United States Patent Application Publication US 2014/0259212 A1 - sequence listing, part 22

SEQ ID NO: 68570 - DNA, 1218 bp, Herminiimonas arsenicoxydans
  CDS (1)..(1218): transl_table=11
atgttgaagctcgactttcaccctgccggccgccattttttgaacattccaggccccagcccagtaccggatcgcctcttgcgggccatgagctatccaacaatcgatcaccgcggccctgaattcggcgcaatgggattgaaaatcctgtccggcatacaaaagattttcaaaaccacgcagccagtcgtcatttatccggcatccggtaccggcgcatgggaagccgcgctagccaataccctgagcccgggcgaccacgtcctgatgttcgaaaccggtcactttgcaaccttgtggaaaaaaatggcggagtcgctgggtattaaaccggaattcatcggtttgcctggttacgaaggctggcgcaacggcgtacgagcggacatgatcgaagcgcgcctgcgcgccgataccaaacacgacatcaaagcagtgtgcgtcgtccacaacgaaacctcgaccggcgttacttccaacatcgcagccgtacgcaaagcgatcaatgcagccgctcaccctgcattgctgctggtcgacaccatctccggcctcgcatcggccgactatcgccatgacgaatggggcgtggacgttaccgtatccggctcgcaaaaaggcttgatgctgccaccaggcatcagcttcaatgccgtatcgaaaaaagcgctcgaagccagtaaaaccgccaaattgccgcgcgcattctggggctggaatgaaatcatcgagatgaacaaaaccggttactggccatatacgcccaacaccaacttgctgtatgcactacacgaagcactggacatgatcctgtccgaaggactggacaatgtattcgagcgccaccagcgtctgggcgcagcatgccgcaccgccgtccaggcatggggcctggaaattcaatgcgccgacccggaagtgtactcgccggtattgaccggcgtggtgatgccggatggcgtggatgccgacgtcgtgcgtcgcctgatttatgaacgcttcaacatgtccctgggcgcaggcttgggcaaggcaaaaggcaagatgttccgtatcggccacttgggcgaaacgtccgatctgtccttgatggcatcgttggccggcgctgaaatgggcttgaaactggctggcgtcaaattggcaggcagcggcgttgttgcagcgatggaatacctggagtcgcacgccgtaccagcattgaaaatcccggtctag

SEQ ID NO: 68571 - protein, 405 aa, Herminiimonas arsenicoxydans
MLKLDFHPAGRHFLNIPGPSPVPDRLLRAMSYPTIDHRGPEFGAMGLKILSGIQKIFKTTQPVVIYPASGTGAWEAALANTLSPGDHVLMFETGHFATLWKKMAESLGIKPEFIGLPGYEGWRNGVRADMIEARLRADTKHDIKAVCVVHNETSTGVTSNIAAVRKAINAAAHPALLLVDTISGLASADYRHDEWGVDVTVSGSQKGLMLPPGISFNAVSKKALEASKTAKLPRAFWGWNEIIEMNKTGYWPYTPNTNLLYALHEALDMILSEGLDNVFERHQRLGAACRTAVQAWGLEIQCADPEVYSPVLTGVVMPDGVDADVVRRLIYERFNMSLGAGLGKAKGKMFRIGHLGETSDLSLMASLAGAEMGLKLAGVKLAGSGVVAAMEYLESHAVPALKIPV

SEQ ID NO: 68572 - DNA, 1164 bp, Symbiobacterium thermophilum IAM 14863
  CDS (1)..(1164): transl_table=11
atgatgcggatggagaagtccctgctcatgattccggggcccacgcccatcccgccgcaggtggcggcggccatgacccagcccatgctgaaccaccggggcgaggccttcagcgccctctttgcggaggtatcgacgaagctgcagaaggtcttccgcacggcgcagccggtctacatcttccccggcgcgggctcggggggctgggaggcggccctcgtcaacaccctgaaccccggcgatgcggtgctcagcgtctcgatcggcgacttcggcgagcgctggcacaaagtggccgtgcagctgggctttgcggtggagcgtctgcggttcgagccgggccgggccgcggacccggagcgcatcgccgagcggctggcggaggaccgggagaggcgcatcaaggcggtcctcatccagcacaacgagacctccacgggcgtgaccaacgacgtccgggccatcgcccgggccgtgagggagcacggagcgctgctcatggtcgactccgtctccggcctgggcgccctgccgctggagatggacgagtgggggttggacgtggtgctcaccggcgcgcagaaggcgctcatgtgcccgccgggcctctccatcatcgccttctccgaacgggcccgggccgcggccgagaagagcgccatgcccaagttctactgggacctgaaggcggcgcacagcagcctgcagaagtggcagacgccctacacgccggcaatctcgctgctccacgccctgaaggcggcgctggagctcctggagacagagaccctggagggctcctgggcgcgccacaggctcatgggcgagatgtgccgggccggcgtaaaggcaatggggctgcgcctgctggccgtggacgagcgcacggcgtccaactcggtcaccgccgtggtcgccccggtggaccccaagcggttgcgcaaggtcgcccgggagcagttcggcgtagagctggcgggcggacagggggacctggcggaccagatcttccgcatcggccacctgggctacgtggtgcccggcgacgtgctgcaggccctggcggccaccgagatggcgctggcgcagctgggcgtggacgtgcagatcggccgggcggtggcggcggcgcaggaggtctggatgaaccatgtgcggggatga

SEQ ID NO: 68573 - protein, 387 aa, Symbiobacterium thermophilum IAM 14863
MMRMEKSLLMIPGPTPIPPQVAAAMTQPMLNHRGEAFSALFAEVSTKLQKVFRTAQPVYIFPGAGSGGWEAALVNTLNPGDAVLSVSIGDFGERWHKVAVQLGFAVERLRFEPGRAADPERIAERLAEDRERRIKAVLIQHNETSTGVTNDVRAIARAVREHGALLMVDSVSGLGALPLEMDEWGLDVVLTGAQKALMCPPGLSIIAFSERARAAAEKSAMPKFYWDLKAAHSSLQKWQTPYTPAISLLHALKAALELLETETLEGSWARHRLMGEMCRAGVKAMGLRLLAVDERTASNSVTAVVAPVDPKRLRKVAREQFGVELAGGQGDLADQIFRIGHLGYVVPGDVLQALAATEMALAQLGVDVQIGRAVAAAQEVWMNHVRG

SEQ ID NO: 68574 - DNA, 1188 bp, Methylococcus capsulatus str. Bath
  CDS (1)..(1188): transl_table=11
atgcctggtcgcaaccatctttacgttcctggtccgacgaacattccggatgccgttctcagcgcgatgcacgtaccgatggaggaccatcggcgaccggacttccctgccctcgtgaccccgctgctggagaatctgaaaaaggtattccggacagaagcaggacagtgcttcatctttccggccacgggaaccgcgggttgggaaattgctctctcgaatacgctctctcccggcgacaaagtgttgtcctatcgttttggacaattcagtcatctgtggatcgacctggccagacgtctgggcctcgaagtggagtacgaggaggtgccgtggggtcagggggtgccgctggacagactggaggcgcgcctgaaagccgacaccgctcatgaaatcaaggcggtgctgatctgccacaatgagactgcaaccggtgtgaccaacgaccttccggccgtacgcaaggccatcgatgcggccggccaccctgccctgttctatgtcgatggcgtgagttccatcggctcgctggatttccgcatggacgaatggggcatcgatatcggcgtggccggctcccagaaaggcttcatgctgccggccggtctggcgctgctgggcttcagccagaaggcactgaaggcacgggagtccgctaagtgtaagcgcgcattcctggacatcaacgatcacatccttcacaacgctggcggttttttcccgtataccccatcgatcccgctgctgtatggtctgcgcaagtcgctggaactgctgctcgaggaggggctggagaacgtttacgcccgccatgcccgcttggccgagggtgtccgccgggcggtggctgcctgggggctccagctctgcgcccaggatccgaaatggtattcgaacaccgtgtcggctgtcgtcgtaccaccggagttcgatgcgcgcgacgtgatccacacggcttatttccgctataacctgtcgctgggtgcggggctgagtgaagtctcggggaaagtattccgcatcggtcacttgggggatctcaacgaattgagcctggccagcgccatcgtgggttcggaaatggccatgctggacgtgggtattcccttgacgccgggcagcggcatcgcggcggccagcgcccattggcgcgagaccgctccggtaatccagccccgagtctga

SEQ ID NO: 68575 - protein, 395 aa, Methylococcus capsulatus str. Bath
MPGRNHLYVPGPTNIPDAVLSAMHVPMEDHRRPDFPALVTPLLENLKKVFRTEAGQCFIFPATGTAGWEIALSNTLSPGDKVLSYRFGQFSHLWIDLARRLGLEVEYEEVPWGQGVPLDRLEARLKADTAHEIKAVLICHNETATGVTNDLPAVRKAIDAAGHPALFYVDGVSSIGSLDFRMDEWGIDIGVAGSQKGFMLPAGLALLGFSQKALKARESAKCKRAFLDINDHILHNAGGFFPYTPSIPLLYGLRKSLELLLEEGLENVYARHARLAEGVRRAVAAWGLQLCAQDPKWYSNTVSAVVVPPEFDARDVIHTAYFRYNLSLGAGLSEVSGKVFRIGHLGDLNELSLASAIVGSEMAMLDVGIPLTPGSGIAAASAHWRETAPVIQPRV

SEQ ID NO: 68576 - DNA, 1191 bp, Silicibacter pomeroyi DSS-3
  CDS (1)..(1191): transl_table=11
atgagtttccagaaccccgttttcatccctgggccgaccaatataccggaaagcctgcgcaaggcctgcgacatgccgacgatcgaccaccggtcgccgctgttcgggcaaatcctgcacccggcgcgtgcgggggtccgggcggtgctcaagagtgaaaccgccgagatcttcatcttcccctccaccgggaccgggggctgggaaaccgcgctgaccaacacgctgtcggcgggtgacggagtgctggccgcgcgcaacggcatgttttcccatcgctggatcgacatgtgccagcgtcatgggctggcggtcgaggtggtcgaaacaccctggggcgaggggctgccggcggatcgctacgaagagatcctggccgccgacacgcatcaccggatcaaggcggttctggccacccataacgaaaccgccaccggcgtgcgctcggatatcgcagcggtacgccgcgcgctcgacaaggcgggccatccggcgctgctgttcgtcgatggggtcagctcgatcggctcgatggacttccgcttcgacgaatggagggtcgatgtggccgtcaccggctcgcaaaagggattcatgctgcccgccgggctggcaattgtcgggttcagtgccaaagcgatggaggccaccgcgaccggcactctgccgcgcaccttcttcgatgtgcatgacatggccaggggctatgccaacaacgcctatccctatacccccgccgtgggcctgatgaacgggctgaaccaggcctgcaggatgctgctggacgagggactggagaatgtctttgcccgccatcaccgcatcgccgaaggggtgcgcgcggcggttcacgcctgggggctggagctgtgtgccgcctcgccggatctctattccgacacggtcagcgccatccgcacgcccgaggggttcaatgccaccgatatcgtgacccatgccgccagcaaatatggcgtcgcctttggcgtcgggctgggcgaagtcgcgggcaaggtgttccgcatcggccatctgggcagcctgaccgatgtcatgacgctgtcgggcatcgccaccgccgagatgtgcatggccgatctgggtctcgacatagggcttggatcgggcgtggcggccgcgcaggagtacttccgctcccatagcgcgacctccctgctcgcggcggcctga

SEQ ID NO: 68577 - protein, 396 aa, Silicibacter pomeroyi DSS-3
MSFQNPVFIPGPTNIPESLRKACDMPTIDHRSPLFGQILHPARAGVRAVLKSETAEIFIFPSTGTGGWETALTNTLSAGDGVLAARNGMFSHRWIDMCQRHGLAVEVVETPWGEGLPADRYEEILAADTHHRIKAVLATHNETATGVRSDIAAVRRALDKAGHPALLFVDGVSSIGSMDFRFDEWRVDVAVTGSQKGFMLPAGLAIVGFSAKAMEATATGTLPRTFFDVHDMARGYANNAYPYTPAVGLMNGLNQACRMLLDEGLENVFARHHRIAEGVRAAVHAWGLELCAASPDLYSDTVSAIRTPEGFNATDIVTHAASKYGVAFGVGLGEVAGKVFRIGHLGSLTDVMTLSGIATAEMCMADLGLDIGLGSGVAAAQEYFRSHSATSLLAAA

SEQ ID NO: 68578 - DNA, 1176 bp, Psychrobacter arcticus 273-4
  CDS (1)..(1176): transl_table=11
atgtcgctacaaaacccaatttttattcctggtcctaccaatattcctgacagactacgtcgcgcgatgaacgtgccgacgcaagatcaccgtgcgcctgatttctcagacactttcttaccggtgcttgctgattgtaaaaaagtatttggcacgcaagatagtgaaatcatcctgtttacctccagtggtacgggcggttgggaagctgctattagcaacaccctctcacctggtgataaagttctgattgcacgctatggtatgttctcccatcgctggattgatatgtgtcagcgccacggacttgatgtgcaagttatcgaatgtccttggggtacaggcgcacctgctgaccaatttcaagctattttgagcgaagacacagcgcacgaaataaaagccgtcatggtcacacataacgaaaccgcgacaggtgtcttaagcgacattggcgccgttcgcaaagccatagatagcagtaaccaccccgctttattattcgtagatggtgtcagctcaattgcttctgtcccttttgagatggatgaatggggcgtagacgttgctgttgctggctcacaaaaaggctttatgctcgcaactggcatggcaatattaggcgtcagtcaaaaagccttgagtcatatggatgaagctaagctaccacgtacttattttgacttccgtgatatgttgaaagcaaatgccaacggcggctttccttatacaccaccattaaaccttatctatggtttaagagaaagtcttgagatgttgtttgatgaaggtcttgaaaacgtctatgcacgtcattatcgtttagccgaaggcgtacgacaagcggttagcgcttggggtatgatattatgtgcaaaaactcctgacctttattctaataccgtaagtgctatctttgttcctgaaggctttaacagtaataaactgaccgatcatgcttttaataaatacggtatctcctttggtattggtttaggtgagatgaatggtaaagcattcagaataggtcatttgggttcattgactgaagtcatggtgctagcagggcttgcagccattgaaatggcaatggttgatttggactaccctattaaactgggtcagggtgtcgctgctgcacaagagtattatcgcaacactgcaacaactaaataa

SEQ ID NO: 68579 - protein, 391 aa, Psychrobacter arcticus 273-4
MSLQNPIFIPGPTNIPDRLRRAMNVPTQDHRAPDFSDTFLPVLADCKKVFGTQDSEIILFTSSGTGGWEAAISNTLSPGDKVLIARYGMFSHRWIDMCQRHGLDVQVIECPWGTGAPADQFQAILSEDTAHEIKAVMVTHNETATGVLSDIGAVRKAIDSSNHPALLFVDGVSSIASVPFEMDEWGVDVAVAGSQKGFMLATGMAILGVSQKALSHMDEAKLPRTYFDFRDMLKANANGGFPYTPPLNLIYGLRESLEMLFDEGLENVYARHYRLAEGVRQAVSAWGMILCAKTPDLYSNTVSAIFVPEGFNSNKLTDHAFNKYGISFGIGLGEMNGKAFRIGHLGSLTEVMVLAGLAAIEMAMVDLDYPIKLGQGVAAAQEYYRNTATTK

SEQ ID NO: 68580 - DNA, 1221 bp, Ralstonia eutropha JMP134
  CDS (1)..(1221): transl_table=11
atgctgaaactggacttccatcccgctggccgtcatttcctgcaaatccccggaccaagcccggtgccggatcgcatcctgcgggccatcagctacccgaccattgaccatcgcggcccggagttcggcgcgctgggattgaaggtgctggccggcatccgcaagatcttcaagactgagcagccggttgtgatctatccggcctccggaacaggcgcatgggaagccgcgctatccaacacgctgagcccgggcgataccgtgctgatgttcgagaccggccacttcgccacgctctggaaaaagatggccgagaaacttgggctgcgcccggagttcctgggcttgccgggcatcgagggctggcgccgcggggttcaggccgacatgatcgaagcgcgcctgcgccaggacagcgaccatgccatcaaggcggtctgcgtggtgcataacgagacctcgaccggcgtcacgtctgatatcgccgccgtgcgcaaggccatcgatgcagcgggccatccggcgctgctgatggtcgacacaatctcggggctggcctctgccgactatcgccacgacgagtggggcgtggacgtgaccgtctccggctcgcaaaaggggctcatgctgccgccgggcatcagcttcaacgccgtgtcgccgaaggcaatcgaagccagccggtccgcgcgcctgccacgcagtttctgggattgggaggagatcatcgccatgaaccggaccggctactggccctacacgcccagcacgaacctgctctatggcttgtcggaggcgctggacatgatccttgaagaagggctcgacaacgtcttcgcacgccaccatcgcctggccgaggcttgccgccgtgcagtgcgcgcatggggcctcgagatccagtgcgcggacccgtcggtctacagcccggtgctgaccggcgtgatgatgcacgacggcattgacgcggactccgtgcgccggatcatctacgaccgcttcaacatgtcgctcggcgcggcgctcggcaagatgaaggggcggatgttccgtatcggccatctcggcgactgcaacgatctcacgctgatggccacgctgtccggctgcgaaatggggctgaagttgtccggtgtgccagtggccgcaagcggcgtcgccgcagccatggactatctcgcggcccacgcaaaccccttgccgctgcgggccgcagcctga

SEQ ID NO: 68581 - protein, 406 aa, Ralstonia eutropha JMP134
MLKLDFHPAGRHFLQIPGPSPVPDRILRAISYPTIDHRGPEFGALGLKVLAGIRKIFKTEQPVVIYPASGTGAWEAALSNTLSPGDTVLMFETGHFATLWKKMAEKLGLRPEFLGLPGIEGWRRGVQADMIEARLRQDSDHAIKAVCVVHNETSTGVTSDIAAVRKAIDAAGHPALLMVDTISGLASADYRHDEWGVDVTVSGSQKGLMLPPGISFNAVSPKAIEASRSARLPRSFWDWEEIIAMNRTGYWPYTPSTNLLYGLSEALDMILEEGLDNVFARHHRLAEACRRAVRAWGLEIQCADPSVYSPVLTGVMMHDGIDADSVRRIIYDRFNMSLGAALGKMKGRMFRIGHLGDCNDLTLMATLSGCEMGLKLSGVPVAASGVAAAMDYLAAHANPLPLRAAA

SEQ ID NO: 68582 - DNA, 1203 bp, Rhodobacter sphaeroides 2.4.1
  CDS (1)..(1203): transl_table=11
atgtcgcttgcgcacggccgtccctatcttgccattcccggcccctccgccatgccggacagggtgctgaacgccatgcaccgtgccgcgcccaacatctacgaaggcgccctgcacgagatggtggccagcctctggccggatctgaagcgcattgccggcaccgagcatcaggtggcgctctatatcgcgaacgggcacggcgcgtgggaggcggcgaacgccaacctcttcagccgcggcgaccgggcgctggtgctggccaccggccgcttcggccacggctgggccgagagtgcccgcgccctcggcgtcgatgtgcagctgatcgacttcggccgggccgcgcccgccgatcccgcccggctggaggaggcgctgcgggccgaccccgggcatcggatcaaggcggtgctggtgacccatgtcgacacggccacctcgatccgcaacgatgtggccgcgctccgcgccgccatcgatgccgtgggccatccggcgctgctcgcggtcgattgcatcgcctcgctcgcctgcgacgaatatcgcatggacgaatggggggccgacgtgacggtcggcgcgagccagaaggggttgatgaccccgccggggctgggcttcgtctggtattccgaccgcgcgttggaacggtgccgcgcctcggatctgcgcacgccttactgggactggacgccccgcagcttcggcaccgaattctggcagcatttctgcggcaccgcgccgacgcatcacctctatgggttgcgggcggcgctcgacatgatcctcgatgagggactgcccgcggtctgggcgcgccacgaggcgctggcgcgggcggtctggacggccttcgaccattggggcgcgggcaatcccgagattgcgctcaacgtggccgatgctgcgtgccgcggccgctcggtgacggcggcccggatgggcgcgccccatgcgacgcggctgcgggaatggaccgagacgcgggcaggcgtgacgctcggcatcggccttggcatggcgctgccctcggagcccgcctatcacgggttcctaagggtcgcgcacatgggccacgtgaacgcccacatgacgctcggcgcgctcgcggtgatggaggcggggctcgcagcgctcgagatcccgcacggggagggggcgctggccgctgccgccgccagcctcggcgcggcagcctga

SEQ ID NO: 68583 - protein, 400 aa, Rhodobacter sphaeroides 2.4.1
MSLAHGRPYLAIPGPSAMPDRVLNAMHRAAPNIYEGALHEMVASLWPDLKRIAGTEHQVALYIANGHGAWEAANANLFSRGDRALVLATGRFGHGWAESARALGVDVQLIDFGRAAPADPARLEEALRADPGHRIKAVLVTHVDTATSIRNDVAALRAAIDAVGHPALLAVDCIASLACDEYRMDEWGADVTVGASQKGLMTPPGLGFVWYSDRALERCRASDLRTPYWDWTPRSFGTEFWQHFCGTAPTHHLYGLRAALDMILDEGLPAVWARHEALARAVWTAFDHWGAGNPEIALNVADAACRGRSVTAARMGAPHATRLREWTETRAGVTLGIGLGMALPSEPAYHGFLRVAHMGHVNAHMTLGALAVMEAGLAALEIPHGEGALAAAAASLGAAA

SEQ ID NO: 68584 - DNA, 1149 bp, Carboxydothermus hydrogenoformans Z-2901
  CDS (1)..(1149): transl_table=11
gtgcaaaaaaaatatcttatgattcccggacctacacctattccgccggaggttaccttggccatgagccggccgatgattggccaccggagcggtgattttgccaagctgcatgagcgggtggtagcaaagttaaaacaggtttttaaaacgcaaaatgacatttttattctcaccaactccggtaccggaggcatggaaatggccgtagccaacgttgtaaatccgggagatgaggttttggctttatccaccggtaattttggtgaacgatttgccaagattgccaaggaatacggtgccaaagtcgatatggtagattttggctggggtaatgcggtggatttagcggtggtcgaggaaaagttaaggcagaatcccaattacaaggcggttttggctacccacaatgaaacatcaaccggggttaaaaacgatatcgccgggattgcggcattaaccaaaaaccaccgggcggtacttatcgttgatgcggtttcaagtttaggaggcatggagtttgataccgatggctggggagtggatgtggtagttactggttcccaaaaagcgcttatgctgcctccgggcttagcgtttatttccttcagtcaaaaagcattagaggcagctcaggataacaaaaacccgaaattttattttagcttaccggcggctaagaaagccttggcggaatggaataccgcttatacaccggcagtatcgctgtttttcgggctggaagcggctcttgatttaatcttagaggaaggtctggacaaggtaattaagaggcataaattactggcaaaagcctgccgggaaggagtaaaagctttaggtttaaaacttttcccggcggaggaaaatgcttccgatacggtaacggcagtagccggggatgaccgttatgatccggaacagttaagaaaagtgttaagaaccaaatacggcgttacctttgccggtggccaaaaagacctgaaaggtaagatttttagaattggtcatatgggttatgttgataagctcgatattattgtggcaataggagcattagaaatggccttaaaagaaattggctatccggtggagctgggtgctggtgttaaaaaggcaatggaagtaattaccggaggtgaagcgtag

SEQ ID NO: 68585 - protein, 382 aa, Carboxydothermus hydrogenoformans Z-2901
MQKKYLMIPGPTPIPPEVTLAMSRPMIGHRSGDFAKLHERVVAKLKQVFKTQNDIFILTNSGTGGMEMAVANVVNPGDEVLALSTGNFGERFAKIAKEYGAKVDMVDFGWGNAVDLAVVEEKLRQNPNYKAVLATHNETSTGVKNDIAGIAALTKNHRAVLIVDAVSSLGGMEFDTDGWGVDVVVTGSQKALMLPPGLAFISFSQKALEAAQDNKNPKFYFSLPAAKKALAEWNTAYTPAVSLFFGLEAALDLILEEGLDKVIKRHKLLAKACREGVKALGLKLFPAEENASDTVTAVAGDDRYDPEQLRKVLRTKYGVTFAGGQKDLKGKIFRIGHMGYVDKLDIIVAIGALEMALKEIGYPVELGAGVKKAMEVITGGEA

SEQ ID NO: 68586 - DNA, 1221 bp, Burkholderia sp. 383
  CDS (1)..(1221): transl_table=11
atgctgcaactcgacttccacccgtccggccgccatttcctgcagattccggggccgagcccggtgcccgaccgcatcctgcgggcgatgagctatccgaccatcgaccaccgtggccccgaattcggtgcgctcggcctcaaggtgctggccggcatcaagaagatcttcaagaccacgcagccggtggtcatctatccggcgtcgggtaccggcgcatgggaagccgcgctgaccaacacgctgagcgccggcgacaccgtgctgatgttcgaaacgggccacttcgcgacgctgtggaaaaagatggccgaggcgctcggcctgaagcccgagttcctcggactgccgggcatcgaaggctggcgccgcggcgtgcagcccgacatgatcgaagcgcgcctgcgcgccgacaccgcgcacgacatcaaggccgtgtgcgtggtgcacaacgaaacctccaccggcgtcacctccgacatcgcggccgtgcgccgcgcgatcgacgcggccggccacccggcgctgctgatggtcgacacgatctcggggctcgcatccgccgactatcgccatgacgaatggggcgtcgacgtcaccgtgtcgggttcacagaaagggctgatgctgccgccgggcatcagcttcaacgcggtgtcgccgaaggcgctcgccgcgagcgagcacgcgacgctgccgcgcgcgttctggggctggcacgagatcatcgaagcgaacaggaacggctactggccgtacacgccgaacaccaacctgctgtacggcctcgccgaagcgctcgacatgatcctcggcgaagggctcgacaacgtgttcgcgcgccaccagcggctcgcggaagcgacgcgccgcgcggtgcgcgcctggggcctcgagatccagtgcgcggacccggccgtctacagccccgtgctgaccggcgtgatgatgcccgacggcgtcgacgcggacgccgtgcgcaagctgatctacgaacgcttcgacatgtcgctcggccaggcgctcggcaagatgcgcggcaagatgttccgcatcggccatctcggcgactgcaacgacctcacgctgatggccacgctcgccggttgcgagatggggctgaagctcgccggcgtgccggtggccgcgagcggcgtcgtcgcggcgatggactatctcgccaccaacacgcacacgcccgcgctgcgcgcggcggcctga

SEQ ID NO: 68587 - protein, 406 aa, Burkholderia sp. 383
MLQLDFHPSGRHFLQIPGPSPVPDRILRAMSYPTIDHRGPEFGALGLKVLAGIKKIFKTTQPVVIYPASGTGAWEAALTNTLSAGDTVLMFETGHFATLWKKMAEALGLKPEFLGLPGIEGWRRGVQPDMIEARLRADTAHDIKAVCVVHNETSTGVTSDIAAVRRAIDAAGHPALLMVDTISGLASADYRHDEWGVDVTVSGSQKGLMLPPGISFNAVSPKALAASEHATLPRAFWGWHEIIEANRNGYWPYTPNTNLLYGLAEALDMILGEGLDNVFARHQRLAEATRRAVRAWGLEIQCADPAVYSPVLTGVMMPDGVDADAVRKLIYERFDMSLGQALGKMRGKMFRIGHLGDCNDLTLMATLAGCEMGLKLAGVPVAASGVVAAMDYLATNTHTPALRAAA

SEQ ID NO: 68588 - DNA, 1149 bp, Synechococcus elongatus PCC 7942
  CDS (1)..(1149): transl_table=11
atggaagacaaattgatgctgatgatccccggcccgacgccggtgccggagcaggtcttgctagcgatggccaagcatccgattgggcaccgcagcgctgactttagccgcttggtcgctgacaccaccgccggtctgaagtggttgcaccaaacgacgggtaatgtcttggtgctttgcagcagcggtacgggtgccatggaagcgggcatcatcaacttcctcagtgcaggcgatcgcgttctctgctgcgaaaacggtaagttcggcgagcgttgggtcaagctggcgcaagcttttgggctggatgttgacctcgtgcaagcgccttggggcaaaccgctcgatccggaagcgattcgcgccaagttggaagcggacaccgataagcaaatcaaagcggtcatcctcacccacagtgaaacctcgacgggggtgatcaacgacctcgaaacgatcagcggttacattcgcgcccatggtgcgctgagcattgttgatgcagtcaccagcttgggtgcggccaatgtgccgatcgatgcttggggcttggatgttgtcgcctcgggttcgcaaaaaggctacatgattccgcccggactgggttttgtagcggtcagcgatcgcgcttggaaagcctacgaaacggcgacgttgcccaagttctacctcgaccttggcaagtaccgcaaagcggcccagaaggattccaatcccttcacaccgccagtcaacctctactacgccctcgatgctgccctgaaaatcatgcagcgcgaaggtctggaaaatatctttgcgcgccatgcgaaactgacccgcgccacccgcgctgcgatcaaggcgctcaacctgccgctctacgccgctgatgaagtgggtagcccggcaattacagcagtcgcgccggtggaagttgccgctgaagacatccgcagcttcaccaaaaagcacttcgatattctgctggcgggcggtcaagacgacctgaagggcaaaatcttccggattggccacttgggctttgtctcgggtcgcgatgtgttgaccgcgatcgccgcgatcgaagcggctctgactggcttgggctacagcaacttcacctcgggtgcaggggttgccgcagcggcagctgaactcgcgaagtag

SEQ ID NO: 68589 - protein, 382 aa, Synechococcus elongatus PCC 7942
MEDKLMLMIPGPTPVPEQVLLAMAKHPIGHRSADFSRLVADTTAGLKWLHQTTGNVLVLCSSGTGAMEAGIINFLSAGDRVLCCENGKFGERWVKLAQAFGLDVDLVQAPWGKPLDPEAIRAKLEADTDKQIKAVILTHSETSTGVINDLETISGYIRAHGALSIVDAVTSLGAANVPIDAWGLDVVASGSQKGYMIPPGLGFVAVSDRAWKAYETATLPKFYLDLGKYRKAAQKDSNPFTPPVNLYYALDAALKIMQREGLENIFARHAKLTRATRAAIKALNLPLYAADEVGSPAITAVAPVEVAAEDIRSFTKKHFDILLAGGQDDLKGKIFRIGHLGFVSGRDVLTAIAAIEAALTGLGYSNFTSGAGVAAAAAELAK

SEQ ID NO: 68590 - DNA, 1167 bp, Moorella thermoacetica ATCC 39073
  CDS (1)..(1167): transl_table=11
gtgactgacaagcagatcctgctcttgcccgggccgacgccggtgccgccgcaggtggccctggccatggcacgtccggcgataaaccaccgcggcccggagtttaaagccctgtgggcggaagttacctcggggttaaaggacgttttccagacccgcgcggaggtggtgattttaaccgcttccggtacaggtggcatggaagctgccgtagccaatctcatttcccccggtgagaaggtgctggtcgtgaccatcggcgcctttggcgagcgcttcgtccagatctgccgggcctttaacgtggaggcggaggtcgtagccttcccctacggccaggctgccgacccggaggttatagcagagcgtctggcagccgacaccgggcatgagattaaagccatcctggtccagcataacgagacctcgacaggagttttaaacgatatccaggctattagccgtgcccggggggatcatccggctttgcttatcgtggacagcatcagcggcctggcggcggctgatttgcccatggacgcctggcatatcgatgtggttatcgccggttcccagaaagcctttatgctgcccccgggattaaccatgctggctgtgggcgagcgcgcctggcaggcggctgagaaatgctccaaccaacgtttttacctggatattaaaaaagcaagaaattcgggcctgaagggccagacgccctttaccccggccgttcccttgctatatggtttacaagaatccctgcggctgctaaaggccgagaccctggccggcagctatgcccgtcacgctttgatgcgggacatggtgcgggccggggttcgcgccctgggcctgaagctcctggccgacgaggcaatagcctcgccggcggtgaccgctgtctgtgtcccagaggggatgaaaccggcggatataatcaatcccctgcgggaaagatttggcgtggtcgtggccgggggccagggagccgttaaagaccaggtcttccgcatcggccacttagggtatgtgagctttaacgccatcctggccggactggccgctctggaggccgttctggccgacgccggggtaccggtgacccggggtgcggcagtggcggcagccagtactattttaagtgaaagtgaggctgtagataagtaa

SEQ ID NO: 68591 - protein, 388 aa, Moorella thermoacetica ATCC 39073
MTDKQILLLPGPTPVPPQVALAMARPAINHRGPEFKALWAEVTSGLKDVFQTRAEVVILTASGTGGMEAAVANLISPGEKVLVVTIGAFGERFVQICRAFNVEAEVVAFPYGQAADPEVIAERLAADTGHEIKAILVQHNETSTGVLNDIQAISRARGDHPALLIVDSISGLAAADLPMDAWHIDVVIAGSQKAFMLPPGLTMLAVGERAWQAAEKCSNQRFYLDIKKARNSGLKGQTPFTPAVPLLYGLQESLRLLKAETLAGSYARHALMRDMVRAGVRALGLKLLADEAIASPAVTAVCVPEGMKPADIINPLRERFGVVVAGGQGAVKDQVFRIGHLGYVSFNAILAGLAALEAVLADAGVPVTRGAAVAAASTILSESEAVDK

SEQ ID NO: 68592 - DNA, 1206 bp, Rubrobacter xylanophilus DSM 9941
  CDS (1)..(1206): transl_table=11
atggtgtatccgagcgggaggcacttcttacagatacctggtcctaccaatatcccggatcgggtactcagggccctcgccgctcccacgatagaccaccgggggccgggcttctcccggcttgcgcgcgaggtgctggaggggctcgggcgggtattcgggtgttcggggccggtggtggtcttcccctcctccgggaccggggcctgggaggcggcgctggtcaacacgctctcgccgggggacagggtattgatgttcgagacggggcacttcgccgctctgtggtgcggggtggcgcggcggctggggcttgaggtggagttcgtgccgggggactggcggcacggggtggatcccggggaggtgaggcgcaggctcgcggcggattggcggggcgagacgaaggccgtggccgtggtgcacaacgagacctccacggggtgtaccagccggatagcggagatccgggaggcgatggacgaggccgggcatccggccctttttttggtggacgtgatctcctccctcggctccatagagtaccgccacgacgagtggggggtcgacgtggcggtggggtgctcgcagaaggggctgctgctgccgcccgggctcgggatcaacgcgctgagcgagcgggccctcgaggcctcgcggggggcgcggctgccgcgctcctactgggactggcggcccatgctcgagagcaacgaggaggggtacttcccgtacacgccgcccaccaacctgctcttcgggctgcgggaggcgctggcgatgctcttcgaggaggggctggagaacgtcctcgcccggcaccggcgccacgccgaggccacccgccgggcggtgcgcgcctgggggctcgaggtgctgtgcctcgagcccgcggagtacagcgcctcgctcactgcggtgctgatgcccgaggggcacgacgccgacctgctgcggcgcctcgtgctggaggggttcaacatgtcactgggggcggggctcgggaagctcgcggggagggtcttcaggatcgggcatctcggcgatctcaacgacctgatgctcgtgggggccctgggcggggtggagatggggctctcggtggcgggcgtaccgcactcgaagggaggggtgatggccgccatggaatatctggtcgagaccgcccccgtagcagggaggcgggctgtagccgctggaggctag

SEQ ID NO: 68593 - protein, 401 aa, Rubrobacter xylanophilus DSM 9941
MVYPSGRHFLQIPGPTNIPDRVLRALAAPTIDHRGPGFSRLAREVLEGLGRVFGCSGPVVVFPSSGTGAWEAALVNTLSPGDRVLMFETGHFAALWCGVARRLGLEVEFVPGDWRHGVDPGEVRRRLAADWRGETKAVAVVHNETSTGCTSRIAEIREAMDEAGHPALFLVDVISSLGSIEYRHDEWGVDVAVGCSQKGLLLPPGLGINALSERALEASRGARLPRSYWDWRPMLESNEEGYFPYTPPTNLLFGLREALAMLFEEGLENVLARHRRHAEATRRAVRAWGLEVLCLEPAEYSASLTAVLMPEGHDADLLRRLVLEGFNMSLGAGLGKLAGRVFRIGHLGDLNDLMLVGALGGVEMGLSVAGVPHSKGGVMAAMEYLVETAPVAGRRAVAAGG

SEQ ID NO: 68594 - DNA, 1155 bp, Nostoc punctiforme PCC 73102
  CDS (1)..(1155): transl_table=11
atgaacgataagctgatgctaatgattccaggcccaaccccggtgccagaagctgctttactggcattagccaagcatccgattggacaccgtaccagtgaatttagcaacattttggcagaagtgacggaaaacctcaagtggttgcaccaaactcaaactgatgtgctgacactgaatgttagtggtacgggtgctgtagaagctggaataattaattttctctctccaggcgatcgcattttagttggctctaatggtaaatttggcgaacgctgggtagaagttggccaagcctacggtttgaatgtagaagaagttaaggtggaatggggaaaacccttagaccccgcagtatttgccgaaaaactccaagcagatactcaaaagcaaattaaagctgtaatcattacccacagtgaaacctcgacaggtgtgttgaatgacctagaaagcatcaaccgccacgttaaagcacacggtgaagctttgattatcgttgatgccgtcacaagcttgggtgcattcaatctacccgtggatgcttggggtttggatatcgtcgcctccggttctcaaaaaggttatatgattccgccgggattgggttttgtctctgtcagccccaaggcttgggaagcttacaaaactgcgaagctaccaaaatattatttggacttagggaaatatcgcaaagccacagccaaaaacacaactccatttactccgcctgtgaacttgatcgtagcgctgcacaccacgttgcgaatcatgaaagaggaaggattagagtcaatatttgctcgacatgaacggctgaaaaatgctacccgcgccgccattcaagggttgaatttacccctgtttgcagcagatagttccgctagtccggcgattacggctgtagcaccacagggaattgaatcggataagattcggtcattgatgaaaaaacgctttgatattgccctagcaggtggtcaagaccatttgagtaataagattttccgcattggtcacttgggctttgtgagcgatcgcgatatccttagctgtatagcatctttagaagttaccctaacagaacttgggtacgaagatttcacccctggatctggtatagcagcagcagttaaagtatttagtcagtcctaa

SEQ ID NO: 68595 - protein, 384 aa, Nostoc punctiforme PCC 73102
MNDKLMLMIPGPTPVPEAALLALAKHPIGHRTSEFSNILAEVTENLKWLHQTQTDVLTLNVSGTGAVEAGIINFLSPGDRILVGSNGKFGERWVEVGQAYGLNVEEVKVEWGKPLDPAVFAEKLQADTQKQIKAVIITHSETSTGVLNDLESINRHVKAHGEALIIVDAVTSLGAFNLPVDAWGLDIVASGSQKGYMIPPGLGFVSVSPKAWEAYKTAKLPKYYLDLGKYRKATAKNTTPFTPPVNLIVALHTTLRIMKEEGLESIFARHERLKNATRAAIQGLNLPLFAADSSASPAITAVAPQGIESDKIRSLMKKRFDIALAGGQDHLSNKIFRIGHLGFVSDRDILSCIASLEVTLTELGYEDFTPGSGIAAAVKVFSQS

SEQ ID NO: 68596 - DNA, 1152 bp, Crocosphaera watsonii WH 8501
  CDS (1)..(1152): transl_table=11
atgcaagataaacatatgctgatgattccagggccaacccctgtccctgagagtgttcttttagcaatggctaaacatcccattggacaccgtagtggagattttagccaaattattggggaaattaccgaaaacctcaaatggcttcatcagactcaaaacgatgtcctcatgttaaccaccagtggtactggggccatggaagccggaattatcaatttcttgagtgctggcgatcgcgttttagtggggaataacggcaagttcggggaacgttggggaaaaatttcccgtgcctttggcttagaagtagaagaaatcaccgcagaatggggtaaacccctcgatccagaagcctttaaaaccaagttagaagccgataccgataaaagcatcaaagcggttattatcacccattctgagacctctacaggggttctcaatgaccttcaaaccatcaatagctatgttaaggcacacggagaagccttaatcatggtggatgctgtcaccagtttaggtgctgtcaatgtaccaatggatgaatggggactcgatatggtggcctcaggctcccaaaaaggctatatgatccctcccggactaggatttgtagctgttggtcctaaagcttggaaagcctacgaaacagctactttacctaagttttatttagatttaggggcttacaaaaaagcaacggataaaagtagttccccttttacccccccagtcaacctcatgtatgggttacaagtggctttagagatgatgaaagcagaagggttagaagccatgtttacccgtcatcaacgcttaacccaagccacccgtgccgcggttaaaggtttagggttatccccctttgctgccgatgaagtggctagttacgctgttactgcggttatgccttctacggttgaagcagaggctattcgttctaccatgaaaaaagaatttgatattgccttagctggtggacaagatcacctcaaagggaaaatcttccgcattggccatttagggtttgtcagtgaacgagatgtgttaactgcgatcgctgctttagaagccacattacaaaagttaggtcatcagggagccacttctggtgctggtattgctgctgcatcccaagtgttcaagagttga

SEQ ID NO: 68597 - protein, 383 aa, Crocosphaera watsonii WH 8501
MQDKHMLMIPGPTPVPESVLLAMAKHPIGHRSGDFSQIIGEITENLKWLHQTQNDVLMLTTSGTGAMEAGIINFLSAGDRVLVGNNGKFGERWGKISRAFGLEVEEITAEWGKPLDPEAFKTKLEADTDKSIKAVIITHSETSTGVLNDLQTINSYVKAHGEALIMVDAVTSLGAVNVPMDEWGLDMVASGSQKGYMIPPGLGFVAVGPKAWKAYETATLPKFYLDLGAYKKATDKSSSPFTPPVNLMYGLQVALEMMKAEGLEAMFTRHQRLTQATRAAVKGLGLSPFAADEVASYAVTAVMPSTVEAEAIRSTMKKEFDIALAGGQDHLKGKIFRIGHLGFVSERDVLTAIAALEATLQKLGHQGATSGAGIAAASQVFKS

SEQ ID NO: 68598 - DNA, 1209 bp, Sulfitobacter sp. EE-36
  CDS (1)..(1209): transl_table=11
atgccgaaacttcccaacttgtcccaagggcgcggctacctcgcgatccccggtccgtcggtcatgcccgaggctgtgttgaacgcgatgcaccgtccggcccccaatatctatgccggtgagatcgtcgatatgatgccgccgttgatggaagatctgcgccgtatcgcgggcacgcagcatcatgtggcgatgtatattggcaacggccacgccgcctgggaggcatcgctgagcaatgtcgtagcccccggtgacaaggtgctggtgcccgcgacagggcggttcggccacggctggggcgatgccgccacggggatcggggcagacgtcgaggtgatggatttcggcctgcaatccacaatggacatcgaccggatcgccgatcgccttgaggcggacaccaaccacgagatcaaagccgtgctggctgtgcatgtggatacctcgacctcggtggtcaacgacatcgccggtctgcgcgcggcgctggatgcggcggatcaccccgcgctgctgatggtggactgtatcgcgtcctttgcgtgcgaccgcttcgagatggacaattggggggccgatgtcatggtcaccgcctgccagaaggggctaatggtcccgcccggcgtgagctttgtcttttttaacgaccgtgcggctgcggtgcgcgatgcgatgccacgggtcagccgtttctgggattggaccccgcgcgccaatcccgaggagttctaccagtaccactgcggcacagcccccacgcaccatatctacggcctgcgcgcggcgctggatatgatccacgacgaggggctggaggccgtctggcagcgtcacgagaccttggcgcgcgcggtgtgggcggcctgtgacgcgtggggggcagagggcgatctttccctgaacatcgccgatcccgctttgcgcagccatgcggtgacagcgctgcggctcaaggccccccatgcgacggagctgcgcgactgggtcgaaggcaacatcggcctgaccctcggcatcggtctgggcatggcccccaagggcagccccgaaagccacggtttcttccgtctgggccacatggggcacgtgaacggtcagatgatcatggggatgctcggcgggatagaggccgggatgtccgcgctcgggatcaaacgcggctccggcgcgctagaggcggcggcgaaggtgatcggcggggcctag

SEQ ID NO: 68599 - protein, 402 aa, Sulfitobacter sp. EE-36
MPKLPNLSQGRGYLAIPGPSVMPEAVLNAMHRPAPNIYAGEIVDMMPPLMEDLRRIAGTQHHVAMYIGNGHAAWEASLSNVVAPGDKVLVPATGRFGHGWGDAATGIGADVEVMDFGLQSTMDIDRIADRLEADTNHEIKAVLAVHVDTSTSVVNDIAGLRAALDAADHPALLMVDCIASFACDRFEMDNWGADVMVTACQKGLMVPPGVSFVFFNDRAAAVRDAMPRVSRFWDWTPRANPEEFYQYHCGTAPTHHIYGLRAALDMIHDEGLEAVWQRHETLARAVWAACDAWGAEGDLSLNIADPALRSHAVTALRLKAPHATELRDWVEGNIGLTLGIGLGMAPKGSPESHGFFRLGHMGHVNGQMIMGMLGGIEAGMSALGIKRGSGALEAAAKVIGGA

SEQ ID NO: 68600 - DNA, 1209 bp, Marinobacter sp. ELB17
  CDS (1)..(1209): transl_table=11
atgttgaaacttgattttcatccatcaggccggcacttccttcaaatacccgggccgtctccggtaccggaccgtattctgcgcgccatgagcctcccgactattgatcatcgcgggcctgagtttggcgcactaggtctggaactgctaaaaaaaattcagactatctttaaaacgacccagcccgtcattatttacccggcatccggaaccggagcctgggaggccgccctcattaacactatgtctgccggtgaccatgtgctgatgttcgaaactggtcacttcgcaacactgtgggaaaaaatggcgcgtcggcttgggctgcagccggaattcttggggctgcccggatatgagggttggcgtgcaggcgtgcaggccgacatgattgaagagcgcctcagaaaagatacaggccacaccatcaaggcggtgtgtgtggttcacaatgaaacctcaaccggtgtaacaagcaatatccctgcagtacgccgcgccatcaatgccgccggccatccagcactgttattggtcgatacgatttcaggcctggcgtgcgcggactatcaacacgatgcgtggggagtggacgtaactatttccggttcccagaaaggtttgatgctgccgccaggtatcagttttaacgccttgtcggataacgccatcgctgccagcaaaacctcaaatttgccaaaaagcttctgggcatgggatgagattcttgaggccaacaaaaacggttattggccttatacgcccaacacgaacttgctttacggcctgaatgaagcgttggatatgttgcttgaggaaggcctggaacaggtgcttgcacgccaccagcgttggggtgtcggtgtgcgtaaggccgttgaagcctgggggctggaagttcagtgtcaggagccagatgtctactccccggttctgacgggtgtcgtgatgcccgagggcgtggatgcggatgcggttcggcgtctgatttacgagcgcttcgatctttcgctgggcatggggctgggcaagtcgaaaggcaagatgttccgaataggacacctcggcgactgcaatgatctgactttgatcgccgcgttaggtggctgtgaggctggtctgaagttgtctggcgtgaacctcaagggtagcggcgttttggcagcgctggagtacttctcccagaatccgcctcaccacgtcaattaa

SEQ ID NO: 68601 - protein, 402 aa, Marinobacter sp. ELB17
MLKLDFHPSGRHFLQIPGPSPVPDRILRAMSLPTIDHRGPEFGALGLELLKKIQTIFKTTQPVIIYPASGTGAWEAALINTMSAGDHVLMFETGHFATLWEKMARRLGLQPEFLGLPGYEGWRAGVQADMIEERLRKDTGHTIKAVCVVHNETSTGVTSNIPAVRRAINAAGHPALLLVDTISGLACADYQHDAWGVDVTISGSQKGLMLPPGISFNALSDNAIAASKTSNLPKSFWAWDEILEANKNGYWPYTPNTNLLYGLNEALDMLLEEGLEQVLARHQRWGVGVRKAVEAWGLEVQCQEPDVYSPVLTGVVMPEGVDADAVRRLIYERFDLSLGMGLGKSKGKMFRIGHLGDCNDLTLIAALGGCEAGLKLSGVNLKGSGVLAALEYFSQNPPHHVN

SEQ ID NO: 68602 - DNA, 1487 bp, Fritillaria agrestis
  CDS (119)..(1324)
ggctctcatccatggctagtaggagctgctgaggagggaaaaataaaactaagttgccctctttcgggcatcgtcaacacaagggacatctaacttcatcaaacatcatccaagaaagatggactacgtctatgggcctgggaggaaccacctttttgttccagggccagtgaacatccctgagcccgtgattcgtgcgatgaacaggaacaacgaagactaccgagccccggctattcctgcattgacaaagactctcctcgaagatgtcaagaagttattcaaaactactactggaacacctttcataatccccacaacaggtactggggcatgggaaagtgccctcacgaacacattatccccgggtgatacgatcgtatcctttctgatcggacagttcagccttctctggatcgatcaacagcagcgcctcaagtttaaggttgatgtcattgagagcgaatggggacaaggtgcgaatctggatgaactggcatcgaagctagccgcggacaggactcatacaatcaaggctgtctgtatagttcacaatgaaacagcaactggagtcaccaacaatttggcagctgtaaggaaattgcttgatgattacaaccatcctgcattgctgcttgttgatggagtgtcatcaatatgcgctctcgacttccgtatggatgaatggggaattgatgtcgccttgacaggctcacagaaagctctttctatgcctactggaatgggctttatttgtgctagcccaaaagcccttgaagcatccaaaacagctcaatcggctagagtgttcttcgactggaatgactacctaaagttttacaaaattggtacttactggccctacacaccttccatccaaatgctctatgggctcagagcggctctagatcttatatttgaggaagggcttgataatgtgattgcaaggcacagccgcttggggaaagcaacaagacttgcggtcgaggcctggggcttgaagaactgcactcagaaggaggaatggcatagcgacactgtaactgcagtcgttgtcccaccttacattgacagcagtgaaatcgtcagaagggcgtggaagcgatacaatctaagcttaggcctgggcctgaataaagtggctggaaaggttttcagaataggtcaccttggtaaccttaatgagctgcaattgctgggttgcctgagtggtgtggagatggtactcaaggatgtcggctatccggttaaactgggaagtggagtggcagcagcagctacatatctgcagaacagtacccctatgatcccttccaggatctaaagttgtctaagttttttctccgctgcttgggttccttgtaaaaaaacattacatactcttgctctcttcccaccatatatgttactataaatacttcatctctgtagtaatttctttgcctgctaaatctggtgaaagtcttccaaaaaaaaaaaaaaaaaaa

SEQ ID NO: 68603 - protein, 401 aa, Fritillaria agrestis
MDYVYGPGRNHLFVPGPVNIPEPVIRAMNRNNEDYRAPAIPALTKTLLEDVKKLFKTTTGTPFIIPTTGTGAWESALTNTLSPGDTIVSFLIGQFSLLWIDQQQRLKFKVDVIESEWGQGANLDELASKLAADRTHTIKAVCIVHNETATGVTNNLAAVRKLLDDYNHPALLLVDGVSSICALDFRMDEWGIDVALTGSQKALSMPTGMGFICASPKALEASKTAQSARVFFDWNDYLKFYKIGTYWPYTPSIQMLYGLRAALDLIFEEGLDNVIARHSRLGKATRLAVEAWGLKNCTQKEEWHSDTVTAVVVPPYIDSSEIVRRAWKRYNLSLGLGLNKVAGKVFRIGHLGNLNELQLLGCLSGVEMVLKDVGYPVKLGSGVAAAATYLQNSTPMIPSRI

SEQ ID NO: 68604 - DNA, 1182 bp, Glossina morsitans morsitans
  CDS (1)..(1182)
atggaaataccaccgcctttggtcttgaaacgacctttattcgttccaattaaaactttaatgggtccgggaccttcgaattgttcacaaagagttttgtcagcactcagcaatccggtgatcggtcatttacattcagagtgtttgcagataatgaacgaaatcaaagaaggaataaaatatatatttcaaacctcaaacgatgctacaatgtgtattagtggctctggtcacagcggcttggaagcggcgctatgtaatttaattgaagagggtgatgtagttttagtggcatgtattgggttgtggggacaccgtgcagctgatatagcaaaacgttacggcggagatgtacgtttagtggagacgacacttgggcattcgttaaccataaatgaaatcgaacttgcatttaagtataatcaaccaaaaattttcttcacggttcaaggtgattcctctacaggagttttgcaatcgaatctcaaagatatcgggaaaatttgtcgtcgatataattgcctttttattgtcgatacaatagcttcgctgggaggcaccgattttttcatggatgagtggttcgttgacgtagcttttactggttctcaaaaaacattaggtgctccgcctggcctaacaccgatttcgttaaatatgcgtgctattgattgcataaacgctcgtaagacaaaagtaaaagtttattattttgatattctgcttattgggcaatattggaattgttttaacatgcctactatttaccatcacacgatctctgcaacactgctatatggtcttagggaagctttggcacaagtttgtgctgaaggcttgaaagcatttattcagagacatcagcaatgctcctatcggttgcaacaaggtctaaaagacctgggcttagaaatgttcgtaaagaatgccaatgaaagactgccaaccataaccaccatcaaagtgcctttcggtatagattggcgtaaagttatcgaatatgctatgagaaagtacagcatggaaattagtggtggactaggacctactgttggcaatgttttccgcatcggtttaatgggcgaaaatgccactttagaaagagccgatttaatattaaacatattccgcgaagctatagagagttccaaattggacaataatgaaaaatccaaaatttga

SEQ ID NO: 68605 - protein, 393 aa, Glossina morsitans morsitans
MEIPPPLVLKRPLFVPIKTLMGPGPSNCSQRVLSALSNPVIGHLHSECLQIMNEIKEGIKYIFQTSNDATMCISGSGHSGLEAALCNLIEEGDVVLVACIGLWGHRAADIAKRYGGDVRLVETTLGHSLTINEIELAFKYNQPKIFFTVQGDSSTGVLQSNLKDIGKICRRYNCLFIVDTIASLGGTDFFMDEWFVDVAFTGSQKTLGAPPGLTPISLNMRAIDCINARKTKVKVYYFDILLIGQYWNCFNMPTIYHHTISATLLYGLREALAQVCAEGLKAFIQRHQQCSYRLQQGLKDLGLEMFVKNANERLPTITTIKVPFGIDWRKVIEYAMRKYSMEISGGLGPTVGNVFRIGLMGENATLERADLILNIFREAIESSKLDNNEKSKI

SEQ ID NO: 68606 - DNA, 1182 bp, Aedes aegypti
  CDS (1)..(1182)
atggaatataaagtgacaccaccggcggttctccgggagcccctcattacgcccaacaaactactgatgggaccaggtccctcgaatgccccgcaacgggtgctggatgccatgtcgcggccaattcttggacaccttcacccggagacgcttaaaattatggacgacatcaaagaaggtgttcggtatctgttccagacgaacaacattgccaccttctgcctcagtgcgtccggtcacggtggcatggaagcgaccctgtgcaatctgctcgaggatggcgatgtgattctgatcggtcataccggtcactggggtgaccgttcggctgatatggccactcgatacggtgccgatgtgcgagtcgtaaaatccaaagtaggacaatcgcttagcttggacgaaattcgggatgccctgttgatccacaagccatcggtgctgttcctgacccaaggcgattcctccacgggggttctgcaaggattggaaggagtaggcgcactatgtcatcaacacaattgcctgctgattgtggacacggttgcctcgcttggaggggcaccgatgttcatggaccgctgggagatcgacgccatgtacacagggtcgcagaaagtgcttggggcgccacccggtatcacaccggtgtcattcagccatagagccgtagaacgctacaagcgccgcaacaccaaagtcaaagtgtactactgggatatgtccctcgtcggtgactattggggctgcttcggaagacccagaatctaccatcacaccatctcctccacgctactgtacggcctgcgagaagccattgccatggcctgcgaagagggcctaccggcgttgatcgcccgccacgaggactgcgccaagcggttgtaccgcggactgcaagatgctggatttgaactctacgcggatcccaaggatcgcctgtcgacggtgacgaccatcaaggtaccgcagggcgtggattggctcaaggccgcccagtatgccatgaagacgtatttggtggaaatcagcggaggtttagggcctacagccgggcaggtgttccgaattggtttgatgggacagaacgctaccaccgaacgggtggatcgagttcttcaagtcttccaggaagcggtcgcggccgtgaaaccggacgtccaggttaagggcaaaatgtaa

SEQ ID NO: 68607 - protein, 393 aa, Aedes aegypti
MEYKVTPPAVLREPLITPNKLLMGPGPSNAPQRVLDAMSRPILGHLHPETLKIMDDIKEGVRYLFQTNNIATFCLSASGHGGMEATLCNLLEDGDVILIGHTGHWGDRSADMATRYGADVRVVKSKVGQSLSLDEIRDALLIHKPSVLFLTQGDSSTGVLQGLEGVGALCHQHNCLLIVDTVASLGGAPMFMDRWEIDAMYTGSQKVLGAPPGITPVSFSHRAVERYKRRNTKVKVYYWDMSLVGDYWGCFGRPRIYHHTISSTLLYGLREAIAMACEEGLPALIARHEDCAKRLYRGLQDAGFELYADPKDRLSTVTTIKVPQGVDWLKAAQYAMKTYLVEISGGLGPTAGQVFRIGLMGQNATTERVDRVLQVFQEAVAAVKPDVQVKGKM

SEQ ID NO: 68608 - DNA, 1206 bp, Medicago truncatula
  CDS (1)..(1206)
atggattatgttaatggaccaggaagaaaccatctctttgttccagggccggttaacataccagaccaggtcattcgggctatgagccgaaacaacgaggactatcgttctcctgcaattccagctctgacaaaaactctacttgaagatgtcaagaagattttcaagactactactggaactccatttcttatccctactactggtaccggtgcttgggagagtgctctgacaaacacattgtcacctggagatcgtattgtatctttcgtgattggccaattcagtttgctttgggttgatcagcagcaacgccttaaatttaatgtcgatgttgtggaaagtgaatggggccgtggtgctgatctcgacattctagaatcaaaacttgcttctgattctgcacacactataaaggctatttgcattgttcataatgagactgcaactggtgtcaccaataacttggccaaagttcgacaacttctcgatgcataccaacatccagccctcctccttgttgatggagtgtcatccatttgtgctctcgatttccgtatggacgaatggggagtagatgtggccataactggttctcagaaagccctttcccttcctactggtataggatttgtggttgcaagccctaaagccatcgaagcttcaaaatctgccaaatcacttcgagttttctttgattggagtgactacctgaagttctacaagatgggaacttattggccatacactccttccattcagcttctctatggtcttagagcagctcttgatctgatttttgaggaaggacttgaaaatatcattgcaaggcacaatcgtttaggtacagcaaccagacttgctgtggaggcatggggtttgaagaattgcacacaagaggaagagtggttcagtgacacagtgactgctgttgttgttcctccttacattgacggtgctgaaattgttagaagggcatggaaaagatacaatttgagcttaggtttgggactaaacaaagttgctggaaaggttttcagaattggacatcttggcaacttgaacgagttgcaactattgggtgctcttgctggtgtggagatgatactcaaagatgttggttatccagtaaaattgggaagtggagttgctgctgccagtgcatacttacagaacaatattcctctcatcccttcaaggatttga

SEQ ID NO: 68609 - protein, 401 aa, Medicago truncatula
MDYVNGPGRNHLFVPGPVNIPDQVIRAMSRNNEDYRSPAIPALTKTLLEDVKKIFKTTTGTPFLIPTTGTGAWESALTNTLSPGDRIVSFVIGQFSLLWVDQQQRLKFNVDVVESEWGRGADLDILESKLASDSAHTIKAICIVHNETATGVTNNLAKVRQLLDAYQHPALLLVDGVSSICALDFRMDEWGVDVAITGSQKALSLPTGIGFVVASPKAIEASKSAKSLRVFFDWSDYLKFYKMGTYWPYTPSIQLLYGLRAALDLIFEEGLENIIARHNRLGTATRLAVEAWGLKNCTQEEEWFSDTVTAVVVPPYIDGAEIVRRAWKRYNLSLGLGLNKVAGKVFRIGHLGNLNELQLLGALAGVEMILKDVGYPVKLGSGVAAASAYLQNNIPLIPSRI

SEQ ID NO: 68610 - DNA, 1182 bp, Aedes aegypti
  CDS (1)..(1182)
atggaatacaaagtgacaccaccggcggttctccgggagcctcttgttactccgaacaaactactgatgggtccaggcccatcgaatgccccgcaacgggtgctggatgccatgtcgcggccaattcttggacatcttcacccggagacgcttaaaattatggacgacatcaaagaaggtgttcggtatctgttccagacgaacaacattgccaccttctgtctcagtgcgtccggtcacggtggcatggaagcgaccctgtgcaatctgctcgaggatggcgatgtgattctgatcggtcataccggtcactggggtgaccgttcggctgatatggccactcgatatggtgccgatgtgcgagtcgtaaaatccaaagtaggacaatcgcttagcttggacgaaattcgggatgccctgttgatccacaagccatcggtgctgttcctgacccagggcgattcctccacgggggttctgcaaggattggaaggagtaggcgcactatgccatcaacacaattgcctgctgattgtggacacggttgcctcgcttggaggggcaccgatgttcatggaccgctgggagatcgacgccatgtacaccgggtcgcagaaagtgcttggggcgccacccggtatcacaccggtttcattcagccatagagccgtagaacgctacaagcgccgcaacaccaaagtcaaagtgtactactgggatatgtccctcgtcggtgactattggggctgcttcggaagacccagaatctaccatcacaccatctcctccacgctactttacggcctgcgagaagccattgccatggcctgtgaagagggcctaccggcgttgattgcccgccacgaggactgcgccaagcggttgtaccgcggactgcaagatgctggttttgaactgtacgcggatcccaaggatcgcctgtcgacggtgacgaccatcaaggtaccgcagggcgtggattggctcaaggccgcccagtacgccatgaagacgtatttggtggaaatcagcggaggtttagggcccacagccgggcaggtgttccgaattggtttgatgggacagaacgctaccaccgaacgggtggatcgagttcttcaagtcttccaggaagcggtcgcggccgtgaaaccggacgtccaggttaagggcaaaatgtaa

SEQ ID NO: 68611 - protein, 393 aa, Aedes aegypti
MEYKVTPPAVLREPLVTPNKLLMGPGPSNAPQRVLDAMSRPILGHLHPETLKIMDDIKEGVRYLFQTNNIATFCLSASGHGGMEATLCNLLEDGDVILIGHTGHWGDRSADMATRYGADVRVVKSKVGQSLSLDEIRDALLIHKPSVLFLTQGDSSTGVLQGLEGVGALCHQHNCLLIVDTVASLGGAPMFMDRWEIDAMYTGSQKVLGAPPGITPVSFSHRAVERYKRRNTKVKVYYWDMSLVGDYWGCFGRPRIYHHTISSTLLYGLREAIAMACEEGLPALIARHEDCAKRLYRGLQDAGFELYADPKDRLSTVTTIKVPQGVDWLKAAQYAMKTYLVEISGGLGPTAGQVFRIGLMGQNATTERVDRVLQVFQEAVAAVKPDVQVKGKM

SEQ ID NO: 68612 - DNA, 1378 bp, Spirodela polyrrhiza
  CDS (36)..(1241)
acgcgggatctcgttgaaggatccacaggagaaagatggactacgtttatggaccggggaggaaccatctctttgtcccgggacccgtgaacatcccagagccggtgatacgcgccatgaacagaaacaacgaggactaccgttcccccgctgtgccggctttgacgaagacccttcttgaggatgttaagaagatatttaagacgacaagtgggactccgtttttgattcccaccacaggaactggggcatgggagagtgcacttactaacaccctgtcccctggagatcgaatcgtctcatttctcatcggacagttcagcctcctctggattgaccagcagcagcgtctgaactttaatgttgatgtcgtagagagtgactggggactaggtgccaaccttgacgttttagccgaaaagttggcagcagaccactcgcacagtatcaaagctatttgcatcgttcacaatgagacggcaacgggagttaccaacaacttggcgactgtgaggaaactacttgacgactataggcatcccgcgttgctgctggttgacggagtgtcgtcaatatgcgcgctcgacttccgtatggacgagtggggggtggacgtggcactgacgggatctcagaaggccctctcgctgcccactgggatgggcatcgtctgcgccagccccaaggcgctggaggcttccaagaccgctaagtcggtaagagtgtttttcgactggaacgactacctcaagttctacaagatggggacttactggccgtacaccccgtccattcaactgctttatgggcttcgagctgctctggacctcatattcgaggagggcctcgagaacgtgatccggaggcacagccgcctggggacggcaacaaggcttgctgtggaagcctggggcctgaagaactgcacgcagaaggaggagtggttcagtgacacagtgacagcggtggtggttccaggctacatcgacagttcagagatcgtcaggagggcatggaagcgcttcaacctgagcttgggcttggggctgaacaaggtagctggaaaggtgttcagaatagggcatctcggtaacgtcaacgagctgcaactgttggggtgcctgagcggcgtggagatggtgttaagggacgtggggtacccggcgaagctaggcagcggggtggcggcagcggcggcgtatctcctcaacaatacccccctcatcccctccaggatctgaagggagtagcccactctcaggcggacactgcctccctccggctgtaaaaaaggtcaaacctttaatgttattatcttacatgaacccattgtacttgattaagctataattttgaacctcgaaaaaaaaaaaaaaaa

SEQ ID NO: 68613 - protein, 401 aa, Spirodela polyrrhiza
MDYVYGPGRNHLFVPGPVNIPEPVIRAMNRNNEDYRSPAVPALTKTLLEDVKKIFKTTSGTPFLIPTTGTGAWESALTNTLSPGDRIVSFLIGQFSLLWIDQQQRLNFNVDVVESDWGLGANLDVLAEKLAADHSHSIKAICIVHNETATGVTNNLATVRKLLDDYRHPALLLVDGVSSICALDFRMDEWGVDVALTGSQKALSLPTGMGIVCASPKALEASKTAKSVRVFFDWNDYLKFYKMGTYWPYTPSIQLLYGLRAALDLIFEEGLENVIRRHSRLGTATRLAVEAWGLKNCTQKEEWFSDTVTAVVVPGYIDSSEIVRRAWKRFNLSLGLGLNKVAGKVFRIGHLGNVNELQLLGCLSGVEMVLRDVGYPAKLGSGVAAAAAYLLNNTPLIPSRI

SEQ ID NO: 68614 - DNA, 1517 bp, Glycine max
  CDS (146)..(1351)
  misc_feature (1392)..(1392): n is a, g, c or t
gattggacactgacatggactgaaggagtagaaaagctcttactttcttccgccatattccacaagaactctccaaggatcctccttcccacgagattctttggtgggaaaaatccaagaggtttgaaatttgaaggcagggaagatggattatttcaatgcaccaggaagaaaccatctctttgttccagggccggttaacattccggaccagatcatccgggccatgaacagaaacaatgaggactaccgttccccagcaattccagctatgacaaaaactttgcttgaggatgtcaagaagattttcaagaccactactggaaccccatttctcatccctacaactggtactggtgcttgggagagtgctctcacaaacacactgtctcctggggatcgaattgtatcgttcctgattggccaattcagcttgctttggattgatcagcagcaacgcctgaagttcaatgttgatgttgttgagagtgaatggggccatggtgctaagcttgatgttctggaatcaaagattgcttcagatacttcacacactataaaggcaatttgcattgttcacaatgagactgcaactggggtcaccaatgacttggccaaagtgagacaaattcttgattcctaccagcatccagccctccttattgttgacggagtgtcttccatttgtgctcttgatttccgcatggatgaatggggagttgatgtggcaataactggctcccagaaggccctttcccttcccactgggataggtattgtggttgcaggccctagagctattgaggcctcaaaacatgctaaatcacttcgagttttctttgactggaaagactacctgaaattctaccagctaggaacgtattggccatacactccttccatacatttgctgtatggtctgagagctgctcttaatctgatttttgaggaaggacttgaaaatgtgattgcaagacacagtcgtttaggcaaagcaaccagacttgctgtagaggcatggggtttgaagaattgcacccaaaaggaagagtggtacagtgacactgtgactgctgttcttgttcctgcttacattgatagtactgaaatagttagaagggcatggaagagatacaatttgagcttaggtcttggactgaacaaagttgctgggaaggttttcagaattggacatcttggcaacttgaatgagttgcaactgttgggatgtctagctggtgtggagatgatactgaaagatgtgggctatcctgtaaagcttggaagtggagttgctgctgccagtgcatacttacaggacactattcctatgatcccttccaggatttgagtcacaagtcattcttgtctttacttccttttttctgctcntttcggaaattctggtaaaatatatattaccctcttttacactcctttgaagatgaacatacactctactttcagctttaatgcattgcttcttttattgtcctgtatatcaaaaatcattgcat

SEQ ID NO: 68615 - protein, 401 aa, Glycine max
MDYFNAPGRNHLFVPGPVNIPDQIIRAMNRNNEDYRSPAIPAMTKTLLEDVKKIFKTTTGTPFLIPTTGTGAWESALTNTLSPGDRIVSFLIGQFSLLWIDQQQRLKFNVDVVESEWGHGAKLDVLESKIASDTSHTIKAICIVHNETATGVTNDLAKVRQILDSYQHPALLIVDGVSSICALDFRMDEWGVDVAITGSQKALSLPTGIGIVVAGPRAIEASKHAKSLRVFFDWKDYLKFYQLGTYWPYTPSIHLLYGLRAALNLIFEEGLENVIARHSRLGKATRLAVEAWGLKNCTQKEEWYSDTVTAVLVPAYIDSTEIVRRAWKRYNLSLGLGLNKVAGKVFRIGHLGNLNELQLLGCLAGVEMILKDVGYPVKLGSGVAAASAYLQDTIPMIPSRI

SEQ ID NO: 68616 - DNA, 1436 bp, Cucumis melo
  CDS (207)..(1412)
cttccttttttctgctctgtgttctgggctctcccttcctcactcctataaacatcaactggtttctcccacttctcttttcatggtttcaacacttattattctccaagcttcttcctctttcacttcattttgctgaggtttgttgagaccagtaagttcacgtttgcaatttgttaacatttaacaagtttgagaagggaaagatggactatgtttatggacctggaaggaaccatctttttgtgccggggccggttaatatccccgaacaagtccttcgagcaatgaaccggaacaacgaggattatcgttctccagctgttccagcactgacaaagactctgcttgaggatgtcaaaaagatattcaaaaccacatcaggcactccatttttgttccctaccacaggtactggtgcatgggagagtgctctcacaaacacattgtctccgggagatcggatcgtgtcattccttattggtcaattcagtttgctttggattgatcagcagcagcgtctcaatttcaaagtcgacgtgattgaaagtgaatggggtgaaggtgctaagcttgatgttttagctgcaaagcttgcagctgatactgatcatactataaaggcagtttgcattgttcataatgagacagcaactggtgtgactaatgatttgtctctagtaagaagaatactagatgaatacaggcatccagctcttttcctcgtggatggagtgtcttcgatatgtgctcttgatttccgtatggatgattggggagtagatgtggctttaactggctctcaaaaagctctttcccttcccaccggaattggtattgtttgcgccagcccccgagcactcgaggcatctaaaacagcaaaatcactcagagttttctttgactggaaggactatctcaagttctataacttaggaacatactggccttacactccttccatccaactcttatatgggcttagagcagctttggacctcgtatttgaggaaggccttgaaaatgtgattgcgagacataaacgtttaggccaagcaacaaggcttgctgtggaggcatggggtttgaagaactgcacacaaaaggaggaatggcacagtgacactgtgactgctgttgttgttcctccatacattgacagtgcagaaattgttagaagggcttggaagagatacaatttgagtttaggtcttggcctcaacaaagttgctggtaaagtcttcagaattggccaccttggcaacctaaatgagttgcaactgttgggttgtcttgctggtgtggagatgattctgaaggatgttggttatccagtgaagcttggaagtggtgttgcagcagcttcttcatatttgcagaacaacatccctctcattccttctcggatttgatattcgatcggttcgaaaccgtga

SEQ ID NO: 68617 - protein, 401 aa, Cucumis melo
MDYVYGPGRNHLFVPGPVNIPEQVLRAMNRNNEDYRSPAVPALTKTLLEDVKKIFKTTSGTPFLFPTTGTGAWESALTNTLSPGDRIVSFLIGQFSLLWIDQQQRLNFKVDVIESEWGEGAKLDVLAAKLAADTDHTIKAVCIVHNETATGVTNDLSLVRRILDEYRHPALFLVDGVSSICALDFRMDDWGVDVALTGSQKALSLPTGIGIVCASPRALEASKTAKSLRVFFDWKDYLKFYNLGTYWPYTPSIQLLYGLRAALDLVFEEGLENVIARHKRLGQATRLAVEAWGLKNCTQKEEWHSDTVTAVVVPPYIDSAEIVRRAWKRYNLSLGLGLNKVAGKVFRIGHLGNLNELQLLGCLAGVEMILKDVGYPVKLGSGVAAASSYLQNNIPLIPSRI

SEQ ID NO: 68618 - DNA, 1206 bp, Cucumis melo
  CDS (1)..(1206)
atggattacgtttatgcacctggaaagaaccatctctttgtcccagggccggtcaacattcccgaaccggttctgcgggcaatgaaccgaaacaatgaggattatcgttcgcctgccgttcctgctttggcgaaaactcttcttgaagatgtgaaaaagattttcaaatctactactggaaccacattcctgattcccacaacaggtactggtgcttgggaaagtgctcttacaaacacattgtctcctggagataggatcgtgtcctttctcattggccagttcagtctgctctggattgatcagcagcagcgccttaacttcaacgtcgatgtcgtcgagagcgactggggtcagggtgccaatcttgatgttctggaatcaaagcttgctaccgatggcggccacaccatcaaggcaatttgcattgtccacaatgagacagctactggtgtcactaatgacctgtctaaagttcggttcctacttgataagtacaagcatcctgctcttttgctggtcgacggagtgtcatccatatgtgcacttgattttcgaatggatgaatggggagtcgacgttgctttaactggttcccaaaaggctctttctctccctacaggacttggaattatttgtgccagtcccaaagcactagtagcatccaaaacttcaaaatctgtcaaagtcttctttgattggaaagactatctcaaattctacaatctaggaacatactggccatacaccccttccattcagctcttgtatggattaagagcagctctcgatcttcttttcgaggaaggtttggacaatgtgattgctcggcacagtcgtcttggcaaagcaacaaggcttgctgtggaggcttgggggttgaaaaattgtacacaaaaagaggaatggtttagtgacactgttactgctgtgcttgttccttcttacattgacagtgcagaaattgtgagaagggcatggaagagatacaatttgagcttgggacttggccttaacaaagttgctggcaaagtattcagaattggtcaccttggaaaccttaatgagttgcaactgttgggatgtcttgctggtgtagaaatgatactgaaggatgtcgggtaccctgttaaactagggagtggagttgctgcagctagtgcatatcttcaaaataacatccctctcattccttcaaggatttaa

SEQ ID NO: 68619 - protein, 401 aa, Cucumis melo
MDYVYAPGKNHLFVPGPVNIPEPVLRAMNRNNEDYRSPAVPALAKTLLEDVKKIFKSTTGTTFLIPTTGTGAWESALTNTLSPGDRIVSFLIGQFSLLWIDQQQRLNFNVDVVESDWGQGANLDVLESKLATDGGHTIKAICIVHNETATGVTNDLSKVRFLLDKYKHPALLLVDGVSSICALDFRMDEWGVDVALTGSQKALSLPTGLGIICASPKALVASKTSKSVKVFFDWKDYLKFYNLGTYWPYTPSIQLLYGLRAALDLLFEEGLDNVIARHSRLGKATRLAVEAWGLKNCTQKEEWFSDTVTAVLVPSYIDSAEIVRRAWKRYNLSLGLGLNKVAGKVFRIGHLGNLNELQLLGCLAGVEMILKDVGYPVKLGSGVAAASAYLQNNIPLIPSRI

SEQ ID NO: 68620 - DNA, 1230 bp, Cucumis melo
  CDS (1)..(1206)
atggactatgtttatggacctggaaggaaccatctttttgtgccggggccggttaatatccccgaacaagtccttcgagcaatgaaccggaacaacgaggattatcgttctccagctgttccagcactgacaaagactctgcttgaggatgtcaaaaagatattcaaaaccacatcaggcactctatttttgttccctaccacaggtactggtgcatgggagagtgctctcacaaacacattgtctccgggagatcggatcgtgtcattccttattggtcaattcagtttgctttggattgatcggcagcagcgtctcaatttcaaggtcgacgtaattgaaagtgaatggggtgaaggtgctaagcttgatgttttagctgcaaagcttgcagctgatactgatcatactataaaggcagtttgcattgttcataatgagacagcaactggtgtgactaatgatttgtctctagtaagaagaatactagatgaatacaggcatccagctcttttcctcgtggatggagtgtcttcgatatgtgctcttgatttccgtatggatgattggggagtaggtgtggctttaactggctctcaaaaagctctttcccttcccaccggagttggtattgtttgcgccagcccccgagcactcgaggcatctaaaacagcaaaatcactcagagttttctttgactggaaggactatctcaagttctataacttaggaacatactggccttacactccttccatccaactcttatatgggcttagagcagctttggacctcgtatttgaggaaggccttgaaaatgtgattgcgagacataaacgtttaggccaagcaacaaggcttgctgtggaggcatggggtttgaagaactgcacacaaaaggaggaatggcacagtgacactgtgactgctgttgttgttcctccatacattgacagtgcagaaattgttagaagggcttggaagagatacaatttgagtttaggtcttggcctcaacaaagttgctggtaaagtcttcagaattggccaccttggcaacctaaatgagttgcaactgttgggttgtcttgctggtgtggagatgattctgaaggatgttggttatccagtgaagcttggaagtggtgttgcagcagcttcttcatatttgcagaacaacatccctctcattccttctcggatttgatactcgatcggttcgaaaccgtga

SEQ ID NO: 68621 - protein, 401 aa, Cucumis melo
MDYVYGPGRNHLFVPGPVNIPEQVLRAMNRNNEDYRSPAVPALTKTLLEDVKKIFKTTSGTLFLFPTTGTGAWESALTNTLSPGDRIVSFLIGQFSLLWIDRQQRLNFKVDVIESEWGEGAKLDVLAAKLAADTDHTIKAVCIVHNETATGVTNDLSLVRRILDEYRHPALFLVDGVSSICALDFRMDDWGVGVALTGSQKALSLPTGVGIVCASPRALEASKTAKSLRVFFDWKDYLKFYNLGTYWPYTPSIQLLYGLRAALDLVFEEGLENVIARHKRLGQATRLAVEAWGLKNCTQKEEWHSDTVTAVVVPPYIDSAEIVRRAWKRYNLSLGLGLNKVAGKVFRIGHLGNLNELQLLGCLAGVEMILKDVGYPVKLGSGVAAASSYLQNNIPLIPSRI

SEQ ID NO: 68622 - DNA, 1206 bp, Cucumis melo
  CDS (1)..(1206)
atggattacgtttatgcacctggaaagaaccatctctttgtcccagggccggtcaacattcccgaaccggttctgcgggcaatgaaccgaaacaatgaggattatcgttcgcctgccgttcctgctttgacgaaaactcttcttgaagatgtgaaaaagattttcaaatctactactggaaccacattcctgattcccacaacaggtactggtgcttgggaaagtgctcttacaaacacattgtctcctggagataggatcgtgtcctttctcattggccagttcagtctgctctggattgatcagcagcagcgccttaacttcaacgtcgatgtcatcgagagcgactggggtcagggtgccaatcttgatgttctggaatcaaagcttgccaccgatggcggccacaccatcaaggcaatttgcattgtccacaatgagacagctactggcgtcactaatgacctgtctaaagttcggttcctacttgataagtacaagcatcctgctcttttgctggtcgacggagtgtcatccatatgtgcacttgattttcgaatggatgaatggggagtcgacgttgctttaactggttcccaaaaggctctttctctccctacaggacttggaattatttgtgccagtcccaaagcactagaagcatccaaaacttcaaaatctgtcaaagtcttctttgattggaaagactatctcaaattctacaatctaggaacatactggccatacaccccttccattcaactcttgtatggattaagagcagctctcgatcttcttttcgaggaaggtttggacaatgtgattgctcggcacagtcgtcttggcaaagcaacaaggcttgctgtggaggcttgggggttgaaaaattgtacacaaaaagaggaatggtttagtgacactgttactgctgtgcttgttccttcttacattgacagtgcagaaattgtgagaagggcatggaagagatacaatttgagcttgggacttggccttaacaaagttgctggcaaagtattcagtattggtcaccttggaaaccttaatgagttgcaactgttgggatgtcttgctggtgtagaaatgatactgaaggatgtcgggtaccctgttaaactagggagtggagttgctgcagctagtgcatatcttcaaaataacatccctctcattccttcaaggatttaa

SEQ ID NO: 68623 - protein, 401 aa, Cucumis melo
MDYVYAPGKNHLFVPGPVNIPEPVLRAMNRNNEDYRSPAVPALTKTLLEDVKKIFKSTTGTTFLIPTTGTGAWESALTNTLSPGDRIVSFLIGQFSLLWIDQQQRLNFNVDVIESDWGQGANLDVLESKLATDGGHTIKAICIVHNETATGVTNDLSKVRFLLDKYKHPALLLVDGVSSICALDFRMDEWGVDVALTGSQKALSLPTGLGIICASPKALEASKTSKSVKVFFDWKDYLKFYNLGTYWPYTPSIQLLYGLRAALDLLFEEGLDNVIARHSRLGKATRLAVEAWGLKNCTQKEEWFSDTVTAVLVPSYIDSAEIVRRAWKRYNLSLGLGLNKVAGKVFSIGHLGNLNELQLLGCLAGVEMILKDVGYPVKLGSGVAAASAYLQNNIPLIPSRI

SEQ ID NO: 68624 - DNA, 1430 bp, Cucumis melo
  CDS (101)..(1306)
gattagatctgttttgctctgctttgtcatttcccccgcagccacacaccattccatttctctctcaaggtgaaaactgagaatttgagcattagaaaaaatggattacgtttatgcacctggaaagaaccatctctttgtcccagggccggtcaacattcccgaaccggttctgcgggcaatgaaccgaaacaatgaggattatcgttcgcctgccgttcctgctttgacgaaaactcttcttgaagatgtgaaaaagattttcaaatctactactggaaccacattcctgattcccacaacaggtactggtgcttgggaaagtgctcttacaaacacattgtctcctggagataggatcgtgtcctttctcattggccagttcagtctgctctggattgatcagcagcagcgccttaacttcaacgtcgatgtcgtcgagagcgactggggtcagggtgccaatcttgatgttctggaatcaaagcttgccaccgatggcggccacaccatcaaggcaatttgcattgtccacaatgagacagctactggtgtcactaatgacctgtctaaagttcggttcctacttgataagtacaagcatcctgctcttttgctggtcgacggagtgtcatccatatgtgcacttgattttcgaatggatgaatggggagtcgacgttgctttaactggttcccaaaaggctctttctctccctacaggacttggaattatttgtgccagtcccaaagcactagaagcatccaaaacttcaaaatctgtcaaagtcttctttgattggaaagactatctcaaattctacaatctaggaacatactggccatacaccccttccattcagctcttgtatggattaagagcagctctcgatcttcttttcgaggaaggtttggacaatgtgattgctcggcacagtcgtcttggcaaagcaacaaggcttgctgtggaggcttgggggttgaaaaattgtacacaaaaagaggaatggtttagtgacactgttactgctgtgcttgttccttcttacattgacagtgcagaaattgtgagaagggcatggaagagatacaatttgagcttgggacttggccttaacaaagttgctggcaaagtattcagaattggtcaccttggaaaccttaatgagttgcaactgttgggatgtcttgctggtgtagaaatggtactgaaggatgtcgggtaccctgttaaactagggagtggagttgctgcagctagtgcatatcttcaaaataacatccctctcattccttcaaggatttaatttatctcccatgtccatgtaattatttttcattttcttcatctctaatactctgtaaaaaaagcacttctcaatactctacttctgttatatattttgatactttttacttttctaaaaaaaa

SEQ ID NO: 68625 - protein, 401 aa, Cucumis melo
MDYVYAPGKNHLFVPGPVNIPEPVLRAMNRNNEDYRSPAVPALTKTLLEDVKKIFKSTTGTTFLIPTTGTGAWESALTNTLSPGDRIVSFLIGQFSLLWIDQQQRLNFNVDVVESDWGQGANLDVLESKLATDGGHTIKAICIVHNETATGVTNDLSKVRFLLDKYKHPALLLVDGVSSICALDFRMDEWGVDVALTGSQKALSLPTGLGIICASPKALEASKTSKSVKVFFDWKDYLKFYNLGTYWPYTPSIQLLYGLRAALDLLFEEGLDNVIARHSRLGKATRLAVEAWGLKNCTQKEEWFSDTVTAVLVPSYIDSAEIVRRAWKRYNLSLGLGLNKVAGKVFRIGHLGNLNELQLLGCLAGVEMVLKDVGYPVKLGSGVAAASAYLQNNIPLIPSRI

SEQ ID NO: 68626 - DNA, 1206 bp, Cucumis melo
  CDS (1)..(1206)
atggactatgtttatggacctggaaggaaccatctttttgtgccggggccggttaatatccccgaacaagtccttcgagcaatgaaccggaacaacgaggattatcgttctccagctgttccagcactgacaaagactctgcttgaggatgtcaaaaagatattcaaaaccacatcaggcactccatttttgttccctaccacaggtactggtgcatgggagagtgctctcacaaacacattgtctccgggagatcggatcgtgtcattccttattggtcaattcagtttgctttggattgatcagcaacagcgtctcaatttcaaagtcgacgtgattgaaagtgaatggggtgaaggtgctaagcttgatgttttagctgcaaagcttgcagctgatactgatcatactataaaggcagtttgcattgttcataatgagacagcaactggcgtgactaatgatttgtctctagtaagaagaatactacatgaatacaggcatccagctcttttcctcgtggatggagtgtcttcgatatgtgctcttgattttcgtatggatgattggggagtggatgtggctttaactggctctcaaaaagctctttcccttcccaccggaattggtattgtttgcgccagcccccgagcactcgaggcatctaaaacagcaaaatcactcagagttttctttgactggaaggactatctcaagttctataacttaggaacatactggccttacactccttccatccaactcttatatgggcttagaccagctttggacctcgtatttgaggaaggccttgaaaatgtgattgcgagacataaacgtttaggccaagcaacaaggcttgctgtggaggcatggggtttgaagaactgcacacaaaaggaggaatggcacagtgacactgtgactgctgttgttgttcctccatacattgacagtgcagaaattgttagaagggcttggaagagatacaatttgagtttaggtcttggcctcaacaaagttgctggtaaagtcttcagaattggccaccttggcaacctaaatgagttgcaactgttgggttgtcttgctggtgtggagatgattctgaaggatgttggttatccagtgaagcttggaagtggtgttgcagcagcttcttcatatttgcagaacaacatccctctcattccttctcggatttga

SEQ ID NO: 68627 - protein, 401 aa, Cucumis melo
MDYVYGPGRNHLFVPGPVNIPEQVLRAMNRNNEDYRSPAVPALTKTLLEDVKKIFKTTSGTPFLFPTTGTGAWESALTNTLSPGDRIVSFLIGQFSLLWIDQQQRLNFKVDVIESEWGEGAKLDVLAAKLAADTDHTIKAVCIVHNETATGVTNDLSLVRRILHEYRHPALFLVDGVSSICALDFRMDDWGVDVALTGSQKALSLPTGIGIVCASPRALEASKTAKSLRVFFDWKDYLKFYNLGTYWPYTPSIQLLYGLRPALDLVFEEGLENVIARHKRLGQATRLAVEAWGLKNCTQKEEWHSDTVTAVVVPPYIDSAEIVRRAWKRYNLSLGLGLNKVAGKVFRIGHLGNLNELQLLGCLAGVEMILKDVGYPVKLGSGVAAASSYLQNNIPLIPSRI

SEQ ID NO: 68628 - DNA, 1089 bp, Amycolatopsis orientalis
  CDS (1)..(1089): transl_table=11
gtgaacctacggatttccggaccgacgcccttgccaccaagggttcgggccgccctgtccaccgacatgatcagtcacaggtcgacggcgttccgggacatcgtcgcggaggttctcgccggtctcactcccgtgttcggtgacccggcgactattctgccgttcacctgttcaggtaccgggggacttgaggcggccgtcgtcaacacggtgcgtccggggcaacgagtcgtcgtggtgtcgatcgggtacttcggcacgcgaatggccgagatcgcccggatggccggcctcgacatcgaagtgatcgaggtgccgtggggccaggcggccgatcctggtgagcttcaggccgttctacggcggctgcgtgacgtggcggcggtcctggtgacccacaacgagacatccaccggtgtgctgaacccgctacccgaactctgtcgcgtggtccgggaaagcagcgatgctttgctgatcgtcgacgtcgtcagcagcgtcggggcgacgcccgtgcgcatgcgggactggggaatcgatgtcgcggtcggtgtcagtcagaaggccctgatgtcgccgcctggattggcgttgctcggtgtgagctcgcgggccctgaccgcggccgcagcgaacccggctcgtcggtactacttcgacttcaccgcaatggctcgggccgtcgaggagaacacgaccacctatacccctgccatcccggttttccatgctcttcagacggcactgcggatgatctcggtcgaaggctgggatcgggttctcgcccggcaccaacggctttccgagcagtgccgcagcgggcttgccgacctggggctggcgttcgcggccgatcagccgtacgcctcgccgaccgtgacttccttcttcgtgcctgccgacatgcgggcgagtgacgttcgggagcggatggcggtggaacacaaggtacaggtcgcgtccgggcgagcgaagtggaaggacagcgtgcttcggatcggccacatgggatacgtcaacgagaatgatgtcgcgcacgtgctggccgcgctcggcgctgtgctcgacagggcaggaggctcgtcgtga

SEQ ID NO: 68629 - protein, 362 aa, Amycolatopsis orientalis
MNLRISGPTPLPPRVRAALSTDMISHRSTAFRDIVAEVLAGLTPVFGDPATILPFTCSGTGGLEAAVVNTVRPGQRVVVVSIGYFGTRMAEIARMAGLDIEVIEVPWGQAADPGELQAVLRRLRDVAAVLVTHNETSTGVLNPLPELCRVVRESSDALLIVDVVSSVGATPVRMRDWGIDVAVGVSQKALMSPPGLALLGVSSRALTAAAANPARRYYFDFTAMARAVEENTTTYTPAIPVFHALQTALRMISVEGWDRVLARHQRLSEQCRSGLADLGLAFAADQPYASPTVTSFFVPADMRASDVRERMAVEHKVQVASGRAKWKDSVLRIGHMGYVNENDVAHVLAALGAVLDRAGGSS

SEQ ID NO: 68630 - DNA, 1158 bp, Saccharomyces cerevisiae
  CDS (1)..(1158)
atgactaaatctgtagatacgctgctgatcccaggccccattatcctaagcggagcagtccagaaggccctggacgttccctctttgggccacacctctcctgagttcgtctctatttttcaaagggtgctaaagaacacaagagctgtcttcaaatccgctgctgcctcgaagtctcagccttttgtgcttgccggctctggtacgttggggtgggacatatttgcctcgaactttattctttcgaaggcccccaacaagaacgtgctggtcgtatccactgggacattttctgacaggtttgctgactgtctgcgtagctacggtgcgcaagtagatgttgttaggcccctcaagataggcgaatcagttcccttagaactgattactgaaaagttgtcgcaaaatagctatggggctgtcacggttacgcacgttgacacttcaacggcagtgctgtccgatctgaaagccatttcgcaagcgattaagcagacttcgccggaaacgttcttcgtagtcgatgctgtatgctcgattggatgcgaagagtttgaatttgatgaatggggggtggatttcgccttgactgcttcgcaaaaggctattggcgctccagcgggtctttctatctcgctatgcagtagcagattcatggattatgcactcaacgacagcaaaaatggtcatgtacatgggtatttttcctcgttgagaagatggacaccaataatggaaaattatgaggctggtaaaggagcttattttgcaaccccacccgtacaactaattaatagccttgatgtagccttgaaagaaattctcgaagaggggttgcataagagatgggatttgcaccgtgaaatgagtgattggtttaaagacagtttggttaatggcttgcaattgacatccgtcagtaggtatccttctaacatgtctgcgcacgggttgacagccgtatacgtagcagatcctcctgatgtcattgcttttttaaagtcacacggtgtagtcattgccggaggtattcacaaggacatcggacccaagtatatccgtattggacatatgggtgtgaccgcttgcaacaagaatttaccgtacatgaagaactgcttcgacttaataaaactagctcttcagaggaaaaagtga

SEQ ID NO: 68631 - protein, 385 aa, Saccharomyces cerevisiae
MTKSVDTLLIPGPIILSGAVQKALDVPSLGHTSPEFVSIFQRVLKNTRAVFKSAAASKSQPFVLAGSGTLGWDIFASNFILSKAPNKNVLVVSTGTFSDRFADCLRSYGAQVDVVRPLKIGESVPLELITEKLSQNSYGAVTVTHVDTSTAVLSDLKAISQAIKQTSPETFFVVDAVCSIGCEEFEFDEWGVDFALTASQKAIGAPAGLSISLCSSRFMDYALNDSKNGHVHGYFSSLRRWTPIMENYEAGKGAYFATPPVQLINSLDVALKEILEEGLHKRWDLHREMSDWFKDSLVNGLQLTSVSRYPSNMSAHGLTAVYVADPPDVIAFLKSHGVVIAGGIHKDIGPKYIRIGHMGVTACNKNLPYMKNCFDLIKLALQRKK

SEQ ID NO: 68632 - DNA, 1251 bp, Bacillus subtilis
  CDS (1)..(1251): transl_table=11
gtgtcaggcagaagagaattatgcaccccgttaagaacgattatgacaccggggcctgttgaggttgatccgcgtgtattaagagtaatgagcaccccggttgtcggccaatttgatccggcgtttacaggtattatgaatgaaacgatggagatgcttcgggagctgttccaaacaaaaaaccgctgggcatacccgattgacggcacttcacgggcgggaattgaagcagtgctggctagtgtgatagagccggaagatgatgtgctcattcccatttacggccgtttcggttatttgctgactgaaatcgccgagcgatatggggcaaatgttcatatgctggagtgcgaatggggaacggtttttgacccggaggacatcatacgggagataaaaaaagtgaagccgaaaattgtggccatggtgcatggagaaacatcgacaggacggattcacccgctgaaagccatcggcgaagcctgccgcaccgaggatgcattgtttatcgtcgatgcagtcgcaacgattgggggctgcgaggttaaagtcgatgaatggaagattgacgctgccatcggcggaacgcaaaaatgtttgtctgtgccttcaggaatggcgccgattacatataatgagcgggtggcggacgtgattgcagctcgcaaaaaggtggaacgcgggattgcgacacaagctgacagggcagcactttcgggaaatcggccaattacaagcaactactttgatttgagccagcttgaggattattggagcgaaagacggctcaatcatcatacagaagcgacgacgatgctgtacgccttacgtgagggagtcagactggtgcttgaagaaggtcttgagacgcgtttcgagcggcatcggcaccatgaagccgcattagcagcagggataaaggcaatggggctaagattgtttggagatgacagctgcaaaatgcctgttgtcacctgtgtcgaaattcccggcggcattgacggcgagtctgtccgtgacatgctgctggcacaattcggcattgaaatcgccagctcattcggcccgcttgcagggaagatctggaggatcggcacgatggggtacagctgcagaaaagaaaacgtgctattcgtgcttgccgggttagaggctgtgcttctcagacataacgcaggaatcgaagcaggaaaagcgctccaagcagcgctggatgtgtatgaaaacgctggccgccaggcagcggtgtaa

SEQ ID NO: 68633 - protein, 416 aa, Bacillus subtilis
MSGRRELCTPLRTIMTPGPVEVDPRVLRVMSTPVVGQFDPAFTGIMNETMEMLRELFQTKNRWAYPIDGTSRAGIEAVLASVIEPEDDVLIPIYGRFGYLLTEIAERYGANVHMLECEWGTVFDPEDIIREIKKVKPKIVAMVHGETSTGRIHPLKAIGEACRTEDALFIVDAVATIGGCEVKVDEWKIDAAIGGTQKCLSVPSGMAPITYNERVADVIAARKKVERGIATQADRAALSGNRPITSNYFDLSQLEDYWSERRLNHHTEATTMLYALREGVRLVLEEGLETRFERHRHHEAALAAGIKAMGLRLFGDDSCKMPVVTCVEIPGGIDGESVRDMLLAQFGIEIASSFGPLAGKIWRIGTMGYSCRKENVLFVLAGLEAVLLRHNAGIEAGKALQAALDVYENAGRQAAV

SEQ ID NO: 68634 - DNA, 2303 bp, Hyphomicrobium methylovorum
  CDS (914)..(2131): transl_table=11
ggtaccgaagccggcgttggcctgcgtatgtttttagatggttgcgccgatggcatccaagattgaggtctcgatcgtcgatcaaaacccggtcgtacgtaccgggttggaaacgctgttggtgcgcgatggccgcttcagcgtctccgggatctacgcgtccggagaagatcttctcgccgcccttcaaaccaagccggttgaaatcgtcatcgtcggctggtctctgccggatatgacgggtggtgatgtcctcacgcgcgtccgtaaagagaaatggcgcacccgcatcatcatctacacgggtgagcgatcgagcgaagttctccgtaccgcgatcaaaagcggcgcatggggattcgttgcgaagacggaagagccgcaagttctgcttgaagccgtcgtgtccgtagcgcgcggccgcttgtcgctaccttacgtcgacatcgatcttttgaaccacgatccgctcgaaagcctgaccgcgcgcgagcgggaattgcttgctgcacttgcgaacggctggaccaacctgcaaatcgcagcgcgcaccggcatctcccgcaatacggtgaaataccatctaaaaaatctctacgataaactcggtgtttcaaaccgcgcgatggccgttgcgcttcatgtttccattaaccgtaacgaacatcgctgagatcagcaccgcatatttccaagcgttgtagattccttggacctttgggtgggtagccgaaactcgcccaaccgggtgttgatcgtttttcgttcgcaccttcatggtcaggctgctagttaaagaccaacgcccgcgaatgcgacgggcggaaggatcagcaaagcatgccgaacgttctacccctgtatccttacaggggtcgttcggcttggctcaacgcagcgcggagaaacgctcatgaccgtcacgcctcacctctttattcccggcccgaccaacattcccgacgcagtccgcatggccatgaacattccgatggaagacatgcgctcgccggaatttccgaaattcacgctgccgctgtttgaagacctgaagaaggccttcaaaatgaaggacggccgcgtattcatcttcccgtcgtcgggaacgggtgcttgggaatcggctgtcgagaacacgctcgccacgggcgacaaggttctgatgagccgcttcggtcagttctcgctcctctgggtcgatatgtgtgagcgtcttggcctcaaggttgaggtttgcgacgaagagtggggcacgggcgttccggtcgaaaagtacgccgacatcctcgccaaggataagaaccacgaaatcaaagctgtcttcgttacgcataacgaaacggcaaccggcgtttccagcgacgttgctggcgtccgtaaggcactcgacgctgcgaagcacccggccctcttgatggtcgacggcgtttcctcggtcggttcgctcgacatgcgtatgggcgaatggggcgtggactgctgcgtttccggttcgcagaagggcttcatgctcccgacgggcctcggcattctcgcagtcagccagaaggcactcgacatcaacaagtcgaagaacggccgcatgaaccgttgcttcttctcgttcgaagacatgatcaagacgaacgatcagggcttcttcccctacacgcctgcaacccagttgctccgtggtctccgtacgtcgctcgatcttctgtttgctgaaggtctcgacaacgtcttcgcacgccacacgcgtctcgcttcgggcgttcgcgctgccgtcgacgcatggggcctgaagctctgcgcgaaggaaccgaagtggtattcggacacggtttccgccatcctggttccggaaggcattgacagcaacgccatcaccaagacggcgtactatcgctacaacacgtcgttcggtctcggcctcaacaaggtcgccggcaaagtcttccgcatcggccacctcggcatgctcgacgaagtcatgatcggcggcgctctgttcgcagccgaaatggcgctcaaggacaacggcgtcaacctcaagctcggctccggcaccggcgcggctgcggaatacttcagcaagaacgcaactaagtccgcaacggccctgacgccgaagcaggcaaaagctgcctaacgaataaatgcccggccgcaaatggccggggattttctgcgattgcgcgcggcgaacgcgaccgtctcgccgcgcgcatccccaacttcaaaaaaacatccgctaacaatcctaggaaggcgatcccccaatgagctacacgctttacccgacccgcaagcagcgcctgcag

SEQ ID NO: 68635 - protein, 405 aa, Hyphomicrobium methylovorum
MTVTPHLFIPGPTNIPDAVRMAMNIPMEDMRSPEFPKFTLPLFEDLKKAFKMKDGRVFIFPSSGTGAWESAVENTLATGDKVLMSRFGQFSLLWVDMCERLGLKVEVCDEEWGTGVPVEKYADILAKDKNHEIKAVFVTHNETATGVSSDVAGVRKALDAAKHPALLMVDGVSSVGSLDMRMGEWGVDCCVSGSQKGFMLPTGLGILAVSQKALDINKSKNGRMNRCFFSFEDMIKTNDQGFFPYTPATQLLRGLRTSLDLLFAEGLDNVFARHTRLASGVRAAVDAWGLKLCAKEPKWYSDTVSAILVPEGIDSNAITKTAYYRYNTSFGLGLNKVAGKVFRIGHLGMLDEVMIGGALFAAEMALKDNGVNLKLGSGTGAAAEYFSKNATKSATALTPKQAKAA

SEQ ID NO: 68636 - DNA, 1158 bp, Methanococcus jannaschii
  CDS (1)..(1158): transl_table=11
atgaaaatagatgcagttaaaaagctattgatgattccagggcctacaatggttccaccagaggttttaaatgcaatggcattgccagttattggacataggacaaaggattacagcaacttattggaagacacaatagaaaaattaaaaaaagtattcataactgaaaacgatacattcttaattactggttcaggaacagcagcaatggatatggcaatatcaaacataataaaaagaggagataaggttttaaacattgttacaggaaactttggagagagatttgcaaatatagttaaagcatacaaaggagaggcaattagattagatgtagaatggggagatatggcagagccagaggcagttaaagagatattggacaaatatgatgacatcaaagcagttacagtagtgcataatgaaacatcaacaggggcaagaaacccaataaaagagattggagaggttgttaaggactatgatgctttatacattgttgatactgtctcatcattaggaggagattatgtaaatgttgataaattccacatagatatctgtgttactggttctcaaaaatgtttggcagctccaccaggattggctgcaataacagtcagtgaaaaggcatgggaagttattaagaagaatgatgacaaagttggtttctacttagatttattggcttataaaaaatactatgaagagaaaaaacaaaccccatacacaccatcagttaatttaacctatgccttaaatgttgcattagatttagttttagaggaaggaatcgagaatagggttaaaagacatgagagattagcaaaagcaacaagggctggtttggaggcaatgggaatagagttgtttgccaaggagagggcaaggtcagtaacagttacatcagcaaaatatccagaaggcattgaagatagcaaatttagaggtatattaagcaacaaatacaacatagttgttgctggtgggcagaagcacttagctggaaagatattcagaattggacacatgggaatctgtggagagaaagaagttttagcaacacttgcttgtgtagaattggctttaaaagagcttggatttgaagttaaagagagtggagtagaggtagcaaaagaagttctattgaaagaatag

SEQ ID NO: 68637 - protein, 385 aa, Methanococcus jannaschii
MKIDAVKKLLMIPGPTMVPPEVLNAMALPVIGHRTKDYSNLLEDTIEKLKKVFITENDTFLITGSGTAAMDMAISNIIKRGDKVLNIVTGNFGERFANIVKAYKGEAIRLDVEWGDMAEPEAVKEILDKYDDIKAVTVVHNETSTGARNPIKEIGEVVKDYDALYIVDTVSSLGGDYVNVDKFHIDICVTGSQKCLAAPPGLAAITVSEKAWEVIKKNDDKVGFYLDLLAYKKYYEEKKQTPYTPSVNLTYALNVALDLVLEEGIENRVKRHERLAKATRAGLEAMGIELFAKERARSVTVTSAKYPEGIEDSKFRGILSNKYNIVVAGGQKHLAGKIFRIGHMGICGEKEVLATLACVELALKELGFEVKESGVEVAKEVLLKE

SEQ ID NO: 68638 - DNA, 1206 bp, Brassica napus
  CDS (1)..(1206)
atggactatatgaatggaccagggagacaccatcttttcgtaccaggaccagtgaacataccggaacaggtgatccgggcgatgaacagaaacaacgaggattaccgttcaccagccatccccgcgcttacaaaaacgttgctggaggacgtgaagaagatattcaagacaacatctgggacaccgtttatgtttccgactactggtactggtgcttgggagagtgccttgaccaacacgctatctcctggagataggatcgtctcgtttctgatagggcaatttagcttgctgtggattgaccagcagaagaggctaaatttcaacgttgatgtggtggagagtgattggggacaaggtgctaatctccaagtcttggcctcaaagctctcacaggaccaaaatcattccatcaaagccatttgcattgtccacaacgagaccgcgactggagtcactaatgacatctctgctgtccgaaccctcctcgatcactacaagcacccggctttgctgcttgtggacggtgtgtcgtccatatgtgcgcttgatttccgaatggatgagtggggagtggatgtggccttgaccggatctcagaaggctttatctcttccaacaggacttggtattgtgtgcgccagtccaaaagctttggaagctaccaaaacctcaaaatccctcaaagtcttctttgattggaatgactacctcaagttttacaagctcggtacatattggccatacacaccttccattcaactcctttacggtcttagagctgctcttgatcttatctttgaagaaggacttgataatgtcattgcccgtcatgcccgtttgggaaaggccacaaggctcgcggtggaagcgtgggggctgaaaaactgtacacagaaggaggagtggataagtaacacagtgacagcggtcatggtgccgccaaatatagacagtactgagattgtgaaaagggcgtggaagaggtacaaccttagtcttggtcttggtctcaacaaagtggctggcaaggttttcagaattgggcaccttggacatcttaatgagttgcaacttcttgggtgtttggctggagtggagatgatactcaaggatgttggctacccagttgtattgggaagtggagttgccgctgcttctacttatcttcagcaccagatccctctcattccttcccggatctaa

SEQ ID NO: 68639 - protein, 401 aa, Brassica napus
MDYMNGPGRHHLFVPGPVNIPEQVIRAMNRNNEDYRSPAIPALTKTLLEDVKKIFKTTSGTPFMFPTTGTGAWESALTNTLSPGDRIVSFLIGQFSLLWIDQQKRLNFNVDVVESDWGQGANLQVLASKLSQDQNHSIKAICIVHNETATGVTNDISAVRTLLDHYKHPALLLVDGVSSICALDFRMDEWGVDVALTGSQKALSLPTGLGIVCASPKALEATKTSKSLKVFFDWNDYLKFYKLGTYWPYTPSIQLLYGLRAALDLIFEEGLDNVIARHARLGKATRLAVEAWGLKNCTQKEEWISNTVTAVMVPPNIDSTEIVKRAWKRYNLSLGLGLNKVAGKVFRIGHLGHLNELQLLGCLAGVEMILKDVGYPVVLGSGVAAASTYLQHQIPLIPSRI

SEQ ID NO: 68640 - DNA, 1206 bp, Brassica napus
  CDS (1)..(1206)
atggactatatgaatggaccagggagacaccatctgttcgtaccaggaccagtgaacataccggaacaggtaatccgggcgatgaacagaaacaacgaggattaccgctcaccagcaatccccgcacttacaaaaacactgttggaggacgtgaagaagatattcaagacaacatctgggacaccgtttatgtttccgactactggtactggtgcttgggagagtgccttgaccaacacgctatctcccggagataggatcgtctcgtttctgatagggcaattcagcttgctgtggattgaccagcagaagaggctaaattttaacgttgatgtggtggagagtgactggggacaaggtgcaaatctccaagtcttggcctcaaagctctcacaggaccaaaatcattccatcaaagccatttgcattgtccacaacgagaccgcgactggagtcactaatgacatctctgctgtccgaaccctcctcgatcactacaagcacccggctttgctgcttgtggacggtgtgtcgtccatatgtgcgcttgatttccgaatggatgagtggggagtggatgtggccttgaccggatctcacaaagctttatctcttccaacaggacttggtattgtgtgcgccagtccaaaagctttggaagctaccaaaacctcaaaatccctcaaagtcttctttgattggaatgactacctcaagttttacaagctcggtacatattggccatacacaccttccattcaactcctttacggtcttagagctgctcttgatcttatctttgaagaaggacttgagaatgtcatcgcccgtcatgcccgtttgggaaaggccacacggctcgcggtggaagcgtgggggctgaaaaactgtacacagaaggaggagtggataagtaacacagtgacagcggtcatggtgccgccaaatatagacagtactgagattgtgaaaagggcgtggaagaggtacaaccttagtcttggtcttggtctcaacaaagtggctggcaaggttttcagaattgggcatcttggacatctcaatgagttgcaacttcttgggtgtttggctggagtggagatgatactcaaggatgttggctacccagttgtattgggaagtggagttgcagctgcttctacttatctccagcaccagatccctctcattccttcccggatctaa

SEQ ID NO: 68641 - protein, 401 aa, Brassica napus
MDYMNGPGRHHLFVPGPVNIPEQVIRAMNRNNEDYRSPAIPALTKTLLEDVKKIFKTTSGTPFMFPTTGTGAWESALTNTLSPGDRIVSFLIGQFSLLWIDQQKRLNFNVDVVESDWGQGANLQVLASKLSQDQNHSIKAICIVHNETATGVTNDISAVRTLLDHYKHPALLLVDGVSSICALDFRMDEWGVDVALTGSHKALSLPTGLGIVCASPKALEATKTSKSLKVFFDWNDYLKFYKLGTYWPYTPSIQLLYGLRAALDLIFEEGLENVIARHARLGKATRLAVEAWGLKNCTQKEEWISNTVTAVMVPPNIDSTEIVKRAWKRYNLSLGLGLNKVAGKVFRIGHLGHLNELQLLGCLAGVEMILKDVGYPVVLGSGVAAASTYLQHQIPLIPSRI

SEQ ID NO: 68642 - DNA, 1206 bp, Brassica napus
  CDS (1)..(1206)
atggattatatgaatggaccagggagacaccatctgtttgtaccaggaccagtgaacataccggaacaggtagtccgggcgatgaaccgaaacaacgaggattaccgctcaccagcaatcccggcacttacgaaaacattgttggaggacgtgaagaagatattcaagacaacatctgggacaccatttatgtttcccacgaccgggactggtgcttgggagagtgccttgactaatacgctatctcctggagacaggatcgtctcgtttctgatcggacaatttagcctgctttggattgaccagcagaagaggctaaatttcaatgtcgatgtggttgagagtgaatggggacagggtgctaatctccaagtcctggcctcaaagctctcacaagaccaaaatcataccatcaaagccatatgcattgtccacaatgaaaccgccactggagtcaccaatgacatctctgctgtccgaaccatcctcgatcattacaagcacccggctttgcttcttgtggacggtgtctcgtccatatgtgcgctcgatttccgaatggatgaatggggagtggacgtggccttgactggctcgcaaaaagccttatctctgccaacaggccttgggattgtgtgcgccagtccaaaagccttggaagcaaccaaaacttcaaaatctctcaaagtcttctttgattggaatgactatctcaagttttacaagctcggaacatattggccatacacaccttccattcaactcctatacggtcttagagctgcccttgatcttatctttgaggaaggacttgataatgtcattgcccgtcacgctcgtttgggaaaggccaccaggctggcggtggaagcgtggggcctgaaaaactgtacacagaaggaggagtggataagtaacacagtgacagcagtcgttgtgccaccgaatatagacagtacggagattgtgaaaagggcgtggaagaggtacaacctaagtcttggtcttggtctcaacaaagtggcgggaaaggttttcagaattgggcaccttggaaaccttaatgagttgcaacttcttgggtgtttggctggagtggagatgatactgaaggatgttgggtacccgatagtattgggaagtggagttgcagctgcttctacttatcttcagcaccacatccctctcattccttctaggatctaa

SEQ ID NO: 68643 - protein, 401 aa, Brassica napus
MDYMNGPGRHHLFVPGPVNIPEQVVRAMNRNNEDYRSPAIPALTKTLLEDVKKIFKTTSGTPFMFPTTGTGAWESALTNTLSPGDRIVSFLIGQFSLLWIDQQKRLNFNVDVVESEWGQGANLQVLASKLSQDQNHTIKAICIVHNETATGVTNDISAVRTILDHYKHPALLLVDGVSSICALDFRMDEWGVDVALTGSQKALSLPTGLGIVCASPKALEATKTSKSLKVFFDWNDYLKFYKLGTYWPYTPSIQLLYGLRAALDLIFEEGLDNVIARHARLGKATRLAVEAWGLKNCTQKEEWISNTVTAVVVPPNIDSTEIVKRAWKRYNLSLGLGLNKVAGKVFRIGHLGNLNELQLLGCLAGVEMILKDVGYPIVLGSGVAAASTYLQHHIPLIPSRI

SEQ ID NO: 68644 - DNA, 1206 bp, Glycine max
  CDS (1)..(1206)
atggattatttcaatgcaccaggaagaaaccatctctttgttccagggccggttaacattccggaccagatcatccgggccatgaacagaaacaatgaggactaccgttctccagcaattccagctatgacaaaaactttgcttgaggatgtcaagaagattttcaagaccactactggaaccccatttctcatccctacaactggtactggtgcttgggagagtgctctcacaaacacactgtctcctggggatcgaattgtatcgttcctgattggccaattcagcttgctttggattgatcagcagcaacgcctgaagttcaatgttgatgttgttgagagtgaatggggccatggtgctaagcttgatgttctggaatcaaagattgcttcagatacttcacacactataaaggcaatttgcattgttcacaatgagactgcaactggggtcaccaatgacttggccaaagtgagacaaattcttgattcctaccagcatccagccctccttattgttgatggagtgtcttccatttgtgctcttgatttccgcatggatgaatggggagttgatgtggcaataactggctcccagaaggccctttcccttcccactgggataggtattgtggttgcaggccctaaagctattgaggcctcaaaacatgctaaatcacttagagttttctttgactggaaagactacctcaaattctaccagctaggaacctattggccatacactccttccatacatttgctgtatggtctgagagctgctcttgatctgatttttgaggaaggactcgaaaatgtgatcgcaaggcacagtcgtttaggcaaagcaaccagacttgctgtagaggcatggggtttgaagaattgcacccaaaaggaagagtggtacagtgacactgtgactgctgttcttgttcctgcttacattgatagtactgaaatagttaggagggcatggaagagatacaatttgagcttaggtcttggactgaacaaagttgctgggaaggttttcagaattggacatcttggccacttgaatgagttgcaactgttgggatgtctagctggtgtagagatgatactcaaagatgtgggttatcctgtaaagcttggaagtggagttgctgctgccagtgcatacttacagaacactattcctatgatcccttccaggatttga

SEQ ID NO: 68645 - protein, 401 aa, Glycine max
MDYFNAPGRNHLFVPGPVNIPDQIIRAMNRNNEDYRSPAIPAMTKTLLEDVKKIFKTTTGTPFLIPTTGTGAWESALTNTLSPGDRIVSFLIGQFSLLWIDQQQRLKFNVDVVESEWGHGAKLDVLESKIASDTSHTIKAICIVHNETATGVTNDLAKVRQILDSYQHPALLIVDGVSSICALDFRMDEWGVDVAITGSQKALSLPTGIGIVVAGPKAIEASKHAKSLRVFFDWKDYLKFYQLGTYWPYTPSIHLLYGLRAALDLIFEEGLENVIARHSRLGKATRLAVEAWGLKNCTQKEEWYSDTVTAVLVPAYIDSTEIVRRAWKRYNLSLGLGLNKVAGKVFRIGHLGHLNELQLLGCLAGVEMILKDVGYPVKLGSGVAAASAYLQNTIPMIPSRI

SEQ ID NO: 68646 - DNA, 1206 bp, Triticum aestivum
  CDS (1)..(1206)
atggactacatgaatgggccaggccggaaccacctgttcgtccctgggccggtgaacatcccggaccaggtgatccgcgccatgagccggcagaacgaggactaccgctcgccggcgatccctgccctcaccaagaccctcctggaggacgtgaagaagatcttcaagaccaccaccggcacccccttcctcttccccaccaccggcaccggcgcctgggagagcgcgctcaccaacacgctctccccgggggaccggatcgtgtccttctcgctggggcagttcagcctgctgtggatcgaccagcagcagcgcctcgggttcagcgtggacgtggtggagtccgactggggctacggcgccgacctcggcgtcctcgagtccaagctccgcactgactcgcagcacaccatcaaggccatctgcatcgtccacaacgagaccgccaccggcgtcaccaacgacctccacgccgtccgcaagctcctcgatgcgtaccggcacccggcgctgctgctggtggacggggtgtcgtccatctgcgcgctggacttccgcatggacgagtggggcgtggacgtggcgctgacggggtcgcagaaggcgctgtcgctgccgacggggctgggcatcgtgtgcgccagccccaaggcgctggaggcggccaagacggccaagtcggtgcgcgtcttcttcgactggaaggactacctcaagttctacaagatgggcacctactggccctacacgccctccatccagctcctctacggcctccgcgccggcctcgacctcctcttcgaggagggcctcgacaacgtcatcaagaggcacacacgcctcggcaccgcaacaaggctggcggtggcggcgtgggggctcaagaactgcaccgcgaaggaggagaacttcagcgacacggtcaccgccgtcgtcgtgccgccgtacatcgacagctccgagatcgtcaagcacgcgtggaagcggtacaacctcagcctcgggctcgggctgaacaaggtcgccggcaaggtcttcaggattggacacctgggccacctcaacgagctgcaacttctgggttgcctcagcggggtggagatggtgctcaaggacatcgggtacccggtgaagctcggcagcggcgtggcggccgccgcggcgtacctctcgaattccacgcccctcatcccctccaggatctga

SEQ ID NO: 68647 - protein, 401 aa, Triticum aestivum
MDYMNGPGRNHLFVPGPVNIPDQVIRAMSRQNEDYRSPAIPALTKTLLEDVKKIFKTTTGTPFLFPTTGTGAWESALTNTLSPGDRIVSFSLGQFSLLWIDQQQRLGFSVDVVESDWGYGADLGVLESKLRTDSQHTIKAICIVHNETATGVTNDLHAVRKLLDAYRHPALLLVDGVSSICALDFRMDEWGVDVALTGSQKALSLPTGLGIVCASPKALEAAKTAKSVRVFFDWKDYLKFYKMGTYWPYTPSIQLLYGLRAGLDLLFEEGLDNVIKRHTRLGTATRLAVAAWGLKNCTAKEENFSDTVTAVVVPPYIDSSEIVKHAWKRYNLSLGLGLNKVAGKVFRIGHLGHLNELQLLGCLSGVEMVLKDIGYPVKLGSGVAAAAAYLSNSTPLIPSRI

SEQ ID NO: 68648 - DNA, 1212 bp, Zea mays
  CDS (1)..(1212)
atggcggactacgtgtatggccccgggcggacccacctgttcgtgccgggccccgtgaacatcccggaccccgtgatccgcgccatgaaccggcagaacgaggactaccgctcgccggcggtgccggcgctgaccaaggtcctgctggaggacgtgaagaagatcttcaagaccacgacgggcacgcccttcatgatcccgacgacggggacgggcgcgtgggagagcgcgctgaccaacacgctgtccccgggcgacagggtcgtgtccttcctcatcggacagttcagcctgctgtggatcgaccagcagcggcgcctgggcttcgacgtggacgcggtggagagcgagtggggccagggcgccgacctggccgcgctggagcgcaggctccgcgacgacgcgccgcggcacgccatcaaggccgtggccatcgtgcacaacgagacggccacgggcgtcaccaacgacctggccgcagtgcgcgcgctgctggacaagcacgcgcacccggcgctgctgctggtggacggcgtgtcgtccatctgcgcgctggacttccgcatggacgagtggggcgtggacgtggcgctcacgggctcgcagaaggcgctgtcgatgccgacggggatgggcatcgtgtgcgccagccccagggcgctggaggccagcaagacggccaggtccgtgcgcgtcttcttcgactggaaggactacctcaggttctacgacatgggcacgtactggccctacacgccctccatccagctcctctacggcctccgcaccgcgctcgacctcatcttcgaggaagggctggacaacgtcgtgaggaggcacaaccgccttgggacagccaccaggctcgccgtcgaggcgtgggggctcagcaactgctgccagaaggaggagtggttcagcgacaccgtcaccgccgtcgtcgtgccgcccaacatcgacagcgccgaggtcgtcaggcacgcgtggaagcggtacaacctcagcctcggcctcggcctcaacaaggtcgccgggaaggtcttcaggatcggccatctcggcaacctcaacgagctgcaacttctgggatgtctgagcggtgtggagatggtgctcaaggatgtggggtacccagtgaaactaggtagcggcgtggcagccgcggcggcgtacctgtcaaactccacgccgctcatcccatctaggatctga

SEQ ID NO: 68649 - protein, 403 aa, Zea mays
MADYVYGPGRTHLFVPGPVNIPDPVIRAMNRQNEDYRSPAVPALTKVLLEDVKKIFKTTTGTPFMIPTTGTGAWESALTNTLSPGDRVVSFLIGQFSLLWIDQQRRLGFDVDAVESEWGQGADLAALERRLRDDAPRHAIKAVAIVHNETATGVTNDLAAVRALLDKHAHPALLLVDGVSSICALDFRMDEWGVDVALTGSQKALSMPTGMGIVCASPRALEASKTARSVRVFFDWKDYLRFYDMGTYWPYTPSIQLLYGLRTALDLIFEEGLDNVVRRHNRLGTATRLAVEAWGLSNCCQKEEWFSDTVTAVVVPPNIDSAEVVRHAWKRYNLSLGLGLNKVAGKVFRIGHLGNLNELQLLGCLSGVEMVLKDVGYPVKLGSGVAAAAAYLSNSTPLIPSRI

SEQ ID NO: 68650 - DNA, 20 bp, Artificial sequence
  primer
atggactatatgtatggacc

SEQ ID NO: 68651 - DNA, 21 bp, Artificial sequence
  primer
ttagattctagagggaatgag

SEQ ID NO: 68652 - protein, 400 aa, Artificial sequence
  consensus sequence
  Variant (4)..(6): Xaa in position 4 to 6 is any amino acid
  Variant (8)..(9): Xaa in position 8 to 9 is any amino acid
  Variant (11)..(12): Xaa in position 11 to 12 is any amino acid
  Variant (14)..(40): Xaa in position 14 to 40 is any amino acid
  Variant (42)..(42): Xaa in position 42 is any amino acid
  Variant (44)..(53): Xaa in position 44 to 53 is any amino acid
  Variant (54)..(57): Xaa in position 54 to 57 is any or no amino acid
  Variant (59)..(59): Xaa in position 59 is any amino acid
  Variant (61)..(62): Xaa in position 61 to 62 is any amino acid
  Variant (64)..(67): Xaa in position 64 to 67 is any amino acid
  Variant (69)..(72): Xaa in position 69 to 72 is any amino acid
  Variant (73)..(75): Xaa in position 73 to 75 is any or no amino acid
  Variant (78)..(84): Xaa in position 78 to 84 is any amino acid
  Variant (86)..(101): Xaa in position 86 to 101 is any amino acid
  Variant (103)..(109): Xaa in position 103 to 109 is any amino acid
  Variant (110)..(113): Xaa in position 110 to 113 is any or no amino acid
  Variant (115)..(131): Xaa in position 115 to 131 is any amino acid
  Variant (132)..(135): Xaa in position 132 to 135 is any or no amino acid
  Variant (138)..(141): Xaa in position 138 to 141 is any amino acid
  Variant (143)..(143): Xaa in position 143 is any amino acid
  Variant (145)..(146): Xaa in position 145 to 146 is any amino acid
  Variant (150)..(165): Xaa in position 150 to 165 is any amino acid
  Variant (166)..(167): Xaa in position 166 to 167 is any or no amino acid
  Variant (169)..(170): Xaa in position 169 to 170 is any amino acid
  Variant (173)..(175): Xaa in position 173 to 175 is any amino acid
  Variant (177)..(184): Xaa in position 177 to 184 is any amino acid
  Variant (186)..(186): Xaa in position 186 is any amino acid
  Variant (188)..(189): Xaa in position 188 to 189 is any amino acid
  Variant (191)..(194): Xaa in position 191 to 194 is any amino acid
  Variant (199)..(202): Xaa in position 199 to 202 is any amino acid
  Variant (204)..(204): Xaa in position 204 is any amino acid
  Variant (206)..(211): Xaa in position 206 to 211 is any amino acid
  Variant (213)..(214): Xaa in position 213 to 214 is any amino acid
  Variant (216)..(229): Xaa in position 216 to 229 is any amino acid
  Variant (230)..(249): Xaa in position 230 to 249 is any or no amino acid
  Variant (251)..(265): Xaa in position 251 to 265 is any amino acid
  Variant (266)..(274): Xaa in position 266 to 274 is any or no amino acid
  Variant (276)..(279): Xaa in position 276 to 279 is any amino acid
  Variant (281)..(283): Xaa in position 281 to 283 is any amino acid
  Variant (285)..(287): Xaa in position 285 to 287 is any amino acid
  Variant (289)..(293): Xaa in position 289 to 293 is any amino acid
  Variant (297)..(301): Xaa in position 297 to 301 is any amino acid
  Variant (304)..(316): Xaa in position 304 to 316 is any amino acid
  Variant (317)..(317): Xaa in position 317 is any or no amino acid
  Variant (320)..(332): Xaa in position 320 to 332 is any amino acid
  Variant (333)..(338): Xaa in position 333 to 338 is any or no amino acid
  Variant (340)..(342): Xaa in position 340 to 342 is any amino acid
  Variant (343)..(343): Xaa in position 343 is any or no amino acid
  Variant (345)..(362): Xaa in position 345 to 362 is any amino acid
  Variant (363)..(366): Xaa in position 363 to 366 is any or no amino acid
  Variant (368)..(372): Xaa in position 368 to 372 is any amino acid
  Variant (374)..(375): Xaa in position 374 to 375 is any amino acid
  Variant (376)..(381): Xaa in position 376 to 381 is any or no amino acid
  Variant (386)..(387): Xaa in position 386 to 387 is any amino acid
  Variant (389)..(398): Xaa in position 389 to 398 is any amino acid
  Variant (399)..(399): Xaa in position 399 is any or no amino acid
PGPXXXPXXVXXAXXXXXXXXXXXXXXXXXXXXXXXXXXXFXTXXXXXXXXXXXXXXGXGXXEXXXXNXXXXXXXGDXXXXXXXGXXXXXXXXXXXXXXXXVXXXXXXXXXXXGXXXXXXXXXXXXXXXXXXXXXKAXXXXHXEXXTGVXXXXXXXXXXXXXXXXXXLXXVDXXXSXXXXXXXXDXWXXDXXXXGSQKXXXXPXGXXXXXXSXXAXXXXXXXXXXXXXXXXXXXXXXXXXXXXXXXXXXDXXXXXXXXXXXXXXXXXXXXXXXXTXXXXLXXXLXXXLXXXXXEGLXXXXXRHXXXXXXXXXXXXXXGLXXXXXXXXXXXXXXXXXXXTXXXXPXXXXXXXXXXXXXXXXXXXXXXGXXXXXGXXXXXXXXFRIGXXGXXXXXXXXXXXL

SEQ ID NO: 68653 - protein, 49 aa, Artificial sequence
  protein pattern
  Variant (2)..(3): Xaa in position 2 to 3 is any amino acid
  Variant (6)..(7): Xaa in position 6 to 7 is any amino acid
  Variant (8)..(8): Xaa in position 8 is any or no amino acid
  Variant (10)..(17): Xaa in position 10 to 17 is any amino acid
  Variant (18)..(18): Xaa in position 18 is any or no amino acid
  Variant (20)..(20): Xaa in position 20 is any amino acid
  Variant (22)..(22): Xaa in position 22 is any amino acid
  Variant (23)..(23): Xaa in position 23 is Ala, Ile, Leu or Val
  Variant (25)..(27): Xaa in position 25 to 27 is any amino acid
  Variant (28)..(28): Xaa in position 28 is Ala, Gly, Ser or Thr
  Variant (29)..(29): Xaa in position 29 is Ala, Cys or Gly
  Variant (30)..(30): Xaa in position 30 is Ala, Cys, Ser or Thr
  Variant (33)..(33): Xaa in position 33 is Ala, Gly, Thr or Val
  Variant (34)..(36): Xaa in position 34 to 36 is any amino acid
  Variant (37)..(37): Xaa in position 37 is Ala or Pro
  Variant (38)..(38): Xaa in position 38 is Ala, Pro or Thr
  Variant (40)..(40): Xaa in position 40 is any amino acid
  Variant (41)..(41): Xaa in position 41 is Ala, Cys, Gly, Ser or Thr
  Variant (42)..(45): Xaa in position 42 to 45 is any amino acid
  Variant (46)..(46): Xaa in position 46 is Gly, Asn or Ser
  Variant (47)..(48): Xaa in position 47 to 48 is any amino acid
LXXVDXXXSXXXXXXXXXDXWXXDXXXXXXQKXXXXXXGXXXXXXXXXA

SEQ ID NO: 68654 - protein, 22 aa, Artificial sequence
  protein pattern
  Variant (2)..(2): Xaa in position 2 is any amino acid
  Variant (3)..(3): Xaa in position 3 is Ala, Pro or Ser
  Variant (4)..(8): Xaa in position 4 to 8 is any amino acid
  Variant (9)..(9): Xaa in position 9 is Ala, Gly or Ser
  Variant (10)..(10): Xaa in position 10 is Leu or Val
  Variant (11)..(12): Xaa in position 11 to 12 is any amino acid
  Variant (13)..(13): Xaa in position 13 is Ala, Gly, Ser or Thr
  Variant (14)..(19): Xaa in position 14 to 19 is any amino acid
TXXXXXXXXXXXXXXXXXXEGL

SEQ ID NO: 68655 - protein, 29 aa, Artificial sequence
  protein pattern
  Variant (2)..(5): Xaa in position 2 to 5 is any amino acid
  Variant (7)..(7): Xaa in position 7 is any or no amino acid
  Variant (9)..(10): Xaa in position 9 to 10 is any amino acid
  Variant (11)..(11): Xaa in position 11 is any or no amino acid
  Variant (13)..(13): Xaa in position 13 is any amino acid
  Variant (14)..(14): Xaa in position 14 is Ile, Leu or Val
  Variant (15)..(15): Xaa in position 15 is Ala, Asp, Glu, Asn or Ser
  Variant (16)..(16): Xaa in position 16 is any amino acid
  Variant (19)..(19): Xaa in position 19 is any amino acid
  Variant (20)..(20): Xaa in position 20 is Ala, Ile or Val
  Variant (21)..(21): Xaa in position 21 is Leu or Val
  Variant (22)..(25): Xaa in position 22 to 25 is any amino acid
  Variant (27)..(27): Xaa in position 27 is any amino acid
  Variant (28)..(28): Xaa in position 28 is Phe or Trp
  Variant (29)..(29): Xaa in position 29 is Ala, Gly or Ser
GXXXXEXAXXXNXXXXGDXXXXXXXGXXX

SEQ ID NO: 68656 - protein, 18 aa, Artificial sequence
  protein pattern
  Variant (2)..(5): Xaa in position 2 to 5 is any amino acid
  Variant (6)..(6): Xaa in position 6 is any or no amino acid
  Variant (8)..(8): Xaa in position 8 is Gly, Asn, Ser or Val
  Variant (9)..(9): Xaa in position 9 is Asp or Glu
  Variant (10)..(10): Xaa in position 10 is Ser or Thr
  Variant (11)..(11): Xaa in position 11 is Ala or Ser
  Variant (12)..(12): Xaa in position 12 is Ala, Ser or Thr
  Variant (13)..(13): Xaa in position 13 is Ala, Gly or Ser
  Variant (14)..(15): Xaa in position 14 to 15 is any amino acid
  Variant (16)..(16): Xaa in position 16 is Asn, Gln or Ser
  Variant (17)..(17): Xaa in position 17 is any amino acid
  Variant (18)..(18): Xaa in position 18 is Ile, Leu or Val
AXXXXXHXXXXXXXXXXX

SEQ ID NO: 68657 - DNA, 1407 bp, Arabidopsis thaliana; identical to SEQ ID NO: 24276
  CDS (1)..(1407)

SEQ ID NO: 68658 - protein, 468 aa, Arabidopsis thaliana; identical to SEQ ID NO: 24277

SEQ ID NO: 68659 - DNA, 2251 bp, Glycine max
  CDS (528)..(1922)
agtgactgattttgcaacccaatatcaaggcattactcccagcccacggtattgcccttcaaaacctacagcaccattaagcactactacaagtatacatgctgaggacaattggagtgtttcaaacttcaagtcaccaaagtcgaggtcttcaacactgaggatgaagctagctgaagatgatgacttcaatcaaaatggtttgacccatgatggaattggaaggaattctagatttaaggctatttgcgctattccaacccaacccaaaaaaatgcttagtaagttctggtctactaccaatagaactgctgctgccacttaaaagaattgagtgaaatatgtttggaacataagttgaaacaagttccatagagcttcatattctctggagggaagtggaagctagtagtccgtttcagcgtgtgtgatactttcctttcatcttcttcttctctctgcgataaaagcaaaacctaaaatttggtttaggcataggaatctgttgtagagttgatctacctggaatggagggagcatcgtggaatagtagtgtttgtgtggcaccgtttctgagcaagacctacgacatggttgatgatccttccaccgacttagtggtgtcgtggggcgaaaacaacaactcctttgttgtttggaacgttccccaattcgccacagacatcttgcccaatcattttaagcacaacaacttctccagcttcgtcagacagttgaatacttatggttttagaaaggttgacccagatcgatgggaatttgcaaatgaaggatttttaagaggtgaaaaacaacttttaaaaagtatcagtaggcggaaatctgctcatgtaaatggtagtcaacaagcatctcaagtgcataaatcagctgctggagcatgtgttgaagtggggaaatttgggcttgaggaagaggtggaaagactgaaaagggataagaatgttcttatgcaggaacttgttaggttgagacagaaacagcaagggactgataaccaattgcaaaatgttgggcaacgtgtgcagtcaatggagcagcgtcagcagcaaatgatgtcattcctggctaaggccatgcagagcccaggcttcttagctcaatttgttcagcagcagaatgaaagtagtaaacatatccctgggagcaataaaaagaggaggctccagcgacaagaagaagatagtttagccaccaaggatctccatagttctcttgatggacacattgtcaagtaccagagttccataaatgaggctgcaaaagcattatttcgccagatattgcaaataaacaattctacaacacaatcatcaattaagaaccctgatgttttccttattgatgatattccttctgccattgcatcagatagcagtagttcatccactcaggtttctaatgtgatggttccacctatatctgagctgacgtctatggaagtaggatcacagtttcctctcagttgtatgcccagtaacatatctgaggtgcagtcttcacctgctgttttgggtttctgtagaagtcaggggatggagacagaaagcagtttattgaatcatgagctgaatgttatgggggctgatactaggaacatgggggagatagatatgatgtcaactgttttagatgaggcagacgaagctgatcatttttcacctgacacagatggaatttctaaactcccagaaatcagtgatgaattctgggaactgtttttaaggccaagcccacttacagaagacacagaggaaactaaatgtagctctctaggatgtggtttgactgaagatcagggtttgccttcagaaatgggaaataagcaggaaaattttgatacaatacaacatgttgactgtcttactcaacagatgggacttcatgcattggagtactgattgtgtgtatatatgttactcacaactgaaggttgaggtcccctttgctactgagcagacaaagccatcttacttatacaacaaagaaacctgacagatccaacaacttgatcggtgcttttatccgcttgtaatgtcgtcgtgtgttctgtttgtcattgggggcttaaaaacatacaagttcacgaaacttcatatatctccatgtattttgaattttaataactatgcccccgtttccaatgcgatgatatttttgtggggatgttccgtataattggatcataactcttgaattgctgttgaataactactgtttactgaaaaaa

SEQ ID NO: 68660 - protein, 464 aa, Glycine max
MEGASWNSSVCVAPFLSKTYDMVDDPSTDLVVSWGENNNSFVVWNVPQFATDILPNHFKHNNFSSFVRQLNTYGFRKVDPDRWEFANEGFLRGEKQLLKSISRRKSAHVNGSQQASQVHKSAAGACVEVGKFGLEEEVERLKRDKNVLMQELVRLRQKQQGTDNQLQNVGQRVQSMEQRQQQMMSFLAKAMQSPGFLAQFVQQQNESSKHIPGSNKKRRLQRQEEDSLATKDLHSSLDGHIVKYQSSINEAAKALFRQILQINNSTTQSSIKNPDVFLIDDIPSAIASDSSSSSTQVSNVMVPPISELTSMEVGSQFPLSCMPSNISEVQSSPAVLGFCRSQGMETESSLLNHELNVMGADTRNMGEIDMMSTVLDEADEADHFSPDTDGISKLPEISDEFWELFLRPSPLTEDTEETKCSSLGCGLTEDQGLPSEMGNKQENFDTIQHVDCLTQQMGLHALEY

SEQ ID NO: 68661 - DNA, 1600 bp, Arabidopsis thaliana
  CDS (46)..(1458)
atggatgtgagcaaagtaaccacaagcgacggcggaggagattcaatggagactaagccatctcctcaacctcagcctgcggcgattctaagttcaaacgcgcctcctccgtttctgagcaagacctatgatatggttgatgatcacaatacagattcgattgtctcttggagtgctaataacaacagttttatcgtttggaaaccaccggagttcgctcgcgatcttcttcctaagaactttaagcataataatttctccagcttcgttagacagcttaatacctatggtttcaggaaggttgacccagatagatgggaatttgcgaatgaaggttttttaagaggtcagaagcacttgctacaatcaataactaggcgaaaacctgcccatggacagggacagggacatcagcgatctcagcactcgaatggacagaactcatctgttagcgcatgtgttgaagttggcaaatttggtctcgaagaagaagttgaaaggcttaaaagagataagaacgtccttatgcaagaactcgtcagattaagacagcagcaacagtccactgataaccaacttcaaacgatggttcagcgtctccagggcatggagaatcggcaacaacaattaatgtcattccttgcaaaggcagtacaaagccctcattttctatctcaattcttacagcagcagaatcagcaaaacgagagtaataggcgcatcagtgataccagtaagaagcggagattcaagcgagacggcattgtccgtaataatgattctgctactcctgatggacagatagtgaagtatcaacctccaatgcacgagcaagccaaagcaatgtttaaacagcttatgaagatggaaccttacaaaaccggcgatgatggtttccttctaggtaatggtacgtctactaccgagggaacagagatggagacttcatcaaaccaagtatcgggtataactcttaaggaaatgcctacagcttctgagatacagtcatcatcaccaattgaaacaactcctgaaaatgtttcggcagcatcagaagcaaccgagaactgtattccttcacctgatgatctaactcttcccgacttcactcatatgctaccggaaaataattcagagaagcctccagagagtttcatggaaccaaacctgggaggttctagtccattactagatccagatctgttgatcgatgattctttgtccttcgacattgacgactttccaatggattctgatatagaccctgttgattacggtttactcgaacgcttactcatgtcaagcccggttccagataatatggattcaacaccagtggacaatgaaacagagcaggaacaaaatggatgggacaaaactaagcatatggataatctgactcaacagatgggtctcctctctcctgaaaccttagatctctcaaggcaaaatccttgattttgggagtttttaaagtcttttgaggtaacacagtccctgagagcagcatattcatttttcatacgctgatcttttatttcttctttcttgtatcaaagtggtttaacattactgcttcatacaactctcaattttacac

SEQ ID NO: 68662 - protein, 470 aa, Arabidopsis thaliana
METKPSPQPQPAAILSSNAPPPFLSKTYDMVDDHNTDSIVSWSANNNSFIVWKPPEFARDLLPKNFKHNNFSSFVRQLNTYGFRKVDPDRWEFANEGFLRGQKHLLQSITRRKPAHGQGQGHQRSQHSNGQNSSVSACVEVGKFGLEEEVERLKRDKNVLMQELVRLRQQQQSTDNQLQTMVQRLQGMENRQQQLMSFLAKAVQSPHFLSQFLQQQNQQNESNRRISDTSKKRRFKRDGIVRNNDSATPDGQIVKYQPPMHEQAKAMFKQLMKMEPYKTGDDGFLLGNGTSTTEGTEMETSSNQVSGITLKEMPTASEIQSSSPIETTPENVSAASEATENCIPSPDDLTLPDFTHMLPENNSEKPPESFMEPNLGGSSPLLDPDLLIDDSLSFDIDDFPMDSDIDPVDYGLLERLLMSSPVPDNMDSTPVDNETEQEQNGWDKTKHMDNLTQQMGLLSPETLDLSRQNP

SEQ ID NO: 68663 - DNA, 1819 bp, Glycine max
  CDS (138)..(1532)
ggagggaagtggaagctagtagtccgtttcagcgtgtgtgatactttcctttcatcttcttcttctctctgcgataaaagcaaaacctaaaatttggtttaggcataggaatctgttgtagagttgatctacctggaatggagggagcatcgtggaatagtagtgtttgtgtggcaccgtttctgagcaagacctacgacatggttgatgatccttccaccgacttagtggtgtcgtggggcgaaaacaacaactcctttgttgtttggaacgttccccaattcgccacagacatcttgcccaatcattttaagcacaacaacttctccagcttcgtcagacagttgaatacttatggttttagaaaggttgacccagatcgatgggaatttgcaaatgaaggatttttaagaggtgaaaaacaacttttaaaaagtatcagtaggcggaaatctgctcatgtaaatggtagtcaacaagcatctcaagtgcataaatcagctgctggagcatgtgttgaagtggggaaatttgggcttgaggaagaggtggaaagactgaaaagggataagaatgttcttatgcaggaacttgttaggttgagacagaaacagcaagggactgataaccaattgcaaaatgttgggcaacgtgtgcagtcaatggagcagcgtcagcagcaaatgatgtcattcctggctaaggccatgcagagcccatgcttcttagctcaatttgttcagcagcagaatgaaagtagtaaacatatccctgggagcaataaaaagaggaggctccagcgacaagaagaagatagtttagccaccaaggatctccatagttctcttgatggacacattgtcaagtaccagagttccataaatgaggctgcaaaagcattatttcgccagatattgcaaataaacaattctacaacacaatcatcaattaagaaccctgatgttttccttattgatgatattccttctgccattgcatcagatagcagtagttcatccactcaggtttctaatgtgatggttccacctatatctgagctgacgtctatggaagtaggatcacagtttcctctcagttgtatgcccagtaacatatctgaggtgcagtcttcacctgctgttttgggtttctgtagaagtcaggggatggagacagaaagcagtttattgaatcatgagctgaatgttatgggggctgatactaggaacatgggggagatagatatgatgtcaactgttttagatgaggcagacgaagctgatcatttttcacctgacacagatggaatttctaaactcccagaaatcagtgatgaattctgggaactgtttttaaggccaagcccacttacagaagacacagaggaaactaaatgtagctctctaggatgtggtttgactgaagatcagggtttgccttcagaaatgggaaataagcaggaaaattttgatacaatacaacatgttgactgtcttactcaacagatgggacttcatgcattggagtactgattgtgtgtatatatgttactcacaactgaaggttgaggtcccctttgctactgagcagacaaagccatcttacttatacaacaaagaaacctgacagatccaacaacttgatcggtgcttttatccgcttgtaatgtcgtcgtgtgttctgtttgtcattgggggcttaaaaacatacaagttcacgaaacttcatatatctccatgtattttgaattttaataactatgcccccgtttccaatgcgatgatatttttgtggggatgttccgtatacaaaaaaaaaa

SEQ ID NO: 68664 - protein, 464 aa, Glycine max
MEGASWNSSVCVAPFLSKTYDMVDDPSTDLVVSWGENNNSFVVWNVPQFATDILPNHFKHNNFSSFVRQLNTYGFRKVDPDRWEFANEGFLRGEKQLLKSISRRKSAHVNGSQQASQVHKSAAGACVEVGKFGLEEEVERLKRDKNVLMQELVRLRQKQQGTDNQLQNVGQRVQSMEQRQQQMMSFLAKAMQSPCFLAQFVQQQNESSKHIPGSNKKRRLQRQEEDSLATKDLHSSLDGHIVKYQSSINEAAKALFRQILQINNSTTQSSIKNPDVFLIDDIPSAIASDSSSSSTQVSNVMVPPISELTSMEVGSQFPLSCMPSNISEVQSSPAVLGFCRSQGMETESSLLNHELNVMGADTRNMGEIDMMSTVLDEADEADHFSPDTDGISKLPEISDEFWELFLRPSPLTEDTEETKCSSLGCGLTEDQGLPSEMGNKQENFDTIQHVDCLTQQMGLHALEY

SEQ ID NO: 68665 - DNA, 2122 bp, Eucalyptus grandis
  CDS (151)..(1707)
cgttagcgaaattactcttctctccctctaaccctctctctccctcggcttcacgtccatggcttcccccccgattcccgcagaaccctagaaaatccgccctcctcccctccccaatcccccccttgaacctcatcgcctcagctcccgatggacggtgccggcgacgacggcgcaggcggcgcctccaagcagagcaacgccccggcggcggcccctactcccgcgcccgcgccgatgtcgagcgcgaacgcgccaccgcctttcctgagcaagacgtacgacatggtggacgacccggcgacggactcgatcgtgtcgtggagcgccacgaacaacagcttcgtggtgtggaagccggcggagttcgctagggatttgttgcccaagtatttcaagcacaacaacttctccagcttcgttcgccagctcaacacttacggtttccggaaagttgatccagatcgctgggaatttgcaaatgagggtttcctgaggggtcagaaacaccttttaaaaagtataagtagacgaaaacccgtgcatggacagggcagtcaacagccgcagcaaccacctggacagagttcttcagttggggcatgtgtagaggttggcaagtttgggcttgaggaagaagttgaaaggctcaaaagggacaaaaatgtgctcatgacagagcttgtgaggttgagacagcagcagcaggccactgatggccaactgcaaacgatggtccaacgactccatgggatggaacaacgacagcagcagatgatgtcattcctagcaaaagctgtgcagagcccgggtttctttgctcagtttgtacagcaacaaaatgagagcaacaggcgcatcactgaagtgaataagaaacgcagactaaggcgagatggcttatctgagaatgagcatactgctgcttctgatggacagattgttaagtaccagcctccaataaatgagactgccaaagcattgttcaggcagatgatgaaagtagaagctcctcagcaggagtcttttgacgatagtccagagagttttcttctcggtgatggttcatctctgtccagtggcatggacagtaggacttcgagtcgcatctctggggtgactcttcaggaggtcccgccaacttctagccaggttcctgagattccaccagctttgggggcctcagcaaatgatccctcatctgccgtatctgaactaaaggctccgtcacagggtactgctaaggtcactactaaccagtttccagatatgggtatgctcgcaggagcacaggagtctgaagcagtctccgttaatcaggcagataccgttatgactgggatctctcaaacacaagacatggtgctggaggatattgctaatatatccagagatgactacatgggagcagatctgcataatggtgattacatggatcctgcatcatttatgaacgggtcgatgcctatagagatcgatagcatttcccctgaccccgacattgatgctttgttagagagttccaccttctgggatgatcttcttatgcagaaccttttaccggaggagggtgaatcaacttcagcagaagctcatgctggggctaacgacgcgcagccgatggagaatggatgggacaaagccgagcacatggatcagcttactgaacagatgggcctcctcgcatctgataacaaggggatttgaccttatacaaattttcagtctgttcccaccatagctcaggttgaaagattgatcgttggtgagaggggctcattttggccttccccaagagcatatcgggcatccgagtattcatacatatacaagccttttctggatgtcacgggccccaaactctgcacatcattttgatacttgagctctggtggaagaaggggccataagtcggatagcttagttaaggggtactacagcttcagtttagtcggctcttagatggaaagaatataaaggatggacgtttgccgagctaaagcgttgctgaagaagtattgtataatttgttaatttgttaagctgatgaaaaccccttctctaatcgtatgtctcatttgagatttatgtccattggtttttcacctttttaaaaaaaaaa

SEQ ID NO: 68666 - protein, 518 aa, Eucalyptus grandis
MDGAGDDGAGGASKQSNAPAAAPTPAPAPMSSANAPPPFLSKTYDMVDDPATDSIVSWSATNNSFVVWKPAEFARDLLPKYFKHNNFSSFVRQLNTYGFRKVDPDRWEFANEGFLRGQKHLLKSISRRKPVHGQGSQQPQQPPGQSSSVGACVEVGKFGLEEEVERLKRDKNVLMTELVRLRQQQQATDGQLQTMVQRLHGMEQRQQQMMSFLAKAVQSPGFFAQFVQQQNESNRRITEVNKKRRLRRDGLSENEHTAASDGQIVKYQPPINETAKALFRQMMKVEAPQQESFDDSPESFLLGDGSSLSSGMDSRTSSRISGVTLQEVPPTSSQVPEIPPALGASANDPSSAVSELKAPSQGTAKVTTNQFPDMGMLAGAQESEAVSVNQADTVMTGISQTQDMVLEDIANISRDDYMGADLHNGDYMDPASFMNGSMPIEIDSISPDPDIDALLESSTFWDDLLMQNLLPEEGESTSAEAHAGANDAQPMENGWDKAEHMDQLTEQMGLLASDNKGI

SEQ ID NO: 68667 - DNA, 1323 bp, Oryza sativa (japonica cultivar-group); identical to SEQ ID NO: 24288
  CDS (1)..(1323)

SEQ ID NO: 68668 - protein, 440 aa, Oryza sativa (japonica cultivar-group); identical to SEQ ID NO: 24289

SEQ ID NO: 68669 - DNA, 1428 bp, Oryza sativa (japonica cultivar-group); identical to SEQ ID NO: 24290
  CDS (1)..(1428)

SEQ ID NO: 68670 - protein, 475 aa, Oryza sativa (japonica cultivar-group); identical to SEQ ID NO: 24291

SEQ ID NO: 68671 - DNA, 1521 bp, Oryza sativa (japonica cultivar-group); identical to SEQ ID NO: 24236
  CDS (1)..(1521)

SEQ ID NO: 68672 - protein, 506 aa, Oryza sativa (japonica cultivar-group); identical to SEQ ID NO: 24237

SEQ ID NO: 68673 - DNA, 1380 bp, Oryza sativa (japonica cultivar-group); identical to SEQ ID NO: 24292
  CDS (1)..(1380)

SEQ ID NO: 68674 - protein, 459 aa, Oryza sativa (japonica cultivar-group); identical to SEQ ID NO: 24293

SEQ ID NO: 68675 - DNA, 1428 bp, Oryza sativa subsp; identical to SEQ ID NO: 24238
  CDS (1)..(1428)

SEQ ID NO: 68676 - protein, 475 aa, Oryza sativa subsp; identical to SEQ ID NO: 24239

SEQ ID NO: 68677 - DNA, 1374 bp, Oryza sativa subsp; identical to SEQ ID NO: 24240
  CDS (1)..(1374)

SEQ ID NO: 68678 - protein, 457 aa, Oryza sativa subsp; identical to SEQ ID NO: 24241

SEQ ID NO: 68679 - DNA, 1509 bp, Medicago sativa; identical to SEQ ID NO: 24246
  CDS (1)..(1509)

SEQ ID NO: 68680 - protein, 502 aa, Medicago sativa; identical to SEQ ID NO: 24247

SEQ ID NO: 68681 - DNA, 1509 bp, Medicago sativa; identical to SEQ ID NO: 24248
  CDS (1)..(1509)

SEQ ID NO: 68682 - protein, 502 aa, Medicago sativa; identical to SEQ ID NO: 24249

SEQ ID NO: 68683 - DNA, 1765 bp, Medicago sativa
  CDS (26)..(1711)
cattcaaaaacaagaattctccgaaatggatggagcaagcggcggaagtggcggcggagagggttcaaccacccaaataccggcgccgacaccgatgctaaacgcgaacgcgccgccaccgtttttgagcaaaacttatgacatggtggatgatccttcaacagatgcgatagtttcatggagcgcaaccaacaacagtttcgttgtttgggacccacccgaattcgctagggaccttttgccgaagttcttcaagcataacaatttctcaagctttgtgagacagttgaatacttatggtttcaggaaggttgacccagatcgttgggaatttgcaaatgagggctttttgaggggtcaaaagcaattgcttaagagtattagtcgaagaaaacctgcccatggtcatactcaacaacaggctcagcaaccgcatggacagagttcatcagtaggggcatgtgtagaagtcggcaaatttgggcttgaggaagaggttgagaggcttaaaagagataagaatgttctcatgcaagagcttgtgaggttgagacagcagcaacaaaccactgacggccagctgcaaacaatggttcagcgccttcaaggaatggagcaacgacaacagcaaatgatgtcattccttgccaaagccgtccaaagccctggtttctttgctcagtttgtgcaacaacaaaatgacagcaataggcgcattactgaagtcaacaaaaagcgtcggctcaagcaggatggtattgctgaaacaacagagcaagctacccctcctgatggacaaattgttaaatatcaacctatgatgaatgaaacagcaaaagcaatgctaaggaagatcatgaaatgggatactccgcgtgtagaatctttcaataaaaaccctgataattacttgattggtgatggtacttcaccatccagtgcaatggacagtagtagctctacaagctggaactcgggagtaactcttcaagaggttcctccatcttcagtgcagtctactcaaattccaatcatgaaatgggatactccgcgtgtagaatctttcaataaaaaccctgataattacttgattggtgatggtacttcaccatccagtgcaatggacagtagtagctctacaagctggaactcgggagtaactcttcaagaggttcctccatcttcagtgcagtctactcaaattccaatgtcaacagggactcaaggacacatcccctcagcagaaaaacctgaaattctatctgtacctcaagctgcagcatctgcaaatgttatgaaggatggaacacatgcagcatcgactatcccgacttctcaagcagatgttataatgcctgatataccttcagtaccagagattgtgcctaaaagtattcttgatatacctgaagacaattatatggctcccgagacagatgatggatttatggatccgagttcacttggatcattacccattgatttggattgtctttcacccggtgcagacattgatgatttgttaagcaattctatttgggatgatcttctgcaaactccaattccagaggattttgaggccaacattgacgaaatatccagagggaatgaggtgcagccaacagaaaatggctgggacaataatactcagcccctggatcaactaacagagcagatgggtcttctttcttctgatgccaaaagaatttaatcatctatgaaatttgtattgacctttcatactgtccaaggtaatccctgaccc

SEQ ID NO: 68684 - protein, 561 aa, Medicago sativa; identical to SEQ ID NO: 24251

SEQ ID NO: 68685 - DNA, 1509 bp, Medicago sativa; identical to SEQ ID NO: 24252
  CDS (1)..(1509)

SEQ ID NO: 68686 - protein, 502 aa, Medicago sativa; identical to SEQ ID NO: 24253

SEQ ID NO: 68687 - DNA, 1588 bp, Medicago sativa
  CDS (26)..(1534)
cattcaaaaacaagaattctccgaaatggatggagcaagcggcgcaagtggcggcggagagggttcaaccacccagataccggcgccgacaccgatgcaaaacgcgaacgcgccgccaccgtttttgagcaaaacttatgacatggtggatgatccttcaacggatgcgatagtttcatggagcgcaaccaacaacagtttcgttgtttgggacccacccgaattcgctagggaccttttgccgaagttcttcaagcataacaatttctcaagctttgtgagacagttgaatacttatggtttcaggaaggttgacccagatcgttgggaatttgcaaatgagggctttttgaggggtcaaaagcaattgcttaagagtattagtcgaagaaaacctgcccatggtcatactcaacaacaggctcagcaaccgcatggacagagttcatcagtaggggcatgtgtagaagtcggcaaatttgggcttgaggaagaggttgagaggcttaaaagagataagaatgttctcatgcaagagcttgtgaggttgagacagcagcaacaaaccactgacggccagctgcaaacaatggttcagcgccttcaaggaatggagcaacgacaacagcaaatgatgtcattccttgccaaagccgtccaaagccctggtttctttgctcagtttgtgcaacaacaaaatgacagcaataggcgcattactgaagtcaacaaaaagcgtcggctcaagcaggatggtattgctgaaacaacagagcaagctacccctcctgatggacaaattgttaaatatcaacctatgatgaatgaaacagcaaaagcaatgctaaggaagatcatgaaatgggatactccgcgtgtagaatctttcaataaaaaccctgataattacttgattggtgatggtacttcaccatccagtgcaatggacagtagtagctctacaagctggaactcgggagtaactcttcaagaggttcctccatcttcagtgcagtctactcaaattccaatgtcaacagggactcaaggacacatcccctcagcagaaaaacctgaaattctatctgtacctcaagctgcagcatctgcaaatgttatgaaggatggaacacatgcagcatcgactatcccgacttctcaagcagatgttataatgcctgatataccttcagtaccagagattgtgcctaaaagtattcttgatatacctgaagacaattatatggctcccgagacagatgatggatttatggatccgagttcacttggatcattacccattgatttggattgtctttcacccggtgcagacattgatgatttgttaagcaattctatttgggatgatcttctgcaaactccaattccagaggattttgaggccaacattgacgaaatatccagagggaatgaggtgcagccaacagaaaatggctgggacaataatactcagcccctggatcaactaacagagcagatgggtcttctttcttctgatgccaaaagaatttaatcatctatgaaatttgtattgacctttcatactgtccaaggtaatccctgaccc

SEQ ID NO: 68688 - protein, 502 aa, Medicago sativa; identical to SEQ ID NO: 24255

SEQ ID NO: 68689 - DNA, 1299 bp, Brassica oleracea; identical to SEQ ID NO: 24454
  CDS (1)..(1299)

SEQ ID NO: 68690 - protein, 432 aa, Brassica oleracea; identical to SEQ ID NO: 24455

SEQ ID NO: 68691 - DNA, 1778 bp, Medicago sativa
  CDS (151)..(1659)
ccccttttctcccttcaaattcaatccccaatttcacttttcaacatttaaaaaaaaaaaaactcaaaatcacacttttagggtttttcaatttctcaacatcccttgatcaaaaaatttctcaacattcaaaaacaagaattctccgaaatggatggagcaagcggcggaagtggcggcggagagggttcaaccacccaaataccggcgccgacaccgatgctaaacgcgaacgcgccgccaccgtttttgagcaaaacttatgacatggtggatgatccttcaacagatgcgatagtttcatggagcgcaaccaacaacagtttcgttgtttgggacccacccgaattcgctagggaccttttgccgaagttcttcaagcataacaatttctcaagctttgtgagacagttgaatacttatggtttcaggaaggttgacccagatcgttgggaatttgcaaatgagggctttttgaggggtcaaaagcaattgcttaagagtattagtcgaagaaaacctgcccatggtcatactcaacaacaggctcagcaaccgcatggacagagttcatcagtaggggcatgtgtagaagtcggcaaatttgggcttgaggaagaggttgagaggcttaaaagagataagaatgttctcatgcaagagcttgtgaggttgagacagcagcaacaaaccactgacggccagctgcaaacaatggttcagcgccttcaaggaatggagcaacgacaacagcaaatgatgtcattccttgccaaagccgtccaaagccctggtttctttgctcagtttgtgcaacaacaaaatgacagcaataggcgcattactgaagtcaacaaaaagcgtcggctcaagcaggatggtattgctgaaacaacagagcaagctacccctcctgatggacaaattgttaaatatcaacctatgatgaatgaaacagcaaaagcaatgctaaggaagatcatgaaatgggatactccgcgtgtagaatctttcaataaaaaccctgataattacttgattggtgatggtacttcaccatccagtgcaatggacagtagtagctctacaagctggaactcgggagtaactcttcaagaggttcctccatcttcagtgcagtctactcaaattccaatgtcaacagggactcaaggacacatcccctcagcagaaaaacctgaaattctatctgtacctcaagctgcagcatctgcaaatgttatgaaggatggaacacatgcagcatcgactatcccgacttctcaagcagatgttataatgcctgatataccttcagtaccagagattgtgcctaaaagtattcttgatatacctgaagacaattatatggctcccgagacagatgatggatttatggatccgagttcacttggatcattacccattgatttggattgtctttcacccggtgcagacattgatgatttgttaagcaattctatttgggatgatcttctgcaaactccaattccagaggattttgaggccaacattgacgaaatatccagagggaatgaggtgcagccaacagaaaatggctgggacaataatactcagcccctggatcaactaacagagcagatgggtcttctttcttctgatgccaaaagaatttaatcatctatgaaatttgtattgacctttcatactgtccaaggtaatccctgacccaaaaaatacacaagtgatgatgtctataatataattacacctccatttgctcaccgagaagcttt

SEQ ID NO: 68692 - protein, 502 aa, Medicago sativa; identical to SEQ ID NO: 24259

SEQ ID NO: 68693 - DNA, 1781 bp, Glycine max
  CDS (142)..(1674)
tctttcactactccccatctgttaaatttcgaacactagggttcaattttctccaacaatgaccctcactctattcctctgacttcccatagaccacaatacactcaccccaggcaaaaaatttcgtttcaaaattgtgatatggacggaagagcgagcagcagcgtgggcggagaagcatcgccagctccagcaccggtgccgataacgaatgcgaacgcgccgccgcctttcttgagcaagacatacgagatggtagaggacccttcgacggactcgatagtgtcgtggagtccaacgaacaacagtttcgtggtttggaaccctcccgagttcgccagagatctcttgcccaaacacttcaagcacaacaacttctccagcttcgttcgccaattaaacacctacggatttaggaaggtagatccagatcgctgggaatttgcaaatgagggatttttgaggggtcaaaagcacttgcttaagactataactcggcggaaacctgcccatggtcataatcaacaggcacagcaagcacatggacagagttcatctgttggggcttgtgttgaagttgggaagtttggacttgaggaagaggttgagattctcaagagagataagaatgtgctcatgcaagagcttgtgagattgaggcagcagcaacaggctactgataaccagctgcagagtatggttcagcgccttcaaggaatggagcaacgacagcaacaaatgatgtcattccttgcaaaggctgttcagagtcctggttttttagctcaatttgtacaacagcaaaatgagagtagtagacgcataacggaggcaaataaaaaacgccggcttaagcaggagggtattggtgaaatggaacatactgctgcttctgatggccaaattgttaaatatcaacctctgataaatgaagcagcaaaagcaatgctgaggcaaatgatgaaattggatacttctcgactagaatcttttagtaataacgctgataattacttgattggtgatcattcatcatcatccggtgcaacggacaggggaaactctttgagccggacttctggagtaacacttcaagtggtccctctgactacaatccagtcttctcacattccatctgcaacggggataggggatgacccttcaacaggaaaatctgagattctatctactcctcaagttgtagcctgtgatgaagttacgaaagctcagtactctaatgtaaatgtttcggttggagaatctaatgcacctgctatccctgctactcaaacagatgaaatcatgcgggacctctctacaataccagacatagtggcaggaaatattcttgatattcctcaagaaaattatatggcacctgagacaggcggtgaaggatatatggatcctacttcatttggagtgaatgtgtcattgcccattgattttgatagtatttcacctgaagcagacattgatgatttgttgaacaatcctcacttttgggatgatattttgcgaactccagtgtcagaggagattgatacgaatgatgctgaagtattcaaggagaatgaggtgcagccaatggaaaatggattggacgaatcacaaaatatggaccaacttactgagcagatgggcctactttcttctgatgccaaaagaatttgagtgtattatgaaagtgtacattattaatatttcatattgtgcaaggtaaccttagcctagacaatgggttatgttgttttagttaaaaaaaaaaaaaaaaaaaaaaa

SEQ ID NO: 68694 - protein, 510 aa, Glycine max; identical to SEQ ID NO: 24261

SEQ ID NO: 68695 - DNA, 1380 bp, Oryza sativa; identical to SEQ ID NO: 24262
  CDS (1)..(1380)

SEQ ID NO: 68696 - protein, 459 aa, Oryza sativa; identical to SEQ ID NO: 24263

SEQ ID NO: 68697 - DNA, 1227 bp, Nicotiana tabacum; identical to SEQ ID NO: 24268
  CDS (1)..(1227)

SEQ ID NO: 68698 - protein, 408 aa, Nicotiana tabacum; identical to SEQ ID NO: 24269

SEQ ID NO: 68699 - DNA, 1639 bp, Arabidopsis thaliana
  CDS (1)..(1488)
atgtttgtaaatttcaaatacttctctttctttatccgtacgaaaatggacggtgttaccggcggaggaacgaatatcggcgaggctgtgacggcgccaccaccgcggaatccgcatccagcgactttacttaatgcgaactctttaccgccccctttccttagcaagacgtatgacatggtggaagatccggcgacggacgcgattgtctcatggagtccgacgaacaatagcttcattgtttgggatccaccggagttttctcgtgatcttctacctaaatacttcaaacacaacaatttctccagctttgttcgccagttaaacacctatggttttaggaaagtggatccagatcgatgggaatttgctaatgaaggtttcttaagaggtcaaaaacatctattgaagaagataagccggagaaaatctgttcagggacatggtagtagtagtagtaatccacaatctcagcaattatctcagggtcaaggttcaatggctgcattatcttcatgtgttgaggttgggaaatttgggttagaggaagaagttgaacagcttaaaagagacaaaaacgtgttgatgcaggaactcgttaagttacgccagcagcaacaaacaacagataataaacttcaggttttggttaaacatcttcaggttatggagcagaggcaacaacagattatgtctttccttgctaaagctgtacagaatcctactttcctctctcagtttatacagaagcagactgatagtaatatgcatgtaaccgaggccaataagaagcggagactcagagaggatagtactgctgctactgagagtaatagtcatagccatagcttggaagcatcagatggacagatagttaagtatcagccacttagaaacgattcaatgatgtggaacatgatgaaaacagatgataagtatccgtttcttgacgggttctcatctccaaaccaggtatcaggagtcactcttcaagaggtactacccataacttcaggacagtcacaggcatatgcatctgtaccatcaggacagcctttatcatacttaccctctacttcaacttctctcccggataccataatgccagagacttcccagataccacaattgacacgagagagtatcaacgacttccctacagaaaacttcatggatacagagaagaatgttccagaggcattcatctctccaagcccattccttgatggtggttcagtcccgattcagcttgagggaatacccgaagaccccgagattgatgaactaatgagtaactttgaattccttgaagaatatatgccagaaagcccagtttttggagatgcaactacactagagaacaacaacaacaacaacaacaacaacaacaacaacaacaacaacaacaacaacaacaacacaaatggtagacatatggataagcttatagaagaattgggtcttctcacatcagaaacagaacactagtaaaggattatgtttagtatccattgtaaagtctttctctactaacattatcgttaggactcagtagtacggttgcaactttgtgcagaaatctttccttggataatagaagagttgtatttattattaaaaagaaaatgccattttttct

SEQ ID NO: 68700 - protein, 495 aa, Arabidopsis thaliana; identical to SEQ ID NO: 24271

SEQ ID NO: 68701 - DNA, 1791 bp, Arabidopsis thaliana
  CDS (118)..(1563)
cgagagagtctctgtctctgtaaaagatatttgagcttgagaagaacagaagaaacttccaggatcaatcaatcgatcaactttagtgaactaactcttgatttttcattcgaagttatggaatcggttcccgaatccgtaccatcgccgaactcgaatacaccgtcaataccaccgccggtgaactccgtaccgcctttcttgagtaaaacctacgacatggttgatgatccgttgaccaatgaggtcgtttcgtggagcagcgggaacaacagcttcgtcgtctggagtgccccggagttctcgaaggtactcttgcccaagtatttcaagcacaacaacttctccagcttcgtcagacagttaaatacttatggtttcagaaaagttgatcctgaccgatgggaatttgcaaatgaaggatttcttagaggccgaaaacaactactgaagagtattgtcaggagaaaaccttcgcatgtgcagcagaatcagcaacaaactcaagttcagagctcatctgttggtgcttgtgtcgaggtggggaagtttggaatagaagaagaagtggaaagacttaagcgggataagaatgttcttatgcaagaactcgtcaggttaaggcagcaacagcaagctactgaaaaccaactgcagaatgtgggacagaaagttcaggtgatggagcaaaggcaacaacaaatgatgtcgtttttagcaaaggctgttcaaagtccaggtttcttaaaccagttagtacaacagaataataatgatggcaacagacaaattccaggaagcaacaaaaagaggagacttcctgtagatgagcaggagaatcgtggtgacaatgtggctaatggtcttaaccgccagattgttagatatcagccgtcgataaacgaagcagcacaaaatatgcttcgacagttcttaaatactagtacctcacctcggtatgaatcagtttcaaacaatcctgacagtttcctattgggtgatgttcccagttctacctctgtagacaatgggaacccttcaagtagagtttctggagtaacattggccgagttttcacccaacacagttcagtcagcaacgaatcaagtacccgaagcaagtttggctcatcatcctcaagctggtctggttcagccaaatataggtcaaagtccggctcaaggagcagcacctgcagactcttggagccctgaatttgatttagttggatgcgagacagatagtggagagtgttttgatccaataatggctgttttagatgagtcagaaggcgatgcaatttctcctgaaggtgagggcaagatgaatgagttactggagggagtccctaagctgcccggaatccaagatccattctgggaacagttcttttctgttgaactcccagcgattgcagatacagacgatattctatcaggatcagtggagaataatgacttggtattggaacaagaaccaaacgagtggacccgtaatgaacaacaaatgaagtatcttactgaacaaatgggactgctttcctcagaagcacagaggaaataaagattttcaggggaggttgcaaaaggagatatgaaggaacgaggaatatatcagatggtgtgtataccctttacatttttacttaaatgaaaaaaaaacagagagaagaaacataaaagatttaccaccaagcttgtgaatagttagtagagatcggtttttgtgttgtttatattatacttttgtgtgaaaacgttcatcttgttcaattatcaaaaaaaaaaaaaa

SEQ ID NO: 68702 - protein, 481 aa, Arabidopsis thaliana; identical to SEQ ID NO: 24273

SEQ ID NO: 68703 - DNA, 1879 bp, Arabidopsis thaliana; identical to SEQ ID NO: 24274
  CDS (143)..(1600)

SEQ ID NO: 68704 - protein, 485 aa, Arabidopsis thaliana; identical to SEQ ID NO: 24275

SEQ ID NO: 68705 - DNA, 1206 bp, Arabidopsis thaliana; identical to SEQ ID NO: 24232
  CDS (1)..(1206)

SEQ ID NO: 68706 - protein, 401 aa, Arabidopsis thaliana; identical to SEQ ID NO: 24233

SEQ ID NO: 68707 - DNA, 1791 bp, Solanum peruvianum
  CDS (3)..(1586)
gaatggagccaaattcttctggcagcgggaaggctgctgtcggtgacggaggaggaggaggagctccgatgttacagccggcgccggcgccggcgccgatgcccagtgcgaatgcgccgccgccgtttctggtgaagacttatgatatggtggatgatccgagtacggataagatcgtgtcgtggagtcctacgaataatagttttgtggtttgggatcctccggagtttgctaaggacctacttcccaagtactttaagcataataacttttccagctttgttcggcagctgaatacttatggttttagaaaggttgatccagaccgctgggaatttgctaatgagggattcttaagaggtcagaagcacctgcttaaaagtataagtcggcgtaaacctgctcatggacatgctcaacaacagcagcagccacatggacatgctcaacaacagatgcagccacctggacacagtgcatccgttggggcttgtgtcgaggttgggaaatttgggcttgaagaagaggttgagaggctgaaaagggacaagaacgtgcttatgcaagagctggttaggctcagacaacagcagcaatccactgacaatcagttgcaagggatggtgcagcgccttcaaggtatggagctgcgacaacaacaaatgatgtcgttcctggcaaaagctgtcaacagccctggattcttggcacagtttgttcagcagcaaaatgagagtaataagcgaatagctgaaggcagcaagaaacgaaggattaagcaggacattgaatcacaggatccatccgttactcctgcggatggacagattgtaaagtaccaacctgggataaatgaggcagcaaaggcaatgttgagggagctttcaaaactagattcatctcctagattagagaacttcagcaacagtcctgaaagtttcctgattggtgatggttcaccacagtctaatgcatcttcaggtcgtgtttcaggagtcactcttcaggaggtcccaccaacttctgggaagcccttgctgaatacagcttcagcaattgcaggtcaaagtttgttgccagccacttctgagatgcagtcatctcatcttggcacatgttccgaaatcatcaataatcagttgtcaaacataatcccgttggtaggaggtgaagatttgcatcctggttcactttctgcatccgatatgattatgcctgagttatcacagttgcaaggaattttgcctgaaaacaatacagatgtgattggatgtgattctttcatggatactattgcagttgaggggaaaatgggactagatattggtagtttgtctccaggtgctgatattgactggcagagtggtttgctggatgaaatacaagagtttcctagtgtgggtgaccctttttgggagaagtttctccaaagcccttcttcccctgatgctgcaatggatgatgatatttcaaacacaagtgaaaccaaaccacaaataaatggatgggataaaactcagaacatggaacatcttactgaacaaatgggggctactaatatcaaacaacaaaaacatatgatctaatctctatatgatatatgtacacaaatgttaattatggtagtttcttgactagtggggggttctagtttctctatagttactatgtttggttcatcttctttcttctcttgttcctgacataaaactcaatgtacctattgaatcactgaaagatggaccctgttccctctcttctttacatcaaggggggataaaaaaaaaaaaa

SEQ ID NO: 68708 - protein, 527 aa, Solanum peruvianum; identical to SEQ ID NO: 24283

SEQ ID NO: 68709 - DNA, 1401 bp, Arabidopsis thaliana; identical to SEQ ID NO: 24284
  CDS (1)..(1401)

SEQ ID NO: 68710 - protein, 466 aa, Arabidopsis thaliana; identical to SEQ ID NO: 24285

SEQ ID NO: 68711 - DNA, 1302 bp, Zea mays; identical to SEQ ID NO: 24294
  CDS (1)..(1302)

SEQ ID NO: 68712 - protein, 433 aa, Zea mays; identical to SEQ ID NO: 24295

SEQ ID NO: 68713 - DNA, 1473 bp, Glycine max
  CDS (1)..(1473)
atggacggcggcgggtccactccggcggcgccgattccgaacgcgaacgcgccgccgccttttctgagcaagacctacgacatggtggaggacccttccaccgacgcgatcgtgtcgtggagcgcaacgaacaacagcttcatcgtgtgggaccctccgcagtttgccagagaccttttgcccaaatacttcaaacacaacaacttctccagcttcgttagacagttaaacacttacggtttcaggaaggttgatccagatcgctgggaatttgcaaatgagggttttttgaagggtcaaaagcacttgcttaggagtattacacgacgaaaacctgcccatggtcaaaatcatcaacagcctcagcaaccgcatggacagagttcatcggtaggggcatgtgtagaagttgggaagtttgggcttgaggaagaggttgagaggcttaaaagagataagaatgtgctcatgcaagagcttgtgaggttgaggcagcagcaacagaccactgataaccagctgcaaacaatggttcagcgccttcagggaatggagcaacgacagcagcaaatgatgtcattccttgccaaagctgtccagagccctggcttctttgctcagtttgtacaacagcaaaatgacagcaataggcgcataactgaagtcaacaaaaagcgtcggcttaaacaggaaggtatggctgaaacagagcatgctgctactccagatggacaaattattaaatatcaacctatggtgaatgaagcagcaaaagcaatgcttaggcagatcatgaaatgggatacttcttgtgtagaatctttgaataaaaattctgataactacgtgattggtgatgcttcatcatcttccagtggaatggacagtagcagctcttcaggctggacttctggagtaactcttaaagaggtctctccagcttcggtgcagtcttcacatgttccagctgcaactgggactcaagggcatgtcccctcaaccgttaaacctgaaattttatctgtaccacaagcagtagcttctgaaaaagttatgaaagatggagcacatgatccaccttctatccctgtgtctcaagcagatgtaatgatccctgatcttcctccaataacagagatggtgacaggaaatattcttgatattcctgaagaaaattatatggcaactgagacagatgagggatacatggattcttcattgggggctggtgggtcatttcccattgatttcgaaggtatttcacctgatgcagacattgatgatttgttagccaatcctatttgggatgaaattttgcaaacttcagttccagaggatatcgataccaatgtggctgaagcatccaaagggaatgaggtccaaccaatggaaaatggatggggcaaaactcaacatatggatcaccttacagagcagatgggtcttctttcttccgatgcaaaaagagtttga

SEQ ID NO: 68714 - protein, 490 aa, Glycine max
MDGGGSTPAAPIPNANAPPPFLSKTYDMVEDPSTDAIVSWSATNNSFIVWDPPQFARDLLPKYFKHNNFSSFVRQLNTYGFRKVDPDRWEFANEGFLKGQKHLLRSITRRKPAHGQNHQQPQQPHGQSSSVGACVEVGKFGLEEEVERLKRDKNVLMQELVRLRQQQQTTDNQLQTMVQRLQGMEQRQQQMMSFLAKAVQSPGFFAQFVQQQNDSNRRITEVNKKRRLKQEGMAETEHAATPDGQIIKYQPMVNEAAKAMLRQIMKWDTSCVESLNKNSDNYVIGDASSSSSGMDSSSSSGWTSGVTLKEVSPASVQSSHVPAATGTQGHVPSTVKPEILSVPQAVASEKVMKDGAHDPPSIPVSQADVMIPDLPPITEMVTGNILDIPEENYMATETDEGYMDSSLGAGGSFPIDFEGISPDADIDDLLANPIWDEILQTSVPEDIDTNVAEASKGNEVQPMENGWGKTQHMDHLTEQMGLLSSDAKRV

SEQ ID NO: 68715 - DNA, 1533 bp, Glycine max
  CDS (1)..(1533)
atggacggaagagcgagcagcagcgtgggcggagaagcatcgccagctccagcaccggtgccgataacgaatgcgaacgcgccgccgcctttcttgagcaagacatacgagatggtagaggacccttcgacggactcgatagtgtcgtggagtccaacgaacaacagtttcgtggtttggaaccctcccgagttcgccagagatctcttgcccaaacacttcaagcacaacaacttctccagcttcgttcgccaattaaacacctacggatttaggaaggtagatccagatcgctgggaatttgcaaatgagggatttttgaggggtcaaaagcacttgcttaagactataactcggcggaaacctgcccatggtcataatcaacaggcacagcaagcacatggacagagttcatctgttggggcttgtgttgaagttgggaagtttggacttgaggaagaggttgagattctcaagagagataagaatgtgctcatgcaagagcttgtgagattgaggcagcagcaacaggctactgataaccagctgcagagtatggttcagcgccttcaaggaatggagcaacgacagcaacaaatgatgtcattccttgcaaaggctgttcagagtcctggttttttagctcaatttgtacaacagcaaaatgagagtagtagacgcataacggaggcaaataaaaaacgccggcttaagcaggagggtattggtgaaatggaacatactgctgcttctgatggccaaattgttaaatatcaacctctgataaatgaagcagcaaaagcaatgctgaagcaaatgatgaaattggatacttctcgactagaatcttttagtaataacgctgataattacttgattggtgatcattcatcatcatccggtgcaacagacaggggaaactctttgagccggacttctggagtaacacttcaagtggtccctctgactacaatccagtcttctcacattccatctacaacagggataggggatgacccttcaacaagaaaatctaaaattctatctactcctcaagttgtagcctgtgataaagttacgaaagctcagtactctaatgtaaatatttcagttgaaaaatctaatacacctactatccctattactcaaacagataaaatcatacaagacctctctacaataccagacatagtggcaggaaatattcttgatattcctcaagaaaattatatggcacctgagacaggcggtgaaggatatatggatcctacttcatttggagtgaatgtgtcattgcccattgattttgatagtatttcacctgaagcagacattgatgatttgttgaacaatcctcacttttgggatgatattttgcgaactccagtgtcagaggagattgatacgaatgatgctgaagtattcaaggagaatgaggtgcagccaatggaaaatggattggacaaatcacaaaatatggaccaacttactgagcagatgggcctactttcttctgatgccaaaagaatttga

SEQ ID NO: 68716 - protein, 510 aa, Glycine max
MDGRASSSVGGEASPAPAPVPITNANAPPPFLSKTYEMVEDPSTDSIVSWSPTNNSFVVWNPPEFARDLLPKHFKHNNFSSFVRQLNTYGFRKVDPDRWEFANEGFLRGQKHLLKTITRRKPAHGHNQQAQQAHGQSSSVGACVEVGKFGLEEEVEILKRDKNVLMQELVRLRQQQQATDNQLQSMVQRLQGMEQRQQQMMSFLAKAVQSPGFLAQFVQQQNESSRRITEANKKRRLKQEGIGEMEHTAASDGQIVKYQPLINEAAKAMLKQMMKLDTSRLESFSNNADNYLIGDHSSSSGATDRGNSLSRTSGVTLQVVPLTTIQSSHIPSTTGIGDDPSTRKSKILSTPQVVACDKVTKAQYSNVNISVEKSNTPTIPITQTDKIIQDLSTIPDIVAGNILDIPQENYMAPETGGEGYMDPTSFGVNVSLPIDFDSISPEADIDDLLNNPHFWDDILRTPVSEEIDTNDAEVFKENEVQPMENGLDKSQNMDQLTEQMGLLSSDAKRI

SEQ ID NO: 68717 - DNA, 1302 bp, Zea mays; identical to SEQ ID NO: 24302
  CDS (1)..(1302)

SEQ ID NO: 68718 - protein, 433 aa, Zea mays; identical to SEQ ID NO: 24303

SEQ ID NO: 68719 - DNA, 1539 bp, Zea mays
  CDS (1)..(1539)
atgcagggcggtgtcatggcgcccccagtcacggcgcacgcggtggcggtggcgcccccggtcacggcgcacgctgcggcggcggcgggcaacggcagcgccaccgccgcgccgccgccaccgttcctcatgaagacctacgaggtggtggacgacccggccacggacgacgtcatatcctggggccccgggaacaacagcttcatcgtctggaacacgcccgagttcgcccgggacctcctgcccaagtacttcaagcacagcaacttctcctccttcgtcaggcagctcaacacctacgggtttagaaaggttgatccagacagatgggaatttgcaaatgagggttttctgagaggacagaagcatctgctgaagactatcaacagaaggaaaccatccttgcaggggaacagccaaccacagcaacctcagtcgcagaacgctcctgtgccttcctgtgtagaggttggtaagtttgggttggaggaagagattgaacggctgaagagggataagaatgttcttatgcaagagcttgtcaggctgagacagcaacagcaaacaactgaccatcagctgcagactttgggcaagcgtcttcaagggatggagtcacggcagcaacagatgatgtctttcctggctaaagcaatgcaaagtcctggtttcctagcacagtttgtacagcaaaatgagaagagcagaagaagaatagtagcggcgaacaagaaaaggcggctgcccaggcaagatggtggcctagactccgaaagtgctgctgcttcgttggacggtcaaattatcaagtatcagcctctgatcaacgaagcagccaaagcaatgctaaggaagatactaaagctagattcttcgcataggttggaatctatgggcaattcagagaatggtaattttctgctggagaattatatgccaggcgctcaagcctttgagagctcttcgtcaacaagaaactctggggtcaccctttcagaggtttcagctaacccaggtttgccatatggcggcggaggcggtggcggcacgagctctgggctgtcagccatctgccctcctgaaatccagtgcccagttgtgatggacaacatgtcgtctaaccaagtggccagcatgagtgctgtgcctcctgtttcgaaggctacaattgacatgggtattcctgaattctcagctctggcagacttggtgaatgaaggctccgtcgatatccctggaggggcctttgagatgcctggtcctgagtttcctctgccagaaggcgatgacagtgtccccatcgagaccgatgagaccatgtacaacaacaacgacgagactcagagccttccaggcatcatcgactccttctgggagcagttcctggtaggcagccctctctctgccgataacgatgaagttgattcggggtcgccacaggagaacggatggagcaaagtggggaacatcggtgatcttacagaacagatgggccttctgtcatcaacaaatcaccgcgactcagggaatgggctgtag

SEQ ID NO: 68720 - protein, 512 aa, Zea mays
MQGGVMAPPVTAHAVAVAPPVTAHAAAAAGNGSATAAPPPPFLMKTYEVVDDPATDDVISWGPGNNSFIVWNTPEFARDLLPKYFKHSNFSSFVRQLNTYGFRKVDPDRWEFANEGFLRGQKHLLKTINRRKPSLQGNSQPQQPQSQNAPVPSCVEVGKFGLEEEIERLKRDKNVLMQELVRLRQQQQTTDHQLQTLGKRLQGMESRQQQMMSFLAKAMQSPGFLAQFVQQNEKSRRRIVAANKKRRLPRQDGGLDSESAAASLDGQIIKYQPLINEAAKAMLRKILKLDSSHRLESMGNSENGNFLLENYMPGAQAFESSSSTRNSGVTLSEVSANPGLPYGGGGGGGTSSGLSAICPPEIQCPVVMDNMSSNQVASMSAVPPVSKATIDMGIPEFSALADLVNEGSVDIPGGAFEMPGPEFPLPEGDDSVPIETDETMYNNNDETQSLPGIIDSFWEQFLVGSPLSADNDEVDSGSPQENGWSKVGNIGDLTEQMGLLSSTNHRDSGNGL

SEQ ID NO: 68721 - DNA, 20 bp, Artificial sequence
  primer
atgggaacggtttgcgaatc

SEQ ID NO: 68722 - DNA, 23 bp, Artificial sequence
  primer
tcattttctgagagcatctgatg

SEQ ID NO: 68723 - protein, 547 aa, Artificial sequence
  consensus sequence
  Variant (2)..(2): Xaa in position 2 is any amino acid
  Variant (5)..(5): Xaa in position 5 is any amino acid
  Variant (9)..(9): Xaa in position 9 is any amino acid
  Variant (12)..(12): Xaa in position 12 is any amino acid
  Variant (14)..(15): Xaa in position 14 to 15 is any amino acid
  Variant (18)..(19): Xaa in position 18 to 19 is any amino acid
  Variant (23)..(27): Xaa in position 23 to 27 is any amino acid
  Variant (28)..(28): Xaa in position 28 is any or no amino acid
  Variant (31)..(31): Xaa in position 31 is any amino acid
  Variant (34)..(37): Xaa in position 34 to 37 is any amino acid
  Variant (39)..(40): Xaa in position 39 to 40 is any amino acid
  Variant (45)..(46): Xaa in position 45 to 46 is any amino acid
  Variant (56)..(56): Xaa in position 56 is any amino acid
  Variant (67)..(67): Xaa in position 67 is any amino acid
  Variant (70)..(70): Xaa in position 70 is any amino acid
  Variant (77)..(77): Xaa in position 77 is any amino acid
  Variant (79)..(79): Xaa in position 79 is any amino acid
  Variant (81)..(81): Xaa in position 81 is any amino acid
  Variant (85)..(86): Xaa in position 85 to 86 is any amino acid
  Variant (90)..(90): Xaa in position 90 is any amino acid
  Variant (92)..(92): Xaa in position 92 is any amino acid
  Variant (97)..(115): Xaa in position 97 to 115 is any amino acid
  Variant (116)..(135): Xaa in position 116 to 135 is any or no amino acid
  Variant (139)..(139): Xaa in position 139 is any amino acid
  Variant (141)..(141): Xaa in position 141 is any amino acid
  Variant (144)..(145): Xaa in position 144 to 145 is any amino acid
  Variant (147)..(148): Xaa in position 147 to 148 is any amino acid
  Variant (150)..(152): Xaa in position 150 to 152 is any amino acid
  Variant (154)..(157): Xaa in position 154 to 157 is any amino acid
  Variant (159)..(159): Xaa in position 159 is any amino acid
  Variant (161)..(165): Xaa in position 161 to 165 is any amino acid
  Variant (167)..(167): Xaa in position 167 is any amino acid
  Variant (169)..(176): Xaa in position 169 to 176 is any amino acid
  Variant (179)..(179): Xaa in position 179 is any amino acid
  Variant (182)..(187): Xaa in position 182 to 187 is any amino acid
  Variant (189)..(209): Xaa in position 189 to 209 is any amino acid
  Variant (210)..(219): Xaa in position 210 to 219 is any or no amino acid
  Variant (224)..(356): Xaa in position 224 to 356 is any amino acid
  Variant (357)..(488): Xaa in position 357 to 488 is any or no amino acid
  Variant (490)..(492): Xaa in position 490 to 492 is any amino acid
  Variant (494)..(519): Xaa in position 494 to 519 is any amino acid
  Variant (520)..(541): Xaa in position 520 to 541 is any or no amino acid
  Variant (544)..(544): Xaa in position 544 is any amino acid
  Variant (546)..(546): Xaa in position 546 is any amino acid
PXFLXKTYXMVXDXXTDXXVSWXXXXXXSFXVWXXXXFXXDLLPXXFKHNNFSSFXRQLNTYGFRKXDPXRWEFANXEXFXRGQXXLLKXIXRRKPXXXXXXXXXXXXXXXXXXXXXXXXXXXXXXXXXXXXXXXEEEXEXLKXXKXXLXXXLXXXXQXQXXXXXQXQXXXXXXXXMEXRQXXXXXXLXXXXXXXXXXXXXXXXXXXXXXXXXXXXXXXKKRRXXXXXXXXXXXXXXXXXXXXXXXXXXXXXXXXXXXXXXXXXXXXXXXXXXXXXXXXXXXXXXXXXXXXXXXXXXXXXXXXXXXXXXXXXXXXXXXXXXXXXXXXXXXXXXXXXXXXXXXXXXXXXXXXXXXXXXXXXXXXXXXXXXXXXXXXXXXXXXXXXXXXXXXXXXXXXXXXXXXXXXXXXXXXXXXXXXXXXXXXXXXXXXXXXXXXXXXXXXXXXXXXXXXXXXXXXXXXXXXXXXXXXXXXXXXXXXXXXXXXXXXXXWXXXLXXXXXXXXXXXXXXXXXXXXXXXXXXXXXXXXXXXXXXXXXXXXXXXXEQXGXL

SEQ ID NO: 68724 - protein, 49 aa, Artificial sequence
  protein pattern
  Variant (2)..(2): Xaa in position 2 is any amino acid
  Variant (5)..(5): Xaa in position 5 is any amino acid
  Variant (6)..(6): Xaa in position 6 is any or no amino acid
  Variant (8)..(8): Xaa in position 8 is any amino acid
  Variant (9)..(9): Xaa in position 9 is any or no amino acid
  Variant (11)..(11): Xaa in position 11 is Ala or Ser
  Variant (12)..(13): Xaa in position 12 to 13 is any amino acid
  Variant (14)..(14): Xaa in position 14 is Phe, Ile or Leu
  Variant (17)..(18): Xaa in position 17 to 18 is any amino acid
  Variant (22)..(22): Xaa in position 22 is Asn or Ser
  Variant (28)..(28): Xaa in position 28 is Ile or Val
  Variant (39)..(39): Xaa in position 39 is Ile or Val
  Variant (42)..(42): Xaa in position 42 is Asp or Glu
FXVWXXPXXFXXXXLPXXFKHXNFSSFXRQLNTYGFRKXDPXRWEFANE

SEQ ID NO: 68725 - protein, 25 aa, Artificial sequence
  protein pattern
  Variant (5)..(5): Xaa in position 5 is any amino acid
  Variant (9)..(12): Xaa in position 9 to 12 is any or no amino acid
  Variant (14)..(14): Xaa in position 14 is Ala, Asp or Pro
  Variant (15)..(15): Xaa in position 15 is any amino acid
  Variant (16)..(16): Xaa in position 16 is Ala, Asn, Ser or Thr
  Variant (17)..(17): Xaa in position 17 is Asp, Asn or Thr
  Variant (18)..(19): Xaa in position 18 to 19 is any amino acid
  Variant (20)..(20): Xaa in position 20 is Ile or Val
  Variant (21)..(21): Xaa in position 21 is Ser or Val
  Variant (22)..(23): Xaa in position 22 to 23 is any amino acid
  Variant (24)..(24): Xaa in position 24 is Ala, Pro, Ser or Thr
  Variant (25)..(25): Xaa in position 25 is Ala, Gly, Pro, Ser or Thr
PPFLXKTYXXXXDXXXXXXXXXXXX

SEQ ID NO: 68726 - protein, 16 aa, Artificial sequence
  protein pattern
  Variant (2)..(2): Xaa in position 2 is Ile or Leu
  Variant (3)..(3): Xaa in position 3 is Lys or Arg
  Variant (5)..(8): Xaa in position 5 to 8 is any amino acid
  Variant (11)..(11): Xaa in position 11 is any amino acid
  Variant (13)..(13): Xaa in position 13 is any amino acid
FXXGXXXXLKXIXRRK

SEQ ID NO: 68727 - DNA, 1599 bp, Arabidopsis thaliana
  CDS (1)..(1599)
atgtcgaaagcttggggtggaattggaattggagcttgggctgatgaagcagagcgtgccgatgaagaacaagcggcggaagctactgctgcgacggcggatacacagagttttcctagcctgagagaggctgctgctgcgactgcgactagtggtaagtctaggaagatgaagaagatgagtttatctgagtttactacaggtgcttatacagcacctggaggtagaaactctgttggattgactcagcaagagattcttcaattacctactggtcctagacaacgttccgaggaggaaatgcaacctggtcgtttaggcggtgggttttcatcttatggtggtcgttctggtggaagaattgggagagatcgagatgattctgatggctcttggagtggtggtggtggtggtggtggaaggagaccttatggtggtggatttgatgatgataggagggggaatcagtctagggtttcggattttcctcaaccttctagagctgatgaggttgatgattgggggaaagagaagaaaccacttccttcttttgatcaaggacgacaaggtcgttacagtggcgatggtggtggttttggaggtggtggaagtggttttggaggcggtggtggtggtggaggtggagggttatctagagctgatgatgttgataattggggtgcagggaaaaggcaagcaccggttagatcatctacgtttgggtcgagttttggtgattcaggtcaggaagaacgtcgtcgtttggttttggaaccaagaaaggttgagtcaggaggaagtgagactccacctgttgttgagaagacgagtaagccgaatccatttggggcagctagaccgagggaggatgttttggcggagaaaggtttggattggaagaagattgactcagagattgaggctaagaaaggaagttctcaaacgagtaggccaacgagtgcacattctagtagaccttctagtgctcaatctaacaggtctgagagttcaggattgaataatgtggtgaaaccgagaccaaaggtgaatccttttggcgatgcaaagcctcgagaagtgttgttagaggaacaagggaaggattggcgtaagatggatttggaactcgagcatcgcagggttgacaggcctgaaacagaagaagagaagatgttgaaagaagagattgaagagctaaggaaaaaactcgagaaggaatccgttgctccagagatcaaggaatctgatcaagaacctggcagtaataataatcacaatgatttaccagaaataatacgtgggaaagagaaagatctggaaatactaacccgtgaattggacgacaaagtcaggttcaggcagaaaccagttgagaggcccgggtctggtgcaggtagaaccggaacatattcagaaagaacacattcccgggctggctcaattgatgaaaccaggagttttgaatctacagagagacccagatcacgtggtgccgtcgatgcctgggttagaccagccaatgagcagcgaagaaactttcaaggaaccaaagagcgcggattcttcagcaacaggtcttcctctagggaaggatggtaa

SEQ ID NO: 68728 - protein, 532 aa, Arabidopsis thaliana
MSKAWGGIGIGAWADEAERADEEQAAEATAATADTQSFPSLREAAAATATSGKSRKMKKMSLSEFTTGAYTAPGGRNSVGLTQQEILQLPTGPRQRSEEEMQPGRLGGGFSSYGGRSGGRIGRDRDDSDGSWSGGGGGGGRRPYGGGFDDDRRGNQSRVSDFPQPSRADEVDDWGKEKKPLPSFDQGRQGRYSGDGGGFGGGGSGFGGGGGGGGGGLSRADDVDNWGAGKRQAPVRSSTFGSSFGDSGQEERRRLVLEPRKVESGGSETPPVVEKTSKPNPFGAARPREDVLAEKGLDWKKIDSEIEAKKGSSQTSRPTSAHSSRPSSAQSNRSESSGLNNVVKPRPKVNPFGDAKPREVLLEEQGKDWRKMDLELEHRRVDRPETEEEKMLKEEIEELRKKLEKESVAPEIKESDQEPGSNNNHNDLPEIIRGKEKDLEILTRELDDKVRFRQKPVERPGSGAGRTGTYSERTHSRAGSIDETRSFESTERPRSRGAVDAWVRPANEQRRNFQGTKERGFFSNRSSSREGW

SEQ ID NO: 68729 - DNA, 2103 bp, Zea mays
  CDS (91)..(1671)
tttcgaggcctgagcgggagcatcgtgctataaataggtccctccgcctccgagtaccaccaaaccctagatctcgcaccggcggcagccatgtccaagccatggggtggcgtcggcgcgtgggcgctggatgccgagcgcgccgaggaggaggagcgcgagcaggtcctggccttcccggcgcccgagccacccgcggccgcgggcggcgccgccagcttcccgagcctccgcgaggcggcctctgctggcggcaagggcaaatcgaagaagaagaacaagggcaccacgctgtccctgtccgagttcaccaccttcggcgcggccgcggcccagcggcgcgcggcgcccgtcgagcccaagggcctgacccacgaggagatgatgctgctgcccacgggcccccgggaacgctcggccgaggagctggaccgctctcgcgggttccgctcctacggcggcggcggcggcttcggcgcaggcgctggaggggagcgccgcggcgggttcgacgacgagggccgccgcgggccgggcagaagctccgatcttgacatgacctcccgagcggacgaggctgacgactggggcgccactaagaagttcaccccggctcccgccgactccggccgccgcgataggttcggtgggccttcccctctcggccgcgctgatgatattgacgactggtcgcgcgacaagaagccgctcccggcgcgctaccccagccttggttctgcaggtggcttccgtgactcgccgggcttccgcgactcatcagcttcttctgatgctgaccgttgggtccgtggagccacccctatgccacacaacggccagggggcgggggagaggccacgcatcgtccttaatccacctaaacgtgacccgtcagctgcctctaccccacctgctgaggtggctcgcaaccggccaagcccttttggggctgcaaggccccgggaggatgtgctggctgagaagggggtggattggaagaagtttgagaatgagattgagcagaagaccagccgccctaccagttcgcactccagcaggccgaatagtgctcattcctcccgccctgggagccctgggtcacaggtttcggccgttgggagtgaaggagcaccgagggcacggccaaaggttaacccatttggtgatgccaagccaagagaagtggtgttgcaggagaaagggaaagactggaggaagattgatgttgagctcgagcatcgtgctataaataggccggagtctgatgaagaaagaaatttgaaagaagaaatcaacctcctgaaggtggatcttaaagaaatcgagggaaagatgagtaatggttctgagcagacatcggtagatgcaaaagatttgtctgagaagatatctatgttggaaagccagcttgagcagctttcaagggagttggatgacaagattcgatttgggcaaaggccacgttctggtgcaggcagggttacagcacttgcacccactagtttaggggaggaaccacaggctacagtggtggacagaccacgttctcgtggtggtatggaaccacccccaaggcaggaagaaagatggggatttcaaggaagcagagaaaggggctcgtttggtggaagcagaaattcagacaggccaatggcaaggcagagatggtgaaattgggacaacaagcatctcttagggacatttctggatcccagtccctttttttgttctgaaaagatgggcaaaataagtcgtacttatttgtttgtcgtgtttgcttggtctagaagattgttgaggatggagataactccacatgaagttattggtttgtcaactctatgccgtaggatgttttgcatttccctttttgccatctaccatgtcaaaacgatatcttagcaacctccgatactaactgttatgcttactggattccagttcagcatatgtcactagttgattatttgtgcactgcttagtggaaaccttggatttgcacttttactgatgctatgtcacctttctgttagtgttttttttaaaaaaaaaaaaaaaaaaaaaaaaaaaaaaaaagggaagccgctcgcgatctagaactag

SEQ ID NO: 68730 - protein, 526 aa, Zea mays
MSKPWGGVGAWALDAERAEEEEREQVLAFPAPEPPAAAGGAASFPSLREAASAGGKGKSKKKNKGTTLSLSEFTTFGAAAAQRRAAPVEPKGLTHEEMMLLPTGPRERSAEELDRSRGFRSYGGGGGFGAGAGGERRGGFDDEGRRGPGRSSDLDMTSRADEADDWGATKKFTPAPADSGRRDRFGGPSPLGRADDIDDWSRDKKPLPARYPSLGSAGGFRDSPGFRDSSASSDADRWVRGATPMPHNGQGAGERPRIVLNPPKRDPSAASTPPAEVARNRPSPFGAARPREDVLAEKGVDWKKFENEIEQKTSRPTSSHSSRPNSAHSSRPGSPGSQVSAVGSEGAPRARPKVNPFGDAKPREVVLQEKGKDWRKIDVELEHRAINRPESDEERNLKEEINLLKVDLKEIEGKMSNGSEQTSVDAKDLSEKISMLESQLEQLSRELDDKIRFGQRPRSGAGRVTALAPTSLGEEPQATVVDRPRSRGGMEPPPRQEERWGFQGSRERGSFGGSRNSDRPMARQRW

SEQ ID NO: 68731 - DNA, 1650 bp, Arabidopsis thaliana
  CDS (1)..(1650)
atgtcgaaaccttggggtggaatcggcgcatgggctgatgaggctgagcgtgccgatgaagagcaagctgctgaagctacagccacggcggcagattcacagagtttcccgagtctgaaagaggctgcgactgctaagtcttctaagaagaagaagaagatgactttatcggagtttaccaaaggagcatacactgctccgagttctgctggattgacgagagagcagatgcttcagctacctactggtccaagacaacgttctgaggatgaaatgcaacctggtcgtctcggtggtggattctcttcttatggtggaggaaggtctagtggacctccgggaagaatgtcacgagatcgagaggattctgatgggtcttggggcggtggtggtggtgggaggagatcttatggtggatttgatgatgatcagaggggatctaattctagggtttctgatttcccacaagtttctagggctgatgaggatgatgattggggaaaaggaaagaaatcgcttccttcgtttgatcaaggacgtcaaggtagtcgttatggtggtgggggaggtagttttggtggaggaggaggaggtggtgctggcagttatggcggcggtggtgctggtgctggtagtggaggtggaggtggattctctaaagctgatgaggttgataattgggcagcgggtaaagcaaaatcatctacgtttgggtcgggtttccgtgaatccggaccagagcctgaccgatgggctcgaggagtccttccttctggtggtggggttcaggaagagcgacgtcgtcttgtatttgaaccacgaaaggctgatacagaagtgagtgaaactccaactgctgtgaagacgagtaagccgagtccatttggagcagctagaccgagagagcaagttttggcggagaaaggattggactggaagaaacttgactcggatattgaggccaagaagggacaaacaagcagaccatcaagcgcgcaatcgagcagaccatcaagtgctcaatctaacaggtctgagagttcagcattgaacaatgtggagaatgtggtgaaaccgagaccaaaggtgaatccttttggtgatgcaaaacctcgggaagtattgctggaggaacaagggaaagattggcgcaagattgattctgaactcgagcatcgcagggttgacaggcctgaaacagagggagagaggatgttgaaggaagagattgaagaactacggaagaaactcgagaaggaggcagccattgcacctgagagcaaggaatctcaacaggaatccgacagtaatcaccaaaatctaccggatctcatacgtgagaaagaaaagaacctagacttactgatccgtgagctggacgacaaagtcaggttcaggccacgagcagttgagaggcctggatccagtgcaagcagaggcggttcctattcagaaagaccacattcacgggctggatcaatcgatgagtctaggagtgttgaatccatggaaagacctagatcacatggcacaggcgataattggccaagaccagtagatgatcgaagaaacttccaaggaagcaaggaacgtggattcttcaacaacagaaacttcgacaggtcatcgtcagcaagggaaggatggtaa

SEQ ID NO: 68732 - protein, 549 aa, Arabidopsis thaliana
MSKPWGGIGAWADEAERADEEQAAEATATAADSQSFPSLKEAATAKSSKKKKKMTLSEFTKGAYTAPSSAGLTREQMLQLPTGPRQRSEDEMQPGRLGGGFSSYGGGRSSGPPGRMSRDREDSDGSWGGGGGGRRSYGGFDDDQRGSNSRVSDFPQVSRADEDDDWGKGKKSLPSFDQGRQGSRYGGGGGSFGGGGGGGAGSYGGGGAGAGSGGGGGFSKADEVDNWAAGKAKSSTFGSGFRESGPEPDRWARGVLPSGGGVQEERRRLVFEPRKADTEVSETPTAVKTSKPSPFGAARPREQVLAEKGLDWKKLDSDIEAKKGQTSRPSSAQSSRPSSAQSNRSESSALNNVENVVKPRPKVNPFGDAKPREVLLEEQGKDWRKIDSELEHRRVDRPETEGERMLKEEIEELRKKLEKEAAIAPESKESQQESDSNHQNLPDLIREKEKNLDLLIRELDDKVRFRPRAVERPGSSASRGGSYSERPHSRAGSIDESRSVESMERPRSHGTGDNWPRPVDDRRNFQGSKERGFFNNRNFDRSSSAREGW

SEQ ID NO: 68733 - DNA, 1359 bp, Arabidopsis thaliana
  CDS (1)..(1359)
atggcggctgctgtatcatctgtttgggcaaagcctggtgcttgggctcttgaagccgaggaacatgaagctgagctcaaacaacaaccctctcccaccaaccagaaatcctctgccgaagattcctccgatttcccttccttagccgctgcagcgaccaccaaaacgaagaagaagaagggccaaaccatctctcttgctgaattcgctacctacggtactgctaaggcaaagccggctccacagacggagcgtctcactcaggctgagctggtcgctcttccgaccggtccacgtgaacgctctgctgaggagcttgatagatctaagcttggaggtggtttccggagctatggtggtggtcgttatggagatgagtcgtccagctcgaggtggggttcgtctagggtttcggaggatggggaaaggagaggcggtggattcaaccgggatagggaacctagcagggattcgggtccgtcgcgtgcggatgaggatgataactgggccgccgccaagaaaccaattagcggaaacggattcgagagaagagagagaggcagcggcggaggattcttcgaatctcagtctcagtccaaggctgatgaagtcgatagctgggtctccactaagccatcggagccccggagattcgtttctagcaacggcggcggcggtgacagatttgagaaaaggggaagttttgaatccttgtctagaaaccgggattctcaatacggtggtggtggtggttctgaatcggatacctggggaagaagaagagaagaaagcggtgctgctaatggctcgccaccaccgagcggtggttcacgcccaagattggtgttacagccacgtacacttcccgtggccgttgtggaggtcgtgaagccggagagtccggtcttggtcattgtggagaaacctaaaggtgctaatccttttgggaacgcaagacctagagaggaagttctggctgagaaaggccaggattggaaagagattgacgagaagctcgaggctgaaaagcttaaggacattgctgcagccatggagaagcctaatgagaaatctacagggaagatgggctttggtcttggcaatggccgtaaagacgaggaacgtattgaaagaagttggaggaaaagcacggagcattctgaggaggatgctcaagaggaggaaccagctgtagaaggggcaaagaaggaagagactgaggacaaaccggctgtagaagaggctaagaaggaagaaactgagggtgaacaggctgtagaagaggctaagaaggaagagactggtggcgaaccggctgtagaagaggcaaagaaggaagagacggaggacaaaatctaa

SEQ ID NO: 68734 - protein, 452 aa, Arabidopsis thaliana
MAAAVSSVWAKPGAWALEAEEHEAELKQQPSPTNQKSSAEDSSDFPSLAAAATTKTKKKKGQTISLAEFATYGTAKAKPAPQTERLTQAELVALPTGPRERSAEELDRSKLGGGFRSYGGGRYGDESSSSRWGSSRVSEDGERRGGGFNRDREPSRDSGPSRADEDDNWAAAKKPISGNGFERRERGSGGGFFESQSQSKADEVDSWVSTKPSEPRRFVSSNGGGGDRFEKRGSFESLSRNRDSQYGGGGGSESDTWGRRREESGAANGSPPPSGGSRPRLVLQPRTLPVAVVEVVKPESPVLVIVEKPKGANPFGNARPREEVLAEKGQDWKEIDEKLEAEKLKDIAAAMEKPNEKSTGKMGFGLGNGRKDEERIERSWRKSTEHSEEDAQEEEPAVEGAKKEETEDKPAVEEAKKEETEGEQAVEEAKKEETGGEPAVEEAKKEETEDKI

SEQ ID NO: 68735 - DNA, 1266 bp, Oryza sativa subsp
  CDS (1)..(1266)
atggccgtcgcctccgcgtgggccaagcccggctcgtgggccctcgccgccgaggagcaggacgacctgcccccgccgccgccgcccgttcccgccgccgacttcccctccctcgccaccgccgccaccaccaaggtccccaagaagaagaagccgcagcccgtcccgctcggcgagttcaacagcaccaagttcgtcgcccccgcctaccgcggacccacccaagacgacctcctcagcctccccaccggcccccgcgagcgcaccgccgaggagctcgccaacgccacgcgcggcttcggggctcgctggggcggcgccggcgccggtggcccccgcggcgacgacgagccccgccgcggcggatctggcccccaggacttcggcccgtcgcgcgccgacgaggccgatgactggggcgccggcaagaagccgctcgagacgagggagcgcatgggaggagggcggcagcccccgcgcccatggagcggagggagcgtagcgtggcgttcggggccgactcgcattcccgccgctgatgattccgcgagctggatctccaacaagggctattctgcggcgccgccaccgccttccgacagccggagggccggtccagtctggggtttcaacagggatggaggcccagacgccgactcttgggagaggaggagggaggaggtgagcggtggtggttcaagcggtggtgcccggccacgcctgaaccttcaaaagcggaccttgccactggctaatggcactgatggagaagggaaggaggacaaggaggaggagaagggagagatgcagcctaaaagcaggtcatcaaacccgtttggtgcagcccgccctcgcgaagtggttcttgctaccaagggagatgacgggaggaaggaggaggagaaggagaaagaggaggagaagctggagattcaaccaaggaccaggacttcaaacccgtttggggctgcccgcccacgtgaggaagtgcttgctgcgaagggtgaggactggaggaagattgatgagaagcttgaggccatgaagatgcgcgaggcaccaccacctgagaggaggtcctttgggaggagaggttcccctgttagaggagaggagaatgggagccgtccactgccagagagtcatgtcgagggagcttggaagaagcctgatgcagttcaggctgttggagaatccgaagatgggtctgataagcttaacacggctgaggctgcgagaaaatttgaagaagggtttgataactga

SEQ ID NO: 68736 - protein, 421 aa, Oryza sativa subsp
MAVASAWAKPGSWALAAEEQDDLPPPPPPVPAADFPSLATAATTKVPKKKKPQPVPLGEFNSTKFVAPAYRGPTQDDLLSLPTGPRERTAEELANATRGFGARWGGAGAGGPRGDDEPRRGGSGPQDFGPSRADEADDWGAGKKPLETRERMGGGRQPPRPWSGGSVAWRSGPTRIPAADDSASWISNKGYSAAPPPPSDSRRAGPVWGFNRDGGPDADSWERRREEVSGGGSSGGARPRLNLQKRTLPLANGTDGEGKEDKEEEKGEMQPKSRSSNPFGAARPREVVLATKGDDGRKEEEKEKEEEKLEIQPRTRTSNPFGAARPREEVLAAKGEDWRKIDEKLEAMKMREAPPPERRSFGRRGSPVRGEENGSRPLPESHVEGAWKKPDAVQAVGESEDGSDKLNTAEAARKFEEGFDN

SEQ ID NO: 68737 - DNA, 1641 bp, Oryza sativa subsp
  CDS (1)..(1641)
atggcgaagccctggggaggcgtcggcgcgtgggcgctggacgcggagcgcgccgaggaggaggagcgggagcaggcggcggcgttcccggcgcccgagccgcccgcggccgcccggtggcgccgccagcttcccgagcctccgcgaggccgccgcggcggcgggcggggcaagcagaagaagaagaacaagggcaccaccctgtcgctgtccgagttcagcgggtacggcgcgcaggggcagcgtcgggccggcggtggcgcagtacccgtggatccgagggggctcacccccgaggagatgatgatgctgcccaccggccccagggagcgctccgccgaggagctcgaccgctcccgagggttccgctcctacggcggagggtttggcgccggcggcggggaccgccgcggcgggttcgacgacgaccgccgcgggcccggtaggtcctcggatctcgacatgccctcccgcgccgacgaggcggacaactgggggacgaataagaggttcacgccggctctcggcgactctggccgccgtgataggttcggcggcccctccccagccggccgctccgatgacatcgatgactggtcgcgcgacaagaagccgatgccatcgcgctacccaagcctcggttctggtggtggtggtggtggcggcttccgtgaatcacctggtttccgcgactcaccaggcccctccgactctgaccgttggtctcgtggtggtagctttgcgccgatgccgcacaacggcgagcgtgagaggccgcggctcaaccttgatccaccgaagcgggatcccttggctactgctacgccaccagctgaggtggcacgcaaccggccaagcccatttggggctgcaaggccccgggaggaggtgctggctgagaaagggttggattggaggaagatggagaccgagattgaacagaaaactagccgccctaccagctcacagtccagccggccgaatagcgcacattcctcccgccctgggagccctggatcacaggtctcagcagttgggagtgaaggggcaccgaggtcacggccaaaggtaaatccgtttggtaatgccaagccacgggaagtggtgctgcaagagaaagggaaagactggaggaagatagaccttgagctggaacatcgtgccgttaataggccagagacgaatgaagaaaggatcttgaaagaagaaataaacctcctcaaggagaaactgaaagaaagtgaggccaataaaactgatggtccggaccaagcttcccctgaggatccagaggatttgtcggagaagataactcagatggaaaagcagcttgagttgcttactattgagttggatgacaaggttcgatttgggcaaagacctggttctggagctggcagggtttcagcagttccaccagctattgcagaggaaccacagattgtggtatccatcgtggataggccacgctctcgtggtggtatggagccatttccgaaaccagctgaggaaagatggggattccaaggtagcagagagaggggctcttttggtggaagcagaagttcagacaggtttgagattgaacgtatagtatactgttcgattgaagatgagagttggaatgggatatttgtctag

SEQ ID NO: 68738 - protein, 546 aa, Oryza sativa subsp
MAKPWGGVGAWALDAERAEEEEREQAAAFPAPEPPAAARWRRQLPEPPRGRRGGGRGKQKKKNKGTTLSLSEFSGYGAQGQRRAGGGAVPVDPRGLTPEEMMMLPTGPRERSAEELDRSRGFRSYGGGFGAGGGDRRGGFDDDRRGPGRSSDLDMPSRADEADNWGTNKRFTPALGDSGRRDRFGGPSPAGRSDDIDDWSRDKKPMPSRYPSLGSGGGGGGGFRESPGFRDSPGPSDSDRWSRGGSFAPMPHNGERERPRLNLDPPKRDPLATATPPAEVARNRPSPFGAARPREEVLAEKGLDWRKMETEIEQKTSRPTSSQSSRPNSAHSSRPGSPGSQVSAVGSEGAPRSRPKVNPFGNAKPREVVLQEKGKDWRKIDLELEHRAVNRPETNEERILKEEINLLKEKLKESEANKTDGPDQASPEDPEDLSEKITQMEKQLELLTIELDDKVRFGQRPGSGAGRVSAVPPAIAEEPQIVVSIVDRPRSRGGMEPFPKPAEERWGFQGSRERGSFGGSRSSDRFEIERIVYCSIEDESWNGIFV

SEQ ID NO: 68739 - DNA, 1689 bp, Vitis vinifera
  CDS (1)..(1689)
  misc_feature (1678)..(1678): r is g or a
atggcattcaggatcattacaaggcctcatggcagcaaatcgctcaaattagcaaaaagatcttcacgaccagatggcgccttagcaacaggtgcatccaagacagagtcagctgcctttgggtcaaagtttgatccaaataagggcaagcttattcctataggagcggtggcagggatagaggcccttccgtctttgggtttaaggtggatctttggtttgggcaagatgtcgaaaccctggggaggaattggtgcttgggctgcagaagcagagagagctgaagctgaagagcaggaacaggcagcagcagcgatagagacagcagcagccaacactgctgctgagtctgagagactcccaagccagaaaggagccaacaaaatgaagcccaagaaaatgtccttgttcgagtttagaatgggtgattatatgcagcaagatccatcaatggagtccaagggtttgatgcaggacgaaatgatccagcttccaactggaccaaagcagaggtccatcgaggaaatgcagcacagtcagcttggtggtggattccaatcgtatcggctatcaggtgctcctcaaggtcagatgagagatcgagatggtgatatcaaccactcttggggtggtaatcgggtattgtatggtggatttgatggtgattgtagggttcaatctcctagggctttggatttcaatcaaccttcaagagctgatcaggttgataagtgggcaacaacaaagaagtacttcccttcaccttcagttgattctggtcgacatgcttggtacaatcggcttggtggtggtactagtggacatcactggaccagaaaagatttttgtgaggacagtcatgagcaaccccgactgattttgaatccaccaagcagagaggtgataagcaatgacctgataggatgcaacaggccaaacccatttggtcatgcaaggccaagagaggaaattttggctgaaaagggggtggattggaagaagctggattcagaaatcgagtataagaagacaagttggctgatgagttcttatctgaccaggccttcaagtacacaatctagccagtctgaagatcccatagcacatggctctgatggggctgtgaagccacggccaaaggtgaacccttttggagatgccaagccccgagaagttttacttgaagagcgtggtaaggactggaggaagatggataaggaattggaacatcgaggtgttgaaaggcctgaaaccgaggaggaaaaaaatttaagagaagaaatatgggatctaaagagggaacttcaaaaagaatcagaaaaaaggcaatcaatgaaagggtctggtgaagatcaaatcagtttacaggatttaatactttccaaagaaaggaacttagagcagctcaactgtgatttagatgacaaagttcgttttggtaggaaagtcatggaaaagccaggttcaggagcattcagaggagctatcatttctgaaagactgccttctcagtctgattctcttgtcaactcgagaaataaggagatcaggttgaggccccaaacacctggcacaggagatgtgaggataaggcctggagacaacagaagagcctttcaaggaggcatggaaagaagaattctaggcaacagagacacggacaggtcaacttcagggragagatggtga

SEQ ID NO: 68740 - protein, 562 aa, Vitis vinifera
  misc_feature (560)..(560): The Xaa at location 560 stands for Glu, or Lys.
MAFRIITRPHGSKSLKLAKRSSRPDGALATGASKTESAAFGSKFDPNKGKLIPIGAVAGIEALPSLGLRWIFGLGKMSKPWGGIGAWAAEAERAEAEEQEQAAAAIETAAANTAAESERLPSQKGANKMKPKKMSLFEFRMGDYMQQDPSMESKGLMQDEMIQLPTGPKQRSIEEMQHSQLGGGFQSYRLSGAPQGQMRDRDGDINHSWGGNRVLYGGFDGDCRVQSPRALDFNQPSRADQVDKWATTKKYFPSPSVDSGRHAWYNRLGGGTSGHHWTRKDFCEDSHEQPRLILNPPSREVISNDLIGCNRPNPFGHARPREEILAEKGVDWKKLDSEIEYKKTSWLMSSYLTRPSSTQSSQSEDPIAHGSDGAVKPRPKVNPFGDAKPREVLLEERGKDWRKMDKELEHRGVERPETEEEKNLREEIWDLKRELQKESEKRQSMKGSGEDQISLQDLILSKERNLEQLNCDLDDKVRFGRKVMEKPGSGAFRGAIISERLPSQSDSLVNSRNKEIRLRPQTPGTGDVRIRPGDNRRAFQGGMERRILGNRDTDRSTSGXRW

SEQ ID NO: 68741 - DNA, 1647 bp, Ostreococcus tauri
  CDS (1)..(1647)
atggcttggggtaacgccaacgcgtggagcgctcaggtggaaggagaaaagaaggaagaggccgtgggatcggcgttcccgacgcttggcgacgtgtcagcgaaggaggaagcggcgtttccgacgctcggcgcggctgcggcgatcaaggaaccaaagaagaaggccaagggagtcaagctctcgctcgcggagtttgcgggatcgagcgtaggtgggtcttcctacgtgccgccgacgcgatcgggcgtcagtgggtactcgagacgcacggatgacgtcgtgcttccgacgggaccacgatccgaccgaccggatgacgactttgccggcggcttgggcggcggattcaaccaaagcggagaccgctacggtggtgatcgctacggcgaccgccagggcgatcgctacggcgaccgccgcgagggcgaccgctacggcgaccgccgcgagggcgaccgctacggtgatcgaggtgatcgagaagctcctctggaggaccaaggtccttcccgcgcggagatgagctccaactggggcgcggaccgccgtgcgccgccacaagatgaccgttacggcagcggacggggcggtggtgaccgctacggcggtggtgaccgctacggtggcggtgaccgctacggcggcgactacgaagatcgtcctcctcgcgaggaacgcagaggatttggagattacgtcgatcgagctccacgcgaaccgcgcgaggaactcgggccgtcgcgcgcggacgaaagcagtagttggagtagagacaggaagcagttgccggagcgtgactcgcgatatgaggaccgtcctcctcgcgaggaacgcgaccgcgattggggcgctttacgctcgcgcacgagcgccgcggagccgcctgcggacgatcgctacgcccctcgcgagcgaccgaagttacagttgaaaccgcgatcggagaccgcgaccgcgcccgcgagctcgggatcgaactccctgttcggcggcgccaaacctgttgacgtcaagtacgtcgaggacaagccgcgcgagcccgtcccggctcgcagcgaagaccgccccgaacgcaccaccgattcaacagactcttggggctcgcgagcgcgtgatcgtaccgaaagacccaagtttgcgccgcgcaaggaggaagagctccgcgaggcgactcctgaggagcgcgcagcccggccgaagctcaacctgcaaaagcgctcgactgaagcccccgtgggcgccgcagcgcagagctcgttgttcggtggcgcccgcccgcgtgaggaggcgctcaaagcggccggtcgtgaccccgtggccgaggacttgaagcgttccgtcggctcggtgaagcgtaaggagttcaaggaggaaaaggagctcaaggcgaaaattgaagaagctaaatccgctggccaagacgtctccgagatggagatctccctcgccaagctctccctcgagctcgacgacaagttccgtttcgccaagcccaaacccgtcggtgagaagcccgccggtgaggacaacggtaagaagtccgcgacggacgccaagcccgctccgcgcgcgcccaaagtcgccgtggacgaagccaagcccgtcgtcgccaagaacgccttcgacgcccttggcgaggagtaa

SEQ ID NO: 68742 - protein, 548 aa, Ostreococcus tauri
MAWGNANAWSAQVEGEKKEEAVGSAFPTLGDVSAKEEAAFPTLGAAAAIKEPKKKAKGVKLSLAEFAGSSVGGSSYVPPTRSGVSGYSRRTDDVVLPTGPRSDRPDDDFAGGLGGGFNQSGDRYGGDRYGDRQGDRYGDRREGDRYGDRREGDRYGDRGDREAPLEDQGPSRAEMSSNWGADRRAPPQDDRYGSGRGGGDRYGGGDRYGGGDRYGGDYEDRPPREERRGFGDYVDRAPREPREELGPSRADESSSWSRDRKQLPERDSRYEDRPPREERDRDWGALRSRTSAAEPPADDRYAPRERPKLQLKPRSETATAPASSGSNSLFGGAKPVDVKYVEDKPREPVPARSEDRPERTTDSTDSWGSRARDRTERPKFAPRKEEELREATPEERAARPKLNLQKRSTEAPVGAAAQSSLFGGARPREEALKAAGRDPVAEDLKRSVGSVKRKEFKEEKELKAKIEEAKSAGQDVSEMEISLAKLSLELDDKFRFAKPKPVGEKPAGEDNGKKSATDAKPAPRAPKVAVDEAKPVVAKNAFDALGEE

SEQ ID NO: 68743 - DNA, 1500 bp, Oryza sativa
  CDS (1)..(1500)
atggcgaagccctggggaggcgtcggcgcgtgggcgctggacgcggagcgcgccgaggaggaggagccgggagcaggcggcggcgttcccggcgcccggagccgcccgcggccgccggtggcgccgccagcttcccgagcctccgcgaggtcgccgcgggcggcgggcgggggcaagcagaagaagaagaacaagggcaccaccctggtcgctgtcgagtcagcggggagcgctccgccgaggaagctcgaccgctcccgaaggttccgctcctacggcggagggtttggcgccggcggcggggaccgccgcggcgggttcgacgacgaccgccgcgggcccggtaggtcctcggatctcgacatgccctcccgcgccgacgaggcggacaactgggggacgaataagaggttcacgccggctctcggcgactctggccgccgtgataggttcggcggcccctccccagccggccgctccgatgacatcgatgactggtcgcgcgacaagaagccgatgccatcgcgctacccaagcctcggttctggtggtggtggtggtggcggcttccgtgaatcacctggtttccgcgactcaccaggcccctccgactctgaccgttggtctcgtggtggtagctttgcgccgatgccgcacaacggcgagcgtgagaggccgcggctcaaccttgatccaccgaagcgggatcccttggctactgctacgccaccagctgaggtggcacgcaaccggccaagcccatttggggctgcaaggccccgggaggaggtgctggctgagaaagggttggattggaggaagatggagaccgagattgaacagaaaactagccgccctaccagctcgcagtccagccggccgaatagcgcacattcctcccgccctgggagccctggatcacaggtctcagcagttgggagtgaaggggcaccgaggtcacggccaaaggtaaatccgtttggtaatgccaagccacgggaagtggtgctgcaagagaaagggaaagactggaggaagatagaccttgagctggaacatcgtgccgttaataggccagagacgaatgaagaaaggatcttgaaagaagaaataaacctcctcaaggagaaactgaaagaaagtgaggccaataaaactgatggtccggaccaagcttcccctgaggatccagaggatttgtcggagaagataactcagatggaaaagcagcttgagttgcttaccattgagttggatgacaaggttcgatttgggcaaagacctggttctggagctggcagggtttcagcagttccaccagctattgcagaggaaccacagattgtggtatccatcgtggataggccacgctctcgtggtggtatggagccatttccgaaaccagctgaggaaagatggggattccaaggtagcagagagaggggctcttttggtggaagcagaagttcagacaggccaatgacaaggcagaggtggtga

SEQ ID NO: 68744 - protein, 499 aa, Oryza sativa
MAKPWGGVGAWALDAERAEEEEPGAGGGVPGARSRPRPPVAPPASRASARSPRAAGGGKQKKKNKGTTLVAVESAGSAPPRKLDRSRRFRSYGGGFGAGGGDRRGGFDDDRRGPGRSSDLDMPSRADEADNWGTNKRFTPALGDSGRRDRFGGPSPAGRSDDIDDWSRDKKPMPSRYPSLGSGGGGGGGFRESPGFRDSPGPSDSDRWSRGGSFAPMPHNGERERPRLNLDPPKRDPLATATPPAEVARNRPSPFGAARPREEVLAEKGLDWRKMETEIEQKTSRPTSSQSSRPNSAHSSRPGSPGSQVSAVGSEGAPRSRPKVNPFGNAKPREVVLQEKGKDWRKIDLELEHRAVNRPETNEERILKEEINLLKEKLKESEANKTDGPDQASPEDPEDLSEKITQMEKQLELLTIELDDKVRFGQRPGSGAGRVSAVPPAIAEEPQIVVSIVDRPRSRGGMEPFPKPAEERWGFQGSRERGSFGGSRSSDRPMTRQRW

SEQ ID NO: 68745 - DNA, 1650 bp, Arabidopsis thaliana
  CDS (1)..(1650)
atgtcgaaaccttggggtggaatcggcgcatgggctgatgaggctgagcgtgccgatgaagagcaagctgctgaagctacagccacggcggcagattcacagagtttcccgagtctgaaagaggctgcgactgctaagtcttctaagaagaagaagaagatgactttatcggagtttaccaaaggagcatacactgctccgagttctgctggattgacgagagagcagatgcttcagctacctactggtccaagacaacgttctgaggatgaaatgcaacctggtcgtctcggtggtggattctcttcttatggtggaggaaggtctagtggacctccgggaagaatgtcacgagatcgagaggattctgatgggtcttggggcggtggtggtggtgggaggagatcttatggtggatttgatgatgatcagaggggatctaattctagggtttctgatttcccacaagtttctagggctgatgaggatgatgattggggaaaaggaaagaaatcgcttccttcgtttgatcaaggacgtcaaggtagtcgttatggtggtgggggaggtagttttggtggaggaggaggaggtggtgctggcagttatggcggcggtggtgctggtgctggtagtggaggtggaggtggattctctaaagctgatgaggttgataattgggcagcgggtaaagcaaaatcatctacgtttgggtcgggtttccgtgaatccggaccagagcctgaccgatgggctcgaggagtccttccttctggtggtggggttcaggaagagcgacgtcgtcttgtatttgaaccacgaaaggctgatacagaagtgagtgaaactccaactgctgtgaagacgagtaagccgagtccatttggagcagctagaccgagagagcaagttttggcggagaaaggattggactggaagaaacttgactcggatattgaggccaagaagggacaaacaagcagaccatcaagcgcgcaatcgagcagaccatcaagtgctcaatctaacaggtctgagagttcagcattgaacaatgtggagaatgtggtgaaaccgagaccaaaggtgaatccttttggtgatgcaaaacctcgggaagtattgctggaggaacaagggaaagattggcgcaagattgattctgaactcgagcatcgcagggttgacaggcctgaaacagagggagagaggatgttgaaggaagagattgaagaactacggaagaaactcgagaaggaggcagccattgcacctgagagcaaggaatctcaacaggaatccgacagtaatcaccaaaatctaccggatctcatacgtgagaaagaaaagaacctagacttactgatccgtgagctggacggcaaagtcaggttcaggccacgagcagttgagaggcctggatccagtgcaagcagaggcggttcctattcagaaagaccacattcacgggctggatcaatcgatgagtctaggagtgttgaatccatggaaagacctagatcacatggcacaggcgataattggccaagaccagtagatgatcgaagaaacttccaaggaagcaaggaacgtggattcttcaacaacagaaacttcgacaggtcatcgtcagcaagggaaggatggtaa

SEQ ID NO: 68746 - protein, 549 aa, Arabidopsis thaliana
MSKPWGGIGAWADEAERADEEQAAEATATAADSQSFPSLKEAATAKSSKKKKKMTLSEFTKGAYTAPSSAGLTREQMLQLPTGPRQRSEDEMQPGRLGGGFSSYGGGRSSGPPGRMSRDREDSDGSWGGGGGGRRSYGGFDDDQRGSNSRVSDFPQVSRADEDDDWGKGKKSLPSFDQGRQGSRYGGGGGSFGGGGGGGAGSYGGGGAGAGSGGGGGFSKADEVDNWAAGKAKSSTFGSGFRESGPEPDRWARGVLPSGGGVQEERRRLVFEPRKADTEVSETPTAVKTSKPSPFGAARPREQVLAEKGLDWKKLDSDIEAKKGQTSRPSSAQSSRPSSAQSNRSESSALNNVENVVKPRPKVNPFGDAKPREVLLEEQGKDWRKIDSELEHRRVDRPETEGERMLKEEIEELRKKLEKEAAIAPESKESQQESDSNHQNLPDLIREKEKNLDLLIRELDGKVRFRPRAVERPGSSASRGGSYSERPHSRAGSIDESRSVESMERPRSHGTGDNWPRPVDDRRNFQGSKERGFFNNRNFDRSSSAREGW

SEQ ID NO: 68747 - DNA, 1641 bp, Oryza sativa subsp
  CDS (1)..(1641)
atggcgaagccctggggaggcgtcggcgcgtgggcgctggacgcggagcgcgccgaggaggaggagcgggagcaggcggcggcgttcccggcgcccgagccgcccgcggccgccggtggcgccgccagcttcccgagcctccgcgaggccgccgcggcggcgggcgggggcaagcagaagaagaagaacaagggcaccaccctgtcgctgtccgagttcagcgggtacggcgcgcaggggcagcgtcggggcggcggtggcgccgcccccgtggatccgagggggctcacccccgaggagatgatgatgctgcccaccggccccagggagcgctccgccgaggagctcgaccgctcccgagggttccgctcctacggcggagggtttggcgccggcggcggggaccgccgcggcgggttcgacgacgaccgccgcgggcccggtaggtcctcggatctcgacatgccctcccgcgccgacgaggcggacaactgggggacgaataagaggttcacgccggctctcggcgactctggccgccgtgataggttcggcggcccctccccagccggccgctccgatgacatcgatgactggtcgcgcgacaagaagccgatgccatcgcgctacccaagcctcggttctggtggtggtggtggtggcggcttccgtgaatcacctggtttccgcgactcaccaggcccctccgactctgaccgttggtctcgtggtggtagctttgcgccgatgccgcacaacggcgagcgtgagaggccgcggctcaaccttgatccaccgaagcgggatcccttggctactgctacgccaccagctgaggtggcacgcaaccggccaagcccatttggggctgcaaggccccgggaggaggtgctggctgagaaagggttggattggaggaagatggagaccgagattgaacagaaaactagccgccctaccagctcacagtccagccggccgaatagcgcacattcctcccgccctgggagccctggatcacaggtctcagcagttgggagtgaaggggcaccgaggtcacggccaaaggtaaatccgtttggtaatgccaagccacgggaagtggtgctgcaagagaaagggaaagactggaggaagatagaccttgagctggaacatcgtgccgttaataggccagagacgaatgaagaaaggatcttgaaagaagaaataaacctcctcaaggagaaactgaaagaaagtgaggccaataaaactgatggtccggaccaagcttcccctgaggatccagaggatttgtcggagaagataactcagatggaaaagcagcttgagttgcttactattgagttggatgacaaggttcgatttgggcaaagacctggttctggagctggcagggtttcagcagttccaccagctattgcagaggaaccacagattgtggtatccatcgtggataggccacgctctcgtggtggtatggagccatttccgaaaccagctgaggaaagatggggattccaaggtagcagagagaggggctcttttggtggaagcagaagttcagacaggtttgagattgaacgtatagtatactgttcgattgaagatgagagttggaatgggatatttgtctag

SEQ ID NO: 68748 - protein, 546 aa, Oryza sativa subsp
MAKPWGGVGAWALDAERAEEEEREQAAAFPAPEPPAAAGGAASFPSLREAAAAAGGGKQKKKNKGTTLSLSEFSGYGAQGQRRGGGGAAPVDPRGLTPEEMMMLPTGPRERSAEELDRSRGFRSYGGGFGAGGGDRRGGFDDDRRGPGRSSDLDMPSRADEADNWGTNKRFTPALGDSGRRDRFGGPSPAGRSDDIDDWSRDKKPMPSRYPSLGSGGGGGGGFRESPGFRDSPGPSDSDRWSRGGSFAPMPHNGERERPRLNLDPPKRDPLATATPPAEVARNRPSPFGAARPREEVLAEKGLDWRKMETEIEQKTSRPTSSQSSRPNSAHSSRPGSPGSQVSAVGSEGAPRSRPKVNPFGNAKPREVVLQEKGKDWRKIDLELEHRAVNRPETNEERILKEEINLLKEKLKESEANKTDGPDQASPEDPEDLSEKITQMEKQLELLTIELDDKVRFGQRPGSGAGRVSAVPPAIAEEPQIVVSIVDRPRSRGGMEPFPKPAEERWGFQGSRERGSFGGSRSSDRFEIERIVYCSIEDESWNGIFV

SEQ ID NO: 68749 - DNA, 1584 bp, Triticum aestivum
  CDS (1)..(1584)
atggccaagccctggggcggcgtcggcgcctgggcgctcgacgctgagcgcgaggacgaggagcgcgagcacgccgcggccttccccgcgcccgacccgcccgccgccgcgggcggcgccgccagcttccccagcctcaaggaggccgtcgtcgccggcggcggcaagcagaagaagaagaagggcaccaccctctcgctctccgagttcaccacctacggcgcggccggcgcgcctcgccgcgtcgcccccgccgagcccaagggcctcaccccgcaggagatgatgatgctccccaccggcccgagggagcgctcggaggacgagctggaccgatcccgcgggttccgctcctatggcggcgacagggagccgcgcggtggcggattcgacgacgaccgccggtccagcagggattcggatctcgacatgccctcccgcgccgacgagtcggacaactggggcaagaacaagagtttctcgccggctcccaccgactctggccggcgtgataggctcagtggcccgtctccgctcggccgctctgatgacatcgacaactggtcgcgcgacaagaagccactcccgtcgcgctaccccagccttggaaccggcggcggtttccgtgaatcatctggcggtggtttccgtgaatcatctggtggtggtttccgcgaatcatctggtggtggtttccgtgactcaccggggccatctgactctgatcgctgggtccgtggtgctgtccctgcccctatgaccaacaatggtgataggccgcgcctcaacctcaatccaccaaagcgtgatccctcagccactcctgtgccagctgctgaggtcgcacgcagcagaccaagccccttcggggctgctaagccccgtgaggaggtgctggctgagaagggccttgattggaggaagatggagggggagattgagaaaaaaaccagtcggcctactagctcgcactccagtaggccgaacagcgcacattcctcccgccctggaagccctggatcacaggtctccgcagttgggagtgagggagcaccaagagcacggccaaaggtaaatccattcggtgatgccaaaccacgggaagtggtgctgcaggagaaaggaaaagactggaggaaaattgaccttgagctggagcatcgggcagttaataggccggagtcagaagaagagaagaatttgaaagaagaaatcaaccttctcaaggtggacttgaaggaaattgaggccattgcaggtgatggttctgagcaagcaaaagaagtgtctgagaagatatctcagatggaaaagcagcttgatctgcttacagttgagttggatgacaaaattcgatttgggcaaagacctagttctggagctggaagggctgcagcatttccacccgctagtgaggaaccacatgttgcagtggcccacatggacagaccgcgttcccgtggtggtgtggaaacatatccgaaaccagttgaagaaaggtggggatttcatggtagcagggaaagaggctcttttggtggaggcggaagttcagacaggtcatcaacaaggcagggatggtga

SEQ ID NO: 68750 - protein, 527 aa, Triticum aestivum
MAKPWGGVGAWALDAEREDEEREHAAAFPAPDPPAAAGGAASFPSLKEAVVAGGGKQKKKKGTTLSLSEFTTYGAAGAPRRVAPAEPKGLTPQEMMMLPTGPRERSEDELDRSRGFRSYGGDREPRGGGFDDDRRSSRDSDLDMPSRADESDNWGKNKSFSPAPTDSGRRDRLSGPSPLGRSDDIDNWSRDKKPLPSRYPSLGTGGGFRESSGGGFRESSGGGFRESSGGGFRDSPGPSDSDRWVRGAVPAPMTNNGDRPRLNLNPPKRDPSATPVPAAEVARSRPSPFGAAKPREEVLAEKGLDWRKMEGEIEKKTSRPTSSHSSRPNSAHSSRPGSPGSQVSAVGSEGAPRARPKVNPFGDAKPREVVLQEKGKDWRKIDLELEHRAVNRPESEEEKNLKEEINLLKVDLKEIEAIAGDGSEQAKEVSEKISQMEKQLDLLTVELDDKIRFGQRPSSGAGRAAAFPPASEEPHVAVAHMDRPRSRGGVETYPKPVEERWGFHGSRERGSFGGGGSSDRSSTRQGW

SEQ ID NO: 68751 - DNA, 1650 bp, Arabidopsis thaliana
  CDS (1)..(1650)
atgtcgaaaccttggggtggaatcggcgcatgggctgatgaggctgagcgtgccgatgaagagcaagctgctgaagctacagccacggcggcagattcacagagtttcccgagtctgaaagaggctgcgactgctaagtcttctaagaagaagaagaagatgactttatcggagtttaccaaaggagcatacactgctccaggttctgctggattgacgagagagcagatgcttcagctacctactggtccaagacaacgttctgaggatgaaatgcaacctggtcgtctcggtggtggattctcttcttatggtggaggaaggtctagtggacctccgggaagaatgtcacgagatcgagaggattctgatgggtcttggggcggtggtggtggtgggaggagatcttatggtggatttgatgatgatcagaggggatctaattctagggtttctgatttcccacaagtttctagggctgatgaggatgatgattggggaaaaggaaagaaatcgcttccttcgtttgatcaaggacgtcaaggtagtcgttatggtggtgggggaggtagttttggtggaggaggaggaggtggtgctggcagttatggcggcggtggtgctggtgctggtagtggaggtggaggtggattctctaaagctgatgaggttgataattgggcagcgggtaaagcaaaatcatctacgtttgggtcgggtttccgtgaatccggaccagagcctgaccgatgggctcgaggagtccttccttctggtggtggggttcaggaagagcgacgtcgtcttgtatttgaaccacgaaaggctgatacagaagtgagtgaaactccaactgctgtgaagacgagtaagccgagtccatttggagcagctagaccgagagagcaagttttggcggagaaaggattggactggaagaaacttgactcggatattgaggccaagaagggacaaacaagcagaccatcaagcgcgcaatcgagcagaccatcaagtgctcaatctaacaggtctgagagttcagcattgaacaatgtggagaatgtggtgaaaccgagaccaaaggtgaatccttttggtgatgcaaaacctcgggaagtattgctggaggaacaagggaaagattggcgcaagattgattctgaactcgagcatcgcagggttgacaggcctgaaacagagggagagaggatgttgaaggaagagattgaagaactacggaagaaactcgagaaggaggcagccattgcacctgagagcaaggaatctcaacaggaatccgacagtaatcaccaaaatctaccggatctcatacgtgagaaagaaaagaacctagacttactgatccgtgagctggacgacaaagtcaggttcaggccacgagcagttgagaggcctggatccagtgcaagcagaggcggttcctattcagaaagaccacattcacgggctggatcaatcgatgagtctaggagtgttgaatccatggaaagacctagatcacatggcacaggcgataattggccaagaccagtagatgatcgaagaaacttccaaggaagcaaggaacgtggattcttcaacaacagaaacttcgacaggtcatcgtcagcaagggaaggatggtaa

SEQ ID NO: 68752 - protein, 549 aa, Arabidopsis thaliana
MSKPWGGIGAWADEAERADEEQAAEATATAADSQSFPSLKEAATAKSSKKKKKMTLSEFTKGAYTAPGSAGLTREQMLQLPTGPRQRSEDEMQPGRLGGGFSSYGGGRSSGPPGRMSRDREDSDGSWGGGGGGRRSYGGFDDDQRGSNSRVSDFPQVSRADEDDDWGKGKKSLPSFDQGRQGSRYGGGGGSFGGGGGGGAGSYGGGGAGAGSGGGGGFSKADEVDNWAAGKAKSSTFGSGFRESGPEPDRWARGVLPSGGGVQEERRRLVFEPRKADTEVSETPTAVKTSKPSPFGAARPREQVLAEKGLDWKKLDSDIEAKKGQTSRPSSAQSSRPSSAQSNRSESSALNNVENVVKPRPKVNPFGDAKPREVLLEEQGKDWRKIDSELEHRRVDRPETEGERMLKEEIEELRKKLEKEAAIAPESKESQQESDSNHQNLPDLIREKEKNLDLLIRELDDKVRFRPRAVERPGSSASRGGSYSERPHSRAGSIDESRSVESMERPRSHGTGDNWPRPVDDRRNFQGSKERGFFNNRNFDRSSSAREGW

SEQ ID NO: 68753 - DNA, 1596 bp, Arabidopsis thaliana
  CDS (1)..(1596)
atgtcgaaagcttggggtggaattggaattggagcttgggctgatgaagcagagcgtgccgatgaagaacaagcggcggaagctactgctgcgacggcggatacacagagatttcctagcctgagagaggctgctgctgcgactgcgactagtggtaagtctaggaagatgaagaagatgagtttatctgagtttactacaggtgcttatacagcacctggaggtagaaactctgttggattgactcagcaagagattcttcaattacctactggtcctagacaacgttccgaggaggaaatgcaacctggtcgtttaggcggtgggttttcatcttatggtggtcgttctggtggaagaattgggagagatcgagatgattctgatggctcttggagtggtggtggtggtggtggtggaaggagaccttatggtggtggatttgatgatgataggagggggaatcagtctagggtttcggattttcctcaaccttctagagctgatgaggttgatgattgggggaaagagaagaaaccacttccctctttggatcaaggacgacaaggtcgttacagtggcggtggtggtggttttggaggtggtggaagtggttttggaggcggtggtggtggaggtggaggattatctagagctgatgatgttgataattggggtgcagggaaaaggcaagcaccggttagatcatctacatttgggtcgagttttggtgattcaggtcaggaagaacgtcgtcgtttggttttggaaccacggaaggttgagtcaggagggagtgagactccacctgttgttgagaagacgagtaagccgaatccatttggggcagctagaccgagggaggatgttttggcggagaaaggtttggattggaagaagattgactcagatattgaggctaagaaaggaagttctcaaacaagtaggccaacgagtgcacattctagtagaccttctagtgctcaatctaacaggtctgagagttcaggattgaataatgtggtgaaaccgagaccaaaggtgaatccttttggcgatgcaaagcctcgagaagtgttgttagaggaacaagggaaggattggcgtaagatggatttggaactcgagcatcgcagggttgacaggcctgaaacagaagaagagaagatgttgaaagaagagattgaagagctaaggaaaaaactcgagaaggaatccattgctccagagatcaaggaatctgatcaagaacctggcagtaataataatcacaatgatgtaccagaaataatacgtgggaaagagaaagatctggaaatactaacccgtgaattggacgacaaagtcaggttcaggcagaaaccagttgagaggcccgggtctggtgcaggtagaaccggaacatattcagaaagaacacattcccgggctggctcaattgatgaaaccaggagttttgaatctacagagagacccagatcacgtggtgccgtcgatgcctgggttagaccagccgatgagcagcgaagaaactttcaaggaagcaaagagcgcggattcttcagcaacaggtcttcctctagggaaggatggtaa

SEQ ID NO: 68754 - protein, 531 aa, Arabidopsis thaliana
MSKAWGGIGIGAWADEAERADEEQAAEATAATADTQRFPSLREAAAATATSGKSRKMKKMSLSEFTTGAYTAPGGRNSVGLTQQEILQLPTGPRQRSEEEMQPGRLGGGFSSYGGRSGGRIGRDRDDSDGSWSGGGGGGGRRPYGGGFDDDRRGNQSRVSDFPQPSRADEVDDWGKEKKPLPSLDQGRQGRYSGGGGGFGGGGSGFGGGGGGGGGLSRADDVDNWGAGKRQAPVRSSTFGSSFGDSGQEERRRLVLEPRKVESGGSETPPVVEKTSKPNPFGAARPREDVLAEKGLDWKKIDSDIEAKKGSSQTSRPTSAHSSRPSSAQSNRSESSGLNNVVKPRPKVNPFGDAKPREVLLEEQGKDWRKMDLELEHRRVDRPETEEEKMLKEEIEELRKKLEKESIAPEIKESDQEPGSNNNHNDVPEIIRGKEKDLEILTRELDDKVRFRQKPVERPGSGAGRTGTYSERTHSRAGSIDETRSFESTERPRSRGAVDAWVRPADEQRRNFQGSKERGFFSNRSSSREGW

SEQ ID NO: 68755 - DNA, 1560 bp, Oryza sativa
  CDS (1)..(1560)
atgtccaaggcctggggcggcctcggcggcgccggcgcgtgggcgctggacgccgagcgcgccgaggaggaggagcgggagagcgccgccgcacccgccccggccgcggggttccccagcctccgcgaggccgccgcgggtgcggccgccggcaagtccaagaagaagaaggggaccaccctctcgctctccgagttcaccacctacggcgccgccgccgggaggcggcccgccgccgcggccgcggagcccaaggggctcacgccgcaggagatgatgatgctgcccaccgggccgcgggagcggtccacggaggagctcgatcggtcccgcctcggcggcgggttccgctcctacggctccggggagcgccgcggcgggttcgacgacgacggccgccgcggcggccccgggagggacgcggatctcgacatgccgtcgcgcgccgacgagtcgggcaactggtcgctcaacaagaagtcgttcacgccgtcgcccgccgactcgggcgcccggagcaggtacggatccctcgggggcggcggcggcggcgcccccgccgcttcctccttcggccgcgccgacgacgacagcgactggtcgcgcgggaagaagccgatgccaatgccgtcccgctacccgagcctcggctccggtggcggtggcggtggcttccgcgactcgcctacctcgaccgactccgaccgatggtcccgtgccgctcctctgcctccgcacaatggcgagcgtgagcggccacgcctagtgcttgatccgcccaagcgggatgcctcggctacccctacgccgcctcctgccgaggcggcacgcagccggccaagcccatttggcgccgcgaggccccgcgaggacattcttgctgaaaaagggctggactggaggaagatggagacagagattgatcataagactagccgcccaaccagctcacagtctagtaggccaggaagtgcgcattcgtctcttcctgggagccctggatcacagacatcagctgtgggtagtgaaggtgtgccgagggctcggccgaaggttaatccttttggggatgcgaagccaagagaggtagttcttcaggagaaaggcaaggattggagaaagattgatcttgagttggagcatcgtcgaattgatagaccggagacaaacgaagagaaggatttgaaagaacagattaacctgcttagggtggatttgaaagaaactgaagcaaacataagtgacgaggataaaaaaggtttatcagaaaagttatcccagatggaaagggaactggagcgtcttacagttgagttggacaacaaggttcgatttgggcaaagacctggttctggatctggcaaggttactgcacatttaagtaattcaccagacgaatcacagattacagagtcaatggaacaaccacgttcccgtagcagcatagaccaaaatcctaaaccagcagaagaaaggtgggggtttcagggcaacagggacagaggctcatttggtggtaacagaaatacagacaggtcgttaacagggcagagatggtga

SEQ ID NO: 68756 - protein, 519 aa, Oryza sativa
MSKAWGGLGGAGAWALDAERAEEEERESAAAPAPAAGFPSLREAAAGAAAGKSKKKKGTTLSLSEFTTYGAAAGRRPAAAAAEPKGLTPQEMMMLPTGPRERSTEELDRSRLGGGFRSYGSGERRGGFDDDGRRGGPGRDADLDMPSRADESGNWSLNKKSFTPSPADSGARSRYGSLGGGGGGAPAASSFGRADDDSDWSRGKKPMPMPSRYPSLGSGGGGGGFRDSPTSTDSDRWSRAAPLPPHNGERERPRLVLDPPKRDASATPTPPPAEAARSRPSPFGAARPREDILAEKGLDWRKMETEIDHKTSRPTSSQSSRPGSAHSSLPGSPGSQTSAVGSEGVPRARPKVNPFGDAKPREVVLQEKGKDWRKIDLELEHRRIDRPETNEEKDLKEQINLLRVDLKETEANISDEDKKGLSEKLSQMERELERLTVELDNKVRFGQRPGSGSGKVTAHLSNSPDESQITESMEQPRSRSSIDQNPKPAEERWGFQGNRDRGSFGGNRNTDRSLTGQRW

SEQ ID NO: 68757 - DNA, 1599 bp, Oryza sativa
  CDS (1)..(1599)
atggcgaagccctggggaggcgtcggcgcgtgggcgctggacgcggagcgcgccgaggaggaggagcgggagcaggcggcggcgttcccggcgcccgagccgcccgcggccgccggtggcgccgccagcttcccgagcctccgcgaggccgccgcggcggcgggcgggggcaagcagaagaagaagaacaagggcaccaccctgtcgctgtccgagttcagcgggtacggcgcgcaggggcagcgtcggggcggcggtggcgccgcccccgtggatccgagggggctcacccccgaggagatgatgatgctgcccaccggccccagggagcgctccgccgaggagctcgaccgctcccgagggttccgctcctacggcggagggtttggcgccggcggcggggaccgccgcggcgggttcgacgacgaccgccgcgggcccggtaggtcctcggatctcgacatgccctcccgcgccgacgaggcggacaactgggggacgaataagaggttcacgccggctctcggcgactctggccgccgtgataggttcggcggcccctccccagccggccgctccgatgacatcgatgactggtcgcgcgacaagaagccgatgccatcgcgctacccaagcctcggttctggtggtggtggtggtggcggcttccgtgaatcacctggtttccgcgactcaccaggcccctccgactctgaccgttggtctcgtggtggtagctttgcgccgatgccgcacaacggcgagcgtgagaggccgcggctcaaccttgatccaccgaagcgggatcccttggctactgctacgccaccagctgaggtggcacgcaaccggccaagcccatttggggctgcaaggccccgggaggaggtgctggctgagaaagggttggattggaggaagatggagaccgagattgaacagaaaactagccgccctaccagctcacagtccagccggccgaatagcgcacattcctcccgccctgggagccctggatcacaggtctcagcagttgggagtgaaggggcaccgaggtcacggccaaaggtaaatccgtttggtaatgccaagccacgggaagtggtgctgcaagagaaagggaaagactggaggaagatagaccttgagctggaacatcgtgccgttaataggccagagacgaatgaagaaaggatcttgaaagaagaaataaacctcctcaaggagaaactgaaagaaagtgaggccaataaaactgatggtccggaccaagcttcccctgaggatccagaggatttgtcggagaagataactcagatggaaaagcagcttgagttgcttactattgagttggatgacaaggttcgatttgggcaaagacctggttctggagctggcagggtttcagcagttccaccagctattgcagaggaaccacagattgtggtatccatcgtggataggccacgctctcgtggtggtatggagccatttccgaaaccagctgaggaaagatggggattccaaggtagcagagagaggggctcttttggtggaagcagaagttcagacaggccaatgacaaggcagaggtggtga

SEQ ID NO: 68758 - protein, 532 aa, Oryza sativa
MAKPWGGVGAWALDAERAEEEEREQAAAFPAPEPPAAAGGAASFPSLREAAAAAGGGKQKKKNKGTTLSLSEFSGYGAQGQRRGGGGAAPVDPRGLTPEEMMMLPTGPRERSAEELDRSRGFRSYGGGFGAGGGDRRGGFDDDRRGPGRSSDLDMPSRADEADNWGTNKRFTPALGDSGRRDRFGGPSPAGRSDDIDDWSRDKKPMPSRYPSLGSGGGGGGGFRESPGFRDSPGPSDSDRWSRGGSFAPMPHNGERERPRLNLDPPKRDPLATATPPAEVARNRPSPFGAARPREEVLAEKGLDWRKMETEIEQKTSRPTSSQSSRPNSAHSSRPGSPGSQVSAVGSEGAPRSRPKVNPFGNAKPREVVLQEKGKDWRKIDLELEHRAVNRPETNEERILKEEINLLKEKLKESEANKTDGPDQASPEDPEDLSEKITQMEKQLELLTIELDDKVRFGQRPGSGAGRVSAVPPAIAEEPQIVVSIVDRPRSRGGMEPFPKPAEERWGFQGSRERGSFGGSRSSDRPMTRQRW

SEQ ID NO: 68759 - DNA, 1530 bp, Brassica napus
  CDS (1)..(1530)
atgtcgaagccttggggtggaaacggcgctagttgggccgatgaggctgaacgcgccgacgaagagcagagcttcccgagtttgaaggaggctgcgagttctaccaagtctaagaagaaaaagaagatgactttatcagagttcaccaagggagctggaagcggttctgttgggttgacgagggagcagatgattcagcttcccactggtccgaggcaacgctccgaggacgaaatgcagcgtggtggtggtggtattggcggtgggttctcttcttacggtggaggaaggtctggtggaatgtcgagaggtggagatgattctaatgggtcttggggtggtggtggtgggaggagaggttatggtgggtttgaggatgatcagagaggctcctctagagtttcagagttcccacaagtgtctagagctgatgaggttgatgattgggggaaagggaagaagtcggttgcgacgtttgatcagggacgtcaaggtcgttttggtggtcttggaggaagcggtggtggcggcagttatggaagtggaggtggcttgtctaaagctgatgagattgataattggggagcaggtaaaagccattcgtctctcacaaagtcatctacatttgggtcaggtccagagcctgaccgttgggcaagaggagtctcttcaggtggtgttcaagaagagcgtcgtcgtcttgttcttaaaccaagaaaggttgttgttgatgacagtggagtgagtgagacccaaaccgatgcgaagacgagtaagccgagtccattcggagcagctagaccgagagagcaagttctggcggagaaaggattggactggaagaaactcgactctgatattgaggctaagaagggaagctctcaaacgagcgcacaatcaagcagaccatcaagttctcagtctaataggtccgagagtttagcatcgaacaacaatgtggagaaaccgagagtaccaaaggtgaatccttttgaagatgcaaagcctagggaagtgttgttggaggagcaagggaaagattggcgcaagatggattccgaactcgagcatcgcagtgttgacaggcctgagacagaagaggagagactgttgaaggaagagatagaagagctacggaagaagctcgagaagggagcagccatcgcacctgagagcaaggaaactcaacaagaatcatcagacagtgataaccataatctactacgggagaaagaaaaagacctggagtcactgatccgtgagctagacgacaaagtcaggttcaggccaagagcagctgagaggcctggatcaggtgcaggcagaacaacaagcaactacgccgaaagacctcattcccggggtggatcagttgaagaggccaggagtgtggaatcatccatggaaagaccgagatcacgaggcacaggtggtggtgatgatagaagaaacttccaaggaagcaaggaacgtggattcttcagcaacaggaacttcgacaggtcatcaacgtcgaggaatggatggtaa

SEQ ID NO: 68760 - protein, 509 aa, Brassica napus
MSKPWGGNGASWADEAERADEEQSFPSLKEAASSTKSKKKKKMTLSEFTKGAGSGSVGLTREQMIQLPTGPRQRSEDEMQRGGGGIGGGFSSYGGGRSGGMSRGGDDSNGSWGGGGGRRGYGGFEDDQRGSSRVSEFPQVSRADEVDDWGKGKKSVATFDQGRQGRFGGLGGSGGGGSYGSGGGLSKADEIDNWGAGKSHSSLTKSSTFGSGPEPDRWARGVSSGGVQEERRRLVLKPRKVVVDDSGVSETQTDAKTSKPSPFGAARPREQVLAEKGLDWKKLDSDIEAKKGSSQTSAQSSRPSSSQSNRSESLASNNNVEKPRVPKVNPFEDAKPREVLLEEQGKDWRKMDSELEHRSVDRPETEEERLLKEEIEELRKKLEKGAAIAPESKETQQESSDSDNHNLLREKEKDLESLIRELDDKVRFRPRAAERPGSGAGRTTSNYAERPHSRGGSVEEARSVESSMERPRSRGTGGGDDRRNFQGSKERGFFSNRNFDRSSTSRNGW

SEQ ID NO: 68761 - DNA, 1548 bp, Zea mays
  CDS (1)..(1548)
atgtccaacccctggggcggcatcgttggtgccggcgcgtgggcgctggacgcggagcgcgctgaggaggaggagcgcgacgcagccgcggcccccgtccccgcccccgcccccgccgcgggcttccccagcctccgcgaggccacagcgggcgccgccggcaagtccaagaagaagaacaaaggaacaacgctctcgctctcggagttcgccgggttcggcccggggcggcggcaagcgccggcgccgccggagcccaggggcctcaccacggcggagatgatgatgctgcccacggcccccagggagcggtccgcggacgagctcgaccggccccgcggcctgggcggcggcttccgctcctacggctccggagaccgtggcggcgggtttgacgacgacggccgccgggggccgcccggcaggggctcggatctcgacatgccctcccgcgccgacgaggaccgcgactggtccatgagcaagaagtcgttcacgccctctcccgccgactccggctcgcggagccggtacggtggcctcgggagtggcgcgcccgcgtccgtcggccgcgctgacgacgatggcgactggtcgcgcgggaagaagccgctgccatcaggcccgtcgcgctacccgagcctcggctccgcgggcggcggcttccgcgactcgcccgtctcgaccgactcctccgaccgctggtcccgtgccgcgccgagcaatgacgagcgtgagaggcctcgcatcgtgcttgatccgcccaaacgtgacgcctcggccacccctacccctcctgctgaggcaggacgcagccggccgagcccatttggagccgcgaggccacgggaggacgtgctggccgataaggggctggactggaaaaagatggaaactgagattgatcagaagaggactagccgacccactagctcgcagtcgagtaggacagagagtgctcaaccatcacgtcctgggagccccgggtcacagatatcagccaccggtagtgaagccgcacccacggcgcggccgaaggttaatccttttggtgaagcaaagccaagggaggtgattctgcaagagaaagggaaggactggaggaagattgaccaagagctggagcatcgccagattgatagaccaaagacaaatgaagagaacgtgttgaaagaagagattaacctacttaaggtggaactagacgaaagtgaaggcaagataagtgatgaggatgcaaaagccatgtctgagaaaataactcaaatggaagagcagctggaacttcttagaactgcgatggatgacaagatcagatttttgcaaagacctggttctggagcaggcagggttatagcatcgccacctactaattttgtagatgaaccccaaataaaagagtccatggaaaggccacgagcacacagcagcacagagcaatatacaaaaccaactgaagaaagatgggggtttcaggggagcagagatagaggctcttttggtggcaacagaatttcagagaggtcgtccgcaggacagaggtggtga

SEQ ID NO: 68762 - protein, 515 aa, Zea mays
MSNPWGGIVGAGAWALDAERAEEEERDAAAAPVPAPAPAAGFPSLREATAGAAGKSKKKNKGTTLSLSEFAGFGPGRRQAPAPPEPRGLTTAEMMMLPTAPRERSADELDRPRGLGGGFRSYGSGDRGGGFDDDGRRGPPGRGSDLDMPSRADEDRDWSMSKKSFTPSPADSGSRSRYGGLGSGAPASVGRADDDGDWSRGKKPLPSGPSRYPSLGSAGGGFRDSPVSTDSSDRWSRAAPSNDERERPRIVLDPPKRDASATPTPPAEAGRSRPSPFGAARPREDVLADKGLDWKKMETEIDQKRTSRPTSSQSSRTESAQPSRPGSPGSQISATGSEAAPTARPKVNPFGEAKPREVILQEKGKDWRKIDQELEHRQIDRPKTNEENVLKEEINLLKVELDESEGKISDEDAKAMSEKITQMEEQLELLRTAMDDKIRFLQRPGSGAGRVIASPPTNFVDEPQIKESMERPRAHSSTEQYTKPTEERWGFQGSRDRGSFGGNRISERSSAGQRW

SEQ ID NO: 68763 - DNA, 1581 bp, Zea mays
  CDS (1)..(1581)
atgtccaagccatggggtggcgtcggcgcgtgggcgctggatgccgagcgcgccgaggaggaggagcgcgagcaggtcctggccttcccggcgcccgagccacccgcggccgcgggcggcgccgccagcttcccgagcctccgcgaggcggcctctgctggcggcaagggcaaatcgaagaagaagaacaagggcaccacgctgtccctgtccgagttcaccaccttcggcgcggccgcggcccagcggcgcgcggcgcccgtcgagcccaagggcctgacccacgaggagatgatgctgctgcccacgggcccccgggaacgctcggccgaggagctggaccgctctcgcgggttccgctcctacggcggcggcggcggcttcggcgcaggcgctggaggggagcgccgcggcgggttcgacgacgagggccgccgcgggccgggcagaagctccgatcttgacatgacatcccgagcggacgaggctgacgactggggcgccactaagaagttcaccccggctcccgccgactccggccgccgcgataggttcggtgggccttcccctctcggccgcgctgatgatattgacgactggtcacgcgacaagaagccgctcccgtcgcgctaccccagccttggttctgcaggtggcttccgtgactcgccgggcttccgcgactcatcagcttcttctgatgctgaccgttgggtccgtggagccacccctatgccacacaacggccagggggcgggggagaggccacgcatcgtccttaatccacctaaacgtgacccgtcagctgcctctaccccacctgctgaggtggctcgcaaccggccaagcccttttggggctgcaaggccccgggaggatgtgctagctgagaagggggtggattggaagaagtttgagaatgagattgagcagaagaccagccgccctaccagttcgcactccagcaggccgaatagtgctcattcctcccgccctgggagccctgggtcacaggtttcggccgttgggagtgaaggagcaccgagggcacggccaaaggttaacccatttggtgatgccaagccaagagaagtggtgttgcaggagaaagggaaagactggaggaagattgatgttgagctcgagcatcgtgctataaataggccggagtctgatgaagaaagaaatttgaaagaagaaatcaacctcctgaaggtggatcttaaagaaatcgagggaaagatgagtaatggttctgagcagacatcggtagatgcaaaagatttgtctgagaagatatctatgttggaaagccagcttgagcagctttcaagggagttggatgacaagattcgatttgggcaaaggccacgttctggtgcaggcagggttacagcacttgcacccactagtttaggggaggaaccacaggctacagtggtggacagaccacgttctcgtggtggtatggaaccacccccaaggcaggaagaaagatggggatttcaaggaagcagagaaaggggctcgtttggtggaagcagaaattcagacaggccaatggcaaggcagagatggtga

SEQ ID NO: 68764 - protein, 526 aa, Zea mays
MSKPWGGVGAWALDAERAEEEEREQVLAFPAPEPPAAAGGAASFPSLREAASAGGKGKSKKKNKGTTLSLSEFTTFGAAAAQRRAAPVEPKGLTHEEMMLLPTGPRERSAEELDRSRGFRSYGGGGGFGAGAGGERRGGFDDEGRRGPGRSSDLDMTSRADEADDWGATKKFTPAPADSGRRDRFGGPSPLGRADDIDDWSRDKKPLPSRYPSLGSAGGFRDSPGFRDSSASSDADRWVRGATPMPHNGQGAGERPRIVLNPPKRDPSAASTPPAEVARNRPSPFGAARPREDVLAEKGVDWKKFENEIEQKTSRPTSSHSSRPNSAHSSRPGSPGSQVSAVGSEGAPRARPKVNPFGDAKPREVVLQEKGKDWRKIDVELEHRAINRPESDEERNLKEEINLLKVDLKEIEGKMSNGSEQTSVDAKDLSEKISMLESQLEQLSRELDDKIRFGQRPRSGAGRVTALAPTSLGEEPQATVVDRPRSRGGMEPPPRQEERWGFQGSRERGSFGGSRNSDRPMARQRW

SEQ ID NO: 68765 - DNA, 20 bp, Artificial sequence
  primer
atgtcgaaagcttggggtgg

SEQ ID NO: 68766 - DNA, 23 bp, Artificial sequence
  primer
ttaccatccttccctagaggaag

SEQ ID NO: 68767 - protein, 655 aa, Artificial sequence
  consensus sequence
  Variant (2)..(4): Xaa in position 2 to 4 is any amino acid
  Variant (7)..(7): Xaa in position 7 is any amino acid
  Variant (8)..(9): Xaa in position 8 to 9 is any or no amino acid
  Variant (11)..(11): Xaa in position 11 is any amino acid
  Variant (12)..(13): Xaa in position 12 to 13 is any or no amino acid
  Variant (16)..(17): Xaa in position 16 to 17 is any amino acid
  Variant (21)..(22): Xaa in position 21 to 22 is any amino acid
  Variant (23)..(23): Xaa in position 23 is any or no amino acid
  Variant (25)..(26): Xaa in position 25 to 26 is any amino acid
  Variant (27)..(50): Xaa in position 27 to 50 is any or no amino acid
  Variant (53)..(53): Xaa in position 53 is any amino acid
  Variant (55)..(55): Xaa in position 55 is any amino acid
  Variant (56)..(56): Xaa in position 56 is any or no amino acid
  Variant (58)..(62): Xaa in position 58 to 62 is any amino acid
  Variant (63)..(67): Xaa in position 63 to 67 is any or no amino acid
  Variant (70)..(70): Xaa in position 70 is any amino acid
  Variant (72)..(74): Xaa in position 72 to 74 is any amino acid
  Variant (77)..(87): Xaa in position 77 to 87 is any amino acid
  Variant (88)..(101): Xaa in position 88 to 101 is any or no amino acid
  Variant (105)..(110): Xaa in position 105 to 110 is any amino acid
  Variant (117)..(117): Xaa in position 117 is any amino acid
  Variant (120)..(121): Xaa in position 120 to 121 is any amino acid
  Variant (123)..(127): Xaa in position 123 to 127 is any amino acid
  Variant (128)..(132): Xaa in position 128 to 132 is any or no amino acid
  Variant (135)..(135): Xaa in position 135 is any amino acid
  Variant (139)..(143): Xaa in position 139 to 143 is any amino acid
  Variant (144)..(170): Xaa in position 144 to 170 is any or no amino acid
  Variant (173)..(173): Xaa in position 173 is any amino acid
  Variant (175)..(176): Xaa in position 175 to 176 is any amino acid
  Variant (178)..(178): Xaa in position 178 is any amino acid
  Variant (179)..(181): Xaa in position 179 to 181 is any or no amino acid
  Variant (183)..(183): Xaa in position 183 is any amino acid
  Variant (184)..(186): Xaa in position 184 to 186 is any or no amino acid
  Variant (188)..(194): Xaa in position 188 to 194 is any amino acid
  Variant (200)..(200): Xaa in position 200 is any amino acid
  Variant (202)..(202): Xaa in position 202 is any amino acid
  Variant (204)..(206): Xaa in position 204 to 206 is any amino acid
  Variant (208)..(210): Xaa in position 208 to 210 is any amino acid
  Variant (211)..(215): Xaa in position 211 to 215 is any or no amino acid
  Variant (217)..(217): Xaa in position 217 is any amino acid
  Variant (219)..(221): Xaa in position 219 to 221 is any amino acid
  Variant (222)..(234): Xaa in position 222 to 234 is any or no amino acid
  Variant (236)..(239): Xaa in position 236 to 239 is any amino acid
  Variant (241)..(242): Xaa in position 241 to 242 is any amino acid
  Variant (243)..(268): Xaa in position 243 to 268 is any or no amino acid
  Variant (270)..(271): Xaa in position 270 to 271 is any amino acid
  Variant (272)..(315): Xaa in position 272 to 315 is any or no amino acid
  Variant (317)..(322): Xaa in position 317 to 322 is any amino acid
  Variant (323)..(342): Xaa in position 323 to 342 is any or no amino acid
  Variant (344)..(344): Xaa in position 344 is any amino acid
  Variant (346)..(349): Xaa in position 346 to 349 is any amino acid
  Variant (351)..(351): Xaa in position 351 is any amino acid
  Variant (353)..(365): Xaa in position 353 to 365 is any amino acid
  Variant (366)..(371): Xaa in position 366 to 371 is any or no amino acid
  Variant (373)..(373): Xaa in position 373 is any amino acid
  Variant (377)..(377): Xaa in position 377 is any amino acid
  Variant (378)..(378): Xaa in position 378 is any or no amino acid
  Variant (380)..(380): Xaa in position 380 is any amino acid
  Variant (384)..(385): Xaa in position 384 to 385 is any amino acid
  Variant (388)..(388): Xaa in position 388 is any amino acid
  Variant (391)..(391): Xaa in position 391 is any amino acid
  Variant (394)..(394): Xaa in position 394 is any amino acid
  Variant (396)..(397): Xaa in position 396 to 397 is any amino acid
  Variant (398)..(399): Xaa in position 398 to 399 is any or no amino acid
  Variant (401)..(401): Xaa in position 401 is any amino acid
  Variant (402)..(402): Xaa in position 402 is any or no amino acid
  Variant (404)..(405): Xaa in position 404 to 405 is any amino acid
  Variant (406)..(410): Xaa in position 406 to 410 is any or no amino acid
  Variant (413)..(413): Xaa in position 413 is any amino acid
  Variant (415)..(418): Xaa in position 415 to 418 is any amino acid
  Variant (420)..(421): Xaa in position 420 to 421 is any amino acid
  Variant (423)..(439): Xaa in position 423 to 439 is any amino acid
  Variant (440)..(446): Xaa in position 440 to 446 is any or no amino acid
  Variant (448)..(448): Xaa in position 448 is any amino acid
  Variant (449)..(449): Xaa in position 449 is any or no amino acid
  Variant (457)..(457): Xaa in position 457 is any amino acid
  Variant (464)..(464): Xaa in position 464 is any amino acid
  Variant (466)..(466): Xaa in position 466 is any amino acid
  Variant (468)..(468): Xaa in position 468 is any amino acid
  Variant (475)..(475): Xaa in position 475 is any amino acid
  Variant (477)..(477): Xaa in position 477 is any amino acid
  Variant (483)..(485): Xaa in position 483 to 485 is any amino acid
  Variant (488)..(491): Xaa in position 488 to 491 is any amino acid
  Variant (492)..(494): Xaa in position 492 to 494 is any or no amino acid
  Variant (496)..(497): Xaa in position 496 to 497 is any amino acid
  Variant (499)..(499): Xaa in position 499 is any amino acid
  Variant (501)..(501): Xaa in position 501 is any amino acid
  Variant (503)..(504): Xaa in position 503 to 504 is any amino acid
  Variant (506)..(508): Xaa in position 506 to 508 is any amino acid
  Variant (510)..(523): Xaa in position 510 to 523 is any amino acid
  Variant (524)..(542): Xaa in position 524 to 542 is any or no amino acid
  Variant (544)..(545): Xaa in position 544 to 545 is any amino acid
  Variant (547)..(548): Xaa in position 547 to 548 is any amino acid
  Variant (550)..(553): Xaa in position 550 to 553 is any amino acid
  Variant (555)..(555): Xaa in position 555 is any amino acid
  Variant (557)..(557): Xaa in position 557 is any amino acid
  Variant (560)..(562): Xaa in position 560 to 562 is any amino acid
  Variant (563)..(566): Xaa in position 563 to 566 is any or no amino acid
  Variant (568)..(568): Xaa in position 568 is any amino acid
  Variant (570)..(582): Xaa in position 570 to 582 is any amino acid
  Variant (583)..(590): Xaa in position 583 to 590 is any or no amino acid
  Variant (592)..(599): Xaa in position 592 to 599 is any amino acid
  Variant (600)..(601): Xaa in position 600 to 601 is any or no amino acid
  Variant (603)..(615): Xaa in position 603 to 615 is any amino acid
  Variant (616)..(621): Xaa in position 616 to 621 is any or no amino acid
  Variant (623)..(623): Xaa in position 623 is any amino acid
  Variant (625)..(626): Xaa in position 625 to 626 is any amino acid
  Variant (627)..(627): Xaa in position 627 is any or no amino acid
  Variant (629)..(640): Xaa in position 629 to 640 is any amino acid
  Variant (641)..(654): Xaa in position 641 to 654 is any or no amino acid
MXXXWGXXXGXXXWAXXAERXXXEXXXXXXXXXXXXXXXXXXXXXXXXXXFPXLXXAXXXXXXXXXXKKXKXXXLSXXXXXXXXXXXXXXXXXXXXXXXXXGLTXXXXXXLPTGPRXRSXXEXXXXXXXXXXGFXSYGXXXXXXXXXXXXXXXXXXXXXXXXXXXXXXXXGGXFXXDXXXXRXXXXRXXXXXXXSRADEXDXWXXXKXXXXXXXXDXGXXXXXXXXXXXXXXXXGXXXXGXXXXXXXXXXXXXXXXXXXXXXXXXXXXWXXXXXXXXXXXXXXXXXXXXXXXXXXXXXXXXXXXXXXXXXXXXXXSXXXXXXXXXXXXXXXXXXXXXXXXXXRXRXXXXPXKXXXXXXXXXXXXXXXXXXXPXPFGXXAXPREXXLAXKGXDWXKXXXXIXXKXXXXXXXRPXSXXXXRXXSXXXXXXXXXXXXXXXXXXXXXXXXRXXPKVNPFGXAKPREVXLXEXGKDWRKXDXELEHRXXXRPXXXXXXXEXXLXEXIXXLXXXLXXXXXXXXXXXXXXXXXXXXXXXXXXXXXXXXXEXXLXXLXXXXDXKXRFXXXXXXXPXSXXXXXXXXXXXXXXXXXXXXXEXXXXXXXXXXPXXXXXXXXXXXXXXXXXXXFXGXXXRXXXXXXXXXXXXXXXXXXXXXXXXXXW

SEQ ID NO: 68768 - protein, 29 aa, Artificial sequence
  protein pattern
  Variant (2)..(5): Xaa in position 2 to 5 is any or no amino acid
  Variant (12)..(12): Xaa in position 12 is Ile, Leu or Val
  Variant (14)..(14): Xaa in position 14 is Glu or Gln
  Variant (16)..(16): Xaa in position 16 is any amino acid
  Variant (23)..(23): Xaa in position 23 is Ile or Met
  Variant (25)..(25): Xaa in position 25 is any amino acid
NXXXXAKPREVXLXEXGKDWRKXDXELEH

SEQ ID NO: 68769 - protein, 33 aa, Artificial sequence
  protein pattern
  Variant (2)..(2): Xaa in position 2 is any or no amino acid
  Variant (4)..(5): Xaa in position 4 to 5 is any or no amino acid
  Variant (10)..(10): Xaa in position 10 is Lys or Arg
  Variant (14)..(14): Xaa in position 14 is any amino acid
  Variant (15)..(15): Xaa in position 15 is Ile or Val
  Variant (18)..(18): Xaa in position 18 is Asp, Glu or Thr
  Variant (21)..(21): Xaa in position 21 is any amino acid
  Variant (23)..(23): Xaa in position 23 is any amino acid
  Variant (24)..(24): Xaa in position 24 is Lys or Arg
  Variant (26)..(26): Xaa in position 26 is any amino acid
  Variant (27)..(27): Xaa in position 27 is Asp or Glu
  Variant (28)..(28): Xaa in position 28 is Glu, Gly, Asn, Ser or Thr
  Variant (29)..(29): Xaa in position 29 is Asp, Glu or Lys
  Variant (30)..(30): Xaa in position 30 is any amino acid
  Variant (31)..(31): Xaa in position 31 is Asp, Glu or Lys
  Variant (32)..(32): Xaa in position 32 is any amino acid
  Variant (33)..(33): Xaa in position 33 is Glu or Lys
SXPXXFGAAXPREXXLAXKGXDXXKXXXXXXXX

SEQ ID NO: 68770 - protein, 22 aa, Artificial sequence
  protein pattern
  Variant (2)..(3): Xaa in position 2 to 3 is any amino acid
  Variant (4)..(4): Xaa in position 4 is any or no amino acid
  Variant (6)..(8): Xaa in position 6 to 8 is any amino acid
  Variant (9)..(9): Xaa in position 9 is any or no amino acid
  Variant (13)..(13): Xaa in position 13 is Ala or Gly
  Variant (15)..(15): Xaa in position 15 is Lys or Arg
  Variant (16)..(16): Xaa in position 16 is Glu or Gln
  Variant (19)..(19): Xaa in position 19 is any amino acid
  Variant (20)..(20): Xaa in position 20 is Asp or Glu
  Variant (22)..(22): Xaa in position 22 is Leu or Met
LXXXEXXXXLPTXPXXRSXXEX

SEQ ID NO: 68771 - protein, 18 aa, Artificial sequence
  protein pattern
  Variant (2)..(4): Xaa in position 2 to 4 is any amino acid
  Variant (5)..(5): Xaa in position 5 is any or no amino acid
  Variant (11)..(11): Xaa in position 11 is Ala, Asp, Ser or Val
  Variant (12)..(12): Xaa in position 12 is any amino acid
  Variant (13)..(13): Xaa in position 13 is Asp or Asn
  Variant (15)..(15): Xaa in position 15 is Ala, Gly or Ser
  Variant (16)..(16): Xaa in position 16 is any amino acid
  Variant (17)..(17): Xaa in position 17 is Ala, Glu, Gly, Asn, Ser or Thr
DXXXXSRADEXXXWXXXK

SEQ ID NO: 68772 - protein, 22 aa, Artificial sequence
  protein pattern
  Variant (2)..(2): Xaa in position 2 is any amino acid
  Variant (3)..(8): Xaa in position 3 to 8 is any or no amino acid
  Variant (10)..(10): Xaa in position 10 is Asp or Glu
  Variant (11)..(11): Xaa in position 11 is any amino acid
  Variant (13)..(14): Xaa in position 13 to 14 is any amino acid
  Variant (15)..(15): Xaa in position 15 is Ala, Asp or Glu
  Variant (16)..(16): Xaa in position 16 is Leu or Met
  Variant (18)..(18): Xaa in position 18 is Asp, Gly or Asn
  Variant (20)..(20): Xaa in position 20 is Ile or Val
KXXXXXXXLXXLXXXXDXKXRF

SEQ ID NO: 68773 - protein, 21 aa, Artificial sequence
  protein pattern
  Variant (3)..(3): Xaa in position 3 is Glu or Lys
  Variant (4)..(4): Xaa in position 4 is Ser or Thr
  Variant (5)..(5): Xaa in position 5 is Asp, Glu or Asn
  Variant (6)..(6): Xaa in position 6 is Glu or Gly
  Variant (8)..(9): Xaa in position 8 to 9 is any amino acid
  Variant (11)..(11): Xaa in position 11 is Lys or Arg
  Variant (13)..(13): Xaa in position 13 is Glu or Gln
  Variant (15)..(15): Xaa in position 15 is any amino acid
  Variant (16)..(16): Xaa in position 16 is any or no amino acid
  Variant (18)..(20): Xaa in position 18 to 20 is any or no amino acid
RPXXXXEXXLXEXIXXLXXXL

SEQ ID NO: 68774 - protein, 28 aa, Artificial sequence
  protein pattern
  Variant (3)..(10): Xaa in position 3 to 10 is any or no amino acid
  Variant (13)..(13): Xaa in position 13 is Ser or Thr
  Variant (15)..(15): Xaa in position 15 is Ala, Ser or Thr
  Variant (16)..(16): Xaa in position 16 is any amino acid
  Variant (18)..(18): Xaa in position 18 is Asn or Ser
  Variant (19)..(19): Xaa in position 19 is Gln or Arg
  Variant (20)..(20): Xaa in position 20 is Pro, Ser or Thr
  Variant (21)..(21): Xaa in position 21 is Glu, Gly, Asn or Ser
  Variant (22)..(22): Xaa in position 22 is Asp or Ser
  Variant (23)..(24): Xaa in position 23 to 24 is any amino acid
  Variant (25)..(25): Xaa in position 25 is Ala, Pro or Ser
  Variant (26)..(27): Xaa in position 26 to 27 is any amino acid
  Variant (28)..(28): Xaa in position 28 is Asn, Pro or Ser
TSXXXXXXXXRPXSXXSXXXXXXXXXXX

SEQ ID NO: 68775 - protein, 11 aa, Artificial sequence
  protein pattern
  Variant (2)..(2): Xaa in position 2 is Ala or Ser
  Variant (3)..(3): Xaa in position 3 is any amino acid
  Variant (4)..(4): Xaa in position 4 is Ala or Pro
  Variant (8)..(8): Xaa in position 8 is any amino acid
  Variant (9)..(9): Xaa in position 9 is any or no amino acid
  Variant (11)..(11): Xaa in position 11 is Ala or Ile
MXXXWGGXXGX

SEQ ID NO: 68776 - protein, 15 aa, Artificial sequence
  protein pattern
  Variant (2)..(2): Xaa in position 2 is any amino acid
  Variant (3)..(3): Xaa in position 3 is Asp or Glu
  Variant (7)..(8): Xaa in position 7 to 8 is any or no amino acid
  Variant (10)..(10): Xaa in position 10 is Ala or Glu
  Variant (11)..(11): Xaa in position 11 is Glu, Gln or Arg
  Variant (12)..(14): Xaa in position 12 to 14 is any amino acid
  Variant (15)..(15): Xaa in position 15 is Ala, Gln or Ser
AXXAERXXEXXXXXX

SEQ ID NO: 68777 - DNA, 1173 bp, Arabidopsis thaliana
  CDS (1)..(1173)
atgtccgatggatacatcaattcgaagaagactgatgatatttgcgaagatgtttgtggacagggatcaaaagcagcaaaaacaatctcaaggctaaaatgtgtgcttaaaggttttgatttaagaacatacttgttcctctttgtgttgatgccatttggtatcttagcaatttatctacacggccaaaagttcacttatttctttagacctctttgggaatcacctccgaagccatttcaaaccattcctcattactataatgagaatgttactatggaatctctctgtagtcttcatggttggggaattagagactcgcccagacgggttttcgacgcggttttgtttagtaatgagaaagatcttttaactgttagatggaatgagctttatccttacgtgacacagtttgtgattcttgaatctaattctacgtttactggtttgcctaaaccattggtgtttaagagtaataaggatcagtttaagtttgtggagccgcggctaacttatgggacgattggtggacggtttaggaaaggcgagaatccgtttgtcgaagaagcgtatcagcgagttgcgttggatcagttgcttaggattgctggtattcaagaagatgatttgttgataatgtctgatgttgatgagattcctagtgctcatactatcaatcttttgagatggtgtgatgatattcctccagttcttcaccttcagttgaagaattatttgtattctttcgaatactatgtcgatagcaagagctggagagcgtctatacaccgttacagtccagggaaaacgcggtatgctcatttccgtcagagtaatgttatgttagctgattctggatggcattgtagcttctgtttccgttatataagtgagtttatattcaagatgaaagcttatagtcattcagaccgtgtcagattctctcattacctgaatccaaggaggattcaagatgttatttgcaaaggaactgatttgtttgatatgttacctgaagaatacacattcaaggagattataggcaaaatgggacctgtacctcggtcttattcagcggttcatcttccttcgtacctactgtataacgccgagcagtacaaatacttgttgcctggtaattgcataagagaaaaacagacagggtttatatga

SEQ ID NO: 68778 - protein, 390 aa, Arabidopsis thaliana
MSDGYINSKKTDDICEDVCGQGSKAAKTISRLKCVLKGFDLRTYLFLFVLMPFGILAIYLHGQKFTYFFRPLWESPPKPFQTIPHYYNENVTMESLCSLHGWGIRDSPRRVFDAVLFSNEKDLLTVRWNELYPYVTQFVILESNSTFTGLPKPLVFKSNKDQFKFVEPRLTYGTIGGRFRKGENPFVEEAYQRVALDQLLRIAGIQEDDLLIMSDVDEIPSAHTINLLRWCDDIPPVLHLQLKNYLYSFEYYVDSKSWRASIHRYSPGKTRYAHFRQSNVMLADSGWHCSFCFRYISEFIFKMKAYSHSDRVRFSHYLNPRRIQDVICKGTDLFDMLPEEYTFKEIIGKMGPVPRSYSAVHLPSYLLYNAEQYKYLLPGNCIREKQTGFI

SEQ ID NO: 68779 - DNA, 1921 bp, Zea mays subsp. mays
  CDS (375)..(1541)
ctctcgctcttgcgccggcgaccccgcggattcgagccaatcaccgccaagtcctcgactccagcgccctttccttgccagcccggcccccgctaccacggagctgcaaataacctgcggtcccgaggaccggacagcaaaagtgcccaaccgctggagctccgccccggcgatcagccgccgggaacgtcgcgcccggctccacagccacagccgcgccattcgagctgctgctcgcgcgcggctggttcttctcggggggattttctttttgcgggcaccctcccctccccctcaccgccctgccgtcagccgtctcgttttcggattcgtttgctccggcggtgggcgttcctgccgtgcggggcgcagtgatgccggaggtggtgcagtacgggtacaagaagaccgacggcatctgcgacagcgtgtgcggcgagcctgtgtcaaagacagttctgacgatgtcaaggctaaagtgcgcgctccggggatttgatttaagggcacttatggtcctcttgattggtgtgccaattctaatcctaatgatatatgcgcatggtcagaaggtcacatacttcctgcggcccatctgggaatctcctcccaagcccttcaagacaattcctcactactaccatgagaacgtcaccatggataacctgtgcaagttacatggttggaaagtccgtgacttcccgcgtcgtgtctttgatgctgtactcttcagcaatgagcttgatatcctggagatccgctggaatgagcttagtccctatgtgtccgagtttgtgcttcttgaatccaactcaacctttactggcataaaaaagccccttcacttcaaggaaaacaagcaccgatttgggttcgctaaatcacggctgacatacggtaatattgggggaaggttcgtgaagggggagaacccatttgttgaggagtcatatcagagggttgcccttgaccggcttcttaagcttgcaagaatagaagacgatgacctgctgatcatgtcggacgttgatgaaatcccgagcggccacacaattgatctcttaaggtggtgcgacggcattccagacatacttcaccttcagctcaggaattatctctactcgttcgagtttttcctggacgacaagagctggagggcatcgatacacaagtaccaagctggaaagacgaggtacgcgcacttccggcaggcagacgagctcctcgccgattcagggtggcattgcagcttttgcttccgctacataagcgatttcgcattcaagatgcaagcgtatagccacgtcgaccggatcaggttcaagtacttcctgaaccctgagaggatccaagatgtcatctgcagaggggcggaccttttcgatatgcttccagaagagtacacgttccaagagatcatcgccaagctggggccgatcccgagcacgtattctggcgttcatcttcctagctatctgctaaggaatgtcgaccggtttagataccttctaccgggcaactgcaggagagaaagtggctaggttttatggcctactaccctgcaacctgttgtgcgtgcgtgggtgggtgccagtgccacaactgcccgctgcaaagctgctgtccatgggatatctgtggcagttcacctggtacggttgcctaacgtagttgaacaaatgctttggtgaagaattggttcatggataggggtgagcacatgattctctaatgtgtaatagaatatgggaggaggatctaacggcatagcgcacgcttggtcctggctgggtgtgcctgcctgatgagctgagcggtttgtgctttacatccgggatgtcatcgtcatccattacttccctgattgatatatataaactcaaaagggctgttgtagattgcaattcaagtggtatttcag

SEQ ID NO: 68780 - protein, 388 aa, Zea mays subsp. mays
MPEVVQYGYKKTDGICDSVCGEPVSKTVLTMSRLKCALRGFDLRALMVLLIGVPILILMIYAHGQKVTYFLRPIWESPPKPFKTIPHYYHENVTMDNLCKLHGWKVRDFPRRVFDAVLFSNELDILEIRWNELSPYVSEFVLLESNSTFTGIKKPLHFKENKHRFGFAKSRLTYGNIGGRFVKGENPFVEESYQRVALDRLLKLARIEDDDLLIMSDVDEIPSGHTIDLLRWCDGIPDILHLQLRNYLYSFEFFLDDKSWRASIHKYQAGKTRYAHFRQADELLADSGWHCSFCFRYISDFAFKMQAYSHVDRIRFKYFLNPERIQDVICRGADLFDMLPEEYTFQEIIAKLGPIPSTYSGVHLPSYLLRNVDRFRYLLPGNCRRESG

SEQ ID NO: 68781 - DNA, 2105 bp, Sorghum bicolor
  CDS (436)..(1602)
tactggatcgcatctcatcgcatcgcatcgcagcaactccccccttcgcaccgttaccccctttgcgctccctcccagcaaatcaccaccgcgccccgcgtctcgcccacgctccctctctcaccaggagggaggagaggagaggagaggagaccggggccgagacgcgaacgcgcggacccctcgagggcgaggacgcgcacgcagccaccggccaggcgactacggctcccggcggccaggttcgggctctgctcccggggaccggggagccgatcgtgcgcgccattgggcccgcgcggggaagcggcaggcgcgtgctgtcttgacccgctccgcacccctcccggcggcggcggcggcgggcgtggtgctcctttgcctttgcggcaggtgcctgcttgtctgtgattctcctcctgcgtcctcggcgccatggaggccggctactgcaaccgcaagaagaccgacggcatctgcgagggcgtctgcgacagcgagcttggttcaaagtcagtcctgagcatgtcaaggttgaagtgtgcactgcgaggatttgatctgagggttctcttgattctgctgattggtgtgccaattctgatctttgccatatatgtgcatggccagaaggtgacttacttcctccgaccaatctgggaaaagcccccgaagcccttcacaatacgccctcactactatcatgaaaatgtctcgatggccaacctctgcaagttgcatggatggaaagtcagggagactccacgccgtgtcttcgatgctgtgctcttcagcaatgagcttgacatccttgatatccgttggcacgagcttagcccatatgtgtcagaatttgtgctgcttgaatccaattcaaccttcactggcataaagaaggaccttcacttcaaggaaaaccgccaacggtttgactttgctgaatcacggttgacctatggtatgataggcggaaggtttgtgaagggagaaaacccatttgttgaggaatcatatcaaagggttgctctcgaccagctcattaagattgcaggcatccaagatgacgacctgttgatcatgtccgatgttgatgagatcccaagtggtcataccatcaacctcttgagatggtgtgatgacattcctgagatacttcacctccagctgaggaactatctctactcattccagtttttactcgatgacaagagctggagggcttcagtacacagatacagagctggaaagacgaggtatgcacatttccggcaaacagatgaacttctggctgattcagggtggcactgcagcttctgcttccgctacataaatgacttcatcttcaagatgaaagcctacagccacgtcgatcggatcagattcaagtacttcctaaacccgaagaggattcagcacgtgatttgcgaaggggctgatcttttcgacatgctccctgaagaatacacattccaagagatcattgccaagctggggcctattccaagtacattctctgctgttcatctccctgcctatctgctggagcagaatgatcggtacagatatctccttccaggcaactgcattagagagagtggctaggcagctgctactgtctgcatcatgaccctgaggcgcacagacgtcgctcgcggatgtcccccgcactggaggagcgccctgccgtggtggggttgtatttctcatccgattggctgacttagttgagtgatcgcttggctgatggtggagttcatatgagattttgtaccgtgtaatggaaaccatggaaggcctgacagcagcataggggcatgctttgatcgcagctgcgttcttgttttgcagaggagctcagcagtgtgtgtgtgcttttataccacctgagtttttattcattgcttccatgattgatatatgaactcaaactatttgtagatctcataccgagcgacattcagattctttcctctttttttttctttgctctcgcccttgtgatgtacattgccattcacttaccctagttacctcttacctgagtcatgtcatgtgtatgctttcattccaatttctgattattgattgacagcggctctatatca

SEQ ID NO: 68782 - protein, 388 aa, Sorghum bicolor
MEAGYCNRKKTDGICEGVCDSELGSKSVLSMSRLKCALRGFDLRVLLILLIGVPILIFAIYVHGQKVTYFLRPIWEKPPKPFTIRPHYYHENVSMANLCKLHGWKVRETPRRVFDAVLFSNELDILDIRWHELSPYVSEFVLLESNSTFTGIKKDLHFKENRQRFDFAESRLTYGMIGGRFVKGENPFVEESYQRVALDQLIKIAGIQDDDLLIMSDVDEIPSGHTINLLRWCDDIPEILHLQLRNYLYSFQFLLDDKSWRASVHRYRAGKTRYAHFRQTDELLADSGWHCSFCFRYINDFIFKMKAYSHVDRIRFKYFLNPKRIQHVICEGADLFDMLPEEYTFQEIIAKLGPIPSTFSAVHLPAYLLEQNDRYRYLLPGNCIRESG

SEQ ID NO: 68783 - DNA, 1974 bp, Zea mays
  CDS (435)..(1601)
gtgcctgctgactgcctccctttggccgccttgcctgccacgcccacgcgcaatcagaagcaggccaccaccccaccctcccaaacggctataattacgcgggtgccctcgagcccggccggggcatcgcatagcagcaattccctcccccccgctccggcccctcgcaccgtttccctttccccgccgctcctccgaagccaccaccgcgccccgccccgcgagggcacgaaagaggaggaacgcggccaccggcggcgagggttcgggctcttgctcccgacggtttgcaacccgggagggagccgaccgtgcgcgcgcattgggcccgcgcgggggaagcggcaggcgcgtgccgtttttatttagcccgctccgctccgcgcccggcggctgcggggtgtggtgctcctgctgattttcttctcggcgccatggaggccggctactgcaaccgcaagaagaccgacggcatctgcgacggcgtctgcgacagcgagcttggttcaaagtcagtcctgagcatgtcgaggctgaagtgcgcgctgcggacattcgatctgagggttctcttgattctgctgatcggtgtgccaatcctgctcttcgccatctacgtgcacggccagaaggtgacctacttcctccggccgatctgggagaagcccccaaagcccttcaaagtactcccccactactaccacgagaacgtctcgatggccaacctctgcaagctgcacggatggagagtcagggagaccccgcgccgcgtcttcgacgccgtgctcttcagcaacgagctcgacatccttgacatccgctggcacgagctgagcccctacgtgtcggagttcgtgctgctggagtccaactcgaccttcaccggcataaggaaggacctccacttcagggagaaccggcagcggttcggcttcgccgagtcgcggctgacctacggcaccataggcgggaggttcgtgaagggagagaacccgttcgtggaggagtcgtaccagagggtcgccctcgaccagctgatcaagatcgcgggcatcgcggacgacgacctgctgatcatgtcggacgtggacgagatcccgagcgggcacaccgtgaacctcctgagatggtgcgacgacgtccccgaggtactccacctccagctccggaactacctctactcgttcgagttcctgctcgacgacaggagctggcgggcctcggtgcacaggtacagggccgggaggacgaggtacgcgcacttccggcagacggacgacctcctggccgattccgggtggcactgcagcttctgcttccgccgcatagacgacttcgtcttcaagatgaaggcctacagccacgtggaccggatcaggttcgggtacttcctgaacccgaggaggatccagcacgtgatctgcgagggggccgatctcttcgacatgctccccgaggagtacacgttccaggagatcatcgccaagctggggcctatcccgagcacgttctccgctgtccatctccccgcctatctgctggagcacaacgagcggtacaggtaccttctcccgggcaactgcgttagagagagtggctagtagctaaggctgtaaggcagctagctgtgttgctgtctgcatcgccatggcctgaggcgcaccgacgtcgctcgcggatgcatgcatgcgtggaggagcgccctgccgttgccggggttgttgtatctggatatacgactggctgggctgacttatatatttagatgatgaatgaatggtcgcttgaccgctgctggttcagttcgtatgagattttgtaccatggaaggccttcacagcagcatagcatgcttggtcgctgcttccttgttgttttgcaggcctgggtttttattcattgcttccatgattgatgtatgtatgaatgaactcaaactatttgtaggtgtcataccgagcgacattcatcccc

SEQ ID NO: 68784 - protein, 388 aa, Zea mays
MEAGYCNRKKTDGICDGVCDSELGSKSVLSMSRLKCALRTFDLRVLLILLIGVPILLFAIYVHGQKVTYFLRPIWEKPPKPFKVLPHYYHENVSMANLCKLHGWRVRETPRRVFDAVLFSNELDILDIRWHELSPYVSEFVLLESNSTFTGIRKDLHFRENRQRFGFAESRLTYGTIGGRFVKGENPFVEESYQRVALDQLIKIAGIADDDLLIMSDVDEIPSGHTVNLLRWCDDVPEVLHLQLRNYLYSFEFLLDDRSWRASVHRYRAGRTRYAHFRQTDDLLADSGWHCSFCFRRIDDFVFKMKAYSHVDRIRFGYFLNPRRIQHVICEGADLFDMLPEEYTFQEIIAKLGPIPSTFSAVHLPAYLLEHNERYRYLLPGNCVRESG

SEQ ID NO: 68785 - DNA, 2087 bp, Zea mays
  CDS (535)..(1701)
agagtacatatatttattttaaacgtcattatgtaaactgtatagtctaaaaaacaaaaggagtttttatgtggccatatacacatatcctacgaattgggggccgcagcgacaagcgtgaggacaaaatcgtacatctctcgatcgcggccgggccgggccactctctcgctcttgcgccggcgaccccgcggtttcgagccaatcaccgccaagtcctcgactccagcgcccttgccttgccaccccggccccagctaccacggggagctgcaaataacctgcggccccgaggaccggacagcaaaagcgcccaaccgctggagctccgccccggcgatcacccgccgggaacgtagcgcccggctccacagccgcgccattcgagctgctgctcgcgcgcggctggttcttctcggggggattttctttttgcgggcaccctccgctccccctcaccgccctgccgtcagccgtctcgttttcggattcgtttgctccggcggtggccgacctgccgtgcggggcgcggtgatgccggaggtggggcagtacgggtacaagaagaccgacggcatctgcgacagcgtgtgcggcgagcctgtgtcaaagacagctctgacgatgtcaaggctaaagtgcgctctccggggatttgatttaagggcacttatggtcctcttgattggtgtgccaattctaatcctaatgatatatgcgcatggtcagaaggtcacatacttcctgcggcccatctgggaatctcctcccaagcccttcaagacaatccctcactactaccatgagaacgtcaccatggagaacctgtgcaagttacatggttggaaagtccgtgacttcccgcgtcgtgtctttgatgctgtactcttcagcaatgagcttgatatcctggagatccgctggaatgagcttagtccctatgtgtccgagtttgtgcttcttgaatccaactcaacctttactggcataaaaaagcccctccacttcaaggaaaacaagcaccgttttgggttcgctaaatcacggctgacatatggtaatattgggggaaggttcgtgaagggggagaacccatttgttgaggagtcatatcagagggttgccctggaccggcttcttaagcttgcaagaatagaagacgatgacctgctgatcatgtcggacgttgatgaaatcccgagcggccacacaatcgatctcttaaggtggtgcgacggcattccagacatacttcaccttcagctcaggaattatctctactcgttcgagtttttcctggacgacaagagctggagggcatcgatacacaagtaccaagctggaaagacgaggtacgcgcacttccggcaggcagacgagctcctcgccgattcagggtggcattgcagcttctgcttccgctacataagcgatttcgcattcaagatgcaagcgtatagccacgtcgaccggatcaggttcaagtacttcctgaaccctgagaggatccaagatgtcatctgcagaggggcggaccttttcgatatgcttccagaagagtacacgttccaagagatcatcgccaagctggggccgatcccgagcacgtattctggcgttcatcttcctagctatctgctaaggaatgtcgaccggtttagataccttctaccgggcaactgcaggagagaaagtggctaggttttatggcccactaccctgcaacctgttgtgcgtgggtgggtgggtgccagtgccacactgccccgctgcaaagctgctgtccatgggatatctgtggcagttcacctggtacggttgcctaacgtagttgaacaaatgctttggggaagaattggttcatggatgggggtgagcacatgattctctaatgtgtaatagaacatgggaggaggatctaacggcatagcgcacgcttggtcctggctgggtgtgcatgagctgagcggtttgtcattgtcattcattacttccctgattgatatatataaactcaaaaaggctgttgtagattgcaatccaagtggtatttcagaattacaaatagtaaaaaaaaaaaagcggcc

SEQ ID NO: 68786 - protein, 388 aa, Zea mays
MPEVGQYGYKKTDGICDSVCGEPVSKTALTMSRLKCALRGFDLRALMVLLIGVPILILMIYAHGQKVTYFLRPIWESPPKPFKTIPHYYHENVTMENLCKLHGWKVRDFPRRVFDAVLFSNELDILEIRWNELSPYVSEFVLLESNSTFTGIKKPLHFKENKHRFGFAKSRLTYGNIGGRFVKGENPFVEESYQRVALDRLLKLARIEDDDLLIMSDVDEIPSGHTIDLLRWCDGIPDILHLQLRNYLYSFEFFLDDKSWRASIHKYQAGKTRYAHFRQADELLADSGWHCSFCFRYISDFAFKMQAYSHVDRIRFKYFLNPERIQDVICRGADLFDMLPEEYTFQEIIAKLGPIPSTYSGVHLPSYLLRNVDRFRYLLPGNCRRESG

SEQ ID NO: 68787 - DNA, 1173 bp, Oryza sativa
  CDS (1)..(1173)
atggaggccggcgggtactacaactgcaagaagacggacggcatctgcgaggacgtctgcgacagcgagcagcatggttcaaaggcagtttttagtatgtcaaggctgaagtgcgcacttcgggggtttgatttaagagcacttttgatcctcttgattggtctgccaattctgatctttgttatataccttcatggccagaaagtcacttacttcctcagaccaatctgggaaaagcccccaaagcccttcaaagtacttcctcactactacaacgaaaatgtctcaatggccaacttatgcaagttacatggatggaaagtcagggaaacgccgcggcgtgtttttgatgctgtgcttttcagcaacgagcttgatattcttgatatccgttggcatgagcttagcccttatgtgtcagagtttgtgttgcttgagtccaactcaaccttcactggccttaaaaaggatctccacttcaaggaaaaccgtcaacgttttgaatttgctgaatcacggttgacctatggtatgataggtggtcggtttgtgaagggggagaacccatttgtcgaggagtcatatcagagggttgctcttgaccagcttattaaaattgccgggatcacagatgatgacctgttgatcatgtctgatgttgatgagattccaagtgggcatacgatcaacctcttgagatggtgtgatgacatacctgaagtactccatctccagctcaggaactatctgtactcatttgaatttttccttgatgacaaaagttggagggcttcaattcacagataccgggctggaaagacgaggtatgcacatttccggcaaacagatgaccttctggctgattcaggatggcactgcagcttttgttttcgctacattagtgattttgtcttcaaaatgcaagcttatagccatgttgatcggattagatttaagtacttcctgaaccccaaaagaattcagcatgtgatatgccgaggagccgatcttttcgacatgcttcctgaagaatacacattccaagaaatcattgccaagctgggtccaatcccaagcacattttctgccgttcatcttcctgcttatttgctagagaaagtagatcagtacagttatcttcttccagggcgatgcatgagagagagtggctag

SEQ ID NO: 68788 - protein, 390 aa, Oryza sativa
MEAGGYYNCKKTDGICEDVCDSEQHGSKAVFSMSRLKCALRGFDLRALLILLIGLPILIFVIYLHGQKVTYFLRPIWEKPPKPFKVLPHYYNENVSMANLCKLHGWKVRETPRRVFDAVLFSNELDILDIRWHELSPYVSEFVLLESNSTFTGLKKDLHFKENRQRFEFAESRLTYGMIGGRFVKGENPFVEESYQRVALDQLIKIAGITDDDLLIMSDVDEIPSGHTINLLRWCDDIPEVLHLQLRNYLYSFEFFLDDKSWRASIHRYRAGKTRYAHFRQTDDLLADSGWHCSFCFRYISDFVFKMQAYSHVDRIRFKYFLNPKRIQHVICRGADLFDMLPEEYTFQEIIAKLGPIPSTFSAVHLPAYLLEKVDQYSYLLPGRCMRESG

SEQ ID NO: 68789 - DNA, 1176 bp, Oryza sativa (japonica cultivar-group)
  CDS (1)..(1176)
atggaggcggcgggctactacaactgcaagaagaacgacggcggcatctgcgggggcgtctgcggcggcagcgagcatggttcaaaggcaattctgagcatgtcaaggttgaagtgtgcgcttcgggggtttgatttgagggcacttctgatcctcttgattggtgtgccagctctaatattcattatatatgttcatggccagaaggtgacttactttcttcgaccgatctgggaaaaaccgccaaagcccttcaatgtgcttcctcactactatcatgaaaatgtctcgatggcaaacctatgcaagttgcatggatggaaagtcagggaaactccacgccgtgtttttgatgctgtgcttttcagcaatgagcttgacattcttgatatccgttggcatgagcttagcccatatgtgtcagaatttgtgctgctcgagtccaactcaaccttcactggcctgaaaaaggatctccacttcaaggaaaaccgtcaacgctttgaatttgctgaatcacggttgacctatggtatgataggtggaagatttgtgaagggggagaacccatttgtcgaggagtcatatcaaagggttgctcttgaccagcttatcaaaattgctggaatcacagatgatgaccttttgatcatgtctgatgttgatgagatccccagtggccatacaatcaacctcttgaggtggtgtgatgacactcctgaagtgcttcatctccagctcaggaactatctttactcatttcagtttctccttgacgacaagagttggagggcttcaatacacagataccgggctggaaagacgaggtatgcgcatttccggcaaacagacgaccttctggccgactcagggtggcactgcagcttttgcttccggcacataaatgattttgtcttcaaaatgcaagcttacagccatgttgaccggattagatttaagtacttcttgaaccccaaaaggattcagcatgtgatatgccaaggagctgatctttttgacatgcttcccgaagagtatacattccaagagatcattgccaagttggggccaatccctagcacattttcagctgttcaccttcctgcttatctgttggagaaaatggaccagtaccgctatcttcttccgggcaactgcatgcgagaaagtggctag

SEQ ID NO: 68790 - protein, 391 aa, Oryza sativa (japonica cultivar-group)
MEAAGYYNCKKNDGGICGGVCGGSEHGSKAILSMSRLKCALRGFDLRALLILLIGVPALIFIIYVHGQKVTYFLRPIWEKPPKPFNVLPHYYHENVSMANLCKLHGWKVRETPRRVFDAVLFSNELDILDIRWHELSPYVSEFVLLESNSTFTGLKKDLHFKENRQRFEFAESRLTYGMIGGRFVKGENPFVEESYQRVALDQLIKIAGITDDDLLIMSDVDEIPSGHTINLLRWCDDTPEVLHLQLRNYLYSFQFLLDDKSWRASIHRYRAGKTRYAHFRQTDDLLADSGWHCSFCFRHINDFVFKMQAYSHVDRIRFKYFLNPKRIQHVICQGADLFDMLPEEYTFQEIIAKLGPIPSTFSAVHLPAYLLEKMDQYRYLLPGNCMRESG

SEQ ID NO: 68791 - DNA, 1077 bp, Oryza sativa (japonica cultivar-group)
  CDS (1)..(1077)
atgtcaaggctgaagtgcgcacttcgggggtttgatttaagagcacttttgatcctcttgattggtctgccaattctgatctttgttatataccttcatggccagaaagtcacttacttcctcagaccaatctgggaaaagcccccaaagcccttcaaagtacttcctcactactacaacgaaaatgtctcaatggccaacttatgcaagttacatggatggaaagtcagggaaacgccgcggcgtgtttttgatgctgtgcttttcagcaacgagcttgatattcttgatatccgttggcatgagcttagcccttatgtgtcagagtttgtgttgcttgagtccaactcaaccttcactggccttaaaaaggatctccacttcaaggaaaaccgtcaacgttttgaatttgctgaatcacggttgacctatggtatgataggtggtcggtttgtgaagggggagaacccatttgtcgaggagtcatatcagagggttgctcttgaccagcttattaaaattgccgggatcacagatgatgacctgttgatcatgtctgatgttgatgagattccaagtgggcatacgatcaacctcttgagatggtgtgatgacatacctgaagtactccatctccagctcaggaactatctgtactcatttgaatttttccttgatgacaaaagttggagggcttcaattcacagataccgggctggaaagacgaggtatgcacatttccggcaaacagatgaccttctggctgattcaggatggcactgcagcttttgttttcgctacattagtgattttgtcttcaaaatgcaagcttatagccatgttgatcggattagatttaagtacttcctgaaccccaaaagaattcagcatgtgatatgccgaggagccgatcttttcgacatgcttcctgaagaatacacattccaagaaatcattgccaagctgggtccaatcccaagcacattttctgccgttcatcttcctgcttatttgctagagaaagtagatcagtacagttatcttcttccagggcgatgcatgagagagagtggctag

SEQ ID NO: 68792 - protein, 358 aa, Oryza sativa (japonica cultivar-group)
MSRLKCALRGFDLRALLILLIGLPILIFVIYLHGQKVTYFLRPIWEKPPKPFKVLPHYYNENVSMANLCKLHGWKVRETPRRVFDAVLFSNELDILDIRWHELSPYVSEFVLLESNSTFTGLKKDLHFKENRQRFEFAESRLTYGMIGGRFVKGENPFVEESYQRVALDQLIKIAGITDDDLLIMSDVDEIPSGHTINLLRWCDDIPEVLHLQLRNYLYSFEFFLDDKSWRASIHRYRAGKTRYAHFRQTDDLLADSGWHCSFCFRYISDFVFKMQAYSHVDRIRFKYFLNPKRIQHVICRGADLFDMLPEEYTFQEIIAKLGPIPSTFSAVHLPAYLLEKVDQYSYLLPGRCMRESG

SEQ ID NO: 68793 - DNA, 1167 bp, Oryza sativa (japonica cultivar-group)
  CDS (1)..(1167)
atgccggagaccgggccctacggccacaagaagaccgacggcatctgcgacggcgtgtgcggcgagcctgcgtcaaaggcagttctgaccatgtcgaggctgagatgtgcacttcggggatttgatttcagagcactattggccctattgataggagtgccaattctaattttaatgatatatgctcatggtcagaaggtcacatacttcctcaggccaatatgggagtctcctcccaagcccttcaaaactatccctcattactaccatgagaatgtcaccatggcgaaactctgcaagttgcatgggtggaaagtccgggagaccccacgacgtgtcttcgatgctgtactattcagcaatgagctcgatattcttgaaatacgttggaatgaactaagcccctatgtctcagagtttgtgctgcttgagtcgaactcaaccttcactggattgaaaaagcccctgcacttcaaggaaaatcgtcatcgatttggatttgctgaatcacggctgacatatggtatgattgggggaaggttcgtgaagggagaaaacccatttgttgaggagtcatatcagagggttgccctggaccagcttattaagattgcaaaaatagaagatgatgacctgttgatcatgtcagatgttgatgaaatcccaagtggccacacaattgatctcctgagatggtgcgacgacattcctgagatccttcatcttcagcttaggaattacctctactcatttgaatttttcctggatgacaaaagttggagggcatcgatacacaggtacaggtctgggaagacaagatatgcacacttccggcagacagatgagcttcttgctgattcagggtggcactgcagtttttgctttcgctacattagtgattttgccttcaaaatgcaagcttacagccatgtcgatcggattagatttaagtacttcctgaaccctgaaaggattcaagatgttatatgcagaggggcggatctttttgacatgcttcctgaagagtacacgttccaagagatcattgccaagttggggccgattccaagcacattttctgctgttcatcttcctagctatctgctacagaatgttgatcggtacagataccttctcccagggtactgcaggagagaaagtgggtag

SEQ ID NO: 68794 - protein, 388 aa, Oryza sativa (japonica cultivar-group)
MPETGPYGHKKTDGICDGVCGEPASKAVLTMSRLRCALRGFDFRALLALLIGVPILILMIYAHGQKVTYFLRPIWESPPKPFKTIPHYYHENVTMAKLCKLHGWKVRETPRRVFDAVLFSNELDILEIRWNELSPYVSEFVLLESNSTFTGLKKPLHFKENRHRFGFAESRLTYGMIGGRFVKGENPFVEESYQRVALDQLIKIAKIEDDDLLIMSDVDEIPSGHTIDLLRWCDDIPEILHLQLRNYLYSFEFFLDDKSWRASIHRYRSGKTRYAHFRQTDELLADSGWHCSFCFRYISDFAFKMQAYSHVDRIRFKYFLNPERIQDVICRGADLFDMLPEEYTFQEIIAKLGPIPSTFSAVHLPSYLLQNVDRYRYLLPGYCRRESG

SEQ ID NO: 68795 - DNA, 1095 bp, Oryza sativa (japonica cultivar-group)
  CDS (1)..(1095)
atggctagaacctctccttttccacctctaactagacggaaaatcgcttccctcaagttgctgataccatgtgttctagttctttcagtggctgttattgttgttacgcagtatttccataatatctcttaccttctgcggccactgtgggacacaccacctaagccatttatccgcatcccacactactatgcccccaacatctccatgccgcagctctgtcagctccatggttggggtatcctccccacccctcgccgtgtctttgacgccgtcctcttcagtaatgaacttgatattctagaaattcgctacggtgagctccttccgtatgttgacaggtttgtcatccttgaagctaatgccacattcactggcatcccgaagtcactctctttcttggaaaatatcaatcgctttgcattcgctggctccaagattgtgtatgacatgcttcctgtcatggaaatggatcccggttctcaccgtcagcccttccatgttgaggccggccaccgtcgtgcgcttaatatgctgctgcgaagatcaggcattgctgtgggggatgtattgatcatggctgatgctgatgagatccctagccctgagacggtgcagttgctcaagtggtgtgatggaataccgcaagtcatgcatctcgagctgaagaactatatgtactcctttgaatttcctatagactacaacagctggagggccacagcacatgtgttcactgagcatacattgtaccgccactcccgtcagagcaaccttctgctggctgatgcaggctggcattgtagcttctgcttcaaggacatcaaggagtttgctttcaagatgaaggcatatagccacgcagaccgggtgaagcaggacagcttcctaaatccagacagaatccagagggtcatatgtaatggggaggacctgtttgacatgctgcctgaagagtacacattcaaggatctcttcaagaagatgggacccataccaaagtcaggatctgctgttcatctgccttcctatttgatcaagaacgcagacaagttcagattcttgctccctggtggatgcttgagaccaggctaa

SEQ ID NO: 68796 - protein, 364 aa, Oryza sativa (japonica cultivar-group)
MARTSPFPPLTRRKIASLKLLIPCVLVLSVAVIVVTQYFHNISYLLRPLWDTPPKPFIRIPHYYAPNISMPQLCQLHGWGILPTPRRVFDAVLFSNELDILEIRYGELLPYVDRFVILEANATFTGIPKSLSFLENINRFAFAGSKIVYDMLPVMEMDPGSHRQPFHVEAGHRRALNMLLRRSGIAVGDVLIMADADEIPSPETVQLLKWCDGIPQVMHLELKNYMYSFEFPIDYNSWRATAHVFTEHTLYRHSRQSNLLLADAGWHCSFCFKDIKEFAFKMKAYSHADRVKQDSFLNPDRIQRVICNGEDLFDMLPEEYTFKDLFKKMGPIPKSGSAVHLPSYLIKNADKFRFLLPGGCLRPG

SEQ ID NO: 68797 - DNA, 1179 bp, Arabidopsis thaliana
  CDS (1)..(1179)
atgtggtggatgatgggagaagctggtgggcattactgttctaagaagactgatgatatctgcggcggtgtttgtagtcaggaacctggaagattcttcagcttttctagactttgttgtgctcttcgtggtgttgatatgaagacttatatcttcttattagtgattgttcccacatgtgtactcgctggctatgtccacggtcagaagatttcttactttctccggcctttatgggaatcaccacctaaaccttttcatgacattcctcattactaccacgagaacgcttctatggagactctttgtaaactccatggctggggtgttcgagactaccctagacgagtttatgatgcggttttgttcagtaacgagcttgatatcctcgctgttcgttggagagaattgtttccttacatcactcagtttgtcctccttgaatcaaacacgacgttcactggcttgcctaagcctcttgtctttgctgctcaccgagatgagttcaagtttattgagtcacgcttgacttatggtactgttggtggaagatttgtcaaagggcagaatccgttttacgaagaggcgtatcagcgggtagctcttgatcagcttctgagaatcgctgggattactgatgatgacttgttgttaatgtctgatgtcgatgagattccaagtagacacaccattaaccttttgagatggtgcgatgagatcccgaagatacttcatctgcgcctcaagaactatctttactcgtttgaattccttgttgataacaaaagctggagagcttccatccacagatatgagacgggtaagacacggtatgctcattatcgacagtctgatgaaatcttggcggatgcaggatggcattgtagcttttgcttccgacgaatcagtgagtttatattcaagatgaaagcttatagccataatgacagagtgaggtttggtcatttcttgaatcctaagagagttcaaagagttatatgcaaaggagctgatcttttcgatatgctccctgaagagtataccttcaaggagataataggaaaaatgggtccaatcccgcattctttctcagctgttcatcttccttcgtatctcctggaaaacgcggataagtacagatttctcttgccgggaaattgcataagagaaagcgaatga

SEQ ID NO: 68798 - protein, 392 aa, Arabidopsis thaliana
MWWMMGEAGGHYCSKKTDDICGGVCSQEPGRFFSFSRLCCALRGVDMKTYIFLLVIVPTCVLAGYVHGQKISYFLRPLWESPPKPFHDIPHYYHENASMETLCKLHGWGVRDYPRRVYDAVLFSNELDILAVRWRELFPYITQFVLLESNTTFTGLPKPLVFAAHRDEFKFIESRLTYGTVGGRFVKGQNPFYEEAYQRVALDQLLRIAGITDDDLLLMSDVDEIPSRHTINLLRWCDEIPKILHLRLKNYLYSFEFLVDNKSWRASIHRYETGKTRYAHYRQSDEILADAGWHCSFCFRRISEFIFKMKAYSHNDRVRFGHFLNPKRVQRVICKGADLFDMLPEEYTFKEIIGKMGPIPHSFSAVHLPSYLLENADKYRFLLPGNCIRESE

SEQ ID NO: 68799 - DNA, 1173 bp, Arabidopsis thaliana
  CDS (1)..(1173)
atgtggtggatgatgggagaaaacggtggtcactactgttctaaaaagtccgatgatttatgcggaactcaggaatcagatcgaggctttggtatttcaagactctgttgtatcttgcgtggtgtggatttaaaatcggttctgtttctgttagtaatcatgccaatgtgtgttcttggtgtatacattaacgctctcaagatttcatatttcttgagacctttatgggaatcaccaccaaaaccattccatgagataccgcattatcaccacgagaacgcttctatggaatctctctgtaaactccacggttggagaacccgtgagtaccctcgtcgtgtctacgacgctgttttgttcagtactgaagttgaactcctcacgatacggtggaaagaactgtacccatatgttactcagtttgttctacttgaatctaactcgactttcaccggattaccaaaaccgcttgttttcgcggggcatagggatgagtttaagtttatcgagccacggttgacttacgggtcgataggaggaaggtttaagaaaggtgagaagaatcctttttacgaagaggcttatcaaagaatcgcattggatcagctattgagaatagctggtatcactgatgatgacttgttgattatgtctgatgttgatgagattccgagtagacatacgataaatcttctccgttggtgcgatgacataccacaaattcttcatcttagactgaagaattacttgtactcttttgagttccctgttgatgataagagctggagagcatcggtgcatagataccagacgggtaaaacaaggtatgcgcattatcgacagtctgatgttatcttggcggattcagggtggcattgcagtttctgttttagacgtataagcgagtttgtgtttaagatgaaagcttatagtcattatgatcgagtgagattcgcgcattacttgaacccgaaaagggttcaaagagttatatgcagcggatcggatttgttcgatatgattcccgaggaatacacgtttaaagacatcattggtaaaatgggaccgatcccgcattcttactccgcggttcatcttccggcgtaccttttagagaacgcggagaggtacaagtttcttcttccggggaactgtttgagagatgaggaatga

SEQ ID NO: 68800 - protein, 390 aa, Arabidopsis thaliana
MWWMMGENGGHYCSKKSDDLCGTQESDRGFGISRLCCILRGVDLKSVLFLLVIMPMCVLGVYINALKISYFLRPLWESPPKPFHEIPHYHHENASMESLCKLHGWRTREYPRRVYDAVLFSTEVELLTIRWKELYPYVTQFVLLESNSTFTGLPKPLVFAGHRDEFKFIEPRLTYGSIGGRFKKGEKNPFYEEAYQRIALDQLLRIAGITDDDLLIMSDVDEIPSRHTINLLRWCDDIPQILHLRLKNYLYSFEFPVDDKSWRASVHRYQTGKTRYAHYRQSDVILADSGWHCSFCFRRISEFVFKMKAYSHYDRVRFAHYLNPKRVQRVICSGSDLFDMIPEEYTFKDIIGKMGPIPHSYSAVHLPAYLLENAERYKFLLPGNCLRDEE

SEQ ID NO: 68801 - DNA, 1086 bp, Arabidopsis thaliana
  CDS (1)..(1086)
atgacgattcgatcgttgcgtaaaccaccgccggttaaacttgtgtttcctactctgattatactcttcttgacatgtttgttatgtatcttaacaaatttccaaaccatatcgtatcttttccgtccgctttgggataaaccgccaccgccttttaaacggataccgcattactatgcggagaatgtttccatgggacatctttgtgagcttcacggctggacaccgcggttagaaccgaggcgagtgtttgatgccatcattttcagtaatgagcttgatcttcttgaagtcagatggcgggaattggagccttatgtgtcgaagtttgtgatattggagtcaaacactacgtttaccgggatcccgaagccgcttttcttcgattccaataaggagagatttgcgtttgcggaggggaagattgtacatggagtgtttcctgggaagaaacggtctacggggcagccgtatgaggatccgtttttgcttgaggggcaacagcgagttgcgatgaactggttgcttagagaagctggtgtatcggatggagatgcggtgataatgtcagatgcagacgagattccgagtcctcatactgtgaagtttctacagtggtgtgatgggataccagatgtaatgcatttggagatgagggaatacatgtactcctttgagtttccggttgattacagtagctggagagcctctgttcatatatatagtaggaagtggactcaataccggcactcacgacaaacggacttgatattatccgacgcagggtggcattgcagcttctgtttcagacgactcaacgagtttgttttcaagatgaaaggttatagtcatgcagatagagtcaaacgcaaggagtttttggattatcagaggatacaaaaacatatttgcaaaggttatgatctctttgacatgcttcctgaaaaatacagcttccaagagttgattagcaaaatcggacccatcccgccttctgcgtctgcggtacatctaccagcctttttgattcagaacgctgctcgctttcggtttctcctcccgggaggttgtctccgagaaccctag

SEQ ID NO: 68802 - protein, 361 aa, Arabidopsis thaliana
MTIRSLRKPPPVKLVFPTLIILFLTCLLCILTNFQTISYLFRPLWDKPPPPFKRIPHYYAENVSMGHLCELHGWTPRLEPRRVFDAIIFSNELDLLEVRWRELEPYVSKFVILESNTTFTGIPKPLFFDSNKERFAFAEGKIVHGVFPGKKRSTGQPYEDPFLLEGQQRVAMNWLLREAGVSDGDAVIMSDADEIPSPHTVKFLQWCDGIPDVMHLEMREYMYSFEFPVDYSSWRASVHIYSRKWTQYRHSRQTDLILSDAGWHCSFCFRRLNEFVFKMKGYSHADRVKRKEFLDYQRIQKHICKGYDLFDMLPEKYSFQELISKIGPIPPSASAVHLPAFLIQNAARFRFLLPGGCLREP

SEQ ID NO: 68803 - DNA, 1167 bp, Arabidopsis thaliana
  CDS (1)..(1167)
atgtccgatggttatcgtagttctaagaagacggatactatctgcgaagatgtttgtggacaggaaggttctcgagcaggcaaggccatttcaaggcttagatgtgttctaagaggactcgatttcaaaacattcctgtttctcttcactctcctgccactcttcatcttcggcatctatctacacggccagaagatcacatatttcttgagacctctatgggaatcacctcctaaaccttttaacatccttccgcattactatcacgagaacacttccatggaattgctctgcaatcttcatggctggaaactccgcgaatctccaagaagagtctttgatgctgccttgttcagtaacgagatcgatatgctcactctccgttggaatgagttaaatccttacattactcagtttgtgcttctcgaatctaactcaactttcaccggactgtcaaaacagttggctttcgcagacaacagggagaagaatttcaaattcgttgagccaaggctgacttatgggaacgttggaggaaggttcaagaaaggcgaaaacccctttgtggaggaatcattccaaaggcttgcacttgaccagttgatcaagctcgcaggtataaaagaagatgatcttttgataatgtcggatgtcgatgagatcccgagcggccataccatcaatctgcttagatggtgtgacgggttcccaccgatccttcatcttcagttgagaaactacctctactcatatgagtactatgtcgatagcaaaagctggagagcttcggttcatctctacaagcctgggaaaactcggtgcgctcatttccggcaaagcaacaatcttttgacagattcaggttggcattgcagtttctgtttcagacacatcaatgacttcgtgttcaagatgaaagcttatagccatactgaccgggttagattcttacattatctgaacccgagacgaatccaagacattatctgcaaaggaactgatcttttcgatatgcttcctgaagaacacacattcagggagattatcggcaaacttggtccgattccacggtcttattcagctgttcatctccctggatacttgattcagaatgctgatagctacaagtacttattacctgggaactgcaaacgagaatctggctga

SEQ ID NO: 68804 - protein, 388 aa, Arabidopsis thaliana
MSDGYRSSKKTDTICEDVCGQEGSRAGKAISRLRCVLRGLDFKTFLFLFTLLPLFIFGIYLHGQKITYFLRPLWESPPKPFNILPHYYHENTSMELLCNLHGWKLRESPRRVFDAALFSNEIDMLTLRWNELNPYITQFVLLESNSTFTGLSKQLAFADNREKNFKFVEPRLTYGNVGGRFKKGENPFVEESFQRLALDQLIKLAGIKEDDLLIMSDVDEIPSGHTINLLRWCDGFPPILHLQLRNYLYSYEYYVDSKSWRASVHLYKPGKTRCAHFRQSNNLLTDSGWHCSFCFRHINDFVFKMKAYSHTDRVRFLHYLNPRRIQDIICKGTDLFDMLPEEHTFREIIGKLGPIPRSYSAVHLPGYLIQNADSYKYLLPGNCKRESG

SEQ ID NO: 68805 - DNA, 1164 bp, Arabidopsis thaliana
  CDS (1)..(1164)
atgtccgatggatactatagttctaagaagacagacgatatctgcgatgatgtttgtggacaggatggttctcgagcagccaaggccttctctagggttagatgtgtactacgaggatttgatttcaagacatatatcttcttcttcaccattgtccctattttcatctttggagtctatttgcatggtcagaagctcacatatttcttgagaccgctttgggaatctccaccaaagccgtttcaaacgctaccccattactaccatgagaacgcctccatggcaacactctgcagtcttcatggctggaaacaccgtgaatctccgagaagggtctttgatgctgtgttgttcagcaatgaagttgatatgcttactatccggtggaaagagctttatccttacataacacagtttgtgatccttgaatcaaactctactttcactggtttgcctaaacctttggttttcaatgggaatcgagcgaagttcgagtttgctgagccgaggctgagttatgggaacattgcaggacgattcaagaaaggagaaaacccgtttgtggaagaagcttaccagaggattgcattggatcagctgatcagactggctggtatagaagaagatgatctgttgataatgtctgatgttgatgagattcctagcgctcataccatcaatctgcttagatggtgcgatggatacccaccgattcttcatcttcagttgaaaaactacttatactcattcgagtacttcgttgacaacaaaagctggagagcttctattcatcagtacaagcctgggaagactcgatacgctcatttccgtcaaggcaacactcttttagcagattctggttggcattgcagtttctgtttcaggcacatcagtgagtttatattcaagatgaaagcgtacagtcacaatgaccgggtcagattctctcattatctaaacccaaaaagaatacaagatgtgatctgtaaaggaactgatctgttcgatatgcttcctgaagagtatacgttcagggaaatcatcgggaaactaggtccaatcccgcggtcttattccgcagttcatctaccagctcatctgatagaaaaagctgagagttacaaatacttgttacctgggaactgcataagggaaagtggctga

SEQ ID NO: 68806 - protein, 387 aa, Arabidopsis thaliana
MSDGYYSSKKTDDICDDVCGQDGSRAAKAFSRVRCVLRGFDFKTYIFFFTIVPIFIFGVYLHGQKLTYFLRPLWESPPKPFQTLPHYYHENASMATLCSLHGWKHRESPRRVFDAVLFSNEVDMLTIRWKELYPYITQFVILESNSTFTGLPKPLVFNGNRAKFEFAEPRLSYGNIAGRFKKGENPFVEEAYQRIALDQLIRLAGIEEDDLLIMSDVDEIPSAHTINLLRWCDGYPPILHLQLKNYLYSFEYFVDNKSWRASIHQYKPGKTRYAHFRQGNTLLADSGWHCSFCFRHISEFIFKMKAYSHNDRVRFSHYLNPKRIQDVICKGTDLFDMLPEEYTFREIIGKLGPIPRSYSAVHLPAHLIEKAESYKYLLPGNCIRESG

SEQ ID NO: 68807 - DNA, 1176 bp, Oryza sativa subsp
  CDS (1)..(1176)
atggaggcggcgggctactacaactgcaagaagaacgacggcggcatctgcgggggcgtctgcggcggcagcgagcatggttcaaaggcaattctgagcatgtcaaggttgaagtgtgcgcttcgggggtttgatttgagggcacttctgatcctcttgattggtgtgccagctctaatattcattatatatgttcatggccagaaggtgacttactttcttcgaccgatctgggaaaaaccgccaaagcccttcaatgtgcttcctcactactatcatgaaaatgtctcgatggcaaacctatgcaggttgcatggatggaaagtcagggaaactccacgccgtgtttttgatgctgtgcttttcagcaatgagcttgacattcttgatatccgttggcatgagcttagcccatatgtgtcagaatttgtgctgctcgagtccaactcaaccttcactggcctgaaaaaggatctccacttcaaggaaaaccgtcaacgttttgaatttgctgaatcacggttgacctatggtatgataggtggaagatttgtgaagggggagaacccatttgtcgaggagtcatatcaaagggttgctcttgaccagcttatcaaaattgctggaatcacagatgatgaccttttgatcatgtctgatgttgatgagatccccagtggccatacaatcaacctcttgaggtggtgtgatgacactcctgaagtgcttcatctccagctcaggaactatctttactcatttcagtttctccttgacgacaagagttggagggcttcaatacacagataccgggctggaaagacgaggtatgcgcatttccggcaaacagacgaccttctggccgactcagggtggcactgcagcttttgcttccggcacataaatgattttgtcttcaaaatgcaagcttacagccatgttgaccggattagatttaagtacttcttgaaccccaaaaggattcagcatgtgatatgccaaggagctgatctttttgacatgcttcccgaagagtatacattccaagagatcattgccaagttggggccaatccctagcacattttcagctgttcaccttcctgcttatctgttggagaaaatggaccagtaccgctatcttcttccgggcaactgcatgcgagaaagtggctag

SEQ ID NO: 68808 - protein, 391 aa, Oryza sativa subsp
MEAAGYYNCKKNDGGICGGVCGGSEHGSKAILSMSRLKCALRGFDLRALLILLIGVPALIFIIYVHGQKVTYFLRPIWEKPPKPFNVLPHYYHENVSMANLCRLHGWKVRETPRRVFDAVLFSNELDILDIRWHELSPYVSEFVLLESNSTFTGLKKDLHFKENRQRFEFAESRLTYGMIGGRFVKGENPFVEESYQRVALDQLIKIAGITDDDLLIMSDVDEIPSGHTINLLRWCDDTPEVLHLQLRNYLYSFQFLLDDKSWRASIHRYRAGKTRYAHFRQTDDLLADSGWHCSFCFRHINDFVFKMQAYSHVDRIRFKYFLNPKRIQHVICQGADLFDMLPEEYTFQEIIAKLGPIPSTFSAVHLPAYLLEKMDQYRYLLPGNCMRESG

SEQ ID NO: 68809 - DNA, 1533 bp, Oryza sativa subsp
  CDS (1)..(1533)
atggaggccggcgggtactacaactgcaagaagacggacggcatctgcgaggacgtctgcgacagcgaggactatattcataagcatctttgccaaaatcctcaattctgccatacacaacctgcatcgtttgtaactgtcatctctgataggactacattcataagcatctttgccaaaatcctcaattctgccatacaacctgcatcttttcatggttcaaaggcagtttttagtatgtcaaggctgaagtgcgcacttcgggggtttgatttaagagcacttttgatcctcttgattggtctgccaattctgatctttgttatataccttcatggccagaaagtcacttacttcctcagaccaatctgggaaaagcccccaaagcccttcaaagtacttcctcactactacaacgaaaatgtctcaatggccaacttatgcaagttacatggatggaaagtcagggaaacgccgcggcgggtttttgatgctgtgcttttcagcaacgagcttgatattcttgatatccgttggcatgagcttagcccttatgtgtcagagtttgtgttgcttgagtccaactcaaccttcactggccttaaaaaggatctccacttcaaggaaaaccgtcaacgttttgaatttgctgaatcacggttgacctatggtatgataggtggtcggtttgtgaagggggagaacccatttgtcgaggagtcatatcagagggttgctcttgaccagcttattaaaattgccgggatcacagatgatgacctgttgatcatgtctgatgttgatgagattccaagtgggcatacgatcaacctcttgagatggtgtgatgacatacctgaagtactccatctccagctcaggaactatctgtactcatttgaatttttccttgatgacaaaagttggagggcttcaattcacagataccgggctggaaagacgagatatgcacatttccggcaaacagatgaccttctggctgattcaggatggcactgcagcttttgttttcgctacattagtgattttgtcttcaaaatgcaagcttatagccatgttgatcggattagatttaagtacttcctgaaccccaaaagaattcagcatgtgatatgccgaggagccgatcttttcgacatgcttcctgaagaatacacattccaagaaatcattgccaagctgggtccaatcccaagcacattttctgccgttcatcttcctgcttatttgctagagaaaatgagttaccctgcattgattctccgggcaataatcatcctcctgtcatttgatatatttgctgtgcactacagaaagcacatgtataatgcagttggtgtttggtctcagctaactgtttgcaaacaaccagagcaaacaaccagagtcgttgcagttattgtgagggttcgtctgttcgtgccgttaagcgacatgttaaggcggcattttgtgggacgaagtgggttggaacaggctgttcttgtcggacgtccgcttcagccagattga

SEQ ID NO: 68810 - protein, 510 aa, Oryza sativa subsp
MEAGGYYNCKKTDGICEDVCDSEDYIHKHLCQNPQFCHTQPASFVTVISDRTTFISIFAKILNSAIQPASFHGSKAVFSMSRLKCALRGFDLRALLILLIGLPILIFVIYLHGQKVTYFLRPIWEKPPKPFKVLPHYYNENVSMANLCKLHGWKVRETPRRVFDAVLFSNELDILDIRWHELSPYVSEFVLLESNSTFTGLKKDLHFKENRQRFEFAESRLTYGMIGGRFVKGENPFVEESYQRVALDQLIKIAGITDDDLLIMSDVDEIPSGHTINLLRWCDDIPEVLHLQLRNYLYSFEFFLDDKSWRASIHRYRAGKTRYAHFRQTDDLLADSGWHCSFCFRYISDFVFKMQAYSHVDRIRFKYFLNPKRIQHVICRGADLFDMLPEEYTFQEIIAKLGPIPSTFSAVHLPAYLLEKMSYPALILRAIIILLSFDIFAVHYRKHMYNAVGVWSQLTVCKQPEQTTRVVAVIVRVRLFVPLSDMLRRHFVGRSGLEQAVLVGRPLQPD

SEQ ID NO: 68811 - DNA, 1143 bp, Oryza sativa subsp
  CDS (1)..(1143)
atgggattaggtgaagttcaagcttggatgcttctggcgccgcatggttcaaaggcaattctgagcatgtcaaggttgaagtgtgcgcttcgggggtttgatttgagggcacttctgatcctcttgattggtgtgccagctctaatattcattatatatgttcatggccagaaggtgacttactttcttcgaccgatctgggaaaaaccgccaaagcccttcaatgtgcttcctcactactatcatgaaaatgtctcgatggcaaacctatgcaagttgcatggatggaaagtcagggaaactccacgccgtgtttttgatgctgtgcttttcagcaatgagcttgacattcttgatatccgttggcatgagcttagcccatatgtgtcagaatttgtgctgctcgagtccaactcaaccttcactggcctgaaaaaggatctccacttcaaggaaaaccgtcaacgctttgaatttgctgaatcacggttgacctatggtatgataggtggaagatttgtgaagggggagaacccatttgtcgaggagtcatatcaaagggttgctcttgaccagcttatcaaaattgctggaatcacagatgatgaccttttgatcatgtctgatgttgatgagatccccagtggccatacaatcaacctcttgaggtggtgtgatgacactcctgaagtgcttcatctccagctcaggaactatctttactcatttcagtttctccttgacgacaagagttggagggcttcaatacacagataccgggctggaaagacgaggtatgcgcatttccggcaaacagacgaccttctggccgactcagggtggcactgcagcttttgcttccggcacataaatgattttgtcttcaaaatgcaagcttacagccatgttgaccggattagatttaagtacttcttgaaccccaaaaggattcagcatgtgatatgccaaggagctgatctttttgacatgcttcccgaagagtatacattccaagagatcattgccaagttggggccaatccctagcacattttcagctgttcaccttcctgcttatctgttggagaaaatggaccagtaccgctatcttcttccgggcaactgcatgcgagaaagtggctag

SEQ ID NO: 68812 - protein, 380 aa, Oryza sativa subsp
MGLGEVQAWMLLAPHGSKAILSMSRLKCALRGFDLRALLILLIGVPALIFIIYVHGQKVTYFLRPIWEKPPKPFNVLPHYYHENVSMANLCKLHGWKVRETPRRVFDAVLFSNELDILDIRWHELSPYVSEFVLLESNSTFTGLKKDLHFKENRQRFEFAESRLTYGMIGGRFVKGENPFVEESYQRVALDQLIKIAGITDDDLLIMSDVDEIPSGHTINLLRWCDDTPEVLHLQLRNYLYSFQFLLDDKSWRASIHRYRAGKTRYAHFRQTDDLLADSGWHCSFCFRHINDFVFKMQAYSHVDRIRFKYFLNPKRIQHVICQGADLFDMLPEEYTFQEIIAKLGPIPSTFSAVHLPAYLLEKMDQYRYLLPGNCMRESG

SEQ ID NO: 68813 - DNA, 1533 bp, Oryza sativa subsp
  CDS (1)..(1533)
atggaggccggcgggtactacaactgcaagaagacggacggcatctgcgaggacgtctgcgacagcgaggactatattcataagcatctttgccaaaatcctcaattctgccatacacaacctgcatcgtttgtaactgtcatctctgataggactacattcataagcatctttgccaaaatcctcaattctgccatacaacctgcatcttttcatggttcaaaggcagtttttagtatgtcaaggctgaagtgcgcacttcgggggtttgatttaagagcacttttgatcctcttgattggtctgccaattctgatctttgttatataccttcatggccagaaagtcacttacttcctcagaccaatctgggaaaagcccccaaagcccttcaaagtacttcctcactactacaacgaaaatgtctcaatggccaacttatgcaagttacatggatggaaagtcagggaaacgccgcggcgtgtttttgatgctgtgcttttcagcaacgagcttgatattcttgatatccgttggcatgagcttagcccttatgtgtcagagtttgtgttgcttgagtccaactcaaccttcactggccttaaaaaggatctccacttcaaggaaaaccgtcaacgttttgaatttgctgaatcacggttgacctatggtatgataggtggtcggtttgtgaagggggagaacccatttgtcgaggagtcatatcagagggttgctcttgaccagcttattaaaattgccgggatcacagatgatgacctgttgatcatgtctgatgttgatgagattccaagtgggcatacgatcaacctcttgagatggtgtgatgacatacctgaagtactccatctccagctcaggaactatctgtactcatttgaatttttccttgatgacaaaagttggagggcttcaattcacagataccgggctggaaagacgaggtatgcacatttccggcaaacagatgaccttctggctgattcaggatggcactgcagcttttgttttcgctacattagtgattttgtcttcaaaatgcaagcttatagccatgttgatcggattagatttaagtacttcctgaaccccaaaagaattcagcatgtgatatgccgaggagccgatcttttcgacatgcttcctgaagaatacacattccaagaaatcattgccaagctgggtccaatcccaagcacattttctgccgttcatcttcctgcttatttgctagagaaaacgagttaccctgcattgattctccgggcaataatcatcctcctgtcatttgatatatttgctgtacactacagaaagcacatgtataatgcagttggtgtttggtctcagctaactgtttgcaaacaaccagagcaaacaaccagagtcgttgcagttattgtgagggttcgtctgttcgtgccgttaagcgacatgttaaggcggcattttgtgggacgaagtgggttggaacaggctgttcttgtcggacgtccgcttcagccagattga

SEQ ID NO: 68814 - protein, 510 aa, Oryza sativa subsp
MEAGGYYNCKKTDGICEDVCDSEDYIHKHLCQNPQFCHTQPASFVTVISDRTTFISIFAKILNSAIQPASFHGSKAVFSMSRLKCALRGFDLRALLILLIGLPILIFVIYLHGQKVTYFLRPIWEKPPKPFKVLPHYYNENVSMANLCKLHGWKVRETPRRVFDAVLFSNELDILDIRWHELSPYVSEFVLLESNSTFTGLKKDLHFKENRQRFEFAESRLTYGMIGGRFVKGENPFVEESYQRVALDQLIKIAGITDDDLLIMSDVDEIPSGHTINLLRWCDDIPEVLHLQLRNYLYSFEFFLDDKSWRASIHRYRAGKTRYAHFRQTDDLLADSGWHCSFCFRYISDFVFKMQAYSHVDRIRFKYFLNPKRIQHVICRGADLFDMLPEEYTFQEIIAKLGPIPSTFSAVHLPAYLLEKTSYPALILRAIIILLSFDIFAVHYRKHMYNAVGVWSQLTVCKQPEQTTRVVAVIVRVRLFVPLSDMLRRHFVGRSGLEQAVLVGRPLQPD

SEQ ID NO: 68815 - DNA, 1179 bp, Arabidopsis thaliana
  CDS (1)..(1179)
atgtggtggatgatgggagaagctggtgggcattactgttctaagaagactgatgatatctgcggcggtgtttgtagtcaggaacctggaagattcttcagcttttctagactttgttgtgctcttcgtggtgttgatatgaagacttatatcttcttattagtgattgttcccacatgtgtactcgctggctatgtccacggtcagaagatttcttactttctccggcctttatgggaatcaccacctaaaccttttcatgacattcctcattactaccacgagaacgcttctatggagactctttgtaaactccatggctggggtgttcgagactaccctagacgagtttatgatgcggttttgttcagtaacgagcttgatatcctcgctgttcgttggagagaattgtttccttacatcactcagtttgtcctccttgaatcaaacacgacgttcactggcttgcctaagcctcttgtctttgctgctcaccgagatgagttcaagtttattgagtcacgcttgacttatggtactgttggtggaagatttgtcaaagggcagaatccgttttacgaagaggcgtatcagcgggtagctcttgatcagcttctgagaatcgctgggattactgatgatgacttgttgttaatgtctgatgtcgatgagattccaagtagacacaccattaaccttttgagatggtgcgatgagatcccgaagatacttcatctgcgcctcaagaactatctttactcgtttgaattccttgttgataacaaaagctggagagcttccatccacagatatgagacgggtaagacacggtatgctcattatcgacagtctgatgaaatcttggcggatgcaggatggcattgtagcttttgcttccgacgaatcagtgagtttatattcaagatgaaagcttatagccataatgacagagtgaggtttggtcatttcttgaatcctaagagagttcaaagagttatatgcaaaggagctgatcttttcgatatgctccctgaagagtataccttcaaggagataataggaaaaatgggtccaatcccgcattctttctcagctgttcatcttccttcgtatctcctgaaaaacgcggataagtacagatttctcttgccgggaaattgcataagagaaagcgaatga

SEQ ID NO: 68816 - protein, 392 aa, Arabidopsis thaliana
MWWMMGEAGGHYCSKKTDDICGGVCSQEPGRFFSFSRLCCALRGVDMKTYIFLLVIVPTCVLAGYVHGQKISYFLRPLWESPPKPFHDIPHYYHENASMETLCKLHGWGVRDYPRRVYDAVLFSNELDILAVRWRELFPYITQFVLLESNTTFTGLPKPLVFAAHRDEFKFIESRLTYGTVGGRFVKGQNPFYEEAYQRVALDQLLRIAGITDDDLLLMSDVDEIPSRHTINLLRWCDEIPKILHLRLKNYLYSFEFLVDNKSWRASIHRYETGKTRYAHYRQSDEILADAGWHCSFCFRRISEFIFKMKAYSHNDRVRFGHFLNPKRVQRVICKGADLFDMLPEEYTFKEIIGKMGPIPHSFSAVHLPSYLLKNADKYRFLLPGNCIRESE

SEQ ID NO: 68817 - DNA, 1167 bp, Populus tremula x Populus alba
  CDS (1)..(1167)
atgaatgaaaatggcggccattactgctccaagaagagtgatgatatctgtaactccattaatttgcaggactcagggcgaattttgagcatgtccagaatccggtgtattcttcgtggcatggatttaaagacatatttgcttctgtttatactcgtgccaacctgtgtctatggtatttacatgcatggacagaagatctcatcctttttccggccattatgggaatccccaccaaaaacgttcaatgaaatcccacactattatcatgagaatgtgtcgatggagaacctctgcaaactccatggttggggaattcgtgagttcccaagacgtgtttatgatgcagtgttattcagtaatgaattggacatccttgctttgcgatggaaagaattgtacccttacattacacagtttgttctccttgaatctaattcaaccttcactgggaaagaaaagcttctctcttttgccaaccatcgagatcagtttaaatttgttgagcccaggttgacctatggaactatcggagggaggtttaagaaaggagagaacccatttatcgaagaggcataccagcgagtagcattggaccaacttatcaaagtagcagggatttctgatgatgacttgcttataatgtcagatgttgatgagataccgagcagacacactatcaatctcttgaggtggtgtgatgacactccttcagttcttcatctccggctgaaaaattatctttactcttttgagtttctcaaggacattaaaagttggagagcttcagtccacagatatcagacaggcaagacgcggtatgcacattatcgccaggcagatgacattttggcagatgcagggtggcactgcagcttttgtttccgccgaataagcgagtttatatttaaggatgaagcttacagtcatgtggataaaagcagggtccaacgttacttgaaccctaaaaggatccagagagtaatttgcaagggtgctgatttatttgatatgcttccagaggagtacacattcaaggaaattattgggaaaatgggaccaattcctcattcctactcagctgttcatcttccatcatatcttctggagaaggcggacaagtataaatttctcttgcctgggaactgcttaagagaaagtgggtga

SEQ ID NO: 68818 - protein, 388 aa, Populus tremula x Populus alba
MNENGGHYCSKKSDDICNSINLQDSGRILSMSRIRCILRGMDLKTYLLLFILVPTCVYGIYMHGQKISSFFRPLWESPPKTFNEIPHYYHENVSMENLCKLHGWGIREFPRRVYDAVLFSNELDILALRWKELYPYITQFVLLESNSTFTGKEKLLSFANHRDQFKFVEPRLTYGTIGGRFKKGENPFIEEAYQRVALDQLIKVAGISDDDLLIMSDVDEIPSRHTINLLRWCDDTPSVLHLRLKNYLYSFEFLKDIKSWRASVHRYQTGKTRYAHYRQADDILADAGWHCSFCFRRISEFIFKDEAYSHVDKSRVQRYLNPKRIQRVICKGADLFDMLPEEYTFKEIIGKMGPIPHSYSAVHLPSYLLEKADKYKFLLPGNCLRESG

SEQ ID NO: 68819 - DNA, 2192 bp, Cucumis sativus
  CDS (601)..(1779)
ggaccctttacaaagagaaagaaaattcccaaagccctttacaattaacattatattttctctctcttttgtaaaacaacgacgacagacaaagagaaacggctctctttttccttttcttattgctttgctttgctttcattttatttcattccattcatctctatgttgtaatttgtgtatgtaaaagagagtggcagcaatcattgtccaagacagatagatagagaaggcctttgttcttggccctcgaattcttagccctcgattttggcctctttcttttactctctctctctcttcctcaattattcccatttttttctctattcatttcggtaattcttagggatctctctctgcatatttagccactgcaaaaagggttgagggaaacgcctttcgcttcttcttttttctgattctggtttaactctgccctcgccgccgccgccgccgccaccgccgctgtttctctccatttttgctaatccttcacttcactgtttgtttaatccttcacgacccaatttcgtaccccacgaaaggagaagacccagtttgttgttttttggttttctgtttctttcgcatctacaaatgtggtggatgatgggtgaaggtggaggccattactgttccaagaaatctgatgatatttgtggcgatgtttgtgatcaggaatccaatcgagtattggggatgtctagacttcgctgcatttttcgtggatatgatgtgaaaaccttccttattctttttgcactggtgccaacatgcatcttgatcatttacttgcacggacagaagatttcatacttcttacggccgctatgggaatccccacctaaagaattcaatatgattactcactactatgatgggaatgtatctatgaagaacctatgcaaactccatggttggaaagtccgtgaatttccacgacgtgtttatgatgctgtgctgttcagtaatgagattgagatgctcaccttgcgatggaaagaactctacccttacattacacagtttgttcttctggaggcaaattcaacatttactgggaagccaaagccattatacttctgctcgtatagggacaaattcaagtttgtggagtcaagatttacttatggcactgttggagggagatttaagaaaggggaaaacccgtttgtcgaagaggcatttcagcgggttgcacttgatcagcttctcagaattgctggtatcactgatgatgacttgttgataatgtctgatgttgacgaaattccaagcaggcacacaattaatctcttgagatggtgtgatgacataccagaagttcttcatttacaacttaagaactatttgtactcttttgagttccatgttgatgacaatagttggagggcttcagtccatagatacaaatctggtaagacaaggtatgttcattatcgccaatcggatgacctgttggcagattcggggtggcactgtagcttctgtttccgacgtatcagcgactttgtctttaagatgaaagcatacagccataatgacagagttaggttctctagttacttaaatcccaaaagaattcagaagattatttgcaagggttcggacctatttgacatgcttcctgaggagtacactttcaaagaaattattgggaaaatgggaccagttcctcattccttctcagcagttcacttgccatcgtatctgctggaaaatgcagaagactacaaattccttttgcctgggaattgcatacgagagagtggctgatctctaacttcggcgtctacctccctgtgaaggttagttgcaatgtggcttgtctgacacctcgtggaccttccatcccgatagttgttgaccgatatacaggcaaccgtggtgatcttttgcctccagataagctaatgttaattcttttggaagttgtaactgcttgggcggttgaactaattccatgggtggaagttatgtgtagatatctgctttctttgggttggtttggttcaagaagtttgatattcattgggtgggcgaacttgctgttataggagccgcagcatattttagagaaaaaccccttgcattgccattgtatttgaggctgttgtgctttcttccctttactgggaaattttgtatacacgactattatttatatcatgtattcatatttgcggttg

SEQ ID NO: 68820 - protein, 392 aa, Cucumis sativus
MWWMMGEGGGHYCSKKSDDICGDVCDQESNRVLGMSRLRCIFRGYDVKTFLILFALVPTCILIIYLHGQKISYFLRPLWESPPKEFNMITHYYDGNVSMKNLCKLHGWKVREFPRRVYDAVLFSNEIEMLTLRWKELYPYITQFVLLEANSTFTGKPKPLYFCSYRDKFKFVESRFTYGTVGGRFKKGENPFVEEAFQRVALDQLLRIAGITDDDLLIMSDVDEIPSRHTINLLRWCDDIPEVLHLQLKNYLYSFEFHVDDNSWRASVHRYKSGKTRYVHYRQSDDLLADSGWHCSFCFRRISDFVFKMKAYSHNDRVRFSSYLNPKRIQKIICKGSDLFDMLPEEYTFKEIIGKMGPVPHSFSAVHLPSYLLENAEDYKFLLPGNCIRESG

SEQ ID NO: 68821 - DNA, 2035 bp, Arabidopsis thaliana
  CDS (346)..(1512)
ccacccatttccagagaggacacagccttttctttcttcctctttctctcttactcattcgtttttttttccttcttctgattcaaatttatttgtttcttctctctgaaaacgtttttttttttgtttgctcttctttttggtagtttctgtttttgttaagctgagtttgaggagtgtgagtgatttgaattttgtctgattttccgggataaaagagcgtcgtcggagataggcgacggatattttggacttatcgtcgccgaaaagaagcgagtttttgaatttgaaaaggtggttggcattttggtaatcggtggatctgagtttgggatgtggtggatgatgggagaagctggtgggcattactgttctaagaagactgatgatatctgcggcggtgtttgtagtcaggaacctggaagattcttcagcttttctagactttgttgtgctcttcgtggtgttgatatgaagacttatatcttcttattagtgattgttcccacatgtgtactcgctggctatgtccacggtcagaagatttcttactttctccggcctttatgggaatcaccacctaaaccttttcatgacattcctcattactaccacgagaacgcttctatggagactctttgtaaactccatggctggggtgttcgagactaccctagacgagtttatgatgcggttttgttcagtaacgagcttgatatcctcgctgttcgttggagagaattgtttccttacatcactcagtttgtcctccttgaatcaaacacgacgttcactggcttgcctaagcctcttgtctttgctgctcaccgagatgagttcaagtttattgagtcacgcttgacttatggtactgttggtggaagatttgtcaaagggcagaatccgttttacgaagaggcgtatcagcgggtagctcttgatcagcttctgagaatcgctgggattactgatgatgacttgttgttaatgtctgatgtcgatgagattccaagtagacacaccattaaccttttgagatggtgcgatgagatcccgaagatacttcatctgcgcctcaagaactatctttactcgtttgaattccttgttgataacaaaagctggagagcttccatccacagatatgagacgggtaagacacggtatgctcattatcgacagtctgatgaaatcttggcggatgcaggatggcattgtagcttttgcttccgacgaatcagtgagtttatattcaagatgaaagcttatagccataatgacagagtgaggtttggtcatttcttgaatcctaagagagttcaaagagttatatgcaaaggagctgatcttttcgatatgctccctgaagagtataccttcaaggagataataggaaaaatgggtccaatcccgcattctttctcagctgttcatcttccttcgtatctcctggaaaacgcggataagtacagatttctcttgccgggaaattgcataagagaaagcgaatgatcgttcgaatcttcaccacatagagtcttacttctcattcatcttaagacctctacattgagaggaaacaaaggctggcttgaatcctcctcgggactaataacacttacacaactgatatataatctctgcaattttgtctgaggcgtatcggtgtcggtgaatgctgcagagtttttcatcaggcacttcgagaggattattaaagggtgaaagattattgtatatagatagacctctttgtttcttcaggattctgatttcgcatcaggcatgaaaaccttcattctctgtgactgtgcatcatcaaacatgagtttctattcttctgagtttcccctttagggaagttttgcatcaagacactctttacttacccttttttgtacatctctttctctcttgatttcagtgggtttgttaagtatacgaggattgttgtttttcatgtattcgttattaagagaattgttctcatatataaagcttccttgttaatgagtaaatgagaaatttccaaaaa

SEQ ID NO: 68822 - protein, 388 aa, Arabidopsis thaliana
MGEAGGHYCSKKTDDICGGVCSQEPGRFFSFSRLCCALRGVDMKTYIFLLVIVPTCVLAGYVHGQKISYFLRPLWESPPKPFHDIPHYYHENASMETLCKLHGWGVRDYPRRVYDAVLFSNELDILAVRWRELFPYITQFVLLESNTTFTGLPKPLVFAAHRDEFKFIESRLTYGTVGGRFVKGQNPFYEEAYQRVALDQLLRIAGITDDDLLLMSDVDEIPSRHTINLLRWCDEIPKILHLRLKNYLYSFEFLVDNKSWRASIHRYETGKTRYAHYRQSDEILADAGWHCSFCFRRISEFIFKMKAYSHNDRVRFGHFLNPKRVQRVICKGADLFDMLPEEYTFKEIIGKMGPIPHSFSAVHLPSYLLENADKYRFLLPGNCIRESE

SEQ ID NO: 68823 - DNA, 1170 bp, Oryza sativa
  CDS (1)..(1170)
atggaggccggcgggtactacaactgcaagaagacggacggcatctgcgaggacgtctgcgacagcgagcatggttcaaaggcagtttttagtatgtcaaggctgaagtgcgcacttcgggggtttgatttaagagcacttttgatcctcttgattggtctgccaattctgatctttgttatataccttcatggccagaaagtcacttacttcctcagaccaatctgggaaaagcccccaaagcccttcaaagtacttcctcactactacaacgaaaatgtctcaatggccaacttatgcaagttacatggatggaaagtcagggaaacgccgcggcgtgtttttgatgctgtgcttttcagcaacgagcttgatattcttgatatccgttggcatgagcttagcccttatgtgtcagagtttgtgttgcttgagtccaactcaaccttcactggccttaaaaaggatctccacttcaaggaaaaccgtcaacgttttgaatttgctgaatcacggttgacctatggtatgataggtggtcggtttgtgaagggggagaacccatttgtcgaggagtcatatcagagggttgctcttgaccagcttattaaaattgccgggatcacagatgatgacctgttgatcatgtctgatgttgatgagattccaagtgggcatacgatcaacctcttgagatggtgtgatgacatacctgaagtactccatctccagctcaggaactatctgtactcatttgaatttttccttgatgacaaaagttggagggcttcaattcacagataccgggctggaaagacgaggtatgcacatttccggcaaacagatgaccttctggctgattcaggatggcactgcagcttttgttttcgctacattagtgattttgtcttcaaaatgcaagcttatagccatgttgatcggattagatttaagtacttcctgaaccccaaaagaattcagcatgtgatatgccgaggagccgatcttttcgacatgcttcctgaagaatacacattccaagaaatcattgccaagctgggtccaatcccaagcacattttctgccgttcatcttcctgcttatttgctagagaaagtagatcagtacagttatcttcttccagggcgatgcatgagagagagtggctag

SEQ ID NO: 68824 - protein, 389 aa, Oryza sativa
MEAGGYYNCKKTDGICEDVCDSEHGSKAVFSMSRLKCALRGFDLRALLILLIGLPILIFVIYLHGQKVTYFLRPIWEKPPKPFKVLPHYYNENVSMANLCKLHGWKVRETPRRVFDAVLFSNELDILDIRWHELSPYVSEFVLLESNSTFTGLKKDLHFKENRQRFEFAESRLTYGMIGGRFVKGENPFVEESYQRVALDQLIKIAGITDDDLLIMSDVDEIPSGHTINLLRWCDDIPEVLHLQLRNYLYSFEFFLDDKSWRASIHRYRAGKTRYAHFRQTDDLLADSGWHCSFCFRYISDFVFKMQAYSHVDRIRFKYFLNPKRIQHVICRGADLFDMLPEEYTFQEIIAKLGPIPSTFSAVHLPAYLLEKVDQYSYLLPGRCMRESG

SEQ ID NO: 68825 - DNA, 1164 bp, Brassica napus
  CDS (1)..(1164)
atgtcagatgggtactatagttgtaaaaagacggacgatatctgcgaagatgtttgtggtcaggatggttcacgagcagcgaaggccttctcaagagtcagatgcgtactacgcggactcgatttcaagacatacatcatcttcctcaccatcatccccatcttcatcctcggagtctacttgcacggacaaaagctcacttacttcctgagacccctctgggaatcaccgcccaagccctttcaaaccctcccgcattactaccaccacaacgcctccatggagactctctgcagcctccacgggtggacacaccgcgagtctcctcgacgagtcttcgacgccgtcctgttcagcaacgaggtcgacatgctcaccatccgctggaaagagctttacccttacgtcacgcagttcgtgatcctcgaatctaactcgacgttcaccggtttgcctaaaccgctggttttcgccgcgaaccgagagaagttcgagttcgtggagccgaggctgacgtacgggaacataggaggaaggttcaagagaggggagaaccctttcgttgaagaagcttaccagaggattgcgttagatcagttaataggactcgcggggattcaagaagatgatctgttgataatgtctgatgtagatgagatccccagcgctcacaccatcaacctccttagatggtgcgatggttacccgcccgttctccatctccagctcaagaactacctctactcgttcgagtattacgtcgacaacaaaagctggagagcttctgttcatcggtacaagcccgggaagacgcggtacgctcatttccgacgaggggatactcttttggcggattctggttggcattgcagtttctgtttcaggcgtataagcgagtttgtgttcaagatgaaagcgtatagccacaacgatagggtgagattctctcattatctaaatccgaagaggatacaagatgtgatatgtagagggactgatctgtttgacatgattcctgaagagcatacgtttagggagatcatcgggaagctggggccgatccctaggtcttactcggctgttcatctcccggggcatttgattgagaaagctgagagttataagtacttgttgcctgggaactgcgttagagacagtggctga

SEQ ID NO: 68826 - protein, 387 aa, Brassica napus
MSDGYYSCKKTDDICEDVCGQDGSRAAKAFSRVRCVLRGLDFKTYIIFLTIIPIFILGVYLHGQKLTYFLRPLWESPPKPFQTLPHYYHHNASMETLCSLHGWTHRESPRRVFDAVLFSNEVDMLTIRWKELYPYVTQFVILESNSTFTGLPKPLVFAANREKFEFVEPRLTYGNIGGRFKRGENPFVEEAYQRIALDQLIGLAGIQEDDLLIMSDVDEIPSAHTINLLRWCDGYPPVLHLQLKNYLYSFEYYVDNKSWRASVHRYKPGKTRYAHFRRGDTLLADSGWHCSFCFRRISEFVFKMKAYSHNDRVRFSHYLNPKRIQDVICRGTDLFDMIPEEHTFREIIGKLGPIPRSYSAVHLPGHLIEKAESYKYLLPGNCVRDSG

SEQ ID NO: 68827 - DNA, 1092 bp, Brassica napus
  CDS (1)..(1092)
atgaaaatcagatcgttgcgtcaaccgccacctaaacttgttctattgccaactcttgttattatcgtttcctcaacatgtttgtttggtatcctcacaaacctccaaaccttatcatatcttctccgtcctctctgggacaaaccgccaccacctttcagacgaatccctcattactacgccgagaacgtctccatggcccacctctgcaatctccacggatggactcccaggacggaaccaaggcgagtcttcgacgccatcatcttcagcaacgagctcgacctcctagagctcaggtggcaggagctaggaccatacgtttcaaaattcgtaattcttgaatccaataccaccttcacaggcatcccaaagcctctcttcttcgactccaacaaggagaggttcgccttcgccgagggtaagatagtgcacggagtcttccccgggaagaagcgtttgcaccacgaccaacaacaacaagaccctttcttgctcgaaggccggcaacgcgtggctatgaactggctcctcagagaagctaatgtatccgatggagacgcggtgataatgtcggatgcagatgagatccccagtcctcacaccgtgaagttcttacagtggtgcgacgggataccggatgtgatgcatctggagatgagggattacatgtattccttcgagttcccggtcgattacagcagctggagagcgtccgtgcatatatacagcaggaaatggactcactaccgccactcacgacagaccgacttgatactgtccgacgccgggtggcattgcagcttctgtttcagacgtctcggcgagttcgtgttcaagatgaaagggtatagccacgcggatagagtgaagcgcaaggagtttttggactactccaggatacagaaacacatatgtaaaggatatgatctctttgacatgcttcctgaggaatacagcttcaaagatttgattagcaaaatcggacccatcccgccttctgcatccgctgtacatctgcctgcgtttttgattcagaatgctgcccgctttcggtttctcctaccaggaggctgtctcagagagccttag

SEQ ID NO: 68828 - protein, 363 aa, Brassica napus
MKIRSLRQPPPKLVLLPTLVIIVSSTCLFGILTNLQTLSYLLRPLWDKPPPPFRRIPHYYAENVSMAHLCNLHGWTPRTEPRRVFDAIIFSNELDLLELRWQELGPYVSKFVILESNTTFTGIPKPLFFDSNKERFAFAEGKIVHGVFPGKKRLHHDQQQQDPFLLEGRQRVAMNWLLREANVSDGDAVIMSDADEIPSPHTVKFLQWCDGIPDVMHLEMRDYMYSFEFPVDYSSWRASVHIYSRKWTHYRHSRQTDLILSDAGWHCSFCFRRLGEFVFKMKGYSHADRVKRKEFLDYSRIQKHICKGYDLFDMLPEEYSFKDLISKIGPIPPSASAVHLPAFLIQNAARFRFLLPGGCLREP

SEQ ID NO: 68829 - DNA, 1170 bp, Brassica napus
  CDS (1)..(1170)
atgtccgatggttattacaattcgaagaagaccgatgatatctgcgacgatgtttgtggacagcagggctctaaagcagcagcaacaatctcacgcctcaaatgcgtcctccgaggcttcgacgtcagaactctcctctgcctcttcatcctcatgcccttcgccatcttcgcaatctacctccacggccaaaagctcacttacttcttcagacccctctgggaatcccctccaaagcccttccacaccatcccccactaccacaccgagaacgcaaccatgcaatctctctgccgcctccacggctggggagtcagagactcacctcgccgcgtttacgacgcggttctcttcagcaacgagatagacctcttgaccgtccgctggaaagagctttacccttacgttacacagttcgtcctcctcgagtcaaactccaccttcaccggtttgcctaaaccgtttgtcttcaaaagcaacaaagaccagttcgccttcgtggaggagcggctgacctacgggaacatcggaggacggtttagaaaaggagagaaccctttcgtcgaggaggcctttcagcgtgtggcgttggataagcttcttagaatcgctggcattgaagaggatgatcttctgatcatgtcggacgtcgatgagattcccagcgttcacaccatcaacctcttgagatggtgcgacgatatccctccggtccttcacctccagcttaagaattatttatactctttcgagtactacgtcgacagcaagagctggagagcttctgtgcaccgttacagtccggggaagactcggtacgcgcattttcgacagagcgatgtgatgttatctgactctggatggcactgcagcttctgtttccgctatataaatgattttgtgttcaagatgaaggcttacagtcactcggaccgtgtcagattttctcattacctgaatcccattaggattcaggatgttatatgcaaaggaactgatttgtttgacatgttgcctgaggagtacacgttcaaggagatgattggtaaaatggggcctgtgcctcgctcttattcggctgttcatctaccttcttacctgctggagaacgctgagaagtataagtacttgttacctggtaattgcgtgagagaaagacagacatggtaa

SEQ ID NO: 68830 - protein, 389 aa, Brassica napus
MSDGYYNSKKTDDICDDVCGQQGSKAAATISRLKCVLRGFDVRTLLCLFILMPFAIFAIYLHGQKLTYFFRPLWESPPKPFHTIPHYHTENATMQSLCRLHGWGVRDSPRRVYDAVLFSNEIDLLTVRWKELYPYVTQFVLLESNSTFTGLPKPFVFKSNKDQFAFVEERLTYGNIGGRFRKGENPFVEEAFQRVALDKLLRIAGIEEDDLLIMSDVDEIPSVHTINLLRWCDDIPPVLHLQLKNYLYSFEYYVDSKSWRASVHRYSPGKTRYAHFRQSDVMLSDSGWHCSFCFRYINDFVFKMKAYSHSDRVRFSHYLNPIRIQDVICKGTDLFDMLPEEYTFKEMIGKMGPVPRSYSAVHLPSYLLENAEKYKYLLPGNCVRERQTW

SEQ ID NO: 68831 - DNA, 1179 bp, Glycine max
  CDS (1)..(1179)
atgtggtgtgcggtgagagattccggtggccattactgccctaagaagaccgatgatttatgcggcgacgtttgtggccaggagtcaagtcaagtatcgggcatgtcaagagtgcgctgcattttacgcggcgtggatgtaaaaacctgcatatttctttttgctgttgtgccaatgtgcatctttggaatatacttgcatggacagaaaatctcctacttcctgcggccactatgggagaaaccacccaagcctttccatgtcattccacattactacaacgaaaatgtgtcgatggagaatctctgcagacttcacggctggggagtccgtgagttcccgagacgtgtgtatgacgctgtgttgttcagtaacgaattggaaatactaaacttgcgctggagagagttgtatccttacataacacagtttgttctccttgagtcaaattccacatttactggtaggccaaaaccttttgttttcaaaggcaatcgggagcagttcaaattcgtggagtctcggttaacttatggaactattggtgggaggttcaagaaaggagaaaacccgtttgttgaggaggcatatcagcgggtggcattggatcaactccttaagatagctggtattactgatgatgacttgttgattatgtctgatgttgacgagattccgagtgctcacactattaacctcttgaggtggtgtgatgatgtgccttcagtccttcatcttcagctgaagaactatctatactcctttgagtttctcttggatgataacagctggagagcttctgttcacagatatcagagtggtaagacaaggtatgctcattaccgccagtctgatgacttattggcggatgctggttggcattgcagcttttgcttccgctatatcagcgatttcgtctttaagatgaaagcctacagtcataatgacagagtcagattctctcattatttaaatcccaaaagaattcaagatgtaatctgcaaaggggctgatttatttgacatgctaccagaggagtacaccttcaaggaaatcattggtaaaatggggccgataccccattcctattctgcagttcatcttcctgcttatctactggaaaatgctgagaagtataaatttctgttgcctggaaattgcttgagagagtccagatga

SEQ ID NO: 68832 - protein, 392 aa, Glycine max
MWCAVRDSGGHYCPKKTDDLCGDVCGQESSQVSGMSRVRCILRGVDVKTCIFLFAVVPMCIFGIYLHGQKISYFLRPLWEKPPKPFHVIPHYYNENVSMENLCRLHGWGVREFPRRVYDAVLFSNELEILNLRWRELYPYITQFVLLESNSTFTGRPKPFVFKGNREQFKFVESRLTYGTIGGRFKKGENPFVEEAYQRVALDQLLKIAGITDDDLLIMSDVDEIPSAHTINLLRWCDDVPSVLHLQLKNYLYSFEFLLDDNSWRASVHRYQSGKTRYAHYRQSDDLLADAGWHCSFCFRYISDFVFKMKAYSHNDRVRFSHYLNPKRIQDVICKGADLFDMLPEEYTFKEIIGKMGPIPHSYSAVHLPAYLLENAEKYKFLLPGNCLRESR

SEQ ID NO: 68833 - DNA, 1167 bp, Hordeum vulgare
  CDS (1)..(1167)
atgcccgaggccagccgctacacccacaagaaggacgacggcatctgcagcagcgtctgcggcgagcccacctcaaaggcagttatggccatgtcaaggctcaagtgtgcgcttcgggggtttgatatcagggcacttctggctctcttcattggtgtgccgctggtaatgttaataatatataagcatggccagaaggtcacatacttcctccggccaatctgggaatctccgcccgagcccttcaagataatccctcactactacaatgagaatgtcaccatggagaacctctgcaagttacatgggtggaaagtcagggagaccccacgccgtgttttcgatgctgtgctcttcagtaatgagcttgatatccttgaacttcgttggaatgaactcagcccctatgtgtcagagttcgtcctgcttgagtccaactcaactttcactggcgtgataaagccactcttcttcaaggaaaaccgccatcgatttagatttgctgaatcgcggctgacctatggcacatatgggggaagattcatgaagggcgaaaatccatttgttgaggagtcgtatcagagggttgccctggaccagcttcttaggattgcaagaattgaagatgacgacatattgatcatgtcagatgttgatgaaatcccaagtggccacaccatcaatctcttgagatggtgcgacgacacgcctaagatagtccatcttcagctcaggaattatctgtactcatttgagttttttctggatgacaagagttggagggcgtcaattcacaggtacgtatctgggaagacaagatatgcgcattttcggcagacagatgtgcttcttgccgattcagggtggcactgcagtttttgtttccggcacatcagtgattttgtcttcaagatgcaagcttatagccatgtggataggatcagattcaagtacttcctgaaccatgagaggattcaagatgtcatctgcagaggggcggatctttttgacatgcttcctgaagagcatacgttccaagaaatcattgcgaagttgggccccattccaagcacattctctgctgttcatcttcctagttatctgcttcagaattttgaccggtaccggtatcttctcccagggaactgcaggagagaaagtggctag

SEQ ID NO: 68834 - protein, 388 aa, Hordeum vulgare
MPEASRYTHKKDDGICSSVCGEPTSKAVMAMSRLKCALRGFDIRALLALFIGVPLVMLIIYKHGQKVTYFLRPIWESPPEPFKIIPHYYNENVTMENLCKLHGWKVRETPRRVFDAVLFSNELDILELRWNELSPYVSEFVLLESNSTFTGVIKPLFFKENRHRFRFAESRLTYGTYGGRFMKGENPFVEESYQRVALDQLLRIARIEDDDILIMSDVDEIPSGHTINLLRWCDDTPKIVHLQLRNYLYSFEFFLDDKSWRASIHRYVSGKTRYAHFRQTDVLLADSGWHCSFCFRHISDFVFKMQAYSHVDRIRFKYFLNHERIQDVICRGADLFDMLPEEHTFQEIIAKLGPIPSTFSAVHLPSYLLQNFDRYRYLLPGNCRRESG

SEQ ID NO: 68835 - DNA, 1167 bp, Brassica napus
  CDS (1)..(1167)
atgtccgatggttattacaattcgaagaagaccgatgatatctgcgacgatgtttgtggacagggatctaaagcaggagcaacaatctcacgcctcaaatgcgtcctccgaggcttcgacgtaagaacgctcctatgcctcttcatcctcgtgccattttccatcttcgcaatctacctccacggccagaagctcacttacttcttcagacccctctgggaatcccctccaaagcccttccacaccatccctcactaccacaccgagaacgcaacgatgcaatctctctgctccctccacggctggggagtcagagactcacctcgccgcgtttacgacgccgtcctcttcagcaacgagaaagatctcttgacagtccgctggaaagagctctacccttatgtgactcagttcgtcctcctcgagtcaaactccaccttcaccggtttgcctaaaccgtttgtcttcaaaagcaacaaggaacagttcagcttcgtggaggagcggctgacgtacgggaacatcggaggacggtttagaaaaggagagaatcctttcgttgaagaggcgtttcagcgtgttgcgttggataagcttcttagaatcgctggcattgaagaggatggtttgttgattatgtctgatgttgatgagatccccagcgctcacaccatcaacctcttgagatggtgtgacgatatccctccggtccttcacctccagcttaagaattatttatactctttcgagtactacgtcgatagcaagagctggagagcttctatacaccgttacaacccagggaagactcggtacgcgcattttcgacagagcgatgtgatgttatctgactctggatggcactgcagcttctgtttccgttatataaatgattttgtgttcaagatgaaggcttacagtcactcggaccgtgtgaggttctctcattacctgaatcctgttaggattcaagatgttatatgcaaagggactgatttgtttgacatgttgcctgaggagtacactttcaaggagatgattggtaaaatgggacctgtgcctcgttcttattcagctgttcatctgccttcttacctgctggagaacgctgagaagtataaatacttgttacctggtaactgcgtgagagaaagacagactgggtga

SEQ ID NO: 68836 - protein, 388 aa, Brassica napus
MSDGYYNSKKTDDICDDVCGQGSKAGATISRLKCVLRGFDVRTLLCLFILVPFSIFAIYLHGQKLTYFFRPLWESPPKPFHTIPHYHTENATMQSLCSLHGWGVRDSPRRVYDAVLFSNEKDLLTVRWKELYPYVTQFVLLESNSTFTGLPKPFVFKSNKEQFSFVEERLTYGNIGGRFRKGENPFVEEAFQRVALDKLLRIAGIEEDGLLIMSDVDEIPSAHTINLLRWCDDIPPVLHLQLKNYLYSFEYYVDSKSWRASIHRYNPGKTRYAHFRQSDVMLSDSGWHCSFCFRYINDFVFKMKAYSHSDRVRFSHYLNPVRIQDVICKGTDLFDMLPEEYTFKEMIGKMGPVPRSYSAVHLPSYLLENAEKYKYLLPGNCVRERQTG

SEQ ID NO: 68837 - DNA, 1173 bp, Triticum aestivum
  CDS (1)..(1173)
atggagtccgccggctactacaccaactgcaagaagaccgacggaatctgcgagggcatctgcgacggcgagcatggttcaaaggctgttctgagcatgtcaaggctgaagtgtgcacttcgggggtttgatttaaaggcccttctgttcctgctgattggtgtgccgattataatctttgtcatatatgttcatggccagaaggtcacttatttcctcagaccaatctgggagaagcccccgaagcctttcacagtacttcctcactactatcatgaaaatgcttcgatggcaaacctctgcaagttgcatggatggaaggtccgggaggctccacggcgtgtctttgacgcggtgcttttcagcaacgagctcgacattcttgatatccgttggcacgagcttagcccgtatgtgtcagaatttgtgctgctcgagtccaattcaacatttactggccttgaaaagaagctccacttcaaggaaaaccgccaaaagtttgagtttgctgaatcacggttgacctatggtatgataggggggaggtttgtgaagggtgagaacccatttgtggaggaatcatatcagagagtcgcgcttgaccagcttctaaagatcgccgggatcaccgacgatgacctgttgattatgtctgatgttgatgagatcccaagtggtcatacaatcaacctgttgagatggtgcgatgatacgcctgagatacttcaccttcagctgaagaactatctctactcgtttcaatttatgcttgatgataagagttggagggcttcggtacacagataccgagcggggaagacgaggtatgcccattaccggcaaactgacgaccttctggcagactcagggtggcactgcagcttttgctttcggtacataaatgattttgtcttcaaaatgaaagcctacagccatgtggaccggatcagattcagctacttcttgaaccccaaaagaattcagcatgtgatatgccaaggggctgatctctttgatatgcttccggaggagtacacgttccaagagatcatcgccaagcttgggccgatcccaagtacgtattcggcggttcatcttcccgcctatctgctcgagaaggttgatcagtacaggtatcttcttcctggcaactgcatgagagaaagtgggtag

SEQ ID NO: 68838 - protein, 390 aa, Triticum aestivum
MESAGYYTNCKKTDGICEGICDGEHGSKAVLSMSRLKCALRGFDLKALLFLLIGVPIIIFVIYVHGQKVTYFLRPIWEKPPKPFTVLPHYYHENASMANLCKLHGWKVREAPRRVFDAVLFSNELDILDIRWHELSPYVSEFVLLESNSTFTGLEKKLHFKENRQKFEFAESRLTYGMIGGRFVKGENPFVEESYQRVALDQLLKIAGITDDDLLIMSDVDEIPSGHTINLLRWCDDTPEILHLQLKNYLYSFQFMLDDKSWRASVHRYRAGKTRYAHYRQTDDLLADSGWHCSFCFRYINDFVFKMKAYSHVDRIRFSYFLNPKRIQHVICQGADLFDMLPEEYTFQEIIAKLGPIPSTYSAVHLPAYLLEKVDQYRYLLPGNCMRESG

SEQ ID NO: 68839 - DNA, 23 bp, Artificial sequence
  primer
atgtccgatggatacatcaattc

SEQ ID NO: 68840 - DNA, 24 bp, Artificial sequence
  primer
tcatataaaccctgtctgtttttc

SEQ ID NO: 68841 - protein, 492 aa, Artificial sequence
  consensus sequence
  Variant (3)..(3): Xaa in position 3 is any amino acid
  Variant (5)..(6): Xaa in position 5 to 6 is any amino acid
  Variant (7)..(7): Xaa in position 7 is any or no amino acid
  Variant (9)..(9): Xaa in position 9 is any amino acid
  Variant (10)..(72): Xaa in position 10 to 72 is any or no amino acid
  Variant (75)..(75): Xaa in position 75 is any amino acid
  Variant (76)..(76): Xaa in position 76 is any or no amino acid
  Variant (78)..(78): Xaa in position 78 is any amino acid
  Variant (82)..(82): Xaa in position 82 is any amino acid
  Variant (84)..(89): Xaa in position 84 to 89 is any amino acid
  Variant (91)..(93): Xaa in position 91 to 93 is any amino acid
  Variant (94)..(94): Xaa in position 94 is any or no amino acid
  Variant (96)..(101): Xaa in position 96 to 101 is any amino acid
  Variant (103)..(103): Xaa in position 103 is any amino acid
  Variant (108)..(109): Xaa in position 108 to 109 is any amino acid
  Variant (115)..(115): Xaa in position 115 is any amino acid
  Variant (118)..(118): Xaa in position 118 is any amino acid
  Variant (124)..(126): Xaa in position 124 to 126 is any amino acid
  Variant (131)..(131): Xaa in position 131 is any amino acid
  Variant (134)..(135): Xaa in position 134 to 135 is any amino acid
  Variant (137)..(138): Xaa in position 137 to 138 is any amino acid
  Variant (141)..(141): Xaa in position 141 is any amino acid
  Variant (146)..(147): Xaa in position 146 to 147 is any amino acid
  Variant (149)..(150): Xaa in position 149 to 150 is any amino acid
  Variant (155)..(155): Xaa in position 155 is any amino acid
  Variant (164)..(164): Xaa in position 164 is any amino acid
  Variant (166)..(166): Xaa in position 166 is any amino acid
  Variant (168)..(169): Xaa in position 168 to 169 is any amino acid
  Variant (172)..(172): Xaa in position 172 is any amino acid
  Variant (175)..(175): Xaa in position 175 is any amino acid
  Variant (178)..(180): Xaa in position 178 to 180 is any amino acid
  Variant (193)..(194): Xaa in position 193 to 194 is any amino acid
  Variant (196)..(196): Xaa in position 196 is any amino acid
  Variant (198)..(198): Xaa in position 198 is any amino acid
  Variant (200)..(201): Xaa in position 200 to 201 is any amino acid
  Variant (203)..(205): Xaa in position 203 to 205 is any amino acid
  Variant (206)..(206): Xaa in position 206 is any or no amino acid
  Variant (208)..(208): Xaa in position 208 is any amino acid
  Variant (210)..(210): Xaa in position 210 is any amino acid
  Variant (212)..(212): Xaa in position 212 is any amino acid
  Variant (218)..(219): Xaa in position 218 to 219 is any amino acid
  Variant (224)..(224): Xaa in position 224 is any amino acid
  Variant (228)..(228): Xaa in position 228 is any amino acid
  Variant (229)..(232): Xaa in position 229 to 232 is any or no amino acid
  Variant (236)..(236): Xaa in position 236 is any amino acid
  Variant (239)..(240): Xaa in position 239 to 240 is any amino acid
  Variant (247)..(247): Xaa in position 247 is any amino acid
  Variant (249)..(251): Xaa in position 249 to 251 is any amino acid
  Variant (255)..(256): Xaa in position 255 to 256 is any amino acid
  Variant (271)..(271): Xaa in position 271 is any amino acid
  Variant (282)..(283): Xaa in position 282 to 283 is any amino acid
  Variant (285)..(286): Xaa in position 285 to 286 is any amino acid
  Variant (290)..(290): Xaa in position 290 is any amino acid
  Variant (292)..(292): Xaa in position 292 is any amino acid
  Variant (301)..(302): Xaa in position 301 to 302 is any amino acid
  Variant (304)..(304): Xaa in position 304 is any amino acid
  Variant (311)..(311): Xaa in position 311 is any amino acid
  Variant (313)..(313): Xaa in position 313 is any amino acid
  Variant (315)..(315): Xaa in position 315 is any amino acid
  Variant (316)..(316): Xaa in position 316 is any or no amino acid
  Variant (324)..(324): Xaa in position 324 is any amino acid
  Variant (327)..(327): Xaa in position 327 is any amino acid
  Variant (329)..(330): Xaa in position 329 to 330 is any amino acid
  Variant (334)..(334): Xaa in position 334 is any amino acid
  Variant (344)..(344): Xaa in position 344 is any amino acid
  Variant (346)..(347): Xaa in position 346 to 347 is any amino acid
  Variant (349)..(349): Xaa in position 349 is any amino acid
  Variant (353)..(353): Xaa in position 353 is any amino acid
  Variant (358)..(358): Xaa in position 358 is any amino acid
  Variant (361)..(361): Xaa in position 361 is any amino acid
  Variant (364)..(366): Xaa in position 364 to 366 is any amino acid
  Variant (370)..(370): Xaa in position 370 is any amino acid
  Variant (374)..(374): Xaa in position 374 is any amino acid
  Variant (378)..(378): Xaa in position 378 is any amino acid
  Variant (380)..(380): Xaa in position 380 is any amino acid
  Variant (393)..(393): Xaa in position 393 is any amino acid
  Variant (397)..(397): Xaa in position 397 is any amino acid
  Variant (399)..(399): Xaa in position 399 is any amino acid
  Variant (404)..(406): Xaa in position 404 to 406 is any amino acid
  Variant (413)..(413): Xaa in position 413 is any amino acid
  Variant (417)..(424): Xaa in position 417 to 424 is any amino acid
  Variant (425)..(483): Xaa in position 425 to 483 is any or no amino acid
  Variant (488)..(488): Xaa in position 488 is any amino acid
  Variant (490)..(490): Xaa in position 490 is any amino acid
KKXDXXXCXXXXXXXXXXXXXXXXXXXXXXXXXXXXXXXXXXXXXXXXXXXXXXXXXXXXXXXXXXXXXXXXSRXXCXLRGXDXXXXXXLXXXXPXXXXXXYXHGQKXXYFLRPXWEXPPKPFXXXPHYYXENXXMXXLCXLHGWXXRXXPRRVXDAVLFSNEXDXLXXRWXELXPYXXXFVLLESNSTFTGXXKXLXFXXNXXXXFXFXEXRLTYGXXGGRFXKGEXXXXXNPFXEEXXQRVALDXLXXXAGIXXDDLLIMSDVDEIPSXHTINLLRWCDXXPXXLHLXLXNYLYSFEFXXDXKSWRASXHXYXXGKTRYAHXRQXDXXLADXGWHCSFCFRXIXXFXFKMXAYSHXDRXRFXXXLNPXRIQXVICXGXDLFDMLPEEYTFXEIIXKXGPIPXXXSAVHLPXYLLXXXXXXXXXXXXXXXXXXXXXXXXXXXXXXXXXXXXXXXXXXXXXXXXXXXXXXXXXXXXXXXXXXXLLPGXCXRE

SEQ ID NO: 68842 - protein, 60 aa, Artificial sequence
  protein pattern
  Variant (2)..(2): Xaa in position 2 is any amino acid
  Variant (12)..(12): Xaa in position 12 is any amino acid
  Variant (14)..(14): Xaa in position 14 is Asn or Ser
  Variant (15)..(15): Xaa in position 15 is Asp or Glu
  Variant (17)..(17): Xaa in position 17 is Ala, Ile or Val
  Variant (21)..(21): Xaa in position 21 is any amino acid
  Variant (26)..(26): Xaa in position 26 is any amino acid
  Variant (29)..(29): Xaa in position 29 is Ile or Val
  Variant (32)..(33): Xaa in position 32 to 33 is any amino acid
  Variant (34)..(34): Xaa in position 34 is Phe or Tyr
  Variant (38)..(38): Xaa in position 38 is any amino acid
  Variant (40)..(40): Xaa in position 40 is Ile or Val
  Variant (42)..(42): Xaa in position 42 is Asp, His, Lys or Arg
  Variant (43)..(43): Xaa in position 43 is Ile or Val
  Variant (46)..(46): Xaa in position 46 is any amino acid
  Variant (48)..(48): Xaa in position 48 is Ala, Ser or Thr
  Variant (54)..(54): Xaa in position 54 is Ile or Leu
  Variant (58)..(58): Xaa in position 58 is His or Tyr
DXGWHCSFCFRXIXXFXFKMXAYSHXDRXRFXXXLNPXRXQXXICXGXDLFDMXPEEXTF

SEQ ID NO: 68843 - protein, 60 aa, Artificial sequence
  protein pattern
  Variant (2)..(2): Xaa in position 2 is any amino acid
  Variant (5)..(5): Xaa in position 5 is Phe, Ile, Leu or Val
  Variant (6)..(6): Xaa in position 6 is Ser or Thr
  Variant (9)..(9): Xaa in position 9 is Phe or Leu
  Variant (12)..(12): Xaa in position 12 is Ile or Leu
  Variant (15)..(15): Xaa in position 15 is any amino acid
  Variant (19)..(19): Xaa in position 19 is Glu or Pro
  Variant (21)..(23): Xaa in position 21 to 23 is any amino acid
  Variant (24)..(24): Xaa in position 24 is Pro or Thr
  Variant (27)..(27): Xaa in position 27 is His or Tyr
  Variant (28)..(29): Xaa in position 28 to 29 is any amino acid
  Variant (31)..(31): Xaa in position 31 is Ala, Thr or Val
  Variant (32)..(32): Xaa in position 32 is Ser or Thr
  Variant (34)..(35): Xaa in position 34 to 35 is any amino acid
  Variant (38)..(38): Xaa in position 38 is any amino acid
  Variant (43)..(44): Xaa in position 43 to 44 is any amino acid
  Variant (46)..(46): Xaa in position 46 is Asp or Glu
  Variant (47)..(47): Xaa in position 47 is any amino acid
  Variant (52)..(52): Xaa in position 52 is Phe or Tyr
  Variant (55)..(55): Xaa in position 55 is Ala or Val
HXQKXXYFXRPXWEXPPKXFXXXXHYXXXNXXMXXLCXLHGWXXRXXPRRVXDAXLFSNE

SEQ ID NO: 68844 - protein, 57 aa, Artificial sequence
  protein pattern
  Variant (3)..(3): Xaa in position 3 is any or no amino acid
  Variant (6)..(6): Xaa in position 6 is Ile or Leu
  Variant (16)..(16): Xaa in position 16 is any amino acid
  Variant (20)..(20): Xaa in position 20 is Asp or Asn
  Variant (27)..(27): Xaa in position 27 is Asp, Glu or Gly
  Variant (28)..(28): Xaa in position 28 is any amino acid
  Variant (30)..(30): Xaa in position 30 is any amino acid
  Variant (31)..(31): Xaa in position 31 is Ile or Val
  Variant (35)..(35): Xaa in position 35 is Gln or Arg
  Variant (37)..(37): Xaa in position 37 is Lys or Arg
  Variant (43)..(43): Xaa in position 43 is Phe or Tyr
  Variant (44)..(44): Xaa in position 44 is Glu or Gln
  Variant (45)..(45): Xaa in position 45 is Phe or Tyr
  Variant (46)..(47): Xaa in position 46 to 47 is any amino acid
  Variant (49)..(50): Xaa in position 49 to 50 is any amino acid
  Variant (56)..(56): Xaa in position 56 is Ile or Val
DDXLLXMSDVDEIPSXHTIXLLRWCDXXPXXLHLXLXNYLYSXXXXXDXXSWRASXH

SEQ ID NO: 68845 - protein, 36 aa, Artificial sequence
  protein pattern
  Variant (4)..(4): Xaa in position 4 is Ala or Gly
  Variant (6)..(6): Xaa in position 6 is Leu or Met
  Variant (9)..(9): Xaa in position 9 is Ile or Val
  Variant (11)..(11): Xaa in position 11 is any or no amino acid
  Variant (13)..(13): Xaa in position 13 is any amino acid
  Variant (14)..(14): Xaa in position 14 is any or no amino acid
  Variant (16)..(16): Xaa in position 16 is Ala or Gly
  Variant (21)..(21): Xaa in position 21 is Ala, Gly or Ser
  Variant (22)..(22): Xaa in position 22 is His or Tyr
  Variant (24)..(24): Xaa in position 24 is Ile or Leu
  Variant (25)..(27): Xaa in position 25 to 27 is any amino acid
  Variant (28)..(28): Xaa in position 28 is Asp, Glu or Ser
  Variant (29)..(32): Xaa in position 29 to 32 is any amino acid
  Variant (33)..(33): Xaa in position 33 is Ile or Leu
  Variant (35)..(35): Xaa in position 35 is any amino acid
  Variant (36)..(36): Xaa in position 36 is Ala or Gly
EIIXKXGPXPXSXXSXVHLPXXLXXXXXXXXXXLXX

SEQ ID NO: 68846 - protein, 22 aa, Artificial sequence
  protein pattern
  Variant (4)..(4): Xaa in position 4 is any amino acid
  Variant (7)..(7): Xaa in position 7 is Ala or Ser
  Variant (8)..(8): Xaa in position 8 is Phe or Tyr
  Variant (11)..(11): Xaa in position 11 is Ile or Val
  Variant (15)..(15): Xaa in position 15 is any amino acid
  Variant (17)..(18): Xaa in position 17 to 18 is any or no amino acid
  Variant (20)..(21): Xaa in position 20 to 21 is any or no amino acid
NPFXEEXXQRXALDXLXXIXXA

SEQ ID NO: 68847 - protein, 21 aa, Artificial sequence
  protein pattern
  Variant (2)..(2): Xaa in position 2 is any amino acid
  Variant (4)..(4): Xaa in position 4 is Ala, Ile or Val
  Variant (5)..(5): Xaa in position 5 is Glu or Lys
  Variant (6)..(6): Xaa in position 6 is Glu, Pro or Ser
  Variant (12)..(13): Xaa in position 12 to 13 is any amino acid
  Variant (18)..(18): Xaa in position 18 is any amino acid
  Variant (21)..(21): Xaa in position 21 is Glu or Gln
FXFXXXRLTYGXXGGRFXKGX

SEQ ID NO: 68848 - protein, 15 aa, Artificial sequence
  protein pattern
  Variant (2)..(2): Xaa in position 2 is any amino acid
  Variant (3)..(3): Xaa in position 3 is Ala, Pro, Ser or Thr
  Variant (11)..(11): Xaa in position 11 is Phe or Tyr
  Variant (13)..(13): Xaa in position 13 is Gln or Arg
  Variant (14)..(14): Xaa in position 14 is Ala, Gly, Ser or Thr
  Variant (15)..(15): Xaa in position 15 is Asp or Asn
YXXGKTRYAHXRXXX

SEQ ID NO: 68849 - DNA, 1305 bp, Arabidopsis thaliana; identical to SEQ ID NO: 958
  CDS (1)..(1305)

SEQ ID NO: 68850 - protein, 434 aa, Arabidopsis thaliana; identical to SEQ ID NO: 959

SEQ ID NO: 68851 - DNA, 1329 bp, Arabidopsis thaliana; identical to SEQ ID NO: 5336
  CDS (1)..(1329)

SEQ ID NO: 68852 - protein, 442 aa, Arabidopsis thaliana; identical to SEQ ID NO: 5337

SEQ ID NO: 68853 - DNA, 1536 bp, Arabidopsis thaliana; identical to SEQ ID NO: 5338
  CDS (1)..(1536)

SEQ ID NO: 68854 - protein, 511 aa, Arabidopsis thaliana; identical to SEQ ID NO: 5339

SEQ ID NO: 68855 - DNA, 1089 bp, Arabidopsis thaliana; identical to SEQ ID NO: 5344
  CDS (1)..(1089)

SEQ ID NO: 68856 - protein, 362 aa, Arabidopsis thaliana; identical to SEQ ID NO: 5345

SEQ ID NO: 68857 - DNA, 1251 bp, Arabidopsis thaliana; identical to SEQ ID NO: 866
  CDS (1)..(1251)

SEQ ID NO: 68858 - protein, 416 aa, Arabidopsis thaliana; identical to SEQ ID NO: 867

SEQ ID NO: 68859 - DNA, 1251 bp, Nicotiana tabacum; identical to SEQ ID NO: 5352
  CDS (1)..(1251)

SEQ ID NO: 68860 - protein, 416 aa, Nicotiana tabacum; identical to SEQ ID NO: 5353

SEQ ID NO: 68861 - DNA, 1335 bp, Oryza sativa subsp; identical to SEQ ID NO: 5358
  CDS (1)..(1335)

SEQ ID NO: 68862 - protein, 444 aa, Oryza sativa subsp; identical to SEQ ID NO: 5359

SEQ ID NO: 68863 - DNA, 1251 bp, Oryza sativa subsp; identical to SEQ ID NO: 5360
  CDS (1)..(1251)

SEQ ID NO: 68864 - protein, 416 aa, Oryza sativa subsp; identical to SEQ ID NO: 5361

SEQ ID NO: 68865 - DNA, 1167 bp, Oryza sativa subsp; identical to SEQ ID NO: 5362
  CDS (1)..(1167)

SEQ ID NO: 68866 - protein, 388 aa, Oryza sativa subsp; identical to SEQ ID NO: 5363

SEQ ID NO: 68867 - DNA, 1194 bp, Oryza sativa subsp; identical to SEQ ID NO: 888
  CDS (1)..(1194)

SEQ ID NO: 68868 - protein, 397 aa, Oryza sativa subsp; identical to SEQ ID NO: 889

SEQ ID NO: 68869 - DNA, 1347 bp, Oryza sativa subsp; identical to SEQ ID NO: 17493
  CDS (1)..(1347)

SEQ ID NO: 68870 - protein, 448 aa, Oryza sativa subsp; identical to SEQ ID NO: 17494

SEQ ID NO: 68871 - DNA, 1068 bp, Oryza sativa subsp; identical to SEQ ID NO: 900
  CDS (1)..(1068)

SEQ ID NO: 68872 - protein, 355 aa, Oryza sativa subsp; identical to SEQ ID NO: 901

SEQ ID NO: 68873 - DNA, 1218 bp, Oryza sativa subsp; identical to SEQ ID NO: 5368
  CDS (1)..(1218)

SEQ ID NO: 68874 - protein, 405 aa, Oryza sativa subsp; identical to SEQ ID NO: 5369

SEQ ID NO: 68875 - DNA, 1134 bp, Oryza sativa subsp; identical to SEQ ID NO: 5370
  CDS (1)..(1134)

SEQ ID NO: 68876 - protein, 377 aa, Oryza sativa subsp; identical to SEQ ID NO: 5371

SEQ ID NO: 68877 - DNA, 1617 bp, Populus tremula; identical to SEQ ID NO: 5374
  CDS (1)..(1617)

SEQ ID NO: 68878 - protein, 538 aa, Populus tremula; identical to SEQ ID NO: 5375

SEQ ID NO: 68879 - DNA, 1617 bp, Populus tremula
  CDS (1)..(1617)
atggaggagatgtatccggcggttgcagtgccatttagagtaggtaattcagcctgtgaaagtccatccatagatacccaaatggatatcacaagaattttaatggcagacacggctagcttattatctgatactgtaactaaggttcctactgctggggataaggattgtaattgtgcggctccggcttcaaaagaggacaggggaggaagaggagcccctttgttggatatgatctctgaaactgaaagaaattgggttgttggcgatgatgggataacacgggaaagtgaggaagaggattctttgtcgttggagggtgatccaattcttgatagttcttgttctctttcaatggctagtgagacaagtagcttatgtggagaggatctcttgagtttggagaccacctctgaggtaggaacactgagttctgtagaaattaaaaagagcattggtggtgttgatattgttgccaagacagcagatttgggggattcaaacgttgacactgttgtgagcgatcccccttcggtggcaggaagtgttgaggaagaggctggggatggatctgatgcaaagacatcttctgtggttcttcagttgactctggaaagagggaccagtggaacagtctcaagaagtgtttttgaagtggactatgtacccctttggggatttacatctgtttgtggaaggagaccggagatggaagatgcagttgctactgtgccttatttattaaaatttcctattcaaatgctgattggcgaccgattacttgatggaatgagcaagtatttgcctcaccagactgctcatttctttggagtttatgatggtcatggaggctcgcaagtggcaaattattgtcatgatcgtatccattcggctttgtccgaggagatagaatttgttaagaatggcctgagtgatggaagtattaaggatagttgccaggagcagtggaaaaaggctttcaccaattgttttctcaaggttgatgctgaagtcggaggaaaggctggtgccgaaccagttgccccagaaactgttggttctactgctgttgtggccattatttgttcatcccacatcatagtagcaaactgtggagactcacgagcagttctttgtcgcgggaaagaaccaatggcattatcagtggatcataaaccaaaccgagaagatgagtatgcaaggatagaagcagctggaggcaaggtcatacagtggaatgggcatcgtgtctttggtgttctagcaatgtcaaggtctattggtgatagatatttgaaaccatggattattccagaacccgaagttatgtttattcctagggcaagagaagatgaatgtctcattctggcaagtgatggtttgtgggatgtcatgtcaaatgaagaagcatgtgatctggcacgcaaacgaatacttgtctggcacaaaaagaatggcgttgcgctctcgtcctcaaggagcgagggaattgatcctgcagctcaagcagcagctgagttcctctcaaaccgtgcccttcaaaaaggaagcaaggataacatcactgtaatcgtggtggatctgaaagcgcaaaggaagttcaaaaccaaaacatga

SEQ ID NO: 68880 - protein, 538 aa, Populus tremula; identical to SEQ ID NO: 17502

SEQ ID NO: 68881 - DNA, 1617 bp, Populus tremula
  CDS (1)..(1617)
atggaggagatgtatccggcggttgcagtgccatttagagtaggtaattcagcctgtgaaagtccatccataaatacccaaatggatatcacaagaattttaatggcagacacggctagcttattatctgatactgtaactaaggttcctactgctggggataaggattgtaattgtgcggctccggcttcaaaagaggacaggggaggaagaggagcccctttgttggatatgatctctgaaactgaaagaaattgggttgttggcgatgatgggataacacgggaaagtgaggaagaggattctttgtcgttggagggtgatccaattcttgatagttcttgttctctttcagtggctagtgagacaagtagcttatgtggagaggatctcttgagtttggagaccgcctctgaggtaggaacactgagttctgtagaaattaaaaagagcattggtggtgttgatattgttgccaagacagcagatttgggggattcaaacgttgacactgttgtgagcgatcgcccttcggtggcaggaagtgttgaggaagaggctggggatggatctgatgcaaagacatcttctgtggttcttcagttgactctggaaagagggaccagtggaacagtctcaagaagtgtttttgaagtggactatgtacccctttggggatttacatctgtttgtggaaggagaccggagatggaagatgcagttgctactgtgccttatttattaaaatttcctattcaaatgctgattggcgaccgattacttgatggaatgaacaagtatttgcctcaccagactgctcatttctttggagtttatgatggtcatggaggctcgcaagtggcaaattattgtcatgatcgtatccattcggctttgtccgaggagatagaatttgttaagaatggcctgagtgatggaagtattaaggatagttgccagaagcagtggaaaaatgctttcaccaattgttttctcaaggttgatgctgaagtcggaggaaaggctggtgccgaaccagttgccccagaaactgttggttctactgctgttgtggccattatttgttcatcccacatcatagtagcaaactgtggagactcacgagcagttctttgtcgcgggaaagaaccaatggcattatcagtggatcataaaccaaaccgagaagatgagtatgcaaggatagaagcagctggaggcaaggtcatacagtggaatgggcatcgtgtctttggtgttctagcaatgtcaaggtctattggtgatagatatttgaaaccatggattattccagaacccgaagttatgtttattcctagggcaagagaagatgaatgtctcattctggcaagtgatggtttgtgggatgtcatgtcaaatgaagaagcatgtgatctggcacgcaaacgaatacttgtctggcacaaaaagaatggcgttgcgctctcgtcctcaaggagcgagggaattgatcctgcagctcaagcagcagctgagttcctctcaaaccgtgcccttcaaaaaggaagcaaggataacatcactgtaatcgtggtggatctgaaagcgcaaaggaagttcaaaaccaaaacatga

SEQ ID NO: 68882 - protein, 538 aa, Populus tremula; identical to SEQ ID NO: 5377

SEQ ID NO: 68883 - DNA, 1617 bp, Populus tremula
  CDS (1)..(1617)
atggaggagatgtatccggcggttgcagtgccatttagagtaggtaattcagcctgtgaaagtccatccataaatacccaaatggatatcacaagaattttaatggcagacacggctagcttattatctgatactgtaactaaggttcctactgctggggataaggattgtaattgtgcggctccggcttcaaaagaggacaggggaggaagaggagcccctttgttggatatgatctctgaaactgaaagaaattgggttgttggcgatgatgggataacacgggaaagtgaggaagaggattctttgtcgttggagggtgatccaattcttgatagttcttgttctctttcagtggctagtgagacaagtagcttatgtggagaggatctcttgagtttggagaccgcctctgaggtaggaacactgagttctgtagaaattaaaaagagcattggtggtgttgatattgttgccaagacagcagatttgggggattcaaacgttgacactgttgtgagcgatcgcccttcggtggcaggaagtgttgaggaagaggctggggatggatctgatgcaaagacatcttctgtggttcttcagttgactctggaaagagggaccagtggaacagtctcaagaagtgtttttgaagtggactatgtacccctttggggatttacatctgtttgtggaaggagaccggagatggaagatgcagttgctactgtgccttatttattaaaatttcctattcaaatgctgattggcgaccgattacttgatggaatgagcaagtatttgcctcaccagactgctcatttctttggagtttatgatggtcatggaggctcgcaagtggcaaattattgtcatgatcgtatccattcggctttgtccgaggagatagaatttgttaagaatggcctgagtgatggaagtattaaggatagttgccagaagcagtggaaaaatgctttcaccaattgttttctcaaggttgatgctgaagtcggaggaaaggctggtgccgaaccatttgccccagaaactgttggttctactgctgttgtggccattatttgttcatcccacatcatagtagcaaactgtggagactcacgagcagttctttgtcgcgggaaagaaccaatggcattatcagtggatcataaaccaaaccgagaagatgagtatgcaaggatagaagcagctggaggcaaggtcatacagtggaatgggcatcgtgtctttggtgttctagcaatgtcaaggtctattggtgatagatatttgaaaccatggattattccagaacccgaagttatgtttattcctagggcaagagaagatgaatgtctcattctggcaagtgatggtttgtgggatgtcatgtcaaatgaagaagcatgtgatctggcacgcaaacgaatacttgtctggcacaaaaagaatggcgttgcgctctcgtcctcaaggagcgagggaattgatcctgcagctcaagcagcagctgagttcctctcaaaccgtgcccttcaaaaaggaagcaaggataacatcactgtaatcgtggtggatctgaaagcgcaaaggaagttcaaaaccaaaacatga

SEQ ID NO: 68884 - protein, 538 aa, Populus tremula; identical to SEQ ID NO: 5379

SEQ ID NO: 68885 - DNA, 1440 bp, Triticum aestivum
  CDS (1)..(1440)
atggaggacgtggccgtggctgcgctcgccacggcgcccacacctgtgtttagccccgccacggccgggctcacgctaatcgccgccgcggctgcggaaccgattgcggccgttgtggcgggcgccatggagggggtgccggtcaccttttcagtgccgccggtcagaaccaccacggatgacgggctgccagcggcaacaggaggggaagggggagaggcgtcggcagcggggagcccgtgctcggtcaccagcgactgcagcagcgtggcaagcgcggatttcgaaggggtgggtctgggcttcttcggtgcgggggtcgaggggggagcggtggtgttcgaggactcggcggcttctgcggccaccgtcgaggcggaggcgagggtcgcggccggggggaggagcgtcttcgctgtcgaatgcgttccactctgggggtttacatcaatttgcggccgccgcccggagatggaggatgcggtcatcgctgtgccgcgattcttcggcttgcccctctggatgctcacgggcaacaatatggtcgatggactcgatcccatctccttccgcctccccgcgcacttttttggtgtatatgatggccacggcggtgcacaggtagcagattactgtcgggatcggctccacgcagcgctggtggaggagctgagcaggatagaagggtccgtgtctggtgctaacctgggagctgtggagttcaagaagcagtgggagaaggcgtttgtggattgcttctcaagggtggatgatgagatagccggtaaggtgaccagcggaggagggggaaacgtgggcacaagcagtgtcactgcaatgggcatggtagatcctgtagcacccgagaccgtcggttcaacggcggtggtcgctgtcatctgctcctctcatatcattgtctcaaattgtggagactcgagggcagtgctctgccgtggcaagcaacccgtgccgttgtcagtggatcataaacctaatagggaggatgagtacgcaaggattgaggcagagggtggcaaggtcatacagtggaatggctaccgagttttcggtgtccttgccatgtcgcggtcaattggtgacagatatctgaaaccatggataattcctgtcccagaggtcacaattgttcctcgagcaaaggatgacgagtgtcttattctcgctagtgatggcctctgggatgtactgtcgaatgaagaggtatgcgatgttgcccgcaagcgaatactcttatggcataaaaagaatggggtaaacttgtcatcggcccaacgtagcggtgactccccagatccagcggctcaagcagctgctgaatgcttgtcgaagcttgctctccagaaggggagcaaggacaacatcacggttattgtggtagacctcaaggcgcagaggaagttcaagagcaaaacttaa

SEQ ID NO: 68886 - protein, 479 aa, Triticum aestivum
MEDVAVAALATAPTPVFSPATAGLTLIAAAAAEPIAAVVAGAMEGVPVTFSVPPVRTTTDDGLPAATGGEGGEASAAGSPCSVTSDCSSVASADFEGVGLGFFGAGVEGGAVVFEDSAASAATVEAEARVAAGGRSVFAVECVPLWGFTSICGRRPEMEDAVIAVPRFFGLPLWMLTGNNMVDGLDPISFRLPAHFFGVYDGHGGAQVADYCRDRLHAALVEELSRIEGSVSGANLGAVEFKKQWEKAFVDCFSRVDDEIAGKVTSGGGGNVGTSSVTAMGMVDPVAPETVGSTAVVAVICSSHIIVSNCGDSRAVLCRGKQPVPLSVDHKPNREDEYARIEAEGGKVIQWNGYRVFGVLAMSRSIGDRYLKPWIIPVPEVTIVPRAKDDECLILASDGLWDVLSNEEVCDVARKRILLWHKKNGVNLSSAQRSGDSPDPAAQAAAECLSKLALQKGSKDNITVIVVDLKAQRKFKSKT

SEQ ID NO: 68887 - DNA, 1440 bp, Triticum monococcum
  CDS (1)..(1440)
atggaggacgtggccgtggctgcgctcgccacggcgcccacacctgtgtttagccccgccacggccgggctcacgctaatcgccgccgcggctgcggaaccgattgcggccgttgtggcgggcgccatggagggggtgccggtcaccttttcagtgccgccggtcagaaccaccacggatgacgggctgccagcggcaacaggaggggaagggggagaggcgtcggcagcggggagcccgtgctcggtcaccagcgactgcagcagcgtggcaagcgcggatttcgaaggggtgggtctgggcttcttcggtgcgggggtcgaggggggagcggtggtgttcgaggactcggcggcttctgcggccaccgtcgaggcggaggcgagggtcgcggccggggggaggagcgtcttcgctgtcgaatgcgttccactctgggggtttacatcaatttgcggccgccgcccggagatggaggatgcggtcatcgctgtgccgcgattcttcggcttgcccctctggatgctcacgggcaacaatatggtcgatggactcgatcccatctccttccgcctccccgcgcacttttttggtgtatatgatggccacggcggtgcacaggtagcagattactgtcgggatcggctccacgcagcgctggtggaggagctgagcaggatagaagggtccgtgtctggtgctaacctgggagctgtggagttcaagaagcagtgggagaaggcgtttgtggattgcttctcaagggtggatgatgagatagccggtaaggtgaccaggggaggagggggaaacgtgggcacaagcagtgtcactgcaatgggcatggtagatcctgtagcacccgagaccgtcggttcaacggcggtggtcgctgtcatctgctcctctcatatcattgtctcaaattgtggagactcgagggcagtgctctgccgtggcaagcaacccgtgccgttgtcagtggatcataaacctaatagggaggatgagtacgcaaggattgaggcagagggtggcaaggtcatacagtggaatggctaccgagttttcggtgtccttgccatgtcgcggtcaattggtgacagatatctgaaaccatggataattcctgtcccagaggtcacaattgttcctcgagcgaaggatgacgagtgtcttattctcgctagtgatggcctctgggatgtactgtcgaatgaagaggtatgcgatgttgcccgcaagcgaatactcttatggcataaaaagaatggggtaaacttgtcatcggcccaacgtagcggtgactccccagatccagcggctcaagcagctgctgaatgcttgtcgaagcttgctctccagaaggggagcaaggacaacatcacggttattgtggtagacctcaaggcgcagaggaagttcaagagcaaaacttaa

SEQ ID NO: 68888 - protein, 479 aa, Triticum monococcum
MEDVAVAALATAPTPVFSPATAGLTLIAAAAAEPIAAVVAGAMEGVPVTFSVPPVRTTTDDGLPAATGGEGGEASAAGSPCSVTSDCSSVASADFEGVGLGFFGAGVEGGAVVFEDSAASAATVEAEARVAAGGRSVFAVECVPLWGFTSICGRRPEMEDAVIAVPRFFGLPLWMLTGNNMVDGLDPISFRLPAHFFGVYDGHGGAQVADYCRDRLHAALVEELSRIEGSVSGANLGAVEFKKQWEKAFVDCFSRVDDEIAGKVTRGGGGNVGTSSVTAMGMVDPVAPETVGSTAVVAVICSSHIIVSNCGDSRAVLCRGKQPVPLSVDHKPNREDEYARIEAEGGKVIQWNGYRVFGVLAMSRSIGDRYLKPWIIPVPEVTIVPRAKDDECLILASDGLWDVLSNEEVCDVARKRILLWHKKNGVNLSSAQRSGDSPDPAAQAAAECLSKLALQKGSKDNITVIVVDLKAQRKFKSKT

SEQ ID NO: 68889 - DNA, 1536 bp, Arabidopsis thaliana; identical to SEQ ID NO: 5382
  CDS (1)..(1536)

SEQ ID NO: 68890 - protein, 511 aa, Arabidopsis thaliana; identical to SEQ ID NO: 5383

SEQ ID NO: 68891 - DNA, 1143 bp, Mesembryanthemum crystallinum
  CDS (1)..(1143)
atggactcctccgacagcggcgaagaactccggccatcaccgccggaatcagagtcggaatcctggacaagctcaagcgtgatgttctccggagaagattctagaagcagcatcggcgacacctcagcgaccagcagcggcagctccggcgagatcccggaggcgatggtcgtcggagttcggccgccggcgccggaaatatccggcgaaactccggcgagggagcggtgtgtaggacggccggatagggtgagctgggggtccacgtcggtgattgggaggagggcggagatggaggacgccattgctgtggctcctgagttcatctcccccacgtgcggtcacgtgggagggtgtacggcaccggattctagaagctccggccatgccttgcctcttcatttcttcggcgtttatgacggccacggtggttcccaggttgctggattttgtgctcaaaggatgcatgaaattatagctgaggagtggaatcaggaaggaattgatgcatatgaatggcagaagaggtggaaagaagccttcatcagtggctttaagagggctgatgatcagattaccacagaagttatagcgtcagagatggttggatccactgctgtcgtagcagttgtgtcgggttgtcaaattattttgtccaactgtggagattcaagggccgtgctttgtagaaggacacagaccattcctttgaccgttgatcacaagccagatagagaagacgaattattgagaattgaaggacaaggtggcagagtcataaactggaatggtgctagggtgtttggagtccttgcaatgtctcgagccataggtgataggtatatgagccctttcataattccagtccctgaggtcactttcacgacaagaagtgatgaagatgagtgtttgatattggcgagtgacgggctttgggatgtcatatcgaacgatgaagctggggaggtggctcgccgccttctaaggcgtagacgcagggccatggtagcaggtgatatttgtccagcacaagtagttgctgataagcttacccagcttgcaattggaagaaacagttctgacaacatttctgtcatcgttgttgatctaaagtcgagaagaagacatcaagcaacacaatga

SEQ ID NO: 68892 - protein, 380 aa, Mesembryanthemum crystallinum; identical to SEQ ID NO: 5385

SEQ ID NO: 68893 - DNA, 1047 bp, Musa balbisiana; identical to SEQ ID NO: 5386
  CDS (1)..(1047)

SEQ ID NO: 68894 - protein, 348 aa, Musa balbisiana; identical to SEQ ID NO: 5387

SEQ ID NO: 68895 - DNA, 1071 bp, Oryza sativa subsp; identical to SEQ ID NO: 938
  CDS (1)..(1071)

SEQ ID NO: 68896 - protein, 356 aa, Oryza sativa subsp; identical to SEQ ID NO: 939

SEQ ID NO: 68897 - DNA, 1281 bp, Prunus avium; identical to SEQ ID NO: 940
  CDS (1)..(1281)

SEQ ID NO: 68898 - protein, 426 aa, Prunus avium; identical to SEQ ID NO: 941

SEQ ID NO: 68899 - DNA, 1329 bp, Arabidopsis thaliana; identical to SEQ ID NO: 5400
  CDS (1)..(1329)

SEQ ID NO: 68900 - protein, 442 aa, Arabidopsis thaliana; identical to SEQ ID NO: 5401

SEQ ID NO: 68901 - DNA, 1251 bp, Nicotiana tabacum; identical to SEQ ID NO: 19461
  CDS (1)..(1251)

SEQ ID NO: 68902 - protein, 416 aa, Nicotiana tabacum; identical to SEQ ID NO: 5403

SEQ ID NO: 68903 - DNA, 1242 bp, Arabidopsis thaliana; identical to SEQ ID NO: 5404
  CDS (1)..(1242)

SEQ ID NO: 68904 - protein, 413 aa, Arabidopsis thaliana; identical to SEQ ID NO: 5405

SEQ ID NO: 68905 - DNA, 1089 bp, Lotus japonicus
  CDS (1)..(1089)
atgaagaacccaaaacgacacccgtcggaatcctctctccggcgagtgacctctgaggagaccgtgacggggttgaagaatgctcaccggaggaggctgaaaattcggcgaatgaagtacagctgccaggcgaagatcaacgccggcgacggagattttcctccgtcggggaaggagcggagggagattcatgagtctgtgcagatatcactgtccctggcgaactcttcgtcgtcatcatcatcggaggaggatcgggagcggaagcgagacgacggcgttttgccgtacggttcggtttcggtggtggggagcaggaaggagatggaggacgcggtgagcgtggagacagggtgcgtgacgaagtgcgactacttcgctgtttttgacggtcacggcggagctcaggtggcggaggcgtgccgggagcggctgtatcggcttgtggcggaggaggttgagaggtgcgggaatggggtggaggaggtggactgggaggaagtgatggaagggtgttttcgtaatatggacggtgaggtggcgggtaatgcggcgttgaggacggtgggttccacggcggttgtcgccgttgttgcagcggcggaggttgtcatcgctaattgcggtgattgtagagcggtgttaggcagaggaggtgaagctgtggatttgtctagtgatcataagcccgacaggcctgatgagttgatgcgaatcgaggaagctggtggaaaggtcataaactggaatggccagcgtgttctaggtgttcttgccacttcccgatctataggggatcagtaccttcgaccctatgtaatatcgaaaccggaagtgacagtgacaaagagaagcagcaaggatgagtttctgatactagcaagtgatggcttgtgggatgtgatctcaagtgaaatggcgtgccaggttgtgagaaaatgcctcaacgggcagattaggagaatttgtaatgagaatcaaagtcgtgcttctgaggctgcaactcttttggctgagatagcattggcaaagggaagcagggataacaccagtgtcattgtaattgagctgagagggactgtaacatag

SEQ ID NO: 68906 - protein, 362 aa, Lotus japonicus; identical to SEQ ID NO: 5413

SEQ ID NO: 68907 - DNA, 1272 bp, Arabidopsis thaliana; identical to SEQ ID NO: 19467
  CDS (1)..(1272)

SEQ ID NO: 68908 - protein, 423 aa, Arabidopsis thaliana; identical to SEQ ID NO: 5319

SEQ ID NO: 68909 - DNA, 1200 bp, Arabidopsis thaliana; identical to SEQ ID NO: 964
  CDS (1)..(1200)

SEQ ID NO: 68910 - protein, 399 aa, Arabidopsis thaliana; identical to SEQ ID NO: 965

SEQ ID NO: 68911 - DNA, 1404 bp, Oryza sativa; identical to SEQ ID NO: 5322
  CDS (1)..(1404)

SEQ ID NO: 68912 - protein, 467 aa, Oryza sativa; identical to SEQ ID NO: 5323

SEQ ID NO: 68913 - DNA, 1212 bp, Oryza sativa; identical to SEQ ID NO: 5324
  CDS (1)..(1212)

SEQ ID NO: 68914 - protein, 403 aa, Oryza sativa; identical to SEQ ID NO: 5325

SEQ ID NO: 68915 - DNA, 1245 bp, Oryza sativa; identical to SEQ ID NO: 5326
  CDS (1)..(1245)

SEQ ID NO: 68916 - protein, 414 aa, Oryza sativa; identical to SEQ ID NO: 5327

SEQ ID NO: 68917 - DNA, 1215 bp, Oryza sativa; identical to SEQ ID NO: 826
  CDS (1)..(1215)

SEQ ID NO: 68918 - protein, 404 aa, Oryza sativa; identical to SEQ ID NO: 827

SEQ ID NO: 68919 - DNA, 1251 bp, Oryza sativa; identical to SEQ ID NO: 5388
  CDS (1)..(1251)

SEQ ID NO: 68920 - protein, 416 aa, Oryza sativa; identical to SEQ ID NO: 5389

SEQ ID NO: 68921 - DNA, 1164 bp, Oryza sativa; identical to SEQ ID NO: 5392
  CDS (1)..(1164)

SEQ ID NO: 68922 - protein, 387 aa, Oryza sativa; identical to SEQ ID NO: 5393

SEQ ID NO: 68923 - DNA, 1146 bp, Oryza sativa; identical to SEQ ID NO: 832
  CDS (1)..(1146)

SEQ ID NO: 68924 - protein, 381 aa, Oryza sativa; identical to SEQ ID NO: 833

SEQ ID NO: 68925 - DNA, 1476 bp, Oryza sativa; identical to SEQ ID NO: 834
  CDS (1)..(1476)

SEQ ID NO: 68926 - protein, 491 aa, Oryza sativa; identical to SEQ ID NO: 835

SEQ ID NO: 68927 - DNA, 1338 bp, Oryza sativa; identical to SEQ ID NO: 5334
  CDS (1)..(1338)

SEQ ID NO: 68928 - protein, 445 aa, Oryza sativa; identical to SEQ ID NO: 5335

SEQ ID NO: 68929 - DNA, 984 bp, Oryza sativa
  CDS (1)..(984)
atgcgtgaggtgctcctcctcggctcgttggtggttctcgccttgttgtcgctgttcccgtgctgctcctgtctctcgcagggagcggaggaggaggaggacgacggcgaggtgcgcttgatggggctcgccggagaggccgctggctcgcctggcagtggcggcgggttcagtgcaaatggtaaatttagctatggttatgcgagctctcctggaaaaagatcctccatggaggacttctatgacaccagaattgatggtgtcgatggagagaccgttggactgtttggtgtctttgatggtcatggtggagctcgagcagcagaattcgtcaagcagaacctcttcaccaatttaatcaagcacccaaagttattcagtgataccaagtctgcaattgctgaaacttacactagcacggactctgaacttctgaaagctgaaaccagccacaatcgagatgcagggtcgactgcctccactgcaattctcgtaggcgaccgtctgctcgttgcaaatgttggagattctagggctgtcatttgtagaggaggagatgctatagctgtgtcaagagaccacaagcctgatcagtcagacgagaggcagaggatagaggatgctggtggttttgtgatgtgggctggaacatggcgcgtgggtggtgttcttgctgtctctcgagcatttggtgacaaactcctgaagcaatatgtggttgctgatccagagatcaaggaggaggtggtcgacagctctctcgagttcctcatccttgctagtgatggcctctgggacgtggtgaccaacgaggaagctgtggccatggtgaagccaattctggattcagagcaggctgcaaagaagctcctccaggaggcctcacagaggggaagcgcagacaacatcacctgcctcgtcgtccgtttcttggagcaggagaatcacctgccagagagaccgacgaatgatcaagcctcctaa

SEQ ID NO: 68930 - protein, 327 aa, Oryza sativa; identical to SEQ ID NO: 899

SEQ ID NO: 68931 - DNA, 1077 bp, Oryza sativa; identical to SEQ ID NO: 17535
  CDS (1)..(1077)

SEQ ID NO: 68932 - protein, 358 aa, Oryza sativa; identical to SEQ ID NO: 17536

SEQ ID NO: 68933 - DNA, 1269 bp, Brassica napus; identical to SEQ ID NO: 972
  CDS (1)..(1269)

SEQ ID NO: 68934 - protein, 422 aa, Brassica napus; identical to SEQ ID NO: 973

SEQ ID NO: 68935 - DNA, 1206 bp, Brassica napus; identical to SEQ ID NO: 1444
  CDS (1)..(1206)

SEQ ID NO: 68936 - protein, 401 aa, Brassica napus; identical to SEQ ID NO: 1445

SEQ ID NO: 68937 - DNA, 1236 bp, Brassica napus; identical to SEQ ID NO: 974
  CDS (1)..(1236)

SEQ ID NO: 68938 - protein, 411 aa, Brassica napus; identical to SEQ ID NO: 975

SEQ ID NO: 68939 - DNA, 1269 bp, Brassica napus
  CDS (1)..(1269)
atggaggaagtatctccggcggttcctatgcctttcatgcctttccccgaaacccagatggaactcgcagggctcatgttgggtaaaggttatcacaacggccaatactcaactcaagattccgacaacggagattctagacaggagacttcacgctctgtttctgaatctaggagagttttgtcctctcggattaattctcccaacttcaacatgaagaatcactcatcatccgctgatatctccgccgccggagaagagatcaacggctcagatgagagatcgacggagaagaagatgatcagcagaacagagagcaggactctgttcgagttcaagagcgtgcctttgtacggtgtgacttccatctgtggaagaagaccggagatggaagatgctctctccgcgatacccagattccttcaatctccgaccaattcgttgatagatggtcgtttcaatcctcagtccgccgctcacttcttcggcgtctacgacggccacggcggttctcaggtagcgaactattgcagagagaggatgcacttggctttagcggaggagatagagaaggagaaaccgatgctctacgacggtgacacgtggcaggagaagtggaagagagctttgttcaactcgttcctccgcgttgactcggagatcgagtcggtggccccggagactgtcgggtcaacgtcggtcgtcgccgtcgtgttcccgactcatatcttcgtcgcgaactgcggcgactcaagagccgttctttgccgcggcaagactgcgttacctttatctaccgatcacaaacctgatagagaagatgaggcggcgaggattgaagccgccggagggaaagtgatccggtggaacggagctcgtgtgttcggtgttctcgccatgtcaagatccattggcgatagatacttaaaaccgtcgatcattcctgatccggaagtgactgctgtgaggagagtcaaagaagatgactgtctgatactagcgagtgacggtgtttgggatgtaatgacggatgaggaagcgtgtgagatggcgcggaaacgtattctcttgtggcacaagaagaacatgggggctggagatgcgtcgttgctcacggaggagagaagaggtgaaggagaagatccggcggcgaagtctgcggctgagtacttgtcaaagctggctttacagagaggaagcaaagacaatataactgtggtggtggttgatctgaagcctcataggaaactcaagatcaaaaagccttga

SEQ ID NO: 68940 - protein, 422 aa, Brassica napus
MEEVSPAVPMPFMPFPETQMELAGLMLGKGYHNGQYSTQDSDNGDSRQETSRSVSESRRVLSSRINSPNFNMKNHSSSADISAAGEEINGSDERSTEKKMISRTESRTLFEFKSVPLYGVTSICGRRPEMEDALSAIPRFLQSPTNSLIDGRFNPQSAAHFFGVYDGHGGSQVANYCRERMHLALAEEIEKEKPMLYDGDTWQEKWKRALFNSFLRVDSEIESVAPETVGSTSVVAVVFPTHIFVANCGDSRAVLCRGKTALPLSTDHKPDREDEAARIEAAGGKVIRWNGARVFGVLAMSRSIGDRYLKPSIIPDPEVTAVRRVKEDDCLILASDGVWDVMTDEEACEMARKRILLWHKKNMGAGDASLLTEERRGEGEDPAAKSAAEYLSKLALQRGSKDNITVVVVDLKPHRKLKIKKP

SEQ ID NO: 68941 - DNA, 1209 bp, Brassica napus; identical to SEQ ID NO: 1478
  CDS (1)..(1209)

SEQ ID NO: 68942 - protein, 402 aa, Brassica napus; identical to SEQ ID NO: 1479

SEQ ID NO: 68943 - DNA, 1206 bp, Brassica napus; identical to SEQ ID NO: 1486
  CDS (1)..(1206)

SEQ ID NO: 68944 - protein, 401 aa, Brassica napus; identical to SEQ ID NO: 1487

SEQ ID NO: 68945 - DNA, 1149 bp, Brassica napus; identical to SEQ ID NO: 998
  CDS (1)..(1149)

SEQ ID NO: 68946 - protein, 382 aa, Brassica napus; identical to SEQ ID NO: 999

SEQ ID NO: 68947 - DNA, 1206 bp, Glycine max; identical to SEQ ID NO: 1496
  CDS (1)..(1206)

SEQ ID NO: 68948 - protein, 401 aa, Glycine max; identical to SEQ ID NO: 1497

SEQ ID NO: 68949 - DNA, 1203 bp, Glycine max; identical to SEQ ID NO: 1498
  CDS (1)..(1203)

SEQ ID NO: 68950 - protein, 400 aa, Glycine max; identical to SEQ ID NO: 1499

SEQ ID NO: 68951 - DNA, 1203 bp, Glycine max
  CDS (1)..(1203)
atggctggaatttgctgtggtgttgttggagaaggtgacactccggctccactcgagcccactcctcgcccctccaggcgccggagtttggacatcttacctttaaaatatatcgccgacatgcccatgccgccgccggaggctttacggaagcgtcccaagctcaacctcagggactgcgataacgcaattgaaaattgcgacgaatccactggacacaaggtgacgaagaaggaatccaaagtagactacgacgacgacgtcgtttcggaaactaagaacgtaactgtttcggaagttgaagaagaatctcccaagttcggcgtgacgtccgtttgcggcaggagaagagacatggaagattccgtctcggtgcggccttgcttcacccaaggcttccactacttcggcgtcttcgacggtcacggttgctctcatgttgcgactatgtgtaaggagcggctacacgagatcgtgaatgaagaaattgaaagcgcgcgcgagaatttggagtggaaactgacgatggagaacggattcgctcgcatggacgacgaggttcatcgccggagccagagcaaccagaccttcacctgcaggtgtgagctccagactcctcactgcgacgccgtcggatccaccgccgtcgtcgccgtcgtcacgccggacaaaatcgtcgtctctaactgcggcgactcccgcgccgtcctctgccgcaacggcgtcgccatccctctctcctccgatcacaagccggatcgacccgacgaattactccgagtccaatccaagggagggcgcgtgatttactgggacggtccgagagtgcttggtgtgttagcaatgtctcgagccataggtgacaattatctgaagccgtacgtgatttcagaaccggaggtgatggtgacggagcggacggaggaggacgagtgtttgatactggcgagtgatgggttgtgggatgtggtatcgaatgagaccgcatgtggggtggtgaggatgtgcctcaaggcgcagaagccgccggggtctccggggagtgacgtggcggctgacggttccgaccgtgcttgctccgatgcgtcgattctgttgaccaagttggcgctggcaaggcatagttcggataatgtgagcgtggtggtggttgatttgaggagggatcaacgacaatcatcaaactacaacgacgttaattaa

SEQ ID NO: 68952 - protein, 400 aa, Glycine max; identical to SEQ ID NO: 1459

SEQ ID NO: 68953 - DNA, 1134 bp, Glycine max; identical to SEQ ID NO: 1006
  CDS (1)..(1134)

SEQ ID NO: 68954 - protein, 377 aa, Glycine max; identical to SEQ ID NO: 1007

SEQ ID NO: 68955 - DNA, 1617 bp, Glycine max; identical to SEQ ID NO: 1518
  CDS (1)..(1617)

SEQ ID NO: 68956 - protein, 538 aa, Glycine max; identical to SEQ ID NO: 1519

SEQ ID NO: 68957 - DNA, 1134 bp, Glycine max; identical to SEQ ID NO: 1010
  CDS (1)..(1134)

SEQ ID NO: 68958 - protein, 377 aa, Glycine max; identical to SEQ ID NO: 1011

SEQ ID NO: 68959 - DNA, 1152 bp, Glycine max; identical to SEQ ID NO: 1012
  CDS (1)..(1152)

SEQ ID NO: 68960 - protein, 383 aa, Glycine max; identical to SEQ ID NO: 1013

SEQ ID NO: 68961 - DNA, 1569 bp, Glycine max; identical to SEQ ID NO: 1524
  CDS (1)..(1569)

SEQ ID NO: 68962 - protein, 522 aa, Glycine max; identical to SEQ ID NO: 1525

SEQ ID NO: 68963 - DNA, 1134 bp, Glycine max; identical to SEQ ID NO: 1014
  CDS (1)..(1134)

SEQ ID NO: 68964 - protein, 377 aa, Glycine max; identical to SEQ ID NO: 1015

SEQ ID NO: 68965 - DNA, 1044 bp, Glycine max; identical to SEQ ID NO: 1024
  CDS (1)..(1044)

SEQ ID NO: 68966 - protein, 347 aa, Glycine max; identical to SEQ ID NO: 1025

SEQ ID NO: 68967 - DNA, 1674 bp, Glycine max; identical to SEQ ID NO: 1558
  CDS (1)..(1674)

SEQ ID NO: 68968 - protein, 557 aa, Glycine max; identical to SEQ ID NO: 1559

SEQ ID NO: 68969 - DNA, 1113 bp, Zea mays; identical to SEQ ID NO: 1034
  CDS (1)..(1113)

SEQ ID NO: 68970 - protein, 370 aa, Zea mays; identical to SEQ ID NO: 1035

SEQ ID NO: 68971 - DNA, 1065 bp, Zea mays; identical to SEQ ID NO: 1036
  CDS (1)..(1065)

SEQ ID NO: 68972 - protein, 354 aa, Zea mays; identical to SEQ ID NO: 1037

SEQ ID NO: 68973 - DNA, 1455 bp, Zea mays; identical to SEQ ID NO: 1594
  CDS (1)..(1455)

SEQ ID NO: 68974 - protein, 484 aa, Zea mays; identical to SEQ ID NO: 1595

SEQ ID NO: 68975 - DNA, 1065 bp, Zea mays; identical to SEQ ID NO: 1048
  CDS (1)..(1065)

SEQ ID NO: 68976 - protein, 354 aa, Zea mays; identical to SEQ ID NO: 1049

SEQ ID NO: 68977 - DNA, 20 bp, Artificial sequence
  primer
atggaggaagtatctccggc

SEQ ID NO: 68978 - DNA, 22 bp, Artificial sequence
  primer
tcagttcaagggtttgctcttg

SEQ ID NO: 68979 - protein, 376 aa, Artificial sequence
  consensus sequence
  Variant (2)..(3): Xaa in position 2 to 3 is any amino acid
  Variant (5)..(6): Xaa in position 5 to 6 is any amino acid
  Variant (8)..(8): Xaa in position 8 is any amino acid
  Variant (10)..(11): Xaa in position 10 to 11 is any amino acid
  Variant (15)..(30): Xaa in position 15 to 30 is any amino acid
  Variant (31)..(54): Xaa in position 31 to 54 is any or no amino acid
  Variant (56)..(56): Xaa in position 56 is any amino acid
  Variant (61)..(63): Xaa in position 61 to 63 is any amino acid
  Variant (66)..(67): Xaa in position 66 to 67 is any amino acid
  Variant (69)..(70): Xaa in position 69 to 70 is any amino acid
  Variant (72)..(72): Xaa in position 72 is any amino acid
  Variant (74)..(85): Xaa in position 74 to 85 is any amino acid
  Variant (86)..(103): Xaa in position 86 to 103 is any or no amino acid
  Variant (105)..(111): Xaa in position 105 to 111 is any amino acid
  Variant (113)..(115): Xaa in position 113 to 115 is any amino acid
  Variant (117)..(117): Xaa in position 117 is any amino acid
  Variant (119)..(126): Xaa in position 119 to 126 is any amino acid
  Variant (127)..(151): Xaa in position 127 to 151 is any or no amino acid
  Variant (159)..(166): Xaa in position 159 to 166 is any amino acid
  Variant (168)..(168): Xaa in position 168 is any amino acid
  Variant (178)..(178): Xaa in position 178 is any amino acid
  Variant (180)..(185): Xaa in position 180 to 185 is any amino acid
  Variant (188)..(188): Xaa in position 188 is any amino acid
  Variant (193)..(193): Xaa in position 193 is any amino acid
  Variant (195)..(195): Xaa in position 195 is any amino acid
  Variant (198)..(199): Xaa in position 198 to 199 is any amino acid
  Variant (202)..(204): Xaa in position 202 to 204 is any amino acid
  Variant (207)..(207): Xaa in position 207 is any amino acid
  Variant (210)..(210): Xaa in position 210 is any amino acid
  Variant (212)..(212): Xaa in position 212 is any amino acid
  Variant (214)..(214): Xaa in position 214 is any amino acid
  Variant (217)..(217): Xaa in position 217 is any amino acid
  Variant (222)..(222): Xaa in position 222 is any amino acid
  Variant (225)..(225): Xaa in position 225 is any amino acid
  Variant (228)..(228): Xaa in position 228 is any amino acid
  Variant (229)..(243): Xaa in position 229 to 243 is any or no amino acid
  Variant (245)..(245): Xaa in position 245 is any amino acid
  Variant (250)..(254): Xaa in position 250 to 254 is any amino acid
  Variant (258)..(261): Xaa in position 258 to 261 is any amino acid
  Variant (263)..(265): Xaa in position 263 to 265 is any amino acid
  Variant (266)..(266): Xaa in position 266 is any or no amino acid
  Variant (268)..(268): Xaa in position 268 is any amino acid
  Variant (269)..(269): Xaa in position 269 is any or no amino acid
  Variant (281)..(283): Xaa in position 281 to 283 is any amino acid
  Variant (285)..(285): Xaa in position 285 is any amino acid
  Variant (288)..(290): Xaa in position 288 to 290 is any amino acid
  Variant (292)..(298): Xaa in position 292 to 298 is any amino acid
  Variant (299)..(351): Xaa in position 299 to 351 is any or no amino acid
  Variant (353)..(354): Xaa in position 353 to 354 is any amino acid
  Variant (355)..(355): Xaa in position 355 is any or no amino acid
  Variant (357)..(359): Xaa in position 357 to 359 is any amino acid
  Variant (361)..(362): Xaa in position 361 to 362 is any amino acid
  Variant (363)..(364): Xaa in position 363 to 364 is any or no amino acid
  Variant (366)..(366): Xaa in position 366 is any amino acid
  Variant (369)..(370): Xaa in position 369 to 370 is any amino acid
  Variant (372)..(372): Xaa in position 372 is any amino acid
  Variant (374)..(375): Xaa in position 374 to 375 is any amino acid
GXXSXXGXRXXMEDXXXXXXXXXXXXXXXXXXXXXXXXXXXXXXXXXXXXXXXXVXDGHGXXXVAXXCXXRXHXXXXXXXXXXXXXXXXXXXXXXXXXXXXXXWXXXXXXXFXXXDXEXXXXXXXXXXXXXXXXXXXXXXXXXXXXXXXXXGSTAVVAXXXXXXXXVXNCGDSRAVLXRXXXXXXLSXDHKPXRXDEXXRIXXXGGXVIXWXGXRVXGVLAXSRXIGXXXXXXXXXXXXXXXXDXYLKPXXXXXPEVXXXXRXXXXDXXLILASDGLWDVXXXEXACXXXRXXXXXXXXXXXXXXXXXXXXXXXXXXXXXXXXXXXXXXXXXXXXXXXXXXXXXXXXXXXXAXXXLXXXAXXXXSXDNXXVXVXXL

SEQ ID NO: 68980 - protein, 21 aa, Artificial sequence
  protein pattern
  Variant (2)..(2): Xaa in position 2 is Asp or Glu
  Variant (3)..(3): Xaa in position 3 is any amino acid
  Variant (11)..(11): Xaa in position 11 is Leu, Met or Val
  Variant (14)..(14): Xaa in position 14 is Leu or Val
  Variant (15)..(15): Xaa in position 15 is Ile, Leu, Met or Val
  Variant (16)..(16): Xaa in position 16 is Asn, Pro, Ser or Thr
  Variant (17)..(17): Xaa in position 17 is any amino acid
  Variant (18)..(18): Xaa in position 18 is Asp, Glu or Gln
  Variant (19)..(19): Xaa in position 19 is any amino acid
  Variant (20)..(20): Xaa in position 20 is Ala or Val
  Variant (21)..(21): Xaa in position 21 is Cys, Gly or Ser
DXXLILASDGXWDXXXXXXXX

SEQ ID NO: 68981 - protein, 20 aa, Artificial sequence
  protein pattern
  Variant (2)..(2): Xaa in position 2 is any amino acid
  Variant (3)..(3): Xaa in position 3 is any or no amino acid
  Variant (5)..(5): Xaa in position 5 is Phe or Tyr
  Variant (10)..(10): Xaa in position 10 is Cys or Gly
  Variant (11)..(12): Xaa in position 11 to 12 is any amino acid
  Variant (15)..(16): Xaa in position 15 to 16 is any amino acid
  Variant (18)..(19): Xaa in position 18 to 19 is any amino acid
FXXVXDGHGXXXVAXXCXXR

SEQ ID NO: 68982 - protein, 21 aa, Artificial sequence
  protein pattern
  Variant (2)..(2): Xaa in position 2 is Ser or Thr
  Variant (3)..(3): Xaa in position 3 is any amino acid
  Variant (8)..(8): Xaa in position 8 is any amino acid
  Variant (10)..(10): Xaa in position 10 is any amino acid
  Variant (13)..(14): Xaa in position 13 to 14 is any amino acid
  Variant (17)..(19): Xaa in position 17 to 19 is any amino acid
LXXDHKPXRXDEXXRIXXXGG

SEQ ID NO: 68983 - protein, 16 aa, Artificial sequence
  protein pattern
  Variant (2)..(2): Xaa in position 2 is any amino acid
  Variant (4)..(4): Xaa in position 4 is Ile, Met or Val
  Variant (7)..(7): Xaa in position 7 is any amino acid
  Variant (10)..(10): Xaa in position 10 is Ala or Ser
  Variant (14)..(14): Xaa in position 14 is any amino acid
VXGXLAXSRXIGDXYL

SEQ ID NO: 68984 - protein, 31 aa, Artificial sequence
  protein pattern
  Variant (2)..(2): Xaa in position 2 is Ala or Ser
  Variant (3)..(3): Xaa in position 3 is Ser or Val
  Variant (4)..(4): Xaa in position 4 is Thr or Val
  Variant (5)..(5): Xaa in position 5 is Ala or Ser
  Variant (6)..(7): Xaa in position 6 to 7 is Ile, Leu or Val
  Variant (8)..(11): Xaa in position 8 to 11 is any amino acid
  Variant (12)..(12): Xaa in position 12 is Ile, Leu or Val
  Variant (13)..(13): Xaa in position 13 is any amino acid
  Variant (14)..(14): Xaa in position 14 is Leu or Val
  Variant (15)..(15): Xaa in position 15 is Ala or Ser
  Variant (17)..(17): Xaa in position 17 is Ala, Cys, Ser, Thr or Val
  Variant (24)..(24): Xaa in position 24 is Ile or Leu
  Variant (25)..(25): Xaa in position 25 is any amino acid
  Variant (26)..(26): Xaa in position 26 is Lys or Arg
  Variant (27)..(29): Xaa in position 27 to 29 is any amino acid
  Variant (30)..(30): Xaa in position 30 is Ala, Pro, Ser or Thr
  Variant (31)..(31): Xaa in position 31 is Ile, Leu, Met or Val
TXXXXXXXXXXXXXXNXGDSRAVXXXXXXXX

SEQ ID NO: 68985 - protein, 21 aa, Artificial sequence
  protein pattern
  Variant (2)..(3): Xaa in position 2 to 3 is any amino acid
  Variant (4)..(4): Xaa in position 4 is any or no amino acid
  Variant (6)..(7): Xaa in position 6 to 7 is any amino acid
  Variant (8)..(9): Xaa in position 8 to 9 is any or no amino acid
  Variant (11)..(11): Xaa in position 11 is any amino acid
  Variant (14)..(14): Xaa in position 14 is any amino acid
  Variant (15)..(15): Xaa in position 15 is Ser or Thr
  Variant (17)..(19): Xaa in position 17 to 19 is Ile or Val
  Variant (20)..(20): Xaa in position 20 is Asp or Glu
LXXXAXXXXSXDNXXVXXXXL

SEQ ID NO: 68986 - protein, 14 aa, Artificial sequence
  protein pattern
  Variant (2)..(3): Xaa in position 2 to 3 is any amino acid
  Variant (5)..(6): Xaa in position 5 to 6 is any amino acid
  Variant (8)..(8): Xaa in position 8 is any amino acid
  Variant (10)..(10): Xaa in position 10 is any amino acid
  Variant (11)..(11): Xaa in position 11 is Asp, Glu or Ser
GXXSXXGXRXXMED

SEQ ID NO: 68987 - DNA, 1113 bp, Arabidopsis thaliana; identical to SEQ ID NO: 864
  CDS (1)..(1113)

SEQ ID NO: 68988 - protein, 370 aa, Arabidopsis thaliana; identical to SEQ ID NO: 865

SEQ ID NO: 68989 - DNA, 1185 bp, Glycine max
  CDS (1)..(1185)
atgctatcaaggttgatggactttctgactgcctgctggcggcgaagatccttctccgacggcaagggtggttccgaggttacggggcggaaggaagggctgctgtggtacaaggatgcggggcagcacttgtttggtgaatactcaatggctgttgtccaggccaacaacctgctcgaggaccagagccagattgagtctggtcctctcagcctgcttgacactggcccttatgggacctttgttggtgtatatgatggacacggtggacccgagacgtcgcgctacgtctgtgatcatctcttccaacatctaaaacgatttgcatctgagcagaagtccatgtctgaggaggttattcggaaggcataccaagccacagaagaaggttttttgtcagtggttaccaaacagtggcccatgaatccccaaattgctgctgtgggatcttgttgtttggttggtgtgatttgtggtggtatcctctatattgctaaccttggtgattcccgtgctgtgcttggccgggtggtcagagcaactggggaggttttggcgatccagctttcgtcagagcataatgtggccagagaatctgtgagacaagagatgcattctttgcatccggatgactcaaaaattgtggttctaaagcacaatgtatggcgggtgaagggtctgatacagatttctagatccattggcgatgtttacctaaaaaaggctgaattcaacaaggaaccattgtatgctaagttccgtgtgcgggaaggttttaagaggcccattttgagctctgacccatcaatttccgttcatgaaattcaacagcatgatcaatttctcatatttgcttctgatggtctttgggaacaccttagcaatcaggatgctgttgatatagttcaaaacaacccacacaatggaattgctcggaggctcatcaaagctgctttgcaagaagcagcaaaaaagagagagatgaggtactctgatttgaagaaaattgaccgtggtgtccgccggcatttccacgatgacatcacagttgtagttgtatttcttgactccaatcttgtcagcagagccagctcggtaagaggtcctcctttatcggtgagaggaggtggtattcccctaccttctagaactttggctccctgtgctgcacctatggaaacttag

SEQ ID NO: 68990 - protein, 394 aa, Glycine max
MLSRLMDFLTACWRRRSFSDGKGGSEVTGRKEGLLWYKDAGQHLFGEYSMAVVQANNLLEDQSQIESGPLSLLDTGPYGTFVGVYDGHGGPETSRYVCDHLFQHLKRFASEQKSMSEEVIRKAYQATEEGFLSVVTKQWPMNPQIAAVGSCCLVGVICGGILYIANLGDSRAVLGRVVRATGEVLAIQLSSEHNVARESVRQEMHSLHPDDSKIVVLKHNVWRVKGLIQISRSIGDVYLKKAEFNKEPLYAKFRVREGFKRPILSSDPSISVHEIQQHDQFLIFASDGLWEHLSNQDAVDIVQNNPHNGIARRLIKAALQEAAKKREMRYSDLKKIDRGVRRHFHDDITVVVVFLDSNLVSRASSVRGPPLSVRGGGIPLPSRTLAPCAAPMET

SEQ ID NO: 68991 - DNA, 1170 bp, Sorghum bicolor
  CDS (1)..(1170)
atgctagtgacattgatgaacttgttgcgggcgtgctggcgaccatcgaaccggcatgcccgaacaggctcagatgttaccggtaggcaggatggacttctatggtacaaggacgccgggcagcatgtcaatggggagttctccatggctgttgttcaggccaataacttacttgaggaccagtgtcagatcgagtcgggcccactgagttttctagattctggaccatatggcactttcgttggcgtttacgatggtcatgctggtgctgagacggcctgctatatcaatgagcatctcttccagaatctgaaaagatttgcatctgagcagaatgcaatgtctgctgatgtactgaagaaggcgtatgaagctacagaagatggattcttctctgttgttaccaaacaatggcctataaagcctcagatagcagctgtcggctcatgctgcctggtcggtgtaatttgtggcggcgtgctttatgttgccaatgttggggattcccgtgccgttttaggaagacatgttaaggccactggagaagttttggctgtccaactgtcagcagagcataatgtaagtattgagtcagtcagaaaagaactgcagtcaatgcacccagaagataggcacattgttgttctcaagcacaatgtttggcgtgtaaaaggattgattcaggtttgtagatcaattggtgatgcttatctcaaaaagcaagagttcaacagggaacccctatatgcaaaattccgcctccgtgaaccttttaacaagccaatactaagttcagaaccatcaatatgtgtgcaaccactacaaccacacgaccagtttctcatatttgcatctgatggactttgggagcacttaaccaaccaagaggctgttgatattgttcacagtagcccccgcagtggctgtgctaggaggctgataagagccgcactgcaagaggcagccaagaaaagagagatgagatactcggacctcaagaagatcgatcgcggtgttcgccgtcacttccacgacgacataacagtcatagtagtgttccttgactccagcctcgtaagtagggcgagcacgcaccgaggtcccactctttccctgcgaggtggtggcgccagcgctggcctgcgcagcaacacgcttgcacctacgtga

SEQ ID NO: 68992 - protein, 389 aa, Sorghum bicolor
MLVTLMNLLRACWRPSNRHARTGSDVTGRQDGLLWYKDAGQHVNGEFSMAVVQANNLLEDQCQIESGPLSFLDSGPYGTFVGVYDGHAGAETACYINEHLFQNLKRFASEQNAMSADVLKKAYEATEDGFFSVVTKQWPIKPQIAAVGSCCLVGVICGGVLYVANVGDSRAVLGRHVKATGEVLAVQLSAEHNVSIESVRKELQSMHPEDRHIVVLKHNVWRVKGLIQVCRSIGDAYLKKQEFNREPLYAKFRLREPFNKPILSSEPSICVQPLQPHDQFLIFASDGLWEHLTNQEAVDIVHSSPRSGCARRLIRAALQEAAKKREMRYSDLKKIDRGVRRHFHDDITVIVVFLDSSLVSRASTHRGPTLSLRGGGASAGLRSNTLAPT

SEQ ID NO: 68993 - DNA, 2092 bp, Zea mays
  CDS (555)..(1751)
  misc_feature (4)..(4): n is a, g, c or t
  misc_feature (5)..(5): n is a, g, c or t
gccnnggccggttcttcaaaaaaagggaaaaaaaaaaaaaaaaaaataaaaaaaaaaaaaaaaaaaaaaaaaaaaaaaaaaaaaaaaaaaaaaaaaaaaaaaaaaaaattgggggtaatttttgagagtccctccaaactttgcttgcttgcgctctccatatatcctgtggatcggagaggatgctctgatctacctgtctgttcttcgatcgagtctgagagatttgggaggaggagggaaacaaagcgaaagagcccatcttttttgtctttttggttcggtttcgtggttgcttcttttggaccccgcggaggagcccaccgtttctacaaaaacccaatctttgctgccttctcagcggtcgagatcgataggtttccagatctgaggctccgtgttctggctgtgagatcggaggcgcagcaatccgagcacgcagctagtagggaaagtatccgagaaaagttgcagattttgctgggggcaacggagcgagaacaagttactgcagaaggaaagggcaaaggtgggggaggcgccggagatgagggatgctatcagctctgatggattatttgaaatcttgctggggtccggcatcaccggctgggcgtccccgcaaaggatcggatgccaccggccgccaggacgggctcctgtggtacaaggacggcgggcaggtcgtcgatggtgagttctccatggccgtggtccaggccaataacctattggaggaccatagccaggttgaatccgggccgcttagcacatcggagcctggactgcaaggcaccttcgtcggggtctacgatgggcacggtggcccggagacagcgcgttacatcaatgaccatctcttcaaccacttgaggagattcgcatctgagcacaagtgcatgtcagcggatgtgattcggaaggcattccgagcgactgaggagggtttcatttctgtggttagtaaccaatggtcattgagacctcaattagcagctgtaggctcttgctgtctagttggtgtggtttgcagcggaactctatatgttgcaaaccttggggactcccgtgctgttctggggagacttgtcaagggaactggggaggttttggcaatgcagctctcagcagaacacaatgcatcctatgaggaggttagacgagagctgcaggcatcacatcctgatgatccccatattgtggtcctaaaacacaatgtttggcgtgtaaagggtattatccagataacaaggtcaattggagatgtgtatctgaagaaaccagaatttaatagagaacctttgcacagcaagtttcgtcttcaggaaacttttaggagaccacttcttagttctgatccagcaattactgtccaccaaatacagccaactgataagttcatcatttttgcatctgatggactctgggaacatcttagtaatcaggaagtggttgacatggtccaaagtagcccgcgtaatggaatcgcacgaaagttagtaaagtctgcagtgcaggaagcagcgaagaagagggagatgcggtattcagacctcaagaaagttgatcggggggtgaggcggcacttccacgacgatataactgtcattgtggtatttttcgattcaaacgccatgacaactgctgcctggagcagaccctcggtctctctccgagggggtgggtttccaatccattcaaacacccttgctccattctcggttcctacagagctaaacaactcctactgaaaccacgcggtatgtgaaggagccaggcaagaggataaaaaaaaagtaaaggaaaacggagaaggaaaaacagctgttgtgatcagttgtagtgtatttcaccgttcatgttcatttaaaacattttttagattctcaagtctcaacctggtgaccagtgcactgatagcaaggtataagattagattattcttagcttttttatcctcttttttttttctcgtccttaccctttagattcactcatgggatatccgatatcaggtgcttgtacattctttggttcaacttgtgataatagttcatcgcccccctcttttcgcccaaaaaaaaaaaaaaaa

SEQ ID NO: 68994 - protein, 398 aa, Zea mays; identical to SEQ ID NO: 1041

SEQ ID NO: 68995 - DNA, 2108 bp, Zea mays
  CDS (595)..(1794)
ccggccgggaaggattggtagagcccatctctgcgccctgccttgctggctctgacctctccctcccttccccttcctcgattgttcctcccccttctttttattagggtttttttttgtctccttagatttgcgcctgttctcacctgtgcgcatactagtctctgcatcagagagtagagacctcggagccgatcttcaacacgcagattgggcagagctgcctgccggagggagagtgaagagagagagagagagagagacgcgcgcgcgctcaaggggggcaaaaggagtttttttttatccagcttgttagcttgattctctttgatccgggagagcagccgccagtccaactaatcctagctattggtgtgccggggctttgattgttctccagatccgagccacctgctgggtggactccaggaatccgagcacgaagttgacaggggagttctcagggaaaagttgcgcaggggaggaaggaagagcctgaaagggcggtgcggagagaaagactataagagcgacctgggtcccttgaggatgccgtcaagaaaccgcgtggagaggagggcgatgagatgagggatgctggccgcggtgatggactatttcagctcctgctggggcccgcgatcgggtgacgggcacagggggaagggccccgacgccgccggccggcaggacggtctcctctggtacaaggacgccggtcagctcgtcactggggagttctccatggccgtggtgcaggccaaccagctgcttgaggaccagagccaagtggagtccggatcgctctccctggctgacccgggcccgcagggcaccttcgtcggcgtctatgatggccatggcggtcctgagacgtcccggttcatcaatgaccacctcttcaaccatctcagaaggtttgcaactgagcacaagtttatgtcagcggacgtgatccggaaagctttccaagcaactgaggagggctttctttctctagtcagcaaggaatggtctttgaagcctcagattgcttcagtgggctcctgctgccttgttggtgtaatctgtgctgggactctctatgttgcaaacctgggtgactcacgtgcagttcttggaaggcttgttaaggcaactggagaggtcgtggccatgcagttgtcatcggagcacaatgcgtgctatgaggaagttagacaagaactgcagtcatcacatcctgacgatccacatattgtggttctcaaacacaatgtttggcgagtgaagggtctcatccagatctcaagatctattggagatgtatatctaaagaaaccagagtacaacagagaaccacttcacagcaagtttcggcttcgagaaaccttccagaggccgatccttagttctgaacctcaaattactgaacatcgaatacagccaaatgatcaatttgttatatttgcttctgatggtctatgggagcacctcagcaataaggaagcagttgaccttgtccaaagtagtccacacaatggaattgctcggagactagtgaaagcggcgatgcaagaagctgccaagaagagggagatgagatactcagacctcaagaagatcgaccgtggtgtgagaaggcatttccacgacgatataacggtcgtcgtggtattccttgatttgaatgccatgagcaaagctagctggagcaaaagcccctcggtttctctccgagggggcggtgtcaccgtccctgcgaagtccctcgcacctttctcagctccggcacggctgaacagcacctactgaagttgctaccactcttgaaaggaagaacacggtgcagatctgcagtggtgagagaaaaaaaaacagcaatcaagtgtagcgttacagttacacctgctgtgttgttgctctttgcaaaactactgtctagactccgcctggtaattagtgtactgatagcgaggtaaaaaaaagttagattatttgttagcagcggcagtgatttgacatctaaggaacaacaacacggtgtccaccgattctgctatcctgatggctcgcggcagcctggctggtcggcacacgacacgaagtgaagctgttttactggcggc

SEQ ID NO: 68996 - protein, 399 aa, Zea mays
MLAAVMDYFSSCWGPRSGDGHRGKGPDAAGRQDGLLWYKDAGQLVTGEFSMAVVQANQLLEDQSQVESGSLSLADPGPQGTFVGVYDGHGGPETSRFINDHLFNHLRRFATEHKFMSADVIRKAFQATEEGFLSLVSKEWSLKPQIASVGSCCLVGVICAGTLYVANLGDSRAVLGRLVKATGEVVAMQLSSEHNACYEEVRQELQSSHPDDPHIVVLKHNVWRVKGLIQISRSIGDVYLKKPEYNREPLHSKFRLRETFQRPILSSEPQITEHRIQPNDQFVIFASDGLWEHLSNKEAVDLVQSSPHNGIARRLVKAAMQEAAKKREMRYSDLKKIDRGVRRHFHDDITVVVVFLDLNAMSKASWSKSPSVSLRGGGVTVPAKSLAPFSAPARLNSTY

SEQ ID NO: 68997 - DNA, 2051 bp, Zea mays
  CDS (170)..(1309)
gccgggggttccctaaaattcttctcgtacgcggccgattgcgaccctcgctcgccctcgcttccccaccacagccccgaaactgccccgcctccgcagccgccgcccgcgcccgctcgtcctccctgcgccgcctcggggacgccccggtcggcgatgtggcgggagcatgctaggcccgctcctcaggctcctctcggcgtgcggcggggtctggcccacctcgccggcccccggcgccgcggcctcctcttccgcctcctccggggacgactctgagggccgcgacggccttctctggtggcgcgacctcgcgcgctgccacgccggcgacgtctccgttgccgtcgcccaggccaaccaggtgctcgaggaccagtgccgcctcgactccgccccgtccatcggcaccgtcgtcggcgtcttcgacggccacggcggccccgacgccgcccgcttcgcctgcgaccaccttgtccccaacctccgagaggcgtcctccggcccgcgaggcgtcaccgcagacgccatcagggaggccttcctggccacggaggaaggcttcctcgcgctcgtgtcaagcctctgggaggcccagccggacatcgccacggccgggacatgctgccttgtcggcgtcgtgcacaacaggacccttttcgtcgccaacctcggcgactcccgggccgtcctcgggaagaaggcgggccgcgctggccagatcgccgcggagcagttgtccagcgagcacaatgccaaccaggaggctgtcaggcaggagctcatggcgcaacacccagatgatgctcagattgttgcgctcaagcatggggtctggagagtgaggggcctcatacaggtgtctagatcaatcggtgatgtatacctgaaacatgcaaagtataacacagaccggatcaaacccaagttcaggcttcccgaatcattcagcaagccattattgagtgccgatccatctatcatctcccgcgatcttgaaccaaatgactgtttcatcatattcgcatcagatggattgtgggagcacctcagcaatcaagaagccgttgagattgttcacagccatcaacgtgctggaagcgcaagaagactcattaaagccgctctacaagaagcagcgcggaagcgtgagatgcgttactcggatcttacaaagatcgataagaaagttcgcaggcatttccatgatgacattactgtcatcgtcttatttataaactatgacctattattgaaaggtgctccgcagggacaacccctctccatcagatgtgccctagattattgacagtgagctagttcacccactggtattcaagctcctgcgggcagccatatccagagtcagctgacatggtcaaccggttgtgaaaagcgcacaacctccggcaccagtttccttttcgtttccccttttttgcacataaaattgacaagtcgctgaaattgccagttttcccctcttggattatgtcggataaaatgcgtatactcttcggttttggagatatatgtctagactctagagcgtgagggaaggttataaagtcttgtatgtctttgttctcttgcagtcttgcttacagttacagctagctctttttgtatgtaacaattgtcagcaatcagcatgtttaaccccctccgtgacgttttacagaagactgaaaaaaaaaaaccacaccgtcatgagcataaattctttacgacttcaaggcttgaaagcaaacagctggtgggcttgtgccagtgaggatctgcagaattctctcctttttttcataaaatgtccaattgttctaccagaattctcaaactagacagttaccgaatgtttcttttgtttaattcactgccttttgcattcattcacacacatcacagtcctccaaccagccatggttttcaacgtgcccatgaaatgaaaagaaacggaaccggaaaagccacagtttccagctctcaaaaaaaaaaaaaaaaaaaaaaaaaaaaaaaaaaaaaaaaaaaaaaaaaaaaaaaaaaaagcggcc

SEQ ID NO: 68998 - protein, 379 aa, Zea mays
MLGPLLRLLSACGGVWPTSPAPGAAASSSASSGDDSEGRDGLLWWRDLARCHAGDVSVAVAQANQVLEDQCRLDSAPSIGTVVGVFDGHGGPDAARFACDHLVPNLREASSGPRGVTADAIREAFLATEEGFLALVSSLWEAQPDIATAGTCCLVGVVHNRTLFVANLGDSRAVLGKKAGRAGQIAAEQLSSEHNANQEAVRQELMAQHPDDAQIVALKHGVWRVRGLIQVSRSIGDVYLKHAKYNTDRIKPKFRLPESFSKPLLSADPSIISRDLEPNDCFIIFASDGLWEHLSNQEAVEIVHSHQRAGSARRLIKAALQEAARKREMRYSDLTKIDKKVRRHFHDDITVIVLFINYDLLLKGAPQGQPLSIRCALDY

SEQ ID NO: 68999 - DNA, 2133 bp, Zea mays
  CDS (404)..(1582)
gggtacccttcgaagtccggcccggggtccgtgatcccgtcagaagacgggcacatgggggttctccggtacagggttcggcgtgcaaaacgactggaccctcgcaagagcccaccgtgagggcgtagacccagaaggagagggagacagaggagaggaggagcagcgtggcgacgcccaaatcgagcgacctgatcgaggcccctcgccccaactcgctgaatcccaatccgagcccgccaattgggcgccccgcccacgccaaggctgaaagtcagtggagttctcagttctcaccaacattcagaaaactgttggctcgctgacaagtccaactgtgtttttcttggactacagatgaagcgagctcgaaggcgtatgtgcaagagatgactgatgagggatgctagtgacattgatgaacttgttacgggcgtgctggcgaccgtcatcgaaccggcatgcccgaacaggctcagatgttaccggtaggcaggatggacttctatggtacaaggacgccgggcagcatgtcaacggggagttttccatggctgttgttcaggccaataacttacttgaggaccagtgtcagattgagtcgggcccactgagttttctagattccggaccatatggcacttttgttggcgtttacgatggacatggtggtccagagacggcctgctatatcaatgatcatctcttccagaatctgaaaaggtttgcatctgagcagaatacaatgtctgctgatgtactgaagaaggcgtatgaagctacagaagatggattcttttctgttgttaccaaacaatggcctgtaaagcctcagatagcagctgtcggctcatgctgcctggtcggtgtaatttgtggtggcatgctttatgttgccaatgttggggattcccgtgttgttttaggaagacatgttaaggctactggagaagttttggctgtccaactgtcagcagagcataatgtaagtattgagtcagtgagaaaagaactgcagtcaatgcacccagaagataggcacattgttgttctcaagcacaatgtttggcgtgtaaaaggactaattcaggtttgtagatcaatcggtgatgcttatctcaagaagcaagagttcaatagggaacccctatatgtgaaatttcggcttcgtgaaccttttcacaagccgatactaagttcagaaccatcaatcaatgtgcaaccactacaaccacacgaccagtttctcatatttgcatctgatggactttgggagcacttaaccaaccaagaagctgttgatattgttcacagtagcccccgcagtggctgtgctaggaggctgataagagcggcgctgcaagtggcagccaagaaaagggagatgaggtactcagacctcaagaagatcgaccgcggtgttcgccgccacttccacgacgacataacagtcatagtagtgttccttgattccagcctcgtgagcaaggcgagcacgcaccgaggccccactctttccctgcgaggcggcggtgccagcgctggtctgcgcagcaacacgcttgcaccaacgtcaatgtgactatgaggaggctacaaccctgactggaggacgttttctttcctcgtgtcgaatgtgttatatatgtacttgtaccggccaaggtcatccatctcccctcaatggtgtaaagaactaggagaggcgtggaagctcctctccagcgtctttgaatcccctcaatggtgtcaaggtgtggactcaagtcaatagcttcgctgttctgatgatgctctgtggaaactcgaatccttccacctgaaaaccaagtagtatgtcttctagtgctggaattaaccctagtgcatatatacatatgaaataaaaaaaagccaaaaggaggagtaacttatttaactgaaaaaaaaaaaaaaaagcgtctatttgtgttatatatgtatgattttctgccactgtcatccatctcccctcaatggtgtaaagaactaggagaggcgtggaagctcctctccagcgtctttcatctactgttgttaattgaccactggtgcatataaatctatggtttcgtcttgcaaataaaaaaagaaaaggaggagtaacttatttaa

SEQ ID NO: 69000 - protein, 392 aa, Zea mays
MLVTLMNLLRACWRPSSNRHARTGSDVTGRQDGLLWYKDAGQHVNGEFSMAVVQANNLLEDQCQIESGPLSFLDSGPYGTFVGVYDGHGGPETACYINDHLFQNLKRFASEQNTMSADVLKKAYEATEDGFFSVVTKQWPVKPQIAAVGSCCLVGVICGGMLYVANVGDSRVVLGRHVKATGEVLAVQLSAEHNVSIESVRKELQSMHPEDRHIVVLKHNVWRVKGLIQVCRSIGDAYLKKQEFNREPLYVKFRLREPFHKPILSSEPSINVQPLQPHDQFLIFASDGLWEHLTNQEAVDIVHSSPRSGCARRLIRAALQVAAKKREMRYSDLKKIDRGVRRHFHDDITVIVVFLDSSLVSKASTHRGPTLSLRGGGASAGLRSNTLAPTSM

SEQ ID NO: 69001 - DNA, 2059 bp, Zea mays
  CDS (437)..(1636)
ccacgcgtccggcggcgtgcctcggagaaagcttgagtgcatactagtctctgcatcagagtagtggcctccgagctgctcttcaacacacagattcggcagagcctgccgagagagagtgaaaagagagggagcgcgctcaaggtgtggcgcaaggagatttttcttttatccagcttcttagcatgattctctttgatcccggagagcagccaccggtccaactagtccttgctgttggtctgccggaacttttgattgctctccagatctgaggcacctgctgggtggattccaggaacccgagcacgaagttgacaggggaggaaggaagaggctgaaagggcggtggagagagaaagactataagggcgagctgagtcccttgaggatgccgtcaagaaaccgcgtggagaggagggcgatgagatgagggatgctggccgcggtgatggactacttcagctcctgctggggcccgcgatcgggcgccgggcaccggggcaagggctccgacgccgccggccggcaggacggtctcctctggtacaaggacgccggccagctcgtcactggggagttctccatggccgtggtgcaggccaaccagctcctcgaggaccagagccaagtagagtccggatcgctctccctggctgacccgggcccacagggcaccttcgtcggcgtctatgatggccatggcggcccggagacgtcccggttcatcaatgaccacctcttcaaccatctcagaaggtttgcaactgagcacaagtttatgtcagcggacgtgatccggaaagctttccaagcaactgaggagggctttctttctctagtcagcaaggaatggtctttgaagcctcagattgcttcagtgggctcctgctgccttgttggtgtaatctgtgctgggactctctatgttgcaaacctgggcgactcacgtgcagttcttggaaggcttgttaaggcaactggagaggttttggccactcagttgtcatcggagcacaatgcgtgctatgaggaagttagacaagagctgcagtcatcacatcctgatgatccacatattgtggttctcaaacacaatgtttggcgagtgaagggtctcatccagatctcaagatctatcggagatgtatatctaaagaaaccggagtataacagagaacctcttcacagcaagtttcggcttcgagaaaccttccagaagccgattcttagttctgaacctcaaattactgaacaccgaatacagccaaacgatcagtttgttatatttgcttccgatggtctatgggagcacctcagcaatcaggaagctgttgaccttgtccaaagtagtccccgtaatggaatcgctcggagactagtgaaagccgcgatgcaagaagctgccaagaagagggagatgagatactcagacctcaagaagatcgaccgtggcgtgaggaggcatttccacgacgatataaccgtcgtcgtggtgttcctcgactcggatgccatgagcaaagctagctggagcaagagcccctcggtttctctccgagggggcggcgtcacccttcccgccaagtccctcgcacccttctcggctccggcacagttgaacggcacccactgaagctgctactgctcttgaaaagaagggcacagtgcagatctgctagagatgatgagagaagcagcaatcaagtgtagctgttgctcgtacacctgctgtgctgttgctgtttgcaaagctgccgtcttgactccgcctggtaattagtgtactgatagcgaggtatagaaattaggttatttgttagcgacgcaaatcctttctttttttttcttctccctctgttcttatctcttttctcttcatcatggaggaaacaggtggctgtaaatttgtccagaacatgttttccctaatagcccatcatatcccgctctttttcttgttgatatgaccaaggctggcagcatcgctgctcaagataatgtttggggcgcatgatttgaccaagtcgaatcattacttttgatgatgtggtgtagc

SEQ ID NO: 69002 - protein, 399 aa, Zea mays
MLAAVMDYFSSCWGPRSGAGHRGKGSDAAGRQDGLLWYKDAGQLVTGEFSMAVVQANQLLEDQSQVESGSLSLADPGPQGTFVGVYDGHGGPETSRFINDHLFNHLRRFATEHKFMSADVIRKAFQATEEGFLSLVSKEWSLKPQIASVGSCCLVGVICAGTLYVANLGDSRAVLGRLVKATGEVLATQLSSEHNACYEEVRQELQSSHPDDPHIVVLKHNVWRVKGLIQISRSIGDVYLKKPEYNREPLHSKFRLRETFQKPILSSEPQITEHRIQPNDQFVIFASDGLWEHLSNQEAVDLVQSSPRNGIARRLVKAAMQEAAKKREMRYSDLKKIDRGVRRHFHDDITVVVVFLDSDAMSKASWSKSPSVSLRGGGVTLPAKSLAPFSAPAQLNGTH

SEQ ID NO: 69003 - DNA, 1956 bp, Zea mays subsp. mays
  CDS (446)..(1639)
agctgtaattttttagagtccctctcaaactttgcttgcttgcgctctccatatatcctgtggaccggagaggatgctctgatctacctgtctgttcttcgatcgagtctgagagatttgggaggaggagggaaacaaagcgaaagagcccatcttttttgtctttttggttcggtttcgtggttgcttcttttggaccccgcggaggagcccaccgtttctacaaaaacccaatctttgctgccttctcagcggtcgagatcgataggtttccagatctgaggctccgtgttctggctgtgagatcggaggcgcagcaatccgagcacgcagctagtagggaaagtatccgagaaaagttgcagattttgctgggggcaacggagcgagaacaagttactgcagaaggaaagggcaaaggtgggggaggcgccggagatgagggatgctatcagctctgatggattatttgaaatcttgctggggtccggcatcaccggctgggcgtccccgcaaaggatcggatgccaccggccgccaggacgggctcctgtggtacaaggacggcgggcaggtcgtcgatggtgagttctccatggccgtggtccaggccaataacctattggaggaccatagccaggttgaatccgggccgcttagcacatcggagcctggactgcaaggcaccttcgtcggggtctacgatgggcacggtggcccggagacagcgcgttacatcaatgaccatctcttcaaccacttgaggagattcgcatctgagcacaagtgcatgtcagcggatgtgattcggaaggtattccgagcgactgaggagggtttcatttctgtggttagtaaccaatggtcattgagacctcaattagcagctgtaggctcttgctgtctagttggtgtggtttgcagcggaactctatatgttgcaaaccttggggactcccgtgctgttctggggagacttgtcaagggaactggggaggttttggcaatgcagctctcagcagaacacaatgcatcctatgtggaggttagacgagagctgcaggcatcacatcctgatgatccccatattgtggtcctaaaacacaatgtttggcgtgtaaagggtattatccagataacaaggtcaattggagatgtgtatctgaagaaaccagaatttaatagagaacctttgcacagcaagtttcgtcttcaggaaacttttaggagaccacttcttagttctgatccagcaattactgtccaccaaatacagccaactgataagttcatcatttttgcatctgatggactctgggaacatcttagtaatcaggaagtggttgacatggtccaaagtagcccgcgtaatggaatcgcacgaaagttagtaaagtctgcagtgcaggaagcagcgaagaagagggagatgcggtattcagacctcaagaaagttgatcggggggtgaggcggcacttccacgacgatataactgtcattgtggtatttttcgattcaaacgccatgacaactgctgcctggagcagaccctcggtctctctccgagggggtgggtttccaatccattcaaacacccttgctccattctcagttcctacagagctaaacaactactgaaaccacgcggtatgtgaaggagccaggcaagaggataaaaaaaaagtaaaggaaaaaggagaaggaaaaacagctgttgtgatcagttgtagtgtatttcaccgttcatgttcatgcaaaacattttttagattctcaagtctcaacctggtgaccagtgcactgatagcaaggtataagattagattattcttagcttttttatcctctttttctctctctcttccttaccctttagattcactcatgggatatcaggtgcttgtacattctttggttcaacttgtgataatagtccatcgcccccctctttcgtc

SEQ ID NO: 69004 - protein, 397 aa, Zea mays subsp. mays
MLSALMDYLKSCWGPASPAGRPRKGSDATGRQDGLLWYKDGGQVVDGEFSMAVVQANNLLEDHSQVESGPLSTSEPGLQGTFVGVYDGHGGPETARYINDHLFNHLRRFASEHKCMSADVIRKVFRATEEGFISVVSNQWSLRPQLAAVGSCCLVGVVCSGTLYVANLGDSRAVLGRLVKGTGEVLAMQLSAEHNASYVEVRRELQASHPDDPHIVVLKHNVWRVKGIIQITRSIGDVYLKKPEFNREPLHSKFRLQETFRRPLLSSDPAITVHQIQPTDKFIIFASDGLWEHLSNQEVVDMVQSSPRNGIARKLVKSAVQEAAKKREMRYSDLKKVDRGVRRHFHDDITVIVVFFDSNAMTTAAWSRPSVSLRGGGFPIHSNTLAPFSVPTELNNY

SEQ ID NO: 69005 - DNA, 2161 bp, Zea mays subsp. mays
  CDS (495)..(1694)
cttttattagggtttttttgtctccttagatttgcgcctgttctcacctgtgcgcatactagtctctgcatcagagagtagagacctcggagccgatcttcaacacgcagattgggcagagctgcctgccggagggagagtggagagagagagagagagagagagagagagagctcaaggggggcaaaaggagtttttttttatccagcttgttagcttgattctctttgatccgggagagcagccgccagtccaactaatcctagctattggtgtgccggggctttgattgttctccagatccgagccacctgctgggtggactccaggaatccgagcacgaagttgacaggggagttctcagggaaaagttgcgcaggggaggaaggaagagcctgaaagggcggtgcggagagaaagactataagagcgacctgggtcccttgaggatgccgtcaagaaaccgcgtggagaggagggcgatgagatgagggatgctggccgcggtgatggactatttcagctcctgctggggcccgcgatcgggtgacgggcacagggggaagggccccgacgccgccggccggcaggacggtctcctctggtacaaggacgccggtcagctcgtcactggggagttctccatggccgtggtgcaggccaaccagctgcttgaggaccagagccaagtggagtccggatcgctctccctggctgacccgggcccgcagggcaccttcgtcggcgtctatgatggccatggcggtcctgagacgtcccggttcatcaatgaccacctcttcaaccatctcagaaggtttgcaactgagcacaagtttatgtcagcggacgtgatccggaaagctttccaagcaactgaggagggctttctttctctagtcagcaaggaatggtctttgaagcctcagattgcttcagtgggctcctgctgccttgttggtgtaatctgtgctgggactctctatgttgcaaacctgggtgactcacgtgcagttcttggaaggcttgttaaggcaactggagaggtcgtggccatgcagttgtcatcggagcacaatgcatgctatgaggaagttagacaagaactgcagtcatcacatcctgacgatccacatattgtggttctcaaacacaatgtttggcgagtgaagggtctcatccagatctcaagatctattggagatgtatatctaaagaaaccagagtataacagagaaccacttcacagcaagtttcggcttcgagaaaccttccagaggccgatccttagttctgaacctcaaattactgaacatcgaatacagccaaatgatcaatttgttatatttgcttctgatggtctatgggagcacctcaccaataaggaagcagttgaccttgtccaaagtagtccacgcaatggaattgctcggagactagtgaaagcggcgatgcaagaagctgccaagaagagggagatgagatactcagacctcaagaagatcgaccgtggtgtgagaaggcatttcctcgacgatataacggtcgtcgtggtattccttgatttgaatgccatgagcaaagctagctggagcaaaagcccctcggtttctctccgagggggcggtgtcaccgtccctgccaagtccctcgcacctttctcagctccggcacggctgaacagcacctactgaagttgctaccactcttgaaaggaagaacacggtgcagatctgcagtggtgagagaaaaaaaaaacagcaatcaagtgtagcgttacacttacacctgctgtgctgttgctctttgcaaaactactgtctagactcctggtaattagtgtactgatagcgaggtaaaaaaaagttagattatttgttagcagcggcagtgatttgacatctaaggaacaacaacacggtgcccaccgattctgctatcctgatggctcgcggcagcctggctggtcggcacacgacacgaagtgaagctgttttactggcggcatctggctttgttttctcatgggacagtgatccacaagagtaagggatcagctcaatccaaagtcaatagatgttccttataaaaaatagaggtacagatgttcccatcggctatgtgtatttggggaaaaaatcaatataaggggtgtttggtg

SEQ ID NO: 69006 - protein, 399 aa, Zea mays subsp. mays
MLAAVMDYFSSCWGPRSGDGHRGKGPDAAGRQDGLLWYKDAGQLVTGEFSMAVVQANQLLEDQSQVESGSLSLADPGPQGTFVGVYDGHGGPETSRFINDHLFNHLRRFATEHKFMSADVIRKAFQATEEGFLSLVSKEWSLKPQIASVGSCCLVGVICAGTLYVANLGDSRAVLGRLVKATGEVVAMQLSSEHNACYEEVRQELQSSHPDDPHIVVLKHNVWRVKGLIQISRSIGDVYLKKPEYNREPLHSKFRLRETFQRPILSSEPQITEHRIQPNDQFVIFASDGLWEHLTNKEAVDLVQSSPRNGIARRLVKAAMQEAAKKREMRYSDLKKIDRGVRRHFLDDITVVVVFLDLNAMSKASWSKSPSVSLRGGGVTVPAKSLAPFSAPARLNSTY

SEQ ID NO: 69007 - DNA, 2161 bp, Zea mays subsp. mays; identical to SEQ ID NO: 69005
  CDS (510)..(1694)

SEQ ID NO: 69008 - protein, 394 aa, Zea mays subsp. mays
MDYFSSCWGPRSGDGHRGKGPDAAGRQDGLLWYKDAGQLVTGEFSMAVVQANQLLEDQSQVESGSLSLADPGPQGTFVGVYDGHGGPETSRFINDHLFNHLRRFATEHKFMSADVIRKAFQATEEGFLSLVSKEWSLKPQIASVGSCCLVGVICAGTLYVANLGDSRAVLGRLVKATGEVVAMQLSSEHNACYEEVRQELQSSHPDDPHIVVLKHNVWRVKGLIQISRSIGDVYLKKPEYNREPLHSKFRLRETFQRPILSSEPQITEHRIQPNDQFVIFASDGLWEHLTNKEAVDLVQSSPRNGIARRLVKAAMQEAAKKREMRYSDLKKIDRGVRRHFLDDITVVVVFLDLNAMSKASWSKSPSVSLRGGGVTVPAKSLAPFSAPARLNSTY

SEQ ID NO: 69009 - DNA, 1812 bp, Zea mays subsp. mays
  CDS (305)..(1444)
attaaaaaagggttccccacagcaccaagcgcgacgtgagcgaggaggcaggcgcgcacggcgtgtcggcgtcgcaccgaacccgacacggctcggcctacggcccccacacatccggctgggccgttccgttccgtttcgttcccttcccattcttctcgtacgcggccgattgctgaccctcgctcgccctcgcttccccaccacagcaccgaaactgccccgcctccgcagccgccgcccgcgcccgctcgtcctccccgcgccgcctcggggacgccccggtcggcgatgtggcgggagcatgctaggcccgctcctcaggctcctctcggcgtgcggcggggtctggcccacctcgccggcccccggcgccgcggcctcctcttccgcctcctccggggacgactctgagggccgcgacggccttctctggtggcgcgacctcgcgcgctgccacgccggcgacgtctccgtcgccgtcgcccaggccaaccaggtgctcgaggaccagtgccgcctcgactccgccccgtccatcggcaccgtcgtcggcgtcttcgacggccacggcggccccgacgccgcccgcttcgcctgcgaccaccttgtccccaacctccgagaggcgtcctccggcccgcggggcgtcaccgcagacgccatcagggaggccttcctggccacggaggaaggattcctcgcgctcgtgtcaagcctctgggaggcccagccggacatcgccacggccgggacatgctgccttgtcggcgtcgtgcacaacaggacccttttcgtcgccaacctcggcgactcccgggccgtcctcgggaagaaggcgggccgcgctggccagatcgccgcggagcagttgtccagcgagcacaatgccaaccaggaggctgtcaggcaggagctcatggcgcaacacccagatgatgctcagattgttgcgctcaagcatggggtctggagagtgaggggcctcatacaggtgtctagatcaatcggtgatgtatacctgaaacatgcaaagtataacacagaccagatcaaacccaagttcaggcttcccgaatcattcagcaagccactattgagtgccgatccatctatcatctcccgcgatcttgaaccaaatgactgtttcatcatattcgcatcagatggattgtgggagcacctcagcaatcaagaagccgttgagattgttcacagccatcaacgtgctggaagcgcaagaagactcattaaagccgctctacaagaagcagcgcggaagcgtgagatgcgttactcggatcttacaaagatcgataagaaagttcgcaggcatttccatgatgacattactgtcatcgtcttatttataaactatgacctattattgaaaggtgctccgcagggacaacccctctccatcagatgtgccctagattattgacagtgagctagttcacccactggtattcaagctcctgcgggcagccatatccagagtcagctgacatggtcaaccggttgtgaaaagcgcacaacctccggcaccagtttccttttcgtttccccttttttgcacataaaattgacaagtcgctgaaattgccagttttcccctcttggattatgtcggataaaatgcgtatactcttcggttttggagatatatgtctagactctagagcgtgagggaaggttataaagtcttgtatgtctttgttctcttgcagtcttgcttacagttacagctagctctttttgtatgtaacaattgtcagcaatcagcatgtttaaccacctccgtgacgtttt

SEQ ID NO: 69010 - protein, 379 aa, Zea mays subsp. mays
MLGPLLRLLSACGGVWPTSPAPGAAASSSASSGDDSEGRDGLLWWRDLARCHAGDVSVAVAQANQVLEDQCRLDSAPSIGTVVGVFDGHGGPDAARFACDHLVPNLREASSGPRGVTADAIREAFLATEEGFLALVSSLWEAQPDIATAGTCCLVGVVHNRTLFVANLGDSRAVLGKKAGRAGQIAAEQLSSEHNANQEAVRQELMAQHPDDAQIVALKHGVWRVRGLIQVSRSIGDVYLKHAKYNTDQIKPKFRLPESFSKPLLSADPSIISRDLEPNDCFIIFASDGLWEHLSNQEAVEIVHSHQRAGSARRLIKAALQEAARKREMRYSDLTKIDKKVRRHFHDDITVIVLFINYDLLLKGAPQGQPLSIRCALDY

SEQ ID NO: 69011 - DNA, 1652 bp, Glycine max
  CDS (287)..(1411)
ccccccacacaccatcctctccccacaagaataagcccgttcatgttcctctaccaccgaacacaccccgccaccacctctcgctaacgtgcgccccttccttatcctgcgcttcgacaccccttcttttctttttttactttttcccttattccccttccttcataagctccgcgttctctctctctctctctctctctctctctctctctctctctcggatcggagcgaggctggcggttccggcgttggggacgttagggttagggtttccgagagatgtggtatgctccaggcattgatgaatctgttctcgctgtgttggaagccgtttggccgcgatgctgatcgaatcgattccatcggagttatcggaagagaaggcaaagacggcttgctctggttccgcgacttcggaaaatatggctccggtgatttctccatggctgtcgttcaggccaaccaggttctcgaagaccagagccagatcgagtctggtcctctcggcaccttcgtcggcatctacgacggtcacggaggacccgacgcatcaagatacgtttgcgatcacttgtttcgccattttcaagcaatatcagctgagtcacgcggggttgtgacaactgagacaatcgaaagagcatttcgccaaacagaagaggggtacatggccctcgtgtcaggctcgtggaatgctcgacctcatattgcaagtgctgggacctgttgtctagttggagtgatatttcagcagacactctttgtggcaaacgctggagattcccgtgttgtattgggtaagaaagttggcaacactggaggtatggctgcaattcagctgtctacagaacacaatgcaaatcttgaggctgttaggcaggaacttaaagaattacatcctcatgatccccaaattgttgtcctcaaacatggagtgtggagagtaaaaggcattattcaggtttctagatctataggtgatgtatatttgaagcatgcacagtttaaccgagaaccacttaatgcaaaattcagacttcctgaaccgatgaacatgcctatcttgagtgctaatcccactattctttctcatgctctccaaccaaatgattccttccttatatttgcatctgatggtttatgggagcatttgagtaacgagaaagctgtggatattgtaaacagcaatccacatgcgggtagtgccaagagacttatcaaggctgctctccatgaagcagcaagaaaacgagaaatgcgatattcagacctccgtaagattgacaagaaagttcgacgccattttcatgatgatatatccgttattgttttattcttaaatcacgaccttatttccagaggcacagtgctagacccgacactttcaattcgaagcgctctcgatcactgacttgtatcactgtaagcagtcttgtacgagtttttggcaactgtaccgatacctgaagcattggtaggtacctggctataatatgtcatttctatggcacatatggcttctggtaccgacatcattcttgaggcacgagaatttattaagttataacatattattagaaatttattcataaagaggaaaaaaataaataccaaaaaaaaaaaaaaaaaagaattcctgcagccccggggga

SEQ ID NO: 69012 - protein, 374 aa, Glycine max
MLQALMNLFSLCWKPFGRDADRIDSIGVIGREGKDGLLWFRDFGKYGSGDFSMAVVQANQVLEDQSQIESGPLGTFVGIYDGHGGPDASRYVCDHLFRHFQAISAESRGVVTTETIERAFRQTEEGYMALVSGSWNARPHIASAGTCCLVGVIFQQTLFVANAGDSRVVLGKKVGNTGGMAAIQLSTEHNANLEAVRQELKELHPHDPQIVVLKHGVWRVKGIIQVSRSIGDVYLKHAQFNREPLNAKFRLPEPMNMPILSANPTILSHALQPNDSFLIFASDGLWEHLSNEKAVDIVNSNPHAGSAKRLIKAALHEAARKREMRYSDLRKIDKKVRRHFHDDISVIVLFLNHDLISRGTVLDPTLSIRSALDH

SEQ ID NO: 69013 - DNA, 1617 bp, Glycine max
  CDS (255)..(1373)
aagaggggcttccccacgccatcctctctcccaacaagagagcgaacgagcccattcctgtttctccaccaccgaacacacacacgccctttgcttccttcctcacctcgcgctaacctgcaccccccttcttatcctgcgcaccccttctttatccaattctttcctcagattcggagcaccgcgcgcgccaccattgggaaaagaggttccggtgctgggggcctagggttagggtttctgagagatgtgggatgctccatgcattgatgagccttatcgcgcgctgttggaagccgttcgggcacggtgacgatgccggtaatgccgccgccggaagagaatgcaaggacggcctcctctggttccgcgacatcggaaagtttgcagccggcgatttctccatggccgtcgtccaggccaaccaggtcatcgaggaccagagccagatcgagtccggcgccttcggcaccttcgtcggcgtctacgacggccacggcggccccgattgctcccgctacgtttgcgataacttgttccgcaatctccaagcgatattggccgagtcacagagtgttgtgacatctgaggccattcatcaggcgttccggcggacagaggaggggtttacggcgcttgtttcggagctgtggagctctcggccgcagattgcgactactgggacgtgttgtttggttggggttatttgtcggcagacactctttgtggcaagtcttggagattcccgtgctgtgttgggtaggagagttggcaacaccggtgggatggccgcgattcagttgtctacggagcacaatgcgaattttgaggctgtcaggcaggagcttaaggaattgcacccgaatgacccccagattgttgtcctcaaacatggagtgtggagagtaaagggcattattcaggtttctagatctataggtgacgtatatatgaaacatgcgcagtttaaccgagaacccattaatgcaaaattcagactccccgaaccaatgaacatgcctttcttgtctgctaatccaactattctttctcatcctctccaaccaaatgattccttccttatatttgcatcagatggtttatgggagcacctgagtaatgatcaagcagtggatattgttcacagcagtccatgcgcgggtagtgcgaagaaacttgtcaaggctgccctacaagaagcagcaagaaaacgtgaaatgcgatattcagacctttacaagattgacaagaaggttcgtcgccattttcacgacgatataactgttattgttttattcttaaaccacaaccttatatccaggggtgcagttctaaatacaccacttacaattcgtagtgctctcgatcactgacgcttcatgatttgtaaacatgcttctcttatacgggtgttctggcaactgtgccaataccagaaaatacaccattggtacgttgctagaatataccattcatagtgctgccacgtatggttactgataccgagacaacttattgatgacgcacgaacttgtaacacttgttagaagtttatccatgaaaatgaaaaagagaaaaagaaaaaaaaaaatatcagaaaagtaacttttgattagt

SEQ ID NO: 69014 - protein, 372 aa, Glycine max
MLHALMSLIARCWKPFGHGDDAGNAAAGRECKDGLLWFRDIGKFAAGDFSMAVVQANQVIEDQSQIESGAFGTFVGVYDGHGGPDCSRYVCDNLFRNLQAILAESQSVVTSEAIHQAFRRTEEGFTALVSELWSSRPQIATTGTCCLVGVICRQTLFVASLGDSRAVLGRRVGNTGGMAAIQLSTEHNANFEAVRQELKELHPNDPQIVVLKHGVWRVKGIIQVSRSIGDVYMKHAQFNREPINAKFRLPEPMNMPFLSANPTILSHPLQPNDSFLIFASDGLWEHLSNDQAVDIVHSSPCAGSAKKLVKAALQEAARKREMRYSDLYKIDKKVRRHFHDDITVIVLFLNHNLISRGAVLNTPLTIRSALDH

SEQ ID NO: 69015 - DNA, 1617 bp, Glycine max; identical to SEQ ID NO: 69013
  CDS (270)..(1373)

SEQ ID NO: 69016 - protein, 367 aa, Glycine max
MSLIARCWKPFGHGDDAGNAAAGRECKDGLLWFRDIGKFAAGDFSMAVVQANQVIEDQSQIESGAFGTFVGVYDGHGGPDCSRYVCDNLFRNLQAILAESQSVVTSEAIHQAFRRTEEGFTALVSELWSSRPQIATTGTCCLVGVICRQTLFVASLGDSRAVLGRRVGNTGGMAAIQLSTEHNANFEAVRQELKELHPNDPQIVVLKHGVWRVKGIIQVSRSIGDVYMKHAQFNREPINAKFRLPEPMNMPFLSANPTILSHPLQPNDSFLIFASDGLWEHLSNDQAVDIVHSSPCAGSAKKLVKAALQEAARKREMRYSDLYKIDKKVRRHFHDDITVIVLFLNHNLISRGAVLNTPLTIRSALDH

SEQ ID NO: 69017 - DNA, 1410 bp, Physcomitrella patens
  CDS (135)..(1250)
atcccgggcgtggaaggagagggaatgtggaggaaagagtggagttattatttgtcagtcgaatgtacaggaagaagcgaaaaggatatggagtggaaatatgaagaagctggttgaagaaggacgtctgagagatggtagagtgggtaatgaagatgttgatggcatgttggcgtccggtgcaaaaatacacgcacctgggggaggagaatggagataaccacgacccactgctgtggcacaaagatttgggtgatcatgccgcaggacagttttctattgccgcagttcaggcgaatgctatcttggaggacatggtccaagtggaaactggaccgtttggtacctttgttggggtgtacgatggccatggtggcccggaagcttctcgttacgtcaatgacagtttgtaccgccatttacagaaatttgccacccaacatgggggaatgtctagtgaggttcttcagcaagcctttaagcagaccgaggaggggtttttggaaatcgtaagggattcatggctcacgaagccccagattgctgccgttggttcctgttgcctggtaggtgtggtgtgggagtgtaagctgtacatcgccagcctgggtgattctaaggctgtgctcggtagattctctcgcaatttgcaatcagtaattgcgacggagatatccactgagcataacgccagtgttgaggctgttaggcaggacctgcaagctgcgcatcctgatgacccgcgcattgttgtgctgaggcacggagtgtggcgtgtgaagggtttgattcaagtctctcgatccattggcgacgtttatctgaagaaggctgagttcaaccgtgagcctctaatcggccggttccgcctgccagagccgctccagagacccgtcatgagcgccgagccggacatccgagtaatcgatctgaccccagatgtggagtttgtgatttttgcatcagatgggttgtgggagcacttgtccaaccaagaggctgtggatattgttcacaaatacccgcgcgctggcatcgccaggcagctcattcgatacgctcttcatgaagcggccaagaagcgagagatgcggtactcggatctgaagaagatcgagcgtggtatccggagacactttcatgacgacatcacagtggtagtcgtcttcttagatcataatttggttagcaatggtagtggtatctcgcatcacatttctgtgaaaggtggagttgacaaaccttcttgaaaaggggtcgtaggtactctccatggtatcttgcaggttttgtcacatgaaacttccccctttcgcacgatggggtagaagtgattgctcctttgaagctacacctccctgcaacccaatcgtctgtcgaacctgaagctagacacccacaggagcttgc

SEQ ID NO: 69018 - protein, 371 aa, Physcomitrella patens
MVEWVMKMLMACWRPVQKYTHLGEENGDNHDPLLWHKDLGDHAAGQFSIAAVQANAILEDMVQVETGPFGTFVGVYDGHGGPEASRYVNDSLYRHLQKFATQHGGMSSEVLQQAFKQTEEGFLEIVRDSWLTKPQIAAVGSCCLVGVVWECKLYIASLGDSKAVLGRFSRNLQSVIATEISTEHNASVEAVRQDLQAAHPDDPRIVVLRHGVWRVKGLIQVSRSIGDVYLKKAEFNREPLIGRFRLPEPLQRPVMSAEPDIRVIDLTPDVEFVIFASDGLWEHLSNQEAVDIVHKYPRAGIARQLIRYALHEAAKKREMRYSDLKKIERGIRRHFHDDITVVVVFLDHNLVSNGSGISHHISVKGGVDKPS

SEQ ID NO: 69019 - DNA, 1143 bp, Oryza sativa (japonica cultivar-group)
  CDS (1)..(1143)
atgttgagggcggtggcgaggtgctgcgggcactggccgccgggggcggcggcggcggacgggatgctgtggcagacggagctgaggccgcacgcggcgggggagttctcgatggcggcggcgcaggcgaacctggccatggaggaccaggcgcaggtgctcgcctcccccgccgccacgctcgtcggcgtgtatgacgggcacggcggcgccgacgcctcccgcttcctccgctcccgcctcttcccccatgtccaacgattcgagaaggagcaaggggggatgagcacggaggtgatccgtagggcgttcggcgcggcggaggaggagttcctgcagcaggtgaggcaggcatggcggcagcggccgaagatggcggccgtgggctcctgctgcctgctcggggctatctccggagacacgctctacgtggccaacctcggcgactcccgcgccgtgctcggccgccgcgtggtcgggggcggggtggccgtcgccgagcggctcaccgacgagcataacgcggcctccgaggaggtccggcgggagctcaccgcgctcaacccggacgatgcgcagatcgtggtgcacgccaggggtgcgtggagggtgaaggggatcattcaggtatcgagaaccattggtgatgtttacttgaagaaacaagagtatagcatggatcccgtgtttcgtaacgttggtccccctattcctttgaagcggccagctcttagcgcagaaccatcgattcaagttcgcaagctcaaaccaaatgatctgttcctgatatttgcttcagatggtctctgggagcatctcagtgacgacgctgcggtgcagattgtcttcaagaatccaaggacgggtatagcaaacagattggtgaaggccgctttaaaggaagccacgaggaagagggaggtcagcttccgtgatctgaagacgatagagaagggagtgaggcgccatttccacgacgacatcagcgtcatcgtcgtctaccttgaccgccaccgcggtcgccgtcacacaagggtcgtcgactcgagcagcaactgcaccaacgcccccgtcgacatctactcctccaactccggccaatccgtggagactcttcaagcccatcggggctccggttggtag

SEQ ID NO: 69020 - protein, 380 aa, Oryza sativa (japonica cultivar-group)
MLRAVARCCGHWPPGAAAADGMLWQTELRPHAAGEFSMAAAQANLAMEDQAQVLASPAATLVGVYDGHGGADASRFLRSRLFPHVQRFEKEQGGMSTEVIRRAFGAAEEEFLQQVRQAWRQRPKMAAVGSCCLLGAISGDTLYVANLGDSRAVLGRRVVGGGVAVAERLTDEHNAASEEVRRELTALNPDDAQIVVHARGAWRVKGIIQVSRTIGDVYLKKQEYSMDPVFRNVGPPIPLKRPALSAEPSIQVRKLKPNDLFLIFASDGLWEHLSDDAAVQIVFKNPRTGIANRLVKAALKEATRKREVSFRDLKTIEKGVRRHFHDDISVIVVYLDRHRGRRHTRVVDSSSNCTNAPVDIYSSNSGQSVETLQAHRGSGW

SEQ ID NO: 69021 - DNA, 1152 bp, Arabidopsis thaliana; identical to SEQ ID NO: 848
  CDS (1)..(1152)

SEQ ID NO: 69022 - protein, 383 aa, Arabidopsis thaliana; identical to SEQ ID NO: 849

SEQ ID NO: 69023 - DNA, 1158 bp, Arabidopsis thaliana
  CDS (1)..(1158)
atggtatcatcggcaactatattgcggatggtagcaccatgttggaggcgaccttctgttaaaggagatcattctactagagacgctaatggtcgatgtgatggtcttctttggtataaagattctggtaaccatgttgctggagagttctctatgtctgttattcaagctaataatcttctcgaagatcatagcaagcttgagtctggacctgttagtatgtttgattctggtcctcaagctacttttgttggtgtttatgatggtcatggtggtcctgaagctgcccgtttcgttaataaacacctcttcgacaacatcaggaagtttacatcagagaatcatggaatgtctgccaatgttataactaaagcgtttttagctacggaagaagattttctttctcttgtccggcggcagtggcagattaaaccacagattgcttctgttggagcttgttgtctggtagggatcatatgtagtggattgttgtatattgcaaacgctggagattctcgggttgtgctaggaagactggaaaaagcgtttaaaattgtcaaggccgttcagttatcgtctgagcataatgcaagtcttgaatctgtgagagaggagttgcgctcgttgcatccaaatgatcctcagattgtggtcttgaagcacaaagtttggcgtgtcaaaggtattatacaggtttcacggtcgattggtgatgcatacttaaagaaagcagaattcaaccgggaaccattgttggcaaagttcagggtccctgaggttttccataagcccatccttagagcagagccggcaattacagtacacaaaatccatccagaagatcagtttcttatatttgcatcagacggcttgtgggagcacttgtccaatcaagaagctgttgacattgtgaacacatgcccgcgcaatgggattgcaaggaagctcataaaaacagctctaagagaggcagcaaagaagagagagatgagatattcggatctaaaaaagatcgatagaggagtgcggagacattttcatgatgatataacagtcatagttgtgtttcttgattcacatctcgtcagtcgcagtacctcacgccgacctctcctctccatctcaggtggtggtgatttagctggaccttctacttga

SEQ ID NO: 69024 - protein, 385 aa, Arabidopsis thaliana
MVSSATILRMVAPCWRRPSVKGDHSTRDANGRCDGLLWYKDSGNHVAGEFSMSVIQANNLLEDHSKLESGPVSMFDSGPQATFVGVYDGHGGPEAARFVNKHLFDNIRKFTSENHGMSANVITKAFLATEEDFLSLVRRQWQIKPQIASVGACCLVGIICSGLLYIANAGDSRVVLGRLEKAFKIVKAVQLSSEHNASLESVREELRSLHPNDPQIVVLKHKVWRVKGIIQVSRSIGDAYLKKAEFNREPLLAKFRVPEVFHKPILRAEPAITVHKIHPEDQFLIFASDGLWEHLSNQEAVDIVNTCPRNGIARKLIKTALREAAKKREMRYSDLKKIDRGVRRHFHDDITVIVVFLDSHLVSRSTSRRPLLSISGGGDLAGPST

SEQ ID NO: 69025 - DNA, 1143 bp, Arabidopsis thaliana
  CDS (1)..(1143)
atgttgcgagctttagcacggcctctcgaacggtgtttgggaagcagagctagtggtgatggtttactctggcaatcggaattgagacctcacgctggcggtgattattcgatcgcggtggttcaagccaattccaggcttgaagatcagagtcaggttttcacatcttcttctgctacttacgtcggtgtatacgatggtcatggtggacctgaagcttctagattcgttaacagacatctctttccttatatgcacaaatttgcaagagaacatgggggattatctgtagatgttatcaaaaaggcattcaaagaaacagaagaagagttttgtggtatggttaaacgatcccttcccatgaaaccgcaaatggctactgtaggatcttgctgtcttgttggtgcaatctctaatgacacactgtatgttgctaatcttggggactcgagagccgttcttggaagcgttgtttcaggggttgatagtaataaaggtgccgtagctgaacggttatctactgatcataatgttgctgttgaagaagtgagaaaggaggttaaggcacttaaccctgatgactcacaaatcgtcttatacacacgtggagtttggcggattaaaggcattattcaggtatcgagatcaattggggatgtatacttgaaaaaaccggagtattacagggacccgattttccagcgacatggaaatcccattcctttgaggagacccgcgatgacagccgaaccctccattatagtaaggaagcttaagccacaggacttgtttctgatatttgcatcagatggtctctgggaacatcttagtgatgaaacagccgtagaaatcgtcctcaaacacccaagaactggtattgcccgaagacttgtaagagctgctctggaagaagcggcaaagaagagagaaatgagatatggagatataaagaaaatagccaaaggaattcgacgacatttccatgacgacataagcgttattgtagtttatctagatcaaaacaaaaccagttcatcgaatagtaaattggtgaagcaaggaggtatcaccgctccaccggatatctactcattacactctgatgaagcagagcaacgacggttactcaatgtgttatactga

SEQ ID NO: 69026 - protein, 380 aa, Arabidopsis thaliana
MLRALARPLERCLGSRASGDGLLWQSELRPHAGGDYSIAVVQANSRLEDQSQVFTSSSATYVGVYDGHGGPEASRFVNRHLFPYMHKFAREHGGLSVDVIKKAFKETEEEFCGMVKRSLPMKPQMATVGSCCLVGAISNDTLYVANLGDSRAVLGSVVSGVDSNKGAVAERLSTDHNVAVEEVRKEVKALNPDDSQIVLYTRGVWRIKGIIQVSRSIGDVYLKKPEYYRDPIFQRHGNPIPLRRPAMTAEPSIIVRKLKPQDLFLIFASDGLWEHLSDETAVEIVLKHPRTGIARRLVRAALEEAAKKREMRYGDIKKIAKGIRRHFHDDISVIVVYLDQNKTSSSNSKLVKQGGITAPPDIYSLHSDEAEQRRLLNVLY

SEQ ID NO: 69027 - DNA, 1203 bp, Arabidopsis thaliana
  CDS (1)..(1203)
atgctatctgggttgatgaattttctgaatgcctgtctctggccacggtcagatcagcaggctcgttctgcctcagattctggtggccgccaagagggtttgctctggttcagagactccggccagcacgtctttggtgacttctccatggccgtcgttcaagccaacagcttgctagaggaccagagccagctcgagtctggctctcttagctcccacgactctggtccctttggcacctttgttggcgtctacgacggccacggtgggcctgagacatctcgcttcatcaatgatcatatgttccaccacctcaagaggtttactgcagagcaacagtgtatgtcatcagaggtgataaaaaaagcgttccaagccactgaagaaggcttcttatccatagttacaaatcaatttcaaactagacctcagatagccacagtgggatcatgctgtcttgtaagtgtcatctgcgatgggaagctatacgtggccaacgcaggggactcacgggccgttctgggacaagtcatgagggtaacaggtgaagctcatgccactcagctctcagcagagcacaacgcatctatagagtcagtgagacgggaacttcaggccctgcatccggatcatccagatattgtggttctgaaacataacgtctggcgagtaaaaggcatcattcaggtttcaagatccattggtgatgtgtatttgaaaaggtcagagttcaacagggaaccactgtatgcaaaattccggctgaggtcaccgttcagcaagccattactgagtgcagagccggcgatcacggtgcatacactggagccgcacgatcagttcattatatgtgcatcagatggactgtgggaacatatgagcaaccaagaagcagtagacatagtccagaatcatccgcgaaacgggatagcaaagcggctggtgaaagtagcgctacaagaagcggcaaagaagagagagatgagatactcagacctgaaaaagatagacagaggagtgaggagacatttccacgatgacataacagtgattgttgtcttctttgatacaaacctagtgagcagaggaagtatgttgagaggaccagccgtgtcagtgagaggagcgggtgtgaatctacctcacaacaccctggcgccttgcaccacgcccactcaagctgctgctgctggcgcctcctga

SEQ ID NO: 69028 - protein, 400 aa, Arabidopsis thaliana
MLSGLMNFLNACLWPRSDQQARSASDSGGRQEGLLWFRDSGQHVFGDFSMAVVQANSLLEDQSQLESGSLSSHDSGPFGTFVGVYDGHGGPETSRFINDHMFHHLKRFTAEQQCMSSEVIKKAFQATEEGFLSIVTNQFQTRPQIATVGSCCLVSVICDGKLYVANAGDSRAVLGQVMRVTGEAHATQLSAEHNASIESVRRELQALHPDHPDIVVLKHNVWRVKGIIQVSRSIGDVYLKRSEFNREPLYAKFRLRSPFSKPLLSAEPAITVHTLEPHDQFIICASDGLWEHMSNQEAVDIVQNHPRNGIAKRLVKVALQEAAKKREMRYSDLKKIDRGVRRHFHDDITVIVVFFDTNLVSRGSMLRGPAVSVRGAGVNLPHNTLAPCTTPTQAAAAGAS

SEQ ID NO: 69029 - DNA, 1158 bp, Arabidopsis thaliana; identical to SEQ ID NO: 22033
  CDS (1)..(1158)

SEQ ID NO: 69030 - protein, 385 aa, Arabidopsis thaliana; identical to SEQ ID NO: 22034

SEQ ID NO: 69031 - DNA, 1155 bp, Arabidopsis thaliana
  CDS (1)..(1155)
atgtcaggttcattgatgaatctgttttctctctgcttcaagccattcgggcacgtctgtgataattccgaagctggatcgggtggtggtggtggcgtttctggtggaaccggcggtgaaggcaaagacggattgctttggttccgtgatctcggtaaatattgcggcggagatttctccatggctgtgattcaagccaatcaggttcttgaagatcagagccaggtcgaatccggtaattttgggacttttgttggtgtttacgatggtcatggtggtcctgaagctgctcgttatgtctgtgatcatctctttaaccattttcgagaaatatcagcggaaacacaaggagttgtgacgagagagacgatagaaagagcctttcatgcgacagaagaaggattcgcttccattgtgtcagagctgtggcaagaaataccaaatttggcaactgttggcacttgttgtttggttggagtgatatatcaaaatactctttttgtggcaagtcttggagattcacgggttgttcttggaaagaaaggcaactgtggcggactctctgctattcagctgtcgactgaacacaatgctaacaatgaagatattcgttgggaactcaaggacttacatcctgatgacccgcagatcgttgtgttcaggcatggagtttggagagttaagggcatcattcaggtatcgaggtctataggagacatgtacatgaaacggcccgaatttaacaaggagccaatcagtcaaaagttcagaattgcagagccaatgaaaagacccttgatgtctgcaacaccaacaatactctctcatcctctgcaccctaatgattcgtttctcatttttgcatctgatggtctttgggagcatttgactaacgaaaaagcagttgagattgttcataaccatccccgtgctggaagcgcaaagagactgataaaggcggctcttcacgaggcagcgaggaaacgtgagatgagatattcagatctaaggaagattgacaagaaagtgagacgacattttcatgatgacatcacggttatagtggtgttcttgaaccatgacctcatatcgagaggccacatcaactcaacccaagacacaacagtctctatacggagtgctcttgaacactga

SEQ ID NO: 69032 - protein, 384 aa, Arabidopsis thaliana
MSGSLMNLFSLCFKPFGHVCDNSEAGSGGGGGVSGGTGGEGKDGLLWFRDLGKYCGGDFSMAVIQANQVLEDQSQVESGNFGTFVGVYDGHGGPEAARYVCDHLFNHFREISAETQGVVTRETIERAFHATEEGFASIVSELWQEIPNLATVGTCCLVGVIYQNTLFVASLGDSRVVLGKKGNCGGLSAIQLSTEHNANNEDIRWELKDLHPDDPQIVVFRHGVWRVKGIIQVSRSIGDMYMKRPEFNKEPISQKFRIAEPMKRPLMSATPTILSHPLHPNDSFLIFASDGLWEHLTNEKAVEIVHNHPRAGSAKRLIKAALHEAARKREMRYSDLRKIDKKVRRHFHDDITVIVVFLNHDLISRGHINSTQDTTVSIRSALEH

SEQ ID NO: 69033 - DNA, 1140 bp, Arabidopsis thaliana
  CDS (1)..(1140)
atgttatcaacgttaatgaaactcttgagtgcttgtctgtggccgtcttcttcctcgggcaagtcctctgattcaactggaaaacaagatggattgctttggtacaaagactttggtcagcacctcgttggtgaattctccatggctgttgttcaagccaacaacttgcttgaggatcagagccaagttgagtctgggcctttgagtactcttgactctggtccttatggaacttttattggaatctatgatggccatggcgggcctgagacgtcgcgatttgttaatgatcacctttttcagcatctaaagagatttgctgcagagcaggcctctatgtcggtggatgtaattaaaaaggcgtatgaggcgacagaagaaggttttttaggggttgtgacaaagcagtggccaactaagccacagattgcagcggttgggtcttgctgcttggtgggtgttatatgcggagggatgctttacatagctaatgttggggattcccgtgcagttcttggaagggctatgaaggcgacaggtgaggttattgcccttcagctctctgctgaacataatgtgagtatagagtctgttagacaggagatgcactccttgcacccagatgactcgcatattgtcatgttaaagcacaatgtgtggcgtgttaagggccttattcagatatctagatccataggcgacgtgtatcttaaaaaggcagagttcaacaaggaaccattgtacacaaagtatagaatccgtgaaccgttcaaaagacctatcttgagtggggaaccaacgataacggagcatgagatccaaccacaagataagtttctaatattcgcttctgatggactatgggaacagatgagcaaccaagaagctgttgacatcgttcagaaccacccacgaaacgggattgcacggagactggtgaagatggcactgcaagaggcggcaaagaaacgagagatgagatattctgatctaaagaagatagagagaggtgtgaggagacatttccacgatgacataactgtggtcataatcttccttgataccaatcaggtgagctctgtgaaaggacccccactctctatccgaggcggtggtatgacattccccaagaaaatctaa

SEQ ID NO: 69034 - protein, 379 aa, Arabidopsis thaliana
MLSTLMKLLSACLWPSSSSGKSSDSTGKQDGLLWYKDFGQHLVGEFSMAVVQANNLLEDQSQVESGPLSTLDSGPYGTFIGIYDGHGGPETSRFVNDHLFQHLKRFAAEQASMSVDVIKKAYEATEEGFLGVVTKQWPTKPQIAAVGSCCLVGVICGGMLYIANVGDSRAVLGRAMKATGEVIALQLSAEHNVSIESVRQEMHSLHPDDSHIVMLKHNVWRVKGLIQISRSIGDVYLKKAEFNKEPLYTKYRIREPFKRPILSGEPTITEHEIQPQDKFLIFASDGLWEQMSNQEAVDIVQNHPRNGIARRLVKMALQEAAKKREMRYSDLKKIERGVRRHFHDDITVVIIFLDTNQVSSVKGPPLSIRGGGMTFPKKI

SEQ ID NO: 69035 - DNA, 1182 bp, Arabidopsis thaliana
  CDS (1)..(1182)
atgttctcctggttagcgagaatggctcttttttgtttacgacctatgcggcgatacggtcgtatgaacagagatgatgacgatgatgatgatcacgacggtgactcttcttcctccggtgactcccttctttggtctagagaactcgagagacattctttcggagatttctctattgctgttgtgcaagctaacgaggttattgaagatcatagtcaagtcgagactggaaacggtgccgttttcgtcggagtttacgatggtcatggtggtcctgaagcttctagatacatctctgatcatctcttttctcatttgatgagagtttcgagagaaaggagttgtatttcagaggaggctttaagagctgcattttctgctactgaggaagggtttctcacgcttgtgcgaaggacttgcgggttgaaaccgttgattgcagctgttggatcttgttgtttggttggagttatttggaaagggactttgcttatcgctaatgttggtgattctcgtgctgtgcttggttccatgggtagtaataataataggtcaaacaagattgtagctgagcaactgactagtgatcacaatgctgctttggaagaagttagacaagagcttaggtcgttgcatcctgatgattcacatatcgttgtccttaaacatggtgtgtggcgcatcaaaggcatcattcaggtatctagatcaataggggatgcatatttaaagcgcccagagttctcacttgacccttcatttccgcggttccatctcgctgaagaactacaaagacctgttttatcagcagagccttgtgtctacacaagagtcttacaaacaagtgacaagtttgtgatattcgcatcagatggactctgggaacaaatgaccaaccagcaagctgtagagatagtgaataaacacccccgtcctggaatagcgagaaggctggtgagaagagcgataaccatagctgcgaaaaagagagagatgaattacgatgatttgaagaaagtggagagaggagtgaggagattctttcatgatgatataacagtggttgtgatattcatagacaatgagcttcttatggtggagaaagctactgttcctgaattgtccattaaaggtttttctcataccgttggaccttccaagttcagtatcttcctctcttag

SEQ ID NO: 69036 - protein, 393 aa, Arabidopsis thaliana
MFSWLARMALFCLRPMRRYGRMNRDDDDDDDHDGDSSSSGDSLLWSRELERHSFGDFSIAVVQANEVIEDHSQVETGNGAVFVGVYDGHGGPEASRYISDHLFSHLMRVSRERSCISEEALRAAFSATEEGFLTLVRRTCGLKPLIAAVGSCCLVGVIWKGTLLIANVGDSRAVLGSMGSNNNRSNKIVAEQLTSDHNAALEEVRQELRSLHPDDSHIVVLKHGVWRIKGIIQVSRSIGDAYLKRPEFSLDPSFPRFHLAEELQRPVLSAEPCVYTRVLQTSDKFVIFASDGLWEQMTNQQAVEIVNKHPRPGIARRLVRRAITIAAKKREMNYDDLKKVERGVRRFFHDDITVVVIFIDNELLMVEKATVPELSIKGFSHTVGPSKFSIFLS

SEQ ID NO: 69037 - DNA, 1155 bp, Arabidopsis thaliana
  CDS (1)..(1155)
atggtatctacaacatttaggagaattgtatcgccttgttggagaccttttggtattggagaagattctagtcctggtagtgatgatacgaatggccgtctcgatggtctcttgtggtacaaagattctgggaaccacatcactggagagttttctatggcagtcgttcaagctaacaaccttcttgaagatcatagccagttagaatctggtcctattagtttgcatgagtctggacctgaggcaacttttgttggtgtttatgatggtcatggaggtcccgaggctgctcggtttgtaaacgataggctcttttataacatcaagaggtacacatcagaacagcgagggatgtcgcctgatgttatcaccagagggtttgtagcaacagaggaggagtttctcggtttagtgcaggagcaatggaagaccaagccacagattgcttctgtgggagcttgttgtttggttggtattgtttgtaatggattgttgtatgttgcaaacgcaggagattctcgggttgtgttagggaaagtcgcaaatccgtttaaagagttgaaagctgttcagttatcaacagagcataatgcaagtatcgaatctgtgagagaggagttacgtttgttgcatcctgatgatccgaatatcgtggtcttgaaacacaaagtttggcgtgttaaagggattatacaggtctcaagatccattggtgacgcataccttaaaagagcggagtttaatcaagaaccgctactacctaagtttagggttccagaacgttttgaaaagccgatcatgagagcggaaccgactataacagttcataagattcatccggaagatcagtttcttatatttgcctcggatggtttatgggagcatctaagcaaccaggaagctgttgatattgtcaattcttgtccacgcaatggtgtggctcggaagttagtgaaagctgcattacaagaagcagcaaagaagagagagatgaggtattctgatttggagaagatagaacgtggcattcggcgacactttcacgacgatattaccgttattgttgtcttcctccacgctacaaacttcgctactcgaactccgatctctgtcaaaggaggtggtctcctctcagcccataatcccgttttatag

SEQ ID NO: 69038 - protein, 384 aa, Arabidopsis thaliana
MVSTTFRRIVSPCWRPFGIGEDSSPGSDDTNGRLDGLLWYKDSGNHITGEFSMAVVQANNLLEDHSQLESGPISLHESGPEATFVGVYDGHGGPEAARFVNDRLFYNIKRYTSEQRGMSPDVITRGFVATEEEFLGLVQEQWKTKPQIASVGACCLVGIVCNGLLYVANAGDSRVVLGKVANPFKELKAVQLSTEHNASIESVREELRLLHPDDPNIVVLKHKVWRVKGIIQVSRSIGDAYLKRAEFNQEPLLPKFRVPERFEKPIMRAEPTITVHKIHPEDQFLIFASDGLWEHLSNQEAVDIVNSCPRNGVARKLVKAALQEAAKKREMRYSDLEKIERGIRRHFHDDITVIVVFLHATNFATRTPISVKGGGLLSAHNPVL

SEQ ID NO: 69039 - DNA, 1251 bp, Nicotiana tabacum; identical to SEQ ID NO: 5352
  CDS (1)..(1251)

SEQ ID NO: 69040 - protein, 416 aa, Nicotiana tabacum; identical to SEQ ID NO: 5353

SEQ ID NO: 69041 - DNA, 1137 bp, Oryza sativa subsp
  CDS (1)..(1137)
atggttgggcagatggtcatgcggattgtgcgcccctgcttcaagcccgaccaccagctcgccgtcggcggcggcggcaccagggatggattgctctggtacaaggacaccgggaggcatgcttgcggggacttctccatggccctcgtgcaggcaaacaaccttctcgaggatgtcagccaggtcgaagctgcccctcttctctcccactcctcctccaccacttttgtcggcatctacgatggccatggtggcccggagactgctcatttcatcgcacaacatttattccccaatctaaagaaatttgctacggaacagcaaactgtttcagttgatgtcattcgcaaatcctatgctgccacggaggaagggtttctcaatcttgtaaggaagcaatggctcatcaaaccgcagcttgcctccgttggttcctgctgtttggttggcatcatcaatgaaggagttctttatgtagcaaatactggtgattcccgtgctgttctagggagacttgaaaggggtgttattaaggcggttcagctgtcagccgagcataacgcaagcattgagtctgtaagggaggaattaagacagtttcacccagacgatccacgaatcgtggtcctaaagcacaacgtttggcgtgtcaaaggccttattcaggtttccagaacgttaggcgatgcttacctaaaaagtactgaatttaaccgagagcctcttttggcgagattccggctttcagaacccttccacaaaccaattctttctccagaaccatccatagaagtacataaactgtgtacagaagatcaatttgtgatatttgcctcagatgggctatgggagcacatgaccaatcaggaggctgtggatatagttaactgttcgccacgaaatggtattgcaagaagactaataaaagcggctctgcgagacgcagcaaaaaaaagagaaatgaggtactcagacttgaaaaagattgatcgcggggtcaggagacactttcacgatgatattactgttgtagtactattcctggactctgctctagttggcaagagattctatggtggcccattactttcactgatgggtggtgatggtgcttcaacgcttacacagaaatgctga

SEQ ID NO: 69042 - protein, 378 aa, Oryza sativa subsp
MVGQMVMRIVRPCFKPDHQLAVGGGGTRDGLLWYKDTGRHACGDFSMALVQANNLLEDVSQVEAAPLLSHSSSTTFVGIYDGHGGPETAHFIAQHLFPNLKKFATEQQTVSVDVIRKSYAATEEGFLNLVRKQWLIKPQLASVGSCCLVGIINEGVLYVANTGDSRAVLGRLERGVIKAVQLSAEHNASIESVREELRQFHPDDPRIVVLKHNVWRVKGLIQVSRTLGDAYLKSTEFNREPLLARFRLSEPFHKPILSPEPSIEVHKLCTEDQFVIFASDGLWEHMTNQEAVDIVNCSPRNGIARRLIKAALRDAAKKREMRYSDLKKIDRGVRRHFHDDITVVVLFLDSALVGKRFYGGPLLSLMGGDGASTLTQKC

SEQ ID NO: 69043 - DNA, 1185 bp, Oryza sativa subsp
  CDS (1)..(1185)
atggactacttcaggtcctgctggggcccgcgatctccggccggtcaccgggtcaggggctccgacgtcgccggccggcaagacgggctcctgtggtataaggacgccggccagctggtcaccggggagttctccatggctgtggttcaggccaacaacctgctggaggaccagagccaggtggagtccggcgcgctctccatggccgagcccggccctcagggcaccttcatcggcgtctatgatggccacggcggcccggagacggcgcggttcatcaatgaccacatgttccaccatctcaggagatttgcaactgagcacaagtgcatgtcaacagatgtgattcggaaagctttccaagcaactgaggagggcttcctttctctagtcagtaagcaatggtccttgaagcctcagattgcagcagtaggatcttgctgcctagttggtgttatttgctcagggactctctatgttgcgaaccttggagattcgcgtgctgttcttgggagatttgtcaagtccactggggaagttgtggcaacgcagctatcatcagaacacaacgcgtgctatgaggaagttagacaagaattgcaggcatcacatcctgatgatccacaaattgttgtcctaaaacacaatgtttggcgtgtcaagggcctcatccagatctcaagatctattggcgatgtatatctaaaaagaccagaatataacagagaacctcttcacagcaagtttcgacttcgggaaaccttcaaaaggccgattcttagttctgaacctgcaattgctgtacaccaaatacaaccaaatgatcattttgttatatttgcttctgatggtctatgggagcacctcagtaatcaggaagcagttgaccttgtccaaaataatcctcgtaatgggattgctcgaagactagttaaagtcgcaatgcaagaagcagccaagaagagggagatgagatactcagacctcaagaaaattgatcgtggcgtgaggcgtcatttccacgacgatataaccgtcattgtggtgtttcttgattcgaatgccataagcaaagcaaactggagccgaggtccttctgtttccctgagagggggtggtgtcaccctccctgcaaattcccttgcgcctttctcggctcccacggtgttaagcagcacctattga

SEQ ID NO: 69044 - protein, 394 aa, Oryza sativa subsp
MDYFRSCWGPRSPAGHRVRGSDVAGRQDGLLWYKDAGQLVTGEFSMAVVQANNLLEDQSQVESGALSMAEPGPQGTFIGVYDGHGGPETARFINDHMFHHLRRFATEHKCMSTDVIRKAFQATEEGFLSLVSKQWSLKPQIAAVGSCCLVGVICSGTLYVANLGDSRAVLGRFVKSTGEVVATQLSSEHNACYEEVRQELQASHPDDPQIVVLKHNVWRVKGLIQISRSIGDVYLKRPEYNREPLHSKFRLRETFKRPILSSEPAIAVHQIQPNDHFVIFASDGLWEHLSNQEAVDLVQNNPRNGIARRLVKVAMQEAAKKREMRYSDLKKIDRGVRRHFHDDITVIVVFLDSNAISKANWSRGPSVSLRGGGVTLPANSLAPFSAPTVLSSTY

SEQ ID NO: 69045 - DNA, 1176 bp, Oryza sativa subsp
  CDS (1)..(1176)
atgggggcgctgcggcggtggctgccgtgctgctgctgctgtcgcggcggcggaggaggtggtggtggtgggagcgtgggggatgggctggtgtgggacgtggccctgaaggcgcacgcgtcgggggactactccgtggccgtggcgcaggcgaacgaggcgctggaggaccaggcgcaggtgttcgtctccccggcggcgacgctcgtcggcgtgtacgacggccacggcggccccgaggcggcgcggttcgtcaacaagcgcctcttctccctcatccaagagttcgcggcgcagagcggcggcatctcggcggaggtgctcgagaaggcgttcggcgagacggaggaggagttcgtggcgtcggtgcagaggtcgtggccgtcgcagccgaggatcctgtccgtcggctcgtgctgcctcgtcggcgccatcgaggacggcacgctctacgtcgccaacctcggcgactcccgcgccgtgctcggccgccgcgctgccgccggcgccgcccacggccgcaagggcaagaacagggtggttcccgagcgcctctccagggaccacaacgtcgccgacgaggacgtccgccgcgagctcaaagagctacaccccgacgactcccacatcgtcctcaacacccatggcgtctggcgcatcaaaggaatcatccaggtgtcgaggtcgatcggcgacgtgtacctgaagaagccggagatatgcaagagcaacccgatgctgcagcagacgatctgcccgttcccgctgcggcgaccggtgatgagcgcggtgccgacgatcaagacgaggaagctgaggccaggggaccagttcgtgatcttcgcgtcggacgggctgtgggagcagctcaccgacgaggcggcggtggcgatcgtggccgggagcccgagacggggcgtggcgatgaggctggtcagggcggcgcagctggaggcggcgaggaagaaggacgtgaagtacgagaggatcaggacgatcgagaaggggcagaggaggcacttccacgacgacatcaccgtcgtcgtgctcttcctcgacaagtgccgcggcaaggccggccgcggcgacgagatcgacggcaccgacggccccgtcgacgtcttctccctcagccccgacgaccgggaggacccgaccaggccagtgctccgttga

SEQ ID NO: 69046 - protein, 391 aa, Oryza sativa subsp
MGALRRWLPCCCCCRGGGGGGGGGSVGDGLVWDVALKAHASGDYSVAVAQANEALEDQAQVFVSPAATLVGVYDGHGGPEAARFVNKRLFSLIQEFAAQSGGISAEVLEKAFGETEEEFVASVQRSWPSQPRILSVGSCCLVGAIEDGTLYVANLGDSRAVLGRRAAAGAAHGRKGKNRVVPERLSRDHNVADEDVRRELKELHPDDSHIVLNTHGVWRIKGIIQVSRSIGDVYLKKPEICKSNPMLQQTICPFPLRRPVMSAVPTIKTRKLRPGDQFVIFASDGLWEQLTDEAAVAIVAGSPRRGVAMRLVRAAQLEAARKKDVKYERIRTIEKGQRRHFHDDITVVVLFLDKCRGKAGRGDEIDGTDGPVDVFSLSPDDREDPTRPVLR

SEQ ID NO: 69047 - DNA, 1299 bp, Medicago truncatula
  CDS (1)..(1299)
atgcattcttggcttgaaaatatagttaatctatacaggaacatgaggaatgacaactttgctttattcgacgaagaccctctcgggagatcgattaatctccaaagccattgctatggagaattttccagtgctgttgttcaagccaatactactatggaagatcaaagccaaattgaagttgcctctaacaatgcagtctttcttggaatttacgatggccatggtggcacccaagcttcccggttcatctgtgaacatctcttcaaaaatctattgaggtttgctaatgataatgagaatgatataactgaagctaccctgagaaatgctgtttctgctactgaagagggttttttggattttgcaaaaatgaattatatgcatcagccaaatcttggatatgttggttcatgctgtcttgctggaattatatggaaagagacactacatgttgcaaatcttggagattcgcgggttgtaattggtactatggttaataaaaagatccgtgctgagcagttaacaagagatcacaattgtaatgatgaagctattagagaagaactcagggcaatgcatcctgatgatcctaacgttgtgataaatgataatggttcgtggcgtgttaaaggcttcattacggtaagtagagctattggtgatgcatatctgaagaggtctgaatttactttgcgcgaatcattccccaaattggaaatagttccggaaccctttacaagaggtgtgctatcagcagaaccagagatgcatactagagttttaacagataatgatcagtttattatatttgcttctgatggactttgggatttcttgtcaaataaaaaagctgctgaaattgttcaaaagaatcctagaaatggaattgcgaaaaggcttctgagtaccgctctagcggtagctgctaaaagaaggaaggttacctataggaagattcaggccgctgctacgggacgcaacaatgtgagccggaggtcttttcatgatgatataagtgtgattgtggtgttcttggacaaaacgtcgtttccgaggcagcctgtacttaatttgtcctacacaggctcatctgacaggcctgtacaatcagattttgcacaatttggattaaccacttcaaggctggattcaatgaggcatcggagtctgaaggatattatccagtttgaatcaggttcatcacatgcatctagctctcagggccctcggactcctctggctctgaaccctcaaacccttgagggcgagagttctcgggctcagagcaatcggtag

SEQ ID NO: 69048 - protein, 432 aa, Medicago truncatula
MHSWLENIVNLYRNMRNDNFALFDEDPLGRSINLQSHCYGEFSSAVVQANTTMEDQSQIEVASNNAVFLGIYDGHGGTQASRFICEHLFKNLLRFANDNENDITEATLRNAVSATEEGFLDFAKMNYMHQPNLGYVGSCCLAGIIWKETLHVANLGDSRVVIGTMVNKKIRAEQLTRDHNCNDEAIREELRAMHPDDPNVVINDNGSWRVKGFITVSRAIGDAYLKRSEFTLRESFPKLEIVPEPFTRGVLSAEPEMHTRVLTDNDQFIIFASDGLWDFLSNKKAAEIVQKNPRNGIAKRLLSTALAVAAKRRKVTYRKIQAAATGRNNVSRRSFHDDISVIVVFLDKTSFPRQPVLNLSYTGSSDRPVQSDFAQFGLTTSRLDSMRHRSLKDIIQFESGSSHASSSQGPRTPLALNPQTLEGESSRAQSNR

SEQ ID NO: 69049 - DNA, 1197 bp, Vitis vinifera
  CDS (1)..(1197)
  misc_feature (141)..(141): y is t or c
  misc_feature (1061)..(1061): y is t or c
atgttttcgtggttggcaaggcttgcattggcgtgttggggacctttggcccgtcgatatgcccctatgagcaaggatgatgataattctggaagcggtgccaacgacgcgctcatctggtgccgggacctcgagaagcaytcattcggcgagttctcgttcgccgtcgtgcaggccaatgaggttatcgaagaccacagccaggtcgaaacgggccgcgatgccacgttcgtcggggtctacgacggccacggtggtcctgaagcctctcgtttcatctccgatcatctttttcttcatctaatgaggcttgctcgagaaaatggaacaatgtctgaggatatcctcagaagtgctttttctgcgactgaggatggttttcttactcttgtgcgtaggacatgtggaataaaaccagtaattgcagcaattgggtcttgttgtctggttggagttatctggagaggaacattatatgttgctaacttgggtgattctcgggccgtaataggttgcttaggtagatcaaataaaatcattgctgagcagttgtccagggaacacaatgcaagtatggaggaggtcagacaagaactcaggtccttgcatccagatgattcacatattgtagttatgaagcatggggtctggcgtatcaaaggcataattcaggtatcgagatctataggtgatgcatacttgaagaggccggagttctctcttgatccatctttcccacgattccaccttcctgaacccattcgtcggcctgtgctaacagcagaaccatccatatgtacaagagtattgcaacccaatgataaatttctcatatttgcctctgatgggctctgggaacacttgacaaatcagcaagcagttgagattgtgcataataaccctcgtgcaggcattgcgaggagacttcttacaacggctttaaacgaggcagctaggaagagagagatgagatacgatgatcttaagaaggttggaaagggagtcaggcggttctttcatgatgatattacagttgttgtaatctatttagaccatgaggygctgaggaaaaatttttctgtaccggagctgtcagttcgaggattcatcgacaccgcattaataaaacactttttaagcagaagtggtatgtatcaatgggaaactgaccaactgttacttggtgaatttttctaa

SEQ ID NO: 69050 - protein, 398 aa, Vitis vinifera
  misc_feature (354)..(354): The Xaa at location 354 stands for Ala, or Val.
MFSWLARLALACWGPLARRYAPMSKDDDNSGSGANDALIWCRDLEKHSFGEFSFAVVQANEVIEDHSQVETGRDATFVGVYDGHGGPEASRFISDHLFLHLMRLARENGTMSEDILRSAFSATEDGFLTLVRRTCGIKPVIAAIGSCCLVGVIWRGTLYVANLGDSRAVIGCLGRSNKIIAEQLSREHNASMEEVRQELRSLHPDDSHIVVMKHGVWRIKGIIQVSRSIGDAYLKRPEFSLDPSFPRFHLPEPIRRPVLTAEPSICTRVLQPNDKFLIFASDGLWEHLTNQQAVEIVHNNPRAGIARRLLTTALNEAARKREMRYDDLKKVGKGVRRFFHDDITVVVIYLDHEXLRKNFSVPELSVRGFIDTALIKHFLSRSGMYQWETDQLLLGEFF

SEQ ID NO: 69051 - DNA, 1362 bp, Vitis vinifera
  CDS (1)..(1362)
  misc_feature (633)..(633): y is t or c
  misc_feature (954)..(954): r is g or a
  misc_feature (1129)..(1129): s is g or c
  misc_feature (1256)..(1256): r is g or a
atgactcagaagtcagaacctaccccatcaattcaatgggttttttccgatacttcaaatttggttacttgggttgaatataataatggactgtggccatggaagagaataggtataagcaacatcgccatcgtgtccccgggaaaatcgatgaatccttatcaaaggaggaaggaaaatttaaaagagagtaggggctcaccatggttttcaaggacaagttttttgaacccataccattggagaggtgttttcaaggcaggtggtggagatgagcttctatggcacttggatttgaagccacatgcatctggggactattcgattgcagtagtgcaagccaactcgtcgctggaagaccaaagccagatcttcacttccccttcagccacatacatcggtgtctacgacggccacggcggtcctgaagcctctcgctttattaccaaccacatcttcccttttctacataagttctcgtctgaacaaggggggttatctgcggaagtgataaaaaaggcgtttaatgccactgaagaggaattcttgcatttagtgaagcagtcatggctagctaggccccagattgcatctgtgggttcgtgctgtctggttggggcaatttcgaatgaygtattgtatgtagcaaatctcggggactcaagggcagtccttgggcggaaagtcacaggagggaggatgaatagcagtcagatggtggtggcggagcgattatcaactgatcataatgttggagttgaggaggtgaggaaggaggtggcagcccttcaccctgatgatgcccacattgtggtgtatactcgaggagtttggcgcattaggggcattattcaggtctcaagatcaataggagatttctatctaaagaaacccgaattgagtagagatcctctttttcaacaatttggatcacctattcctttgaaaagaccrgtaatgacagcagaaccctcgatagtaattagaaatttaaagccgcacgacttgttcttgatatttgcatcagatggcctttgggagcagttaagtgatgaagcagctgttgaaatcgtcttaaaaaatccaagaattggaatagcaaaacgactagtgagagctgcccttcagsaagcagcaaggaaaagagaaatgagatatgacgacataagaagaattgaaaaaggggtgaggcgccatttccatgatgacatcactgtaattgtgatgtaccttgatcatgcacaaggctctccaartgggagactcaaggatcatggcattgttgactgcaccagtgccccagctgacatcttctctcttaattcagatgaaacccacaaccgatttcccattgttcactag

SEQ ID NO: 69052 - protein, 453 aa, Vitis vinifera
  misc_feature (419)..(419): The Xaa at location 419 stands for Asn, or Ser.
MTQKSEPTPSIQWVFSDTSNLVTWVEYNNGLWPWKRIGISNIAIVSPGKSMNPYQRRKENLKESRGSPWFSRTSFLNPYHWRGVFKAGGGDELLWHLDLKPHASGDYSIAVVQANSSLEDQSQIFTSPSATYIGVYDGHGGPEASRFITNHIFPFLHKFSSEQGGLSAEVIKKAFNATEEEFLHLVKQSWLARPQIASVGSCCLVGAISNDVLYVANLGDSRAVLGRKVTGGRMNSSQMVVAERLSTDHNVGVEEVRKEVAALHPDDAHIVVYTRGVWRIRGIIQVSRSIGDFYLKKPELSRDPLFQQFGSPIPLKRPVMTAEPSIVIRNLKPHDLFLIFASDGLWEQLSDEAAVEIVLKNPRIGIAKRLVRAALQZAARKREMRYDDIRRIEKGVRRHFHDDITVIVMYLDHAQGSPXGRLKDHGIVDCTSAPADIFSLNSDETHNRFPIVH

SEQ ID NO: 69053 - DNA, 1113 bp, Vitis vinifera
  CDS (1)..(1113)
  misc_feature (216)..(216): y is t or c
  misc_feature (264)..(264): s is g or c
  misc_feature (409)..(409): m is a or c
atgctcggtgctttgatgaatctcctctctctctgtttgaagccatttggccgtgattcagggaatgtcgagcttgggagtgaaggaagagagggtttgctttggtttcgggatattgggcattatgcgtccggcgacttctcgatggccgtggttcaggccaatcaggtgctggaggaccagagccagatcgagtcggggccatttgggaccttygtgggggtttacgacggtcacggagggcccgaagcggctcgctacgtstgcgatcacctttttcggaatttccaagcaatatcagctgagtccgagggtgttgtgaccacggagacaatcagaagggcttttctccaaacagaggaagggtttacagctcttgtgtcccagttatggattagtcaacccaatmtggcgtcagttggctcatgctgtctagtgggagttatatacgagcagacccttttcattgcaaacctgggagattcgcgggttgtgttgggcaagaaagtaggcaacactggtgttgttgctgccatacagctctcgactgaacacaatgctaacgttgaggctgtcaggcaagagctcaaagacttgcaccccaatgatccccaaattgttgtcctcaagcatggtgtttggagagtaaagggcattattcaggtttctagatctataggcgacgtatatatgaaacatgcgcagtttaacagagaaccacttaatgcgaaattcagacttcctgaaccaatgaacatgcctatcttgactgccaatccatctattatttctcatactctccacccaaatgattctttccttatatttgcatctgatggtctatgggaacacttgagtaatgaaaaagctgtggatatcgtccatagtcatccacgtgcaggaagtgccaaacgacttgtaaaggcagccctccaagaagcagcaagaaaacgagaaatgcggtactcagatctgcgaaggattgacaagaaggtcagacgacattttcatgacgacataactgttattgttttgttcttaaaccacgacctaatatccagaggcatggtgcaagaccctccactttcagttcgtagtgcactggaacactga

SEQ ID NO: 69054 - protein, 370 aa, Vitis vinifera
  misc_feature (137)..(137): The Xaa at location 137 stands for Leu, or Met.
MLGALMNLLSLCLKPFGRDSGNVELGSEGREGLLWFRDIGHYASGDFSMAVVQANQVLEDQSQIESGPFGTFVGVYDGHGGPEAARYVCDHLFRNFQAISAESEGVVTTETIRRAFLQTEEGFTALVSQLWISQPNXASVGSCCLVGVIYEQTLFIANLGDSRVVLGKKVGNTGVVAAIQLSTEHNANVEAVRQELKDLHPNDPQIVVLKHGVWRVKGIIQVSRSIGDVYMKHAQFNREPLNAKFRLPEPMNMPILTANPSIISHTLHPNDSFLIFASDGLWEHLSNEKAVDIVHSHPRAGSAKRLVKAALQEAARKREMRYSDLRRIDKKVRRHFHDDITVIVLFLNHDLISRGMVQDPPLSVRSALEH

SEQ ID NO: 69055 - DNA, 1155 bp, Vitis vinifera
  CDS (1)..(1155)
atgttatcagggttgatgaactttttgagggcctgttttcggccagggtcggatcgatatgttcacacgggttcggacgctggtggtcgccaggatgggctcctgtggtacaaagattctgggcagcactctagtggtgaattctcgatggctgttattcaggccaacaatttacttgaagatcatagccagattgagtcaggcagtttgagctcacatgagtctggcccttatggtacctttgttggaatttatgatgggcatggtggacccgagacggcccggtacatcaatgatcacctcttccatcatctcaagaggtttacttcagagcagcaatccatgtcaacggatgtaatacgcaaggcttttcaagcaacagaagaggggtttatctctcttgttgctagacagtggtccatcagaccacagcttgcagcggtcggatcatgctgcctggttggtgttatttgtggtgggaatctttacatcgccaaccttggcgattcccgtgcggttttggggagacttgtgaaggcaactggggatgttctagccattcagctgagctgcattctctgcacccggtacgacaatcaaattgtagttttaaagcataatgtatggcgtgtaaggggccttatacagattactaggtctattggtgatgtatatttaaaaaaggctgagttcaacagggagcctttaattgccaagtttcgccttcgtgaaccattcagaatgccaatattgagctcagacccagcaatttcagtgcacccactccagccacacgatcagtttgttatatttgcatctgatgggctctgggagcaccttagcaatcaggaggcagtagatattgttcaaagtcaccctcgcaatggaagtgcaaagaggctggtgaaagctgctttacaagaagcagcaaaaaagagagaaatgaggtattcagacctgaagaagattgaccgaggggttcgtcggcatttccatgatgacatcacagtgattgttgtgtttcttgactcaaatctcgtgagcagggctagctcagtcaaatgctctaatatctctgtgagaggaggtgggatcaacctgcctgccaatactcttgcccctttcgctacccccactgaagctggctctacctga

SEQ ID NO: 69056 - protein, 384 aa, Vitis vinifera
MLSGLMNFLRACFRPGSDRYVHTGSDAGGRQDGLLWYKDSGQHSSGEFSMAVIQANNLLEDHSQIESGSLSSHESGPYGTFVGIYDGHGGPETARYINDHLFHHLKRFTSEQQSMSTDVIRKAFQATEEGFISLVARQWSIRPQLAAVGSCCLVGVICGGNLYIANLGDSRAVLGRLVKATGDVLAIQLSCILCTRYDNQIVVLKHNVWRVRGLIQITRSIGDVYLKKAEFNREPLIAKFRLREPFRMPILSSDPAISVHPLQPHDQFVIFASDGLWEHLSNQEAVDIVQSHPRNGSAKRLVKAALQEAAKKREMRYSDLKKIDRGVRRHFHDDITVIVVFLDSNLVSRASSVKCSNISVRGGGINLPANTLAPFATPTEAGST

SEQ ID NO: 69057 - DNA, 1185 bp, Sorghum bicolor
  CDS (1)..(1185)
atggactacttcagctcctgctggggcccgcgatcgcgtgccgggcaccggggcaagggctccgacgcggccggccggcaggacggtctcctctggtacaaggacgctggccagctcgtcactggggagttctccatggccgtggtgcaggccaaccagctgcttgaggaccagagccaggtggaatccggaccgctctccctggctgaccccggcccgcagggcaccttcgtcggcgtccatgatggccatggcggcccagagacggcccggttcatcaatgaccacctcttcaaccatctcaggaaatttgcaactgagcacaagtgtgtgtcagcggatgtgatccggaaagctttccaagcaactgaggagggctggctttctcttgtaagcaaggaatggtctatgaagcctcagattgcttcagtaggctcctgctgccttgttggtgtaatctgtgctgggactctctatgttgcaaacctgggcgactcacgtgcagttcttggaaggcttgttaaggcaactggagaggctgtggccatgcagttgtcatcggagcacaatgcgtgccatgaggaagttagacaagagctgcagtcatcacatcctgatgatccacatattgtggttcttaaacacaatgtttggcgagtgaagggtctcatccagatctcaagatctatcggagatgtatatctaaagaaaccagagtataacagagaacctcttcatagcaagtttcggcttcgagaaaccttccagaggccgattcttagtgctgaccctcaaattactgaacatcgaatacagccaaacgatcagtttgttatatttgcttctgatggtctatgggagcacctcagcactcaggaagcagttgaccttgtccacagtagtccccgtaatggaatcgctcggagactagttaaagccgcgatgcaagaagctgccaagaagagggagatgagatattcagacctcaagaagatcgaccgaggtgtgagaaggcatttccacgacgatacaaccgtggttgtgctgttcctggattcaaatgccatgagcaaagcaagctggagcaaaagcccctctgtttctatccgagggggcggtgtaacccttcccgcgaaatccctcgcacctttctcagctctggcacagttgaacagcacctactga

SEQ ID NO: 69058 - protein, 394 aa, Sorghum bicolor
MDYFSSCWGPRSRAGHRGKGSDAAGRQDGLLWYKDAGQLVTGEFSMAVVQANQLLEDQSQVESGPLSLADPGPQGTFVGVHDGHGGPETARFINDHLFNHLRKFATEHKCVSADVIRKAFQATEEGWLSLVSKEWSMKPQIASVGSCCLVGVICAGTLYVANLGDSRAVLGRLVKATGEAVAMQLSSEHNACHEEVRQELQSSHPDDPHIVVLKHNVWRVKGLIQISRSIGDVYLKKPEYNREPLHSKFRLRETFQRPILSADPQITEHRIQPNDQFVIFASDGLWEHLSTQEAVDLVHSSPRNGIARRLVKAAMQEAAKKREMRYSDLKKIDRGVRRHFHDDTTVVVLFLDSNAMSKASWSKSPSVSIRGGGVTLPAKSLAPFSALAQLNSTY

SEQ ID NO: 69059 - DNA, 1323 bp, Medicago truncatula
  CDS (1)..(1323)
atgcatccttggcttgaaaatatagttaatctatgcaggaacaggaagaatgacaacttagctttattcgacgaatggccctctctcgcaagttcgattaatctcaaaaaccattgctatggagaattttccagtgcgtttgttcaagcaaatgaagatatggaagatcgaagccaagttgaagttgcctctagaaatgcactctttcttggagtttacgacggccatggtggcttcgaggcttcccagttcatctctgaacacctcttcgacgatctactgaggcttactaatgagaatgagaataaaataactgaagctaccctgagggatgctgtttctgctactgaagcgagttttttggattctgtaaaaaggaattatatgataaatcgaaatcttggaaaagttggttcatgctgtcttgctggaatcatatggaaagggacgctacatgttgcaaatcttggagattcacgtgctgtaattggtactatggttaataagagaatccgtgctgagcagttgacaagagatcacaattgtagtgatccagctattagagaagaactcaagtcaatgcatcctggtgatcctaccattgtgaaggaaaagaatggagtgtggcgcgttaaaggcatcatttcggttagtagaagtattggtgatacatatctgaaaaggcttgaatttacgctgtgcgaatcgtttcccaaattcaaaaaagttcctgaaccatttactagaggtgtggtatcagcagaaccagagatgcgtactagagttttaacatatagtgacaagtttcttatatttgcttctgatggactttgggatttcttgtcaaatgaacaagcagttgaaattgttcaaaacaatccaagaaatggaattgcaaaaaggcttgtgagtactgttctagcgaaagcggctgctaatgggaatgttacctgtaatagcatgatgcatgctaatctgggacgtggcgatgggaacaggaggtcttttcatgatgatataagtgtgattgttgtgttctttgacaaaacgtcgtttctgaggatgcccgtacataatttgtcctacaaaagctcatctgacagacctacaccatctgcttttgcacggtctggattaaccactcattggctgcagaggctgaagaagactattaaagaccggtttaaaggaagttcatcgaatgcatctggctctcaggatcagaaccctgaaacccctgagggcgagagctctcaaactcagagccttttaggtcagagttctcgggctcagagtccttggaagaatcttaaacagaattag

SEQ ID NO: 69060 - protein, 440 aa, Medicago truncatula
MHPWLENIVNLCRNRKNDNLALFDEWPSLASSINLKNHCYGEFSSAFVQANEDMEDRSQVEVASRNALFLGVYDGHGGFEASQFISEHLFDDLLRLTNENENKITEATLRDAVSATEASFLDSVKRNYMINRNLGKVGSCCLAGIIWKGTLHVANLGDSRAVIGTMVNKRIRAEQLTRDHNCSDPAIREELKSMHPGDPTIVKEKNGVWRVKGIISVSRSIGDTYLKRLEFTLCESFPKFKKVPEPFTRGVVSAEPEMRTRVLTYSDKFLIFASDGLWDFLSNEQAVEIVQNNPRNGIAKRLVSTVLAKAAANGNVTCNSMMHANLGRGDGNRRSFHDDISVIVVFFDKTSFLRMPVHNLSYKSSSDRPTPSAFARSGLTTHWLQRLKKTIKDRFKGSSSNASGSQDQNPETPEGESSQTQSLLGQSSRAQSPWKNLKQN

SEQ ID NO: 69061 - DNA, 1143 bp, Oryza sativa subsp
  CDS (1)..(1143)
atgttgagggcggtggcgaggtgctgcgggcactggccgccgggggcggcggcggcggacgggatgctgtggcagacggagctgaggccgcacgcggcgggggagttctcgatggcggcggcgcaggcgaacctggccatggaggaccaggcgcaggtgctcgcctcccccgccgccacgctcgtcggcgtgtatgacgggcacggcggcgccgacgcctcccgcttcctccgctcccgcctcttcccccttgtccaacgattcgagaaggagcaaggggggatgagcacggaggtgatccggagggcgttcggcgcggcggaggaggagttcctgcagcaggtgaggcaggcatggcggcagcggccgaagatggcggccgtgggctcctgctgcctgctcggggctatctccggagacacgctctacgtggccaacctcggcgactcccgcgccgtgctcggccgccgcgtggtcgggggcggggtggccgtcgccgagcggctcaccgacgagcataacacggcctccgaggaggtccggcgggagctcaccgcgctcaacccggacgatgcgcagatcgtggtgcacgccaggggtgcgtggagggtgaaggggatcattcaggtatcgagaaccattggtgatgtttacttgaagaaacaagagtatagcatggatcccgtgtttcgtaacgttggtccccctattcctttgaagcggccagctcttagcgcagaaccatcgattcaagttcgcaagctcaaaccaaatgatctgttcctgatatttgcttcagatggtctctgggagcatctcagtgacgacgctgcggtgcagattgtcttcaagaatccaaggacgggtatagcaaacagattggtgaaggccgctttaaaggaagccacgaggaagagggaggtcagcttccgtgatctgaagacgatagagaagggagtgaggcgccatttccacgacgacatcagcgtcatcgtcgtctaccttgaccgccaccgcggtcgccgtcacacaagggtcgtcgactcgagtagcaactgcaccaacgcccccgtcgacatctactcctccaactccggccaatccgtggagactcttcaagctcatcggggctccggttggtag

SEQ ID NO: 69062 - protein, 380 aa, Oryza sativa subsp
MLRAVARCCGHWPPGAAAADGMLWQTELRPHAAGEFSMAAAQANLAMEDQAQVLASPAATLVGVYDGHGGADASRFLRSRLFPLVQRFEKEQGGMSTEVIRRAFGAAEEEFLQQVRQAWRQRPKMAAVGSCCLLGAISGDTLYVANLGDSRAVLGRRVVGGGVAVAERLTDEHNTASEEVRRELTALNPDDAQIVVHARGAWRVKGIIQVSRTIGDVYLKKQEYSMDPVFRNVGPPIPLKRPALSAEPSIQVRKLKPNDLFLIFASDGLWEHLSDDAAVQIVFKNPRTGIANRLVKAALKEATRKREVSFRDLKTIEKGVRRHFHDDISVIVVYLDRHRGRRHTRVVDSSSNCTNAPVDIYSSNSGQSVETLQAHRGSGW

SEQ ID NO: 69063 - DNA, 1152 bp, Arabidopsis thaliana; identical to SEQ ID NO: 934
  CDS (1)..(1152)

SEQ ID NO: 69064 - protein, 383 aa, Arabidopsis thaliana; identical to SEQ ID NO: 935

SEQ ID NO: 69065 - DNA, 1155 bp, Arabidopsis thaliana
  CDS (1)..(1155)
  misc_feature (317)..(317): v is a, g or c
  misc_feature (675)..(675): s is g or c
atgtcaggttcattgatgaatctgttttctctctgcttcaagccattcgggcacgtctgtgataattccgaagctggatcgggtggtggtggtggcgtttctggtggaaccggccgtgaaggcaaagacggattgctttggttccgtgatctcggtaaatattgcggcggagatttctccatggctgtgattcaagccaatcaggttcttgaagatcagagccaggtcgaatccggtaattttgggacttttgttggtgtttacgatggtcatggtggtcctgaagctgctcgttatgtctgtgatcatctctttavccattttcgagaaatatcagcggaaacacaaggagttgtgacgagagagacgatagaaagagcctttcatgcgacagaagaaggattcgcttccattgtgtcagagctgtggcaagaaataccaaatttggcaactgttggcacttgttgtttggttggagtgatatatcaaaatactctttttgtggcaagtcttggagattcacgggttgttcttggaaagaaaggcaactgtggcggactctctgctattcagctgtcgactgaacacaatgctaacaatgaagatattcgttgggaactcaaggacttacatcctgatgacccgcagatcgttgtgttcaggcatggagtttgsagagttaagggcatcattcaggtatcgaggtctataggagacatgtacatgaaacggcccgaatttaacaaggagccaatcagtcaaaagttcagaattgcagagccaatgaaaagacccttgatgtctgcaacaccaacaatactctctcatcctctgcaccctaatgattcgtttctcatttttgcatctgatggtctttgggagcatttgactaacgaaaaagcagttgagattgttcataaccatccccgtgctggaagcgcaaagagactgataaaggcggctcttcacgaggcagcgaggaaacgtgagatgagatattcagatctaaggaagattgacaagaaagtgagacgacattttcatgatgacatcacggttatagtggtgttcttgaaccatgacctcatatcgagaggccacatcaactcaacccaagacacaacagtctctatacggagtgctcttgaacactga

SEQ ID NO: 69066 - protein, 384 aa, Arabidopsis thaliana
  misc_feature (106)..(106): The Xaa at location 106 stands for Asn, Ser, or Thr.
  misc_feature (225)..(225): The Xaa at location 225 stands for Cys, or Trp.
MSGSLMNLFSLCFKPFGHVCDNSEAGSGGGGGVSGGTGREGKDGLLWFRDLGKYCGGDFSMAVIQANQVLEDQSQVESGNFGTFVGVYDGHGGPEAARYVCDHLFXHFREISAETQGVVTRETIERAFHATEEGFASIVSELWQEIPNLATVGTCCLVGVIYQNTLFVASLGDSRVVLGKKGNCGGLSAIQLSTEHNANNEDIRWELKDLHPDDPQIVVFRHGVXRVKGIIQVSRSIGDMYMKRPEFNKEPISQKFRIAEPMKRPLMSATPTILSHPLHPNDSFLIFASDGLWEHLTNEKAVEIVHNHPRAGSAKRLIKAALHEAARKREMRYSDLRKIDKKVRRHFHDDITVIVVFLNHDLISRGHINSTQDTTVSIRSALEH

SEQ ID NO: 69067 - DNA, 1182 bp, Arabidopsis thaliana
  CDS (1)..(1182)
atgttctcctggttagcgagaatggctcttttttgtttacgacctatgcggcgatacggtcgtatgaacagagatgatgacgatgatgatgatcacgacggtgactcttcttcctccggtgactcccttctttggtctagagaactcgagagacattctttcggagatttctctattgctgttgtgcaagctaacgaggttattgaagatcatagtcaagtcgagactggaaacggtgccgttttcgtcggagtttacgatggtcatggtggtcctgaagcttctagatacatctctgatcatctcttttctcatttgatgagagtttcgagagaaaggagttgtatttcagaggaggctttaagagctgcattttctgctactgaggaagggtttctcacgcttgtgcgaaggacttgcgggttgaaaccgttgattgcagctgttggatcttgttgtttggttggagttatttggaaagggactttgcttatcgctaatgttggtgattctcgtgctgtgcttggttccatgggtagtaataataataggtcaaacaagattgtagctgagcaactgactagtgatcacaatgctgctttggaagaagttagacaagagcttaggtcgttgcatcctgatgattcacatatcgttgtccttaaacatggtgtgtggcgcatcaaaggcatcattcaggtatctagatcaataggggatgcatacttaaagcgcccagagttctcacttgacccttcatttccgcggttccatctcgctgaagaactacaaagacctgtttcatcagcagagccttgtgtctacacaagagtcttacaaacaagtgacaagtttgtgatattcgcatcagatggactctgggaacaaatgaccaaccagcaagctgtagagatagtgaataaacaccctcgtcctggaatagcgagaaggctggtgagaagagcgataaccatagctgcgaaaaagagagagatgaattacgatgatttgaagaaagtggagagaggagtgaggagattctttcatgatgatataacagtggttgtgatattcatagacaatgagcttcttatggtggagaaagctactgttcctgaattgtccattaaaggtttttctcataccgttggaccttccaagttcagtatcttcctctcttag

SEQ ID NO: 69068 - protein, 393 aa, Arabidopsis thaliana
MFSWLARMALFCLRPMRRYGRMNRDDDDDDDHDGDSSSSGDSLLWSRELERHSFGDFSIAVVQANEVIEDHSQVETGNGAVFVGVYDGHGGPEASRYISDHLFSHLMRVSRERSCISEEALRAAFSATEEGFLTLVRRTCGLKPLIAAVGSCCLVGVIWKGTLLIANVGDSRAVLGSMGSNNNRSNKIVAEQLTSDHNAALEEVRQELRSLHPDDSHIVVLKHGVWRIKGIIQVSRSIGDAYLKRPEFSLDPSFPRFHLAEELQRPVSSAEPCVYTRVLQTSDKFVIFASDGLWEQMTNQQAVEIVNKHPRPGIARRLVRRAITIAAKKREMNYDDLKKVERGVRRFFHDDITVVVIFIDNELLMVEKATVPELSIKGFSHTVGPSKFSIFLS

SEQ ID NO: 69069 - DNA, 1137 bp, Thellungiella halophila
  CDS (1)..(1137)
atgctatcaactttgatgaaacttttgagtgcttgtctgtggccttcttcctcgggcaagtcctctgattcaacaggaaaacaagatggactgctctggtacaaagactctggtcagcacctacttggtgaattctcaatggcagttgttcaggccaacaatctgcttgaggatcagagccaggttgagtctggccctttgagtacacttgactctggtccttttggaacctttatcggaatctatgacggacatggcggtcctgagacctcccgctttgtcaatgatcacctctttcagcatctaaagagattcgcagcagagcatgcttctatgtcggtggatgtaattagaaaggcatatgaagcgacggaagaagggttcctaggggttgtgacaaagcagtggccggttaagccacagattgcagcggttgggtcttgctgcctggtgggtgttatatgcggaggcaggctctacatcgctaacgttggggattcacgtgcagttcttggaagggctatgaatgctacaggcgaggttattgcgcttcagctctcagcggaacataacgtgagcatagagtctgttagacaggaaatgcgctccttgcacccggatgattctcatatcgtcgtgttaaagcacaatgtgtggcgtgttaagggtcttattcagatatctagatccatcggcgacatctatcttaagaaggcagagttcaacaaggaaccattatacacgaagtacagactccgcgagccgatcaagagaccgattttgagtggggaaccgtcaataacagagcatgagatccaaccacaagatcagtttctgatatttgcttctgatggactatgggagcagatgagcaaccaagaagccgttgacatcgttcagaaccacccacgaaacgggattgcacggagacttgtgaagatggcactgcaagcggcggcaaagaaaagagagatgagatactctgatctgaagaagatagagagaggcgtgaggaggcatttccacgatgacatcactgtggtcgtcatcttccttgataccaatgtagtgagctctgccaaaggaccctctctttctatcagaggcggcggtatgactttccccaagaaactctaa

SEQ ID NO: 69070 - protein, 378 aa, Thellungiella halophila
MLSTLMKLLSACLWPSSSGKSSDSTGKQDGLLWYKDSGQHLLGEFSMAVVQANNLLEDQSQVESGPLSTLDSGPFGTFIGIYDGHGGPETSRFVNDHLFQHLKRFAAEHASMSVDVIRKAYEATEEGFLGVVTKQWPVKPQIAAVGSCCLVGVICGGRLYIANVGDSRAVLGRAMNATGEVIALQLSAEHNVSIESVRQEMRSLHPDDSHIVVLKHNVWRVKGLIQISRSIGDIYLKKAEFNKEPLYTKYRLREPIKRPILSGEPSITEHEIQPQDQFLIFASDGLWEQMSNQEAVDIVQNHPRNGIARRLVKMALQAAAKKREMRYSDLKKIERGVRRHFHDDITVVVIFLDTNVVSSAKGPSLSIRGGGMTFPKKL

SEQ ID NO: 69071 - DNA, 1203 bp, Arabidopsis thaliana
  CDS (1)..(1203)
atgctatctgggttgatgaattttctgaatgcctgtctctggccacggtcagatcagcaggctcgttctgcctcagattctggtggccgccaagagggtttgctctggttcagtgactccggccagcacgtctttggtgacttctccatggccgtcgttcaagccaacagcttgctagaggaccagagccagctcgagtctggctctcttagctcccacgactctggtccctttggcacctttgttggcgtctacgacggccacggtgggcctgagacatctcgcttcatcaatgatcatatgttccaccacctcaagaggtttactgcagagcaacagtgtatgtcatcagaggtgataaaaaaagcgttccaagccactgaagaaggcttcttatccatagttacaaatcaatttcaaactagacctcagatagccacagtgggatcatgctgtcttgtaagtgtcatctgcgatgggaagctatacgtggccaacgcaggggactcacgggccgttctgggacaagtcatgagggtaacaggtgaagctcatgccactcagctctcagcagagcacaacgcatctatagagtcagtgagacgggaacttcaggccctgcatccggatcatccagatattgtggttctgaaacataacgtctggcgagtaaaaggcatcattcaggtttcaagatccattggtgatgtgtatttgaaaaggtcagagttcaacagggaaccactgtatgcaaaattccggctgaggtcaccgttcagcaagccattactgagtgcagagccggcgatcacggtgcatacactggagccgcacgatcagttcattatatgtgcatcagatggactgtgggaacatatgagcaaccaagaagcagtagacatagtccagaatcatccgcgaaacgggatagcaaagcggctggtgaaagtagcgctacaagaagcggcaaagaagagagagatgagatactcagacctgaaaaagatagacagaggagtgaggagacatttccacgatgacataacagtgattgttgtcttctttgatacaaacctagtgagcagaggaagtatgttgagaggaccagccgtgtcagtgagaggagcgggtgtgaatctacctcacaacaccctggcgccttgcaccacgcccactcaagctgctgctgctggcgcctcctga

SEQ ID NO: 69072 - protein, 400 aa, Arabidopsis thaliana
MLSGLMNFLNACLWPRSDQQARSASDSGGRQEGLLWFSDSGQHVFGDFSMAVVQANSLLEDQSQLESGSLSSHDSGPFGTFVGVYDGHGGPETSRFINDHMFHHLKRFTAEQQCMSSEVIKKAFQATEEGFLSIVTNQFQTRPQIATVGSCCLVSVICDGKLYVANAGDSRAVLGQVMRVTGEAHATQLSAEHNASIESVRRELQALHPDHPDIVVLKHNVWRVKGIIQVSRSIGDVYLKRSEFNREPLYAKFRLRSPFSKPLLSAEPAITVHTLEPHDQFIICASDGLWEHMSNQEAVDIVQNHPRNGIAKRLVKVALQEAAKKREMRYSDLKKIDRGVRRHFHDDITVIVVFFDTNLVSRGSMLRGPAVSVRGAGVNLPHNTLAPCTTPTQAAAAGAS

SEQ ID NO: 69073 - DNA, 1131 bp, Arabidopsis thaliana
  CDS (1)..(1131)
atggtagcaccatgttggaggcgaccttctgttaaaggagatcattctactagagacgctaatggtcgatgtgatggtcttctttggtataaagattctggtaaccatgttgctggagagttctctatgtctgttattcaagctaataatcttctcgaagatcatagcaagcttgagtctggacctgttagtatgtttgattctggtcctcaagctacttttgttggtgtttatgatggtcatggtggtcctgaagctgcccgtttcgttaataaacacctcttcgacaacatcaggaagtttacatcagagaatcatggaatgtctgccaatgttataactaaagcgtttttagctacggaagaagattttctttctcttgtccggcggcagtggcagattaaaccacagattgcttctgttggagcttgttgtctggtagggatcatatgtagtggattgttgtatattgcaaacgctggagattctcgggttgtgctaggaagactggaaaaagcgtttaaaattgtcaaggccgttcagttatcgtctgagcataatgcaagtcttgaatctgtgagagaggagttgcgctcgttgcatccaaatgatcctcagattgtggtcttgaagcacaaagtttggcgtgtcaaaggtattatacaggtttcacggtcgattggtgatgcatacttaaagaaagcagaattcaaccgggaaccattgttggcaaagttcagggtccctgaggttttccataagcccatccttagagcagagccggcaattacagtacacaaaatccatccagaagatcagtttcttatatttgcatcagacggcttgtgggagcacttgtccaatcaagaagctgttgacattgtgaacacatgcccgcgcaatgggattgcaaggaagctcataaaaacagctctaagagaggcagcaaagaagagagagatgagatattcggatctaaaaaagatcgatagaggagtgcggagacattttcatgatgatataacagtcatagttgtgtttcttgattcacatctcgtcagtcgcagtacctcacgccgacctctcctctccatctcaggtggtggtgatttagctggaccttctacttga

SEQ ID NO: 69074 - protein, 376 aa, Arabidopsis thaliana
MVAPCWRRPSVKGDHSTRDANGRCDGLLWYKDSGNHVAGEFSMSVIQANNLLEDHSKLESGPVSMFDSGPQATFVGVYDGHGGPEAARFVNKHLFDNIRKFTSENHGMSANVITKAFLATEEDFLSLVRRQWQIKPQIASVGACCLVGIICSGLLYIANAGDSRVVLGRLEKAFKIVKAVQLSSEHNASLESVREELRSLHPNDPQIVVLKHKVWRVKGIIQVSRSIGDAYLKKAEFNREPLLAKFRVPEVFHKPILRAEPAITVHKIHPEDQFLIFASDGLWEHLSNQEAVDIVNTCPRNGIARKLIKTALREAAKKREMRYSDLKKIDRGVRRHFHDDITVIVVFLDSHLVSRSTSRRPLLSISGGGDLAGPST

SEQ ID NO: 69075 - DNA, 1161 bp, Arabidopsis thaliana
  CDS (1)..(1161)
atggctcttttttgtttacgacctatgcggcgatacggtcgtatgaacagagatgatgacgatgatgatgatcacgacggtgactcttcttcctccggtgactcccttctttggtctagagaactcgagagacattctttcggagatttctctattgctgttgtgcaagctaacgaggttattgaagatcatagtcaagtcgagactggaaacggtgccgttttcgtcggagtttacgatggtcatggtggtcctgaagcttctagatacatctctgatcatctcttttctcatttgatgagagtttcgagagaaaggagttgtatttcagaggaggctttaagagctgcattttctgctactgaggaagggtttctcacgcttgtgcgaaggacttgcgggttgaaaccgttgattgcagctgttggatcttgttgtttggttggagttatttggaaagggactttgcttatcgctaatgttggtgattctcgtgctgtgcttggttccatgggtagtaataataataggtcaaacaagattgtagctgagcaactgactagtgatcacaatgctgctttggaagaagttagacaagagcttaggtcgttgcatcctgatgattcacatatcgttgtccttaaacatggtgtgtggcgcatcaaaggcatcattcaggtatctagatcaataggggatgcatatttaaagcgcccagagttctcacttgacccttcatttccgcggttccatctcgctgaagaactacaaagacctgttttatcagcagagccttgtgtctacacaagagtcttacaaacaagtgacaagtttgtgatattcgcatcagatggactctgggaacaaatgaccaaccagcaagctgtagagatagtgaataaacacccccgtcctggaatagcgagaaggctggtgagaagagcgataaccatagctgcgaaaaagagagagatgaattacgatgatttgaagaaagtggagagaggagtgaggagattctttcatgatgatataacagtggttgtgatattcatagacaatgagcttcttatggtggagaaagctactgttcctgaattgtccattaaaggtttttctcataccgttggaccttccaagttcagtatcttcctctcttag

SEQ ID NO: 69076 - protein, 386 aa, Arabidopsis thaliana
MALFCLRPMRRYGRMNRDDDDDDDHDGDSSSSGDSLLWSRELERHSFGDFSIAVVQANEVIEDHSQVETGNGAVFVGVYDGHGGPEASRYISDHLFSHLMRVSRERSCISEEALRAAFSATEEGFLTLVRRTCGLKPLIAAVGSCCLVGVIWKGTLLIANVGDSRAVLGSMGSNNNRSNKIVAEQLTSDHNAALEEVRQELRSLHPDDSHIVVLKHGVWRIKGIIQVSRSIGDAYLKRPEFSLDPSFPRFHLAEELQRPVLSAEPCVYTRVLQTSDKFVIFASDGLWEQMTNQQAVEIVNKHPRPGIARRLVRRAITIAAKKREMNYDDLKKVERGVRRFFHDDITVVVIFIDNELLMVEKATVPELSIKGFSHTVGPSKFSIFLS

SEQ ID NO: 69077 - DNA, 1377 bp, Oryza sativa; identical to SEQ ID NO: 952
  CDS (1)..(1377)

SEQ ID NO: 69078 - protein, 458 aa, Oryza sativa; identical to SEQ ID NO: 953

SEQ ID NO: 69079 - DNA, 1152 bp, Oryza sativa; identical to SEQ ID NO: 954
  CDS (1)..(1152)

SEQ ID NO: 69080 - protein, 383 aa, Oryza sativa; identical to SEQ ID NO: 955

SEQ ID NO: 69081 - DNA, 1134 bp, Arabidopsis thaliana; identical to SEQ ID NO: 812
  CDS (1)..(1134)

SEQ ID NO: 69082 - protein, 377 aa, Arabidopsis thaliana; identical to SEQ ID NO: 813

SEQ ID NO: 69083 - DNA, 1140 bp, Arabidopsis thaliana
  CDS (1)..(1140)
atgaatctgttttctctctgcttcaagccattcgggcacgtctgtgataattccgaagctggatcgggtggtggtggtggcgtttctggtggaaccggcggtgaaggcaaagacggattgctttggttccgtgatctcggtaaatattgcggcggagatttctccatggctgtgattcaagccaatcaggttcttgaagatcagagccaggtcgaatccggtaattttgggacttttgttggtgtttacgatggtcatggtggtcctgaagctgctcgttatgtctgtgatcatctctttaaccattttcgagaaatatcagcggaaacacaaggagttgtgacgagagagacgatagaaagagcctttcatgcgacagaagaaggattcgcttccattgtgtcagagctgtggcaagaaataccaaatttggcaactgttggcacttgttgtttggttggagtgatatatcaaaatactctttttgtggcaagtcttggagattcacgggttgttcttggaaagaaaggcaactgtggcggactctctgctattcagctgtcgactgaacacaatgctaacaatgaagatattcgttgggaactcaaggacttacatcctgatgacccgcagatcgttgtgttcaggcatggagtttggagagttaagggcatcattcaggtatcgaggtctataggagacatgtacatgaaacggcccgaatttaacaaggagccaatcagtcaaaagttcagaattgcagagccaatgaaaagacccttgatgtctgcaacaccaacaatactctctcatcctctgcaccctaatgattcgtttctcatttttgcatctgatggtctttgggagcatttgactaacgaaaaagcagttgagattgttcataaccatccccgtgctggaagcgcaaagagactgataaaggcggctcttcacgaggcagcgaggaaacgtgagatgagatattcagatctaaggaagattgacaagaaagtgagacgacattttcatgatgacatcacggttatagtggtgttcttgaaccatgacctcatatcgagaggccacatcaactcaacccaagacacaacagtctctatacggagtgctcttgaacactga

SEQ ID NO: 69084 - protein, 379 aa, Arabidopsis thaliana
MNLFSLCFKPFGHVCDNSEAGSGGGGGVSGGTGGEGKDGLLWFRDLGKYCGGDFSMAVIQANQVLEDQSQVESGNFGTFVGVYDGHGGPEAARYVCDHLFNHFREISAETQGVVTRETIERAFHATEEGFASIVSELWQEIPNLATVGTCCLVGVIYQNTLFVASLGDSRVVLGKKGNCGGLSAIQLSTEHNANNEDIRWELKDLHPDDPQIVVFRHGVWRVKGIIQVSRSIGDMYMKRPEFNKEPISQKFRIAEPMKRPLMSATPTILSHPLHPNDSFLIFASDGLWEHLTNEKAVEIVHNHPRAGSAKRLIKAALHEAARKREMRYSDLRKIDKKVRRHFHDDITVIVVFLNHDLISRGHINSTQDTTVSIRSALEH

SEQ ID NO: 69085 - DNA, 1086 bp, Arabidopsis thaliana
  CDS (1)..(1086)
atggttaaaccctgttggagaataggtgccggtatggagagaagtaagatcaatcccacaaaggttgatggtttgacatggtacaaagatcttggtcttcacacctttggagagttttccatggcaatgatccaagccaacagtgtgatggaggatcagtgccagatcgaatcagggccgcttacattcaacaatccgacagttcaaggcacatttgttggagtttacgatggccatggaggtccagaggcttccagattcattgcagacaacatcttccccaaggagatttcagagcaggtgatcagcaaagcatttgccgagacagacaaagattttctcaagacagtgacgaagcaatggcctacgaacccacagatggcatcagtggggtcatgttgcttggcaggagtgatatgcaacggattggtgtatattgcaaacacgggagattccagagctgtgttgggcagatctgagagaggtggagtgagagctgttcagttatctgtagagcacaatgccaatcttgagtctgcgaggcaagagctatggtcattgcatcctaatgaccccaccattcttgtgatgaagcaccgcttgtggcgtgtgaaaggcgttatccaggtcacaagatccataggtgatgcatacctcaaaagagcagagttcaacagagaacctttgctgcccaaattcagactaccagaacatttcactaagccaatccttagtgcggatccatcagtcaccattacgcggcttagcccacaagatgagtttataattcttgcttcagatgggctttgggagcatcttagcaaccaggaagctgttgatattgtgcataattcccctcgacaaggaatagcaaggagactacttaaagctgcattgaaggaagcagcaaagaaaagagagatgagatactcagacctaacagagatccatcctggtgtaagaaggcatttccacgacgatataaccgttattgtggtctatctcaacccccacccggtcaaaaccaattcttgggcttcacctctgtcaattagagggggatacccgatgcattcaacatcatga

SEQ ID NO: 69086 - protein, 361 aa, Arabidopsis thaliana
MVKPCWRIGAGMERSKINPTKVDGLTWYKDLGLHTFGEFSMAMIQANSVMEDQCQIESGPLTFNNPTVQGTFVGVYDGHGGPEASRFIADNIFPKEISEQVISKAFAETDKDFLKTVTKQWPTNPQMASVGSCCLAGVICNGLVYIANTGDSRAVLGRSERGGVRAVQLSVEHNANLESARQELWSLHPNDPTILVMKHRLWRVKGVIQVTRSIGDAYLKRAEFNREPLLPKFRLPEHFTKPILSADPSVTITRLSPQDEFIILASDGLWEHLSNQEAVDIVHNSPRQGIARRLLKAALKEAAKKREMRYSDLTEIHPGVRRHFHDDITVIVVYLNPHPVKTNSWASPLSIRGGYPMHSTS

SEQ ID NO: 69087 - DNA, 1230 bp, Arabidopsis thaliana
  CDS (1)..(1230)
atgttgtttacatttgtgaatgcgtgtttgaattctgaatcctgggtttgtggagttggaattgagtctgacaagaagattgggtttcttcataatatagttataagcactgatttgatgaacgatttgatagctgaagattctagtcctggtagtgatgatacgaatggccgtctcgatggtctcttgtggtacaaagattctgggaaccacatcactggagagttttctatggcagtcgttcaagctaacaaccttcttgaagatcatagccagttagaatctggtcctattagtttgcatgagtctggacctgaggcaacttttgttggtgtttatgatggtcatggaggtcccgaggctgctcggtttgtaaacgataggctcttttataacatcaagaggtacacatcagaacagcgagggatgtcgcctgatgttatcaccagagggtttgtagcaacagaggaggagtttctcggtttagtgcaggagcaatggaagaccaagccacagattgcttctgtgggagcttgttgtttggttggtattgtttgtaatggattgttgtatgttgcaaacgcaggagattctcgggttgtgttagggaaagtcgcaaatccgtttaaagagttgaaagctgttcagttatcaacagagcataatgcaagtatcgaatctgtgagagaggagttacgtttgttgcatcctgatgatccgaatatcgtggtcttgaaacacaaagtttggcgtgttaaagggattatacaggtctcaagatccattggtgacgcataccttaaaagagcggagtttaatcaagaaccgctactacctaagtttagggttccagaacgttttgaaaagccgatcatgagagcggaaccgactataacagttcataagattcatccggaagatcagtttcttatatttgcctcggatggtttatgggagcatctaagcaaccaggaagctgttgatattgtcaattcttgtccacgcaatggtgtggctcggaagttagtgaaagctgcattacaagaagcagcaaagaagagagagatgaggtattctgatttggagaagatagaacgtggcattcggcgacactttcacgacgatattaccgttattgttgtcttcctccacgctacaaacttcgctactcgaactccgatctctgtcaaaggaggtggtctcctctcagcccataatcccgttttatag

SEQ ID NO: 69088 - protein, 409 aa, Arabidopsis thaliana
MLFTFVNACLNSESWVCGVGIESDKKIGFLHNIVISTDLMNDLIAEDSSPGSDDTNGRLDGLLWYKDSGNHITGEFSMAVVQANNLLEDHSQLESGPISLHESGPEATFVGVYDGHGGPEAARFVNDRLFYNIKRYTSEQRGMSPDVITRGFVATEEEFLGLVQEQWKTKPQIASVGACCLVGIVCNGLLYVANAGDSRVVLGKVANPFKELKAVQLSTEHNASIESVREELRLLHPDDPNIVVLKHKVWRVKGIIQVSRSIGDAYLKRAEFNQEPLLPKFRVPERFEKPIMRAEPTITVHKIHPEDQFLIFASDGLWEHLSNQEAVDIVNSCPRNGVARKLVKAALQEAAKKREMRYSDLEKIERGIRRHFHDDITVIVVFLHATNFATRTPISVKGGGLLSAHNPVL

SEQ ID NO: 69089 - DNA, 1194 bp, Fagus sylvatica
  CDS (1)..(1194)
atgttttcggagttgatgaactttttgagggcctgttttcgggccaagtccgatcgacatgttcatacgggttcaaatgcaaggggtcgccaagacgggttattgtggtacaaagacagtggacagcacttcaatggtgaattctcgtatggctgtggtcaagccaacaatttgcttgaggaccagagccagattgagtcgggcagtttgagcttgaacgagaccggcccctatggcacctttattggtgtctacgacgggcatgggggccctgagacgtcgcgctatgtcaataatcacctgtttcagcatctcaagaggtttacatctgagcaacactcgatgtcggtggaagtgatacggaaagcatatcaagcaacagaagaggggttcctgtctcaagttaccaaacaatggccactgaaaccgcagattgcagcggttgggtcatgctgtcttgttggtgttatttgtggtggaaccctttacattgccaaccttggtgattctcgtgctgtcctgggaagagttatgaaggcaacaggggaggttttatccatccaattgtcagcggagcacaatgtagctatagagtctgtcagacaggagttgcattctttgcatcccgaggacccacagattgtagttttgaagcataatgtatggcgtgtaaagggcctgatacagatttctagatctattggtgatgtgtatttaaaaaaggctgagttcaacagggagcccttatatgctaaatttcgccttcgtgaacctttcaaaaagccaatactgagcgccgatccagcaatttcagtgcaccaattgcaaccccatgatcaatttgttatatttgcatctgatgggctttgggagcaccttagcaatcaggaagcagttgatatagttcaaaatcatccacgcagcggaagtgttagaaggttgataaaagttgctttgcaagaagcagcaaagaagagagaaatgagatattcggacttgaagaagattgaccgtggtgtccgccgccatttccacgatgacatcacagtgattgttgtgtttcttgactcaaacctcgtgagcagagctagttcagtcaagtgccctagtatatccgtgagggggggtggaataaacctgcctcacaacacactcgctccttatactacgcagatggaagttggcagcacctaa

SEQ ID NO: 69090 - protein, 397 aa, Fagus sylvatica
MFSELMNFLRACFRAKSDRHVHTGSNARGRQDGLLWYKDSGQHFNGEFSYGCGQANNLLEDQSQIESGSLSLNETGPYGTFIGVYDGHGGPETSRYVNNHLFQHLKRFTSEQHSMSVEVIRKAYQATEEGFLSQVTKQWPLKPQIAAVGSCCLVGVICGGTLYIANLGDSRAVLGRVMKATGEVLSIQLSAEHNVAIESVRQELHSLHPEDPQIVVLKHNVWRVKGLIQISRSIGDVYLKKAEFNREPLYAKFRLREPFKKPILSADPAISVHQLQPHDQFVIFASDGLWEHLSNQEAVDIVQNHPRSGSVRRLIKVALQEAAKKREMRYSDLKKIDRGVRRHFHDDITVIVVFLDSNLVSRASSVKCPSISVRGGGINLPHNTLAPYTTQMEVGST

SEQ ID NO: 69091 - DNA, 1188 bp, Arabidopsis thaliana
  CDS (1)..(1188)
atgaattttctgaatgcctgtctctggccacggtcagatcagcaggctcgttctgcctcagattctggtggccgccaagagggtttgctctggttcagagactccggccagcacgtctttggtgacttctccatggccgtcgttcaagccaacagcttgctagaggaccagagccagctcgagtctggctctcttagctcccacgactctggtccctttggcacctttgttggcgtctacgacggccacggtgggcctgagacatctcgcttcatcaatgatcatatgttccaccacctcaagaggtttactgcagagcaacagtgtatgtcatcagaggtgataaaaaaagcgttccaagccactgaagaaggcttcttatccatagttacaaatcaatttcaaactagacctcagatagccacagtgggatcatgctgtcttgtaagtgtcatctgcgatgggaagctatacgtggccaacgcaggggactcacgggccgttctgggacaagtcatgagggtaacaggtgaagctcatgccactcagctctcagcagagcacaacgcatctatagagtcagtgagacgggaacttcaggccctgcatccggatcatccagatattgtggttctgaaacataacgtctggcgagtaaaaggcatcattcaggtttcaagatccattggtgatgtgtatttgaaaaggtcagagttcaacagggaaccactgtatgcaaaattccggctgaggtcaccgttcagcaagccattactgagtgcagagccggcgatcacggtgcatacactggagccgcacgatcagttcattatatgtgcatcagatggactgtgggaacatatgagcaaccaagaagcagtagacatagtccagaatcatccgcgaaacgggatagcaaagcggctggtgaaagtagcgctacaagaagcggcaaagaagagagagatgagatactcagacctgaaaaagatagacagaggagtgaggagacatttccacgatgacataacagtgattgttgtcttctttgatacaaacctagtgagcagaggaagtatgttgagaggaccagccgtgtcagtgagaggagcgggtgtgaatctacctcacaacaccctggcgccttgcaccacgcccactcaagctgctgctgctggcgcctcctga

SEQ ID NO: 69092 - protein, 395 aa, Arabidopsis thaliana
MNFLNACLWPRSDQQARSASDSGGRQEGLLWFRDSGQHVFGDFSMAVVQANSLLEDQSQLESGSLSSHDSGPFGTFVGVYDGHGGPETSRFINDHMFHHLKRFTAEQQCMSSEVIKKAFQATEEGFLSIVTNQFQTRPQIATVGSCCLVSVICDGKLYVANAGDSRAVLGQVMRVTGEAHATQLSAEHNASIESVRRELQALHPDHPDIVVLKHNVWRVKGIIQVSRSIGDVYLKRSEFNREPLYAKFRLRSPFSKPLLSAEPAITVHTLEPHDQFIICASDGLWEHMSNQEAVDIVQNHPRNGIAKRLVKVALQEAAKKREMRYSDLKKIDRGVRRHFHDDITVIVVFFDTNLVSRGSMLRGPAVSVRGAGVNLPHNTLAPCTTPTQAAAAGAS

SEQ ID NO: 69093 - DNA, 1191 bp, Mesembryanthemum crystallinum
  CDS (1)..(1191)
atgttatcgaggttgatatcattcctaaaggcctgttggcggccatcttcagaccggtctcattcgggttcagatgcagcaggacgtcaagatgggctgctttggtataaggatactggacaacatattaatggtgaattctcgatggctgttgttcaggccaataatctactcgaggatcaaagccagatagagtcaggttgcttgagcttgcttgattctggcccgtatggaacatttgttggggtatatgatggccatggtgggcctgagacatcacgctacatcaatgatcatctttttcatcaccttaagagatttgcagccgaacagcagtccatgtcagttgatgtgataaagaaagcattccaagcgactgaggagggatttttctctgttgttgccaaacaatggcccatgaagccacagattgcagctgttggatcttgctgtttggttggtgtggtatgtaatggtatcctttacatagcaaacctcggtgattcccgtgctgttcttggaagggctgttaaggcaactggcgaggttcttgccatccagttgtctgcagaacataatgctagcattgagtctgtaagacaggagatgcaggcaacacatcctgaagacaaggacattgtagtactgaagcataatgtatggcgggtgaaaggcctgatacagattactagatctatcggtgatgtatatcttaaaaaaactgagtacaacagagagcctttatattctaaatttcgcctccgtgaacctttcaagaagcccatattgagttctgatccggcaatatctgtgcatgaacttcagccacacgatcaggtttgtatatttgcttctgatggtctatgggagcaccttaccaatcaagaagcggttgatcttgtccaaaagagtcctcggaatggaagtgccaaacggctggtaaaagttgcgctgcaggaagcggctaagaaaagagagatgagatattcggatttgaaaaagattgaccgtggggtacgtcggcatttccacgatgacatcaccgtagttgttgtattccttgactcgaatctaatcagcagaggcagctcagtaaggggtccaactctgtccctcagaggcggtggcatccacctccctgcaaaaactctagccccttgtgccacgccaatggaagttggtaacagctga

SEQ ID NO: 69094 - protein, 396 aa, Mesembryanthemum crystallinum
MLSRLISFLKACWRPSSDRSHSGSDAAGRQDGLLWYKDTGQHINGEFSMAVVQANNLLEDQSQIESGCLSLLDSGPYGTFVGVYDGHGGPETSRYINDHLFHHLKRFAAEQQSMSVDVIKKAFQATEEGFFSVVAKQWPMKPQIAAVGSCCLVGVVCNGILYIANLGDSRAVLGRAVKATGEVLAIQLSAEHNASIESVRQEMQATHPEDKDIVVLKHNVWRVKGLIQITRSIGDVYLKKTEYNREPLYSKFRLREPFKKPILSSDPAISVHELQPHDQVCIFASDGLWEHLTNQEAVDLVQKSPRNGSAKRLVKVALQEAAKKREMRYSDLKKIDRGVRRHFHDDITVVVVFLDSNLISRGSSVRGPTLSLRGGGIHLPAKTLAPCATPMEVGNS

SEQ ID NO: 69095 - DNA, 1200 bp, Arabidopsis thaliana; identical to SEQ ID NO: 964
  CDS (1)..(1200)

SEQ ID NO: 69096 - protein, 399 aa, Arabidopsis thaliana; identical to SEQ ID NO: 965

SEQ ID NO: 69097 - DNA, 1131 bp, Oryza sativa
  CDS (1)..(1131)
atggttgggcagacggtcatgcggattgtgcgcccctgcttcaagcccgaccaccagctcgccgtcggcggcaccagggatggattgctctggtacaaggacaccgggaggcacgcttgcggcgacttctctatggccctcgtgcaggcaaacaaccttctcgaggatgccagccaggtcgaagctgcccctcttcttctctcccactcctcctccaccacttttgtcggcatctacgatggccatggtggcccggagactgctcatttcatcgcacaacatttcttccccaatctaaagaaatttgctacggaacagcaaactgtttcagttgatgtcattcgcaaatcctatgctgccacggaggaagggtttctcaatcttgtaaggaagcaatggctcatcaaaccgcagcttgcctccgttggttcctgctgtttggttggcatcatcaatgaaggagttctttatgtagcaaatactggtgattcccgtgctgttctagggagacttgaaaggggtgttattaaggcggttcagctgtcagccgagcataacgcaagcattgagtctgtaagggaggaattaagacagtttcacccagacgatccacgaatcgtggtcctaaagcacaacgtttggcgtgtcaaaggccttattcaggtttccagaacgttaggcgatgcttacctaaaaagtactgaatttaaccgagagcctcttttggcgagattccggctttcagaacccttccacaaaccaattctttctccagaaccatccatagaagtacataaactgtgtacagaagaccaatttgtgatatttgcctcagatgggctatgggagcacctgaccaatcaggaggctgtggatatagttaactgtgcgccaagaaatggtattgcaagaagactaataaaagcggctctgcgagaggcagcaaaaaaaagagaaatgaggtactcagacttgaaaaagattgatcgcggggtcaggagacactttcacgatgatattactgttgtagtactattcctggactctgctctagttggcaagagattctatggtggcccattactttcactgaggggtggtgatggtgcttcaacgcttacacagaaatga

SEQ ID NO: 69098 - protein, 376 aa, Oryza sativa
MVGQTVMRIVRPCFKPDHQLAVGGTRDGLLWYKDTGRHACGDFSMALVQANNLLEDASQVEAAPLLLSHSSSTTFVGIYDGHGGPETAHFIAQHFFPNLKKFATEQQTVSVDVIRKSYAATEEGFLNLVRKQWLIKPQLASVGSCCLVGIINEGVLYVANTGDSRAVLGRLERGVIKAVQLSAEHNASIESVREELRQFHPDDPRIVVLKHNVWRVKGLIQVSRTLGDAYLKSTEFNREPLLARFRLSEPFHKPILSPEPSIEVHKLCTEDQFVIFASDGLWEHLTNQEAVDIVNCAPRNGIARRLIKAALREAAKKREMRYSDLKKIDRGVRRHFHDDITVVVLFLDSALVGKRFYGGPLLSLRGGDGASTLTQK

SEQ ID NO: 69099 - DNA, 1164 bp, Oryza sativa
  CDS (1)..(1164)
atgttctcgtggttgttgaggattgcgtccgcgtgcttgggcccggcccggaggtacgcgcgtacgaggaaggatgaagatggcggcgataatggcggcggcgtcgccgacggcctgctgtggtcgcgggacctggggcgtcacgcggcgggtgagttctcctttgccgtcgtgcaggccaacgaggcgttggaagaccatagccaggtcgagacgggctccgccgccaccttcgtcggcgtctacgacggccacggcggtgccgatgctgctcgcttcatatctgatcacctcttcgcacacctgatacgacttgcccgagaaagtgaaacagtatcggaggaagttgttcgaggggcattttctgctaccgaagaaggtttcttgacacttgttcggagaacgcagtttttaaagcctatgatagctgcagttggatcttgttgtcttgttggtatcatatggagaggggtactatatgtggctaatttaggtgattctagggcagttgttggctatttgggtagaacaaacaagattactgctgagcaaattacaagggatcataatgcttgtaaggaggaagtgaggcaggaacttatttctcgtcatcccgatgattcacaaattgttgttctgaagcatggcgtttggcgcataaaaggcataatccaggtttcaaggactataggtgatgcatatttaaagaggcgtgaatttgctcttgatccatccataactcgcttccgcctttctgagcctcttcgccgacctgttctaacagcagagccatctatctgcacaagagttctttctctgcaagatcaatttgttatttttgcatccgatggtctttgggagcacttaacaaaccaacaagctgttgacatcgtctacaaaaatccacgagcaggaattgcaaagaggctagtaaacacagctttgaaagaagctgcacggaagcgagaaatgaggtttgttgatcttaagaaagtcgaaaaaggggtgcggcgcttcttccatgacgacattacagtcgtcgttgtttacatcgaccatgagttacttcaggagaaaaatgtttctgttcctgaactttcagtccgtgggtttgtcgactcagtaggtccctcgagaatttcaggattcgatgctatttcatga

SEQ ID NO: 69100 - protein, 387 aa, Oryza sativa
MFSWLLRIASACLGPARRYARTRKDEDGGDNGGGVADGLLWSRDLGRHAAGEFSFAVVQANEALEDHSQVETGSAATFVGVYDGHGGADAARFISDHLFAHLIRLARESETVSEEVVRGAFSATEEGFLTLVRRTQFLKPMIAAVGSCCLVGIIWRGVLYVANLGDSRAVVGYLGRTNKITAEQITRDHNACKEEVRQELISRHPDDSQIVVLKHGVWRIKGIIQVSRTIGDAYLKRREFALDPSITRFRLSEPLRRPVLTAEPSICTRVLSLQDQFVIFASDGLWEHLTNQQAVDIVYKNPRAGIAKRLVNTALKEAARKREMRFVDLKKVEKGVRRFFHDDITVVVVYIDHELLQEKNVSVPELSVRGFVDSVGPSRISGFDAIS

SEQ ID NO: 69101 - DNA, 1200 bp, Oryza sativa
  CDS (1)..(1200)
atgctggccgcggtgatggactacttcaggtcctgctggggcccgcgatctccggccggtcaccgggtcaggggctccgacgtcgccggccggcaagacgggctcctgtggtataaggacgccggccagctggtcaccggggagttctccatggctgtggttcaggccaacaacctgctggaggaccagagccaggtggagtccggcgcgctctccatggccgagcccggccctcagggcaccttcatcggcgtctatgatggccacggcggcccggagacggcgcggttcatcaatgaccacatgttccaccatctcaggagatttgcaactgagcacaagtgcatgtcaaccgatgtgattcggaaagctttccaagcaactgaggagggcttcctttctctagtcagtaagcaatggtccttgaagcctcagattgcagcagtaggatcttgctgcctagttggtgttatttgctcagggactctctatgttgcgaaccttggagattcgcgtgctgttcttgggagatttgtcaagtccactggggaagttgtggcaacgcagctatcatcagaacacaacgcgtgctatgaggaagttagacaagaattgcaggcatcacatcctgatgatccacaaattgttgtcctaaaacacaatgtttggcgtgtcaagggcctcatccagatctcaagatctattggcgatgtatatctaaaaagaccagaatataacagagaacctcttcacagcaagtttcgacttcgggaaaccttcaaaaggccgattcttagttctgaacctgcaattgctgtacaccaaatacaaccaaatgatcattttgttatatttgcttctgatggtctatgggagcacctcagtaatcaggaagcagttgaccttgtccaaaataatcctcgtaatgggattgctcgaagactagttaaagtcgcaatgcaagaagcagccaagaagagggagatgagatactcagacctcaagaaaattgatcgtggcgtgaggcgtcatttccacgacgatataaccgtcattgtggtgtttcttgattcgaatgccataagcaaagcaaactggagccgaggtccttctgtttccctgagagggggtggtgtcaccctccctgcaaattcccttgcgcctttctcaactcccacggtgttaagcagcacctattga

SEQ ID NO: 69102 - protein, 399 aa, Oryza sativa
MLAAVMDYFRSCWGPRSPAGHRVRGSDVAGRQDGLLWYKDAGQLVTGEFSMAVVQANNLLEDQSQVESGALSMAEPGPQGTFIGVYDGHGGPETARFINDHMFHHLRRFATEHKCMSTDVIRKAFQATEEGFLSLVSKQWSLKPQIAAVGSCCLVGVICSGTLYVANLGDSRAVLGRFVKSTGEVVATQLSSEHNACYEEVRQELQASHPDDPQIVVLKHNVWRVKGLIQISRSIGDVYLKRPEYNREPLHSKFRLRETFKRPILSSEPAIAVHQIQPNDHFVIFASDGLWEHLSNQEAVDLVQNNPRNGIARRLVKVAMQEAAKKREMRYSDLKKIDRGVRRHFHDDITVIVVFLDSNAISKANWSRGPSVSLRGGGVTLPANSLAPFSTPTVLSSTY

SEQ ID NO: 69103 - DNA, 1179 bp, Oryza sativa
  CDS (1)..(1179)
atgggggcgctgcggcggtggctgccgtgctgctgctgctgctgtcgcggcggcggaggaggtggtggtggtgggagcgtgggggatgggctggtgtgggacgtggccctgaaggcgcacgcgtcgggggactactccgtggccgtggcgcaggcgaacgaggcgctggaggaccaggcgcaggtgttcgtctccccggcggcgacgctcgtcggcgtgtacgacggccacggcggccccgaggcggcgcggttcgtcaacaagcgcctcttctccctcatccaagagttcgcggcgcagagcggcggcatctcggcggaggtgctcgagaaggcgttcggcgagacggaggaggagttcgtggcgtcggtgcagaggtcgtggccgtcgcagccgaggatcctgtccgtcggctcgtgctgcctcgtcggcgccatcgaggacggcacgctctacgtcgccaacctcggcgactcccgcgccgtgctcggccgccgctctgccgccggcgccgcccacggccgcaagggcaagaacagggtggttcccgagcgcctctccagggaccacaacgtcgccgacgaggacgtccgccgcgagctcaaagagctacaccccgacgactcccacatcgtcctcaacacccatggcgtctggcgcatcaaaggaatcatccaggtgtcgaggtcgatcggcgacgtgtacctgaagaagccggagatatgcaagagcaacccgatgctgcagcagacgatctgcccgttcccgctgcggcgaccggtgatgagcgcggtgccgacgatcaagacgaggaagctgaggccaggggaccagttcgtgatcttcgcgtcggacgggctgtgggagcagctcaccgacgaggcggcggtggcgatcgtggccgggagcccgagacggggcgtggcgatgaggctggtcagggcggcgcagctggaggcggcgaggaagaaggacgtgaagtacgagaggatcaggacgatcgagaaggggcagaggaggcacttccacgacgacatcaccgtcgtcgtgctcttcctcgacaagtgccgcggcaaggccggccgcggcgacgagatcgacggcaccgacggccccgtcgacgtcttctccctcagccccgacgaccgggaggacccgaccaggccagtgctccgttga

SEQ ID NO: 69104 - protein, 392 aa, Oryza sativa
MGALRRWLPCCCCCCRGGGGGGGGGSVGDGLVWDVALKAHASGDYSVAVAQANEALEDQAQVFVSPAATLVGVYDGHGGPEAARFVNKRLFSLIQEFAAQSGGISAEVLEKAFGETEEEFVASVQRSWPSQPRILSVGSCCLVGAIEDGTLYVANLGDSRAVLGRRSAAGAAHGRKGKNRVVPERLSRDHNVADEDVRRELKELHPDDSHIVLNTHGVWRIKGIIQVSRSIGDVYLKKPEICKSNPMLQQTICPFPLRRPVMSAVPTIKTRKLRPGDQFVIFASDGLWEQLTDEAAVAIVAGSPRRGVAMRLVRAAQLEAARKKDVKYERIRTIEKGQRRHFHDDITVVVLFLDKCRGKAGRGDEIDGTDGPVDVFSLSPDDREDPTRPVLR

SEQ ID NO: 69105 - DNA, 1161 bp, Oryza sativa
  CDS (1)..(1161)
atgctgggcgcgctccttaggctgctctccgcgtgcggcggggtctggcccacgtcaccggcgccgcccgcgcggtcgtcgtcgtcttcgtcggcggcggccgcggcggaccaggccgctgctgagggcagggatggcctgctgtggtggcgggacctcgcgcggtgccacgccggggagctgtccgtcgccgtcgtgcaggggaaccacgtgctcgaggaccagtgccgcgtcgagtcgggcccgccgcccctcgccgccacctgcatcggcgtcttcgacggccacgccggccccgacgccgcccgcttcgcctgcgaccacctcctccccaacctccgagaggccgcgtccgggccggagggcgtcacggccgacgccatcagggacgcgttcctggccacggaggaaggcttcctcgcggtcgtctcgcggatgtgggaggcgcagccggacatggccaccgtcgggacgtgctgcctcgtcggagtcgtgcaccagaggacgctcttcgtcgccaacctcggggattccagggccgttcttgggaagaaggttggtcgcgctggtcagattaccgccgagcaactgtccagtgagcataacgccaatgaagaggatgtcaggcaggagctcatggctcagcacccagatgatcctcagattgttgctcttaaacatggggtttggagagtcaagggcatcatacaggtgtccagatcattaggcgatgcatatctaaagcatagtcagtataacacggaacagatcaaaccaaagttcaggctccctgaaccattcagcaggcctatattgagtgccaacccatctatcatcgcacgttgccttcaaccaagtgattgcttcatcatatttgcctccgatggtttgtgggaacacctgagtaatcagcaggctgttgagattgtgcacaaccatcaacgagctggaagtgcaagaaggctcataaaggcagctctccatgaagcagcacggaaacgtgagatgcgttattcagaccttatgaagattgacaagaaggttcgcaggcatttccatgacgatatcactgtcatcgtcttattcataaattatgaccaattagctaaaggtcattcacaagggcaatctctatccatcagatgtgctttagatcattga

SEQ ID NO: 69106 - protein, 386 aa, Oryza sativa
MLGALLRLLSACGGVWPTSPAPPARSSSSSSAAAAADQAAAEGRDGLLWWRDLARCHAGELSVAVVQGNHVLEDQCRVESGPPPLAATCIGVFDGHAGPDAARFACDHLLPNLREAASGPEGVTADAIRDAFLATEEGFLAVVSRMWEAQPDMATVGTCCLVGVVHQRTLFVANLGDSRAVLGKKVGRAGQITAEQLSSEHNANEEDVRQELMAQHPDDPQIVALKHGVWRVKGIIQVSRSLGDAYLKHSQYNTEQIKPKFRLPEPFSRPILSANPSIIARCLQPSDCFIIFASDGLWEHLSNQQAVEIVHNHQRAGSARRLIKAALHEAARKREMRYSDLMKIDKKVRRHFHDDITVIVLFINYDQLAKGHSQGQSLSIRCALDH

SEQ ID NO: 69107 - DNA, 1167 bp, Oryza sativa
  CDS (1)..(1167)
atgtggccgtggctggagaggattgcgtccgcgtgctgggaccgggtccggaggtacgcgcttacgaggagggatgaggaagacggcagcggcagcggcggcgacgccgacgacctgctgctgtggtcgcgggacctcgtgcgccacgcggcgggcgagttctccttcgccgtggtgcaggcgaacgacgtgctcgaggaccacagccaggtcgagactggcgccgccgccaccttcatcggcgtctacgacggccacggcggcgcggaggcttcccgattcatctccaaccaccttgccgcgcacctcgtccgtctggctcaagagcgtggaacaatttcggaggatattgttcgaaatgccttttctgctacagaggaaggcttcttgtcacttgtgcgcaggacacatttaataaagccttctattgcctctattgggtcttgctgtctagtaggtatcatatggaaaggaacactctacctggccaatcttggagattctcgggcagttgttggttgtttaaccgggtcaaacaaaattgttgctgagcagctaacaagagaccacaatgcaagcatggaagaagtgaggcaggaacttcgatcccttcatcccgacgattcgcaaattgttgttcttaagaatggtgtatggcgcatcaaaggcataatacaggtttcaaggtctataggtgatgcatacttgaagaagcaagaattcgctcttgatccatctatgacccgtttccacctttctgagcctctacgacggcctgttctaacatcagagccgtctatatatacgagagttcttcattcacaagatagtttctttatcttcgcatcggatggattatgggagcacttgacaaaccagcaagcagttgaaattgtccacaacaatccacgagaaggtattgcaaggaggttagtaaaagcagctttgaaagaagctgcccggaagagggaaatgaagtacaatgatatcaagaaacttgagaaaggagtacgccgcttcttccatgatgacatcacggttgtggttgttttcattgatcatgagctcctacaagatggggatgagtctactcctgaaatttcagttcgcggatttgttgactcaggggggccctcgagcttttcagggttaaatggcatttcttga

SEQ ID NO: 69108 - protein, 388 aa, Oryza sativa
MWPWLERIASACWDRVRRYALTRRDEEDGSGSGGDADDLLLWSRDLVRHAAGEFSFAVVQANDVLEDHSQVETGAAATFIGVYDGHGGAEASRFISNHLAAHLVRLAQERGTISEDIVRNAFSATEEGFLSLVRRTHLIKPSIASIGSCCLVGIIWKGTLYLANLGDSRAVVGCLTGSNKIVAEQLTRDHNASMEEVRQELRSLHPDDSQIVVLKNGVWRIKGIIQVSRSIGDAYLKKQEFALDPSMTRFHLSEPLRRPVLTSEPSIYTRVLHSQDSFFIFASDGLWEHLTNQQAVEIVHNNPREGIARRLVKAALKEAARKREMKYNDIKKLEKGVRRFFHDDITVVVVFIDHELLQDGDESTPEISVRGFVDSGGPSSFSGLNGIS

SEQ ID NO: 69109 - DNA, 1146 bp, Oryza sativa; identical to SEQ ID NO: 832
  CDS (1)..(1146)

SEQ ID NO: 69110 - protein, 381 aa, Oryza sativa; identical to SEQ ID NO: 833

SEQ ID NO: 69111 - DNA, 1179 bp, Oryza sativa
  CDS (1)..(1179)
atgatagtgacattgatgaacttgttacgggcatgctggagaccatcatccaaccagcatgcccgggcaggctcagatgttgccggcaggcaggatggacttctatggtacaaggacactggtcagcatgtaaatggggaattctctatggctgtggtccaggccaacaacttacttgaggatcagtgccagattgaatcgggtccattgagctttcttgactctggtccatacggaactttcgtcggggtttatgatggacatggtggcccagagacggcttgctatatcaacgatcacctattccaccatctgaaaaggtttgcatctgaacagaattcgatatctgctgatgtgctgaagaaagcatatgaagctacagaagatgggttcttctctgttgtcaccaagcaatggcctgtgaagcctcaaatagctgctgttggctcgtgctgcctggttggtgtaatctgtggtggcattctttatgttgctaatgttggggattcccgtgttgttttaggcagacatgtcaaagccacgggagaagttctggctgtccaactctcagcagagcataacgtaagcattgagtcagtgagaaaagaattgcagtcaatgcacccggaagataggcatattgttgttctcaagcacaacgtttggcgtgtaaaaggtctaattcaggtctgcagatcaattggtgatgcctatctcaaaagatcagagttcaaccgggaacctttgtatgcaaaattccgcctccgggaaccttttcacaagcccatactaagttcagaaccatcgattagtgtgcaacccctacaaccacatgatcaatttctcatatttgcatctgatggtctatgggagcacttaaccaatcaagaggccgttgacattgttcacagtagccctcgcaatggaagtgctaggaggctcataaaggcagctttgcaagaagcagccaagaaaagagaaatgaggtactcagatctcaagaagattgaccgtggtgttcgccgccacttccatgatgacataaccgtcatagtagtcttcctcgactccagccttgtcagcagggcgagcacctacaggggcccttctgtttctttaagaggcggcggcgtgaatctgcgcagcaacacacttgcaccttatgcatctcaaatgtga

SEQ ID NO: 69112 - protein, 392 aa, Oryza sativa
MIVTLMNLLRACWRPSSNQHARAGSDVAGRQDGLLWYKDTGQHVNGEFSMAVVQANNLLEDQCQIESGPLSFLDSGPYGTFVGVYDGHGGPETACYINDHLFHHLKRFASEQNSISADVLKKAYEATEDGFFSVVTKQWPVKPQIAAVGSCCLVGVICGGILYVANVGDSRVVLGRHVKATGEVLAVQLSAEHNVSIESVRKELQSMHPEDRHIVVLKHNVWRVKGLIQVCRSIGDAYLKRSEFNREPLYAKFRLREPFHKPILSSEPSISVQPLQPHDQFLIFASDGLWEHLTNQEAVDIVHSSPRNGSARRLIKAALQEAAKKREMRYSDLKKIDRGVRRHFHDDITVIVVFLDSSLVSRASTYRGPSVSLRGGGVNLRSNTLAPYASQM

SEQ ID NO: 69113 - DNA, 1134 bp, Oryza sativa
  CDS (1)..(1134)
atgatggcgaggtggtgcgtggggtggccggcggcggcgaggggtggtcgggatgagctgacgtggcaggcggagctgacggcgcacgcggcgggggagttctccatggcggcggcgcaggccaacgcggtgatggaggaccaggcgcaggtcatggcgtcgcccggcgccacgctcgtcggcgtctatgatggccatggcggccccgacgcctcccgcttcctccgctcccgcctattccctctcatccatgagttcgcggcggagcgcggcggcgcggtggacgccgacgtgatccggaaggcgttcctggcggccgacgaggagtacctccagctgctgcggtggtcgctgccgaacatgtcccgcgcggccgcctcgggctcctgctgcctcctgggcgccatctccggcgacacgctctacgtcgccaacgccggcgactcccgcgctgtcctcggccgccgcgcggcggccggccagaccgtcgccgagcggctctccaccgagcacaacgtggcctcggaggaggtccggagggagctcgccgcgctccaccccgacgacggcgaggtcgtggtccacgcccgcggcgcgtggagggtgaaggggatcatccaggtggcgcgcgccatcggcgacgtgtacctcaagacgccggagttcaagcgcgacccggcggtgcagcggctatgcagcgccgccgccgccgtcgagctggcgcggccggtggtcaccgccgagccgtccatccacgcccggaagctcaaggcgggcgtcgacctgttcgtcgtgttcgcctccgacggcctatgggagcacctctccgacgaggcggcggtgcagctggtgtccaagagctcgacgaggagaggcgtggcggcgaggctggtgcaggcagcgctcggggaggcggcgaggaagcgggaggtgaggcgcggcgacctgcggcggatcgagcgaggggtgaggcgccacttccacgacgacatcaccgccgtcgtcgtcttcctcgacctcgacgacgacggcggccgccgcgcgcgccgccgtggcagggtcgtcgactccagcagcagcagctgcagcaacacgccgctcgacgtctacagcttgtacaactccaccgcttga

SEQ ID NO: 69114 - protein, 377 aa, Oryza sativa
MMARWCVGWPAAARGGRDELTWQAELTAHAAGEFSMAAAQANAVMEDQAQVMASPGATLVGVYDGHGGPDASRFLRSRLFPLIHEFAAERGGAVDADVIRKAFLAADEEYLQLLRWSLPNMSRAAASGSCCLLGAISGDTLYVANAGDSRAVLGRRAAAGQTVAERLSTEHNVASEEVRRELAALHPDDGEVVVHARGAWRVKGIIQVARAIGDVYLKTPEFKRDPAVQRLCSAAAAVELARPVVTAEPSIHARKLKAGVDLFVVFASDGLWEHLSDEAAVQLVSKSSTRRGVAARLVQAALGEAARKREVRRGDLRRIERGVRRHFHDDITAVVVFLDLDDDGGRRARRRGRVVDSSSSSCSNTPLDVYSLYNSTA

SEQ ID NO: 69115 - DNA, 1182 bp, Oryza sativa; identical to SEQ ID NO: 970
  CDS (1)..(1182)

SEQ ID NO: 69116 - protein, 393 aa, Oryza sativa; identical to SEQ ID NO: 971

SEQ ID NO: 69117 - DNA, 1179 bp, Oryza sativa
  CDS (1)..(1179)
atgctgctgcggtggctggcgcggccggcggagaggtgcctggggcgaggcggcggcggcggcggagggggaggaggggatgggttgctgtggcacgcggagctgaagccgcacgcgagcggggagtactccatcgcggtggcgcaggcgaacgcggagctggaggaccaggggcaggtggtgacctcgccggcggcgaccttcgtcggcgtctacgacggccacggtggccccgaggcgtcccgcttcatctcctcccgcctcttcccccacctccacaggtttgcatctgagcaaggtggcatgtccaccgatgcaatcaagagggcattccatgccacggaggaggagttcttgcacatggtcaagcgatcctggctcaagcagccacagattgcctcggttggttcatgctgcctcgtcggagcaatcaccgataacgttctatatgtcgccaatttaggggactcgagggccgtccttggccgtagggggcctgatggtcgggaggtagtggctgagagactatccaatgaccacaatgttgcagaggaggaggtcagaaaggagctcactgagcagcatcctgatgattcacgtatagtcatctatacccgaggagtttggaggattaagggcatcattcaggtttccagatcaattggagatgtatacctgaagaagcctgaatttgctagagaccctatattccggcaatatgtttgttccattccattgaagcgacctgtcatgacggctgaaccatcgatcaaagaacatcagttgaggcagcaagacttattcttgatatttgcatcggatggtctgtgggagcagctaactgataaagcagcggttgatatcgtcttcaagaatcccagagcagggatagcgaagcgattggtgcgagcagcgctgactgaagcggcgaggaaacgagagatgagatacactgatatcaaacatatagagagaggcagcaggcggaatttccacgacgatatcacagtcgttgtggtctatcttgaccatcacaagcatggtgtgcggcctaatttgggtaacagaaacagtttccggttcaccaatgcgccggttgacatcttctccggcagctcagaagaggtggatcaccaccctctcaggctgaatcttgcaatggatggtgctgtgggttag

SEQ ID NO: 69118 - protein, 392 aa, Oryza sativa
MLLRWLARPAERCLGRGGGGGGGGGGDGLLWHAELKPHASGEYSIAVAQANAELEDQGQVVTSPAATFVGVYDGHGGPEASRFISSRLFPHLHRFASEQGGMSTDAIKRAFHATEEEFLHMVKRSWLKQPQIASVGSCCLVGAITDNVLYVANLGDSRAVLGRRGPDGREVVAERLSNDHNVAEEEVRKELTEQHPDDSRIVIYTRGVWRIKGIIQVSRSIGDVYLKKPEFARDPIFRQYVCSIPLKRPVMTAEPSIKEHQLRQQDLFLIFASDGLWEQLTDKAAVDIVFKNPRAGIAKRLVRAALTEAARKREMRYTDIKHIERGSRRNFHDDITVVVVYLDHHKHGVRPNLGNRNSFRFTNAPVDIFSGSSEEVDHHPLRLNLAMDGAVG

SEQ ID NO: 69119 - DNA, 1269 bp, Brassica napus; identical to SEQ ID NO: 972
  CDS (1)..(1269)

SEQ ID NO: 69120 - protein, 422 aa, Brassica napus; identical to SEQ ID NO: 973

SEQ ID NO: 69121 - DNA, 1125 bp, Brassica napus; identical to SEQ ID NO: 17539
  CDS (1)..(1125)

SEQ ID NO: 69122 - protein, 374 aa, Brassica napus; identical to SEQ ID NO: 17540

SEQ ID NO: 69123 - DNA, 1206 bp, Brassica napus; identical to SEQ ID NO: 1444
  CDS (1)..(1206)

SEQ ID NO: 69124 - protein, 401 aa, Brassica napus; identical to SEQ ID NO: 1445

SEQ ID NO: 69125 - DNA, 1182 bp, Brassica napus; identical to SEQ ID NO: 1446
  CDS (1)..(1182)

SEQ ID NO: 69126 - protein, 393 aa, Brassica napus; identical to SEQ ID NO: 1447

SEQ ID NO: 69127 - DNA, 1194 bp, Glycine max
  CDS (1)..(1194)
atgttatcggggttgatgaacttattgagggcctgctttcggccgggttcggatggatttacacgtgcaggttcggatgccggtggtagacaggatggactattgtggtacaaggactcggggcagcacttgaatggggatttttcaatggctgtaatccaagccaataacttgctggaagatcagagccagattgaatcaggctgtttgagctccaatgaatccggcccttatggtaccttcatcggtgtctatgatggccatggagggcccgagacatcacggtttatcaatgatcacctatttcaccatctcaagagattcacttcagagcaacaatcaatgtcggtggatgtaattcgcaaggcactccaagcaacagaagaggggtttatttcggtggttgccagacagttttctctgtcaccacaaattgcggctgtcgggtcatgctgtcttgttggtgttatttgtaatggaaccctttacatagcaaaccttggggattcccgggcagttttgggaagagcagtcaaggcaactggcgaggttttagccatgcaattatcagcagagcacaatgcatcgatagagactgtaagacaggagctgcatgcttcacatcctgatgacccaaatattgtggttttaaagcataatgtatggcgtgtgaagggccttattcaagtttctagatctattggtgatgtatatttgaaaaaggccgagttcaatcgagaaccactatatgctaagtttcgacttcgtgaaccatacaagatgccaatactaagctcagaaccatcaatatcagtgcatcatttgcagccacatgatcaatttattatattcgcatctgatggactctgggagcaccttagcaatcaagaagcagttgatatagttcaaaacagtccccgcagtggaagcgctaggaggctggtaaaagctgcgcttcaagaagctgcaaagaagagagaaatgagatattcagatttaaagaaaattgatcgcggagttcgtcgtcatttccatgatgataccacggtgattgttgtgtatcttgactcaaatctcgtgagtagggaaagcactgtgaagttccctggcatttctgttagagggggtggtattaacctgcctcataacacactggcaccttgtaccacaccaacagagattggtggtaactga

SEQ ID NO: 69128 - protein, 397 aa, Glycine max
MLSGLMNLLRACFRPGSDGFTRAGSDAGGRQDGLLWYKDSGQHLNGDFSMAVIQANNLLEDQSQIESGCLSSNESGPYGTFIGVYDGHGGPETSRFINDHLFHHLKRFTSEQQSMSVDVIRKALQATEEGFISVVARQFSLSPQIAAVGSCCLVGVICNGTLYIANLGDSRAVLGRAVKATGEVLAMQLSAEHNASIETVRQELHASHPDDPNIVVLKHNVWRVKGLIQVSRSIGDVYLKKAEFNREPLYAKFRLREPYKMPILSSEPSISVHHLQPHDQFIIFASDGLWEHLSNQEAVDIVQNSPRSGSARRLVKAALQEAAKKREMRYSDLKKIDRGVRRHFHDDTTVIVVYLDSNLVSRESTVKFPGISVRGGGINLPHNTLAPCTTPTEIGGN

SEQ ID NO: 69129 - DNA, 1176 bp, Brassica napus
  CDS (1)..(1176)
atgttctcctggttagcaaggatggctctgttttgtctgcggccgatgcgtcggtacggtcgtatgaacagagatgacgatgaagaagaagatgatcacgaagactcctctggaggtgactcgctgctttggtctagggagcttgagaggcattcattcggtgatttctccatggctgtcgtgcaagctaacgaggttgttgaggatcatagccaagtcgagacagggaagggagctgtctttgttggtgtctatgatggtcatggtggtcctgaggcttctagatacatctctgaccatctctttggacatctgatgagattgtcgaaagaacatggcgccattacagaggagactctaagagctgcatattccgcaaccgaggaaggtttcctcacgctcgtgagaagaacttgctcgttaaaaccgttaatagcagccgttggatcttgctgtctggtgggagttatctggaaaggaaccttgcttatcgccaacgtcggggactcccgcgctgttcttggttccatgagtagtactaatagatcaaacaagattgcagctgagcagctgactagtgatcacaatgccgctttggaagaagtaagacaagagctcaagtcgttgcatccggatgatccccacatcgttgtcctcaaacacggcgtgtggcgcatcaaaggcatcatccaagtgtctagatcaataggggacgcgtacttgaagcgccccgagttctcactcgatccttcgtttccaaagtttcatctcaccgaacggctgcaaagaccggtcctatcggcagagccgtgcgtgtacacgagagtcttgcaaacgagcgataagtttgtgatattcgcgtcggatgggctctgggagcagatgagcaaccagcaagcagtggagatagtgaacaaacatcctcgtcccgggatagcgaggaggctggtgaggagagcgatgagcatagctgcgaagaagagggagatgaggtatgatgatttgaagaaagtggagaggggagtgaggagattctttcatgatgatataacggtggttgtggtgtttgtggacagtgagcttcttatggtggagaaagctactgttcctgagctctccgttaaaggtttctctcgtaccgttggaccttccaagttcagtatcttcttttcttaa

SEQ ID NO: 69130 - protein, 391 aa, Brassica napus
MFSWLARMALFCLRPMRRYGRMNRDDDEEEDDHEDSSGGDSLLWSRELERHSFGDFSMAVVQANEVVEDHSQVETGKGAVFVGVYDGHGGPEASRYISDHLFGHLMRLSKEHGAITEETLRAAYSATEEGFLTLVRRTCSLKPLIAAVGSCCLVGVIWKGTLLIANVGDSRAVLGSMSSTNRSNKIAAEQLTSDHNAALEEVRQELKSLHPDDPHIVVLKHGVWRIKGIIQVSRSIGDAYLKRPEFSLDPSFPKFHLTERLQRPVLSAEPCVYTRVLQTSDKFVIFASDGLWEQMSNQQAVEIVNKHPRPGIARRLVRRAMSIAAKKREMRYDDLKKVERGVRRFFHDDITVVVVFVDSELLMVEKATVPELSVKGFSRTVGPSKFSIFFS

SEQ ID NO: 69131 - DNA, 1134 bp, Brassica napus
  CDS (1)..(1134)
atgttagctacgttaatgaaactattgagtgcttgtctctggccttcttcctcctctgattcttcagctgggagacaagatgggttgctctggtacaaagactctggtcagcacctacttggtgagttctctatggcggttgttcaggccaacaatctccttgaggatcagagccaacttgagtctggccctctgagtactcttgattctggtccttatggaacttttgttggagtatatgacggtcacggcggccctgagacctcacgctttgtcaacgatcatctctttcagcatttaaagagatttgcagcagaggaagcctgtctgtcgatggatgtaattagaaaggcttacgaggcgactgaagaagggtttctaggggttgtgacaaagcagtggccggtgaagccacagattgcagctgttgggtcttgctgcttggtcggtgtcatatgcggagggatgctctacatcgctaacgttggggattcccgtgcagttcttgggagggctgtgaaggcgacaggtgaggttattgcgcttcagctctcagcggaacataacgtgagcatagagtctgttagacaggaaatgcactccttacatccagatgactcgcatattgttgtgttaaagcacaatgtgtggcgtgttaagggacttattcagatatcaagatccataggcgacgtgtatcttaagaaggcggagttcaacagggaaccactctacacaaagtatagactccgcgagccgatgaagaggccaatcttgagtggggaaccgtcgataacagagcatgagatccaaccacatgatcagtttctgatatttgcttcagacgggctatgggaacagatgagcaaccaagaagctgttgacatcgttcagaaccaccctcgaaacgggatagcacgtagactggtgaagatggcactgcaagctgcagcaaagaagagagaaatgagatatactgatctgaagaagatagagagaggggttaggaggcatttccacgatgacatcactgtcgtggtcatcttccttgacaccaatgtgatgagctctgccaaaggaggaccctctgtttctatcagaggcggcggtatgactttccccaagaaactctaa

SEQ ID NO: 69132 - protein, 377 aa, Brassica napus
MLATLMKLLSACLWPSSSSDSSAGRQDGLLWYKDSGQHLLGEFSMAVVQANNLLEDQSQLESGPLSTLDSGPYGTFVGVYDGHGGPETSRFVNDHLFQHLKRFAAEEACLSMDVIRKAYEATEEGFLGVVTKQWPVKPQIAAVGSCCLVGVICGGMLYIANVGDSRAVLGRAVKATGEVIALQLSAEHNVSIESVRQEMHSLHPDDSHIVVLKHNVWRVKGLIQISRSIGDVYLKKAEFNREPLYTKYRLREPMKRPILSGEPSITEHEIQPHDQFLIFASDGLWEQMSNQEAVDIVQNHPRNGIARRLVKMALQAAAKKREMRYTDLKKIERGVRRHFHDDITVVVIFLDTNVMSSAKGGPSVSIRGGGMTFPKKL

SEQ ID NO: 69133 - DNA, 1236 bp, Brassica napus; identical to SEQ ID NO: 974
  CDS (1)..(1236)

SEQ ID NO: 69134 - protein, 411 aa, Brassica napus; identical to SEQ ID NO: 975

SEQ ID NO: 69135 - DNA, 1269 bp, Brassica napus; identical to SEQ ID NO: 68939
  CDS (1)..(1269)

SEQ ID NO: 69136 - protein, 422 aa, Brassica napus; identical to SEQ ID NO: 68940

SEQ ID NO: 69137 - DNA, 1125 bp, Glycine max
  CDS (1)..(1125)
atgttccatgcattgatgagccttatcgcgcgctgttggaagccgttcgggcacggtgacgacgccgctaatgccgccgccgccgccggaagagaatgcaaggacggcctcctctggttccgcgacatcggaaagttcgccgccggcgatttctccatggccgtcgtccaggccaaccaggtcctcgaggaccagagccagatcgagtccggcgccttcggctccttcgtcggcgtctacgacggccacggcggccccgattgctcccgctatgtctgcgacaacttgttccgcaatctccaagcgatattggctgagtcacagagtgttgtgacatctgaggccattcaacaggcgttccggcggactgaggaggggttcacggcgcttgtttcggagctgtggagctcccggccgcagattgcgactactgggacgtgttgtttggttggggttatttgccggcagacgctctttgtggcgagtcttggagattcccgtgctgtgttgggtaggagagtcggcaacaccggtgggatggccgcgattcagttgtctacggagcacaatgcgaattttgaggctatcaggcaggagcttaaggaattgcacccgaatgacccccagattgttgtcctcaaacatggagtgtggagagtaaagggaattattcaggtttctagatctataggtgacgtatatatgaaacatgcgcagtttaaccgcgaacccattaatgcaaaattcagactccccgaaccaatggacatgcctttcttgtctgctaatccaactattctttctcatactctccaaccaaatgattccttccttatatttgcatcagatggtttatgggagcacttgagtaatgatcaagcagtggatattgttcacagcagtccacgcgcgggtagtgccaagagacttgtcaaggctgccctacacgaagcagcaagaaagcgtgaaatgcgatattcagacctttacaagattgacaagaaggttcgtcgccattttcacgacgatataactgttattgttttattcttaaaccacgaccttatatccagaggcgcagttctaaatacgccactcacaattcgaagtgctctcgatcactga

SEQ ID NO: 69138 - protein, 374 aa, Glycine max
MFHALMSLIARCWKPFGHGDDAANAAAAAGRECKDGLLWFRDIGKFAAGDFSMAVVQANQVLEDQSQIESGAFGSFVGVYDGHGGPDCSRYVCDNLFRNLQAILAESQSVVTSEAIQQAFRRTEEGFTALVSELWSSRPQIATTGTCCLVGVICRQTLFVASLGDSRAVLGRRVGNTGGMAAIQLSTEHNANFEAIRQELKELHPNDPQIVVLKHGVWRVKGIIQVSRSIGDVYMKHAQFNREPINAKFRLPEPMDMPFLSANPTILSHTLQPNDSFLIFASDGLWEHLSNDQAVDIVHSSPRAGSAKRLVKAALHEAARKREMRYSDLYKIDKKVRRHFHDDITVIVLFLNHDLISRGAVLNTPLTIRSALDH

SEQ ID NO: 69139 - DNA, 1164 bp, Zea mays
  CDS (1)..(1164)
atgtggtcgtggttgacgaagattgcgtccgcgtgcttgggcccggtccggaggtgcgcgcgtacgaggaaggatgaggacgacagcgataatggccgcggcgtcgccgacgacctgctgtggtcgcgggacctcgggcgccacgcggcgggtcagttctcgtttgccgtcgtgcaggccaacgaggcgttggaggaccacagccaagtggagacaggctctgccgcaactttcgtaggcgtctacgacggtcatggcggcgctgaggctgcccgcttcatatctgaccacctcttcgcacacctcattcgacttgctcaggaaaatggaacaatatctgaggatgttgttcggagtgcgttttctgctacggaggaaggcttcttgacactcgtgcggagaacacgttttataaagcctttgattgctgcggttggatcctgctgtctagttggtgtcatatggagaggaacactatatgtggctaatctaggcgattccagggctgttattggcgttctaggtagatcaaacaagatcgtggctgagccactcacaagagatcataatgcaagtagggaggaggtcaggcaggagcttatatcccgtcatccagatgattctcaaattgtggttctcaagcatggtgtttggcgcatcaagggcataattcaggtttcaagaacaattggagatgcttacttgaagaggcgggaatttgctcttgatccatctatcactcgtttccgcctttcggagcctctccgccagcctgttctcacagcagagccatctatctatacaagggtgcttaacccacaagataaatttattatttttgcatctgatggtctttgggagcacttgacaaatcaacaggccgttgaaattgtccacagcaatccacgatcaggaattgcaaagaggctggtaagggcagcgttgaaacaagctgcacggaagagggaaatgaggtatgatgacctcaggaaagttgagaagggaattcgccgcttcttccacgatgacattacagtagttgttgtttacatagatcacggattactgcaagagagggatacttccgtgccagagctctcagtccgtggctttgttgactccgttggcccctcaaatttctcagggataaccgccatatcatga

SEQ ID NO: 69140 - protein, 387 aa, Zea mays
MWSWLTKIASACLGPVRRCARTRKDEDDSDNGRGVADDLLWSRDLGRHAAGQFSFAVVQANEALEDHSQVETGSAATFVGVYDGHGGAEAARFISDHLFAHLIRLAQENGTISEDVVRSAFSATEEGFLTLVRRTRFIKPLIAAVGSCCLVGVIWRGTLYVANLGDSRAVIGVLGRSNKIVAEPLTRDHNASREEVRQELISRHPDDSQIVVLKHGVWRIKGIIQVSRTIGDAYLKRREFALDPSITRFRLSEPLRQPVLTAEPSIYTRVLNPQDKFIIFASDGLWEHLTNQQAVEIVHSNPRSGIAKRLVRAALKQAARKREMRYDDLRKVEKGIRRFFHDDITVVVVYIDHGLLQERDTSVPELSVRGFVDSVGPSNFSGITAIS

SEQ ID NO: 69141 - DNA, 1194 bp, Glycine max
  CDS (1)..(1194)
atgttatcggggttgatgaacttattgagggcctgctttcggccgggttcagatggatttacacttgcaggttcggatgctggaggtagacaggatggactgttgtggtacaaggactcggggcagcacttgagtggtgaattttcaatggctgtaatccaagccaataacttgctggaagatcagagccagattgaatcaggctgtttgagctccaatgagtctggcccttacggtaccttcgtcggtatctatgatggccatggagggcccgagacatcgcggtttatcaatgatcacctatttcaccatctcaagagatttacttcagagcaacaatcaatgtcggtggatgtaattcgcaaggcactccaagcaacagaagaggggtttatttcagtggttgccagacagttttctctgtcaccacaaattgcggctgttgggtcatgctgtcttgttggtgttatttgtaatggaaccctttacatagcaaaccttggggattcccgggctgttttgggaagagcagtcaaggcaactggcgaggttttagccatgcaattatcagcagagcacaatgcatcgatagagtctgtaagacaggagctgcatgcttcgcatcctgatgacccaaatattgtggttttaaagcataatgtatggcgtgtgaagggtcttattcaagtttctagatctattggtgatgtatatttgaaaaaggccgagttcaatagagaaccactatatgctaagtttcgacttcgtgaaccatacaagatgccaatactaagctcagaaccatcaatatcagtgcatcatttgcagccacatgatcaatttattatatttgcatctgatggactctgggagcacctcagcaatcaagaagcagttgatatagttcaaaacagtccccgcagtggaagcgctaggaggctggtaaaagctgcgcttcaagaagctgcaaagaagagagaaatgagatattcagatttaaagaaaattgatcgcggagttcgtcgtcatttccatgatgataccacggtgattgttgtgtatcttgactcaaatctcgtgagtagggccagcactgtgaagttccctggcatttctgttagagggggtggtattaacctgcctcataacacactggcaccttgtaccacaccaacagagattggtggtacctga

SEQ ID NO: 69142 - protein, 397 aa, Glycine max
MLSGLMNLLRACFRPGSDGFTLAGSDAGGRQDGLLWYKDSGQHLSGEFSMAVIQANNLLEDQSQIESGCLSSNESGPYGTFVGIYDGHGGPETSRFINDHLFHHLKRFTSEQQSMSVDVIRKALQATEEGFISVVARQFSLSPQIAAVGSCCLVGVICNGTLYIANLGDSRAVLGRAVKATGEVLAMQLSAEHNASIESVRQELHASHPDDPNIVVLKHNVWRVKGLIQVSRSIGDVYLKKAEFNREPLYAKFRLREPYKMPILSSEPSISVHHLQPHDQFIIFASDGLWEHLSNQEAVDIVQNSPRSGSARRLVKAALQEAAKKREMRYSDLKKIDRGVRRHFHDDTTVIVVYLDSNLVSRASTVKFPGISVRGGGINLPHNTLAPCTTPTEIGGT

SEQ ID NO: 69143 - DNA, 852 bp, Linum usitatissimum; identical to SEQ ID NO: 1464
  CDS (1)..(852)

SEQ ID NO: 69144 - protein, 283 aa, Linum usitatissimum; identical to SEQ ID NO: 1465

SEQ ID NO: 69145 - DNA, 1185 bp, Zea mays
  CDS (1)..(1185)
atgctagtgacattgatgaacttgttacgggcgtgctggcgaccgtcatcgaaccggcatgcccgaacaggctcagatgttaccggtaggcaggatggacttctatggtacaaggacgccgggcagcatgtcaacggggagttttccatggctgttgttcaggccaataacttacttgaggaccagtgtcagattgagtcgggcccactgagttttctagattccggaccatatggcacttttgttggcgtttacgatggacatggtggtccagagacggcctgctatatcaatgatcatctcttccagaatctgaaaaggtttgcatctgagcagaatacaatgtctgctgatgtactgaagaaggcgtatgaagctacagaagatggattcttttctgttgttaccaaacaatggcctgtaaagcctcagatagcagctgtcggctcatgctgcctggtcggtgtaatttgtggtggcatgctttatgttgccaatgttggggattcccgtgttgttttaggaagacatgttaaggctactggagaagttttggctgtccaactgtcagcagagcataatgtaagtattgagtcagtgagaaaagaactgcagtcaatgcacccagaagataggcacattgttgttctcaagcacaatgtttggcgtgtaaaaggactaattcaggtttgtagatcaatcggtgatgcttatctcaagaagcaagagttcaatagggaacccctatatgtgaaatttcggcttcgtgaaccttttcacaagccgatactaagttcagaaccatcgatcaatgtgcaaccactacaaccacacgaccagtttctcatatttgcatctgatggactttgggagcacttaaccaaccaagaagctgttgatattgttcacagtagcccccgcagtggctgtgctaggaggctgataagagcggcgctgcaagtggcagccaagaaaagggagatgaggtactcagacctcaagaagatcgaccgcggtgttcgccgccacttccacgacgacataacagtcatagtagtgttccttgattccagcctcgtgagcaaggcgagcacgcaccgaggccccactctttccctgcgaggcggcggtgccagcgctggtctgcgcagcaacacgcttgcaccaacgtcaatgtggctatga

SEQ ID NO: 69146 - protein, 394 aa, Zea mays
MLVTLMNLLRACWRPSSNRHARTGSDVTGRQDGLLWYKDAGQHVNGEFSMAVVQANNLLEDQCQIESGPLSFLDSGPYGTFVGVYDGHGGPETACYINDHLFQNLKRFASEQNTMSADVLKKAYEATEDGFFSVVTKQWPVKPQIAAVGSCCLVGVICGGMLYVANVGDSRVVLGRHVKATGEVLAVQLSAEHNVSIESVRKELQSMHPEDRHIVVLKHNVWRVKGLIQVCRSIGDAYLKKQEFNREPLYVKFRLREPFHKPILSSEPSINVQPLQPHDQFLIFASDGLWEHLTNQEAVDIVHSSPRSGCARRLIRAALQVAAKKREMRYSDLKKIDRGVRRHFHDDITVIVVFLDSSLVSKASTHRGPTLSLRGGGASAGLRSNTLAPTSMWL

SEQ ID NO: 69147 - DNA, 1200 bp, Zea mays
  CDS (1)..(1200)
atgctggccgcggtgatggactacttcagcacctgctggggcccgcggtctcgtgcggggcaccggggcaagggctccgacgccgccggccggcaggacggcctcctctggtacaaggacgccgggcagctcgtcaccggggggttctccatggccgtggtgcaggccaaccagctgcttgaggaccagagccaggtggagtccggatcgctctccctggctgactacggcccgcagggcaccttcgtcggcgtctatgatggccatggcggcccggagacgtcccggttcatcaatgaccacctcttcaaccatctcaggagattcgcaactgagcacaagtccatgtcagcagacgtgatccggaaagctttccaagaaactgaggagggctttctttctctagtcatcaaggaatggtctttcaagcctcagattgcatcagttggctcctgttgccttgttggtgtaatctgtgctgggactctctatgttgcaaacctgggcgactcgcgtgcagttcttggaaggcttgtgaaagcaactggagaggttctggccactcagttgtcagcggagcacaatgcatgctatgaagaagttagacaagagctgcagtcatcacatcctgatgatccacgtattgtggttctcaaacataacgtttggcgagtgaagggtctcatccagatctcaagatctatcggagatgtatatctaaagaaaccggagtataacagagaacctcttcacagcaagtttcggcttcgagaaaccttccagaagccgattcttagttctgaacctcaaattactgaacaccgaatacagccaaacgatcagtttgttatatttgcttccgatggtctatgggagcacctcagcaatcaggaagctgttgaccttgtccaaagtagtccccgtaatggaatcgctcggagactagtgaaagccgcgatgcaagaagctgccaagaagagggagatgagatactcagacctcaagaagatcgaccgtggcgtgaggaggcatttccacgacgatataaccgtcgtcgtggtgttcctcgactcggatgccatgagcaaagctagctggagcaagagcccctcgttttctctccgagggggcggcgtcacccttcccgccaagtccctcgcacccttctcggctccggcacagttgaacggcacccactga

SEQ ID NO: 69148 - protein, 399 aa, Zea mays
MLAAVMDYFSTCWGPRSRAGHRGKGSDAAGRQDGLLWYKDAGQLVTGGFSMAVVQANQLLEDQSQVESGSLSLADYGPQGTFVGVYDGHGGPETSRFINDHLFNHLRRFATEHKSMSADVIRKAFQETEEGFLSLVIKEWSFKPQIASVGSCCLVGVICAGTLYVANLGDSRAVLGRLVKATGEVLATQLSAEHNACYEEVRQELQSSHPDDPRIVVLKHNVWRVKGLIQISRSIGDVYLKKPEYNREPLHSKFRLRETFQKPILSSEPQITEHRIQPNDQFVIFASDGLWEHLSNQEAVDLVQSSPRNGIARRLVKAAMQEAAKKREMRYSDLKKIDRGVRRHFHDDITVVVVFLDSDAMSKASWSKSPSFSLRGGGVTLPAKSLAPFSAPAQLNGTH

SEQ ID NO: 69149 - DNA, 1200 bp, Zea mays
  CDS (1)..(1200)
atgctggccgcggtgatggactacttcagctcctgctggggcccgcgatcgggcgccgggcaccggggcaagggctccgacgccgccggccggcaggacggtctcctctggtacaaggacgccggccagctcgtcactggggagttctccatggccgtggtgcaggccaaccagctcctcgaggaccagagccaagtagagtccggatcgctctccctggctgacccgggcccacagggcaccttcgtcggcgtctatgatggccatggcggcccggagacgtcccggttcatcaatgaccacctcttcaaccatctcagaaggtttgcaactgagcacaagtttatgtcagcggacgtgatccggaaagctttccaagcaactgaggagggctttctttctctagtcagcaaggaatggtctttgaagcctcagattgcttcagtgggctcctgctgccttgttggtgtaatctgtgctgggactctctatgttgcaaacgtgggcgactcacgtgcagttcttggaaggcttgttaaggcaactggagaggttgtggccatgcagttgtcatcggagcacaatgcgtgctatgaggaagttagacaagaactgcagtcatcacatcctgacgatccacatattgtggttctcaaacacaatgtttggcgagtgaagggtctcatccagatctcaagatctattggagatgtatatctaaagaaaccagagtacaacagagaaccacttcacagcaagtttcggcttcgagaaaccttccagaggccgacccttagttctgaacctcaaattactgaacatcgaatacagccgaacgatcaatttgttatatttgcttctgatggtctatgggagcacctcagcaataaggaagcagttgaccttgtccaaagtagtccccgaaatggaatcgctcggaggctagtgaaagccgcgatgcaagaagctgccaagaagagggagatgagatactcagacctcaagaagatcgaccgtggtgtgagaaggcatttccacgacgatataactgtcgtcgtggtattcctcgattcggatgccatgagcaaagctagctggagcaaaagcccctcggtttctctccgagggggcggtgtcgccctccctgcgaagtccctcgcacctttctcagctccggcacggctgaacagcacctactga

SEQ ID NO: 69150 - protein, 399 aa, Zea mays
MLAAVMDYFSSCWGPRSGAGHRGKGSDAAGRQDGLLWYKDAGQLVTGEFSMAVVQANQLLEDQSQVESGSLSLADPGPQGTFVGVYDGHGGPETSRFINDHLFNHLRRFATEHKFMSADVIRKAFQATEEGFLSLVSKEWSLKPQIASVGSCCLVGVICAGTLYVANVGDSRAVLGRLVKATGEVVAMQLSSEHNACYEEVRQELQSSHPDDPHIVVLKHNVWRVKGLIQISRSIGDVYLKKPEYNREPLHSKFRLRETFQRPTLSSEPQITEHRIQPNDQFVIFASDGLWEHLSNKEAVDLVQSSPRNGIARRLVKAAMQEAAKKREMRYSDLKKIDRGVRRHFHDDITVVVVFLDSDAMSKASWSKSPSVSLRGGGVALPAKSLAPFSAPARLNSTY

SEQ ID NO: 69151 - DNA, 1179 bp, Hordeum vulgare
  CDS (1)..(1179)
atgctatcgtctgcgatggattacctgagatcttgctggggtcccacgtcgtcgccggacgggcgcccccgcaagggagtggatgttgcaggccggcaggacgggctcctgtggtacaaggacgccgggcagctcgtcgccggcgagttctcgatggccgtggtccaggccaataacctgctggaggaccacagtcaggtggaatccgggtcgctgagcaccaccgatcccgacctgcagggctccttcgtcggcgtctatgatggccatggtggaccggagacggcacgctacatcaatgaccacatgttcaaccatctgaagggatatgcatctgagcaaaagtgcatgtcagtggatgtgattcggaaggctttccgagcgactgaggagggatttctctctctagtcagtaatcaatggtcgatgaggcctcaattagcggcggtaggctcttgctgtctagttggtgtcatttgtgctggaactctctatgttgcaaatgttggggactcccgtgccattctggggagacttgtcaagggaactggagaggttgtggcaatgcagctctcagcagaacataatgcatccttcgaggaggttaggcgagagatgcaggcaatgcatcctgatgatccccatattgtggtcctaaagcacaatgtttggcgtgtgaagggtattattcagataacaaggtccattggagatgtgtatctgaagagaccagaattcaacagagaacctttgcatagcaagtttcggcttccagaaactttccggagaccccttcttagttctgagccagcaatcactgtacaccaaatacagttaactgatcagttcatcatttttgcatctgatggactctgggagcatcttagtaatcagaaagcagttgagctagtccacagtagtccccgtaatgggattgctcgaaagctggtgaaggctgcaatgcaggaagcagcaaagaagagggagatgcgttattcagatctcaagaaaatcgaccgtggagtgaggcgccactttcatgatgatataacggtcgtggtggtattttttgattcgaatgccatagccatggacgcctggagccgtcccacagtttctctgcgaggtggcggcgttgcgctccctgcaaattcccttgctccattctcaggttcctag

SEQ ID NO: 69152 - protein, 392 aa, Hordeum vulgare
MLSSAMDYLRSCWGPTSSPDGRPRKGVDVAGRQDGLLWYKDAGQLVAGEFSMAVVQANNLLEDHSQVESGSLSTTDPDLQGSFVGVYDGHGGPETARYINDHMFNHLKGYASEQKCMSVDVIRKAFRATEEGFLSLVSNQWSMRPQLAAVGSCCLVGVICAGTLYVANVGDSRAILGRLVKGTGEVVAMQLSAEHNASFEEVRREMQAMHPDDPHIVVLKHNVWRVKGIIQITRSIGDVYLKRPEFNREPLHSKFRLPETFRRPLLSSEPAITVHQIQLTDQFIIFASDGLWEHLSNQKAVELVHSSPRNGIARKLVKAAMQEAAKKREMRYSDLKKIDRGVRRHFHDDITVVVVFFDSNAIAMDAWSRPTVSLRGGGVALPANSLAPFSGS

SEQ ID NO: 69153 - DNA, 1200 bp, Zea mays
  CDS (1)..(1200)
atgctggccgcggtgatggactacttcagcacctgctggggcccgcggtctcgtgcggggcacaggggcaagggctccgacgccgccggccggcaggacggcctcctctggtacaaggacgccgggcagctcgtcaccggggggttctccatggccgtggtgcaggccaaccagctgcttgaggaccagagccaggtggagtccggatcgctctccctggctgactacggcccgcagggcaccttcgtcggcgtctatgatggccatggcggcccggagacgtcccggttcatcaatgaccacctcttcaaccatctcaggagatttgcaactgagcacaagtccatgtcagcagacgtgatccggaaagctttccaagaaactgaggagggctttctttctctagtcatcaaggaatggtctttcaagcctcagattgcatcagttggctcctgttgccttgttggtgtaatctgtgctgggactctctatgttgcaaacctgggcgactcccgtgcagttcttggaaggcttgttaaggcaactggagaggttctggccacgcagttgtcagcggagcacaatgcatgctatgaagaagttagacaagagctgcagtcatcacatcctgatgatccacgtattgtggttctaaaacataacgtttggcgagtgaagggtctcatccagatctcaagatctatcggagatgtatatctaaagaaaccggagtataacagagaacctcttcacagcaagtttcggcttcgagaaaccttccagaagccgattcttagttctgaacctcaaattactgaacaccgaatacagccaaacgatcagtttgttatatttgcttctgatggtctatgggagcacctcagcaatcaggaagctgttgaccttgtccaaagtagtccccgtaatggaatcgctcggagactagtgaaagccgcgatgcaagaagctgccaagaagagggagatgagatactcagacctcaagaagatcgaccgtggcgtgaggaggcatttccacgacgatataaccgtcgtcgtggtgttcctcgactcggatgccatgagcaaagctagctggagcaagagcccctcggtttctctccgagggggcggcgtcacccttcccgccaagtccctcgcacccttctcggctccggcacagttgaacggcacccactga

SEQ ID NO: 69154 - protein, 399 aa, Zea mays
MLAAVMDYFSTCWGPRSRAGHRGKGSDAAGRQDGLLWYKDAGQLVTGGFSMAVVQANQLLEDQSQVESGSLSLADYGPQGTFVGVYDGHGGPETSRFINDHLFNHLRRFATEHKSMSADVIRKAFQETEEGFLSLVIKEWSFKPQIASVGSCCLVGVICAGTLYVANLGDSRAVLGRLVKATGEVLATQLSAEHNACYEEVRQELQSSHPDDPRIVVLKHNVWRVKGLIQISRSIGDVYLKKPEYNREPLHSKFRLRETFQKPILSSEPQITEHRIQPNDQFVIFASDGLWEHLSNQEAVDLVQSSPRNGIARRLVKAAMQEAAKKREMRYSDLKKIDRGVRRHFHDDITVVVVFLDSDAMSKASWSKSPSVSLRGGGVTLPAKSLAPFSAPAQLNGTH

SEQ ID NO: 69155 - DNA, 1167 bp, Zea mays; identical to SEQ ID NO: 984
  CDS (1)..(1167)

SEQ ID NO: 69156 - protein, 388 aa, Zea mays; identical to SEQ ID NO: 985

SEQ ID NO: 69157 - DNA, 1083 bp, Zea mays; identical to SEQ ID NO: 986
  CDS (1)..(1083)

SEQ ID NO: 69158 - protein, 360 aa, Zea mays; identical to SEQ ID NO: 987

SEQ ID NO: 69159 - DNA, 1119 bp, Zea mays; identical to SEQ ID NO: 988
  CDS (1)..(1119)

SEQ ID NO: 69160 - protein, 372 aa, Zea mays; identical to SEQ ID NO: 989

SEQ ID NO: 69161 - DNA, 1182 bp, Brassica napus; identical to SEQ ID NO: 1476
  CDS (1)..(1182)

SEQ ID NO: 69162 - protein, 393 aa, Brassica napus; identical to SEQ ID NO: 1477

SEQ ID NO: 69163 - DNA, 1209 bp, Brassica napus; identical to SEQ ID NO: 1478
  CDS (1)..(1209)

SEQ ID NO: 69164 - protein, 402 aa, Brassica napus; identical to SEQ ID NO: 1479

SEQ ID NO: 69165 - DNA, 1182 bp, Brassica napus; identical to SEQ ID NO: 1480
  CDS (1)..(1182)

SEQ ID NO: 69166 - protein, 393 aa, Brassica napus; identical to SEQ ID NO: 1481

SEQ ID NO: 69167 - DNA, 1206 bp, Brassica napus; identical to SEQ ID NO: 1486
  CDS (1)..(1206)

SEQ ID NO: 69168 - protein, 401 aa, Brassica napus; identical to SEQ ID NO: 1487

SEQ ID NO: 69169 - DNA, 1155 bp, Brassica napus; identical to SEQ ID NO: 17561
  CDS (1)..(1155)

SEQ ID NO: 69170 - protein, 384 aa, Brassica napus; identical to SEQ ID NO: 17562

SEQ ID NO: 69171 - DNA, 1152 bp, Brassica napus; identical to SEQ ID NO: 994
  CDS (1)..(1152)

SEQ ID NO: 69172 - protein, 383 aa, Brassica napus; identical to SEQ ID NO: 995

SEQ ID NO: 69173 - DNA, 1134 bp, Brassica napus; identical to SEQ ID NO: 996
  CDS (1)..(1134)

SEQ ID NO: 69174 - protein, 377 aa, Brassica napus; identical to SEQ ID NO: 997

SEQ ID NO: 69175 - DNA, 1149 bp, Brassica napus; identical to SEQ ID NO: 998
  CDS (1)..(1149)

SEQ ID NO: 69176 - protein, 382 aa, Brassica napus; identical to SEQ ID NO: 999

SEQ ID NO: 69177 - DNA, 1155 bp, Brassica napus; identical to SEQ ID NO: 17563
  CDS (1)..(1155)

SEQ ID NO: 69178 - protein, 384 aa, Brassica napus; identical to SEQ ID NO: 17564

SEQ ID NO: 69179 - DNA, 1134 bp, Brassica napus; identical to SEQ ID NO: 1000
  CDS (1)..(1134)

SEQ ID NO: 69180 - protein, 377 aa, Brassica napus; identical to SEQ ID NO: 1001

SEQ ID NO: 69181 - DNA, 1200 bp, Zea mays
  CDS (1)..(1200)
atgctggccgcggtgatggactacttcagctcctgctggggcccgcgatctcgtgccgggcaccggggcaagggctccgacgccgccggccggcaggacggtctcctctggtacaaggacgccggccagctcgtcactggggagttctccatggccgtggtgcaggccaaccagctgctcgaggaccagagccaggtggagtccggatcgctctccctggctgacccgggcccgcagggcaccttcgtcggcgtctatgatggccatggcggcccggagacgtcccggttcatcaatgaccacctcttcaaccatctcagaaggtttgcaactgagcacaagtttatgtcagcagacgtgatccggaaagctttccaagaaactgaggagggctttctttctctagtcatcaaggaatggtctttcaagcctcagattgcatcagttggctcctgttgccttgttggtgtaatctgtgctgggactctctatgttgcaaacctgggcgactcgcgtgcagttcttggaaggcttgttaaggcaactggagaggttctggccactcagttgtcagcggagcacaatgcatgctatgaagaagttagacaagagctgcagtcatcacatcctgatgatccacgtattgtggttctcaaacataacgtttggcgagtgaagggtctcatccagatctcaagatctatcggagatgtatatctaaagaaaccagagtataacagagaacctcttcacagcaaatttcggcttcgagaaaccttccagaagccgattcttagttctgaacctcaaattactgaacaccgaatacagccaaacgatcagtttgttatatttgcttctgatggtctatgggagcacctcagcaatcaggaagctgttgaccttgtccaaagtagtccccgtaatggaatcgctcggagactagtgaaagccgcgatgcaagaagctgccaagaagagggagatgagatactcagacctcaagaagatcgaccgtggcgtgaggaggcatttccacgacgatataaccgtcgtcgtggtattcctcgactcggatgccatgagcaaagctagctggagcaagagcccctcggtttctctccgagggggcggcgtcacccttcccgccaagtccctcgcacccttctcggctccggcacagttgaacggcacccactga

SEQ ID NO: 69182 - protein, 399 aa, Zea mays
MLAAVMDYFSSCWGPRSRAGHRGKGSDAAGRQDGLLWYKDAGQLVTGEFSMAVVQANQLLEDQSQVESGSLSLADPGPQGTFVGVYDGHGGPETSRFINDHLFNHLRRFATEHKFMSADVIRKAFQETEEGFLSLVIKEWSFKPQIASVGSCCLVGVICAGTLYVANLGDSRAVLGRLVKATGEVLATQLSAEHNACYEEVRQELQSSHPDDPRIVVLKHNVWRVKGLIQISRSIGDVYLKKPEYNREPLHSKFRLRETFQKPILSSEPQITEHRIQPNDQFVIFASDGLWEHLSNQEAVDLVQSSPRNGIARRLVKAAMQEAAKKREMRYSDLKKIDRGVRRHFHDDITVVVVFLDSDAMSKASWSKSPSVSLRGGGVTLPAKSLAPFSAPAQLNGTH

SEQ ID NO: 69183 - DNA, 852 bp, Glycine max; identical to SEQ ID NO: 22119
  CDS (1)..(852)

SEQ ID NO: 69184 - protein, 283 aa, Glycine max; identical to SEQ ID NO: 22120

SEQ ID NO: 69185 - DNA, 1206 bp, Glycine max; identical to SEQ ID NO: 1496
  CDS (1)..(1206)

SEQ ID NO: 69186 - protein, 401 aa, Glycine max; identical to SEQ ID NO: 1497

SEQ ID NO: 69187 - DNA, 1203 bp, Glycine max; identical to SEQ ID NO: 1498
  CDS (1)..(1203)

SEQ ID NO: 69188 - protein, 400 aa, Glycine max; identical to SEQ ID NO: 1499

SEQ ID NO: 69189 - DNA, 1017 bp, Glycine max; identical to SEQ ID NO: 1502
  CDS (1)..(1017)

SEQ ID NO: 69190 - protein, 338 aa, Glycine max; identical to SEQ ID NO: 1503

SEQ ID NO: 69191 - DNA, 1203 bp, Glycine max; identical to SEQ ID NO: 68951
  CDS (1)..(1203)

SEQ ID NO: 69192 - protein, 400 aa, Glycine max; identical to SEQ ID NO: 1459

SEQ ID NO: 69193 - DNA, 1134 bp, Glycine max; identical to SEQ ID NO: 1006
  CDS (1)..(1134)

SEQ ID NO: 69194 - protein, 377 aa, Glycine max; identical to SEQ ID NO: 1007

SEQ ID NO: 69195 - DNA, 1017 bp, Glycine max; identical to SEQ ID NO: 1510
  CDS (1)..(1017)

SEQ ID NO: 69196 - protein, 338 aa, Glycine max; identical to SEQ ID NO: 1511

SEQ ID NO: 69197 - DNA, 1134 bp, Glycine max; identical to SEQ ID NO: 1010
  CDS (1)..(1134)

SEQ ID NO: 69198 - protein, 377 aa, Glycine max; identical to SEQ ID NO: 1011

SEQ ID NO: 69199 - DNA, 1185 bp, Glycine max
  CDS (1)..(1185)
atgctatcaaggttgatggactttctgactgcctgctggcggcgaagatccttctccgacggcaagggtggttccgaggttacggggcggaaggaagggctgctgtggtacaaggatgcggggcagcacttgtttggtgaatactcaatggctgttgtccaggccaacaacctgctcgaggaccagagccagattgagtctggtcctctcagcctgcttgacactggcccttatgggacctttgttggtgtatatgatggacacggtggacccgagacgtcgcgctacgtctgtgatcatctcttccaacatctaaaacgatttgcatctgagcagaagtccatgtctgaggaggttattcggaaggcataccaagccacagaagaaggttttttgtcagtggttaccaaacagtggcccatgaatccccaaattgctgctgtgggatcttgttgtttggttggtgtgatttgtggtggtatcctctacattgctaaccttggcgattcccgtgctgtgcttggccgggttgtcagagcaaccggggaggttttggcgatccagctttcgtcagagcataatgtggccatagaatctgtgagacaagagatgcattctttgcatccggatgactcaaaaattgtggttctaaagcacaatgtatggcgggtgaagggtctgatacagatttctagatccattggcgatgtatacctaaaaaaggctgaatttaacaaggaaccattgtatgctaagtttcgtgtgcgggaaggttttaagaggcccattttgagctctgacccatcaatttctgtccatgaacttcaacagcatgatcaatttctcatatttgcttctgatggtctttgggaacaccttagcaatcaggatgccgttgatatagttcaaaacaacccacacaatggaattgctcggaggctcatcaaagctgcgttgcaagaagcagcaaaaaagagagagatgaggtactctgatttgaagaaaattgaccgtggtgtccgccggcatttccatgatgacatcacagttgtagttgtatttcttgactccaatcttgtcagcagagccagctcagtaagaggtcctcctttatcggtgagaggaggtggtgttcccctaccttctagaactttggctccctgtgctgcacctatggaaacttag

SEQ ID NO: 69200 - protein, 394 aa, Glycine max
MLSRLMDFLTACWRRRSFSDGKGGSEVTGRKEGLLWYKDAGQHLFGEYSMAVVQANNLLEDQSQIESGPLSLLDTGPYGTFVGVYDGHGGPETSRYVCDHLFQHLKRFASEQKSMSEEVIRKAYQATEEGFLSVVTKQWPMNPQIAAVGSCCLVGVICGGILYIANLGDSRAVLGRVVRATGEVLAIQLSSEHNVAIESVRQEMHSLHPDDSKIVVLKHNVWRVKGLIQISRSIGDVYLKKAEFNKEPLYAKFRVREGFKRPILSSDPSISVHELQQHDQFLIFASDGLWEHLSNQDAVDIVQNNPHNGIARRLIKAALQEAAKKREMRYSDLKKIDRGVRRHFHDDITVVVVFLDSNLVSRASSVRGPPLSVRGGGVPLPSRTLAPCAAPMET

SEQ ID NO: 69201 - DNA, 1194 bp, Glycine max
  CDS (1)..(1194)
atgttatcggggttgatgaacttattgagggcctgctttcggccgggttcggatggatttacacgtgcaggttcggatgctggtggtagacaggatggactattgtggtacaaggactcggggcagcacttgaatggggaattttcaatggctgtaatccaagccaataacttgctggaagatcagagccagattgaatcaggctgtttgagctccaatgaatccggcccttatggtaccttcatcggtgtctatgatggccatggagggcccgagacatcacggtttatcaatgatcacctatttcaccatctcaagagattcacttcagagcaacaatcaatgtcggtggatgtaattcgcaaggcactccaagcaacagaagaggggtttatttcagtggttgccagacagttttctctgtcaccacaaattgcggctgtcgggtcatgctgtcttgttggtgttatttgtaatggaaccctttacatagcaaaccttggggattcccgggcagttttgggaagagcagtcaaggcaactggcgaggttttagccatgcaattatcagcagagcacaatgcatcgatagagactgtaagacaggagctgcatgcttcacatcctgatgacccaaatattgtggttttaaagcataatgtatggcgtgtgaagggccttattcaagtttctagatctattggtgatgtatatttgaaaaaggccgagttcaatcgagaaccactatatgctaagtttcgacttcgtgaaccatacaagatgccaatactaagctcagaaccatcaatatcagtgcatcatttgcagccacatgatcaatttattatatttgcatctgatggactctgggagcacctcagcaatcaagaagcagttgatatagttcaaaacagtccccgcagtggaagcgctaggaggctggtaaaagctgcgcttcaagaagctgcaaagaagagagaaatgagatattcagatttaaagaaaattgatcgcggagttcgtcgtcatttccatgatgataccacggtgattgttgtgtatcttgactcaaatctcgtgagtagggccagcactgtgaagttccctggcatttctgttagagggggtggtattaacctgcctcataacacactggcaccttgtaccacaccaacagagattggtggtacctga

SEQ ID NO: 69202 - protein, 397 aa, Glycine max
MLSGLMNLLRACFRPGSDGFTRAGSDAGGRQDGLLWYKDSGQHLNGEFSMAVIQANNLLEDQSQIESGCLSSNESGPYGTFIGVYDGHGGPETSRFINDHLFHHLKRFTSEQQSMSVDVIRKALQATEEGFISVVARQFSLSPQIAAVGSCCLVGVICNGTLYIANLGDSRAVLGRAVKATGEVLAMQLSAEHNASIETVRQELHASHPDDPNIVVLKHNVWRVKGLIQVSRSIGDVYLKKAEFNREPLYAKFRLREPYKMPILSSEPSISVHHLQPHDQFIIFASDGLWEHLSNQEAVDIVQNSPRSGSARRLVKAALQEAAKKREMRYSDLKKIDRGVRRHFHDDTTVIVVYLDSNLVSRASTVKFPGISVRGGGINLPHNTLAPCTTPTEIGGT

SEQ ID NO: 69203 - DNA, 1152 bp, Glycine max; identical to SEQ ID NO: 1012
  CDS (1)..(1152)

SEQ ID NO: 69204 - protein, 383 aa, Glycine max; identical to SEQ ID NO: 1013

SEQ ID NO: 69205 - DNA, 1158 bp, Glycine max
  CDS (1)..(1158)
atgttttcgtggctggcaaggatagtgtcggcgtgcttgagaccggtgcggcgatatgcgcgtatgagcaaggatggtgatgtcgatgacgtgtccaccatcggcgacgcgctcgtgtgggggaaggacctcgaaaaacactcgtgcggcgaattctcctacgcggtggttcaggccaacgaggtcatcgaggatcacagccaggtcgagaccggctccgatgccgtcttcgtcggcgtctacgacggacacggcggcgccgaagcctcgcgcttcatcaacgatcatctcttccttaatctcatcagggttgctcaagaaaatggttctatgtctgaagatattatcagaagtgctgtttctgctactgaggacgggtttctgactcttgttcgaaggagttatggaataaagccattgatagcagcaatgggttcctgttgtctggttggtgttgtctggaaagggacgctatatattgcgaatcttggagactctcgcgctgtaattggttctgtaggtagatctaacaagatcattgctgagcagttgaccaaagagcacaacgctagcaaagaggaggttagacgagaactcaggtctttgcatccagaagattcacaaattgtagttatgaagcaaggaacctggcgcattaaaggcatcatccaggtatccagatctataggagatgcatatttgaagcggccagagttctcatttgatccgtcattcccacggttccacctgcctgaacctatccgccgacctgtgctaaccgcagaaccttctatatgttcaagagtgttaaaacctaatgataagttcattatctttgcatctgatggactctgggaacacttgacaaaccaggaagctgctgagattgttcataacaatccacgaatcggtattgcaagaagacttcttaaagcagctttaaacgaggcagctaggaaaagggaaatgagatataaagaccttcagaagattggaaaggggattaggcgtttcttccatgatgatatcactgtggttgttgtcttcattgaccacgagttgcgcggcaagaatgttacagttcctgatttgtccatcaaagggtttattgacacagttggaccatcaaattttagaaatttgcggggattggaatga

SEQ ID NO: 69206 - protein, 385 aa, Glycine max
MFSWLARIVSACLRPVRRYARMSKDGDVDDVSTIGDALVWGKDLEKHSCGEFSYAVVQANEVIEDHSQVETGSDAVFVGVYDGHGGAEASRFINDHLFLNLIRVAQENGSMSEDIIRSAVSATEDGFLTLVRRSYGIKPLIAAMGSCCLVGVVWKGTLYIANLGDSRAVIGSVGRSNKIIAEQLTKEHNASKEEVRRELRSLHPEDSQIVVMKQGTWRIKGIIQVSRSIGDAYLKRPEFSFDPSFPRFHLPEPIRRPVLTAEPSICSRVLKPNDKFIIFASDGLWEHLTNQEAAEIVHNNPRIGIARRLLKAALNEAARKREMRYKDLQKIGKGIRRFFHDDITVVVVFIDHELRGKNVTVPDLSIKGFIDTVGPSNFRNLRGLE

SEQ ID NO: 69207 - DNA, 1569 bp, Glycine max; identical to SEQ ID NO: 1524
  CDS (1)..(1569)

SEQ ID NO: 69208 - protein, 522 aa, Glycine max; identical to SEQ ID NO: 1525

SEQ ID NO: 69209 - DNA, 1134 bp, Glycine max; identical to SEQ ID NO: 1014
  CDS (1)..(1134)

SEQ ID NO: 69210 - protein, 377 aa, Glycine max; identical to SEQ ID NO: 1015

SEQ ID NO: 69211 - DNA, 1143 bp, Glycine max
  CDS (1)..(1143)
atgctgcgtttgtgctacggccctctggattgctgcttccgacgccgccgtgccgacggactcctctggcacaccgacttgaagccccacgcctccggcgacttctccatcgccgtcgcccaggccaattactgtctcgaggatcagagccaagtcttcacctccccctacgccacctacgtcggcgtctacgacggccacggcggccccgaagcttctcgattcgtcaacaagcgcctcttcccttatttgcacaaattcgccactgagcaaggagggttgtctgtggatgtgataaaaaaggcattcagtgccacagaggaggaattcttgcatttggtgaagctatccttgcccattagtccccagattgcttccgtcggatcctgttgcctttttggtgcaatttctaataatgtgttgtatgttgccaacctcggcgactcgagagctgttcttggcaggagggatacggtgagaaagaacagtccagtggtggcacagcgtttgtcaacagatcataatgtagctgatgaagaggtgagaaaagaagttgaagctctccatcctgatgactcgcacattgtggtttataaccgtggagtttggaggattaagggcattatacaggtgtcaagatctatcggtgacgtgtatttgaagaaacctgatttctaccgagacccggtttttcagcagtttggaaatcctattcctttgaagcgtcctgtaatgacagctgaaccatcaatcattattagggagcttgagtctcaggatttattcttgatatttgcatcagatggcctctgggaacaattaagtgacgaggcagcagttcagatcgttttcaaacatccaagagctggaattgccaagagactggtgagagctgctcttcatgaagctgcaaagaagagagagatgagatacgatgacataaagaaaattgacaaaggaataagacgacacttccatgatgatatcactgtggttgtaatctatcttgatcaccatgcaggctcctctaatggtagatttaagcaaactgctgttggctatacaactgccccagttgatattttttccctaaatgcggatgaagagaaaagcggatgcttggtacagttgcctaaagagtga

SEQ ID NO: 69212 - protein, 380 aa, Glycine max
MLRLCYGPLDCCFRRRRADGLLWHTDLKPHASGDFSIAVAQANYCLEDQSQVFTSPYATYVGVYDGHGGPEASRFVNKRLFPYLHKFATEQGGLSVDVIKKAFSATEEEFLHLVKLSLPISPQIASVGSCCLFGAISNNVLYVANLGDSRAVLGRRDTVRKNSPVVAQRLSTDHNVADEEVRKEVEALHPDDSHIVVYNRGVWRIKGIIQVSRSIGDVYLKKPDFYRDPVFQQFGNPIPLKRPVMTAEPSIIIRELESQDLFLIFASDGLWEQLSDEAAVQIVFKHPRAGIAKRLVRAALHEAAKKREMRYDDIKKIDKGIRRHFHDDITVVVIYLDHHAGSSNGRFKQTAVGYTTAPVDIFSLNADEEKSGCLVQLPKE

SEQ ID NO: 69213 - DNA, 852 bp, Glycine max; identical to SEQ ID NO: 22155
  CDS (1)..(852)

SEQ ID NO: 69214 - protein, 283 aa, Glycine max; identical to SEQ ID NO: 22156

SEQ ID NO: 69215 - DNA, 1128 bp, Glycine max
  CDS (1)..(1128)
atgctccaggcattgatgaatctgttctcgctgtgttggaagccatttggccgcgatgctgctgatcgaatcgattccatcggagttaccggaagagaaggcaaagacggcttgctctggttccgcgacttcggaaaatatggctccggcgatttctccatggctgccgttcaggccaaccaggttctcgaagaccagagccagatcgagtctggtcctctcggcaccttcgtcggcatctacgacggtcacggaggacccgacgcatcaagatacgtttgcgatcacttgtttcgccattttcaagcaatatcagctgagtcacgcggggttgtgacaactgagacaatcgaaagagcatttcgccaaacagaagaggggtacatggccctcgtgtcaggctcgtggaatgctcgacctcatattgcaagtgctgggacctgttgtctagttggagtgatatttcagcagacactctttgtggcaaacgctggagattcccgtgttgtattgggtaagaaagttggcaacactggaggtatggctgcaattcagctgtctacagaacacaatgcaaatcttgaggctgttaggcaggaacttaaagaattacatcctcatgatccccaaattgttgtcctcaaacatggagtgtggagagtaaaaggcattattcaggtttctagatctataggtgatgtatatttgaagcatgcacagtttaaccgagaaccacttaatgcaaaattcagacttcctgaaccgatgaacatgcctatcttgagtgctaatcccactattctttctcatgctctccaaccaaatgattccttccttatatttgcatctgatggtttatgggagcatttgagtaacgagaaagctgtggatattgtaaacagcaatccacatgcgggtagtgccaagagacttatcaaggctgctctccatgaagcagcaagaaaacgagaaatgcgatattcagacctccgtaagattgacaagaaagttcgacgccattttcatgatgatatatccgttattgttttattcttaaatcacgaccttatttccagaggcacagtgctagacccgacactttcaattcgaagcgctctcgatcactga

SEQ ID NO: 69216 - protein, 375 aa, Glycine max
MLQALMNLFSLCWKPFGRDAADRIDSIGVTGREGKDGLLWFRDFGKYGSGDFSMAAVQANQVLEDQSQIESGPLGTFVGIYDGHGGPDASRYVCDHLFRHFQAISAESRGVVTTETIERAFRQTEEGYMALVSGSWNARPHIASAGTCCLVGVIFQQTLFVANAGDSRVVLGKKVGNTGGMAAIQLSTEHNANLEAVRQELKELHPHDPQIVVLKHGVWRVKGIIQVSRSIGDVYLKHAQFNREPLNAKFRLPEPMNMPILSANPTILSHALQPNDSFLIFASDGLWEHLSNEKAVDIVNSNPHAGSAKRLIKAALHEAARKREMRYSDLRKIDKKVRRHFHDDISVIVLFLNHDLISRGTVLDPTLSIRSALDH

SEQ ID NO: 69217 - DNA, 945 bp, Glycine max; identical to SEQ ID NO: 1540
  CDS (1)..(945)

SEQ ID NO: 69218 - protein, 314 aa, Glycine max; identical to SEQ ID NO: 1541

SEQ ID NO: 69219 - DNA, 1044 bp, Glycine max; identical to SEQ ID NO: 1024
  CDS (1)..(1044)

SEQ ID NO: 69220 - protein, 347 aa, Glycine max; identical to SEQ ID NO: 1025

SEQ ID NO: 69221 - DNA, 1083 bp, Glycine max; identical to SEQ ID NO: 1544
  CDS (1)..(1083)

SEQ ID NO: 69222 - protein, 360 aa, Glycine max; identical to SEQ ID NO: 1545

SEQ ID NO: 69223 - DNA, 1128 bp, Glycine max
  CDS (1)..(1128)
atgctccaggcattgatgaatctgttctcgctgtgttggaagccatttggccgcgatgctgctgatcgaatcgattccatcggagttaccggaagagaaggcaaagacggcttgctttggttccgcgacggcggaaaatatggctctggcgatttctccatggccgtcgttcaggccaaccaggttctcgaagaccagagccagatcgagtctggtcctctcggcaccttcgtcggcatctacgacggtcacggaggacccgacgcctcaagatacgtttgcgatcacttgtttcgccattttcaagcaatatcagctgagtcacgcggggttgtgacaactgagacaatcgaaagagcatttcgccaaacagaagaggggtacatggccctcgtgtcaggctcgtggaatgctcgacctcatattgcaagtgctgggacctgttgtctagttggagtgatatttcagcagacactctttgtggcaaacgctggagattcccgtgttgtattgggtaagaaagttggcaacactggaggtatggctgcaattcagctgtctacagaacacaatgcaaatcttgaggctgttaggcaggaacttaaagaattacatcctcatgatccccaaattgttgtcctcaaacatggagtgtggagagtaaaaggcattattcaggtttctagatctataggtgatgtatatttgaagcatgcacagtttaaccgagaaccacttaatgcaaaattcagacttcctgaaccgatgaacatgcctatcttgagtgctaatcccactattctttctcatgctctccaaccaaatgattccttccttatatttgcatctgatggtttatgggagcatttgagtaacgagaaagctgtggatattgtaaacagcaatccacatgcgggtagtgccaagagacttatcaaggctgctctccatgaagcagcaagaaaacgagaaatgcgatattcagacctccgtaagattgacaagaaagttcgacgccattttcatgatgatatatccgttattgttttattcttaaatcacgaccttatttccagaggcacagtgctagacccgacactttcaattcgaagcgctctcgatcactga

SEQ ID NO: 69224 - protein, 375 aa, Glycine max
MLQALMNLFSLCWKPFGRDAADRIDSIGVTGREGKDGLLWFRDGGKYGSGDFSMAVVQANQVLEDQSQIESGPLGTFVGIYDGHGGPDASRYVCDHLFRHFQAISAESRGVVTTETIERAFRQTEEGYMALVSGSWNARPHIASAGTCCLVGVIFQQTLFVANAGDSRVVLGKKVGNTGGMAAIQLSTEHNANLEAVRQELKELHPHDPQIVVLKHGVWRVKGIIQVSRSIGDVYLKHAQFNREPLNAKFRLPEPMNMPILSANPTILSHALQPNDSFLIFASDGLWEHLSNEKAVDIVNSNPHAGSAKRLIKAALHEAARKREMRYSDLRKIDKKVRRHFHDDISVIVLFLNHDLISRGTVLDPTLSIRSALDH

SEQ ID NO: 69225 - DNA, 1176 bp, Brassica napus
  CDS (1)..(1176)
atgttctcctggttggtaaggatggctctgttttgtttgcggccgatgcgtcggtacggtcgtatgaacagagatgacgatgaagatgaagatgatcatgaagactcctctggaggtgactcgctgctttggtctagggagcttgagaggcattcattcggtgatttctccatggctgtcgtgcaagctaacgaggttgttgaggatcatagccaagtcgagacagggaagggagctgtctttgttggtgtctatgatggtcatggtggtcctgaggcttctagatacatctctgaccatctctttggccatctgatgagagtttctaaagaacatggcggcattacagaggagactctaagagctgcattttccgcaaccgaggaaggtttcctcacgctcgtgagaagaacttgctcgttaaaaccgttaatagcagccgttggatcttgctgtctggtcggagttatctggaaaggaaccttgcttatcgccaacgttggagactcccgcgctgttcttggttccatgagcagtactaatagatcaaacaagattgcagccgagcagctgactagtgatcacaatgctgctttggaagaagtaagacaagagctcaagtctttgcatccggacgatccccacatcgttgtcctcaaacacggcgtgtggcgcatcaaaggcatcatccaggtgtctagatcgataggggacgcgtacttgaagcgccccgagttctctctcgatccttcgtttccaaagttccatctcaccgaagggctacaaagaccggtcctatcggcagagccgtgcgtgtacacgagagtcttgcaaacgagcgataagtttgtgatattcgcatcagatgggctctgggagcagatgagcaaccagcaagcagtggagatagtgaacaaacatcctcgtcccgggatagcgaggaggctggtgaggagagcgatgagcatagctgcgaagaagagggagatgaggtatgatgatctgaagaaagtggagaggggagtgaggagattctttcatgatgatataacggtggttgtggtgttcgtggacagtgagcttcttatggtggagaaagctactgttcctgaactctcagttaaaggtttctctcatactgttggaccttccaagttcagtatcttcttgtcttaa

SEQ ID NO: 69226 - protein, 391 aa, Brassica napus
MFSWLVRMALFCLRPMRRYGRMNRDDDEDEDDHEDSSGGDSLLWSRELERHSFGDFSMAVVQANEVVEDHSQVETGKGAVFVGVYDGHGGPEASRYISDHLFGHLMRVSKEHGGITEETLRAAFSATEEGFLTLVRRTCSLKPLIAAVGSCCLVGVIWKGTLLIANVGDSRAVLGSMSSTNRSNKIAAEQLTSDHNAALEEVRQELKSLHPDDPHIVVLKHGVWRIKGIIQVSRSIGDAYLKRPEFSLDPSFPKFHLTEGLQRPVLSAEPCVYTRVLQTSDKFVIFASDGLWEQMSNQQAVEIVNKHPRPGIARRLVRRAMSIAAKKREMRYDDLKKVERGVRRFFHDDITVVVVFVDSELLMVEKATVPELSVKGFSHTVGPSKFSIFLS

SEQ ID NO: 69227 - DNA, 1674 bp, Glycine max; identical to SEQ ID NO: 1558
  CDS (1)..(1674)

SEQ ID NO: 69228 - protein, 557 aa, Glycine max; identical to SEQ ID NO: 1559

SEQ ID NO: 69229 - DNA, 1104 bp, Zea mays
  CDS (1)..(1104)
atgttgcgagcgctggcggcgaggtgctgcggccactggccgccgggcgccgcggcggcggacgggatgctgtggcaggcggagctgcggccgcacgcggcgggggagttctcgatggccgcggcgcaggccaacctggccatggaggaccaggcgcaggtgctggcgtccccggccgccacgctcgtcggcgtctacgacggccacggcggggccgacgcatcccggttcctccgctcccggctcttcccgcatgtccaacgcgtcgtgcaggagcaggggggcatgagcgccgaggcgattcggagcgcgttcggcgcggccgaggaggagttccataggcaggtgaggcaggagtggaggagccggccgcggctcgctgccgtgggctcctgctgcctgctcggggccatctccggggacacgctgtacgtggccaacgccggcgattcccgcgccgtgctcggccgccgagtgcccggcggcggggcggccgtcgccgagcggctctccgccgagcacaacgcggcgtgcgaggaggtgcggcgcgagctcgccgcgctcaaccccgacgacgcgcagatcgttgtgcacgccaggggagcctggagggtcaaggggataattcaggtgtcgagatccattggcgatttttatctcaagaaaccggagtatagcctggaccccttgttccggcaagttggggcccctattgcgctgaagaggccagctctcagcgctgaaccatcggttcaagtacgcaagctgaaaccaaacgacctgttcctgatatttgcttcagatggcctttgggagcacctcagcgacgatgctgcggtgcagattgtcttcaagaatccgagaactgggatagccagcagactggtgaaggctgccttgaaggaagcgaccaggaagagggaggtcaggtaccgtgatctgaggacgatcgagagaggggtgaggcggcatttccacgacgacatcagcgtcgtcgtggtctacctcgatggccaccgcgagcgtcgccacaccagggtcgttgactcgagcagcaactgcaccagtgcgcccgtcgacatccactcctccaactcccgctag

SEQ ID NO: 69230 - protein, 367 aa, Zea mays
MLRALAARCCGHWPPGAAAADGMLWQAELRPHAAGEFSMAAAQANLAMEDQAQVLASPAATLVGVYDGHGGADASRFLRSRLFPHVQRVVQEQGGMSAEAIRSAFGAAEEEFHRQVRQEWRSRPRLAAVGSCCLLGAISGDTLYVANAGDSRAVLGRRVPGGGAAVAERLSAEHNAACEEVRRELAALNPDDAQIVVHARGAWRVKGIIQVSRSIGDFYLKKPEYSLDPLFRQVGAPIALKRPALSAEPSVQVRKLKPNDLFLIFASDGLWEHLSDDAAVQIVFKNPRTGIASRLVKAALKEATRKREVRYRDLRTIERGVRRHFHDDISVVVVYLDGHRERRHTRVVDSSSNCTSAPVDIHSSNSR

SEQ ID NO: 69231 - DNA, 1113 bp, Zea mays; identical to SEQ ID NO: 1034
  CDS (1)..(1113)

SEQ ID NO: 69232 - protein, 370 aa, Zea mays; identical to SEQ ID NO: 1035

SEQ ID NO: 69233 - DNA, 1200 bp, Zea mays
  CDS (1)..(1200)
atgctggccgcggtgatggactacttcagctcctgctggggcccgcgatcgggcgccgggcaccgggaaaagggctccgacgccgccggccggcaggacggtctcctctggtacaaggacgccggccagctcgtcactggggagttctccatggccgtggtgcaggccaaccagctcctcgaggaccagagccaagtagagtccggatcgctctccctggctgacacgggcccacagggcaccttcgtcggcgtctatgatggccatggcggcccggagacgtcccggttcatcaatgaccacctcttcaaccatctcagaaggtttgcaactgagcacaagtttatgtcagcggacgtgatccggaaagctttccaagcaactgaggagggctttctttctctagtcagcaaggaatggtctttgaagcctcagattgcttcagtgggctcctgctgccttgttggtgtaatctgtgctgggactctctatgttgcaaacgtgggcgactcacgtgcagttcttggaaggcttgttaaggcaactggagaggttgtggccatgcagttgtcatcggagcacaatgcgtgctatgaggaagttagacaagaactgcagtcatcacatcctgacgatccacatattgtcgttctcaaacacaatgtttggcgagtgaagggtatcatccagatctcaagatctattggagatgtatatctaaagaaaccagagtacaacagagaaccacttcacagcaagtttcggcttcgagaaaccttccagaggccgatccttagttctgaacctcaaattactgaacatcgaatacagccaaacgatcaatttgttatatttgcttctgatggtctatgggagcacctcagcaataaggaagcagttgaccttgtccaaagtagtccccgaaatggaatcgctcggagactagtgaaagccgcgatgcaagaagctgccaagaagagggagatgagatactcagacctcaagaagatcgaccgtggtgtgagaaggcatttccacgacgatataactgtcgtcgtggtattcctcgattcggatgccatgagcaaagctagctggagcaaaagcccctcggtttctctccgagggggcggtgtcaccctccctgcgaagtccctcgcacctttctcagctccggcacggctgaacagcaccaactga

SEQ ID NO: 69234 - protein, 399 aa, Zea mays
MLAAVMDYFSSCWGPRSGAGHREKGSDAAGRQDGLLWYKDAGQLVTGEFSMAVVQANQLLEDQSQVESGSLSLADTGPQGTFVGVYDGHGGPETSRFINDHLFNHLRRFATEHKFMSADVIRKAFQATEEGFLSLVSKEWSLKPQIASVGSCCLVGVICAGTLYVANVGDSRAVLGRLVKATGEVVAMQLSSEHNACYEEVRQELQSSHPDDPHIVVLKHNVWRVKGIIQISRSIGDVYLKKPEYNREPLHSKFRLRETFQRPILSSEPQITEHRIQPNDQFVIFASDGLWEHLSNKEAVDLVQSSPRNGIARRLVKAAMQEAAKKREMRYSDLKKIDRGVRRHFHDDITVVVVFLDSDAMSKASWSKSPSVSLRGGGVTLPAKSLAPFSAPARLNSTN

SEQ ID NO: 69235 - DNA, 1065 bp, Zea mays; identical to SEQ ID NO: 1036
  CDS (1)..(1065)

SEQ ID NO: 69236 - protein, 354 aa, Zea mays; identical to SEQ ID NO: 1037

SEQ ID NO: 69237 - DNA, 873 bp, Zea mays; identical to SEQ ID NO: 1574
  CDS (1)..(873)

SEQ ID NO: 69238 - protein, 290 aa, Zea mays; identical to SEQ ID NO: 1575

SEQ ID NO: 69239 - DNA, 1200 bp, Zea mays
  CDS (1)..(1200)
atgctggccgcggtgatggactacttcagcacctgctggggcccgcggtctcgtgcggggcaccggggcaagggctccgacgccgccggccggcaggacggcctcctctggtacaaggacgccgggcagctcgtcaccggggggttctccatggccgtggtgcaggccaaccagctgctcgaggaccagagccaggtggagtccggatcgctctccctggctgactacggcccgcagggcaccttcgtcggcgtctatgatggccatggcggcccggagacgtcccggttcatcaatgaccacctcttcaaccatctcaggagatttgcaactgagcacaagtccatgtcagcagacgtgatccggaaagctttccaagaaactgaggagggctttctttctctagtcatcaaggaatggtctttcaagcctcagattgcatcagttggctcctgttgccttgtacgcgtaagctgtgctgggactctctatgttgcaaacctgggcgactcgcgtgcagttcttggaaggcttgtgaaagcaactggagaggttctggccactcagttgtcagcggagcacaatgcatgctatgaagaagttagacaagagctgcagtcatcacatcctgatgatccacgtattgtggttctcaaacataacgtttggcgagtgaagggtctcatccagatctcaagatctatcggagatgtatatctaaagaaaccggagtataacagagaacctcttcacagcaagtttcggcttcgagaaaccttccagaagccgattcttagttctgaacctcaaattactgaacaccgaatacagccaaacgatcagtttgttatatttgcttccgatggtctatgggagcacctcagcaatcaggaagctgttgaccttgtccaaagtagtccccgtaatggaatcgctcggagactagtgaaagccgcgatgcaagaagctgccaagaagagggagatgagatactcagacctcaagaagatcgaccgtggcgtgaggaggcatttccacgacgatataaccgtcgtcgtggtgttcctcgactcggatgccatgagcaaagctagctggagcaagagcccctcggtttctctccgagggggcggcgtcacccttcccgccaagtccctcgcacccttctcggctccggcacagttgaacggcacccactga

SEQ ID NO: 69240 - protein, 399 aa, Zea mays
MLAAVMDYFSTCWGPRSRAGHRGKGSDAAGRQDGLLWYKDAGQLVTGGFSMAVVQANQLLEDQSQVESGSLSLADYGPQGTFVGVYDGHGGPETSRFINDHLFNHLRRFATEHKSMSADVIRKAFQETEEGFLSLVIKEWSFKPQIASVGSCCLVRVSCAGTLYVANLGDSRAVLGRLVKATGEVLATQLSAEHNACYEEVRQELQSSHPDDPRIVVLKHNVWRVKGLIQISRSIGDVYLKKPEYNREPLHSKFRLRETFQKPILSSEPQITEHRIQPNDQFVIFASDGLWEHLSNQEAVDLVQSSPRNGIARRLVKAAMQEAAKKREMRYSDLKKIDRGVRRHFHDDITVVVVFLDSDAMSKASWSKSPSVSLRGGGVTLPAKSLAPFSAPAQLNGTH

SEQ ID NO: 69241 - DNA, 1164 bp, Zea mays
  CDS (1)..(1164)
atgtggtcgtggttgacgaagattgcgtccgcgtgcttgggcccggtccggaggtgcgcgcgtacgaggaaggatgaggacgacagcgataatggccgcggcgtcgccgacgacctgctgtggtcgcgggacctcgggcgccacgcggcgggtcagttctcgtttgccgtcgtgcaggccaacgaggcgttggaggaccacagccaagtggagacaggctctgccgcaactttcgtaggcgtctacgacggtcatggcggcgctgaggctgcccgcttcatatctgaccacctcttcgcacacctcattcgacttgctcaggaaaatggaacaatatctgaggatgttgttcggagtgcgttttctgccaccgaggaaggcttcttgacactcgtgcggagaacacgttttataaagcctttgattgctgcggttggatcctgctgtctagttggtgtcatatggagagggacactatatgtggctaatctaggcgattccagggctgttattggcgttctaggtagatcaaacaagatcgtggctgagccactcacaagagatcataatgcaagtagggaggaggtcaggcaggagcttatatcccgtcatccagatgattctcaaattgtcgttctcaagcatggtgtttggcgcatcaagggcataattcaggtttcaagaacaattggagatgcttacttgaagaggcgggaatttgctcttgatccatctatcactcgtttccgcctttcggagcctctccgccagcctattctcacagcagagccatctatctatacaagggtgcttaacccacaagataaatttattatttttgcatctgatggtctttgggagcacttgacaaatcaacaggccgttgaaattgtccacagcaatccacgatcaggaattgcaaagaggctggtaagggcagcgttgaaacaagctgcacggaagagggaaatgaggtatgatgacctcaggaaagttgagaagggaattcgccgcttcttccacgatgacattacagtagttgttgtttacatagatcacggattactgcaagagagggatacttccgtgccagagctctcagtccgtggctttgttgactccgttggcccctcaaatttctcagggataaccgccatatcatga

SEQ ID NO: 69242 - protein, 387 aa, Zea mays
MWSWLTKIASACLGPVRRCARTRKDEDDSDNGRGVADDLLWSRDLGRHAAGQFSFAVVQANEALEDHSQVETGSAATFVGVYDGHGGAEAARFISDHLFAHLIRLAQENGTISEDVVRSAFSATEEGFLTLVRRTRFIKPLIAAVGSCCLVGVIWRGTLYVANLGDSRAVIGVLGRSNKIVAEPLTRDHNASREEVRQELISRHPDDSQIVVLKHGVWRIKGIIQVSRTIGDAYLKRREFALDPSITRFRLSEPLRQPILTAEPSIYTRVLNPQDKFIIFASDGLWEHLTNQQAVEIVHSNPRSGIAKRLVRAALKQAARKREMRYDDLRKVEKGIRRFFHDDITVVVVYIDHGLLQERDTSVPELSVRGFVDSVGPSNFSGITAIS

SEQ ID NO: 69243 - DNA, 1179 bp, Zea mays
  CDS (1)..(1179)
atgctagtgaaattgatgaacttgttacgggcgtgctggcgaccgtcatcgaaccggcatgcccgaacaggctcagatgttaccggtaggcaggatggacttctatggtacaaggacgccgggcaacatgtcaacggggagttctccatggctgttgttcaggcaaataacttacttgaggaccagtgtcagatcgagtcgggcccactgagttttctagattccggaccatatggcactttcgttggcgtttacgatggacatggtggtccagagacggcctgctatatcaatgatcatctcttccagaatctgaaaagatttgcatctgagcagaatacaatgtctgctgatgtactgaagaaggcatatgaagctacagaagatggattcttctccattgttaccaaacaatggcctgtaaagcctcagatagcagctgtcggctcatgctgcctggtcggtgtaatttgtggtggcatgctttatgttgccaatgttggggattcccgtgttgttttaggaagacatgttaaggctactggagaagttttggctgtccaactgtcagcagagcataatgtaagtattgagtcagtgagaaaagaactgcagtcaatgcacccagaagataggcacattgttgttctcaagcacaatgtttggcgtgtaaaaggactaattcaggtttgtagatcaatcggtgatgcttatctcaagaaacaagagttcaatagggaacccctatatgtgaaatttcggcttcgtgaaccttttcacaagccgatactaagttcagaaccatcaatcaatgtgcaaccactacaaccacacgaccagtttctcatatttgcatctgatggactttgggagcacttaaccaaccaagaagctgttgatattgttcacagtagcccccgcagtggctgtgctaggaggctgataagagcggcgctgcaagtggcagccaagaaaagggagatgaggtactcagacctcaagaagatcgaccgcggtgttcgccgccacttccacgacgacataacagtcatagtagtgttccttgattccagcctcgtgagcaaggcgagcacgcaccgaggccccactctttccctgcgaggcggcggtgccagcgctggtctgcgcagcaacacgcttgcaccaacgtcaatgtga

SEQ ID NO: 69244 - protein, 392 aa, Zea mays
MLVKLMNLLRACWRPSSNRHARTGSDVTGRQDGLLWYKDAGQHVNGEFSMAVVQANNLLEDQCQIESGPLSFLDSGPYGTFVGVYDGHGGPETACYINDHLFQNLKRFASEQNTMSADVLKKAYEATEDGFFSIVTKQWPVKPQIAAVGSCCLVGVICGGMLYVANVGDSRVVLGRHVKATGEVLAVQLSAEHNVSIESVRKELQSMHPEDRHIVVLKHNVWRVKGLIQVCRSIGDAYLKKQEFNREPLYVKFRLREPFHKPILSSEPSINVQPLQPHDQFLIFASDGLWEHLTNQEAVDIVHSSPRSGCARRLIRAALQVAAKKREMRYSDLKKIDRGVRRHFHDDITVIVVFLDSSLVSKASTHRGPTLSLRGGGASAGLRSNTLAPTSM

SEQ ID NO: 69245 - DNA, 873 bp, Zea mays; identical to SEQ ID NO: 1584
  CDS (1)..(873)

SEQ ID NO: 69246 - protein, 290 aa, Zea mays; identical to SEQ ID NO: 1585

SEQ ID NO: 69247 - DNA, 1065 bp, Zea mays; identical to SEQ ID NO: 1042
  CDS (1)..(1065)

SEQ ID NO: 69248 - protein, 354 aa, Zea mays; identical to SEQ ID NO: 1043

SEQ ID NO: 69249 - DNA, 1083 bp, Zea mays; identical to SEQ ID NO: 1044
  CDS (1)..(1083)

SEQ ID NO: 69250 - protein, 360 aa, Zea mays; identical to SEQ ID NO: 1045

SEQ ID NO: 69251 - DNA, 1455 bp, Zea mays; identical to SEQ ID NO: 1594
  CDS (1)..(1455)

SEQ ID NO: 69252 - protein, 484 aa, Zea mays; identical to SEQ ID NO: 1595

SEQ ID NO: 69253 - DNA, 1200 bp, Zea mays
  CDS (1)..(1200)
atgctggccgcggtgatggactacttcagctcctgctggggcccgcgatcgggcgccgggcaccggggcaagggctccgacgccgccggccggcaggacggtctcctctggtacaaggacgccggccagctcgtcactggggagttctccatggccgtggtgcaggccaaccagctcctcgaggaccagagccaagtagagtccggatcgctctccctggctgacccgggcccacagggcaccttcgtcggcgtctatgatggccatggcggcccggagacgtcccggttcatcaatgaccacctcttcaaccatctcagaaggtttgcaactgagcacaagtttatgtcagcggacgtgatccggaaagctttccaagcaactgaggagggctttctttctctagtcagcaaggaatggtctttgaagcctcagattgcttcagtgggctcctgctgccttgttggtgtaatctgtgctgggactctctatgttgcaaacgtgggcgactcacgtgcagttcttggaaggcttgttaaggcaactggagaggttgtggccatgcagttgtcatcggagcacaatgcgtgctatgaggaagttagacaagaactgcagtcatcacatcctgacgatccacatattgtggttctcaaacacaatgtttggcgagtgaagggtctcatccagatctcaagatctattggagatgtatatctaaagaaaccagagtacaacagagaaccacttcacagcaagtttcggcttcgagaaaccttccagaggccgatccttagttctgaacctcaaattactgaacatcgaatacagccgaacgatcaatttgttatatttgcttctgatggtctatgggagcacctcagcaataaggaagcagttgaccttgtccaaagtagtccccgaaatggaatcgctcggaggctagtgaaagccgcgatgcaagaagctgccaagaagagggagatgagatactcagacctcaagaagatcgaccgtggtgtgagaaggcatttccacgacgatataactgtcgtcgtggtattcctcgattcggatgccatgagcaaagctagctggagcaaaagcccctcggtttctctccgagggggcggtgtcgccctccctgcgaagtccctcgcacctttctcagctccggcacggctgaacagcacctactga

SEQ ID NO: 69254 - protein, 399 aa, Zea mays
MLAAVMDYFSSCWGPRSGAGHRGKGSDAAGRQDGLLWYKDAGQLVTGEFSMAVVQANQLLEDQSQVESGSLSLADPGPQGTFVGVYDGHGGPETSRFINDHLFNHLRRFATEHKFMSADVIRKAFQATEEGFLSLVSKEWSLKPQIASVGSCCLVGVICAGTLYVANVGDSRAVLGRLVKATGEVVAMQLSSEHNACYEEVRQELQSSHPDDPHIVVLKHNVWRVKGLIQISRSIGDVYLKKPEYNREPLHSKFRLRETFQRPILSSEPQITEHRIQPNDQFVIFASDGLWEHLSNKEAVDLVQSSPRNGIARRLVKAAMQEAAKKREMRYSDLKKIDRGVRRHFHDDITVVVVFLDSDAMSKASWSKSPSVSLRGGGVALPAKSLAPFSAPARLNSTY

SEQ ID NO: 69255 - DNA, 1179 bp, Zea mays
  CDS (1)..(1179)
atgtggccgtggctggagaggattgcgtccgcgtgctgggaccgggtccggaagtacgcgcttacgaggaagggtgaggacgacgccgacaccgacgccgacgtcgacgccgtcgcggacgagctgctgtggtcgcgggacctcacccgtcacgcggcgggcgacttctccttcgccgtcgtgcaggccaacgacgtgttggaggaccagagtcaggtggagacggccgccgctgccaccttcgtcggcgtctacgacggccacgggggcgccgaggcgtcccgcttcatctctaaccacctttctgcgcacatcgtccgtcttgcacaggaacatggaacaatgtctgaggatgttgttcgaaaggccttttctgctacagaggaaggcttcctgtcgcttgtgcgcaggacacatttgataaaacctgctatggctactattggatcttgctgtctggttggtatcatatggagagggacactctacctggccaatcttggtgattctcgggcggttgttggttgtttggatggagcaaacaggatttttgctgaacagttaacaagggaccacaatgctagcatggaagagattaggcaggagcttaggtctcttcatcctgatgattcgcaaatcgttgttctgaagaatggtgtgtggcgcatcaaaggcatcatacaggtttcaaggtctataggtgatgcatacttgaagaagcgagaattcgctgttgatccatccacagctcgtttccacctctcggaacctctccgccggcctgttctgacgtcagaaccatctatatcttcaagaattcttggttcgcaagaccgttttttgatctttgcatcggatggactatgggagcacctctcaaaccagcaagctgttgaaattgtccacaatagtccacgagaaggtgttgcaaggagattggtacaaacagctctaaaagaagctgcgaggaagagggaaatgaggtatggcgatattaagaagctcgaaaaaggagtccggcgctacttccacgacgacataacagttgtcgtcgtcttcatagaccatgaactgcgggcggagcattcttcctcgacctctgttcctgaactctcggtccgtgggttcgttgatgcgggggcacgctccagcttttcagggatgaacgacattacttga

SEQ ID NO: 69256 - protein, 392 aa, Zea mays
MWPWLERIASACWDRVRKYALTRKGEDDADTDADVDAVADELLWSRDLTRHAAGDFSFAVVQANDVLEDQSQVETAAAATFVGVYDGHGGAEASRFISNHLSAHIVRLAQEHGTMSEDVVRKAFSATEEGFLSLVRRTHLIKPAMATIGSCCLVGIIWRGTLYLANLGDSRAVVGCLDGANRIFAEQLTRDHNASMEEIRQELRSLHPDDSQIVVLKNGVWRIKGIIQVSRSIGDAYLKKREFAVDPSTARFHLSEPLRRPVLTSEPSISSRILGSQDRFLIFASDGLWEHLSNQQAVEIVHNSPREGVARRLVQTALKEAARKREMRYGDIKKLEKGVRRYFHDDITVVVVFIDHELRAEHSSSTSVPELSVRGFVDAGARSSFSGMNDIT

SEQ ID NO: 69257 - DNA, 1119 bp, Zea mays; identical to SEQ ID NO: 1046
  CDS (1)..(1119)

SEQ ID NO: 69258 - protein, 372 aa, Zea mays; identical to SEQ ID NO: 1047

SEQ ID NO: 69259 - DNA, 1173 bp, Zea mays
  CDS (1)..(1173)
atgctagtgaaattgatgaacttgttacgggcgtgctggcgaccgtcatcgaaccggcatgcccgaacaggctcagatgttaccggtaggcaggatggacttctatggtacaaggacgccgggcaacatgtcaatggggagttctccatggctgttgttcaggcaaataacttacttgaggaccagtgtcagatcgagtcgggcccactgagttttctagattctggaccatatggcactttcgttggtgtttacgatgggcatggtggtccagagacggcctgctatatcaatgatcatcttttccagaatctgaaaagatttgcatctgagcagaatgcaatgtctgctgatgtactgaagaaggcatatgaagctacagaagatggattcttctccattgttaccaaacaatggcctgtaaagcctcagatagcagctgtcggctcatgctgcctggtcggtgtaatttgtggtggcatgctttatgttgccaatgttggggattcccgtgtcgttttaggaaaacatgttaaggccactggagaagttttggctgtccaactgtcagcagaacataatgttagtattgcgtccgtgagaaaagaactgcagtcaatgcacccagaagataggcacattgttgttctcaagcacaatgtttggcgtgttaaaggactaattcaggtttgtagatcaattggtgatgcatatctcaaaaagcaagagttcaacagggaacccctatatgcaaaatttcgcctccgtgaaccttttcacaagccaatactaagttcagaaccatcaatcagtgtgcaaccactacaaccacacgaccagtttctcatatttgcatctgatggactttgggagcagttaaccaaccaagaggcagttgatattgttcgaagtagcccccgcagtggctgtgctaggaggctgataagagcggcactgcaagaggcagccaagaaaagagagatgaggtactcggacctcaagaagattgaccgcggtgttcgccgccacttccacgacgacataacagtcatagtagtgttccttgactccggcctcgtaagccaggcgagcacacaccgaggtccaactctttccttgcgaggcggtggcggcagcgctggcctgcgcagcaacacacttgcacctacgtga

SEQ ID NO: 69260 - protein, 390 aa, Zea mays
MLVKLMNLLRACWRPSSNRHARTGSDVTGRQDGLLWYKDAGQHVNGEFSMAVVQANNLLEDQCQIESGPLSFLDSGPYGTFVGVYDGHGGPETACYINDHLFQNLKRFASEQNAMSADVLKKAYEATEDGFFSIVTKQWPVKPQIAAVGSCCLVGVICGGMLYVANVGDSRVVLGKHVKATGEVLAVQLSAEHNVSIASVRKELQSMHPEDRHIVVLKHNVWRVKGLIQVCRSIGDAYLKKQEFNREPLYAKFRLREPFHKPILSSEPSISVQPLQPHDQFLIFASDGLWEQLTNQEAVDIVRSSPRSGCARRLIRAALQEAAKKREMRYSDLKKIDRGVRRHFHDDITVIVVFLDSGLVSQASTHRGPTLSLRGGGGSAGLRSNTLAPT

SEQ ID NO: 69261 - DNA, 1164 bp, Zea mays
  CDS (1)..(1164)
atgtggtcgtggttgacgaagattgcgtccgcgtgcttgggcccggtccggaggtgcgcgcgtacgaggaaggatgaggacgacagcgataatggccgcggcgtcgccgacgacctgctgtggtcgcgggacctcgggcgccacgcggcgggtcagttctcgtttgccgtcgtgcaggccaacgaggcgttggaggaccacagccaagtggagacaggctctgccgcaactttcgtaggcgtctacgacggtcatggcggcgctgaggctgcccgcttcatatctgaccacctcttcgcacacctcattcgacttgctcaggaaaatggaacaatatctgaggatgttgttcggagtgcgttttctgccaccgaggaaggcttcttgacactcgtgcggagaacacgttttataaagcctttgattgctgcggttggatcctgctgtctagttggtgtcatatggagagggacactatatgtggctaatctaggcgattccagggctgttattggcgttctaggtagatcaaacaagatcgtggctgagccactcacaagagatcataatgcaagtagggaggaggtcaggcaggagcttatatcccgtcatccagatgattctcaaattgtcgttctcaagcatggtgtttggcgcatcaagggcataattcaggtttcaagaacaattggagatgcttacttgaagaggcgggaatttgctcttgatccatctatcactcgtttccgcctttcggagcctctccgccagcctgttctcacagcagagccatctatctatacaagggtgcttaacccacaagataaatttattatttttgcatctgatggtctttgggagcacttgacaaatcaacaggccgttgaaattgtccacagcaatccacgatcaggaattgcaaagaggctggtaagggcagcgttgaaacaagctgcacggaagagggaaatgaggtatgatgacctcaggaaagttgagaagggaattcgccgcttcttccacgatgacattacagtagttgttgtttacatagatcacggattactgcaagagagggatacttccgtgccagagctctcagtccgtggctttgttgactccgttggcccctcaagtttctcagggataaccgccatatcatga

SEQ ID NO: 69262 - protein, 387 aa, Zea mays
MWSWLTKIASACLGPVRRCARTRKDEDDSDNGRGVADDLLWSRDLGRHAAGQFSFAVVQANEALEDHSQVETGSAATFVGVYDGHGGAEAARFISDHLFAHLIRLAQENGTISEDVVRSAFSATEEGFLTLVRRTRFIKPLIAAVGSCCLVGVIWRGTLYVANLGDSRAVIGVLGRSNKIVAEPLTRDHNASREEVRQELISRHPDDSQIVVLKHGVWRIKGIIQVSRTIGDAYLKRREFALDPSITRFRLSEPLRQPVLTAEPSIYTRVLNPQDKFIIFASDGLWEHLTNQQAVEIVHSNPRSGIAKRLVRAALKQAARKREMRYDDLRKVEKGIRRFFHDDITVVVVYIDHGLLQERDTSVPELSVRGFVDSVGPSSFSGITAIS

SEQ ID NO: 69263 - DNA, 1065 bp, Zea mays; identical to SEQ ID NO: 1048
  CDS (1)..(1065)

SEQ ID NO: 69264 - protein, 354 aa, Zea mays; identical to SEQ ID NO: 1049

SEQ ID NO: 69265 - DNA, 1167 bp, Zea mays; identical to SEQ ID NO: 1050
  CDS (1)..(1167)

SEQ ID NO: 69266 - protein, 388 aa, Zea mays; identical to SEQ ID NO: 1051

SEQ ID NO: 69267 - DNA, 20 bp, Artificial sequence
  primer
atggttaaaccctgttggag

SEQ ID NO: 69268 - DNA, 20 bp, Artificial sequence
  primer
tcatgatgttgaatgcatcg

SEQ ID NO: 69269 - protein, 371 aa, Artificial sequence
  consensus sequence
  Variant (3)..(15): Xaa in position 3 to 15 is any amino acid
  Variant (16)..(41): Xaa in position 16 to 41 is any or no amino acid
  Variant (44)..(44): Xaa in position 44 is any amino acid
  Variant (50)..(59): Xaa in position 50 to 59 is any amino acid
  Variant (61)..(98): Xaa in position 61 to 98 is any amino acid
  Variant (99)..(135): Xaa in position 99 to 135 is any or no amino acid
  Variant (137)..(148): Xaa in position 137 to 148 is any amino acid
  Variant (149)..(149): Xaa in position 149 is any or no amino acid
  Variant (151)..(152): Xaa in position 151 to 152 is any amino acid
  Variant (155)..(155): Xaa in position 155 is any amino acid
  Variant (163)..(167): Xaa in position 163 to 167 is any amino acid
  Variant (168)..(181): Xaa in position 168 to 181 is any or no amino acid
  Variant (183)..(184): Xaa in position 183 to 184 is any amino acid
  Variant (187)..(188): Xaa in position 187 to 188 is any amino acid
  Variant (190)..(193): Xaa in position 190 to 193 is any amino acid
  Variant (194)..(200): Xaa in position 194 to 200 is any or no amino acid
  Variant (202)..(217): Xaa in position 202 to 217 is any amino acid
  Variant (218)..(223): Xaa in position 218 to 223 is any or no amino acid
  Variant (225)..(229): Xaa in position 225 to 229 is any amino acid
  Variant (231)..(231): Xaa in position 231 is any amino acid
  Variant (235)..(236): Xaa in position 235 to 236 is any amino acid
  Variant (239)..(244): Xaa in position 239 to 244 is any amino acid
  Variant (245)..(272): Xaa in position 245 to 272 is any or no amino acid
  Variant (274)..(283): Xaa in position 274 to 283 is any amino acid
  Variant (284)..(284): Xaa in position 284 is any or no amino acid
  Variant (286)..(286): Xaa in position 286 is any amino acid
  Variant (288)..(288): Xaa in position 288 is any amino acid
  Variant (290)..(290): Xaa in position 290 is any amino acid
  Variant (297)..(303): Xaa in position 297 to 303 is any amino acid
  Variant (306)..(320): Xaa in position 306 to 320 is any amino acid
  Variant (321)..(347): Xaa in position 321 to 347 is any or no amino acid
  Variant (349)..(354): Xaa in position 349 to 354 is any amino acid
  Variant (355)..(360): Xaa in position 355 to 360 is any or no amino acid
  Variant (362)..(364): Xaa in position 362 to 364 is any amino acid
  Variant (366)..(368): Xaa in position 366 to 368 is any amino acid
  Variant (370)..(370): Xaa in position 370 is any amino acid
EDXXXXXXXXXXXXXXXXXXXXXXXXXXXXXXXXXXXXXXXGVXDGHGGXXXXXXXXXXLXXXXXXXXXXXXXXXXXXXXXXXXXXXXXXXXXXXXXXXXXXXXXXXXXXXXXXXXXXXXXXXXXXXXXXXXXXXGXXXXXXXXXXXXXLXXANXGDSRAVLXXXXXXXXXXXXXXXXXXXAXXLSXXHXXXXXXXXXXXEXXXXXXXXXXXXXXXXXXXXXXGXXXXXRXIGDXXLKXXXXXXXXXXXXXXXXXXXXXXXXXXXXXXXXXXPXXXXXXXXXXXDXFXIXASDGLWXXXXXXXAVXXXXXXXXXXXXXXXXXXXXXXXXXXXXXXXXXXXXXXXXXXLXXXXXXXXXXXXRXXXDXXXVXV

SEQ ID NO: 69270 - protein, 21 aa, Artificial sequence
  protein pattern
  Variant (2)..(2): Xaa in position 2 is any amino acid
  Variant (3)..(3): Xaa in position 3 is any or no amino acid
  Variant (10)..(10): Xaa in position 10 is Asp, Glu or Lys
  Variant (11)..(11): Xaa in position 11 is any amino acid
  Variant (12)..(12): Xaa in position 12 is Ile, Leu, Met or Val
  Variant (13)..(13): Xaa in position 13 is Asp, Ser or Thr
  Variant (14)..(14): Xaa in position 14 is Asp, Asn, Ser or Thr
  Variant (15)..(16): Xaa in position 15 to 16 is any amino acid
  Variant (18)..(18): Xaa in position 18 is Ala, Cys or Val
  Variant (19)..(20): Xaa in position 19 to 20 is any amino acid
  Variant (21)..(21): Xaa in position 21 is Ala, Ile or Val
IXXASDGLWXXXXXXXAXXXX

SEQ ID NO: 69271 - protein, 15 aa, Artificial sequence
  protein pattern
  Variant (2)..(2): Xaa in position 2 is any amino acid
  Variant (3)..(3): Xaa in position 3 is Ile or Leu
  Variant (4)..(4): Xaa in position 4 is Ala, Gln or Ser
  Variant (5)..(5): Xaa in position 5 is Ile, Met or Val
  Variant (6)..(6): Xaa in position 6 is Ala, Cys, Ser or Thr
  Variant (8)..(8): Xaa in position 8 is Ala, Gly, Ser or Thr
  Variant (12)..(13): Xaa in position 12 to 13 is any amino acid
  Variant (14)..(14): Xaa in position 14 is Leu, Met or Val
GXXXXXRXIGDXXXK

SEQ ID NO: 69272 - protein, 19 aa, Artificial sequence
  protein pattern
  Variant (2)..(2): Xaa in position 2 is Ile or Val
  Variant (3)..(3): Xaa in position 3 is Phe or Tyr
  Variant (9)..(9): Xaa in position 9 is any amino acid
  Variant (10)..(10): Xaa in position 10 is Asp, Glu, Gln, Arg or Ser
  Variant (11)..(11): Xaa in position 11 is Ala, Cys, Thr or Val
  Variant (12)..(12): Xaa in position 12 is Ala or Ser
  Variant (13)..(13): Xaa in position 13 is any amino acid
  Variant (14)..(14): Xaa in position 14 is Phe or Tyr
  Variant (15)..(18): Xaa in position 15 to 18 is any amino acid
  Variant (19)..(19): Xaa in position 19 is Phe, Ile, Leu or Met
GXXDGHGGXXXXXXXXXXX

SEQ ID NO: 69273 - protein, 10 aa, Artificial sequence
  protein pattern
  Variant (2)..(2): Xaa in position 2 is Asp or Asn
  Variant (3)..(3): Xaa in position 3 is Ile, Leu, Met or Val
  Variant (4)..(4): Xaa in position 4 is Ser or Thr
  Variant (6)..(6): Xaa in position 6 is Ile or Val
  Variant (8)..(8): Xaa in position 8 is Ile, Leu, Met or Val
  Variant (9)..(9): Xaa in position 9 is any amino acid
  Variant (10)..(10): Xaa in position 10 is Phe, Ile, Leu or Val
DXXXVXVXXX

SEQ ID NO: 69274 - protein, 20 aa, Artificial sequence
  protein pattern
  Variant (2)..(3): Xaa in position 2 to 3 is any amino acid
  Variant (4)..(4): Xaa in position 4 is Leu, Met or Val
  Variant (5)..(5): Xaa in position 5 is Ser or Thr
  Variant (6)..(6): Xaa in position 6 is any amino acid
  Variant (7)..(7): Xaa in position 7 is Asp or Glu
  Variant (9)..(12): Xaa in position 9 to 12 is any amino acid
  Variant (13)..(14): Xaa in position 13 to 14 is any or no amino acid
  Variant (16)..(17): Xaa in position 16 to 17 is any amino acid
  Variant (19)..(19): Xaa in position 19 is any amino acid
AXXXXXXHXXXXXXEXXRXE

SEQ ID NO: 69275 - DNA, 423 bp, Arabidopsis thaliana; identical to SEQ ID NO: 2735
  CDS (1)..(423)

SEQ ID NO: 69276 - protein, 140 aa, Arabidopsis thaliana; identical to SEQ ID NO: 2736

SEQ ID NO: 69277 - DNA, 405 bp, Glycine max
  CDS (1)..(405)
atgcattatcaagcagcagcggcgtcgtgggggagctacgtggcgggggccccacggaacagcgcggcggcggcggtggtggtgggggacccactggagcggatagagaggctggcgtcggagagcgcggtggtgatattcagcgtgagcacgtgctgcatgtgccacgccatcaagaggctcttctgcggcatgggcgtgaacccgaccgtgcacgagctggacgaggatccaagaggcaaggacctcgaacgcgccctcatgcggctcctcggaaccccctcggttgtccctgtcgtcttcatcggtggcaagcttgtcggaaccatggaccgagtcatggcttgccacattaacggcaccctcgttcctctcctcaaagaagctggtgctctctggctttga

SEQ ID NO: 69278 - protein, 134 aa, Glycine max
MHYQAAAASWGSYVAGAPRNSAAAAVVVGDPLERIERLASESAVVIFSVSTCCMCHAIKRLFCGMGVNPTVHELDEDPRGKDLERALMRLLGTPSVVPVVFIGGKLVGTMDRVMACHINGTLVPLLKEAGALWL

SEQ ID NO: 69279 - DNA, 414 bp, Triticum aestivum
  CDS (1)..(414)
atgttgaggatgcagcagcaggtggagggcgtggtgggcggcggcatcatggcggaggcggaggaggcggcggtgtacgagcgggtggctcgcatggccagcggcaacgcggtggtcgtcttcagcgccagcggctgctgcatgtgccacgtcgtcaagcgcctcctgcttggcctgggggtcggccccaccgtctacgagttggaccagatgggcggcgccgggcgagagatccaggcggcgctggcgcagctgctgccccccggacccggcgccggccaccaccagcagccgccagtgcccgtggtgttcgtcggcgggaggctcctgggcggcgtggagaaggtgatggcgtgccacatcaacggcacgctcgtcccgctcctcaaggacgccggcgcgctctggctctga

SEQ ID NO: 69280 - protein, 137 aa, Triticum aestivum
MLRMQQQVEGVVGGGIMAEAEEAAVYERVARMASGNAVVVFSASGCCMCHVVKRLLLGLGVGPTVYELDQMGGAGREIQAALAQLLPPGPGAGHHQQPPVPVVFVGGRLLGGVEKVMACHINGTLVPLLKDAGALWL

SEQ ID NO: 69281 - DNA, 414 bp, Zea mays subsp. mays; identical to SEQ ID NO: 10837
  CDS (1)..(414)

SEQ ID NO: 69282 - protein, 137 aa, Zea mays subsp. mays; identical to SEQ ID NO: 2828

SEQ ID NO: 69283 - DNA, 405 bp, Oryza sativa (japonica cultivar-group); identical to SEQ ID NO: 2593
  CDS (1)..(405)

SEQ ID NO: 69284 - protein, 134 aa, Oryza sativa (japonica cultivar-group); identical to SEQ ID NO: 2594

SEQ ID NO: 69285 - DNA, 477 bp, Oryza sativa (japonica cultivar-group); identical to SEQ ID NO: 2595
  CDS (1)..(477)

SEQ ID NO: 69286 - protein, 158 aa, Oryza sativa (japonica cultivar-group); identical to SEQ ID NO: 2596

SEQ ID NO: 69287 - DNA, 309 bp, Arabidopsis thaliana; identical to SEQ ID NO: 2597
  CDS (1)..(309)

SEQ ID NO: 69288 - protein, 102 aa, Arabidopsis thaliana; identical to SEQ ID NO: 2598

SEQ ID NO: 69289 - DNA, 309 bp, Magnaporthe grisea 70-15; identical to SEQ ID NO: 2613
  CDS (1)..(309)

SEQ ID NO: 69290 - protein, 102 aa, Magnaporthe grisea 70-15; identical to SEQ ID NO: 2614

SEQ ID NO: 69291 - DNA, 309 bp, Aspergillus nidulans FGSC A4; identical to SEQ ID NO: 2629
  CDS (1)..(309)

SEQ ID NO: 69292 - protein, 102 aa, Aspergillus nidulans FGSC A4; identical to SEQ ID NO: 2630

SEQ ID NO: 69293 - DNA, 471 bp, Candida albicans SC5314; identical to SEQ ID NO: 2639
  CDS (1)..(471): transl_table=12

SEQ ID NO: 69294 - protein, 156 aa, Candida albicans SC5314; identical to SEQ ID NO: 2640

SEQ ID NO: 69295 - DNA, 384 bp, Oryza sativa subsp; identical to SEQ ID NO: 3343
  CDS (1)..(384)

SEQ ID NO: 69296 - protein, 127 aa, Oryza sativa subsp; identical to SEQ ID NO: 3344

SEQ ID NO: 69297 - DNA, 315 bp, Oryza sativa subsp; identical to SEQ ID NO: 3345
  CDS (1)..(315)

SEQ ID NO: 69298 - protein, 104 aa, Oryza sativa subsp; identical to SEQ ID NO: 3346

SEQ ID NO: 69299 - DNA, 393 bp, Oryza sativa subsp; identical to SEQ ID NO: 3347
  CDS (1)..(393)

SEQ ID NO: 69300 - protein, 130 aa, Oryza sativa subsp; identical to SEQ ID NO: 3348

SEQ ID NO: 69301 - DNA, 408 bp, Oryza sativa subsp
  CDS (1)..(408)
atgcagtacggcgcggcggcggcggagcaggcgtggtacatgccggcggcggcgatggtggtggcagcggcggcggagacggcggcggagcgggtggagaggctggcgtcggagagcgcggtggtggtgttcagcgtgagcagctgctgcatgtgccacgccgtgaagcgcctcttctgcggcatgggcgtgcacccggcggtgcacgagctggacctcgacccgcgcggccgcgacctggagggggccctggggagcctcgtcggggcccgccgcgcagccgctgccgccgtgcccgtcgtgttcatcggcggcaagctggtcggcgccatggaccgcgtcatggccgcgcacatcaacggctccctcgtgccgctgctcaaggaggccggcgcgctctggctttag

SEQ ID NO: 69302 - protein, 135 aa, Oryza sativa subsp
MQYGAAAAEQAWYMPAAAMVVAAAAETAAERVERLASESAVVVFSVSSCCMCHAVKRLFCGMGVHPAVHELDLDPRGRDLEGALGSLVGARRAAAAAVPVVFIGGKLVGAMDRVMAAHINGSLVPLLKEAGALWL

SEQ ID NO: 69303 - DNA, 336 bp, Oryza sativa subsp
  CDS (1)..(336)
atggcggagatggtggcgaggctggcgtcggagagggcggtggtggtgttcaccaagagcggctgctgcatgtgcaccgcggtgacgacgctgctcggcgagctcgccgtcagcgccgccgtgcacgagctcgacagggagccgctcgggaaggagatggagagggagctcgccaggaggctctacggctccggcggccgcggcgggcccgccgtgccggcggtgttcatcggcgggagcctcgtcggcagcaccagcaaggtgatggccatgcatctcaagggggaagctcgtgccaatgctcaagaacgccggtgcactgtggctttaatttga

SEQ ID NO: 69304 - protein, 111 aa, Oryza sativa subsp
MAEMVARLASERAVVVFTKSGCCMCTAVTTLLGELAVSAAVHELDREPLGKEMERELARRLYGSGGRGGPAVPAVFIGGSLVGSTSKVMAMHLKGEARANAQERRCTVALI

SEQ ID NO: 69305 - DNA, 306 bp, Vitis vinifera; identical to SEQ ID NO: 2645
  CDS (1)..(306)
  misc_feature (225)..(225): r is g or a
  misc_feature (273)..(273): y is t or c

SEQ ID NO: 69306 - protein, 101 aa, Vitis vinifera; identical to SEQ ID NO: 2646

SEQ ID NO: 69307 - DNA, 324 bp, Vitis vinifera; identical to SEQ ID NO: 2647
  CDS (1)..(324)

SEQ ID NO: 69308 - protein, 107 aa, Vitis vinifera; identical to SEQ ID NO: 2648

SEQ ID NO: 69309 - DNA, 321 bp, Vitis vinifera; identical to SEQ ID NO: 2649
  CDS (1)..(321)

SEQ ID NO: 69310 - protein, 106 aa, Vitis vinifera; identical to SEQ ID NO: 2650

SEQ ID NO: 69311 - DNA, 345 bp, Vitis vinifera; identical to SEQ ID NO: 2651
  CDS (1)..(345)

SEQ ID NO: 69312 - protein, 114 aa, Vitis vinifera; identical to SEQ ID NO: 2652

SEQ ID NO: 69313 - DNA, 414 bp, Vitis vinifera; identical to SEQ ID NO: 2653
  CDS (1)..(414)
  misc_feature (18)..(18): y is t or c
  misc_feature (63)..(63): m is a or c

SEQ ID NO: 69314 - protein, 137 aa, Vitis vinifera; identical to SEQ ID NO: 2654

SEQ ID NO: 69315 - DNA, 630 bp, Pichia guilliermondii
  CDS (1)..(630)
atgtccagcagaaaagccagagtcgtggctcttgcggtgtttgccgtgctcatgatcctcgcactccaccacacaacgcgtagcagaattcccacaaatttggataccgagaaaaaagctcaaacgttacttacgtcaaatagtctcattgactccaacaacgacgacaaggtagacgcggctataaaccaccaaatttcgcagttgggcaccgaggatgaagccaagccggaaaccaagccggaagcagcggaaactggcgagtttgatccagccaaagaacttgtgacaattcgagcacttagcccagtggtgattttttcaaagacaacttgtccattttccaaaagactcaaagctttacttcatgacaactaccagatcactccccagcctgctattgtggaattggaccgtcatacccatggtgctgagctccaaaagtaccttgctgaagtcagcggacgcaggaccgtcccaaatgtgttggtaggaaagtcgtccaagagccgaggaggaagcgacgacatgatggcgcttcatgaaagcggcgagttggtgctgctgttgatcgaatggggagagaaactggtggatgtgaagcaggtggaggcgccgtctaatgtgtga

SEQ ID NO: 69316 - protein, 209 aa, Pichia guilliermondii
MSSRKARVVALAVFAVLMILALHHTTRSRIPTNLDTEKKAQTLLTSNSLIDSNNDDKVDAAINHQISQLGTEDEAKPETKPEAAETGEFDPAKELVTIRALSPVVIFSKTTCPFSKRLKALLHDNYQITPQPAIVELDRHTHGAELQKYLAEVSGRRTVPNVLVGKSSKSRGGSDDMMALHESGELVLLLIEWGEKLVDVKQVEAPSNV

SEQ ID NO: 69317 - DNA, 312 bp, Musa acuminata; identical to SEQ ID NO: 3023
  CDS (1)..(312)

SEQ ID NO: 69318 - protein, 103 aa, Musa acuminata; identical to SEQ ID NO: 3024

SEQ ID NO: 69319 - DNA, 312 bp, Musa acuminata; identical to SEQ ID NO: 2661
  CDS (1)..(312)

SEQ ID NO: 69320 - protein, 103 aa, Musa acuminata; identical to SEQ ID NO: 2662

SEQ ID NO: 69321 - DNA, 450 bp, Medicago truncatula; identical to SEQ ID NO: 2663
  CDS (1)..(450)

SEQ ID NO: 69322 - protein, 149 aa, Medicago truncatula; identical to SEQ ID NO: 2664

SEQ ID NO: 69323 - DNA, 399 bp, Beta vulgaris; identical to SEQ ID NO: 2671
  CDS (1)..(399)

SEQ ID NO: 69324 - protein, 132 aa, Beta vulgaris; identical to SEQ ID NO: 2672

SEQ ID NO: 69325 - DNA, 321 bp, Beta vulgaris; identical to SEQ ID NO: 2673
  CDS (1)..(321)

SEQ ID NO: 69326 - protein, 106 aa, Beta vulgaris; identical to SEQ ID NO: 2674

SEQ ID NO: 69327 - DNA, 309 bp, Beta vulgaris; identical to SEQ ID NO: 2675
  CDS (1)..(309)

SEQ ID NO: 69328 - protein, 102 aa, Beta vulgaris; identical to SEQ ID NO: 2676

SEQ ID NO: 69329 - DNA, 309 bp, Beta vulgaris; identical to SEQ ID NO: 2677
  CDS (1)..(309)

SEQ ID NO: 69330 - protein, 102 aa, Beta vulgaris; identical to SEQ ID NO: 2678

SEQ ID NO: 69331 - DNA, 309 bp, Beta vulgaris; identical to SEQ ID NO: 2679
  CDS (1)..(309)

SEQ ID NO: 69332 - protein, 102 aa, Beta vulgaris; identical to SEQ ID NO: 2680

SEQ ID NO: 69333 - DNA, 309 bp, Aspergillus oryzae; identical to SEQ ID NO: 2683
  CDS (1)..(309)

SEQ ID NO: 69334 - protein, 102 aa, Aspergillus oryzae; identical to SEQ ID NO: 2684

SEQ ID NO: 69335 - DNA, 342 bp, Triticum aestivum; identical to SEQ ID NO: 2689
  CDS (1)..(342)

SEQ ID NO: 69336 - protein, 113 aa, Triticum aestivum; identical to SEQ ID NO: 2690

SEQ ID NO: 69337 - DNA, 327 bp, Solanum lycopersicum; identical to SEQ ID NO: 2701
  CDS (1)..(327)

SEQ ID NO: 69338 - protein, 108 aa, Solanum lycopersicum; identical to SEQ ID NO: 2702

SEQ ID NO: 69339 - DNA, 447 bp, Arabidopsis thaliana; identical to SEQ ID NO: 2705
  CDS (1)..(447)

SEQ ID NO: 69340 - protein, 148 aa, Arabidopsis thaliana; identical to SEQ ID NO: 2706

SEQ ID NO: 69341 - DNA, 312 bp, Arabidopsis thaliana; identical to SEQ ID NO: 2707
  CDS (1)..(312)

SEQ ID NO: 69342 - protein, 103 aa, Arabidopsis thaliana; identical to SEQ ID NO: 2708

SEQ ID NO: 69343 - DNA, 312 bp, Arabidopsis thaliana; identical to SEQ ID NO: 2709
  CDS (1)..(312)

SEQ ID NO: 69344 - protein, 103 aa, Arabidopsis thaliana; identical to SEQ ID NO: 2710

SEQ ID NO: 69345 - DNA, 309 bp, Arabidopsis thaliana; identical to SEQ ID NO: 2711
  CDS (1)..(309)

SEQ ID NO: 69346 - protein, 102 aa, Arabidopsis thaliana; identical to SEQ ID NO: 2712

SEQ ID NO: 69347 - DNA, 309 bp, Arabidopsis thaliana; identical to SEQ ID NO: 2713
  CDS (1)..(309)

SEQ ID NO: 69348 - protein, 102 aa, Arabidopsis thaliana; identical to SEQ ID NO: 2714

SEQ ID NO: 69349 - DNA, 300 bp, Arabidopsis thaliana; identical to SEQ ID NO: 2715
  CDS (1)..(300)

SEQ ID NO: 69350 - protein, 99 aa, Arabidopsis thaliana; identical to SEQ ID NO: 2716

SEQ ID NO: 69351 - DNA, 540 bp, Arabidopsis thaliana; identical to SEQ ID NO: 2717
  CDS (1)..(540)

SEQ ID NO: 69352 - protein, 179 aa, Arabidopsis thaliana; identical to SEQ ID NO: 2718

SEQ ID NO: 69353 - DNA, 453 bp, Arabidopsis thaliana; identical to SEQ ID NO: 2719
  CDS (1)..(453)

SEQ ID NO: 69354 - protein, 150 aa, Arabidopsis thaliana; identical to SEQ ID NO: 2720

SEQ ID NO: 69355 - DNA, 378 bp, Arabidopsis thaliana; identical to SEQ ID NO: 2721
  CDS (1)..(378)

SEQ ID NO: 69356 - protein, 125 aa, Arabidopsis thaliana; identical to SEQ ID NO: 2722

SEQ ID NO: 69357 - DNA, 525 bp, Arabidopsis thaliana; identical to SEQ ID NO: 2729
  CDS (1)..(525)

SEQ ID NO: 69358 - protein, 174 aa, Arabidopsis thaliana; identical to SEQ ID NO: 2730

SEQ ID NO: 69359 - DNA, 435 bp, Arabidopsis thaliana; identical to SEQ ID NO: 2731
  CDS (1)..(435)

SEQ ID NO: 69360 - protein, 144 aa, Arabidopsis thaliana; identical to SEQ ID NO: 2732

SEQ ID NO: 69361 - DNA, 339 bp, Oryza sativa subsp
  CDS (1)..(339)
atggcgctcgccaaggccaaggagaccgtcgcctccgctcccgtcgtcgtctacagcaagtcttactgtcctttttgcgtccgtgtgaagaagttgttcgagcagcttggagcaactttcaaggccattgagttggatggggagagtgatggatctgagctgcagtcggcacttgctgaatggactggacaaaggactgttccaaatgtcttcatcaatgggaagcatattggtggctgtgatgatactttggcattgaacaatgaagggaagctggtgcctctgctgaccgaggctggagcaattgccagttctgcaaagacgacaatcaccgcatag

SEQ ID NO: 69362 - protein, 112 aa, Oryza sativa subsp
MALAKAKETVASAPVVVYSKSYCPFCVRVKKLFEQLGATFKAIELDGESDGSELQSALAEWTGQRTVPNVFINGKHIGGCDDTLALNNEGKLVPLLTEAGAIASSAKTTITA

SEQ ID NO: 69363 - DNA, 411 bp, Arabidopsis thaliana; identical to SEQ ID NO: 2733
  CDS (1)..(411)

SEQ ID NO: 69364 - protein, 136 aa, Arabidopsis thaliana; identical to SEQ ID NO: 2734

SEQ ID NO: 69365 - DNA, 414 bp, Arabidopsis thaliana; identical to SEQ ID NO: 2737
  CDS (1)..(414)

SEQ ID NO: 69366 - protein, 137 aa, Arabidopsis thaliana; identical to SEQ ID NO: 2738

SEQ ID NO: 69367 - DNA, 309 bp, Arabidopsis thaliana
  CDS (1)..(309)
atggagaagatatcaaatttgttagaagacaagcccgtggtgatattcagcaagacgtcctgctgtatgagtcactcgatcaagtcgcttatatctggttacggtgcgaattcaacagtgtatgagctagacgaaatgtctaatggaccagagatcgaacgagcacttgtagagcttgggtgcaaaccgactgtgccagctgtctttatagggcaagagctcgtaggtggtgcaaatcaacttatgtctcttcaagtcaggaaccaactagcttcgttgctccgaagagctggagccatatggatttaa

SEQ ID NO: 69368 - protein, 102 aa, Arabidopsis thaliana
MEKISNLLEDKPVVIFSKTSCCMSHSIKSLISGYGANSTVYELDEMSNGPEIERALVELGCKPTVPAVFIGQELVGGANQLMSLQVRNQLASLLRRAGAIWI

SEQ ID NO: 69369 - DNA, 309 bp, Arabidopsis thaliana; identical to SEQ ID NO: 2739
  CDS (1)..(309)

SEQ ID NO: 69370 - protein, 102 aa, Arabidopsis thaliana; identical to SEQ ID NO: 2740

SEQ ID NO: 69371 - DNA, 309 bp, Arabidopsis thaliana; identical to SEQ ID NO: 2741
  CDS (1)..(309)

SEQ ID NO: 69372 - protein, 102 aa, Arabidopsis thaliana; identical to SEQ ID NO: 2742

SEQ ID NO: 69373 - DNA, 309 bp, Arabidopsis thaliana; identical to SEQ ID NO: 2743
  CDS (1)..(309)

SEQ ID NO: 69374 - protein, 102 aa, Arabidopsis thaliana; identical to SEQ ID NO: 2744

SEQ ID NO: 69375 - DNA, 309 bp, Arabidopsis thaliana; identical to SEQ ID NO: 2745
  CDS (1)..(309)

SEQ ID NO: 69376 - protein, 102 aa, Arabidopsis thaliana; identical to SEQ ID NO: 2746

SEQ ID NO: 69377 - DNA, 309 bp, Arabidopsis thaliana; identical to SEQ ID NO: 2573
  CDS (1)..(309)

SEQ ID NO: 69378 - protein, 102 aa, Arabidopsis thaliana; identical to SEQ ID NO: 2574

SEQ ID NO: 69379 - DNA, 309 bp, Arabidopsis thaliana; identical to SEQ ID NO: 2747
  CDS (1)..(309)

SEQ ID NO: 69380 - protein, 102 aa, Arabidopsis thaliana; identical to SEQ ID NO: 2748

SEQ ID NO: 69381 - DNA, 309 bp, Arabidopsis thaliana; identical to SEQ ID NO: 2749
  CDS (1)..(309)

SEQ ID NO: 69382 - protein, 102 aa, Arabidopsis thaliana; identical to SEQ ID NO: 2750

SEQ ID NO: 69383 - DNA, 309 bp, Arabidopsis thaliana; identical to SEQ ID NO: 2751
  CDS (1)..(309)

SEQ ID NO: 69384 - protein, 102 aa, Arabidopsis thaliana; identical to SEQ ID NO: 2752

SEQ ID NO: 69385 - DNA, 378 bp, Oryza sativa; identical to SEQ ID NO: 2753
  CDS (1)..(378)

SEQ ID NO: 69386 - protein, 125 aa, Oryza sativa; identical to SEQ ID NO: 2754

SEQ ID NO: 69387 - DNA, 411 bp, Oryza sativa; identical to SEQ ID NO: 3119
  CDS (1)..(411)

SEQ ID NO: 69388 - protein, 136 aa, Oryza sativa; identical to SEQ ID NO: 3120

SEQ ID NO: 69389 - DNA, 312 bp, Oryza sativa; identical to SEQ ID NO: 2755
  CDS (1)..(312)

SEQ ID NO: 69390 - protein, 103 aa, Oryza sativa; identical to SEQ ID NO: 2756

SEQ ID NO: 69391 - DNA, 444 bp, Oryza sativa; identical to SEQ ID NO: 2757
  CDS (1)..(444)

SEQ ID NO: 69392 - protein, 147 aa, Oryza sativa; identical to SEQ ID NO: 2758

SEQ ID NO: 69393 - DNA, 378 bp, Oryza sativa; identical to SEQ ID NO: 2759
  CDS (1)..(378)

SEQ ID NO: 69394 - protein, 125 aa, Oryza sativa; identical to SEQ ID NO: 2760

SEQ ID NO: 69395 - DNA, 408 bp, Oryza sativa; identical to SEQ ID NO: 2761
  CDS (1)..(408)

SEQ ID NO: 69396 - protein, 135 aa, Oryza sativa; identical to SEQ ID NO: 2762

SEQ ID NO: 69397 - DNA, 402 bp, Oryza sativa; identical to SEQ ID NO: 2763
  CDS (1)..(402)

SEQ ID NO: 69398 - protein, 133 aa, Oryza sativa; identical to SEQ ID NO: 2764

SEQ ID NO: 69399 - DNA, 408 bp, Oryza sativa; identical to SEQ ID NO: 2765
  CDS (1)..(408)

SEQ ID NO: 69400 - protein, 135 aa, Oryza sativa; identical to SEQ ID NO: 2766

SEQ ID NO: 69401 - DNA, 384 bp, Oryza sativa; identical to SEQ ID NO: 2767
  CDS (1)..(384)

SEQ ID NO: 69402 - protein, 127 aa, Oryza sativa; identical to SEQ ID NO: 2768

SEQ ID NO: 69403 - DNA, 345 bp, Oryza sativa; identical to SEQ ID NO: 2769
  CDS (1)..(345)

SEQ ID NO: 69404 - protein, 114 aa, Oryza sativa; identical to SEQ ID NO: 2770

SEQ ID NO: 69405 - DNA, 417 bp, Oryza sativa; identical to SEQ ID NO: 2771
  CDS (1)..(417)

SEQ ID NO: 69406 - protein, 138 aa, Oryza sativa; identical to SEQ ID NO: 2772

SEQ ID NO: 69407 - DNA, 399 bp, Oryza sativa; identical to SEQ ID NO: 2773
  CDS (1)..(399)

SEQ ID NO: 69408 - protein, 132 aa, Oryza sativa; identical to SEQ ID NO: 2774

SEQ ID NO: 69409 - DNA, 579 bp, Oryza sativa; identical to SEQ ID NO: 2777
  CDS (1)..(579)

SEQ ID NO: 69410 - protein, 192 aa, Oryza sativa; identical to SEQ ID NO: 2778

SEQ ID NO: 69411 - DNA, 495 bp, Oryza sativa; identical to SEQ ID NO: 2779
  CDS (1)..(495)

SEQ ID NO: 69412 - protein, 164 aa, Oryza sativa; identical to SEQ ID NO: 2780

SEQ ID NO: 69413 - DNA, 327 bp, Oryza sativa; identical to SEQ ID NO: 2781
  CDS (1)..(327)

SEQ ID NO: 69414 - protein, 108 aa, Oryza sativa; identical to SEQ ID NO: 2782

SEQ ID NO: 69415 - DNA, 330 bp, Oryza sativa; identical to SEQ ID NO: 2785
  CDS (1)..(330)

SEQ ID NO: 69416 - protein, 109 aa, Oryza sativa; identical to SEQ ID NO: 2786

SEQ ID NO: 69417 - DNA, 330 bp, Oryza sativa; identical to SEQ ID NO: 2787
  CDS (1)..(330)

SEQ ID NO: 69418 - protein, 109 aa, Oryza sativa; identical to SEQ ID NO: 2788

SEQ ID NO: 69419 - DNA, 312 bp, Oryza sativa; identical to SEQ ID NO: 2789
  CDS (1)..(312)

SEQ ID NO: 69420 - protein, 103 aa, Oryza sativa; identical to SEQ ID NO: 2790

SEQ ID NO: 69421 - DNA, 315 bp, Oryza sativa; identical to SEQ ID NO: 2791
  CDS (1)..(315)

SEQ ID NO: 69422 - protein, 104 aa, Oryza sativa; identical to SEQ ID NO: 2792

SEQ ID NO: 69423 - DNA, 309 bp, Brassica napus; identical to SEQ ID NO: 2793
  CDS (1)..(309)

SEQ ID NO: 69424 - protein, 102 aa, Brassica napus; identical to SEQ ID NO: 2794

SEQ ID NO: 69425 - DNA, 309 bp, Brassica napus; identical to SEQ ID NO: 2795
  CDS (1)..(309)

SEQ ID NO: 69426 - protein, 102 aa, Brassica napus; identical to SEQ ID NO: 2796

SEQ ID NO: 69427 - DNA, 309 bp, Brassica napus; identical to SEQ ID NO: 2797
  CDS (1)..(309)

SEQ ID NO: 69428 - protein, 102 aa, Brassica napus; identical to SEQ ID NO: 2798

SEQ ID NO: 69429 - DNA, 309 bp, Brassica napus; identical to SEQ ID NO: 2799
  CDS (1)..(309)

SEQ ID NO: 69430 - protein, 102 aa, Brassica napus; identical to SEQ ID NO: 2800

SEQ ID NO: 69431 - DNA, 309 bp, Brassica napus; identical to SEQ ID NO: 2801
  CDS (1)..(309)

SEQ ID NO: 69432 - protein, 102 aa, Brassica napus; identical to SEQ ID NO: 2802

SEQ ID NO: 69433 - DNA, 318 bp, Brassica napus; identical to SEQ ID NO: 2803
  CDS (1)..(318)

SEQ ID NO: 69434 - protein, 105 aa, Brassica napus; identical to SEQ ID NO: 2804

SEQ ID NO: 69435 - DNA, 300 bp, Brassica napus; identical to SEQ ID NO: 2805
  CDS (1)..(300)

SEQ ID NO: 69436 - protein, 99 aa, Brassica napus; identical to SEQ ID NO: 2806

SEQ ID NO: 69437 - DNA, 309 bp, Brassica napus; identical to SEQ ID NO: 2807
  CDS (1)..(309)

SEQ ID NO: 69438 - protein, 102 aa, Brassica napus; identical to SEQ ID NO: 2808

SEQ ID NO: 69439 - DNA, 306 bp, Glycine max; identical to SEQ ID NO: 2811
  CDS (1)..(306)

SEQ ID NO: 69440 - protein, 101 aa, Glycine max; identical to SEQ ID NO: 2812

SEQ ID NO: 69441 - DNA, 315 bp, Triticum aestivum; identical to SEQ ID NO: 2813
  CDS (1)..(315)

SEQ ID NO: 69442 - protein, 104 aa, Triticum aestivum; identical to SEQ ID NO: 2814

SEQ ID NO: 69443 - DNA, 306 bp, Glycine max; identical to SEQ ID NO: 2815
  CDS (1)..(306)

SEQ ID NO: 69444 - protein, 101 aa, Glycine max; identical to SEQ ID NO: 2816

SEQ ID NO: 69445 - DNA, 309 bp, Brassica napus; identical to SEQ ID NO: 2817
  CDS (1)..(309)

SEQ ID NO: 69446 - protein, 102 aa, Brassica napus; identical to SEQ ID NO: 2818

SEQ ID NO: 69447 - DNA, 309 bp, Brassica napus; identical to SEQ ID NO: 2819
  CDS (1)..(309)

SEQ ID NO: 69448 - protein, 102 aa, Brassica napus; identical to SEQ ID NO: 2820

SEQ ID NO: 69449 - DNA, 399 bp, Glycine max; identical to SEQ ID NO: 2821
  CDS (1)..(399)

SEQ ID NO: 69450 - protein, 132 aa, Glycine max; identical to SEQ ID NO: 2822

SEQ ID NO: 69451 - DNA, 312 bp, Triticum aestivum; identical to SEQ ID NO: 2823
  CDS (1)..(312)

SEQ ID NO: 69452 - protein, 103 aa, Triticum aestivum; identical to SEQ ID NO: 2824

SEQ ID NO: 69453 - DNA, 414 bp, Triticum aestivum; identical to SEQ ID NO: 2825
  CDS (1)..(414)

SEQ ID NO: 69454 - protein, 137 aa, Triticum aestivum; identical to SEQ ID NO: 2826

SEQ ID NO: 69455 - DNA, 468 bp, Zea mays; identical to SEQ ID NO: 2829
  CDS (1)..(468)

SEQ ID NO: 69456 - protein, 155 aa, Zea mays; identical to SEQ ID NO: 2830

SEQ ID NO: 69457 - DNA, 312 bp, Zea mays; identical to SEQ ID NO: 2585
  CDS (1)..(312)

SEQ ID NO: 69458 - protein, 103 aa, Zea mays; identical to SEQ ID NO: 2586

SEQ ID NO: 69459 - DNA, 312 bp, Hordeum vulgare; identical to SEQ ID NO: 2833
  CDS (1)..(312)

SEQ ID NO: 69460 - protein, 103 aa, Hordeum vulgare; identical to SEQ ID NO: 2834

SEQ ID NO: 69461 - DNA, 393 bp, Hordeum vulgare; identical to SEQ ID NO: 2835
  CDS (1)..(393)

SEQ ID NO: 69462 - protein, 130 aa, Hordeum vulgare; identical to SEQ ID NO: 2836

SEQ ID NO: 69463 - DNA, 378 bp, Brassica napus; identical to SEQ ID NO: 2837
  CDS (1)..(378)

SEQ ID NO: 69464 - protein, 125 aa, Brassica napus; identical to SEQ ID NO: 2838

SEQ ID NO: 69465 - DNA, 309 bp, Brassica napus; identical to SEQ ID NO: 2843
  CDS (1)..(309)

SEQ ID NO: 69466 - protein, 102 aa, Brassica napus; identical to SEQ ID NO: 2844

SEQ ID NO: 69467 - DNA, 309 bp, Brassica napus; identical to SEQ ID NO: 2845
  CDS (1)..(309)

SEQ ID NO: 69468 - protein, 102 aa, Brassica napus; identical to SEQ ID NO: 2846

SEQ ID NO: 69469 - DNA, 435 bp, Brassica napus; identical to SEQ ID NO: 2849
  CDS (1)..(435)

SEQ ID NO: 69470 - protein, 144 aa, Brassica napus; identical to SEQ ID NO: 2850

SEQ ID NO: 69471 - DNA, 435 bp, Brassica napus; identical to SEQ ID NO: 2851
  CDS (1)..(435)

SEQ ID NO: 69472 - protein, 144 aa, Brassica napus; identical to SEQ ID NO: 2852

SEQ ID NO: 69473 - DNA, 309 bp, Brassica napus; identical to SEQ ID NO: 2853
  CDS (1)..(309)

SEQ ID NO: 69474 - protein, 102 aa, Brassica napus; identical to SEQ ID NO: 2854

SEQ ID NO: 69475 - DNA, 300 bp, Brassica napus; identical to SEQ ID NO: 2855
  CDS (1)..(300)

SEQ ID NO: 69476 - protein, 99 aa, Brassica napus; identical to SEQ ID NO: 2856

SEQ ID NO: 69477 - DNA, 363 bp, Brassica napus; identical to SEQ ID NO: 2857
  CDS (1)..(363)

SEQ ID NO: 69478 - protein, 120 aa, Brassica napus; identical to SEQ ID NO: 2858

SEQ ID NO: 69479 - DNA, 309 bp, Brassica napus; identical to SEQ ID NO: 2861
  CDS (1)..(309)

SEQ ID NO: 69480 - protein, 102 aa, Brassica napus; identical to SEQ ID NO: 2862

SEQ ID NO: 69481 - DNA, 309 bp, Brassica napus; identical to SEQ ID NO: 2865
  CDS (1)..(309)

SEQ ID NO: 69482 - protein, 102 aa, Brassica napus; identical to SEQ ID NO: 2866

SEQ ID NO: 69483 - DNA, 300 bp, Brassica napus; identical to SEQ ID NO: 2867
  CDS (1)..(300)

SEQ ID NO: 69484 - protein, 99 aa, Brassica napus; identical to SEQ ID NO: 2868

SEQ ID NO: 69485 - DNA, 309 bp, Brassica napus; identical to SEQ ID NO: 2869
  CDS (1)..(309)

SEQ ID NO: 69486 - protein, 102 aa, Brassica napus; identical to SEQ ID NO: 2870

SEQ ID NO: 69487 - DNA, 309 bp, Brassica napus; identical to SEQ ID NO: 2871
  CDS (1)..(309)

SEQ ID NO: 69488 - protein, 102 aa, Brassica napus; identical to SEQ ID NO: 2872

SEQ ID NO: 69489 - DNA, 309 bp, Brassica napus; identical to SEQ ID NO: 2873
  CDS (1)..(309)

SEQ ID NO: 69490 - protein, 102 aa, Brassica napus; identical to SEQ ID NO: 2874

SEQ ID NO: 69491 - DNA, 312 bp, Brassica napus; identical to SEQ ID NO: 2875
  CDS (1)..(312)

SEQ ID NO: 69492 - protein, 103 aa, Brassica napus; identical to SEQ ID NO: 2876

SEQ ID NO: 69493 - DNA, 426 bp, Brassica napus; identical to SEQ ID NO: 2877
  CDS (1)..(426)

SEQ ID NO: 69494 - protein, 141 aa, Brassica napus; identical to SEQ ID NO: 2878

SEQ ID NO: 69495 - DNA, 309 bp, Brassica napus; identical to SEQ ID NO: 2879
  CDS (1)..(309)

SEQ ID NO: 69496 - protein, 102 aa, Brassica napus; identical to SEQ ID NO: 2880

SEQ ID NO: 69497 - DNA, 333 bp, Glycine max; identical to SEQ ID NO: 2881
  CDS (1)..(333)

SEQ ID NO: 69498 - protein, 110 aa, Glycine max; identical to SEQ ID NO: 2882

SEQ ID NO: 69499 - DNA, 324 bp, Glycine max; identical to SEQ ID NO: 2883
  CDS (1)..(324)

SEQ ID NO: 69500 - protein, 107 aa, Glycine max; identical to SEQ ID NO: 2884

SEQ ID NO: 69501 - DNA, 501 bp, Glycine max; identical to SEQ ID NO: 2885
  CDS (1)..(501)

SEQ ID NO: 69502 - protein, 166 aa, Glycine max; identical to SEQ ID NO: 2886

SEQ ID NO: 69503 - DNA, 399 bp, Glycine max; identical to SEQ ID NO: 2887
  CDS (1)..(399)

SEQ ID NO: 69504 - protein, 132 aa, Glycine max; identical to SEQ ID NO: 2888

SEQ ID NO: 69505 - DNA, 309 bp, Glycine max; identical to SEQ ID NO: 2889
  CDS (1)..(309)

SEQ ID NO: 69506 - protein, 102 aa, Glycine max; identical to SEQ ID NO: 2890

SEQ ID NO: 69507 - DNA, 525 bp, Glycine max; identical to SEQ ID NO: 2891
  CDS (1)..(525)

SEQ ID NO: 69508 - protein, 174 aa, Glycine max; identical to SEQ ID NO: 2892

SEQ ID NO: 69509 - DNA, 483 bp, Glycine max; identical to SEQ ID NO: 2893
  CDS (1)..(483)

SEQ ID NO: 69510 - protein, 160 aa, Glycine max; identical to SEQ ID NO: 2894

SEQ ID NO: 69511 - DNA, 522 bp, Glycine max; identical to SEQ ID NO: 2895
  CDS (1)..(522)

SEQ ID NO: 69512 - protein, 173 aa, Glycine max; identical to SEQ ID NO: 2896

SEQ ID NO: 69513 - DNA, 411 bp, Glycine max; identical to SEQ ID NO: 2897
  CDS (1)..(411)

SEQ ID NO: 69514 - protein, 136 aa, Glycine max; identical to SEQ ID NO: 2898

SEQ ID NO: 69515 - DNA, 309 bp, Glycine max; identical to SEQ ID NO: 2899
  CDS (1)..(309)

SEQ ID NO: 69516 - protein, 102 aa, Glycine max; identical to SEQ ID NO: 2900

SEQ ID NO: 69517 - DNA, 423 bp, Glycine max; identical to SEQ ID NO: 2901
  CDS (1)..(423)

SEQ ID NO: 69518 - protein, 140 aa, Glycine max; identical to SEQ ID NO: 2902

SEQ ID NO: 69519 - DNA, 306 bp, Glycine max; identical to SEQ ID NO: 2903
  CDS (1)..(306)

SEQ ID NO: 69520 - protein, 101 aa, Glycine max; identical to SEQ ID NO: 2904

SEQ ID NO: 69521 - DNA, 309 bp, Glycine max; identical to SEQ ID NO: 2905
  CDS (1)..(309)

SEQ ID NO: 69522 - protein, 102 aa, Glycine max; identical to SEQ ID NO: 2906

SEQ ID NO: 69523 - DNA, 318 bp, Glycine max; identical to SEQ ID NO: 2907
  CDS (1)..(318)

SEQ ID NO: 69524 - protein, 105 aa, Glycine max; identical to SEQ ID NO: 2908

SEQ ID NO: 69525 - DNA, 402 bp, Glycine max; identical to SEQ ID NO: 2909
  CDS (1)..(402)

SEQ ID NO: 69526 - protein, 133 aa, Glycine max; identical to SEQ ID NO: 2910

SEQ ID NO: 69527 - DNA, 309 bp, Glycine max; identical to SEQ ID NO: 2911
  CDS (1)..(309)

SEQ ID NO: 69528 - protein, 102 aa, Glycine max; identical to SEQ ID NO: 2912

SEQ ID NO: 69529 - DNA, 402 bp, Glycine max; identical to SEQ ID NO: 2913
  CDS (1)..(402)

SEQ ID NO: 69530 - protein, 133 aa, Glycine max; identical to SEQ ID NO: 2914

SEQ ID NO: 69531 - DNA, 480 bp, Zea mays; identical to SEQ ID NO: 2915
  CDS (1)..(480)

SEQ ID NO: 69532 - protein, 159 aa, Zea mays; identical to SEQ ID NO: 2916

SEQ ID NO: 69533 - DNA, 393 bp, Zea mays; identical to SEQ ID NO: 2917
  CDS (1)..(393)

SEQ ID NO: 69534 - protein, 130 aa, Zea mays; identical to SEQ ID NO: 2918

SEQ ID NO: 69535 - DNA, 315 bp, Zea mays; identical to SEQ ID NO: 2583
  CDS (1)..(315)

SEQ ID NO: 69536 - protein, 104 aa, Zea mays; identical to SEQ ID NO: 2584

SEQ ID NO: 69537 - DNA, 345 bp, Zea mays; identical to SEQ ID NO: 2919
  CDS (1)..(345)

SEQ ID NO: 69538 - protein, 114 aa, Zea mays; identical to SEQ ID NO: 2920

SEQ ID NO: 69539 - DNA, 312 bp, Zea mays; identical to SEQ ID NO: 2921
  CDS (1)..(312)

SEQ ID NO: 69540 - protein, 103 aa, Zea mays; identical to SEQ ID NO: 2922

SEQ ID NO: 69541 - DNA, 342 bp, Zea mays; identical to SEQ ID NO: 2923
  CDS (1)..(342)

SEQ ID NO: 69542 - protein, 113 aa, Zea mays; identical to SEQ ID NO: 2924

SEQ ID NO: 69543 - DNA, 399 bp, Zea mays; identical to SEQ ID NO: 2927
  CDS (1)..(399)

SEQ ID NO: 69544 - protein, 132 aa, Zea mays; identical to SEQ ID NO: 2928

SEQ ID NO: 69545 - DNA, 315 bp, Zea mays; identical to SEQ ID NO: 2587
  CDS (1)..(315)

SEQ ID NO: 69546 - protein, 104 aa, Zea mays; identical to SEQ ID NO: 2588

SEQ ID NO: 69547 - DNA, 315 bp, Zea mays; identical to SEQ ID NO: 2929
  CDS (1)..(315)

SEQ ID NO: 69548 - protein, 104 aa, Zea mays; identical to SEQ ID NO: 2930

SEQ ID NO: 69549 - DNA, 20 bp, Artificial sequence
  primer
atgcaatacaaaacagaaac

SEQ ID NO: 69550 - DNA, 20 bp, Artificial sequence
  primer
tcagagccaaagagcgccag

SEQ ID NO: 69551 - protein, 101 aa, Artificial sequence
  consensus sequence
  Variant (3)..(3): Xaa in position 3 is any amino acid
  Variant (5)..(8): Xaa in position 5 to 8 is any amino acid
  Variant (9)..(9): Xaa in position 9 is any or no amino acid
  Variant (11)..(18): Xaa in position 11 to 18 is any amino acid
  Variant (20)..(23): Xaa in position 20 to 23 is any amino acid
  Variant (24)..(26): Xaa in position 24 to 26 is any or no amino acid
  Variant (28)..(33): Xaa in position 28 to 33 is any amino acid
  Variant (35)..(35): Xaa in position 35 is any amino acid
  Variant (37)..(46): Xaa in position 37 to 46 is any amino acid
  Variant (47)..(48): Xaa in position 47 to 48 is any or no amino acid
  Variant (50)..(50): Xaa in position 50 is any amino acid
  Variant (51)..(74): Xaa in position 51 to 74 is any or no amino acid
  Variant (76)..(76): Xaa in position 76 is any amino acid
  Variant (79)..(79): Xaa in position 79 is any amino acid
  Variant (81)..(82): Xaa in position 81 to 82 is any amino acid
  Variant (84)..(86): Xaa in position 84 to 86 is any amino acid
  Variant (88)..(95): Xaa in position 88 to 95 is any amino acid
  Variant (97)..(98): Xaa in position 97 to 98 is any amino acid
  Variant (100)..(100): Xaa in position 100 is any amino acid
VVXFXXXXXCXXXXXXXXLXXXXXXXGXXXXXXEXDXXXXXXXXXXXXLXXXXXXXXXXXXXXXXXXXXXXXXXPXVFXGXXGXXXGXXXXXXXXHXXGXL

SEQ ID NO: 69552 - protein, 30 aa, Artificial sequence; identical to SEQ ID NO: 23843
  protein pattern
  Variant (2)..(2): Xaa in position 2 is Ala, Asn or Val
  Variant (5)..(5): Xaa in position 5 is any amino acid
  Variant (6)..(6): Xaa in position 6 is any or no amino acid
  Variant (8)..(10): Xaa in position 8 to 10 is any amino acid
  Variant (11)..(11): Xaa in position 11 is any or no amino acid
  Variant (13)..(13): Xaa in position 13 is Ala, Gly, Pro, Ser or Thr
  Variant (14)..(25): Xaa in position 14 to 25 is any amino acid
  Variant (27)..(28): Xaa in position 27 to 28 is any amino acid
  Variant (29)..(29): Xaa in position 29 is any or no amino acid

SEQ ID NO: 69553 - DNA, 312 bp, Arabidopsis thaliana
  CDS (1)..(312)
atggggaggtttactacttccaggaagcttttggccataagcttgtcggtactagccgtgctctcaccactctacatcgacagattatcagaggaagatctagaagaggaagaagaactcttcagctttatgttttccttctctctgcttctcctcttgttgattttagccatagccttgtccttgtacagtgacccgagcttgaccaggtttgatccttactggattcacaggctatgtggttcgtttggtggattgcttgtcatcctcatccttcttgttttcgtcttgatatgcaaagcctctggttag

SEQ ID NO: 69554 - protein, 103 aa, Arabidopsis thaliana
MGRFTTSRKLLAISLSVLAVLSPLYIDRLSEEDLEEEEELFSFMFSFSLLLLLLILAIALSLYSDPSLTRFDPYWIHRLCGSFGGLLVILILLVFVLICKASG

SEQ ID NO: 69555 - DNA, 336 bp, Zea mays
  CDS (1)..(336)
atggggaggtcctcttccacggagaagctggtgtgcttcgtcctggcggtcctggcggtgctgtccccgctgtacatcgaccggcggcccgtggcggagcgagaggaggaggacgaggacgacggcggcggcccgtcggcgctgtggctgccggcggtgctcctcgcgctcatcctcgccatcaacgttacgtgcttcatggaccggcgcgtggtcaggttcgacccttactggatccaccgcgtgtgggggtcctccggcggcctcctcgccatgctgctgctcctcggcttcgtgctcaggtgcaaggcgtccctgctgtataccagctactag

SEQ ID NO: 69556 - protein, 111 aa, Zea mays
MGRSSSTEKLVCFVLAVLAVLSPLYIDRRPVAEREEEDEDDGGGPSALWLPAVLLALILAINVTCFMDRRVVRFDPYWIHRVWGSSGGLLAMLLLLGFVLRCKASLLYTSY

SEQ ID NO: 69557 - DNA, 318 bp, Triticum aestivum
  CDS (1)..(318)
atggggaggccgtcttcgacggcgaagctggtgtgcgtggccctggcggcgctggccgtgctgtcgccgctgtacatggaccgggacctcgaggcggaggaggaggaggaggaggagggctggggcctactgctgccgtcggcgctgtggctgccggcgctgctggtggtgctcatcctggccatcaacgtggcgtgcttcgtggaccggagggtcgtcaggttcgacccctactggatccaccgcgtcgggggctcctcctgcggcctcatggccacgctgctgctgctcggcttcgtcctcaagtgcaagggctag

SEQ ID NO: 69558 - protein, 105 aa, Triticum aestivum
MGRPSSTAKLVCVALAALAVLSPLYMDRDLEAEEEEEEEGWGLLLPSALWLPALLVVLILAINVACFVDRRVVRFDPYWIHRVGGSSCGLMATLLLLGFVLKCKG

SEQ ID NO: 69559 - DNA, 918 bp, Nicotiana benthamiana
  CDS (517)..(852)
ttttttcactttctggaaatatcctcaataaaagggttactcttcctctcctttttcccctacaggggttactctattatgtttttttcccttaaacatattaaagggttacttttaatgcaaagattataagggatgcaaattcaaatctataaagtcccccaatcctttgatagatcactagaaaaagaagattcgtaccaaacggaagaaaagagactttgaagattctggaaattaagaaaatttaataaccaatacccctatcaaaagcctaggttgaggaagcattggtgactctagaaaaactatttttcattggagcaggaatctttaagcaggagagccagatttcctacatatgaaaggaggttcttggccataggccttggacttctggctatcatctctcctctatacattgacagtagaaaaaacactactgaaccccaccttgaagaacaaatcatcaacttccttccctaccttccacttcttttcttgatcactgctatcatgagcgtaagtatttctcaccaattggctcggttctcatcgtatgatcacaggcttctagccataggtcttacacttgttgccatagtctcacctttgtacatcaacaggagaaaggtagctgatccagagcttgaagagcaatcacttagcatctcttcttgcttgccattgctaatgttgtttctcatcattgccattgctatgtcatgctacttggacgggagctttaccaggttctatccttactggattcatagggttggtggtacttccactgggattctcattcttctgcttgttcttgcatttgttttgaagtttaaagctctatagcatgaataacagagggtctaaagatatgtaccttatatccttatgttcaagtgttgttcatgtgtg

SEQ ID NO: 69560 - protein, 111 aa, Nicotiana benthamiana
MSVSISHQLARFSSYDHRLLAIGLTLVAIVSPLYINRRKVADPELEEQSLSISSCLPLLMLFLIIAIAMSCYLDGSFTRFYPYWIHRVGGTSTGILILLLVLAFVLKFKAL

SEQ ID NO: 69561 - DNA, 321 bp, Oryza sativa (japonica cultivar-group)
  CDS (1)..(321)
atggggaggccgtcgtcgacggagaggctggtgtgcgtcgtcctggcggtgctcgccgtgctctcgccgctgtacatcgaccggcggcggccggcggcgtgggacagcgacgacgacgaggagggcggcggcgtgtcggcgctgctgctgccggcgctgctgatcgtgctgatcctggccatcaacgttacgtgcttcgtggaccggagggtggtcaggttcgacccctactggatacaccgcgtcgggggctcatcctgcggcctcatggccacgctgctgctgctcggcttcgtgctcaagtgtaaggcgtctctctag

SEQ ID NO: 69562 - protein, 106 aa, Oryza sativa (japonica cultivar-group)
MGRPSSTERLVCVVLAVLAVLSPLYIDRRRPAAWDSDDDEEGGGVSALLLPALLIVLILAINVTCFVDRRVVRFDPYWIHRVGGSSCGLMATLLLLGFVLKCKASL

SEQ ID NO: 69563 - DNA, 405 bp, Oryza sativa subsp
  CDS (1)..(405)
atggggaggccgtcgtcgacggagaggctggtgtgcgtcgtcctggcggtgctcgccgtgctctcgccgctgtacatcgaccggcggcggccggcggcgtgggacagcgacgacgaggaggagggcggcggcgtgtcggcgctgctgctgccggcgctgctgatcgtgctgatcctggccatcaacgtgacgtgcttcttggaccggagggtggtcaggttcgacccctactggatacaccgcgtcgggggctcatcctgcggcctcatggccacgctgctgctgctcggcttcgtgctcaagtgtccagttcaagcttttcccgtaatctgcgcaattgagctctttgtgctaccgttgccattttgtatgttggcttgtgcggttctctgtcacgattggtga

SEQ ID NO: 69564 - protein, 134 aa, Oryza sativa subsp
MGRPSSTERLVCVVLAVLAVLSPLYIDRRRPAAWDSDDEEEGGGVSALLLPALLIVLILAINVTCFLDRRVVRFDPYWIHRVGGSSCGLMATLLLLGFVLKCPVQAFPVICAIELFVLPLPFCMLACAVLCHDW

SEQ ID NO: 69565 - DNA, 2301 bp, Oryza sativa subsp
  CDS (1)..(2301)
atggggaggccgtcgtcgacggagaggctggtgtgcgtcgtcctggcggtgctcgccgtgctctcgccgctgtacatcgaccggcggcggccggcggcgtgggacagcgacgacgacgaggagggcggcggcgtgtcggcgctgctgctgccggcgctgctgatcgtgctgatcctggccatcaacgttacgtgcttcgtggaccggagggtggtcaggttcgacccctactggatacaccgcgtcgggggctcatcctgcggcctcatggccacgctgctgctgctcggcttcgtgctcaagtgtccagttcaagcttttcccgtaatctgcgcaactgagctctttgtgctaccgttgccattttcacaacagatctgggccgccacccgacccgacgccctcctccaaagtccaatctccatcccggtgcttcctccacctgacccgagcggctgcctcctctgccctgcacgaccgggcgccgctcctcatctaacccggtgcgcctcttccgcctccgcctctgcctccggcaccgcccatcccccaacccgccttcatcatctcatgacgatttgccccgtttcgtaccgtacacccacgctggtgaatccatacgccgctggccccggcgccgcctcccgacgctctggctctcccgactgggtcatgctggataaaacagcgtacatctccgaccgccggaacgcgtccacggctgaatcccagacgagcgagggccagatcgtccagccctccgttctcgccgcggaaggatccctcgttctcttccgcgtcaatttgtccccgcgtcccaggaggtctggcacctacatgagcccgtgcaactacttcgtctacaccgctggccccgggcgtccatggctcgacctgcttcctgaccccaatgccatgcccttcaactcccagcaatttggcctcttcccttgccgcagcggcgtcagtgagcactatgatgtggccttcctcaattctgaatgggtggcctctgatgaggcttgccagttcgagctatgcaccttctcatccaagaccggaaggtggagcagcaaaccagtcttgctggacttgtccccgtctgagattcacaaggtagcgatcgagcatgagaccgacaagctgatcaccattggacacgattcgttgggtttggtcgatctctggcgtggtattattctgctcgaaaagctgttcgacgactacccggttatgagatatatgacattccctaagccagtggtgtacaccatagatgcgtacggtgcaactgtatgcggtgaaatagccccagagtgtgctcgggatgtcgcctgctgcgatggtttgatcaagtttgtggacatagaatactgctacagtgacgacgtcaatggtaatggttggaaagccacgatatggaataggatgctttcttggaaagattggcgcaagcgtttctcagttgacaaatttgacatcttggttgatcccagttactccactgttttgcccgatctatgggacgataataccaaaatgatgcaattgaagaaactgatttgtactatccccactctgagcatgtatgacgacgattttgtttacatgatgtccacgatgactgaagaagacaaaaatgcctggatcatctctgttgacatgaaacagaacactctgcaagctgtggccccaatttctgctgaaaggttctccgttctctgttcagattgtcgtccctgtgcattctccaagtacctcaagattacctcaggggttgtcattcccaatcctgtgggcgagtacaccaagagaaatcatcttcaggaccgtgttctggaagcgctacggactcaagactcgttgaatgaacttgacgattgctcagaatttgagaggtcaaacttcgaggagtacaggtcactcgttcagtccagtccagtatcatctctgcattccaatattcagaatgttgctggatattatgcttctaatgatattgagaaagcggcctccaaagctgtgaatatttgcttacgaactttagctcagcttgtgagtggcaatgtctttctatctcttagagcttcggaagacctgaatcaggtattacaagagtcaaccagttatccgtcagcacatgctgaagccatcaggagcaaaatcaatgttgtccttagagccataggcagcctcgtgcaaactgtgccagtgcaaccaagaatgacgacggttgctgattcccacggcgtttcgaagatttatagcgaagaagagaaaaacaactctcacgaaccataa

SEQ ID NO: 69566 - protein, 766 aa, Oryza sativa subsp
MGRPSSTERLVCVVLAVLAVLSPLYIDRRRPAAWDSDDDEEGGGVSALLLPALLIVLILAINVTCFVDRRVVRFDPYWIHRVGGSSCGLMATLLLLGFVLKCPVQAFPVICATELFVLPLPFSQQIWAATRPDALLQSPISIPVLPPPDPSGCLLCPARPGAAPHLTRCASSASASASGTAHPPTRLHHLMTICPVSYRTPTLVNPYAAGPGAASRRSGSPDWVMLDKTAYISDRRNASTAESQTSEGQIVQPSVLAAEGSLVLFRVNLSPRPRRSGTYMSPCNYFVYTAGPGRPWLDLLPDPNAMPFNSQQFGLFPCRSGVSEHYDVAFLNSEWVASDEACQFELCTFSSKTGRWSSKPVLLDLSPSEIHKVAIEHETDKLITIGHDSLGLVDLWRGIILLEKLFDDYPVMRYMTFPKPVVYTIDAYGATVCGEIAPECARDVACCDGLIKFVDIEYCYSDDVNGNGWKATIWNRMLSWKDWRKRFSVDKFDILVDPSYSTVLPDLWDDNTKMMQLKKLICTIPTLSMYDDDFVYMMSTMTEEDKNAWIISVDMKQNTLQAVAPISAERFSVLCSDCRPCAFSKYLKITSGVVIPNPVGEYTKRNHLQDRVLEALRTQDSLNELDDCSEFERSNFEEYRSLVQSSPVSSLHSNIQNVAGYYASNDIEKAASKAVNICLRTLAQLVSGNVFLSLRASEDLNQVLQESTSYPSAHAEAIRSKINVVLRAIGSLVQTVPVQPRMTTVADSHGVSKIYSEEEKNNSHEP

SEQ ID NO: 69567 - DNA, 339 bp, Arabidopsis thaliana
  CDS (1)..(339)
atggaaacgggatcatccagcccgatgatggggaggtttactacttccaggaagcttttggccataagcttgtcggtactagccgtgctctcaccactctacatcgacagattatcagaggaagatctagaagaggaagaagaactcttcagctttatgttttccttctctctgcttctcctcttgttgattttagccatagccttgtccttgtacagtgacccgagcttgaccaggtttgatccttactggattcacaggctatgtggttcgtttggtggattgcttgtcatcctcatccttcttgttttcgtcttgatatgcaaagcctctggttag

SEQ ID NO: 69568 - protein, 112 aa, Arabidopsis thaliana
METGSSSPMMGRFTTSRKLLAISLSVLAVLSPLYIDRLSEEDLEEEEELFSFMFSFSLLLLLLILAIALSLYSDPSLTRFDPYWIHRLCGSFGGLLVILILLVFVLICKASG

SEQ ID NO: 69569 - DNA, 20 bp, Artificial sequence
  primer
atggggaggtttactacttc

SEQ ID NO: 69570 - DNA, 22 bp, Artificial sequence
  primer
ctaaccagaggctttgcatatc

SEQ ID NO: 69571 - protein, 104 aa, Artificial sequence
  consensus sequence
  Variant (4)..(9): Xaa in position 4 to 9 is any amino acid
  Variant (10)..(10): Xaa in position 10 is any or no amino acid
  Variant (12)..(15): Xaa in position 12 to 15 is any amino acid
  Variant (17)..(18): Xaa in position 17 to 18 is any amino acid
  Variant (30)..(50): Xaa in position 30 to 50 is any amino acid
  Variant (51)..(54): Xaa in position 51 to 54 is any or no amino acid
  Variant (57)..(58): Xaa in position 57 to 58 is any amino acid
  Variant (64)..(69): Xaa in position 64 to 69 is any amino acid
  Variant (71)..(74): Xaa in position 71 to 74 is any amino acid
  Variant (84)..(85): Xaa in position 84 to 85 is any amino acid
  Variant (88)..(89): Xaa in position 88 to 89 is any amino acid
  Variant (92)..(94): Xaa in position 92 to 94 is any amino acid
  Variant (96)..(96): Xaa in position 96 is any amino acid
  Variant (99)..(99): Xaa in position 99 is any amino acid
  Variant (103)..(103): Xaa in position 103 is any amino acid
MGRXXXXXXXLXXXXLXXLAVLSPLYIDRXXXXXXXXXXXXXXXXXXXXXXXXXLLXXLILAIXXXXXXDXXXXRFDPYWIHRXXGSXXGLXXXLXLLXFVLXC

SEQ ID NO: 69572 - protein, 55 aa, Artificial sequence
  protein pattern
  Variant (2)..(2): Xaa in position 2 is any amino acid
  Variant (4)..(4): Xaa in position 4 is Leu or Pro
  Variant (5)..(5): Xaa in position 5 is Ala or Leu
  Variant (6)..(6): Xaa in position 6 is Ile, Leu or Val
  Variant (8)..(12): Xaa in position 8 to 12 is any or no amino acid
  Variant (15)..(15): Xaa in position 15 is Ala or Asn
  Variant (16)..(16): Xaa in position 16 is Leu or Val
  Variant (17)..(17): Xaa in position 17 is Ala, Ser or Thr
  Variant (18)..(18): Xaa in position 18 is any amino acid
  Variant (19)..(19): Xaa in position 19 is Phe or Tyr
  Variant (20)..(20): Xaa in position 20 is any amino acid
  Variant (22)..(22): Xaa in position 22 is any amino acid
  Variant (23)..(23): Xaa in position 23 is Arg or Ser
  Variant (24)..(24): Xaa in position 24 is Leu or Val
  Variant (25)..(25): Xaa in position 25 is Thr or Val
  Variant (35)..(35): Xaa in position 35 is Leu or Val
  Variant (36)..(36): Xaa in position 36 is any amino acid
  Variant (39)..(39): Xaa in position 39 is any amino acid
  Variant (40)..(40): Xaa in position 40 is Cys or Gly
  Variant (43)..(43): Xaa in position 43 is Leu or Met
  Variant (44)..(44): Xaa in position 44 is Ala or Val
  Variant (45)..(45): Xaa in position 45 is any amino acid
  Variant (47)..(47): Xaa in position 47 is Ile or Leu
  Variant (50)..(50): Xaa in position 50 is Gly or Val
  Variant (54)..(54): Xaa in position 54 is any amino acid
LXLXXXLXXXXXAIXXXXXXDXXXXRFDPYWIHRXXGSXXGLXXXLXLLXFVLXC

SEQ ID NO: 69573 - protein, 19 aa, Artificial sequence
  protein pattern
  Variant (2)..(2): Xaa in position 2 is Leu or Val
  Variant (3)..(3): Xaa in position 3 is Ala or Cys
  Variant (4)..(4): Xaa in position 4 is Phe, Ile or Val
  Variant (5)..(5): Xaa in position 5 is Ala, Ser or Val
  Variant (7)..(7): Xaa in position 7 is Ala or Ser
  Variant (8)..(8): Xaa in position 8 is Ala or Val
  Variant (17)..(17): Xaa in position 17 is Ile or Met
LXXXXLXXLAVLSPLYXDR

SEQ ID NO: 69574 - DNA, 402 bp, Arabidopsis thaliana; identical to SEQ ID NO: 22445
  CDS (1)..(402)

SEQ ID NO: 69575 - protein, 133 aa, Arabidopsis thaliana; identical to SEQ ID NO: 22446

SEQ ID NO: 69576 - DNA, 701 bp, Oryza sativa
  CDS (109)..(513)
aaaaaaccaacaagaagagttgttgcttgcgctcacgcgaagcgaagaggagcaaggcgagaaaagagagagagagagagagagaaccaaaccaagcacgcgaccgagatgagctccttcttctcgacgatgttcacgccgccgcccgccgccgacgacggcggcgactcgcgcgtggtggccgtccactccacggccacctgggacgagcagtggggcgcccacaagagcaaccccaacaagctgatcgtgatcgacttctccgccacctggtgcgggccctgccgcttcatcgagccggccttcaaggacatggccggacgcttcgccgacgccgtcttcttcaagatcgatgtcgacgaactttcggaagtggcgaggcaatggaaagtggaggccatgccgacctttgtgttaatcaagggcgggaaggaggttagtcgcgtggttggtgctaagaaggatgaactggagaggaaagtcaacatgttcatttcatcctcctcatcctaaatcccaaacttatgcctgcattcctcatttagtaccaggctctggtttctctcggtgctaggagtgagagaccctgtggttgtcctcttaaaaatgctgcaaaattcgatgtgaagtgggagtaaacgcgtttaagacaataaacttgtgatacttgggaatggaaatgtaattgcctgttgctcttg

SEQ ID NO: 69577 - protein, 134 aa, Oryza sativa
MSSFFSTMFTPPPAADDGGDSRVVAVHSTATWDEQWGAHKSNPNKLIVIDFSATWCGPCRFIEPAFKDMAGRFADAVFFKIDVDELSEVARQWKVEAMPTFVLIKGGKEVSRVVGAKKDELERKVNMFISSSSS

SEQ ID NO: 69578 - DNA, 765 bp, Glycine max
  CDS (77)..(478)
tttttcggctgcgagaagacgacagaaggggatataactgttgagaaaggaataccaagattaccaccacaaagcaatgggcggtatactttctgcgcttcttggcggcgacgcggcggcggcggcgtcttcgccggagagttctacttctagagtctcctccttccactcgtcgccgcgctggcagctctacttcaacgagatcaaagataccgataagctcgttgtgatagatttctcggcgtcgtggtgcggtccttgcaaattcatagagccagcgattcacgccatggccgacaagttcaacgacgttgacttcgtcaagatcgacgtcgacgaattacctgatgtggcgcaggagtttcaggtgcaggcgatgccgactttcgtgttgtggaagaaagggaaggaagtcgacaaggttgtgggcgcaaagaaggacgagctcgagaagaagattgagaaacatcgatcgtgatcttagctctgtaatcctattcattcagctatttatctttctttccaaggtgaaaagaatattaaaacagagtttaaatttgttatatttggctgtagtgttatgatgatgatgatgattatgatggatggggttgtaaaattttaaactggttgggttgtttcttcaggaagatggtgtctgtttcatattttagcaaaattgttatatagaaattgaaaatactgtctcactctgtgtttgtgttgtgggtgttttgtgtttttgtttaattacttctttcttca

SEQ ID NO: 69579 - protein, 133 aa, Glycine max
MGGILSALLGGDAAAAASSPESSTSRVSSFHSSPRWQLYFNEIKDTDKLVVIDFSASWCGPCKFIEPAIHAMADKFNDVDFVKIDVDELPDVAQEFQVQAMPTFVLWKKGKEVDKVVGAKKDELEKKIEKHRS

SEQ ID NO: 69580 - DNA, 651 bp, Glycine max
  CDS (13)..(408)
gagcgcaccacaatgggcagtgcattttctgccctattcggccgcgggtccaccgtcgccgattttaaggtggagagtttacacgtgttgccgttccactcgtcggagcgctggcagctacacttcaacgaggtcaaagagacctctaagctcgttgtgatagatttcacggcgtcgtggtgcggcccttgcagattcatagctccggtatttaacgagatggccaagaagtttagcaacgctgagtttgtcaagatcgatgtcgacgaattacctgatgtggctaaggattttaaggtggaggcgatgccgacgtttgtgttgtgtaagaaaggaaaagaagttgatagggttgtgggcgccaggaaggacgagctccagaacaagattcagaaacattatcaataaaacgtggaatcaatcaccacatgccatgctagctattcaaacaagcctatgtattcagctatgttatatatgtgtgtctatctatctttcttttcaagggaaaaaatatagaaaaaaaaaataaagtacaaggcttgtgatgatgatgatgaagttgtacaatttaaacttattgggttttatgtttcttcgccaagatgatgtttgtttcagttatatataattttccaaaatactttctca

SEQ ID NO: 69581 - protein, 131 aa, Glycine max
MGSAFSALFGRGSTVADFKVESLHVLPFHSSERWQLHFNEVKETSKLVVIDFTASWCGPCRFIAPVFNEMAKKFSNAEFVKIDVDELPDVAKDFKVEAMPTFVLCKKGKEVDRVVGARKDELQNKIQKHYQ

SEQ ID NO: 69582 - DNA, 581 bp, Zea mays
  CDS (58)..(453)
tgctcgcgctcggtttacgagaaagacaaaaaaaaaaaaaaagaaaaaacaaaaaacatgggctccttcctgtcgtcgttgtggacccctcccccgctcgccggcgacgaccccgactccgccgtcgtcgccgtccactccaagcccgcctgggacaagcactgggaggaacaccggaacgcgtccaagctgatggtgatcgacttctccgcctcctggtgcgggccctgccgcttcatcgagcccgccttcaaggagatggcctcccgcttcgccgacgcgctcttcgtcaagatcgacgtcgacgagctcgcggaggttgcaaagacattccgcgtagaggcgatgccgacctttgtactggtgaagggcgggcaggaggtgagtcgcgtggtcggggctaagaaggatgagcttgacaggaagatcaagacgttcatctcatctacctgatcctagcttaattaacctgcactccaattgtagtgccaggttctgtcttgttgatcccagtgtcaaggggctcctatggtttccccatggagtagcactaccaatcctcctaaaatgctgcaaatccg

SEQ ID NO: 69583 - protein, 131 aa, Zea mays; identical to SEQ ID NO: 22572

SEQ ID NO: 69584 - DNA, 396 bp, Oryza sativa (japonica cultivar-group); identical to SEQ ID NO: 22471
  CDS (1)..(396)

SEQ ID NO: 69585 - protein, 131 aa, Oryza sativa (japonica cultivar-group); identical to SEQ ID NO: 22472

SEQ ID NO: 69586 - DNA, 522 bp, Oryza sativa (japonica cultivar-group)
  CDS (1)..(522)
atggcctcctccgccctcgccgtctccgtcgccaagccagccgcgtctcctcccgtcgccgtcgccgcggtaaccccgcagcgtcgcctcctcccgcagtgccggggcgtccgcgctgccccggtcgtccggctccgctcgggacgcgcccgcggcgtgtcggtggtgtgcgccgcccagggccaggagacctccttccaagttcctgacgtgactaagtcaacatggcagtcacttgtggtggagagtgaacttccggttctcgttgagttctgggcttcgtggtgcgggccatgcaaaatgatagatcctgtcattggcaaactttcaaaagaatatgaagggaagctgaactgctacaagctcaacactgatgaaaaccccgacatagcaacccagtttgggataagaagcattcccacaatgatgatattcaagaacggtgagaagaaagatgcggtgattggagctgtgcccgagagcaccctggtcagcagcatcgacaaatacatcgggaggtaa

SEQ ID NO: 69587 - protein, 173 aa, Oryza sativa (japonica cultivar-group)
MASSALAVSVAKPAASPPVAVAAVTPQRRLLPQCRGVRAAPVVRLRSGRARGVSVVCAAQGQETSFQVPDVTKSTWQSLVVESELPVLVEFWASWCGPCKMIDPVIGKLSKEYEGKLNCYKLNTDENPDIATQFGIRSIPTMMIFKNGEKKDAVIGAVPESTLVSSIDKYIGR

SEQ ID NO: 69588 - DNA, 408 bp, Oryza sativa (japonica cultivar-group); identical to SEQ ID NO: 22477
  CDS (1)..(408)

SEQ ID NO: 69589 - protein, 135 aa, Oryza sativa (japonica cultivar-group); identical to SEQ ID NO: 22478

SEQ ID NO: 69590 - DNA, 366 bp, Oryza sativa (japonica cultivar-group); identical to SEQ ID NO: 22267
  CDS (1)..(366)

SEQ ID NO: 69591 - protein, 121 aa, Oryza sativa (japonica cultivar-group); identical to SEQ ID NO: 22268

SEQ ID NO: 69592 - DNA, 423 bp, Arabidopsis thaliana; identical to SEQ ID NO: 22249
  CDS (1)..(423)

SEQ ID NO: 69593 - protein, 140 aa, Arabidopsis thaliana; identical to SEQ ID NO: 22250

SEQ ID NO: 69594 - DNA, 321 bp, Bombyx mori; identical to SEQ ID NO: 22269
  CDS (1)..(321)

SEQ ID NO: 69595 - protein, 106 aa, Bombyx mori; identical to SEQ ID NO: 22270

SEQ ID NO: 69596 - DNA, 318 bp, Archaeoglobus fulgidus DSM 4304
  CDS (1)..(318): transl_table=11
atggagcgtcttaacagtgagaggtttagggaggtaatccagagcgacaagctggtggtggtggacttctacgccgactggtgcatgccctgcaggtacatctcgccgatacttgagaagctctcgaaggagtacaacggcgaagtggagttctacaagctcaacgtcgatgaaaaccaggatgtggcctttgaatacggcattgcgagcatcccaacagtgctgttcttcaggaacggcaaggttgttggtggattcattggagcgatgcctgaaagtgcggtgagggcggaaatagagaaagcacttggagcctga

SEQ ID NO: 69597 - protein, 105 aa, Archaeoglobus fulgidus DSM 4304
MERLNSERFREVIQSDKLVVVDFYADWCMPCRYISPILEKLSKEYNGEVEFYKLNVDENQDVAFEYGIASIPTVLFFRNGKVVGGFIGAMPESAVRAEIEKALGA

SEQ ID NO: 69598 - DNA, 390 bp, Arabidopsis thaliana; identical to SEQ ID NO: 22271
  CDS (1)..(390)

SEQ ID NO: 69599 - protein, 129 aa, Arabidopsis thaliana; identical to SEQ ID NO: 22272

SEQ ID NO: 69600 - DNA, 447 bp, Arabidopsis thaliana
  CDS (1)..(447)
atgggtgctaacgtttctactccagaccagagatttcaggtaacccacttccgttcaacgaagccatggacacctcgacctgagatttatcctttcaaagtcaacagtccttgtattgtggagatcaagaacatgaatcagtggaaatctaggctcaacgctcttaaagacaccaacaagctgctggtgatcgagttcacagctaaatggtgtggaccatgtaaaacccttgaaccaaagctcgaagagttggctgctaaatacaccgatgttgagttcgtgaagattgatgtcgatgtcttaatgagcgtgtggatggagttcaaccttagcactttacctgcgattgtattcatgaaaagaggccgagaagtagacatggttgtgggtgtgaaggttgatgagttagagaggaaactcaataaatacacacaatccttcttctga

SEQ ID NO: 69601 - protein, 148 aa, Arabidopsis thaliana
MGANVSTPDQRFQVTHFRSTKPWTPRPEIYPFKVNSPCIVEIKNMNQWKSRLNALKDTNKLLVIEFTAKWCGPCKTLEPKLEELAAKYTDVEFVKIDVDVLMSVWMEFNLSTLPAIVFMKRGREVDMVVGVKVDELERKLNKYTQSFF

SEQ ID NO: 69602 - DNA, 465 bp, Arabidopsis thaliana; identical to SEQ ID NO: 22273
  CDS (1)..(465)

SEQ ID NO: 69603 - protein, 154 aa, Arabidopsis thaliana; identical to SEQ ID NO: 22274

SEQ ID NO: 69604 - DNA, 402 bp, Agrobacterium tumefaciens str. C58
  CDS (1)..(402): transl_table=11
gtgagataccggggcattgaaatttcgacgcgcccgcatcacatcgatagcggaaaagatttactgaaaggagagccagatatggctaccgtaaaagtcgatgccgccaacttccagtccgaagtcctcgaatccgccgaacccgtcgtggtggatttctgggccgagtggtgcggtccgtgcaagatgatcgcgccgagccttgaggaaatttcctccgagctggctggcaaggtcaaagttgcgaagctcaacatcgacgaaaacccggagctggccgctcagttcggcgttcgctcgatcccgacgcttgccatattcaagggtggcgaagtggctgatatcaaggtaggtgctgcacccaagacagcgctttccgcctggatttccagcgctgcttaa

SEQ ID NO: 69605 - protein, 133 aa, Agrobacterium tumefaciens str. C58
MRYRGIEISTRPHHIDSGKDLLKGEPDMATVKVDAANFQSEVLESAEPVVVDFWAEWCGPCKMIAPSLEEISSELAGKVKVAKLNIDENPELAAQFGVRSIPTLAIFKGGEVADIKVGAAPKTALSAWISSAA

SEQ ID NO: 69606 - DNA, 480 bp, Arabidopsis thaliana
  CDS (1)..(480)
atgaagagtcaatggtctaattttcatcagattgggagaaactctttcttagctgcttctactgtttacgtttcaaacgaattcaacttcttaaacacttctcttcttaatcgaagaagcttctgttttgcagaaggagatcgatccagctttgtagtgttgaaatcggaagcagagttcaacagtgcattgagtaaagctcgagatggatctttgccatcggttttctatttcactgccgcatggtgtggaccttgcaggcttatctctcctgtgatattggagctcagtaataaatatcctgatgtaacaacgtataaggtcgacattgacgagggcggtctatcaaatgctattgggaagttaaatgtatctgctgtgccaacactgcaattcttcaaaggtggcgtgaagaaagcagagattgtaggcgttgatgtggtgaggctgaagagtgtcatggaacaactctacaagtga

SEQ ID NO: 69607 - protein, 159 aa, Arabidopsis thaliana
MKSQWSNFHQIGRNSFLAASTVYVSNEFNFLNTSLLNRRSFCFAEGDRSSFVVLKSEAEFNSALSKARDGSLPSVFYFTAAWCGPCRLISPVILELSNKYPDVTTYKVDIDEGGLSNAIGKLNVSAVPTLQFFKGGVKKAEIVGVDVVRLKSVMEQLYK

SEQ ID NO: 69608 - DNA, 474 bp, Drosophila melanogaster
  CDS (1)..(474)
atggtgtacccagtgcggaacaaggacgatcttgaccagcagctaatcctcgccgaggacaagctggtggtaattgatttttatgcagactggtgcggaccttgcaagataatagcacccaagctggacgaactggcgcagcagtactcggaccgtgtcgtcgtactcaaggtgaacgtggacgagaacgaggacattacggtcgaatacaatgtgaatagcatgcccacttttgtgttcatcaagggcggcaatgtgctggagctcttcgttggctgcaattccgataagctggccaaattgatggagaagcatgccggcgtttataccgatgaagcggccgacgttaaggccgtccatatcgatggcgaatgcattgtcgatctgaccgccgagtccagtgaaagcgacaacgacaacaacaacgttaatgaggtgtccgcccacgacgagaatgccgttctggagcactag

SEQ ID NO: 69609 - protein, 157 aa, Drosophila melanogaster
MVYPVRNKDDLDQQLILAEDKLVVIDFYADWCGPCKIIAPKLDELAQQYSDRVVVLKVNVDENEDITVEYNVNSMPTFVFIKGGNVLELFVGCNSDKLAKLMEKHAGVYTDEAADVKAVHIDGECIVDLTAESSESDNDNNNVNEVSAHDENAVLEH

SEQ ID NO: 69610 - DNA, 321 bp, Drosophila melanogaster; identical to SEQ ID NO: 22277
  CDS (1)..(321)

SEQ ID NO: 69611 - protein, 106 aa, Drosophila melanogaster; identical to SEQ ID NO: 22278

SEQ ID NO: 69612 - DNA, 315 bp, Bacteroides thetaiotaomicron VPI-5482; identical to SEQ ID NO: 22279
  CDS (1)..(315): transl_table=11

SEQ ID NO: 69613 - protein, 104 aa, Bacteroides thetaiotaomicron VPI-5482; identical to SEQ ID NO: 22280

SEQ ID NO: 69614 - DNA, 309 bp, Mycoplasma mycoides subsp. mycoides SC str. PG1; identical to SEQ ID NO: 22283
  CDS (1)..(309): transl_table=4

SEQ ID NO: 69615 - protein, 102 aa, Mycoplasma mycoides subsp. mycoides SC str. PG1; identical to SEQ ID NO: 22284

SEQ ID NO: 69616 - DNA, 324 bp, Magnaporthe grisea 70-15; identical to SEQ ID NO: 22285
  CDS (1)..(324)

SEQ ID NO: 69617 - protein, 107 aa, Magnaporthe grisea 70-15; identical to SEQ ID NO: 22286

SEQ ID NO: 69618 - DNA, 411 bp, Apis mellifera
  CDS (1)..(411)
atgttgcgaattggtttgagagttatacgcactgctataggaagcagagcttttgcaaatgcaccggctcaagaacaagcaatctcaacaactttcaaagttcaagatccaaaagattttaataatcgtgttaaaaattctaaagtaccagtgatcgttgatttttttgcaacatggtgcaatccttgtcgcatgcttactcctcgtatagaatctgtaattgcggaaaaacaaggaaaagttttattggcaaaagttgatattgatgagaatagtgatcttgcattggattatgaggttggatccgttccagtcctaattgcaatgaaagatggaaaggttttagatagaattgttggtcttcaggatgtagataaacttaaacaatttgtagataagtattcagaataa

SEQ ID NO: 69619 - protein, 136 aa, Apis mellifera
MLRIGLRVIRTAIGSRAFANAPAQEQAISTTFKVQDPKDFNNRVKNSKVPVIVDFFATWCNPCRMLTPRIESVIAEKQGKVLLAKVDIDENSDLALDYEVGSVPVLIAMKDGKVLDRIVGLQDVDKLKQFVDKYSE

SEQ ID NO: 69620 - DNA, 426 bp, Candida glabrata CBS 138
  CDS (1)..(426)
atgcttcttttccgtaccgctagatgccaagtaccaacattaggccgttttgccacacacccaagaattgccccatcgattgcgatgaggttccagtccagtggcggatatgcttctattaagcaggtcaagacgctagaagaagtccagaagctgatgaaggactctaacttgtcggtcatcgacttctacgccacctggtgtggtccatgtaaggctatggtgccattcttgtccaagtttgtggaccagtacaaagacgtcaagttctacaaggtcgacgtcgatgaaagtcccgatgttgctgaatactatggtgtatcggcaatgccaacttttgtgttcactaaggatgatgacatcttgcataagataagaggtgcaaaccctaaagggttggccaaagccatcgaagagtttaaatga

SEQ ID NO: 69621 - protein, 141 aa, Candida glabrata CBS 138
MLLFRTARCQVPTLGRFATHPRIAPSIAMRFQSSGGYASIKQVKTLEEVQKLMKDSNLSVIDFYATWCGPCKAMVPFLSKFVDQYKDVKFYKVDVDESPDVAEYYGVSAMPTFVFTKDDDILHKIRGANPKGLAKAIEEFK

SEQ ID NO: 69622 - DNA, 312 bp, Candida glabrata CBS 138
  CDS (1)..(312)
atggtcaagcaaatcacaagtgtttctgaattcgacagtgctattgctgttgacaagttggtcgttgtcgacttcttcgccacctggtgtggtccatgtaagatgatcgccccaatgatcgaaaagttcgctgctgaatactctaccgctgacttctacaagctagatgtcgacgagttgccagaagtcgcccaaaagaacgaagtctccgctatgccaactttggtcttgttcaagaacggtaaggaagtcgccaaggtcgtcggtgccaacccagctgctatcaagcaagccattgccaacaacgtctaa

SEQ ID NO: 69623 - protein, 103 aa, Candida glabrata CBS 138
MVKQITSVSEFDSAIAVDKLVVVDFFATWCGPCKMIAPMIEKFAAEYSTADFYKLDVDELPEVAQKNEVSAMPTLVLFKNGKEVAKVVGANPAAIKQAIANNV

SEQ ID NO: 69624 - DNA, 315 bp, Kluyveromyces lactis NRRL Y-1140
  CDS (1)..(315)
atggtcgctcaacttacttccgcatccgaattcgaaaaggctttgactgacgacaagttggtcgtcgtcgacttctttgccacctggtgtggtccatgcaagatgattgccccaatgttggaaaagttcgctaaggaatacgagggtaaagctaccttcttgaaggttgacgttgatgagttgccagatgttgcaaagaacaacgatgtcagtgctatgccaaccctagttttcttcaagtccggtaaggaaatttctagagtcctaggtgctaacttggctgctatcaagcaaaccattgctgctaacgtgtaa

SEQ ID NO: 69625 - protein, 104 aa, Kluyveromyces lactis NRRL Y-1140
MVAQLTSASEFEKALTDDKLVVVDFFATWCGPCKMIAPMLEKFAKEYEGKATFLKVDVDELPDVAKNNDVSAMPTLVFFKSGKEISRVLGANLAAIKQTIAANV

SEQ ID NO: 69626 - DNA, 1011 bp, Debaryomyces hansenii CBS767
  CDS (1)..(1011)
atgagttcggtgattcaatttgtgaagtcttcacaagacttcgaagcgtatctatcaaagaacaaatatgtagtggccaattttacggctacttggtgtggaccatgtcaacaagtgaaaccaataatagatgcattgtatacggatgagacaaatgaaaggatagagatcgttagagtggatttagatagccacggcgatttggcttctcagtatcaagtcaccagtattccaacctttgtttttttggaaagtggcaaagaagtcaacagggttacaggggccaatgttccagagtttatgaagcaatttcattcgatgaaagaaaaggcggccagcgacgaagttgccactaagagggttggaaatggtgcgagtagtgcttctgtttcgacctctgcatggaaggacattgctgataaaattcccaaaggctttgaaatcttgaatggttctatttattttggtcaattcgaagcattgaatgcattgccactctacaaaggtgaaaatgattcagacgtgaaaaatctcttcagactcgactacacgaaggaaaacagtacggtattatcagatgctgattctcagttgttgttttatattccatttacaaacatctccaaagtttcctcgatcgtactcaaacttagaaaggataacaaaatcgcctcggacgtcgaattggaattggatgaggacgatttgaagaacgaatgtcaaaatccaagccttattaaggtctggctcaaccaacatagcattatgtcattcgatgatgcttctgctgacatcaatgccccacatatcgaaaaaattgcggaatcgaacgatgagatttggtacgaatgcaaattgaaattcgtcagattccaaaatgtccaaagcttgaacattttgatcgacggtgatgacgaagactatcatactcttcttgataaagtcatcttcattggtgtcaatggtgaatcaaaggaacaggctaagatcctgaaattagatgatgaataa

SEQ ID NO: 69627 - protein, 336 aa, Debaryomyces hansenii CBS767
MSSVIQFVKSSQDFEAYLSKNKYVVANFTATWCGPCQQVKPIIDALYTDETNERIEIVRVDLDSHGDLASQYQVTSIPTFVFLESGKEVNRVTGANVPEFMKQFHSMKEKAASDEVATKRVGNGASSASVSTSAWKDIADKIPKGFEILNGSIYFGQFEALNALPLYKGENDSDVKNLFRLDYTKENSTVLSDADSQLLFYIPFTNISKVSSIVLKLRKDNKIASDVELELDEDDLKNECQNPSLIKVWLNQHSIMSFDDASADINAPHIEKIAESNDEIWYECKLKFVRFQNVQSLNILIDGDDEDYHTLLDKVIFIGVNGESKEQAKILKLDDE

SEQ ID NO: 69628 - DNA, 315 bp, Yarrowia lipolytica CLIB122
  CDS (1)..(315)
atggccgttacccagatcacctccgtctccgacttccagaacgccatcaagtccgacaagctcaccgtcatcgacttctacgctacctggtgcggaccctgcaagatgattgcccccacctttgacaagttctccgagaccttcaccgacgctcagttctaccgatgtgacgtcgatgaggcctctgctgtcgcccaggaggttggcgtcaccgccatgcccacctttgccttctacaagaacggcgagaagatcaccaccgtcatgggtgccaacccctctgccctgaacgctgccatcaagcagaacgtctaa

SEQ ID NO: 69629 - protein, 104 aa, Yarrowia lipolytica CLIB122
MAVTQITSVSDFQNAIKSDKLTVIDFYATWCGPCKMIAPTFDKFSETFTDAQFYRCDVDEASAVAQEVGVTAMPTFAFYKNGEKITTVMGANPSALNAAIKQNV

SEQ ID NO: 69630 - DNA, 312 bp, Candida albicans SC5314
  CDS (1)..(312): transl_table=12
atggttcacgttgtcactgaagttaacgaattccaaacccttttaaaggaaaacaacttagttattgttgacttttttgccacttggtgtggtccatgtaaaatgattgctccattattagaaaaattccaaaatgaatattctaatattaaatttttgaaaattgatgttgatcaattgggttctttagcacaagaatataatgttagttctatgccaactttgattttattcaaaaatggtgaagaagtcaatcgtgtcattggtgctaacccagctgctattaaacaagctttggcttctcttgcttaa

SEQ ID NO: 69631 - protein, 103 aa, Candida albicans SC5314
MVHVVTEVNEFQTLLKENNLVIVDFFATWCGPCKMIAPLLEKFQNEYSNIKFLKIDVDQLGSLAQEYNVSSMPTLILFKNGEEVNRVIGANPAAIKQALASLA

SEQ ID NO: 69632 - DNA, 315 bp, Cryptococcus neoformans var. neoformans B-3501A; identical to SEQ ID NO: 22295
  CDS (1)..(315)

SEQ ID NO: 69633 - protein, 104 aa, Cryptococcus neoformans var. neoformans B-3501A; identical to SEQ ID NO: 22296

SEQ ID NO: 69634 - DNA, 339 bp, Symbiobacterium thermophilum IAM 14863
  CDS (1)..(339): transl_table=11
gtggccggcgacaaggtcgtcacgctgtcggccagcaactgggccgcggaggtggagcagtcttcgctgcccgtgctggtggacttctgggccgtctggtgcggcccgtgccggatgatcgcgcctgtggtcgaggagatcgcggcagactatgaaggccgcatgaaggtcggtaagctcaatgtcgatgaaaataacgatctggccgcccggtacggcgtgatgtcgattccgacgctgatcctgttcaagaacggggagccggtggagcggatcgtcggcttccagcccaagaaggagctggccgccaagatcgaccgggctctggcccaggcctag

SEQ ID NO: 69635 - protein, 112 aa, Symbiobacterium thermophilum IAM 14863
MAGDKVVTLSASNWAAEVEQSSLPVLVDFWAVWCGPCRMIAPVVEEIAADYEGRMKVGKLNVDENNDLAARYGVMSIPTLILFKNGEPVERIVGFQPKKELAAKIDRALAQA

SEQ ID NO: 69636 - DNA, 324 bp, Carboxydothermus hydrogenoformans Z-2901
  CDS (1)..(324): transl_table=11
atggttttaaagtttaccgatgccaattttgaagatgaagtaattaattccgatatgccggtattagtagatttttgggcggagtggtgtggtccgtgccggatgattgcccccatcatcgaaagactggcgattgattatctcggtcaggttaaagttggcaagctaaatgttgatgaaaaccgggaaacggctattgctcttggaatcatgagcattcctacggtaatgatttttaaagatggaaaggtgcttgataccattatcggttatcagccggaaaacgtctttcgcgagaaaatagaaaaagcgttaaaaaagtag

SEQ ID NO: 69637 - protein, 107 aa, Carboxydothermus hydrogenoformans Z-2901
MVLKFTDANFEDEVINSDMPVLVDFWAEWCGPCRMIAPIIERLAIDYLGQVKVGKLNVDENRETAIALGIMSIPTVMIFKDGKVLDTIIGYQPENVFREKIEKALKK

SEQ ID NO: 69638 - DNA, 330 bp, Desulfitobacterium hafniense Y51
  CDS (1)..(330): transl_table=11
atggcaggcgaaaatgttaagacctttacaacagcaaattggaatgaagaagttttgggttccgacaaagccgtattagtagatttctgggcggcttggtgtggaccctgccgtatggttgctcctatcattgaggagctggcagatgaaatggcgggaaaagtcatcatcggcaagcttaatgtggatgaggaaccggcaattgccggacaataccaagtgatgagcattcccactttagctgttttcaaaaacggccaagtggtggataagagtgtagggttccgcggtaaggctgacctcgtcaaaatgattgaaaaacatgcctaa

SEQ ID NO: 69639 - protein, 109 aa, Desulfitobacterium hafniense Y51
MAGENVKTFTTANWNEEVLGSDKAVLVDFWAAWCGPCRMVAPIIEELADEMAGKVIIGKLNVDEEPAIAGQYQVMSIPTLAVFKNGQVVDKSVGFRGKADLVKMIEKHA

SEQ ID NO: 69640 - DNA, 396 bp, Methanococcoides burtonii DSM 6242
  CDS (1)..(396): transl_table=11
atggatgatttagagaagatcagacaacaacgattggaacagatcaaaaagggccttgaggctaaagcgttcccggatgcacccatacatgttacggatgcagatttcaatgagttcatagcaaagtaccccatcactgtaattgattgttgggcagaatggtgtggaccttgcagaaaacttattcctattattgatgcccttgcaaaagaatatcagggaaaaatagttttcgggaaattgaacactgatgagaaccagatggtcgcaaggaattttaatataacagccattccaacaatattggtctttaaaaacggaaacgctgctacccagatagtaggagcactccagaaagaacaactcgttgaacaccttaacaaattcatacagtga

SEQ ID NO: 69641 - protein, 131 aa, Methanococcoides burtonii DSM 6242
MDDLEKIRQQRLEQIKKGLEAKAFPDAPIHVTDADFNEFIAKYPITVIDCWAEWCGPCRKLIPIIDALAKEYQGKIVFGKLNTDENQMVARNFNITAIPTILVFKNGNAATQIVGALQKEQLVEHLNKFIQ

SEQ ID NO: 69642 - DNA, 981 bp, Mesorhizobium sp. BNC1
  CDS (1)..(981): transl_table=11
atgaacgaccgtgaaaacccatatgcgggcggtggaatgacaggcaatgtcaccttcggcggcgcgtcccgcgcggatgccggcggcgctgccgcccacgcacttgcgccttcctccggggatctcataaaagacacaagcaccgcttcctttgccgcggatgtgattcaggaatcccgcaatcagcccgtgcttgtggatttctgggcgccctggtgcgggccttgcaagcagcttacgcccctgctcgaaaaagcggtgcgcgaggcgggcggccgcgtgaagctggtgaagctcaatatcgatgaccatccggccattccaggccaattgggcatccagtccattccggccatcattgccttcaaggaaggccagcccgtcgatggcttcatgggtgccgttccggagagccagatccgcgatttcataaagcggatttccgctggcggcagcaaagtggaggaggcgctggcagccgccgccgaggcgcgcgaagccggcgattcgcagatggcggcgcaaatctactcggccgtcctccagcaggaacccgagcaggtggacgcacttgcgggacttgcagatcttctcttcgaagcgggacagacagacgaggcgcgctcgctgctcgaccaggtgccggacgccaagaagaacgcggcggctgtggccacggtgcgcgcgaagatggcccttgccgagcaggtggccggcctgggcaatccggccgagcttcagcaacgccttgcctcgaatcctgatgatcatcaggctcgtttcgacctggcgctgatcctcaatgctcagggaaagcgcgcggaagcggccgacaatcttctcgccatcatcaaggcggatcgcagctggaacgacgatgcagcgcggggcaagctgcttgagcttttcgatgcctgggggatgacggatcctgcaacgctctccgcgcggcgcaggctctcttcgctcctgttctcgtag

SEQ ID NO: 69643 - protein, 326 aa, Mesorhizobium sp. BNC1
MNDRENPYAGGGMTGNVTFGGASRADAGGAAAHALAPSSGDLIKDTSTASFAADVIQESRNQPVLVDFWAPWCGPCKQLTPLLEKAVREAGGRVKLVKLNIDDHPAIPGQLGIQSIPAIIAFKEGQPVDGFMGAVPESQIRDFIKRISAGGSKVEEALAAAAEAREAGDSQMAAQIYSAVLQQEPEQVDALAGLADLLFEAGQTDEARSLLDQVPDAKKNAAAVATVRAKMALAEQVAGLGNPAELQQRLASNPDDHQARFDLALILNAQGKRAEAADNLLAIIKADRSWNDDAARGKLLELFDAWGMTDPATLSARRRLSSLLFS

SEQ ID NO: 69644 - DNA, 453 bp, Rhodococcus sp. RHA1
  CDS (1)..(453): transl_table=11
atgggatccgacaaggtgaagtgtccgcactgcggcaaggtcaacaaggtgccggcggccggggacggaaaaccccgctgcgggaactgccacgagccgctgccgtggatcgccgcggcaggggacgacgacttcgcggaggtcgccgacaagtcctcggtgcctgtgctggtcgatctctgggcgacctggtgcggcccgtgccgcatggtcagcccggcgctcgagcagctcgccagagaacgcgcaggtcagatcaagctggtcaaggtcgacgtggatgctgctccccagacggccgaacggttcaccgtccgcgccgtaccaactctgctggtgatggaccggggtgaggtcctcgctcgtcaggcgggcgcagctccggtaccccagctgcgcacgtggctcgatcaggcgctctcggaaaatgcaggcaaggaagcgaagtcatga

SEQ ID NO: 69645 - protein, 150 aa, Rhodococcus sp. RHA1
MGSDKVKCPHCGKVNKVPAAGDGKPRCGNCHEPLPWIAAAGDDDFAEVADKSSVPVLVDLWATWCGPCRMVSPALEQLARERAGQIKLVKVDVDAAPQTAERFTVRAVPTLLVMDRGEVLARQAGAAPVPQLRTWLDQALSENAGKEAKS

SEQ ID NO: 69646 - DNA, 363 bp, Medicago truncatula; identical to SEQ ID NO: 22309
  CDS (1)..(363)

SEQ ID NO: 69647 - protein, 120 aa, Medicago truncatula; identical to SEQ ID NO: 22310

SEQ ID NO: 69648 - DNA, 405 bp, Medicago truncatula; identical to SEQ ID NO: 22311
  CDS (1)..(405)

SEQ ID NO: 69649 - protein, 134 aa, Medicago truncatula; identical to SEQ ID NO: 22312

SEQ ID NO: 69650 - DNA, 927 bp, Magnetospirillum gryphiswaldense
  CDS (1)..(927): transl_table=11
atggatttcatcattggttcaggatcaaagcccgccgccggcggggccacccccagcgatctcatcaaggatggcagtgccgcgacctttaccgccgacgtcatcgaagcctccatgaaggcgccggtgatcgtcgatttctgggcaacgtggtgcggcccgtgcaaacaattggggccggccctggaaaaagtggtgcgcgaggctcgcggtgccgtgcgcatggtcaagatcgacgtcgacaagaaccaggaactggcggcgcaattgcgcattcagtcagtgcccaccgtctacgccttcgccaatggccgtcccgtggatggctttaccggcgcccagtcggaaagccagttgcgcgctttcgtccaacgcttgaccaagagcgcggcccagcccagcctggccgaggtgatggacgaggccaaggccttgttggcccagggtgatgccgagaccgccgcgcagattttccagcaggtgctgggcgaagaccccaataacggcccggccatggccgggctgctgcgctgcctgatggcggtgggcgatgtggacagcgttgtccagatgttggggcaattgccgccggagctggccaagcatgccgaggtggcggcggtcaggacagcgctggaactgcaacaggccgccgccgccggggctgggcaggcggctgaattgcgccgccggctggcggccaatgccgatgatcatcaggcccgtttcgatctggccctggcctattatggtgccggcgaaaccgaagcggcgctcgaggaattgctggaattgttccgccgtgaccgcacctggaacgacgatggcgcgcgcaagcaattgctgaagatgttcgaggccttgggtggtgcccatccgctgaccctgcagggccggcgtcggttgtcggcgctgttgttcgcatga

SEQ ID NO: 69651 - protein, 308 aa, Magnetospirillum gryphiswaldense
MDFIIGSGSKPAAGGATPSDLIKDGSAATFTADVIEASMKAPVIVDFWATWCGPCKQLGPALEKVVREARGAVRMVKIDVDKNQELAAQLRIQSVPTVYAFANGRPVDGFTGAQSESQLRAFVQRLTKSAAQPSLAEVMDEAKALLAQGDAETAAQIFQQVLGEDPNNGPAMAGLLRCLMAVGDVDSVVQMLGQLPPELAKHAEVAAVRTALELQQAAAAGAGQAAELRRRLAANADDHQARFDLALAYYGAGETEAALEELLELFRRDRTWNDDGARKQLLKMFEALGGAHPLTLQGRRRLSALLFA

SEQ ID NO: 69652 - DNA, 453 bp, Rhodococcus sp
  CDS (1)..(453): transl_table=11
atgggatccgacacggtgaagtgtccgaactgcggcaaggtcaacaaggtgccggcggccggggacggcaaaccgcgctgcgggaactgtcacgagccgctgccctggatcgcctcggccggggacggcgacttcgcggaggtcgccgagaagtcctcggtgcctgtgctggtcgatctctgggcgacgtggtgcggcccgtgccgcatggtcagcccggcgctcgagcagctcgccacagaacgcgcgggtcagatcaagctggtcaaggtcgacgtagatgctgcgcccaagacggccgaacggttcaccgtccgcgccgtgccgactctgctggtgatggaccggggtgaggtcctcgctcggcaggcgggcgccgctccggtaccccagctgcgcacgtggctcgatcaggcgctctcggaaaatgcaggcaaggaggcgaagtcatga

SEQ ID NO: 69653 - protein, 150 aa, Rhodococcus sp
MGSDTVKCPNCGKVNKVPAAGDGKPRCGNCHEPLPWIASAGDGDFAEVAEKSSVPVLVDLWATWCGPCRMVSPALEQLATERAGQIKLVKVDVDAAPKTAERFTVRAVPTLLVMDRGEVLARQAGAAPVPQLRTWLDQALSENAGKEAKS

SEQ ID NO: 69654 - DNA, 345 bp, Vitis vinifera; identical to SEQ ID NO: 22317
  CDS (1)..(345)

SEQ ID NO: 69655 - protein, 114 aa, Vitis vinifera; identical to SEQ ID NO: 22318

SEQ ID NO: 69656 - DNA, 411 bp, Vitis vinifera; identical to SEQ ID NO: 22321
  CDS (1)..(411)

SEQ ID NO: 69657 - protein, 136 aa, Vitis vinifera; identical to SEQ ID NO: 22322

SEQ ID NO: 69658 - DNA, 366 bp, Vitis vinifera; identical to SEQ ID NO: 22323
  CDS (1)..(366)
  misc_feature (130)..(130): r is g or a
  misc_feature (260)..(260): s is g or c
  misc_feature (346)..(346): s is g or c

SEQ ID NO: 69659 - protein, 121 aa, Vitis vinifera; identical to SEQ ID NO: 22324
  misc_feature (44)..(44): The Xaa at location 44 stands for Ala, or Thr.
  misc_feature (87)..(87): The Xaa at location 87 stands for Ala, or Gly.

SEQ ID NO: 69660 - DNA, 393 bp, Triticum turgidum subsp; identical to SEQ ID NO: 22327
  CDS (1)..(393)

SEQ ID NO: 69661 - protein, 130 aa, Triticum turgidum subsp; identical to SEQ ID NO: 22328

SEQ ID NO: 69662 - DNA, 354 bp, Eucalyptus grandis; identical to SEQ ID NO: 22329
  CDS (1)..(354)

SEQ ID NO: 69663 - protein, 117 aa, Eucalyptus grandis; identical to SEQ ID NO: 22330

SEQ ID NO: 69664 - DNA, 318 bp, Arcobacter butzleri
  CDS (1)..(318): transl_table=11
atgggaaaatacatagatttaaataaaaataatataaaagaaaatattcaagaaggtgtcgttctagttgatttttgggcaccatggtgtggaccttgtcgaatgcttgctcctgctattgatcaattagcagaagaatttgaaaacaaagcaaagatttgcaaagttaatacagaagaagaaccagatttaacaagtgaatatcaagtaagatcaattcctactattcttttctttaaaaatggagaaattgttgatcaaatgattggagcaacaactaaagctaaacttgaagaaaagttaaacagtttattataa

SEQ ID NO: 69665 - protein, 105 aa, Arcobacter butzleri
MGKYIDLNKNNIKENIQEGVVLVDFWAPWCGPCRMLAPAIDQLAEEFENKAKICKVNTEEEPDLTSEYQVRSIPTILFFKNGEIVDQMIGATTKAKLEEKLNSLL

SEQ ID NO: 69666 - DNA, 354 bp, Cryphonectria parasitica
  CDS (1)..(354)
atgactgtccacaacgtcgagactgcctcccagttcaaggagattctcgccaagaacccggttgtgtttgttgattggttcgcgacgtggtgcggcccttgcaagatgatcgctcctaagatagcagagtggtcaaacgagtacaccggcgtttacttcgtcaagatcgacgtcgatgcgctgcccgagctggcggctgagcacaacgtcaaggccatgcccaccttccacgtcttcaaggacggcaacaccaccgccgccgaggagtttgtcagcgccgtcccccccaaggtccaggccctgatcgagaagcacaacccgggcaagaaggagggcgaggagaaggccgagtaa

SEQ ID NO: 69667 - protein, 117 aa, Cryphonectria parasitica
MTVHNVETASQFKEILAKNPVVFVDWFATWCGPCKMIAPKIAEWSNEYTGVYFVKIDVDALPELAAEHNVKAMPTFHVFKDGNTTAAEEFVSAVPPKVQALIEKHNPGKKEGEEKAE

SEQ ID NO: 69668 - DNA, 339 bp, Curvularia lunata
  CDS (1)..(339)
atgagcgaagaaaccaagcagggcgttcacaacctcgccaacaaggcccaattcgaggctgctatcaacgacaaggagaccctcatggtcctcgactgcttcgcgacatggtgtggtccttgcaaggtgattgctccccaagttgtcaagctctctgagaagtaccccaacgcccgcttcttcaagctcgacgtcgatgacgttcccgacgtcgcccaggaactcggtatccgcgctatgcccaccttccttttgttcaagggcggcgacaagatcagcgaggttgttggtgccaaccccaaggcacttgaggccgccatccagtccaactacgagtag

SEQ ID NO: 69669 - protein, 112 aa, Curvularia lunata
MSEETKQGVHNLANKAQFEAAINDKETLMVLDCFATWCGPCKVIAPQVVKLSEKYPNARFFKLDVDDVPDVAQELGIRAMPTFLLFKGGDKISEVVGANPKALEAAIQSNYE

SEQ ID NO: 69670 - DNA, 327 bp, Aspergillus fumigatus
  CDS (1)..(327)
atgtcccatggcaaagttatagctgtcgataatcccatcatctacaaagcgcttacctcgtccggccctgtcgtcgtcgatttcttcgccacgtggtgcggtccttgccgggcggtagcgcctaaggtgggagagcttagcgagaagtactccaatgtgcgatttatccaggtcgatgtcgataaggtgcgctctgtggcgcacgagatgaatatccgggcgatgccgacgtttgtgctgtataaggatggtcagcctctggagaagagggttgttggtgggaatgtgagggagttggaggagatgattaagagtatttctgcttaa

SEQ ID NO: 69671 - protein, 108 aa, Aspergillus fumigatus
MSHGKVIAVDNPIIYKALTSSGPVVVDFFATWCGPCRAVAPKVGELSEKYSNVRFIQVDVDKVRSVAHEMNIRAMPTFVLYKDGQPLEKRVVGGNVRELEEMIKSISA

SEQ ID NO: 69672 - DNA, 372 bp, Solanum berthaultii; identical to SEQ ID NO: 22337
  CDS (1)..(372)

SEQ ID NO: 69673 - protein, 123 aa, Solanum berthaultii; identical to SEQ ID NO: 22338

SEQ ID NO: 69674 - DNA, 324 bp, Aspergillus oryzae
  CDS (1)..(324)
atggctgaagttactcctcttaacagcctttccgagttccaaactctcatcaattcgggccaagtggtcataatcgacttttgggctccatggtgtggtccatgccgaatgataagcccagtctttgaaaggctggcctccgatccacagtacagttcgatcaagtttgtcaaggtggatgttgatgaccagccggaaatttctcaagaatgtggaattagagccatgccaaccttcatggttttcaaagatggcgcgaagctggacgagtttatgggcgctcatcccaatggcctacatgaccttgttcagaagtatgtataa

SEQ ID NO: 69675 - protein, 107 aa, Aspergillus oryzae
MAEVTPLNSLSEFQTLINSGQVVIIDFWAPWCGPCRMISPVFERLASDPQYSSIKFVKVDVDDQPEISQECGIRAMPTFMVFKDGAKLDEFMGAHPNGLHDLVQKYV

SEQ ID NO: 69676 - DNA, 333 bp, Aspergillus oryzae; identical to SEQ ID NO: 22339
  CDS (1)..(333)

SEQ ID NO: 69677 - protein, 110 aa, Aspergillus oryzae; identical to SEQ ID NO: 22340

SEQ ID NO: 69678 - DNA, 327 bp, Aspergillus oryzae; identical to SEQ ID NO: 22341
  CDS (1)..(327)

SEQ ID NO: 69679 - protein, 108 aa, Aspergillus oryzae; identical to SEQ ID NO: 22342

SEQ ID NO: 69680 - DNA, 330 bp, Aspergillus oryzae; identical to SEQ ID NO: 22343
  CDS (1)..(330)

SEQ ID NO: 69681 - protein, 109 aa, Aspergillus oryzae; identical to SEQ ID NO: 22344

SEQ ID NO: 69682 - DNA, 327 bp, Chlamys farreri
  CDS (1)..(327)
atgagcgagactgggaaggtcatcgggttgaaaacaaaggcagattttgatgaatgcttacaaaccgacaaacttgtggtcatcgatttctttgccgattggtgcggaccatgtaaacaaattgcacctgcaattgaggaactggccaaggcaaatactgatgtcatctttaggaaggttaatgtagatgagaatgatgagacagctcaagcatgtgaaatcagtgccatgccaacatttcggttttacaaaagtggacaaacggttgatgaagttgtcggagccaataagggaaaaattgaggaatatattgtcaaaaatgagtga

SEQ ID NO: 69683 - protein, 108 aa, Chlamys farreri
MSETGKVIGLKTKADFDECLQTDKLVVIDFFADWCGPCKQIAPAIEELAKANTDVIFRKVNVDENDETAQACEISAMPTFRFYKSGQTVDEVVGANKGKIEEYIVKNE

SEQ ID NO: 69684 - DNA, 459 bp, Nicotiana alata; identical to SEQ ID NO: 22351
  CDS (1)..(459)

SEQ ID NO: 69685 - protein, 152 aa, Nicotiana alata; identical to SEQ ID NO: 22352

SEQ ID NO: 69686 - DNA, 369 bp, Zea mays; identical to SEQ ID NO: 22353
  CDS (1)..(369)

SEQ ID NO: 69687 - protein, 122 aa, Zea mays; identical to SEQ ID NO: 22354

SEQ ID NO: 69688 - DNA, 387 bp, Zea mays; identical to SEQ ID NO: 22355
  CDS (1)..(387)

SEQ ID NO: 69689 - protein, 128 aa, Zea mays; identical to SEQ ID NO: 22356

SEQ ID NO: 69690 - DNA, 372 bp, Oryza sativa subsp
  CDS (1)..(372)
atggcggccgcgccgtcccgccgtggcgccacgctgcgggttcaagcgaagaaacagacgttctcttcgtttgacgagttactggagaagtctgaaaagcctgtactagtcgacttctatgcaacttggtgtggtccatgtcaatacatggttcctatacttcaggaagtaagcgaaaagttaggcgataagattcaagtcgtaaaaattgatacagagaagtacacaagcattgctaatcgttaccaaattgaagcattgccaacttttattatcttcaagaatgggaaaccttgtcatcgctttgagggagcgctgcctgctaatcaactaatccaacagattgagagtgctttggaggttgcaaagtag

SEQ ID NO: 69691 - protein, 123 aa, Oryza sativa subsp
MAAAPSRRGATLRVQAKKQTFSSFDELLEKSEKPVLVDFYATWCGPCQYMVPILQEVSEKLGDKIQVVKIDTEKYTSIANRYQIEALPTFIIFKNGKPCHRFEGALPANQLIQQIESALEVAK

SEQ ID NO: 69692 - DNA, 429 bp, Plantago major; identical to SEQ ID NO: 22357
  CDS (1)..(429)

SEQ ID NO: 69693 - protein, 142 aa, Plantago major; identical to SEQ ID NO: 22358

SEQ ID NO: 69694 - DNA, 360 bp, Plantago major
  CDS (1)..(360)
atggctacttcttcagaagagggacaagtgtacagcgttcactccgttgaggagtttaaggatcatcttgagaagagcaaggaggccaagaagctggtggttattgacttcactgcttcgtggtgtggaccatgccgcttcatcgccccaatcttggctgagctcgcgaagaagacaccacatgttatgtttctcaaggtcgatgttgatgaactgaaggctatttcagtggagtacgaagtcgaggctatgccgacttttgttttcctcaaggacgggaagccaattgacaggcttgttggtgcaaagaaggaagatctgctggcaaagattaccacacatggtactgttgtggcttga

SEQ ID NO: 69695 - protein, 119 aa, Plantago major
MATSSEEGQVYSVHSVEEFKDHLEKSKEAKKLVVIDFTASWCGPCRFIAPILAELAKKTPHVMFLKVDVDELKAISVEYEVEAMPTFVFLKDGKPIDRLVGAKKEDLLAKITTHGTVVA

SEQ ID NO: 69696 - DNA, 483 bp, uncultured archaeon GZfos19C8
  CDS (1)..(483): transl_table=11
ttgtacagatatagagaaggtggtatgatgatggaagagaaaagggatttgtcgggatttgtgaacgcggaagaagcggaaatagagcaaataaaggagcgaaagatgcgtgagatggaagaaaagataaaggccaaaggggaagagcaaaaagaagggattattgattatcctattgtgttaactgacgagacttttacggatgcagtaagaaaaagttcactgatcgttgtggattgctgggcgccctggtgtggcccatgcaaaacgatcgcaccggtaatagaagagttagcgaagcaatacgcgggtaaagtcgtgtttggtaaactgaacgtggatgagaatccaaaagtagcgacggatttcgctattatggctatacctacaatgttcatctttaaaaatggcgagcctgtggatgttatacaaggtgctttgccaaaaccatatttagaagcaaagcttaaggaatggttgtaa

SEQ ID NO: 69697 - protein, 160 aa, uncultured archaeon GZfos19C8
MYRYREGGMMMEEKRDLSGFVNAEEAEIEQIKERKMREMEEKIKAKGEEQKEGIIDYPIVLTDETFTDAVRKSSLIVVDCWAPWCGPCKTIAPVIEELAKQYAGKVVFGKLNVDENPKVATDFAIMAIPTMFIFKNGEPVDVIQGALPKPYLEAKLKEWL

SEQ ID NO: 69698 - DNA, 408 bp, Glycine max; identical to SEQ ID NO: 22359
  CDS (1)..(408)

SEQ ID NO: 69699 - protein, 135 aa, Glycine max; identical to SEQ ID NO: 22360

SEQ ID NO: 69700 - DNA, 375 bp, Capsicum annuum; identical to SEQ ID NO: 22361
  CDS (1)..(375)

SEQ ID NO: 69701 - protein, 124 aa, Capsicum annuum; identical to SEQ ID NO: 22362

SEQ ID NO: 69702 - DNA, 372 bp, Ipomoea batatas; identical to SEQ ID NO: 22365
  CDS (1)..(372)

SEQ ID NO: 69703 - protein, 123 aa, Ipomoea batatas; identical to SEQ ID NO: 22366

SEQ ID NO: 69704 - DNA, 432 bp, Ipomoea batatas; identical to SEQ ID NO: 22367
  CDS (1)..(432)

SEQ ID NO: 69705 - protein, 143 aa, Ipomoea batatas; identical to SEQ ID NO: 22368

SEQ ID NO: 69706 - DNA, 372 bp, Arabidopsis thaliana; identical to SEQ ID NO: 22369
  CDS (1)..(372)

SEQ ID NO: 69707 - protein, 123 aa, Arabidopsis thaliana; identical to SEQ ID NO: 22370

SEQ ID NO: 69708 - DNA, 369 bp, Hordeum vulgare var; identical to SEQ ID NO: 22371
  CDS (1)..(369)

SEQ ID NO: 69709 - protein, 122 aa, Hordeum vulgare var; identical to SEQ ID NO: 22372

SEQ ID NO: 69710 - DNA, 357 bp, Hordeum vulgare var; identical to SEQ ID NO: 22373
  CDS (1)..(357)

SEQ ID NO: 69711 - protein, 118 aa, Hordeum vulgare var; identical to SEQ ID NO: 22374

SEQ ID NO: 69712 - DNA, 372 bp, Citrus paradisi; identical to SEQ ID NO: 22375
  CDS (1)..(372)

SEQ ID NO: 69713 - protein, 123 aa, Citrus paradisi; identical to SEQ ID NO: 22376

SEQ ID NO: 69714 - DNA, 396 bp, Leymus chinensis; identical to SEQ ID NO: 22377
  CDS (1)..(396)

SEQ ID NO: 69715 - protein, 131 aa, Leymus chinensis; identical to SEQ ID NO: 22378

SEQ ID NO: 69716 - DNA, 453 bp, Chlamydomonas reinhardtii
  CDS (1)..(453)
atgctttcgaccatcggccggtccgctcgcagcggccagtacctgctccggacgctcaatgcggcaactacagtgacgcaaacctgcagcgcgggcttcgcgacagccggtgctcctgaccgtgtggtggaggtgaccagcgaccaggacttctcagctaagctggcggatgtcgcaggcagcggttcgctcatgatatgcgacttcacagccaagtggtgcgggccctgccgcatgattgcgccggtgttcagctccctctccaacaagtacacagacgtgacgtttgtgaagattgacattgacaacaccgcgctggggaacactgtcaacgaccacagcattacgggcgtgcccacgtttgtctactacaagggcggacgacgcgtggagagcttcagcggcgcccgagccgacatgctggagagcctcattcagaagcacgcaaagtag

SEQ ID NO: 69717 - protein, 150 aa, Chlamydomonas reinhardtii
MLSTIGRSARSGQYLLRTLNAATTVTQTCSAGFATAGAPDRVVEVTSDQDFSAKLADVAGSGSLMICDFTAKWCGPCRMIAPVFSSLSNKYTDVTFVKIDIDNTALGNTVNDHSITGVPTFVYYKGGRRVESFSGARADMLESLIQKHAK

SEQ ID NO: 69718 - DNA, 393 bp, Pisum sativum; identical to SEQ ID NO: 22379
  CDS (1)..(393)

SEQ ID NO: 69719 - protein, 130 aa, Pisum sativum; identical to SEQ ID NO: 22380

SEQ ID NO: 69720 - DNA, 342 bp, Pisum sativum; identical to SEQ ID NO: 22381
  CDS (1)..(342)

SEQ ID NO: 69721 - protein, 113 aa, Pisum sativum; identical to SEQ ID NO: 22382

SEQ ID NO: 69722 - DNA, 357 bp, Triticum aestivum; identical to SEQ ID NO: 22383
  CDS (1)..(357)

SEQ ID NO: 69723 - protein, 118 aa, Triticum aestivum; identical to SEQ ID NO: 22384

SEQ ID NO: 69724 - DNA, 396 bp, Hordeum vulgare var; identical to SEQ ID NO: 22385
  CDS (1)..(396)

SEQ ID NO: 69725 - protein, 131 aa, Hordeum vulgare var; identical to SEQ ID NO: 22386

SEQ ID NO: 69726 - DNA, 402 bp, Brassica campestris; identical to SEQ ID NO: 22387
  CDS (1)..(402)

SEQ ID NO: 69727 - protein, 133 aa, Brassica campestris; identical to SEQ ID NO: 22388

SEQ ID NO: 69728 - DNA, 396 bp, Triticum aestivum; identical to SEQ ID NO: 22389
  CDS (1)..(396)

SEQ ID NO: 69729 - protein, 131 aa, Triticum aestivum; identical to SEQ ID NO: 22390

SEQ ID NO: 69730 - DNA, 459 bp, Nicotiana tabacum; identical to SEQ ID NO: 22391
  CDS (1)..(459)

SEQ ID NO: 69731 - protein, 152 aa, Nicotiana tabacum; identical to SEQ ID NO: 22392

SEQ ID NO: 69732 - DNA, 399 bp, Oryza sativa; identical to SEQ ID NO: 22393
  CDS (1)..(399)

SEQ ID NO: 69733 - protein, 132 aa, Oryza sativa; identical to SEQ ID NO: 22394

SEQ ID NO: 69734 - DNA, 402 bp, Zea mays; identical to SEQ ID NO: 22395
  CDS (1)..(402)

SEQ ID NO: 69735 - protein, 133 aa, Zea mays; identical to SEQ ID NO: 22396

SEQ ID NO: 69736 - DNA, 363 bp, Cucurbita maxima; identical to SEQ ID NO: 22397
  CDS (1)..(363)

SEQ ID NO: 69737 - protein, 120 aa, Cucurbita maxima; identical to SEQ ID NO: 22398

SEQ ID NO: 69738 - DNA, 360 bp, Arabidopsis thaliana; identical to SEQ ID NO: 22399
  CDS (1)..(360)

SEQ ID NO: 69739 - protein, 119 aa, Arabidopsis thaliana; identical to SEQ ID NO: 22400

SEQ ID NO: 69740 - DNA, 432 bp, Populus tremula x Populus tremuloides
  CDS (1)..(432)
atggagtttgcttggccagttcttcagcgaggaagaacagtgcaaacaagcttctttaattttgatcactccaatggatttccatgcacaaagccagctgctggggttgtggatgtccattctgtaggcgcatggagatcctatttcgaggccaacaagcaaaacaacaaattgctggtgattgaattcacggcgacatggtgtggaccttgccgatacatggagcagaccatgaaggactttgctgccaagtacacagacgttgtgttcatcaggattgacgttgatgaattgcagcatgtggctcagcaattcaatgtgactaccatgccagcattttcactcttgaagaaagggaagatagttgacgaggtagcaggggtcaagaagagtgagcttcagaacaagattgagaagcatgggatgatatga

SEQ ID NO: 69741 - protein, 143 aa, Populus tremula x Populus tremuloides
MEFAWPVLQRGRTVQTSFFNFDHSNGFPCTKPAAGVVDVHSVGAWRSYFEANKQNNKLLVIEFTATWCGPCRYMEQTMKDFAAKYTDVVFIRIDVDELQHVAQQFNVTTMPAFSLLKKGKIVDEVAGVKKSELQNKIEKHGMI

SEQ ID NO: 69742 - DNA, 345 bp, Populus tremula x Populus tremuloides
  CDS (1)..(345)
atggccgaagaaggacaagttattgcctgccacacagtggatacctggaaagagcatttcgagaagggaaaagggtctcagaaactgattgtcgtggattttactgcttcatggtgtccaccatgtaaaatgattgctccaatcttcgccgagttggcgaagaagtttcccaatgtcacattcttgaaggtggatgtggatgaattgaaggctgttgctgaggagtggaatgtggaggcaatgccaacttttattttcctgaaagatggaaaattagtggacaaaactgtgggtgctgataaagatggcctgccaacactggttgcaaagcacgcaactgcataa

SEQ ID NO: 69743 - protein, 114 aa, Populus tremula x Populus tremuloides
MAEEGQVIACHTVDTWKEHFEKGKGSQKLIVVDFTASWCPPCKMIAPIFAELAKKFPNVTFLKVDVDELKAVAEEWNVEAMPTFIFLKDGKLVDKTVGADKDGLPTLVAKHATA

SEQ ID NO: 69744 - DNA, 381 bp, Podospora anserina
  CDS (1)..(381)
atgacggtccacatcttcgaaacagccggccagttcaaggaggccgtcgccgcccaccccgtcgtcgtcgtcgacgccttcgctacctggtgtggcccgtgcaaggccatcgcgccccagatcgcaaagtgggccgaggaccccgagttcaaggacaagatctacttttgcaagttcgacgtcgaccacctccccgaactcgctcaggagctcggcatccgcgccatgcccaccttcatcttctacaaggacggcgaccgcgtcgacgagctcatgggcgccaacccccccgcgctactgaacctgcttaggaagtacctcggtgggagcggtgctggtgctagcagtggtggggagcaccctgagcctccttcgctttaa

SEQ ID NO: 69745 - protein, 126 aa, Podospora anserina
MTVHIFETAGQFKEAVAAHPVVVVDAFATWCGPCKAIAPQIAKWAEDPEFKDKIYFCKFDVDHLPELAQELGIRAMPTFIFYKDGDRVDELMGANPPALLNLLRKYLGGSGAGASSGGEHPEPPSL

SEQ ID NO: 69746 - DNA, 411 bp, Prunus persica; identical to SEQ ID NO: 22403
  CDS (1)..(411)

SEQ ID NO: 69747 - protein, 136 aa, Prunus persica; identical to SEQ ID NO: 22404

SEQ ID NO: 69748 - DNA, 357 bp, Pisum sativum; identical to SEQ ID NO: 22405
  CDS (1)..(357)

SEQ ID NO: 69749 - protein, 118 aa, Pisum sativum; identical to SEQ ID NO: 22406

SEQ ID NO: 69750 - DNA, 315 bp, Branchiostoma belcheri
  CDS (1)..(315)
atggtgcaaatgattgaaaccaaggctgcctttgataaactcctggctgagaccgacaagctgatagttgtggacttcacagcctcctggtgtgggccctgcaggatgatcgctcctgtgtttgagaaactggctgaagaaaaccctgatgtcgtctttgtgaaggtggacgttgatgcaaatgacgagacagctggcgcctgtggcatctctgccatgcctacattccactgctacaggaatggagcaaaggttgaggagctgtgtggcgcaagtgaagagaagttgagggaaatggtggccaagaacaagtaa

SEQ ID NO: 69751 - protein, 104 aa, Branchiostoma belcheri
MVQMIETKAAFDKLLAETDKLIVVDFTASWCGPCRMIAPVFEKLAEENPDVVFVKVDVDANDETAGACGISAMPTFHCYRNGAKVEELCGASEEKLREMVAKNK

SEQ ID NO: 69752 - DNA, 363 bp, Pisum sativum; identical to SEQ ID NO: 22407
  CDS (1)..(363)

SEQ ID NO: 69753 - protein, 120 aa, Pisum sativum; identical to SEQ ID NO: 22408

SEQ ID NO: 69754 - DNA, 324 bp, Neurospora crassa; identical to SEQ ID NO: 22409
  CDS (1)..(324)

SEQ ID NO: 69755 - protein, 107 aa, Neurospora crassa; identical to SEQ ID NO: 22410

SEQ ID NO: 69756 - DNA, 366 bp, Oryza sativa subsp; identical to SEQ ID NO: 22411
  CDS (1)..(366)

SEQ ID NO: 69757 - protein, 121 aa, Oryza sativa subsp; identical to SEQ ID NO: 22412

SEQ ID NO: 69758 - DNA, 378 bp, Triticum aestivum; identical to SEQ ID NO: 22413
  CDS (1)..(378)

SEQ ID NO: 69759 - protein, 125 aa, Triticum aestivum; identical to SEQ ID NO: 22414

SEQ ID NO: 69760 - DNA, 396 bp, Phalaris coerulescens; identical to SEQ ID NO: 22415
  CDS (1)..(396)

SEQ ID NO: 69761 - protein, 131 aa, Phalaris coerulescens; identical to SEQ ID NO: 22416

SEQ ID NO: 69762 - DNA, 396 bp, Secale cereale; identical to SEQ ID NO: 22419
  CDS (1)..(396)

SEQ ID NO: 69763 - protein, 131 aa, Secale cereale; identical to SEQ ID NO: 22420

SEQ ID NO: 69764 - DNA, 396 bp, Hordeum bulbosum; identical to SEQ ID NO: 22421
  CDS (1)..(396)

SEQ ID NO: 69765 - protein, 131 aa, Hordeum bulbosum; identical to SEQ ID NO: 22422

SEQ ID NO: 69766 - DNA, 321 bp, Manduca sexta
  CDS (1)..(321)
atgtcgatccacatcaaggacgctgacgacctcaagaacaggctcgccgaggccggcgataagctggtggtgatcgacttcatggcgacctggtgcggtccctgcaagatgatcggccccaaactagacgagatggccgctgagatggcggactctatcgtcgtagttaaggtcgacgtggatgagtgcgaggacatcgcagccgactacaacatcaactctatgcccacattcgtgttcgtcaagaactccaagaagctcgaagagttctccggcgcgaacgtggacaagctaaagaacaccatcctcaagctgaagtaa

SEQ ID NO: 69767 - protein, 106 aa, Manduca sexta
MSIHIKDADDLKNRLAEAGDKLVVIDFMATWCGPCKMIGPKLDEMAAEMADSIVVVKVDVDECEDIAADYNINSMPTFVFVKNSKKLEEFSGANVDKLKNTILKLK

SEQ ID NO: 69768 - DNA, 378 bp, Hevea brasiliensis; identical to SEQ ID NO: 22423
  CDS (1)..(378)

SEQ ID NO: 69769 - protein, 125 aa, Hevea brasiliensis; identical to SEQ ID NO: 22424

SEQ ID NO: 69770 - DNA, 345 bp, Drosophila melanogaster; identical to SEQ ID NO: 22425
  CDS (1)..(345)

SEQ ID NO: 69771 - protein, 114 aa, Drosophila melanogaster; identical to SEQ ID NO: 22426

SEQ ID NO: 69772 - DNA, 309 bp, Chlamydia muridarum
  CDS (1)..(309): transl_table=11
atggtccaaattgtatctcaagataatttcgctgatagcattgcttctgggctagtccttgtcgatttttttgctgaatggtgtggcccttgtaaaatgcttaccccagtattagaagcattggcagcagaacttccttatgtaactatcctgaaattggatattgatgcttctccccgccctgcagaacaatttggcgtttcctccattccaacgctcatcctctttaaagatggaaaagaagtagagcgcagcgtcggcttgaaagataaagattctctagtcaagcttatttctaaacatcaataa

SEQ ID NO: 69773 - protein, 102 aa, Chlamydia muridarum
MVQIVSQDNFADSIASGLVLVDFFAEWCGPCKMLTPVLEALAAELPYVTILKLDIDASPRPAEQFGVSSIPTLILFKDGKEVERSVGLKDKDSLVKLISKHQ

SEQ ID NO: 69774 - DNA, 321 bp, Coprinus comatus; identical to SEQ ID NO: 22427
  CDS (1)..(321)

SEQ ID NO: 69775 - protein, 106 aa, Coprinus comatus; identical to SEQ ID NO: 22428

SEQ ID NO: 69776 - DNA, 333 bp, Emericella nidulans; identical to SEQ ID NO: 22429
  CDS (1)..(333)

SEQ ID NO: 69777 - protein, 110 aa, Emericella nidulans; identical to SEQ ID NO: 22430

SEQ ID NO: 69778 - DNA, 351 bp, Mycobacterium bovis
  CDS (1)..(351): transl_table=11
atgaccgattccgagaagtccgccaccatcaaagttaccgacgcatcctttgccaccgacgtgctatccagcaacaagcctgtgctggttgacttttgggcgacatggtgtggaccttgcaagatggtagcgcccgttctcgaggaaatcgccaccgagcgcgcaacagacctcaccgtcgccaagctcgacgtggacaccaacccggagaccgcccgcaacttccaggtcgtctcgatccctaccctgatcttgttcaaggacggccagccggtgaaacgaatcgttggcgccaagggtaaggctgcgttgctgcgcgagctctcagacgtggttcccaacctcaactag

SEQ ID NO: 69779 - protein, 116 aa, Mycobacterium bovis
MTDSEKSATIKVTDASFATDVLSSNKPVLVDFWATWCGPCKMVAPVLEEIATERATDLTVAKLDVDTNPETARNFQVVSIPTLILFKDGQPVKRIVGAKGKAALLRELSDVVPNLN

SEQ ID NO: 69780 - DNA, 312 bp, Schizosaccharomyces pombe
  CDS (1)..(312)
atggtgaaacaagtctccgactcttctgaatttaaatctattgtttgccaagacaagcttgtcgttgtcgacttctttgctacttggtgtggaccttgcaaggccattgctcctaagtttgagcaattttccaacacttactctgatgccactttcatcaaggttgatgtcgatcaattaagtgaaattgcagctgaagctggcgttcacgctatgccctctttcttcctttacaagaatggtgagaagattgaagaaatcgtaggtgctaatcctgctaaattagaggcttctattaaggcgaacctctaa

SEQ ID NO: 69781 - protein, 103 aa, Schizosaccharomyces pombe
MVKQVSDSSEFKSIVCQDKLVVVDFFATWCGPCKAIAPKFEQFSNTYSDATFIKVDVDQLSEIAAEAGVHAMPSFFLYKNGEKIEEIVGANPAKLEASIKANL

SEQ ID NO: 69782 - DNA, 312 bp, Saccharomyces cerevisiae; identical to SEQ ID NO: 22431
  CDS (1)..(312)

SEQ ID NO: 69783 - protein, 103 aa, Saccharomyces cerevisiae; identical to SEQ ID NO: 22432

SEQ ID NO: 69784 - DNA, 315 bp, Saccharomyces cerevisiae; identical to SEQ ID NO: 22433
  CDS (1)..(315)

SEQ ID NO: 69785 - protein, 104 aa, Saccharomyces cerevisiae; identical to SEQ ID NO: 22434

SEQ ID NO: 69786 - DNA, 384 bp, Saccharomyces cerevisiae
  CDS (1)..(384)
atgttgttctataagcctgtgatgaggatggcggtgagaccgctaaaaagcataagattccagtcctcatacaccagtattactaaattgacgaacctaacagaatttaggaatttgatcaagcaaaatgataaactagtcatcgatttttatgctacttggtgtggcccctgtaagatgatgcaaccacacttaacgaaattaattcaggcttatccagatgtaagatttgtcaagtgcgacgtggacgaatcaccagatattgccaaagagtgtgaagtgacggctatgcccacctttgttcttggcaaggatggccaactcatcggcaagatcattggagctaaccctactgctttagagaagggaatcaaagatctataa

SEQ ID NO: 69787 - protein, 127 aa, Saccharomyces cerevisiae
MLFYKPVMRMAVRPLKSIRFQSSYTSITKLTNLTEFRNLIKQNDKLVIDFYATWCGPCKMMQPHLTKLIQAYPDVRFVKCDVDESPDIAKECEVTAMPTFVLGKDGQLIGKIIGANPTALEKGIKDL

SEQ ID NO: 69788 - DNA, 345 bp, Arabidopsis thaliana; identical to SEQ ID NO: 22439
  CDS (1)..(345)

SEQ ID NO: 69789 - protein, 114 aa, Arabidopsis thaliana; identical to SEQ ID NO: 22440

SEQ ID NO: 69790 - DNA, 372 bp, Brassica napus; identical to SEQ ID NO: 22441
  CDS (1)..(372)

SEQ ID NO: 69791 - protein, 123 aa, Brassica napus; identical to SEQ ID NO: 22442

SEQ ID NO: 69792 - DNA, 381 bp, Nicotiana tabacum; identical to SEQ ID NO: 22443
  CDS (1)..(381)

SEQ ID NO: 69793 - protein, 126 aa, Nicotiana tabacum; identical to SEQ ID NO: 22444

SEQ ID NO: 69794 - DNA, 360 bp, Brassica napus; identical to SEQ ID NO: 22447
  CDS (1)..(360)

SEQ ID NO: 69795 - protein, 119 aa, Brassica napus; identical to SEQ ID NO: 22448

SEQ ID NO: 69796 - DNA, 357 bp, Nicotiana tabacum; identical to SEQ ID NO: 22449
  CDS (1)..(357)

SEQ ID NO: 69797 - protein, 118 aa, Nicotiana tabacum; identical to SEQ ID NO: 22450

SEQ ID NO: 69798 - DNA, 357 bp, Arabidopsis thaliana; identical to SEQ ID NO: 22451
  CDS (1)..(357)

SEQ ID NO: 69799 - protein, 118 aa, Arabidopsis thaliana; identical to SEQ ID NO: 22452

SEQ ID NO: 69800 - DNA, 360 bp, Arabidopsis thaliana; identical to SEQ ID NO: 22453
  CDS (1)..(360)

SEQ ID NO: 69801 - protein, 119 aa, Arabidopsis thaliana; identical to SEQ ID NO: 22454

SEQ ID NO: 69802 - DNA, 357 bp, Arabidopsis thaliana; identical to SEQ ID NO: 22455
  CDS (1)..(357)

SEQ ID NO: 69803 - protein, 118 aa, Arabidopsis thaliana; identical to SEQ ID NO: 22456

SEQ ID NO: 69804 - DNA, 372 bp, Brassica rapa; identical to SEQ ID NO: 22457
  CDS (1)..(372)

SEQ ID NO: 69805 - protein, 123 aa, Brassica rapa; identical to SEQ ID NO: 22458

SEQ ID NO: 69806 - DNA, 351 bp, Fagopyrum esculentum; identical to SEQ ID NO: 22461
  CDS (1)..(351)

SEQ ID NO: 69807 - protein, 116 aa, Fagopyrum esculentum; identical to SEQ ID NO: 22462

SEQ ID NO: 69808 - DNA, 378 bp, Picea mariana
  CDS (1)..(378)
atggcggagggaaacgtgtttgcatgtcactctacagagggctggcgctccaagctgcaggaggccatcgatactaaacgtctggtggcagtagatttcactgcaacgtggtgtggaccttgtcgagtcataggtccagtgtttgttgagctgtcaaagaagttcccagaaatatttttcttgaaggtcgatgtggacgaattgagggatgtcgctcaagagtgggatgtggaggccatgcctacatttatctttatcaaggatggaaaggctgttgataaggttgtgggtgcaaagaaagatgatcttgaaagaaaagttgcagccctagcagctgctgctactactacagaagcaacccttcctgcacaagcttag

SEQ ID NO: 69809 - protein, 125 aa, Picea mariana
MAEGNVFACHSTEGWRSKLQEAIDTKRLVAVDFTATWCGPCRVIGPVFVELSKKFPEIFFLKVDVDELRDVAQEWDVEAMPTFIFIKDGKAVDKVVGAKKDDLERKVAALAAAATTTEATLPAQA

SEQ ID NO: 69810 - DNA, 357 bp, Ricinus communis; identical to SEQ ID NO: 22465
  CDS (1)..(357)

SEQ ID NO: 69811 - protein, 118 aa, Ricinus communis; identical to SEQ ID NO: 22466

SEQ ID NO: 69812 - DNA, 384 bp, Triticum aestivum; identical to SEQ ID NO: 22467
  CDS (1)..(384)

SEQ ID NO: 69813 - protein, 127 aa, Triticum aestivum; identical to SEQ ID NO: 22468

SEQ ID NO: 69814 - DNA, 357 bp, Arabidopsis thaliana; identical to SEQ ID NO: 22469
  CDS (1)..(357)

SEQ ID NO: 69815 - protein, 118 aa, Arabidopsis thaliana; identical to SEQ ID NO: 22470

SEQ ID NO: 69816 - DNA, 564 bp, Oryza sativa
  CDS (1)..(564)
atggcgctacgcctctccgtctcctcctcgcacgggccggcttcctcgccggccatctccacatgccgccccgccgcctgcgggcgcttccccgccttgctcggcggcggtgtggcttctcagaggaggagcctgacggtggtgtctggccctgagacaagggcggtgatccccgtgaggtcgagcggctcggacaccgccactgttggggccgaggcggaggcggtggccgtgaccgggcaggtgacggaggtgaacaaggataccttctggccaattgtcaagtcggcagggcccaaggtcgtcgtcctcgacatgtacacccaatggtgcggcccttgcaaggtgatggcaccgaaattccaggagatgtccgagaaggaccaggacgttgtgttcctcaaactcgactgcaatcaagacaacaagtctcttgcaaaggagctgggcataaaggttgtgccaacattcaagattctcaaggacgggaaggtcgtcaaggaggtcacaggtgccaaactagatgaattaatccaagcgatcgagacggtgaagtcaagctga

SEQ ID NO: 69817 - protein, 187 aa, Oryza sativa
MALRLSVSSSHGPASSPAISTCRPAACGRFPALLGGGVASQRRSLTVVSGPETRAVIPVRSSGSDTATVGAEAEAVAVTGQVTEVNKDTFWPIVKSAGPKVVVLDMYTQWCGPCKVMAPKFQEMSEKDQDVVFLKLDCNQDNKSLAKELGIKVVPTFKILKDGKVVKEVTGAKLDELIQAIETVKSS

SEQ ID NO: 69818 - DNA, 405 bp, Oryza sativa; identical to SEQ ID NO: 22473
  CDS (1)..(405)

SEQ ID NO: 69819 - protein, 134 aa, Oryza sativa; identical to SEQ ID NO: 22474

SEQ ID NO: 69820 - DNA, 399 bp, Oryza sativa; identical to SEQ ID NO: 22475
  CDS (1)..(399)

SEQ ID NO: 69821 - protein, 132 aa, Oryza sativa; identical to SEQ ID NO: 22476

SEQ ID NO: 69822 - DNA, 369 bp, Oryza sativa; identical to SEQ ID NO: 22463
  CDS (1)..(369)

SEQ ID NO: 69823 - protein, 122 aa, Oryza sativa; identical to SEQ ID NO: 22464

SEQ ID NO: 69824 - DNA, 417 bp, Oryza sativa; identical to SEQ ID NO: 22479
  CDS (1)..(417)

SEQ ID NO: 69825 - protein, 138 aa, Oryza sativa; identical to SEQ ID NO: 22480

SEQ ID NO: 69826 - DNA, 954 bp, Oryza sativa
  CDS (1)..(954)
atggcgacggctggggccagcagctttgaggacgagatcatggagtctgacattgagttggaaggtgaagctgttgagccagataatgaccctcctcagaagatgggagatccatctgttgaagtctccgatgagaagcgtgaccaggcgcagctgtgcaaaaacaaaggcgtcgatgcattttcagaaggtaaattggatgaagctattgagcatctgacagaggctattgtactgaatccgacttcagctatcgcctatgcaactagggctgttatttttgtgaagtcaaagaaaccaaatgcagctattcgtgatgcagatgcagcattaaagattaatccagattctgctaaaggatataaatcacgagggatggcaaaagctatgcttgggaaatgggaagaggctgctcaggaccttcgcatggcagcaaaattggattatgatgaagagattggagcagaacttaagaaggttgaacccaatgtactcaaaattgaggagcacaggaaaaaatatgaaagattacgtaaagagagggacattaagaaagctgaaatggaaaaacagcgtaaacatgcagaggaggtctctgctgcttctgctgctctgaaggatggtgatgtgatcgctatccactcatccagtgagctggacacaaagctgaaggcagcctcaagcctgtctaggcttgtggttctctatttcactgcagcatggtgtgggccatgtcgttttattggacctgtttgcaaaagcttagctgaaaagcaccggaatgttgttttccttaaggtggacatcgatgaactaaacagtgtcgcatatcgctggaacgtctccagtgttccatcattcttctttgtgaggaatggaaaggagatcgataaagttgttggtgctgacaagaatggccttgagaggaaagttgctcagcatggatcatcctaa

SEQ ID NO: 69827 - protein, 317 aa, Oryza sativa
MATAGASSFEDEIMESDIELEGEAVEPDNDPPQKMGDPSVEVSDEKRDQAQLCKNKGVDAFSEGKLDEAIEHLTEAIVLNPTSAIAYATRAVIFVKSKKPNAAIRDADAALKINPDSAKGYKSRGMAKAMLGKWEEAAQDLRMAAKLDYDEEIGAELKKVEPNVLKIEEHRKKYERLRKERDIKKAEMEKQRKHAEEVSAASAALKDGDVIAIHSSSELDTKLKAASSLSRLVVLYFTAAWCGPCRFIGPVCKSLAEKHRNVVFLKVDIDELNSVAYRWNVSSVPSFFFVRNGKEIDKVVGADKNGLERKVAQHGSS

SEQ ID NO: 69828 - DNA, 414 bp, Oryza sativa; identical to SEQ ID NO: 22255
  CDS (1)..(414)

SEQ ID NO: 69829 - protein, 137 aa, Oryza sativa; identical to SEQ ID NO: 22256

SEQ ID NO: 69830 - DNA, 546 bp, Oryza sativa
  CDS (1)..(546)
atgggcatggagaactgtttacgagtgaccacagtaggcacagccacaccccaatgcctttctccattctttccatcttcaagggataagcttgtcttcccaactcacagaggtttcaagaaatccttgcaaaactcaacactgtcatgcccttctctttactcaaccggtgctgcctatagaaagtcccgttttgtttgcaatgctcgtgaagcagtaaatgaagttaaagtggtgactgactcaagctggaataaccttgtgattgcaagtgagacccctgtgctggtagagttttgggcaccgtggtgtggtccatgcaggatgatagcgcctgttatcgatgagttagcaaaggattatgctggaaaaattgcatgctacaagcttaacacagatgattctccaaacatagcaacacagtacggcatcagaagcataccaacagttctgttcttcaagaatggagagaaaaaagaaagcataattggcgccgttcccaaatctacactgtccgcaacagtggaaaaatatgttgaattataa

SEQ ID NO: 69831 - protein, 181 aa, Oryza sativa
MGMENCLRVTTVGTATPQCLSPFFPSSRDKLVFPTHRGFKKSLQNSTLSCPSLYSTGAAYRKSRFVCNAREAVNEVKVVTDSSWNNLVIASETPVLVEFWAPWCGPCRMIAPVIDELAKDYAGKIACYKLNTDDSPNIATQYGIRSIPTVLFFKNGEKKESIIGAVPKSTLSATVEKYVEL

SEQ ID NO: 69832 - DNA, 543 bp, Oryza sativa
  CDS (1)..(543)
atggcctccgccctcgccgcctccaccgccgtctgctcctctcccctcgcatccgcctccgcctccgcttcgtccgcgcgccgcctgcgcgcggtcccgccctcccgcggcatccgctaccaggccctccgcgcggactccggtttcgccgggaaccgccggggtggcggccgtggagcgtcggtagtgtgcgcggtccagggccaggacacatccatccaagttccagaagtgacgaagtcaacatggcaatcacttgttatggagagcgagcttcctgtccttgttggatactgggctacatggtgtgggccttgcaaaatgattgatcccgttgttggcaagctctccaaggagtatgaagggaaactgaaatgctacaagctcaatactgacgagaatccagatatagcaagtcagtatggcgtccggagcatcccaaccatgatgatattcaagaacggagagaagaaagatgcagtgattggagctgtgcctgagagtacactgatcgcatccattgagaaatttgtcgagaggtaa

SEQ ID NO: 69833 - protein, 180 aa, Oryza sativa
MASALAASTAVCSSPLASASASASSARRLRAVPPSRGIRYQALRADSGFAGNRRGGGRGASVVCAVQGQDTSIQVPEVTKSTWQSLVMESELPVLVGYWATWCGPCKMIDPVVGKLSKEYEGKLKCYKLNTDENPDIASQYGVRSIPTMMIFKNGEKKDAVIGAVPESTLIASIEKFVER

SEQ ID NO: 69834 - DNA, 423 bp, Brassica napus; identical to SEQ ID NO: 22481
  CDS (1)..(423)

SEQ ID NO: 69835 - protein, 140 aa, Brassica napus; identical to SEQ ID NO: 22482

SEQ ID NO: 69836 - DNA, 381 bp, Brassica napus; identical to SEQ ID NO: 22483
  CDS (1)..(381)

SEQ ID NO: 69837 - protein, 126 aa, Brassica napus; identical to SEQ ID NO: 22484

SEQ ID NO: 69838 - DNA, 456 bp, Brassica napus; identical to SEQ ID NO: 22485
  CDS (1)..(456)

SEQ ID NO: 69839 - protein, 151 aa, Brassica napus; identical to SEQ ID NO: 22486

SEQ ID NO: 69840 - DNA, 402 bp, Brassica napus; identical to SEQ ID NO: 22487
  CDS (1)..(402)

SEQ ID NO: 69841 - protein, 133 aa, Brassica napus; identical to SEQ ID NO: 22488

SEQ ID NO: 69842 - DNA, 549 bp, Glycine max
  CDS (1)..(549)
atggccaccgtgcaactccaatccctaacccttgttcgctcctcagcacttccttccgccaccttctcccctccgatcgccgtctccggccgccgcaactccgccgcgctgccgcgctactccggcctccggctccgacccgccgctgagaccagtttcccgactcacgccagctcgagaaccgcttctcgcggcggaggtgtcaagtgcgaggcaggagacaccgctgttgaagttgctcccgttactgatgcaaattggcaatcacttgtgattgaatccgagtctcctgtactggttgaattctgggctccatggtgtggtccctgccgtatgatccacccgataattgacgagctggcaaaagaatatactggtaagctaaagtgctacaaactcaatactgatgagagcccttcaactgctactaagtacgggatacgaagtatcccaactgtcattattttcaagaatggtgagaagaaagatacagttataggagctgtgcccaagacaacattgacctcaagcattgaaaaattcttgtga

SEQ ID NO: 69843 - protein, 182 aa, Glycine max
MATVQLQSLTLVRSSALPSATFSPPIAVSGRRNSAALPRYSGLRLRPAAETSFPTHASSRTASRGGGVKCEAGDTAVEVAPVTDANWQSLVIESESPVLVEFWAPWCGPCRMIHPIIDELAKEYTGKLKCYKLNTDESPSTATKYGIRSIPTVIIFKNGEKKDTVIGAVPKTTLTSSIEKFL

SEQ ID NO: 69844 - DNA, 360 bp, Triticum aestivum; identical to SEQ ID NO: 22489
  CDS (1)..(360)

SEQ ID NO: 69845 - protein, 119 aa, Triticum aestivum; identical to SEQ ID NO: 22490

SEQ ID NO: 69846 - DNA, 504 bp, Zea mays
  CDS (1)..(504)
atggcggccttcgctacgggcagcaccacagcgcgcgcgacgctggcatcgccgacttcgtgccagccggccgcgcgccgggcgccggcccgatggatgccgctgcgctgctcgccgccggccctgggcctcaggggaggagcgcgttctcggcggagcgccacgctacgggtggaagctaagaagcaaactttttcttcatttgatgagttgctggagaagtctgagaagccattgttagttgacttctatgcaacttggtgtggtccatgccaatacatggttcccatacttcaagaagtgagtgagaagttaggcgacaaaattcaagttgtgaaaattgatactgagaagtacactagcattgcaagtcgttacagaattgaagcattgccaacttttatcatattcaaggatgggaaaccttgttatcgctttgagggagcattacctgttgaccagatgatcgaacagattgaaaatgctttggcagtcacaaagtag

SEQ ID NO: 69847 - protein, 167 aa, Zea mays
MAAFATGSTTARATLASPTSCQPAARRAPARWMPLRCSPPALGLRGGARSRRSATLRVEAKKQTFSSFDELLEKSEKPLLVDFYATWCGPCQYMVPILQEVSEKLGDKIQVVKIDTEKYTSIASRYRIEALPTFIIFKDGKPCYRFEGALPVDQMIEQIENALAVTK

SEQ ID NO: 69848 - DNA, 549 bp, Glycine max
  CDS (1)..(549)
atggccaccgtgcaactccaatccctaacccttgttcgctcctccgcactcccttccgccaccttctcccctccgatcgccctctccggccgccggaactccgccgcgctgccgcgctacgcctgcctccgactccgacccgccgccgagacctgttttccgactcgcgccgccttgagaaccgctcctcgcggcggaggcgtcaagtgcgaggcaggagacaccgccgttgaagtggctcctattactgatgcaaattggcaatcacttgtgcttgaatctgagtctccagtattggttgaattctgggctccatggtgtggtccctgccgtatgatacatccgataattgatgagctggcaaaggaatatgttggtaggcttaagtgctacaaactcaatactgatgaaagcccttcaaccgctactcggtacgggatccgaagtatcccaactgtcattattttcaagaatggtgagaagaaagatacagttattggagctgtgcccaagacaacattgacctcaagcatagaaaaattcttgtga

SEQ ID NO: 69849 - protein, 182 aa, Glycine max
MATVQLQSLTLVRSSALPSATFSPPIALSGRRNSAALPRYACLRLRPAAETCFPTRAALRTAPRGGGVKCEAGDTAVEVAPITDANWQSLVLESESPVLVEFWAPWCGPCRMIHPIIDELAKEYVGRLKCYKLNTDESPSTATRYGIRSIPTVIIFKNGEKKDTVIGAVPKTTLTSSIEKFL

SEQ ID NO: 69850 - DNA, 432 bp, Zea mays; identical to SEQ ID NO: 22491
  CDS (1)..(432)

SEQ ID NO: 69851 - protein, 143 aa, Zea mays; identical to SEQ ID NO: 22492

SEQ ID NO: 69852 - DNA, 372 bp, Brassica napus; identical to SEQ ID NO: 22493
  CDS (1)..(372)

SEQ ID NO: 69853 - protein, 123 aa, Brassica napus; identical to SEQ ID NO: 22494

SEQ ID NO: 69854 - DNA, 456 bp, Brassica napus; identical to SEQ ID NO: 22495
  CDS (1)..(456)

SEQ ID NO: 69855 - protein, 151 aa, Brassica napus; identical to SEQ ID NO: 22496

SEQ ID NO: 69856 - DNA, 354 bp, Brassica napus; identical to SEQ ID NO: 22497
  CDS (1)..(354)

SEQ ID NO: 69857 - protein, 117 aa, Brassica napus; identical to SEQ ID NO: 22498

SEQ ID NO: 69858 - DNA, 360 bp, Brassica napus
  CDS (1)..(360)
atggcggcagaagagggacaagtgatcggttgccacgagattgatgtatgggccgtgcagctcgacacagccaaacaatccaacaagctgattgtgatagatttcactgcttcatggtgcccaccatgccgcatgattgctccagttttcgcagatctggccaagaagttcatgtcaagtgccatcttcttcaaggtggacgtcgatgaactgcagaatgtagctcaagagtttggtgtggaggcaatgccgacctttgtgttcatcaaagacggaaatgttgttgataaggtcgttggtgcaaggaaggaagatcttcatgccacaatagccaagcatactggtgttgctactgcttaa

SEQ ID NO: 69859 - protein, 119 aa, Brassica napus
MAAEEGQVIGCHEIDVWAVQLDTAKQSNKLIVIDFTASWCPPCRMIAPVFADLAKKFMSSAIFFKVDVDELQNVAQEFGVEAMPTFVFIKDGNVVDKVVGARKEDLHATIAKHTGVATA

SEQ ID NO: 69860 - DNA, 579 bp, Brassica napus
  CDS (1)..(579)
atggcttcctttctcgattccgtaaccgtcacccgcgtgttttctcttcccatcacttcctcgatttcacctgcttcaaaggttccgtcagtctctgcccggcggatctctcccgttccggaattcagaggtttgaaagcttcccggaagagttcggtgactcagtcagcgagtcttggtacgaatctcggatcccgattcgctcgtggtggtagaatcgtctgcgaggctcaggacaccactgccgccgccgtcgaagttccaaacatctctgattcagaatggcaaacacaggttctcgagtcagatgtaccagtattggtcgagttttgggcaccttggtgtggaccttgccgtatgattcaccccattgttgaccaactggccaaggacttcgctggtaagttcaaattctacaaaatcaacaccgacgagagcccaaacacagccaaccgttacgggatacgcagcgttcctaccgtgatcatattcaaagacggtgagaagaaagacagtatcatcggagctgtccctaaagagacgttggagaaaactatagaaagattcgtggtcgagtaa

SEQ ID NO: 69861 - protein, 192 aa, Brassica napus
MASFLDSVTVTRVFSLPITSSISPASKVPSVSARRISPVPEFRGLKASRKSSVTQSASLGTNLGSRFARGGRIVCEAQDTTAAAVEVPNISDSEWQTQVLESDVPVLVEFWAPWCGPCRMIHPIVDQLAKDFAGKFKFYKINTDESPNTANRYGIRSVPTVIIFKDGEKKDSIIGAVPKETLEKTIERFVVE

SEQ ID NO: 69862 - DNA, 423 bp, Brassica napus; identical to SEQ ID NO: 22503
  CDS (1)..(423)

SEQ ID NO: 69863 - protein, 140 aa, Brassica napus; identical to SEQ ID NO: 22504

SEQ ID NO: 69864 - DNA, 387 bp, Brassica napus; identical to SEQ ID NO: 22507
  CDS (1)..(387)

SEQ ID NO: 69865 - protein, 128 aa, Brassica napus; identical to SEQ ID NO: 22508

SEQ ID NO: 69866 - DNA, 456 bp, Brassica napus; identical to SEQ ID NO: 22509
  CDS (1)..(456)

SEQ ID NO: 69867 - protein, 151 aa, Brassica napus; identical to SEQ ID NO: 22510

SEQ ID NO: 69868 - DNA, 354 bp, Brassica napus; identical to SEQ ID NO: 22513
  CDS (1)..(354)

SEQ ID NO: 69869 - protein, 117 aa, Brassica napus; identical to SEQ ID NO: 22514

SEQ ID NO: 69870 - DNA, 1137 bp, Brassica napus
  CDS (1)..(1137)
atgatggatgcgaatcaagtagcagagctccgaagattcatcgagcagctgaaactgaatccttctctcctccacgatccttctctgactttcttcaaagattatctccgaagtttaggagctcaagtccccaagatagtgaagacggaaagagattatgaggatacggctgagactaaacccagtttctctcctagctatgatgatgatgaagttaccgagtctgatgttgaattggatgattctgatgttgttgagccagacaatgagcctcctcagctgatgggagatcctacagctgaagtgacggatgaagatagggatgctgctcagttagagaagagcaaagccatggaagcaatctctcaaggaaagttcaacgaaggtattgatcatctaacaaaggccatcatgctgaacccctcttcagctattctctacgccactagagctactgtgtttctagcagtcaagaagccaaatgctgcaatccgggatgcggacatggcgttacagttcaaccctgattcagctaaggggtacaaagcaagaggtatggctagggccatgttaggccagtgggaagaagctgcggctgatcttcatgtagcctcaaaattagattacgacgaggagattgggtcggcacttaagaaggttgagcccaatgcaaagagaatcgaagaacaccgcaggaaatatcaacgtctgaggaaagaaaaggagcttcaaagggctgaacgcgagagaagagaacagcaagaagcccaggagcgagaagctctgtctgcacttaaagacggacaagtgattcgcatccactctacgagcgagctagaagcaaagacaaaggctgcaaagaaggcatcgcgtctgctaatcatgtacttcacagcaacatggtgtggaccgtgccgttacatgtctcctgtgtacacaaacctggctacgcaacacccgagagtagtcttcttgaaagttgacatagatgaggccaatgacgtggctgctgcttggaacataagtagcgtcccgaccttttgcttcatcagagatggcaaacaggtggacaaagttgtgggagctgataaaggttcgcttgagaagaagattgcacagcactcttcttctaagtaa

SEQ ID NO: 69871 - protein, 378 aa, Brassica napus
MMDANQVAELRRFIEQLKLNPSLLHDPSLTFFKDYLRSLGAQVPKIVKTERDYEDTAETKPSFSPSYDDDEVTESDVELDDSDVVEPDNEPPQLMGDPTAEVTDEDRDAAQLEKSKAMEAISQGKFNEGIDHLTKAIMLNPSSAILYATRATVFLAVKKPNAAIRDADMALQFNPDSAKGYKARGMARAMLGQWEEAAADLHVASKLDYDEEIGSALKKVEPNAKRIEEHRRKYQRLRKEKELQRAERERREQQEAQEREALSALKDGQVIRIHSTSELEAKTKAAKKASRLLIMYFTATWCGPCRYMSPVYTNLATQHPRVVFLKVDIDEANDVAAAWNISSVPTFCFIRDGKQVDKVVGADKGSLEKKIAQHSSSK

SEQ ID NO: 69872 - DNA, 402 bp, Brassica napus; identical to SEQ ID NO: 22519
  CDS (1)..(402)

SEQ ID NO: 69873 - protein, 133 aa, Brassica napus; identical to SEQ ID NO: 22520

SEQ ID NO: 69874 - DNA, 345 bp, Brassica napus; identical to SEQ ID NO: 22523
  CDS (1)..(345)

SEQ ID NO: 69875 - protein, 114 aa, Brassica napus; identical to SEQ ID NO: 22524

SEQ ID NO: 69876 - DNA, 579 bp, Brassica napus
  CDS (1)..(579)
atggcttccttgctcgattccgtcaccgttacccgcgtgttttctcttccgatcacttcctcgatttcacctgcttcaaaggttccgtcaatctctgcccggaggatttctcccgttccggaattcagaggtttgaaagcttcctggaggagttcggtgactcagtcagcgagtcttggtacgaatctcggatcccgattcgctcgtggtggtagaatcgtctgcgaggctcaggacaccactgccgccgccgtcgaagtaccaaacatctctgactcagaatggcaaacacaggttctcgagtcagatgtaccagtattggtcgagttttgggcaccgtggtgtggaccttgccgtatgattcaccccattgttgaccaactggccagggatttcgcaggcaagttcaaattctacaaaatcaacaccgacgagagcccaaacacagccaaccgttacgggatacgcagcgttcctaccgtgatcatattcaaagacggtgagaagaaagacagtatcatcggagctgtccctaaagagacgttggagaaaactatagaaagattcgtggtcgagtaa

SEQ ID NO: 69877 - protein, 192 aa, Brassica napus
MASLLDSVTVTRVFSLPITSSISPASKVPSISARRISPVPEFRGLKASWRSSVTQSASLGTNLGSRFARGGRIVCEAQDTTAAAVEVPNISDSEWQTQVLESDVPVLVEFWAPWCGPCRMIHPIVDQLARDFAGKFKFYKINTDESPNTANRYGIRSVPTVIIFKDGEKKDSIIGAVPKETLEKTIERFVVE

SEQ ID NO: 69878 - DNA, 360 bp, Glycine max; identical to SEQ ID NO: 22525
  CDS (1)..(360)

SEQ ID NO: 69879 - protein, 119 aa, Glycine max; identical to SEQ ID NO: 22526

SEQ ID NO: 69880 - DNA, 366 bp, Glycine max
  CDS (1)..(366)
atggccatggcatatgttgctagatcatcggagtcatctcaagtgcttaatttccattccactgctaaatggaatgctcactttgatgccttgaaacaaactaacaaactgatggtggttgatttcactgcttcatggtgtggaccttgcaaactcatggacccagttatccaagagtttgctacaaaatacagagatgttgagtttgtcaagattgatgtggatgagttaatggaggtatctcaacattaccaagtgcagggaatgccaactttcatgctgattaagaaaggcaaagtggctgataaagtggtgggagtgagaaaggaggagctacaaaggttgattgaacaacacagaaaataa

SEQ ID NO: 69881 - protein, 121 aa, Glycine max
MAMAYVARSSESSQVLNFHSTAKWNAHFDALKQTNKLMVVDFTASWCGPCKLMDPVIQEFATKYRDVEFVKIDVDELMEVSQHYQVQGMPTFMLIKKGKVADKVVGVRKEELQRLIEQHRK

SEQ ID NO: 69882 - DNA, 381 bp, Glycine max; identical to SEQ ID NO: 22527
  CDS (1)..(381)

SEQ ID NO: 69883 - protein, 126 aa, Glycine max; identical to SEQ ID NO: 22528

SEQ ID NO: 69884 - DNA, 1140 bp, Glycine max
  CDS (1)..(1140)
atggaggagggaaaattgagagagctgaagcaattcatagagatatgcaagtccaatccctcacttctccacaatccatctctttcattcttcaagacttatcttctcagcctcggtgctcgcatccctccccaacccaaaacggaaccaggtgattttgatgacaagtcagatcctcctttatccgcacaaaatgacattgtagaatctgatatagagttggataatgctgatgttgttgaacctgataatgaccctcctcaaaagatgggagatccttctgctgaaataacggaagaacaaagggatgctgcacaactagcaaaatcaaaagcagtcgatgctatgtcacaaggtaatttggatgaagcactggcccaactgacagaagccattttgttgaatccgcaatcagctatactttatgctactagagctagcatctatatgaaattgaagaaaccaaatgctgctatacgtgatgctgacactgccttgaagattaacccagactcagctaaaggctacaaaatacgaggaatgtcaagggctatgttgggactatgggaagaagcagcaagtgaccttcacgtggcttcaaagttagattacgatgaagagattagtatggcacttaaaaaggttgaacctaatgcccttaaaatcgaggagcataggagaaaatatgaacgcttaagaaagcaaaagcaacagaaaagagctcctatcaagactgaagctcctattaagaaggagcaagaaactgaagcccaagtacaagcagcattatctgctttaaaagatgggcaagtcatgggtattcactctagtggtgaattggaaaagaagttaagtgctgcatcaaagacatcacgcttggcgatcctgtattttactgcaacatggtgtggcccttgtcgcttcatttcccctatttatacaagcttggctgaaaagtacccaaaagtggtttttttgaaagttgacatagatgaggccagggacgttgctgcaggttggaatattagcagtgttccgacatttttctttgttaagaatggcaaagaggttgacagtgtggtcggggcagacaaaagtacacttgaaagcaagattgcacaacatgctggctctctttaa

SEQ ID NO: 69885 - protein, 379 aa, Glycine max
MEEGKLRELKQFIEICKSNPSLLHNPSLSFFKTYLLSLGARIPPQPKTEPGDFDDKSDPPLSAQNDIVESDIELDNADVVEPDNDPPQKMGDPSAEITEEQRDAAQLAKSKAVDAMSQGNLDEALAQLTEAILLNPQSAILYATRASIYMKLKKPNAAIRDADTALKINPDSAKGYKIRGMSRAMLGLWEEAASDLHVASKLDYDEEISMALKKVEPNALKIEEHRRKYERLRKQKQQKRAPIKTEAPIKKEQETEAQVQAALSALKDGQVMGIHSSGELEKKLSAASKTSRLAILYFTATWCGPCRFISPIYTSLAEKYPKVVFLKVDIDEARDVAAGWNISSVPTFFFVKNGKEVDSVVGADKSTLESKIAQHAGSL

SEQ ID NO: 69886 - DNA, 546 bp, Glycine max
  CDS (1)..(546)
atggccctggagaactgtttgcgagtgaccacagtaggcacagccacaccccaatgcttttctccattttttccatcttcaagggataaacttgtcttcccaactcacagaggtttcaagaaatccttgcaaaactcaacactgtcatacccttatctttactccaccggtgctgcctatagaaaatcccgttttgtttgcaatgctcgtgaagcagtaaatgaagttaaagtggtgactgactcaagctggaacaaccttgtcattgcaagtgagacccctgtgctggtagagttttgggcaccatggtgtggtccatgcaggatgatagcacctgctatcgatgagctagcgaaggaatatgctggaaaaattgcatgctttaagcttaacacagatgattctccaaacatagcaacacagtacggcatcagaagcataccaacagttctgttcttcaagaatggagagaaaaaagaaagcataattggtgcagttcccaaatccactctgtccgcaacagtggaaaaatacgttgattcataa

SEQ ID NO: 69887 - protein, 181 aa, Glycine max
MALENCLRVTTVGTATPQCFSPFFPSSRDKLVFPTHRGFKKSLQNSTLSYPYLYSTGAAYRKSRFVCNAREAVNEVKVVTDSSWNNLVIASETPVLVEFWAPWCGPCRMIAPAIDELAKEYAGKIACFKLNTDDSPNIATQYGIRSIPTVLFFKNGEKKESIIGAVPKSTLSATVEKYVDS

SEQ ID NO: 69888 - DNA, 402 bp, Glycine max; identical to SEQ ID NO: 22529
  CDS (1)..(402)

SEQ ID NO: 69889 - protein, 133 aa, Glycine max; identical to SEQ ID NO: 22530

SEQ ID NO: 69890 - DNA, 354 bp, Glycine max; identical to SEQ ID NO: 22531
  CDS (1)..(354)

SEQ ID NO: 69891 - protein, 117 aa, Glycine max; identical to SEQ ID NO: 22532

SEQ ID NO: 69892 - DNA, 417 bp, Glycine max; identical to SEQ ID NO: 22533
  CDS (1)..(417)

SEQ ID NO: 69893 - protein, 138 aa, Glycine max; identical to SEQ ID NO: 22534

SEQ ID NO: 69894 - DNA, 549 bp, Glycine max
  CDS (1)..(549)
atggccaccgtgcaactccaatccctaacccttgttcgctcctccgcactcccttccgccaccttctcccctccgatcgccctctccggccgccggaactccgccgcgctgccgcgctacgccggcctccgactccgacccgccgccgagacctgttttccgactcgcgccgccttgagaaccgctcctcgcggcggaggcgtcaagtgcgaggcaggagacaccgccgttgaagtggctcctattactgatgcaaattggcaatcacttgtgcttgaatctgagtctccagtattggttgaattctgggctccatggtgtggtccctgccgtatgatccatccgataattgatgagctggcaaaggaatatgttggtaggcttaagtgctacaaactcaatactgatgaaagcccttcaaccgctactcggtacgggatccgaagtatcccaactgtcattattttcaagaatggtgagaagaaagatacagttattggagctgtgcccaagacaacattgacctcaagcatagaaaaattcttgtga

SEQ ID NO: 69895 - protein, 182 aa, Glycine max
MATVQLQSLTLVRSSALPSATFSPPIALSGRRNSAALPRYAGLRLRPAAETCFPTRAALRTAPRGGGVKCEAGDTAVEVAPITDANWQSLVLESESPVLVEFWAPWCGPCRMIHPIIDELAKEYVGRLKCYKLNTDESPSTATRYGIRSIPTVIIFKNGEKKDTVIGAVPKTTLTSSIEKFL

SEQ ID NO: 69896 - DNA, 372 bp, Glycine max; identical to SEQ ID NO: 22535
  CDS (1)..(372)

SEQ ID NO: 69897 - protein, 123 aa, Glycine max; identical to SEQ ID NO: 22536

SEQ ID NO: 69898 - DNA, 366 bp, Glycine max
  CDS (1)..(366)
atggccatggcatatgttgctagatcatcggagtcatctcaagtgcttaatttccattccactgctaaatggaatgctcactttgatgccttgaaacaaactaacaaactgatggtggttgatttcactgcttcatggtgtggaccttgcaaactcatggacccagttatccaagagtttgctacaaaatacagagatgtcgagtttgtgaagattgatgtggatgagttaatggaggtatctcaacattaccaagtgcagggaatgccaactttcatgctgattaagaaaggcaacgtggctgataaagtggtgggagtgagaaaggaggagctacaaaggttgattgaacaacaccgaaaataa

SEQ ID NO: 69899 - protein, 121 aa, Glycine max
MAMAYVARSSESSQVLNFHSTAKWNAHFDALKQTNKLMVVDFTASWCGPCKLMDPVIQEFATKYRDVEFVKIDVDELMEVSQHYQVQGMPTFMLIKKGNVADKVVGVRKEELQRLIEQHRK

SEQ ID NO: 69900 - DNA, 510 bp, Glycine max
  CDS (1)..(510)
atggcaacactcttcgactctctcgccgtcgtgcgtctccccaccgccgcccgccggacctccgttatgctcccgcactgcgctggcctcaggctcagacccgccgccgcttcgcgcctagttgcgtcccccgctcgcaggatcgcttctcgcgcagcgcgcgtcgcctgcgaggctcaggacaccgccgtggaagtggctcctattactgatgcaaactggcaatcccttgtccttgaatccgaatctgctgttttggttgaattctgggcgccatggtgtggtccctgccgaatgattcaccctataattgatgaacttgcaaagcaatatgctgggaagctcaagtgttacaaactcaacactgatgagagcccttcaaccgctactcggtatggaattcgaagcatcccaactgttatgatcttcaagagtggtgagaagaaagatacagttattggtgctgtgcccaagtcaacattgaccacgagcatagaaaaattcttgtga

SEQ ID NO: 69901 - protein, 169 aa, Glycine max
MATLFDSLAVVRLPTAARRTSVMLPHCAGLRLRPAAASRLVASPARRIASRAARVACEAQDTAVEVAPITDANWQSLVLESESAVLVEFWAPWCGPCRMIHPIIDELAKQYAGKLKCYKLNTDESPSTATRYGIRSIPTVMIFKSGEKKDTVIGAVPKSTLTTSIEKFL

SEQ ID NO: 69902 - DNA, 375 bp, Glycine max; identical to SEQ ID NO: 22537
  CDS (1)..(375)

SEQ ID NO: 69903 - protein, 124 aa, Glycine max; identical to SEQ ID NO: 22538

SEQ ID NO: 69904 - DNA, 423 bp, Glycine max; identical to SEQ ID NO: 22539
  CDS (1)..(423)

SEQ ID NO: 69905 - protein, 140 aa, Glycine max; identical to SEQ ID NO: 22540

SEQ ID NO: 69906 - DNA, 414 bp, Glycine max; identical to SEQ ID NO: 22541
  CDS (1)..(414)

SEQ ID NO: 69907 - protein, 137 aa, Glycine max; identical to SEQ ID NO: 22542

SEQ ID NO: 69908 - DNA, 423 bp, Glycine max; identical to SEQ ID NO: 22545
  CDS (1)..(423)

SEQ ID NO: 69909 - protein, 140 aa, Glycine max; identical to SEQ ID NO: 22546

SEQ ID NO: 69910 - DNA, 363 bp, Glycine max; identical to SEQ ID NO: 22547
  CDS (1)..(363)

SEQ ID NO: 69911 - protein, 120 aa, Glycine max; identical to SEQ ID NO: 22548

SEQ ID NO: 69912 - DNA, 414 bp, Glycine max; identical to SEQ ID NO: 22549
  CDS (1)..(414)

SEQ ID NO: 69913 - protein, 137 aa, Glycine max; identical to SEQ ID NO: 22550

SEQ ID NO: 69914 - DNA, 354 bp, Glycine max; identical to SEQ ID NO: 22551
  CDS (1)..(354)

SEQ ID NO: 69915 - protein, 117 aa, Glycine max; identical to SEQ ID NO: 22552

SEQ ID NO: 69916 - DNA, 528 bp, Glycine max
  CDS (1)..(528)
atggtcactctcttcgactccctcgccgtcgtgcgtctccccaccgccgccttctccccggctgccaccagccggacctccgttttgctcccgcactgcgccggcctcaggctcagacccgccgccgccacgcgcttagttgcgtcccccgctcgcagaatcgcttcacgcgccgcgcgcgtcgtatgtgaggctcaggataccgccgtcgaagtggctcctattactgatgcaaattggcaatcccttgtccttgaatctgaatctgctgttttggttgaattctgggcgccatggtgtggtccctgccgaatgattcaccctataatagatgaactggcaaagcaatatgctgggaagctcaagtgttacaaactcaacacggatgagagcccttcaaccgctactcggtatggaattcgaagcatccctactgttatgatcttcaagaatggtgagaagaaagatacagttattggtgctgtgcccaagtcaacattgaccacgagcatagaaaaattcgtatga

SEQ ID NO: 69917 - protein, 175 aa, Glycine max
MVTLFDSLAVVRLPTAAFSPAATSRTSVLLPHCAGLRLRPAAATRLVASPARRIASRAARVVCEAQDTAVEVAPITDANWQSLVLESESAVLVEFWAPWCGPCRMIHPIIDELAKQYAGKLKCYKLNTDESPSTATRYGIRSIPTVMIFKNGEKKDTVIGAVPKSTLTTSIEKFV

SEQ ID NO: 69918 - DNA, 363 bp, Glycine max; identical to SEQ ID NO: 22553
  CDS (1)..(363)

SEQ ID NO: 69919 - protein, 120 aa, Glycine max; identical to SEQ ID NO: 22554

SEQ ID NO: 69920 - DNA, 549 bp, Glycine max
  CDS (1)..(549)
atggcgagaaactgggtggttcgatccttggcgcttcgtcacgcaatgaagaatagggttctcacactctccttcaaccgaattcttccctcactcccatcaaaatcctctctcttagccaccaccgccgccgccactgcctcctctcagctctccctcctcccctccttccaccactctcgctccctctcctccgcctcagctccttccgacgttgtccttgttaattccgaggaagagttcaacaatatccttaccaaagtccgagatgactcgttgcacgcggtcttctatttcactgcggcttggtgtggaccttgcaggtttatttcacctatcgttggggagctcagtaagaagtaccctcatgtaacaacatataagattgacattgatcaggaagcacttcaaggcacactgggcaagttgcagatttcatctgtgccaacacttcatttctttcagaatgggaaaaaggctgatgagcttataggtgctgatgttgcgcgattaaactatatcacagagaaactcttcaagaaggactga

SEQ ID NO: 69921 - protein, 182 aa, Glycine max
MARNWVVRSLALRHAMKNRVLTLSFNRILPSLPSKSSLLATTAAATASSQLSLLPSFHHSRSLSSASAPSDVVLVNSEEEFNNILTKVRDDSLHAVFYFTAAWCGPCRFISPIVGELSKKYPHVTTYKIDIDQEALQGTLGKLQISSVPTLHFFQNGKKADELIGADVARLNYITEKLFKKD

SEQ ID NO: 69922 - DNA, 417 bp, Glycine max; identical to SEQ ID NO: 22555
  CDS (1)..(417)

SEQ ID NO: 69923 - protein, 138 aa, Glycine max; identical to SEQ ID NO: 22556

SEQ ID NO: 69924 - DNA, 405 bp, Glycine max; identical to SEQ ID NO: 22559
  CDS (1)..(405)

SEQ ID NO: 69925 - protein, 134 aa, Glycine max; identical to SEQ ID NO: 22560

SEQ ID NO: 69926 - DNA, 366 bp, Helianthus annuus
  CDS (1)..(366)
atggctgaagaaggaattgttgtcggttgccacaacgctgatcaatggaaagagcattttgataagcacaaggcttctcagaaattggttgttgtggatttcactgcttcatggtgcggtccttgccgtgtaattgcaccgatcttggctgattatgctaaaaagtttcctcatgtcgccttcttgaaggtcgatgtcgatgaagttgagagtgttgctcaggagtattcagtggaagcgatgccgacgttcttgttcttcaagaacggtgtgaaggtggacacagttgttggtgctaagaaggatgaacttcttgcctgcattgtgaagcatgctggagaggctgctgcaactgtatctgcttag

SEQ ID NO: 69927 - protein, 121 aa, Helianthus annuus
MAEEGIVVGCHNADQWKEHFDKHKASQKLVVVDFTASWCGPCRVIAPILADYAKKFPHVAFLKVDVDEVESVAQEYSVEAMPTFLFFKNGVKVDTVVGAKKDELLACIVKHAGEAAATVSA

SEQ ID NO: 69928 - DNA, 570 bp, Hordeum vulgare
  CDS (1)..(570)
atggcgttacgcctctccgtctcctcgccgcagagcacggcctcctcgccggccatctcctcatgccgccccgccgcctgcggccgattcctggcctgtgtggcggcttctcagaagaggagcctgatggtggtgtctggctctgacgcgagggtggtgactccgctgaagtcaggcagcttggagacggccacgacgggtgccgacgaggtggaaacacccgcagcggcggtggcggtgactgggcaggtcaccgaggtctgcaaagacaccttctggccaattgtcaaggcagcagggccgaagcttgtcgtcctcgatatgtacacccaatggtgcggcccttgcaaagttatggcaccgaaattccagcagatgtccgagaaggaccacgacgtcgtgttcctcaagctcgattgcaatcaagacaacaggccacttgcaaaggagctcggcataagggttgtaccaacattcaagattttcaaggatgggaaggtggctaaggaggtcactggtgcgaagattgatgaattagcgcgtgcgattgaggaagtgaagtcaagctga

SEQ ID NO: 69929 - protein, 189 aa, Hordeum vulgare
MALRLSVSSPQSTASSPAISSCRPAACGRFLACVAASQKRSLMVVSGSDARVVTPLKSGSLETATTGADEVETPAAAVAVTGQVTEVCKDTFWPIVKAAGPKLVVLDMYTQWCGPCKVMAPKFQQMSEKDHDVVFLKLDCNQDNRPLAKELGIRVVPTFKIFKDGKVAKEVTGAKIDELARAIEEVKSS

SEQ ID NO: 69930 - DNA, 396 bp, Hordeum vulgare; identical to SEQ ID NO: 22561
  CDS (1)..(396)

SEQ ID NO: 69931 - protein, 131 aa, Hordeum vulgare; identical to SEQ ID NO: 22562

SEQ ID NO: 69932 - DNA, 369 bp, Hordeum vulgare; identical to SEQ ID NO: 22563
  CDS (1)..(369)

SEQ ID NO: 69933 - protein, 122 aa, Hordeum vulgare; identical to SEQ ID NO: 22564

SEQ ID NO: 69934 - DNA, 372 bp, Linum usitatissimum; identical to SEQ ID NO: 22565
  CDS (1)..(372)

SEQ ID NO: 69935 - protein, 123 aa, Linum usitatissimum; identical to SEQ ID NO: 22566

SEQ ID NO: 69936 - DNA, 363 bp, Linum usitatissimum; identical to SEQ ID NO: 22567
  CDS (1)..(363)

SEQ ID NO: 69937 - protein, 120 aa, Linum usitatissimum; identical to SEQ ID NO: 22568

SEQ ID NO: 69938 - DNA, 357 bp, Zea mays; identical to SEQ ID NO: 22569
  CDS (1)..(357)

SEQ ID NO: 69939 - protein, 118 aa, Zea mays; identical to SEQ ID NO: 22570

SEQ ID NO: 69940 - DNA, 534 bp, Zea mays
  CDS (1)..(534)
atgtcgtccgcgccgagcaccacggcgtccaccatcgcagcctctatccacacgccgttctcctcgggtccccgcggggcccgccttccggccgcgctccgcctctcgctcgctcagctccggtcggccggatgccgcgcggcgccaggtcgcctcgctcgccctcgcgcgcgcgttcggtgcggcgcggcggccaggttcattgggcagggcgagttccccgcggaggtgctggagtcggagctgcccgtgctcgtggacttcgtcgccgactggtgcgggccgtgccgcctcatcgcgcccgtcgtcgattgggcctccgaggaatatgctgggcgattaaaaattgtcaagattgatcatgatgccaatccacagctgattgaagagtacaaggtctatggtctcccgactttgattctcttcaagaatggacaagaggtaccagacagccgacgagaaggggcaatgacaaaagacaagttcaagcaatacctggaacctctcttgactacaattacaacagccgcttaa

SEQ ID NO: 69941 - protein, 177 aa, Zea mays
MSSAPSTTASTIAASIHTPFSSGPRGARLPAALRLSLAQLRSAGCRAAPGRLARPRARVRCGAAARFIGQGEFPAEVLESELPVLVDFVADWCGPCRLIAPVVDWASEEYAGRLKIVKIDHDANPQLIEEYKVYGLPTLILFKNGQEVPDSRREGAMTKDKFKQYLEPLLTTITTAA

SEQ ID NO: 69942 - DNA, 549 bp, Zea mays
  CDS (1)..(549)
atggccctgcgcctaccaatctcatcgtcccacgggctggcctccacgccggcgccaatctccacgacgacgtgccggccggccgtcttggcgacggccgcggcccagaagaggagcctgctgctggcgacggcctccgagacgaggggagtcgcgccggtgaggtccagcgggatcgagacgagcacggtgggtctgggatgtgaggccgtcaccgggcaggtcacggaggtcaacaaggacaccttctggcccatcgtcgaggccgccggcgacaaggtcgtcgtcctcgacatgtacaccgaatggtgcgggccttgcaaagtgatggctcccaagttccaggagatgtccgagaagaacctggacgtcgtgttcctcaagctggactgcaaccaggacaacaagcctctcgcgaaggagctgggcataaaggttgtgccgacgttcaagatcctcaagggcgggaaggtcgtgaaggaggtcaccggcgccaagatcgacgagctagcggaagccatcgagatagccaacaagaagtcaggctga

SEQ ID NO: 69943 - protein, 182 aa, Zea mays
MALRLPISSSHGLASTPAPISTTTCRPAVLATAAAQKRSLLLATASETRGVAPVRSSGIETSTVGLGCEAVTGQVTEVNKDTFWPIVEAAGDKVVVLDMYTEWCGPCKVMAPKFQEMSEKNLDVVFLKLDCNQDNKPLAKELGIKVVPTFKILKGGKVVKEVTGAKIDELAEAIEIANKKSG

SEQ ID NO: 69944 - DNA, 405 bp, Zea mays; identical to SEQ ID NO: 22573
  CDS (1)..(405)

SEQ ID NO: 69945 - protein, 134 aa, Zea mays; identical to SEQ ID NO: 22574

SEQ ID NO: 69946 - DNA, 363 bp, Zea mays
  CDS (1)..(363)
atggcgtccgaggagggagtcgtgatcgcctgccacaccaaggccgacttcgacgcccacatggccaaggccaaggaggccggcaagctggtgatcattgacttcacggcctcctggtgcggcccctgccgcttcatcgcgccactgttcgtcgagcacgccaagaagttcacccaggctgtgttcctgaaggtggacgtggacgagctgaaggaagttgccgcggcctacgatgtcgaggcgatgccgaccttccacttcgtcaagaacggggtgacggtggagaccgtcgtcggtgccaggaaggagaacctcctggcccagatcgagaagcactgcgccgcggccgtgcctgctgcgtag

SEQ ID NO: 69947 - protein, 120 aa, Zea mays
MASEEGVVIACHTKADFDAHMAKAKEAGKLVIIDFTASWCGPCRFIAPLFVEHAKKFTQAVFLKVDVDELKEVAAAYDVEAMPTFHFVKNGVTVETVVGARKENLLAQIEKHCAAAVPAA

SEQ ID NO: 69948 - DNA, 570 bp, Triticum aestivum
  CDS (1)..(570)
atggcgttacgcctctccgtctcctcgccgcagagcacggcctcctcgccggccatctcctcatgccgccccgccgcctgcggccgcttcctggcctgcgtggcggcttctcagaagaggagcctgatggtggtgtctggctctgacgggaggggagtggctccggtgaagtcgggcggcttggagacggccacgacgggagccgacgaggtggaagcgcccacagcggcggtggcggtgaccgggcaggtcacggaggtctgcaaggacaccttctggccaattgtcaaggcagcaggggagaagcccgtcgtcctcgacatgtacacccaatggtgcggcccttgcaaagttatggcaccaaaattccaggagatgtctgagaaggaccacgacgtcgtattcctcaagctcgattgcaatcaagacaacaggcctcttgcaaaggagcttggcataagggttgtaccaacattcaagattttcaaggatgggaaggttgcaaaggaggtcactggtgcgaagattgatgaattagcgcgtgcgattgaggaagtgaagtcaagctga

SEQ ID NO: 69949 - protein, 189 aa, Triticum aestivum
MALRLSVSSPQSTASSPAISSCRPAACGRFLACVAASQKRSLMVVSGSDGRGVAPVKSGGLETATTGADEVEAPTAAVAVTGQVTEVCKDTFWPIVKAAGEKPVVLDMYTQWCGPCKVMAPKFQEMSEKDHDVVFLKLDCNQDNRPLAKELGIRVVPTFKIFKDGKVAKEVTGAKIDELARAIEEVKSS

SEQ ID NO: 69950 - DNA, 381 bp, Triticum aestivum; identical to SEQ ID NO: 22575
  CDS (1)..(381)

SEQ ID NO: 69951 - protein, 126 aa, Triticum aestivum; identical to SEQ ID NO: 22576

SEQ ID NO: 69952 - DNA, 357 bp, Triticum aestivum; identical to SEQ ID NO: 22577
  CDS (1)..(357)

SEQ ID NO: 69953 - protein, 118 aa, Triticum aestivum; identical to SEQ ID NO: 22578

SEQ ID NO: 69954 - DNA, 396 bp, Triticum aestivum; identical to SEQ ID NO: 22579
  CDS (1)..(396)

SEQ ID NO: 69955 - protein, 131 aa, Triticum aestivum; identical to SEQ ID NO: 22580

SEQ ID NO: 69956 - DNA, 381 bp, Triticum aestivum; identical to SEQ ID NO: 22581
  CDS (1)..(381)

SEQ ID NO: 69957 - protein, 126 aa, Triticum aestivum; identical to SEQ ID NO: 22582

SEQ ID NO: 69958 - DNA, 357 bp, Triticum aestivum; identical to SEQ ID NO: 22583
  CDS (1)..(357)

SEQ ID NO: 69959 - protein, 118 aa, Triticum aestivum; identical to SEQ ID NO: 22584

SEQ ID NO: 69960 - DNA, 528 bp, Glycine max
  CDS (1)..(528)
atggtcactctcttcgactccctcgccgtcgtgcgtctccccaccgccgccttctccccggctgccaccagccggacctccgttttgctcccgcactgcgccggcctcaggctcagacccgccgccgccacgcgcttagttgcgtcccccgctcgcagaatcgcttcacgcgccgcgcgcgtcgtatgtgaggctcaggataccgccgtcgaagtggctcctattactgatgcaaattggcaatcccttgtccttgaatctgaatctgctgttttggttgaattctgggcgccatggtgtggtccctgccgaatgattcaccctataatagatgaactggcaaagcaatatgctgggaagctcaagtgttacaaactcaacacggatgagagcccttcaaccgctactcggtatggaattcgaagcatccctactgttatgatcttcaagaatggtgagaagaaagatacagttattggtgctgtgcccaagtcaacattgactgcgagcatagaaaaattcgtatga

SEQ ID NO: 69961 - protein, 175 aa, Glycine max
MVTLFDSLAVVRLPTAAFSPAATSRTSVLLPHCAGLRLRPAAATRLVASPARRIASRAARVVCEAQDTAVEVAPITDANWQSLVLESESAVLVEFWAPWCGPCRMIHPIIDELAKQYAGKLKCYKLNTDESPSTATRYGIRSIPTVMIFKNGEKKDTVIGAVPKSTLTASIEKFV

SEQ ID NO: 69962 - DNA, 534 bp, Zea mays
  CDS (1)..(534)
atgtcgtccgcgccgagcaccacggcgtccaccatcgcagcctctatccacacgccgttctcctcgggtccccgcggggcccgccttccggccgcgctccgcctctcgctcgctcagctccggtcggccggatgccgcgcggcgccaggtcgcctcgctcgccctcgcgcgcgcgttcggtgcggcgcggcggccaggttcattgggcagggcgagttccccgcggaggtgctggagtcggagctgcccgtgctcgtggacttcgtcgccgactggtgcgggccgtgccgcctcatcgcgcccgtcgtcgattgggcctccgaggaatatgctgggcgattaaaaattgtcaagattgatcatgatgccaatccacagctgattgaagagtacaaggtttatggtctcccgactttgattctcttcaaggatggccaagaggtgccaggcagccgacgagaaggggcaatgataaaagacaagttcaaggaatacctggaacctctgttgactacaattacaacagccgcttaa

SEQ ID NO: 69963 - protein, 177 aa, Zea mays
MSSAPSTTASTIAASIHTPFSSGPRGARLPAALRLSLAQLRSAGCRAAPGRLARPRARVRCGAAARFIGQGEFPAEVLESELPVLVDFVADWCGPCRLIAPVVDWASEEYAGRLKIVKIDHDANPQLIEEYKVYGLPTLILFKDGQEVPGSRREGAMIKDKFKEYLEPLLTTITTAA

SEQ ID NO: 69964 - DNA, 366 bp, Zea mays
  CDS (1)..(366)
atggcgtccgaggaggagggagtcgtgatcgcctgccacaccaaggccgagttcgacgcccacatggccaaggccaaggaggccggcaagctggtgatcattgacttcacggcctcctggtgcggcccctgccgcttcatcgcgccactgttcgtcgagcacgccaagaagttcacccaggctgtgttcctgaaggtggacgtggacgagctgaaggaagttgccgcggcctacgatgtcgaggcgatgccgaccttccacttcgtcaagaacggggtgacggtggagaccgtcgtcggtgccaggaaggagaacctcctggcccagatcgagaagcactgcgccgcggccgtgcctgctgcgtag

SEQ ID NO: 69965 - protein, 121 aa, Zea mays
MASEEEGVVIACHTKAEFDAHMAKAKEAGKLVIIDFTASWCGPCRFIAPLFVEHAKKFTQAVFLKVDVDELKEVAAAYDVEAMPTFHFVKNGVTVETVVGARKENLLAQIEKHCAAAVPAA

SEQ ID NO: 69966 - DNA, 432 bp, Zea mays
  CDS (1)..(432)
atgggactgaggcgtctgatgagatgctgctgctgcattgcaaagcacgcggacgacggcgacaagatcgatttcggaggtggcaatgttcatgttgtcacaagcaaagaggactgggaccaaagaattgcggaggcaaacaaggatgggaaaaccgtggttgcaaacttcagcgcttcctggtgtgggccgtgccgtgtcatcgcacctgtctacgccgaaatgtcgcagacgtaccctcagctcatgttcctgacgatcgatgttgatgacttgatggagttcagctcgtcgtgggacatccgcgcgaccccgacgttcttcttcctcaagaacgagcagcaggtggacaagctggtcggcgccaacaagcctgagctggagaagaaagtggccgccgtcgccgacgcggccggcagcaagacagtgtag

SEQ ID NO: 69967 - protein, 143 aa, Zea mays
MGLRRLMRCCCCIAKHADDGDKIDFGGGNVHVVTSKEDWDQRIAEANKDGKTVVANFSASWCGPCRVIAPVYAEMSQTYPQLMFLTIDVDDLMEFSSSWDIRATPTFFFLKNEQQVDKLVGANKPELEKKVAAVADAAGSKTV

SEQ ID NO: 69968 - DNA, 606 bp, Zea mays
  CDS (1)..(606)
atggcactgcggctacccatctcctcgacccacgggctggcctcctcgccagcgcccatctcctccacgacgacgtgccggccggccgccgccagtgggagcttgatcccgccagctgccctgatcgcagttgccatccgctgggcgtcggcgtcggcgtcccaaaagaggggcctgctgctgacgacggcgaggggcggcggagtcctcgcgccggtgaggtcgagcgggatcgagacgacgacgacctcggtgggagctgaggccgtcaccgggcaggtcacggaggtcaacaaggacaccttctggcccatcgtcgaggccgccggcgacaaggtcgtcgtcctcgacatgtacaccgaatggtgcgggccttgcaaagtgatggctcccaagttccaggagatgtccgagaagaacctggacgtcgtgttcctcaagctggactgcaaccaggacaacaagcctctcgcgaaggagctgggcataaaggttgtgccgacgttcaagatcctcaagggcgggaaggtcgtgaaggaggtcaccggcgccaagatcgacgagctagcggaagccatcgagatagccaacaagaagtcaggctga

SEQ ID NO: 69969 - protein, 201 aa, Zea mays
MALRLPISSTHGLASSPAPISSTTTCRPAAASGSLIPPAALIAVAIRWASASASQKRGLLLTTARGGGVLAPVRSSGIETTTTSVGAEAVTGQVTEVNKDTFWPIVEAAGDKVVVLDMYTEWCGPCKVMAPKFQEMSEKNLDVVFLKLDCNQDNKPLAKELGIKVVPTFKILKGGKVVKEVTGAKIDELAEAIEIANKKSG

SEQ ID NO: 69970 - DNA, 369 bp, Zea mays; identical to SEQ ID NO: 22585
  CDS (1)..(369)

SEQ ID NO: 69971 - protein, 122 aa, Zea mays; identical to SEQ ID NO: 22586

SEQ ID NO: 69972 - DNA, 432 bp, Zea mays; identical to SEQ ID NO: 22587
  CDS (1)..(432)

SEQ ID NO: 69973 - protein, 143 aa, Zea mays; identical to SEQ ID NO: 22588

SEQ ID NO: 69974 - DNA, 606 bp, Zea mays
  CDS (1)..(606)
atggcactgcggctacccatctcctcgacccacgggctggcctcctcgccagcgcccatctcctccacgacgacgtgccggccggccgccgccagtgggagcttgatcccgccagctgccctggtcgcagttgccatccgctgggcgtcggcgtcggcgtcccaaaagaggggcctgctgctgacgacggcgaggggcggcggagtcctcgcgccggtgaggtcgagcgggatcgagacgacgacgacctcggtgggagctgaggccgtcaccgggcaggtcacggaggtcaacaaggacaccttctggcccatcgtcgaggccgccggcgacaaggtcgtcgtcctcgacatgtacaccgaatggtgcgggccttgcaaagttatggctcccaagttccaggagatgtccgagaagaacctggacgtcgtgttcctcaagctggactgcaaccaggacaacaagcctctcgcgaaggagctgggcataaaggttgtgccgacgttcaagatcctcaagggcgggaaggtcgtgaaggaggtcaccggcgccaagatcgacgagctagcggaagccatcgagatagccaacaagaagtcaggctga

SEQ ID NO: 69975 - protein, 201 aa, Zea mays
MALRLPISSTHGLASSPAPISSTTTCRPAAASGSLIPPAALVAVAIRWASASASQKRGLLLTTARGGGVLAPVRSSGIETTTTSVGAEAVTGQVTEVNKDTFWPIVEAAGDKVVVLDMYTEWCGPCKVMAPKFQEMSEKNLDVVFLKLDCNQDNKPLAKELGIKVVPTFKILKGGKVVKEVTGAKIDELAEAIEIANKKSG

SEQ ID NO: 69976 - DNA, 384 bp, Zea mays; identical to SEQ ID NO: 22589
  CDS (1)..(384)

SEQ ID NO: 69977 - protein, 127 aa, Zea mays; identical to SEQ ID NO: 22590

SEQ ID NO: 69978 - DNA, 399 bp, Zea mays; identical to SEQ ID NO: 22591
  CDS (1)..(399)

SEQ ID NO: 69979 - protein, 132 aa, Zea mays; identical to SEQ ID NO: 22592

SEQ ID NO: 69980 - DNA, 504 bp, Zea mays
  CDS (1)..(504)
atggcggccttcgctacgggcagcaccacagcgcgcgcgacgctggcatcgccgacttcgtgccagccggccgcgcgccgggcgccggcccgatggatgccgctgcgctgctcgccgccggcccggggcctcaggggaggagcgcgttctcggcggagcgccacgctacgggtggaagctaagaagcaaactttttcttcatttgatgagttgctggagaagtctgagaagccattgttagttgacttctatgcaacttggtgtggtccatgccaatacatggttcccatacttcaagaagtgagtgagaagttaggcgacaaaattcaagttgtgaaaattgatactgagaagtacactagcattgcaagtcgttacagaattgaagcattgccaacttttatcatattcaaggatgggaaaccttgttatcgctttgagggagcattacctgttgaccagatgatcgaacagattgaaaatgctttggcagtcacaaagtag

SEQ ID NO: 69981 - protein, 167 aa, Zea mays
MAAFATGSTTARATLASPTSCQPAARRAPARWMPLRCSPPARGLRGGARSRRSATLRVEAKKQTFSSFDELLEKSEKPLLVDFYATWCGPCQYMVPILQEVSEKLGDKIQVVKIDTEKYTSIASRYRIEALPTFIIFKDGKPCYRFEGALPVDQMIEQIENALAVTK

SEQ ID NO: 69982 - DNA, 363 bp, Zea mays
  CDS (1)..(363)
atggcgtccgaggagggagtcgtgatcgcctgccacaccaaggccgaatttgacgcccacatggccaaggccaaggaggccggcaagctggtgatcattgacttcacggcctcctggtgcggcccctgccgcttcatcgcgccactgttcgtcgagcacgccaagaagttcacccaggctgtgttcctgaaggtggacgtggacgagctgaaggaagttgccgcggcctacgatgtcgaggcgatgccgaccttccacttcgtcaagaacggggtgacggtggagaccgtcgtcggtgccaggaaggagaacctcctggcccagatcgagaagcactgcgccgcggccgtgcctgctgcgtag

SEQ ID NO: 69983 - protein, 120 aa, Zea mays
MASEEGVVIACHTKAEFDAHMAKAKEAGKLVIIDFTASWCGPCRFIAPLFVEHAKKFTQAVFLKVDVDELKEVAAAYDVEAMPTFHFVKNGVTVETVVGARKENLLAQIEKHCAAAVPAA

SEQ ID NO: 69984 - DNA, 402 bp, Zea mays; identical to SEQ ID NO: 22593
  CDS (1)..(402)

SEQ ID NO: 69985 - protein, 133 aa, Zea mays; identical to SEQ ID NO: 22594

SEQ ID NO: 69986 - DNA, 390 bp, Zea mays; identical to SEQ ID NO: 22595
  CDS (1)..(390)

SEQ ID NO: 69987 - protein, 129 aa, Zea mays; identical to SEQ ID NO: 22596

SEQ ID NO: 69988 - DNA, 543 bp, Zea mays
  CDS (1)..(543)
atggccctgcgcctaccaatctcatcgtcccacgggctggcctccacgccggcgccaatctccacgacgacgtgccggccggccgtcttggcgacggccgcggcccagaagaggagcctgctgctggcgacggcctccgagacgaggggagtcgcgccggtgaggtccagcgggatcgagacgagcacggtgggtctgggatgtgaggccgtcaccgggcaggtcacggaggtcaacaaggacaccttctggcccatcgtcgaggccgccggcgacaaggtcgtcgtcctcgacatgtacaccgaatggtgcgggccttgcaaagtgatggctccgaaattccaggagatgtctgagaagaacctggatgttgtgttcctgaagctcgactgcaaccaggacaacaagccgcttgcgaaggagctgggcataaaggttgtgccaacgttcaagatcctcaagggtgggaaggtcgtgaaggaggtgaccggcgccaagatcgacgagctagcgcaagccatcgacacagtcaagtcagactga

SEQ ID NO: 69989 - protein, 180 aa, Zea mays
MALRLPISSSHGLASTPAPISTTTCRPAVLATAAAQKRSLLLATASETRGVAPVRSSGIETSTVGLGCEAVTGQVTEVNKDTFWPIVEAAGDKVVVLDMYTEWCGPCKVMAPKFQEMSEKNLDVVFLKLDCNQDNKPLAKELGIKVVPTFKILKGGKVVKEVTGAKIDELAQAIDTVKSD

SEQ ID NO: 69990 - DNA, 381 bp, Zea mays
  CDS (1)..(381)
atggcggccgaggagggtgccgtgatcgcgtgccacaccaaggacgagttcgacgcccgcatggccaaggccaaggagcagggcaagctggtggtcatcgacttcatggccccctggtgcagtgggtgccagatgatggccccggtgtacgcggactgcgccagcaagtacccttccgcggtcttcctcgaggtcgacgtggacgaactgctggaagtcgcgaagatctacggcgtccatgtgatgccgaccttctgcttcatcaggaacggcgagacgctcgagagctttgctaccgtcgacgaggacgagctccgggacgccgtcaggaagtacgccgccgctggcactacgacggctcctgcctcggcgtccgcctaa

SEQ ID NO: 69991 - protein, 126 aa, Zea mays
MAAEEGAVIACHTKDEFDARMAKAKEQGKLVVIDFMAPWCSGCQMMAPVYADCASKYPSAVFLEVDVDELLEVAKIYGVHVMPTFCFIRNGETLESFATVDEDELRDAVRKYAAAGTTTAPASASA

SEQ ID NO: 69992 - DNA, 369 bp, Zea mays; identical to SEQ ID NO: 22597
  CDS (1)..(369)

SEQ ID NO: 69993 - protein, 122 aa, Zea mays; identical to SEQ ID NO: 22598

SEQ ID NO: 69994 - DNA, 369 bp, Zea mays; identical to SEQ ID NO: 22599
  CDS (1)..(369)

SEQ ID NO: 69995 - protein, 122 aa, Zea mays; identical to SEQ ID NO: 22600

SEQ ID NO: 69996 - DNA, 399 bp, Zea mays; identical to SEQ ID NO: 22601
  CDS (1)..(399)

SEQ ID NO: 69997 - protein, 132 aa, Zea mays; identical to SEQ ID NO: 22602

SEQ ID NO: 69998 - DNA, 387 bp, Zea mays; identical to SEQ ID NO: 22603
  CDS (1)..(387)

SEQ ID NO: 69999 - protein, 128 aa, Zea mays; identical to SEQ ID NO: 22604

SEQ ID NO: 70000 - DNA, 387 bp, Zea mays; identical to SEQ ID NO: 22605
  CDS (1)..(387)

SEQ ID NO: 70001 - protein, 128 aa, Zea mays; identical to SEQ ID NO: 22606

SEQ ID NO: 70002 - DNA, 20 bp, Artificial sequence
  primer
atgggaggagctttatcaac

SEQ ID NO: 70003 - DNA, 21 bp, Artificial sequence
  primer
ttatgctctgagtttgctaac

SEQ ID NO: 70004 - protein, 122 aa, Artificial sequence
  consensus sequence
  Variant (2)..(2): Xaa in position 2 is any amino acid
  Variant (4)..(4): Xaa in position 4 is any amino acid
  Variant (10)..(13): Xaa in position 10 to 13 is any amino acid
  Variant (15)..(27): Xaa in position 15 to 27 is any amino acid
  Variant (28)..(30): Xaa in position 28 to 30 is any or no amino acid
  Variant (32)..(32): Xaa in position 32 is any amino acid
  Variant (34)..(34): Xaa in position 34 is any amino acid
  Variant (36)..(36): Xaa in position 36 is any amino acid
  Variant (38)..(51): Xaa in position 38 to 51 is any amino acid
  Variant (52)..(53): Xaa in position 52 to 53 is any or no amino acid
  Variant (57)..(59): Xaa in position 57 to 59 is any amino acid
  Variant (61)..(61): Xaa in position 61 is any amino acid
  Variant (63)..(69): Xaa in position 63 to 69 is any amino acid
  Variant (70)..(71): Xaa in position 70 to 71 is any or no amino acid
  Variant (74)..(77): Xaa in position 74 to 77 is any amino acid
  Variant (78)..(121): Xaa in position 78 to 121 is any or no amino acid
FXAXWCGPCXXXXPXXXXXXXXXXXXXXXXFXKXDXDXXXXXXXXXXXXXXXXPTFXXXKXGXXXXXXXXXGAXXXXXXXXXXXXXXXXXXXXXXXXXXXXXXXXXXXXXXXXXXXXXXXXL

SEQ ID NO: 70005 - protein, 20 aa, Artificial sequence
  protein pattern
  Variant (2)..(2): Xaa in position 2 is any amino acid
  Variant (4)..(4): Xaa in position 4 is any amino acid
  Variant (7)..(7): Xaa in position 7 is Gly or Pro
  Variant (10)..(10): Xaa in position 10 is Lys or Arg
  Variant (11)..(11): Xaa in position 11 is any amino acid
  Variant (12)..(12): Xaa in position 12 is Ile, Leu, Met or Val
  Variant (13)..(13): Xaa in position 13 is any amino acid
  Variant (15)..(19): Xaa in position 15 to 19 is any amino acid
  Variant (20)..(20): Xaa in position 20 is Ala, Ser or Val
FXAXWCXPCXXXXPXXXXXX

SEQ ID NO: 70006 - DNA, 984 bp, Arabidopsis thaliana
  CDS (1)..(984)
atggcagtcgctgataatcccttttcaatgtcgaccatgttcaatgctttaccaaaccctaaaggaatctccggttccattcctcctcctggattcgccccacgcgcctccgccacgcccttgcacgcagctctgttcaacctaatgactgacggcgatggtgtgtcttactttaaagagatgatctcaaattcagacaaaacagagcttcagaggatggcctcgttgcttacgtctgactccgattacttcatgtcgatcgtcacaaccaagttcggctcgagacgcgtgcagaagctcctcggcaaatcagatgacgtggacgccttcttctgtgccgctatcttgcgccgcttcctccacatcacgaccgacaaatacgcatcctacgtgacgatacgagccatggtcgttttcgacaaggtgatgaaaaaggcattgtacgagcgcattctctaccacgctctcgacctagcgtgtgaccagcacggctgcatcgcgctcaatgatatcataaccgacgctgacgatccttactacagagatcagctactagaattggtcgcatccaacgctctccggctaagcaacgatgcttcagggaactttgtggtccaacatgtgcttacactgtatgactcgcgttgcattcacaacatcgccgttaatctttatggtcagtgcattgagctatcgtttaagaagtatggaagctacatcgtggagaagcttttggaggtggaggagtcaatggttgtggtggttgtggagcttttgggttgcgatggagacaggttgatgaggctggcgaggaatgagtttgggaatttcgtggtggtcaaggctctgagattcaccaagatgtctaggatggatctgttttggggtttggtgcagaagctcatgccttttatccgtctcttgcgtagatctcacggaagcaacattgcaaacatcttggactcatttaggcttcgttgctga

SEQ ID NO: 70007 - protein, 327 aa, Arabidopsis thaliana
MAVADNPFSMSTMFNALPNPKGISGSIPPPGFAPRASATPLHAALFNLMTDGDGVSYFKEMISNSDKTELQRMASLLTSDSDYFMSIVTTKFGSRRVQKLLGKSDDVDAFFCAAILRRFLHITTDKYASYVTIRAMVVFDKVMKKALYERILYHALDLACDQHGCIALNDIITDADDPYYRDQLLELVASNALRLSNDASGNFVVQHVLTLYDSRCIHNIAVNLYGQCIELSFKKYGSYIVEKLLEVEESMVVVVVELLGCDGDRLMRLARNEFGNFVVVKALRFTKMSRMDLFWGLVQKLMPFIRLLRRSHGSNIANILDSFRLRC

SEQ ID NO: 70008 - DNA, 927 bp, Arabidopsis thaliana
  CDS (1)..(927)
atggcacaccagctccgttttgccgccgcaagagaacccatctcagaagagtatccggcggttgctcttcctcatccacgttgcatctccgtcgcgtttcctcctccgagattcacaccatctccgtcgcctttaactaattactcattcttggccgcattaactcctcaagaactggagatgcgtttgcaaattgcaatggatgtccagatgatctcgaagttagaccaaagaaagcttcaaacgatggcgtcattgctgacatcagatcccgattacttcttgatgatcgcaagaaacatgaacggctccaaacgcattcagaaacttctcggaaaaacagatgacgtggacgctttattcgccgccgctatcttgcgccgcttcctccacatcatcaccgacaagtacgcgtcgtacgtggtgagacgggggatgacagttttcgataagaagaagaaaaaagcaatgtacgagcacattctccactacgcgagccacatagcgcgtgataaacacgctcttgtactaagcaacgatgcttatgggaactttgtgatacaacgcgtgcttaaactgaatgacttgcgtagcaagaacaacatcgtcgttagtctacgtggccactttgttgatctctcgtttcagaaatatggaagctacgttgtggatgtacttttggagacgaaggagtcaatggttgtggtggtggaggagcttatggaatgtgaaggagatatgttgatgaggttggcgaggaatgagtatgggaatttcttggtgtgcaaggcactgagagtcacgcagaaggagatggttaggactgatctgttttggggtttggtgcataagctcaagccttttcacaatctcttgcgttggtctcgtggaaagaacattgcatccatcttaaactcgattcgttag

SEQ ID NO: 70009 - protein, 308 aa, Arabidopsis thaliana
MAHQLRFAAAREPISEEYPAVALPHPRCISVAFPPPRFTPSPSPLTNYSFLAALTPQELEMRLQIAMDVQMISKLDQRKLQTMASLLTSDPDYFLMIARNMNGSKRIQKLLGKTDDVDALFAAAILRRFLHIITDKYASYVVRRGMTVFDKKKKKAMYEHILHYASHIARDKHALVLSNDAYGNFVIQRVLKLNDLRSKNNIVVSLRGHFVDLSFQKYGSYVVDVLLETKESMVVVVEELMECEGDMLMRLARNEYGNFLVCKALRVTQKEMVRTDLFWGLVHKLKPFHNLLRWSRGKNIASILNSIR

SEQ ID NO: 70010 - DNA, 915 bp, Arabidopsis thaliana
  CDS (1)..(915)
atgacaaacatcaatcgcttatcaatgtcgacaatgttcaacgctttacacgaaatcctgaatgaggagcctttggcaattcctcctcctccttcacgtggcggctattcctacttccacatccgtacaacggagatggatttgcaaaggatgttcaacttcatgactggaagcgaagatttgaaagacgacatctcagtattagacacgggaatgcttaaactcatgaggatgtcagatgacatggacgtcttcttctttgtggctatcatgcgcctcttcatccatgtcatgatcgacaaatacgcctcctacgtggcgatacaggggatgagaatttttaaacaggacaagagagagttgatgtatgatcacattcttcgatacgcgcttttcctggcgcgtgaccagtatggttgcattgcgctcaacgaaatcataaaagagttggacgatccttactatagagacgagctcatggacatagtctcaaacaacgctcttttgctaagcaacgatgcttatggcaactttgtggtccaacacgtgcttaaactacatgactcccgttgcacgggtaacattgctgataaactatgtggctactgcgttgagctctcgtttaaaaagtatggaagctacatcgtggagcgacttttggaggtgagggacataccaatggcaacaattgttctggatcttttagcgtgcaagacagagatgttgataaggttggcgaggagcgagaacgggaattttgtggtgtgcaaattactggaattaacaaatgacattctcactgctgatctattttacagtttggtgaataagctcaggccttatcgctttctcttgcataggtttcctgaaagcaagattgtagccatcttgggctcaatgcgtgtcccaaactag

SEQ ID NO: 70011 - protein, 304 aa, Arabidopsis thaliana
MTNINRLSMSTMFNALHEILNEEPLAIPPPPSRGGYSYFHIRTTEMDLQRMFNFMTGSEDLKDDISVLDTGMLKLMRMSDDMDVFFFVAIMRLFIHVMIDKYASYVAIQGMRIFKQDKRELMYDHILRYALFLARDQYGCIALNEIIKELDDPYYRDELMDIVSNNALLLSNDAYGNFVVQHVLKLHDSRCTGNIADKLCGYCVELSFKKYGSYIVERLLEVRDIPMATIVLDLLACKTEMLIRLARSENGNFVVCKLLELTNDILTADLFYSLVNKLRPYRFLLHRFPESKIVAILGSMRVPN

SEQ ID NO: 70012 - DNA, 999 bp, Arabidopsis thaliana
  CDS (1)..(999)
atggcaaacaacaattccttttcaatgtcgacaatgttcaatactatacaagaaatcctgaatgaggagcctttgacagttccttctcctccttcacgtggcggctattccttattccacatccgtaaagcggagatggatattcaaaggattttcaacttcatgactggaagtgaagatttgaaagacgacatctcagtattagacacgggaacgcttatgtggatggcgtctttaatgacgtctgactgcgattacttcatggtcatcacaacaaacaagaacggctccaaaaccctacagaaactcatgggaatgtcagatgacatggacgtcttcttctttgaggctatcatgcgcctcttcatccatgtcatgactgacaagtacgcctcctacgtgacgatacaggggatgagagtttttcaacaggacaagagagagttgatgtatgatcaaattcttcgatacgcgtgtttcctggcgggtgaccagtacggttgcatcgcgctcaacgaaatcataaccgacttggacgatccttactacagagaccagctccttgacatagtcgcgaacaacgctcttttgctaagcaacgatgcttatggcaactttgtggtccaacacgtgcttaaactacgtgactcccgttgcacgcgtaacattgctgataaactatgtggctactgcgtcgagctctcgtttaaaaagtatggaagctacatcgtggagcggcttttggaggcgggggacgtaccaatggcaacagtggttctggatctgttggcgtgcaagacagagatgttgataaggttggcgaggagcgagtacgggaattttgtggtgtgcaaggcactggaattaacaaatgagatcctcacggctgatctgttttacggtttggtgaataggctcatgccttatcgccatctcttgcataggtctcctcgaagcaagattgcaaccatcttggactcaatgagtgtcccaaactag

SEQ ID NO: 70013 - protein, 332 aa, Arabidopsis thaliana
MANNNSFSMSTMFNTIQEILNEEPLTVPSPPSRGGYSLFHIRKAEMDIQRIFNFMTGSEDLKDDISVLDTGTLMWMASLMTSDCDYFMVITTNKNGSKTLQKLMGMSDDMDVFFFEAIMRLFIHVMTDKYASYVTIQGMRVFQQDKRELMYDQILRYACFLAGDQYGCIALNEIITDLDDPYYRDQLLDIVANNALLLSNDAYGNFVVQHVLKLRDSRCTRNIADKLCGYCVELSFKKYGSYIVERLLEAGDVPMATVVLDLLACKTEMLIRLARSEYGNFVVCKALELTNEILTADLFYGLVNRLMPYRHLLHRSPRSKIATILDSMSVPN

SEQ ID NO: 70014 - DNA, 984 bp, Arabidopsis thaliana
  CDS (1)..(984)
atggcagtctccgataataccttttcaatgtcgaccatgttcaatgctttaccaaaccctacagaaacctccggttacattcctccttctggattcgccccacgcgcctccgccacgcccttgcacgcagctctgttcaacctaatgactgacggcgatggtgtgtcttactttaaagagatgatctcaaagtcagacaaaacagagcttcagaggatggcctcgttgcttacgtctgactccgattacttcatgtcgatcgtcacaaccaagttcggctcgagacgcgtgcagaagctcctcggcaaatcagatgacgtggacgccttcttctgtgccgctatcttgcgccgcttcctccacatcacgaccgacaaatacgcatcctacgtgacgatacgagccatggtcgttttcgacaaggtgatgaaaaaggcattgtacgagcgcattctctaccacgctctcgacctagcgtgtgaccagcacggctgcatcgcgctcaatgatatcataaccgacgctgacgatccttactacagagatcagctactagaattggtcgtatccaacgctctccggctaagcaacgatgcttcagggaactttgtggtccaacatgtgcttacactgtatgactcgcgttgcattcacaacatcgccgttaatctttatggtcagtgcattgagctatcgtttaagaagtatggaagctacatcgtggagaagcttttggaggtggaggagtcaatggttgtggtggttgtggagcttttgggttgcgatggagacaggttgatgaggctggcgaggaatgagtttgggaatttcgtggtggtcaaggcactgagattcacaaaggagatgaggatggatctgttttggggtttggtgcagaagctcatgccttttatccatctcttgcgtagatctcacggaaacaacattgcaaacatcttggacacatttaggcttcgttgctga

SEQ ID NO: 70015 - protein, 327 aa, Arabidopsis thaliana
MAVSDNTFSMSTMFNALPNPTETSGYIPPSGFAPRASATPLHAALFNLMTDGDGVSYFKEMISKSDKTELQRMASLLTSDSDYFMSIVTTKFGSRRVQKLLGKSDDVDAFFCAAILRRFLHITTDKYASYVTIRAMVVFDKVMKKALYERILYHALDLACDQHGCIALNDIITDADDPYYRDQLLELVVSNALRLSNDASGNFVVQHVLTLYDSRCIHNIAVNLYGQCIELSFKKYGSYIVEKLLEVEESMVVVVVELLGCDGDRLMRLARNEFGNFVVVKALRFTKEMRMDLFWGLVQKLMPFIHLLRRSHGNNIANILDTFRLRC

SEQ ID NO: 70016 - DNA, 1023 bp, Ostreococcus tauri
  CDS (1)..(1023)
atggacaaccgtttcgtctccgttgagaactgcgttggacaaatctctgttctcgcacgcgatcagcacggctgccgattcttacaacgcaagtttgacgaagaaggctccaaggctgtcgatctctgctacgatgaaatcatcgccgaagctgtcgaactcatgatggatccgtttgggaactatctggttcaaaagttgattgaatgctgcagcgatgaacaacgttctggggtgttgcgcgcggtctctgtcgtgaaggctgataatccggatggtctgcccgaactcgtcactatcgctttgaacacgcacggtactcgcgcggttcaaaagttgattgagatgctcaactctccggaagaagtttctctcgcgacgaccgctctgcgacctggtgtcgttaccttgatcaaggacttgaatggcaaccacgtaattcagcgttgccttcaaagactgtcgtgtgacgacaatcagttcatctatgacgccgcaaaggtgcactgcgtggagattgcaactcaccgacatggttgttgcgttcttcagcgttgcatcgatcacgcgactgaggaacaacgtcgtccgctggtgcacgaaatcgcttctcaggcgctcgtgctctcccaagacccttttggcaactatgtcgtccagtatattttggatctgggcttgtcttgggccaacggcgaggtcatgacgcaactcctcggcaactacgccgagcttagtatgcaaaagttcagctctaacgtcgtggagaagtgcctcaagcttgccgacgcgtctcttgagaagaaccgtaacacagtggtgcgagaaatcatgcagtcaccactgttggatcgtcttctcatggacccgtatggtaactatgtagtgcagtcaacgctcactgtgacgaagggtgtgcttcacaccgaactcgtcgagcgcatcagaccgcacttaccgttgatcaaaaatagtccgtttggtaagcggattttacgattactcctggagaacaagaagtag

SEQ ID NO: 70017 - protein, 340 aa, Ostreococcus tauri
MDNRFVSVENCVGQISVLARDQHGCRFLQRKFDEEGSKAVDLCYDEIIAEAVELMMDPFGNYLVQKLIECCSDEQRSGVLRAVSVVKADNPDGLPELVTIALNTHGTRAVQKLIEMLNSPEEVSLATTALRPGVVTLIKDLNGNHVIQRCLQRLSCDDNQFIYDAAKVHCVEIATHRHGCCVLQRCIDHATEEQRRPLVHEIASQALVLSQDPFGNYVVQYILDLGLSWANGEVMTQLLGNYAELSMQKFSSNVVEKCLKLADASLEKNRNTVVREIMQSPLLDRLLMDPYGNYVVQSTLTVTKGVLHTELVERIRPHLPLIKNSPFGKRILRLLLENKK

SEQ ID NO: 70018 - DNA, 753 bp, Arabidopsis thaliana
  CDS (1)..(753)
atgactggaagtgaagatttgaaagacgacatctcagtattagacacgggaacgcttatgtggatggcgtctttaatgacgtctgactgcgattacttcatggtcatcacaacaaacaagaacggctccaaaaccctacagaaactcatgggaatgtcagatgacatggacgtcttcttctttgaggctatcatgcgcctcttcatccatgtcatgactgacaagtacgcctcctacgtgacgatacaggggatgagagtttttcaacaggacaagagagagttgatgtatgatcaaattcttcgatacgcgtgtttcctggcgggtgaccagtacgctcttttgctaagcaacgatgcttatggcaactttgtggtccaacacgtgcttaaactacgtgactcccgttgcacgcgtaacattgctgataaactatgtggctactgcgtcgagctctcgtttaaaaagtatggaagctacatcgtggagcggcttttggaggcgggggacgtaccaatggcaacagtggttctggatctgttggcgtgcaagacagagatgttgataaggttggcgaggagcgagtacgggaattttgtggtgtgcaaggcactggaattaacaaatgagatcctcacggctgatctgttttacggtttggtgaataggctcatgccttatcgccatctcttgcataggtctcctcgaagcaagattgcaaccatcttggactcaatgagtgtcccaaactag

SEQ ID NO: 70019 - protein, 250 aa, Arabidopsis thaliana
MTGSEDLKDDISVLDTGTLMWMASLMTSDCDYFMVITTNKNGSKTLQKLMGMSDDMDVFFFEAIMRLFIHVMTDKYASYVTIQGMRVFQQDKRELMYDQILRYACFLAGDQYALLLSNDAYGNFVVQHVLKLRDSRCTRNIADKLCGYCVELSFKKYGSYIVERLLEAGDVPMATVVLDLLACKTEMLIRLARSEYGNFVVCKALELTNEILTADLFYGLVNRLMPYRHLLHRSPRSKIATILDSMSVPN

SEQ ID NO: 70020 - DNA, 948 bp, Arabidopsis thaliana
  CDS (1)..(948)
atgttcaatgctttaccaaaccctacagaaacctccggttacattcctccttctggattcgccccacgcgcctccgccacgcccttgcacgcagctctgttcaacctaatgactgacggcgatggtgtgtcttactttaaagagatgatctcaaagtcagacaaaacagagcttcagaggatggcctcgttgcttacgtctgactccgattacttcatgtcgatcgtcacaaccaagttcggctcgagacgcgtgcagaagctcctcggcaaatcagatgacgtggacgccttcttctgtgccgctatcttgcgccgcttcctccacatcacgaccgacaaatacgcatcctacgtgacgatacgagccatggtcgttttcgacaaggtgatgaaaaaggcattgtacgagcgcattctctaccacgctctcgacctagcgtgtgaccagcacggctgcatcgcgctcaatgatatcataaccgacgctgacgatccttactacagagatcagctactagaattggtcgtatccaacgctctccggctaagcaacgatgcttcagggaactttgtggtccaacatgtgcttacactgtatgactcgcgttgcattcacaacatcgccgttaatctttatggtcagtgcattgagctatcgtttaagaagtatggaagctacatcgtggagaagcttttggaggtggaggagtcaatggttgtggtggttgtggagcttttgggttgcgatggagacaggttgatgaggctggcgaggaatgagtttgggaatttcgtggtggtcaaggcactgagattcacaaaggagatgaggatggatctgttttggggtttggtgcagaagctcatgccttttatccatctcttgcgtagatctcacggaaacaacattgcaaacatcttggacacatttaggcttcgttgctga

SEQ ID NO: 70021 - protein, 315 aa, Arabidopsis thaliana
MFNALPNPTETSGYIPPSGFAPRASATPLHAALFNLMTDGDGVSYFKEMISKSDKTELQRMASLLTSDSDYFMSIVTTKFGSRRVQKLLGKSDDVDAFFCAAILRRFLHITTDKYASYVTIRAMVVFDKVMKKALYERILYHALDLACDQHGCIALNDIITDADDPYYRDQLLELVVSNALRLSNDASGNFVVQHVLTLYDSRCIHNIAVNLYGQCIELSFKKYGSYIVEKLLEVEESMVVVVVELLGCDGDRLMRLARNEFGNFVVVKALRFTKEMRMDLFWGLVQKLMPFIHLLRRSHGNNIANILDTFRLRC

SEQ ID NO: 70022 - DNA, 759 bp, Arabidopsis thaliana
  CDS (1)..(759)
atgactaataacgaagatcatgttgcggctccgtttgaagagatgatctcgaagttagaccaaagaaagcttcaaacgatggcgtcattgctgacatcagatcccgattacttcttgatgatcgcaagaaacatgaacggctccaaacgcattcagaaacttctcggaaaaacagatgacgtggacgctttattcgccgccgctatcttgcgccgcttcctccacatcatcaccgacaagtacgcgtcgtacgtggtgagacgggggatgacagttttcgataagaagaagaaaaaagcaatgtacgagcacattctccactacgcgagccacatagcgcgtgataaacacgctcttgtactaagcaacgatgcttatgggaactttgtgatacaacgcgtgcttaaactgaatgacttgcgtagcaagaacaacatcgtcgttagtctacgtggccactttgttgatctctcgtttcagaaatatggaagctacgttgtggatgtacttttggagacgaaggagtcaatggttgtggtggtggaggagcttatggaatgtgaaggagatatgttgatgaggttggcgaggaatgagtatgggaatttcttggtgtgcaaggcactgagagtcacgcagaaggagatggttaggactgatctgttttggggtttggtgcataagctcaagccttttcacaatctcttgcgttggtctcgtggaaagaacattgcatccatcttaaactcgattcgttag

SEQ ID NO: 70023 - protein, 252 aa, Arabidopsis thaliana
MTNNEDHVAAPFEEMISKLDQRKLQTMASLLTSDPDYFLMIARNMNGSKRIQKLLGKTDDVDALFAAAILRRFLHIITDKYASYVVRRGMTVFDKKKKKAMYEHILHYASHIARDKHALVLSNDAYGNFVIQRVLKLNDLRSKNNIVVSLRGHFVDLSFQKYGSYVVDVLLETKESMVVVVEELMECEGDMLMRLARNEYGNFLVCKALRVTQKEMVRTDLFWGLVHKLKPFHNLLRWSRGKNIASILNSIR

SEQ ID NO: 70024 - DNA, 1059 bp, Brassica napus
  CDS (1)..(1059)
atggcaaacgctgatcccttctcaatgtctacgctactcagttctttacaacatctacctttcaccttcgcaacagaacccatgatgactccggcagttcctcctcctccacgtggcatcatcttcaccattcctcaaccaagatacgaccctaaggaattcttaactcctcagtacctggagtactctcgtttgcagtcgctgttcaacctcatgactagcagcaaagaagaagttaacattgctccgttcaaagagatgatctcaaggttgtccagaagagagctccaagagatggcgtatttgctgacctcagatcccgactacttcttggcgatcgcaagaaacaagaacggctctcaccgcctacagaaactcatcggaaaatcaggcgacgcggacaagttgttcttcctcgcgatcttgcgccgcttcctccacgtcatgacagataagtacgcgtcctacgtggcggtacgaggaatgcaagtttttgacgacaagaagaaagagttgatgtacgagcacattctcccccacgcgcttcgagtggcatgtgacaaacacggctacatcgccctcaacgaggtaataaccgacttggaccatcctttctacagagaccagctcttggacattgtcgcgctcaacgctctcttgctaagctacgatgcttatgggaactatgtggttcaacacgtgcttacattgaatgacttgcgttgcacgtataacattgcggttagtctcgttggctattgcgttgagctctcgttagacaagtgtggaagctacatcgtggagaagcttctggaggcggaggagtcgatggttcttgtggtggaagagcttttggagtgcgaaggaggcagtttgatgaggctggcgaggaatgagtatgggagtttcgtggtgatcaaggcactgagagtcatgcaggagatgaatagggttgatctgtttaggggtttggtgcagaagctgatgccttttcgccatctcttgcgtaggccttgtggaaacactactatagcagcaatcattgagtcggtttgttag

SEQ ID NO: 70025 - protein, 352 aa, Brassica napus
MANADPFSMSTLLSSLQHLPFTFATEPMMTPAVPPPPRGIIFTIPQPRYDPKEFLTPQYLEYSRLQSLFNLMTSSKEEVNIAPFKEMISRLSRRELQEMAYLLTSDPDYFLAIARNKNGSHRLQKLIGKSGDADKLFFLAILRRFLHVMTDKYASYVAVRGMQVFDDKKKELMYEHILPHALRVACDKHGYIALNEVITDLDHPFYRDQLLDIVALNALLLSYDAYGNYVVQHVLTLNDLRCTYNIAVSLVGYCVELSLDKCGSYIVEKLLEAEESMVLVVEELLECEGGSLMRLARNEYGSFVVIKALRVMQEMNRVDLFRGLVQKLMPFRHLLRRPCGNTTIAAIIESVC

SEQ ID NO: 70026 - DNA, 3180 bp, Glycine max
  CDS (1)..(3180)
atgttgtctgaattgggaagaagaccaatgcttgggagtaacgagggttcctttggtgatgaactggagaaggagatagggatgttgcttcgtgagcaacgaagacaggaggctgatgatcgtgaacgagagcttaatatttataggagtggatcagcgcctccaactgtggagggttctttgagtgctgttggagggttgtttggtggtgctgctggtgctcctgccgctggtgctcctgtcgccttttcggaatttcaagggactaaggatgtgaatgggattacttctgaggaagagcttaggtctgatccagcgtatctttcatactactactccaatgtgaatttgaaccctaggctgccaccacctttgctgtcaaaggaggattggaggtttaaacaaagactaaaaggtggagcttcggctcgaggtggaattggagataggaggaaagtgaacaggactgatgacaacagtggaagatcaccgtttgcgaccccaccaggttttaacatgaggaaacaagagagtgaggtggagagtgaaaatccaagaggttcggctgagtggggtggtgatggactcattggtttgcctggcttaggtcttggcagcaaacaaaagagccttgcagaaatttttcaggatgatttaggacataacacctatatcacaggccttccatctcatccagccagccgaaatgcatttgatgaaaatggcgatatcacaacatctgctgaagcagaactggctcatgcacgccgcgagtccatggccactgatacactaagatctggatcaaatgtccaaggatcatctgctgcccaaaatactggcccacaagcttcatattcctatgctgctgcactaggatcttccttgtcgagaagcactactcctgatccacaacttgttgctagggctcccagtccctgccccacacctattgggggtgggagagttgtagctgctgagaagagaggtattaacagtcctgatgcttttaatggtgtttcatctggagtcaatgagcctgcagatattgtggctgcattgtctggcatgaatctgtcagctgatgatgtgttagatggtgatagccatttcccgtcacaggttgagtcagatgttgataatcatcagagatacctatttggcatgcaaggtggtcaggatcctggcaaacaacatgcatacttaaagaagtctgaatcaggacacttgcataaatctgcttactctgattcaggtaagaatggtgggagtatgtcagacatcaacaatccatctttggataggcatgctgagctacaaaagtgtgctgttcctcccaataactcatacttcaagggatcacctacctcagcttttagtggtggaggtggcgtgcctgctcagtactcgcccttagatagtacaaattcagcatttactaactatggcctgagtggctatgctggaaatccagcattggcatccttgatgactaaccaacttggcactggtaatctgccacccttatttgaaaatgttgctgcagcatcagcaatggcagcccctggaatgcactcgagaattcttggaggtggtttggcttctggagctgctgctccatctgatgtgcataatattggtaggatgggaaatcaaattccaggcagtgctcttcaggctccttttgtcgatccaatgtatcttcagtacctgaggacatctgagtttgctgcagcacaacttgctgctctcaatgacccctctgtggacaggaactacttaggcaattcatacatgaatttacttgagctccagaaagcttatcttgggtctatcctctcacctcagaaatcccaatacaatgtaccgctgggtggtaaatcaggcagctccactcctcatggttattatggaaatcctgcatatggtgttggaatgtcttacccaggaactccaattgcaaactctgttgtgtccacttcgccagttggatctggaagtcctgttaggcacaatgagctgaatatgcgttttgcttctggattgaggaatttagctggggtcatgggaccttggcatgtagatactgggaatattgatgaaagttttgcttcttctctgttggaagagtttaaaagcaataaaacaaagtgttttgagctttctgaaattgctggtcatgttgttgaattcagtgcggatcaatacgggagtcgatttattcaacaaaagcttgaaacagctactacagaagaaaaaaacatggtttatcaggaaatcatgccacatgcccttgctttgatgactgatgtctttggtaattatgtggttcaaaagttttttgagcatggacttgcatcccaaagaagagaattagccaacaaacttcttggccatgttctgacacttagccttcaaatgtatggttgccgtgtcatccagaaggccatcgaagttgttgatctggatcagaagatagagatggttcaagagcttgatggtaacgtcatgcgctgtgtacgtgatcagaatggtaatcacgtcattcaaaagtgtattgaatgtgtccctgaagatgcaatcgactttattgtctcgacattttttgatcaagttgtgacactatcaacccatccatatggttgccgggtgatacagagagtgctggaacattgcgaagaccctacaacacagcagaaagttatggatgaaattttaggagcagttagcatgctagctcaggatcagtatggaaactacgttgttcagcatgtgctggaacatgggaagcctcatgagcgttcttctataataaaggaattagcaggcaagatagttcaaatgagtcaacagaagtttgcctccaatgtagtagagaaatgtttgacctttggaggtccttctgagcgccaattactagtgaatgagatgcttggcaccaccgatgaaaatgagcctcttcaggcgatgatgaaagatcaatttgcaaattacgttgtacaaaaggtgctggaaacttgtgatgatcaacaccgtgagctgattctttcccgaattaaggttcatttgaatgcattgaaaaagtacacctatggaaagcacatcgtcacgcgtgtagaaaaacttgttgctgctggagaaaggagaatagctgctcaggctcctcctcaacctgcttag

SEQ ID NO: 70027 - protein, 1059 aa, Glycine max
MLSELGRRPMLGSNEGSFGDELEKEIGMLLREQRRQEADDRERELNIYRSGSAPPTVEGSLSAVGGLFGGAAGAPAAGAPVAFSEFQGTKDVNGITSEEELRSDPAYLSYYYSNVNLNPRLPPPLLSKEDWRFKQRLKGGASARGGIGDRRKVNRTDDNSGRSPFATPPGFNMRKQESEVESENPRGSAEWGGDGLIGLPGLGLGSKQKSLAEIFQDDLGHNTYITGLPSHPASRNAFDENGDITTSAEAELAHARRESMATDTLRSGSNVQGSSAAQNTGPQASYSYAAALGSSLSRSTTPDPQLVARAPSPCPTPIGGGRVVAAEKRGINSPDAFNGVSSGVNEPADIVAALSGMNLSADDVLDGDSHFPSQVESDVDNHQRYLFGMQGGQDPGKQHAYLKKSESGHLHKSAYSDSGKNGGSMSDINNPSLDRHAELQKCAVPPNNSYFKGSPTSAFSGGGGVPAQYSPLDSTNSAFTNYGLSGYAGNPALASLMTNQLGTGNLPPLFENVAAASAMAAPGMHSRILGGGLASGAAAPSDVHNIGRMGNQIPGSALQAPFVDPMYLQYLRTSEFAAAQLAALNDPSVDRNYLGNSYMNLLELQKAYLGSILSPQKSQYNVPLGGKSGSSTPHGYYGNPAYGVGMSYPGTPIANSVVSTSPVGSGSPVRHNELNMRFASGLRNLAGVMGPWHVDTGNIDESFASSLLEEFKSNKTKCFELSEIAGHVVEFSADQYGSRFIQQKLETATTEEKNMVYQEIMPHALALMTDVFGNYVVQKFFEHGLASQRRELANKLLGHVLTLSLQMYGCRVIQKAIEVVDLDQKIEMVQELDGNVMRCVRDQNGNHVIQKCIECVPEDAIDFIVSTFFDQVVTLSTHPYGCRVIQRVLEHCEDPTTQQKVMDEILGAVSMLAQDQYGNYVVQHVLEHGKPHERSSIIKELAGKIVQMSQQKFASNVVEKCLTFGGPSERQLLVNEMLGTTDENEPLQAMMKDQFANYVVQKVLETCDDQHRELILSRIKVHLNALKKYTYGKHIVTRVEKLVAAGERRIAAQAPPQPA

SEQ ID NO: 70028 - DNA, 2616 bp, Zea mays
  CDS (1)..(2616)
atggtcacggagatggcggcgcgcggcggcgaggcggcggcgtttggcgcggagaccgaccgcggcgacttcgaggtgtttcgcagtggctccgcgccgcccactgtcgagggagccctgggcgccgccggggccgacggcggccttctcgtggacgacgacctccgcgccgacccggcgtaccagagctactactactccagtgcgcacctcaacccccgcctcccgccgccgctcctgtccaaggaggactggcgctcctcgcaccaccgcctccgctccgcggccttcggcgggatcggggacggcaggaggcagcagcagccggctgcccaagggacggtcggcctgcccgggatcgatcttgcccgccagaggagcttctccaccgtctttcaggaggattcgtatcagcgtgatatggataggcagactgccagccacaatagtagtgaatcattatgttcttctggaatacagtatggtctaaatcgtggacctggaactattggaggcctgcactctagcaatagtttacgaagcttggatgaaattccgaacaatgatctgccatcaaatacatttgcttctcttttagggtcatctctttctaggagtgcatctccagatcctgagcttgtgaagagggcccctagtccatcccttcctccaatcggtgtgaaagttggcaacactgataagatgaatggtggttcctcttctttccgtcgtagttcatccgcaatcggtggatctgatgatctggtggctgccttatctgggatgaacttatcatctagggcaatgagtgggcaaactatggaccagtctcagctctatcaggatgttgataacgtccagaagtttctttttgatcgacagggtgaccaaccaaatggcaatcagcagcactacatgaggcgtcctgagcatggacaatctaagttatctgatggatattctgccaatttggccaattcatccacgatgagaaaccagattaattctggcagtttcacatcttttgacagtttgtctcttggatctggctttccttcccctaggattggttctagatcccctggagggactgtatcttctcgacaaaatttagctggtatgtctaacatgctaaactataatggaattggaagtccaactgcgtcaccttctcttcagacttctattgatccagcgtatatccagtaccttgctcaaattgcagctacctgggatgatcctctaatggacaggagccatctgggaagttcttacatggacttacttggtacacagaaagctaaccttggccctttacttcagtcacaaaagcaatatggttactgtggcaatcttggatttaaccttggtggttatgctggaagtccattgacaagtcctgttcttccctcttcacctattgcaccgggcagtccacttaggcatggtgaccgcaacatgcgctttccaccaggcatgagaaacttcggtaattcctttggttcatggaattcaggcatgagtggaaagatggatgctaatttgatgccctctctcctggaggaattcaagagcaacaaaagtaaatcatatgagctctccgaaatagctggccatgttgttgagtttagtgctgatcaatatggaagccggttcatacaacagaagctagaaacagccagtactgaagaaaaggacatggttttttcagaaattatgcctcaagctctcacattaatgactgatgtatttggaaattatgttgtccaaaagttttttgagcatggaagcactgcccagataaaggaattggctggtcagcttattggacgtgtccttgctcttagtcttcagatgtatgggtgccgggttatacagaaggctatagaagttgttgatttggatctgcagactaaaatggttgcggagctggagggtcatgtcatgcgctgtgtacgtgatcaaaatgggaaccatgttatacagaaatgcatagagtgcattcctcagcatgctatcgagttcattgtctcgacattctatggccaagttgtaatgttatccactcatccatatggttgccgagttattcagagggttctagagcattgtgatgatcctaagacacagcaaataatgatggatgagattctccagtctgtttgcttgctagctcaggaccagtatggcaactatgtggttcagcatgttctggaacatggcaagccccatgagagatcagccattattgagaagctaattggccaagttgtgcaaatgagccagcaaaagtttgcctctaatgtcattgagaagtgcttagcctttggaaatcctgtagaacgtcaggttctgatcggtgagatgcttggatccactagcgaaagcgaacctcttgaggtaatgatgaaagaccagttcgcaaactatgtggtgcagaaggtgctagaaacttgtgacgatcagcagagggagatgatcttaacaaggataaagacacacttgaacacactcaagaagtacacatacgggaagcacatagtagcgcgtgtagagaagcttgttgctgctggagagaagcgccttgggcttcaaccagcatgcaccgccgcctga

SEQ ID NO: 70029 - protein, 871 aa, Zea mays
MVTEMAARGGEAAAFGAETDRGDFEVFRSGSAPPTVEGALGAAGADGGLLVDDDLRADPAYQSYYYSSAHLNPRLPPPLLSKEDWRSSHHRLRSAAFGGIGDGRRQQQPAAQGTVGLPGIDLARQRSFSTVFQEDSYQRDMDRQTASHNSSESLCSSGIQYGLNRGPGTIGGLHSSNSLRSLDEIPNNDLPSNTFASLLGSSLSRSASPDPELVKRAPSPSLPPIGVKVGNTDKMNGGSSSFRRSSSAIGGSDDLVAALSGMNLSSRAMSGQTMDQSQLYQDVDNVQKFLFDRQGDQPNGNQQHYMRRPEHGQSKLSDGYSANLANSSTMRNQINSGSFTSFDSLSLGSGFPSPRIGSRSPGGTVSSRQNLAGMSNMLNYNGIGSPTASPSLQTSIDPAYIQYLAQIAATWDDPLMDRSHLGSSYMDLLGTQKANLGPLLQSQKQYGYCGNLGFNLGGYAGSPLTSPVLPSSPIAPGSPLRHGDRNMRFPPGMRNFGNSFGSWNSGMSGKMDANLMPSLLEEFKSNKSKSYELSEIAGHVVEFSADQYGSRFIQQKLETASTEEKDMVFSEIMPQALTLMTDVFGNYVVQKFFEHGSTAQIKELAGQLIGRVLALSLQMYGCRVIQKAIEVVDLDLQTKMVAELEGHVMRCVRDQNGNHVIQKCIECIPQHAIEFIVSTFYGQVVMLSTHPYGCRVIQRVLEHCDDPKTQQIMMDEILQSVCLLAQDQYGNYVVQHVLEHGKPHERSAIIEKLIGQVVQMSQQKFASNVIEKCLAFGNPVERQVLIGEMLGSTSESEPLEVMMKDQFANYVVQKVLETCDDQQREMILTRIKTHLNTLKKYTYGKHIVARVEKLVAAGEKRLGLQPACTAA

SEQ ID NO: 70030 - DNA, 1440 bp, Zea mays
  CDS (1)..(1440)
atgaaggtcgacagggagatggagattctgctgaacgagatccccctcctccaccacgtcggcctcctcggcggcagcgaggccggcgcggacgacgacgccgacctctccttcctcatccacgagctcgccgcgatgggcctcgtcgacggcgacgacgagctgccggcgccgggcgctgccaccggctacggcttccccacgaaaggcgagaaccttgtcgccatgcactcgttctccatggccagccactacgcgcacatgcgctctctgtttgttcccgtcaccttcgacgacgccgccgcggccgacggctgggacatccggtgctccccgccgccttatgtgcctctgccttctcccgccacgccgagggcccggtgcaagagcgtgaggaggaagaacggctcggtgatgacgacgagccccaagaagtgcggagccgccgcggcggccaagtggcacggcgagagcctggccggcctgcgcggggtcatgtaccacatggcgcgcgaccagcacgggtgccgcctgctgcagcagaggctcgacgacggcaagcgcgaggtcgactatatcttcgccggcgtctcgcgccacgccgcgcagctgatggtggacccattcgggaactacctcatgcagaagctgctcgccgtctgcgacgacgggcagatgatgacgcttgtgctcaccctcaccgccgaccccttcgccctcgtcaggatatccctcaacgtccatgggacacgggcggtgcagaagctgattgagagactcagtgcaagggaagagattggtcttgtcatggatgctctgcgccctggcttcttggagctcatcaaggataccaatggcaaccatgtcgtgcaaaagtgtttgcattcgtttgcttcaaacgataataaggcgatctttgctgctgctgcactccactgcgtcgatatcgggatgcaaatccacggttgctgtgtcctacagcggtgcattgcgcggtcgcgtggtgagcacagggacaagctggttgccgccattgctcacaatgggtttaagcttgcccaagatgcatatgggaactacgttgtccaggttgtactggacttgaagataccaactgcgaattcaagccttgcccaacagtttggaggcaagtatatccacctgtccatgcagaagttcagcagcaatgttgtggagaaatgcctgaaagtgttcaaggaggttgacaaggccaagatcatactggaactccttgccacgccacacctggagcaactgcttccgcactgctatgcaaactatgtcgtgtactctgctctcaagaattcaaagggctcacttcattccgcactgataaatgcaatcctaccacatgaggaactacttaggaccagtccgtactgcaagaggatatactcgaaattttttttgaagaattga

SEQ ID NO: 70031 - protein, 479 aa, Zea mays
MKVDREMEILLNEIPLLHHVGLLGGSEAGADDDADLSFLIHELAAMGLVDGDDELPAPGAATGYGFPTKGENLVAMHSFSMASHYAHMRSLFVPVTFDDAAAADGWDIRCSPPPYVPLPSPATPRARCKSVRRKNGSVMTTSPKKCGAAAAAKWHGESLAGLRGVMYHMARDQHGCRLLQQRLDDGKREVDYIFAGVSRHAAQLMVDPFGNYLMQKLLAVCDDGQMMTLVLTLTADPFALVRISLNVHGTRAVQKLIERLSAREEIGLVMDALRPGFLELIKDTNGNHVVQKCLHSFASNDNKAIFAAAALHCVDIGMQIHGCCVLQRCIARSRGEHRDKLVAAIAHNGFKLAQDAYGNYVVQVVLDLKIPTANSSLAQQFGGKYIHLSMQKFSSNVVEKCLKVFKEVDKAKIILELLATPHLEQLLPHCYANYVVYSALKNSKGSLHSALINAILPHEELLRTSPYCKRIYSKFFLKN

SEQ ID NO: 70032 - DNA, 20 bp, Artificial sequence
  primer
atggcagtcgctgataatcc

SEQ ID NO: 70033 - DNA, 20 bp, Artificial sequence
  primer
tcagcaacgaagcctaaatg

SEQ ID NO: 70034 - protein, 287 aa, Artificial sequence
  consensus sequence
  Variant (2)..(11): Xaa in position 2 to 11 is any amino acid
  Variant (12)..(17): Xaa in position 12 to 17 is any or no amino acid
  Variant (19)..(23): Xaa in position 19 to 23 is any amino acid
  Variant (24)..(51): Xaa in position 24 to 51 is any or no amino acid
  Variant (53)..(53): Xaa in position 53 is any amino acid
  Variant (54)..(56): Xaa in position 54 to 56 is any or no amino acid
  Variant (60)..(72): Xaa in position 60 to 72 is any amino acid
  Variant (73)..(74): Xaa in position 73 to 74 is any or no amino acid
  Variant (76)..(84): Xaa in position 76 to 84 is any amino acid
  Variant (85)..(85): Xaa in position 85 is any or no amino acid
  Variant (87)..(91): Xaa in position 87 to 91 is any amino acid
  Variant (93)..(127): Xaa in position 93 to 127 is any amino acid
  Variant (128)..(155): Xaa in position 128 to 155 is any or no amino acid
  Variant (157)..(158): Xaa in position 157 to 158 is any amino acid
  Variant (160)..(161): Xaa in position 160 to 161 is any amino acid
  Variant (164)..(164): Xaa in position 164 is any amino acid
  Variant (168)..(168): Xaa in position 168 is any amino acid
  Variant (171)..(171): Xaa in position 171 is any amino acid
  Variant (173)..(180): Xaa in position 173 to 180 is any amino acid
  Variant (182)..(184): Xaa in position 182 to 184 is any amino acid
  Variant (186)..(186): Xaa in position 186 is any amino acid
  Variant (188)..(191): Xaa in position 188 to 191 is any amino acid
  Variant (194)..(195): Xaa in position 194 to 195 is any amino acid
  Variant (197)..(198): Xaa in position 197 to 198 is any amino acid
  Variant (200)..(201): Xaa in position 200 to 201 is any amino acid
  Variant (204)..(205): Xaa in position 204 to 205 is any amino acid
  Variant (207)..(215): Xaa in position 207 to 215 is any amino acid
  Variant (216)..(220): Xaa in position 216 to 220 is any or no amino acid
  Variant (222)..(229): Xaa in position 222 to 229 is any amino acid
  Variant (230)..(233): Xaa in position 230 to 233 is any or no amino acid
  Variant (235)..(236): Xaa in position 235 to 236 is any amino acid
  Variant (238)..(243): Xaa in position 238 to 243 is any amino acid
  Variant (245)..(245): Xaa in position 245 is any amino acid
  Variant (248)..(248): Xaa in position 248 is any amino acid
  Variant (250)..(250): Xaa in position 250 is any amino acid
  Variant (252)..(257): Xaa in position 252 to 257 is any amino acid
  Variant (258)..(262): Xaa in position 258 to 262 is any or no amino acid
  Variant (264)..(266): Xaa in position 264 to 266 is any amino acid
  Variant (268)..(272): Xaa in position 268 to 272 is any amino acid
  Variant (274)..(276): Xaa in position 274 to 276 is any amino acid
  Variant (279)..(285): Xaa in position 279 to 285 is any amino acid
  Variant (286)..(286): Xaa in position 286 is any or no amino acid
MXXXXXXXXXXXXXXXXSXXXXXXXXXXXXXXXXXXXXXXXXXXXXXXXXXGXXXXQKLXXXXXXXXXXXXXXXAXXXXXXXXXXDXXXXXVXXXXXXXXXXXXXXXXXXXXXXXXXXXXXXXXXXXXXXXXXXXXXXXXXXXXXXXXXXXXXXXLXXDXXGNXVVQXVLXLXXXXXXXXIXXXLXGXXXXLSXXKXXSXXVEXXLXXXXXXXXXXXXXXVXXXXXXXXXXXXLXXLXXXXXXNXVVXKXLXXXXXXXXXXXLXXXLXXXXXPXXXLLXXXXXXXXI

SEQ ID NO: 70035 - protein, 57 aa, Artificial sequence
  protein pattern
  Variant (2)..(2): Xaa in position 2 is any amino acid
  Variant (3)..(5): Xaa in position 3 to 5 is any or no amino acid
  Variant (7)..(8): Xaa in position 7 to 8 is any amino acid
  Variant (11)..(11): Xaa in position 11 is Phe or Tyr
  Variant (13)..(13): Xaa in position 13 is Ile or Val
  Variant (15)..(15): Xaa in position 15 is any amino acid
  Variant (16)..(16): Xaa in position 16 is Ile or Val
  Variant (18)..(26): Xaa in position 18 to 26 is any amino acid
  Variant (27)..(27): Xaa in position 27 is Glu, Asn or Ser
  Variant (28)..(28): Xaa in position 28 is Ile or Val
  Variant (29)..(31): Xaa in position 29 to 31 is any amino acid
  Variant (33)..(33): Xaa in position 33 is any amino acid
  Variant (35)..(36): Xaa in position 35 to 36 is any amino acid
  Variant (37)..(37): Xaa in position 37 is Ala, Ile or Val
  Variant (38)..(38): Xaa in position 38 is Asp, Glu or Gln
  Variant (39)..(39): Xaa in position 39 is Leu or Met
  Variant (41)..(42): Xaa in position 41 to 42 is any amino acid
  Variant (44)..(44): Xaa in position 44 is any amino acid
  Variant (45)..(45): Xaa in position 45 is Ala, Gly or Ser
  Variant (47)..(47): Xaa in position 47 is any amino acid
  Variant (48)..(48): Xaa in position 48 is Ile or Val
  Variant (50)..(50): Xaa in position 50 is Asp or Glu
  Variant (51)..(52): Xaa in position 51 to 52 is any amino acid
  Variant (54)..(56): Xaa in position 54 to 56 is any amino acid
  Variant (57)..(57): Xaa in position 57 is Asp, Glu or Gly
SXXXXDXXGNXVXQXXLXXXXXXXXXXXXXXLXGXXXXXSXXKXXSXXVXXXLXXXX

SEQ ID NO: 70036 - protein, 51 aa, Artificial sequence
  protein pattern
  Variant (2)..(5): Xaa in position 2 to 5 is any amino acid
  Variant (6)..(6): Xaa in position 6 is any or no amino acid
  Variant (8)..(9): Xaa in position 8 to 9 is any amino acid
  Variant (10)..(12): Xaa in position 10 to 12 is any or no amino acid
  Variant (14)..(14): Xaa in position 14 is any amino acid
  Variant (16)..(16): Xaa in position 16 is Ala or Gly
  Variant (18)..(18): Xaa in position 18 is any amino acid
  Variant (19)..(19): Xaa in position 19 is Phe or Val
  Variant (20)..(21): Xaa in position 20 to 21 is any amino acid
  Variant (22)..(22): Xaa in position 22 is Gln or Arg
  Variant (23)..(23): Xaa in position 23 is any amino acid
  Variant (24)..(24): Xaa in position 24 is Leu or Met
  Variant (25)..(31): Xaa in position 25 to 31 is any amino acid
  Variant (32)..(32): Xaa in position 32 is Lys or Arg
  Variant (33)..(34): Xaa in position 33 to 34 is any amino acid
  Variant (35)..(35): Xaa in position 35 is Leu, Met or Val
  Variant (36)..(36): Xaa in position 36 is Phe or Tyr
  Variant (37)..(37): Xaa in position 37 is Asp, Glu, Gln or Ser
  Variant (38)..(38): Xaa in position 38 is any amino acid
  Variant (40)..(40): Xaa in position 40 is Leu or Met
  Variant (41)..(42): Xaa in position 41 to 42 is any amino acid
  Variant (44)..(45): Xaa in position 44 to 45 is any amino acid
  Variant (46)..(46): Xaa in position 46 is Ile, Leu or Val
  Variant (47)..(48): Xaa in position 47 to 48 is any amino acid
  Variant (50)..(50): Xaa in position 50 is any amino acid
  Variant (51)..(51): Xaa in position 51 is Phe, His or Tyr
AXXXXXFXXXXXDXYXSXXXXXXXXXXXXXXXXXXXXXIXXXAXXXXXDXX

SEQ ID NO: 70037 - protein, 23 aa, Artificial sequence
  protein pattern
  Variant (2)..(2): Xaa in position 2 is any amino acid
  Variant (3)..(6): Xaa in position 3 to 6 is any or no amino acid
  Variant (8)..(9): Xaa in position 8 to 9 is any amino acid
  Variant (11)..(11): Xaa in position 11 is Asp, Asn or Ser
  Variant (12)..(12): Xaa in position 12 is Glu or Gln
  Variant (13)..(13): Xaa in position 13 is any amino acid
  Variant (15)..(15): Xaa in position 15 is Asn or Ser
  Variant (16)..(16): Xaa in position 16 is Phe or His
  Variant (17)..(17): Xaa in position 17 is Leu or Val
  Variant (18)..(18): Xaa in position 18 is Ile or Val
  Variant (19)..(19): Xaa in position 19 is any amino acid
  Variant (21)..(21): Xaa in position 21 is any amino acid
  Variant (22)..(22): Xaa in position 22 is Ile or Leu
  Variant (23)..(23): Xaa in position 23 is Glu or Arg
LXXXXXRXXRXXXGXXXXXKXXX

SEQ ID NO: 70038 - DNA, 1533 bp, Arabidopsis thaliana; identical to SEQ ID NO: 8405
  CDS (1)..(1533)

SEQ ID NO: 70039 - protein, 510 aa, Arabidopsis thaliana; identical to SEQ ID NO: 8406

SEQ ID NO: 70040 - DNA, 2347 bp, Oryza sativa; identical to SEQ ID NO: 15534
  CDS (116)..(1648)

SEQ ID NO: 70041 - protein, 510 aa, Oryza sativa; identical to SEQ ID NO: 15535

SEQ ID NO: 70042 - DNA, 1984 bp, Sorghum bicolor; identical to SEQ ID NO: 15538
  CDS (202)..(1710)

SEQ ID NO: 70043 - protein, 502 aa, Sorghum bicolor; identical to SEQ ID NO: 15539

SEQ ID NO: 70044 - DNA, 1875 bp, Triticum aestivum; identical to SEQ ID NO: 15546
  CDS (86)..(1630)

SEQ ID NO: 70045 - protein, 514 aa, Triticum aestivum; identical to SEQ ID NO: 16276

SEQ ID NO: 70046 - DNA, 1875 bp, Triticum aestivum; identical to SEQ ID NO: 15546
  CDS (101)..(1630)

SEQ ID NO: 70047 - protein, 509 aa, Triticum aestivum; identical to SEQ ID NO: 15547

SEQ ID NO: 70048 - DNA, 1913 bp, Zea mays subsp. mays
  CDS (158)..(1687)
aattccgtccacagaagaagaatccttctcgacgccgcccccattcattcttggagggcaagaagaacgcgcagtccaaaagcgaaacaaggggaaggggcgaggcagccaaacgaatcccagcacctgcctctcctttgcttgcgcagatctagcgatggcggcgggcggtgagttggcgtggggggaggagcccgtggcgcggcgccggcctaagaccaagatcgtctgcacgctcggcccggcgtcgcgatccgtcgagatgatctcgcgcctgctgcgcgccgggatgtgcgtcgcgcgcttcaacttctcccatggctcccacgagtaccaccaggagacgctcgacaacctgcacgccgccatggagctcaccgggatcctctgcgccgttatgctcgacaccaagggtccagagattagaactggatttttgaaagatgggaatcctattcaattgataaaaggccaagaaatcacaatttctacagactatagcattcagggtgatgagaaaatgatatcaatgagctacaagaagcttgctgttgatctgaagccaggcagtgtcatattgtgtgctgatggtaccatcactcttactgttcttcactgtgataaagaacaaggcttggttcgctgccgctgtgagaacactttcaagcttggcgagaggaagaatgttaatcttccaggagttattgttgatctccccacactcacagacaaggacaaggaggacatccttaaatggggtgttccaaacaagattgacatgattgccttgtcatttgttcggaagggttcggatcttgtggaggttaggaaggtacttggtgagcatgccaagtccataatgctgatgtcaaaggttgagaatcaagagggagtagctaactttgatgatatcctggcaaactctgatgcttttatggtggcaagaggtgatttaggaatggaaattcctatagagaagattttctttgcacagaaggtgatgattttcaagtgcaatattcaaggcaagcctgttgtgactgcaacccagatgttggaatctatgatcaagtctcctcgccctactcgggcagaagcaacggatgttgcaaacgcagttcttgatggcacagactgtgttatgctcagtggtgagactgctgctggggcttatccagagttggcggtgcagactatggctaagatctgcctgcaagcagagtcttgcgtagaccatgctgctattttcaaatcaatcatggcttcagctccaattccaatgagtccattggagagccttgcatcatcagctgttcgcacagcaaactctgccagggcagcacttatcttggtcctgaccaggggaggaactactgctaggcttgtagccaagtataggccatccatgccgattctgtccgttgtggttcctgagctgaagacagactcgttcgactgggcctgcagtgacgagggtccggcaaggcacagcctcattgtgaggggtgtcatcccaatgctgagtgccgccactgccaaggcctttgacaacgaagccactgacgaagctattggttttgccattgaaaatgcgaagacgatggggctatgcaacaccggtcaatccgttgtggccctgcaccgcatcgggatttcatccgtcatcaagcttcttactgtgaagtaggggtccaagggtgagggacaccattttgcttggtgaatttttgtgaggctgcttacgcacatcagcgtatccacagcttttctgttgccaaagatacagactttgcgttctggtacaccttggtgttacaagggttgtgggaatttgtcgtttagatattagcgatttaaacagtttatcaactgctatagctaattaatttgcagctgtgctgcaactttatcgt

SEQ ID NO: 70049 - protein, 509 aa, Zea mays subsp. mays
MAAGGELAWGEEPVARRRPKTKIVCTLGPASRSVEMISRLLRAGMCVARFNFSHGSHEYHQETLDNLHAAMELTGILCAVMLDTKGPEIRTGFLKDGNPIQLIKGQEITISTDYSIQGDEKMISMSYKKLAVDLKPGSVILCADGTITLTVLHCDKEQGLVRCRCENTFKLGERKNVNLPGVIVDLPTLTDKDKEDILKWGVPNKIDMIALSFVRKGSDLVEVRKVLGEHAKSIMLMSKVENQEGVANFDDILANSDAFMVARGDLGMEIPIEKIFFAQKVMIFKCNIQGKPVVTATQMLESMIKSPRPTRAEATDVANAVLDGTDCVMLSGETAAGAYPELAVQTMAKICLQAESCVDHAAIFKSIMASAPIPMSPLESLASSAVRTANSARAALILVLTRGGTTARLVAKYRPSMPILSVVVPELKTDSFDWACSDEGPARHSLIVRGVIPMLSAATAKAFDNEATDEAIGFAIENAKTMGLCNTGQSVVALHRIGISSVIKLLTVK

SEQ ID NO: 70050 - DNA, 1953 bp, Triticum aestivum; identical to SEQ ID NO: 15548
  CDS (152)..(1693)

SEQ ID NO: 70051 - protein, 513 aa, Triticum aestivum; identical to SEQ ID NO: 15549

SEQ ID NO: 70052 - DNA, 1524 bp, Oryza sativa; identical to SEQ ID NO: 15558
  CDS (1)..(1524)

SEQ ID NO: 70053 - protein, 507 aa, Oryza sativa; identical to SEQ ID NO: 15559

SEQ ID NO: 70054 - DNA, 1883 bp, Brassica napus; identical to SEQ ID NO: 15560
  CDS (119)..(1651)

SEQ ID NO: 70055 - protein, 510 aa, Brassica napus; identical to SEQ ID NO: 8816

SEQ ID NO: 70056 - DNA, 1903 bp, Brassica napus; identical to SEQ ID NO: 16301
  CDS (122)..(1618)

SEQ ID NO: 70057 - protein, 498 aa, Brassica napus; identical to SEQ ID NO: 8854

SEQ ID NO: 70058 - DNA, 2067 bp, Triticum aestivum; identical to SEQ ID NO: 15570
  CDS (115)..(1659)

SEQ ID NO: 70059 - protein, 514 aa, Triticum aestivum; identical to SEQ ID NO: 8828

SEQ ID NO: 70060 - DNA, 1825 bp, Helianthus annuus; identical to SEQ ID NO: 15574
  CDS (128)..(1624)

SEQ ID NO: 70061 - protein, 498 aa, Helianthus annuus; identical to SEQ ID NO: 8834

SEQ ID NO: 70062 - DNA, 2075 bp, Zea mays; identical to SEQ ID NO: 15576
  CDS (198)..(1739)

SEQ ID NO: 70063 - protein, 513 aa, Zea mays; identical to SEQ ID NO: 8894

SEQ ID NO: 70064 - DNA, 1413 bp, Klebsiella pneumoniae subsp. pneumoniae MGH 78578; identical to SEQ ID NO: 15584
  CDS (1)..(1413): transl_table=11

SEQ ID NO: 70065 - protein, 470 aa, Klebsiella pneumoniae subsp. pneumoniae MGH 78578; identical to SEQ ID NO: 15585

SEQ ID NO: 70066 - DNA, 1557 bp, Xanthobacter autotrophicus Py2; identical to SEQ ID NO: 8651
  CDS (1)..(1557): transl_table=11

SEQ ID NO: 70067 - protein, 518 aa, Xanthobacter autotrophicus Py2; identical to SEQ ID NO: 8652

SEQ ID NO: 70068 - DNA, 1533 bp, Arabidopsis thaliana; identical to SEQ ID NO: 8391
  CDS (1)..(1533)

SEQ ID NO: 70069 - protein, 510 aa, Arabidopsis thaliana; identical to SEQ ID NO: 8392

SEQ ID NO: 70070 - DNA, 1494 bp, Arabidopsis thaliana; identical to SEQ ID NO: 8393
  CDS (1)..(1494)

SEQ ID NO: 70071 - protein, 497 aa, Arabidopsis thaliana; identical to SEQ ID NO: 8394

SEQ ID NO: 70072 - DNA, 1533 bp, Arabidopsis thaliana; identical to SEQ ID NO: 8395
  CDS (1)..(1533)

SEQ ID NO: 70073 - protein, 510 aa, Arabidopsis thaliana; identical to SEQ ID NO: 8396

SEQ ID NO: 70074 - DNA, 1479 bp, Arabidopsis thaliana; identical to SEQ ID NO: 8397
  CDS (1)..(1479)

SEQ ID NO: 70075 - protein, 492 aa, Arabidopsis thaliana; identical to SEQ ID NO: 8398

SEQ ID NO: 70076 - DNA, 1533 bp, Arabidopsis thaliana; identical to SEQ ID NO: 8399
  CDS (1)..(1533)

SEQ ID NO: 70077 - protein, 510 aa, Arabidopsis thaliana; identical to SEQ ID NO: 8400

SEQ ID NO: 70078 - DNA, 1740 bp, Arabidopsis thaliana; identical to SEQ ID NO: 8401
  CDS (1)..(1740)

SEQ ID NO: 70079 - protein, 579 aa, Arabidopsis thaliana; identical to SEQ ID NO: 8402

SEQ ID NO: 70080 - DNA, 1497 bp, Arabidopsis thaliana; identical to SEQ ID NO: 8403
  CDS (1)..(1497)

SEQ ID NO: 70081 - protein, 498 aa, Arabidopsis thaliana; identical to SEQ ID NO: 8404

SEQ ID NO: 70082 - DNA, 1413 bp, Vibrio cholerae O1 biovar eltor str. N16961; identical to SEQ ID NO: 15602
  CDS (1)..(1413): transl_table=11

SEQ ID NO: 70083 - protein, 470 aa, Vibrio cholerae O1 biovar eltor str. N16961; identical to SEQ ID NO: 15603

SEQ ID NO: 70084 - DNA, 1755 bp, Bacillus halodurans C-125; identical to SEQ ID NO: 15604
  CDS (1)..(1755): transl_table=11

SEQ ID NO: 70085 - protein, 584 aa, Bacillus halodurans C-125; identical to SEQ ID NO: 15605

SEQ ID NO: 70086 - DNA, 1740 bp, Halobacterium sp. NRC-1; identical to SEQ ID NO: 8411
  CDS (1)..(1740): transl_table=11

SEQ ID NO: 70087 - protein, 579 aa, Halobacterium sp. NRC-1; identical to SEQ ID NO: 8412

SEQ ID NO: 70088 - DNA, 1473 bp, Neisseria meningitidis Z2491; identical to SEQ ID NO: 15612
  CDS (1)..(1473): transl_table=11

SEQ ID NO: 70089 - protein, 490 aa, Neisseria meningitidis Z2491; identical to SEQ ID NO: 15613

SEQ ID NO: 70090 - DNA, 1443 bp, Escherichia coli O157:H7 EDL933; identical to SEQ ID NO: 15614
  CDS (1)..(1443): transl_table=11
  misc_feature (850)..(850): r is g or a

SEQ ID NO: 70091 - protein, 480 aa, Escherichia coli O157:H7 EDL933; identical to SEQ ID NO: 15615
  misc_feature (284)..(284): The Xaa at location 284 stands for Ala, or Thr.

SEQ ID NO: 70092 - DNA, 1419 bp, Clostridium acetobutylicum ATCC 824; identical to SEQ ID NO: 15622
  CDS (1)..(1419): transl_table=11

SEQ ID NO: 70093 - protein, 472 aa, Clostridium acetobutylicum ATCC 824; identical to SEQ ID NO: 15623

SEQ ID NO: 70094 - DNA, 1440 bp, Agrobacterium tumefaciens str. C58; identical to SEQ ID NO: 8419
  CDS (1)..(1440): transl_table=11

SEQ ID NO: 70095 - protein, 479 aa, Agrobacterium tumefaciens str. C58; identical to SEQ ID NO: 8420

SEQ ID NO: 70096 - DNA, 1431 bp, Nostoc sp. PCC 7120; identical to SEQ ID NO: 15630
  CDS (1)..(1431): transl_table=11

SEQ ID NO: 70097 - protein, 476 aa, Nostoc sp. PCC 7120; identical to SEQ ID NO: 15631

SEQ ID NO: 70098 - DNA, 1716 bp, Arabidopsis thaliana; identical to SEQ ID NO: 8433
  CDS (1)..(1716)

SEQ ID NO: 70099 - protein, 571 aa, Arabidopsis thaliana; identical to SEQ ID NO: 8434

SEQ ID NO: 70100 - DNA, 1584 bp, Arabidopsis thaliana; identical to SEQ ID NO: 8435
  CDS (1)..(1584)

SEQ ID NO: 70101 - protein, 527 aa, Arabidopsis thaliana; identical to SEQ ID NO: 8436

SEQ ID NO: 70102 - DNA, 1791 bp, Arabidopsis thaliana; identical to SEQ ID NO: 8437
  CDS (1)..(1791)

SEQ ID NO: 70103 - protein, 596 aa, Arabidopsis thaliana; identical to SEQ ID NO: 8438

SEQ ID NO: 70104 - DNA, 1584 bp, Arabidopsis thaliana; identical to SEQ ID NO: 8439
  CDS (1)..(1584)

SEQ ID NO: 70105 - protein, 527 aa, Arabidopsis thaliana; identical to SEQ ID NO: 8440

SEQ ID NO: 70106 - DNA, 1428 bp, Fusobacterium nucleatum subsp. nucleatum ATCC 25586; identical to SEQ ID NO: 8443
  CDS (1)..(1428): transl_table=11

SEQ ID NO: 70107 - protein, 475 aa, Fusobacterium nucleatum subsp. nucleatum ATCC 25586; identical to SEQ ID NO: 8444

SEQ ID NO: 70108 - DNA, 1665 bp, Drosophila melanogaster; identical to SEQ ID NO: 15642
  CDS (1)..(1665)

SEQ ID NO: 70109 - protein, 554 aa, Drosophila melanogaster; identical to SEQ ID NO: 15643

SEQ ID NO: 70110 - DNA, 1752 bp, Thermoanaerobacter tengcongensis MB4; identical to SEQ ID NO: 8445
  CDS (1)..(1752): transl_table=11

SEQ ID NO: 70111 - protein, 583 aa, Thermoanaerobacter tengcongensis MB4; identical to SEQ ID NO: 8446

SEQ ID NO: 70112 - DNA, 1437 bp, Streptomyces coelicolor A3(2); identical to SEQ ID NO: 8447
  CDS (1)..(1437): transl_table=11

SEQ ID NO: 70113 - protein, 478 aa, Streptomyces coelicolor A3(2); identical to SEQ ID NO: 8448

SEQ ID NO: 70114 - DNA, 1431 bp, Streptomyces coelicolor A3(2); identical to SEQ ID NO: 8449
  CDS (1)..(1431): transl_table=11

SEQ ID NO: 70115 - protein, 476 aa, Streptomyces coelicolor A3(2); identical to SEQ ID NO: 8450

SEQ ID NO: 70116 - DNA, 1434 bp, Methanosarcina mazei Go1; identical to SEQ ID NO: 15650
  CDS (1)..(1434): transl_table=11

SEQ ID NO: 70117 - protein, 477 aa, Methanosarcina mazei Go1; identical to SEQ ID NO: 15651

SEQ ID NO: 70118 - DNA, 1785 bp, Thermosynechococcus elongatus BP-1; identical to SEQ ID NO: 8455
  CDS (1)..(1785): transl_table=11

SEQ ID NO: 70119 - protein, 594 aa, Thermosynechococcus elongatus BP-1; identical to SEQ ID NO: 8456

SEQ ID NO: 70120 - DNA, 1761 bp, Oceanobacillus iheyensis HTE831; identical to SEQ ID NO: 8457
  CDS (1)..(1761): transl_table=11

SEQ ID NO: 70121 - protein, 586 aa, Oceanobacillus iheyensis HTE831; identical to SEQ ID NO: 8458

SEQ ID NO: 70122 - DNA, 1437 bp, Brucella suis 1330; identical to SEQ ID NO: 16373
  CDS (1)..(1437): transl_table=11

SEQ ID NO: 70123 - protein, 478 aa, Brucella suis 1330; identical to SEQ ID NO: 16374

SEQ ID NO: 70124 - DNA, 1413 bp, Shigella flexneri 2a str. 301; identical to SEQ ID NO: 15660
  CDS (1)..(1413): transl_table=11

SEQ ID NO: 70125 - protein, 470 aa, Shigella flexneri 2a str. 301; identical to SEQ ID NO: 15661

SEQ ID NO: 70126 - DNA, 1437 bp, Leptospira interrogans serovar Lai str. 56601; identical to SEQ ID NO: 8463
  CDS (1)..(1437): transl_table=11

SEQ ID NO: 70127 - protein, 478 aa, Leptospira interrogans serovar Lai str. 56601; identical to SEQ ID NO: 8464

SEQ ID NO: 70128 - DNA, 1440 bp, Shewanella oneidensis MR-1; identical to SEQ ID NO: 8371
  CDS (1)..(1440): transl_table=11

SEQ ID NO: 70129 - protein, 479 aa, Shewanella oneidensis MR-1; identical to SEQ ID NO: 8372

SEQ ID NO: 70130 - DNA, 1539 bp, Drosophila melanogaster; identical to SEQ ID NO: 15666
  CDS (1)..(1539)

SEQ ID NO: 70131 - protein, 512 aa, Drosophila melanogaster; identical to SEQ ID NO: 15667

SEQ ID NO: 70132 - DNA, 1455 bp, Pseudomonas putida KT2440; identical to SEQ ID NO: 15668
  CDS (1)..(1455): transl_table=11

SEQ ID NO: 70133 - protein, 484 aa, Pseudomonas putida KT2440; identical to SEQ ID NO: 15669

SEQ ID NO: 70134 - DNA, 1416 bp, Pseudomonas putida KT2440; identical to SEQ ID NO: 15670
  CDS (1)..(1416): transl_table=11

SEQ ID NO: 70135 - protein, 471 aa, Pseudomonas putida KT2440; identical to SEQ ID NO: 15671

SEQ ID NO: 70136 - DNA, 1629 bp, Escherichia coli CFT073; identical to SEQ ID NO: 15672
  CDS (1)..(1629): transl_table=11

SEQ ID NO: 70137 - protein, 542 aa, Escherichia coli CFT073; identical to SEQ ID NO: 15673

SEQ ID NO: 70138 - DNA, 1755 bp, Clostridium tetani E88; identical to SEQ ID NO: 15676
  CDS (1)..(1755): transl_table=11

SEQ ID NO: 70139 - protein, 584 aa, Clostridium tetani E88; identical to SEQ ID NO: 15677

SEQ ID NO: 70140 - DNA, 1761 bp, Lactobacillus plantarum WCFS1; identical to SEQ ID NO: 15678
  CDS (1)..(1761): transl_table=11

SEQ ID NO: 70141 - protein, 586 aa, Lactobacillus plantarum WCFS1; identical to SEQ ID NO: 15679

SEQ ID NO: 70142 - DNA, 1413 bp, Vibrio parahaemolyticus RIMD 2210633; identical to SEQ ID NO: 15682
  CDS (1)..(1413): transl_table=11

SEQ ID NO: 70143 - protein, 470 aa, Vibrio parahaemolyticus RIMD 2210633; identical to SEQ ID NO: 15683

SEQ ID NO: 70144 - DNA, 1458 bp, Bacteroides thetaiotaomicron VPI-5482
  CDS (1)..(1458): transl_table=11
atgttactgaaacagacaaaaatcgtcgcatccatttcggacagacgttgcgatgtggactttataaaacagctgtttgaagctgggatgaatgtggtacgtatgaatacggctcacgctagccgtgaaggttttgaagcgttgattgccaatgtacgttccgtatccaaccggattgcaatcctcatggataccaaaggaccggaagtacgtacaactgccaatgcggaaccgattccatatcagataggtgataaagtaaagattgtcggcaatcctgatcaggagacgactcgtgaatgtatcgctgtttcgtatcctaactttgtgaacgatttgaatatcggaggtctggttctgattgacgatggtgatcttgaactggaagtaatcgataagacagccgattatctgctttgcgaagtgaaaaacgatgcaacgttgggaagccgcaagagcgtgaacgtcccgggtgttcgtatcaatcttccttcattgacagagaaagaccgtaacaatatactttacgcgattgaaaaggatatcgatttcatcgctcactctttcgtgcgcaaccgtcaggacgtacttgatatccgtgaaattctggatgctcacaatagtgatatccggattattgccaagattgagaatcaggaaggggtggacaacatcgacgagattcttgaagtggcggacggcgtgatggtagcccgtggtgacctgggtatcgaagtgccgcaggaacgtattccgggtatccagcgtgtgctgatccgcaaatgtatcctggcaaagaaaccggtgatcgttgcgactcagatgcttcataccatgatcaacaatcctcgtccgacccgcgcggaagtgaccgatatcgcgaatgcaatctactatcgtacggatgctctgatgttgagcggtgagactgcttatggcaaatatccggtagatgcagtcaagacaatgaccaagatcgcggcccaggctgaaaaagataaactggaagagaatgatatccgtatcccgttgaacgaaaacagtaacgatgtaacggccttccttgctaaacaggcagtgaaagctacatcgaaactgaagatacgtgccatcatcacagacagctatagcggacggaccgcccgtaatctggcagctttccgtggtaagttcccggtattggctatctgctataaagaaaagaccatgcgtcatctggcactttcttatggagtggaagcaatctatatgccggagctggccaacggacaggaatattattttgccgctttgcgccgcctgttgaaggaaggacgtttgcagccgactgatatggtaggatatctgagtagcggtaaggcaggtacacaaacttcattcctcgaaatcaatgtcgtggaagatgcgttgaaacatgcgggagaaactgtattgcctaacaacaatcgttatctctaa

SEQ ID NO: 70145 - protein, 485 aa, Bacteroides thetaiotaomicron VPI-5482
MLLKQTKIVASISDRRCDVDFIKQLFEAGMNVVRMNTAHASREGFEALIANVRSVSNRIAILMDTKGPEVRTTANAEPIPYQIGDKVKIVGNPDQETTRECIAVSYPNFVNDLNIGGLVLIDDGDLELEVIDKTADYLLCEVKNDATLGSRKSVNVPGVRINLPSLTEKDRNNILYAIEKDIDFIAHSFVRNRQDVLDIREILDAHNSDIRIIAKIENQEGVDNIDEILEVADGVMVARGDLGIEVPQERIPGIQRVLIRKCILAKKPVIVATQMLHTMINNPRPTRAEVTDIANAIYYRTDALMLSGETAYGKYPVDAVKTMTKIAAQAEKDKLEENDIRIPLNENSNDVTAFLAKQAVKATSKLKIRAIITDSYSGRTARNLAAFRGKFPVLAICYKEKTMRHLALSYGVEAIYMPELANGQEYYFAALRRLLKEGRLQPTDMVGYLSSGKAGTQTSFLEINVVEDALKHAGETVLPNNNRYL

SEQ ID NO: 70146 - DNA, 1758 bp, Enterococcus faecalis V583; identical to SEQ ID NO: 8473
  CDS (1)..(1758): transl_table=11

SEQ ID NO: 70147 - protein, 585 aa, Enterococcus faecalis V583; identical to SEQ ID NO: 8474

SEQ ID NO: 70148 - DNA, 1431 bp, Rhodopirellula baltica SH 1; identical to SEQ ID NO: 15692
  CDS (1)..(1431): transl_table=11

SEQ ID NO: 70149 - protein, 476 aa, Rhodopirellula baltica SH 1; identical to SEQ ID NO: 15693

SEQ ID NO: 70150 - DNA, 1410 bp, Photorhabdus luminescens subsp. laumondii TTO1; identical to SEQ ID NO: 15702
  CDS (1)..(1410): transl_table=11

SEQ ID NO: 70151 - protein, 469 aa, Photorhabdus luminescens subsp. laumondii TTO1; identical to SEQ ID NO: 15703

SEQ ID NO: 70152 - DNA, 1488 bp, Vibrio vulnificus YJ016; identical to SEQ ID NO: 15704
  CDS (1)..(1488): transl_table=11

SEQ ID NO: 70153 - protein, 495 aa, Vibrio vulnificus YJ016; identical to SEQ ID NO: 15705

SEQ ID NO: 70154 - DNA, 1434 bp, Rhodopseudomonas palustris CGA009; identical to SEQ ID NO: 8491
  CDS (1)..(1434): transl_table=11

SEQ ID NO: 70155 - protein, 477 aa, Rhodopseudomonas palustris CGA009; identical to SEQ ID NO: 8492

SEQ ID NO: 70156 - DNA, 1341 bp, Onion yellows phytoplasma OY-M; identical to SEQ ID NO: 15706
  CDS (1)..(1341): transl_table=11

SEQ ID NO: 70157 - protein, 446 aa, Onion yellows phytoplasma OY-M; identical to SEQ ID NO: 15707

SEQ ID NO: 70158 - DNA, 1419 bp, Mycobacterium avium subsp. paratuberculosis K-10
  CDS (1)..(1419): transl_table=11
gtgagtagacgcgggaagatcgtctgcacccttggcccggcgaccaattcggacgagttgattttggcgctggtcgaggccggaatggacgtcgcccgactgaacttcagccacggcgactacgccgaccacaaagccgcctacgaacgggtgcgggtggcctccgacgccaccggccgcgccgtcggcgtgctcgccgatctgcagggccccaagatccgcctggggcgctttgccaccgggcccacctactgggccgacggcgaaacggtccgcatcaccgtcgccgactgcgaaggcagccacgaccgggtgtcgaccacctacaaacaactggcccaggacgccgcggtcggggaccgggtcctggtcgacgacggcaaggtcggcctggtggtcgacggcatcgagggcgacgacgtcatctgcaccgtggtcgagggcggcccggtcagcaacaacaagggcatctcgctgccgggcatgaacgtctccgcaccggccttgtccgacaaggacatcgaggacctcaccttcgcgctcgagctgggcgtcgacctggtcgcgctgtccttcgtgcgttcgccctccgacgtcgagctggtgcacgaggtgatggaccgcgtcggccggcgggtgcccgtgatcgccaaactggaaaagccggaggccgtcgacaacctggaagccatcgtgctggccttcgacgccatcatggtggcccgcggcgacctcggtgtcgaacttcccctggaagaggttccgctggtgcagaagcgggccatccagatggcccgggagaacgccaaacccgtcatcgtggcaacccagatgctcgattcgatgatcgagaactcacggccgacccgggccgaggcctccgacgtcgccaacgccgtgctggacggcgccgacgccgtgatgctgtccggggagacctcggtgggcaagtacccgctggcggccgtgcggaccatggcgcgcatcatctgcgcggtcgaggacaactccacggccgccccgccgctcacccacgtgccccgcaccaaacgcggggtgatctcgtatgcggcccgcgacatcggcgaacgcctggacgccaaggcgctggtcgcgttcacccagtccggcgacaccgtcaagcggctggcgcggttgcacaccccgctgccgctgctggccttcacggcatggccggaggtgcgcagccagctggccatgacctggggcaccgagacgttcatcgtgccgatgatgacctccaccgacggcatgatccgccaggtggacaagtcgctgctggaactcggtcggtaccggcgtggtgacctggtggtgatcgtcgccggcgcgccacctggcacagtagggtcaaccaacctgatccacgtgcaccggatcggggaggacgacgtctag

SEQ ID NO: 70159 - protein, 472 aa, Mycobacterium avium subsp. paratuberculosis K-10
MSRRGKIVCTLGPATNSDELILALVEAGMDVARLNFSHGDYADHKAAYERVRVASDATGRAVGVLADLQGPKIRLGRFATGPTYWADGETVRITVADCEGSHDRVSTTYKQLAQDAAVGDRVLVDDGKVGLVVDGIEGDDVICTVVEGGPVSNNKGISLPGMNVSAPALSDKDIEDLTFALELGVDLVALSFVRSPSDVELVHEVMDRVGRRVPVIAKLEKPEAVDNLEAIVLAFDAIMVARGDLGVELPLEEVPLVQKRAIQMARENAKPVIVATQMLDSMIENSRPTRAEASDVANAVLDGADAVMLSGETSVGKYPLAAVRTMARIICAVEDNSTAAPPLTHVPRTKRGVISYAARDIGERLDAKALVAFTQSGDTVKRLARLHTPLPLLAFTAWPEVRSQLAMTWGTETFIVPMMTSTDGMIRQVDKSLLELGRYRRGDLVVIVAGAPPGTVGSTNLIHVHRIGEDDV

SEQ ID NO: 70160 - DNA, 1770 bp, Lactobacillus johnsonii NCC 533; identical to SEQ ID NO: 15708
  CDS (1)..(1770): transl_table=11

SEQ ID NO: 70161 - protein, 589 aa, Lactobacillus johnsonii NCC 533; identical to SEQ ID NO: 15709

SEQ ID NO: 70162 - DNA, 1416 bp, Treponema denticola ATCC 35405; identical to SEQ ID NO: 8495
  CDS (1)..(1416): transl_table=11

SEQ ID NO: 70163 - protein, 471 aa, Treponema denticola ATCC 35405; identical to SEQ ID NO: 8496

SEQ ID NO: 70164 - DNA, 1437 bp, Mycoplasma mycoides subsp. mycoides SC str. PG1; identical to SEQ ID NO: 15712
  CDS (1)..(1437): transl_table=4

SEQ ID NO: 70165 - protein, 478 aa, Mycoplasma mycoides subsp. mycoides SC str. PG1; identical to SEQ ID NO: 15713

SEQ ID NO: 70166 - DNA, 1758 bp, Bacillus cereus ATCC 10987; identical to SEQ ID NO: 15714
  CDS (1)..(1758): transl_table=11

SEQ ID NO: 70167 - protein, 585 aa, Bacillus cereus ATCC 10987; identical to SEQ ID NO: 15715

SEQ ID NO: 70168 - DNA, 1656 bp, Nasonia vitripennis; identical to SEQ ID NO: 15718
  CDS (1)..(1656)

SEQ ID NO: 70169 - protein, 551 aa, Nasonia vitripennis; identical to SEQ ID NO: 15719

SEQ ID NO: 70170 - DNA, 1587 bp, Magnaporthe grisea 70-15; identical to SEQ ID NO: 8497
  CDS (1)..(1587)

SEQ ID NO: 70171 - protein, 528 aa, Magnaporthe grisea 70-15; identical to SEQ ID NO: 8498

SEQ ID NO: 70172 - DNA, 1623 bp, Gibberella zeae PH-1; identical to SEQ ID NO: 8499
  CDS (1)..(1623)

SEQ ID NO: 70173 - protein, 540 aa, Gibberella zeae PH-1; identical to SEQ ID NO: 8500

SEQ ID NO: 70174 - DNA, 1554 bp, Apis mellifera; identical to SEQ ID NO: 15722
  CDS (1)..(1554)

SEQ ID NO: 70175 - protein, 517 aa, Apis mellifera; identical to SEQ ID NO: 15723

SEQ ID NO: 70176 - DNA, 1515 bp, Candida albicans SC5314; identical to SEQ ID NO: 8501
  CDS (1)..(1515): transl_table=12

SEQ ID NO: 70177 - protein, 504 aa, Candida albicans SC5314; identical to SEQ ID NO: 8502

SEQ ID NO: 70178 - DNA, 1587 bp, Ustilago maydis 521; identical to SEQ ID NO: 8503
  CDS (1)..(1587)

SEQ ID NO: 70179 - protein, 528 aa, Ustilago maydis 521; identical to SEQ ID NO: 8504

SEQ ID NO: 70180 - DNA, 1590 bp, Cryptococcus neoformans var. neoformans B-3501A; identical to SEQ ID NO: 15728
  CDS (1)..(1590)

SEQ ID NO: 70181 - protein, 529 aa, Cryptococcus neoformans var. neoformans B-3501A; identical to SEQ ID NO: 15729

SEQ ID NO: 70182 - DNA, 1719 bp, Cryptococcus neoformans var. neoformans B-3501A; identical to SEQ ID NO: 15730
  CDS (1)..(1719)

SEQ ID NO: 70183 - protein, 572 aa, Cryptococcus neoformans var. neoformans B-3501A; identical to SEQ ID NO: 15731

SEQ ID NO: 70184 - DNA, 1560 bp, Encephalitozoon cuniculi GB-M1; identical to SEQ ID NO: 15732
  CDS (1)..(1560)

SEQ ID NO: 70185 - protein, 519 aa, Encephalitozoon cuniculi GB-M1; identical to SEQ ID NO: 15733

SEQ ID NO: 70186 - DNA, 1539 bp, Tribolium castaneum; identical to SEQ ID NO: 15734
  CDS (1)..(1539)

SEQ ID NO: 70187 - protein, 512 aa, Tribolium castaneum; identical to SEQ ID NO: 15735

SEQ ID NO: 70188 - DNA, 1611 bp, Tribolium castaneum; identical to SEQ ID NO: 15736
  CDS (1)..(1611)

SEQ ID NO: 70189 - protein, 536 aa, Tribolium castaneum; identical to SEQ ID NO: 15737

SEQ ID NO: 70190 - DNA, 1674 bp, Tribolium castaneum; identical to SEQ ID NO: 15738
  CDS (1)..(1674)

SEQ ID NO: 70191 - protein, 557 aa, Tribolium castaneum; identical to SEQ ID NO: 15739

SEQ ID NO: 70192 - DNA, 1593 bp, Tribolium castaneum; identical to SEQ ID NO: 15740
  CDS (1)..(1593)

SEQ ID NO: 70193 - protein, 530 aa, Tribolium castaneum; identical to SEQ ID NO: 15741

SEQ ID NO: 70194 - DNA, 1791 bp, Prochlorococcus marinus str. AS9601
  CDS (1)..(1791): transl_table=11
atgtcgaatattgatttaaaaagaagaacaaaaatagtagcaactattggccctgcgacccaatctgaagagataattacaaatttaattaaagctggagtaacaacattcagattaaatttctcacatggagatcataaagatcatgctgagagaataaaaaccataagggaagtatcaaaaaagttagatatagatattggaatattgcaagatcttcaaggacctaaaatacgattaggacgctttaaagatgggccagtaaaagttaaaaaaggcgataaatttacgcttacatcaaatgaagtcgaatgtacaaatactattgcaaatgttacctacgacaaactttctcaagaagttagcgaagggaaaagaatacttttagatgatggaaaaatagaaatgattgtagaaaaagttgatacaaaagctaataatctggagtgcatggtaactgtaggaggggttctttcaaacaataaaggtgttaattttccagatgttcaattatcagtaaaagcattaacagaaaaggataaagaggatttaaaatttggtttatctgtaggagttgattggatagcactaagtttcgtaagaaatccatccgatataaatgagataaaagatttaataaacacaaatgggcattcaactccggtagtcgcaaaaatagaaaaatttgaagcaattgatcagatcgatacagttttacccttatgtgatggggttatggttgcaagaggtgatttgggagtagaaatgcctgctgaagaagttcctcttctacaaaaggagttaataagaaaagctaattcattaggtatcccaataattacagcgactcaaatgcttgattctatggcttctaatccaagaccaactagggccgaagttagtgatgttgcaaatgcaattctggatggtacagatgctgtaatgctttcaaacgaaactgcagttggcgattatcctgtagaggcagttgaaacgatggcaaccatagcaagaagaattgaaagggattatccacttaaggctattgaaagccacttacccagtacgatcccaaatgctattagtgcagcagtaagcaatatagctagacaacttgatgcaggagctataatccctttaactaaatcaggttctaccgctcgaaatgtaagtaagttcagacctccaacacctatcttggcaactactacagaaagaagtgtagcgagaagattgcaacttgtttggggagttaccccaatagtagttaaaaatgatgaaagaacagcaaagacttttagtttagctatgcaaattgctcaagagatgggcatcctaaatcaaggagatttagtagttcaaaccgcaggtacattaacaggaattagcggctctacagatttaataaaagtcggtttagtaagaaagattgtatcaagaggaatttcaataggggaaatcggtgttacaggtaaagcaaggataattaaaaataatcttgatatatccttaatttgcccaggagaaatattatttgttcccaaggaattaatgaaaaatattccactgagtaaaaatattgccggcattgttacaaaccaaaatgtaaatgatgtttacgccttttttaataaaaataataaaaagatttctacaatttgtaatttagagaatatggataatcatcaaatcagtaatggcgatcttattaccctccagcttaatgaaggtgttatatacatgggacaaattgaagatgatgatgcaatagataaatataaatatgtctag

SEQ ID NO: 70195 - protein, 596 aa, Prochlorococcus marinus str. AS9601
MSNIDLKRRTKIVATIGPATQSEEIITNLIKAGVTTFRLNFSHGDHKDHAERIKTIREVSKKLDIDIGILQDLQGPKIRLGRFKDGPVKVKKGDKFTLTSNEVECTNTIANVTYDKLSQEVSEGKRILLDDGKIEMIVEKVDTKANNLECMVTVGGVLSNNKGVNFPDVQLSVKALTEKDKEDLKFGLSVGVDWIALSFVRNPSDINEIKDLINTNGHSTPVVAKIEKFEAIDQIDTVLPLCDGVMVARGDLGVEMPAEEVPLLQKELIRKANSLGIPIITATQMLDSMASNPRPTRAEVSDVANAILDGTDAVMLSNETAVGDYPVEAVETMATIARRIERDYPLKAIESHLPSTIPNAISAAVSNIARQLDAGAIIPLTKSGSTARNVSKFRPPTPILATTTERSVARRLQLVWGVTPIVVKNDERTAKTFSLAMQIAQEMGILNQGDLVVQTAGTLTGISGSTDLIKVGLVRKIVSRGISIGEIGVTGKARIIKNNLDISLICPGEILFVPKELMKNIPLSKNIAGIVTNQNVNDVYAFFNKNNKKISTICNLENMDNHQISNGDLITLQLNEGVIYMGQIEDDDAIDKYKYV

SEQ ID NO: 70196 - DNA, 1761 bp, Clostridium difficile 630; identical to SEQ ID NO: 8505
  CDS (1)..(1761): transl_table=11

SEQ ID NO: 70197 - protein, 586 aa, Clostridium difficile 630; identical to SEQ ID NO: 8506

SEQ ID NO: 70198 - DNA, 1437 bp, Bradyrhizobium sp. ORS278
  CDS (1)..(1437): transl_table=11
atgagacgcctgcgccgcatcaagattctcgccacgctcggtcccgcctcctcggacagcgcgatgattcgcaagctgttcgaggccggggccgacatcttccgcatcaacatgagccacaccccgcatgacaagctgcgggagctggtggccacgatccgcagcgtcgaagccagctatggccggccgatcggcatcctggtcgatctgcagggccccaaactgcggcttggcacgtttgccgaaggtccggtccagctcaacaacggacagagcttcgtgctcgattccgacaagacgcccggcgatgcgacacgggtgtacctgccgcatccggagatcctggcagccctgcagcccggccacgcgctgctgctcgacgacggcaaggtgcggctgatcgccgaggagacgaccccgacgcgcgccgtcacccgcgtcgtcatcggcggcaagatgtccgaccgcaagggcgtgagcctgcccgacaccgatctgccggtctcggcgatgacgccgaaggaccgcgccgatctcgaagcggcgctgaacatcggcatcgactggatcgcgctgtccttcgtgcagcgcgccgatgacgtgctcgaggcgaagaagatcatccgcggccgcgccgccgtgatgtccaagatcgagaaaccgcaggcgatcgagcgtctcaacgacatcgtcgatgtctccgacgcgctgatggtggcgcgcggcgatctcggcgtcgagctgccgctggagcgcgtgccgggcctgcagaagcagatgacacggttggcgcgccgcgccggcaagccggtggtggtggcgacgcagatgctggaatcgatgatccagtcgccggtcccgacccgcgcggaggtctccgacgtggcgaccgcggtctatgagggcgctgacgcgatcatgctgtcggcggaatcggcggccggcaagtttccggtcgaggcggtctcgacgatgaaccggatcggcgaggaggtcgaacgcgacatcgtctatcgctcggtgatcgcggcgcagcggcccgagccggagtcgaccgcgggcgacgccatcgccgaggcggcgcgcaggattgccgaaaatctcgatctgccggcgatcatctgctggacgtcgtccggctcgaccgcggtccgcgtcgcgcgcgagcggcccaagccgccggtggtcgcgatcaccccgaacctggcgaccgggcgccgcctcgcggtggtgtggggcgtccattgcgtggtggccgaggatgcccgcgaccaggacgacatggtcgaacgtgccggctcgatcgcgtttcgcgacggcttcgtccgcgccggccagcgcgtcatcgtcgttgccggcgtcccgctcggcacccccggcaccaccaacatggtgcgcatcgcctatgtcgggccgtcgaacgaggcccatctctga

SEQ ID NO: 70199 - protein, 478 aa, Bradyrhizobium sp. ORS278
MRRLRRIKILATLGPASSDSAMIRKLFEAGADIFRINMSHTPHDKLRELVATIRSVEASYGRPIGILVDLQGPKLRLGTFAEGPVQLNNGQSFVLDSDKTPGDATRVYLPHPEILAALQPGHALLLDDGKVRLIAEETTPTRAVTRVVIGGKMSDRKGVSLPDTDLPVSAMTPKDRADLEAALNIGIDWIALSFVQRADDVLEAKKIIRGRAAVMSKIEKPQAIERLNDIVDVSDALMVARGDLGVELPLERVPGLQKQMTRLARRAGKPVVVATQMLESMIQSPVPTRAEVSDVATAVYEGADAIMLSAESAAGKFPVEAVSTMNRIGEEVERDIVYRSVIAAQRPEPESTAGDAIAEAARRIAENLDLPAIICWTSSGSTAVRVARERPKPPVVAITPNLATGRRLAVVWGVHCVVAEDARDQDDMVERAGSIAFRDGFVRAGQRVIVVAGVPLGTPGTTNMVRIAYVGPSNEAHL

SEQ ID NO: 70200 - DNA, 1461 bp, Leptospira interrogans serovar Copenhageni str. Fiocruz L1-130
  CDS (1)..(1461): transl_table=11
atgaagagcgaatcctccgtttttagaaaaaccaaaatcatctgtacgattggtcctgcgacctcagataaaaaaatgattcaggctcttgccgaagccggaatgaacgtggcacgattaaacatgtctcacggaaaccacgattttcatagaagtatcattcgtaatattaagtccctcaataaggacgtgttgaaaaatccgattgcgattttactcgatacacaaggaccggaaattcgaactggagatcttcaagtagatcatctggatttaaaagtaggtgagacctttacctttcatatcattccgggggaagaatctgaagaacaatccgtatttgtaaactataaggatatagttaaagatttaaaagtaggcgatccagtaaccgtagataacggtttaatcaatcttgtagtagaggaaatcaatgattctgctcttaagtgtaaggtgttagacggtggaagactaggttctagaaaacacattaatcttccaggaattcgggttaatcttccctcgatcactccaaaggatcataaggatattctattcggattagaagaagatgtagattttattgcactttcttttgttcgttctgtggaagacattaatcaattaaaacaaattatagaagagaacgatggacacgcgcagatcatcgctaagatagaagatcaagaagcggtgcgtaatatgaaagaaatcgtggaagccgcagacggtgtgatggttgcgagaggggatttgggggttgaagttccaattgaagaattgccgatcttgcaaagagctatcattaaagaatgtgctctcaaaggaaaaagggtgatcgtagcaacccatcttttagaatctatgattcataatccttcgcctacgagggcggaggtgaccgacgtcgctaacgcgatttatgaagaagcggacgcgattatgctttctggagaaaccgcggccggtaaatttccgattcgttgtgtggaaatgatggataagatcgcacaacgtgtagaaaagactggcggtgtagattacgttaaggataaaattccacaggataaaaaagagcagatggcaagggcggctgcaaaacttgcagattctttaaagtgtccggcgattatagtaattacaagaagagggaccaccgcgttgaacgtggcgggttttcatcctcattatcctttgatttatgcgtttacgaatatgacaactgttaggcgaaagctctggttgactcgaggagtgattccgcatagaatcgatttttccaaagatccggaaaagacgattcgactcgcgatcgaaactttgaagaaaacgggaaggatcgaggatggggatcaagttgtgattctgtcagacatcatcgcgggcgaagatcgtgtggaaacgattcagattcgagaagtaaaaacgtattttaatgtggaagtggaaaaactttga

SEQ ID NO: 70201 - protein, 486 aa, Leptospira interrogans serovar Copenhageni str. Fiocruz L1-130
MKSESSVFRKTKIICTIGPATSDKKMIQALAEAGMNVARLNMSHGNHDFHRSIIRNIKSLNKDVLKNPIAILLDTQGPEIRTGDLQVDHLDLKVGETFTFHIIPGEESEEQSVFVNYKDIVKDLKVGDPVTVDNGLINLVVEEINDSALKCKVLDGGRLGSRKHINLPGIRVNLPSITPKDHKDILFGLEEDVDFIALSFVRSVEDINQLKQIIEENDGHAQIIAKIEDQEAVRNMKEIVEAADGVMVARGDLGVEVPIEELPILQRAIIKECALKGKRVIVATHLLESMIHNPSPTRAEVTDVANAIYEEADAIMLSGETAAGKFPIRCVEMMDKIAQRVEKTGGVDYVKDKIPQDKKEQMARAAAKLADSLKCPAIIVITRRGTTALNVAGFHPHYPLIYAFTNMTTVRRKLWLTRGVIPHRIDFSKDPEKTIRLAIETLKKTGRIEDGDQVVILSDIIAGEDRVETIQIREVKTYFNVEVEKL

SEQ ID NO: 70202 - DNA, 1797 bp, Candidatus Protochlamydia amoebophila UWE25; identical to SEQ ID NO: 8513
  CDS (1)..(1797): transl_table=11

SEQ ID NO: 70203 - protein, 598 aa, Candidatus Protochlamydia amoebophila UWE25; identical to SEQ ID NO: 8514

SEQ ID NO: 70204 - DNA, 1758 bp, Listeria monocytogenes str. 4b F2365; identical to SEQ ID NO: 15752
  CDS (1)..(1758): transl_table=11

SEQ ID NO: 70205 - protein, 585 aa, Listeria monocytogenes str. 4b F2365; identical to SEQ ID NO: 15753

SEQ ID NO: 70206 - DNA, 1437 bp, Bartonella henselae str. Houston-1; identical to SEQ ID NO: 8515
  CDS (1)..(1437): transl_table=11

SEQ ID NO: 70207 - protein, 478 aa, Bartonella henselae str. Houston-1; identical to SEQ ID NO: 8516

SEQ ID NO: 70208 - DNA, 1758 bp, Bacillus thuringiensis serovar konkukian str. 97-27; identical to SEQ ID NO: 15754
  CDS (1)..(1758): transl_table=11

SEQ ID NO: 70209 - protein, 585 aa, Bacillus thuringiensis serovar konkukian str. 97-27; identical to SEQ ID NO: 15755

SEQ ID NO: 70210 - DNA, 1413 bp, Erwinia carotovora subsp. atroseptica SCRI1043; identical to SEQ ID NO: 15756
  CDS (1)..(1413): transl_table=11

SEQ ID NO: 70211 - protein, 470 aa, Erwinia carotovora subsp. atroseptica SCRI1043; identical to SEQ ID NO: 15757

SEQ ID NO: 70212 - DNA, 1746 bp, Desulfotalea psychrophila LSv54; identical to SEQ ID NO: 8525
  CDS (1)..(1746): transl_table=11

SEQ ID NO: 70213 - protein, 581 aa, Desulfotalea psychrophila LSv54; identical to SEQ ID NO: 8526

SEQ ID NO: 70214 - DNA, 1755 bp, Symbiobacterium thermophilum IAM 14863; identical to SEQ ID NO: 8529
  CDS (1)..(1755): transl_table=11

SEQ ID NO: 70215 - protein, 584 aa, Symbiobacterium thermophilum IAM 14863; identical to SEQ ID NO: 8530

SEQ ID NO: 70216 - DNA, 1758 bp, Bacillus licheniformis ATCC 14580; identical to SEQ ID NO: 15768
  CDS (1)..(1758): transl_table=11

SEQ ID NO: 70217 - protein, 585 aa, Bacillus licheniformis ATCC 14580; identical to SEQ ID NO: 15769

SEQ ID NO: 70218 - DNA, 1449 bp, Azoarcus sp. EbN1; identical to SEQ ID NO: 15772
  CDS (1)..(1449): transl_table=11

SEQ ID NO: 70219 - protein, 482 aa, Azoarcus sp. EbN1; identical to SEQ ID NO: 15773

SEQ ID NO: 70220 - DNA, 1446 bp, Silicibacter pomeroyi DSS-3; identical to SEQ ID NO: 16485
  CDS (1)..(1446): transl_table=11

SEQ ID NO: 70221 - protein, 481 aa, Silicibacter pomeroyi DSS-3; identical to SEQ ID NO: 16486

SEQ ID NO: 70222 - DNA, 1755 bp, Bacillus clausii KSM-K16; identical to SEQ ID NO: 8537
  CDS (1)..(1755): transl_table=11

SEQ ID NO: 70223 - protein, 584 aa, Bacillus clausii KSM-K16; identical to SEQ ID NO: 8538

SEQ ID NO: 70224 - DNA, 1434 bp, Corynebacterium glutamicum ATCC 13032; identical to SEQ ID NO: 8543
  CDS (1)..(1434): transl_table=11

SEQ ID NO: 70225 - protein, 477 aa, Corynebacterium glutamicum ATCC 13032; identical to SEQ ID NO: 8544

SEQ ID NO: 70226 - DNA, 1437 bp, Haemophilus influenzae 86-028NP; identical to SEQ ID NO: 8545
  CDS (1)..(1437): transl_table=11

SEQ ID NO: 70227 - protein, 478 aa, Haemophilus influenzae 86-028NP; identical to SEQ ID NO: 8546

SEQ ID NO: 70228 - DNA, 1437 bp, Ralstonia eutropha JMP134; identical to SEQ ID NO: 26628
  CDS (1)..(1437): transl_table=11

SEQ ID NO: 70229 - protein, 478 aa, Ralstonia eutropha JMP134; identical to SEQ ID NO: 26629

SEQ ID NO: 70230 - DNA, 1431 bp, Anabaena variabilis ATCC 29413; identical to SEQ ID NO: 15790
  CDS (1)..(1431): transl_table=11

SEQ ID NO: 70231 - protein, 476 aa, Anabaena variabilis ATCC 29413; identical to SEQ ID NO: 15791

SEQ ID NO: 70232 - DNA, 1752 bp, Carboxydothermus hydrogenoformans Z-2901; identical to SEQ ID NO: 8561
  CDS (1)..(1752): transl_table=11

SEQ ID NO: 70233 - protein, 583 aa, Carboxydothermus hydrogenoformans Z-2901; identical to SEQ ID NO: 8562

SEQ ID NO: 70234 - DNA, 1485 bp, Synechococcus sp. CC9605; identical to SEQ ID NO: 26640
  CDS (1)..(1485): transl_table=11

SEQ ID NO: 70235 - protein, 494 aa, Synechococcus sp. CC9605; identical to SEQ ID NO: 26641

SEQ ID NO: 70236 - DNA, 1443 bp, Geobacter metallireducens GS-15; identical to SEQ ID NO: 8563
  CDS (1)..(1443): transl_table=11

SEQ ID NO: 70237 - protein, 480 aa, Geobacter metallireducens GS-15; identical to SEQ ID NO: 8564

SEQ ID NO: 70238 - DNA, 1794 bp, Prochlorococcus marinus str. MIT 9312; identical to SEQ ID NO: 8565
  CDS (1)..(1794): transl_table=11

SEQ ID NO: 70239 - protein, 597 aa, Prochlorococcus marinus str. MIT 9312; identical to SEQ ID NO: 8566

SEQ ID NO: 70240 - DNA, 1785 bp, Synechococcus elongatus PCC 7942
  CDS (1)..(1785): transl_table=11
atgcaacccaacgactttcagcgccgcactaaaattgtcgccacgattggccctgcaacgtccaagcccgaggtgctacgggcgttgatcgaagctggcgcatcgacattacggctcaatttctcccacggaacccacgacgatcatcagcgcagcattcgcctgatccgtcagatctccttcgagctcaatcgtcccgttggcattctgcaagacttgcagggaccgaaaatccgcctcggtcgttttgccgatggcccaattacagtccaaaagggtgactccttcatcctgaccagccgcagtgtaccgggctcgcaaacaatcagctcggtcacctatgaaccgctggccgatgaagtgccggaaggcgcaacgattctgcttgatgatggccgcgtcgaaatgacggtggtcaaggtcgatcgccaaactcgtgagctgcactgcgaagtcgtggtgggtggcatcctctcgaataacaaaggggtcaacttccccggcgtctatctgtctgtcaaagccctgacggataaagaccgcgaagacctgatctttggtctggatcaaggggtggactgggtcgccctcagctttgtccgcaacccgcaggatgttctcgaaatcaaagaactgatctctcgggctgggaagtcagtgcccgtgatcgccaagattgagaagcacgaagcgatcgagcagatggaagccgtgctctcgctctgtgatggcgtgatggtggcgcggggtgacctcggcgttgagctgccagcagaagaagtgccgattctgcaaaaacgactgattcgcaccgccaatcgtctcggcattccggtgattaccgcgacccaaatgctggacagcatggtcagcaatccgcggccgacccgggctgagatttcggacgtcgctaacgccattctggatggcaccgacgcggtgatgctctccaacgaaacagccgtcggtaagtttccgattgaagccgtttcaaccatggccacgatcgcccatcggatcgaagctgagcagcaatacatcaccctcaacccgacgccgactagctcgattcccaatgcgatcagccaagcggtgggtcatatcgccgagcaattagatgcggccgcaattatgaccctgacccaaagcggcgcgacagcccgcaacgtctccaaattccgcccgaccacgccgattttggcggttacgcccaacattgatgtagcgcgtcagctgcaactggtttggggcgtgcagccgcttctggtcgttgatttgccttcgacgagccaaaccttccgcgctgccctcaacgtcgcccaagagcgcactttgctcaaagaaggcgatctggtagtgatgacagccggcaccctgccgggcgtttccggttccactgacttggtcaaggtcgaaatcgtcacggcagtgattgctcgggggattggcgttggacagggtagtgtcagtggcaaggctcgcgtcatccacaatgcagcggaagcggcgaccttggcccaaggtgaaattctgattgccacccagacctcagcggactacatcgaagcgattcgcaaagccagcggcattgtcacggaagaggaaggcttgaccagccatgccgccgtgattggcctgcgcctcggtattcccgtgattgttggcgtcaagaacgccactagcgtcgtgcgtgacggttcaatcctgacgctggatgtgaagcgcgggctactctactccggtgccgttggggctgttgctgccgagcagccgatttccgtctaa

SEQ ID NO: 70241 - protein, 594 aa, Synechococcus elongatus PCC 7942
MQPNDFQRRTKIVATIGPATSKPEVLRALIEAGASTLRLNFSHGTHDDHQRSIRLIRQISFELNRPVGILQDLQGPKIRLGRFADGPITVQKGDSFILTSRSVPGSQTISSVTYEPLADEVPEGATILLDDGRVEMTVVKVDRQTRELHCEVVVGGILSNNKGVNFPGVYLSVKALTDKDREDLIFGLDQGVDWVALSFVRNPQDVLEIKELISRAGKSVPVIAKIEKHEAIEQMEAVLSLCDGVMVARGDLGVELPAEEVPILQKRLIRTANRLGIPVITATQMLDSMVSNPRPTRAEISDVANAILDGTDAVMLSNETAVGKFPIEAVSTMATIAHRIEAEQQYITLNPTPTSSIPNAISQAVGHIAEQLDAAAIMTLTQSGATARNVSKFRPTTPILAVTPNIDVARQLQLVWGVQPLLVVDLPSTSQTFRAALNVAQERTLLKEGDLVVMTAGTLPGVSGSTDLVKVEIVTAVIARGIGVGQGSVSGKARVIHNAAEAATLAQGEILIATQTSADYIEAIRKASGIVTEEEGLTSHAAVIGLRLGIPVIVGVKNATSVVRDGSILTLDVKRGLLYSGAVGAVAAEQPISV

SEQ ID NO: 70242 - DNA, 1437 bp, Rhodospirillum rubrum ATCC 11170; identical to SEQ ID NO: 8567
  CDS (1)..(1437): transl_table=11

SEQ ID NO: 70243 - protein, 478 aa, Rhodospirillum rubrum ATCC 11170; identical to SEQ ID NO: 8568

SEQ ID NO: 70244 - DNA, 1749 bp, Moorella thermoacetica ATCC 39073; identical to SEQ ID NO: 8569
  CDS (1)..(1749): transl_table=11

SEQ ID NO: 70245 - protein, 582 aa, Moorella thermoacetica ATCC 39073; identical to SEQ ID NO: 8570

SEQ ID NO: 70246 - DNA, 1428 bp, Syntrophus aciditrophicus SB; identical to SEQ ID NO: 8571
  CDS (1)..(1428): transl_table=11

SEQ ID NO: 70247 - protein, 475 aa, Syntrophus aciditrophicus SB; identical to SEQ ID NO: 8572

SEQ ID NO: 70248 - DNA, 1455 bp, Novosphingobium aromaticivorans DSM 12444; identical to SEQ ID NO: 8575
  CDS (1)..(1455): transl_table=11

SEQ ID NO: 70249 - protein, 484 aa, Novosphingobium aromaticivorans DSM 12444; identical to SEQ ID NO: 8576

SEQ ID NO: 70250 - DNA, 1437 bp, Francisella tularensis subsp. holarctica; identical to SEQ ID NO: 8577
  CDS (1)..(1437): transl_table=11

SEQ ID NO: 70251 - protein, 478 aa, Francisella tularensis subsp. holarctica; identical to SEQ ID NO: 8578

SEQ ID NO: 70252 - DNA, 1437 bp, Burkholderia xenovorans LB400; identical to SEQ ID NO: 16531
  CDS (1)..(1437): transl_table=11

SEQ ID NO: 70253 - protein, 478 aa, Burkholderia xenovorans LB400; identical to SEQ ID NO: 16532

SEQ ID NO: 70254 - DNA, 1434 bp, Myxococcus xanthus DK 1622; identical to SEQ ID NO: 8591
  CDS (1)..(1434): transl_table=11

SEQ ID NO: 70255 - protein, 477 aa, Myxococcus xanthus DK 1622; identical to SEQ ID NO: 8592

SEQ ID NO: 70256 - DNA, 1437 bp, Mesorhizobium sp. BNC1; identical to SEQ ID NO: 8595
  CDS (1)..(1437): transl_table=11

SEQ ID NO: 70257 - protein, 478 aa, Mesorhizobium sp. BNC1; identical to SEQ ID NO: 8596

SEQ ID NO: 70258 - DNA, 1413 bp, Cytophaga hutchinsonii ATCC 33406; identical to SEQ ID NO: 8597
  CDS (1)..(1413): transl_table=11

SEQ ID NO: 70259 - protein, 470 aa, Cytophaga hutchinsonii ATCC 33406; identical to SEQ ID NO: 8598

SEQ ID NO: 70260 - DNA, 1404 bp, Clostridium perfringens ATCC 13124; identical to SEQ ID NO: 15822
  CDS (1)..(1404): transl_table=11

SEQ ID NO: 70261 - protein, 467 aa, Clostridium perfringens ATCC 13124; identical to SEQ ID NO: 15823

SEQ ID NO: 70262 - DNA, 1425 bp, Clostridium perfringens ATCC 13124
  CDS (1)..(1425): transl_table=11
atgcaaaaaacaaaaatgatatttacaattggtcctgcaagtgattcagaagaaattctaagagagttcataagaattggtatgaatgcagctagattaaacttctcacatggagaccatgcaagtcataaagaaaagatagaacttattaagagacttagaaaagaagaaaaatcagctacagctatcttattagacattaagggtcctaaaataagaacacataattttaaaaatggcgaagctgaattaaaaaatggtgatgaattcacattctcttgcggagatgaaatattaggtgataacactaaatgttcaatctcttataaagaactatatgaagacataaaacctggtggatcaatacttgttgatgatggacttttagaatttaaagtaaaggaagtccgtggaactgatataatatgtgaagttattgaaggaggtactataaaagaccataaaggtgtaaatgtacctaatgtaccaatcaaactccctgcagtaactgaaaaggatagatctgacttaatatttggttgcgaaatggaagtagactttgtagcagcttctttcataagaaaacctgaggatgtacttgaagttagagaaattctagactctcatggtggaaaagatataaaaataatatcaaaaatagaaagccaagaaggtgtagataacataaaagaaataattaaggttactgatggtgtaatggttgctagaggtgatatgggagtagaaattcctatagaaaatgtacctataattcaaaaaaatataattaagaaatgtaatcaagcagggaaaatagttataacggcaactcaaatgttagattctatgataagaaatccaagacctactagagctgaagcttctgacgtatgtaatgccatatttgatggtacagatgccataatgcttagtggagaaagtgcttctggtagcttccctatagaggcagcaatgacaatgtctagaatagcaaaaaaagcagaagctaacttagactataattatcttttaagaagattaaaggatccaaatccaaatccagatgcctttgcagatgccataagttattcagcatcaaaaacagctagcaaattccctacaaaagctatagtagcagccactcagactggttcaacagctaagatattatcaaaatataaacctagctgtccaataatagctattactccatatgaaaaagttagaagaagcctagctttaaactttggaataatttctaagaaatgcgcttattttaatagcacagatgagatcatagaggaagctagaaaagtagctaaagaattccaaatagctgaaactggagataatataatggtagctgctgggttcccaacatcaataactggtggaacaaacatgctaaaaattgaaaaaatataa

SEQ ID NO: 70263 - protein, 474 aa, Clostridium perfringens ATCC 13124
MQKTKMIFTIGPASDSEEILREFIRIGMNAARLNFSHGDHASHKEKIELIKRLRKEEKSATAILLDIKGPKIRTHNFKNGEAELKNGDEFTFSCGDEILGDNTKCSISYKELYEDIKPGGSILVDDGLLEFKVKEVRGTDIICEVIEGGTIKDHKGVNVPNVPIKLPAVTEKDRSDLIFGCEMEVDFVAASFIRKPEDVLEVREILDSHGGKDIKIISKIESQEGVDNIKEIIKVTDGVMVARGDMGVEIPIENVPIIQKNIIKKCNQAGKIVITATQMLDSMIRNPRPTRAEASDVCNAIFDGTDAIMLSGESASGSFPIEAAMTMSRIAKKAEANLDYNYLLRRLKDPNPNPDAFADAISYSASKTASKFPTKAIVAATQTGSTAKILSKYKPSCPIIAITPYEKVRRSLALNFGIISKKCAYFNSTDEIIEEARKVAKEFQIAETGDNIMVAAGFPTSITGGTNMLKIEKI

SEQ ID NO: 70264 - DNA, 1764 bp, Trichodesmium erythraeum IMS101; identical to SEQ ID NO: 8603
  CDS (1)..(1764): transl_table=11

SEQ ID NO: 70265 - protein, 587 aa, Trichodesmium erythraeum IMS101; identical to SEQ ID NO: 8604

SEQ ID NO: 70266 - DNA, 1434 bp, Pseudomonas aeruginosa UCBPP-PA14; identical to SEQ ID NO: 16547
  CDS (1)..(1434): transl_table=11

SEQ ID NO: 70267 - protein, 477 aa, Pseudomonas aeruginosa UCBPP-PA14; identical to SEQ ID NO: 16548

SEQ ID NO: 70268 - DNA, 1764 bp, Pediococcus pentosaceus ATCC 25745; identical to SEQ ID NO: 8615
  CDS (1)..(1764): transl_table=11

SEQ ID NO: 70269 - protein, 587 aa, Pediococcus pentosaceus ATCC 25745; identical to SEQ ID NO: 8616

SEQ ID NO: 70270 - DNA, 1434 bp, Oenococcus oeni PSU-1; identical to SEQ ID NO: 8617
  CDS (1)..(1434): transl_table=11

SEQ ID NO: 70271 - protein, 477 aa, Oenococcus oeni PSU-1; identical to SEQ ID NO: 8618

SEQ ID NO: 70272 - DNA, 1422 bp, Leuconostoc mesenteroides subsp. mesenteroides ATCC 8293; identical to SEQ ID NO: 15836
  CDS (1)..(1422): transl_table=11

SEQ ID NO: 70273 - protein, 473 aa, Leuconostoc mesenteroides subsp. mesenteroides ATCC 8293; identical to SEQ ID NO: 15837

SEQ ID NO: 70274 - DNA, 1413 bp, Solibacter usitatus Ellin6076; identical to SEQ ID NO: 8619
  CDS (1)..(1413): transl_table=11

SEQ ID NO: 70275 - protein, 470 aa, Solibacter usitatus Ellin6076; identical to SEQ ID NO: 8620

SEQ ID NO: 70276 - DNA, 1710 bp, Magnetococcus sp. MC-1; identical to SEQ ID NO: 15840
  CDS (1)..(1710): transl_table=11

SEQ ID NO: 70277 - protein, 569 aa, Magnetococcus sp. MC-1; identical to SEQ ID NO: 15841

SEQ ID NO: 70278 - DNA, 1437 bp, Acidovorax sp. JS42; identical to SEQ ID NO: 8627
  CDS (1)..(1437): transl_table=11

SEQ ID NO: 70279 - protein, 478 aa, Acidovorax sp. JS42; identical to SEQ ID NO: 8628

SEQ ID NO: 70280 - DNA, 1428 bp, Fusobacterium nucleatum subsp. vincentii ATCC 49256; identical to SEQ ID NO: 15846
  CDS (1)..(1428): transl_table=11

SEQ ID NO: 70281 - protein, 475 aa, Fusobacterium nucleatum subsp. vincentii ATCC 49256; identical to SEQ ID NO: 15847

SEQ ID NO: 70282 - DNA, 1776 bp, Crocosphaera watsonii WH 8501; identical to SEQ ID NO: 8631
  CDS (1)..(1776): transl_table=11

SEQ ID NO: 70283 - protein, 591 aa, Crocosphaera watsonii WH 8501; identical to SEQ ID NO: 8632

SEQ ID NO: 70284 - DNA, 1749 bp, Exiguobacterium sibiricum 255-15; identical to SEQ ID NO: 15850
  CDS (1)..(1749): transl_table=11

SEQ ID NO: 70285 - protein, 582 aa, Exiguobacterium sibiricum 255-15; identical to SEQ ID NO: 15851

SEQ ID NO: 70286 - DNA, 1446 bp, Oceanicola batsensis HTCC2597; identical to SEQ ID NO: 8639
  CDS (1)..(1446): transl_table=11

SEQ ID NO: 70287 - protein, 481 aa, Oceanicola batsensis HTCC2597; identical to SEQ ID NO: 8640

SEQ ID NO: 70288 - DNA, 1488 bp, Erythrobacter sp. NAP1; identical to SEQ ID NO: 8641
  CDS (1)..(1488): transl_table=11

SEQ ID NO: 70289 - protein, 495 aa, Erythrobacter sp. NAP1; identical to SEQ ID NO: 8642

SEQ ID NO: 70290 - DNA, 1437 bp, Pseudoalteromonas tunicata D2; identical to SEQ ID NO: 8645
  CDS (1)..(1437): transl_table=11

SEQ ID NO: 70291 - protein, 478 aa, Pseudoalteromonas tunicata D2; identical to SEQ ID NO: 8646

SEQ ID NO: 70292 - DNA, 1413 bp, Photobacterium sp. SKA34; identical to SEQ ID NO: 15858
  CDS (1)..(1413): transl_table=11

SEQ ID NO: 70293 - protein, 470 aa, Photobacterium sp. SKA34; identical to SEQ ID NO: 15859

SEQ ID NO: 70294 - DNA, 1416 bp, Pseudomonas putida GB-1; identical to SEQ ID NO: 8667
  CDS (1)..(1416): transl_table=11

SEQ ID NO: 70295 - protein, 471 aa, Pseudomonas putida GB-1; identical to SEQ ID NO: 8668

SEQ ID NO: 70296 - DNA, 1455 bp, Pseudomonas putida GB-1; identical to SEQ ID NO: 8669
  CDS (1)..(1455): transl_table=11

SEQ ID NO: 70297 - protein, 484 aa, Pseudomonas putida GB-1; identical to SEQ ID NO: 8670

SEQ ID NO: 70298 - DNA, 1761 bp, Bacillus sp. SG-1; identical to SEQ ID NO: 15880
  CDS (1)..(1761): transl_table=11

SEQ ID NO: 70299 - protein, 586 aa, Bacillus sp. SG-1; identical to SEQ ID NO: 15881

SEQ ID NO: 70300 - DNA, 1413 bp, Moritella sp. PE36; identical to SEQ ID NO: 15884
  CDS (1)..(1413): transl_table=11

SEQ ID NO: 70301 - protein, 470 aa, Moritella sp. PE36; identical to SEQ ID NO: 15885

SEQ ID NO: 70302 - DNA, 1446 bp, Magnetospirillum gryphiswaldense; identical to SEQ ID NO: 8679
  CDS (1)..(1446): transl_table=11

SEQ ID NO: 70303 - protein, 481 aa, Magnetospirillum gryphiswaldense; identical to SEQ ID NO: 8680

SEQ ID NO: 70304 - DNA, 1503 bp, Vitis vinifera; identical to SEQ ID NO: 15892
  CDS (1)..(1503)

SEQ ID NO: 70305 - protein, 500 aa, Vitis vinifera; identical to SEQ ID NO: 15893

SEQ ID NO: 70306 - DNA, 1743 bp, Vitis vinifera; identical to SEQ ID NO: 15894
  CDS (1)..(1743)
  misc_feature (200)..(200): y is t or c
  misc_feature (1338)..(1338): y is t or c

SEQ ID NO: 70307 - protein, 580 aa, Vitis vinifera; identical to SEQ ID NO: 15895
  misc_feature (67)..(67): The Xaa at location 67 stands for Met, or Thr.

SEQ ID NO: 70308 - DNA, 1866 bp, Vitis vinifera; identical to SEQ ID NO: 15896
  CDS (1)..(1866)

SEQ ID NO: 70309 - protein, 621 aa, Vitis vinifera; identical to SEQ ID NO: 15897

SEQ ID NO: 70310 - DNA, 1755 bp, Bacillus subtilis; identical to SEQ ID NO: 8681
  CDS (1)..(1755): transl_table=11

SEQ ID NO: 70311 - protein, 584 aa, Bacillus subtilis; identical to SEQ ID NO: 8682

SEQ ID NO: 70312 - DNA, 1428 bp, Zymomonas mobilis; identical to SEQ ID NO: 8683
  CDS (1)..(1428): transl_table=11

SEQ ID NO: 70313 - protein, 475 aa, Zymomonas mobilis; identical to SEQ ID NO: 8684

SEQ ID NO: 70314 - DNA, 2100 bp, Ostreococcus tauri; identical to SEQ ID NO: 8685
  CDS (1)..(2100)

SEQ ID NO: 70315 - protein, 699 aa, Ostreococcus tauri; identical to SEQ ID NO: 8686

SEQ ID NO: 70316 - DNA, 1692 bp, Crassostrea gigas; identical to SEQ ID NO: 15908
  CDS (1)..(1692)

SEQ ID NO: 70317 - protein, 563 aa, Crassostrea gigas; identical to SEQ ID NO: 15909

SEQ ID NO: 70318 - DNA, 1437 bp, Spiroplasma citri; identical to SEQ ID NO: 15910
  CDS (1)..(1437): transl_table=4

SEQ ID NO: 70319 - protein, 478 aa, Spiroplasma citri; identical to SEQ ID NO: 15911

SEQ ID NO: 70320 - DNA, 1536 bp, Capsicum annuum; identical to SEQ ID NO: 8691
  CDS (1)..(1536)

SEQ ID NO: 70321 - protein, 511 aa, Capsicum annuum; identical to SEQ ID NO: 8692

SEQ ID NO: 70322 - DNA, 1731 bp, Medicago truncatula; identical to SEQ ID NO: 15914
  CDS (1)..(1731)

SEQ ID NO: 70323 - protein, 576 aa, Medicago truncatula; identical to SEQ ID NO: 15915

SEQ ID NO: 70324 - DNA, 1590 bp, Medicago truncatula; identical to SEQ ID NO: 15916
  CDS (1)..(1590)

SEQ ID NO: 70325 - protein, 529 aa, Medicago truncatula; identical to SEQ ID NO: 15917

SEQ ID NO: 70326 - DNA, 1437 bp, Nitrosovibrio sp; identical to SEQ ID NO: 16635
  CDS (1)..(1437): transl_table=11

SEQ ID NO: 70327 - protein, 478 aa, Nitrosovibrio sp; identical to SEQ ID NO: 16636

SEQ ID NO: 70328 - DNA, 1455 bp, Nitrosospira multiformis
  CDS (1)..(1455): transl_table=11
atgattcgaagaacaaaaatcgtagcaacacttggtcccgcatcccgagatgcaaaggtgctggagcgaatgataaacgccggcgttgatgtagtacgcatcaacttttcccatgggaccagggaagagcatatcgaaggcgccgagttggcgcgctccctcgcacgtgccgctggccacgcagtaggtgtgctggcggacttgcagggacccaagattcgaatcggcaaatttgaaaataataaaattctgctgaaaacgggcgatcgattcatactcgacgccgaatgcgagcttggaaaccaggaacgggtgggcctggattacaaggaactgcccaatgatgtcgagaccggtgcaacactgatcctggatgatggacgtatcgtgctcggcgtttccgaagtcaagggaagccaggtttattgcgtggttgagcaaggtgggatactgtccaacaacaagggaatcaaccgcaaaggcggcggcctgagtgctcctgccctcaccggcaaggacgtggaagatatccgaacggccgcagcccttaaagccgactatctggcggtatcatttccccgttctggcgatgatatgcgctgggcacgcgatgtgatgcgcgaggcgggcggaaaaagcttattgatggcgaagatcgaacgatcggaagccatcctggcgctggatgacattctggaggcttccgatgcgatcatggttgcgcgcggagaccttgcggtagaggtaggcgatgcagcggtgccggcattgcaaaaacgaatgattcgcactgcccgaaccaagaacaagctggtggtaacagctacccagatgatggagtccatggtcagcagtcccatccctacccgcgcggaggtaacggatgtagcaaatgcggtattggatggcactgatggggtgatgctgtcagcggaatcggccaccggccaatatcccgttgaagcggttgcggcgatggcgagggtatgcctggaggcggaaaaggaatacctggtaagcagcgaaaaccgacggctgcagggcggcctgcccgacaatatcgaggaagcaattgcccgtgcgaccatgttcaccgcaggaggattgaagatcagggccattgcggcgcttacacaaagcggcaggaccgtgttgctgatgtcgcgcaggagttccaccgtacccatattcgcgctgagtccccaggaagatacacggcgcaagatgacgttatttcggggtgtgtaccccgtcaagttcggcggaggctcgaacgacccggagatcatcctgaatcatgccgaaaacgagttgctcagacgaggcgcggtacgcaacggcgacctaatgatcatgaccatcggtgaaccggtgggcaaggcaggcggcaccaatacgatgaaaatagtgaaggtcggcgagcacagaaaacaggaacggaaggtggaatcctga

SEQ ID NO: 70329 - protein, 484 aa, Nitrosospira multiformis
MIRRTKIVATLGPASRDAKVLERMINAGVDVVRINFSHGTREEHIEGAELARSLARAAGHAVGVLADLQGPKIRIGKFENNKILLKTGDRFILDAECELGNQERVGLDYKELPNDVETGATLILDDGRIVLGVSEVKGSQVYCVVEQGGILSNNKGINRKGGGLSAPALTGKDVEDIRTAAALKADYLAVSFPRSGDDMRWARDVMREAGGKSLLMAKIERSEAILALDDILEASDAIMVARGDLAVEVGDAAVPALQKRMIRTARTKNKLVVTATQMMESMVSSPIPTRAEVTDVANAVLDGTDGVMLSAESATGQYPVEAVAAMARVCLEAEKEYLVSSENRRLQGGLPDNIEEAIARATMFTAGGLKIRAIAALTQSGRTVLLMSRRSSTVPIFALSPQEDTRRKMTLFRGVYPVKFGGGSNDPEIILNHAENELLRRGAVRNGDLMIMTIGEPVGKAGGTNTMKIVKVGEHRKQERKVES

SEQ ID NO: 70330 - DNA, 1620 bp, Phaeodactylum tricornutum; identical to SEQ ID NO: 8699
  CDS (1)..(1620)

SEQ ID NO: 70331 - protein, 539 aa, Phaeodactylum tricornutum; identical to SEQ ID NO: 8700

SEQ ID NO: 70332 - DNA, 1632 bp, Phaeodactylum tricornutum; identical to SEQ ID NO: 8701
  CDS (1)..(1632)

SEQ ID NO: 70333 - protein, 543 aa, Phaeodactylum tricornutum; identical to SEQ ID NO: 8702

SEQ ID NO: 70334 - DNA, 1542 bp, Phaeodactylum tricornutum; identical to SEQ ID NO: 8703
  CDS (1)..(1542)

SEQ ID NO: 70335 - protein, 513 aa, Phaeodactylum tricornutum; identical to SEQ ID NO: 8704

SEQ ID NO: 70336 - DNA, 1998 bp, Phaeodactylum tricornutum; identical to SEQ ID NO: 8705
  CDS (1)..(1998)

SEQ ID NO: 70337 - protein, 665 aa, Phaeodactylum tricornutum; identical to SEQ ID NO: 8706

SEQ ID NO: 70338 - DNA, 1500 bp, Propionibacterium freudenreichii subsp; identical to SEQ ID NO: 26780
  CDS (1)..(1500): transl_table=11

SEQ ID NO: 70339 - protein, 499 aa, Propionibacterium freudenreichii subsp; identical to SEQ ID NO: 26781

SEQ ID NO: 70340 - DNA, 1533 bp, Solanum tuberosum; identical to SEQ ID NO: 8707
  CDS (1)..(1533)

SEQ ID NO: 70341 - protein, 510 aa, Solanum tuberosum; identical to SEQ ID NO: 8708

SEQ ID NO: 70342 - DNA, 1533 bp, Citrus sinensis; identical to SEQ ID NO: 8709
  CDS (1)..(1533)

SEQ ID NO: 70343 - protein, 510 aa, Citrus sinensis; identical to SEQ ID NO: 8710

SEQ ID NO: 70344 - DNA, 1740 bp, Arabidopsis thaliana; identical to SEQ ID NO: 8711
  CDS (1)..(1740)

SEQ ID NO: 70345 - protein, 579 aa, Arabidopsis thaliana; identical to SEQ ID NO: 8712

SEQ ID NO: 70346 - DNA, 1509 bp, Glycine max; identical to SEQ ID NO: 8713
  CDS (1)..(1509)

SEQ ID NO: 70347 - protein, 502 aa, Glycine max; identical to SEQ ID NO: 8714

SEQ ID NO: 70348 - DNA, 1530 bp, Zea mays; identical to SEQ ID NO: 8715
  CDS (1)..(1530)

SEQ ID NO: 70349 - protein, 509 aa, Zea mays; identical to SEQ ID NO: 8716

SEQ ID NO: 70350 - DNA, 1767 bp, Lactobacillus casei; identical to SEQ ID NO: 15934
  CDS (1)..(1767): transl_table=11

SEQ ID NO: 70351 - protein, 588 aa, Lactobacillus casei; identical to SEQ ID NO: 8718

SEQ ID NO: 70352 - DNA, 1521 bp, Saccharomyces bayanus; identical to SEQ ID NO: 8719
  CDS (1)..(1521)

SEQ ID NO: 70353 - protein, 506 aa, Saccharomyces bayanus; identical to SEQ ID NO: 8720

SEQ ID NO: 70354 - DNA, 1770 bp, Lactobacillus delbrueckii subsp; identical to SEQ ID NO: 16663
  CDS (1)..(1770): transl_table=11

SEQ ID NO: 70355 - protein, 589 aa, Lactobacillus delbrueckii subsp; identical to SEQ ID NO: 16664

SEQ ID NO: 70356 - DNA, 1434 bp, Stigmatella aurantiaca; identical to SEQ ID NO: 15938
  CDS (1)..(1434): transl_table=11

SEQ ID NO: 70357 - protein, 477 aa, Stigmatella aurantiaca; identical to SEQ ID NO: 15939

SEQ ID NO: 70358 - DNA, 1584 bp, Arabidopsis thaliana; identical to SEQ ID NO: 8721
  CDS (1)..(1584)

SEQ ID NO: 70359 - protein, 527 aa, Arabidopsis thaliana; identical to SEQ ID NO: 8722

SEQ ID NO: 70360 - DNA, 1533 bp, Glycine max; identical to SEQ ID NO: 8723
  CDS (1)..(1533)

SEQ ID NO: 70361 - protein, 510 aa, Glycine max; identical to SEQ ID NO: 8724

SEQ ID NO: 70362 - DNA, 1536 bp, Glycine max; identical to SEQ ID NO: 8725
  CDS (1)..(1536)

SEQ ID NO: 70363 - protein, 511 aa, Glycine max; identical to SEQ ID NO: 8726

SEQ ID NO: 70364 - DNA, 1791 bp, Arabidopsis thaliana; identical to SEQ ID NO: 8727
  CDS (1)..(1791)

SEQ ID NO: 70365 - protein, 596 aa, Arabidopsis thaliana; identical to SEQ ID NO: 8728

SEQ ID NO: 70366 - DNA, 1584 bp, Arabidopsis thaliana; identical to SEQ ID NO: 8729
  CDS (1)..(1584)

SEQ ID NO: 70367 - protein, 527 aa, Arabidopsis thaliana; identical to SEQ ID NO: 8730

SEQ ID NO: 70368 - DNA, 1665 bp, Drosophila melanogaster; identical to SEQ ID NO: 15948
  CDS (1)..(1665)

SEQ ID NO: 70369 - protein, 554 aa, Drosophila melanogaster; identical to SEQ ID NO: 15949

SEQ ID NO: 70370 - DNA, 1740 bp, Arabidopsis thaliana; identical to SEQ ID NO: 8731
  CDS (1)..(1740)

SEQ ID NO: 70371 - protein, 579 aa, Arabidopsis thaliana; identical to SEQ ID NO: 8732

SEQ ID NO: 70372 - DNA, 1581 bp, Aspergillus oryzae; identical to SEQ ID NO: 8733
  CDS (1)..(1581)

SEQ ID NO: 70373 - protein, 526 aa, Aspergillus oryzae; identical to SEQ ID NO: 8734

SEQ ID NO: 70374 - DNA, 1413 bp, Selenomonas ruminantium; identical to SEQ ID NO: 8737
  CDS (1)..(1413): transl_table=11

SEQ ID NO: 70375 - protein, 470 aa, Selenomonas ruminantium; identical to SEQ ID NO: 8738

SEQ ID NO: 70376 - DNA, 1545 bp, Arabidopsis thaliana; identical to SEQ ID NO: 8739
  CDS (1)..(1545)

SEQ ID NO: 70377 - protein, 514 aa, Arabidopsis thaliana; identical to SEQ ID NO: 8740

SEQ ID NO: 70378 - DNA, 1704 bp, Arabidopsis thaliana; identical to SEQ ID NO: 8741
  CDS (1)..(1704)

SEQ ID NO: 70379 - protein, 567 aa, Arabidopsis thaliana; identical to SEQ ID NO: 8742

SEQ ID NO: 70380 - DNA, 1533 bp, Lilium longiflorum; identical to SEQ ID NO: 8743
  CDS (1)..(1533)

SEQ ID NO: 70381 - protein, 510 aa, Lilium longiflorum; identical to SEQ ID NO: 8744

SEQ ID NO: 70382 - DNA, 1413 bp, Vibrio marinus; identical to SEQ ID NO: 8745
  CDS (1)..(1413): transl_table=11

SEQ ID NO: 70383 - protein, 470 aa, Vibrio marinus; identical to SEQ ID NO: 8746

SEQ ID NO: 70384 - DNA, 1752 bp, Ricinus communis; identical to SEQ ID NO: 8747
  CDS (1)..(1752)

SEQ ID NO: 70385 - protein, 583 aa, Ricinus communis; identical to SEQ ID NO: 8748

SEQ ID NO: 70386 - DNA, 1782 bp, Nicotiana tabacum; identical to SEQ ID NO: 8749
  CDS (1)..(1782)

SEQ ID NO: 70387 - protein, 593 aa, Nicotiana tabacum; identical to SEQ ID NO: 8750

SEQ ID NO: 70388 - DNA, 1494 bp, Arabidopsis thaliana; identical to SEQ ID NO: 8751
  CDS (1)..(1494)

SEQ ID NO: 70389 - protein, 497 aa, Arabidopsis thaliana; identical to SEQ ID NO: 8752

SEQ ID NO: 70390 - DNA, 1533 bp, Solanum tuberosum; identical to SEQ ID NO: 8753
  CDS (1)..(1533)

SEQ ID NO: 70391 - protein, 510 aa, Solanum tuberosum; identical to SEQ ID NO: 8754

SEQ ID NO: 70392 - DNA, 1536 bp, Glycine max; identical to SEQ ID NO: 8755
  CDS (1)..(1536)

SEQ ID NO: 70393 - protein, 511 aa, Glycine max; identical to SEQ ID NO: 8756

SEQ ID NO: 70394 - DNA, 1527 bp, Nicotiana tabacum; identical to SEQ ID NO: 15976
  CDS (1)..(1527)

SEQ ID NO: 70395 - protein, 508 aa, Nicotiana tabacum; identical to SEQ ID NO: 8758

SEQ ID NO: 70396 - DNA, 1689 bp, Nicotiana tabacum; identical to SEQ ID NO: 8759
  CDS (1)..(1689)

SEQ ID NO: 70397 - protein, 562 aa, Nicotiana tabacum; identical to SEQ ID NO: 8760

SEQ ID NO: 70398 - DNA, 1506 bp, Candida glabrata; identical to SEQ ID NO: 8763
  CDS (1)..(1506)

SEQ ID NO: 70399 - protein, 501 aa, Candida glabrata; identical to SEQ ID NO: 8764

SEQ ID NO: 70400 - DNA, 1413 bp, Escherichia coli O157; identical to SEQ ID NO: 8765
  CDS (1)..(1413): transl_table=11

SEQ ID NO: 70401 - protein, 470 aa, Escherichia coli O157; identical to SEQ ID NO: 8766

SEQ ID NO: 70402 - DNA, 1413 bp, Salmonella typhi; identical to SEQ ID NO: 15984
  CDS (1)..(1413): transl_table=11

SEQ ID NO: 70403 - protein, 470 aa, Salmonella typhi; identical to SEQ ID NO: 15985

SEQ ID NO: 70404 - DNA, 1413 bp, Salmonella typhimurium; identical to SEQ ID NO: 8767
  CDS (1)..(1413): transl_table=11

SEQ ID NO: 70405 - protein, 470 aa, Salmonella typhimurium; identical to SEQ ID NO: 8768

SEQ ID NO: 70406 - DNA, 1503 bp, Saccharomyces cerevisiae; identical to SEQ ID NO: 8769
  CDS (1)..(1503)

SEQ ID NO: 70407 - protein, 500 aa, Saccharomyces cerevisiae; identical to SEQ ID NO: 8770

SEQ ID NO: 70408 - DNA, 1527 bp, Candida glabrata; identical to SEQ ID NO: 8771
  CDS (1)..(1527)

SEQ ID NO: 70409 - protein, 508 aa, Candida glabrata; identical to SEQ ID NO: 8772

SEQ ID NO: 70410 - DNA, 1443 bp, Escherichia coli; identical to SEQ ID NO: 8363
  CDS (1)..(1443): transl_table=11

SEQ ID NO: 70411 - protein, 480 aa, Escherichia coli; identical to SEQ ID NO: 8364

SEQ ID NO: 70412 - DNA, 1443 bp, Salmonella typhimurium; identical to SEQ ID NO: 8773
  CDS (1)..(1443): transl_table=11

SEQ ID NO: 70413 - protein, 480 aa, Salmonella typhimurium; identical to SEQ ID NO: 8774

SEQ ID NO: 70414 - DNA, 1776 bp, Synechocystis sp
  CDS (1)..(1776): transl_table=11
atgcaaacgtctccccttccccgtcgtaccaaaatcgtcgctaccattggccccgcgacccaaagcaaggaagtgctgagacaactgatccaagccggtgctaccactttccgcctcaatttttcccacggagaccacgcttaccaccaacaaagtatccgtttgattcgccagattgcctttgaactgaaccaaccagtgggcattctccaggatttacaggggccaaagattcgggtgggcaaatttctcaatgatgccggctctgtgcaactcaaaaacggtgatccctataccctcaccagtcgcccggtggaatgtacggaaaccattagttccattagctacgaatatttagccgacgaagtaccttctggggcaagaattttgctcgacgacggcaaactggaaatgttggtggaggaagtggacactgttgcccgggatctccactgtcgggtgattgtggggggaaccctttccagcaataaaggggttaattttcccggggtctgcctttccgttaaggccatgaccgataaagataaggaagatttgatgttcgggctggaccaaggggtggactgggtggccctgagttttgttcgtaatccccaggatattgatgagattaaggggttaattgcggcggcagggaaatccgtgccggtaatcgccaaaattgagaagcacgaagcgattaaggatatgcaggcggtgctggaaaaatgtgacggtgtcatggtggcccggggggacttgggggtagaactacccgcagaagatgtacctattttgcaaaagaaactcattgccactgctaaccggttgggcattcctgtcattactgctacccaaatgttggacagtatggtcaacagcccccgacctactagggctgaagtgtccgacgtggccaatgccatcctcgatggtaccgatgcggtgatgctctccaacgaaacggcgatcggtaaatttcccgtggaagcagtggctattatggccaaaattgcggagcgcattgaacaggaagatatcaatccttcccaagcggaagccagtcgcacttctattcccaatgctatttccagcgccgttagccagattgcggaaaccctcaacgcggcggctattatgtctttgactaagaccggatccaccgcccgccatgtgtcaaagttccgccccaaaacccccattctggccgttacgccccatgtggatgtgtcccgtcagttgcagttggtgtggggagttaagcccctgttggtattggatttaccttccaccagccaaacgttccaagccgccattaacgtggcccaggaaaaccattttctccgggatggagatttggtggtgatgaccgccgggacattgcagggagttgccggttcgacggatttaatcaaagtggaagtggtcaaggccattcttggtcggggtgtaggtattggccaaggagctgtaagtggccgggccagggttgccagtcgtccccaggcgatcgcccaatttacccagggagaaattttagtagttccctctaccaacgctgattgtgtggacatgatgcgacgggcggcgggcattatcaccgaagaagaaagcctgactagccatgcggccattattggtttgcggctgggggtgccggtcattgtgggttttaaaggcgctacccaaaagattcgagatggagccattgtcaccatcgatgcccaaaaaggactgatttattccggtgcattacccccggtgtccaaaggatag

SEQ ID NO: 70415 - protein, 591 aa, Synechocystis sp
MQTSPLPRRTKIVATIGPATQSKEVLRQLIQAGATTFRLNFSHGDHAYHQQSIRLIRQIAFELNQPVGILQDLQGPKIRVGKFLNDAGSVQLKNGDPYTLTSRPVECTETISSISYEYLADEVPSGARILLDDGKLEMLVEEVDTVARDLHCRVIVGGTLSSNKGVNFPGVCLSVKAMTDKDKEDLMFGLDQGVDWVALSFVRNPQDIDEIKGLIAAAGKSVPVIAKIEKHEAIKDMQAVLEKCDGVMVARGDLGVELPAEDVPILQKKLIATANRLGIPVITATQMLDSMVNSPRPTRAEVSDVANAILDGTDAVMLSNETAIGKFPVEAVAIMAKIAERIEQEDINPSQAEASRTSIPNAISSAVSQIAETLNAAAIMSLTKTGSTARHVSKFRPKTPILAVTPHVDVSRQLQLVWGVKPLLVLDLPSTSQTFQAAINVAQENHFLRDGDLVVMTAGTLQGVAGSTDLIKVEVVKAILGRGVGIGQGAVSGRARVASRPQAIAQFTQGEILVVPSTNADCVDMMRRAAGIITEEESLTSHAAIIGLRLGVPVIVGFKGATQKIRDGAIVTIDAQKGLIYSGALPPVSKG

SEQ ID NO: 70416 - DNA, 1521 bp, Saccharomyces cerevisiae; identical to SEQ ID NO: 8775
  CDS (1)..(1521)

SEQ ID NO: 70417 - protein, 506 aa, Saccharomyces cerevisiae; identical to SEQ ID NO: 8776

SEQ ID NO: 70418 - DNA, 1599 bp, Agaricus bisporus; identical to SEQ ID NO: 16002
  CDS (1)..(1599)

SEQ ID NO: 70419 - protein, 532 aa, Agaricus bisporus; identical to SEQ ID NO: 16003

SEQ ID NO: 70420 - DNA, 1506 bp, Ashbya gossypii; identical to SEQ ID NO: 8777
  CDS (1)..(1506)

SEQ ID NO: 70421 - protein, 501 aa, Ashbya gossypii; identical to SEQ ID NO: 8778

SEQ ID NO: 70422 - DNA, 1581 bp, Aspergillus niger; identical to SEQ ID NO: 8779
  CDS (1)..(1581)

SEQ ID NO: 70423 - protein, 526 aa, Aspergillus niger; identical to SEQ ID NO: 8780

SEQ ID NO: 70424 - DNA, 1758 bp, Bacillus licheniformis; identical to SEQ ID NO: 8781
  CDS (1)..(1758): transl_table=11

SEQ ID NO: 70425 - protein, 585 aa, Bacillus licheniformis; identical to SEQ ID NO: 8782

SEQ ID NO: 70426 - DNA, 1761 bp, Bacillus psychrophilus; identical to SEQ ID NO: 16010
  CDS (1)..(1761): transl_table=11

SEQ ID NO: 70427 - protein, 586 aa, Bacillus psychrophilus; identical to SEQ ID NO: 8784

SEQ ID NO: 70428 - DNA, 1764 bp, Bacillus stearothermophilus; identical to SEQ ID NO: 8785
  CDS (1)..(1764): transl_table=11

SEQ ID NO: 70429 - protein, 587 aa, Bacillus stearothermophilus; identical to SEQ ID NO: 8786

SEQ ID NO: 70430 - DNA, 1758 bp, Bacillus subtilis; identical to SEQ ID NO: 8787
  CDS (1)..(1758): transl_table=11

SEQ ID NO: 70431 - protein, 585 aa, Bacillus subtilis; identical to SEQ ID NO: 8788

SEQ ID NO: 70432 - DNA, 1434 bp, Borrelia burgdorferi; identical to SEQ ID NO: 16741
  CDS (1)..(1434): transl_table=11

SEQ ID NO: 70433 - protein, 477 aa, Borrelia burgdorferi; identical to SEQ ID NO: 16742

SEQ ID NO: 70434 - DNA, 1422 bp, Clostridium acetobutylicum; identical to SEQ ID NO: 8791
  CDS (1)..(1422): transl_table=11

SEQ ID NO: 70435 - protein, 473 aa, Clostridium acetobutylicum; identical to SEQ ID NO: 8792

SEQ ID NO: 70436 - DNA, 1425 bp, Clostridium perfringens
  CDS (1)..(1425): transl_table=11
atgcaaaaaacaaaaatgatatttacaattggtccttcaagtgattcagaagaaattttaagagagttcataagaattggtatgaatgcagctagattaaacttctcacatggagaccatgcaagtcataaagaaaaaatagaacttattaagagacttagaaaagaagaaaaatcagctacagctatcttattagacattaagggtcctaaaataagaacatataattttaaaaatggcgaagctgaattaaaaaatggtgatgaattcacattctcttgcggagatgaaatattaggtgataacactaaatgttcaatctcttataaagaactatatgaagacataaaacctggtggatcaatacttgttgatgatggacttttagaatttaaagtaaaggaagtccgtggaactgatataatatgtgaagttattgaaggaggtactataaaagaccataaaggtgtaaatgtacctaatgtaccaatcaaactccctgcagtaactgaaaaggatagatctgacttaatatttggttgcgagatggaagtagactttgtagcagcttctttcataagaaaaccagaggatgtacttgaagttagagaaattctagactctcatggtggaaaagatataaaaataatatcaaaaatagaaagccaagaaggtgtagataacataaaagaaataattaaagttactgatggtgtaatggttgctagaggtgatatgggagtagaaattcctatagaaaatgtacctataattcaaaaaaatataattaagaaatgtaatcaagcagggaaaatagttataacggcaactcaaatgttagattctatgataagaaatccaagacctactagagctgaagcttctgacgtatgtaatgccatatttgatggtacagatgccataatgcttagtggagaaagtgcttctggtagcttccctatagaggcagcaatgacaatgtctagaatagcaaaaaaagcagaagctaacttagactataattatcttttaagaagattaaaagatccaaatccaaatcccgatgcctttgcagatgccataagttattcagcatcaaaaacagctagcaaattccctacaaaagctatagtagcagccactcagactggttcaactgctaagatattatcaaaatataaacctagctgtccaataatagctattactccatatgaaaaagttagaagaagcttagctttaaactttggaataatttctaagaaatgtgcttattttaatagtacagatgaaattatagaggaagctagaaaagtagctaaagaatttgaaatagctgaaactggagataatataatggtagctgctggattcccaacatcaataactggtggaacaaacatgctaaaaattgaaaaaatataa

SEQ ID NO: 70437 - protein, 474 aa, Clostridium perfringens
MQKTKMIFTIGPSSDSEEILREFIRIGMNAARLNFSHGDHASHKEKIELIKRLRKEEKSATAILLDIKGPKIRTYNFKNGEAELKNGDEFTFSCGDEILGDNTKCSISYKELYEDIKPGGSILVDDGLLEFKVKEVRGTDIICEVIEGGTIKDHKGVNVPNVPIKLPAVTEKDRSDLIFGCEMEVDFVAASFIRKPEDVLEVREILDSHGGKDIKIISKIESQEGVDNIKEIIKVTDGVMVARGDMGVEIPIENVPIIQKNIIKKCNQAGKIVITATQMLDSMIRNPRPTRAEASDVCNAIFDGTDAIMLSGESASGSFPIEAAMTMSRIAKKAEANLDYNYLLRRLKDPNPNPDAFADAISYSASKTASKFPTKAIVAATQTGSTAKILSKYKPSCPIIAITPYEKVRRSLALNFGIISKKCAYFNSTDEIIEEARKVAKEFEIAETGDNIMVAAGFPTSITGGTNMLKIEKI

SEQ ID NO: 70438 - DNA, 1428 bp, Corynebacterium glutamicum; identical to SEQ ID NO: 16020
  CDS (1)..(1428): transl_table=11

SEQ ID NO: 70439 - protein, 475 aa, Corynebacterium glutamicum; identical to SEQ ID NO: 16021

SEQ ID NO: 70440 - DNA, 1515 bp, Debaryomyces hansenii; identical to SEQ ID NO: 8793
  CDS (1)..(1515)

SEQ ID NO: 70441 - protein, 504 aa, Debaryomyces hansenii; identical to SEQ ID NO: 8794

SEQ ID NO: 70442 - DNA, 1602 bp, Drosophila melanogaster; identical to SEQ ID NO: 16024
  CDS (1)..(1602)

SEQ ID NO: 70443 - protein, 533 aa, Drosophila melanogaster; identical to SEQ ID NO: 16025

SEQ ID NO: 70444 - DNA, 1581 bp, Emericella nidulans; identical to SEQ ID NO: 8795
  CDS (1)..(1581)

SEQ ID NO: 70445 - protein, 526 aa, Emericella nidulans; identical to SEQ ID NO: 8796

SEQ ID NO: 70446 - DNA, 1506 bp, Kluyveromyces lactis; identical to SEQ ID NO: 8797
  CDS (1)..(1506)

SEQ ID NO: 70447 - protein, 501 aa, Kluyveromyces lactis; identical to SEQ ID NO: 8798

SEQ ID NO: 70448 - DNA, 1770 bp, Lactobacillus delbrueckii subsp; identical to SEQ ID NO: 16030
  CDS (1)..(1770): transl_table=11

SEQ ID NO: 70449 - protein, 589 aa, Lactobacillus delbrueckii subsp; identical to SEQ ID NO: 16031

SEQ ID NO: 70450 - DNA, 1452 bp, Methylobacterium extorquens; identical to SEQ ID NO: 16032
  CDS (1)..(1452): transl_table=11

SEQ ID NO: 70451 - protein, 483 aa, Methylobacterium extorquens; identical to SEQ ID NO: 16033

SEQ ID NO: 70452 - DNA, 1506 bp, Saccharomyces castellii; identical to SEQ ID NO: 8801
  CDS (1)..(1506)

SEQ ID NO: 70453 - protein, 501 aa, Saccharomyces castellii; identical to SEQ ID NO: 8802

SEQ ID NO: 70454 - DNA, 1506 bp, Saccharomyces kluyveri; identical to SEQ ID NO: 8803
  CDS (1)..(1506)

SEQ ID NO: 70455 - protein, 501 aa, Saccharomyces kluyveri; identical to SEQ ID NO: 8804

SEQ ID NO: 70456 - DNA, 1530 bp, Schizosaccharomyces pombe; identical to SEQ ID NO: 8805
  CDS (1)..(1530)

SEQ ID NO: 70457 - protein, 509 aa, Schizosaccharomyces pombe; identical to SEQ ID NO: 8806

SEQ ID NO: 70458 - DNA, 1758 bp, Staphylococcus aureus; identical to SEQ ID NO: 8517
  CDS (1)..(1758): transl_table=11

SEQ ID NO: 70459 - protein, 585 aa, Staphylococcus aureus; identical to SEQ ID NO: 8518

SEQ ID NO: 70460 - DNA, 1758 bp, Staphylococcus epidermidis; identical to SEQ ID NO: 16042
  CDS (1)..(1758): transl_table=11

SEQ ID NO: 70461 - protein, 585 aa, Staphylococcus epidermidis; identical to SEQ ID NO: 16043

SEQ ID NO: 70462 - DNA, 1401 bp, Thermotoga maritima; identical to SEQ ID NO: 8407
  CDS (1)..(1401): transl_table=11

SEQ ID NO: 70463 - protein, 466 aa, Thermotoga maritima; identical to SEQ ID NO: 8408

SEQ ID NO: 70464 - DNA, 1617 bp, Trichoderma reesei; identical to SEQ ID NO: 8807
  CDS (1)..(1617)

SEQ ID NO: 70465 - protein, 538 aa, Trichoderma reesei; identical to SEQ ID NO: 8808

SEQ ID NO: 70466 - DNA, 1533 bp, Oryza sativa; identical to SEQ ID NO: 8809
  CDS (1)..(1533)

SEQ ID NO: 70467 - protein, 510 aa, Oryza sativa; identical to SEQ ID NO: 8810

SEQ ID NO: 70468 - DNA, 1752 bp, Oryza sativa; identical to SEQ ID NO: 8811
  CDS (1)..(1752)

SEQ ID NO: 70469 - protein, 583 aa, Oryza sativa; identical to SEQ ID NO: 8812

SEQ ID NO: 70470 - DNA, 1647 bp, Oryza sativa; identical to SEQ ID NO: 8379
  CDS (1)..(1647)

SEQ ID NO: 70471 - protein, 548 aa, Oryza sativa; identical to SEQ ID NO: 8380

SEQ ID NO: 70472 - DNA, 1536 bp, Oryza sativa; identical to SEQ ID NO: 8381
  CDS (1)..(1536)

SEQ ID NO: 70473 - protein, 511 aa, Oryza sativa; identical to SEQ ID NO: 8382

SEQ ID NO: 70474 - DNA, 1737 bp, Oryza sativa; identical to SEQ ID NO: 16058
  CDS (1)..(1737)

SEQ ID NO: 70475 - protein, 578 aa, Oryza sativa; identical to SEQ ID NO: 16059

SEQ ID NO: 70476 - DNA, 1713 bp, Oryza sativa; identical to SEQ ID NO: 8383
  CDS (1)..(1713)

SEQ ID NO: 70477 - protein, 570 aa, Oryza sativa; identical to SEQ ID NO: 8384

SEQ ID NO: 70478 - DNA, 1584 bp, Oryza sativa; identical to SEQ ID NO: 8385
  CDS (1)..(1584)

SEQ ID NO: 70479 - protein, 527 aa, Oryza sativa; identical to SEQ ID NO: 8386

SEQ ID NO: 70480 - DNA, 1584 bp, Oryza sativa; identical to SEQ ID NO: 8813
  CDS (1)..(1584)

SEQ ID NO: 70481 - protein, 527 aa, Oryza sativa; identical to SEQ ID NO: 8814

SEQ ID NO: 70482 - DNA, 1584 bp, Oryza sativa; identical to SEQ ID NO: 8387
  CDS (1)..(1584)

SEQ ID NO: 70483 - protein, 527 aa, Oryza sativa; identical to SEQ ID NO: 8388

SEQ ID NO: 70484 - DNA, 1584 bp, Oryza sativa; identical to SEQ ID NO: 16068
  CDS (1)..(1584)

SEQ ID NO: 70485 - protein, 527 aa, Oryza sativa; identical to SEQ ID NO: 16069

SEQ ID NO: 70486 - DNA, 1716 bp, Brassica napus; identical to SEQ ID NO: 8817
  CDS (1)..(1716)

SEQ ID NO: 70487 - protein, 571 aa, Brassica napus; identical to SEQ ID NO: 8818

SEQ ID NO: 70488 - DNA, 1584 bp, Brassica napus; identical to SEQ ID NO: 8819
  CDS (1)..(1584)

SEQ ID NO: 70489 - protein, 527 aa, Brassica napus; identical to SEQ ID NO: 8820

SEQ ID NO: 70490 - DNA, 1584 bp, Brassica napus; identical to SEQ ID NO: 8823
  CDS (1)..(1584)

SEQ ID NO: 70491 - protein, 527 aa, Brassica napus; identical to SEQ ID NO: 8824

SEQ ID NO: 70492 - DNA, 1581 bp, Glycine max; identical to SEQ ID NO: 16795
  CDS (1)..(1581)

SEQ ID NO: 70493 - protein, 526 aa, Glycine max; identical to SEQ ID NO: 15541

SEQ ID NO: 70494 - DNA, 1509 bp, Glycine max; identical to SEQ ID NO: 8879
  CDS (1)..(1509)

SEQ ID NO: 70495 - protein, 502 aa, Glycine max; identical to SEQ ID NO: 8880

SEQ ID NO: 70496 - DNA, 1581 bp, Glycine max; identical to SEQ ID NO: 8825
  CDS (1)..(1581)

SEQ ID NO: 70497 - protein, 526 aa, Glycine max; identical to SEQ ID NO: 8826

SEQ ID NO: 70498 - DNA, 1584 bp, Triticum aestivum; identical to SEQ ID NO: 8829
  CDS (1)..(1584)

SEQ ID NO: 70499 - protein, 527 aa, Triticum aestivum; identical to SEQ ID NO: 8830

SEQ ID NO: 70500 - DNA, 1584 bp, Brassica napus; identical to SEQ ID NO: 8835
  CDS (1)..(1584)

SEQ ID NO: 70501 - protein, 527 aa, Brassica napus; identical to SEQ ID NO: 8836

SEQ ID NO: 70502 - DNA, 1743 bp, Brassica napus; identical to SEQ ID NO: 8837
  CDS (1)..(1743)

SEQ ID NO: 70503 - protein, 580 aa, Brassica napus; identical to SEQ ID NO: 8838

SEQ ID NO: 70504 - DNA, 1743 bp, Brassica napus; identical to SEQ ID NO: 8839
  CDS (1)..(1743)

SEQ ID NO: 70505 - protein, 580 aa, Brassica napus; identical to SEQ ID NO: 8840

SEQ ID NO: 70506 - DNA, 1764 bp, Brassica napus; identical to SEQ ID NO: 8841
  CDS (1)..(1764)

SEQ ID NO: 70507 - protein, 587 aa, Brassica napus; identical to SEQ ID NO: 8842

SEQ ID NO: 70508 - DNA, 1533 bp, Brassica napus; identical to SEQ ID NO: 8843
  CDS (1)..(1533)

SEQ ID NO: 70509 - protein, 510 aa, Brassica napus; identical to SEQ ID NO: 8844

SEQ ID NO: 70510 - DNA, 1497 bp, Brassica napus; identical to SEQ ID NO: 8845
  CDS (1)..(1497)

SEQ ID NO: 70511 - protein, 498 aa, Brassica napus; identical to SEQ ID NO: 8846

SEQ ID NO: 70512 - DNA, 1584 bp, Brassica napus; identical to SEQ ID NO: 8847
  CDS (1)..(1584)

SEQ ID NO: 70513 - protein, 527 aa, Brassica napus; identical to SEQ ID NO: 8848

SEQ ID NO: 70514 - DNA, 1533 bp, Brassica napus; identical to SEQ ID NO: 8849
  CDS (1)..(1533)

SEQ ID NO: 70515 - protein, 510 aa, Brassica napus; identical to SEQ ID NO: 8850

SEQ ID NO: 70516 - DNA, 1584 bp, Brassica napus; identical to SEQ ID NO: 21831
  CDS (1)..(1584)

SEQ ID NO: 70517 - protein, 527 aa, Brassica napus; identical to SEQ ID NO: 8822

SEQ ID NO: 70518 - DNA, 1584 bp, Brassica napus; identical to SEQ ID NO: 8851
  CDS (1)..(1584)

SEQ ID NO: 70519 - protein, 527 aa, Brassica napus; identical to SEQ ID NO: 8852

SEQ ID NO: 70520 - DNA, 1497 bp, Brassica napus; identical to SEQ ID NO: 8855
  CDS (1)..(1497)

SEQ ID NO: 70521 - protein, 498 aa, Brassica napus; identical to SEQ ID NO: 8856

SEQ ID NO: 70522 - DNA, 1584 bp, Zea mays; identical to SEQ ID NO: 8857
  CDS (1)..(1584)

SEQ ID NO: 70523 - protein, 527 aa, Zea mays; identical to SEQ ID NO: 8858

SEQ ID NO: 70524 - DNA, 1728 bp, Glycine max; identical to SEQ ID NO: 8859
  CDS (1)..(1728)

SEQ ID NO: 70525 - protein, 575 aa, Glycine max; identical to SEQ ID NO: 8860

SEQ ID NO: 70526 - DNA, 1584 bp, Glycine max; identical to SEQ ID NO: 8861
  CDS (1)..(1584)

SEQ ID NO: 70527 - protein, 527 aa, Glycine max; identical to SEQ ID NO: 8862

SEQ ID NO: 70528 - DNA, 1584 bp, Glycine max; identical to SEQ ID NO: 8863
  CDS (1)..(1584)

SEQ ID NO: 70529 - protein, 527 aa, Glycine max; identical to SEQ ID NO: 8864

SEQ ID NO: 70530 - DNA, 1638 bp, Glycine max; identical to SEQ ID NO: 8865
  CDS (1)..(1638)

SEQ ID NO: 70531 - protein, 545 aa, Glycine max; identical to SEQ ID NO: 8866

SEQ ID NO: 70532 - DNA, 1638 bp, Glycine max; identical to SEQ ID NO: 8867
  CDS (1)..(1638)

SEQ ID NO: 70533 - protein, 545 aa, Glycine max; identical to SEQ ID NO: 8868

SEQ ID NO: 70534 - DNA, 1728 bp, Glycine max; identical to SEQ ID NO: 8869
  CDS (1)..(1728)

SEQ ID NO: 70535 - protein, 575 aa, Glycine max; identical to SEQ ID NO: 8870

SEQ ID NO: 70536 - DNA, 1749 bp, Glycine max; identical to SEQ ID NO: 8871
  CDS (1)..(1749)

SEQ ID NO: 70537 - protein, 582 aa, Glycine max; identical to SEQ ID NO: 8872

SEQ ID NO: 70538 - DNA, 1584 bp, Glycine max; identical to SEQ ID NO: 8873
  CDS (1)..(1584)

SEQ ID NO: 70539 - protein, 527 aa, Glycine max; identical to SEQ ID NO: 8874

SEQ ID NO: 70540 - DNA, 1749 bp, Glycine max; identical to SEQ ID NO: 8875
  CDS (1)..(1749)

SEQ ID NO: 70541 - protein, 582 aa, Glycine max; identical to SEQ ID NO: 8876

SEQ ID NO: 70542 - DNA, 1728 bp, Glycine max; identical to SEQ ID NO: 8877
  CDS (1)..(1728)

SEQ ID NO: 70543 - protein, 575 aa, Glycine max; identical to SEQ ID NO: 8878

SEQ ID NO: 70544 - DNA, 1749 bp, Glycine max; identical to SEQ ID NO: 8881
  CDS (1)..(1749)

SEQ ID NO: 70545 - protein, 582 aa, Glycine max; identical to SEQ ID NO: 8882

SEQ ID NO: 70546 - DNA, 1542 bp, Hordeum vulgare; identical to SEQ ID NO: 8883
  CDS (1)..(1542)

SEQ ID NO: 70547 - protein, 513 aa, Hordeum vulgare; identical to SEQ ID NO: 8884

SEQ ID NO: 70548 - DNA, 1584 bp, Oryza sativa; identical to SEQ ID NO: 8885
  CDS (1)..(1584)

SEQ ID NO: 70549 - protein, 527 aa, Oryza sativa; identical to SEQ ID NO: 8886

SEQ ID NO: 70550 - DNA, 1803 bp, Zea mays; identical to SEQ ID NO: 8887
  CDS (1)..(1803)

SEQ ID NO: 70551 - protein, 600 aa, Zea mays; identical to SEQ ID NO: 8888

SEQ ID NO: 70552 - DNA, 1698 bp, Triticum aestivum; identical to SEQ ID NO: 8889
  CDS (1)..(1698)

SEQ ID NO: 70553 - protein, 565 aa, Triticum aestivum; identical to SEQ ID NO: 8890

SEQ ID NO: 70554 - DNA, 1584 bp, Zea mays; identical to SEQ ID NO: 8891
  CDS (1)..(1584)

SEQ ID NO: 70555 - protein, 527 aa, Zea mays; identical to SEQ ID NO: 8892

SEQ ID NO: 70556 - DNA, 1728 bp, Zea mays; identical to SEQ ID NO: 8895
  CDS (1)..(1728)

SEQ ID NO: 70557 - protein, 575 aa, Zea mays; identical to SEQ ID NO: 8896

SEQ ID NO: 70558 - DNA, 1707 bp, Zea mays; identical to SEQ ID NO: 8897
  CDS (1)..(1707)

SEQ ID NO: 70559 - protein, 568 aa, Zea mays; identical to SEQ ID NO: 8898

SEQ ID NO: 70560 - DNA, 1629 bp, Zea mays; identical to SEQ ID NO: 8899
  CDS (1)..(1629)

SEQ ID NO: 70561 - protein, 542 aa, Zea mays; identical to SEQ ID NO: 8900

SEQ ID NO: 70562 - DNA, 1548 bp, Zea mays; identical to SEQ ID NO: 8901
  CDS (1)..(1548)

SEQ ID NO: 70563 - protein, 515 aa, Zea mays; identical to SEQ ID NO: 8902

SEQ ID NO: 70564 - DNA, 1542 bp, Zea mays; identical to SEQ ID NO: 8905
  CDS (1)..(1542)

SEQ ID NO: 70565 - protein, 513 aa, Zea mays; identical to SEQ ID NO: 8906

SEQ ID NO: 70566 - DNA, 1530 bp, Zea mays; identical to SEQ ID NO: 8903
  CDS (1)..(1530)

SEQ ID NO: 70567 - protein, 509 aa, Zea mays; identical to SEQ ID NO: 8904

SEQ ID NO: 70568 - DNA, 1707 bp, Zea mays; identical to SEQ ID NO: 8831
  CDS (1)..(1707)

SEQ ID NO: 70569 - protein, 568 aa, Zea mays; identical to SEQ ID NO: 8832

SEQ ID NO: 70570 - DNA, 1584 bp, Zea mays; identical to SEQ ID NO: 8907
  CDS (1)..(1584)

SEQ ID NO: 70571 - protein, 527 aa, Zea mays; identical to SEQ ID NO: 8908

SEQ ID NO: 70572 - DNA, 1554 bp, Zea mays; identical to SEQ ID NO: 8909
  CDS (1)..(1554)

SEQ ID NO: 70573 - protein, 517 aa, Zea mays; identical to SEQ ID NO: 8910

SEQ ID NO: 70574 - DNA, 1707 bp, Zea mays; identical to SEQ ID NO: 8911
  CDS (1)..(1707)

SEQ ID NO: 70575 - protein, 568 aa, Zea mays; identical to SEQ ID NO: 8912

SEQ ID NO: 70576 - DNA, 1728 bp, Zea mays; identical to SEQ ID NO: 8913
  CDS (1)..(1728)

SEQ ID NO: 70577 - protein, 575 aa, Zea mays; identical to SEQ ID NO: 8914

SEQ ID NO: 70578 - DNA, 22 bp, Artificial sequence
  primer
atgtcgaacatagacatagaag

SEQ ID NO: 70579 - DNA, 22 bp, Artificial sequence
  primer
tcacttcaccacacagatcttg

SEQ ID NO: 70580 - protein, 479 aa, Artificial sequence
  consensus sequence
  Variant (4)..(5): Xaa in position 4 to 5 is any amino acid
  Variant (7)..(7): Xaa in position 7 is any amino acid
  Variant (10)..(21): Xaa in position 10 to 21 is any amino acid
  Variant (22)..(23): Xaa in position 22 to 23 is any or no amino acid
  Variant (25)..(28): Xaa in position 25 to 28 is any amino acid
  Variant (29)..(29): Xaa in position 29 is any or no amino acid
  Variant (31)..(31): Xaa in position 31 is any amino acid
  Variant (33)..(33): Xaa in position 33 is any amino acid
  Variant (37)..(40): Xaa in position 37 to 40 is any amino acid
  Variant (42)..(59): Xaa in position 42 to 59 is any amino acid
  Variant (60)..(69): Xaa in position 60 to 69 is any or no amino acid
  Variant (71)..(72): Xaa in position 71 to 72 is any amino acid
  Variant (73)..(76): Xaa in position 73 to 76 is any or no amino acid
  Variant (79)..(80): Xaa in position 79 to 80 is any amino acid
  Variant (82)..(93): Xaa in position 82 to 93 is any amino acid
  Variant (94)..(97): Xaa in position 94 to 97 is any or no amino acid
  Variant (99)..(124): Xaa in position 99 to 124 is any amino acid
  Variant (125)..(135): Xaa in position 125 to 135 is any or no amino acid
  Variant (137)..(143): Xaa in position 137 to 143 is any amino acid
  Variant (144)..(148): Xaa in position 144 to 148 is any or no amino acid
  Variant (150)..(179): Xaa in position 150 to 179 is any amino acid
  Variant (180)..(195): Xaa in position 180 to 195 is any or no amino acid
  Variant (197)..(200): Xaa in position 197 to 200 is any amino acid
  Variant (203)..(204): Xaa in position 203 to 204 is any amino acid
  Variant (206)..(214): Xaa in position 206 to 214 is any amino acid
  Variant (215)..(215): Xaa in position 215 is any or no amino acid
  Variant (217)..(220): Xaa in position 217 to 220 is any amino acid
  Variant (223)..(227): Xaa in position 223 to 227 is any amino acid
  Variant (229)..(243): Xaa in position 229 to 243 is any amino acid
  Variant (244)..(252): Xaa in position 244 to 252 is any or no amino acid
  Variant (254)..(254): Xaa in position 254 is any amino acid
  Variant (256)..(265): Xaa in position 256 to 265 is any amino acid
  Variant (266)..(268): Xaa in position 266 to 268 is any or no amino acid
  Variant (270)..(273): Xaa in position 270 to 273 is any amino acid
  Variant (275)..(276): Xaa in position 275 to 276 is any amino acid
  Variant (285)..(285): Xaa in position 285 is any amino acid
  Variant (287)..(287): Xaa in position 287 is any amino acid
  Variant (289)..(295): Xaa in position 289 to 295 is any amino acid
  Variant (298)..(299): Xaa in position 298 to 299 is any amino acid
  Variant (301)..(307): Xaa in position 301 to 307 is any amino acid
  Variant (311)..(311): Xaa in position 311 is any amino acid
  Variant (312)..(312): Xaa in position 312 is any or no amino acid
  Variant (315)..(315): Xaa in position 315 is any amino acid
  Variant (318)..(318): Xaa in position 318 is any amino acid
  Variant (321)..(323): Xaa in position 321 to 323 is any amino acid
  Variant (325)..(325): Xaa in position 325 is any amino acid
  Variant (331)..(332): Xaa in position 331 to 332 is any amino acid
  Variant (338)..(340): Xaa in position 338 to 340 is any amino acid
  Variant (342)..(342): Xaa in position 342 is any amino acid
  Variant (344)..(345): Xaa in position 344 to 345 is any amino acid
  Variant (349)..(349): Xaa in position 349 is any amino acid
  Variant (351)..(351): Xaa in position 351 is any amino acid
  Variant (353)..(353): Xaa in position 353 is any amino acid
  Variant (355)..(356): Xaa in position 355 to 356 is any amino acid
  Variant (358)..(361): Xaa in position 358 to 361 is any amino acid
  Variant (362)..(363): Xaa in position 362 to 363 is any or no amino acid
  Variant (365)..(365): Xaa in position 365 is any amino acid
  Variant (366)..(371): Xaa in position 366 to 371 is any or no amino acid
  Variant (373)..(393): Xaa in position 373 to 393 is any amino acid
  Variant (394)..(419): Xaa in position 394 to 419 is any or no amino acid
  Variant (421)..(423): Xaa in position 421 to 423 is any amino acid
  Variant (425)..(426): Xaa in position 425 to 426 is any amino acid
  Variant (428)..(428): Xaa in position 428 is any amino acid
  Variant (429)..(429): Xaa in position 429 is any or no amino acid
  Variant (431)..(436): Xaa in position 431 to 436 is any amino acid
  Variant (439)..(459): Xaa in position 439 to 459 is any amino acid
  Variant (460)..(478): Xaa in position 460 to 478 is any or no amino acid
TKIXXTXGPXXXXXXXXXXXXXXGXXXXXRXNXSHGXXXXHXXXXXXXXXXXXXXXXXXXXXXXXXXXXDXXXXXXGPXXRXXXXXXXXXXXXXXXXGXXXXXXXXXXXXXXXXXXXXXXXXXXXXXXXXXXXXXGXXXXXXXXXXXXGXXXXXXXXXXXXXXXXXXXXXXXXXXXXXXXXXXXXXXXXXXXXXXPXXXXKDXXDXXXXXXXXXXDXXXXSFXXXXXDXXXXXXXXXXXXXXXXXXXXXXXXKXEXXXXXXXXXXXXXIXXXXDXXMVARGDLGXEXPXXXXXXXQKXXIXXXXXXXKPVXXATXMLXSMXXXPXPTRAEXXDVANAXXXGXDXXMLSXEXAXGXXPXXXXXXMXXXXXXXEXXXXXXXXXXXXXXXXXXXXXXXXXXXXXXXXXXXXXXXXXXXXXXXIXXXTXXGXXAXXXXXXRPXXXXXXXXXXXXXXXXXXXXXXXXXXXXXXXXXXXXXXXXG

SEQ ID NO: 70581 - protein, 45 aa, Artificial sequence
  protein pattern
  Variant (2)..(4): Xaa in position 2 to 4 is any or no amino acid
  Variant (6)..(6): Xaa in position 6 is any amino acid
  Variant (8)..(8): Xaa in position 8 is Leu or Met
  Variant (9)..(9): Xaa in position 9 is Ala, Asp, Glu, Asn or Gln
  Variant (12)..(16): Xaa in position 12 to 16 is any amino acid
  Variant (17)..(17): Xaa in position 17 is Ala or Pro
  Variant (19)..(19): Xaa in position 19 is Lys or Arg
  Variant (22)..(23): Xaa in position 22 to 23 is any amino acid
  Variant (25)..(25): Xaa in position 25 is Ile or Val
  Variant (26)..(27): Xaa in position 26 to 27 is any amino acid
  Variant (28)..(28): Xaa in position 28 is Ala or Ser
  Variant (29)..(29): Xaa in position 29 is Ile or Val
  Variant (30)..(30): Xaa in position 30 is any amino acid
  Variant (31)..(31): Xaa in position 31 is Ala, Asp, Glu, Gln or Thr
  Variant (32)..(32): Xaa in position 32 is Ala, Gly, Asn or Ser
  Variant (33)..(33): Xaa in position 33 is Ala, Ser or Thr
  Variant (34)..(34): Xaa in position 34 is Asp, Gly, Ser or Thr
  Variant (35)..(36): Xaa in position 35 to 36 is any amino acid
  Variant (38)..(38): Xaa in position 38 is any amino acid
  Variant (40)..(40): Xaa in position 40 is Ala, Glu, Gly or Asn
  Variant (42)..(42): Xaa in position 42 is Ser or Thr
  Variant (43)..(43): Xaa in position 43 is Ala, Ser or Thr
  Variant (44)..(44): Xaa in position 44 is any amino acid
AXXXTXMXXSMXXXXXXTXAEXXDXXXXXXXXXXXXMXSXEXXXG

SEQ ID NO: 70582 - protein, 26 aa, Artificial sequence
  protein pattern
  Variant (2)..(3): Xaa in position 2 to 3 is any amino acid
  Variant (4)..(6): Xaa in position 4 to 6 is any or no amino acid
  Variant (8)..(8): Xaa in position 8 is Ile or Val
  Variant (13)..(13): Xaa in position 13 is Leu or Met
  Variant (15)..(15): Xaa in position 15 is any amino acid
  Variant (16)..(16): Xaa in position 16 is Glu or Gln
  Variant (17)..(21): Xaa in position 17 to 21 is any amino acid
  Variant (22)..(22): Xaa in position 22 is Ile, Leu, Met or Val
  Variant (23)..(25): Xaa in position 23 to 25 is any amino acid
DXXXXXMXARGDXGXXXXXXXXXXXQ

SEQ ID NO: 70583 - DNA, 813 bp, Azotobacter vinelandii
  CDS (1)..(813): transl_table=11
atgaacgaacgtccggaggagtccaacaagggacccgcagccgacagcctgctgcccatcgacgaacacattgaagaggggcaggacgcggaggggcgcaaggttcgccatcgtggtatctacttgctgcctaacctgttcaccacggccaaccttttcgctggcttctactccatagtcagcgcaatcaatggaaacttggacgtggctgccgctactgtcttcgtcgcaatggtgctggacagcctggatggtcgcgtagcgcgtctgaccaacacgcaaagtgcgttcggtgctgaatatgattcgctttccgacatggtggccttcggtctggcccctgccatcctcgccttcgagtgggcgcttggcagtatgggcaaggttggctggatggttgcgttcgtctatgtggctggtgcagccctgcgtctggcgcgtttcaacacacagatcggcaaggctgacaaacgctttttcatcgggctggccagcccggcggcggcgggcgtggtggctggtaccgtttgggctttcaatgatttcggtatccaggggtcgaatatttcttccttggttgctctactggttgcggcagcgggcatgctgatggtcagtaatatcaagtactacagcttcaaggatctggatctcaaggggagggtgccctttgtcgccattctggtggtggtgctgctctttgctgtggtgttcagcgatccgcctcggatcttgttgttgattttcttggcttacgcgatttctggtccggtgcagtatctgctgcagtggcgtcgcaaaagggctgggtga

SEQ ID NO: 70584 - protein, 270 aa, Azotobacter vinelandii
MNERPEESNKGPAADSLLPIDEHIEEGQDAEGRKVRHRGIYLLPNLFTTANLFAGFYSIVSAINGNLDVAAATVFVAMVLDSLDGRVARLTNTQSAFGAEYDSLSDMVAFGLAPAILAFEWALGSMGKVGWMVAFVYVAGAALRLARFNTQIGKADKRFFIGLASPAAAGVVAGTVWAFNDFGIQGSNISSLVALLVAAAGMLMVSNIKYYSFKDLDLKGRVPFVAILVVVLLFAVVFSDPPRILLLIFLAYAISGPVQYLLQWRRKRAG

SEQ ID NO: 70585 - DNA, 828 bp, Xanthobacter autotrophicus Py2
  CDS (1)..(828): transl_table=11
atggaaacgccctttcccccgttcgatccggaaggccggccgcgcccccgcttcggccgcctcggccgggtgccgctgcgggtgctgttgcccaatctggtgacgctgctggccctgtgctccggcctgacggcggtgcgcctcgccatcgaggagcggatcgagctggcgctggccgccatcgtcttcgcggccttgcttgatggcatcgacggtcgcctcgcccgggcgctgaagggcacgtcgcgcttcggcgccgaactggacagcctcgccgacttcgtgaatttcggctgcgtgccggcgctgatgctctatttctgggggctgaaggagaccggctccgtgggctggatcgccgcgctcgcctatgccatctgcgctgcgctgcgcctcgcccgcttcaacgtgatgctggatgatccccacaagccgccgttcgccggtgacttcttcaccggcatcccggcgccggcgggggccatcacagtgctgctgcccatctatctggagctgatcggcgtgccccatggcggggtgagcgcgcccatcgcgctgctctattgcctggccatcggcttcctcatgatctccaccgtgccggcctggtcgggcaagaccctggggcggcgggtgcggcgggacatggtgctgccgcttttcgtggcggtggcgatcttttttgcgctgctggcgagctatccctggatcgtgctctcggtgtgctcgatcatctacctcgctttgctgcccgtctccaccctgagataccgtcggcagatggccgcatggcgcgccgcgcgccccgaggacctccccgccgcctga

SEQ ID NO: 70586 - protein, 275 aa, Xanthobacter autotrophicus Py2
METPFPPFDPEGRPRPRFGRLGRVPLRVLLPNLVTLLALCSGLTAVRLAIEERIELALAAIVFAALLDGIDGRLARALKGTSRFGAELDSLADFVNFGCVPALMLYFWGLKETGSVGWIAALAYAICAALRLARFNVMLDDPHKPPFAGDFFTGIPAPAGAITVLLPIYLELIGVPHGGVSAPIALLYCLAIGFLMISTVPAWSGKTLGRRVRRDMVLPLFVAVAIFFALLASYPWIVLSVCSIIYLALLPVSTLRYRRQMAAWRAARPEDLPAA

SEQ ID NO: 70587 - DNA, 873 bp, Agrobacterium tumefaciens str. C58
  CDS (1)..(873): transl_table=11
atgcgcatggaaacgccgatttcggagccgcagcagaacggaaaacaggagggccgcagtgatagcggccgtgggccgcgcctgagggaaattccctttcgcctcctggtgcccaatctgatcaccgttctcgcgatctgcgcaggcttgagcggcgtacgccttgccatcgaaggccgctttgaactcgccgtcggtatggtgctcctcgccgcctttctcgacggcgtggacgggcgtgttgcccgcatgatgaaggcgacctccaaattcggcgagcagatggattcgcttgccgatatcgtcaatttcggtgtcgctcctgctctcgtcgtctatatctatctgctcgatcaggcgcgttcgattggctggatcggcgccctcatctatgtcattgccgccggcctgcgcctggcgcgcttcaacgtcatgatcgagcggccggtaaaggcgccttggcagagcgaattttttgtcggcgttccggccccgatgggcgcgatgctggtgcttctgccggtctatctcggcttcctcggcgtggagccggacaagcccttcgcttacgtcgccgccgcctacaccgtcctgatcggttatcttctcatcagccgtctgccggtctggtcgggaaagtccagtacccgcattcgccgtgatctggtgctgccgatgatcctcgtcgtcgtgctctatgtggcgatgctgatgagcttcacctgggaagttctggttctgacggtcgccgcctatctcgtcttcattcccatcagcgcccgcctctggcatcgccgctacggtacgctgaccatcgaggaagacgcgcatgacgatgccaatggcggcaacggcctcgatcgcggcatttaa

SEQ ID NO: 70588 - protein, 290 aa, Agrobacterium tumefaciens str. C58
MRMETPISEPQQNGKQEGRSDSGRGPRLREIPFRLLVPNLITVLAICAGLSGVRLAIEGRFELAVGMVLLAAFLDGVDGRVARMMKATSKFGEQMDSLADIVNFGVAPALVVYIYLLDQARSIGWIGALIYVIAAGLRLARFNVMIERPVKAPWQSEFFVGVPAPMGAMLVLLPVYLGFLGVEPDKPFAYVAAAYTVLIGYLLISRLPVWSGKSSTRIRRDLVLPMILVVVLYVAMLMSFTWEVLVLTVAAYLVFIPISARLWHRRYGTLTIEEDAHDDANGGNGLDRGI

SEQ ID NO: 70589 - DNA, 867 bp, Agrobacterium tumefaciens str. C58
  CDS (1)..(867): transl_table=11
atggaaacgccgatttcggagccgcagcagaacggaaaacaggagggccgcagtgatagcggccgtgggccgcgcctgagggaaattccctttcgcctcctggtgcccaatctgatcaccgttctcgcgatctgcgcaggcttgagcggcgtacgccttgccatcgaaggccgctttgaactcgccgtcggtatggtgctcctcgccgcctttctcgacggcgtggacgggcgtgttgcccgcatgatgaaggcgacctccaaattcggcgagcagatggattcgcttgccgatatcgtcaatttcggtgtcgctcctgctctcgtcgtctatatctatctgctcgatcaggcgcgttcgattggctggatcggcgccctcatctatgtcattgccgccggcctgcgcctggcgcgcttcaacgtcatgatcgagcggccggtaaaggcgccttggcagagcgaattttttgtcggcgttccggccccgatgggcgcgatgctggtgcttctgccggtctatctcggcttcctcggcgtggagccggacaagcccttcgcttacgtcgccgccgcctacaccgtcctgatcggttatcttctcatcagccgtctgccggtctggtcgggaaagtccagtacccgcattcgccgtgatctggtgctgccgatgatcctcgtcgtcgtgctctatgtggcgatgctgatgagcttcacctgggaagttctggttctgacggtcgccgcctatctcgtcttcattcccatcagcgcccgcctctggcatcgccgctacggtacgctgaccatcgaggaagacgcgcatgacgatgccaatggcggcaacggcctcgatcgcggcatttaa

SEQ ID NO: 70590 - protein, 288 aa, Agrobacterium tumefaciens str. C58
METPISEPQQNGKQEGRSDSGRGPRLREIPFRLLVPNLITVLAICAGLSGVRLAIEGRFELAVGMVLLAAFLDGVDGRVARMMKATSKFGEQMDSLADIVNFGVAPALVVYIYLLDQARSIGWIGALIYVIAAGLRLARFNVMIERPVKAPWQSEFFVGVPAPMGAMLVLLPVYLGFLGVEPDKPFAYVAAAYTVLIGYLLISRLPVWSGKSSTRIRRDLVLPMILVVVLYVAMLMSFTWEVLVLTVAAYLVFIPISARLWHRRYGTLTIEEDAHDDANGGNGLDRGI

SEQ ID NO: 70591 - DNA, 774 bp, Xanthomonas campestris pv. campestris str. ATCC 33913
  CDS (1)..(774): transl_table=11
atggatgaaatgagaccgcccccgcgttcgcgcacgatctacctgctgccgaacctgttcaccaccgccgggttgttctccggcttctacgccatcattgctgccgccaacggccagttcgtgcaggccagcatggcggtgttcgtggccgcggtgatggacgggctggacggccgcgtggcgcgcctgaccaacaccagcagcgaattcggcgtgcagtacgactcgctggccgacctggtcagcttcggcatggcgccggcgctggtgatgtatcactggtcgctgtcggcgctgaagttcgacagcagcgtgatgggccgggtcggctggtcggcggcgtttctgtatgcggcctgcgccgcgctgcggctggcgcgcttcaacacccaggtcggcgtggtcgacaaacgctggttcatcggcctggccagcccggccgcggccggcttgatgatgtccttcgtgtgggccttcgccgacgacagcctgggcctggatggcgagcagctgcgctatgtggcgctgtgcgtcaccgtggtgtcggcgttgctgatggtcagccggatccgtttctggagcttcaagggcggcgaacgcggcccgcgtgccgaccgggtgccgttcctggcgctggcgatcgcggcggtggtcatcgcgctgctggtcatcgacccggcacgctcgctgctggtgatcggcgtgctgtacgccttgtccggcccggtgatgtggctgtggcggcgcggacgcaggacgcccgagctgccatga

SEQ ID NO: 70592 - protein, 257 aa, Xanthomonas campestris pv. campestris str. ATCC 33913
MDEMRPPPRSRTIYLLPNLFTTAGLFSGFYAIIAAANGQFVQASMAVFVAAVMDGLDGRVARLTNTSSEFGVQYDSLADLVSFGMAPALVMYHWSLSALKFDSSVMGRVGWSAAFLYAACAALRLARFNTQVGVVDKRWFIGLASPAAAGLMMSFVWAFADDSLGLDGEQLRYVALCVTVVSALLMVSRIRFWSFKGGERGPRADRVPFLALAIAAVVIALLVIDPARSLLVIGVLYALSGPVMWLWRRGRRTPELP

SEQ ID NO: 70593 - DNA, 810 bp, Shewanella oneidensis MR-1
  CDS (1)..(810): transl_table=11
atgcaaaattcttctaatcaaacagtaaagaataaaggtatctatttactgccgaatttattcacgactgcaggattgttttccggtttctatgctgtgattgcctctatgaatgctaacttcgaagcggctgcgatcgcgatttttgtggccatgatatgtgatggtctcgatgggcgagtggcaaggttgactaatactcaaagtgactttggtgccgagtacgacagcatggctgatatggtgtcctttgggatggcaccagcactactcgcctataattgggccttggcggatttaggcaaagtcggttggttggcggcgtttatctattgcgcgggggcagcattaaggctcgcacgtttcaacactcaagtgggagttgcggataaacgttactttcaagggctcgccagtccagcagctgcagcggtaattgcgggtagtatctggctcggtaaccaatatagtctcgatggtaaaaatatcagttggattgcaggattgatcactgctactacaggcttattaatggtgagtaatttccgttaccattccttcaaagagatcgactggcgcggcaaagtgaactttatcgtcattctattgcttgtgggcatatttgtggtggtttcggtgcagcctgcgttaatcctctgtataggtttttacctttatgctatctcaggtcctgtggttactattcgtacagttcgaaaactaaaagtggctcatattgttggcgatgatgaacaaggcaaagagattaaagaaaataagagttcaatcaactccggtgaaaaaccataa

SEQ ID NO: 70594 - protein, 269 aa, Shewanella oneidensis MR-1
MQNSSNQTVKNKGIYLLPNLFTTAGLFSGFYAVIASMNANFEAAAIAIFVAMICDGLDGRVARLTNTQSDFGAEYDSMADMVSFGMAPALLAYNWALADLGKVGWLAAFIYCAGAALRLARFNTQVGVADKRYFQGLASPAAAAVIAGSIWLGNQYSLDGKNISWIAGLITATTGLLMVSNFRYHSFKEIDWRGKVNFIVILLLVGIFVVVSVQPALILCIGFYLYAISGPVVTIRTVRKLKVAHIVGDDEQGKEIKENKSSINSGEKP

SEQ ID NO: 70595 - DNA, 852 bp, Pseudomonas putida KT2440
  CDS (1)..(852): transl_table=11
atgagcgaacgtcccgaagagccgaacaagccctccgacgccgaaagcctgctacctgtcgatgagcacgttgaagaagggcatgacgccgaaggccgcaaggtgcgccaccgcggcatctacctgttgcccaacctgtttaccaccgccaacctgtttgccggtttctattccatcatcagctcgatgagcgcacagagcgccctgagtgccggcgacccgcgcgaggcgagcaagtacttcgcttttgccgctatcgccatcttcgtggccatggtgctcgacggcctggacggccgcgttgcgcgcatgaccaatacccagagtgccttcggtgccgagtatgactcgctgtcggatatggtcgccttcggcgtggccccggctttgctggccttcggctgggcgctgggtgacatgggcaaggtcggctggatggttgccttcatctatgtggccggtgccgcgttgcgcctggcgcgcttcaatacccaggtcggtaccgccgacaagcgctacttcatcggcctggccagcccggctgccgccggtgtggtggcaggcaccgtatgggcgttcagcgactacggcatccagggctccaagctgtcgttcctggtcgcgctgctggtggctgctgctggcatgctgatggtcagcaacatcaagtacaacagtttcaaggagctggacctcaaggggcgcgtcccgttcgtggcgatcctggcggtggtgctggtgtttgccgtcgtgttcagcgacccgccgcgtatcctgctgttgatcttccttgcctatgcagcatcggggccgatccagttcctgctgaaggcgcgccgtcgcaaagcgtga

SEQ ID NO: 70596 - protein, 283 aa, Pseudomonas putida KT2440
MSERPEEPNKPSDAESLLPVDEHVEEGHDAEGRKVRHRGIYLLPNLFTTANLFAGFYSIISSMSAQSALSAGDPREASKYFAFAAIAIFVAMVLDGLDGRVARMTNTQSAFGAEYDSLSDMVAFGVAPALLAFGWALGDMGKVGWMVAFIYVAGAALRLARFNTQVGTADKRYFIGLASPAAAGVVAGTVWAFSDYGIQGSKLSFLVALLVAAAGMLMVSNIKYNSFKELDLKGRVPFVAILAVVLVFAVVFSDPPRILLLIFLAYAASGPIQFLLKARRRKA

SEQ ID NO: 70597 - DNA, 882 bp, Bradyrhizobium japonicum USDA 110
  CDS (1)..(882): transl_table=11
atgacgccctatgacatcaaagaccctgacgttcgccgccggcggttccgcccgattccggtgcggatgctggtgcccaacgtcatcacgctgctggcgatctgcgccggcctgacgtctatccggctgtcgatcgaggggcggatgtcgctcgccgtctacgccatcgtgttcgccgccgcgctggacggcatcgacggccgcatcgcgcgcatgatcaagggccagtccaagttcggggcggagctcgacagcctcgccgacttcgtcaatttcggcgtcgcgcccgggctgatgctgtatttctggcagttgcacgagctcggcaatgccggctggatcgccgcgatggtgttcgcgatctccggcggcctgcgtcttgcgcgcttcaacgccacaatggacgatcccaacaagccggccttcgccgccaatttcttcaccggcgtgccggcgccggccggtgcgatcacggttctgctgccgatctatgtggcgttcctcgatctcggccgcgcgcccgcggcggtgacggcggcctacacgctgctgatcgccttcctgatggtgtcgcgcctgccggtgttctccggcaagaccaagcgcatgcgcgtgccgccggaactggtgctgccggccttcgtcgcggtgatcgtcttcattgctatcctgatcgcctatccctggcacgtgctgtcgatcggcacggtgctgtatcttctcgctttgccgctcggctacaaatcctatcgcgaccaggcgcgcgcgatggatgctgccacgcctgcgggaggcgagatctcgtcgccgccgtcggcgccgacgctggcgaacctgtcggagccgccgcacgacgacgaccggcccggacggctgcactaa

SEQ ID NO: 70598 - protein, 293 aa, Bradyrhizobium japonicum USDA 110
MTPYDIKDPDVRRRRFRPIPVRMLVPNVITLLAICAGLTSIRLSIEGRMSLAVYAIVFAAALDGIDGRIARMIKGQSKFGAELDSLADFVNFGVAPGLMLYFWQLHELGNAGWIAAMVFAISGGLRLARFNATMDDPNKPAFAANFFTGVPAPAGAITVLLPIYVAFLDLGRAPAAVTAAYTLLIAFLMVSRLPVFSGKTKRMRVPPELVLPAFVAVIVFIAILIAYPWHVLSIGTVLYLLALPLGYKSYRDQARAMDAATPAGGEISSPPSAPTLANLSEPPHDDDRPGRLH

SEQ ID NO: 70599 - DNA, 852 bp, Pseudomonas syringae pv. tomato str. DC3000
  CDS (1)..(852): transl_table=11
atgagcgaacgtcccgaggagcccaacaaggcctccgacgctgaaagtctgctacccatcgatgaacatgtagaagaagggcatgacgccgaaggccgtcaggtccggcatcgcggtatctatctgctgcccaacctgtttaccaccgcgaatctgtttgcgggtttctactccatcatcagttccatgagcgcgcaaagcgcgatgagtgccggtgatagcgccgctgcgagcaagtatttcgcgttcgcggcgattgcgatcttcgtcgccatggtcctcgatgggctggatggtcgcgttgcgcgcatgaccaacacccagagcgcatttggcgccgagtacgattccctgtccgacatggttgcctttggtgtcgcaccggcgctgctggcatttggctgggcgctgggggacatgggcaaggttggctggatggtcgccttcatctatgtggccggcgcggcgttgcgtctggcgcgcttcaacacccaggtcggcaaggctgacaagcgctacttcatcggtctggccagcccggcggcggcaggtgttgttgccggtacggtctgggcgtttagcgatttcgggattcagggttccaagctgtcgtttctggtggccttgctggtcgctgcagccggcatgctgatggtcagtaacatcaagtacaacagcttcaaggaactggacctgaaagggcgcgtaccttttgttgcgattctggccgtggtgctggtgtttgccgtggtattcagcgacccgccgcgcattctgctgctgatattcctcgcctacgccctgtccggaccgattcagtatctattgcgtcgccataaagcctcacaatga

SEQ ID NO: 70600 - protein, 283 aa, Pseudomonas syringae pv. tomato str. DC3000
MSERPEEPNKASDAESLLPIDEHVEEGHDAEGRQVRHRGIYLLPNLFTTANLFAGFYSIISSMSAQSAMSAGDSAAASKYFAFAAIAIFVAMVLDGLDGRVARMTNTQSAFGAEYDSLSDMVAFGVAPALLAFGWALGDMGKVGWMVAFIYVAGAALRLARFNTQVGKADKRYFIGLASPAAAGVVAGTVWAFSDFGIQGSKLSFLVALLVAAAGMLMVSNIKYNSFKELDLKGRVPFVAILAVVLVFAVVFSDPPRILLLIFLAYALSGPIQYLLRRHKASQ

SEQ ID NO: 70601 - DNA, 780 bp, Nitrosomonas europaea ATCC 19718
  CDS (1)..(780): transl_table=11
atgcaggaatctgatccagagcaactgcccgtcacaggcccgcggtggaggagacggggtatctatctgctgcccaatctcttcacgactgcggcgctgtttgccggtttctatgcgattgtccaggcgatgaatggtcattatgagcattctgccattgccatttttgtggccatggtatttgatggcctggatggccgggtggcacgcctgacgcatacgcaaagtgaattcggtgcagagtacgatagcctgtctgatatggtttcgtttggtgtggctcctgcattgattgtgtacgaatgggcgttgagagatctggggaaactgggctggatcgctgcattcatctattgtgcttgtgcagcgttgcgccttgcccgtttcaatgtaacggtcgaagtcgtcgacaagaaatattttcaaggcttgcccagtccggctgcggctgctctgatcgccggaatgatctgggtagtactgggtttccaggtagatgctgccgatatcacatggctggcgtgggccatgacactgtttgccggcttgaccatggtgaccaatatcccttactacagcggtaaagaattcaatctgcacaagaaagtttcattttttgtggttttgctgctgcttctgttctttttcgttctgattccgagtcatccaccgctggtgttgttcggggtatttctgacttatgcgttatccggatatggcatgaagatctggcggctgtacaagaacagaaaacgtaacgaaatccgtaaagaaacttga

SEQ ID NO: 70602 - protein, 259 aa, Nitrosomonas europaea ATCC 19718
MQESDPEQLPVTGPRWRRRGIYLLPNLFTTAALFAGFYAIVQAMNGHYEHSAIAIFVAMVFDGLDGRVARLTHTQSEFGAEYDSLSDMVSFGVAPALIVYEWALRDLGKLGWIAAFIYCACAALRLARFNVTVEVVDKKYFQGLPSPAAAALIAGMIWVVLGFQVDAADITWLAWAMTLFAGLTMVTNIPYYSGKEFNLHKKVSFFVVLLLLLFFFVLIPSHPPLVLFGVFLTYALSGYGMKIWRLYKNRKRNEIRKET

SEQ ID NO: 70603 - DNA, 990 bp, Rhodopirellula baltica SH 1
  CDS (1)..(990): transl_table=11
gtgtgccggctcgacggtgttcgcccgctatcaacaaggttgatcgaaatgagcgaactgaaaccaagattgccaatccaggacgacgacagcgtcgatgacgaatcggacctcatccaagaggacggagtcgctgaacgctcgaaatttggtcgccgacgccgccgtggtaagaagcgacgtttgacgctggccgtgttgccaactttgttgaccctcggaaatggcgtctgcggtctggctgcgatcgcgatcgctgtcagcacagagtcgctggattggacgcccgagtcgaagttgtttgccgctggtttgttgatctttggcggcatgttgtttgatgccctggatggatcagcggctcggttgaccggtcaagcgagccggttcggcgcggagctggattcgttgtgcgatgcggtcacgttcggggttgcacccgcggtgatcgtttggcggatcagcgatgtgttgttgcagcgtttgacttggggcatcggcgttttgttcgcgctttgcgttctgatccgcttggctcgtttcaatgttgaaacgccagaggatgacgaccacgaaggctttgaaggtttgccatcgccggccgccgcaggaacgatcgcagcgtttgcgattgcgattccggacctggccgacttctcggtcggcgaagcctatcccgaatggattcattcgatggccggcctcgctctcgatgcgtcgcactatgtgattccgaccctggctttggtgctggcgtttttgatggtgtcgcgatacgagtaccctcacgtgttcgcacaattggtgcgtggacggcgagcaccgcaccagatcggacaagctttgtttgcggtggtgggtttgttcctgctgcactgggtcgctcttccagttgtgttttgctacttcgcattcatgtcgccaatccgatcgttgctgcaacgcaactcgaaacccgcaacgtcgacttcgtcggtagaaggcggatga

SEQ ID NO: 70604 - protein, 329 aa, Rhodopirellula baltica SH 1
MCRLDGVRPLSTRLIEMSELKPRLPIQDDDSVDDESDLIQEDGVAERSKFGRRRRRGKKRRLTLAVLPTLLTLGNGVCGLAAIAIAVSTESLDWTPESKLFAAGLLIFGGMLFDALDGSAARLTGQASRFGAELDSLCDAVTFGVAPAVIVWRISDVLLQRLTWGIGVLFALCVLIRLARFNVETPEDDDHEGFEGLPSPAAAGTIAAFAIAIPDLADFSVGEAYPEWIHSMAGLALDASHYVIPTLALVLAFLMVSRYEYPHVFAQLVRGRRAPHQIGQALFAVVGLFLLHWVALPVVFCYFAFMSPIRSLLQRNSKPATSTSSVEGG

SEQ ID NO: 70605 - DNA, 798 bp, Chlamydophila pneumoniae TW-183
  CDS (1)..(798): transl_table=11
atggcgggattagatctagaagcacgaggcaagcgtcgcgtagtgacacctaacgctattactgcttttggactttgttgtggattatttattattttcaaaagcgtattaagaacgtcgtcctctgtagagttattccatcgtttgcagggcttatctctcttgcttattagtgctatgatcgcggatttttctgatggtgcgatcgctcgaatcatgaaagccgagagcgcttttggtgctcagtttgattctctttctgatgcggtcactttcggcattgccccacctttgattgctataaaaagtcttgatgggatttatgttgggaattttttctcttcgctactactcatcacctcgattatttattctctgtgtggagtgttgcggttggtacgttacaacctcttttctcaaaagactgtagatgtttcaaagccttattgttttattggtctgcccattcctgctgctgctgcaagtattgtctccttagctttatttcttgcttcggatttctttccagacctccctgcccaacttcgggtaggtctattatcatttgcccttcttttcattgggggtctgatgatttctccatggaaatttcctggagtgaagcatttccgctttaatgtttcttcttttctgctggtagtgactataggtttagcagcatgtcttttcttttcaggacttgtagatcattttgttgaagtctttttccttgtatcttggctatatactttagtaggctttccgatcttttcaatcatctatagaaaaaagagctag

SEQ ID NO: 70606 - protein, 265 aa, Chlamydophila pneumoniae TW-183
MAGLDLEARGKRRVVTPNAITAFGLCCGLFIIFKSVLRTSSSVELFHRLQGLSLLLISAMIADFSDGAIARIMKAESAFGAQFDSLSDAVTFGIAPPLIAIKSLDGIYVGNFFSSLLLITSIIYSLCGVLRLVRYNLFSQKTVDVSKPYCFIGLPIPAAAASIVSLALFLASDFFPDLPAQLRVGLLSFALLFIGGLMISPWKFPGVKHFRFNVSSFLLVVTIGLAACLFFSGLVDHFVEVFFLVSWLYTLVGFPIFSIIYRKKS

SEQ ID NO: 70607 - DNA, 780 bp, Bordetella pertussis Tohama I
  CDS (1)..(780): transl_table=11
atgcccaatttctccatgcgcgatcccgaaaatcgccatcgcagcatctacctgctgcccaatgccttcaccacggcggccctgttcgcggggttctacgccgtcgtgcaggccatgaacgaccgcttcgagaccgcggccatcgccatcttcgtggccatggtgctcgacggcatggacggccgggtggcgcgcctgaccaacacccagtcggccttcggcgagcaatacgattcgctgtccgacatgacctccttcggcgtcgcgcccgcgctggtcatctacgaatggatcctgcaggacctcggccgctggggctggctggccgccttcgtgtacgtcgccggcgcggccttgcgcctggcgcgcttcaacaccaacatcgcggtggtcgacaagcgcttcttccaggggctgcccagccccgctgccgcggcgctggtggccggcttcgtctggctggccatcgacaacaaactgcccatccacgacagcatcatggcctgggtggcctttgtcctgacgatgtacgccggcgtggcgatggtcagcaacgcctcgtttttcagcggcaagaacttcgccttgggccgcagcgtgccgttctggggcatcctgctggtggtggccgtgttcgtgttcgtctccagcgatccgccggtggtgctgttcggcctgttcgtgctttatggcctgtcgggctgggtggtgatggcatggcgctggaaccgcgcccgcaggctgcagcaggagcgccgcagcggccatcattctccgtga

SEQ ID NO: 70608 - protein, 259 aa, Bordetella pertussis Tohama I
MPNFSMRDPENRHRSIYLLPNAFTTAALFAGFYAVVQAMNDRFETAAIAIFVAMVLDGMDGRVARLTNTQSAFGEQYDSLSDMTSFGVAPALVIYEWILQDLGRWGWLAAFVYVAGAALRLARFNTNIAVVDKRFFQGLPSPAAAALVAGFVWLAIDNKLPIHDSIMAWVAFVLTMYAGVAMVSNASFFSGKNFALGRSVPFWGILLVVAVFVFVSSDPPVVLFGLFVLYGLSGWVVMAWRWNRARRLQQERRSGHHSP

SEQ ID NO: 70609 - DNA, 915 bp, Rhodopseudomonas palustris CGA009
  CDS (1)..(915): transl_table=11
atgatggccgagcaggatggtggttccgagacgagagcgaaaccgatgcctttcgatctgaattcccctgagacgccgcgtcgccggttcgggccgattccggtgcgcctgctggtgccgaacgtcatcaccctgctggcgatctgcgccggcctgaccgcgatccggctctccaccgaggggcggatggagctggcggtggcggcgatcgtgttcgcggcggtgctcgacggtatcgacggccgcgtcgctcggatgatcaagggccagtcgaaattcggcgccgagctcgacagcttggcggatttcgtcaatttcggcgtcgcgccgggcctgatcctgtatttctggcagctccacgatttgaacaacgtcggctggatcgccgcgatggtgttcgcgatcagcggcggcctgcggctggcgcggttcaacgccaccatggacgaccccaacaagccggcgttcgccgccaacttctttaccggcgtaccggccccggccggcgccatcaccgtgttgctgcccgtctatatgggcttcctcggcgcgccgacgccgccggcggtgctgaccgcggtctatacgctgctgatcgcgttcctgatggtgtcgcggctgccggtgttctccggcaagacggtgaagatgcgggtggcgccggaaatggtgctgccgctgttcgtctcggtggtgttgttcatcgcgctgctgatcggctacccgtggcacatcctgtcggcctgctcggtgctgtacctgctcagcctgccggtcggctggcggtcgtatcgcgaccatcagcgcaatgccgccgcggacaagggcaaaggcgcaccttcggggcagaaaccgaccctggtcgtgaacgatcccgtcccacgcgacgacgaccgcccggcgcggctgaactga

SEQ ID NO: 70610 - protein, 304 aa, Rhodopseudomonas palustris CGA009
MMAEQDGGSETRAKPMPFDLNSPETPRRRFGPIPVRLLVPNVITLLAICAGLTAIRLSTEGRMELAVAAIVFAAVLDGIDGRVARMIKGQSKFGAELDSLADFVNFGVAPGLILYFWQLHDLNNVGWIAAMVFAISGGLRLARFNATMDDPNKPAFAANFFTGVPAPAGAITVLLPVYMGFLGAPTPPAVLTAVYTLLIAFLMVSRLPVFSGKTVKMRVAPEMVLPLFVSVVLFIALLIGYPWHILSACSVLYLLSLPVGWRSYRDHQRNAAADKGKGAPSGQKPTLVVNDPVPRDDDRPARLN

SEQ ID NO: 70611 - DNA, 858 bp, Bdellovibrio bacteriovorus HD100
  CDS (1)..(858): transl_table=11
atggctactgatactcatcttgataaaatcgaatctgacgatgccaaagctcagcgcttggcgatgtacatttatatccttccaaatttgatgaccacggggaatctgttctgcggtttctttgctgtcatccaatccatcaaaggtaattatctttttgctgcatacgcgatcgtggttgctgctgtctttgaccagttggatggccgtctggcgcgtttgacccgctcaacgagtaagttcggtgctgaatacgattctttgtgtgacttggtcagcttcggtatggctccggctacgatgctgttcctgtgggccttgcagccattcggtcgtctgggctgggttgcgaccttcctgttcgtagcgtgtggtgcgcttcgtttggcgcgtttcaacgttcaggcgaacgtggttgaaaagaactacttccagggtctgccgattccaatggcggcaggtatcgtggcttcttctgttctggccttccaggatctggaattggaaccgctgggcaactacggtttgctggtgatgactattttgctggcgttggtgatggtttccaacttccgcttccgcagctttaaagatctggatctgaaagagcgtctgccgttccgttacctgattctgggtgtcggtgttctggttgtcgtggcacttcgtccggaagtgatgctgtttgttctcttcatggcttacgcagttttgggcgctgttttcggtgtcttcaaacttggaaaaaacatccgtaagatcaagccaagcgtgtacgctcctgcatctgtgcatgaaagcgatctggtcctcgaagacgaggaagaagaggcgaagaaagatgaaaagaaaacttaa

SEQ ID NO: 70612 - protein, 285 aa, Bdellovibrio bacteriovorus HD100
MATDTHLDKIESDDAKAQRLAMYIYILPNLMTTGNLFCGFFAVIQSIKGNYLFAAYAIVVAAVFDQLDGRLARLTRSTSKFGAEYDSLCDLVSFGMAPATMLFLWALQPFGRLGWVATFLFVACGALRLARFNVQANVVEKNYFQGLPIPMAAGIVASSVLAFQDLELEPLGNYGLLVMTILLALVMVSNFRFRSFKDLDLKERLPFRYLILGVGVLVVVALRPEVMLFVLFMAYAVLGAVFGVFKLGKNIRKIKPSVYAPASVHESDLVLEDEEEEAKKDEKKT

SEQ ID NO: 70613 - DNA, 873 bp, Burkholderia vietnamiensis G4
  CDS (1)..(873): transl_table=11
atggccgcattcaaaccgcgccggccgcgcaacggcaccagccagacgccgcgcccgtttcgccgcaacaaggtgatggcatcggatccggtgccgagcgaaagtcgccgcgccgcgcgccagcggttcctgaagacgcgcggcatctatctgctgccgaacgcgttcacgaccgctgcgctgttctgcggcttcttcgcggtcgtgcaggcgatgaacgtgcgcttcgagatcgccgcgatcgccatcttcgtcgcgatggtgctcgacgggatggacgggcgcgtcgcgcggatgacgcatacgcagagcgcgttcggcgaacagttcgacagcctgtccgacatggtgtcgttcggcgtggcgcccgcgctcgtgatgtacgaatgggtgctgaaggatctcggccgctggggctggcttgccgccttcgtctactgctcgggcgcggcgctgcggctcgcgcgcttcaacaccaacatcggcgtcgtcgacaagcgcttcttccaggggctgccgagcccggccgccgccgcgctgatcgccggcttcgtgtggctcgccaccgacaaccgcgtgccgatgaagctcggctggctgccgtgggtcgcgttcgtgctgacgatctacgcgggcgtgacgatggtgtcgaacgcgccgttttacagcggcaaggcgctcgacgtgcggcatcgcgtgccgttcgcggcgatcctcttggtggtggtggcgttcgtgctggtgtcgtccgatccgccgctgatgctgttctgcctgttcgtgctgtacgggctgtccggctacgtgttctgggcgtacatggccgtgcgcggccgtgccaacccggcgcgctcgtcgcagcgcgagcactga

SEQ ID NO: 70614 - protein, 290 aa, Burkholderia vietnamiensis G4
MAAFKPRRPRNGTSQTPRPFRRNKVMASDPVPSESRRAARQRFLKTRGIYLLPNAFTTAALFCGFFAVVQAMNVRFEIAAIAIFVAMVLDGMDGRVARMTHTQSAFGEQFDSLSDMVSFGVAPALVMYEWVLKDLGRWGWLAAFVYCSGAALRLARFNTNIGVVDKRFFQGLPSPAAAALIAGFVWLATDNRVPMKLGWLPWVAFVLTIYAGVTMVSNAPFYSGKALDVRHRVPFAAILLVVVAFVLVSSDPPLMLFCLFVLYGLSGYVFWAYMAVRGRANPARSSQREH

SEQ ID NO: 70615 - DNA, 750 bp, Desulfovibrio vulgaris subsp. vulgaris str. Hildenborough
  CDS (1)..(750): transl_table=11
atggaacagaagaccggaccagtacataagggagtctacatcctccccaacctcttcaccacggcgagcctcttctcgggctttctggggctgttgtgggctgcgtccggtgaatacgaagcctgtgccatggccatcctgttcagcgccctcatggacggtctcgacggcaaggtggcgcgtctcaccaacaccgccagcgaattcggcgtacagtacgactcgctgtgcgacctcgtcgccttcggtgtggcccccgccttcctcgtctggaactggcagctcaagcaattcggccgcctcggcatcgccgtggcctttctgctcgccgtgtgcggtgcgcttcgactggcgcgcttcaacatctccacggctgtcacgtccaagaagttcttcacggggctgcccatccccgccgcaggctgcacgcttgccgcgatggtgttcttccagccctacgtccccgaacagctgatgcacgccttcccggcgttcacactcggcgtcacgttcgtgctctccttcctcatggtgagccgtgtacgctatgcctccttcaaggaatacgggctgatcaaggcccacccgttcagctcgatggtcaccgccatcctgttgttcgtccttgtctcctctgaacccaagctcttggggttcatggtgtttgcgggttacctgatttcgggccccgtatacaccttcatcattcttccgcgtcgctcccacaagctactacgcagcctagcatag

SEQ ID NO: 70616 - protein, 249 aa, Desulfovibrio vulgaris subsp. vulgaris str. Hildenborough
MEQKTGPVHKGVYILPNLFTTASLFSGFLGLLWAASGEYEACAMAILFSALMDGLDGKVARLTNTASEFGVQYDSLCDLVAFGVAPAFLVWNWQLKQFGRLGIAVAFLLAVCGALRLARFNISTAVTSKKFFTGLPIPAAGCTLAAMVFFQPYVPEQLMHAFPAFTLGVTFVLSFLMVSRVRYASFKEYGLIKAHPFSSMVTAILLFVLVSSEPKLLGFMVFAGYLISGPVYTFIILPRRSHKLLRSLA

SEQ ID NO: 70617 - DNA, 840 bp, Bartonella quintana str. Toulouse
  CDS (1)..(840): transl_table=11
atgaaaaatttttcactattttcttcatttaatcctgaagggcagcatgatgatgttgcaaatcggtggcggtcgcctacaccaatgcggtatatcgttcccaatatcattactattttggcgatttgcgcagggatgagcagtattcgtttggcttttgagcatcgctatgaggctgctattttaatggtgcttttagcagcaaccctagatggggctgatggccgcgttgcccgtttgatggatgggagttcatcttttggggcgcagatggattctcttgctgatgttgttaattttggtgttgctcctgcgcttattgtttattcctttgttttaaatcaagcgtaccaagttggttggatcgcagcacttgtctattgtgttgcttgttgtttgcgtttagcgcgttttaatgtgatgttggataacgtagatataccaaaatggcagggcagttattttattggtgttcctgcaccagcaggagcgttattgcttttattgcctatgtatttaggagctcttggtttggtcccaagttggagctgggcattattttttagcctttatactgtgattattgcttttcttttggtcagtcgtttaccagtctggaatgcaaaaacaattgatcagaatttgaggcgtgatctcgttgtaccgtgcatgctgggcattgttatttatgtaggttttctggcaacttacacatggcacactttattgattacagctgttggttatatgatttttctcccctgtagttttgtggcttataataaacgggctgctttggaagaaaaaaagatcaatgttaaaattatctcaaaatcgtag

SEQ ID NO: 70618 - protein, 279 aa, Bartonella quintana str. Toulouse
MKNFSLFSSFNPEGQHDDVANRWRSPTPMRYIVPNIITILAICAGMSSIRLAFEHRYEAAILMVLLAATLDGADGRVARLMDGSSSFGAQMDSLADVVNFGVAPALIVYSFVLNQAYQVGWIAALVYCVACCLRLARFNVMLDNVDIPKWQGSYFIGVPAPAGALLLLLPMYLGALGLVPSWSWALFFSLYTVIIAFLLVSRLPVWNAKTIDQNLRRDLVVPCMLGIVIYVGFLATYTWHTLLITAVGYMIFLPCSFVAYNKRAALEEKKINVKIISKS

SEQ ID NO: 70619 - DNA, 840 bp, Bartonella henselae str. Houston-1
  CDS (1)..(840): transl_table=11
atgggaaatttttcgctattttcttcatttaatcctgaaggacagcatgatgatgttgcaaatcggtggcgttcacccacaccgatgcggtatatcattcctaatattattactattttggcaatttgcgcagggatgagcagtattcgtttggcttttgagcatcgctatgaggctgctattttaatggtacttttggcagcaattctagatggggctgatggtcgcattgcccgtttaatggatggaagttcatcttttggagcgcagatggattctcttgccgatgttattaattttggtgttgcaccttcacttattgtgtattcttttgttttgaatcaagctcaccaagtcggttggattgcagggcttgtctattgtgttgcttgttgtttgcgtttagcacgctttaatgtgatgttggataacacagatataccaaaatggcaggggaattattttgttggtgttcctgccccagcgggagcgttattgcttttattgcctatgtatttaggagctcttggtttggttccaagttggagttgggcattgttttttagcctttatactgtgattattgcttttcttttagtcagtcgtttacctgtatggaatggaaaaacaattaatcaaaatttgagacgtgatatcgttgtaccgtgcatgctgggcattgttatttatgtaggttttctggcaacttatacatggcacactttattgattacagctgttagttatatgatttttcttccgtgtagctttgtagcttataataaacgagctgctttggaagaaaaaaaggcaaatattaaaacgctctcaagttcatag

SEQ ID NO: 70620 - protein, 279 aa, Bartonella henselae str. Houston-1
MGNFSLFSSFNPEGQHDDVANRWRSPTPMRYIIPNIITILAICAGMSSIRLAFEHRYEAAILMVLLAAILDGADGRIARLMDGSSSFGAQMDSLADVINFGVAPSLIVYSFVLNQAHQVGWIAGLVYCVACCLRLARFNVMLDNTDIPKWQGNYFVGVPAPAGALLLLLPMYLGALGLVPSWSWALFFSLYTVIIAFLLVSRLPVWNGKTINQNLRRDIVVPCMLGIVIYVGFLATYTWHTLLITAVSYMIFLPCSFVAYNKRAALEEKKANIKTLSSS

SEQ ID NO: 70621 - DNA, 834 bp, Acinetobacter sp. ADP1
  CDS (1)..(834): transl_table=11
atgacaaatgcaccaaaatccgaacacgacacgaaggttgatgaccattcatttgatggtattacctttgaagttgttgaagaagaacataccaacgaaggacagcgcgtaaaacgccgtggtatttacttgtggccaaatttgattaccacagctgccttgttatctggtttctattcgattattgcgagtacaaatggaaactatgtgcaggccatctacgccatttttttggcggctttattagatggtctggatgggcgagttgcacgtgccattggtgcccagagtgctttcggtgaacagtatgattccttatcagatctactggcgtttggtgttgcacctgcaatgttgatgtatagctggagtttgcatgagcttggtcgaattggtctggcttgctgctttatttacacagcctgtgctgcatttcgtctagcacgatttaatgttcagattggcgtagtcgacaagcgttactttattgggattgccagcccattagccgctgtactagtgattacgttagtttgggttagtcgcgattatccatttatttttgatttacgtgatattacgattcagatcatttatgccgtatatatggtggttgtggcattactcatgatctcaaacattaaatattattcatttaaagaaatggatcgaaagcgggttccatttgtcgtgatgttgcctgtagtgctaatttttgcagcaatcacttataatattcctgttggtatcctggtggtgtccttgatctatgcagcttcaggttttattaccactttatttgcacacaaacaggctgtaaataaaacagagtga

SEQ ID NO: 70622 - protein, 277 aa, Acinetobacter sp. ADP1
MTNAPKSEHDTKVDDHSFDGITFEVVEEEHTNEGQRVKRRGIYLWPNLITTAALLSGFYSIIASTNGNYVQAIYAIFLAALLDGLDGRVARAIGAQSAFGEQYDSLSDLLAFGVAPAMLMYSWSLHELGRIGLACCFIYTACAAFRLARFNVQIGVVDKRYFIGIASPLAAVLVITLVWVSRDYPFIFDLRDITIQIIYAVYMVVVALLMISNIKYYSFKEMDRKRVPFVVMLPVVLIFAAITYNIPVGILVVSLIYAASGFITTLFAHKQAVNKTE

SEQ ID NO: 70623 - DNA, 774 bp, Desulfotalea psychrophila LSv54
  CDS (1)..(774): transl_table=11
ttgactttaactaacggagtatctatgtcacatccacaagaagaaatgagtactaaattttatcttcttccctgtcttttcaccctcagtagcctcttttgtggtttctacgccatactctcggcaaccaagggagaatttgttgtttcggcaattgccattatcgtggccgccgttttcgacggtcttgacggccgagttgcccgtatgacaggtaagacaagtatgtttggtgttgaacttgactcactctgtgacaatgtctcttttggtgttgctccaggtctactcgcctacttctgggccctgcagccctacggacgctacggctggttggccgcatttctctatattgccaccaccaccctgcgccttgcccgttttaactcacaacagactgactctgtgaattttatcggtctgccctgtcccgctgcagcagccatgatctcttcagctgtcctcttttgccatagccttggcattgaaggtccggtaaagcatatatctctgctcttcttagtatatctgctttcctacctgatggtctccaaccacagctactgtagcttcaaaaaaatgcagcataaaggaagaacatttccgatacttgttggcgccctattgctcttcatccttgtagctgctgagccacagataatgttttttgcaatctttgttctctatattgcctctggaatggccaccgatttatggaaatgggcccaaaaaagctctcttggccataagctcacaaataaatcaaaacaatag

SEQ ID NO: 70624 - protein, 257 aa, Desulfotalea psychrophila LSv54
MTLTNGVSMSHPQEEMSTKFYLLPCLFTLSSLFCGFYAILSATKGEFVVSAIAIIVAAVFDGLDGRVARMTGKTSMFGVELDSLCDNVSFGVAPGLLAYFWALQPYGRYGWLAAFLYIATTTLRLARFNSQQTDSVNFIGLPCPAAAAMISSAVLFCHSLGIEGPVKHISLLFLVYLLSYLMVSNHSYCSFKKMQHKGRTFPILVGALLLFILVAAEPQIMFFAIFVLYIASGMATDLWKWAQKSSLGHKLTNKSKQ

SEQ ID NO: 70625 - DNA, 819 bp, Symbiobacterium thermophilum IAM 14863
  CDS (1)..(819): transl_table=11
gtgaacgagaacacggtcatgcaaccgcaccgtccccggtggcgcgtccgcaccgtccggggcgggaagtggatcagggagagggggcagaaggggctgtccagcctgccgcacctgttcaccctggcaaacctgtccttcggcatcgggagcctcctgctgaccatggacggccagtggcgcgcagcgtcgctgatggtcgtgggctcgctggtcgcggacgggctggacggccgcctggcccggctgatgaaggccgaaggggcgttcggacgcgagctggactcgctggccgacgtcgtcgccttcggcgtcgcgccagccgttctgctctaccagatggggctgcgggagctgggctacctcggcctggccgtcacgctgttcttcccgctctgcggggcgcttcggctggcccgcttcaacatcctcaccaacgagggctacttcctcggcgtgccgatcacggcggccggcaccctgctgtccaccatggccttctacttcctgcaggagacgaccgctccaccgccaccccacgtgatcccctccgtcatggtgatcctggggtacctgatgacctcgtccattccgtaccccgacttcaagaagcggcggaagggcgcgggcatccagttctggccgatcgtgggaccggtcctggcgctggccgcgctgctgttcgccgccggctggaacccgtgggccgtcatcctcatgcccctcacggcctacgtggtgctgggcccgtggctggtcgtcctgcgcaagtgggacgagaaagtacagccctggctggccgacgtcacccgccgctga

SEQ ID NO: 70626 - protein, 272 aa, Symbiobacterium thermophilum IAM 14863
MNENTVMQPHRPRWRVRTVRGGKWIRERGQKGLSSLPHLFTLANLSFGIGSLLLTMDGQWRAASLMVVGSLVADGLDGRLARLMKAEGAFGRELDSLADVVAFGVAPAVLLYQMGLRELGYLGLAVTLFFPLCGALRLARFNILTNEGYFLGVPITAAGTLLSTMAFYFLQETTAPPPPHVIPSVMVILGYLMTSSIPYPDFKKRRKGAGIQFWPIVGPVLALAALLFAAGWNPWAVILMPLTAYVVLGPWLVVLRKWDEKVQPWLADVTRR

SEQ ID NO: 70627 - DNA, 747 bp, Methylococcus capsulatus str. Bath
  CDS (1)..(747): transl_table=11
atggaagaaaacgcatctcccaatcccaagcgtcggcgcggcatctatctgctgcccaacctcttcaccacggccgctctgttcgccggcttctatgccatcacggcggcgctcaaccagcgcttcgagctggccgcgatttcgatcttcgtcgccatgatcctggatgggatggacggccgggtcgcccggatgaccaatacccagagcgcgttcggtgcggaatacgacagcatggcggacatgatttcgttcggggcggcgcccgccctggtggtctacatctggtcgctgtccactctgggcaagctcggctgggtcgccgcgttcgtccataccgccggcggcgcactgcgcctggcccgcttcaacacccagatcgccaccgccgacaagcgctatttccagggcctgcccagcccctccgccgccgccatcctggccggcttcgtctggttctctgtggaccagggcctgagcggcgagaccatgcgctacatcgccctgggactctccgtcgccacggggctggccatggtcagcaacttccgctactacagtttcaaggacgtcgacctgcgggggcgggtacccttcgtcaacgccatcttcgtgatgttgctgttcgcggtgctgttttccaacccgccgctggtgctgttcctgttcttcggcgcctatgccctgtcgggccccgcgttgacgctggccctgctgaaacggcggcgcggcgagcggcgcccgtga

SEQ ID NO: 70628 - protein, 248 aa, Methylococcus capsulatus str. Bath
MEENASPNPKRRRGIYLLPNLFTTAALFAGFYAITAALNQRFELAAISIFVAMILDGMDGRVARMTNTQSAFGAEYDSMADMISFGAAPALVVYIWSLSTLGKLGWVAAFVHTAGGALRLARFNTQIATADKRYFQGLPSPSAAAILAGFVWFSVDQGLSGETMRYIALGLSVATGLAMVSNFRYYSFKDVDLRGRVPFVNAIFVMLLFAVLFSNPPLVLFLFFGAYALSGPALTLALLKRRRGERRP

SEQ ID NO: 70629 - DNA, 756 bp, Silicibacter pomeroyi DSS-3
  CDS (1)..(756): transl_table=11
atgactgatccgttggataatgaagagcaatcaaaagttcgcctgatccatcttctgcccaatctgctcaccattgctgcgatctgcgcggggcttaccgcgatccggttcggctatgagggcaattttgagatggctgttcgcctcgttctcgtggcctgtgttctggatggtctggatgggcgggttgcccgtttcctgaaccactcgaccgcagtgggggcagagctcgactcgctggccgattttgtgaacttcggggttgcccccgtcctgatcctgcacagctgggcccttcaggatttttcgggcatcggttggatcgccgttctgttctattcgatctgctgcgtcctgcggttggcccggttcaatgtcagcggccgcttggaccccaaaagcgcgccttcggatttctttgttggcgtgcccgcccccgccggggcgctgctggtcctgctgccgctggttgtctcatttgcagtctcggacatgcccgtcgccccgcccgccattgtcgcgttgcacatttgcgtgatcggaattctgatgatcagccgaatgccgacatattcttttaagaacatggccatagatcgttccaacgcgaaattcttcctgctgggtgcgacaattttgagcgccgcgctgttaacctatctatggatcactctgacattcatcatcctggcttatgccggttgccttgtctgggtgtaccgctcctcccggaagctgaagaaaaccaaaggatag

SEQ ID NO: 70630 - protein, 251 aa, Silicibacter pomeroyi DSS-3
MTDPLDNEEQSKVRLIHLLPNLLTIAAICAGLTAIRFGYEGNFEMAVRLVLVACVLDGLDGRVARFLNHSTAVGAELDSLADFVNFGVAPVLILHSWALQDFSGIGWIAVLFYSICCVLRLARFNVSGRLDPKSAPSDFFVGVPAPAGALLVLLPLVVSFAVSDMPVAPPAIVALHICVIGILMISRMPTYSFKNMAIDRSNAKFFLLGATILSAALLTYLWITLTFIILAYAGCLVWVYRSSRKLKKTKG

SEQ ID NO: 70631 - DNA, 807 bp, Chlamydophila abortus S26/3
  CDS (1)..(807): transl_table=11
atggcagaattggaaccagaaatccgaggtaagcgtcgagtcgtgactcctaacgctatcactgccttcggtctctgttgtggactttttattatttttaagagtgttttaaagacatcatcttctgtagaactattgcatcgtttacaggggctttcgcttttgttaatcagtgcgatgatcgcggatttttctgatggtgctattgctcgcattatgaaagcggaaagtgctttcggagcacaatttgattctctttctgatgctataacattcggtatagcgcctccactcattgcgattaagagtctggatggtgtgtatgctgggggatttttttcttccctacttttagtaacctcgatcatttactccctgtgtggagttttacggttagtccgctacaatttgttctctaaaaaacctaacgaaactacacggcttccctgctttatcggtttgccgattcctgctgctgctgcatgtgttgtctctttagctttattcatagcctctgactttggtacagtacttccggtacaagtgcgtgtgactttgatttctttaggtctactatttattggaagtcttatgatctccccgtggaagttcccggggctcaaaaacctacgttttaaagtttcttcttttttacttgttgttactactggtttagtcgcatgtttgtttttcctaggtcttgttgatcattttaccgaagtatttttcttagtttcttggttatatgttttggtagcgttccctatttttgcgatcacatatcaaagaaagacaaaacggttatga

SEQ ID NO: 70632 - protein, 268 aa, Chlamydophila abortus S26/3
MAELEPEIRGKRRVVTPNAITAFGLCCGLFIIFKSVLKTSSSVELLHRLQGLSLLLISAMIADFSDGAIARIMKAESAFGAQFDSLSDAITFGIAPPLIAIKSLDGVYAGGFFSSLLLVTSIIYSLCGVLRLVRYNLFSKKPNETTRLPCFIGLPIPAAAACVVSLALFIASDFGTVLPVQVRVTLISLGLLFIGSLMISPWKFPGLKNLRFKVSSFLLVVTTGLVACLFFLGLVDHFTEVFFLVSWLYVLVAFPIFAITYQRKTKRL

SEQ ID NO: 70633 - DNA, 846 bp, Pseudomonas syringae pv. syringae B728a
  CDS (1)..(846): transl_table=11
atgagcgaacgtcctgaagagcccgtcaaggcctctgacgctgaaagtctgctacctatcgatgaacacgtggaagagggccatgacgccgaaggccggcaggtccggcatcggggtatctacctgcttcccaacctgtttaccacggcgaatctgttcgcgggtttctactccatcatcagctccatgagtgcgcaaagcgccatgagcgccggtgattttgccggggcaagcaagtatttcgcattcgctgcgattgcgatcttcgtggccatggtgctcgacggcctggatggccgtgtggcgcgcatgaccaacacgcaaagcgcgtttggcgccgagtacgattcgctgtccgacatggttgcctttggtgtggccccggcgttgctggcatttggctgggcgctgggcgacatgggcaaggtcggctggatggttgccttcatctatgtagccggcgctgcattgcgtctggcgcgcttcaatactcaggtcggcaaggctgacaagcgctacttcatcggcctggccagtccggcagcggcaggtgtagtggccggcacggtctgggcattcagcgatttcgggattcagggctccaagctgtcgtttctcgttgcgttgctggtcgcggccgccggtatgctgatggtcagtaacatcaagtacaacagcttcaaggagctggacttgaagggccgcgtgccgttcgttgcgattctggcggtggtcttggtgtttgctgtcgtattcagcgacccgccgcgcattttgctgctgatatttctcgcttacgctctgtccggccccattcagtatctgctacgtcgccgcaaggcctag

SEQ ID NO: 70634 - protein, 281 aa, Pseudomonas syringae pv. syringae B728a
MSERPEEPVKASDAESLLPIDEHVEEGHDAEGRQVRHRGIYLLPNLFTTANLFAGFYSIISSMSAQSAMSAGDFAGASKYFAFAAIAIFVAMVLDGLDGRVARMTNTQSAFGAEYDSLSDMVAFGVAPALLAFGWALGDMGKVGWMVAFIYVAGAALRLARFNTQVGKADKRYFIGLASPAAAGVVAGTVWAFSDFGIQGSKLSFLVALLVAAAGMLMVSNIKYNSFKELDLKGRVPFVAILAVVLVFAVVFSDPPRILLLIFLAYALSGPIQYLLRRRKA

SEQ ID NO: 70635 - DNA, 864 bp, Pseudomonas fluorescens Pf-5
  CDS (1)..(864): transl_table=11
atgtccatgagcgaacgtcccgaagagccaaaccaggcctctgacgccgaaagcctgctaccgatcgatgagcatgtcgaagaagggcatgacgctgaaggccgtaaagtccggcatcgtggtatctatcttctgccgaatctgttcaccactgcgaacctgttcgcggggttctattccatcattagctccatgagcgcccagagtgcaatgagcgccggagatgcggccggggcgagcaagtactttgcctttgccgcgatcgccattttcgtggccatggtgcttgatggcctggatgggcgtgttgcccgcatgaccaacacacagagtgcttttggcgctgaatacgactcgctgtccgatatggttgcattcggcgtagcgccggcgttgttggcctttggctgggccctgggtgacatgggcaaggtcggttggatggtcgccttcatctatgtggcaggcgcggccttgcgcctggcgcgtttcaatactcaagtcggtactgccgacaagcgttatttcatcggccttgccagcccggcagcggcgggtgtggtggccggtatcgtctgggcattcagcgactacgggatccaggggtcgaagatgtcgttcctggtggcgttgatggtggccgccgcaggcatgctgatggtcagtaacatcaagtacaacagcttcaaggacctggacctgaaagggcgtgtaccttttgtggcgatcctggcggtggtactggtgtttgcagtggtgttcagcgatccgccgcgcattctgcttttggtgttcctcgcctatgcggcgtcgggccctatccagtacctgttgcacctgcgtcgtcgcaaaagcgtcgagtga

SEQ ID NO: 70636 - protein, 287 aa, Pseudomonas fluorescens Pf-5
MSMSERPEEPNQASDAESLLPIDEHVEEGHDAEGRKVRHRGIYLLPNLFTTANLFAGFYSIISSMSAQSAMSAGDAAGASKYFAFAAIAIFVAMVLDGLDGRVARMTNTQSAFGAEYDSLSDMVAFGVAPALLAFGWALGDMGKVGWMVAFIYVAGAALRLARFNTQVGTADKRYFIGLASPAAAGVVAGIVWAFSDYGIQGSKMSFLVALMVAAAGMLMVSNIKYNSFKDLDLKGRVPFVAILAVVLVFAVVFSDPPRILLLVFLAYAASGPIQYLLHLRRRKSVE

SEQ ID NO: 70637 - DNA, 948 bp, Psychrobacter arcticus 273-4
  CDS (1)..(948): transl_table=11
atgacgactgatcaatcatcacgtagccttgaaaaaaacagtcttgcaaagggcggtctggtcactgataaagtgatgaatgacggtttgatcaaagagcctttattacaagatagcgccgccactcaaccgccttttatcgacgagcatgatttcgatattcgcttggcggataatgagaactatgatgggttgacgtttgaggtgattgaagcagaagtcgcggaaggtaagcgtgtggtcagtcgcggtgtttatttagcacccaacttgattaccacattatcgctgctgtcaggcttttattctattttagccagtacccaaggcgagttttataaggcctctttagcgattttcttatcggctattctggatggtgcagatgggcgggtggcgcgtatgctgaatgcgcaaagcccctttggcgagcagtatgattcgcttgccgatatgctagcctttggtgttgcaccggcaattctaatttatagctttgctttgcagccattaggtcgtattgggttaggttgtgcgtttgtctttactgcctgtgccgctttccgtttggcacgctttaacgttcagattggtgaagtcgacaaaaaatactttgttggtttagcaagtccacttgccgccattttggtaacggctgctgtcatggttgccgtcgatcacaatcaatggatcggacaatacgatacgcctgtgatgttcttatttgccgcttgggtcgttatttgcggtctgcttatggtcagcaacgtcaaatactatagctttaaagagtttgataagaagaaagttccttttgtggtgcttatcgttggtgtattggtcatgagtatcgttttatacgatattccagtcggcatcttagcgattggtgttatttatgctttgtcaggtattgttagtaccttacaagccaaagccaccagttaa

SEQ ID NO: 70638 - protein, 315 aa, Psychrobacter arcticus 273-4
MTTDQSSRSLEKNSLAKGGLVTDKVMNDGLIKEPLLQDSAATQPPFIDEHDFDIRLADNENYDGLTFEVIEAEVAEGKRVVSRGVYLAPNLITTLSLLSGFYSILASTQGEFYKASLAIFLSAILDGADGRVARMLNAQSPFGEQYDSLADMLAFGVAPAILIYSFALQPLGRIGLGCAFVFTACAAFRLARFNVQIGEVDKKYFVGLASPLAAILVTAAVMVAVDHNQWIGQYDTPVMFLFAAWVVICGLLMVSNVKYYSFKEFDKKKVPFVVLIVGVLVMSIVLYDIPVGILAIGVIYALSGIVSTLQAKATS

SEQ ID NO: 70639 - DNA, 846 bp, Pseudomonas syringae pv. phaseolicola 1448A
  CDS (1)..(846): transl_table=11
atgagcgaacgtcccgaggagcctaacaaggcctccgacgctgaaagtctgctacctatcgatgaacatgtggaagaagggcatgacgccgaaggccggcaggtccggcatcgcggtatctatctgctgcccaacctgtttaccactgcgaacctgtttgctggcttttactccatcatcagttccatgagcgcacaaagcgcgatgagtgcgggtgataccgccggcgcgagcaagtatttcgcgttcgctgccattgcgatcttcgtcgccatggttctcgacgggctggatggtcgcgttgcgcgcatgaccaatacccagagcgcgtttggtgccgaatacgattccctgtccgacatggtcgcctttggtgtggcgcccgcgctgctggcattcggttgggcattgggtgacatgggcaaggtgggctggatggtcgccttcatctatgtggcgggcgcggcattgcgtctggcgcgcttcaacactcaggtcggcaaggctgacaaacgttacttcatcggtttggctagcccggctgcggcaggtgttgtggccggcacggtctgggcgttcagtgatttcgggattcagggttcgaagctgtcgttcctggtggccttgctggttgcggcggcaggcatgctgatggtcagcaacatcaagtacaacagcttcaaggagctggacctgaaagggcgtgtaccttttgttgcgattctggccgtggtgctggtgtttgccgtggtattcagcgatccgccacgtattctgctgctgatattcctcgcctatgccctgtctggaccgattcagtatctattgcgtcgccgcaaggcctag

SEQ ID NO: 70640 - protein, 281 aa, Pseudomonas syringae pv. phaseolicola 1448A
MSERPEEPNKASDAESLLPIDEHVEEGHDAEGRQVRHRGIYLLPNLFTTANLFAGFYSIISSMSAQSAMSAGDTAGASKYFAFAAIAIFVAMVLDGLDGRVARMTNTQSAFGAEYDSLSDMVAFGVAPALLAFGWALGDMGKVGWMVAFIYVAGAALRLARFNTQVGKADKRYFIGLASPAAAGVVAGTVWAFSDFGIQGSKLSFLVALLVAAAGMLMVSNIKYNSFKELDLKGRVPFVAILAVVLVFAVVFSDPPRILLLIFLAYALSGPIQYLLRRRKA

SEQ ID NO: 70641 - DNA, 753 bp, Dechloromonas aromatica RCB
  CDS (1)..(753): transl_table=11
atgacagaactcaagccccgtaagaccctgttcaatccagagctaaagcggcgtggcatttatgtgctgcccaacctgttcaccacggcagcgctgttcgccggcttcttcgccattgtgcaggcgatgcagggggatttcgagcgggcggcgatggcgatctttatcgcgatggtcctcgatggcctggatggccgtgtggcccgattgacgcatacacaatcggcttttggtgccgagtatgactcgctttcggacatggtcagcttcggcgcggcgccggcattggtcatgtacgagtgggcattgcgcgatctcggccggattggctggatcgctgcgttcatctattgcgccggtgcggcattgcgcctggcgcgtttcaatacaacgctggaagtgatggacaagcgtttcttccagggcttgccctcgcctgcagcggcggcgctggtcgctggtctggtctgggtgatgattgtttctggtgtcccgggcagtgatgtgcgctggctggcctgtgtgctgaccatctttgccggaattaccatggtctccaatatccgctattacagtttcaaggacgtcaatctcaagaagagcgtgcccttcttcgtgattgccgccattgcgcttggctttgcgctggtggcctacagccctgaaattgccctgtttgggttctttgtcttttatggtttgtccggttacgtgctggccgctctcggcctgttgaagcgtaaggcacagtga

SEQ ID NO: 70642 - protein, 250 aa, Dechloromonas aromatica RCB
MTELKPRKTLFNPELKRRGIYVLPNLFTTAALFAGFFAIVQAMQGDFERAAMAIFIAMVLDGLDGRVARLTHTQSAFGAEYDSLSDMVSFGAAPALVMYEWALRDLGRIGWIAAFIYCAGAALRLARFNTTLEVMDKRFFQGLPSPAAAALVAGLVWVMIVSGVPGSDVRWLACVLTIFAGITMVSNIRYYSFKDVNLKKSVPFFVIAAIALGFALVAYSPEIALFGFFVFYGLSGYVLAALGLLKRKAQ

SEQ ID NO: 70643 - DNA, 894 bp, Ralstonia eutropha JMP134
  CDS (1)..(894): transl_table=11
atggttgcctttcaccgccgcaacaagcgggccaacagcggaaacgtgacgcatctgcgtccgttccgtcataaccagctgcgcggcacagacgacctggatgacgatgccgtcgacgacgaccatgacatcgtctaccagcggccgcgccggcgcggcatctacctgctgcccaatgcgttcaccacggctgcgctgttcgccggcttcttcgcgatcgtgcaggccatgaacatgcgcttcgacgtggcggctatcgccatcttcgcagccatggtgctcgacggcatggatggacgcgtggcacgcatcaccaacacgcagagcgcgtttggcgagcagtacgattcgctgtcggacatgacgtcgttcggcgtggcgccggccctggtgatgtacgaatggattctgcacgacctgggcaagtggggctggatcgccgcctttgtgtactgcacgtgcgcggcgctgcggctcgcgcgcttcaacgccaatatcggtgtcgtcgacaagcgctttttccagggacttcctagcccggccgctgccgcattggtggccggctttgtctggctggtcatcgacaacaagctccccgtcaaggagctgtggatgccgtgggtggccttcggtatcacgctgtacgcggggctatcgatggtgtcgaacgcaccgttctacagcggcaaggcgctggatgtccgctaccgcgtgccgtttggcatgatggtgctcgttcttgtgctgttcgtgctggtgtcgacggatccgccggtggcgctgtttgcgctctttgtcgcgtatgcgatttccggttacgtgctgtggggctggcgtgccatccacggccagccgggagtggcaaagaaagtgcgcgataacggctcgcactga

SEQ ID NO: 70644 - protein, 297 aa, Ralstonia eutropha JMP134
MVAFHRRNKRANSGNVTHLRPFRHNQLRGTDDLDDDAVDDDHDIVYQRPRRRGIYLLPNAFTTAALFAGFFAIVQAMNMRFDVAAIAIFAAMVLDGMDGRVARITNTQSAFGEQYDSLSDMTSFGVAPALVMYEWILHDLGKWGWIAAFVYCTCAALRLARFNANIGVVDKRFFQGLPSPAAAALVAGFVWLVIDNKLPVKELWMPWVAFGITLYAGLSMVSNAPFYSGKALDVRYRVPFGMMVLVLVLFVLVSTDPPVALFALFVAYAISGYVLWGWRAIHGQPGVAKKVRDNGSH

SEQ ID NO: 70645 - DNA, 789 bp, Thiobacillus denitrificans ATCC 25259
  CDS (1)..(789): transl_table=11
atgctcgaataccaccatcgcaagaccgaatcacgccacacccggatgcgcgaccgcggcatctatctgctgcccaatctcttcacgaccggcgcgctgttcgcgggcttctacgccgtcgtgcaggcgatgaatggccgcttcgaacacgcggcggtcgcgatctttatcgccatggtgctcgacggactcgacggccgggtcgcgcggatgacccgcacgcagagcgccttcggcgccgagtacgacagcctctccgacatggtgtcattcggcgtcgcgccggcgctcgtgatctacgaattcgcgctacagggtatgggaaagctcggctggatcgccgcttttgtctactgtgcgggcgctgccctgcgcctcgcgcgcttcaacacccagctggatgtcgtcaccgacaagcgctttttccagggcctgccgagcccgtcggccgccgcgctgatcgcgggtttcgtctgggtcatggtcgagtacggggtcgtcggcgaggacgtgcgctggctcgccgccatcatcgcgctcttcggcgggctgacgatggtcagcaacttccgctactacagcggcaaggaaatcaacctgcgcaaaagcgtgcccttcttcgtcatcctgctgatcgtgctcgccttcatcctgatctcgacgagcccgcccgaagtgctgttcggcgtgttcctgctctacggcctctcgggctacggttacgcggtatggttgctgtggcagcgccgcaaggcctccgcagcgggcttgcagggcgaacaaaaatag

SEQ ID NO: 70646 - protein, 262 aa, Thiobacillus denitrificans ATCC 25259
MLEYHHRKTESRHTRMRDRGIYLLPNLFTTGALFAGFYAVVQAMNGRFEHAAVAIFIAMVLDGLDGRVARMTRTQSAFGAEYDSLSDMVSFGVAPALVIYEFALQGMGKLGWIAAFVYCAGAALRLARFNTQLDVVTDKRFFQGLPSPSAAALIAGFVWVMVEYGVVGEDVRWLAAIIALFGGLTMVSNFRYYSGKEINLRKSVPFFVILLIVLAFILISTSPPEVLFGVFLLYGLSGYGYAVWLLWQRRKASAAGLQGEQK

SEQ ID NO: 70647 - DNA, 858 bp, Pseudomonas fluorescens PfO-1
  CDS (1)..(858): transl_table=11
atgagcgaacgtcccgaagagccgaaccaggcttccgacgccgaaagcctgctgcccatcgatgagcacatcgaagaagggcatgacgcagaaggccgtaaagtccggcatcgtggtatctatcttctgccaaatctgttcaccactgcgaacctgttcgcagggttctattccatcatcaattcgatgagtgcccaggctgcgttgagcgccggtgactcggcgaatgcgagcaagtactttgcctttgccgccatcgcgatttttgtcgccatggtgctcgacggtcttgatggtcgcgtagcgcgcatgaccaatacccaaagtgccttcggcgccgagtacgactcgctgtcggacatggtcgcctttggtgtcgcgccggcattactggcattcggctgggcgctgggtgacatgggcaaggtcggctggatggttgccttcatctatgtggcgggtgcggcgttgcgtctggcgcgcttcaacactcaggtgggtaccgccgacaagcgctacttcatcggcctggccagcccggctgctgccggtgtggtcgcggggattgtctgggcgttcagcgattacgggatccagggttcgaagatgtcgttcctggttgcgttgatggtggcggccgccggcatgctgatggtcagcaacatcaagtacaacagcttcaaggagctggacctgaaggggcgggtgcctttcgtggcgatccttgcagtggtgctggtgtttgccgtggtgttcagcgatccgcctcgcattctgctgctggtgttcctcgcctatgccgcttcgggcccggtgcagtatctgttgcatcttcgtcgtcacaaacacgccgagtga

SEQ ID NO: 70648 - protein, 285 aa, Pseudomonas fluorescens PfO-1
MSERPEEPNQASDAESLLPIDEHIEEGHDAEGRKVRHRGIYLLPNLFTTANLFAGFYSIINSMSAQAALSAGDSANASKYFAFAAIAIFVAMVLDGLDGRVARMTNTQSAFGAEYDSLSDMVAFGVAPALLAFGWALGDMGKVGWMVAFIYVAGAALRLARFNTQVGTADKRYFIGLASPAAAGVVAGIVWAFSDYGIQGSKMSFLVALMVAAAGMLMVSNIKYNSFKELDLKGRVPFVAILAVVLVFAVVFSDPPRILLLVFLAYAASGPVQYLLHLRRHKHAE

SEQ ID NO: 70649 - DNA, 873 bp, Burkholderia sp. 383
  CDS (1)..(873): transl_table=11
atggccgcattcaaaccgcgtcggccgcgcaacggcgccggccagacgccacgcccgttccgccgcaacaaggtgatggcaccggattcggtgcccatcgagagccgccgcgccgcgcgccagcggttcctgaagacgcgcggcatctacctgctgccgaacgcattcacgaccgccgcgctgttctgcggcttcttcgcggtcgtgcaggcgatgaacgtgcgcttcgagatcgccgcgatcgcgattttcgtcgcgatggtgctcgacgggatggacgggcgcgttgcccgcatgacgcatacgcagagcgcgttcggcgagcagttcgacagcctgtcggacatggtgtcgttcggcgtcgcgcccgcgctcgtgatgtacgagtgggtgctgaaggatctcggccgctggggctggctcgccgcgttcgtctattgctcgggcgccgcgctgcggctcgcgcgtttcaacacgaacatcggcagcgtcgacaagcgtttcttccaggggctgccgagcccggcggccgcggcgctgattgccggcttcgtgtggctcgccaccgacaaccgcgtgccgatgaagctcggctggctgccgtgggtcgcgttcgtgctgacgatctacgcgggcgtgacgatggtgtcgaacgcgccgttctacagcggcaaggcgctcgacgtgcggcaccgtgtgccgttcgcggcgatcctgctggtcgtcgtcgcgttcgtgctcgtgtcgtccgatccgccgctgatgctgttctgcctgttcgtgctgtacgggctgtccggctacgtgttctgggcctacatggccattcgcgggcgcgcgaatccggcgcgctcgtcgcagcgcgatcactga

SEQ ID NO: 70650 - protein, 290 aa, Burkholderia sp. 383
MAAFKPRRPRNGAGQTPRPFRRNKVMAPDSVPIESRRAARQRFLKTRGIYLLPNAFTTAALFCGFFAVVQAMNVRFEIAAIAIFVAMVLDGMDGRVARMTHTQSAFGEQFDSLSDMVSFGVAPALVMYEWVLKDLGRWGWLAAFVYCSGAALRLARFNTNIGSVDKRFFQGLPSPAAAALIAGFVWLATDNRVPMKLGWLPWVAFVLTIYAGVTMVSNAPFYSGKALDVRHRVPFAAILLVVVAFVLVSSDPPLMLFCLFVLYGLSGYVFWAYMAIRGRANPARSSQRDH

SEQ ID NO: 70651 - DNA, 780 bp, Geobacter metallireducens GS-15
  CDS (1)..(780): transl_table=11
atgaatggtgaaaagattgacatgagcgagagcatgcggaaggggatttacatccttccgaatctctttaccacgggaagcctgtttgccggcttttacggtatggtcgccaccatgaacggcgatttcaagaccgccgcgctctggattcttgtctcctccatctttgatggccttgacggcaaggttgcgcggcttaccggcacctccagcaagttcggggtcgaatacgactcgctcgcggatgtggtatccttctgtgtcgctccggcactcctcacatacaagtgggcgctccaaccctttggccgcttggggtggcttgcggcgtttctctttgtcgcctgcggggcgctcaggttggcccgctttaacgttcaggtcaacacggtggagagcaagcgtttcgtgggactaccgacccctgcggctgcgagtatggtgtcggccatggtgcttcttttctaccacttcggctggcccagttcttacaagaaactggcgatcctggtcctcatttatcttctcgcctttctcatggtttccaacttccggtactactccttcaaggatcctgagttgatcaagcgccagccctttgcctttctcgtgcttgcggtgcttctcctggtggttattgcggcagaaccggtcgtcatgctctttctgattttcatttgctacacgttttcggggattgtcggtttcttgatgacctggccacggcggcgcagactcgagaaggcgatccataacaaacacaccaaggaagagccctga

SEQ ID NO: 70652 - protein, 259 aa, Geobacter metallireducens GS-15
MNGEKIDMSESMRKGIYILPNLFTTGSLFAGFYGMVATMNGDFKTAALWILVSSIFDGLDGKVARLTGTSSKFGVEYDSLADVVSFCVAPALLTYKWALQPFGRLGWLAAFLFVACGALRLARFNVQVNTVESKRFVGLPTPAAASMVSAMVLLFYHFGWPSSYKKLAILVLIYLLAFLMVSNFRYYSFKDPELIKRQPFAFLVLAVLLLVVIAAEPVVMLFLIFICYTFSGIVGFLMTWPRRRRLEKAIHNKHTKEEP

SEQ ID NO: 70653 - DNA, 828 bp, Rhodospirillum rubrum ATCC 11170
  CDS (1)..(828): transl_table=11
atggtccgccacccccacgtcctgcgccggagcaccccgcgatttcaggggatgccgttcaacaagatggtccccaatatgctgaccttgctggcgctttgcgccggcttgacgtccattcgctatgggctgcatggggaataccagaaggcggtggtcgccctggtgttttcggccatcttcgacggcctggacgggcgggtggcgcgcttgctcaagggcaccagccagttcggcgccgaactcgacagcctgtcggatttcgtctgcttcggcgtcgccccggcgatgcttttgtatttatggacgatgagcggcgccggtggcatcggctgggccctggtcttgctctatgtcgtgtgctgcggcctgcggctggcccggttcaatacccagttgatgggcgaaaaggacctgccgtcctgggcctataactatttcaccggggtgcccgccccggcggcggccggtctggtgttgttgccgatgatcttgtcgtttgaaagcggcgccgatttcctggtcagcccggtggttgccggggtgttcctggttggtgtggcggcgctgatggtcagcaagctgccgaccttcagcttcaagaaagccaagatcccccacgtctatgtgctgccgctgatgctggccatcggcgttttggccgcctttctggtgaccaatccctggctgacgctgggcggccttggcctgttctatctggccctgctgcccttcggcctgcgctcgttccgcaagcttcagcgcgaggcccagcaggtgacgggcgaaatcgccgaggaaacggtcggcgctccgcccgagccctga

SEQ ID NO: 70654 - protein, 275 aa, Rhodospirillum rubrum ATCC 11170
MVRHPHVLRRSTPRFQGMPFNKMVPNMLTLLALCAGLTSIRYGLHGEYQKAVVALVFSAIFDGLDGRVARLLKGTSQFGAELDSLSDFVCFGVAPAMLLYLWTMSGAGGIGWALVLLYVVCCGLRLARFNTQLMGEKDLPSWAYNYFTGVPAPAAAGLVLLPMILSFESGADFLVSPVVAGVFLVGVAALMVSKLPTFSFKKAKIPHVYVLPLMLAIGVLAAFLVTNPWLTLGGLGLFYLALLPFGLRSFRKLQREAQQVTGEIAEETVGAPPEP

SEQ ID NO: 70655 - DNA, 765 bp, Syntrophus aciditrophicus SB
  CDS (1)..(765): transl_table=11
atgaagcagggggacaaattgggcagaggccgcatgaaaaaaggggtttacctcttaccgaatcttttcacatcggctaatctttttttcggattttattcaatcattttatcaataaggggatcatttgcccaggcgtcgttctttgttctcatatcgattgttcttgacagtctggatggacggatcgctaggatgaccaactccatgagtaaattcggcactgaatacgattcattgtccgacctcgtcgcctttggggttgcgcccgcagtgatggtttatttatggtccctttctcattacggcaaatggggggttgtggcgtcgttcttatttgttctttgtggagctctgcgtctggcacgcttcaatattcagatcggcattgtggaaagtaaagtcttcaatggtttggccatacctgccgcggcagcggttgttgtaactggaatactgctttatgattatctggtaggcaaggggtcctttcctcatgtccttattccagttgccgtggtcgtcctgtcttttctgatggtcagtaacgtgaaatattacagtttcaaggatctgaactatttcgccagaaagcctttcatgtctttttttctgattgtgattgtcttactcattattgtggctgaacctcagatcatggtcttcatatttgcattaacatactgcctgtccggccctgtttggatgcttttcagaatcctgcgccgttatctcgattcgcgaatgcaggcttcaaagccgtaa

SEQ ID NO: 70656 - protein, 254 aa, Syntrophus aciditrophicus SB
MKQGDKLGRGRMKKGVYLLPNLFTSANLFFGFYSIILSIRGSFAQASFFVLISIVLDSLDGRIARMTNSMSKFGTEYDSLSDLVAFGVAPAVMVYLWSLSHYGKWGVVASFLFVLCGALRLARFNIQIGIVESKVFNGLAIPAAAAVVVTGILLYDYLVGKGSFPHVLIPVAVVVLSFLMVSNVKYYSFKDLNYFARKPFMSFFLIVIVLLIIVAEPQIMVFIFALTYCLSGPVWMLFRILRRYLDSRMQASKP

SEQ ID NO: 70657 - DNA, 843 bp, Novosphingobium aromaticivorans DSM 12444
  CDS (1)..(843): transl_table=11
gtgattgcccagggcgaacccgagggcccgcgccggggtcgccttcccgggggactcacgctgcgcgcgatggcacccaacgccatcaccacggcggccctctgttcgggcctgaccggcatccgttttgccgtaaccgcggcttcgggcaccgaccccgtgctggttgccgaagactggcggcgcgcggtagcggcggtcatcatcgcgggcatgctggacggcatcgacgggcgcatagctcgcctgctaaaggcgcaatcgcgtttcggcgcggaactcgacagtctggccgacaacgtctcgttcggcgtagcaccggcgctgatcctgttcctgtggtctctgcaggaggcgccgcgcgtcggctggtttgccgcacttgccgtagcgatcgcatgtgcgctgcgccttgcacggttcaacgcgcggatcgatattgaagagcaaccccacaagtcagccgggttccttaccggcattccggcgccggtcggcgcagggcttgcgttcctgccgctctatctgtggttcgcgaccgacaatccctggttccgccagcccatcgtcacgggaccctggctggtgctgatcgcgttcctgatgatctcgaacatcgcaacgctcagctggacttcgatgcggccgcgccgaaacgtacggcttgaactgatcctgctggtgggcctggtgattgcggcgttgctgaccgaaccctggctgacgctggtggggatctgcgtggtttacctgctgctcatcccgatgggcgtgtatcgttacgcaaaggtcaggcggcagcgcgctgcccacgcccgagccgggcagcttccgaccgcttga

SEQ ID NO: 70658 - protein, 280 aa, Novosphingobium aromaticivorans DSM 12444
MIAQGEPEGPRRGRLPGGLTLRAMAPNAITTAALCSGLTGIRFAVTAASGTDPVLVAEDWRRAVAAVIIAGMLDGIDGRIARLLKAQSRFGAELDSLADNVSFGVAPALILFLWSLQEAPRVGWFAALAVAIACALRLARFNARIDIEEQPHKSAGFLTGIPAPVGAGLAFLPLYLWFATDNPWFRQPIVTGPWLVLIAFLMISNIATLSWTSMRPRRNVRLELILLVGLVIAALLTEPWLTLVGICVVYLLLIPMGVYRYAKVRRQRAAHARAGQLPTA

SEQ ID NO: 70659 - DNA, 795 bp, Anaplasma phagocytophilum HZ
  CDS (1)..(795): transl_table=11
gtgaagctattccccagtgtggtcacaatgttggggttgtgcgctgggctgacttctataaagtacactttcgccggaaattgggaactagcagccatattaataattgtggctgcgtttatggacggaatagatggcagaatagctcgtttgcttaattctgccactggtttcggtgctcagttagattctttagcggattttttgaatttcggcgttgctccggcatttttgctatatttttggctgctgcgtgacatgaaagtcatcggatggatgctggtgatgattttcgtagtgtgtatgtctataaggctcgccaggtttaatgtttccttgaacaaagataaagagaaggatgattggagaaagtacttctttgtaggcgtgcccgcgcctataggtgctggtctttcgcttgtgcctgtaatgcttacttttagtgatattaatattgctgtgcttgatgatgcattgcagaacaagaatattatcgcgatctactttgtgttcgttgcatttttatctgtgagtaatatacccacagcttctgctaagtatcatagtatacctaagaggctgtcttacctttttattacgcttttggctgtgctaatggtgctggctataaccaatccttggattacttttccgattatgggttttacgtatcttatgtctattcccatctttggggtgtactatatgtatgttgattcaaagcgaagtaatatggaagaggaagacgcggaggctttgctatttgaaaatgatgaagatgacgacaacgtatag

SEQ ID NO: 70660 - protein, 264 aa, Anaplasma phagocytophilum HZ
MKLFPSVVTMLGLCAGLTSIKYTFAGNWELAAILIIVAAFMDGIDGRIARLLNSATGFGAQLDSLADFLNFGVAPAFLLYFWLLRDMKVIGWMLVMIFVVCMSIRLARFNVSLNKDKEKDDWRKYFFVGVPAPIGAGLSLVPVMLTFSDINIAVLDDALQNKNIIAIYFVFVAFLSVSNIPTASAKYHSIPKRLSYLFITLLAVLMVLAITNPWITFPIMGFTYLMSIPIFGVYYMYVDSKRSNMEEEDAEALLFENDEDDDNV

SEQ ID NO: 70661 - DNA, 816 bp, Francisella tularensis subsp. holarctica
  CDS (1)..(816): transl_table=11
atgtggttattagaaaatatagacatgaaaaaatcaaaatatatactacctagtttgtttactagtgctagtttattatttgctttcttagcaattatagcagcctttaatggtaattttgtctcgtctgcagtatacatgcttttagcaggttttgcagatgcatttgatggtagggttgctaggtatacacacactcaaactgaatttggtgctgctttagatagtcttgctgatgtggtttcatttggagctactccagccttagttatgtatttttggagtttgcataatattggtgctctaggcgcagctatttcatttttgtacttgcttgctgtagcattaagattagctaaatttgatactatgcctgctggtgataattcagaggaaaatataattgagcgtcgtttatatttttatggaatgccatgtccagctggtgctgtaactatatcaggattaatctggatggggcaaagaacatttgttggtgattatgcttttataacggtaattttgactgtttttacagctttatatcttgcttttatgatggttagtgatattaagtttagaagctttaaagatagtgatggtaaaggtaatattagtaagttgtatgtaatttgttttattttgattattcttatgttatttacgatgcctgataaattactttatttgattatgataggttatgccttatcaggtccgatatctcattacagatataaagctaaaattaaaaatagtgatctaaatgaagaatcatcggttgatggtaagaaaataatagatattgagaagtag

SEQ ID NO: 70662 - protein, 271 aa, Francisella tularensis subsp. holarctica
MWLLENIDMKKSKYILPSLFTSASLLFAFLAIIAAFNGNFVSSAVYMLLAGFADAFDGRVARYTHTQTEFGAALDSLADVVSFGATPALVMYFWSLHNIGALGAAISFLYLLAVALRLAKFDTMPAGDNSEENIIERRLYFYGMPCPAGAVTISGLIWMGQRTFVGDYAFITVILTVFTALYLAFMMVSDIKFRSFKDSDGKGNISKLYVICFILIILMLFTMPDKLLYLIMIGYALSGPISHYRYKAKIKNSDLNEESSVDGKKIIDIEK

SEQ ID NO: 70663 - DNA, 876 bp, Saccharophagus degradans 2-40
  CDS (1)..(876): transl_table=11
atgacggatcaaaaaaaggagcaaaaagaagagttggcgctttcggtgccagacgggcttcctgttgatgagcatatagaagaagtgtctgagggcggtaaaaaagtgcagcgaagaggtgtctaccttttgccaaacctatttacaaccggtgctttgtttggtggcttctttgccatcatttctgctatgaaaggtaattttgatcatgcggcattagcgatatttgctgcgcagatactcgatggctttgatggtcgggttgcgcgcatgaccaatactgagagccgcttcggtacagagtacgatagcttgtccgatatggtctcctttggcttggctcctggtattgttgctttcagttgggggttggagcctctaggtaaatttggttgggctgcggcatttgtttttgtttgttgtgcagctttgcgccttgcacgctttaacactcagtcaggtaaaacagatagcaactattttactggtttggcgagcccccctgcagctacgcttttagcttccggcgtgtggtgtggcagtgagcttgagctaacaacccaggtatcggtttttgctgctattttgaccgcctttgttggcttaatgatggtgtctaatttccgttaccattcttttaaagggttggatgctaaccggcgcgtaccatttgtttctatgtttattgttgtaatggtatttatattggtaaccatagatcctcccaaagttttatttgcaatggcttttatttatgccacctctgggcctattgcctggcttatcggcttttttaaaggcgcggccaccaaggtagcagctgtcgactcagctgatagcaactcttctagtgaagcggaagaaaaagctaagtaa

SEQ ID NO: 70664 - protein, 291 aa, Saccharophagus degradans 2-40
MTDQKKEQKEELALSVPDGLPVDEHIEEVSEGGKKVQRRGVYLLPNLFTTGALFGGFFAIISAMKGNFDHAALAIFAAQILDGFDGRVARMTNTESRFGTEYDSLSDMVSFGLAPGIVAFSWGLEPLGKFGWAAAFVFVCCAALRLARFNTQSGKTDSNYFTGLASPPAATLLASGVWCGSELELTTQVSVFAAILTAFVGLMMVSNFRYHSFKGLDANRRVPFVSMFIVVMVFILVTIDPPKVLFAMAFIYATSGPIAWLIGFFKGAATKVAAVDSADSNSSSEAEEKAK

SEQ ID NO: 70665 - DNA, 795 bp, Methylobacillus flagellatus KT
  CDS (1)..(795): transl_table=11
atggctgaaattcccaatcgtccgcgccgccatcactcattcatggaatccggcttgcgtgagcgcagcatctacctgttgcccaatctattcactactgcggcactgttcgccgggttctatgcgattgtgcaggccatgaatggcaagttcgagcattctgctgtggccattttcattgccatggtcatggacgggctggatggccgggtggcgcgcatgaccaatacgcaaagcgcgttcggcgcggaatacgacagcctttccgacatggtgtcgtttggtgtcgcgccagcattggtgatgtacgtctgggcgctgaagcccctgggcaagctgggctggattgccgcattcatctattgtgcgggtgcggccttgcgcctggcccgcttcaacaccaagctcgacgagagcgataagcgctatttccaggggctgcccagtcctgctgccgctgctttgcttgcagggctggtgtgggtatcgtatgaaaaccatgtgagcagtacggaggtgttttttgatgccgtcaaaatgcagtgggtcgcctggagtatcacattgtttgccgggctgtccatggtgagcgacctgcgctactacagtggtaaggacatcaatttgcgtcgcagtgtgccatttgttgtgattctattgatcgtgctggcattcgtgctgatttcctatagtccgcctgaagtgttgtttgccgttttcctgggctatggtgtttctggttatgtactatggatatggggtaagcgcaagaaggccgcccgcccgcaagggtaa

SEQ ID NO: 70666 - protein, 264 aa, Methylobacillus flagellatus KT
MAEIPNRPRRHHSFMESGLRERSIYLLPNLFTTAALFAGFYAIVQAMNGKFEHSAVAIFIAMVMDGLDGRVARMTNTQSAFGAEYDSLSDMVSFGVAPALVMYVWALKPLGKLGWIAAFIYCAGAALRLARFNTKLDESDKRYFQGLPSPAAAALLAGLVWVSYENHVSSTEVFFDAVKMQWVAWSITLFAGLSMVSDLRYYSGKDINLRRSVPFVVILLIVLAFVLISYSPPEVLFAVFLGYGVSGYVLWIWGKRKKAARPQG

SEQ ID NO: 70667 - DNA, 894 bp, Ralstonia metallidurans CH34
  CDS (1)..(894): transl_table=11
atgggtgccttcaatcgacgcaacaagcgcgtcaacaacggtaacgtgacgcacctgcgtccgtttcgccgtaaccaattgcgcaacgacaatgcgtatgacccggacgagcacgatctggagtacgtgcgtccgcgccgtcgtggcatttatctgctgcccaacgcctttaccaccgctgcattgttcgcaggcttctttgcgatcgtgcaggcgatgaacatgcgcttcgacgtggcggccatcgcaatctttgcggcgatggtgctcgatggcatggatggccgcgtggcccgcatcacgaacacgcagagcgcgtttggcgaacagtacgattcgctgtcggacatgacgtcgttcggcgtggcgccggctctggtcatgtatgagtggatcctgcatgacctgggcaagtggggctggattgccgcctttgtctactgcacttgcgcggcgctacgactggcgcgcttcaatgccaatattggcgtggtcgacaagcgcttcttccaggggctgccgagcccggctgccgcggcgttggtggcgggctttgtctggctggcgatcgacaacaagctgcccgtcaaggagctctggatgccgtgggtcgcattcggcatcacgctctatgccggcttgtcgatggtgtccaatgcgccgttctacagcggtaaggcactggatgtgcgctatcgcgtgccgttcggcatgatggtgctggtactcgtgctgttcgtggtcgtgtcttccgatccacccgtggcactgtttggcctgttcgtcgcctatgcgatttcaggttacctgctttgggcatggcgaacgctgcacggtcagcgtggcggcgtcgacaagtcgcgcgcgccgggcaacggctcaggcggcaactga

SEQ ID NO: 70668 - protein, 297 aa, Ralstonia metallidurans CH34
MGAFNRRNKRVNNGNVTHLRPFRRNQLRNDNAYDPDEHDLEYVRPRRRGIYLLPNAFTTAALFAGFFAIVQAMNMRFDVAAIAIFAAMVLDGMDGRVARITNTQSAFGEQYDSLSDMTSFGVAPALVMYEWILHDLGKWGWIAAFVYCTCAALRLARFNANIGVVDKRFFQGLPSPAAAALVAGFVWLAIDNKLPVKELWMPWVAFGITLYAGLSMVSNAPFYSGKALDVRYRVPFGMMVLVLVLFVVVSSDPPVALFGLFVAYAISGYLLWAWRTLHGQRGGVDKSRAPGNGSGGN

SEQ ID NO: 70669 - DNA, 864 bp, Acidobacteria bacterium Ellin345
  CDS (1)..(864): transl_table=11
atgcgtcgtaaagatgacgatcctggccgacaacgccggctgcgtaagggcctgtacatccttccttcgctcttcaccgcggtgaacatcgcggcgggctattacgccatctcccaggcgattcaagctgccaacaaccagggtgatccgcggcactacgatctcgctgcgctcgcgattggcttcgcgatcgtcttcgacggcctcgacggccgcgtggcgcgcatgaccaacaccaccagcgattttggccgcgaactcgattcgcttgccgacgtaatcaccttcggcatggcgcccgcgatcctcgcgtggctgtggggcttccacgccatggcgatggccaacacggttctgcaagggaagctcatgcgcttcggcgccgtggtgaccttcctgttcctcgccgctggcgcttgccgtctcgcacgcttcaacatccaattgaatccgcagccatcaaacccgggcaggccaggaaagaaatactttgtcggtatgccgatacctggcggtgcgggcgtcatcgcgtccgtggttcactttgcgcacggctatcccatcgcgtcctggtggatggcgctaatctgggcgttcttcgttcttacgctcggattcctcatggtcagccgctggcgcttcccgagtttcaagggcgtggatttccgccagcgtcactcggcgcgactcattgttgtgctgtgcgcactggttgcgatgatcatcttgttctccgattggacgctgttcgtcatttccatcacgtatatgttctggggcattttctcgcggctcttctatggcttccgccgcggatcgcaaatgccgccgccgtctcccgaccaggttgtacacgccgactga

SEQ ID NO: 70670 - protein, 287 aa, Acidobacteria bacterium Ellin345
MRRKDDDPGRQRRLRKGLYILPSLFTAVNIAAGYYAISQAIQAANNQGDPRHYDLAALAIGFAIVFDGLDGRVARMTNTTSDFGRELDSLADVITFGMAPAILAWLWGFHAMAMANTVLQGKLMRFGAVVTFLFLAAGACRLARFNIQLNPQPSNPGRPGKKYFVGMPIPGGAGVIASVVHFAHGYPIASWWMALIWAFFVLTLGFLMVSRWRFPSFKGVDFRQRHSARLIVVLCALVAMIILFSDWTLFVISITYMFWGIFSRLFYGFRRGSQMPPPSPDQVVHAD

SEQ ID NO: 70671 - DNA, 819 bp, Shewanella sp. MR-7
  CDS (1)..(819): transl_table=11
atgcaaaattcctcgaatcaaacagtaaagaataaaggtatctatttactgccgaatttattcaccaccgccggcttgttttccggtttctatgctgtgattgcctctatgaatgctaactttgaagcggcggcgattgcgatttttgtggccatgatttgcgatggcttagacggtagagtggcaagattaacgaatacgcaaagtgactttggtgccgaatatgacagcatggcggatatggtgtcttttggtatggcgcctgcgttactcgcctacaattgggcgcttgcagatttaggcaaggttggttggctcgcagcatttatctattgtgcgggcgctgcattaaggttggcacgttttaatacacaggtcggcgtggcagataagcgttattttcaaggcctagcgagtcctgcggctgcggcagtaattgctggtagcatttggcttggcaatcagtacaacctcgatggtaagaatatcagctggattgccggattgattacggccaccacgggattattaatggtgagtaatttccgctatcactctttcaaggagattgactggcgcggcaaagtgaatttcatcgctatcttatttgtggttggtgtgtttgtcgttgtttcagtacaacctgcgctaattctctgtattggtttttatctttatgcaatctcgggtccagtgatcactattcgcactgtgagaaaactcaaagtggcacatattgttggcgatggagagcatgaaaaggaacaagacacagaagagggcaccaagagttcaaaaaaatctacggataatccttag

SEQ ID NO: 70672 - protein, 272 aa, Shewanella sp. MR-7
MQNSSNQTVKNKGIYLLPNLFTTAGLFSGFYAVIASMNANFEAAAIAIFVAMICDGLDGRVARLTNTQSDFGAEYDSMADMVSFGMAPALLAYNWALADLGKVGWLAAFIYCAGAALRLARFNTQVGVADKRYFQGLASPAAAAVIAGSIWLGNQYNLDGKNISWIAGLITATTGLLMVSNFRYHSFKEIDWRGKVNFIAILFVVGVFVVVSVQPALILCIGFYLYAISGPVITIRTVRKLKVAHIVGDGEHEKEQDTEEGTKSSKKSTDNP

SEQ ID NO: 70673 - DNA, 756 bp, Alkalilimnicola ehrlichei MLHE-1
  CDS (1)..(756): transl_table=11
atggatgcgagcaagcgccgtcgtggcatctatctgctgcccaacctcctgaccaccggttgtctgtttttcggcttcttcgccatcatctcggccttcaacggcgacttccgcaacgcggccctggccatcttcattgccatggtcttcgatggcctggacggccgtgtggcacggatgaccaacacccaaagcgacttcggcgtacagtttgacagcattgcggacatggtcagcttcggcgtagggccggccctggtggcctggatctgggcgctctccggcaccgccagcctgcccgggccgttggccaagctgggtctgctgatcgccttcgtctacgcggcctgcgcggcactgcgcctggcccggttcaacacccaggtggggatggcggacaagcgctacttccaggggctgcccagtccggcggccgccggtgtggtggcggggctgatctgggtgggggatcacctgggtatcagcgacggcagtgccatgatcgccagtggggtcattgtcctcacggccggcctgctgatggtcagccgattgcgctactatagcttcaaagaggtggacttccgctaccgggtgcccttcttcaccatggtggtggtgctgcttgccctggccttcctactgatccacccgcccaccgtgcttttcgccggttttttcatctacatgctctccggtcccgcgctcacctggcatcagcgtcgccgacgcgtgcgcgaggggcgctccggctga

SEQ ID NO: 70674 - protein, 251 aa, Alkalilimnicola ehrlichei MLHE-1
MDASKRRRGIYLLPNLLTTGCLFFGFFAIISAFNGDFRNAALAIFIAMVFDGLDGRVARMTNTQSDFGVQFDSIADMVSFGVGPALVAWIWALSGTASLPGPLAKLGLLIAFVYAACAALRLARFNTQVGMADKRYFQGLPSPAAAGVVAGLIWVGDHLGISDGSAMIASGVIVLTAGLLMVSRLRYYSFKEVDFRYRVPFFTMVVVLLALAFLLIHPPTVLFAGFFIYMLSGPALTWHQRRRRVREGRSG

SEQ ID NO: 70675 - DNA, 858 bp, Rhizobium leguminosarum bv. viciae 3841
  CDS (1)..(858): transl_table=11
ttggaacgcgatatggaaacgccttttccgcctttcgagcccaatgggccagatgattccgcccgcggcccgcgtctgcgcgaaatcccgctccggctcgtctttccgaacctcatcaccattctggcgatctgtgccgggctgaccggcatccggctggctttcgagaatcgttatgagctagccgtctccatggtactgctcgccgccttcctcgacggcatcgacgggcgcgtggcgcggctgatgaaggcgacttccaaattcggcgcgcagatggattcgcttgccgacatcgtcaatttcggcgtcgcacccgccctcgtcgtttatgtcttcgcgctcgaccaggcgcgctcgctaggctggatcgccgccctgatctatgcgatcgccgccgggcttcgccttgcccgtttcaacgtcatggccgaacgcgaaaacaaggcgagctggcaatcggaatatttcgtcggcgtgccggcgccggccggcgccatgctggtgctgctgccggtctatctcggcttccttgggctggcgacggaccgcaccttcgcctatctctcgtcgatctataccgtgcttatcgccttcctgctgatcagccggctgccggtctggtcgggcaaatcggaaggcaatcgcttgcggcgcgatctcgtgctgccgatgatgctcggcgtcgtgctctatgtggctctgctgatgagctacacttgggaggtgatggtcttcaccgttgccgcctacctcatatcgcttcccttcggcgcgcggaaatggcggcggaaatacgggacgctgacgatcgaggaacccggcatcggcgacgacgatatcggccggcacatctga

SEQ ID NO: 70676 - protein, 285 aa, Rhizobium leguminosarum bv. viciae 3841
MERDMETPFPPFEPNGPDDSARGPRLREIPLRLVFPNLITILAICAGLTGIRLAFENRYELAVSMVLLAAFLDGIDGRVARLMKATSKFGAQMDSLADIVNFGVAPALVVYVFALDQARSLGWIAALIYAIAAGLRLARFNVMAERENKASWQSEYFVGVPAPAGAMLVLLPVYLGFLGLATDRTFAYLSSIYTVLIAFLLISRLPVWSGKSEGNRLRRDLVLPMMLGVVLYVALLMSYTWEVMVFTVAAYLISLPFGARKWRRKYGTLTIEEPGIGDDDIGRHI

SEQ ID NO: 70677 - DNA, 891 bp, Solibacter usitatus Ellin6076
  CDS (1)..(891): transl_table=11
atggctctcaaagaccgctttgtagatccgaactctccggaccgcaggccccgcaaagcggcctacgctcttcccactctgttcacggcgggcaatatcttcctcggctacatctccatactgcgctccttcaaagggtccatgctgctcgcgggcggattgccgggcgcccccgagcatttcaccgtggccgcccaggcgatcggcgccgccgtctttctcgatggcctcgatggccgcatcgcgcgcatgaccaataccaccagcgatttcggccgcgagatggattcgctcgctgacgtcattagcttcggcctcgcgcccgccgtcctcgccttcgcctggggagtgcagttcatcgaccccacgatcggcgaaaagctgcgcggccagatcttcaacgccggctacttcatcgctttccttttcctgctctgcggcgcctgccgcctggcgcgcttcaatattcaggtcaatcccgttcctaagaatcccggacgccccgatcgcaaatactttgtcggcctccccatccccgccgccgccgccatggtctgcgcggtggtctgggcctgcggctcggagccgctagtctactggccgctttccgtcgcctggcttgggctcctcctgctgctcggctttctcatggtcagcacctggcggtactacagcttcaagggcatcagcctgaataaggcctactcgcccctcatcattattctggtggccgcattcattttcggcatggcctattacgcgcagattctcctgctgggcatggcgactgcctacgtctccagcgggatctttatccgtatcggcggcattctccgccgccgcatgcgccgtcccccacccccaccagcaccggagcccagccttggataa

SEQ ID NO: 70678 - protein, 296 aa, Solibacter usitatus Ellin6076
MALKDRFVDPNSPDRRPRKAAYALPTLFTAGNIFLGYISILRSFKGSMLLAGGLPGAPEHFTVAAQAIGAAVFLDGLDGRIARMTNTTSDFGREMDSLADVISFGLAPAVLAFAWGVQFIDPTIGEKLRGQIFNAGYFIAFLFLLCGACRLARFNIQVNPVPKNPGRPDRKYFVGLPIPAAAAMVCAVVWACGSEPLVYWPLSVAWLGLLLLLGFLMVSTWRYYSFKGISLNKAYSPLIIILVAAFIFGMAYYAQILLLGMATAYVSSGIFIRIGGILRRRMRRPPPPPAPEPSLG

SEQ ID NO: 70679 - DNA, 804 bp, Magnetococcus sp. MC-1
  CDS (1)..(804): transl_table=11
atgggtgatagtgaggcagtcaagtccaagagagcggtctatattcttcccaatctcttgaccacgggggggatgttttttggtttttacagcatcattgcggccctgacagggcgctttgagttgggtgccataaccatctttattgcggcggtgtttgatgcgctggatggtcgcgtggcgcgggctatgggggcgacctcggcgtttggtaaagagtatgactcgttggcggactttctctctttttgcattgcccccgctattttggtgcagcagtgggcgttggacccctttaaccgggtcggttgggcggcggctttcttttatacggtgtgtggggcgctgcgtctggcacgctttaatgtgcagcactatgtgcaggagtcccgcatctccaaacgctatttccagggcttgcccagccccatggcggccatggtgatggcaggtatggtgctgttgttgctggattgggatctgctgacggtggccgatgaggggcgcaaaacagcaggtagttgggtggttttgggggtggtattggtgatgggcggcttgatggtgagctccattcgttttcgcagctttaaagactttagcctgcaccgaaaaaagccctttatgaccttggtggcggtggtggcctccatcacgttgctgaccatgcacaccaataccaccctgtttgtggtgatggtgggttatctgttgctgggcatccacagccacaaagagtatttggcgctgttggctgagggtaaagaggtggaagaggatgaggtggaagatttgagcgtgtaa

SEQ ID NO: 70680 - protein, 267 aa, Magnetococcus sp. MC-1
MGDSEAVKSKRAVYILPNLLTTGGMFFGFYSIIAALTGRFELGAITIFIAAVFDALDGRVARAMGATSAFGKEYDSLADFLSFCIAPAILVQQWALDPFNRVGWAAAFFYTVCGALRLARFNVQHYVQESRISKRYFQGLPSPMAAMVMAGMVLLLLDWDLLTVADEGRKTAGSWVVLGVVLVMGGLMVSSIRFRSFKDFSLHRKKPFMTLVAVVASITLLTMHTNTTLFVVMVGYLLLGIHSHKEYLALLAEGKEVEEDEVEDLSV

SEQ ID NO: 70681 - DNA, 795 bp, Azoarcus sp. BH72
  CDS (1)..(795): transl_table=11
gtggaccaacctgatcaaccacccctgatcgcgctcgagaagcgtcgccgcggcatctacatcctgcccaacctgttcaccactgccgcgctcttcgccggcttcttcgccatcgtgcaggcgatgaaccagcgttacgaggtggcggcggtcgcgatcttcgtcgccatggtgctcgacagcctggacggccgcgtcgcccgcctcacccacacccagagtgcgttcggcgccgagtacgactcgctgtccgacatggtgtcgttcggcgccgcgccggcgctggtcgtgtatgagtgggcgctgaaggacatgggcaagctcggctggatcgccgcgttcatctattgcgccggtgccgcgctgcgcctggcgcgcttcaacaccaacatcggcgtggtcgacaaacgctacttccagggcctgcccagcccggcggcggccgcgctgatcgccggcctggtgtgggtttcgatcgacaacggcgtcaccggcgacgacgtccgctggtacgcctgcatcctgacgatcatcgccggcgtttccatggtcagcaacgtgctgttctggagcggcaaggacctcaacctgcgcaagagcgtgcccttcatcgtcgtcatcgcgccggtcatggccttcgccctggtgtcgagcaacccgccggtggtgctgttcgcgctgttcctggtgtatgcggcctcgggctacatcatgtgggcgtggcgctggagcagtcgccgccgccgtcaggcagtcattcgcggccgcagcggcaccgatgccgcgggccactga

SEQ ID NO: 70682 - protein, 264 aa, Azoarcus sp. BH72
MDQPDQPPLIALEKRRRGIYILPNLFTTAALFAGFFAIVQAMNQRYEVAAVAIFVAMVLDSLDGRVARLTHTQSAFGAEYDSLSDMVSFGAAPALVVYEWALKDMGKLGWIAAFIYCAGAALRLARFNTNIGVVDKRYFQGLPSPAAAALIAGLVWVSIDNGVTGDDVRWYACILTIIAGVSMVSNVLFWSGKDLNLRKSVPFIVVIAPVMAFALVSSNPPVVLFALFLVYAASGYIMWAWRWSSRRRRQAVIRGRSGTDAAGH

SEQ ID NO: 70683 - DNA, 834 bp, Acidovorax sp. JS42
  CDS (1)..(834): transl_table=11
atgcatgatggcaacgacgccgccgaaaacacgggcgtgatggtgcgcaagcgccgcaagggcatctacatcctgcccaacctgttcacgctggcagcgttgtttggcgggttctacgccattgtcatggccatgaatggccgcttcgactatgcggcggtgggggtgttctgcgccatggtgctggacagcctggatggccgcgtggcgcgcatgaccaacacgcaaagcgcgttcggcgagcagatggattcgctgtcggacatggtgtccttcggcgtggcgcctgcactgatcgcctacgagtgggccctcagcggcctggggcgctggggctggatcgcggccttcgtctactgttcatgcgctgccctgcggctggcgcgcttcaacgtcaacaccggcaccgtggacaagcgctggttccaggggcttccatctccggccgcggcggcgctggtgacgggcttcatctggctgctgtccgacgcgggtgtgcagcgtgggcaggacggcctgctgacctggagccagctcacctgggtgatgttcgggctgacgctgtacgccgggctcaccatggtgaccaatgcgccgttctatagcttcaaggacctgcacctcaagcgcagcgtgccctttacggccatcgtgctcatcgtgctggggatcgccatcatcaacatccatgcgcccacggtgctgttcagcattttcgtggcttatggattgagcggctacggcgtgtatgcatggcggcgtgccaaggggtatcgggccagcgtgatcagcacctctaaggacgagcccgaggagcgcgggttgcacgagtag

SEQ ID NO: 70684 - protein, 277 aa, Acidovorax sp. JS42
MHDGNDAAENTGVMVRKRRKGIYILPNLFTLAALFGGFYAIVMAMNGRFDYAAVGVFCAMVLDSLDGRVARMTNTQSAFGEQMDSLSDMVSFGVAPALIAYEWALSGLGRWGWIAAFVYCSCAALRLARFNVNTGTVDKRWFQGLPSPAAAALVTGFIWLLSDAGVQRGQDGLLTWSQLTWVMFGLTLYAGLTMVTNAPFYSFKDLHLKRSVPFTAIVLIVLGIAIINIHAPTVLFSIFVAYGLSGYGVYAWRRAKGYRASVISTSKDEPEERGLHE

SEQ ID NO: 70685 - DNA, 795 bp, Magnetospirillum magnetotacticum MS-1
  CDS (1)..(795): transl_table=11
atgttccgccccaagcgtccgccccgtatccgggggttgtcgatcaacaagctgatccccaacatcctgacgctgctggcgctgtgcgctggcctcacctccatccgcttcgccgtacacggcatgtggaaggaggcggtgatctccaccgttctggccgccattctggacgggttggacgggcgggtggcgcggctgcttcaaggcacctccaagttcggcgccgaactggattccctttccgatttcgtcagcttcggcgtggcgcccgccatggtgctgtatttttggaccatgcaaggcgccggaggattcggctgggcgctggtcttgctgttctcggtgtgctgcgcgctgcgtctggcccgcttcaacaccatgatcggcgaacccgacctgccgccctacgcctataacttcttcaccggcgttccggctccggcggcggccgggctggtcttgcttcccatggtcttcaccatccagttcggcggcggcttcttcgatcagcccgcggtggtcgcggtcttcttgttgggcgtttccttcctgatggtcagcaagatccccaccttctcggggaaaaaagtgcgcgtgccccaccgttgggtcctgcccatcctgctgatcattggcctcgcggcggctttcatggtgaccgagccctggctgaccctgtcgctgctgggtgtcttgtatctggggatgatcccactcagcttgcgctcgttccgccgcctcaaggctcaggcggaagtcccggccccggacgaagcgcccataccttccgcgtag

SEQ ID NO: 70686 - protein, 264 aa, Magnetospirillum magnetotacticum MS-1
MFRPKRPPRIRGLSINKLIPNILTLLALCAGLTSIRFAVHGMWKEAVISTVLAAILDGLDGRVARLLQGTSKFGAELDSLSDFVSFGVAPAMVLYFWTMQGAGGFGWALVLLFSVCCALRLARFNTMIGEPDLPPYAYNFFTGVPAPAAAGLVLLPMVFTIQFGGGFFDQPAVVAVFLLGVSFLMVSKIPTFSGKKVRVPHRWVLPILLIIGLAAAFMVTEPWLTLSLLGVLYLGMIPLSLRSFRRLKAQAEVPAPDEAPIPSA

SEQ ID NO: 70687 - DNA, 792 bp, Prosthecochloris aestuarii DSM 271
  CDS (1)..(792): transl_table=11
atgttattggatcgactattttctatgaaagaacaagatcgcaacagttcagccaaaaagtatgccgggtcgggctttccggccctatcccgttcgttcgttccttctgtctttactgtcatgaatatggtttgcggatatgttgccatcgtgatggccggcgcagcccattttcatgctgccggatggtttattatcattgcggccttttttgatgtatttgacggatatgtcgcccgattgactaatggggcttccgagttcggaggagagcttgattctctttctgatcttgtttcgttcggtgtggcgccggcctatcttgtctacaattttgccttgagcccaatgggagctgcaggcgtcatggtcagttcgcttctggtgatcggaagcgctctgcggcttgcgcgttacaatgttgtcaacagggaaagcaggggagattctttttcaggtctgcctactccggcacaggcgctgaccgttgtggggtttgtgctgtggatgctttcggatccgctcctcagccaggcccgactgattgcggtgctttcatggatgacgattattctctccatgctgatggtcagcaaggtcaattaccagacgttccccaggctgaatcttgattccctcagagcgcaacctctgcagacaggcctctatatcgcggtgtttttttgtgtgcttatcttccacgcaaaggctttttttcttgccatgttgttgtatattctgctgggtgttatgaggtcactttcgctgatggtgcgccagaccgtcctgtga

SEQ ID NO: 70688 - protein, 263 aa, Prosthecochloris aestuarii DSM 271
MLLDRLFSMKEQDRNSSAKKYAGSGFPALSRSFVPSVFTVMNMVCGYVAIVMAGAAHFHAAGWFIIIAAFFDVFDGYVARLTNGASEFGGELDSLSDLVSFGVAPAYLVYNFALSPMGAAGVMVSSLLVIGSALRLARYNVVNRESRGDSFSGLPTPAQALTVVGFVLWMLSDPLLSQARLIAVLSWMTIILSMLMVSKVNYQTFPRLNLDSLRAQPLQTGLYIAVFFCVLIFHAKAFFLAMLLYILLGVMRSLSLMVRQTVL

SEQ ID NO: 70689 - DNA, 756 bp, Oceanospirillum sp. MED92
  CDS (1)..(756): transl_table=11
atgactgaaccgcagaatcaagataatcaggaaccggttaaaccgcgtagtcgtggtatctatcttttacctaacctgtttacgaccggtgcgctgttctctggattttatgccgttgtggcaagtatgaatggccattttgagaatgcggccattgcgatctttgtggccatggtgcttgatggtttggatgggcgtgtcgctcgtttgacgaatacgtcgagtgcttttggtgcggagtatgattcactggcggatatggtttcatttggtgtcgcaccgtcgttggttgtttttaattgggtgttggatgacataggtaaacttggctggtttgctgcatttgtttatgtggctggggctgctttaagacttgctcgatttaatactcagataggctcaacagataagcgttactttattggcttaccgagcccagctgctgctgccgcggttgcaggtctagtgtgggctgcaacagaatacaatgttgatggtgcgccttatgcctatgcaatcgctttatatgtagcactggtcggtgtccttatggtgagtaatgttttgtattacagttttaaggatgtgagtttaaaagagaaagtacctttccttatcctggccggcattgtgttagcggttggggtgatctcaatcgatcctgccgttttcctctggttgctcttcctggtatatgcgatttcgggccctgcgttatggctgatgcgaaaaaccaaacagaagcctgccaactaa

SEQ ID NO: 70690 - protein, 251 aa, Oceanospirillum sp. MED92
MTEPQNQDNQEPVKPRSRGIYLLPNLFTTGALFSGFYAVVASMNGHFENAAIAIFVAMVLDGLDGRVARLTNTSSAFGAEYDSLADMVSFGVAPSLVVFNWVLDDIGKLGWFAAFVYVAGAALRLARFNTQIGSTDKRYFIGLPSPAAAAAVAGLVWAATEYNVDGAPYAYAIALYVALVGVLMVSNVLYYSFKDVSLKEKVPFLILAGIVLAVGVISIDPAVFLWLLFLVYAISGPALWLMRKTKQKPAN

SEQ ID NO: 70691 - DNA, 861 bp, delta proteobacterium MLMS-1
  CDS (1)..(861): transl_table=11
atgggcaacaaacgcaaaaaatattttggccggggtggggcgccggggagcaggaagcggatcagcctgttgcccagtattctgaccaccatcagcctttttagtggcttctacgccattgtcgcggcgatcaacgagcagtttttccatgcggcggtggcgattctcattgccgggatcttcgacgggctggatggccgggtggcccggatgaccaacaccgccagccggttcggcgaggaatacgattcactctgtgatctggtggctttcggggtggcgccggccattttgacttaccagtgggtcctggtctcctatggccgttatggctggttggccgccttcctgtatgtggccaccaccgccctgcgactggcccgtttcaactcccagccgccggccgacgagaacaagaatttcatcgggctgccctgtccggccgccgccgggatgatcgccaccgcctaccttttttgccatttctggggcctcagcggtccggccatggagattgccatgatggtggcggtttttctgctctcctgcctgatggtcagctcggttgcttattccagtttcaaacacccggaaacccagcgtaaaaaggcgtttcagatgctggtggggatggtggtattgatcatggtgctggccaccgaaccccgggttaccctttttctgctgggcctgatttacgtgctgtccgggccgctggcggcggcatatcggttgatggtcccggcccccaaggcgccggatcagggtaaggatgaggaagagtcaacagcggccggaggcgacagcgattcgttgtcggccggtggtgaagagtcgccggagtccgccgcttcccgttaa

SEQ ID NO: 70692 - protein, 286 aa, delta proteobacterium MLMS-1
MGNKRKKYFGRGGAPGSRKRISLLPSILTTISLFSGFYAIVAAINEQFFHAAVAILIAGIFDGLDGRVARMTNTASRFGEEYDSLCDLVAFGVAPAILTYQWVLVSYGRYGWLAAFLYVATTALRLARFNSQPPADENKNFIGLPCPAAAGMIATAYLFCHFWGLSGPAMEIAMMVAVFLLSCLMVSSVAYSSFKHPETQRKKAFQMLVGMVVLIMVLATEPRVTLFLLGLIYVLSGPLAAAYRLMVPAPKAPDQGKDEEESTAAGGDSDSLSAGGEESPESAASR

SEQ ID NO: 70693 - DNA, 843 bp, Rickettsiella grylli
  CDS (1)..(843): transl_table=11
atgaacaaccccaatgagaaaaacccttttattcaaacgtttattgaagaagaattaacggtttctgaaacgaaacccaaccatttaggcgatcaggatgagaaagaacgattagcctatcgtcgccgtggaatttacttgttgccgaatttatttaccatcgccggtttatttgcaggattttacgcgatcatcactgccatggaaggttattttaatgatgcggccatcgctatttttgttgcgatgattatggatttttttgatggtcgcgttgctcgattgacgcatacgcaaagtgcatttggtgccgaattagatagtttatcggacatggtttcttttggcattgcacccgcgcttgttatttatagttggtctttagaagggttaggtaaattaggttggttagctgcattcgtctttgccgcctctggcgcactgcgtttagcccgttttaatacacaagtattactgagtgataaacgttattttaaaggattacctattcctgcagcagccggtgttttagccagtatggtctggttatgtgttgattcagaaattttaggtgatacgatgagtctgataaccgccgtaatagcagtcattattgcagcgctcatggtcagtaatatccgttattattcctttaaagaaattgatctgaaaggacgcgttccttttgtggctatcctattggttgtcgtggcttttgtgagtatttcacttgatcctcctaaaatattatttttggtctttttctgttatgcgctatcaggccctcttctcagtttgtatcacctctataaaaaacgcgctttacgaaaaaaaaatcactag

SEQ ID NO: 70694 - protein, 280 aa, Rickettsiella grylli
MNNPNEKNPFIQTFIEEELTVSETKPNHLGDQDEKERLAYRRRGIYLLPNLFTIAGLFAGFYAIITAMEGYFNDAAIAIFVAMIMDFFDGRVARLTHTQSAFGAELDSLSDMVSFGIAPALVIYSWSLEGLGKLGWLAAFVFAASGALRLARFNTQVLLSDKRYFKGLPIPAAAGVLASMVWLCVDSEILGDTMSLITAVIAVIIAALMVSNIRYYSFKEIDLKGRVPFVAILLVVVAFVSISLDPPKILFLVFFCYALSGPLLSLYHLYKKRALRKKNH

SEQ ID NO: 70695 - DNA, 792 bp, Oceanobacter sp. RED65
  CDS (1)..(792): transl_table=11
atgtcagatccacaagagaaaaaggttattcccttgaaccaagaaaacgattcggtaccaggaaaaacgaaactgcgtagcaaaggtatttatttgcttccaaacctatttactacaggcgcattattctctggtttctacgccgtagttgcctccatgaatggacacttcgacaaggcggctatcgcaatttttgtagcaatgattttggatggactagatggccgtgttgctcgtatgaccaatacacaaagtgaattcggtgctgagtacgactctttagcggatatggtgagctttggcgtggctccggcgctggtggcttttagttggtctttgcagtccttaggccaagctggttggatagcagcatttatatatgttgctggtgcggccttgcgtcttgcccgtttcaatacccaaattgaaacagcggataaaaattactttacgggtcttgctagtccttctgcggccgcgatcgtagcgggcactgtctgggtcttcaatgacaacggtattgctggaatagatgtggctgcgctcatggcggtgttagtaggtcttgctggtattcttatggtgagtaatgtgaaataccacagcttcaaaggctttgacctaaaaggtaaggtgccatttgtcgccatgcttgcggttgtgggtgtgttcgctgtgatctccatcgacccgccagtggtcctattagcggtattcctcctttacggattgacaggacctgtttggaccgcctggttgtggctgaaagagcgtaaagctaaatcagtgtaa

SEQ ID NO: 70696 - protein, 263 aa, Oceanobacter sp. RED65
MSDPQEKKVIPLNQENDSVPGKTKLRSKGIYLLPNLFTTGALFSGFYAVVASMNGHFDKAAIAIFVAMILDGLDGRVARMTNTQSEFGAEYDSLADMVSFGVAPALVAFSWSLQSLGQAGWIAAFIYVAGAALRLARFNTQIETADKNYFTGLASPSAAAIVAGTVWVFNDNGIAGIDVAALMAVLVGLAGILMVSNVKYHSFKGFDLKGKVPFVAMLAVVGVFAVISIDPPVVLLAVFLLYGLTGPVWTAWLWLKERKAKSV

SEQ ID NO: 70697 - DNA, 924 bp, marine gamma proteobacterium HTCC2143
  CDS (1)..(924): transl_table=11
atggacgatcaccaaaaagaatcaacaacatccccgcaaggtgttcctgcagaagggagcgagtcaggagcgggtgcgatcgataacggtcatcagtccaaggtggctggtgacgaaatcgccgggggtccatcgatagagtcgctgattctcattgacgaacatgaagaggaagtctcagttgacggtaaaacagtgcgtcggcgagggatttacctgctccccaacttgtttaccaccgcggccctgttttccggcttctatgcggttgtttctggcatgcacggagagtttgaagccgcagcaattgctatttttgtggccatgattttggatgggctcgatggacgtgttgcacgtttgaccaacacgcagagtaaatttggcgcggaatacgacagcttggcagatatggtttcctttggtgtagcgccggcgctggttatgttcagctgggcattgtctgatctggggaaatttggttgggcatgtgcgtttgtttatgtcgcttgtgcagcacttcggcttgcccgttttaatacgcagatagatacggcggataacaactttttttcgggcttggcgagtcctgcggcggccgcggtggtcgctggaatagtgtgggtgtgtcaggatgagggatgggtcggtagtaacttgccggttgaactcgcggttgttgcaggttgcctaaccgggttaatgggttttttgatgatattgaatgtcccttaccacagttttaaagggctggacctgaaggggcgagtgccttttgtggtgatgattttagtggttttgctgttcggtgttattatgctagatcccgccagaatattactgctggcggcaatggtttacgcgctttctgggccggctacagccgtctggtctaagctgcgagatgacgagcctgttgaatag

SEQ ID NO: 70698 - protein, 307 aa, marine gamma proteobacterium HTCC2143
MDDHQKESTTSPQGVPAEGSESGAGAIDNGHQSKVAGDEIAGGPSIESLILIDEHEEEVSVDGKTVRRRGIYLLPNLFTTAALFSGFYAVVSGMHGEFEAAAIAIFVAMILDGLDGRVARLTNTQSKFGAEYDSLADMVSFGVAPALVMFSWALSDLGKFGWACAFVYVACAALRLARFNTQIDTADNNFFSGLASPAAAAVVAGIVWVCQDEGWVGSNLPVELAVVAGCLTGLMGFLMILNVPYHSFKGLDLKGRVPFVVMILVVLLFGVIMLDPARILLLAAMVYALSGPATAVWSKLRDDEPVE

SEQ ID NO: 70699 - DNA, 840 bp, Candidatus Desulfococcus oleovorans Hxd3
  CDS (1)..(840): transl_table=11
atgaaaaaaagacacattgaaaaagaaaaactgcgcaggagcatctatctgctgcccaacctgtttaccacgttaaacctgttctgcgggtttctggccattatcgccgccatagaaggccggtttgaaaacagcgcgtttttgattctcggcggcatggtgtttgatattctggacggcaaaaccgcccggctcaccaaaaccaccagccggttcggtattgaatacgactccctggccgacctgatcaccttcggcctggcgccgggtattctggcctacctgtgggcctttcagcctctggggaaactgggatggctggcggccctgatctttatgacgtgcggagcccttcgcctggcccgcttcaacacccacgtggatgtggccgactcttcggtgtttaccgggctgcccattcccggagcggccggcatgaccgccaccagcgtgctgttcatcatgaaggtcaccaacggcgcgggcccaggcccctatgccacggttctgctgctgggggccatgtttgcgctggcctttctcatggtcagcaatattccctacaccagttttaagaaggcgccgcccgttctggtgagggcgaacaacttcaacatcctggttattgccgtgctgatgctggtgtttattgtccaggaaccggtggtggccctcttcacgctgggggcgctgtatgtctctttcggtccggcccgcgccgtccgccgcctcttttccagagacggccggcacacggaggatgacgcggccgacgacctgctgatcgaaaccgatgccgccgattcggacgaggaagagcatagcccataccacatctga

SEQ ID NO: 70700 - protein, 279 aa, Candidatus Desulfococcus oleovorans Hxd3
MKKRHIEKEKLRRSIYLLPNLFTTLNLFCGFLAIIAAIEGRFENSAFLILGGMVFDILDGKTARLTKTTSRFGIEYDSLADLITFGLAPGILAYLWAFQPLGKLGWLAALIFMTCGALRLARFNTHVDVADSSVFTGLPIPGAAGMTATSVLFIMKVTNGAGPGPYATVLLLGAMFALAFLMVSNIPYTSFKKAPPVLVRANNFNILVIAVLMLVFIVQEPVVALFTLGALYVSFGPARAVRRLFSRDGRHTEDDAADDLLIETDAADSDEEEHSPYHI

SEQ ID NO: 70701 - DNA, 849 bp, Marinobacter sp. ELB17
  CDS (1)..(849): transl_table=11
atgactgacgaaaagaaatctgccgaatctaatccggccaacaagccagatgtgcctgcttctgccggccaaggtacggaagacgttcacgagctcccgccgggagaggttattgaagaagagttggttggaggggcgcctgttcgccataaaggtattttcctgctgcctaatgcgctcactacagcctctttgttttcgggcttctacgcgattgtctctgctgccaacggcattttcgacaacgctgctattgccatcttcgtgtctatgattctggatgggctagatgggcgcgttgcgcgcatgactaacacccaaagtaaatttggcgaagagtatgattccctggccgatatggtggcctttggtgtagcgccggggttggtggcgttcttttggtcgcttaatggtctgggtaagctgggttgggcggtaacctttatttatgtagccggaacggctctgcgcttggctcgcttcaacactcagatcgggtcggtcgataagaagtactttgttggcttgccaagccctgcggcagcagcggccgtggcaggaatggtctggtgctttcatgcgttcgagccagcagcttggttaacggctttaacactgtttgtggttgccggtgctggcgttttgatggtcagtaatgttctttaccagagcttcaaagatctcgacatgcggggtagggtaccgttcgcagcgattctgctggtggtgctgatttttgtggtcattgcgctggatccagccaccgtgttgttcagcgccttcttggtgtatgcgctgacagggccggtgcgggccttatttcgtaaaaagccccgtcgcccagcgtaa

SEQ ID NO: 70702 - protein, 282 aa, Marinobacter sp. ELB17
MTDEKKSAESNPANKPDVPASAGQGTEDVHELPPGEVIEEELVGGAPVRHKGIFLLPNALTTASLFSGFYAIVSAANGIFDNAAIAIFVSMILDGLDGRVARMTNTQSKFGEEYDSLADMVAFGVAPGLVAFFWSLNGLGKLGWAVTFIYVAGTALRLARFNTQIGSVDKKYFVGLPSPAAAAAVAGMVWCFHAFEPAAWLTALTLFVVAGAGVLMVSNVLYQSFKDLDMRGRVPFAAILLVVLIFVVIALDPATVLFSAFLVYALTGPVRALFRKKPRRPA

SEQ ID NO: 70703 - DNA, 843 bp, Erythrobacter sp. SD-21
  CDS (1)..(843): transl_table=11
atgagcctgctgtccgaccccacgccgcgccccgagccggaagagcgcgcgcgactcggccccaaggcggctgaggacgaacagccggtcatgggcaagtcgcgcggcctgtcactgcgggcaatggctcccaacgcgattacggcggcggcgctgtgttcggggctgaccggcatccgctttgccatttccgagcaatgggcggcggccgccgtggcgatcatagtagccggcatcctcgacgggatggacgggcgcatcgcacgcctcctgaaggcgcaatcgcgcttcggggcggaactcgacagccttgccgactcgctcagcttcggcaccgcgcccgcgatcatcatctacctgtggtcgctttcggcggagccgcgctggggctggtttgctgctttggcactggcaatctgctgcgccctgcgcctcgcgcgcttcaacgcgcagatcgacatggaagagcagccgcacaaatcgctcggattcctgaccggcgttcccgcacccatgggggcagggctggccttcatgccgttctatttatggtcggcgacaggcatcgaggtgttccgcgagccgatcttcgtggcgccctggatactcgcgacggcgctgttgatgatttcgagcatggcgacgccaagttggacttcgcttcgcccgcgacggggcattcgcctgtgggtgctggctttcgccggattgctgtttgcggcgctgctggtcgaaccctggtggacgctaagcgcgatcgggatcggctacctgatcctgctgccgttcacgctgatgcgctacgcacggatcaagcggcgcgctgcgtcgcctgccggatga

SEQ ID NO: 70704 - protein, 280 aa, Erythrobacter sp. SD-21
MSLLSDPTPRPEPEERARLGPKAAEDEQPVMGKSRGLSLRAMAPNAITAAALCSGLTGIRFAISEQWAAAAVAIIVAGILDGMDGRIARLLKAQSRFGAELDSLADSLSFGTAPAIIIYLWSLSAEPRWGWFAALALAICCALRLARFNAQIDMEEQPHKSLGFLTGVPAPMGAGLAFMPFYLWSATGIEVFREPIFVAPWILATALLMISSMATPSWTSLRPRRGIRLWVLAFAGLLFAALLVEPWWTLSAIGIGYLILLPFTLMRYARIKRRAASPAG

SEQ ID NO: 70705 - DNA, 753 bp, Thiocapsa roseopersicina
  CDS (1)..(753): transl_table=11
atggacaacgtgccagccacccgaaagcgaccacgcggaatctatctgctgcccaatctcttcacgaccgcagcactctttgcgggattctatgcggttctcgcggccacgcaggatcgcttcgaggcggctgcgctggcgatctttgcggctcaggcgctcgacgggatcgacgggcgcgtggcccgtatcactcaaacccaaagcgatttcggtgccgagtacgacagcctctcggacatggtggccttcggtgtggccccggcgttggttgcctatcactgggccttgggcgggctcggcaaggtcggctggcttgccgcctttgtttttaccgccgccgcggcgttgcgtctggcacgtttcaacacgcaggtgcggatcgccgacaagcgttacttccaggggctcgccagtccagcggccgcggccatcatcgcgagcggggtctggatcggcgcggatacggggatcgccggggccgatgtcgcctggattgcggccttcctcaccgcgggcgcgggtctgttgatggtcagcaacttccgctacatcagcttcaagcagctcaacttccagggccgcgtgccctttctcctggccgtcgccgtcatgctgggctttggcgtcatcttcatcaacccgccgctgatgctctttttgatggcgacgacctatgcggtttcggggccggtgtggaccctgttgcgactgcgtaaaagtcgatcgcgccatcggcgcgagaggcattga

SEQ ID NO: 70706 - protein, 250 aa, Thiocapsa roseopersicina
MDNVPATRKRPRGIYLLPNLFTTAALFAGFYAVLAATQDRFEAAALAIFAAQALDGIDGRVARITQTQSDFGAEYDSLSDMVAFGVAPALVAYHWALGGLGKVGWLAAFVFTAAAALRLARFNTQVRIADKRYFQGLASPAAAAIIASGVWIGADTGIAGADVAWIAAFLTAGAGLLMVSNFRYISFKQLNFQGRVPFLLAVAVMLGFGVIFINPPLMLFLMATTYAVSGPVWTLLRLRKSRSRHRRERH

SEQ ID NO: 70707 - DNA, 825 bp, Agrobacterium sp
  CDS (1)..(825): transl_table=11
atggcccgcagtgatagcggccgtgggccccggctgcgggagattccctttcggctcctggtgcccaatctgatcaccgttctcgcgatctgcgcaggcttgagcggcgtacgccttgccatcgaaggccgctttgaactcgccgtcggcatggtgctcctcgccgcctttctcgacggcgtggacgggcgtgttgcccgcatgatgaaggcgacctccaaattcggcgagcagatggattcgcttgccgacattgtcaatttcggtgtcgctcctgctctcgtcgtctatatctatctgctcgaccaggcgcgttcgatcggctggatcggcgctctcatctatgtcattgccgccggcctgcgcctggcgcgcttcaacgtcatgatcgagcggccggtgaaggcgccctggcagagcgaattttttgtcggtgttccggccccgatgggcgcgatgctggtgcttctgccagtctatctcggcttcctcggcgtggagccggacaagcccttcgcttacgtcgccgccgcctatacggtcctgatcggttatcttctcatcagccgcctgccggtctggtcggggaagtccagtacccgcatccgccgtgatctggtgctacccatgatcctcgtcgtcgtgctctatgtggcgatgctgatgagcttcacctgggaagttctggttctgacggtcgccgcctatctcgtcttcattcccatcagcgcccgcctctggcatcgccgctacggtacgctgaccatcgaggaagacgcgcatgacgatgccaatggcggcaacggcctcgatcgcggcatttaa

SEQ ID NO: 70708 - protein, 274 aa, Agrobacterium sp
MARSDSGRGPRLREIPFRLLVPNLITVLAICAGLSGVRLAIEGRFELAVGMVLLAAFLDGVDGRVARMMKATSKFGEQMDSLADIVNFGVAPALVVYIYLLDQARSIGWIGALIYVIAAGLRLARFNVMIERPVKAPWQSEFFVGVPAPMGAMLVLLPVYLGFLGVEPDKPFAYVAAAYTVLIGYLLISRLPVWSGKSSTRIRRDLVLPMILVVVLYVAMLMSFTWEVLVLTVAAYLVFIPISARLWHRRYGTLTIEEDAHDDANGGNGLDRGI

SEQ ID NO: 70709 - DNA, 861 bp, Mycobacterium bovis
  CDS (1)..(861): transl_table=11
atgatcggaaagccccgcggcaggcgaggggtaaacctgcagatactgcccagcgcgatgacggtgctgtccatttgcgcgggactgaccgcaatcaagtttgcgctcgagcaccagccgaaggccgcgatggcactgatcgccgcagcggccatcctcgacgggctcgacggccgggtggcccgcatcctggatgcccagtcgcggatgggcgcagagatcgactcactggccgacgcggtgaacttcggagtgacacccgcgctggtgctttacgtgtcgatgttgtcgaagtggccggtcggttgggtggtcgtgctgctctacgcggtgtgcgtggtattacggctggcgcggtacaacgcactgcaggacgacggaacccagcccgcctacgcgcatgaattcttcgtcggaatgcccgcgccggcgggcgcggtttccatgatcggcctgctagccctcaaaatgcagttcggcgaaggatggtggacctcggtctggttcctcagcttttgggtgacgggaacgtcgatactcttggtcagcgggatcccgatgaaaaagatgcacgccgtgtcggtaccacccaactacgcggccgccctgctggcggtgctggctatctgcgcggcggccgcagtcctggccccctacttgttgatctgggtgatcatcatcgcctacatgtgccatattcctttcgcggtgcgcagccagcgctggcttgcccaacaccctgaggtgtgggacgacaagcccaagcaacggcgcgcggtgcggcgcgcgagccgccgggcgcatccctaccggccgtcgatggcgcggctgggcctgcgcaagccgggtcgacggctgtga

SEQ ID NO: 70710 - protein, 286 aa, Mycobacterium bovis
MIGKPRGRRGVNLQILPSAMTVLSICAGLTAIKFALEHQPKAAMALIAAAAILDGLDGRVARILDAQSRMGAEIDSLADAVNFGVTPALVLYVSMLSKWPVGWVVVLLYAVCVVLRLARYNALQDDGTQPAYAHEFFVGMPAPAGAVSMIGLLALKMQFGEGWWTSVWFLSFWVTGTSILLVSGIPMKKMHAVSVPPNYAAALLAVLAICAAAAVLAPYLLIWVIIIAYMCHIPFAVRSQRWLAQHPEVWDDKPKQRRAVRRASRRAHPYRPSMARLGLRKPGRRL

SEQ ID NO: 70711 - DNA, 21 bp, Artificial sequence
  primer
atgaacgaacgtccggaggag

SEQ ID NO: 70712 - DNA, 20 bp, Artificial sequence
  primer
tcacccagcccttttgcgac

SEQ ID NO: 70713 - protein, 264 aa, Artificial sequence
  consensus sequence
  Variant (3)..(4): Xaa in position 3 to 4 is any amino acid
  Variant (6)..(11): Xaa in position 6 to 11 is any amino acid
  Variant (13)..(26): Xaa in position 13 to 26 is any amino acid
  Variant (27)..(40): Xaa in position 27 to 40 is any or no amino acid
  Variant (42)..(47): Xaa in position 42 to 47 is any amino acid
  Variant (49)..(51): Xaa in position 49 to 51 is any amino acid
  Variant (53)..(54): Xaa in position 53 to 54 is any amino acid
  Variant (58)..(58): Xaa in position 58 is any amino acid
  Variant (61)..(65): Xaa in position 61 to 65 is any amino acid
  Variant (67)..(67): Xaa in position 67 is any amino acid
  Variant (70)..(72): Xaa in position 70 to 72 is any amino acid
  Variant (76)..(76): Xaa in position 76 is any amino acid
  Variant (78)..(80): Xaa in position 78 to 80 is any amino acid
  Variant (83)..(83): Xaa in position 83 is any amino acid
  Variant (87)..(93): Xaa in position 87 to 93 is any amino acid
  Variant (95)..(99): Xaa in position 95 to 99 is any amino acid
  Variant (100)..(112): Xaa in position 100 to 112 is any or no amino acid
  Variant (115)..(125): Xaa in position 115 to 125 is any amino acid
  Variant (133)..(139): Xaa in position 133 to 139 is any amino acid
  Variant (140)..(150): Xaa in position 140 to 150 is any or no amino acid
  Variant (152)..(152): Xaa in position 152 is any amino acid
  Variant (154)..(156): Xaa in position 154 to 156 is any amino acid
  Variant (158)..(158): Xaa in position 158 is any amino acid
  Variant (159)..(159): Xaa in position 159 is any or no amino acid
  Variant (161)..(192): Xaa in position 161 to 192 is any amino acid
  Variant (193)..(211): Xaa in position 193 to 211 is any or no amino acid
  Variant (213)..(213): Xaa in position 213 is any amino acid
  Variant (215)..(219): Xaa in position 215 to 219 is any amino acid
  Variant (221)..(221): Xaa in position 221 is any amino acid
  Variant (223)..(251): Xaa in position 223 to 251 is any amino acid
  Variant (252)..(256): Xaa in position 252 to 256 is any or no amino acid
  Variant (258)..(263): Xaa in position 258 to 263 is any amino acid
PNXXTXXXXXXGXXXXXXXXXXXXXXXXXXXXXXXXXXXXAXXXXXXAXXXDXXDGRXARXXXXXSXFGXXXDSLXDXXXFGXAPAXXXXXXXLXXXXXXXXXXXXXXXXXXGWXXXXXXXXXXXLRLARFNXXXXXXXXXXXXXXXXXXFXGXXXPXXAXXXXXXXXXXXXXXXXXXXXXXXXXXXXXXXXXXXXXXXXXXXXXXXXXXXMXSXXXXXSXKXXXXXXXXXXXXXXXXXXXXXXXXXXXXXXXXXXLXXXXXXY

SEQ ID NO: 70714 - protein, 36 aa, Artificial sequence
  protein pattern
  Variant (4)..(6): Xaa in position 4 to 6 is any or no amino acid
  Variant (8)..(8): Xaa in position 8 is Ile, Leu or Val
  Variant (11)..(15): Xaa in position 11 to 15 is any amino acid
  Variant (17)..(17): Xaa in position 17 is any amino acid
  Variant (18)..(18): Xaa in position 18 is Phe or Met
  Variant (20)..(20): Xaa in position 20 is any amino acid
  Variant (21)..(21): Xaa in position 21 is Glu or Gln
  Variant (22)..(22): Xaa in position 22 is any amino acid
  Variant (25)..(25): Xaa in position 25 is Ile, Leu or Met
  Variant (26)..(26): Xaa in position 26 is Ala, Cys or Ser
  Variant (28)..(29): Xaa in position 28 to 29 is any amino acid
  Variant (30)..(30): Xaa in position 30 is Ala, Cys, Asn, Ser or Thr
  Variant (32)..(32): Xaa in position 32 is Cys or Gly
  Variant (33)..(33): Xaa in position 33 is any amino acid
  Variant (34)..(34): Xaa in position 34 is Ala, Gly, Thr or Val
  Variant (36)..(36): Xaa in position 36 is Ala, Gly or Ser
LDGXXXRXARXXXXXSXXGXXXDSXXDXXXFXXXPX

SEQ ID NO: 70715 - DNA, 1098 bp, AZOTOBACTER VINELANDII
  CDS (1)..(1098): transl_table=11
atgctcaagaaatcgccacttcatgccgtgcaccgggctcttggtgcccgcttcgtctctcacggcggctgggaagtgccggtcaactttggctcggtgactgcggaacatcatgccgttcgccgtgattgcggcatgttcgacgtatcctggctgacccatctggacattcaaggtcctgacactcggaagttcttgcttcgcctgcttgccaacgacatcgaccgactcgatcgtcccggtaaatcgctttacaccacgatgctcaatgatgacggcggggtaatggacgacctgatcgttcatcgtctggattacgaccgttatcgtctgatcatcgatgccgaccggagcgatcgggatctcgcctggataaaaacctgtcagcacacctggaagctggatgtcaccctatcgctgctcggctctgattcggaaacctttgcaacgatagccatccaaggcccctctgcccgatcgaaggtgtgggatgtattgccggaaatcagaccgacaaccatcggcctcaccgcgtattccagcgcccaggtcgaatcgatcttcgttgcgacgacgggttataccggtgaagacggtttcgagatcacacttccagccaatcgagccgaggcattgtggtatgccttgatggctgtgggtgtaaaaccctgcggcttttgcgcgagagacacgctacgtacggaagcgggtttgcgactgtatggacgggacatggacgaaatgctttcccccttcgaggcgggcctggcctggtcggtggaaacgacatcggagcgagatttcataggccgaaatgccctgttcgcacgcgcacagcgatggcagttccttggcctgaaacttgtcgacaaggggctgctgcgggatcggcaaacggtatttacggagcatggtgagggaaaaatcactagcgcaacctattccccaacgctggaagcctatattgccttggtgctcctgccgagagagattgctattggcgatatcgtccacgcaagcctgcggggccatccgcttccggcacaggtcacaccaccccgcttcgttcgccatggaaaggtgctgctaagcaagtag

SEQ ID NO: 70716 - protein, 365 aa, AZOTOBACTER VINELANDII
MLKKSPLHAVHRALGARFVSHGGWEVPVNFGSVTAEHHAVRRDCGMFDVSWLTHLDIQGPDTRKFLLRLLANDIDRLDRPGKSLYTTMLNDDGGVMDDLIVHRLDYDRYRLIIDADRSDRDLAWIKTCQHTWKLDVTLSLLGSDSETFATIAIQGPSARSKVWDVLPEIRPTTIGLTAYSSAQVESIFVATTGYTGEDGFEITLPANRAEALWYALMAVGVKPCGFCARDTLRTEAGLRLYGRDMDEMLSPFEAGLAWSVETTSERDFIGRNALFARAQRWQFLGLKLVDKGLLRDRQTVFTEHGEGKITSATYSPTLEAYIALVLLPREIAIGDIVHASLRGHPLPAQVTPPRFVRHGKVLLSK

SEQ ID NO: 70717 - DNA, 1227 bp, Oryza sativa
  CDS (1)..(1227)
atgagagggctactcgcgtgcgccacgctcgcccgccgcgccgccggcgcgacgtcgacggcgcggcggcacctggcgggcgcggccgaggcggcggaggcggagctgaagaagacggcgctgtacgacttccacgtcgcgcacggcgggaagatggtgccgttcgccgggtggagcatgcccatccagtacaaggacaccatcatggactccaccctcaactgccgcgccaacggcagcctcttcgacgtctcccacatgtgcggcctcagcctccacggccgccaggccatccccttcctcgagtccctcgtcgtcgccgacgtcgcggcgctcaaggacggcaccgggacgctcaccgtcttcaccaacgaccgcggcggcgccatcgacgactccgtcgttaccaaggtcaccgaccagcacatctacctcgtcgtcaacgccgggtgcagggacaaggatctcgcccacattggggagcacatggaggccttcaacaagaagggcggcgacgtcaagtggcacgtccacgatgagcgctcgcttcttgcattgcagggacctcttgctgcaccaactctccagttgctgacaaaagaagatttaagcaaaatgtatttcagtgacttcaagatgattgacatcaatggatatgcttgctttctcaccagaactggttataccggtgaagatgggtttgaaatctctgttccatcagagaatgcagttgatcttgcaaaggccctcctggagaaatctgaaggcaaggtgagactgactggtttaggtgcccgtgacagtctccgcttggaggctggcctctgcctgtacggcaacgacatggagcaacacatcacaccagttgaggctggtctctcatgggcaattggcaagaggaggaaagcagaaggcggcttcctgggagcagatgtgatcctcaagcagctccaggaaggcccaaagatcaggcgtgtcggtctcctctcgcaaggaccgcctcctcggagtcatagtgagattgtgagcaactccggggagaacattggtgaggttaccagtggagggttcagcccctgcttgaagaagaacatcgccatgggctacgtaaaatccggtttgcacaaggctgggacagagttcaaggttgtcgtccgtgggaagtcctacgatgccgtcgtcaccaagatgccgttcgtgccgaccaagtactacaaaccctcatag

SEQ ID NO: 70718 - protein, 408 aa, Oryza sativa
MRGLLACATLARRAAGATSTARRHLAGAAEAAEAELKKTALYDFHVAHGGKMVPFAGWSMPIQYKDTIMDSTLNCRANGSLFDVSHMCGLSLHGRQAIPFLESLVVADVAALKDGTGTLTVFTNDRGGAIDDSVVTKVTDQHIYLVVNAGCRDKDLAHIGEHMEAFNKKGGDVKWHVHDERSLLALQGPLAAPTLQLLTKEDLSKMYFSDFKMIDINGYACFLTRTGYTGEDGFEISVPSENAVDLAKALLEKSEGKVRLTGLGARDSLRLEAGLCLYGNDMEQHITPVEAGLSWAIGKRRKAEGGFLGADVILKQLQEGPKIRRVGLLSQGPPPRSHSEIVSNSGENIGEVTSGGFSPCLKKNIAMGYVKSGLHKAGTEFKVVVRGKSYDAVVTKMPFVPTKYYKPS

SEQ ID NO: 70719 - DNA, 1224 bp, Glycine max
  CDS (1)..(1224)
atgagggggggcttgtggcaacttgggcaatcgatcactcgccgtcttgcccatggagataagaaggctgttgctcgtcgatgttttgcctcagaagctgagctgaaaaagacagtgtttcatgacttccatgttgctcatggtgggaagatggttccatttgctgggtggagcatgccaatccaatacaaggactcaatcatggactctaccatcaactgtagggagaatggtagcctctttgatgtttcccatatgtgtgggctgagcctcaaagggaaggacgctgccccattccttgaaaagctggtcattgccgatgttgctgggcttgcccctggaactgggacgttgactgttttcacaaatgaaaagggaggtgcaattgatgattcagtaattactaaggtgacggatgaccacatatatttggttgtgaatgctggctgcagggataaagatctggctcatattgaggaacacatgaaagcattcaaggccaaaggtggtgatgtgtcttggcacatccacgatgagagatccctacttgctctgcagggtcctcttgctgcccccgttcttcaacacctgacaaaagaggatttgagcaagctctactttggggagttccgtgtgttggacatcaatggctcagagtgttttcttaccaggacagggtatactggggaagatggatttgagatctcagttccttcagagcatggagtagatcttgccaaagcaatactggaaaaatctgaagggaaggtaagattgacaggattgggagctagagatagtctgcgacttgaagctggattgtgcttatatggaaatgacatggaacagcacattacacctattgaggcaggactaacatgggctatagggaagaggaggagagcagaaggtggttttctaggagctgatgttatcctgaaacagcttgaagaaggtcctaaaatcaggcgtgttggtttcttttcttctggtccacctcccagaagccacagtgagattcaagatgaaggaggcaacaacattggggaaatcaccagtggtggattcagtccttgcctccagaagaacatagccatgggatatgtgaaatctggattgcacaaggcagccaccaaagtaaagattattattcggggaaaacccaatgaaggagtcgttacaaaaatgccatttgtaccaacaaaatactataagccttcctga

SEQ ID NO: 70720 - protein, 407 aa, Glycine max
MRGGLWQLGQSITRRLAHGDKKAVARRCFASEAELKKTVFHDFHVAHGGKMVPFAGWSMPIQYKDSIMDSTINCRENGSLFDVSHMCGLSLKGKDAAPFLEKLVIADVAGLAPGTGTLTVFTNEKGGAIDDSVITKVTDDHIYLVVNAGCRDKDLAHIEEHMKAFKAKGGDVSWHIHDERSLLALQGPLAAPVLQHLTKEDLSKLYFGEFRVLDINGSECFLTRTGYTGEDGFEISVPSEHGVDLAKAILEKSEGKVRLTGLGARDSLRLEAGLCLYGNDMEQHITPIEAGLTWAIGKRRRAEGGFLGADVILKQLEEGPKIRRVGFFSSGPPPRSHSEIQDEGGNNIGEITSGGFSPCLQKNIAMGYVKSGLHKAATKVKIIIRGKPNEGVVTKMPFVPTKYYKPS

SEQ ID NO: 70721 - DNA, 1224 bp, Glycine max
  CDS (1)..(1224)
atgagggggagcttgtggcaacttgggcaatcgatcactcgccgtcttgcccatggagataagaaggctgttgctcgccgatgttttgcctcagaagctgagctgaaaaagacagtgtttcatgacttccatgttgctcatggtgggaagatggttccatttgctggatggagcatgccaatccaatacaaggactcaatcatggactctaccatcaactgtaggcagaatggtagcctttttgatgtttcccatatgtgtgggctgagcctcaaggggaaggatgctgtcccattccttgaaaagctagtcattgctgatgttgccgggcttgcccctggaactgggacattgactgttttcacaaatgaaaaaggaggggcaattgatgattcagtaattactaaggtgacggatgaccacatatatttggttgtgaatgctggttgcagggataaagatctggctcatattgaggaacatatgaaggcattcaaggccaaaggtggtgatgtgtcttggcacatccacgatgaaagatccctacttgctctgcagggtcctcttgctgctcccgttcttcaacacctaacaaaagaggatttgagcaagctattctttggggagttccgtgtgttggacatcaatggctcacagtgctttcttacccggacagggtatactggagaagatggatttgagatctcagttccttcagagcatggactagatcttgccaaggcaatactggaaaaatctgaagggaaggtaagattgacaggattgggagctagagatagtctgcgacttgaagctggattgtgcttatatggaaatgacatggaacagcacattacacctattgaggcaggactcacatgggctatagggaagaggaggagagcagaaggtggttttctaggagctgatgttatcttgaaacagctcgaagaaggtcctaaaatcaggcgtgttggtttcttttcttctggtccacctcccagaagccacagtgagattcaagatgaaggaggcaacaacattggggaaatcaccagtggtggattcagtccttgcctccagaagaacatagccatgggatatgtgaaatctggattgcacaaggcaggcaccaaagtaaagattattattcgaggaaaacccaatgaaggagtccttacaaaaatgccatttgtaccaacaaaatactataagccatcctga

SEQ ID NO: 70722 - protein, 407 aa, Glycine max
MRGSLWQLGQSITRRLAHGDKKAVARRCFASEAELKKTVFHDFHVAHGGKMVPFAGWSMPIQYKDSIMDSTINCRQNGSLFDVSHMCGLSLKGKDAVPFLEKLVIADVAGLAPGTGTLTVFTNEKGGAIDDSVITKVTDDHIYLVVNAGCRDKDLAHIEEHMKAFKAKGGDVSWHIHDERSLLALQGPLAAPVLQHLTKEDLSKLFFGEFRVLDINGSQCFLTRTGYTGEDGFEISVPSEHGLDLAKAILEKSEGKVRLTGLGARDSLRLEAGLCLYGNDMEQHITPIEAGLTWAIGKRRRAEGGFLGADVILKQLEEGPKIRRVGFFSSGPPPRSHSEIQDEGGNNIGEITSGGFSPCLQKNIAMGYVKSGLHKAGTKVKIIIRGKPNEGVLTKMPFVPTKYYKPS

SEQ ID NO: 70723 - DNA, 1182 bp, Glycine max
  CDS (1)..(1182)
atgagggggggcttatggcaactcgggcaatcaatcactcgccgtcttgcccagggtgataagaaggctgttgctcgtaggtattttgcctcagatgctgagctgaaaaagacagtcgtttatgacttccatgttgctaatggagggaagatggtgccatttgctggatggagcatgccaattcaatataaggactcaattatggactcaacccttaactgtagggagaatggtagcctttttgatgtttcccatatgtgcgggctaagcctcaagggaaaggactctgttccgttccttgaaaagcttgtcattgctgatgttgctgggcttgcccctggaactggttcattgactgtcttcacaaatgaaaaaggaggggcaattgatgattcagttattaccaaggtgaaggatgatcacatatacttggttgtgaatgctggatgcagggataaagatctggctcatattgaggagcatatgaaggcattcaaggccaaaggtggtgatgtgtcatggcacatccatgatgagagatctcttcttgctctgcagggtcctcttgctgctccggtttcttcaacacctgacaaaagcagatttaagcaagattgctttctcacacggacagggtatactggggaagatggatttgagatatcaattccctcagagagtgcagtggatcttgccaaggcaattcttgaaaaatctgaagggaagataagattgacaggattaggtgctcgagatagtctacgccttgaagctggattgtgtttatatggcaatgacttggaacagcacattacacctattgaggcaggactgacatgggccatagggaagagaaggagagcagaagggggttttctaggtgctgatgttatactaaaacagcttgaagaaggccctaagatcaggcgtgttggtttcttttcttctggccctcctcccagaagccacagtgagattcaagatgaaggagggaacaacattggggaagtcacaagtggcggattcagtccttgcctcaagaagaacatagccattggatatgtgaaatcaggattgcacaaagcaggcaccaaagtaaagattattattcgaggaaagtctaatgaaggagttgttacaaagatgccatttgtaccaacaaaatactataagccgtcctaa

SEQ ID NO: 70724 - protein, 393 aa, Glycine max
MRGGLWQLGQSITRRLAQGDKKAVARRYFASDAELKKTVVYDFHVANGGKMVPFAGWSMPIQYKDSIMDSTLNCRENGSLFDVSHMCGLSLKGKDSVPFLEKLVIADVAGLAPGTGSLTVFTNEKGGAIDDSVITKVKDDHIYLVVNAGCRDKDLAHIEEHMKAFKAKGGDVSWHIHDERSLLALQGPLAAPVSSTPDKSRFKQDCFLTRTGYTGEDGFEISIPSESAVDLAKAILEKSEGKIRLTGLGARDSLRLEAGLCLYGNDLEQHITPIEAGLTWAIGKRRRAEGGFLGADVILKQLEEGPKIRRVGFFSSGPPPRSHSEIQDEGGNNIGEVTSGGFSPCLKKNIAIGYVKSGLHKAGTKVKIIIRGKSNEGVVTKMPFVPTKYYKPS

SEQ ID NO: 70725 - DNA, 1444 bp, Sorghum bicolor
  CDS (102)..(1325)
gcacgaggcaccagtccaccacccaccacacccgaccgatcccgatctcaccgaacccccccgccacctgcctgccgtgccggggctcgccgctcgccacgatgaggggcctcctcgcgtgcgccagtaccctcgcccgccgcgccaccgcgcccgcgcgcgtccgccacctggcgggcgcggcggaggcggcggaggccgagctcaagaagacggcgctgtacgacttccacgtcgcgcacggcggcaagatggtgccgttcgccggctggagcatgcccatccagtacagggactccatcatggactccaccgtcaactgccgcgccaacggcgggctcttcggcgcggcccacatgtgcggcctcagcctcaggggccgcgacgccatcccgttcctcgagtccctcgtcatcgccgacgtcgccgcgctcagggacggcaccggcacgctcaccgtcttcaccaacgacaagggcggcgccatcgacgactccgtcgtcaccaaggtcaccgaccaccacatctacctcgtcgtcaacgccgggtgcagggacaaggacctcgcccacatcgaggagcacatggaggcgttcaataagaagggcggagacgtcaagtggcacatccacgacgagcggtcgctgctcgcattgcagggtcctcttgctgcaccaactctccagttgctgacgaaagaagatttgagcaaaatgtacttcagtgacttcaagctgattgacatcaatggatattcatgcttcctcacgagaactggttacaccggcgaagatggttttgaaatctctgttccatcagagaatgcagttgatcttgcaaaggccatcctagagaaatccgaaggcaaggtgcggttgactggcttgggtgcccgtgacagtctccgcctagaggcaggcctctgcctgtacggcaacgacatggagcagcacatcacgccagttgaagccggcctctcatgggcaattggaaagaggaggaaatcggaaggcggtttcctgggtgcagatgtgatcctaaagcagcttcaggaaggcccaaagatcaggcgtgtcggcatgatcacgcaagggccgcctgcacggagccacagcgagcttgtgagcagctccggggagagcatcggcgaggtgaccagcggagggttcagcccgtgcctgaagaagaacatcgctatgggctacgtgaaatcaggaatgcacaaggctgggacagaattcaaggtggttgttcgtgggaaatcctacgacgctgtggtcaccaagatgccgttcgtgcccaccaagtactacaggccctcgtagattgtacaaatgggacgctttgcatttctcttgttgcggcttgtccttgacaggttgtttaagcctgcaactgtaacttgacattttatctatgcctgcctaataatgccttgtttccc

SEQ ID NO: 70726 - protein, 407 aa, Sorghum bicolor
MRGLLACASTLARRATAPARVRHLAGAAEAAEAELKKTALYDFHVAHGGKMVPFAGWSMPIQYRDSIMDSTVNCRANGGLFGAAHMCGLSLRGRDAIPFLESLVIADVAALRDGTGTLTVFTNDKGGAIDDSVVTKVTDHHIYLVVNAGCRDKDLAHIEEHMEAFNKKGGDVKWHIHDERSLLALQGPLAAPTLQLLTKEDLSKMYFSDFKLIDINGYSCFLTRTGYTGEDGFEISVPSENAVDLAKAILEKSEGKVRLTGLGARDSLRLEAGLCLYGNDMEQHITPVEAGLSWAIGKRRKSEGGFLGADVILKQLQEGPKIRRVGMITQGPPARSHSELVSSSGESIGEVTSGGFSPCLKKNIAMGYVKSGMHKAGTEFKVVVRGKSYDAVVTKMPFVPTKYYRPS

SEQ ID NO: 70727 - DNA, 1430 bp, Oryza sativa
  CDS (46)..(1356)
gaaccaaacccgcgaaacccccacaaacgacggtggtgaaagaagatgagagggctactcgcgtgcgccacgctcgcccgccgcgccgccggcgcgacgtcgacggcgcggcggcacctggcgggcgcggccgatgtggcggaggcggagctgaagaagacggcgctgtacgacttccacgtcgcgcacggcgggaagatggtgccgttcgccgggtggagcatgcccatccagtacaaggacaccatcatggactccaccctcaactgccgcgccaacggcagcctcttcgacgtctcccacatgtgcggcctcagcctccacggccgccaggccatccccttcctcgagtccctcgtcgtcgccgacgtcgcggcgctcaaggacggcaccgggacgctcaccgtcttcaccaacgaccgcggcggcgccatcgacgactccgtcgttaccaaggtcaccgaccagcacatctacctcgtcgtcaacgccgggtgcagggacaaggatctcgcccacattggggagcacatggaggccttcaacaagaagggcggcgacgtcaagtggcacgtccacgatgagcgctcgcttcttgcattgcagggacctcttgctgcaccaactctccagttgctgacaaaagaagatttaagcaaaatgtatttcagtgacttcaagatgattgacatcaatggatatgcttgctttctcaccagaactggttataccggtgaagatgggtttgaaatctctgttccatcagagaatgcagttgatcttgcaaaggccctcctggagaaatctgaaggcaaggtgagactgactggtttaggtgcccgtgacagtctccgcttggaggctggcctctgcctgtacggcaacgacatggagcaacacatcacaccagttgaggctggtctctcatgggcaattggcaagaggaggaaagcagaaggcggcttcctgggagcagatgtgatcctcaagcagctccaggaaggcccaaagatcaggcgtgtcggtctcctctcgcaaggaccgcctcctcggagtcatagtgagattgtgagcaactccggggagaacattggtgaggttaccagtggagggttcagcccctgcttgaagaagaacatcgccatgggctacgtaaaatccggtttgcacaaggctgggacagagttcaaggttgtcgtccgtgggaagtcctacgatgccgtcgtcaccaagatgccgttcgtgccgaccaagtactacaaaccctcatggatttgtacaaaggatgctccttcggttgaaattttctcatgcaactctcttgtcgctgcttgttctgcagcaccgcaactgtaacttctgtaaggtctcatcttacagcctgacattttacctctgcccatctaataatatgaaatgtgatatgcagc

SEQ ID NO: 70728 - protein, 436 aa, Oryza sativa
MRGLLACATLARRAAGATSTARRHLAGAADVAEAELKKTALYDFHVAHGGKMVPFAGWSMPIQYKDTIMDSTLNCRANGSLFDVSHMCGLSLHGRQAIPFLESLVVADVAALKDGTGTLTVFTNDRGGAIDDSVVTKVTDQHIYLVVNAGCRDKDLAHIGEHMEAFNKKGGDVKWHVHDERSLLALQGPLAAPTLQLLTKEDLSKMYFSDFKMIDINGYACFLTRTGYTGEDGFEISVPSENAVDLAKALLEKSEGKVRLTGLGARDSLRLEAGLCLYGNDMEQHITPVEAGLSWAIGKRRKAEGGFLGADVILKQLQEGPKIRRVGLLSQGPPPRSHSEIVSNSGENIGEVTSGGFSPCLKKNIAMGYVKSGLHKAGTEFKVVVRGKSYDAVVTKMPFVPTKYYKPSWICTKDAPSVEIFSCNSLVAACSAAPQL

SEQ ID NO: 70729 - DNA, 1230 bp, Zea mays
  CDS (1)..(1230)
atgagaggcctcctcgcgtgcgccaccctcgcccgccgcgccgccgcctcctccgcgcccgcgcgcgtccgccacctggcgggcgccgcggaggcggcggaggccgagctcaagaggacggcgctctacgacttccacgtcgcccacggcggcaagatggtgccgttcgccggctggagcatgcccatccagtacagggactccatcatggactccaccgtcaactgccgcgccaacggcagcctcttcgacgtcgcccacatgtgcggcctcagcctcaagggccgcggggccatccccttcctcgagtccctcgtcgtcgccgacgtcgccgcgctcagggacggcaccggcaccctcaccgtcttcaccaacgagcagggcggcgccatcgacgactccgtcatcgccaaggtcaccgaccaccacatctacctcgtcgtcaacgccggatgcagggacaaggacctcgcccacatcgaggcgcacatggaggccttcaacaagaagggcggggacgtcaagtggcacatccacgacgaccgatcgctgctcgcattgcagggtcctcttgctgcacctactctgcagttgctgacgaaagaagatttgagcaaaatgtacttcagtgacttcaagatgattgacatcaatggatatgcatgctttctgacgagaactggctacaccggcgaagatggttttgagatctctgttccgtcagagaatgcagtggatcttgcagaggccatcctagagagatcggaaggcaaggtgcggctgaccggcttgggcgcccgtgacagtctccgactggaggcaggcctgtgcctgtacggcaacgacatggagcagcacatcacgccggtggaagccggcctctcatgggcgatcggcaagaggaggagggcagagggcggtttcctgggcgcagacgtgatcctgaagcagctccaggaagggccaaagatcaggcgcgtgggcatggtcacgcaggggccgcccgcgcggagccacagcgagctggtgagcggctcgggggagaggatcggcgaggtgaccagcggagggttcagcccgtgcctgaagaagaacatcgctatgggctacgtgaagtcgggaatgcacaaggctgggacggagttgaaggtggtcgttcgcgggaagtcctacgacgccgtggtcaccaagatgccgttcgtgcccaccaagtactacaagccctcgtag

SEQ ID NO: 70730 - protein, 409 aa, Zea mays
MRGLLACATLARRAAASSAPARVRHLAGAAEAAEAELKRTALYDFHVAHGGKMVPFAGWSMPIQYRDSIMDSTVNCRANGSLFDVAHMCGLSLKGRGAIPFLESLVVADVAALRDGTGTLTVFTNEQGGAIDDSVIAKVTDHHIYLVVNAGCRDKDLAHIEAHMEAFNKKGGDVKWHIHDDRSLLALQGPLAAPTLQLLTKEDLSKMYFSDFKMIDINGYACFLTRTGYTGEDGFEISVPSENAVDLAEAILERSEGKVRLTGLGARDSLRLEAGLCLYGNDMEQHITPVEAGLSWAIGKRRRAEGGFLGADVILKQLQEGPKIRRVGMVTQGPPARSHSELVSGSGERIGEVTSGGFSPCLKKNIAMGYVKSGMHKAGTELKVVVRGKSYDAVVTKMPFVPTKYYKPS

SEQ ID NO: 70731 - DNA, 1203 bp, Saccharomyces cerevisiae
  CDS (1)..(1203)
atgtctataatcaaaaaaattgtgtttaagagattcaactcaactttgaaaaaaactgctcttcatgaccttcatgtgtcattaggcggtacaatggtaccatacgcaggatattccatgcccgtactatacaagggacagactcatattgaatcacataattggaccaggacaaacgctggtttatttgatgtttctcatatgttacaaagtaagttatctggtcctcattctgttaagtttctgcaacgtgtaacgcccacagatttcaatgccttgcctgttgggtcagggaccttaagtgttctattaaatccacagggaggcgtggtagacgataccatcatcactaaagaaaacgatgacaatgagttctatattgtgaccaatgctggctgtgcggaaagagacaccgagttctttcacgatgagctacaaaatggttctactttagattgtcaatggaaaatcattgaaggtagatcactattggcattgcagggtcctaaagcaaaagatgtgttggaaccacttttatcaaaaacagctcctggaaaggatctaaaagagttattttttggacaaagacatgaatttgcgttaaaggacggttctttggttcaaattgctagaggcgggtacactggtgaagatggatttgagataagcattgcaaatgagaaagcggttgagtttgcggagcaactcttggccaatccagtaatgaagcctatcggactggctgctagagacagtttaaggttggaagctggtatgtgtttgtatggtcatgaattggacgaaagtatcacaccagtagaagctgcgttaaactgggtgatttcaaagtcaagaagggacctagtagatcaaaagtactggttcaatggctatgccaagataatggaccagctaaacaataaaacgtatagcaaggtacgagtcggattcaaatacttgaaaaaggggccagctgccagaaatggtgtcaagatcttcttgcccgatgccgaaacagaggtcggccttgttacatcaggtagtgcatctccaactttaaacaacatcaatattggacaagcttatgtacagaaaggttaccacaagaagggaacgaagttgcttgttcaagtaaggaacaagttctacccgattgaacttgctaaaatgcctcttgtgcccacacattactacaagcagtaa

SEQ ID NO: 70732 - protein, 400 aa, Saccharomyces cerevisiae
MSIIKKIVFKRFNSTLKKTALHDLHVSLGGTMVPYAGYSMPVLYKGQTHIESHNWTRTNAGLFDVSHMLQSKLSGPHSVKFLQRVTPTDFNALPVGSGTLSVLLNPQGGVVDDTIITKENDDNEFYIVTNAGCAERDTEFFHDELQNGSTLDCQWKIIEGRSLLALQGPKAKDVLEPLLSKTAPGKDLKELFFGQRHEFALKDGSLVQIARGGYTGEDGFEISIANEKAVEFAEQLLANPVMKPIGLAARDSLRLEAGMCLYGHELDESITPVEAALNWVISKSRRDLVDQKYWFNGYAKIMDQLNNKTYSKVRVGFKYLKKGPAARNGVKIFLPDAETEVGLVTSGSASPTLNNINIGQAYVQKGYHKKGTKLLVQVRNKFYPIELAKMPLVPTHYYKQ

SEQ ID NO: 70733 - DNA, 1095 bp, Thermotoga maritima MSB8
  CDS (1)..(1095): transl_table=11
atgaagagaacgcctctatttgaaaagcatgttgaactcggtgcgaaaatggtagatttcgcggggtgggagatgcctctttattacacatccatattcgaagaagtgatggcagtcagaaaatcggtggggatgttcgatgtctctcacatgggggaatttctcgttaaagggcccgaggcggtttcttttattgactttcttataacgaacgacttttcttcacttccggatggtaaagcgatttactctgtcatgtgcaatgaaaacggtggaatcatcgatgatcttgttgtgtacaaggtgagtcctgatgaagctctcatggtggtgaacgcggcaaacattgaaaaggacttcaactggataaaatcccattcgaagaatttcgatgtcgaagtatcgaacatttcagatacgacagcgctcatagcgttccaggggccaaaagcacaggagaccctccaggagcttgttgaagacggtctcgaggaaattgcctattattctttcagaaagagtattgtagccggtgtagagactcttgtctcaagaacgggatacacgggtgaggacggtttcgaactgatgcttgaagcgaagaatgcaccgaaggtctgggatgctttgatgaatctgctcagaaaaatcgatggcagacccgcaggtcttggggcgagagacgtttgccgactcgaggcgacttatttgctgtacggtcaggacatggatgagaacacgaatcctttcgaagtgggactttcctgggttgtaaaactgaacaaagacttcgtggggaaggaagcgctgctgaaagcgaaggaaaaagtggaaagaaaacttgtggcgcttgagctctctggaaaaagaatagcaagaaaaggctatgaagttttaaagaatggagagagagtgggagagatcacaagtggtaacttctctccaactcttgggaagtcgatagcgctggctctcgtttcaaaatcggtgaagataggagaccaactgggagtggtgtttcctggtggaaagcttgtagaagctctggtagtaaaaaaaccattttacagaggcagtgtgaggagggaggtttga

SEQ ID NO: 70734 - protein, 364 aa, Thermotoga maritima MSB8
MKRTPLFEKHVELGAKMVDFAGWEMPLYYTSIFEEVMAVRKSVGMFDVSHMGEFLVKGPEAVSFIDFLITNDFSSLPDGKAIYSVMCNENGGIIDDLVVYKVSPDEALMVVNAANIEKDFNWIKSHSKNFDVEVSNISDTTALIAFQGPKAQETLQELVEDGLEEIAYYSFRKSIVAGVETLVSRTGYTGEDGFELMLEAKNAPKVWDALMNLLRKIDGRPAGLGARDVCRLEATYLLYGQDMDENTNPFEVGLSWVVKLNKDFVGKEALLKAKEKVERKLVALELSGKRIARKGYEVLKNGERVGEITSGNFSPTLGKSIALALVSKSVKIGDQLGVVFPGGKLVEALVVKKPFYRGSVRREV

SEQ ID NO: 70735 - DNA, 1098 bp, Bacillus halodurans C-125
  CDS (1)..(1098): transl_table=11
atgacagaattaaagaaaacaccattatttgacctttacgaacagtatggcggtaaggtcattgactttggcggctgggctttaccagttcagttttcaagcatcaaagaagagcatgaagcagttcgaacaaaagcaggactgtttgacgtatctcatatgggtgaagtagaggtgacaggtgcccaggctcttaactacttgcagcgcttagtaacaaacgatgtgtcaaaaatcaaagacggtcaggcacaatatacagcgatgtgttatgaaaatggaggaactgtcgatgacttgctcatttatcggcggagcgaagatcagtaccttcttgttataaacgcggccaacattgacaaagacatagcatggatggagaagcatgcgatcgacggcgtttcgattaccaacgtatcaaatcaaacggcacagcttgctctacaagggccggttgctgagaatgtattgcaaacactcaccgaagaacctctagcagacattaaattttttcgatttgtcgatggcgtcaacattgcaggtgtgaatgttcttctttcgcgaactggctatacaggtgaggatggttttgaactttattgcttagctgaagatgcgcctgtcctatggaaaaaactaattgaagcagggaaagaacatggggtcgttccttgtggtctgggagcgagagatacccttcgttttgaagccaaattacctttatacggccaggaattgacgaaggatatttcgccaattgaagcgggtattggttttgcagttaaagtcgataaagaagattttatcggaaaagagatcctaaaaaaacaaaaggagcaaggggctccccggaaactcgttggacttgaaatggttgataaaggaatcccgcgcacgggctatgaggtttatgtggataatcagaagattggctttgtgacaacaggcacacaatcaccaacgttgaaaaaaaatgtggggctggccttgctgcaagctgagcacagtgagctagggactgaagtcatcgttcacgtacgcaaaagacagttaatagcaaaggttgtcgccaccccgttttataaaagaggaaactaa

SEQ ID NO: 70736 - protein, 365 aa, Bacillus halodurans C-125
MTELKKTPLFDLYEQYGGKVIDFGGWALPVQFSSIKEEHEAVRTKAGLFDVSHMGEVEVTGAQALNYLQRLVTNDVSKIKDGQAQYTAMCYENGGTVDDLLIYRRSEDQYLLVINAANIDKDIAWMEKHAIDGVSITNVSNQTAQLALQGPVAENVLQTLTEEPLADIKFFRFVDGVNIAGVNVLLSRTGYTGEDGFELYCLAEDAPVLWKKLIEAGKEHGVVPCGLGARDTLRFEAKLPLYGQELTKDISPIEAGIGFAVKVDKEDFIGKEILKKQKEQGAPRKLVGLEMVDKGIPRTGYEVYVDNQKIGFVTTGTQSPTLKKNVGLALLQAEHSELGTEVIVHVRKRQLIAKVVATPFYKRGN

SEQ ID NO: 70737 - DNA, 1101 bp, Neisseria meningitidis MC58
  CDS (1)..(1101): transl_table=11
atgactgctctgaaaaccaccccatttcatcaagcccatcaagatgcaggcgcgaagctggtcgattttgccggctgggagctgcccatccattatggttcacaaatcgccgaacacgaagccgtgcgcaccgacgccggtatgtttgacgtatcccatatgctcgttaccgacgtagcaggcgcaaatgccaaagcctttttccgcaaattgattgccaacgatgtcgccaagctcgcttttgtcggcaaagccctttattccgctttgctcaacgacaacggcggtgtgattgacgacttaatcgtttaccgcaccaatgaagccgaaacccaataccgcatcgtgtccaacggcgcgacccgcgaaaaagacacggcgcaattccacaaagtcggacaagagttcggcgtcgccttcaatccgcgctacgacctcggcatgctcgccgtacaaggccctaaagccattgaaaaactcctgaccgtcaaacccgaatgggcagatgtcgtccataacctcaaaccgttccaaggcgcggatttgggcaacgactggtttgtcgcccgcaccggctacaccggcgaagacggcgtcgaagtcatcctgcccggcaccgaagccgtcgcattcttcaaagccctgcaacaagccggcgtacagccctgcggcctcggcgcgcgcgacaccctgcgcatggaagccggcatgaacctctacggcaacgatatggacgacgacaccagcccgctcgaagcaggtatgggttggaccgttgacttgaaagacgaaagccgcgacttcgtcggcaaagccgccttgctggcattgaaagaaaaaggcgttgccgtcaaacaggtcggcctgttgctcgaaaaaggcggcatcctgcgcgcgcatatggaagtgttgaccgacaaaggccaaggcgaaaccaccagcggcgtattctccccaagcctgaaacaatccatcgccatcgcgcgcgtaccgaaagattttgacggcgataccgccaaagtgctgatgcgtggcaaagaagtggacgtgcgtgtactgaagctgccgtttgtccgcaacggacagaaacagtttgattga

SEQ ID NO: 70738 - protein, 366 aa, Neisseria meningitidis MC58
MTALKTTPFHQAHQDAGAKLVDFAGWELPIHYGSQIAEHEAVRTDAGMFDVSHMLVTDVAGANAKAFFRKLIANDVAKLAFVGKALYSALLNDNGGVIDDLIVYRTNEAETQYRIVSNGATREKDTAQFHKVGQEFGVAFNPRYDLGMLAVQGPKAIEKLLTVKPEWADVVHNLKPFQGADLGNDWFVARTGYTGEDGVEVILPGTEAVAFFKALQQAGVQPCGLGARDTLRMEAGMNLYGNDMDDDTSPLEAGMGWTVDLKDESRDFVGKAALLALKEKGVAVKQVGLLLEKGGILRAHMEVLTDKGQGETTSGVFSPSLKQSIAIARVPKDFDGDTAKVLMRGKEVDVRVLKLPFVRNGQKQFD

SEQ ID NO: 70739 - DNA, 1164 bp, Halobacterium sp. NRC-1
  CDS (1)..(1164): transl_table=11
atgccatcgcgggggacgcaccagcacacctgtttacgaaagccttacttcccgggacgcgacgggccacgtatgggtcttcgaacgtcgccgctgcacggccgacacgaggaccgcggcgcctccttcacggagttcggcggctggaacatgcccgtcgacttcgacgggatccaggcggagcacgccgcggttcgggaggccgcgggcatcttcgacgtctcgcacatgggcgagatcgaggtgtccgggccggacgccgaacgactgatgcagcgactgaccacgaacgacgtgtcgcgtctcgaccccggggacgcacagtacgccgccatcaccgacgatgacggcatcatgatcgacgacaccgtggtctatcgcacccccgccgactggcccggcgcgttcctgttcgtacccaacgccggccacgacgcggcggcgttcgaccggtggaccgaccaccgggacgcccacgacctcgacgcgtccgtcgacaacgtcaccacggactacggaatggtggccgtccaggggccggacgcgcccgacctggtcgcggcgcgcgccggcgatggcgtccacgacctcggacgcttcgaggccgcgaccgtcggcgtcgcgggcgtcgagtgcctcgtggcgaacaccggctacacgggcgaagcgggcgtcgagatcgtgttcccggccgacggcgcgggcgcggtctgggacgccatcgcgaacgactgccagccctgcgggctcggcgcgcgggacaccctccgcatggagcatggcttcctgctgtccgggcaggacttcgaccccgaggagaacccgcggacgccgttcgaggcgggcatcggcttcgccgtcgcgccggagtcggggttcgtcgggcgggacgcgctcgccgacacggacagccccgaacagcagttcgtggggctgacactggacgagcgtggcgtcccgcggcacggctacgccgtcacgacccctgctggggacgagatcggaaccgtcaccagcgggacgatgagtcccaccctgggcgagcccatcgggctcggatacgtcgacagcgcgcacgccgccgacggcacgactgttgcggtgcggatccgtggcaccgacaagcaagcaaccatcacgacaccacccttcctcgaccaatga

SEQ ID NO: 70740 - protein, 387 aa, Halobacterium sp. NRC-1
MPSRGTHQHTCLRKPYFPGRDGPRMGLRTSPLHGRHEDRGASFTEFGGWNMPVDFDGIQAEHAAVREAAGIFDVSHMGEIEVSGPDAERLMQRLTTNDVSRLDPGDAQYAAITDDDGIMIDDTVVYRTPADWPGAFLFVPNAGHDAAAFDRWTDHRDAHDLDASVDNVTTDYGMVAVQGPDAPDLVAARAGDGVHDLGRFEAATVGVAGVECLVANTGYTGEAGVEIVFPADGAGAVWDAIANDCQPCGLGARDTLRMEHGFLLSGQDFDPEENPRTPFEAGIGFAVAPESGFVGRDALADTDSPEQQFVGLTLDERGVPRHGYAVTTPAGDEIGTVTSGTMSPTLGEPIGLGYVDSAHAADGTTVAVRIRGTDKQATITTPPFLDQ

SEQ ID NO: 70741 - DNA, 1095 bp, Escherichia coli O157:H7 EDL933
  CDS (1)..(1095): transl_table=11
atggcacaacagactcctttgtacgaacaacacacgctttgcggcgctcgcatggtggatttccacggctggatgatgccgctgcattacggttcgcaaatcgacgaacatcatgaggtacgtaccgatgccggaatgtttgatgtgtcacatatgaccatcgtcgatcttcgcggcagccgcacccgggagtttctgcgttatctgctggcgaacgatgtggcgaagctcaccaaaagcggcaaagccctttactcggggatgttgaatgcctctggcggtgtgatagatgacctcatcgtctactactttactgaagatttcttccgcctcgttgttaactccgccacccgcgaaaaagacctctcctggattacccaacacgctgaacctttcggcatcgaaattaccgttcgtgatgacctttccatgatcgccgtacaagggccgaatgcgcaggcaaaagctgccacactgtttaatgatgctcagcgtcaggcggtggaagggatgaaaccgttctttggcgtgcaggcgggcgatctgtttattgccaccactggttataccggtgaagcgggctatgaaattgcgctgcccaatgaaaaagcggccgatttctggcgtgcgctggtggaagggggcgttaagccatgcggtctgggcgcgcgtgacacgctgcgtctggaagcgggcatgaatctttatggtcaggagatggacgaaaccatctctccgttagccgccaacatgggctggactatcgcctgggaaccggcagatcgtgacttcatcggtcgtgaagccctggaagtgcagcgtgagcatggcacagaaaaactggttggtctggtgatgaccgaaaaaggcgtgctgcgtaatgaactgccggtacgttttaccgatgcgcagggcaaccagcatgaaggcattatcaccagcgggactttctccccgacgctgggttacagcattgcgctggcacgcgtgccgaaaggtattggcgaaacggcgattgtgcaaattcgcaaccgtgaaatgccggttaaagtgacaaaacctgtttttgtgcgtaacggcaaagccgtcgcgtga

SEQ ID NO: 70742 - protein, 364 aa, Escherichia coli O157:H7 EDL933
MAQQTPLYEQHTLCGARMVDFHGWMMPLHYGSQIDEHHEVRTDAGMFDVSHMTIVDLRGSRTREFLRYLLANDVAKLTKSGKALYSGMLNASGGVIDDLIVYYFTEDFFRLVVNSATREKDLSWITQHAEPFGIEITVRDDLSMIAVQGPNAQAKAATLFNDAQRQAVEGMKPFFGVQAGDLFIATTGYTGEAGYEIALPNEKAADFWRALVEGGVKPCGLGARDTLRLEAGMNLYGQEMDETISPLAANMGWTIAWEPADRDFIGREALEVQREHGTEKLVGLVMTEKGVLRNELPVRFTDAQGNQHEGIITSGTFSPTLGYSIALARVPKGIGETAIVQIRNREMPVKVTKPVFVRNGKAVA

SEQ ID NO: 70743 - DNA, 1107 bp, Xylella fastidiosa 9a5c
  CDS (1)..(1107): transl_table=11
atgatcaaaaagaccattctcaatgacactcatcgggcactcggtgccaagatggtcgacttcagcggctgggaaatgcccattcactacggctcacagattgatgagcatcatcacgtcaggcgtaacgccggcatattcgacgtcagtcatatgaccgtcattgatttgcacgggacacaggtacgccccctcttgcgtcgactattagctaattcggtagataagctcaaagtacccggaaaagcactgtatagctgcatgttgaatccgcaaggcggtgtgatcgacgatttgatcgtctattacctacgtgaagattactttcgttttatcgtcaacgccgctacacgagaaaaggatttagcatggatcaatacacaagcatctgcgttcaacgtacgcgttgaagagcgtgcagacttggcaatgctcgccgtacaggggcctgccgcgcgcgcgcaggtcaccaacctattggccgagactcaccgcgacgcagtggaaaagctcggacgtttcgctgcactagaagtcgcatcgcactcgaaaaaaatcctctttatttcacgtactggatataccggtgaggacggctttgagatcttacttccacaagaagaaacgataacgttatggaatgcgctgttgaagacaggcgtgaaaccaatcggactaggcgcacgcgatacgttacgtctagaggcagggatgaatctctacggccaggatatggacgagcaggtttcaccctacgaagccgcactgggctggactgtcatgcttgatgaaggtcgcaacttcatcggccgcaacgtgctggaacagcaaaagactaacggcgtatcacggcagatgataggcctactcatggatgagaagggagtgcttcgccatggtcagaaagtattgaccgcacaaggcgagggccacatcctttccggtacgttttcaccaaccttgaacaaggctatcggattcgcgcgcgtgccagccggaaaaccaagtgaggtccgggtcaacatacgtgaccgtgaaatcccggtgcgggttgtcagattcccctttgtacgtgaaggccagacgcaaccaaacatttttgattga

SEQ ID NO: 70744 - protein, 368 aa, Xylella fastidiosa 9a5c
MIKKTILNDTHRALGAKMVDFSGWEMPIHYGSQIDEHHHVRRNAGIFDVSHMTVIDLHGTQVRPLLRRLLANSVDKLKVPGKALYSCMLNPQGGVIDDLIVYYLREDYFRFIVNAATREKDLAWINTQASAFNVRVEERADLAMLAVQGPAARAQVTNLLAETHRDAVEKLGRFAALEVASHSKKILFISRTGYTGEDGFEILLPQEETITLWNALLKTGVKPIGLGARDTLRLEAGMNLYGQDMDEQVSPYEAALGWTVMLDEGRNFIGRNVLEQQKTNGVSRQMIGLLMDEKGVLRHGQKVLTAQGEGHILSGTFSPTLNKAIGFARVPAGKPSEVRVNIRDREIPVRVVRFPFVREGQTQPNIFD

SEQ ID NO: 70745 - DNA, 1089 bp, Bacillus subtilis subsp. subtilis str. 168
  CDS (1)..(1089): transl_table=11
atgctgaaaagaacgccgttatttgacctgtataaggaatatggaggaaaaacgattgatttcggaggctgggagcttcctgttcaattttcttctataaaaaaagaacacgaggctgtccgaactgcagccggtttgtttgatgtatctcatatgggagaagtcgaagtgtcagggaacgacagtctgtcttttttgcaaagattgatgacaaatgatgtttccgcgttaacgccaggccgtgctcaatatacagcgatgtgttacccggatggcggaaccgtcgatgatttgcttatctatcaaaaaggagagaaccgctatctgcttgtcattaatgcttctaatatagataaagacttggcttggatgaaagaacatgcagcaggtgatgtgcagattgacaatcagtcagatcaaatcgcgctcttggctgtacagggaccgaaagcagaagcgatcttaaaaaatctgacagatgcggatgtgtctgcattaaagccgtttgcgtttattgatgaagccgatatcagcggccgcaaagcacttatttcacgcactggctatacgggagaagacgggtatgaaatttactgccgcagtgatgatgctatgcatatttggaaaaaaatcatcgatgcaggggatgcatacggattgattccatgcggtctcggtgcacgtgatacactccggtttgaagcgaacgtcccgctctacggtcaggagctgacccgggatattacaccgattgaagcaggtataggctttgctgtaaagcacaaaaaggagtctgactttttcggtaagtcagtattgagtgaacaaaaagaaaacggagcgaagcgcaaacttgtcggtctcgaaatgattgaaaaagggataccgcggcacggatatgaggttttccaaaatggcaagtctgtcggaaaggtgacaaccggcacgcagtcaccgacattaggaaaaaacgtcggccttgccttaattgattcggaaacgagtgagatcgggactgttgtagatgtagagatacgcaaaaaattagtgaaagcaaaggttgtcaaaacaccattttataaacgctaa

SEQ ID NO: 70746 - protein, 362 aa, Bacillus subtilis subsp. subtilis str. 168
MLKRTPLFDLYKEYGGKTIDFGGWELPVQFSSIKKEHEAVRTAAGLFDVSHMGEVEVSGNDSLSFLQRLMTNDVSALTPGRAQYTAMCYPDGGTVDDLLIYQKGENRYLLVINASNIDKDLAWMKEHAAGDVQIDNQSDQIALLAVQGPKAEAILKNLTDADVSALKPFAFIDEADISGRKALISRTGYTGEDGYEIYCRSDDAMHIWKKIIDAGDAYGLIPCGLGARDTLRFEANVPLYGQELTRDITPIEAGIGFAVKHKKESDFFGKSVLSEQKENGAKRKLVGLEMIEKGIPRHGYEVFQNGKSVGKVTTGTQSPTLGKNVGLALIDSETSEIGTVVDVEIRKKLVKAKVVKTPFYKR

SEQ ID NO: 70747 - DNA, 1098 bp, Yersinia pestis CO92
  CDS (1)..(1098): transl_table=11
atggctaagcagaccccgctgtatgaccaacatgtcgcgtgcggtgcgcgtatggtagattttcatggttggatgatgccattgcattatggctcccaaattgacgaacaccattttgtgcggcaggacgcaggcatgtttgatgtctcccacatgaccatcgttgatttgcacggtaaccgtacccgtgagtttttgcgctatctgttggctaacgatgtagccaaactgacccaaccgggcaaagccctttacaccgggatgctgaatgaatccggcggtgttatcgatgatttgattgtttacttcctcagcgaagattatttccgtttagtggttaactccgccacccgtgataaagacctcgcttggataagtcagcatgctgaaccttatcaggtcgaggtcacggtgcgtgacgatctggcactgattgcagtacaaggcccacaagcccaacaaaaagttgccacgttactgaccaccgagcagcaacaggctattgcgggcatgaagccattctttggtattcaaaccggcgatttatttattgctaccacgggttataccggtgaagccgggtatgaaattgcgttgccgaaacagcaggttgttgcgttctggcagcaactattggccgccggtgtgaagcccgcaggtcttggtgcgcgtgatacgctgcgcttagaagcggggatgaacttatatggtcaggaaatggatgaaaaaacgtctccgttagccgctaatatggggtggacagtggcctggcaaccagaagatcgtcagtttattggtcgtgctgcgttggaaaggcagcgaatgaaggggactgagcaattggttggtctgatcatgacggaaaaaggcgtgttacgtaatgaattgccggtgtatttttttgatgccgcaggcaatcagcatgttggggtgataaccagcggttcattttcgccaacactgggtttcagtattgcgctagcccgtgtacccgcaggtatcggtgaacatgctgtggtacaaatccgtaaccgtgaaatgccggtacgggtaacaaaacccggttttgtgcgagcgggcaaagccatcgtattgtaa

SEQ ID NO: 70748 - protein, 365 aa, Yersinia pestis CO92
MAKQTPLYDQHVACGARMVDFHGWMMPLHYGSQIDEHHFVRQDAGMFDVSHMTIVDLHGNRTREFLRYLLANDVAKLTQPGKALYTGMLNESGGVIDDLIVYFLSEDYFRLVVNSATRDKDLAWISQHAEPYQVEVTVRDDLALIAVQGPQAQQKVATLLTTEQQQAIAGMKPFFGIQTGDLFIATTGYTGEAGYEIALPKQQVVAFWQQLLAAGVKPAGLGARDTLRLEAGMNLYGQEMDEKTSPLAANMGWTVAWQPEDRQFIGRAALERQRMKGTEQLVGLIMTEKGVLRNELPVYFFDAAGNQHVGVITSGSFSPTLGFSIALARVPAGIGEHAVVQIRNREMPVRVTKPGFVRAGKAIVL

SEQ ID NO: 70749 - DNA, 1095 bp, Escherichia coli str. K-12 substr. MG1655
  CDS (1)..(1095): transl_table=11
atggcacaacagactcctttgtacgaacaacacacgctttgcggcgctcgcatggtggatttccacggctggatgatgccgctgcattacggttcgcaaatcgacgaacatcatgcggtacgtaccgatgccggaatgtttgatgtgtcacatatgaccatcgtcgatcttcgcggcagccgcacccgggagtttctgcgttatctgctggcgaacgatgtggcgaagctcaccaaaagcggcaaagccctttactcggggatgttgaatgcctctggcggtgtgatagatgacctcatcgtctactactttactgaagatttcttccgcctcgttgttaactccgccacccgcgaaaaagacctctcctggattacccaacacgctgaacctttcggcatcgaaattaccgttcgtgatgacctttccatgattgccgtgcaagggccgaatgcgcaggcaaaagctgccacactgtttaatgacgcccagcgtcaggcggtggaagggatgaaaccgttctttggcgtgcaggcgggcgatctgtttattgccaccactggttataccggtgaagcgggctatgaaattgcgctgcccaatgaaaaagcggccgatttctggcgtgcgctggtggaagcgggtgttaagccatgtggcttgggcgcgcgtgacacgctgcgtctggaagcgggcatgaatctttatggtcaggagatggacgaaaccatctctcctttagccgccaacatgggctggaccatcgcctgggaaccggcagatcgtgactttatcggtcgtgaagccctggaagtgcagcgtgagcatggtacagaaaaactggttggtctggtgatgaccgaaaaaggcgtgctgcgtaatgaactgccggtacgctttaccgatgcgcagggcaaccagcatgaaggcattatcaccagcggtactttctccccgacgctgggttacagcattgcgctggcgcgcgtgccggaaggtattggcgaaacggcgattgtgcaaattcgcaaccgtgaaatgccggttaaagtgacaaaacctgtttttgtgcgtaacggcaaagccgtcgcgtga

SEQ ID NO: 70750 - protein, 364 aa, Escherichia coli str. K-12 substr. MG1655
MAQQTPLYEQHTLCGARMVDFHGWMMPLHYGSQIDEHHAVRTDAGMFDVSHMTIVDLRGSRTREFLRYLLANDVAKLTKSGKALYSGMLNASGGVIDDLIVYYFTEDFFRLVVNSATREKDLSWITQHAEPFGIEITVRDDLSMIAVQGPNAQAKAATLFNDAQRQAVEGMKPFFGVQAGDLFIATTGYTGEAGYEIALPNEKAADFWRALVEAGVKPCGLGARDTLRLEAGMNLYGQEMDETISPLAANMGWTIAWEPADRDFIGREALEVQREHGTEKLVGLVMTEKGVLRNELPVRFTDAQGNQHEGIITSGTFSPTLGYSIALARVPEGIGETAIVQIRNREMPVKVTKPVFVRNGKAVA

SEQ ID NO: 70751 - DNA, 1128 bp, Caulobacter crescentus CB15
  CDS (1)..(1128): transl_table=11
ttgtccagccaagactcgtccgatcaagatctgaagaagaccccgctctacgacgcccacgtggcggccggcgcccgcatggttccgttcgcgggctattcgatgcccgtgcagtacaaggacggggtgctcaaggagcacctgtggacccgcgagcacgccggtctgttcgacgtctcgcacatgggccaggcccgcatccggggcgagaaccccgccaagagcttcgagaaggtggtctcggccgactatcagggcctgaaggccggcaagcagcgctatggcgtgctgctgaacgccgacggcggcatcgtcgatgacctgatgaccgcgcgcccggacgaggatggtctgttcgtggtggtcaacggcgcctgcaaggacaacgactacgccatcatcgcccgtgagctggccggcgaagccaccgtgacccgtctggaagaccgcgcgctgctggcgctgcagggccccgaggccgccgccgtgctggccgcccatgtcccggaagccgcgcagatggtgttcatggacgccaaggccctgagcgccttcggcgtcgatgcgatcatctcccgctcgggctataccggcgaggacggctacgagatctcggtgcccgccgacgccgccgagcgggtgtggaacaccctgctggccgatgagcgggtcaagccgattggcctgggcgcccgcgacagcctgcgcctggaagcgggcctgccgctctacggtcacgacctggatgaaaccgtctcgccgatcgaggcgggcctgaacttcgccgtcggcaggtcgcgccgcgaggccggcgactatctgggcgcggcccgcatcgccaaggaactggccggtgagctgtcgcgcgtccgcgtgaacctgaaggtgctggaaggcgcgccggcccgcgaaggcgccgagatcgccgacgaagcggggaatgtcatcggtaaggtgaccagcggcggcttcgcgcccagcctcggcttcccgatcgccatcggtttcgccccgcccgcctatgcggcggtggggaccaagctcaaggtcatcgtccggggcaagccggccgccgccgaggtggtggccagcccgttcgttccgaaccgttacgtccgcaaactttaa

SEQ ID NO: 70752 - protein, 375 aa, Caulobacter crescentus CB15
MSSQDSSDQDLKKTPLYDAHVAAGARMVPFAGYSMPVQYKDGVLKEHLWTREHAGLFDVSHMGQARIRGENPAKSFEKVVSADYQGLKAGKQRYGVLLNADGGIVDDLMTARPDEDGLFVVVNGACKDNDYAIIARELAGEATVTRLEDRALLALQGPEAAAVLAAHVPEAAQMVFMDAKALSAFGVDAIISRSGYTGEDGYEISVPADAAERVWNTLLADERVKPIGLGARDSLRLEAGLPLYGHDLDETVSPIEAGLNFAVGRSRREAGDYLGAARIAKELAGELSRVRVNLKVLEGAPAREGAEIADEAGNVIGKVTSGGFAPSLGFPIAIGFAPPAYAAVGTKLKVIVRGKPAAAEVVASPFVPNRYVRKL

SEQ ID NO: 70753 - DNA, 1095 bp, Salmonella enterica subsp. enterica serovar Typhimurium str. LT2
  CDS (1)..(1095): transl_table=11
atggcccaacagacgcctttgtacgaacaacacacgctatgcggcgcccgcatggtcgattttcatggctggatgatgcccctgcattacggctctcagcttgatgaacaccacgctgtgcgcaccgatgccgggatgtttgatgtatcgcatatgaccattgtcgatcttcatggcagccgcacacgagagtttctacgttatctgctggcaaacgacgtcgcgaagctaacgaagacgggtaaagccctctactccggtatgcttaacgcatcgggcggcgtgattgatgaccttatcgtctactacttcactgaagatttcttccgtctcgttgttaactccgccacccgcgaaaaagacctctcctggattacccaacacgctgaaccttatgccatcgacatcaccgttcgtgacgacctgtcgctgattgcggtacaggggccgaatgcgcaggaaaaagcggcgactctgtttactgaccaacagcgccatgcagtagaaggtatgaagccgttcttcggcgttcaggcgggcgatttgtttatcgccaccaccggttataccggcgaagcaggctatgaaatcgccatgccgaatgaaaaagcggcggatttctggcgtgcgctggtggaggcgggcgtgaagccgtgcggtcttggcgcgcgcgacacgctgcgtctggaagcaggcatgaacctgtacggtcaggagatggatgaaggtatctctccgctggcggctaatatgggatggactatcgcctgggaacctgctgaccgcgactttattggccgtgaggcgctggagatgcagcgtgaaaaaggccatgagcagcttgtcggtctggtgatgaccgagaagggcgtattgcgtaatgaattgccggtgcgttttaccgatgcgcagggcaatcagcaagaaggcattatcaccagcgggacgttttccccaacgttgggctacagcattgcgctggcgcgcgttccggcgggcatcggcgagacggcgattgtacaaattcgtaaccgtgaaatgccggtaaaagtgactaaacctgtttttgtgcgtaacggcaaagccgtcgcgtga

SEQ ID NO: 70754 - protein, 364 aa, Salmonella enterica subsp. enterica serovar Typhimurium str. LT2
MAQQTPLYEQHTLCGARMVDFHGWMMPLHYGSQLDEHHAVRTDAGMFDVSHMTIVDLHGSRTREFLRYLLANDVAKLTKTGKALYSGMLNASGGVIDDLIVYYFTEDFFRLVVNSATREKDLSWITQHAEPYAIDITVRDDLSLIAVQGPNAQEKAATLFTDQQRHAVEGMKPFFGVQAGDLFIATTGYTGEAGYEIAMPNEKAADFWRALVEAGVKPCGLGARDTLRLEAGMNLYGQEMDEGISPLAANMGWTIAWEPADRDFIGREALEMQREKGHEQLVGLVMTEKGVLRNELPVRFTDAQGNQQEGIITSGTFSPTLGYSIALARVPAGIGETAIVQIRNREMPVKVTKPVFVRNGKAVA

SEQ ID NO: 70755 - DNA, 1089 bp, Listeria monocytogenes EGD-e
  CDS (1)..(1089): transl_table=11
atgacagagctactaaaaacaccgattcatccactttatgcaaaatatggtgcgaaaaccattgattttggtgggtgggatttaccggtacaatttgctggtataaaagcagaacatgaggccgtgcgaactgatgcagggttatttgacgtgtctcacatgggagaaattctagtaaaaggacctgatagtacttcttatttacagtatttgttatcaaacgacatagaaaaaataaaaatcggaaaagcgcaatataatattatgtgctatgaaactggcggaacagtggacgatctagtagtttataagaaatcagaaacggaatacatacttgttgtcaatgcagcaaacacggacaaagattttgaatggatggttaaaaatattcgcggggatgtttctgttaccaatgtatcttcggaatatggacaattagcacttcaagggccaaacgccgaaaaaattctctcgaaactaacggatgtagatttaagctcgattagcttctttggatttgtggaggatgcggatgtagctggagtgaaaacaatcatttcaagaagtggatatactggagaagatggatttgaaatttatatgccaagcgcagatgcaggaaaagtatttgaggcgattttggctgaaggtgtcgctccaattggtttaggcgcacgggatacattgcgtttagaggcagtacttgcgctttatggacaagaattaagcaaagacattactccacttgaagctggcctcaattttgctgttaaattgaaaaaagaagcagattttataggcaaagaagccctaattaaacaaaaagaagcagggctgaacagaaaattagttggtattgaattaatcgaacgaggtattccacgtcacgattatccagtatttttaaatgaggaacaaatcggcgttgtgacttcaggcacgcaatcaccaacacttggaataaatattggtctcgctttaattgatacagcttacacagaattgggtcaagaagtagaagtaggcataagaaataaaaaagtaaaagcaaaaatagtaccaacaccattttataaacgcgcaaagtaa

SEQ ID NO: 70756 - protein, 362 aa, Listeria monocytogenes EGD-e
MTELLKTPIHPLYAKYGAKTIDFGGWDLPVQFAGIKAEHEAVRTDAGLFDVSHMGEILVKGPDSTSYLQYLLSNDIEKIKIGKAQYNIMCYETGGTVDDLVVYKKSETEYILVVNAANTDKDFEWMVKNIRGDVSVTNVSSEYGQLALQGPNAEKILSKLTDVDLSSISFFGFVEDADVAGVKTIISRSGYTGEDGFEIYMPSADAGKVFEAILAEGVAPIGLGARDTLRLEAVLALYGQELSKDITPLEAGLNFAVKLKKEADFIGKEALIKQKEAGLNRKLVGIELIERGIPRHDYPVFLNEEQIGVVTSGTQSPTLGINIGLALIDTAYTELGQEVEVGIRNKKVKAKIVPTPFYKRAK

SEQ ID NO: 70757 - DNA, 1131 bp, Nostoc sp. PCC 7120
  CDS (1)..(1131): transl_table=11
atggctaatcaaaaagatactgccgaaaccttagcgagaacccctttgtatcaactgggtgtagaactcaaagcccgcttgaccagctttggcgggtgggaaatgccagtacaatttagtgggatcacccgcgaacacgaagcagtaagaaacgctgctgggatgtttgacatttctcacatgggtaaattcaccctccaaggtaaaaacctcatttctcaactccaaggtttagttccttcagatttaagtaggttgcaaccaggacaagcccaatataccgtgttgttaaacccccaaggaggaatcatcgacgatattattgtctactaccaaggtgaagacaacactggtacacaacaggcatttattatcgtcaatgcagccaccactagtaaagacaaagcatggatactgtcacacctcgaccaaaatcaggtgcaattccaagacatatcaccagcaaaagtcttaatcgccattcaagggccaaaagctatcggctatctccagccttttgtgcagcaaaacttacaaccaatcaaagcctttggacatctagaagcaacagtactaggtcaagcaggttttatagcccgtacaggttataccggggaagatggctttgagattttggtagacccagaagtaggggtagagttatggcgtagtttatatgatgcaggtgtcattccctgtggcttaggtgcaagagataccctgaggctagaagcagctatggcgctttacggtcaagacatcgatgacaacaccactcctctagaagctgggttagggtggttagttcatttggataccaaaggagattttattggtcggtcggttttagaacaacaaaaggctacaggagtacaacgccgacttataggtttgcaaacccaaggacgtaacatcgcccgtcatggctaccaagttctctcagacggtaaagtagtaggcggagtgactagcggcactctatcacctacactgggttatcctgttgctttagcctacgtccctagcaaactagcgaaagttggtcaaccgctagaagtcgaaattcgtggtaaagcatacccagctgttgtagttaagcgacccttttatcgttcaagtaataagggttag

SEQ ID NO: 70758 - protein, 376 aa, Nostoc sp. PCC 7120
MANQKDTAETLARTPLYQLGVELKARLTSFGGWEMPVQFSGITREHEAVRNAAGMFDISHMGKFTLQGKNLISQLQGLVPSDLSRLQPGQAQYTVLLNPQGGIIDDIIVYYQGEDNTGTQQAFIIVNAATTSKDKAWILSHLDQNQVQFQDISPAKVLIAIQGPKAIGYLQPFVQQNLQPIKAFGHLEATVLGQAGFIARTGYTGEDGFEILVDPEVGVELWRSLYDAGVIPCGLGARDTLRLEAAMALYGQDIDDNTTPLEAGLGWLVHLDTKGDFIGRSVLEQQKATGVQRRLIGLQTQGRNIARHGYQVLSDGKVVGGVTSGTLSPTLGYPVALAYVPSKLAKVGQPLEVEIRGKAYPAVVVKRPFYRSSNKG

SEQ ID NO: 70759 - DNA, 1128 bp, Ralstonia solanacearum GMI1000
  CDS (1)..(1128): transl_table=11
atgacgctccaacacacgccgctcaatgccatccaccgctcgctgggcgcccgcatggtcgactttggcggctgggacatgccggtcaactacggctcccagatcgaggaacatcacgccgtgcgccgcgatgccggcatcttcgacgtctcgcacatgtgcgtggtcgacctgaccggtgcgcgggtgcgcgatttcctgcgcgggctgctcgccaacaacatcgacaagctgcagaccccgggcaaagcgctctacacctgcatgctcaaccccaagggcggcgtgatcgatgacctgatcgtctatttcttccgcgaggactggttccgcctggtggtcaacgccggcaccgcgccgaccgacatcgagtggatcaccgcgcagaacgccgccgccggcacgggcgtggccatcacgccgcgccgctccgacaacaacgcgggcgcggaacccctcggcatcgtggccgtgcagggcccgaacgcgcgcgccaaggcctacgccgccttgccgggcacgcaggcggtgggcgaggcgctcaagccgttcaacgctggcttcgccaccatcgacggcgtgggcgagatcatggtcgcgcgcaccggctacacgggggaagacggcttcgagctggtggtgcccgccgcgcagatcgccggcgtctgggagcgcctgctgcaggccggcgtgcgcccctgcggcctgggcgcgcgcgacacgctgcgcctggaagccggcatgaacctctacggccaggacatggacgagcacgtctcgccgctggacgcgggcctggcctggacggtcgacctgcaaagcgagcgcgacttcaacggcaaggcggcgctcgccgccaacggccagcgcgaccagttcgtcggcctgctgctgcgcgacaagggcggcgtgctgcgcgcccaccagaaagtcatcacggccgccggtgacggcgaaatcaccagcggcaccttcagccccagcctgtcgcagtcgatcgcgctggcgcgcctgcccaaggacgtggccatcggcgcggacgtgcaggtcgagatccgcgaccgcaggctgaccgcgactgtggttaaactgccgttcgtgcgcaatggcaaggcgctggtcagctga

SEQ ID NO: 70760 - protein, 375 aa, Ralstonia solanacearum GMI1000
MTLQHTPLNAIHRSLGARMVDFGGWDMPVNYGSQIEEHHAVRRDAGIFDVSHMCVVDLTGARVRDFLRGLLANNIDKLQTPGKALYTCMLNPKGGVIDDLIVYFFREDWFRLVVNAGTAPTDIEWITAQNAAAGTGVAITPRRSDNNAGAEPLGIVAVQGPNARAKAYAALPGTQAVGEALKPFNAGFATIDGVGEIMVARTGYTGEDGFELVVPAAQIAGVWERLLQAGVRPCGLGARDTLRLEAGMNLYGQDMDEHVSPLDAGLAWTVDLQSERDFNGKAALAANGQRDQFVGLLLRDKGGVLRAHQKVITAAGDGEITSGTFSPSLSQSIALARLPKDVAIGADVQVEIRDRRLTATVVKLPFVRNGKALVS

SEQ ID NO: 70761 - DNA, 1164 bp, Schizosaccharomyces pombe
  CDS (1)..(1164)
atgaatagatctgctgctttatcaatcttaaagcgccaaagttctacggcagcttcttcttcactcaagagaactcctttatatgatctgcatttaaaagaaggagctaccatagtcccctttgctggtttttcaatgccagtacagtataaaggtcaaaccattagtgccagtcataagtggacacgggagcattctggcttatttgatgtaagccatatggtccaatggtttgtgagaggtgaaaatgctactgcttatttggaaagtatcacaccttcttcgttgaaggaattgaagccttttcattctacattgagtgcctttacaaacgaaacgggtggcatcattgatgacacgattatcagtaaacaagatgaaaatacttattatattgtcaccaatgctgcttgtagtgagaaggatgaagccaaccttaaaaagcacatcgaaaattggaagggcgtcgaattagaaagggtccaagggagagctttaatcgctattcagggacccgagactgcttctgtcgttcaaaaattaatcccaaatgtcgatttttctgtactcaagtttggtcagtctgcatacgtggactttaagggagttaaatgcctcttttctcgcagtggatatacaggagaagatgggtttgaggtatccataccagaagaagtttctgttgactttgcaagcactttgttggctgatactagagttcgtccaattggacttggagcccgcgataccttacgtttagaagcgggaatgtgcctttatggaagtgatatcgatgacacgacctctccagttgagggttccttgtcctggattattggtaagcgtagaagaaaagaaggtggtttcgttggcagtagtcgaatcttaaaggagcttaaagatggcccttcacgtcgtcgagttggtttcatcgttgaaaaagtccctgctcgtcatggaagcgcggtcgaagttgatggtgtggaggttggccaagtaacctctggctgtccttctcctactctgggtaagaatatagctatgggttacatttctactgggttgcaccaagttggtactccagcgcacattaaagttcgtaacaaactccatccagcccaagtcgtccgcatgccgtttgtggaaacccattattataaataa

SEQ ID NO: 70762 - protein, 387 aa, Schizosaccharomyces pombe
MNRSAALSILKRQSSTAASSSLKRTPLYDLHLKEGATIVPFAGFSMPVQYKGQTISASHKWTREHSGLFDVSHMVQWFVRGENATAYLESITPSSLKELKPFHSTLSAFTNETGGIIDDTIISKQDENTYYIVTNAACSEKDEANLKKHIENWKGVELERVQGRALIAIQGPETASVVQKLIPNVDFSVLKFGQSAYVDFKGVKCLFSRSGYTGEDGFEVSIPEEVSVDFASTLLADTRVRPIGLGARDTLRLEAGMCLYGSDIDDTTSPVEGSLSWIIGKRRRKEGGFVGSSRILKELKDGPSRRRVGFIVEKVPARHGSAVEVDGVEVGQVTSGCPSPTLGKNIAMGYISTGLHQVGTPAHIKVRNKLHPAQVVRMPFVETHYYK

SEQ ID NO: 70763 - DNA, 1218 bp, Drosophila melanogaster
  CDS (1)..(1218)
atgttcagactaagctatcgactgcccgctgccctcggcggtctgcgccacgcctcctccgccgccggcgagggtcagcgcaccgccctctacgatttccacgtgcagaaaggcggaaagatcgtgaacttcggaggctatgctctgccggttcagtattcggatcagagcattatagcctcccacctgcacacccgtcaggtgggctccattttcgacgtgtcgcacatgctgcaatcccggattttcggcaaggatgcggccgcctgtctggagtcggtttgcactgcggacattctgggcacgccggagggcagtggtagcctcaccgtcttcaccaacgaggcgggcggtatcctggacgatctcatcgtgaacaaagtcagcgaaaaggagctatatgtggtctccaatgcggcgatgaaagaacaggacatgggcataatgaagacagctgtggataattttaagtcccagggaaaagacgtatccattgaattcctcacacccgccgatcaatctctagtagccgtccagggtcctcaagtggccaaggaactatcgaaactacttaccgggaaagcttctctcgatcaactctacttcatgagttccttcgtcaccacattggctggaatccccaatgtcaggatcacgagatgtggttacaccggtgaggacggtgtggagatatcggtggcatccagccaggcacagaagctcactgaatctcttcttgagagtggagtcctcaagcttgctggtctgggagccagagactccctgcgattggaggcgggtctctgcttgtatggcagtgatatcgattctaagacgacacccgtggaggcggctcttgcctggttggtaaccaaaagacgccgcacaacccgcgattttccaggagctgacgtgatccttggccagctgaaggagggcgtcagccggaggcgagtgggtctccagatgttgggcaccaagccaccgccagctcgttccggagtggccatctttagtcagggtcagcaggtgggtcaggtgactagtggctgcccaagtcccagtgctggacgcaacattgctatgggatatgtggcagagaatctaaaagcacccggcacaaaggtggagttcaaggttcgagacaagctctacgaggctgaagtcactaaaatgccatttgtaaaagctaactattataacagaccaaagaaataa

SEQ ID NO: 70764 - protein, 405 aa, Drosophila melanogaster
MFRLSYRLPAALGGLRHASSAAGEGQRTALYDFHVQKGGKIVNFGGYALPVQYSDQSIIASHLHTRQVGSIFDVSHMLQSRIFGKDAAACLESVCTADILGTPEGSGSLTVFTNEAGGILDDLIVNKVSEKELYVVSNAAMKEQDMGIMKTAVDNFKSQGKDVSIEFLTPADQSLVAVQGPQVAKELSKLLTGKASLDQLYFMSSFVTTLAGIPNVRITRCGYTGEDGVEISVASSQAQKLTESLLESGVLKLAGLGARDSLRLEAGLCLYGSDIDSKTTPVEAALAWLVTKRRRTTRDFPGADVILGQLKEGVSRRRVGLQMLGTKPPPARSGVAIFSQGQQVGQVTSGCPSPSAGRNIAMGYVAENLKAPGTKVEFKVRDKLYEAEVTKMPFVKANYYNRPKK

SEQ ID NO: 70765 - DNA, 1125 bp, Thermoanaerobacter tengcongensis MB4
  CDS (1)..(1125): transl_table=11
atgaaagggtgtgatagtttggataatctcaaaaaaaccccattgtatgaaatttatcctaagtacaatgcaaaaataatagactttgccggctgggcaatgccagttcaattcgaaagcataatatcagaacacgaagctgtcagaaatgcagcaggccttttcgatgtatcccatatgggagaaataattgtaaaaggaaaagatgcgtttcctttcctccagaacctcctcacaaatgacctttccaagttaaatgacaatcaggtgctttacactttcatgtgcaatcacaacggaggagtaattgacgaccttctagtctacaagtattccaacaactactatcttttagtagttaatgcagcaaacatagaaaaggattacaaatggatgctgaacaatgcaggaatatacaaagtggaaattgaaaatgtgtcagataagatagcagaactagcaattcagggtccaaaagcagaagaaatccttcaaaaattgactgatgaggacctatcacagatcaagttcttctacttcaaagataaagtaaaaattgctggtgtagaatgcttagtttcccgcacaggttacactggtgaagacggatttgaaatttatatgccaaatgaacatgctgtcaccctttgggagaaaattttagaggcgggcaaagattacggcctcaagccggcaggtcttggcgcaagagatacacttcgctttgaagcaggtttgcctctttatggaaatgaattaggagaggacataactcctttagaagcaggtttaggattttttgtgaagtttgacaaaggaaattttattggaaaagacgctcttttaaaacagaaggaacaaggattaaagagaaaactggtaggatttgaaatgataggcaatggaattccaagacacgggtatgaagtacaggctgataatcaaaaaattggctatgtgactacgggttatttctctccaactcttaaaaagaacataggactcgctttgattgactcaaaatacgcccaaataggaaatcaaattgaggtaataataagaaataagccgcttaaagcggtgatagtagataagaatttctacaagaaaaattacaaaaaatag

SEQ ID NO: 70766 - protein, 374 aa, Thermoanaerobacter tengcongensis MB4
MKGCDSLDNLKKTPLYEIYPKYNAKIIDFAGWAMPVQFESIISEHEAVRNAAGLFDVSHMGEIIVKGKDAFPFLQNLLTNDLSKLNDNQVLYTFMCNHNGGVIDDLLVYKYSNNYYLLVVNAANIEKDYKWMLNNAGIYKVEIENVSDKIAELAIQGPKAEEILQKLTDEDLSQIKFFYFKDKVKIAGVECLVSRTGYTGEDGFEIYMPNEHAVTLWEKILEAGKDYGLKPAGLGARDTLRFEAGLPLYGNELGEDITPLEAGLGFFVKFDKGNFIGKDALLKQKEQGLKRKLVGFEMIGNGIPRHGYEVQADNQKIGYVTTGYFSPTLKKNIGLALIDSKYAQIGNQIEVIIRNKPLKAVIVDKNFYKKNYKK

SEQ ID NO: 70767 - DNA, 1119 bp, Streptomyces coelicolor A3(2)
  CDS (1)..(1119): transl_table=11
atgagcagtaccgaactgcgccgtaccgcgctcgatgccacgcatcgcgcgctgggcgcgacgatgaccgacttcgccggctgggacatgccgctgcgctacggctccgagcgcgaggagcacgtcgcggtgcgcacccgcgccggtctcttcgacctgtcgcacatgggtgagatcaccgtcaccggcccgcaggcggccgagctgctgaacttcgcgctggtcggcaacatcggcaccgtgaagccgggccgggcgcgctacaccatgatctgccgcgaggacggcggcatcctggacgacctgatcgtctatcggctcgaagaggccgagtacatggtcgtcgccaacgcctccaacgcccaggtcgtcctggacgcgctgaccgagcgggcggccgggttcgacgccgaggtgcgcgacgaccgggacgcctacgcgctgctcgccgtgcagggccccgagtccccgggcatcctcgcgtcgctcaccgacgccgatctggacggcctgaagtactacgccggtctgcccggaacggtcgccggcgtcccggcgctgatcgcgcgcaccggctacaccggcgaggacggcttcgagctgttcgtgaagccggagcacgccgtcgggctgtggcaggcactgaccggggcgggcgaggccgcggggctgatcccgtgcggtctgtcctgccgggacacgctccgcctggaggcgggcatgccgctgtacggcaacgagctgtcgaccgcgctgacgccgttcgacgccggtctgggccgggtggtgaagttcgagaaggagggcgacttcgtcgggcgcgccgcgctgaccgaggccgccgagcgcgccgcttcccggccgccccgcgtcctggtcggcctggtcgccgagggccgccgggtcccgcgctccgggtaccgggtcgtcgcgggcggcgaggtgatcggcgaggtcacctccggcgctccgtccccgacgctgggcaggccgatcgccatggcgtacgtcgaccccgcacacgcggccccgggcaccgagggcgtgggcgtggacatccggggcagccacgagccgtacgaggtcgtggcgctgccgttctacaagcgccagaagtag

SEQ ID NO: 70768 - protein, 372 aa, Streptomyces coelicolor A3(2)
MSSTELRRTALDATHRALGATMTDFAGWDMPLRYGSEREEHVAVRTRAGLFDLSHMGEITVTGPQAAELLNFALVGNIGTVKPGRARYTMICREDGGILDDLIVYRLEEAEYMVVANASNAQVVLDALTERAAGFDAEVRDDRDAYALLAVQGPESPGILASLTDADLDGLKYYAGLPGTVAGVPALIARTGYTGEDGFELFVKPEHAVGLWQALTGAGEAAGLIPCGLSCRDTLRLEAGMPLYGNELSTALTPFDAGLGRVVKFEKEGDFVGRAALTEAAERAASRPPRVLVGLVAEGRRVPRSGYRVVAGGEVIGEVTSGAPSPTLGRPIAMAYVDPAHAAPGTEGVGVDIRGSHEPYEVVALPFYKRQK

SEQ ID NO: 70769 - DNA, 1110 bp, Xanthomonas campestris pv. campestris str. ATCC 33913
  CDS (1)..(1110): transl_table=11
atgacccagaagaccatcctcaacgacacccatcgcgcgctcggcgccaagatggtcgacttcggcggttgggacatgccgatccactacggctcgcagatcgacgaacaccaccaggtgcgtcgcgacgccggcatgttcgacgtcagccacatgaccgtggtcgatctgcacggcgtgcgcgtgcgcgagttcttgcgctacctgctggccaattcggtcgacaagctcaaggtctccggcaaggccttgtacacctgcatgctcaacccgcagggtggcgtgatcgacgacctgatcgtgtacttcatgcaggaagagtttttccgcctggtggtcaacgccgccacccgcgacaaggacctgcagtggatcggcgaacaggccgcacgcttcgaggtgcgcgtgaaagaacgcgccgacttcgccatgatcgcggtgcagggaccgaacgcgcgcagcaaggtgatcgacctgctcgaccccgccgacgctagcgctgcgagcaagctcggccgcttcgctgcgctgcagacgcgcacgcgcgatggcgttgcgttgttcctcgcgcgcaccggctacaccggtgaggacggttttgaaattgtgttgccgcaggctgatgcggtcgcgttctggaatgcgctgctcgcgcatggcgtggcgcctgccggcctgggcgcgcgcgacaccttgcgtctggaagcgggcatgaatctctacggccaggacatggacgacaacgtcactccgtacgaagccgcgctggcctggaccatcacgctcgacgaaggccgcgacttcatcggccgcagcgtgctggagtcgcagaaagcgcagggcgcaccccgccagatgatcggcgtggtcatggacgagaagggcgtgctgcgtcacggccagaaggtgctcagcgcaggcggcgaaggcgagatcctgtccggcacgttctcgcccaccctgggcaaggccattgcctttgcacgcgtgccggccggcagcatcgacgacctgcgcgtggacatccgtggcaagcaggtgcccttgcgcgcggtgaagtttccgtttgtgcgcgatggccaggcccagcccggcgtactcggcgcgtaa

SEQ ID NO: 70770 - protein, 369 aa, Xanthomonas campestris pv. campestris str. ATCC 33913
MTQKTILNDTHRALGAKMVDFGGWDMPIHYGSQIDEHHQVRRDAGMFDVSHMTVVDLHGVRVREFLRYLLANSVDKLKVSGKALYTCMLNPQGGVIDDLIVYFMQEEFFRLVVNAATRDKDLQWIGEQAARFEVRVKERADFAMIAVQGPNARSKVIDLLDPADASAASKLGRFAALQTRTRDGVALFLARTGYTGEDGFEIVLPQADAVAFWNALLAHGVAPAGLGARDTLRLEAGMNLYGQDMDDNVTPYEAALAWTITLDEGRDFIGRSVLESQKAQGAPRQMIGVVMDEKGVLRHGQKVLSAGGEGEILSGTFSPTLGKAIAFARVPAGSIDDLRVDIRGKQVPLRAVKFPFVRDGQAQPGVLGA

SEQ ID NO: 70771 - DNA, 1110 bp, Xanthomonas axonopodis pv. citri str. 306
  CDS (1)..(1110): transl_table=11
atgacccagaagaccatcctcaacgacacccatcgtgcgcttggcgccaagatggtcgacttcggcggctgggacatgccgatccactacggctcgcaactggacgagcaccaccaggtgcgtcgcgacgccggcatgttcgacgtcagccacatgacggtggtcgacctgcacggcgcgcgggtgcgcgagtttctgcgctacctgctcgccaactcggtggacaagctcaaggtctccggcaaggcgctgtacacctgcatgctcaatccgcagggtggggtgatcgacgacctcatcgtctattacatgacagaagacttcttccgtctggtggtcaacgccgccacccgcgaaaaggacctgcagtggatcggcgagcaggccgcgcgcttcgacgtgcgcgtcgaagagcgcagcgacttcgccatgattgccgtgcaaggtcccagcgcgcgtaccaaggtcatcgacctgctcgaccctgccgacactgcagcggcgagcaagctcggccggttcgccgcgctgcagacgcgttcgcgcgatggcatcgagttgttccttgcgcgcaccggctacaccggcgaagacggtttcgaaatcgtgttgccgcagcaggccgccgtcgcattctggaatgcgttgctcgcgcagggcgtcaaaccggccggcctgggcgcacgcgacaccctgcgtctggaagcgggcatgaatctttacgggcaggacatggacgatggcgtcaccccttacgaggcagggctggcctggacgatcgccctggacgaaggacgcgacttcatcggtcgcagcgtgctcgaatcgcaaaaggcgcagggcgcaccgcgtcagctgatcggtgtggtgatggacgagaagggcgtgttacggcatggccagaccgtgctcaccgccaacggcgaaggcgagatcctgtccggcacgttctcgccgacgctgggcaaggcgatcgccttcgcgcgcgtgccggccggcagcatcgagcagctgcgcgtggacatccgcggcaaacaggtgccgttgagagcggtgaagtttccgttcgtgcgcgatggccaggcacagcccggcgtgctcggcgactga

SEQ ID NO: 70772 - protein, 369 aa, Xanthomonas axonopodis pv. citri str. 306
MTQKTILNDTHRALGAKMVDFGGWDMPIHYGSQLDEHHQVRRDAGMFDVSHMTVVDLHGARVREFLRYLLANSVDKLKVSGKALYTCMLNPQGGVIDDLIVYYMTEDFFRLVVNAATREKDLQWIGEQAARFDVRVEERSDFAMIAVQGPSARTKVIDLLDPADTAAASKLGRFAALQTRSRDGIELFLARTGYTGEDGFEIVLPQQAAVAFWNALLAQGVKPAGLGARDTLRLEAGMNLYGQDMDDGVTPYEAGLAWTIALDEGRDFIGRSVLESQKAQGAPRQLIGVVMDEKGVLRHGQTVLTANGEGEILSGTFSPTLGKAIAFARVPAGSIEQLRVDIRGKQVPLRAVKFPFVRDGQAQPGVLGD

SEQ ID NO: 70773 - DNA, 1098 bp, Chlorobium tepidum TLS
  CDS (1)..(1098): transl_table=11
atgaaaaagactgcgctctcagcctggcatgaagctgccggtgcgaaaatgatcgatttcggcggatttctgatgccggtgcagtacaccgggattatcgccgagcacaaggccgtccgcgaagcggcggggcttttcgatgtgtctcacatgggtaatttctacgtcaggggagcgcgggcgctggagttccttcagtacatgaccaccaacgatctcgcaaaaatcgtggacgggcaagcgcagtacacgctgatgctctatcccgatggcggcatcgtcgatgaccttatcatctaccgggtgagcgccgacacctttttcctcatcgtcaacgcgagcaactgcgaaaaggatttcgactggctttcgagccatatcggccagttcgagggggtggcgctcgaaaaccacaccagcgagctttcgctcatcgccctgcaggggccgaagtcgttcgatattctggcgcgggttttccctggcgcgggcatcgacaagctcggttcgttccacttcataaagctgccgttcgagggagcggagatcatggtggcccgcaccggctacaccggcgaggcgggcgtcgaaatctgccttccgaacgaaagggcggttgcgctctggtcggcgctgatggaggcaggaaagagtgacggcatccagccgatcggtctcggcgcgcgcgatacgttgcggctggagatgggctattcgctctacggccacgagatcgagagggatgtcaatccgctcgaagcacggctcaaatgggtggtgaagctgaacaaaccaaacttcatcggcaagcaggcgtgcgagcaggttgagatcaatccacgcaagagcgtggttggcttcagcctcgaaggccgcgctattccgcgccagcacttcaaggtctataactccgacaagcaggagattggtgaggtgtgcagcggcacggtgtcgccgacccttcaggagccgattggcacggcgagccttctgctcgactacgcgcagcccggtacgccgatcttcgttgaaattcgcggaaccatgcaacccggtgcggtcaggcgcctgccgttcgtgcacgctgaccgtccatga

SEQ ID NO: 70774 - protein, 365 aa, Chlorobium tepidum TLS
MKKTALSAWHEAAGAKMIDFGGFLMPVQYTGIIAEHKAVREAAGLFDVSHMGNFYVRGARALEFLQYMTTNDLAKIVDGQAQYTLMLYPDGGIVDDLIIYRVSADTFFLIVNASNCEKDFDWLSSHIGQFEGVALENHTSELSLIALQGPKSFDILARVFPGAGIDKLGSFHFIKLPFEGAEIMVARTGYTGEAGVEICLPNERAVALWSALMEAGKSDGIQPIGLGARDTLRLEMGYSLYGHEIERDVNPLEARLKWVVKLNKPNFIGKQACEQVEINPRKSVVGFSLEGRAIPRQHFKVYNSDKQEIGEVCSGTVSPTLQEPIGTASLLLDYAQPGTPIFVEIRGTMQPGAVRRLPFVHADRP

SEQ ID NO: 70775 - DNA, 1101 bp, Thermosynechococcus elongatus BP-1
  CDS (1)..(1101): transl_table=11
atgatctctatggctgaagcattgcaacgtacccccctctatcctctacatcagggagcacggtttaccccctttggcgattgggagatgcccctccagtacagcagtattttgcaggaacaccaagccgtacggcagcaggtggggatgtttgatatttcccacatgggcaagttggtgctgcggggagagggagtactaggggcgctgcaaaccttagtgcccacgaatctgagccagctacagcccggccaagcaaaatacaccgttctcctgaacgaggccgggggcattgtcgatgatgtcattctctacatgggtgatggccaagtccgctgtattgtgaatgcggctaccactgccaaggactgggcatggtttcaaaagtatttacccgccagtattgaggtgattgatgagtcggcgagccaggtgttgattgctctccaagggccggcggcgacggcaacgctgtctcccttgtgcgatcgccccctaggggagatcaagacctatcgccatgctccagtgaacctactgggacagcctgcttggatagcgcgcaccggctacacaggtgaagatggttgggaaattcttgtccccgccgaactggggcaacagttgtggcaaaccctgttggcggcaggtgtgactccctgtgggttgggggcgcgcgatacgctgcggttggaggccgccatgctcctctacggccaggatatggatgagcaaactacccccctagaggcgggtctcgatgggttaattgattggcaaaagcccgattttgtgggtcgtgctgcccttttagctcaaaagcagcagggcattgagcggcaattggtggggttagaactactgggcaaaggcattgctcgccacggctacccaatctacgcaggagcccaggccgtgggggaggttaccagtggcaccctatctcccacgttggggaaggcgatcgcccttggctatgtctttccagagtttgcccacataggtcgtgaactggcggtgcaggtgcgcgatcgctgggtgccagcggtggtggtgcctcgacccttttatcgccggccgcggtcaacggctaaaatttga

SEQ ID NO: 70776 - protein, 366 aa, Thermosynechococcus elongatus BP-1
MISMAEALQRTPLYPLHQGARFTPFGDWEMPLQYSSILQEHQAVRQQVGMFDISHMGKLVLRGEGVLGALQTLVPTNLSQLQPGQAKYTVLLNEAGGIVDDVILYMGDGQVRCIVNAATTAKDWAWFQKYLPASIEVIDESASQVLIALQGPAATATLSPLCDRPLGEIKTYRHAPVNLLGQPAWIARTGYTGEDGWEILVPAELGQQLWQTLLAAGVTPCGLGARDTLRLEAAMLLYGQDMDEQTTPLEAGLDGLIDWQKPDFVGRAALLAQKQQGIERQLVGLELLGKGIARHGYPIYAGAQAVGEVTSGTLSPTLGKAIALGYVFPEFAHIGRELAVQVRDRWVPAVVVPRPFYRRPRSTAKI

SEQ ID NO: 70777 - DNA, 1095 bp, Shigella flexneri 2a str. 301
  CDS (1)..(1095): transl_table=11
atggcacaacagactcctttgtacgaacaacacacgctttgcggcgctcgcatggtggatttccacggctggatgatgccgctgcattacggttcgcaaatcgacgaacatcatgcggtacgtaccgatgccggaatgtttgatgtgtcgcatatgaccatcgtcgatctccgcggcagccgcacccgggagtttctgcgttatctgctggcgaacgatgtggcgaagctcaccaaaagcggcaaagccctttactcggggatgttgaatgcctctggcggtgtgatagatgatctcatcgtctactactttactgaagatttcttccgcctcgttgttaactccgccacccgcgaaaaagacctctcctggattacccaacacgctgaacctttcggcatcgaaattaccgttcgtgatgacctttccatgattgccgtgcaagggccgaatgctcaggcaaaagctgccacactgtttaatgatgctcagcgtcaggcggtggaagggatgaaaccgttctttggcgtgcaggtgggcgatctgtttattgccaccactggttataccggtgaagcgggctatgaaattgcgctgcccaatgaaaaagcggccgatttctggcgtgcgctggtggaagcgggcgttaagccctgcggtctgggggcgcgtgacacgctgcgtctggaagcgggcatgaatctttatggtcaggagatggacgaaactatttctcctttagccgccaacatgggctggactatcgcctgggaaccgacagatcgtgactttatcggtcgtgaagccctggaagtgcagcgtgagcatggtacagaaaaactggttggtctggtgatgaccgaaaaaggcgtgctgcgtaatgaactgccggtacgctttaccgatgcgcagggcaaccagcatgaaggcattatcaccagcggtactttctccccgacgctgggttacagcattgcgctggcgcgcgtgccggaaggtattggcgaaacggcgattgtgcaaattcgcaaccgtgaaatgccggttaaagtgacaaaacctgtttttgtgcgtaacggcaaagccgtcgcgtga

SEQ ID NO: 70778 - protein, 364 aa, Shigella flexneri 2a str. 301
MAQQTPLYEQHTLCGARMVDFHGWMMPLHYGSQIDEHHAVRTDAGMFDVSHMTIVDLRGSRTREFLRYLLANDVAKLTKSGKALYSGMLNASGGVIDDLIVYYFTEDFFRLVVNSATREKDLSWITQHAEPFGIEITVRDDLSMIAVQGPNAQAKAATLFNDAQRQAVEGMKPFFGVQVGDLFIATTGYTGEAGYEIALPNEKAADFWRALVEAGVKPCGLGARDTLRLEAGMNLYGQEMDETISPLAANMGWTIAWEPTDRDFIGREALEVQREHGTEKLVGLVMTEKGVLRNELPVRFTDAQGNQHEGIITSGTFSPTLGYSIALARVPEGIGETAIVQIRNREMPVKVTKPVFVRNGKAVA

SEQ ID NO: 70779 - DNA, 1122 bp, Pseudomonas putida KT2440
  CDS (1)..(1122): transl_table=11
atgtccgaaacactgctcaagaccccactgcatgccctgcatctggaactgggtgcacgcatggtgccgttcgccggctacgacatgccggtgcagtacccgctgggcgtgctcaaggaacacctgcacacccgcgagcaggccggcctgttcgacgtctcgcacatgggccagatcattctgcgtggcgctgacgccgccaaggcgctggaaagcctggtaccggtggacatcatcgacctgccagtgggtatgcagcgctatgccatgttcaccaatgagcaaggcggcattctcgacgacctgatggttgccaacctgggcgaggacaccctgttcctggtcgtcaacgccgcctgcaaggagcaggacctggctcacctgcaaacccacatcggcagccgttgcgaggtgcagccgctgttcgaggagcgtgccctgctcgccctgcaaggcccggctgcagtcaaggtgctggaacgcctggctccagaagtggccggcatgaccttcatgcagttccgccgggtaaaactgctgggtgtggactgcttcgtcagccgctcgggctacaccggcgaagacggctacgagatctcggtaccggtcaacgctgccgacgccttggcccgccgcctgatggccgagccggaagtacagccgatcggcttgggcgcacgcgactcgctgcgcctggaagctggcctgtgcctgtatggccacgacatgaacagcgagactacgccgatcgaagccagcctgctgtgggcaatttccaaggtgcgccgtgccgacggtgcacgtgctgccggcttcccgggtgccgaggcgatcttcgcccacgtgcgcgatggtgttgcgcgcaaacgtgtcggcctgctgccgcaggagcgtacgcctgttcgtgaaggtgcggacattgtcgacgcaaacgataaaccggtgggtaaagtgtgcagcgggggctttggcccgacactcgctgcccctgtcgccatgggttatatcgatagtgaacatgctgcactcgacaccgcactgtttgccgtggtgcgtggaaagaaggtggccttgaaagtcagcaaaatgcctttcgtgacaccacgttactaccgtggctga

SEQ ID NO: 70780 - protein, 373 aa, Pseudomonas putida KT2440
MSETLLKTPLHALHLELGARMVPFAGYDMPVQYPLGVLKEHLHTREQAGLFDVSHMGQIILRGADAAKALESLVPVDIIDLPVGMQRYAMFTNEQGGILDDLMVANLGEDTLFLVVNAACKEQDLAHLQTHIGSRCEVQPLFEERALLALQGPAAVKVLERLAPEVAGMTFMQFRRVKLLGVDCFVSRSGYTGEDGYEISVPVNAADALARRLMAEPEVQPIGLGARDSLRLEAGLCLYGHDMNSETTPIEASLLWAISKVRRADGARAAGFPGAEAIFAHVRDGVARKRVGLLPQERTPVREGADIVDANDKPVGKVCSGGFGPTLAAPVAMGYIDSEHAALDTALFAVVRGKKVALKVSKMPFVTPRYYRG

SEQ ID NO: 70781 - DNA, 1083 bp, Pseudomonas putida KT2440
  CDS (1)..(1083): transl_table=11
atgggacagcgcacgcttttgtatgacctgcacctggcgctaggcgccaagacggtcgatttcggtggctgggacatgcccctgcactatggctcgcaggtcgaggagcaccatcaggtgcgcagcgattgcggcgtcttcgatgtttctcatatgaccgtgatcgatgtcgacggcactgatgccacagtttggctgcagcgcctgctggccaacgacgtggcccgcctcgacgaccccggcaaggcgctgtatagcccgctgctgaacgaacagggcggggtgatcgatgatctgattgtctaccgcactgaaaccggctatcgcctggtcaccaatgccgccacccgtgccaaggtgctcgattggctgcaattgcaacgtgccggtttttccgtggacttccaggtccgccctgatctggccatccttgccatccaggggccgcgtgcccgcgaaaaggtggcggccctgctcagccccgcgcgcgctgcactcatccgcgaactgcgcccgttcgagggcgttgccgacggcgactggttcattgcccgcaccggctataccggtgaggacggcctggagatcatcttcccgggcgatcaggcggtggccttcttcaacgacctggtcggcgccggtatcgccccaagcggcctgggcgcccgcgataccctgcgcctggaagccggcatgaacctgtacggccaggacatcgacgaaaaccacaccccgctcacctccaacctgggctggagcatcgcctgggaaccggccgagcgcaacttcatcggccgtgtcggcctgcttgcggaaatcgagcacggcgtgcaggaaaagctggtgggtctggtgctggaagagcgcggtgtactgcgcgcccatcaggtcgtgcgtgtagccggcattggcgaaggggagatcaccagtggtagtttctcgcctacgctgagcaagtccattgcgttggcgcgtgtgcctatggctaccggggatcgggccgaggtggaaattcgcggcaagtggtacccggtgcgggtggtcaaaccgaccttcgtgcgccacggcaagattctgatctga

SEQ ID NO: 70782 - protein, 360 aa, Pseudomonas putida KT2440
MGQRTLLYDLHLALGAKTVDFGGWDMPLHYGSQVEEHHQVRSDCGVFDVSHMTVIDVDGTDATVWLQRLLANDVARLDDPGKALYSPLLNEQGGVIDDLIVYRTETGYRLVTNAATRAKVLDWLQLQRAGFSVDFQVRPDLAILAIQGPRAREKVAALLSPARAALIRELRPFEGVADGDWFIARTGYTGEDGLEIIFPGDQAVAFFNDLVGAGIAPSGLGARDTLRLEAGMNLYGQDIDENHTPLTSNLGWSIAWEPAERNFIGRVGLLAEIEHGVQEKLVGLVLEERGVLRAHQVVRVAGIGEGEITSGSFSPTLSKSIALARVPMATGDRAEVEIRGKWYPVRVVKPTFVRHGKILI

SEQ ID NO: 70783 - DNA, 1107 bp, Xylella fastidiosa Temecula1
  CDS (1)..(1107): transl_table=11
atgatcaaaaagaccattctcaatgacacccatcaagcactcggtgccaagatggtcgacttcagcggctgggaaatgcccattcactacggctcacagattgatgagcatcatcacgtcaggcgtaacgccggcatattcgacgtcagtcatatgactgtcattgatttgcacgggacacaggtacgccccctcttgcgtcgactattagctaattcggtagataagctcaaagtaccaggaaaagcactgtatagctgcatgttgaatccgcaaggcggtgtaatcgacgatttgatcgtctattacctacgtgaagattactttcgttttatcgtcaacgccgctacacgagaaaaggatttagcatggatcaatacacaagcatctgcgttcaacgtacgtgttgaagagcgtgcagacttggcaatgctcgccgtacaggggcctgccgcgcgcgcgcaggtcaccaacctattggccgagactcaccgcgacgcagtggaaaagctcggacgtttcgccgcactagaagtcgcatcgcactcgaaaaaacccctctttatttcacgtactggatataccggtgaggacggctttgagatcttacttccacaagaagaaacgataacgttatggaatgcgctgttgaagacaggcgtgaaaccaatcggactaggcgcacgcgatacgttacgtctagaggcagggatgaatctctacggccaggatatggacgagcaggtttcaccctacgaagcagcactgggctggactgtcatgcttgatgaaggtcgcaacttcatcggtcgcaacgtgctggaacagcaaaagactaacggcgtatcacgacagatgataggcctactcatggatgagaagggagtgcttcgccatggtcagaaagtattgaccgcacaaggtgagggccacatcctttccggtacgttttcaccaaccttgaacaaggctatcggattcgcgcgcgtgccagccggaaaaccaagtgaggtccgagtcaacatacgtgaccgtgaaatcccggtgcgggttgtcaaattcccctttgtacgtgaaggccagacgcaaccaaacatttttgattga

SEQ ID NO: 70784 - protein, 368 aa, Xylella fastidiosa Temecula1
MIKKTILNDTHQALGAKMVDFSGWEMPIHYGSQIDEHHHVRRNAGIFDVSHMTVIDLHGTQVRPLLRRLLANSVDKLKVPGKALYSCMLNPQGGVIDDLIVYYLREDYFRFIVNAATREKDLAWINTQASAFNVRVEERADLAMLAVQGPAARAQVTNLLAETHRDAVEKLGRFAALEVASHSKKPLFISRTGYTGEDGFEILLPQEETITLWNALLKTGVKPIGLGARDTLRLEAGMNLYGQDMDEQVSPYEAALGWTVMLDEGRNFIGRNVLEQQKTNGVSRQMIGLLMDEKGVLRHGQKVLTAQGEGHILSGTFSPTLNKAIGFARVPAGKPSEVRVNIRDREIPVRVVKFPFVREGQTQPNIFD

SEQ ID NO: 70785 - DNA, 1092 bp, Nitrosomonas europaea ATCC 19718
  CDS (1)..(1092): transl_table=11
atgctgaagacaacccctttgaatgcggcgcaccgggccatgaatgccaaaatggtcgattttggcggctgggatatgcccctgcactatggctcccaactggatgagcaccactctgtcaggcgtgatgccggtatgttcgatgtgtctcatatgttgaccgtcgatattcacggcgaaaacgtacgccagtttctgcgaggactggtggccaacaatgtcgataaactgaccctcccgggcaaagcgctctacacctgcatgctgacccccacaggtggaatcatcgacgatctgatcatttacttcctgtccgagtcctggttccgtctggtagtcaatgccggtacggctgataaggatatcgactggatcaccgggcaatcccgccagcttgctcccgctctgaccattaccccgcgtcgtgatcttgccatgatcgcagtacagggacccaatgcgcgtacgaaagtctggaatgtcattcctgattcccaggcgatttcagaaaacctgaaaccatttcagtctgtgatgctgggtgactatttcatcgcacgtaccggttataccggtgaggatggttttgaaatcacgttacccgccggccaggctgctgatttctggcaaaaactgcatgcagcgggtgttgctccggccggactgggtgcacgtgataccctgcgcctggaagcaggtatgaatctttatggccaggatatggacgagaccgtcaacccgcttgaatcagggcttgcatggactgtggatctgaaaagcgagcgtgacttcaccggtaaacagacactgctggaaacgccggtcaatcggcagctggttggcctggtattgctggataaaggagtactgcgtaatcatcagaaagtcattacacggcaggaaggtgaagcaggagaaggagagattaccagtggcgggttttccccaacgttgaaccagtcgattgcgctggcgcgtattcctgcaggcatcgctgctggtgagcaggtacatgtcgtcgtgcgggataaacagcttgcggcaaaagtcgtcaaatatccgtttgttcgcaatggtcaggcactggtctga

SEQ ID NO: 70786 - protein, 363 aa, Nitrosomonas europaea ATCC 19718
MLKTTPLNAAHRAMNAKMVDFGGWDMPLHYGSQLDEHHSVRRDAGMFDVSHMLTVDIHGENVRQFLRGLVANNVDKLTLPGKALYTCMLTPTGGIIDDLIIYFLSESWFRLVVNAGTADKDIDWITGQSRQLAPALTITPRRDLAMIAVQGPNARTKVWNVIPDSQAISENLKPFQSVMLGDYFIARTGYTGEDGFEITLPAGQAADFWQKLHAAGVAPAGLGARDTLRLEAGMNLYGQDMDETVNPLESGLAWTVDLKSERDFTGKQTLLETPVNRQLVGLVLLDKGVLRNHQKVITRQEGEAGEGEITSGGFSPTLNQSIALARIPAGIAAGEQVHVVVRDKQLAAKVVKYPFVRNGQALV

SEQ ID NO: 70787 - DNA, 1227 bp, Arabidopsis thaliana
  CDS (1)..(1227)
atgagaggtgggagtctatggcagctagggcaatcaataacccgtcgtcttgctcaatctgacaagaaggttgtgtcacgtcgctactttgcctctgaagctgacctgaaaaagactgctctttacgacttccatgttgcccatggaggaaagatggttccttttgctggttggagtatgccaattcagtacaaagattcgattatggactcaacggttaactgcagggaaaatgggagtttgtttgatgttgcacatatgtgtggtttgagccttaagggtaaagattgtgttccttttcttgagacacttgtggttgctgatgtggctggtttggctcctggaactgggagcttaactgtgttcacaaacgagaaaggaggtgccattgatgactcggtgattaccaaagtgacagatgaacatatctatttggtggtcaatgctggctgtagggataaggatttggctcacattgaagaacacatgaaggctttcaaatccaaaggaggtgatgtctcgtggcatatccacgacgagagatctcttcttgcccttcagggtcctttggctgctccagtgcttcaacacctgactaaagaagacttgagcaagctttactttggcaatttccagattctggacattaatggttccacatgtttccttaccaggactgggtataccggggaagatgggtttgagatttcggttccagatgagcatgctgtggatctagcaaaagcaatcttggagaagtccgagggtaaggtaaggcttacgggtctaggagcaagagacagtctcaggttagaagcaggactttgtctatatggaaacgacatggagcaacacatttctcctgttgaagctgggctcacatgggccatagggaagcgtagaagagccgaaggtggatttcttggcgcggatgtgattctccagcagcttaaagatggacctacaatcagaagggtcggtttcttctcctcaggaccacccgcaaggtcgcatagcgaggttcatgatgagagtgggaacaagattggagagatcacaagtggagggtttagcccgaacctgaagaagaacatagccatgggatatgtgaagtcaggtcagcacaagactgggactaaagtcaagatcttggtccgtgggaaaccatatgaaggcagcatcacgaagatgccattcgtggccaccaaatactacaaaccaacatga

SEQ ID NO: 70788 - protein, 408 aa, Arabidopsis thaliana
MRGGSLWQLGQSITRRLAQSDKKVVSRRYFASEADLKKTALYDFHVAHGGKMVPFAGWSMPIQYKDSIMDSTVNCRENGSLFDVAHMCGLSLKGKDCVPFLETLVVADVAGLAPGTGSLTVFTNEKGGAIDDSVITKVTDEHIYLVVNAGCRDKDLAHIEEHMKAFKSKGGDVSWHIHDERSLLALQGPLAAPVLQHLTKEDLSKLYFGNFQILDINGSTCFLTRTGYTGEDGFEISVPDEHAVDLAKAILEKSEGKVRLTGLGARDSLRLEAGLCLYGNDMEQHISPVEAGLTWAIGKRRRAEGGFLGADVILQQLKDGPTIRRVGFFSSGPPARSHSEVHDESGNKIGEITSGGFSPNLKKNIAMGYVKSGQHKTGTKVKILVRGKPYEGSITKMPFVATKYYKPT

SEQ ID NO: 70789 - DNA, 1101 bp, Bordetella pertussis Tohama I
  CDS (1)..(1101): transl_table=11
atgtccgcaccgctcaaacgcacccccttggccgaagaacatcttgccgccggcgcctgtatggtcgacttcggcggctgggacatgccgctggcctatggctcgcaactggaagagcaccacgcggtgcgccaggacgccggcatgttcgacgtctcgcacatgctcaacgtcgatgtcggcggcgccgacgccaccgccttcctgcgccgcctggtggccaacgacgtggcccgcctggccacgccgggtaaggccctgtacagctgcatgctgaacccgcagggcggcatcatcgacgacctcatcatctactacttcgcgcccgaccaatggcgcgtggtggtcaacgccggcacggccgacaaggacatcgcctggatgcagcgcgtggccgccgccgacggcttcgatgtcgtgatcgcgccgcgccgcgacctggccatggtggcggtgcagggccccaacgcccgcgccaaggtgtgggcggcccgtcccgcgtggcaggcggcgtccgagccgctggcgccgttctcggccgcggccgtcgaggctggcacgctggtggcgcgtaccggctataccggcgaggacgggttcgaaatcgtgctgcccgccgacgcggtggtccagctgtggcgcgacctgctggcgcagggcgtgcggccctgcggcctgggcgcgcgcgacacgctgcgcctggaggcgggcatgaatctctacggccaggacatggacgaactcgtccatcccgaccaggccggcctgagctggaccgttgcgctcaaggacgaggcgcgccgcttcgtggggcgcgatgccatcgagcagttcgccgtgccgcgcgccttcgtcggcctgaagctgcaggagcgcggcgtgatgcgcgcccacatgccggtgcgctgcgcgcagggcatgggcgagctcaccagcggcaccatgtcgcccaccctgggcgtgtcggtgggctttgcccgcatgccggtgggcgtgcagcccggcgacgccgtcgaggtggaaatccgcggcaagtgggtgcccgccctggtatgcaaattgccgttcgtgcgtcacggcaaagccgtcgaacactcgtaa

SEQ ID NO: 70790 - protein, 366 aa, Bordetella pertussis Tohama I
MSAPLKRTPLAEEHLAAGACMVDFGGWDMPLAYGSQLEEHHAVRQDAGMFDVSHMLNVDVGGADATAFLRRLVANDVARLATPGKALYSCMLNPQGGIIDDLIIYYFAPDQWRVVVNAGTADKDIAWMQRVAAADGFDVVIAPRRDLAMVAVQGPNARAKVWAARPAWQAASEPLAPFSAAAVEAGTLVARTGYTGEDGFEIVLPADAVVQLWRDLLAQGVRPCGLGARDTLRLEAGMNLYGQDMDELVHPDQAGLSWTVALKDEARRFVGRDAIEQFAVPRAFVGLKLQERGVMRAHMPVRCAQGMGELTSGTMSPTLGVSVGFARMPVGVQPGDAVEVEIRGKWVPALVCKLPFVRHGKAVEHS

SEQ ID NO: 70791 - DNA, 1101 bp, Bordetella parapertussis 12822
  CDS (1)..(1101): transl_table=11
atgtccgcaccgctcaaacgcacccccttggccgaagaacatcttgccgccggcgcccgcatggtcgacttcggtggctgggacatgccgctggcctatggctcgcaactggaagagcaccacgcggtgcgccaggacgccggcatgttcgacgtctcgcacatgctcaacgtcgatgtcggcggcgccgacgccaccgccttcctgcgccgcctggtggccaacgacgtggcccgcctggccacgccgggcagggccctgtacagctgcatgctgaacccgcagggcggcatcatcgacgacctcatcatctactacttcgcgcccgaccaatggcgcgtggtggtcaacgccggcacggccgacaaggacatcgcctggatgcagcgcgtggccgccgccgacggcttcgatgtcgcgatcgcgccgcgccgcgacctggccatggtggcggtgcagggccccaacgcccgcgccaaggtgtgggcggcccgtcccgcgtggcaggcggcgtccgagccgttggcgccgttctcggccgcggccgtcgaggccggcacgctggtggcgcgcaccggctataccggcgaggacgggttcgaaatcgtgttgcccgccgacgcggtggtccagctgtggcgcgacctgctggcgcagggcgtgcggccctgcggcctgggcgcgcgcgacacgctgcgcctggaggcgggcatgaatctctacggccaggacatggacgaactcgtccatcccgaccaggccggcctgagctggaccgttgcgctcaaggacgaggcgcgccgcttcgtgggacgcgatgccatcgagcagttcgccgtgccgcgcgccttcgtcggcctgaagctgcaggagcgcggcgtgatgcgcgcccacatgccggtgcgctgcgcgcagggcatgggcgagctcaccagcggcaccatgtcgcccaccctgggcgtgtcggtgggctttgcccgcgtgccggtgggcgtgcagcccggcgacgccgtcgaggtggaaatccgcggcaagtgggtgcccgccctggtatgcaaattgccgttcgtgcgtcacggcaaagccgtcgaacactcgtaa

SEQ ID NO: 70792 - protein, 366 aa, Bordetella parapertussis 12822
MSAPLKRTPLAEEHLAAGARMVDFGGWDMPLAYGSQLEEHHAVRQDAGMFDVSHMLNVDVGGADATAFLRRLVANDVARLATPGRALYSCMLNPQGGIIDDLIIYYFAPDQWRVVVNAGTADKDIAWMQRVAAADGFDVAIAPRRDLAMVAVQGPNARAKVWAARPAWQAASEPLAPFSAAAVEAGTLVARTGYTGEDGFEIVLPADAVVQLWRDLLAQGVRPCGLGARDTLRLEAGMNLYGQDMDELVHPDQAGLSWTVALKDEARRFVGRDAIEQFAVPRAFVGLKLQERGVMRAHMPVRCAQGMGELTSGTMSPTLGVSVGFARVPVGVQPGDAVEVEIRGKWVPALVCKLPFVRHGKAVEHS

SEQ ID NO: 70793 - DNA, 1101 bp, Bordetella bronchiseptica RB50
  CDS (1)..(1101): transl_table=11
atgtccgcaccgctcaaacgcacccccttggccgaagaacatcttgccgccggcgcccgcatggtcgacttcggtggctgggacatgccgctggcctatggctcgcaactggaagagcaccacgcggtgcgccaggacgccggcatgttcgacgtctcgcacatgctcaacgtcgatgtcggcggcgccgacgccaccgccttcctgcgccgcctggtggccaacgacgtggcccgcctggccacgccgggcaaggccctgtacagctgcatgctgaacccgcagggcggcatcatcgacgacctcatcatctactacttcgcgcccgaccaatggcgcgtggtggtcaacgccggcacggccgacaaggacatcgcctggatgcagcgcgtggccgccgccgacggcttcgatgtcgcgatcgcgccgcgccgcgacctggccatggtggcggtgcagggccccaacgcccgcgccaaggtgtgggcggcccgtcccgcgtggcaggcggcgtccgagccgttggcgccgttctcggccgcggccgtcgaggccggcacgctggtggcgcgcaccggctataccggcgaggacgggttcgaaatcgtgctgcccgccgacgcggtggtccagctgtggcgcgacctgctggcgcagggcgtgcggccctgcggcctgggcgcgcgcgacacgctgcgcctggaggcgggcatgaatctctacggccaggacatggacgaactcgtccatcccgaccaggccggcctgagctggaccgttgcgctcaaggacgaggcgcgccgcttcgtgggacgcgatgccatcgagcagttcgccgtgccgcgcgccttcgtcggcctgaagctgcaggagcgcggcgtgatgcgcgcccacatgccggtgcgctgcgcgcagggcatgggcgagctcaccagcggcaccatgtcgcccaccctgggcgtgtcggtgggctttgcccgcgtgccggtgggcgtgcagcccggcgacgccgtcgaggtggaaatccgcggcaagtgggtgcccgccctggtatgcaaattgccgttcgtgcgtcacggcaaagccgtcgaacactcgtaa

SEQ ID NO: 70794 - protein, 366 aa, Bordetella bronchiseptica RB50
MSAPLKRTPLAEEHLAAGARMVDFGGWDMPLAYGSQLEEHHAVRQDAGMFDVSHMLNVDVGGADATAFLRRLVANDVARLATPGKALYSCMLNPQGGIIDDLIIYYFAPDQWRVVVNAGTADKDIAWMQRVAAADGFDVAIAPRRDLAMVAVQGPNARAKVWAARPAWQAASEPLAPFSAAAVEAGTLVARTGYTGEDGFEIVLPADAVVQLWRDLLAQGVRPCGLGARDTLRLEAGMNLYGQDMDELVHPDQAGLSWTVALKDEARRFVGRDAIEQFAVPRAFVGLKLQERGVMRAHMPVRCAQGMGELTSGTMSPTLGVSVGFARVPVGVQPGDAVEVEIRGKWVPALVCKLPFVRHGKAVEHS

SEQ ID NO: 70795 - DNA, 1089 bp, Chromobacterium violaceum ATCC 12472
  CDS (1)..(1089): transl_table=11
atgacggccccgaaacgtaccccgctgtttgatgcccatatcgccgccggcgccaagatggtcgatttcgccggttgggaaatgcccatccactatggttcccagctgaaagagcacgaaatcgtccgcagcgacgcgggcatgttcgacgtctcgcacatgacggtgatcgacatcaccggcgccgacgccaaggcctggctgcaaaaactgatcgctaacgacgtggccaagctcggcttcgagggcaaggcgctgtattccggcatgctgaccccggaaggcaccgtcgtcgacgacctgatcgtctacctcactgcctacggctaccgcatggtggtcaacgccggcaccaccgagaaagacttggcctggatggaaagccagaaggccggcttcgacgtggcgctgaaggtgcgccgcgacctggcgatgctggcggtgcagggccccaaggcgattcaaaaagtctgttccatcaagccggagctggccgaggccatccgcgcgctgaaagtgttccagggcctgccgcagggcgagtggttctacgcccgcaccggctataccggcgaagacggcctggaaatcatggtcccggccgatcaggccatttccttcttccatcaattgcaagccgccggcgtgtcgccgatcggcctgggcgcgcgcgacacgctgcgcttggaagccggcatgaacctgtacggccacgacatggacgagaccgtgtcgccgctggaagccggcatgggctggaccatcgcctgggagccggccgagcgcaagttcaacggccgcgaggcgctggaagcgcaaaaggccgccggcgtgaagatgaagcaggtgggcctggtgctggaaggccgcggcgtgctgcgcgaaggcctgaaggtggtggtggagagcgtcggcgaaggcgtgatcaccagcggcaccttctcgcctacgctgaagcattccatcgccatcgcccgcgtgccggccgccaccggcgccgccgcccaggtggacctgcgcggcacgctgaccgacgtccgcgtggtgaagatgcccttcgtccgcaacggcaagaaagtattcgaataa

SEQ ID NO: 70796 - protein, 362 aa, Chromobacterium violaceum ATCC 12472
MTAPKRTPLFDAHIAAGAKMVDFAGWEMPIHYGSQLKEHEIVRSDAGMFDVSHMTVIDITGADAKAWLQKLIANDVAKLGFEGKALYSGMLTPEGTVVDDLIVYLTAYGYRMVVNAGTTEKDLAWMESQKAGFDVALKVRRDLAMLAVQGPKAIQKVCSIKPELAEAIRALKVFQGLPQGEWFYARTGYTGEDGLEIMVPADQAISFFHQLQAAGVSPIGLGARDTLRLEAGMNLYGHDMDETVSPLEAGMGWTIAWEPAERKFNGREALEAQKAAGVKMKQVGLVLEGRGVLREGLKVVVESVGEGVITSGTFSPTLKHSIAIARVPAATGAAAQVDLRGTLTDVRVVKMPFVRNGKKVFE

SEQ ID NO: 70797 - DNA, 1089 bp, Porphyromonas gingivalis W83
  CDS (1)..(1089): transl_table=11
atgaagacaactccctttaccgatgtgcacattgcattaggagcaaagatgcacgagtttgcgggctacaatatgcctatcgaatatggtggcattatagacgagcacatgaatgtggtcaacaatgtaggcgtattcgacgtatcgcacatgggcgaattttgggtaaaaggcccgaatgccctccgcttcttacagaaagtgtccagcaacgatgcttccaaactggcagtcggtcaagttcagtattgctgcttccccaataacgacggtggtatagtggacgacttcctgctctatcgctacgaagaggaaaaatatatgatggtacccaacgctgccaatatcgccaaggactgggcctggtgccggcagcagaatacgatgggagccatattggaaaatgcctcggacaacatcgcccaacttgccgtacaaggcccgaaagcaacggaagtgatgcaacgcctcacggacatcgacctgaacgagatcacttactatacgttcaaagtaggctctttcgccggatgccccgacgtaattatttcggctacgggttataccggagcaggtggcttcgaactctatttctatccccaatacgctcagaagatatgggatgccctcttcgaagccggcaagcccgaaggtatcaaaccggccggactcggtgctcgcgacacgcttcgtctggagatgggtttctgtctctatggcaatgatatatgcgacaccacttctcccatagaggctgggctgggctggatcaccaagttcaccgacgacaaaatggatatgccgagccgtaagatcatggaagagcagaaagccggaggtctcaagcgcaagctcgttgccttcgaactgaaagacaagggtattcctcgccagcactatgaaattgccaatgccgaagggcaaatcatcggagaggttacttccggaacgatgtctccttgccttaagaaaggtatcggtatgggctatgtggctacggagttcagcaaggtcggcacagagcttggcatcatggtacgcggtcgtcaactcaaggctgagatcgtgaagcccccattccgcaaatag

SEQ ID NO: 70798 - protein, 362 aa, Porphyromonas gingivalis W83
MKTTPFTDVHIALGAKMHEFAGYNMPIEYGGIIDEHMNVVNNVGVFDVSHMGEFWVKGPNALRFLQKVSSNDASKLAVGQVQYCCFPNNDGGIVDDFLLYRYEEEKYMMVPNAANIAKDWAWCRQQNTMGAILENASDNIAQLAVQGPKATEVMQRLTDIDLNEITYYTFKVGSFAGCPDVIISATGYTGAGGFELYFYPQYAQKIWDALFEAGKPEGIKPAGLGARDTLRLEMGFCLYGNDICDTTSPIEAGLGWITKFTDDKMDMPSRKIMEEQKAGGLKRKLVAFELKDKGIPRQHYEIANAEGQIIGEVTSGTMSPCLKKGIGMGYVATEFSKVGTELGIMVRGRQLKAEIVKPPFRK

SEQ ID NO: 70799 - DNA, 1095 bp, Photorhabdus luminescens subsp. laumondii TTO1
  CDS (1)..(1095): transl_table=11
atggcaaaacaaaccccattgtatgaccagcatctggcttgtggtgcacgtatggtagattttcatggctggatgatgcctttgcattatggttcacaaatggatgaacatcacattgtccgcactcatgctggtatgtttgatgtttcccacatgacgattgtggatctgcatggtactggttgccgtgatttcctgcgttatttgttggcaaatgacattgctaaactgacagaaaagggtaaagccttatacaccgggatgcttaatgcttctggtggtgtaattgatgacctgattgtttattaccttagcaatgatttttatcggttggtggtcaattctgcgactcgtgagaaagatctggcttggattaatgaacatgtcgccaattacccggttgatattcaggttcgtgatgatctggcattgattgcggttcaggggcctgacgctcaggcaaaagtagagtctctattgaatgatgaacaaaaacagactattgccggaatgaaacctttctttggtgttcaggcgggggatctgtttatcgcaacaacgggttataccggtgaggcgggttatgaagtggcattaccaaaagagcaagcagccgatttctggcaaaaattgctgagtgtcggcgttaagcctgcgggattaggtgcgcgtgatacgctgcgacttgaagccggtatgaacctctatggacaggaaatggatgaaaccatttctccccttgtggctaacatgggttggacaatcgcttggaaacccgaagatcgccagtttatcggccgtgaagcgctagaaaaacagcgtgaagagggcactgaacagttggttggtttggtgatgagagaaaagggtgtgttacgcggtggtttagcggttagttttactgatgagatgggcaccttacattctggcgttattaccagtggtacgttctctccaacattaggattcagtattgcccttgcccgtgtgccgcaaggaattggtgaacaggcggttgtccaaatccgcaatcgtgaaatgccggttcaggtagtcaaacccagctttgtacgggcgggcaaacctctcgtatag

SEQ ID NO: 70800 - protein, 364 aa, Photorhabdus luminescens subsp. laumondii TTO1
MAKQTPLYDQHLACGARMVDFHGWMMPLHYGSQMDEHHIVRTHAGMFDVSHMTIVDLHGTGCRDFLRYLLANDIAKLTEKGKALYTGMLNASGGVIDDLIVYYLSNDFYRLVVNSATREKDLAWINEHVANYPVDIQVRDDLALIAVQGPDAQAKVESLLNDEQKQTIAGMKPFFGVQAGDLFIATTGYTGEAGYEVALPKEQAADFWQKLLSVGVKPAGLGARDTLRLEAGMNLYGQEMDETISPLVANMGWTIAWKPEDRQFIGREALEKQREEGTEQLVGLVMREKGVLRGGLAVSFTDEMGTLHSGVITSGTFSPTLGFSIALARVPQGIGEQAVVQIRNREMPVQVVKPSFVRAGKPLV

SEQ ID NO: 70801 - DNA, 1083 bp, Bdellovibrio bacteriovorus HD100
  CDS (1)..(1083): transl_table=11
atgaaaaagacacctttagcagacacacatgaaaagctgggcgcccgcatggtcgactttgccggttggtatatgcccgttcaatacatcggtcttcgtgaagagcacaacaacgtgcgcacgaacgtgggcctattcgacgtctcccacatgggcgaagttcgcgtcaagggacctaaagccctggagactctggagtggctgaccaccaacgacgtttccaagctgaacgacggcgaagctcagtattctctgctgccgaatgatcagggcggtctggttgacgatatcatcgtttactgcctgtctaaagattccgactatctggtgtgtgtgaacgcctctaacaaagacaaagactttgcctggatgaccaaacacaacaagggtgccgacatcaccgacgaatccgacctttggggtcagatcgccatccaaggcccgaaagccctggaactgtgtgaccgcgtctttgacatcaaagtcagcgaaatgaagtccttcacggtcaaatccggcacgttcaagggccacaagatcatgatcgccaccaccggctacaccggcgaaaaaggctgtgaagtctttgtcgaggcggcgggcacggcggacctgtggatgactttgctggaaaaaggcaaggacctgggctgcatgggcatcggtttgggcgctcgtgacaccctaagaaccgaaatgaagtactccctgtatggccacgaaatcgatgacacgacgaatccatacgaagcgggccttggctgggttattaaaccggctaaaaaggacttcatgaacaaagcccaaatcgtgggcaaaaaagaagccggcctaaccagaaatcttgtgggatttaagatgcttgagaagggcatcccccgtcagggatacagcctgttttcttttgacaacaaagaaatcggcaaggtaactagtggtacacactcaccgaccctggacgagcctatcggtattgcttttatcgatgtggcttacgcgaaagaaggaactgaattccttctggatatccgcggccgtaaagtgaaagccgtggtttgcaaaacaccgtttgtaacgaaataa

SEQ ID NO: 70802 - protein, 360 aa, Bdellovibrio bacteriovorus HD100
MKKTPLADTHEKLGARMVDFAGWYMPVQYIGLREEHNNVRTNVGLFDVSHMGEVRVKGPKALETLEWLTTNDVSKLNDGEAQYSLLPNDQGGLVDDIIVYCLSKDSDYLVCVNASNKDKDFAWMTKHNKGADITDESDLWGQIAIQGPKALELCDRVFDIKVSEMKSFTVKSGTFKGHKIMIATTGYTGEKGCEVFVEAAGTADLWMTLLEKGKDLGCMGIGLGARDTLRTEMKYSLYGHEIDDTTNPYEAGLGWVIKPAKKDFMNKAQIVGKKEAGLTRNLVGFKMLEKGIPRQGYSLFSFDNKEIGKVTSGTHSPTLDEPIGIAFIDVAYAKEGTEFLLDIRGRKVKAVVCKTPFVTK

SEQ ID NO: 70803 - DNA, 1074 bp, Treponema denticola ATCC 35405
  CDS (1)..(1074): transl_table=11
atgaaaagaacaccctattatgaaaccttgctcgctaaaggcggcaagtttgttgagttcggcggatatgaaatgcccattcagtttgccggtatcttaaaagagcatcttgcagttcgcaataatgtaggactttttgatgtttcacatatgggagagttttatattgaaggcgacaatgccgaagctgccgtaaatgcccttattacaaacgatattcgcggaatggctgacggagatgtacgctacacccttatgtgtaacgaaaagggcggaatcgtagatgacttccttgtttaccgctataatcaaaagaaattccttttggttgtaaatgccggaaaccatgacaaagattatgactgggtaaaaaagcatttggataagagcgttacctttactgaccgatcttccgaaattgcccagcttgcaattcaaggccccaatgctcctgctgtggtaaaaaagtttattgctccttctgcaatgccctccgcttactacacctttaagaccttccagtgccccaagggagaagtaatcgtttctcagacaggttataccggtgaagacggttacgaaatctactgccccaaagaatgggctcttgagcttttcaatcaagttatgaaagcaggagaagaattcggaatagagctttgcggtttaggctgccgagacaccttgcgccttgaagccggtatgcccttgtacggccatgaaatgaccgaagaaaccttggcaaccgaagtaacattaaagccctttatcaaacttgaaaaagaagactttatcggtaaaaaagctcttgaaaccaacgaagccaaaaaaatccgaaaaggctttaagatgattgacagaggtattgcccgcgatcatgacaaagttttcttaggcgacaaggaaatcggttatgttacaaccggaacttcttcaccctcattaaaagtcggtatcggacatatgagaatcgatagaggcattaaagatgaagaagtccttatcgaagtacgaggtaaaaaactaaaggctaaaatcgtgcctacgagcttcttaaaagaaattaagggctaa

SEQ ID NO: 70804 - protein, 357 aa, Treponema denticola ATCC 35405
MKRTPYYETLLAKGGKFVEFGGYEMPIQFAGILKEHLAVRNNVGLFDVSHMGEFYIEGDNAEAAVNALITNDIRGMADGDVRYTLMCNEKGGIVDDFLVYRYNQKKFLLVVNAGNHDKDYDWVKKHLDKSVTFTDRSSEIAQLAIQGPNAPAVVKKFIAPSAMPSAYYTFKTFQCPKGEVIVSQTGYTGEDGYEIYCPKEWALELFNQVMKAGEEFGIELCGLGCRDTLRLEAGMPLYGHEMTEETLATEVTLKPFIKLEKEDFIGKKALETNEAKKIRKGFKMIDRGIARDHDKVFLGDKEIGYVTTGTSSPSLKVGIGHMRIDRGIKDEEVLIEVRGKKLKAKIVPTSFLKEIKG

SEQ ID NO: 70805 - DNA, 1182 bp, Pichia stipitis CBS 6054
  CDS (1)..(1182): transl_table=12
atgttcagagtcaccaacaagaaattctattctacagcctcatcgctcttgaagacccccttgcacgaagcccacattgaattgggtggtaagatggttccctacgcagggttcgagatgcctgtcttgtacaaggaccaatcgcatattgactctcacaattgggtcagatccaaagtcggtttgtttgacgtcagccacatgttacaacacaacttttctggggtggatgcgaaaaacttgcttcagaagattacacctatcgacttgagccaattgccagtcaacagctcgagtttgtctgtgttattgaatgaaaatggaggtgtaattgacgactgtatcatcaccaaacacggcgaagaaaagtactatatggtcaccaacgctggatgtagagctaaggatatcagcttcatcaagaaggaagccgaaaactttagtggtgtaacccacgaaacgtttgaaggaaccttgttggctattcagggtccaaaggctgtcgaaatcttgcaaaagttcaccaacgaggacttgtccaagatctactttggacagaccaagtttgtcaagttggctcctatcgatgccaccgttcatttggctagatctggttatactggtgaggacgggttcgagttgtcgattccatcgttgactgccgaagaaagcaagcaatctttggactttttctatacattaattcgcgaatatccagatgttgtcaagccaattgggttggccgctagagactcgttgagattggaagctggtatgtgtctttatggacacgaattgaccgaagaaatcacacctatccaagcttcattgacctggttgattccaaagacccgtagagaccaaggtgggttcaacggtgcatccaagatcttgagccagatcaacgacaagaagttggtcacagccagaagaatcggtgtttcttccaagggtccatcaccaagagacggcaacaagattttcaccgaagacggctccgagcaaatcggttacatcacctctggctctccatctcctaccttgggtggaaacgttgcccaagcctacatcgacaagaaggccaagatcggcagcaagatcaagatcgagatcaggggcaagttgagagaaggtaccgtggccaagttgccatttgtggccagcaacttctacaaggcatag

SEQ ID NO: 70806 - protein, 393 aa, Pichia stipitis CBS 6054
MFRVTNKKFYSTASSLLKTPLHEAHIELGGKMVPYAGFEMPVLYKDQSHIDSHNWVRSKVGLFDVSHMLQHNFSGVDAKNLLQKITPIDLSQLPVNSSSLSVLLNENGGVIDDCIITKHGEEKYYMVTNAGCRAKDISFIKKEAENFSGVTHETFEGTLLAIQGPKAVEILQKFTNEDLSKIYFGQTKFVKLAPIDATVHLARSGYTGEDGFELSIPSLTAEESKQSLDFFYTLIREYPDVVKPIGLAARDSLRLEAGMCLYGHELTEEITPIQASLTWLIPKTRRDQGGFNGASKILSQINDKKLVTARRIGVSSKGPSPRDGNKIFTEDGSEQIGYITSGSPSPTLGGNVAQAYIDKKAKIGSKIKIEIRGKLREGTVAKLPFVASNFYKA

SEQ ID NO: 70807 - DNA, 1245 bp, Ostreococcus lucimarinus CCE9901
  CDS (1)..(1245)
atgcgcgcggcgctgcgacgatgcgcgaagcgcgcgacgcgcgcggcgacgcgaccgcacgcggcgccgcgcgcgacggcggcgccggcgcgcgcgtacgcggacatcgcgagcctgaagcggacgccgctgtacgacttgcacgcgaggcgcggcgggaagctcgtcgacttcgcggggtacgcgctgccgatacagtacgaagattccatcatggaggcgacgcagcactgccggagcgaagcgtcgttgttcgacgtgagtcacatgctcgggagcagcgtcagggggaaggacgcgacggcgtttttggagtcgctcgtcgtggcggatttgaaggggctcaaggacggcacggggacgctgagcgtgatgacgaacgaaaagggtggtatcatcgacgataccgtcatcacgaaggttaattctaatgatttttacgtcgtcttgaacgctggttgcgcggagaaggatcaagcgcacatcaacgcggcgctggcgaaggccaaggcgaaggggatggacgtcgaattcgtcgtgcactcggatcgctcgctgttggcgttccaaggaccgaagaccatgtccgtgcttcaacgcctgaccgatttcgacctgagcaagctgtatttcgggatgtttacgtcgatgaagatcaacggcgccgattgctgggtcacgcgcaccggttacacgggcgaggacgggttcgagatctccgtcccgaacgccgacgcgatgaagctcgccgagcgcttggagtctgagaaggaagtgcgcatggctgccctcggcccgcgcgattctttgcgcctcgaagccggattgtgcctgtacggtaacgatttgaacgaagacatcactccgcccgaggctggtttggcgtggaccatcggcaaggctcgccgcgagctctgcgacttcaccggcggcgaaatcatcaaaaagcagctcgaagacccgaaggcgattccccagcgtcgcgtcggtttgaccttcaccggcaagggtgcccccgcgagacagcactctctgatcctcgacacggacggcaaccaaatcggcgaagtcacctccggcggcttctctccggtgttgcaaaagaacatcgccatgggctacgtcgccaaagccttcgccaaagccggcaccgagctcttggtcgagacgcgcggcaagcgcacgcccgccgtgacgaccaagatgcctttcgtcaacacgacgtactacaagcccgcggaatag

SEQ ID NO: 70808 - protein, 414 aa, Ostreococcus lucimarinus CCE9901
MRAALRRCAKRATRAATRPHAAPRATAAPARAYADIASLKRTPLYDLHARRGGKLVDFAGYALPIQYEDSIMEATQHCRSEASLFDVSHMLGSSVRGKDATAFLESLVVADLKGLKDGTGTLSVMTNEKGGIIDDTVITKVNSNDFYVVLNAGCAEKDQAHINAALAKAKAKGMDVEFVVHSDRSLLAFQGPKTMSVLQRLTDFDLSKLYFGMFTSMKINGADCWVTRTGYTGEDGFEISVPNADAMKLAERLESEKEVRMAALGPRDSLRLEAGLCLYGNDLNEDITPPEAGLAWTIGKARRELCDFTGGEIIKKQLEDPKAIPQRRVGLTFTGKGAPARQHSLILDTDGNQIGEVTSGGFSPVLQKNIAMGYVAKAFAKAGTELLVETRGKRTPAVTTKMPFVNTTYYKPAE

SEQ ID NO: 70809 - DNA, 1182 bp, Pichia guilliermondii ATCC 6260
  CDS (1)..(1182): transl_table=12
atgagttcgattgttaccaagagatttgccagtggcgcaagcaagcttcttcgtacacccttgtatgactgtcatgttgaattgggagggaaaatggtagattatgctgggttcgaaatgccggttttgtacaagggacagactcatgttgagtctcacaactgggtgagaagcaaagttgggttgtttgatgtgtcccacatgcttcagcacaaatttaaaggagcccagcctcgggaattgttgcaaaaaatcacccccatagatttggcatatttgcccataaactcttcgtcgttgacggtattgttaaataagaatggaggagtcattgatgactgtatcatcaccaaacatggagaaaatgactactatatggtgacaaatgccggatgtcgtaccaaagacgtcaagttcatcaaagaagaggctgcgaattttgatgtagaccactcaacatttgagggcactttgttggctatccagggcccagaagccgcaggattacttcaaaaattcaccaacgaagacttgagcaagattactttcggtaataccaagtaccttaagttgtccctgattggtgcagatgtccatttagctcggtctggatacactggcgaagatggatttgagcttctgattccctcttctaccccacaggaatcccaagagtcgcaaaacttctttagatctcttattgaagattacccagatttggttcgtcccattggtttggcagcgcgggactcgttgcggttggaagctggtatgtgtctttacggccacgagctcgcggaggatatcaccccgattgaagccacattgacgtggttgattcccaagctgagaagagacgagaaaaatgccaccttcaatggggcttccaagatcttgagtcagatcaaagacaagactttgtgctccaaaaagagaattggtttgttgtcgaaaggtccctcgcctcgtgatggaaataagcttttcagtgaagacggaaaggaaattggacacattacttcgggttcaccttcacctacacttgggggaaatgttgcgcaagcatatgctgacaagttgttaaagtcaggtacaaaagtgttttttgagctgagaggaaaaaagagagaagcaattgtggccaagatgccatttgtggagagcaagttttacagaggataa

SEQ ID NO: 70810 - protein, 393 aa, Pichia guilliermondii ATCC 6260
MSSIVTKRFASGASKLLRTPLYDCHVELGGKMVDYAGFEMPVLYKGQTHVESHNWVRSKVGLFDVSHMLQHKFKGAQPRELLQKITPIDLAYLPINSSSLTVLLNKNGGVIDDCIITKHGENDYYMVTNAGCRTKDVKFIKEEAANFDVDHSTFEGTLLAIQGPEAAGLLQKFTNEDLSKITFGNTKYLKLSLIGADVHLARSGYTGEDGFELLIPSSTPQESQESQNFFRSLIEDYPDLVRPIGLAARDSLRLEAGMCLYGHELAEDITPIEATLTWLIPKLRRDEKNATFNGASKILSQIKDKTLCSKKRIGLLSKGPSPRDGNKLFSEDGKEIGHITSGSPSPTLGGNVAQAYADKLLKSGTKVFFELRGKKREAIVAKMPFVESKFYRG

SEQ ID NO: 70811 - DNA, 1194 bp, Lodderomyces elongisporus NRRL YB-4239
  CDS (1)..(1194)
atgcttagaactactcagtttatacaaaaaagattagcctcaacaggtaaagatctcttgcgaactccattataccaagcacacattgaccatggtgggaaaatggttgagtatgctggcttcgaaatgcccgtcttgtacaaggatcaatctcacattgagtcacataaatgggtgagatcgaatgttggtttatttgatgtgagtcatatgttacagcacaatatctcgggatcagagtcaaaattgtttttgcagaaagttactccaattgatttggacctgttggctattaatagttccagcttatctgtgctattaaacaaagatggtggagtaattgatgattgtataattacaaaacatggtgagaacgcatactatatggtgaccaatgctggatgcagggccaaggatgtggattttttgaaaaaagaacttttgcaattcctggatgtcaagcacaatacttttgaaggtactcttttagctatccaaggtcccaaggcccaagatttactccaaaaatttactaatgaagatttgggcaagatttattttggtcagaccaagtttttgaaactatcaccaatcaatgcaactgtgcatttagcgagatctggttatacgggagaggatggatttgaattgtctattccatctacaagcgaagtagaacaacaagaagccttgagtttcttcaacactttaattgccgaatatccggaaattgtcaaaccaattgggttggcagctagagactcattgagattagaagctggtatgtgtttatatggccatgaactaactgaagatctcacgccagtagacgcatcattaacgtggttgatcccaaaaacacgcagagagttgggagagcagagctttaatggtgcagccaaaatattgagtcaaatcaaggataaatcaacaaccaagagaaggattggtattacatcaaaaggtccctcgccacgtgatggtaacaagatctttgcagaagacggcaagaccgaagtcggctatgttacttctggttcgccctccccaacacttggaggtaatattgctcaagcgtacatcgataagaaggccaaaattggctctaatgtcaaggtagacattagaggtaaattgagagatgctgtagtgaccaaattaccatttgtcgaaagcaaattttataaacagtaa

SEQ ID NO: 70812 - protein, 397 aa, Lodderomyces elongisporus NRRL YB-4239
MLRTTQFIQKRLASTGKDLLRTPLYQAHIDHGGKMVEYAGFEMPVLYKDQSHIESHKWVRSNVGLFDVSHMLQHNISGSESKLFLQKVTPIDLDLLAINSSSLSVLLNKDGGVIDDCIITKHGENAYYMVTNAGCRAKDVDFLKKELLQFLDVKHNTFEGTLLAIQGPKAQDLLQKFTNEDLGKIYFGQTKFLKLSPINATVHLARSGYTGEDGFELSIPSTSEVEQQEALSFFNTLIAEYPEIVKPIGLAARDSLRLEAGMCLYGHELTEDLTPVDASLTWLIPKTRRELGEQSFNGAAKILSQIKDKSTTKRRIGITSKGPSPRDGNKIFAEDGKTEVGYVTSGSPSPTLGGNIAQAYIDKKAKIGSNVKVDIRGKLRDAVVTKLPFVESKFYKQ

SEQ ID NO: 70813 - DNA, 1242 bp, Nasonia vitripennis
  CDS (1)..(1242)
atgggatcaccggccggcatcacgagggcgcttcgctgtctgcacagcaagttgacgaccaataacgagagaccgctgctgaggctcttctccgcgaaagctgccgccgccgccgagcccaggaagacctgcctctacgacctgcacgtcgaccacaatggcaaaatcgtcgacttcgccggctggctgctgcccgtccaatatcgggaagcaattgcggcgtcgcatcaacacactcgcacccacgcctcggtctttgacgtcggccacatgctgcagacccacgtgacgggccgcgactccggcgagttcctcgagtccctcaccaccgctgatctgcagagcctcaagcagggcagcgccggactgacggttttcacgaacgaccagggcggaatcctcgatgatctcatcatcaccaaagatcgggatgacaagttcttcgtcgtgtcgaacgccggcaggaggaacgaggacacggcgctgatgctcaagcgacagagcgagatgaaggctcaaggaaaggacgtgaacatccagttcttggaccctctcgagcagggcttgatagcgttacaggggccgagcgcggcgacggtactgcagtcgctggttcagattgatttaacgaagctcaagttcatgatgagcgtggagacggagatcaatcagaagcgcgtgagaatatcccgatgcggttacactggcgaagatggcttcgaaatttccattcccggaacggacgcgaggaccatcacggagatcattttggagaatcctgacgtgaagctcgcgggactcggacccagggacagcttgaggctggaggctggtctttgtttatacggccacgatatcaccgaagacacgacgcccgtagaagcgacgcttttgtggctagtcgcgaaacgtcgcagagctgaagcaaattttcccggtgcccagcgtattctcgatcaaatcaagaacggcgtgacgaagaagcgcgtcggtctgactctgagtcaaggtccaccggcacgtgaaaacgcgcccatcctgacagcagctggtgaacgcgtgggtaaagtgacgtcgggtggacccagtccgaccctgggtaagcccatcgccatgggttacgtgcccctagaactggccaaggctggcacaaacgttctcgtagaagtcaggggcaagatgtacaaagctgtggttacgaagatgccgttcgttaagtctaactactacacagacaaatag

SEQ ID NO: 70814 - protein, 413 aa, Nasonia vitripennis
MGSPAGITRALRCLHSKLTTNNERPLLRLFSAKAAAAAEPRKTCLYDLHVDHNGKIVDFAGWLLPVQYREAIAASHQHTRTHASVFDVGHMLQTHVTGRDSGEFLESLTTADLQSLKQGSAGLTVFTNDQGGILDDLIITKDRDDKFFVVSNAGRRNEDTALMLKRQSEMKAQGKDVNIQFLDPLEQGLIALQGPSAATVLQSLVQIDLTKLKFMMSVETEINQKRVRISRCGYTGEDGFEISIPGTDARTITEIILENPDVKLAGLGPRDSLRLEAGLCLYGHDITEDTTPVEATLLWLVAKRRRAEANFPGAQRILDQIKNGVTKKRVGLTLSQGPPARENAPILTAAGERVGKVTSGGPSPTLGKPIAMGYVPLELAKAGTNVLVEVRGKMYKAVVTKMPFVKSNYYTDK

SEQ ID NO: 70815 - DNA, 1239 bp, Aedes aegypti
  CDS (1)..(1239)
atgttgtcggttctgtcgagagtggctcagcgggggaggagcttatcggctgtatccgcagtgcagcgctgttatgcatccacgggaggaaaggaaccaagcaaaacggctctgtacgaattccatcaggctcaaggtggaaaactggtagactttgccggttactggttgcccgtgcagtacagcgatcagagtattattaaatcgcatcattacacccgcgagtatggatctattttcgacgtgtcgcatatgctgcaaacatatttgagaggcaaggatgtcatcagttgctttgagtcgatttgtactgcagatataaagggactccgaaatggcactggaacgttgaccgtgttcaccaatggaaagggaggaattttggacgatctgattgtgagtcgagtgtcggaggatactttgtatgtggtctccaatgcatcccggaaggatacggatatggcagttatgaccgatgcagtggcatccttcaaatcccaaggcaaagacgtctcggtgcagttcctgtccagcgatgaccaatcactcctggcaatccaaggtccacatgccgtttcagtcctgcaaaagctgtgcaccaaagacctttcccgcttatacttcatgaataccacaacggacactattgccggcgtagaaaactgccgaatcactcgttgtggatacactggcgaagacggagtcgaaatttctatcccatccaacaaagccaccgacattgcttcagcgctcctggagcaaaaagtcggcaaccttaagttggcaggtcttggagctcgcgattccctccgactggaagccggcctatgcctgtacggcaacgacatcgacgagactacgacccccgttgaagctggccttctctggttggtggccaaacagcgccgcgcagaaaacaatttccccggctcggacaagatcaacaatcaaataaaaaacggcgtcactcgacgtcgcgtcggattcaagatgtccgcaggatcggcccccgcaaggcaacacgtggaaattttcgataacgaacatcacaaaatcggagagatcaccagcggctgtccgagcccgtgtctgcagcagaacatcgccatgggatacattcgggaggaatcgaaaaaggtgggcaccgaagtgacgctcaagattcgggacaagttctaccacagccaggtcgccaagatgccattcgtcgcgacacattattatcagcaaccgaaataa

SEQ ID NO: 70816 - protein, 412 aa, Aedes aegypti
MLSVLSRVAQRGRSLSAVSAVQRCYASTGGKEPSKTALYEFHQAQGGKLVDFAGYWLPVQYSDQSIIKSHHYTREYGSIFDVSHMLQTYLRGKDVISCFESICTADIKGLRNGTGTLTVFTNGKGGILDDLIVSRVSEDTLYVVSNASRKDTDMAVMTDAVASFKSQGKDVSVQFLSSDDQSLLAIQGPHAVSVLQKLCTKDLSRLYFMNTTTDTIAGVENCRITRCGYTGEDGVEISIPSNKATDIASALLEQKVGNLKLAGLGARDSLRLEAGLCLYGNDIDETTTPVEAGLLWLVAKQRRAENNFPGSDKINNQIKNGVTRRRVGFKMSAGSAPARQHVEIFDNEHHKIGEITSGCPSPCLQQNIAMGYIREESKKVGTEVTLKIRDKFYHSQVAKMPFVATHYYQQPK

SEQ ID NO: 70817 - DNA, 1230 bp, Chlamydomonas reinhardtii
  CDS (1)..(1230)
atgctgccggcacttggccgcgttggtgcccagcaggcagccggcgctgctgcatccctgctgttcacccgtggctatgccgacttgtcttcgctgaagaagacgatgctgtatgacttccatgtggcgcacggaggcaagatggtggatttcgctggctgggcgctgcctattcagtacaaggatagcatcatggactcgaccacgcactgccgtcagaacgcctcgctgttcgacgtgtcgcacatgtgtggtttctcgctgaagggcaaagacgccatccagttcctggaggggctggtggttggtgacatcgccggcctcaaggacggcaccggctccctgagcgccttcaccaacgaaaagggtggcatcattgacgacaccgtcatcaccaaggtgaacggccagcacatctacacggtggtgaacgcgggctgccgcgacaaggacctcgcgcacctcagcaagcacctggcggcggccaagtccaagggcctggacgtggccatgacggtgcacgacgaccgcagcctgctggcgctgcagggccccgccgccgccgaggtggtggcgggcctggtggctccgggcgtggacctgaaggccatgtacttctccgacttcaagcccatcgacctgggcggcatcccgtgctgggtcacccgcacagggtacaccggcgaggacggctttgagatcagtgtgcccaacagccacgccgtggcgctggcggagaagctcaccgccaacaagcgcgtgcgcatggccggcctgggtccccgcgactctctgcgcctggaggcgggtctgtgcctgtacggcaacgacctgaacgaggacctgacgcccgtggaggcgggcctggcctggaccatcggcaagcgccgccgcgagaagttcgacttcctgggcggcgacatcattaagaagcagctggcggagggcgtcagcaagcgccgcgtgggctttgtgagcaccggcgcgcccgcccgccagcacagcgtggtgagcacccccgacggcaaggtggtgggcgagatcaccagcggcgccttcagcccctgcctcaaaaagaacatcgccatgggctacgtggacaaggacttcgccaaggccggcaccgcgctcaaggtggaggtgcgcggcaaggtaaacgacgccgtggtgacaaagatgcccttcgtgcccacgccctactacaagcgccccgagcccgccaagaagtaa

SEQ ID NO: 70818 - protein, 409 aa, Chlamydomonas reinhardtii
MLPALGRVGAQQAAGAAASLLFTRGYADLSSLKKTMLYDFHVAHGGKMVDFAGWALPIQYKDSIMDSTTHCRQNASLFDVSHMCGFSLKGKDAIQFLEGLVVGDIAGLKDGTGSLSAFTNEKGGIIDDTVITKVNGQHIYTVVNAGCRDKDLAHLSKHLAAAKSKGLDVAMTVHDDRSLLALQGPAAAEVVAGLVAPGVDLKAMYFSDFKPIDLGGIPCWVTRTGYTGEDGFEISVPNSHAVALAEKLTANKRVRMAGLGPRDSLRLEAGLCLYGNDLNEDLTPVEAGLAWTIGKRRREKFDFLGGDIIKKQLAEGVSKRRVGFVSTGAPARQHSVVSTPDGKVVGEITSGAFSPCLKKNIAMGYVDKDFAKAGTALKVEVRGKVNDAVVTKMPFVPTPYYKRPEPAKK

SEQ ID NO: 70819 - DNA, 1128 bp, Physcomitrella patens subsp. patens
  CDS (1)..(1128)
atgttgtacgattaccatgtggagaatggtggcaagatggtccccttcgccggatggtcgatgcctatccagtacaaggacagtatcatggactccaccacgaattgccgctccaatggcagtttgtttgatgtctcgcacatgtgtgggttgagcctcaagggccctgatgccatcgacttccttgagacgctcgtcgtggccgacattaagggcctcgcacctggcactggcacgctctccgtgtttacgaacgagaatggaggcgttattgacgacaccgtcatcacaaaggtgtcagacgatcacatctacttggtggtcaatgcgggttgtcgtaagaaagatttggcccaccttaagaagcatttgaaacccttccaggataccggtaagtcggtcgggtggcacattcacgatgagcgctccttattggctttgcaggggcctctggcggccgacatactgcagactctcactaaggaggatctcagcaagatgtacttcagtgacttcaaggtcattgacatcaatggctccgagtgtttcctcacccgcacagggtatactggcgaggacggttttgagatttcagtgccagatgaatctgcgctcgatttgacaaaggcaatcatggacaagggtcagggaaagattcgcctaactggtctgggagctcgggacagtctccgcttggaagccggtttgtgcctgtacggtaacgacctagagcaacacatttctcccattgaagcagggcttgcgtggaccgtgggcaagagacgccgagcagagggcaactttttgggagctgaaaccatcttacgccaaattaaggatggtgtatcaaagcgcagagttgggttcatctccaccggcgcaccagcacgagcacacagcgagatccttgaccttgaaggaaacaatatcggggagatcaccagtggtggattcagcccctgcctgaagaagaacatctctatgggctacatcgcaactggtcatcacaagaacaataccaaggtcaagcttgctgtgcgatccaagacatacgacgccactgtcacaaagatgccgttcgtgccctccaagtactacaagccaccacaagaagcagcgaagagctga

SEQ ID NO: 70820 - protein, 375 aa, Physcomitrella patens subsp. patens
MLYDYHVENGGKMVPFAGWSMPIQYKDSIMDSTTNCRSNGSLFDVSHMCGLSLKGPDAIDFLETLVVADIKGLAPGTGTLSVFTNENGGVIDDTVITKVSDDHIYLVVNAGCRKKDLAHLKKHLKPFQDTGKSVGWHIHDERSLLALQGPLAADILQTLTKEDLSKMYFSDFKVIDINGSECFLTRTGYTGEDGFEISVPDESALDLTKAIMDKGQGKIRLTGLGARDSLRLEAGLCLYGNDLEQHISPIEAGLAWTVGKRRRAEGNFLGAETILRQIKDGVSKRRVGFISTGAPARAHSEILDLEGNNIGEITSGGFSPCLKKNISMGYIATGHHKNNTKVKLAVRSKTYDATVTKMPFVPSKYYKPPQEAAKS

SEQ ID NO: 70821 - DNA, 1239 bp, Physcomitrella patens subsp. patens
  CDS (1)..(1239)
atgaagagggcagtgtcgcagctgggaggcacggtgcgacgcaccctcgcgcagcagagcagcaatgccttgcgagagacgtcacgacggtgctatgcggatgatgccgcaaatctgaaaaagaccatgttgtatgattaccatgtggagaatggaggcaagatggtacccttcgcaggatgggcgatgcctatccagtacaaggacagcatcatggattctactatcaattgccggactaacggcagtttgttcgatgtgtcgcatatgtgtgggctgagcttgaaaggcccagatgccattgatttcttggagacgcttgttgtcgccgacatcaaaggcctcgccaatggtaccggcacgctctccgtctttacgaacgagaatggtggagtgatcgatgacactgtcatcacaaaggtgacagatgaccacatctacctggttgtcaatgccgggtgccgggacaaggatttagcccatctcgagaagtatttgaagccctttctggcctcagggaagtcggtcgggtggcacattcacgatgagcgctccctgttggctttgcagggtcctctggcgggcgaagttctgcaaaaactcaccaaggaggatctcagcaagatgtatttcagtgacttcaagattattgacatcaatggctccgagtgcttccttacccgcacaggttacacaggtgaagatggtttcgaaatttcagtgccagatgaatctgcgctggatttgaccaaggccatcatggataaggctccggggaagctccgcttaacaggactgggagctagggacagtcttcgtcttgaagctggtctgtgcttatacggcaacgacctagagcagcacatcagtcccattgaagcaggacttgcatggactgtaggcaagagacgccgagcagaaggcaactttttgggagctgaaccaatcctacgtcaaatcaaggatggtgtgtctaggcgtagagttggtttcatctctactggtgcaccagcacgagctcacagcgagattctcgaccttgagggaaagaacatcggggagatcaccagtggtggattcagcccttgcttgaagaagaacatatccatgggctacattgcaaccgggcatcacaagaacaacacccaggtcaaggtcacagtgcgatccaagtcatacgacgccgtagtcaccaagatgccgttcgtgccctccaagtactacaagccaccacaataa

SEQ ID NO: 70822 - protein, 412 aa, Physcomitrella patens subsp. patens
MKRAVSQLGGTVRRTLAQQSSNALRETSRRCYADDAANLKKTMLYDYHVENGGKMVPFAGWAMPIQYKDSIMDSTINCRTNGSLFDVSHMCGLSLKGPDAIDFLETLVVADIKGLANGTGTLSVFTNENGGVIDDTVITKVTDDHIYLVVNAGCRDKDLAHLEKYLKPFLASGKSVGWHIHDERSLLALQGPLAGEVLQKLTKEDLSKMYFSDFKIIDINGSECFLTRTGYTGEDGFEISVPDESALDLTKAIMDKAPGKLRLTGLGARDSLRLEAGLCLYGNDLEQHISPIEAGLAWTVGKRRRAEGNFLGAEPILRQIKDGVSRRRVGFISTGAPARAHSEILDLEGKNIGEITSGGFSPCLKKNISMGYIATGHHKNNTQVKVTVRSKSYDAVVTKMPFVPSKYYKPPQ

SEQ ID NO: 70823 - DNA, 1233 bp, Coprinopsis cinerea okayama7#130
  CDS (1)..(1233)
atgactgcattttgtcgcgtgctgggaattcgaggatcgctgagggcagcctacgttgccaatggcctcaaaaccacagccaggcgctatgcaacggcgtcagaaccgttgaaacgtaccggcctgtacgattttcacgtcgcaaatggcgccaaaatggtgccttttgctggatactccatgcctcttgcttatggcgatgtaggccaagttgcaagccataaccatgtccggaacagcgtcggattgttcgacgtaggacacatggtccagtccaacttccggggtgcaacggcaactgaattcctggaatggttgacaccttcgtcactgtcctcgctcccagcctacagctccacgctttccctgctcctcaacgagaagggaggaatcatcgacgatactataatcacaaaacatgccgcggatgcgttctatgttgtcaccaatgctggacgcagggaacgtgatttggcttggatcaaggagaagctggaggagtggaataacagtgaggctgggaagaagggtcctgtggaactcgaagtccttgagaactggggtcttttggctctccaagggcccaaggctgcatcttacctccaaagtctcacttccttcgatttgaaccagctgctcttcggaaaggctgcctttgtccctatcgagggcttcaacctccacgttgctcgaggtggatatactggagaagacggtttcgagatctcaatcccaccttcgcaaaccgaagaagtcgctaggctcttgtccaaaaaccctgttcagctcaccggtctcggagctcgagacagccttcgtctggaggctggtatgtgtttgtacggcaacgagattgacgagaacactggtcctgtggaggctggattgacatgggtcattcctaaggagaggagagaagccggtgaattcattggtgctgatgccattcgcaagcaaatcaaggaaggtccttctcgcaggcgtattggcttgatcgtggaaggcgcccctgcacgacagggcgcaaagattgtcggccccgggaacgaggaaattggtgtcgtcacgtctggaattccttcacctaccctcggtaagaacattgccatgggatacgtcaagaatggtctccacaagaagggcaccgagctccaggtggacgtccgaaacaggctgaggaaggctgtcgtaacaccgctaccgtttgtgaaggcaaactactaccgcggctga

SEQ ID NO: 70824 - protein, 410 aa, Coprinopsis cinerea okayama7#130
MTAFCRVLGIRGSLRAAYVANGLKTTARRYATASEPLKRTGLYDFHVANGAKMVPFAGYSMPLAYGDVGQVASHNHVRNSVGLFDVGHMVQSNFRGATATEFLEWLTPSSLSSLPAYSSTLSLLLNEKGGIIDDTIITKHAADAFYVVTNAGRRERDLAWIKEKLEEWNNSEAGKKGPVELEVLENWGLLALQGPKAASYLQSLTSFDLNQLLFGKAAFVPIEGFNLHVARGGYTGEDGFEISIPPSQTEEVARLLSKNPVQLTGLGARDSLRLEAGMCLYGNEIDENTGPVEAGLTWVIPKERREAGEFIGADAIRKQIKEGPSRRRIGLIVEGAPARQGAKIVGPGNEEIGVVTSGIPSPTLGKNIAMGYVKNGLHKKGTELQVDVRNRLRKAVVTPLPFVKANYYRG

SEQ ID NO: 70825 - DNA, 1242 bp, Culex quinquefasciatus
  CDS (1)..(1242)
atgttgaaggtgcttactgggaacgtcgctcgagggagctgccggcagctgatccgaccattgagcgtttcggcggtgcacagatcttcgcagaaggaacccgcccgaacggcgctgtacgagttccaccagggtcacggcggcaagctggttgactttgccggctactggctgccggtgcagtacagcgatctgagcattatcaagtcccatctgtacactcgggagtacgggtcgatctttgatgtgtcccacatgctgcagacgtacttgcgagggaaagacgtcatcagctgcttcgagtcggtttgtaccgccgatgtcaaggggctacggaatggaaccggtacgctgacggtgttcacgaatggcaagggcgggattttggacgatctgatcgtgaaccgggtctcggacgatacgctgtacgtggtgtcgaacgcctcacgtaaggaaacggacatgggtgtgatgtccgatgccgtggcctccttcaaagctcaaggaaaggacgtttccgtcgagttcctatccagcgaagatcagtctctgctggccctgcaaggtcccagcgctgtctcggttctgcagaagctgtgcaccaaagatctctcgcggttgtttttcatgaacgggatcaccgatcagattgccggagtggacaactgccgaatcacgcgctgtggctacaccggagaggacggcgtagagatctccatcccttcccgacatgctcccgccatcgccaacgccttgctagaccaaaaggtgggcaacctcaagttggccggactcggcgcccgtgactccctccgcctggaagccggtctctgcctgtacggaaacgacatcgacgagaaaacgacccccgtcgaggcgggtctgctctggctggtcgcgaaacaacgccgcgccgagaacaacttccccggctcggacaaaatcaacgcccagatcaagaacggagtgacgcggcgtcgcgtcgggttcaaaatgtccccggggtcggccccggcccggcaccacgtggaagtgtttgacaacgagcaccacaagatcggcgagatcaccagcggctgtccgagtccgtgcctgcagcagaacatcgccatgggatacatccgcgaggagagcaagaaggtgggcacggaattgacgctgaaggtccgggacaagttctaccacagccaggtctgcaagatgccgttcgtgccgacgcactactatcaggcgccgaaataa

SEQ ID NO: 70826 - protein, 413 aa, Culex quinquefasciatus
MLKVLTGNVARGSCRQLIRPLSVSAVHRSSQKEPARTALYEFHQGHGGKLVDFAGYWLPVQYSDLSIIKSHLYTREYGSIFDVSHMLQTYLRGKDVISCFESVCTADVKGLRNGTGTLTVFTNGKGGILDDLIVNRVSDDTLYVVSNASRKETDMGVMSDAVASFKAQGKDVSVEFLSSEDQSLLALQGPSAVSVLQKLCTKDLSRLFFMNGITDQIAGVDNCRITRCGYTGEDGVEISIPSRHAPAIANALLDQKVGNLKLAGLGARDSLRLEAGLCLYGNDIDEKTTPVEAGLLWLVAKQRRAENNFPGSDKINAQIKNGVTRRRVGFKMSPGSAPARHHVEVFDNEHHKIGEITSGCPSPCLQQNIAMGYIREESKKVGTELTLKVRDKFYHSQVCKMPFVPTHYYQAPK

SEQ ID NO: 70827 - DNA, 1233 bp, Drosophila persimilis
  CDS (1)..(1233)
atgttcaagctaagcaatcgactaaaacagacctgggttctgcgcccaaccctgggcggactacgccacgcctcttcggcaggcgagggaaaccgcacggccctctacgatttccacgtgcagaaggggggaaaaatcgtcaactttgggggctatgcgctgccagtgcaatactctgaccagagcatcatcgcctcgcatctgcacacccggagtgtgggctccatcttcgatgtatcgcatatgctccagacctacgtgaggggcaaagatgctgctgcctgtctggagtctgtgtgtacggcggacatcttaggtactccggagggtagtggaaccctcacggttttcaccaatgaccaaggcggcattctggacgatctcattgtgaacaaggtcagcgagaaggagctgtatgttgtctccaatgccgctatgaagcagcaggatatgaatataatcagtgcggctgcgtcatccttcaagtcacagggcagggacgtttccgttgagttcctaacaccttcggaccagtccctgattgccgtacaaggcccgcgagtggctgcggaactagccaagctgctggctccaactacagccctagaccaactctactttatgcaatccttcgtcggcactttggcaggcatccccaatgtgaggattacgagatgtggctacaccggggaggatggagtggagatatcggtggcttctggccacgtacaggccctcaccgaagctctcttggctaatggaatccttaagctggccggcctgggagccagagattcgctacggctggaggcaggtctctgtctctacggcagcgacatcgatgcccaaactacacctgtggaggcagctttggcctggctagtggccaaaagacgtcgagcagcacgcgactttccaggcgctgatgtggttctcagccaactgaaaggaggagttcagaggcgccgcgtgggcctacaaatgctgggagcaaaacctccgccagcccgctcaggcgtggccatcttcagtgggggccaacaggtgggccaggtgaccagtggctgcccaagtcccagcactggtcgcaacatagccatgggctatgtgtcggagtcgctgaaggcgcctggaagcagggtggagctcaaagtgcgcgataaggtctatgaggcagagattacgaaaacgccgtttgtcaaagctaattactacaataaaccaaagatatag

SEQ ID NO: 70828 - protein, 410 aa, Drosophila persimilis
MFKLSNRLKQTWVLRPTLGGLRHASSAGEGNRTALYDFHVQKGGKIVNFGGYALPVQYSDQSIIASHLHTRSVGSIFDVSHMLQTYVRGKDAAACLESVCTADILGTPEGSGTLTVFTNDQGGILDDLIVNKVSEKELYVVSNAAMKQQDMNIISAAASSFKSQGRDVSVEFLTPSDQSLIAVQGPRVAAELAKLLAPTTALDQLYFMQSFVGTLAGIPNVRITRCGYTGEDGVEISVASGHVQALTEALLANGILKLAGLGARDSLRLEAGLCLYGSDIDAQTTPVEAALAWLVAKRRRAARDFPGADVVLSQLKGGVQRRRVGLQMLGAKPPPARSGVAIFSGGQQVGQVTSGCPSPSTGRNIAMGYVSESLKAPGSRVELKVRDKVYEAEITKTPFVKANYYNKPKI

SEQ ID NO: 70829 - DNA, 1218 bp, Drosophila sechellia
  CDS (1)..(1218)
atgtttagactaagctatcgactgcccaccgccctcggcggtctgcgccactcctcctccgccgccggcgagggtcagcgcaccgccctctacgatttccacgtgcaaaaaggcggcaagatcgtgaacttcggaggctatgccctgccggttcagtattcggatcagagcattatagcctcccacctccacacccgccaggtgggctccatctttgacgtatcgcacatgctgcagacccggattttcggcaaggatgcggccgcctgtctggagtccgtttgcacagcggacattctgggcacgccggagggcagtggtagcctcaccgtctttaccaacgaggcaggcggcatcctggacgatctcattgtgaacaaagtcagcgaaaaggaactctatgtggtatccaatgcggcgatgaaggaacaggacatgggcataatgaagacagctgtggataactttaagtcgcagggcaaagatgtaaccatcgaattcctcacacccaccgatcaatctctagttgccgtccagggtcctcaagtggccaaggaactatcgaaactacttgccaaggaagcttctctggatcaactctactttatgagctccttcatcaccacattggctggaatccccaatgtcaggatcaccagatgtggctacaccggcgaggatggtgtggagatatcggtggaatctagacaagcacagaagctcaccgaatcccttctagagagtggagtcctcaagcttgctggtctgggagccagagattccctgcgcttggaggcgggtctctgcctctatggcagtgatatcgatgccaagacgacacccgtggaggcggctcttgcctggttggtaaccaaaagacgccgcaccacccgagattttccaggagcagatgtgatccttggccagctaaaggagggcgtcagcagaagacgagtgggtctccagatgttgggtaccaagccaccgcccgctcgttccggagtggccatctttagtcagggtgagcaggtgggtcaagtgaccagtggctgcccaagtcccagtgctggacgcaacattgctatgggatatgtggcggagaatctaaaagcacccgggacaaaggtggagttcaaggttcgagacaagctctacgaggccgaagtcaccaaaatgccctttgtaaaagctaactattataacaggccaaagaaataa

SEQ ID NO: 70830 - protein, 405 aa, Drosophila sechellia
MFRLSYRLPTALGGLRHSSSAAGEGQRTALYDFHVQKGGKIVNFGGYALPVQYSDQSIIASHLHTRQVGSIFDVSHMLQTRIFGKDAAACLESVCTADILGTPEGSGSLTVFTNEAGGILDDLIVNKVSEKELYVVSNAAMKEQDMGIMKTAVDNFKSQGKDVTIEFLTPTDQSLVAVQGPQVAKELSKLLAKEASLDQLYFMSSFITTLAGIPNVRITRCGYTGEDGVEISVESRQAQKLTESLLESGVLKLAGLGARDSLRLEAGLCLYGSDIDAKTTPVEAALAWLVTKRRRTTRDFPGADVILGQLKEGVSRRRVGLQMLGTKPPPARSGVAIFSQGEQVGQVTSGCPSPSAGRNIAMGYVAENLKAPGTKVEFKVRDKLYEAEVTKMPFVKANYYNRPKK

SEQ ID NO: 70831 - DNA, 1245 bp, Drosophila virilis
  CDS (1)..(1245)
atgttgaagctaagcagccgactgcaagcgcaaaaggttttgcctttcggctggcaaagattacgccacgcctcctccagcacaggcggagagggtgagcgcacagcactttatgatttccatgtgcgcaaaggcggcaagattgtgaactttggtggttatgcactgcccgtgcagtactccgaccagagcatcatcgcctcccacctgtacacacgccgtgtgggctccatattcgatgtgtcgcatatgctacagacctatgtgcggggcaaggatgcggccgcttgtctggaatccatttgcacagctgacattctggacatgcccgcgggcagcggcagcctgacagtgtttaccaacgatcagggaggcattttggacgatctgatcgtgaataaggtcagcgacaaggagctctatgtggtctccaatgcggcgatgaagcaacaggacatgcaaatcatgaccgccgctgtgtccaacttcaagtcccaaggcaaagatgtctccattgagttcttgagcccggctcatcagtctctaattgcagtgcaaggcccgcaagcagcccaggagctatccaagctgctgccacagccaaaagcaaaagccctggaacagctctacttcatgcgctcgggcatctttgagctggcggggattagcaatgtacgcatcacgcgctgcggctacacgggcgaggatggtgtcgagatctcagtgccttctactcaggtggaaactcttaccgaggctctgctcgctgctggccaactgaagctggctggcctgggcgcacgcgattcactgcgcctggaggggggtttgtgcctctatggcagcgacattgatgcacagaccacacctgtggaggcagcacttgcttggctggtggccaaacggcgacgcagcacatctgactttcctggcgctcagacaattcttcagcagctgaaggagggtgcccagcggcgtcgcgttggactgcaaatgctgggcgccaaggcaccgcccgcacgagcaggtgtcgccatcttcagtggtgggaagcaggtgggtcaattgaccagcggttgccccagccccagcactggccgcaacattgccatgggctacgtggcagagcagcttaagaagcccggcacccaggtggagctaaaggtgcgcgacaaattctacgaggcggaaataactcgaatgccctttgttaaggccaactactacaataagcccaagcaataa

SEQ ID NO: 70832 - protein, 414 aa, Drosophila virilis
MLKLSSRLQAQKVLPFGWQRLRHASSSTGGEGERTALYDFHVRKGGKIVNFGGYALPVQYSDQSIIASHLYTRRVGSIFDVSHMLQTYVRGKDAAACLESICTADILDMPAGSGSLTVFTNDQGGILDDLIVNKVSDKELYVVSNAAMKQQDMQIMTAAVSNFKSQGKDVSIEFLSPAHQSLIAVQGPQAAQELSKLLPQPKAKALEQLYFMRSGIFELAGISNVRITRCGYTGEDGVEISVPSTQVETLTEALLAAGQLKLAGLGARDSLRLEGGLCLYGSDIDAQTTPVEAALAWLVAKRRRSTSDFPGAQTILQQLKEGAQRRRVGLQMLGAKAPPARAGVAIFSGGKQVGQLTSGCPSPSTGRNIAMGYVAEQLKKPGTQVELKVRDKFYEAEITRMPFVKANYYNKPKQ

SEQ ID NO: 70833 - DNA, 1218 bp, Drosophila simulans
  CDS (1)..(1218)
atgttcagactaagctatcgactgcccaccgccctcggctgtctgcgccacgcctcctccgccgccggcgagggtcagcgcaccgccctctacgatttccacgtgcaaaaaggcggcaagatcgtgaacttcggaggctatgccctgccagttcagtattcggatcagagcattatagcctcccacctccacacccgccaggtgggctccatctttgacgtatcgcacatgctgcagacccggattttcggcaaggatgcggccgcctgtctggagtccgtttgcacagcggacattctgggcacgccggagggcagtggtagcctcaccgtcttcaccaacgaggcgggcggcatcctggacgatctcattgtgaacaaagtcagcgaaaaggaactatatgtggtatccaatgcggcgatgaaggaacaggacatgggcataataaaggcagctgtggataactttaagtcccagggcaaagatgtaaccatcgaattcctcacacccaccgatcaatctctagttgccgtccagggtcctcaagtggccaaggaactatcgaaactacttgccaaggaagcttctctggatcaactctactttatgagctccttcatcaccacattggctggaatccccaatgtgaggatcacgagatgtggttacaccggcgaggacggtgtggagatatcggtggaatccagccaggcgcagaagctcaccgaatcccttctagagagtggagtcctcaagcttgctggtctgggagccagagattccctgcgtttggaggcgggtctctgcctctatggcagtgatatcgattccaagacgacacccgtggaggcggctctcgcctggctggtaaccaaaagacgccgcaccacccgagattttccaggagctgatgtgatcctccgccagctaaaggagggcgtcagccggaggcgagtgggtctccagatgttgggtaccaagccaccgcccgctcgttccggagtggccatctttagtcagggtaagcaggtgggtcaggtgaccagtggctgcccaagtcccagtgctggacgcaacattgcaatgggatatgtggcggaaaatctaaaagcacccgggacaaaggtggagttcaaggttcgagacaagctctacgaggccgaagtcaccaaaatgccctttgtaaaagctaactattataacaggccaaagaaataa

SEQ ID NO: 70834 - protein, 405 aa, Drosophila simulans
MFRLSYRLPTALGCLRHASSAAGEGQRTALYDFHVQKGGKIVNFGGYALPVQYSDQSIIASHLHTRQVGSIFDVSHMLQTRIFGKDAAACLESVCTADILGTPEGSGSLTVFTNEAGGILDDLIVNKVSEKELYVVSNAAMKEQDMGIIKAAVDNFKSQGKDVTIEFLTPTDQSLVAVQGPQVAKELSKLLAKEASLDQLYFMSSFITTLAGIPNVRITRCGYTGEDGVEISVESSQAQKLTESLLESGVLKLAGLGARDSLRLEAGLCLYGSDIDSKTTPVEAALAWLVTKRRRTTRDFPGADVILRQLKEGVSRRRVGLQMLGTKPPPARSGVAIFSQGKQVGQVTSGCPSPSAGRNIAMGYVAENLKAPGTKVEFKVRDKLYEAEVTKMPFVKANYYNRPKK

SEQ ID NO: 70835 - DNA, 1218 bp, Ciona intestinalis
  CDS (1)..(1218)
atgcttaaaattgcccaatttcgtcaaaatattctttctcgttgtgttttgtctgcaagtaaacggctgcttacaaccagtaactgtctttgtaaagataatattaaaacatctgtactgcatgatttccatgtgaaaaataatgcaaaaatggtcccatttgctggctggacaatgccaatacagtataagtcacttggaatcatagactctcatcaccacacaaggaacaaagtgtctttgtttgatgtgtcacacatgctacagtttaaagtgtatgggaaagacaaagagagctttattgagagcatgactgtatgtgatgtaaaaggcttgccggaaaatggaggatctctgactgttttcaccaacgcagaaggtggaataatggatgatgctatcattaatcaaacacaacaagattatctgtactgtgtatcaaacgctggttgttctgataagataagtacatgcttaagggagaaccttatagattttacagcgaagggaggagaagttgtgttggagcttttagattgtggtttgcttgctgtacagggaccaaaaatggcagaggtattgcagactgggacagatactgatttaagcaagttatacttcatgcagaatgtggaggcaaatttgtttggcgttgattgccggattactaggtgtggatacactggtgaagatggagtggaaatttctgtagcaaaaaatagagctgttgaactggctgagaatatctgctcacatgaagatgtggaattggcaggtctaggtgcgagggacagtttaaggttggaagcgggactttgtctctatggaaatgacattgatgaaatgaccactcccgttgaggcggggttgacatggtgtattggtaaaagaagaagaaaagagaagaattttcctggagcggaaaaaattgttgcgcaaataaaaagtaaaccaagtaaacggagaagtggtttaattgtaagctctgctattgctcgcaatggagcaatagtgcaggatggaaatggaaatgaaattggttcagtaaccagtggctgcccttcccccacattaagtgctaatattgcaatggcatatttacctctcccacttagcaaagtaggaactgaagtaaatgtgttggtgagaaaaagagtggtttctgccaaagttacaaaaatgccttttgtcccagctaactattttatgaataaataa

SEQ ID NO: 70836 - protein, 405 aa, Ciona intestinalis
MLKIAQFRQNILSRCVLSASKRLLTTSNCLCKDNIKTSVLHDFHVKNNAKMVPFAGWTMPIQYKSLGIIDSHHHTRNKVSLFDVSHMLQFKVYGKDKESFIESMTVCDVKGLPENGGSLTVFTNAEGGIMDDAIINQTQQDYLYCVSNAGCSDKISTCLRENLIDFTAKGGEVVLELLDCGLLAVQGPKMAEVLQTGTDTDLSKLYFMQNVEANLFGVDCRITRCGYTGEDGVEISVAKNRAVELAENICSHEDVELAGLGARDSLRLEAGLCLYGNDIDEMTTPVEAGLTWCIGKRRRKEKNFPGAEKIVAQIKSKPSKRRSGLIVSSAIARNGAIVQDGNGNEIGSVTSGCPSPTLSANIAMAYLPLPLSKVGTEVNVLVRKRVVSAKVTKMPFVPANYFMNK

SEQ ID NO: 70837 - DNA, 1200 bp, Schizosaccharomyces japonicus yFS275
  CDS (1)..(1200)
atgctctgctcttcagtcaaactccgtgcttgcacattgcctcgtcgtgttcgtgttcctaccggcaatcacttcgtgcgttccattgcttctctgaaaaaaactcctctgtatccgctccatgttgcgcgtggagcgaaaattgtgccgttcgccggttttgaaatgcctctccagtacaagggcatgtcagttggcgattcacatcgttggactcgccaacacgccggtcttttcgatgtaagccacatggtccaatggtttgttcgcggcgaaaatgctactgcgtttttggaaagcattacaccttcctcgctgcaggaattaaagcccatgcattcgacattgagtgtgttcaccaacgagacgggcggcatcgtcgacgatacaattatcagcaaacacgacgacaaaacgtactatattgtcacgaacgcagcttgtgcggacaaggacaccgaaaacttgagcaagaacttgaacaaatggactaagggtggtgtaaccattgaccgcattgagggtcgtgctttgatcgcgttgcagggtccggaggctgtcgcagcgcttgccaagctggccgtcacgtttgacttcccttcgctgaagtttggtaagtcggcatatatcgatgtgttaggtgccaattgtcttgtgtcgcgttccggatacaccggtgaagatggagttgaaatgtcggtgcctgcggatgattccatgaaaatcgctgaaactctccttgccgatagccgtgtacaacccatcggtctcggtgcccgtgactctcttcgtctcgaggccggaatgtgtttgtatggcaacgatatcgacgacactacgtctccagttgagggctctctttcatgggttattggcaaaagacgtcgctccgaaggcaattttgttggcagtagtcgtatcttgaaagagcttatgggaggacctagtcgtcgtcgtgtcggctttcttgttcagggtgctcctgctcgtgagggttctgccgtcgaagtggacggagtgaacgtgggacgggttacctctggctgtccttccccttccctgggcaagaacattgccatgggctacgttcgcactggactccacaaggtcggtacccgagtccacatcaacgttcgcaacaagctccgtcccgctgaggtggtcaagatgccttttgtgcaaacccactaccacaagtag

SEQ ID NO: 70838 - protein, 399 aa, Schizosaccharomyces japonicus yFS275
MLCSSVKLRACTLPRRVRVPTGNHFVRSIASLKKTPLYPLHVARGAKIVPFAGFEMPLQYKGMSVGDSHRWTRQHAGLFDVSHMVQWFVRGENATAFLESITPSSLQELKPMHSTLSVFTNETGGIVDDTIISKHDDKTYYIVTNAACADKDTENLSKNLNKWTKGGVTIDRIEGRALIALQGPEAVAALAKLAVTFDFPSLKFGKSAYIDVLGANCLVSRSGYTGEDGVEMSVPADDSMKIAETLLADSRVQPIGLGARDSLRLEAGMCLYGNDIDDTTSPVEGSLSWVIGKRRRSEGNFVGSSRILKELMGGPSRRRVGFLVQGAPAREGSAVEVDGVNVGRVTSGCPSPSLGKNIAMGYVRTGLHKVGTRVHINVRNKLRPAEVVKMPFVQTHYHK

SEQ ID NO: 70839 - DNA, 1251 bp, Branchiostoma floridae
  CDS (1)..(1251)
atgacattgacaaccgtttttcgggcttgtatgcgactcctccagctgagacgtttaccagaacgtgtaacaaccatctatgcaagatcgttttcgtcagaggttgatcttaaaaagactcccctatacgagttccacaaggagcatggcggcaagatggtggacttcaccggttggtccatgcctgtgcagtacaaggacggcatctccgcatctcacctccacacccgcaccaacgcttccatcttcgacgtctcgcacatggtccagagtcggattcacggcaaggacgcggtcaagttcatcgagtcgttgaccgtcggggacgtcgcggggttgcaggagaaccaagggaccttgaccttgttcactaacgacagaggaggaatcatggatgacttgatcgtgtctaagacctcagaagggtttctgtacgtggtgacgaatgctggctgtgctgagaaggacatcgcacacatgcagagccagtgtaaagagtttcaagcccaaggtcatgatgcagcagtagaggtcatccaggagcagtttggtctcttggcattacaaggtccatctgctgcagctgcgttacaggcaggtgttgatgcagacctgtccaggatcacctttatgtgcagtgctgtcctgacggtgttcggtgtacctggctgtcgggtcaccaggtgtggatacacgggagaggacggctttgaggtgtccatccctgtagcccaggttgtccaggttgcggacagcctgctgcaggtggaggctgcagacgtgaagctggcagggctggggcccagggacagcctcaggctggaggcggggctctgtctctatggcaacgacattgacgaggacaccacgccagtggaggccacccttctgtggacagtagccaaacgtaggagagcggaatccaacttccctggtgcaggtgtcatcctccaacagatcaaggacaaaccaagcaggaagagggtggggattacttcaaaaggaccaccagcaagaggcaaagcccaccggcccatactcaacagagacggggggcgacatagactttctggtgttgtgaccagtggttgcccctccccatcgctaaaggagaacgttgccatgggatacgtgcaaacagcgttcgccaaggccggcacacctctgaaacttgaggtgcgcgggaagcaggtcccagcacaggtgtccaagatgccgtttgtgcccgcaaactactactacgggaaatga

SEQ ID NO: 70840 - protein, 416 aa, Branchiostoma floridae
MTLTTVFRACMRLLQLRRLPERVTTIYARSFSSEVDLKKTPLYEFHKEHGGKMVDFTGWSMPVQYKDGISASHLHTRTNASIFDVSHMVQSRIHGKDAVKFIESLTVGDVAGLQENQGTLTLFTNDRGGIMDDLIVSKTSEGFLYVVTNAGCAEKDIAHMQSQCKEFQAQGHDAAVEVIQEQFGLLALQGPSAAAALQAGVDADLSRITFMCSAVLTVFGVPGCRVTRCGYTGEDGFEVSIPVAQVVQVADSLLQVEAADVKLAGLGPRDSLRLEAGLCLYGNDIDEDTTPVEATLLWTVAKRRRAESNFPGAGVILQQIKDKPSRKRVGITSKGPPARGKAHRPILNRDGGRHRLSGVVTSGCPSPSLKENVAMGYVQTAFAKAGTPLKLEVRGKQVPAQVSKMPFVPANYYYGK

SEQ ID NO: 70841 - DNA, 1227 bp, Vitis vinifera
  CDS (1)..(1227)
atgagaggagggggtctgtggcaacttgggcaatcaattacccgcaggcttgctcaggctgataagaaggctgtagctcgtcgatgctttgcctcagaagccgagctcaagaagacagttctctatgactttcatattgccaatggtgggaagatggttccatttgcaggatggagcatgcctattcagtacaaggactcgattatggactctacggtgaattgtcgggagaatggtagcctctttgatgtctcccatatgtgtgggctaagcctcaagggaaaggactgcattccttttctggaaaagcttgtcattgctgatgttgctgggcttgcccctgggactgggactttaaccgtctttacaaatgagaaaggaggggcaattgatgattctgtgatcaccaaggtgaaggataaccacatctacctggttgtgaatgccgggtgtagggataaggacttggcccacattgaggagcatatgaaggcttacaagtccaaaggcggggacgtctcatggcatatccatgatgagaggtctcttctagctctccagggtccccttgctgccccagttcttcaacacctgacaaaagaggatttaagcaagttattttttggggagttccaaatcttggatatcaacggagcaacctgctttctcactaggacagggtacacaggtgaagatggatttgaaatttcagttccttccgagaatgcagtagatcttgccaaagcaatcttggagaaatctgaagggaaggtaaggttaacagggctgggtgcacgagacagtctccgccttgaagcggggctgtgcttatatggtaatgacatggaacagcacgtaaccccagtcgaggcaggactcacatgggccatagggaagagaagaagggcagaaggcggctttctgggtgctgaggtgatactcaaacaacttgaagagggcccttcggtcaggcgtgtcggcttcttctcttcaggcccccctgctagaagccacagcgaaattcaggatgacaaaggaaacaacatcggtgaaatcaccagtggaggattcagcccctgcctgaagaagaacataggaatggggtacgtcaaatctggatcccacaaggccggcaccaaagttaagattctgattcgagggaagccctatgatggggttgtcacaaagatgccattcgtgccaacaaaatactacaagccatcctaa

SEQ ID NO: 70842 - protein, 408 aa, Vitis vinifera
MRGGGLWQLGQSITRRLAQADKKAVARRCFASEAELKKTVLYDFHIANGGKMVPFAGWSMPIQYKDSIMDSTVNCRENGSLFDVSHMCGLSLKGKDCIPFLEKLVIADVAGLAPGTGTLTVFTNEKGGAIDDSVITKVKDNHIYLVVNAGCRDKDLAHIEEHMKAYKSKGGDVSWHIHDERSLLALQGPLAAPVLQHLTKEDLSKLFFGEFQILDINGATCFLTRTGYTGEDGFEISVPSENAVDLAKAILEKSEGKVRLTGLGARDSLRLEAGLCLYGNDMEQHVTPVEAGLTWAIGKRRRAEGGFLGAEVILKQLEEGPSVRRVGFFSSGPPARSHSEIQDDKGNNIGEITSGGFSPCLKKNIGMGYVKSGSHKAGTKVKILIRGKPYDGVVTKMPFVPTKYYKPS

SEQ ID NO: 70843 - DNA, 1227 bp, Populus trichocarpa
  CDS (1)..(1227)
atgaggggaggaggtttgtggcaacttggcctatcaataacccgccgacttgctcaggctgataagaaggctgtgggacgtcgatactttgcctcagaagctgagctgaaaaagactgtcctttatgacttccatgttgctaatggtggcaagatggtgccttttgctgggtggggcatgcccattcagtacaaggactccatcatggaatcgacggtgaattgtagacagaatggtagcctttttgatgtctcacatatgtgtgggtttagcctgaagggaaaggactgtgttcctttcctagagaaacttgttattgctgatgttgctgcgcttgcacctggaactgggactctaactgtctttactaatgagaaaggaggagcaattgatgattcagtgatcaccaaggtgacggatgatcacatgtacatagttgtgaatgcagggtgtagagataaggatcttgctcacatcgaggcacatatgaagtcattcaaggcaaagggtggagatgtctcatggcacatccacgatgagagatctcttcttgccctccagggtcctcttgctgcccctgttctccaacacctgacaaaagaggatttgagcaaggtatactttggggagttccgtattacagacatcaatggagcgcgctgctttattactaggacagggtacactggtgaagatggatttgaaatttctgttccttcagagaatgcagtggatcttgccaaagcaatcctagaaaaatctgaaggaaaagtaaggttgacagggcttggtgctcgggacagtctccgacttgaagctgggctgtgcttatatggtaatgacatggaacagcacataacaccagtagaggcaggactgaattgggcgatagggaagagaaggaaggcagaaggcggctttctgggtgctgaagtaatactcaaacaacttgcagaaggtccaaaagtcaggcttgtaggatttagctctactggtccacctcctcgatcccacagtgagattcaggatgagaaagggactaacattggagaaattactagtggaggatttagcccatgcctcaagaaaaatatagccatggggtacgtgaaatctggtttccacaaggcaggcaccaaagcgaaaatactggtacgtgggaaggcctatgatggagttgtcacaaaaaagccatttgtaccaactaaatattacaagccatcttaa

SEQ ID NO: 70844 - protein, 408 aa, Populus trichocarpa
MRGGGLWQLGLSITRRLAQADKKAVGRRYFASEAELKKTVLYDFHVANGGKMVPFAGWGMPIQYKDSIMESTVNCRQNGSLFDVSHMCGFSLKGKDCVPFLEKLVIADVAALAPGTGTLTVFTNEKGGAIDDSVITKVTDDHMYIVVNAGCRDKDLAHIEAHMKSFKAKGGDVSWHIHDERSLLALQGPLAAPVLQHLTKEDLSKVYFGEFRITDINGARCFITRTGYTGEDGFEISVPSENAVDLAKAILEKSEGKVRLTGLGARDSLRLEAGLCLYGNDMEQHITPVEAGLNWAIGKRRKAEGGFLGAEVILKQLAEGPKVRLVGFSSTGPPPRSHSEIQDEKGTNIGEITSGGFSPCLKKNIAMGYVKSGFHKAGTKAKILVRGKAYDGVVTKKPFVPTKYYKPS

SEQ ID NO: 70845 - DNA, 1227 bp, Populus trichocarpa
  CDS (1)..(1227)
atgaggggaggaggtttgtggcaacttggccaatcaattacccgccgacttgctcaggttgataagaaggttgtgggacgtcgatactttgcctcagaagctgagctgcaaaagactgttctttatgacttccatgttgctaatggtggcaagatggtgccatttgctgggtggggcatgcccattcagtacaaggactctatcatggaatcaacggtgaattgtagacagaacggtagcctttttgatgtctcacatatgtgtgggttgagcctcaagggcaaggactgtattcctttcctagagaagcttgttattgctgatgttgccgcgcttgcacctggaactgggactctaactgtctttactaatgagaaaggaggagcaattgatgattcagtgatcaccaaagttcagaatgatcacatgtacatagttgtgaatgcagggtgtagagataaggatcttgctcacattgaggagcatatgaaggcatttaaggcaaaaggtggagatgtctcatggcacatccatgatgagagatctcttctcgccctccagggtcctctttctgcttctgttctccaacacctgacaaaagatgatttgagcaagttatactttggggagttccgtattacagacatcaatggagcgtactgctttatcactaggacaggatacactggagaagatggatttgaaatatcagttccttcagagaatgcagtggatcttgccaaagcaatcctagaaaaatctgaaggaaaaataaggttgacagggcttggtgcccgggacagtctccgacttgaagctgggctgtgcttatatggtaatgacatggaacagcacataacaccagtagaggcaggactgtcttgggcgatagggaagagaaggaaggctgaaggtggctttctgggtgctgaagtaatactcaaacaacttgcagaaggtccaaaaattaggcttgtaggatttacctctactggtccacctcccagatcccacagtgagattcaggatgagaaagggactaacattggagaaattacaagtggaggatttagcccatgcctcaagaaaaatatagccatggggtacgtgaaatctggttcacacaaggcaggcaccaaagctaaaatactggtacgtgggaaggcctatgatggagctgtcacaaaaaagccatttgtaccaactaaatattacaagccatcttaa

SEQ ID NO: 70846 - protein, 408 aa, Populus trichocarpa
MRGGGLWQLGQSITRRLAQVDKKVVGRRYFASEAELQKTVLYDFHVANGGKMVPFAGWGMPIQYKDSIMESTVNCRQNGSLFDVSHMCGLSLKGKDCIPFLEKLVIADVAALAPGTGTLTVFTNEKGGAIDDSVITKVQNDHMYIVVNAGCRDKDLAHIEEHMKAFKAKGGDVSWHIHDERSLLALQGPLSASVLQHLTKDDLSKLYFGEFRITDINGAYCFITRTGYTGEDGFEISVPSENAVDLAKAILEKSEGKIRLTGLGARDSLRLEAGLCLYGNDMEQHITPVEAGLSWAIGKRRKAEGGFLGAEVILKQLAEGPKIRLVGFTSTGPPPRSHSEIQDEKGTNIGEITSGGFSPCLKKNIAMGYVKSGSHKAGTKAKILVRGKAYDGAVTKKPFVPTKYYKPS

SEQ ID NO: 70847 - DNA, 1368 bp, Apis mellifera
  CDS (1)..(1368)
atgcttcgcttcgccgcccgtgcaacatcggcccgccaatcggagaaatgtttggataaatcggtgaggaaacgggagttaaccgcgtcgactacgattctcgacgcgagctcgaggagcgcggcgcacgagccgagccgtttaagatgtttgatcgattccggaacgcggtcaaacgatactgaaggccgccgccgccgtggcttgtcaacggcgtcgacggcaacgccgacggcaacgacgccaaggaaaacgtgcctctacgaccttcacgtggaaaatcgaggtaagataaccaatttttccggatggttgttgcctgtccagtatcaagaggcgatagccacatctcatttgcacacgagaacgttcgcctcgttgttcgacgtcggtcacatgttgcaaacaagagtttctgggagagacgccacccaattcttggaatctctgacgacgagcgatttgaaaaatttgggcaacggttgcgccgttctcgccgtgttcacggacgagaacggaggtattctggacgatttgatcgttacgaaagacggagaggatagatattttctcgtgtcgaacgcgggaagaagaaaggaagattctcgattgcttcttcaacagcaggagatatttctcactcaaggaaaatcggtgagcttggaatttttagatccgttgaagcagagcctcgtggcgttacaggggcccacggccgcttccgttctccaatcgatcgtcgacgtcgatttgaggaatctaagattcatgaacagcgtggaaaccgaggtgttggggcgacggataaggataacacgttgcgggtacacgggggaggacgggttcgagatctcgataccggttcaaatagcgcataccttggtaaaaatgattttaaacacgcccgacacgaaactggccgggttgggagctagagatagtttgaggctggaagccggtctttgcctctacgggcaagatatcaacgagaaaataacaccgatcgaagccgggcttggttggctaatagctaaacgaaggaaagcggaagcaaattttccaggtgcggcgaagatacttctgcagatcgagtcagggactaagaagaagagggtggggataacggttgtgaatgggccaccggttagagcgggagcgtgtatattaacgccggagggagaacgagtcggcaacatcacttccggtggacctagtccaactctcggaagttacatagctatgggatacgtgccaccagaattggccgaatacgggaaaggggttttggtcgaggtccgaggaaaaacctacaaagctaaagtaacgaaaatgccctttgtcaagacgaattattacactggaaagtga

SEQ ID NO: 70848 - protein, 455 aa, Apis mellifera
MLRFAARATSARQSEKCLDKSVRKRELTASTTILDASSRSAAHEPSRLRCLIDSGTRSNDTEGRRRRGLSTASTATPTATTPRKTCLYDLHVENRGKITNFSGWLLPVQYQEAIATSHLHTRTFASLFDVGHMLQTRVSGRDATQFLESLTTSDLKNLGNGCAVLAVFTDENGGILDDLIVTKDGEDRYFLVSNAGRRKEDSRLLLQQQEIFLTQGKSVSLEFLDPLKQSLVALQGPTAASVLQSIVDVDLRNLRFMNSVETEVLGRRIRITRCGYTGEDGFEISIPVQIAHTLVKMILNTPDTKLAGLGARDSLRLEAGLCLYGQDINEKITPIEAGLGWLIAKRRKAEANFPGAAKILLQIESGTKKKRVGITVVNGPPVRAGACILTPEGERVGNITSGGPSPTLGSYIAMGYVPPELAEYGKGVLVEVRGKTYKAKVTKMPFVKTNYYTGK

SEQ ID NO: 70849 - DNA, 1188 bp, Debaryomyces hansenii CBS767
  CDS (1)..(1188): transl_table=12
atgtcaaggatagtaggtagaagattatattctagtgggtcacaattgattaaaacaccattgtacgattgtcatgtcgaatttggtggtaaaatggtcccatatgcgggatttgaaatgcctgttttatacaaggaccaaactcacactgagtcacataactgggttagaaataacgttgggttattcgatgtgtctcatatgttacaacatagacttagtggtcaaaacgtcgctgatttcttacaaaaagtcacccctatcaacttatctgaattagaagttaattcttcaagtttgtcagtgttcttgaatgaacaaggtggtgtcatcgatgattgtattattacaaagcatggtgaaaatgaatactatatggtttccaatgctggttgccgtgaaaaagatattgcattccttaaaaaggagttacaaaacttcagcggtgttaaccatgacactttcgaaggtaccttgttagccatccaaggtccaaaggctgctgaaatattacaaaaattcaccaatgaaagcttgaaggatttgactttcggaaaatctagattttctcaattatcatccattatcaactctcaggtacatattgccagatgtggttacaccggtgaagatgggttcgaattgtcgattccatctagcaccgcgcaagaaaccaaggaatcacaagagttcttcagaacattgatcaacgaataccctgatatcgttaaaccaattggtttagctgccagagattccttaagattggaagccggtatgtgtctttacggtcacgaattggacgaatctaagactccaattgaagccactttagcctggttaattccaaagagccgcagacaagatgacgcaaccttcaatggtgcaagcaacatcttagcccagatcaaggaccgttcattatttacacacaagcgtgttggtatcaggaccaagggcccatctccaagagacgattgcaaagtttacactgctgacggtaaagacgaagttggttatatcacttccggtgccccatccccaacctcaggtggaaatgtcgcccaaggatacatcaagaacggccttaagattggcaccgaagttaaggtagaaatcagaggtaagttaagggacggtgttatcagcaagatgccttttgtcccaagtaattattatagaggttga

SEQ ID NO: 70850 - protein, 395 aa, Debaryomyces hansenii CBS767
MSRIVGRRLYSSGSQLIKTPLYDCHVEFGGKMVPYAGFEMPVLYKDQTHTESHNWVRNNVGLFDVSHMLQHRLSGQNVADFLQKVTPINLSELEVNSSSLSVFLNEQGGVIDDCIITKHGENEYYMVSNAGCREKDIAFLKKELQNFSGVNHDTFEGTLLAIQGPKAAEILQKFTNESLKDLTFGKSRFSQLSSIINSQVHIARCGYTGEDGFELSIPSSTAQETKESQEFFRTLINEYPDIVKPIGLAARDSLRLEAGMCLYGHELDESKTPIEATLAWLIPKSRRQDDATFNGASNILAQIKDRSLFTHKRVGIRTKGPSPRDDCKVYTADGKDEVGYITSGAPSPTSGGNVAQGYIKNGLKIGTEVKVEIRGKLRDGVISKMPFVPSNYYRG

SEQ ID NO: 70851 - DNA, 1221 bp, Yarrowia lipolytica CLIB122
  CDS (1)..(1221)
atgcttcgagttgcacacttttcccgagctgctgtttctgcgcgagcagccattcccaccacacgagtcgccttgcagcgagttgctcgatactccgtggacgctaacctcaagaagaccccccttttccctctccatgagaagctggacgcccagtttgtcgactacgccggctttgccatgcccgtgctttacaagggtactacacacatccagtcgcataattgggtgcgggagaaggccggtctgttcgacgtgtcgcatatgctgcagcaccggttctctggccccgctgctaccgagttcctggagaagatcacccccgcagacctccaagcgctgcagcccttcacctcgactctgtctgtgctcctcacccccgagggaggcattgtcgacgatctgatcatctccaagcacggtgagaacgacttctacgtggtgaccaacgccggctgcagagataaggatctagccttcctggccaaggagagcgagccgtttggcgacaagctggtccacgacacaattggtggcggcctgatcgctctacagggtcccgaggctgccgctgcgctccagaagttcaccaactatgatctgtcccagatcaagtttggccagtccgcctgggtcgactttggaggcaacaagtaccacgtggcccgaggaggatacactggtgaggacggcttcgaggtgtccatccctgacgatgcagcctctgttgcctttgccgaggctctccttgagaacgacaacgtcattgctgtcggcctggctgcccgagactctctgcgactcgaggccggaatgtgtctctatggccacgagctgagcgaggagctgactcctgtcgaggctggcctcacctgggttgttggcaaggcccgacgatctggtgaccgaactggattcaacggctctgacaagattctggcccagatcaaggacaagtccgccacgaaggcccgagtgggtctgttcaacgacggccctgctccccgagagggcgttgccattctcaacgaggcgggcgagaaggtcggagtcgtcacttccggctgcaagtctccttctctcaacaagaacatcggtatgggctacgtcaacaagccattcaacaagagcggcaccaagctgactcttgatatccgaaacaagaagcgacccgccgaggtggtcaagatgccctttgttccccacaagtacttcaagtag

SEQ ID NO: 70852 - protein, 406 aa, Yarrowia lipolytica CLIB122
MLRVAHFSRAAVSARAAIPTTRVALQRVARYSVDANLKKTPLFPLHEKLDAQFVDYAGFAMPVLYKGTTHIQSHNWVREKAGLFDVSHMLQHRFSGPAATEFLEKITPADLQALQPFTSTLSVLLTPEGGIVDDLIISKHGENDFYVVTNAGCRDKDLAFLAKESEPFGDKLVHDTIGGGLIALQGPEAAAALQKFTNYDLSQIKFGQSAWVDFGGNKYHVARGGYTGEDGFEVSIPDDAASVAFAEALLENDNVIAVGLAARDSLRLEAGMCLYGHELSEELTPVEAGLTWVVGKARRSGDRTGFNGSDKILAQIKDKSATKARVGLFNDGPAPREGVAILNEAGEKVGVVTSGCKSPSLNKNIGMGYVNKPFNKSGTKLTLDIRNKKRPAEVVKMPFVPHKYFK

SEQ ID NO: 70853 - DNA, 1230 bp, Cryptococcus neoformans var. neoformans JEC21
  CDS (1)..(1230)
atgttctcgctcgcccgccccaccgccagacccgtcgccgcactcgccagacgtgcgctcgcaacctccgccgtcctcgcacagctcaagaaaacaccgctccatgacttccacgtgcagcacaaggccaagatggtcccctttgcgggctacagcatgcccttgagctacggcgagacaggacagatcaccgcccacaagcacgtccgatcagacgccggcttatttgacgtctctcatatgctgcagcacaactttacaggccctactgcccaggaattcctcttgaccctttgtccctcgtccctcgactcgctcaaaccattcacctccaccctgtccgttcttttgaacgagcaaggaggtatcattgacgacaccatcatcaccaagcacagcgattctgctttctacgtcgtcactaacgccggccgatccgtcgaggacaaggcccatatctcgcaaaagctcgaagagtggaatgccgcccacaagggacgagaagtcaagtgggagactcttgaaggctggggtcttttagcactccagggccccaaggccaaggatgtgcttcagcgagtcactgaccaggacttgaacaaagtgaaattcggttcaagtgtctttgctgatatcaagacgatggacggtcaaaccgtcaagtgtcatgtggccaggggcggctacactggcgaagatggctttgaagtatcgattcctccagagcatactctcgctctttccaacaccatcgcttctcatcctgacgtcatgcttatcggtcttggcgctcgagactctctccgtctcgaagctggtatgtgtctctacggccacgatcttgacgaaagcgtgagccccgtggaaggcggtttaagctgggtcattggcaaggacagacgcgcgcccgacgctcagccgtctttccctggaaaatcgagaatcctcgaggaacttgccaacggaccttccaggcgaagggtcggctttgaggttataggttccccagcgagagaaggttgtaaagtcttggatgcgctgggtgaaaaggaaattggtgtaatcacttctggtattccttcccctacactcggcacaaacatcgccatgggatacattgccaacggatcccataaaaagggtaccgcagtcaaagtcgaggtgaggaaaaaattgagggatgccttcgtcaagcccatgccgtttgtgcctaccaagtacttcaagtga

SEQ ID NO: 70854 - protein, 409 aa, Cryptococcus neoformans var. neoformans JEC21
MFSLARPTARPVAALARRALATSAVLAQLKKTPLHDFHVQHKAKMVPFAGYSMPLSYGETGQITAHKHVRSDAGLFDVSHMLQHNFTGPTAQEFLLTLCPSSLDSLKPFTSTLSVLLNEQGGIIDDTIITKHSDSAFYVVTNAGRSVEDKAHISQKLEEWNAAHKGREVKWETLEGWGLLALQGPKAKDVLQRVTDQDLNKVKFGSSVFADIKTMDGQTVKCHVARGGYTGEDGFEVSIPPEHTLALSNTIASHPDVMLIGLGARDSLRLEAGMCLYGHDLDESVSPVEGGLSWVIGKDRRAPDAQPSFPGKSRILEELANGPSRRRVGFEVIGSPAREGCKVLDALGEKEIGVITSGIPSPTLGTNIAMGYIANGSHKKGTAVKVEVRKKLRDAFVKPMPFVPTKYFK

SEQ ID NO: 70855 - DNA, 1185 bp, Candida albicans SC5314
  CDS (1)..(1185): transl_table=12
  misc_feature (1082)..(1082): n is a, g, c or t
  misc_feature (1088)..(1088): n is a, g, c or t
  misc_feature (1092)..(1092): n is a, g, c or t
atgttaagaattacttctaaaagattatactcatcaactagcaacttattgaagactccattgcatgaagctcacatagaattaggtggtaaaatggtaccatatgctggtttcgaaatgccagtattgtataaaggtcaatctcatattgaatctcataattgggtgagatcaaaagttggtttatttgatgttagtcacatgttacaacataacattagtggtaaagatgctcaaagcttgttacaaaaaataactcctattgatttaagtaaattaccagttaacacatctagcttatcagtgttattaaataataatggtggagtaattgatgattgtattatcaccaaacacggtgaagatgaatattatatggtcactaatgctggatgtcgtgagaaagatgtcaaatttattaaagacgaggctagccaatttaatagtgttaatcacaatacgtttgaaggaacattattagctattcaaggtcctaaagcacaagaaatattacaacaatttaccaatgaagatttatctaaaatttattttggtcaaaccaaattcttgaaattatcaccaattggggcaacagtttatttggctagatctggttatactggagaagatggatttgaattatcaatcccatcgactacaccagaagaatcaaaacaagcattagactttttttacactttgattaatgaataccctgatgttgtcaaaccaattgggttggcagctagagattctttgagattagaagctggtatgtgtctttatggccacgaattgactgaagaaataactccaattgaagcatctttgacttggttaataccaaaaactcgtcgtgatgaaaataatgatttcaatggtgctagtaaaatattgctgcaaattaaagataaatcttcttttactcatagaagaattggattgacctccaaaggtccatcaccaagagatggaaacaagatatttaatgaagatggaactgttgtgattggatatgtgacatctggatcaccatcacctacattgggtggaaatattgctcaagcttatattgccaaganacatanaatnggcagtaatgttaaaattgaaattagaaataaattaagagatgctgttataacaaaattgccatttgtaccaagcattttatataacccatag

SEQ ID NO: 70856 - protein, 394 aa, Candida albicans SC5314
  misc_feature (361)..(361): The Xaa at location 361 stands for Arg, Ile, Lys, or Thr.
  misc_feature (363)..(363): The Xaa at location 363 stands for Arg, Ile, Lys, or Thr.
  misc_feature (364)..(364): The Xaa at location 364 stands for Ile, or Met.
MLRITSKRLYSSTSNLLKTPLHEAHIELGGKMVPYAGFEMPVLYKGQSHIESHNWVRSKVGLFDVSHMLQHNISGKDAQSLLQKITPIDLSKLPVNTSSLSVLLNNNGGVIDDCIITKHGEDEYYMVTNAGCREKDVKFIKDEASQFNSVNHNTFEGTLLAIQGPKAQEILQQFTNEDLSKIYFGQTKFLKLSPIGATVYLARSGYTGEDGFELSIPSTTPEESKQALDFFYTLINEYPDVVKPIGLAARDSLRLEAGMCLYGHELTEEITPIEASLTWLIPKTRRDENNDFNGASKILSQIKDKSSFTHRRIGLTSKGPSPRDGNKIFNEDGTVVIGYVTSGSPSPTLGGNIAQAYIAKXHXXGSNVKIEIRNKLRDAVITKLPFVPSILYNP

SEQ ID NO: 70857 - DNA, 1185 bp, Candida albicans SC5314
  CDS (1)..(1185): transl_table=12
atgttaagaattacttctaaaagattatactcatcaactagcaacttattgaagactccattgcatgaagctcacatagaattaggtggtaaaatggtaccatatgctggtttcgaaatgccagtattgtataaaggtcaatctcatattgaatctcataattgggtgagatcaaaagttggtttatttgatgttagtcacatgttacaacataacattagtggtaaagatgctcaaaacttgttacaaaaaataactcctattgatttaagtaaattaccagttaacacatctagcttatcagtgttattaaataataatggtggagtaattgatgattgtattatcaccaaacacggtgaagatgaatattatatggtcactaatgctggatgtcgtgagaaagatgtcaaatttattaaagacgaggctagccaatttaatagtgttaatcacaatacgtttgaaggaacattattagctattcaaggtcctaaagcacaagaaatattacaacagtttaccaatgaagatttatctaaaatttattttggtcaaaccaaattcttaaaattatcaccaattggggcaacagttcatttagctagatctggttatactggagaagatggatttgaattatcaattccatcgactacaccagaagaatcaaaacaagcattagactttttttacactttgattaatgaataccctgatgttgtcaaaccaattgggttggcagctagagattctttgagattggaggctggtatgtgtctttatggtcacgaattgaccgaagaaataactccaattgaagcatctttgacttggttaataccaaagactcgtcgtgatgaaaataatgatttcaatggtgctagtaaaatattgctgcaaattaaagataaatcttcttttactcatagaagaatcggattgacttccaaaggtccatcaccaagagatggaaacaagatatttaatgaagatggaactgttgaaattggatatgtgacatctggatcaccatcacctacattgggtggaaatattgctcaagcttatattgacaagaaacataaaattggcagtaatgttaaaattgaaattagaaataaattaagagatgctgttataacaaaattgccatttgtaccaagcaatttatataaaccatag

SEQ ID NO: 70858 - protein, 394 aa, Candida albicans SC5314
MLRITSKRLYSSTSNLLKTPLHEAHIELGGKMVPYAGFEMPVLYKGQSHIESHNWVRSKVGLFDVSHMLQHNISGKDAQNLLQKITPIDLSKLPVNTSSLSVLLNNNGGVIDDCIITKHGEDEYYMVTNAGCREKDVKFIKDEASQFNSVNHNTFEGTLLAIQGPKAQEILQQFTNEDLSKIYFGQTKFLKLSPIGATVHLARSGYTGEDGFELSIPSTTPEESKQALDFFYTLINEYPDVVKPIGLAARDSLRLEAGMCLYGHELTEEITPIEASLTWLIPKTRRDENNDFNGASKILSQIKDKSSFTHRRIGLTSKGPSPRDGNKIFNEDGTVEIGYVTSGSPSPTLGGNIAQAYIDKKHKIGSNVKIEIRNKLRDAVITKLPFVPSNLYKP

SEQ ID NO: 70859 - DNA, 1098 bp, Yersinia enterocolitica subsp. enterocolitica 8081
  CDS (1)..(1098): transl_table=11
atggctaagcagaccccgctgtatgaccaacacgtggcgtgcggtgcgcgcatggtagattttcatggctggatgatgccattgcattatggttcccaaatcgatgagcaccatatcgtgcgccaggatgccggtatgtttgatgtctcgcacatgactattgtcgacttacacggtgctcgtacccgtgaattcctgcgttatctattagctaatgatgttgccaaactgacccaaccgggcaaagccctttataccgcaatgctgaatgcctccggcggtgttatcgatgatttgattgtctatttcctacgcgaagactatttccgtttagtggttaactctgctacccgcgaaaaagatctgaactggatcattcagcatgctgagccgtatcaggttgatgtcactgtacgtgatgatttggcgctggtagcagtgcaaggcccaacagcacaacagaaagtcgcgaccttactaacttctgagcagcaacaagcgatcgcaggaatgaagccgttctttggtattcaggctgatgatttgtttatcgccaccaccggctataccggcgaagcaggttacgaaattgcgctacctaaagaacgggttgtcgaattttggcaacagttgttggctgctggtgtgaaacctgctggccttggtgcacgagacactttgcgtctggaagccggtatgaatctctacggtcaggagatggacgaaggcgtttcgccgctcgccgccaatatgggctggacagtggcctggttgccagaagaccgccagtttatcggccgcgaagcacttgagcagcaacgtgctaacggaactgagcaattggtaggtttgatcatgaccgaaaaaggtgtattacgtaatgagttgccggtgcatttttctgatgattcgggcaatcagcatgtgggcgtgataaccagcggttcattctctcctacactgggttttagtattgcactggcccgtgtccctgcggggataggtgaaaatgcagtagtgcaaatccgcaaccgtgaaatgccggtgcgggtcacaaaaccgggttttgtgcgggcgggtaaaccggtcgcgctgtaa

SEQ ID NO: 70860 - protein, 365 aa, Yersinia enterocolitica subsp. enterocolitica 8081
MAKQTPLYDQHVACGARMVDFHGWMMPLHYGSQIDEHHIVRQDAGMFDVSHMTIVDLHGARTREFLRYLLANDVAKLTQPGKALYTAMLNASGGVIDDLIVYFLREDYFRLVVNSATREKDLNWIIQHAEPYQVDVTVRDDLALVAVQGPTAQQKVATLLTSEQQQAIAGMKPFFGIQADDLFIATTGYTGEAGYEIALPKERVVEFWQQLLAAGVKPAGLGARDTLRLEAGMNLYGQEMDEGVSPLAANMGWTVAWLPEDRQFIGREALEQQRANGTEQLVGLIMTEKGVLRNELPVHFSDDSGNQHVGVITSGSFSPTLGFSIALARVPAGIGENAVVQIRNREMPVRVTKPGFVRAGKPVAL

SEQ ID NO: 70861 - DNA, 1125 bp, Prochlorococcus marinus str. MIT 9303
  CDS (1)..(1125): transl_table=11
atgaatctgcaacacacacccctccatgacctctgccgagatgcaggcggccggatggtgccctttgccggctgggacatgccagtgcagttctctggcctcctccaagaacatcaggcagtgcgtcagcaggtgggaatgttcgatatctctcatatgggagtgctgcgtctcgaaggaaccaaccccaaagacaccttgcaggcactagtgccaaccgacctcaatcgcatcggtccaggtgaggcttgctacacggtgctgctcaacgaaacaggaggaattctcgatgacctagtcgtttacgaccttggcaccaataagcaagacagccaaagcctgctgattgtgattaatgcagcctgcagcgaaaccgacaccatctggttaaagcaacatctgcagcccgcaggcatcgcactctcggatgccaagaacaatggcgtcttactggcactacaaggcccccaagcgaccaaggtgttggaacgcttaagtggcgaatcactagcgagccttccccgcttcggccatcgccaagtccagttttacggcctgggagcggaagatccctcttcagtcttcattgcacgaactggctacaccggcgaagacggctttgaactgctcctggaagcagaagccggccgagccctctggctccaattgcgcgccgaaggagtcatcccatgcggactcggttcccgtgacaccttgcgtctagaggcagcaatgcacctctatggacaggacatggacatcaatacaacacccttcgaggctggtctcggctggttggtacacctggaaatgcctgctccattcatgggtcgaactgctctagagcaacaagcagagcaaggccccattcgccgcttggtcggcctaaagctgtctggacgagccatagcccgtcatggatacccactgcttcacaacaacaacaaagtgggagaaatcacaagcggcacctggtcgcccagtttgggagaagcgatagccctgggctatctacccacagctctagcccgcatcggcaacgaagtggcggtagagatccgcggcaagcaccacccggcaacggtggtgaagcgccccttttatcgccgtccttcccttagctga

SEQ ID NO: 70862 - protein, 374 aa, Prochlorococcus marinus str. MIT 9303
MNLQHTPLHDLCRDAGGRMVPFAGWDMPVQFSGLLQEHQAVRQQVGMFDISHMGVLRLEGTNPKDTLQALVPTDLNRIGPGEACYTVLLNETGGILDDLVVYDLGTNKQDSQSLLIVINAACSETDTIWLKQHLQPAGIALSDAKNNGVLLALQGPQATKVLERLSGESLASLPRFGHRQVQFYGLGAEDPSSVFIARTGYTGEDGFELLLEAEAGRALWLQLRAEGVIPCGLGSRDTLRLEAAMHLYGQDMDINTTPFEAGLGWLVHLEMPAPFMGRTALEQQAEQGPIRRLVGLKLSGRAIARHGYPLLHNNNKVGEITSGTWSPSLGEAIALGYLPTALARIGNEVAVEIRGKHHPATVVKRPFYRRPSLS

SEQ ID NO: 70863 - DNA, 1095 bp, Shewanella baltica OS155
  CDS (1)..(1095): transl_table=11
atggctaacaaaactattctgtttaacaagcacttagaatcaaacgctaagatggtcgacttccacggttgggacatgcctctcaactatggttcacaaatcgaagaacacaatgcagtgcgtcaagacgcgggtatgttcgacgtttcccacatgactgtggttgatgtgattggtaacgacgcttgtgcatttctgcgtaagttgctggcaaacgatgtggctaagcttaaagttccaggtaaagccttatacggcggcatgttagacgaaaatgctggcgtcatcgacgacctcatcacttactacctcactgacactaattaccgcgtggtagtgaactcagcgacccgcgaaaaagatctcgcttggatcgccaagcaatcccaaggttttgatgtcactgtgactgagcgtcccgagctggcgatgatcgccgttcaaggtcctaacgctaaagcgaaagccgctgccgtgctcagtgccgagcaaaacgccgccatcgaaggcatgaaacctttcttcggtaagcaagccggttctctgtttattgcgactacgggttacacaggcgaagcgggctatgaaattatcgtcccagaaaacgaagcagaggccatgtggcaagcattgttagatcaaggtgttaaaccttgtggtctcggtgcccgtgacactctgcgcctcgaagccggtatgaatctttacggcttagacatggacgaaaccatcaacccattggccgccaacatgggctggaccatcgcatgggaaccgagcgaccgtgactttatcggccgtaaagccctcgaaacacttcgcgatgccggaaccgacaaacttgttggtctagtgatggaagaaaagggcgtgttacgccatgatatgccagtatttttcaccgactcagccggtgttgagcaccaaggcgtgattaccagcggtactttctcgccaacattgggctattctattgcgatggcgcgtgttcctaactcgattggggatacggcggaagtcgaaatgcgtaaaaaacgtgtggctgttagagtggtagcgccaaactttgtgcgcaacggtaaacaagcattttaa

SEQ ID NO: 70864 - protein, 364 aa, Shewanella baltica OS155
MANKTILFNKHLESNAKMVDFHGWDMPLNYGSQIEEHNAVRQDAGMFDVSHMTVVDVIGNDACAFLRKLLANDVAKLKVPGKALYGGMLDENAGVIDDLITYYLTDTNYRVVVNSATREKDLAWIAKQSQGFDVTVTERPELAMIAVQGPNAKAKAAAVLSAEQNAAIEGMKPFFGKQAGSLFIATTGYTGEAGYEIIVPENEAEAMWQALLDQGVKPCGLGARDTLRLEAGMNLYGLDMDETINPLAANMGWTIAWEPSDRDFIGRKALETLRDAGTDKLVGLVMEEKGVLRHDMPVFFTDSAGVEHQGVITSGTFSPTLGYSIAMARVPNSIGDTAEVEMRKKRVAVRVVAPNFVRNGKQAF

SEQ ID NO: 70865 - DNA, 1104 bp, Saccharopolyspora erythraea NRRL 2338
  CDS (1)..(1104): transl_table=11
atgtcgtcgccccggcagacacccctgcacgagatccacgaagcgctcggcgccaccttcaccgagttcgccggctggcggatgccgctgcgctacacgggcgacgcggccgagcacaacgcggtgcgcaccgccgcgggcctgttcgacttgacccacatgggtgaaatccgcatcagcggcccgcaggcgcccgaggccctggactacgcgctggtggccaacgcgtcggccatcaccgtcggccgtgcccgctacaccatgatctgcaactccgagggcggcgtcctcgacgacctgatcgtctaccggctgggcgagcaggagtacctggtggtggccaacgccgccaacgccgcggtggtctcggccgagctggccgagcgggtcgcccggttcgaggcgagccacgaggacgtctccgacgactacgcgctcatcgccgtgcagggcccgaaggcggtggacatcctcgcgccgctgaccagcacggacctgagcacggtcaagtactacgccggttaccgcagcgaggtcgccggcgcgcgcgtcatgctggcccgcaccggctacaccggcgaggacggcttcgagctgttcacctcccccgccgacgcccccgccgtgtggcaggcgctggccgactccggcgccgagcacgggctgcgcccggccgggctgtcctgccgcgacacgctgcggctggaggcgggcatgccgctgtacggcaacgagctctcggcggagctgacgccgttccacgccaacctcggccgggtcgtcaagctcgacaagcccggcgacttcgtgggcaaggcgccgctggccgcggccgccgagaagcccaccgagcgcaagctcgtcggcctgcgcaccgaccagcgccgcgccccccgccacggctaccgggtgctcgacgccggcggagccgagatcggcgtcgtcaccagcggcgcgccctccccgaccctgggacacccgatcgcgatggcctacgtcgaccgggaccacgccgaacccggcaccgccctgcaggtggacatccgcggcacggccgtcccggtggaggtcgtcgcactgcccttctaccgccgcaacgcctga

SEQ ID NO: 70866 - protein, 367 aa, Saccharopolyspora erythraea NRRL 2338
MSSPRQTPLHEIHEALGATFTEFAGWRMPLRYTGDAAEHNAVRTAAGLFDLTHMGEIRISGPQAPEALDYALVANASAITVGRARYTMICNSEGGVLDDLIVYRLGEQEYLVVANAANAAVVSAELAERVARFEASHEDVSDDYALIAVQGPKAVDILAPLTSTDLSTVKYYAGYRSEVAGARVMLARTGYTGEDGFELFTSPADAPAVWQALADSGAEHGLRPAGLSCRDTLRLEAGMPLYGNELSAELTPFHANLGRVVKLDKPGDFVGKAPLAAAAEKPTERKLVGLRTDQRRAPRHGYRVLDAGGAEIGVVTSGAPSPTLGHPIAMAYVDRDHAEPGTALQVDIRGTAVPVEVVALPFYRRNA

SEQ ID NO: 70867 - DNA, 1095 bp, Desulfotomaculum reducens MI-1
  CDS (1)..(1095): transl_table=11
atgcaggaactaaaacgtacacctttgtacaacatccatctggcagctggagctaagatggtggaatttggcggttggttgatgccagtacagtatgaaggaattattgccgaacatcaggctgtgcggtccgctgcggggttatttgatgtatcccacatgggtgaaatacaaatctctggcccaactgccagggagtttgttcaaaggctggtaaccaacgatatatccagattaaaaccggggtgtgcaatttattcccccatgtgtaatccccagggaggtaccgttgatgatttattagtatatcaactggaagatcaacaatacttgttggtagttaatgcctctaatacagataaggattttcattggattgtcagtcagcaggtaccaggtgtagagatacaaaatgtttcagaggtaacttgtcaattggcactacaagggccacaggcagaaaaaattttacagaggttgactgcagtggacctaagccatataaaatccttttgctttgtctatggagccgttgagggtattcactgtctgatttcccgtaccggttatactggcgaagcaggttttgaactatattttccggcgtcccatgcggaaagggtttggcaggcgattatggcaaccggagccacagatggcctaagacctgtgggccttggagccagagatactttgcgctttgaagcttgcctggcactctatggtcatgaattaaccgatgatatttctccactgatggccggattgggctggacggtaaaatttaataaaccggaatttgtagggaaagaacctttgctgaaacagaaggaagcaggaactacctatcagttagtgggactagagatgattgaccggggcattcctcgtcagggatacgctatttttaaagaaggtcaagaagtagggtggattacctctggaacctttgcaccaaccctgggaaaaaatatgggattgggttatgttgaaataccatttgcagatgtaggcaaagaattgaatattatggttcgtaacaagccattaaaggcacgcattgtgaaaaaaccattttataagcgggaggtttag

SEQ ID NO: 70868 - protein, 364 aa, Desulfotomaculum reducens MI-1
MQELKRTPLYNIHLAAGAKMVEFGGWLMPVQYEGIIAEHQAVRSAAGLFDVSHMGEIQISGPTAREFVQRLVTNDISRLKPGCAIYSPMCNPQGGTVDDLLVYQLEDQQYLLVVNASNTDKDFHWIVSQQVPGVEIQNVSEVTCQLALQGPQAEKILQRLTAVDLSHIKSFCFVYGAVEGIHCLISRTGYTGEAGFELYFPASHAERVWQAIMATGATDGLRPVGLGARDTLRFEACLALYGHELTDDISPLMAGLGWTVKFNKPEFVGKEPLLKQKEAGTTYQLVGLEMIDRGIPRQGYAIFKEGQEVGWITSGTFAPTLGKNMGLGYVEIPFADVGKELNIMVRNKPLKARIVKKPFYKREV

SEQ ID NO: 70869 - DNA, 1119 bp, Burkholderia vietnamiensis G4
  CDS (1)..(1119): transl_table=11
atgactgccctgaatcacaccccgctcaacgccgcgcaccgcgcgctcaatgcccgcatggtcgacttcggcggctgggacatgcccgtcaactacggctcgcagatcgaagagcacgaagccgtgcgcaccgacgccggcatgttcgacgtgtcgcacatgtgcgtcgtcgatttcaccggcagccgcgtgcgcgcgttcttcgagcatgcgctcgcgaacaacgtcggcaagctcaagacgcccggcaaggcgctctactcgtgcctgctcaatccgcaaggcggcgtcatcgacgatctgatcgtctattacttcaccgaagacttcttccgcgtggtggtcaacgccggcacggccgagaaagacatcgcgtggttcaaccagctcaacgaacaaggcggatacggcctgacgatcgcgccgcgccgcgatttcgcgatcgtggccgtccaaggcccgaacgcccgtgaaaaagtctgggccaccgtgcccgccgcgcgcgccgcgacgagcgagctcaagccgttcaacgccgcgcaggtcgccggcacgccgttcggcgatctcaccgtcgcgcgcaccggctacaccggcgaagacggcttcgaagtgatcgtccccgccgtgcacgtcgtcgcgctctggaacgcgctgcagcaaaacggcgtgcgcccgtgcgggctcggcgcgcgcgacacgctgcgcctcgaggccggcatgaacctgtacggccaggacatggacgaaaccgtgtccccgctcgacgccggcctcgcatggacggtcgatctctccgccccgcgcgaattcgtcggccgccccgcgctcgagcgcgacggcacgcgcgccgcgttcgtcggcctgatcctgcagaaggaaaacggcaaggcgggcggcgtgctgcgcgcgcaccagaaagtcgtcacgccgcacggcgaaggcgagatcacgagcggcacgttctcgccgtcgatgcaggagtcgatcgcgttcgcgcgcgtgccggccgccgtccagctcggcgacatcgtccatgtgcagattcgagacaagcaacttcccgcgcgcgtggtaaaactgccgttcgtgcgcaacggcaaggtcctcgctgcgtaa

SEQ ID NO: 70870 - protein, 372 aa, Burkholderia vietnamiensis G4
MTALNHTPLNAAHRALNARMVDFGGWDMPVNYGSQIEEHEAVRTDAGMFDVSHMCVVDFTGSRVRAFFEHALANNVGKLKTPGKALYSCLLNPQGGVIDDLIVYYFTEDFFRVVVNAGTAEKDIAWFNQLNEQGGYGLTIAPRRDFAIVAVQGPNAREKVWATVPAARAATSELKPFNAAQVAGTPFGDLTVARTGYTGEDGFEVIVPAVHVVALWNALQQNGVRPCGLGARDTLRLEAGMNLYGQDMDETVSPLDAGLAWTVDLSAPREFVGRPALERDGTRAAFVGLILQKENGKAGGVLRAHQKVVTPHGEGEITSGTFSPSMQESIAFARVPAAVQLGDIVHVQIRDKQLPARVVKLPFVRNGKVLAA

SEQ ID NO: 70871 - DNA, 1098 bp, Chlorobium phaeovibrioides DSM 265
  CDS (1)..(1098): transl_table=11
atgaaaaaaacttcactctcttcctggcatgaaaaggcgggtgcgaaaataattgatttcggtggttggctgatgccggtgcagtattcgggaatcatggcggagcataaagctgtgcgcagtgcggcgggcttgtttgatgtgtcgcacatgggtaatttttatgtgaagggacggcgtgcgcttgagtttcttcagtcggtgaccaccaatgatctcagccgtactgttgacggacaggcgcagtataccatcatgctgtatgagaacggaggtattgttgatgacctcatcatatacaggatagattccgtgaccttttttctgattgtcaatgcgggtaactgtgacaaggattttgcatggcttgaggagcatgcgggtgcttttgagggggtgcagctgtcaaatcattcggaccagctgtcgctgatagcgcttcagggtccgaaggctttcagtatcctgtcccgggtgattcccgagattgatgctgacagactcccttcattccattttcgtcaactgcctttcatgggtgctgagctgatggttgcccggacgggatataccggcgaagccggtgttgagatatgcctgccaaacgctctggcgcagcctctctgggaggcactgcttgatgcgggccgtgaggatggcctggtgcctgtgggtcttggtgcgcgcgatacgcttcgtcttgaaatggggtactctctctatggacatgaaattgatcaggataccaatccgcttgaagcccggctgaagtgggttgtgagcatggagaaggggcctttcatcgggcgtgaggcatgcaggcaggttgagctggatccccgcttcggtgttgccgggttctctcttgaggggagggctcttgcgcgccagggctgcagggtgttcaatgccgaccgtcaggagatcgggaaggtgtgcagcggcacaatttctccgacccttcaggagccgataggtactgccagccttgtcagggaatatctcaaaccgggaactccggtgtttgttgaaattcgcgggtcactgcagccggggcagatcaggcggctgccgtttgtcaaaccagcgctcctttga

SEQ ID NO: 70872 - protein, 365 aa, Chlorobium phaeovibrioides DSM 265
MKKTSLSSWHEKAGAKIIDFGGWLMPVQYSGIMAEHKAVRSAAGLFDVSHMGNFYVKGRRALEFLQSVTTNDLSRTVDGQAQYTIMLYENGGIVDDLIIYRIDSVTFFLIVNAGNCDKDFAWLEEHAGAFEGVQLSNHSDQLSLIALQGPKAFSILSRVIPEIDADRLPSFHFRQLPFMGAELMVARTGYTGEAGVEICLPNALAQPLWEALLDAGREDGLVPVGLGARDTLRLEMGYSLYGHEIDQDTNPLEARLKWVVSMEKGPFIGREACRQVELDPRFGVAGFSLEGRALARQGCRVFNADRQEIGKVCSGTISPTLQEPIGTASLVREYLKPGTPVFVEIRGSLQPGQIRRLPFVKPALL

SEQ ID NO: 70873 - DNA, 1098 bp, Aeromonas salmonicida subsp. salmonicida A449
  CDS (1)..(1098): transl_table=11
atgatccagactacagtactgcatcccaagcacctggaagccggcgccaaaatggtggacttccacggttgggaaatgcccatcaactacggctcccagctggaagagcaccacgcggtgcgcaccgatgccggcatgttcgacgtctcccacatgaccatagtcgacttgaccggcgaacgggtcaaagccttcctgcaacacctgctggccaacgacgtagccaaactcacagtcccgggcaaggccctctacagcggcatgctcaaccccgatggcggcgtcatcgatgacctcattacctattatctgaccgataccttctaccgtctggtggtcaactccgccactcgcgagaaggatctggcctggatccgccaccacgccatcgattttgccgtgagcgtgaccgaacgccccgagctcgccatgatcgcggtacagggccccaacgccaaggccaaggcggccaaggtattcacccctgagcagaacgcggcagtggaaggcatgaagcccttcttcggcgtgcaggcaggggatctctttatcgccaccaccggttacacaggtgaagacggttatgaaatcgtggtgccgcaagagaaggcgtgtgacctgtggcaggcgctgctggataacggcgtggccccgtgcggactgggcgcgcgggataccctgcgtctcgaagccggcatgaacctctacagccaggatatggacgaaagcatcagcccgctcgccgccaacatggcctggaccctggccttcgaaccggcctcccgccagtttatcggtcgcgccgcgctggaagcacaaaaagcggcgggtacccagctcaagcaggtcggtctggtgatggaagagaagggagtactgcgtgccggcatgccagtcaccttcaccaccgccagcggtgaaaaacgggaaggtgtgatcacctccggctctttctcgccgaccctgggttacagtattgccctggcgcgggtgccccgagatatcggcgagcaggccgaggtggagatccgcaagaagctagtcaccgtcaaggtcaccaagcccgctttcgtgcgcaacggccagaaactggtgtaa

SEQ ID NO: 70874 - protein, 365 aa, Aeromonas salmonicida subsp. salmonicida A449
MIQTTVLHPKHLEAGAKMVDFHGWEMPINYGSQLEEHHAVRTDAGMFDVSHMTIVDLTGERVKAFLQHLLANDVAKLTVPGKALYSGMLNPDGGVIDDLITYYLTDTFYRLVVNSATREKDLAWIRHHAIDFAVSVTERPELAMIAVQGPNAKAKAAKVFTPEQNAAVEGMKPFFGVQAGDLFIATTGYTGEDGYEIVVPQEKACDLWQALLDNGVAPCGLGARDTLRLEAGMNLYSQDMDESISPLAANMAWTLAFEPASRQFIGRAALEAQKAAGTQLKQVGLVMEEKGVLRAGMPVTFTTASGEKREGVITSGSFSPTLGYSIALARVPRDIGEQAEVEIRKKLVTVKVTKPAFVRNGQKLV

SEQ ID NO: 70875 - DNA, 1164 bp, Salinispora tropica CNB-440
  CDS (1)..(1164): transl_table=11
atgctaaccagccggggtggtgccggtaagttgccacccatgaccgacgtgacctccggctccgccgacacccggctgcgccgctctccgctgcacgaccggcacgtcgctgccggcgccaagttcgccctcttcggcgggtgggagatgccgctcgaatacgcccggggcggggtgcgcaaggagcatacggcggtccgcggcgcggtcggcgtcttcgacgtgtcgcacctgggcaaggtgcgggtcaccggcatgggggcggcggacttcgtcaacgcctgcctcagcaacgacctggcccggatcgaaccgggccgcgcgcagtacaccctctgctgcgacgacgccgccggtggggtggtggacgacatcatcgcctacctgtacgcctatgaccacgtcttcctgatccccaacgccgcgaacaccgccgaagtggtgcgtcggctgcaggccgccgcgccgtcgccgatcacgatcaccgacgagcacgaggcgtacgcggtcctcgcggtgcagggcccgcgctcggccgatctgctcggcgcgctgggcctgcccactgagcacgactacatgagcttcgcggagggcacgctggccggggccgacctgaccgtgtgccgcaccggctacaccggcgagctgggctatgaactgatcctgcccgccgcggacgccggaggagtctgggacgcgctcttcgccgcagatgagcagcttcaggcgtgcggcctggccgcccgggacaccctgcgcaccgagatgggctacccgctgcacgggcaggacctgtcgcgggaaatcaccccggtgcaggctcgctcaggctgggcggttggctgggacaagcccgccttctgggggcgcgcggcgctggtcgcggagaagtccgccggcccccggcgccggttgcggggcctggtggcggtcgaccgggccatcccgcgccccggcatggtcgtctaccacggtgagacgccggtcggcacggtcaccagcggcaccttcagcccgacccggaagcagggcatcgccctggccctgatcgacaccgagccggccctggccgagggggtcgatctcgaggtcgacatccggggacgccgggcaacggtgcgcctggtccgtccgccgttcgtcgacccctcggttcggtag

SEQ ID NO: 70876 - protein, 387 aa, Salinispora tropica CNB-440
MLTSRGGAGKLPPMTDVTSGSADTRLRRSPLHDRHVAAGAKFALFGGWEMPLEYARGGVRKEHTAVRGAVGVFDVSHLGKVRVTGMGAADFVNACLSNDLARIEPGRAQYTLCCDDAAGGVVDDIIAYLYAYDHVFLIPNAANTAEVVRRLQAAAPSPITITDEHEAYAVLAVQGPRSADLLGALGLPTEHDYMSFAEGTLAGADLTVCRTGYTGELGYELILPAADAGGVWDALFAADEQLQACGLAARDTLRTEMGYPLHGQDLSREITPVQARSGWAVGWDKPAFWGRAALVAEKSAGPRRRLRGLVAVDRAIPRPGMVVYHGETPVGTVTSGTFSPTRKQGIALALIDTEPALAEGVDLEVDIRGRRATVRLVRPPFVDPSVR

SEQ ID NO: 70877 - DNA, 1098 bp, Pseudomonas mendocina ymp
  CDS (1)..(1098): transl_table=11
atgggacagcgtacccccctttatgacctgcacctggcactgggggccaaaatggtggatttcggcggctgggacatgccgctgcactacggatcgcaggtggaggaacaccatcaggtgcgtcgcgagtgcggcgtgttcgacgtctcccacatgtgcgtggtggacgtgaccggcagccaggcccaggcctttctgcagcgcctgctggccaacgacgtggcgcgcctggacagcgccggcaaggccctgtacagcgccatgctcaacgagcagggcggggtgatcgatgacctgatcgtctacctcaccggctcttctgcccaggagcagagttaccgtctggtggtcaatgccggtacccgcgacaaggacctggcgtggatgcatgcccaggccggcgacttcgacgtgcaactgcgcgagcgccgcgacctggccatgctcgccatccagggacccaaggcccgcgcgcgcgtggccgaactgctgacccaggcacgcgctgcgctgatccacgagctgcggccgttccaggggctggccgaaggcgactggttcatcgcgcgcaccggctacaccggtgaggatggtctggaaatcgtgctgccggtggccgaggtggtgccgctgctcaacgagctggtcggcgccggtatcgcgcccatcggcctcggtgcgcgcgacaccctgcgcctggaggccggcatgaacctctacggccaggacatggacgaaagcgtttcgccgctggcggccaacatggcctggaccatcgcctgggagccggccgcgcgcgccttcatcggccgtgccgcactcgaggcgcagcgcgcggcgggttgcccgagcaagctggtcggcctggtgctggaagagcgcggcgtgctgcgcgcgcatcaggtggtgcgtgtcgagggcatcggcgaaggtgaaatcaccagcggcagcttctcgccgacgctgaacaaatccattgccctggctcgcgtgccgacggccaccggcgagcgcgccgaggtggagattcgcggcaagtggtacccggtgcgagtggtcaggccgagcttcgtgcgcaacggcaaaacccttatctga

SEQ ID NO: 70878 - protein, 365 aa, Pseudomonas mendocina ymp
MGQRTPLYDLHLALGAKMVDFGGWDMPLHYGSQVEEHHQVRRECGVFDVSHMCVVDVTGSQAQAFLQRLLANDVARLDSAGKALYSAMLNEQGGVIDDLIVYLTGSSAQEQSYRLVVNAGTRDKDLAWMHAQAGDFDVQLRERRDLAMLAIQGPKARARVAELLTQARAALIHELRPFQGLAEGDWFIARTGYTGEDGLEIVLPVAEVVPLLNELVGAGIAPIGLGARDTLRLEAGMNLYGQDMDESVSPLAANMAWTIAWEPAARAFIGRAALEAQRAAGCPSKLVGLVLEERGVLRAHQVVRVEGIGEGEITSGSFSPTLNKSIALARVPTATGERAEVEIRGKWYPVRVVRPSFVRNGKTLI

SEQ ID NO: 70879 - DNA, 1110 bp, Flavobacterium johnsoniae UW101
  CDS (1)..(1110): transl_table=11
atggaaaatcaaagcgtaaatatcaaaaaaacagcccttaatgcaattcatcatgaccttggcgggaaaatgaccccatttgccggttatgaaatgccggttcaatatgcaggtgtaaatcatgaacatgaaaccgttagaaatgctgtaggtgtttttgatgtttcccacatgggggagattcttatacagggaaaagatgccctggcactcattcagaaaataagttcaaacgatgcctcaaagctttttcctggaaaaatacaatacagctgtatgccaaataaaactggcggtattgtagatgatctgctgatatatatgatgagtgaaaaggattatttactggtggtaaatgcttcaaatatccaaaaagactgggactggataagtactatagcccttgattatttagatcttaccataacaaacctttccgatataatttccctactggctgttcaaggccctttggccgcaaaatccctgcaaaaattgaccagtatcaatttgaatgagatgaaatattatacgtttgaaataggcgaatttgcaggtattccaaatgctatagtatctgccaccggatataccggggcaggcggatttgaaatatatgtacagaataagtatgcagaactattatgggatgccattttcgaggcaggaaaagagtataacattgagcctattggactcgctgccagggatacactgcgattggaaatgggatactgtttgtatggcaatgatatcaatgatacgacttcgccattagaagccggactggaatggattactaaattcactaaagaatttattcaaagtgattctctcaaaattcaaaaagaaaatggagtaacaaggaaattagtaggatttgaaatgactggcaaaggcattccccgtcatgcttacgaaatttgggatgaaaaccagcaaattataggcaccgttacctcgggtaccatgtcgcctactttaaaaaaggctgtaggaatggggtatgttactgctgaaaaatcaaatattggcagtgagatttttatcaatatcagaaacaaaccagttaaggcaattattgttcagactccttttgttcaaatctaa

SEQ ID NO: 70880 - protein, 369 aa, Flavobacterium johnsoniae UW101
MENQSVNIKKTALNAIHHDLGGKMTPFAGYEMPVQYAGVNHEHETVRNAVGVFDVSHMGEILIQGKDALALIQKISSNDASKLFPGKIQYSCMPNKTGGIVDDLLIYMMSEKDYLLVVNASNIQKDWDWISTIALDYLDLTITNLSDIISLLAVQGPLAAKSLQKLTSINLNEMKYYTFEIGEFAGIPNAIVSATGYTGAGGFEIYVQNKYAELLWDAIFEAGKEYNIEPIGLAARDTLRLEMGYCLYGNDINDTTSPLEAGLEWITKFTKEFIQSDSLKIQKENGVTRKLVGFEMTGKGIPRHAYEIWDENQQIIGTVTSGTMSPTLKKAVGMGYVTAEKSNIGSEIFINIRNKPVKAIIVQTPFVQI

SEQ ID NO: 70881 - DNA, 1110 bp, Synechococcus sp. WH 7803
  CDS (1)..(1110): transl_table=11
atggatctgcatcgcacaccgctccatgacctctgcgtgaccactggcgggcgcatggtgcccttcgccggctgggagatgcccgtgcaattttcgggactggtcgctgagcacacagccgtgcggcagagggtgggactcttcgacatctcccacatgggcgtgctgcgcattgagggcagcaaccccaaggacgccctccaaaccctcgtaccgacagacctgcaccgcatcggcccggggcaggcctgttattccgtgctgctcaacgagtccggagggatccgcgacgacctgatcgtttacgacctggggcaaacgaacagcgaccagggagaagccagtttgatcgtggtgatcaatgccgcttgcgcggcagccgataccgcctggatcagcgaacagctcacgcctcagggcctaaaggtcaccgatgagaagggcgatggcattttgctggccctccaaggccctgaagccttggcacggatggagcagctgagcggtgtcgacctgcacgcgctgccccgcttcgcccatcgcatgctggatctcacagggttgtcccgtcctgtgttctgtgcacgaaccggatacaccggggaggacggcgtggagctgctgctcgcacgtgaggacggacgcaacctctggaaccgactggtggctgacggggtgaccccctgcggcctcggtgcacgggacacccttcgcctcgaggccgccatgcatctctacggccaagacatggacgctgacaccacgccatttgaggccggcctgggctggctcgtgcacctggaaatgccatcaacctttaccggccgtgcggcactcgagcgcgctgcagacagcggtccatcccggcgactggtcggtctgaagctgaaaggacgggccattgctcgccatggttatccggtgatccataacggtgaacaggcgggggcgatcaccagcggcagctggtcgcccaccctccaggaagcgattgccctcgcctatgtacccaccgccctcgccaaggtggggcaagagctcggcgttgagatccgcgggcaggttcaggccgccacggtcgtgaggcgcccgttttaccgccatccctga

SEQ ID NO: 70882 - protein, 369 aa, Synechococcus sp. WH 7803
MDLHRTPLHDLCVTTGGRMVPFAGWEMPVQFSGLVAEHTAVRQRVGLFDISHMGVLRIEGSNPKDALQTLVPTDLHRIGPGQACYSVLLNESGGIRDDLIVYDLGQTNSDQGEASLIVVINAACAAADTAWISEQLTPQGLKVTDEKGDGILLALQGPEALARMEQLSGVDLHALPRFAHRMLDLTGLSRPVFCARTGYTGEDGVELLLAREDGRNLWNRLVADGVTPCGLGARDTLRLEAAMHLYGQDMDADTTPFEAGLGWLVHLEMPSTFTGRAALERAADSGPSRRLVGLKLKGRAIARHGYPVIHNGEQAGAITSGSWSPTLQEAIALAYVPTALAKVGQELGVEIRGQVQAATVVRRPFYRHP

SEQ ID NO: 70883 - DNA, 1101 bp, Acidiphilium cryptum JF-5
  CDS (1)..(1101): transl_table=11
ttggccgaatcagcattgctcaccgtgccgctcgacgcgctgcatcgcagcctgggcgcgcgtatggtcgatttcgccggctacgatatgccggtgcagtatgaaggcatcatcgccgagcatctgcactgccgggcccaagccgcgctgtttgacgtctcgcatatgggccaggcggtgcttgaaggccccgacgcggccgccgcgctagaacgcgtggtgaccggcgacatccgggggctgaagccaggccgccagcgctacacgctgctaatgaacgcgcaaggcgggattgtggacgatctcatggtcgccaatctgggcgaccgcctgctcctcgtgctcaatgccgggcgcaaaaatgttgacgttgctcacattcgcgcccacctgcccgcgaccgtttcgctgaccccgcaattcgaccgcgcgctgctcgccctgcaggggcccgaggccggcgcggtgatggccacgctggcaccagaggtggccgcgatgcgcttcatggaagcgcgcgagatggcattgtccggcatttccgtcacgatcacccgctcgggctataccggcgaggacgggttcgagatcggccttcccgcggcggaggccgagggtctggcgcgcgccctgctggccgatgcgcgggtgaagccggccggcctcggtgcgcgggattcgctcaggctcgaggccggtctgccgctctatggcaacgatatcgacgagacgcgcgacccgattgccgccgggctcggcttcgcgatcggcaagacacgcaagatgggctgggatttcctcggcggcgacgccgtgcgggcggtgcacgatgccggcccgcgcgagcgcctggtcgggctgcgcgccgaaggtcgggctcctgtgcgcgccggcgccgagcttcgcgatgccgccgggcaaccggccgggcgcgtcacctccggcaccttcgggccgagcgtcaacgggccggtggcgctcggctatgtccgcgccgattgcgccggggacggctcgaccctgatcgccgggctgcgcggccgcgatatcggcatcaccgtcgtgccgctgcctttcgttccgcatcgttatcatcgctga

SEQ ID NO: 70884 - protein, 366 aa, Acidiphilium cryptum JF-5
MAESALLTVPLDALHRSLGARMVDFAGYDMPVQYEGIIAEHLHCRAQAALFDVSHMGQAVLEGPDAAAALERVVTGDIRGLKPGRQRYTLLMNAQGGIVDDLMVANLGDRLLLVLNAGRKNVDVAHIRAHLPATVSLTPQFDRALLALQGPEAGAVMATLAPEVAAMRFMEAREMALSGISVTITRSGYTGEDGFEIGLPAAEAEGLARALLADARVKPAGLGARDSLRLEAGLPLYGNDIDETRDPIAAGLGFAIGKTRKMGWDFLGGDAVRAVHDAGPRERLVGLRAEGRAPVRAGAELRDAAGQPAGRVTSGTFGPSVNGPVALGYVRADCAGDGSTLIAGLRGRDIGITVVPLPFVPHRYHR

SEQ ID NO: 70885 - DNA, 1086 bp, Bacteroides vulgatus ATCC 8482
  CDS (1)..(1086): transl_table=11
atgaaaacaactccgtttaccgaaacacacattgccttgggggcgaaaatgcacgaatttgcaggttataatatgcctattgaatattcgggaattattgatgaacatcttactgtatgtaatgccgtaggtgtttttgatgtatcccatatgggtgaattttgggtaaaaggtcctaatgcgttggagtttttgcagcaagtgacttcaaacaatgtggcaactttgcccgtcggtaaagcgcaatatacttgtttccctaatgaggagggaggtattgttgatgacctgttggtgtatcactatgaatccgaaaaatacttgttggtggtaaatgcggccaatattgagaaagactggaactggtgtgtcagccataacacagtgggtgcggaattggaaaatgcatccgaccgtatggcacagcttgctattcagggaccgaaggctatggaagttttgcaaaaactgactccggtcaacttgtctgaaattccttattatgcttttaccacaggtgagttcgccggtcagaaagatgtgattatttcgaataccggttataccggtgcaggtggtttcgagctttatttttatcccgaagccggtcaggctatctggaaagcaatttttgaagcaggtgctcctgaagggattaaacctatcgggctaggggctcgtgatacattacgtttggaaatgggcttttgcctgtatggtaatgatttgagtgataccacttctccgttggaagcaggattgggctggattaccaaatttgttgaaggaaagaatttcacttcacgtgctttacttgaaaagcagaaagccgaaggattgaaacgcaagctgattgcttttgaaatggtagaccgtggtattccccgtcatggttatgaactggtaaatgctgatggagagaaaataggtgaagtaactagtggaaccatgtctccaatgcgtaagattggtatcggtatgggatatgttcagaccgcttacacagcattaggtactgaaatatttattgatgtgcgcggacgcaagctgaaagctgtagtagtaaaggccccgttcagaaaataa

SEQ ID NO: 70886 - protein, 361 aa, Bacteroides vulgatus ATCC 8482
MKTTPFTETHIALGAKMHEFAGYNMPIEYSGIIDEHLTVCNAVGVFDVSHMGEFWVKGPNALEFLQQVTSNNVATLPVGKAQYTCFPNEEGGIVDDLLVYHYESEKYLLVVNAANIEKDWNWCVSHNTVGAELENASDRMAQLAIQGPKAMEVLQKLTPVNLSEIPYYAFTTGEFAGQKDVIISNTGYTGAGGFELYFYPEAGQAIWKAIFEAGAPEGIKPIGLGARDTLRLEMGFCLYGNDLSDTTSPLEAGLGWITKFVEGKNFTSRALLEKQKAEGLKRKLIAFEMVDRGIPRHGYELVNADGEKIGEVTSGTMSPMRKIGIGMGYVQTAYTALGTEIFIDVRGRKLKAVVVKAPFRK

SEQ ID NO: 70887 - DNA, 1110 bp, Alkaliphilus metalliredigens QYMF
  CDS (1)..(1110): transl_table=11
ttggaaaattcaaaaaagacacctttattcacggtttatgaaaaacataaaggcaagttgattgattttggtggatgggccatgcccgtacaatttgaaggcatcattcctgagcacgaggctgtgaggtcaaatgcaggactttttgatgtatcccacatgggagaagttgaaataaagggtaaggatgcgctgaattttgtccagtatttaatcaccaacgatgcttctcaaatggaaaaaaatcaaatcatctacagttttatgtgttatgaaaatggtggagtggttgacgatttattggtatacaaatttgaggaagattacttttatcttgtgatcaatgcaggtaacatagaaaaagactatgagtggatgctaaaacaaagtactgcctatgacgtagaggtcaacaatatatccaatgatgtgtcggaattggcgcttcagggacccaaggcagaaaaaatattacaaaaattaacagagacagatctatcacaacttcagtttttttatcttcaaagagatgtgaccatagacggtgtgaactgtttgatatctagaactggatatactggagaagatggatttgagatttatgtgaatccaagtgacgctgtacaattatgggaaaaactccttgaagtaggtcaagaggatggcttgaagcctattggattaggcgctcgagatacattgagatttgaagcagcattgcccctttatggacatgaaatcaatcgggatattacacctttagaagcgggatttggatttgctgtcaagctgaaaaaagaggtggattttcttggtaagaaagctttgattgaacaaaaagaagcaggtttaacaagaaaacttgtaggctttgaaatgaaggatagaggtattcctagaagtgattatgaagtgtatcaccagggtgaaaaaataggttttgtgacaacgggttatttttcaccaacattaaagagaaatattggtttagcactaattgatgcaaagtatgcagaattaggcaatgaagtggatatattaatccgtaagaagcaagtaaaagctgaattgatttcaaagacattttataagaaaaactacaaaaaatag

SEQ ID NO: 70888 - protein, 369 aa, Alkaliphilus metalliredigens QYMF
MENSKKTPLFTVYEKHKGKLIDFGGWAMPVQFEGIIPEHEAVRSNAGLFDVSHMGEVEIKGKDALNFVQYLITNDASQMEKNQIIYSFMCYENGGVVDDLLVYKFEEDYFYLVINAGNIEKDYEWMLKQSTAYDVEVNNISNDVSELALQGPKAEKILQKLTETDLSQLQFFYLQRDVTIDGVNCLISRTGYTGEDGFEIYVNPSDAVQLWEKLLEVGQEDGLKPIGLGARDTLRFEAALPLYGHEINRDITPLEAGFGFAVKLKKEVDFLGKKALIEQKEAGLTRKLVGFEMKDRGIPRSDYEVYHQGEKIGFVTTGYFSPTLKRNIGLALIDAKYAELGNEVDILIRKKQVKAELISKTFYKKNYKK

SEQ ID NO: 70889 - DNA, 1095 bp, Klebsiella pneumoniae subsp. pneumoniae MGH 78578
  CDS (1)..(1095): transl_table=11
atggctcaacagactccgttgtatgaacaacacacgctgtgcggcgcgcgcatggtggatttccatggctggatgatgccgctgcattacgggtcccagattgatgagcaccatgcggtgcgcggcgatgcagggatgttcgatgtgtcgcatatgaccatcgtcgatttccacggcagccggatccgcgagttcttgcgctatttgctggccaacgatgtggcgaagctcaccaccccgggcaaagcgctctacaccggaatgctgaccgcctccgccggcgtcatcgacgacctgattgtctatttcctttctgaagattatttccgcctcgttgttaactccgccacccgcgaaaaagacctcgcctggatctccgaacaagctgaaccttacggccttgaaattaccgttcgcgacgatctgtcgctgatcgcggtccagggcccccaggcgaaagcgaaggcggcgacgctgtttaccgacgctcaacgtcaggccgtggaaggcatgaagccgttcttcggcgtgcaggccggcgacctgtttatcgccaccaccggctataccggcgaagcgggttatgaaattgtgatgccgaacgagcaggcggctgatttctggcgcggtctgctggacgctggcgttaagccgtgcggtcttggcgcgcgcgacaccctgcgcctggaggccgggatgaacctgtacggccaggagatggacgaaggtgtttccccgctggcggcgaacatgggctggactatcgcctgggagcccgccgatcgtaacttcatcggccgcgaagcgctggagatgcagcgcgaaaaaggcaccgagcagctggttggcctggtgatgaccgagaaaggcgtcctgcgcggtggtctgccggtccgttttaccgatagcgacggtaatcaaaaagaaggcattatcaccagcggcaccttctcgccgacgctgggctacagcatcgcgctggctcgcgtgccggccgggattggcgacaccgcggtggtgcaaatccgtaaccgtgaaatgccggtaaaagtgactaaacctggttttgtacgcaatggcaaagccattgtgtga

SEQ ID NO: 70890 - protein, 364 aa, Klebsiella pneumoniae subsp. pneumoniae MGH 78578
MAQQTPLYEQHTLCGARMVDFHGWMMPLHYGSQIDEHHAVRGDAGMFDVSHMTIVDFHGSRIREFLRYLLANDVAKLTTPGKALYTGMLTASAGVIDDLIVYFLSEDYFRLVVNSATREKDLAWISEQAEPYGLEITVRDDLSLIAVQGPQAKAKAATLFTDAQRQAVEGMKPFFGVQAGDLFIATTGYTGEAGYEIVMPNEQAADFWRGLLDAGVKPCGLGARDTLRLEAGMNLYGQEMDEGVSPLAANMGWTIAWEPADRNFIGREALEMQREKGTEQLVGLVMTEKGVLRGGLPVRFTDSDGNQKEGIITSGTFSPTLGYSIALARVPAGIGDTAVVQIRNREMPVKVTKPGFVRNGKAIV

SEQ ID NO: 70891 - DNA, 1101 bp, Bacillus amyloliquefaciens FZB42
  CDS (1)..(1101): transl_table=11
atgctgaaacgaacaccgctttatgacgtgtataaagaatacggcggaaaaacgattgattttggaggatgggagctgccggttcaattttcttctattaaagaggagcatgaagccgtccgtacaaaagcgggcctgtttgatgtgtcccatatgggggaagtcgaagtatccggtaaagacgccctgtcttttctgcaaaaaatgatgacaaatgacgttgccgatttaaagccgggaaacgcgctttataccgccatgtgttatcctgacggcggtacggtcgatgacttgctgatctatcagaaaagcgagagctgctatctgctcgtgattaacgcgtctaatattgaaaaagacatcgcttggctgacggaacatacggaaggcgacgtcacgctgacgaatcagtctgacgggatttcactgcttgccgttcaggggccgaatgctcagtcggttcttgcgaagctgactgaatgtgatttgtcctccttaaagccgtttacatttattgataaggcggacgttgccggacgccaagtcctgctttcaagaacaggctataccggtgaagacggatttgagttatattgccgcaatgaagatgcggttcatctatttaaggagatacttgcagcgggagagcatgaaggcctcgttccgtgcggtctcggcgcccgtgatacgctgagatttgaagcgaagcttgctttatacggtcaggaattgacgaaagatattacaccgattgaagccggaatcggatttgccgtgaaacacaagaaagattccgattttttcgggaaatcagtattgcgcgaacagaaagaaaaaggagccccgcgaaagctggtcggacttgagatgattgaaaaagggattccgagacacggatacgccgtgaaaaaagacggtgttccgatcggtgaagtcacgacaggcacgcaatctccgactttaaagaaaaatatcggccttgccttaatcaaaacggaattcagtgaagtcggaacggaagtagaagtggaaatccgtaaaaaaacggtaaaagcgaagattgtccgcacaccgttttataaacgtccaaaacagagctga

SEQ ID NO: 70892 - protein, 366 aa, Bacillus amyloliquefaciens FZB42
MLKRTPLYDVYKEYGGKTIDFGGWELPVQFSSIKEEHEAVRTKAGLFDVSHMGEVEVSGKDALSFLQKMMTNDVADLKPGNALYTAMCYPDGGTVDDLLIYQKSESCYLLVINASNIEKDIAWLTEHTEGDVTLTNQSDGISLLAVQGPNAQSVLAKLTECDLSSLKPFTFIDKADVAGRQVLLSRTGYTGEDGFELYCRNEDAVHLFKEILAAGEHEGLVPCGLGARDTLRFEAKLALYGQELTKDITPIEAGIGFAVKHKKDSDFFGKSVLREQKEKGAPRKLVGLEMIEKGIPRHGYAVKKDGVPIGEVTTGTQSPTLKKNIGLALIKTEFSEVGTEVEVEIRKKTVKAKIVRTPFYKRPKQS

SEQ ID NO: 70893 - DNA, 1113 bp, Roseiflexus castenholzii DSM 13941
  CDS (1)..(1113): transl_table=11
atgagtaatgacggcgggttgcgccgcacaccgttgtacgagcgccacgtggcgctcggtgcgcggatggtggagttcggcggttgggagatgccggtgcagtacagcgggatcatcgatgaacatcgcgcggttcgtgaagccgtcggtttgttcgatatcagtcacatgggcgaggtcgaggtgcgtggaccggacgcgctgccatttctccagcatttggtgacgtatgatgtcgctgcgattcagccaggggaggcgaactatgcgctgatgtgccttcccaatggcgggatcatcgatgatacgtttatctacaatcttggtgattattatctgatcgtcgttaatgccgccaacacggccaaagatgtcgcctggatgcacgaatgcgcgaaggggtttcaggtcatggtcgccgatgcgtcggaccgcaccggcatgctggcgcttcagggtccggcagcggaggggcttttggcgcaagttgcaggggcagaccttgcagcattgccgttccacggcgtcaggcgcgggactgtgtcgggcatcccggcaatcgtggcgcgcaccggctacaccggcgaggacgggtttgaactctttgttgccgccgacgatgtcgggcgcttgtgggatgctctgctcaacgccggacgcaacgcggggttgaaaccgtgcggcttgggggcgcgcgacagtctgcgcttcgaggcgtgtctggcgctctatggtcacgagattaccgaagagaccaatccatatgaggcgcggctcggatgggtggtcaaactcgacaagggcgatttcatcggacgagacgccttgcagcgcatcaaacaggaaggcgtgcggcgacgtctcaccggctttgaaatggtgggacgcggtattgcgcgcagtgagtatgaaatccgcgacctggaaggaatgccggtcggtcgcgtaacgagcggtatgccatcaccgacgctggagaaaaacctgggcatggggtatgtgcctgtcaccctgtcggcagaagggagtgagtttgatgtcgtggtgcgcgaccgaccggtgcgcgcgcgggttgtgaaaatgccgttctaccgtccacgctacaagaagtga

SEQ ID NO: 70894 - protein, 370 aa, Roseiflexus castenholzii DSM 13941
MSNDGGLRRTPLYERHVALGARMVEFGGWEMPVQYSGIIDEHRAVREAVGLFDISHMGEVEVRGPDALPFLQHLVTYDVAAIQPGEANYALMCLPNGGIIDDTFIYNLGDYYLIVVNAANTAKDVAWMHECAKGFQVMVADASDRTGMLALQGPAAEGLLAQVAGADLAALPFHGVRRGTVSGIPAIVARTGYTGEDGFELFVAADDVGRLWDALLNAGRNAGLKPCGLGARDSLRFEACLALYGHEITEETNPYEARLGWVVKLDKGDFIGRDALQRIKQEGVRRRLTGFEMVGRGIARSEYEIRDLEGMPVGRVTSGMPSPTLEKNLGMGYVPVTLSAEGSEFDVVVRDRPVRARVVKMPFYRPRYKK

SEQ ID NO: 70895 - DNA, 1098 bp, Cronobacter sakazakii ATCC BAA-894
  CDS (1)..(1098): transl_table=11
atggctcaacaaaccccgttgtatgaacagcacaacctctgcggcgcgcgcatggtggatttccacggctggatgatgccgctgcattacggctcgcagattgatgagcaccatgcggtgcgtaacgacgcggggatgtttgatgtctcccatatgaccattgtcgacctgcgcggcgcgcgtacccgcgaattcctccgctacctgctggcaaacgatgtggcaaaactcacccagccgggcaaagcgctctacaccgccatgcttaacgcctccggcggcgtgattgacgacctgattgtctacttcatgaccgaagactatttccgcctggtcgtgaactccgccacccgtgaaaaagacctcgcctggattaacgagcacgccgagccgtatggcgtgtccgtcacagtgcgcgacgatctctcccttatcgccgtccaggggccgaacgcgaaagcgaaagccgccacgctctttaccgacgcgcagcgtaaagccacagaaggcatgaagccgtttttcggcgtgcaggcggatgacctgtttatcgccaccaccggctacaccggcgaggcgggctatgaaatcgcgatgccgaatgaaaaagcggccggcttctggagccagcttgtggaagcgggcgtcaaaccgtgcggccttggcgcgcgcgatacgctacgccttgaggcgggcatgaatctttacggccaggagatggacgaaggcgtttcgccgctcgccgccaatatgggctggacgatcgcctggcagccggaagaccgcgcgtttattggtcgcgacgcgctggaagcccagcgtgagaacggcacggaacagctggttggtctggtgatgacagaaaaaggcgtgctgcgcggcgagctgccggtgcgttttaccgatgatcagggcaacgcccgcgaaggcatcattaccagcggcaccttctcgccaacgcttggctacagcattgcgctggctcgcgttcctgcgggtatcggcgatactgccattgtgcagatccgcaaccgcgaaatgcccgtgaaagtcactaaacccattttcgtgcgcgccggtaagccggtcacgcagtaa

SEQ ID NO: 70896 - protein, 365 aa, Cronobacter sakazakii ATCC BAA-894
MAQQTPLYEQHNLCGARMVDFHGWMMPLHYGSQIDEHHAVRNDAGMFDVSHMTIVDLRGARTREFLRYLLANDVAKLTQPGKALYTAMLNASGGVIDDLIVYFMTEDYFRLVVNSATREKDLAWINEHAEPYGVSVTVRDDLSLIAVQGPNAKAKAATLFTDAQRKATEGMKPFFGVQADDLFIATTGYTGEAGYEIAMPNEKAAGFWSQLVEAGVKPCGLGARDTLRLEAGMNLYGQEMDEGVSPLAANMGWTIAWQPEDRAFIGRDALEAQRENGTEQLVGLVMTEKGVLRGELPVRFTDDQGNAREGIITSGTFSPTLGYSIALARVPAGIGDTAIVQIRNREMPVKVTKPIFVRAGKPVTQ

SEQ ID NO: 70897 - DNA, 1095 bp, Citrobacter koseri ATCC BAA-895
  CDS (1)..(1095): transl_table=11
atggctcaacagactcctttatacgaacaacacacgctttgtggcgcgcgcatggtggatttccatggctggatgatgccgctgcactatggttctcaacttgatgagcaccatgcagttcgcactgatgccggtatgtttgatgtgtcgcatatgaccatcgtcgatctacgcggcagccgcacccgggagtttttgcgttatctgctggcgaatgacgtggcgaaactcacaaagaccggtaaagccctctactctggcatgctcaatgcctcgggcggcgtgatagatgacctgattgtctattacttcactgaagatttcttccgcctcgttgtaaactccgccacccgcgaaaaagacctctcctggattacccaacacgccgaaccttacgccatcgacatcaccgttcgtgacgacctgtcgctgattgcggtacaggggccgaatgcgcaggcgaaagcggccacgctgtttactgaagaacagcgcaaggcggtggaaggcatgaaaccgttctttggcgtgcaggcgggcgatctgtttattgcaacaaccggttataccggcgaagcaggctatgaaattgcgatgccaaacgaaaaggcggcggatttctggcgtgcgctggtggaatccggcgtgaagccgtgtggcctgggcgcgcgcgatacgctgcgtctggaagcgggtatgaacctgtatggtcaggagatggatgaaggcgtctctccgctggcggcgaacatgggctggaccatcgcctgggaaccggccgatcgcgattttattggtcgcgaggcgctggaagtccagcgtgaaaaaggcaccgaacaactggtgggtctggttatgaccgagaaaggcgtactgcgtaacgaactgccggtacgctttaccgatgcccaggggaatcagctggaaggcgttatcaccagcggcactttctctccaacgctgggctacagcattgcgctggcgcgcgttccggcgggtattggcgagacggcgatcgtgcagatccgcaatcgcgaaatgccagtaaaagtcactaaacctgtttttgtgcgtaacggcaaagccgtcgcgtga

SEQ ID NO: 70898 - protein, 364 aa, Citrobacter koseri ATCC BAA-895
MAQQTPLYEQHTLCGARMVDFHGWMMPLHYGSQLDEHHAVRTDAGMFDVSHMTIVDLRGSRTREFLRYLLANDVAKLTKTGKALYSGMLNASGGVIDDLIVYYFTEDFFRLVVNSATREKDLSWITQHAEPYAIDITVRDDLSLIAVQGPNAQAKAATLFTEEQRKAVEGMKPFFGVQAGDLFIATTGYTGEAGYEIAMPNEKAADFWRALVESGVKPCGLGARDTLRLEAGMNLYGQEMDEGVSPLAANMGWTIAWEPADRDFIGREALEVQREKGTEQLVGLVMTEKGVLRNELPVRFTDAQGNQLEGVITSGTFSPTLGYSIALARVPAGIGETAIVQIRNREMPVKVTKPVFVRNGKAVA

SEQ ID NO: 70899 - DNA, 1098 bp, Serratia proteamaculans 568
  CDS (1)..(1098): transl_table=11
atggcaaagcaaaccccactgtacgaccagcacgtggcgtgcggtgcgcgcatggtagattttcatggctggatgatgccgctgcattacggctcccagatcgatgagcaccacgccgtgcgtcaggatgccggtatgttcgacgtctcccacatgaccattgtggatctgcgcggtgcccgcacccgcgagttcctgcgttacctgctggcgaatgacgtcgccaagctcactcaacctggcaaagcgttatacaccggtatgctgaatgcgtccggcggtgtgattgacgacctgattgtttacttccttactgaagactatttccgcctggtggtgaactccgccacacgcgaaaaagacctggcctggatcgaagagcacgcagccccttacggcgtagccctgacggtgcgtgacgatctggcgctggttgcggtgcagggcccacaggccaaagagcgcgccgccaccttatttaccccggaacaaaaaagcgcggttgaaggcatgaagccattcttcggcgtacaggccggggatctgtttattgccaccaccggttataccggcgaagcgggctatgaaatcgccctgccgaaagagcaggtggtcgatttctggcaaaaactgctggcagcaggtgtgaagcctgccggcctgggcgcacgcgacacgctgcgtctggaggcaggcatgaacctgtacgggcaagaaatggacgaaggcgtttcgccgctggccgccaacatgggctggaccattgcctggctgccggaagaccgtcagtttattggccgtgaagcgctggaaaaacagcgtgaaatgggtaccgagcaactggtcggcttgatcatgacggaaaaaggcgtattacgtaatgagctgccggtgcgattcaccgatgaagcaggtcagacgcatgaagggattatcaccagcggttcattctcaccgaccctgggcttcagtattgccctggcccgcgtgcccgctggtatcggcgagcaggccatcgtgcagatccgcaaccgtgaaatgccggtcaaggtcaccaaacctggattcgtgcgtgccggtaagccactgactaattaa

SEQ ID NO: 70900 - protein, 365 aa, Serratia proteamaculans 568
MAKQTPLYDQHVACGARMVDFHGWMMPLHYGSQIDEHHAVRQDAGMFDVSHMTIVDLRGARTREFLRYLLANDVAKLTQPGKALYTGMLNASGGVIDDLIVYFLTEDYFRLVVNSATREKDLAWIEEHAAPYGVALTVRDDLALVAVQGPQAKERAATLFTPEQKSAVEGMKPFFGVQAGDLFIATTGYTGEAGYEIALPKEQVVDFWQKLLAAGVKPAGLGARDTLRLEAGMNLYGQEMDEGVSPLAANMGWTIAWLPEDRQFIGREALEKQREMGTEQLVGLIMTEKGVLRNELPVRFTDEAGQTHEGIITSGSFSPTLGFSIALARVPAGIGEQAIVQIRNREMPVKVTKPGFVRAGKPLTN

SEQ ID NO: 70901 - DNA, 1098 bp, Bacillus pumilus SAFR-032
  CDS (1)..(1098): transl_table=11
atgttgaaacgaacaccgctttttcatgcgtatgaaacgtttggcgcaaaaaccattgacttcgggggctgggaattacctgtccaattttcttccattaaagaagagcacgaagctgttcgaacaaaggcagggctttttgatgtgtctcacatgggtgaggtggaaatcaaaggtcaagacgcccttccttttttacaaaggttattaaccaatgatgtgtctaagctgacagacggtaaggcactatatacagccatgtgctatgaagatggcgggacagtggatgatctgctcgtctaccaaaaagaaaagaacgattatttgcttgttattaatgcatctaatatcgaaaaagatgtggaatggctgcttcagcaccaaggtgagaacgacgtattgatccaaaatgtctcggatgaaatcgccttgcttgcccttcaaggacctcttgccgctgacatcatgaaagatgtagcggatgaagaagtgacatcgctcaagccatttacatttttatcaaaagctgaagttgctcaaaaagaggtgcttgtttcaagaacgggctacactggagaagacggctttgaaatttactgtcagtcagaagatgcggtccacatttggtcggctttattaaaagttggcgcaccaaaagggttaataccgtgtgggcttggtgcacgagacaccttgagatttgaagcaagacttccgctttatggccaggagctaacaaaggatatctctccattagaaggcgggattggctttgcggtcaaaacggataaagaagccaattttattggcaaagaagcgctcaagaagcaaaaagaagaagggccgaagcgaaagcttgtcggcattgaaatgatagataaagggattccgcgcacagactatccggtcttttcaggagaaaagcagattggcgtagtcacaacgggcacacaatccccaacattaaagaaaaatgtcgggcttgctttaatcgaatcttctcaggcgcagcttggaacagtggtagaagtacaagttcgtaaaaaacgtctaaaagcgaaaatcgtcgcaacaccattttataaaagagccaaataa

SEQ ID NO: 70902 - protein, 365 aa, Bacillus pumilus SAFR-032
MLKRTPLFHAYETFGAKTIDFGGWELPVQFSSIKEEHEAVRTKAGLFDVSHMGEVEIKGQDALPFLQRLLTNDVSKLTDGKALYTAMCYEDGGTVDDLLVYQKEKNDYLLVINASNIEKDVEWLLQHQGENDVLIQNVSDEIALLALQGPLAADIMKDVADEEVTSLKPFTFLSKAEVAQKEVLVSRTGYTGEDGFEIYCQSEDAVHIWSALLKVGAPKGLIPCGLGARDTLRFEARLPLYGQELTKDISPLEGGIGFAVKTDKEANFIGKEALKKQKEEGPKRKLVGIEMIDKGIPRTDYPVFSGEKQIGVVTTGTQSPTLKKNVGLALIESSQAQLGTVVEVQVRKKRLKAKIVATPFYKRAK

SEQ ID NO: 70903 - DNA, 1125 bp, Acaryochloris marina MBIC11017
  CDS (1)..(1125): transl_table=11
atgcaaacgtggattaccatggcagactccttgaaaccgactcctttactagagcaacatcagcagctcaatgctcggatgatgggctttgggggttggaatatgcctgttcaatatgaaggcatcaccgttgagcatcaaagcgtccgtcaaaaagtgggcatgtttgatatctctcatatgggtaagttcttgctcaagggagataacttacggcagaaactgcagcccttagtcccctctgatctcagtcagcttgaaccggggcaagcaaagtactctgtctttttgaatgagcaagctgggattattgatgatctaatcttttactttgaggggatctcagactcaggagcagaaattggcaagctgattgtcaatgcctcgactacggctaaggacaaagcctggttattagagaatgtttccgctgaagcgattgggtttgaggatgtttccgactcccatgtgctaattgccgtgcaaggacccgatgcgatctcaactctgcagcgctttacccccaccgatctctcggccattcgcaactatcgccatcagtctggcaccatcctggagcaacccgcctggtttgcccgcactgggtacactggcgaagacgggtttgaagtcatggtcgatccagagacgggtaagaaactctggcagacccttttggaggctggtgttgctccctgcggtttgggagcccgcgataccttaagactagaagccgccatggctctgtatggtcaagatataaatgacactacaaccccctacgaagctgggttgggatggttggttaatctagatcaaggtgagtttattggccaagacaccctcaagaagcagcaagcagagggaccgccccgtaagttagtggctttggaaatgcaggggcgtcatattgctcgtcatgattatcccgtttgggtcaatgaccaagaagtgggcattgtcaccagcggcagtttttcacccactttgggtaaatcgattgccctcgcctatgtcccaacggcttatgccaaatccggtacggaagtagcggtattaatccgcaagaagccccaactggcaacggttgttaaaaagcccttttatcgacgacctaaagcgtga

SEQ ID NO: 70904 - protein, 374 aa, Acaryochloris marina MBIC11017
MQTWITMADSLKPTPLLEQHQQLNARMMGFGGWNMPVQYEGITVEHQSVRQKVGMFDISHMGKFLLKGDNLRQKLQPLVPSDLSQLEPGQAKYSVFLNEQAGIIDDLIFYFEGISDSGAEIGKLIVNASTTAKDKAWLLENVSAEAIGFEDVSDSHVLIAVQGPDAISTLQRFTPTDLSAIRNYRHQSGTILEQPAWFARTGYTGEDGFEVMVDPETGKKLWQTLLEAGVAPCGLGARDTLRLEAAMALYGQDINDTTTPYEAGLGWLVNLDQGEFIGQDTLKKQQAEGPPRKLVALEMQGRHIARHDYPVWVNDQEVGIVTSGSFSPTLGKSIALAYVPTAYAKSGTEVAVLIRKKPQLATVVKKPFYRRPKA

SEQ ID NO: 70905 - DNA, 1086 bp, Dinoroseobacter shibae DFL 12
  CDS (1)..(1086): transl_table=11
atgttgaagaaaacgccgctgcaccccctacatcttgagttaggcgcaaagatggtgcccttcgcctggtgggagatgcccgtgcagtaccccacgggcatcatggccgagcatgccgcctgccgcgaaggcgccgccctgttcgatgtcagccacatgtgccagatggagatcaccggcgacgacccggccgccgccctggagcggctggtgcccggcggcatcaccagcctcgcccccgggcaggcgcgttatacccagctgaccaccggggcgggggggatctatgacgacctgatcgtgacccgcgatcccggggggctctatgtggtggccaacgcctccatggcggaccaggacgtgggcctgctgcgcgcggggctgcccgattgcacccttcgggtcatcgaggaccacgccctgatcgccgtgcagggccccgcggcagccgcgctggtggccgggctggtgcccgcggcggaggatctgcgcttcatgcagagcgcgcaggcggcgtgggacggacaggatctgcgcctgtcgcggctgggctataccggcgaggacgggttcgagatctccctgcccgccaccgcggcggaggccttcgcccgggcgctgatcgccgggggggccatgcccgccgggctgggcgcgcgcgacaccctgcggatggaggcgggcctgccgctttacggccaggatatcgaccagggcacctcgccgcccgaggcggggctggggttctcgatcccgaagcgccgccgcgccgaggggggcttcccgggtgccgcgcggatcctgggcgagctggccgacggtcccgcccgccggctggtcggcctgcgccccgaggggcgcgcgcccgtgcgtgcgggcgtcgagatcaccgcgcccgacggcacaccgctcggcaccgtgaccagcggcgggttcgcccccacgctccaggcgccgatctccatgggctacgtgaccgccagccacgccgcccccggcaccgagatccacgtgatcctgcgcggcaagccccagcccgcaacggtcaccccgctccccttcgttccgcaccgctataaacgttga

SEQ ID NO: 70906 - protein, 361 aa, Dinoroseobacter shibae DFL 12
MLKKTPLHPLHLELGAKMVPFAWWEMPVQYPTGIMAEHAACREGAALFDVSHMCQMEITGDDPAAALERLVPGGITSLAPGQARYTQLTTGAGGIYDDLIVTRDPGGLYVVANASMADQDVGLLRAGLPDCTLRVIEDHALIAVQGPAAAALVAGLVPAAEDLRFMQSAQAAWDGQDLRLSRLGYTGEDGFEISLPATAAEAFARALIAGGAMPAGLGARDTLRMEAGLPLYGQDIDQGTSPPEAGLGFSIPKRRRAEGGFPGAARILGELADGPARRLVGLRPEGRAPVRAGVEITAPDGTPLGTVTSGGFAPTLQAPISMGYVTASHAAPGTEIHVILRGKPQPATVTPLPFVPHRYKR

SEQ ID NO: 70907 - DNA, 1086 bp, Herpetosiphon aurantiacus ATCC 23779
  CDS (1)..(1086): transl_table=11
atgaaacaaacaccactcaatgcacgccatcgcgcccttggagccagaatggtcgagttcggcggctgggacatgccagtccaatatgcgggcatcatcgctgaacacaaggcaacccgcgaaggcgctggcctgttcgatattagccatatggcgcgattttgggtcactggccccgatagcgaacgctttattcagttgatcgatacctttgatattagcaaaaccgcgatcggccaatccgattatgggattatgtgctacgaagatggcgggattgttgacgatattttcacctatcatcttggccccgacgaatggatggttgtggccaacgctggcaacgccgaaaaagattgggcttggctcaatcaacatactgctggctacgacgtggtgctaactgatcgctctcaagagttggcgatgatcgcattgcaagggccaaaagctgaaagcctgttggctcccttgactgatgctgatgtggtcaatttggcgttccatggcatcaccaaggctacagttgagggcgctgctggttatatttcgcgcactggctacactggcgaagatggcttcgaattgttcttgcctgctggcgagatcgaacgaatctgggatcgtttgttggaagttggggctacgccgattggattgggtgctcgtgatagcctgcgtttcgagccaggtttggcgctttatggccatgaaattgagcgcgatattaatccttatgaagccaaattgggctgggtggtcaagctcgataaaggcccattcatcggctcagaagccttgcacgatatcaaggccaatggtccagtccgcactctagttggcttagaaatgactggccgcgggattgcccgtcaaggctacccggttgtggcgctcgatggcagtgaattgggcgttgtaacgactggcatgcctagcccaagcttgggcaaaaatctggcctatgccttggttaaggctggtagcctcaaaattggcgctgaagtcgatgtgctgattcgcgaaaagccagtgcgggcaaccgtagtcaaaacgccgttttacaaagcacgctacaaaaaatag

SEQ ID NO: 70908 - protein, 361 aa, Herpetosiphon aurantiacus ATCC 23779
MKQTPLNARHRALGARMVEFGGWDMPVQYAGIIAEHKATREGAGLFDISHMARFWVTGPDSERFIQLIDTFDISKTAIGQSDYGIMCYEDGGIVDDIFTYHLGPDEWMVVANAGNAEKDWAWLNQHTAGYDVVLTDRSQELAMIALQGPKAESLLAPLTDADVVNLAFHGITKATVEGAAGYISRTGYTGEDGFELFLPAGEIERIWDRLLEVGATPIGLGARDSLRFEPGLALYGHEIERDINPYEAKLGWVVKLDKGPFIGSEALHDIKANGPVRTLVGLEMTGRGIARQGYPVVALDGSELGVVTTGMPSPSLGKNLAYALVKAGSLKIGAEVDVLIREKPVRATVVKTPFYKARYKK

SEQ ID NO: 70909 - DNA, 1119 bp, Burkholderia multivorans ATCC 17616
  CDS (1)..(1119): transl_table=11
atgactgcactgaaacataccccgctcaacgccgcgcatcgcgcactcaatgcccgcatggtcgacttcggcggctgggacatgcccgtcaactacggctcgcagatcgaagagcacgaagcggtgcgcaccgacgccggcatgttcgacgtgtcgcacatgtgcgtcgtcgatttcaccggcagccgcgcgcgcgccttcttcgagtacgcgatcgcgaacaacgtcggcaagctcaagacgcccggcaaggcgctctactcgtgcctgctcaatccgcagggcggcgtcatcgacgatctgatcgtctattacttcaccgaagacttcttccgcgtggtcgtcaacgccggcaccgccgacaaggacatcgcctggttcaaccagctcaacgagcaaggcggctacgggctcacgatcgcgccgcgccgcgatttcgcgatcgtcgccgtacagggtccgaacgcgcgcgaaaaggtctgggcgaccgtgcccgccgcgcgcgccgcgacgagcgagctgaagccgttcaatgccgcgcaggtcgccggcacgccgttcggcgatctgacggtcgcccgcaccggctacacgggcgaggacggcttcgaagtgatcgtcccggccgtgcacgtcgaggcgctgtggaacgcgctgcagcagcacggcgtgcgtccgtgcgggctcggcgcgcgcgacacgctgcggctcgaagccggcatgaacctgtacggccaggacatggacgacaccgtctcgccgctcgacgcaggcctcgcctggacggtcgacctgtcgacgccgcgcgcgttcgtcggccgcgaagcgctcgagcgcgacggcacgcgcgccgcattcgtcggcctgatcctgcagaaggaaaacggcaaggcgggcggcgtgctgcgcgcgcaccagaaggtcgtcacgccgcacggcgaaggggagatcacgagcggcacgttctcgccgtcgatgcaggaatcgatcgcgttcgcgcgcgtgccgacggccgtccaggtcggcgacaccgtccatgtgcagattcgtgacaagcaacttcccgcgcgcgtggtaaaactgccgttcgtgcgcaacggcaaggtcctcgctgcgtaa

SEQ ID NO: 70910 - protein, 372 aa, Burkholderia multivorans ATCC 17616
MTALKHTPLNAAHRALNARMVDFGGWDMPVNYGSQIEEHEAVRTDAGMFDVSHMCVVDFTGSRARAFFEYAIANNVGKLKTPGKALYSCLLNPQGGVIDDLIVYYFTEDFFRVVVNAGTADKDIAWFNQLNEQGGYGLTIAPRRDFAIVAVQGPNAREKVWATVPAARAATSELKPFNAAQVAGTPFGDLTVARTGYTGEDGFEVIVPAVHVEALWNALQQHGVRPCGLGARDTLRLEAGMNLYGQDMDDTVSPLDAGLAWTVDLSTPRAFVGREALERDGTRAAFVGLILQKENGKAGGVLRAHQKVVTPHGEGEITSGTFSPSMQESIAFARVPTAVQVGDTVHVQIRDKQLPARVVKLPFVRNGKVLAA

SEQ ID NO: 70911 - DNA, 1122 bp, Sorangium cellulosum 'So ce 56'
  CDS (1)..(1122): transl_table=11
atgtcgaccaagccgctccccaccgctccgctccgaaggacgccgctctacgacgagcacatcaagctcggcggccgcatggtcccgttcgccggctgggagatgccggtccagtacaaaggcgtcaccgaagagcacaaggcggtgcgcaccgccgccgggctgttcgacgtctcgcacatgggcgagatcatcctgagcggcgagcactccggacaggtggtcgactacctcgtcacgaacgacgtgaagaagctggaagacggccacgcgctctacacgtgcgcgtgcaacgaggccggaaccatcctcgacgacctcatcgtgtaccggatcgacgcgcggcagtggctcatcgtctgcaacgcgtcgaaccgcgacaagatcgccgcccacatcagggccgcggcgcagggccactgcagcttcgaggacgcgtcggatcgcacggcgatgatggcgctccaggggccgaaggcgctcgacatcgtcgcgctcgcgggcggcgacggccccgcgctgcgcgagctcgcgccgttccacttccgcgacgcgacgctcgccaacgtgcgctgcaccgtggcccgcaccggctacaccggcgaggacggcatcgagatcttctgctcgccgtccgacgcgcagcggctctggcgcgcgctcgtcgagctcggcggtccgctcggcctcgaggcgacgggcctcggcgcgcgcgacacgctccgcctcgaggcgcgcctgtcgctgtacggcaacgacatcgacgagacgacgaaccccatcgaggcgggcctcggctgggtggtgaagctcgacaagggcgatttcgtggggcgcgccgcgctccagcgcatcaaggacgagggccccgcgcgcaagctggtcggcttcgagatgacggggcgcggcatcgcgcgccacggctacccgctgctcgacgtgagcggcgcgaaggtcggcgtctgcacgagcggcagcccggggccgaccgtcggcaagaacatcgggctcggctacctgccggcgccgatggcggcggtagggaccgccttccaggtggactgccgcgggcgcacggtcgaggcggtcgtggtcaagaccccgttctacaagcgggcctga

SEQ ID NO: 70912 - protein, 373 aa, Sorangium cellulosum 'So ce 56'
MSTKPLPTAPLRRTPLYDEHIKLGGRMVPFAGWEMPVQYKGVTEEHKAVRTAAGLFDVSHMGEIILSGEHSGQVVDYLVTNDVKKLEDGHALYTCACNEAGTILDDLIVYRIDARQWLIVCNASNRDKIAAHIRAAAQGHCSFEDASDRTAMMALQGPKALDIVALAGGDGPALRELAPFHFRDATLANVRCTVARTGYTGEDGIEIFCSPSDAQRLWRALVELGGPLGLEATGLGARDTLRLEARLSLYGNDIDETTNPIEAGLGWVVKLDKGDFVGRAALQRIKDEGPARKLVGFEMTGRGIARHGYPLLDVSGAKVGVCTSGSPGPTVGKNIGLGYLPAPMAAVGTAFQVDCRGRTVEAVVVKTPFYKRA

SEQ ID NO: 70913 - DNA, 1077 bp, Acholeplasma laidlawii PG-8A
  CDS (1)..(1077): transl_table=11
atggataaattaaaaacaacgagtttatatcaaaaacacgtcgatttaggtgcaaacttaatagattttggtggatttcatatgccactatattacacttcaatcgccttagaacaccatcaggttagaaatgatgttggtatgttcgatgtatctcatatgggtcaaatcttaattgaaggtaaagatgcgctagcttatacaaattatgtgttatcttcaactaccgagttaagacctcaaaaccaatatggattactccttcaaaacgatggaggtatcattgatgacttaatggtttatccatttagttctgatcaaatcctacttgtagtcaatgcttctaatattgaaaaagatttcaatcatctttcttcaataaaacatacatttgatatacacttaagaaatatcagtgataagtttaactgtattgcagttcaaggtccaaacagttttaaattcttgagtaaattatttcaagatttaccaaaacattcatcagactttatgtttacacataatgaacatggtcccttactcatttccagatctggttatacaggtgaagatggctttgaaatatatacttatgatggctatgcttctttaatttgggatgacttatataagttaggtgtaaaacccattggtttaggtgctagagacacgctacgctttgaagctggtatgcccttatatggtaacgaaatgaatgaaacgataaatcctatagaagccggattagggtttgctgttgattttaaaaaggatgatttcattggtaaatctgcattattagcgtataaagaaaatccactaagaaaaaatgtcggatttgagttattagaaaagaatattgctagatctggttatgaaatctatgtaggcaatcaacttattggacatgtaactacaggttacttatcgccttctacgaatatagcattagggtttgcattaattgatgcaaaacatgctaaattaggtacaatcatagatataaaaattagaaacaaatttgttaaagcggttgttagaaataaaaaatttataaataaaaataataaaatatag

SEQ ID NO: 70914 - protein, 358 aa, Acholeplasma laidlawii PG-8A
MDKLKTTSLYQKHVDLGANLIDFGGFHMPLYYTSIALEHHQVRNDVGMFDVSHMGQILIEGKDALAYTNYVLSSTTELRPQNQYGLLLQNDGGIIDDLMVYPFSSDQILLVVNASNIEKDFNHLSSIKHTFDIHLRNISDKFNCIAVQGPNSFKFLSKLFQDLPKHSSDFMFTHNEHGPLLISRSGYTGEDGFEIYTYDGYASLIWDDLYKLGVKPIGLGARDTLRFEAGMPLYGNEMNETINPIEAGLGFAVDFKKDDFIGKSALLAYKENPLRKNVGFELLEKNIARSGYEIYVGNQLIGHVTTGYLSPSTNIALGFALIDAKHAKLGTIIDIKIRNKFVKAVVRNKKFINKNNKI

SEQ ID NO: 70915 - DNA, 1101 bp, Bordetella petrii DSM 12804
  CDS (1)..(1101): transl_table=11
atgtccgcttccctcaaacgcaccccgctggccgacgcccacgtcgccgccggcgcccgcatggtcgatttcggcggctgggacatgccgctggcgtatggctcgcagctcgaagaacaccatgccgtgcgccgcgacgccggcatgttcgacgtgtcccacatgctgaacgtcgacgtcaccggtccggacgccactgcatttctgcggcgcctggtggccaacgacgtggctcgccttacggtgcccggcaaggcgttgtacagctgcatgctcaacccgcagggcggcatcatcgacgacctgatcgtctatttcttcgctgccgaccaatggcgcgtggtggtaaacgccgccacggccgacaaagacgttgcctggatgcagcgcgtggccgcggcgggcagctacgacgtcgccatcgcgccgcgccgcgacctggccatggtggccgtgcaggggcccaacgcccgtgcccgcgtctgggccgcccggccggcctggcaggccgccaccgagccgctgacgcctttcgtggcggcccaggtggccgacgacaccctggtggcgcgcaccggctacaccggcgaagacggtttcgagatcgtgctgccggccgaccaggtggtggccttgtggaacgatctgctggcccagggcgtgcgcccctgcgggctgggcgcgcgcgacacgctgcgcctcgaggccggcatgaacctgtatggccaggacatggacgagctcacccagcccgatcaggcaggcctgacctggacggtgtcgctgaaagaccccgagcgccgtttcgtggggcgcgatgccctggaacagttcgccgcgccccgcggcttcgtgggcctgaagctgcaagagcgcggcgtaatgcgcgcccacatggcggtatacacgcccctgggcgagggcgaaatcaccagcggcacgatgtcgcccacgctcggcgtgtcggtggcgttcgcccgcgtgccccagggcgtgcagcctggccagacggtcgaggtcgatatccgcggcaagcgggtgccggccctggtatgcaaattgccgttcgtgcgccatggcaaggcggtcgaacactcgtaa

SEQ ID NO: 70916 - protein, 366 aa, Bordetella petrii DSM 12804
MSASLKRTPLADAHVAAGARMVDFGGWDMPLAYGSQLEEHHAVRRDAGMFDVSHMLNVDVTGPDATAFLRRLVANDVARLTVPGKALYSCMLNPQGGIIDDLIVYFFAADQWRVVVNAATADKDVAWMQRVAAAGSYDVAIAPRRDLAMVAVQGPNARARVWAARPAWQAATEPLTPFVAAQVADDTLVARTGYTGEDGFEIVLPADQVVALWNDLLAQGVRPCGLGARDTLRLEAGMNLYGQDMDELTQPDQAGLTWTVSLKDPERRFVGRDALEQFAAPRGFVGLKLQERGVMRAHMAVYTPLGEGEITSGTMSPTLGVSVAFARVPQGVQPGQTVEVDIRGKRVPALVCKLPFVRHGKAVEHS

SEQ ID NO: 70917 - DNA, 1101 bp, Bacillus weihenstephanensis KBAB4
  CDS (1)..(1101): transl_table=11
atgattacattacaacgtacaccgttatttgatgtatacgcgaagtatggtgggaaaacagtcgacttcggtggttgggaattaccagttcaattttcaagcattaaagaggaacatgaagctgtacgtacaggagcaggtttgttcgatgtatctcatatgggagaagtagaggtaaaaggtgtagatagtttagcatttttacaacgtgttgttacaaatgacgtatctaccttaaaggtagggggcgcacaatatacagctatgtgctatgaaaatggtggcacagtagatgacttattaatctacaaacgtggtgaagaagactatttattagtaatcaatgcatcaaatatcgagaaagattacgaatggttagctagccatgtaattggcgatgcgaaagtagtcaatgtttctagtgaagttgcgcagcttgcaattcaaggaccaaaagcagaaggcattttacaaaaagttgtgtcagaagatttgaaagaaattaagttctttaaatttaaaaataatattcttgtagatggaattcctgcacttgtatctcgtacaggttacacaggtgaagatggattcgaaatttactgtaagagtgaagatgcagcaaaactttgggagaaacttcttgaagtgggagcagaagagggcttaaaaccatgtggcttaggtgctcgtgatacacttcgcttcgaagcaacacttccgttatacggacaagagttatcaaaagatattacaccgattgaagcgggaattggctttgcggtaaaaccaaataaagaagcagatttctttggaaaagaaacgttaaaagagcaaaaagaaaacggtgcatctcgtaaattagtcggcatcgaagtaatcgaacgcggtattcctcgtacgcattaccctgtatttataggagaagaaaaaatcggggaagtaacgagtggtacacaatctccaacgttaaagaaaagcattggtttagcactaattgatgtaaaatacgcagcagttgatacagaagtagaaattgaaattcgtaataaacgcgtcaaagcagtagttgttccaacaccattttataaacgttcaaagtaa

SEQ ID NO: 70918 - protein, 366 aa, Bacillus weihenstephanensis KBAB4
MITLQRTPLFDVYAKYGGKTVDFGGWELPVQFSSIKEEHEAVRTGAGLFDVSHMGEVEVKGVDSLAFLQRVVTNDVSTLKVGGAQYTAMCYENGGTVDDLLIYKRGEEDYLLVINASNIEKDYEWLASHVIGDAKVVNVSSEVAQLAIQGPKAEGILQKVVSEDLKEIKFFKFKNNILVDGIPALVSRTGYTGEDGFEIYCKSEDAAKLWEKLLEVGAEEGLKPCGLGARDTLRFEATLPLYGQELSKDITPIEAGIGFAVKPNKEADFFGKETLKEQKENGASRKLVGIEVIERGIPRTHYPVFIGEEKIGEVTSGTQSPTLKKSIGLALIDVKYAAVDTEVEIEIRNKRVKAVVVPTPFYKRSK

SEQ ID NO: 70919 - DNA, 1107 bp, Microcystis aeruginosa NIES-843
  CDS (1)..(1107): transl_table=11
atggctaaccaagaagcaacttcccccgctattcgtacccccttatatgacctaattgcccaacaaaccagcaaatttaccccttttgcgggttgggagatgccgatacagtttagcggcctaaaaatcgaacataatgctgtccgcaacggtgtggggatgtttgacatttcccacatgggcaaatttatcttaactggagataatctggttcaatctctccaaaccctagttccttctaatttagcccgtttaagcgcaggaaaggcacagtatagcgttttacttaacccagacggtggcataatcgatgatattatcttttactaccaaagcgaaagccaaggcgtattaattgttaatgcctcaaccaccgataaagatcgagaatggattttaggcaatttagagggttcgggggtcaaattaaaggatttatcgcaagaaagggtcttaattgccctgcaaggacccaaggcagccacaattttacagtccttggtcggggaaaaattaagcgattttggcctatttaatcactgggaaagccagcttttcggggaaaaagtttttatcgctaggaccggttacacgggagaagatggttttgaaattatggcccctcctgaaatcgggcagcgactttggacggaattcttaaatttaggggtgactccctgcggtttaggggcccgggataccctgcgtttagaggcagctttagccctttatggacaggatatcgacgatagcaccagtcccctagaggcaggcttaaattggttggttcatctgccagaaaaaggcgattttatcggtcgcaatgtccttgaagaccaaaaacttaatggtgtgaatcggcgcttggtgggattgcagatgtccggcaaacatatcgcccgtcacgattatccggtagtattcgctggggaagtggtgggtaaagtcaccagtggcactttatcaccaactttaaacacagcgatcgctttagcctatcttcccacacctttcgccgcgatcggacaagcgatcgaagtagaaatccgcggcactacctaccccgctaccgtcgttaaaaaacccttttataaaagtaaaaattaa

SEQ ID NO: 70920 - protein, 368 aa, Microcystis aeruginosa NIES-843
MANQEATSPAIRTPLYDLIAQQTSKFTPFAGWEMPIQFSGLKIEHNAVRNGVGMFDISHMGKFILTGDNLVQSLQTLVPSNLARLSAGKAQYSVLLNPDGGIIDDIIFYYQSESQGVLIVNASTTDKDREWILGNLEGSGVKLKDLSQERVLIALQGPKAATILQSLVGEKLSDFGLFNHWESQLFGEKVFIARTGYTGEDGFEIMAPPEIGQRLWTEFLNLGVTPCGLGARDTLRLEAALALYGQDIDDSTSPLEAGLNWLVHLPEKGDFIGRNVLEDQKLNGVNRRLVGLQMSGKHIARHDYPVVFAGEVVGKVTSGTLSPTLNTAIALAYLPTPFAAIGQAIEVEIRGTTYPATVVKKPFYKSKN

SEQ ID NO: 70921 - DNA, 1122 bp, Pseudomonas putida GB-1
  CDS (1)..(1122): transl_table=11
atgtccgaaacactgctcaagaccccactgcatgccctgcacctggaattgggggcgcgcatggtgccgttcgccggctacgacatgccagtgcagtacccgctgggcgtgctcaaggaacacctgcacacccgcgagcaggccggcctgttcgatgtctcgcacatgggccagatcatcctgcgcggcgccgatgccgccaaggccttggaaagcctggtgccagtggacatcatcgacctgccggtgggcatgcaacgctatgccatgttcaccaatgaacaaggcggtatccttgacgacctgatggtggccaacctgggcgacgacaccctgttcctggtggtgaacgccgcttgcaaggaccaggacctggcccacctgcaaacgcacatcggcggccgttgcgaggtgcagccattgttcgagcagcgtgccctgctcgccctgcaagggccggcagcggtcaaggtgcttgagcgcctggccccggaagtggccggcatgaccttcatgcagttccgcccggtgaaactgctgggtgaagactgcttcgtcagccgctcgggctacaccggcgaagacggctacgagatttcggtaccggtccaaggcgccgaagctttggcccgccgcctgctggccgagccggaagtacaacctatcggcctgggcgcgcgcgactcgctgcgcctggaagccggcctgtgcctgtatggccatgacatgaataccgagaccactccgatcgaagccagtctgctgtgggcgatttccaaagtgcgccgtgccgagggtgcgcgtgctgcagggttccctggcgccgaggcaatcttcgcccaccagcgcgagggagtggcgcgcaaacgtgtcgggctgttgccacaagaacgtaccccagtacgtgaaggggcggacattgtcgatgcaaacgataaaccggtaggtaaagtgtgcagcggtggctttggcccgacactcggcgcccctgttgcaatgggttatatcgagagtgaacatgctgcactcgacacccccctgtttgccgtagtacgcggcaagaaggttgccttgaaagtcagcaaaatgcctttcgtggcacaacgttactaccgtggttga

SEQ ID NO: 70922 - protein, 373 aa, Pseudomonas putida GB-1
MSETLLKTPLHALHLELGARMVPFAGYDMPVQYPLGVLKEHLHTREQAGLFDVSHMGQIILRGADAAKALESLVPVDIIDLPVGMQRYAMFTNEQGGILDDLMVANLGDDTLFLVVNAACKDQDLAHLQTHIGGRCEVQPLFEQRALLALQGPAAVKVLERLAPEVAGMTFMQFRPVKLLGEDCFVSRSGYTGEDGYEISVPVQGAEALARRLLAEPEVQPIGLGARDSLRLEAGLCLYGHDMNTETTPIEASLLWAISKVRRAEGARAAGFPGAEAIFAHQREGVARKRVGLLPQERTPVREGADIVDANDKPVGKVCSGGFGPTLGAPVAMGYIESEHAALDTPLFAVVRGKKVALKVSKMPFVAQRYYRG

SEQ ID NO: 70923 - DNA, 1083 bp, Pseudomonas putida GB-1
  CDS (1)..(1083): transl_table=11
atgggacagcgcacgcttttgtatgacctgcacctggcgctaggcgccaagacggtcgatttcggtggctgggacatgcccctgcactatggctcgcaggtcgaggagcaccatcaggtgcgcagcgactgcggcgtcttcgatgtttcccatatgaccgtgatcgatgtcgacggcaccgatgccaccgcttggctgcagcgtttgctggccaacgacgtggcccgcctcgacgacgtcggcaaggcactgtacagcccgctgctccacgagcagggtggggtaatcgacgacttgctcgtctaccgcatggaaaacggctaccgcctggtcaccaatgccgccacccgagccaaagtgctcgactggttagagcagcagcgggccggtttcgccgtgaacttccagccccgtcccgacctggccatcctcgccatccaggggccgcatgcccgcgaaaaggtcgccgctttgctcagccctgcacgcgcggccctgattcgtgaactgcgcccgttcgaaggcgtcgccgaaggtgactggttcattgcccgcaccgggtacaccggtgaagacggcctggagatcatctttccaggcgatcaagcagtggccttcttcaacgacctggtcggcgccggcattgccccgagcggccttggcgcccgcgatacgttgcgcctggaagccggcatgaacctgtacggccaggacatcgacgaaaaccacactccgctcacttccaacctgggctggagcatcgcctgggagcccgccgagcgcgacttcatcggccgtgccggcctgttggcggaaatcgagcgcggtgtgcaggagaaactggtcggtctggtgctggaagagcgcggcgtgctgcgtgcccaccaggtggtgcgcgtagccgggattggcgaaggggagatcaccagtggtagtttctcacctacgctgagcaagtccattgccctggcgcgcgtacccatggcgaccggtgaccgggccgaggtggaaattcgcggcaaatggtacccggtgcgggtggtcaaaccgaccttcgtgcgccacggcaagatcctgatctga

SEQ ID NO: 70924 - protein, 360 aa, Pseudomonas putida GB-1
MGQRTLLYDLHLALGAKTVDFGGWDMPLHYGSQVEEHHQVRSDCGVFDVSHMTVIDVDGTDATAWLQRLLANDVARLDDVGKALYSPLLHEQGGVIDDLLVYRMENGYRLVTNAATRAKVLDWLEQQRAGFAVNFQPRPDLAILAIQGPHAREKVAALLSPARAALIRELRPFEGVAEGDWFIARTGYTGEDGLEIIFPGDQAVAFFNDLVGAGIAPSGLGARDTLRLEAGMNLYGQDIDENHTPLTSNLGWSIAWEPAERDFIGRAGLLAEIERGVQEKLVGLVLEERGVLRAHQVVRVAGIGEGEITSGSFSPTLSKSIALARVPMATGDRAEVEIRGKWYPVRVVKPTFVRHGKILI

SEQ ID NO: 70925 - DNA, 1095 bp, Shewanella halifaxensis HAW-EB4
  CDS (1)..(1095): transl_table=11
atggctaacaaaactgtactttttaacaagcatctagaatctaacggcaagatggtagacttccacggttgggacatgccacttaactacggttcacaaatcgaagagcatcacgcggtgcgccaagacgcaggtatgttcgacgtttctcacatgactgtagttgatgtgattggtgatgacgcttgtgcctttttacgcaaactgctagccaacgacgtcgctaagcttaaagtccctggtaaggccctatatggcggtatgcttgaccataacggcggcgtcatcgacgaccttatcacttattacctatctgataccgagtaccgtattgttgttaactcagcaacacgcgaaaaagacctcgcttggataaacgagcaagttaacggtttcagcgttgaagtgaccgagcgtccagagctggcgatgatcgccgttcaaggtccaaacgctaaggcaaaagccgccaccgtatttaacgccgagcaaaatgccgcgattgaaggcatgaagccattcttcggtgtgcaaactggctcgctgtttatcgcaaccacaggttacactggcgaaacgggctacgaagtcatcgtgccagaagccgatgccgaagcactatggcaagctttcctagaagcgggcattaagccatgtggactcggtgcacgtgacactctacgtttagaggcgggcatgaacctttacggcctagatatggacgaaagtgttaatccactcgccgcgaacatgggctggactgtggcatgggagccagcggatcgtgactttaacggtcgccaagcgttagagaagattaaagccgaaggtaccgacaagctagtgggcctcatcatggacgctaaaggcgttatccgtcacggcatgtcagtgttctttaccgacagcgatggtgttgagcagcaaggtatcatcaccagtggtacattctcgcctacactaggttactcaattgccatggctcgcgtaccgcgcagcattggtgatgttgccgaagtagagatgcgtaagaagcgtgtacccgttaaggttatcgctccatcatttgtgcgcaatggtaaacaagcattctaa

SEQ ID NO: 70926 - protein, 364 aa, Shewanella halifaxensis HAW-EB4
MANKTVLFNKHLESNGKMVDFHGWDMPLNYGSQIEEHHAVRQDAGMFDVSHMTVVDVIGDDACAFLRKLLANDVAKLKVPGKALYGGMLDHNGGVIDDLITYYLSDTEYRIVVNSATREKDLAWINEQVNGFSVEVTERPELAMIAVQGPNAKAKAATVFNAEQNAAIEGMKPFFGVQTGSLFIATTGYTGETGYEVIVPEADAEALWQAFLEAGIKPCGLGARDTLRLEAGMNLYGLDMDESVNPLAANMGWTVAWEPADRDFNGRQALEKIKAEGTDKLVGLIMDAKGVIRHGMSVFFTDSDGVEQQGIITSGTFSPTLGYSIAMARVPRSIGDVAEVEMRKKRVPVKVIAPSFVRNGKQAF

SEQ ID NO: 70927 - DNA, 1104 bp, Lysinibacillus sphaericus C3-41
  CDS (1)..(1104): transl_table=11
atgacgaatgaattaaaacgtacacctctatttgaagaatacgcgaaatacggtgctaagacggttgacttcggtggatgggaattaccagttcaattctcttctattaaagatgaacatgatgcagtacgtaatcgtgcgggattatttgatgtatcccatatgggtgaaattttagtaacaggtcccgatgcattaaattttttacaaaatcttttatccaatgatgtttcaaaaatagctactggccaagcacaatacacagctatgtgctatgagaacggcggtgtagtcgatgatttactaacgtataagttagctgatgaccactatttattgtgtgtgaatgcagctaatatcgaaaaagattacgattggatgctggaaaaccaacatcaatatgatgtgacaattgacaatcaatcagatgcctatgcacaaattgccctacaaggacctttagcagaggaagttcttcaatccttaacttcaactgatgttagtgctattaaatttttccgattccaagagaatgtagaagtcacaggacataaagtactagtttcacgtagtggatacacaggagaagatggcttcgaattatatggagcacccgaagacattaaagcattatggggtaaaattttagatgctggtcaagacaaaggtgttgtccctgcaggtctaggctgtcgagatacactacgttttgaagcgggtctgccactttacggtcaagaattatcagcaaccatctctcctcttgaagcaggtatcggctttgctgtgaaattaaataaagaagattttattggtcatgatgcattagtagctcagaaggaaaatggtcttccacgcaaactagtcggcattgaaatgattgataaagggattccacgccatggctataaggtgtttaaggatggtaaggaaattggtgaagttacaacaggaacacagcttccttcctcaaaacgtaatgttggtcacgcgttaattgacagtcaattcgcaacaatcggaaatgaaatggaaattgaaatccgtggaaagcaactaaaagtagttacagttgaaacaccgttttataagcgttcaaaataa

SEQ ID NO: 70928 - protein, 367 aa, Lysinibacillus sphaericus C3-41
MTNELKRTPLFEEYAKYGAKTVDFGGWELPVQFSSIKDEHDAVRNRAGLFDVSHMGEILVTGPDALNFLQNLLSNDVSKIATGQAQYTAMCYENGGVVDDLLTYKLADDHYLLCVNAANIEKDYDWMLENQHQYDVTIDNQSDAYAQIALQGPLAEEVLQSLTSTDVSAIKFFRFQENVEVTGHKVLVSRSGYTGEDGFELYGAPEDIKALWGKILDAGQDKGVVPAGLGCRDTLRFEAGLPLYGQELSATISPLEAGIGFAVKLNKEDFIGHDALVAQKENGLPRKLVGIEMIDKGIPRHGYKVFKDGKEIGEVTTGTQLPSSKRNVGHALIDSQFATIGNEMEIEIRGKQLKVVTVETPFYKRSK

SEQ ID NO: 70929 - DNA, 1098 bp, Yersinia pseudotuberculosis YPIII
  CDS (1)..(1098): transl_table=11
atggctaagcagaccccgctgtatgaccaacatgtcgcgtgcggtgcgcgtatggtagattttcatggttggatgatgccattgcattatggctcccaaattgacgaacaccattttgtgcggcaggacgcaggcatgtttgatgtctcccacatgaccatcgttgatttgcacggtaaccgtacccgtgagtttttgcgctatctgttggctaacgatgtagccaaactgacccaaccgggcaaagccctttacaccgggatgctgaatgaatccggcggtgttatcgatgatttgattgtttacttcctcagcgaagattatttccgtttagtggttaactccgccacccgtgataaagacctcgcttggataagtcagcatgctgaaccttatcaggtcgaggtcacggtgcgtgacgatctggcactgattgcagtacaaggcccacaagcccaacaaaaagttgccacgttactgaccaccgagcagcaacaggctattgcgggcatgaagccattctttggtattcaaaccggcgatttatttattgctaccacgggttataccggtgaagccgggtatgaaattgcgttgccgaaacagcaggttgttgcgttctggcagcaactattggccgccggtgtgaagcccgcaggtcttggtgcgcgtgatacgctgcgcttagaagcggggatgaacttatatggtcaggaaatggatgaaaaaacgtctccgttagccgctaatatggggtggacagtggcctggcaaccagaagatcgtcagtttattggtcgtgctgcgttggaaaggcagcgaatgaaggggactgagcaattggttggtctgatcatgacggaaaaaggcgtgttacgtaatgaattgccagtgtatttttttgatgccgcaggcaatcagcatgttggggtgataaccagcggttcattttcgccaacactgggtttcagtattgcgctagcccgtgtacccacaggtatcggtgaacatgctgtggtacaaatccgtaaccgtgaaatgccggtacgggtaacaaaacccggttttgtgcgagcgggcaaagccatcgtattgtaa

SEQ ID NO: 70930 - protein, 365 aa, Yersinia pseudotuberculosis YPIII
MAKQTPLYDQHVACGARMVDFHGWMMPLHYGSQIDEHHFVRQDAGMFDVSHMTIVDLHGNRTREFLRYLLANDVAKLTQPGKALYTGMLNESGGVIDDLIVYFLSEDYFRLVVNSATRDKDLAWISQHAEPYQVEVTVRDDLALIAVQGPQAQQKVATLLTTEQQQAIAGMKPFFGIQTGDLFIATTGYTGEAGYEIALPKQQVVAFWQQLLAAGVKPAGLGARDTLRLEAGMNLYGQEMDEKTSPLAANMGWTVAWQPEDRQFIGRAALERQRMKGTEQLVGLIMTEKGVLRNELPVYFFDAAGNQHVGVITSGSFSPTLGFSIALARVPTGIGEHAVVQIRNREMPVRVTKPGFVRAGKAIVL

SEQ ID NO: 70931 - DNA, 1092 bp, Synechococcus sp. PCC 7002
  CDS (1)..(1092): transl_table=11
atgactttacagcgcacgcccctccatgacctcgccattgcagcgggtgccaaatttgtaccgttttccggttgggagatggccgtgcaatacaaaggcctaaaggtggagcatcaggcggtgcgcacagaggtgggaatgtttgatatttcccacatgggcaagtttcagttggctggggaaaacctcattgcagccatgcaaaaactggtgccttcaaatctggcacgacttgctcccggtcaagcgcaatacacagtgctactcaatgaccacggcggcatcatcgatgatgtgatctattatcaccagggcgatcgccagggctttttgattgtgaatgcggccaccacccagaaggattgggactggttaacgcaccatttgacagcgcaggggatcactttaaccgatgtctcccaagaaaatatcttgctggcgatccaaggcccccaggcggagaaagccttgcaacctgttgtggaaaatttagatttggcgaccctaaagctgtttaaccacggccaaggacaaattttcggggaaacggcttttattgcccggactggctacactggcgaagatggctttgaggtgatggtcgcgccgacagcagggaaaaaactttggagcgctttaatcgatgcgggggtgatgccctgtggtttgggagcacgggatacgctgcgactggaggccgggttacacctctatggtcaggacatggacgacgacacaacccctttggaagcgggtttggggtggctgatccactggcaagaaaaagatgcgtttatcgctaaggatattttgcagacccaaaaagcagcaggtgttcaacggcgtttggtgggcctagagatgcaggggcgcggtatcgcccgccatgactattctgttctcgtcaatggtgaagcagtgggccttgtgaccagtggtacgatgtcccccaccctcgaaaaggcgatcgccttagcttatctcccgttggaatttagcaaagtaggtcaagctgtcaccgtagaaatccgcgggaaacagtacccagcccaggtggtgaaaaaacctttttatcgtgccagcaaaaaatag

SEQ ID NO: 70932 - protein, 363 aa, Synechococcus sp. PCC 7002
MTLQRTPLHDLAIAAGAKFVPFSGWEMAVQYKGLKVEHQAVRTEVGMFDISHMGKFQLAGENLIAAMQKLVPSNLARLAPGQAQYTVLLNDHGGIIDDVIYYHQGDRQGFLIVNAATTQKDWDWLTHHLTAQGITLTDVSQENILLAIQGPQAEKALQPVVENLDLATLKLFNHGQGQIFGETAFIARTGYTGEDGFEVMVAPTAGKKLWSALIDAGVMPCGLGARDTLRLEAGLHLYGQDMDDDTTPLEAGLGWLIHWQEKDAFIAKDILQTQKAAGVQRRLVGLEMQGRGIARHDYSVLVNGEAVGLVTSGTMSPTLEKAIALAYLPLEFSKVGQAVTVEIRGKQYPAQVVKKPFYRASKK

SEQ ID NO: 70933 - DNA, 1113 bp, Clostridium botulinum A3 str. Loch Maree
  CDS (1)..(1113): transl_table=11
atggaaggtttaaaagttacacctttaagaggtgtgtatgaagagtatggtgggaaaattgtagattttgcaggatatgaacttccaacacaatttaaaggctttttacatgagcatcatactgtaagagaaaaagcaggtctttttgatgtttctcatatgggagaagctatggtaacaggaaaagatgctgggaaattcattcaatacttaatgactaatgacataaatgttcttaaagataatgaggttttgtacacattcatgtgtaatgaagatggtggagtgatagatgatttattggtttataaatttgcagaggatgagttttttttagttattaatgcaagtaataaggataaagatgttaagtggataatggaccacaaaggggattttgatgttgaaattgctgatgtatcagatagcattgcacaacttgcattacaaggacctttggcagaggaaatacttcaaaaaatagtagatgtagatttacaagaaataaaattctttaagcttagaagagatgttttagttgatgggaaaaaatgcttagtatcaagaaccggttatactggagaagatggttttgaaatttattgtaaaccagaggatgcaaaaggactatggcatgctatattaaatgcaggaaaagaagaaggtgcacagccaataggattaggtgctagagatactttaagatttgaagctagtcttcttttatatggaaatgaaatggatgaaacaattacaccattagaagtaggtatgggattctttgtaaaattaaaagttgaagaagactttataggaaaagatgctttgataaaacaaaaagcagaaggcgtaactagaaaattggtaggatttgaacttatagataagggaattccaagacatggttatgaggttattaaagatggaaaagttattggacatgttacaactggatataaatctcctacattaaacaaagcaattggattagctttagtagaagaacaatattctaaaataggaacagagtttaatataaaagttagaaaaaaagaattaaaagctgttgctatagataagagattctatactaaaaaaacaaaaaccaaataa

SEQ ID NO: 70934 - protein, 370 aa, Clostridium botulinum A3 str. Loch Maree
MEGLKVTPLRGVYEEYGGKIVDFAGYELPTQFKGFLHEHHTVREKAGLFDVSHMGEAMVTGKDAGKFIQYLMTNDINVLKDNEVLYTFMCNEDGGVIDDLLVYKFAEDEFFLVINASNKDKDVKWIMDHKGDFDVEIADVSDSIAQLALQGPLAEEILQKIVDVDLQEIKFFKLRRDVLVDGKKCLVSRTGYTGEDGFEIYCKPEDAKGLWHAILNAGKEEGAQPIGLGARDTLRFEASLLLYGNEMDETITPLEVGMGFFVKLKVEEDFIGKDALIKQKAEGVTRKLVGFELIDKGIPRHGYEVIKDGKVIGHVTTGYKSPTLNKAIGLALVEEQYSKIGTEFNIKVRKKELKAVAIDKRFYTKKTKTK

SEQ ID NO: 70935 - DNA, 1110 bp, Cyanothece sp. ATCC 51142
  CDS (1)..(1110): transl_table=11
atggctaattctaacgtctctgattctcttttgcgtactcctttatatgatttaatcatccaacagaaagcgagaatgacagcgttttcgggttgggaaatgccagtacagtttactggactaaaagtagaacatcacgccgtcagaactggggtgggaatgtttgatatttctcacatgggtaagtttactttagagggagaaggtttatttcctatgttacagtccctagttccttctgacttagaacggttaaccccaggtaaagctcaatataccgtcttattaaacccagatgggggtattattgatgacatcattgtttactgtcaaggggaagaaaaagcggttattattgttaatgcagctacgaaagataaggataaaaagtggattttgtcgaatttaggcgcaaccagtcttaattttactgatgtatcttcacaaaaagtcttattagccattcaaggccccgaaaccgtcgaaaaattacagcctttggttgaggctgatctcactcaactgtctttctttggccatacagatactgaagtgttgggatatcctgcgtttattgcccgaactggatacactggcgaagatgggtttgaggtgatgatcgatcctgaaggaggacaagagttatggcgatcgctacttcaagctggcgtaaccccttgcggtttgggggctagagataccctgcgtttagaagctgctatgtctttatacggtcaagatattgatgatcataccactcccctagaagccgggttaaaatggctggtgcatttggataaaaaaggtgagtttatggggcgagaagtgttagaaaaacaagctacagaaggggttaaacggcgtttagtcggcttagaaatggaaggacgacatattgcccgtcatggctattcggtggcttctgagggcaaaattgtgggagaagtcactagcggaaccattgggcccacagttggaaaagcgatcgctttagcttatgttcccacagcgttaagtaaaatagggacaatggttgaggtagaaattagaggaaaattataccctgctaaagtggttaaaaagcctttttataagtcggaaaatcgttaa

SEQ ID NO: 70936 - protein, 369 aa, Cyanothece sp. ATCC 51142
MANSNVSDSLLRTPLYDLIIQQKARMTAFSGWEMPVQFTGLKVEHHAVRTGVGMFDISHMGKFTLEGEGLFPMLQSLVPSDLERLTPGKAQYTVLLNPDGGIIDDIIVYCQGEEKAVIIVNAATKDKDKKWILSNLGATSLNFTDVSSQKVLLAIQGPETVEKLQPLVEADLTQLSFFGHTDTEVLGYPAFIARTGYTGEDGFEVMIDPEGGQELWRSLLQAGVTPCGLGARDTLRLEAAMSLYGQDIDDHTTPLEAGLKWLVHLDKKGEFMGREVLEKQATEGVKRRLVGLEMEGRHIARHGYSVASEGKIVGEVTSGTIGPTVGKAIALAYVPTALSKIGTMVEVEIRGKLYPAKVVKKPFYKSENR

SEQ ID NO: 70937 - DNA, 1119 bp, Burkholderia ambifaria MC40-6
  CDS (1)..(1119): transl_table=11
atgactgcactgaatcacaccccgctcaacgccgcgcatcgcgcgctcaatgcccgcatggtcgatttcggcggctgggacatgcccgtcaactacggctcgcagatcgaagaacacgaagccgtgcgcaccgacgccggcatgttcgacgtgtcgcacatgtgcgtcgtcgatttcaccggcagccgcgtgcgcgcgttcttcgagcacgcgatcgcgaacaacgtcggcaagctcaagacccccggcaaggcgctctactcgtgcctgctcaatccgcagggcggcgtcatcgacgacctgatcgtctattacttcaccgaagacttcttccgcgtcgtcgtcaacgccggcacggccgagaaggacatcgcgtggttcaaccagctcaacgagcaaggcggctacggcctgaccatcgcgccgcgccgcgatttcgcgatcgtcgccgtgcagggcccgaacgcccgtgaaaaggtctggacgacggtgcccgccgcgcgcgccgccaccagcgaactgaagccgttcaacgccgcgcgggtcgccggcacgccgttcggcgagctcaccgtcgcgcgcaccggctacaccggcgaagacggcttcgaagtgatcgtcccggccgtgcacgtcgaagcgctgtggaccgcgctgcagcaaaacggcgtgcgcccgtgcgggctcggcgcgcgcgacacgctgcgcctcgaggccggcatgaacctgtacggccaggacatggacgagaccgtgtccccgctcgacgcgggcctcgcatggacggtcgacctgtcggcaccgcgcgacttcgtcggccgtgacgcgctcgagcgcgacggcacgcgcgccgcgttcgtcggcctgatcctgcaaaaggaaaacggcaaggcgggcggcgtgctgcgcgcgcaccagaaggtcgtcacgccgcacggcgaaggcgagatcacgagcggcacgttctcgccgtcgatgcaggaatcgatcgcgttcgcacgcgtgccagcggccgtccacgtcggcgacaccatacatgtgcagattcgagacaagcaacttcccgcgcgcgtggtaaaactgccgttcgtgcgcaacggcaaggtcctcgctgcgtaa

SEQ ID NO: 70938 - protein, 372 aa, Burkholderia ambifaria MC40-6
MTALNHTPLNAAHRALNARMVDFGGWDMPVNYGSQIEEHEAVRTDAGMFDVSHMCVVDFTGSRVRAFFEHAIANNVGKLKTPGKALYSCLLNPQGGVIDDLIVYYFTEDFFRVVVNAGTAEKDIAWFNQLNEQGGYGLTIAPRRDFAIVAVQGPNAREKVWTTVPAARAATSELKPFNAARVAGTPFGELTVARTGYTGEDGFEVIVPAVHVEALWTALQQNGVRPCGLGARDTLRLEAGMNLYGQDMDETVSPLDAGLAWTVDLSAPRDFVGRDALERDGTRAAFVGLILQKENGKAGGVLRAHQKVVTPHGEGEITSGTFSPSMQESIAFARVPAAVHVGDTIHVQIRDKQLPARVVKLPFVRNGKVLAA

SEQ ID NO: 70939 - DNA, 1083 bp, Exiguobacterium sibiricum 255-15
  CDS (1)..(1083): transl_table=11
atgagtcagacgacattgaagagaacgccattgttcgacatcattgcaccaacggggaaaatggtcgattttgcagggtttgaaatgccagttctgttttcatccatcaaggaagagcatacagcggtgcgggaacgtgtcgggatgtttgatgtatcccatatgggcgagttatttgtttccggatcagatgcgttagcgtttttgcaacagacgctgtcgaatgatatctcgaagattgcgatcggacaggctcaatacaacgtcttatgtcaagaagacggcgggacagtagacgatttgttggtatatcgtttggacgaacaggattacctgctcgtcgtcaatgcatccaacatcgagaaagatgaagcacacttacgtcagtatctgacgggggacgtgttgcttgaaaatcaatcggatgcctacggtcaaattgccgttcaaggtccaaaagctgttgaagtgttgcaggaactgacggcactcaagctggaagacatcaaatttttccgctttgcgcaaggagaattggctggagtcgagatgcttgtatcacgcagcggttatacaggggaagacggcttcgaattgtatatgccgtcagcagacgcatcagcggtctggaatgcgttattggaagcggatgtcgtaccgtgtgggctgggtgcccgggatacgttacgatttgaagcctgcctgccgttatacggacacgagttatcagcgacgatttcaccgattgaagcagggatgggatttgccgttaaaccgcaagtgaagtcgtttgtcggatcggaagtcttggtgaaacagaaagaagacggaccgcgtcgtcaattgattggtcttgaactgacggataaagggatcgctcgtcaagatgctcctgttttggtaaatggggaaactatcggattcgttacgacgggtacattaccaccgacaattggtaaagccattgcgttagcacttgtgccgacggaatatgcgaccgaggaaacatttgaaatcgaagtacgcggaaaaaaactggcagcaaaacgaattgatacgccattctatcgccggagcaaataa

SEQ ID NO: 70940 - protein, 360 aa, Exiguobacterium sibiricum 255-15
MSQTTLKRTPLFDIIAPTGKMVDFAGFEMPVLFSSIKEEHTAVRERVGMFDVSHMGELFVSGSDALAFLQQTLSNDISKIAIGQAQYNVLCQEDGGTVDDLLVYRLDEQDYLLVVNASNIEKDEAHLRQYLTGDVLLENQSDAYGQIAVQGPKAVEVLQELTALKLEDIKFFRFAQGELAGVEMLVSRSGYTGEDGFELYMPSADASAVWNALLEADVVPCGLGARDTLRFEACLPLYGHELSATISPIEAGMGFAVKPQVKSFVGSEVLVKQKEDGPRRQLIGLELTDKGIARQDAPVLVNGETIGFVTTGTLPPTIGKAIALALVPTEYATEETFEIEVRGKKLAAKRIDTPFYRRSK

SEQ ID NO: 70941 - DNA, 1110 bp, Opitutus terrae PB90-1
  CDS (1)..(1110): transl_table=11
atgagcgaactgaaacgcaccccgctgcgcgactttcatgccgcgcatggagcgaggttggtggactttgcgggctgggagatgcccgtccaataccgcagcatccttgaggagcacaaagcagtgcggcgcaccgccggcctgttcgacgtgagtcacatgggcgaggtcgacgtgcacggtccggacgcggcgcgttttttgaatcggctcgtcacgaacgacgtcgccaagcttttccccggccgcgtgctttactcgccgatgtgttatcccaacggcggcgtggtggacgatctgctcgtctacatgcgggagccgaatcgctattttctctgcgtcaatgccagcaacgtggcgaaggaccttgcgtggatgcgcgagcaggcgagcgggttcgacgtgacgatcacggaccgttcggacgactacgcgctgctggcggtgcaaggcccggcggcggcggcgatcgtgcaatcgttgaccggcgcgaagctcggcgcgcttggctactaccatttcggcgagggcaccgtcgcaggcgtgcagtgcctgatcagccggaccggctacactggcgaggatggcttcgagctctaccatgcacccgccgacgcggtgacgctcgccgaggcgctgctccgcgcgggcgcgccgcacgggctcgaactcgccgggctcggcgcgcgtgacagcctgcggctcgaggcgggttatccgctctacggccacgaactcaccgcagaaatctcgccgctgaccgccggactcggctggacggtgaagctcaacaagggcgccgacttcgtcggccgtgaaccgctgctggccgagaagaccaatggcgctccgcacaaggtcgtgtttttccgcacgggcgaccgtcggatcgcgcgcgcggaaacgccggtgctcgacggagcggggcagcaggtggggcgcgtgctctctggcacgctctcaccgatgctgaacgaggcgatcggctccgccttggtgacgacggccagcgccacgccggacgcgccgctggcggtggatatccgcggcacccggttgaatttgcatctggtcaaaccgccgttcgtcgcattgaagaaagcatcatga

SEQ ID NO: 70942 - protein, 369 aa, Opitutus terrae PB90-1
MSELKRTPLRDFHAAHGARLVDFAGWEMPVQYRSILEEHKAVRRTAGLFDVSHMGEVDVHGPDAARFLNRLVTNDVAKLFPGRVLYSPMCYPNGGVVDDLLVYMREPNRYFLCVNASNVAKDLAWMREQASGFDVTITDRSDDYALLAVQGPAAAAIVQSLTGAKLGALGYYHFGEGTVAGVQCLISRTGYTGEDGFELYHAPADAVTLAEALLRAGAPHGLELAGLGARDSLRLEAGYPLYGHELTAEISPLTAGLGWTVKLNKGADFVGREPLLAEKTNGAPHKVVFFRTGDRRIARAETPVLDGAGQQVGRVLSGTLSPMLNEAIGSALVTTASATPDAPLAVDIRGTRLNLHLVKPPFVALKKAS

SEQ ID NO: 70943 - DNA, 1116 bp, Streptomyces griseus subsp. griseus NBRC 13350
  CDS (1)..(1116): transl_table=11
atgagcactgccccccgtctcaccgccctcgacaccctgcatcgctcgctcggcgccaccatgaccgacttcgcgggctgggacatgcccctgcggtacgccagtgagcgcgacgagcacaacgccgtacgcacccgggccggcctcttcgacctgtcgcacatgggcgagatcaccgtcaccggcccggaggccgccgccttcctgagctacgcactggtgggcaacatcgccaccgtcggcaacggccgcgcccgctacacgatgatcgtccgggaggacggcgggatcgtggacgacctgatcgtctaccgcctgggcgagagcgagtacatggtcgtcgccaacgcgggcaacgcccagatcgtgctggacgccctcaccgagcgcgtcagcggcttcgacgccgaggtgcgcgacgaccgggacgcctacgcgctgctcgccgtccagggccccgagtcccccgccatcatgaaggccgtcaccgacgccgacctggacgggctgaagtactacgcgggcctgccgggcaccgtcgccggggtcccggcgctcatcgcccgcaccggctacaccggcgaggacggcttcgagctgttcgtggcgcccgagcacgccgagcagctgtggcgggcgctgaccgaggccggcgccccgcacggtctgatcccgtgcgggctctcctgccgggacacgctgcgcctggaggcgggcatgccgctgtacgggcacgagctgacgaccgcgctcaccccgttcgacgcgggtctgggccgggtcgtgaagttcgagaaggagggcgacttcgtcgggcgcgcggcgctgaccgccgccgccgaacgcgccgagaccgctccgccgcgcaagctggtgggcctgatcgccgagggacgccgggtgccgcgtgccggtttcgcggtcgtcgccgacggcaaggtgatcggcgaggtcacctccggcgccccgtccccgaccctgggcaggccgatcgccatggcctacgtggacgcggccttcgccgcgccgggcaccgagggcgtgggcgtggacatccgcggcacgcacgagccgtacgaggtcgtcgcactgccgttctacaagcgccagaagtga

SEQ ID NO: 70944 - protein, 371 aa, Streptomyces griseus subsp. griseus NBRC 13350
MSTAPRLTALDTLHRSLGATMTDFAGWDMPLRYASERDEHNAVRTRAGLFDLSHMGEITVTGPEAAAFLSYALVGNIATVGNGRARYTMIVREDGGIVDDLIVYRLGESEYMVVANAGNAQIVLDALTERVSGFDAEVRDDRDAYALLAVQGPESPAIMKAVTDADLDGLKYYAGLPGTVAGVPALIARTGYTGEDGFELFVAPEHAEQLWRALTEAGAPHGLIPCGLSCRDTLRLEAGMPLYGHELTTALTPFDAGLGRVVKFEKEGDFVGRAALTAAAERAETAPPRKLVGLIAEGRRVPRAGFAVVADGKVIGEVTSGAPSPTLGRPIAMAYVDAAFAAPGTEGVGVDIRGTHEPYEVVALPFYKRQK

SEQ ID NO: 70945 - DNA, 1104 bp, Mycobacterium marinum M
  CDS (1)..(1104): transl_table=11
atgagtgacgcgccagagttgatgcagggaccgttggaagaccgccaccgcgcgctgggcgcaagcttcgccgaattcggcggctggctgatgccggtgtcctacgccgggacggtcagcgagcacaatgccacccgcaacgccgccggcttgttcgacgtcagccacctcggtaaggcactggttcgcgggccgggtgcggcggagttcgtcaactccgcgcttaccaacgatctacgccgcatcgggccgggcaaggcgcaatacaccttgtgctgcaacgaatccggtggcgtgattgacgacttgatcgcctactacgttgccgacgacgaaatcttcctggtgcccaacgccgccaacaccgccgcggtggtcgcagccttgcaggcggcggcgccgagcggtttgaccatcaccgacctgcatcgctcctacgcggtgctggcggtgcaggggccgcgttcgaccgaggtgctggccgcgctcggcctgcccactgagatggattacatgggctatgccgactcgtcgtacaacggggtatcggttcgggtctgccgcaccgggtacaccggcgagcacggctatgagctgctaccgccgtgggagtccgccggcgtggtcttcgacgccctggcggccgccgttgccgaagtgggcggcgagccggccggcctgggcgcgcgcgacacgctgcgcaccgaaatgggctaccccctgcacgggcatgaactgtcgctcgacatttcgccgttgcaggcccgatgtgggtgggcgatcggctggaagaaggacgcgttctttggccgggaagcgttgttggcggagaaagcggccggcccgcgccgcttgctccgggggttgcgtatggtcggccgcggtgtgttgcgtccgggcctgacggtgctcaacggctccaccccggtcggggtcaccacatcggggacattctcgccaaccttgcagatcggtatcgcgcttgcgctgattgacaccgacgcgggtgtggaagacggccagcaaatcaccgtcgacgtgcgaggccgtgccgtcgagtgcgaagtggtgcgtccgcccttcgtcgaggccaagacgcggtag

SEQ ID NO: 70946 - protein, 367 aa, Mycobacterium marinum M
MSDAPELMQGPLEDRHRALGASFAEFGGWLMPVSYAGTVSEHNATRNAAGLFDVSHLGKALVRGPGAAEFVNSALTNDLRRIGPGKAQYTLCCNESGGVIDDLIAYYVADDEIFLVPNAANTAAVVAALQAAAPSGLTITDLHRSYAVLAVQGPRSTEVLAALGLPTEMDYMGYADSSYNGVSVRVCRTGYTGEHGYELLPPWESAGVVFDALAAAVAEVGGEPAGLGARDTLRTEMGYPLHGHELSLDISPLQARCGWAIGWKKDAFFGREALLAEKAAGPRRLLRGLRMVGRGVLRPGLTVLNGSTPVGVTTSGTFSPTLQIGIALALIDTDAGVEDGQQITVDVRGRAVECEVVRPPFVEAKTR

SEQ ID NO: 70947 - DNA, 1146 bp, Kocuria rhizophila DC2201
  CDS (1)..(1146): transl_table=11
atgagcgagcgtcggaccgcactgcacggggcccacgaacggctcggagcccggttcaccgacttcggcggctggtccatgcccgtgcgctacgccagcgacaccgccgagcaccacgccgtgcgccgcggcgccgggatcttcgacctctcccacatgggcgaggtggaggtgaccgggccgcaggccggggccttcctggaccacgccctcgtgggcgtgctctcgggcatcggcgtgggccgggccaagtactcggtgatcgtggacgaggccggccgcgtgctggacgatctcatcacctaccgcctgggcgaggagcgctacctcgtggtgccgaacgccggcaaccaggacacggtggtcgaggcgctgcagcagcgcgccgaggccttcgacgtcacggtgcaggaccggggtccggagacgtccctgatcgccgtgcagggcccccgggcgctcgaggtgctccgggccaccggtctggacccggccgaggaggtggcgggcctgaagtactacgcgtgcgccgtcgcccgctgcggcggggtagacgtgctggccgcgcgcacgggctacaccggcgaggacggcttcgagttgtactgcgcgaacgccgacgccgagacgctgtggaacgccctgctcgcgaccgccgaggagctcggcaccgaggacgcacccgtgcagccggcaggactggcggcgcgggactccctgcgcctggaggccggcatgccgctgtacggccacgagctctcgaccgagatcacgcccgtggaggcggggctcggcaagctcgtggaggtcgccctgcgcaagaaggacgagtccgggacccgcaccgtgggccacgacgcactggccgccatgctgcggagcacccccgagcgcaccctgatcgggctggagggcctcggacgcaagcccatccgcgccgggtacaccgtgctgtcgggggagcggaccatcggggaggtcacgagcggcctgccctcgcccaccctcggcaagcccgtggccatggccctcgtggccacggacgccctggacgagatcgccgccgggaccgtgagcgtccaggacgcgcgcggccgcggcgtcgaggtggcacggacggccatgccgttctacacacggggctga

SEQ ID NO: 70948 - protein, 381 aa, Kocuria rhizophila DC2201
MSERRTALHGAHERLGARFTDFGGWSMPVRYASDTAEHHAVRRGAGIFDLSHMGEVEVTGPQAGAFLDHALVGVLSGIGVGRAKYSVIVDEAGRVLDDLITYRLGEERYLVVPNAGNQDTVVEALQQRAEAFDVTVQDRGPETSLIAVQGPRALEVLRATGLDPAEEVAGLKYYACAVARCGGVDVLAARTGYTGEDGFELYCANADAETLWNALLATAEELGTEDAPVQPAGLAARDSLRLEAGMPLYGHELSTEITPVEAGLGKLVEVALRKKDESGTRTVGHDALAAMLRSTPERTLIGLEGLGRKPIRAGYTVLSGERTIGEVTSGLPSPTLGKPVAMALVATDALDEIAAGTVSVQDARGRGVEVARTAMPFYTRG

SEQ ID NO: 70949 - DNA, 1119 bp, Burkholderia phymatum STM815
  CDS (1)..(1119): transl_table=11
atgaccgaactcaaacacaccccgctccacgccacgcaccgcgcgctgaatgcccgcatggtcgacttcggcggctgggacatgcccgtcaattacggctcgcagatcgaagagcatcgcgcggtgcgcacggacgccggcatgttcgacgtctcccacatgtgtgtcgtcgatttcacgggcgaacgcgtgcgtgccttcttcgagcgcgcgctggccaataacgtcggcaagctgcaaacggccggcaaggccctttactcgtgtctgctgaacccgcaaggcggcgtgatcgacgacctgatcgtctattacttcggcgaagatcatttccgcgtcgtcgtgaatgccggcacggctgaaaaagacatcgcgtggttcaacaagctcaatgacgaagaaggcttcggcctcaccatcacgccgcgccgcgactacgcgatcgtcgccgtgcagggcccgaacgcgcgcgaaaaagtctgggcgacggtgccgcatgcacgcgccgccagcgaagcgctcaagccgttcaacgcggcgcgcgtcgccgatacgccgttcggcgagctgaccgtcgcgcgcaccggctacacgggcgaggacggcttcgaaatcatcgtccccgccgctcacgtcgaagcactgtggaacgcgctgcaggcgcagggcgtgcgccccgccggtctcggcgcgcgcgacacgctgcgtctcgaagcgggcatgaacctgtacggtcaggacatggacgacgacgtgtcacccctcgacgccggtctcgcgtggacagtcgacctgtccgcaccgcgcgaattcatcggccgcgcgaagctcgaagcggacggctcgaagcagtcgttcgtcggcctgattctgcacaaggacaacggcaaggcggcgggcgtgctgcgcgcgcatcagaaggtcgtcacgccgaacggcgaaggcgaaatcacgagcggcacattctcgccgaccatgcaggagtcgatcgcctttgcgcgcgtgccgaagggcgtgcagccgggcgacgtcgtgcacgtgcagatccgtgacaaggcacttccagccagcgtggttaaactgccattcgtgcgcaacggcaaagtgctcgtcggctga

SEQ ID NO: 70950 - protein, 372 aa, Burkholderia phymatum STM815
MTELKHTPLHATHRALNARMVDFGGWDMPVNYGSQIEEHRAVRTDAGMFDVSHMCVVDFTGERVRAFFERALANNVGKLQTAGKALYSCLLNPQGGVIDDLIVYYFGEDHFRVVVNAGTAEKDIAWFNKLNDEEGFGLTITPRRDYAIVAVQGPNAREKVWATVPHARAASEALKPFNAARVADTPFGELTVARTGYTGEDGFEIIVPAAHVEALWNALQAQGVRPAGLGARDTLRLEAGMNLYGQDMDDDVSPLDAGLAWTVDLSAPREFIGRAKLEADGSKQSFVGLILHKDNGKAAGVLRAHQKVVTPNGEGEITSGTFSPTMQESIAFARVPKGVQPGDVVHVQIRDKALPASVVKLPFVRNGKVLVG

SEQ ID NO: 70951 - DNA, 1095 bp, Shigella boydii CDC 3083-94
  CDS (1)..(1095): transl_table=11
atggcacaacagactcctttgtacgaacaacacacgctttgcggcgctcgcatggtggatttccacggctggatgatgccgctgcattacggttcgcaaatcgacgaacatcatgcggtacgtaccgatgccggaatgtttgatgtgtcacatatgaccatcgtcgatctccgcggcagccgcacccgggagtttctgcgttatctgctggcgaacgatgtggcgaagctcaccaaaagcggcaaagccctttactcggggatgttgaatgcctctggcggtgtgatagatgacctcatcgtctactactttactgaagatttattccgcctcgttgttaactccgccacccgcgaaaaagacctctcctggattacccaacacgctgaacctttcggcatcgaaattaccgttcgtgatgacctttccatgattgccgtgcaagggccgaatgcgcaggcaaaagctgccacactgtttaatgacgcccagcgtcaggcggtggaagggatgaaaccgttctttggcgtgcaggcgggcgatctgtttattgccaccactggttataccggtgaagcgggctatgaaattgcgctgcccaatgaaaaagcggccgatttctggcgtgcgctggtggaagcgggtgttaagccatgtggcttgggcgcgcgtgacacgctgcgtctggaagcgggcatgaatctttatggtcaggagatggacgaaactatttctcctttagccgccaacatgggctggactatcgcctgggaaccggcagatcgtgactttatcggtcgtgaagccctggaagtgcagcgtgagcatggtacagaaaaactggttggtctggtgatgaccgaaaaaggcgtgctgcgtaatgaactgccggtacgctttaccgatgcgcagggcaaccagcatgaaggcattatcaccagcggtactttctccccgacgctgggttacagcattgcgctggcgcgcgtgccggaaggtattggcgaaacggcgattgtgcaaattcgcaaccgtgaaatgccggttaaagtgacaaaacctgtttttgtgcgtaacggcaaagccgtcgcgtga

SEQ ID NO: 70952 - protein, 364 aa, Shigella boydii CDC 3083-94
MAQQTPLYEQHTLCGARMVDFHGWMMPLHYGSQIDEHHAVRTDAGMFDVSHMTIVDLRGSRTREFLRYLLANDVAKLTKSGKALYSGMLNASGGVIDDLIVYYFTEDLFRLVVNSATREKDLSWITQHAEPFGIEITVRDDLSMIAVQGPNAQAKAATLFNDAQRQAVEGMKPFFGVQAGDLFIATTGYTGEAGYEIALPNEKAADFWRALVEAGVKPCGLGARDTLRLEAGMNLYGQEMDETISPLAANMGWTIAWEPADRDFIGREALEVQREHGTEKLVGLVMTEKGVLRNELPVRFTDAQGNQHEGIITSGTFSPTLGYSIALARVPEGIGETAIVQIRNREMPVKVTKPVFVRNGKAVA

SEQ ID NO: 70953 - DNA, 1119 bp, Burkholderia phytofirmans PsJN
  CDS (1)..(1119): transl_table=11
atgaccgaactcaaacacaccccgctcaacgccacccatcgtgcgctcaatgcccgcatggtcgatttcggcggctgggacatgcccgtcaattacggctcgcagatcgacgaacaccgcgccgtgcgcaccgacgccggcatgttcgacgtctcgcacatgtgcgtcgtcgatttcaccggcgagcgcgtgcgcgctttcttcgaatacgcgctggcgaataacgttgccaaactgcaaacgcccggccgcgcactgtattcctgtctgctgaatccggacggcggcgtgatcgacgatctgatcgtctattacttcggcgaagaccacttccgcgtggtcgtcaacgccggtaccgctgataaagatatcgcctggttcggccagctcaacgccgaaggcagctttggcctgaccatcacgccgcgccgcgactatgcgatcgtcgctgtacaaggtccgaatgcgcgcgaaaaggtctggcaaaccgtgccggccgcacgcgccgccaccgaagcgctgaagcccttcaacgccgcacgtatcgaagacacgccgttcggcgaattgaccgtcgcccgcaccggctacaccggcgaagacggcttcgaaatcatcgtccccgcagatcacgtcgaagcgctgtggaatgcattgcaagctcaaggtgtgcgcccggccggtctcggcgcgcgcgacacgctgcggctcgaagccggcatgaacctgtacggccaggacatggacgacaacgtctcgccgctcgacgccgggctcgcctggaccgtcgacctcacctcgccgcgcgacttcgtcggcaagggcaagctggaagcggacggctcgcaggccgcgttcgtcggtttgatcctgctgaaggaaaacggcaaggcggcgggcgtgctgcgtgctcatcagaaagtcgtcacgccgcacggcgaaggcgaaatcaccagcgggacgttttccccgaccatgcaggaatcgatcgccttcgcgcgggtgccgaaaggcgtgcagccgggcgacaccgtacacgttcagattcgtgacaaaaacgtaccggcaagcgtggtaaaactgccgttcgtgcgcaatggcaaagtgctcgcggtttaa

SEQ ID NO: 70954 - protein, 372 aa, Burkholderia phytofirmans PsJN
MTELKHTPLNATHRALNARMVDFGGWDMPVNYGSQIDEHRAVRTDAGMFDVSHMCVVDFTGERVRAFFEYALANNVAKLQTPGRALYSCLLNPDGGVIDDLIVYYFGEDHFRVVVNAGTADKDIAWFGQLNAEGSFGLTITPRRDYAIVAVQGPNAREKVWQTVPAARAATEALKPFNAARIEDTPFGELTVARTGYTGEDGFEIIVPADHVEALWNALQAQGVRPAGLGARDTLRLEAGMNLYGQDMDDNVSPLDAGLAWTVDLTSPRDFVGKGKLEADGSQAAFVGLILLKENGKAAGVLRAHQKVVTPHGEGEITSGTFSPTMQESIAFARVPKGVQPGDTVHVQIRDKNVPASVVKLPFVRNGKVLAV

SEQ ID NO: 70955 - DNA, 1128 bp, Ralstonia pickettii 12J
  CDS (1)..(1128): transl_table=11
atgacgctccaacacacgccgctcaatgccatccaccgctcgctgggcgcccgcatggtcgactttggcggctgggacatgcccgtcaactacggctcccaaatcgaagagcaccacgccgtgcgccaggacgccggcgtcttcgacgtctcgcacatgtgcgtggtcgacctcaccggcgcgcgcgtgcgcgacttcctgcgtgggctgctcgccaacaatgtcgacaagctccagacgcccggcaaggcgctctacagctgcatgctgaaccccaagggcggcgtgatcgacgatctgatcgtctacttcttccgcgaagactggttccgcttggtggtcaacgcaggcaccgccccgacggacctggaatggatcgtcgcgcagaacgccgccgccggcaccgacgtgacgatcacgccgcgccgctccgacaacaacgcgggtgccgagccactgggcatcctggcggtgcagggcccgaacgcgcgtgccaagacctacgccgcgctgcccggctcgcaggccgtgggcgacgcgctgaagccgttcaacgcgggctttgtgaccgtggaaaacgtgggcgagatcatggtggcccgaaccggctacaccggtgaagacggtttcgaactggtcgtgccggccgcgcagatcgcgggcgtgtgggagcgcctgctgcaggccggcgtgcgcccggcaggcctcggcgcgcgcgacacgctgcgcctggaagccggcatgaacctctacggccaggacatggacgagcacgtctcgccgctcgacgccggcctcgcctggacggtcgacctgcaaagcgaacgcgacttcaccggcaaggccgcgctgcaagccggtggacaacgcgaacagttcgtcggcctgatcctgcgcgacaagggcggcgtgctgcgcgcccaccagaaagtcatcaccgccgccggtgacggcgagatcaccagcggcacgttcagcccgagcctgtcgctctccatcgcactggcgcgcctgcccaaggaggtgcccgtcggcaccgacgtgcaggtcgaaattcgcgaccgcaagttgaccgcgactgtggttaaactgccgttcgtgcgcaatggcaaggcgctggtcagctga

SEQ ID NO: 70956 - protein, 375 aa, Ralstonia pickettii 12J
MTLQHTPLNAIHRSLGARMVDFGGWDMPVNYGSQIEEHHAVRQDAGVFDVSHMCVVDLTGARVRDFLRGLLANNVDKLQTPGKALYSCMLNPKGGVIDDLIVYFFREDWFRLVVNAGTAPTDLEWIVAQNAAAGTDVTITPRRSDNNAGAEPLGILAVQGPNARAKTYAALPGSQAVGDALKPFNAGFVTVENVGEIMVARTGYTGEDGFELVVPAAQIAGVWERLLQAGVRPAGLGARDTLRLEAGMNLYGQDMDEHVSPLDAGLAWTVDLQSERDFTGKAALQAGGQREQFVGLILRDKGGVLRAHQKVITAAGDGEITSGTFSPSLSLSIALARLPKEVPVGTDVQVEIRDRKLTATVVKLPFVRNGKALVS

SEQ ID NO: 70957 - DNA, 1212 bp, Xanthomonas campestris pv. campestris str. B100
  CDS (1)..(1212): transl_table=11
atgcccacgcaccggccgtgcgttgcctcagcgccagcccgcggtttcccccaagcgtggccggccggcgataatggtcctctttcccttggaccggcgctcatgacccagaagaccatcctcaacgacacccatcgcgcgctcggcgccaagatggtcgacttcggcggttgggacatgccgatccactacggctcgcagatcgacgaacaccaccaggtgcgtcgcgacgccggcatgttcgacgtcagccacatgaccgtggtcgatctgcacggcgcgcgcgtgcgcgagttcttgcgctacctgctggccaattcggtcgacaagctcaaggtctccggcaaggcgctgtacacctgcatgctcaacccgcaaggcggcgtgatcgacgacctgatcgtgtacttcatgcaggaagagttcttccgcctggtggtcaacgccgccacccgcgacaaggacctgcagtggatcggcgaacaggccgcacgcttcgaggtgcgcgtggaagaacgcgccgacttcgccatgatcgcggtgcaggggcccaacgcgcgcagcaaggtgatcgatctgctcgaccccgccgatgccagcgcggcgagcaagctcggccgcttcgctgcgctgcagacgcgcacgcgcgatggcgttgcgttgttcctcgcgcgcaccggctacaccggtgaggacggttttgaaatcgtgttgccgcaggccgatgcggtcgcgttctggaatgcgctgctcgcgcatggcgtggcgcctgccggcctgggcgcgcgcgacaccttgcgtctggaagcgggcatgaatctctacggccaggacatggacgacgacgtcactccgtacgaagccgcgctggcctggaccatcacgctcgacgaaggccgcgacttcatcggccgcagcgtgctggagtcgcaaaaagcgcagggcgcagcccgccagatgatcggcgtggtcatggacgagaagggcgtgctgcgtcacggccagaaggtgctcagcgcaggcggcgaaggcgagatcctgtccggcacgttctcacccaccctgggcaaggccattgcctttgcacgcgtgccggccggcagcatcgacgacctgcgcgtggacatccgtggcaagcaggtgcccttgcgcgcggtgaagtttccgtttgtgcgcgatggccaggcccagcccggcgtactcggcgcgtaa

SEQ ID NO: 70958 - protein, 403 aa, Xanthomonas campestris pv. campestris str. B100
MPTHRPCVASAPARGFPQAWPAGDNGPLSLGPALMTQKTILNDTHRALGAKMVDFGGWDMPIHYGSQIDEHHQVRRDAGMFDVSHMTVVDLHGARVREFLRYLLANSVDKLKVSGKALYTCMLNPQGGVIDDLIVYFMQEEFFRLVVNAATRDKDLQWIGEQAARFEVRVEERADFAMIAVQGPNARSKVIDLLDPADASAASKLGRFAALQTRTRDGVALFLARTGYTGEDGFEIVLPQADAVAFWNALLAHGVAPAGLGARDTLRLEAGMNLYGQDMDDDVTPYEAALAWTITLDEGRDFIGRSVLESQKAQGAARQMIGVVMDEKGVLRHGQKVLSAGGEGEILSGTFSPTLGKAIAFARVPAGSIDDLRVDIRGKQVPLRAVKFPFVRDGQAQPGVLGA

SEQ ID NO: 70959 - DNA, 1098 bp, Erwinia tasmaniensis Et1/99
  CDS (1)..(1098): transl_table=11
atgacccagcaaaccccgttattcgcacagcaccaggccagcggtgcaaggatggtggattttcacggatggatgatgccgctgcactacggttcgcaaatggatgaacaccatgcggttcgccgtgatgccggcatgttcgacgtttctcatatgaccattgtcgatctgcatggtgctcgcacgcgcgagtttttgcgctatctgctggcaaacgacgtcgccaaactgacccagccgggtaaagccctgtatagcgcgatgctaaacgcctccgctggggtgatcgacgatctgatcgtctattttatcagcgaagatttcttccgcctggtggttaattcggcaacccgcgagaaggatctggcgtggatcgtagagcatgcggcggcgtacggcgttcagctgaccgaacgcgacgatctgtcgctgatcgcggttcaggggccgaacgcgcagcaaaaagcgcaaagcgtgtttgatgacgcccagcgtgatgccgtcagcgcgatgaaacccttctttggcgtgcaggcgggtgaactgtttatcgcgacgaccggctataccggcgaaccgggctatgaaatcgccctgccgaatgagctggcggccgaattctggcagcagctgctggccgccggagtcaggcccgccgggcttggcgcacgcgatacgctgcgtcttgaggccggtatgaacctgtatgggcaggagatggacgagaaggtctccccgcttgcggccaatatgagctggaccatcggctgggaaccgtcagaccgccagtttatcgggcgcgagatgctggagatacagcgcaccaaaggcacggaacggctggtcggtctgatcatgactgaaaaaggcgtgctgcgtaacgcgcttccggtgcgcttcagcgatgccgatggcaacatgcttgagggcgttatcaccagcggttcgttctcccccactctggggtgcagcattgccctcgcccgcgttccggccggcattggcgaacaggcggtggtgcaaattcgcaaccgcgcgatgccggtgaccgtgaccaaacctgtttttgtccgcgccggtaaaccggtaacgaactaa

SEQ ID NO: 70960 - protein, 365 aa, Erwinia tasmaniensis Et1/99
MTQQTPLFAQHQASGARMVDFHGWMMPLHYGSQMDEHHAVRRDAGMFDVSHMTIVDLHGARTREFLRYLLANDVAKLTQPGKALYSAMLNASAGVIDDLIVYFISEDFFRLVVNSATREKDLAWIVEHAAAYGVQLTERDDLSLIAVQGPNAQQKAQSVFDDAQRDAVSAMKPFFGVQAGELFIATTGYTGEPGYEIALPNELAAEFWQQLLAAGVRPAGLGARDTLRLEAGMNLYGQEMDEKVSPLAANMSWTIGWEPSDRQFIGREMLEIQRTKGTERLVGLIMTEKGVLRNALPVRFSDADGNMLEGVITSGSFSPTLGCSIALARVPAGIGEQAVVQIRNRAMPVTVTKPVFVRAGKPVTN

SEQ ID NO: 70961 - DNA, 1110 bp, Xanthomonas oryzae pv. oryzae PXO99A
  CDS (1)..(1110): transl_table=11
atgacccagaagaccatcctcaacgacacccatcgtgcgctcggcgccaagatggtcgacttcggcgggtgggacatgccgatccactatggctcgcagttggacgagcaccaccaagtgcgccgcgacgccggcatgttcgacgtcagccacatgaccgtggtcgatttgcacggtgcgcgcgtacgcgcgtttctgcgcgacctgctcgccaactcggtggacaagctcaaggtctgcggcaaggcgctgtacacctgcatgctcaatccgcagggtggggtgatcgacgacctcatcgtctattacatgagcgaagacttcttccggttggtggtcaatgccgccacccgcgaaaaagatctgcagtggatcggcgagcaggccgtacgcttcgatgtgcgcgtggaagagcgcagcgacttcgcgatgatcgccgtgcaaggccccaacgcacgcgccaatgtcatcgacctgctggacccggccgacaccgcagcggcgagcaagctcggccgtttcgctgcactgcaaacgcgttcgcgcgatggcatcgaattgtttcttgcgcgcaccggctacaccggcgaagacggtttcgaaatcgtgttgccgcaggaggccgccgtcgcgttctggaatgcattgctcgcgcagggcgtcaagccagcaggtctgggcgcacgcgacaccttgcgtctggaagcgggaatgcatctttacgggcaggacatggacgatgcggtcaccccctacgaagccgcgctggcctggacgattgccctggacgaaggacgcgacttcatcggtcgccgtgtgctcgagtcgcaaaaggcgcagggtgcaccgtgtcagttgatcggtgtggtgatggacgacaagggcgtgctgcgacatggccaggcggtgttcaccgccagtggcgaaggcgagattctgtccggcacgttctcgccgacgctcggcaaggcgatcgccttcgcgcgcgtgccggccggcagcatcgatcagctacgcgtggacatccgtggcaagcaggtgccgttgcgcgcggtgaaatttccgttcgttcgcgatggccaggcacagcccggcgtgctcggcgactga

SEQ ID NO: 70962 - protein, 369 aa, Xanthomonas oryzae pv. oryzae PXO99A
MTQKTILNDTHRALGAKMVDFGGWDMPIHYGSQLDEHHQVRRDAGMFDVSHMTVVDLHGARVRAFLRDLLANSVDKLKVCGKALYTCMLNPQGGVIDDLIVYYMSEDFFRLVVNAATREKDLQWIGEQAVRFDVRVEERSDFAMIAVQGPNARANVIDLLDPADTAAASKLGRFAALQTRSRDGIELFLARTGYTGEDGFEIVLPQEAAVAFWNALLAQGVKPAGLGARDTLRLEAGMHLYGQDMDDAVTPYEAALAWTIALDEGRDFIGRRVLESQKAQGAPCQLIGVVMDDKGVLRHGQAVFTASGEGEILSGTFSPTLGKAIAFARVPAGSIDQLRVDIRGKQVPLRAVKFPFVRDGQAQPGVLGD

SEQ ID NO: 70963 - DNA, 1098 bp, Natranaerobius thermophilus JW/NM-WN-LF
  CDS (1)..(1098): transl_table=11
ttgacccacccacaaaaaacccctttgtatgatatccataaagaacgagggggaaagataattgacttcggtggttggtacttgccggtacagttcacaggtattattgacgaggtaatgacaactagaaaagaggccggtctatttgatgtttcccacatgggagaaataatagtagaaggcccaaaggctttagagtatcttcaaaaaatggtccctaatgatgtggccagattaaaaccgggtaagatactttacacaccaatgtgctatgaaaacggtggaactgtagatgactttttaatttataaaatggatgaaaataaattccttcttattgttaatgcagctaacacggacaaggattttgaatggcttcaggaaaataatactgaaggtgttgaattgaaaaatctttctgatgaatatggtcagatagcgattcaaggtcccaaggccgaaaaaatattacaacgcttgacggatactcctcttaaagagattaaattttttaatttcaaggaagatgtggatttagatggtgtgaaagctttaatttcccgcactggttatactggggaaaatggttttgaaatttatatcaaggcagaagaaacagccaaactttgggaaaagattgaagatgccggtgaaaatgatggattaaagccaattggtcttggagctagggatgtacttagatttgaagtttgtttgccattatacggtaatgaattgtcacctgaaattacccccctagaagccagactgaatccttttgttaagttgaataaaacagaagactttttaggcaaagatgtgttagtgaaccaaaaagaacaaggtctagaaagggttcttgtaggatttgagatgatcgataggggaattccaagaaccaattatatcttgatgaaagacggacaggagattggctttgttagttcgggatcacaatcaccaactcttgataaagccctagggcttggcttcattaagcctgagcatgaccaagaaggtaatgaaattgaagtgaagataagaaagaaaactgcaaaagcaaaaattgtaaaaacacctttttataggaggggataa

SEQ ID NO: 70964 - protein, 365 aa, Natranaerobius thermophilus JW/NM-WN-LF
MTHPQKTPLYDIHKERGGKIIDFGGWYLPVQFTGIIDEVMTTRKEAGLFDVSHMGEIIVEGPKALEYLQKMVPNDVARLKPGKILYTPMCYENGGTVDDFLIYKMDENKFLLIVNAANTDKDFEWLQENNTEGVELKNLSDEYGQIAIQGPKAEKILQRLTDTPLKEIKFFNFKEDVDLDGVKALISRTGYTGENGFEIYIKAEETAKLWEKIEDAGENDGLKPIGLGARDVLRFEVCLPLYGNELSPEITPLEARLNPFVKLNKTEDFLGKDVLVNQKEQGLERVLVGFEMIDRGIPRTNYILMKDGQEIGFVSSGSQSPTLDKALGLGFIKPEHDQEGNEIEVKIRKKTAKAKIVKTPFYRRG

SEQ ID NO: 70965 - DNA, 1113 bp, Stenotrophomonas maltophilia K279a
  CDS (1)..(1113): transl_table=11
atgacccagaagacgctgctcaacgatacccaccgcgcccttggcgccaagatggtcgatttcgggggttgggacatgcccatccactacggctcgcagctggacgagcaccacctggtgcgtcgcgagtcgggtgtgttcgacgtcagccacatgaccgtggtcgacctgcgcggtgaccaggtcaggccgttcctgcgccgcctgctggccaactcggtcgacaagctgaaggtgccgggcaaggcgctgtactcgtgcatgctgaatccgcgcggcggcgtcatcgacgacctgatcgtctactacctgggcgacgatttcttccgcatggtggtcaacgcctccacccgcgaaaaggacctggcctggctgcgcgagcaggccgcgccgttcggcgtcagcgtcgagcagcgcccggacctggccatcctggccgtgcagggcccgcaggcgcgcgcgatcgtgatcggcctggcccgcgaatccgagcgcgaggcgctgaccaagctgggccgcttcgccgccctgcaggtgcagtccgacgacggcgtcgagctgttcgtcgcccgtaccggttacaccggcgaagacggcttcgaaatcctgctgccgcaggacgcggtggtcgcgttctggaaccgcctgctggcggcgggcgtgaagccggccggtctcggcgcacgcgacacgttgcgcctggaagccggcatgaacctgtacggccaggacatggacgaagagatcagcccgtacgaagcggcgctggcctggacggtgtcgctggacgaaggccgcgacttcatcggtcgcgacgcgctggaagcgcagaaggctgccggcacagcacgccagatgatcggcctggtgatggacgagaagggcgtgctgcgccatggccaggcggtgaccaccgctggcggccagggcgagatcctgtccggcaccttctcgccgaccctggccaagggcatcgcttttgcccgcgtgcccgccggtgaactcggcgaggtcaccgtcgacatccgcggccggcaggtgccggtgcgcgtggtcaagttcccgttcgtgcgcgaaggccaggcccagcccggcgtgctcgccgacgcctga

SEQ ID NO: 70966 - protein, 370 aa, Stenotrophomonas maltophilia K279a
MTQKTLLNDTHRALGAKMVDFGGWDMPIHYGSQLDEHHLVRRESGVFDVSHMTVVDLRGDQVRPFLRRLLANSVDKLKVPGKALYSCMLNPRGGVIDDLIVYYLGDDFFRMVVNASTREKDLAWLREQAAPFGVSVEQRPDLAILAVQGPQARAIVIGLARESEREALTKLGRFAALQVQSDDGVELFVARTGYTGEDGFEILLPQDAVVAFWNRLLAAGVKPAGLGARDTLRLEAGMNLYGQDMDEEISPYEAALAWTVSLDEGRDFIGRDALEAQKAAGTARQMIGLVMDEKGVLRHGQAVTTAGGQGEILSGTFSPTLAKGIAFARVPAGELGEVTVDIRGRQVPVRVVKFPFVREGQAQPGVLADA

SEQ ID NO: 70967 - DNA, 1116 bp, Cellvibrio japonicus Ueda107
  CDS (1)..(1116): transl_table=11
atgggtaataaaaccgcactctatgacatccaccagtccatgggcggcaaaatagtcgatttcggcggctgggacatgcccctgcactatggttcgcaaatcgatgaacatcacaaggttcgccaacatgccggtatgttcgatgtatcccacatgacggtggttgatgtgaccggcagcgatgccaaggcctatttgcaatacctgctggccaatgacgttgccaaactcgataacctggtgggcaaagccctctacagtggcatgctcaacgaacagggcggtgtcatcgatgatttgattgtgtacaacatgggcgactggtaccgcgtcgtcgtcaactgcagtacacgcgaaaaagacctggcctggatgagccaggtagcaaacaactaccaggtcaagctgcaagagcgcgccgacctggccatgatcgccgtccagggcccgcaggccattgccatcaccaaaaccctggtcagtgccgaagcggctacgctgatcgataacttgcaggttttccaggggctcgcctccacacaacaggggagcgattggttttttggacgcactggctataccggcgaggatggcctcgaaattatgctgcccaatgaacaggccggcactttctggcaagccctggcagccgccggtgtagcaccctgcggattgggcgcgcgcgataccctgcgcctggaggcggggatgaacctctacggccacgagatggacgaaaacatctctccgctggcagccaatatgggctggactatcgcctggcaaccggaggcgcgcaactttatcggccgcgcggcactcactgcggaaaaatccgcaggccaacgccacaaactggttggcctggtgctgcgcgagcgcggcgtcctgcgcgccgaacagttggtgcatatcgccaacagcgatgaacgcggcgtgattaccagcgggacattttcgcccagcttgggctattctattgctctggcgcgggtacctgtcacccaggtacccctgacacccggtgcccaatgccaggtagaaatgcgtggcaagctggtcactgtcgatgtcgtcgcccccggttttgtacgccagggaaaagccctggtttaa

SEQ ID NO: 70968 - protein, 371 aa, Cellvibrio japonicus Ueda107
MGNKTALYDIHQSMGGKIVDFGGWDMPLHYGSQIDEHHKVRQHAGMFDVSHMTVVDVTGSDAKAYLQYLLANDVAKLDNLVGKALYSGMLNEQGGVIDDLIVYNMGDWYRVVVNCSTREKDLAWMSQVANNYQVKLQERADLAMIAVQGPQAIAITKTLVSAEAATLIDNLQVFQGLASTQQGSDWFFGRTGYTGEDGLEIMLPNEQAGTFWQALAAAGVAPCGLGARDTLRLEAGMNLYGHEMDENISPLAANMGWTIAWQPEARNFIGRAALTAEKSAGQRHKLVGLVLRERGVLRAEQLVHIANSDERGVITSGTFSPSLGYSIALARVPVTQVPLTPGAQCQVEMRGKLVTVDVVAPGFVRQGKALV

SEQ ID NO: 70969 - DNA, 1089 bp, Chloroherpeton thalassium ATCC 35110
  CDS (1)..(1089): transl_table=11
atgaaatacacgccattacataaaattcatcaacagcttggggcaaaattggttgattttgccggctttgaaatgcccgttcaatatgacggaatcctggttgagcacaaagcagtcagagaggccgttgggctatttgatgtctcgcacatgggcgagtttgaagtcaaaggaaaaggggcgaaagcgttccttcaaaacatgacaacaaacgacgttgaaagcctttgcgacggcaaagcccaatactcgctattgctctatgaagatggcggggttgttgatgatctgctcgtatataaaattgccgacgagcactattttttaattgtcaatgcaagcaatattgaaaaggatttcgattggctaaaacaacaccaacctgatgatgaggttgttttggaaaatcgctccgatgagctttcacttattgccattcaagggccaaaagcggaagccgttttgtcgaaactcaccgatgtgccactggatgccatcaagtattatcacttcgtatttggcgatgtttgtggcaagcgtaccctgatttcacgcacaggctacactggcgaagctggctttgaactttgcatggcaaacgagcacgctgaagaaatttggcacgcccttatcgaagcaggcctgccatttggcattgtccccgtagggcttggcgctcgcgatacgcttcgtcttgaaatgggatatagcttatacggtcacgagattgatcaccaaaccaatccctatgaagcgcaattaggctggattacaaaactgcaaaaaggtgattttattggaaaaaatgcctgcgtcgagaaaaaattgcatttggaacaaacgctggttggatttactttaaccggaaaaaacattcctcgtcaaggctataaaatccaagacttaagtgggacagacataggcgttgtttgtagtggaacgctctccccaactttgggaaagccgattggaacaggatatgtaaaatcttcattttcaaaaattgactcgaaagtttatataaacatcagaggaaaattacaagaagcagcggtggtaaaagtaccgtttctccataaaaaccggtaa

SEQ ID NO: 70970 - protein, 362 aa, Chloroherpeton thalassium ATCC 35110
MKYTPLHKIHQQLGAKLVDFAGFEMPVQYDGILVEHKAVREAVGLFDVSHMGEFEVKGKGAKAFLQNMTTNDVESLCDGKAQYSLLLYEDGGVVDDLLVYKIADEHYFLIVNASNIEKDFDWLKQHQPDDEVVLENRSDELSLIAIQGPKAEAVLSKLTDVPLDAIKYYHFVFGDVCGKRTLISRTGYTGEAGFELCMANEHAEEIWHALIEAGLPFGIVPVGLGARDTLRLEMGYSLYGHEIDHQTNPYEAQLGWITKLQKGDFIGKNACVEKKLHLEQTLVGFTLTGKNIPRQGYKIQDLSGTDIGVVCSGTLSPTLGKPIGTGYVKSSFSKIDSKVYINIRGKLQEAAVVKVPFLHKNR

SEQ ID NO: 70971 - DNA, 1098 bp, Chlorobaculum parvum NCIB 8327
  CDS (1)..(1098): transl_table=11
atgaaaaagacagcgctctctgcctggcatgaaggtgccggtgcgaaaatgatcgatttcggcggctttctgatgccggtgcagtattccggaatcatcgccgaacacaaggcggtgcgtgaagctgccggactgttcgatgtttcgcacatggggaatttctacgtcaggggcgagcgtgcgctggagtttctccagtacgtcaccaccaacgatctcggcaagatcgtggacgggcaggcgcagtacacgctgatgctttatccggacggcggcatcgtcgatgacctcatcatctaccgcgtcagcgccgacacctttttcctgatcgtcaacgcgagcaactgcgaaaaggatttcgcctggctcagcgaccatgtcggcggcttcgagggcgtgacgctcgaaaaccgcaccagcgagctgtcgctgatcgctctgcagggcccgaaagcgttcgaggtactcgggcgtgtatttccggaggccgggctcgacaagctggcttcgttccatttcgcgaccgtgcctttcggtggcgcggaggccatggtagcccgcaccggctacaccggcgaggctggcgtggagatctgcctgccgaacgaagaggctgaggcgttgtggacggctcttatggccgccggaaaaaatgacggcattcagcccatcggcctcggcgcgcgcgacacccttcgccttgaaatgggttattcgctctatggccacgagatcgaccagacggtgaacccgctcgaagcgcgtttgaaatgggtggtcaagatggacaagcccaacttcatcggcaagcaggcctgccagcaggtcgagcttgatccgcgcaagagcgtggtcggtttcagcctcgacggccgtgccattccgcgccagcatttcaaggtctacaactccgacaagcaggagatcggcgaggtgtgcagcggcacggtttcgccgacgcttcaggagcctatcggtacggccagccttctgcgcgactatgcgaaaaccggcacgccgatcttcgttgagattcgcggcacctttcaacccggtacggtcaggcgtcttccgttcgtgcatgccgaccgtccctga

SEQ ID NO: 70972 - protein, 365 aa, Chlorobaculum parvum NCIB 8327
MKKTALSAWHEGAGAKMIDFGGFLMPVQYSGIIAEHKAVREAAGLFDVSHMGNFYVRGERALEFLQYVTTNDLGKIVDGQAQYTLMLYPDGGIVDDLIIYRVSADTFFLIVNASNCEKDFAWLSDHVGGFEGVTLENRTSELSLIALQGPKAFEVLGRVFPEAGLDKLASFHFATVPFGGAEAMVARTGYTGEAGVEICLPNEEAEALWTALMAAGKNDGIQPIGLGARDTLRLEMGYSLYGHEIDQTVNPLEARLKWVVKMDKPNFIGKQACQQVELDPRKSVVGFSLDGRAIPRQHFKVYNSDKQEIGEVCSGTVSPTLQEPIGTASLLRDYAKTGTPIFVEIRGTFQPGTVRRLPFVHADRP

SEQ ID NO: 70973 - DNA, 1128 bp, Cupriavidus taiwanensis
  CDS (1)..(1128): transl_table=11
atgacgctccaggccacgcccctcaacgctatccaccgcgccctcggcgcccgcatggtcgacttcggcggctgggacatgccggtcaactatggctcccagatcgaggagcaccatgccgtgcgcaacgatgccggcatgttcgacgtctcgcacatgtgcgtggtcgacctcgccggccccaatacccgcgccttcctgcgcggcctgctggccaacaacgtcgacaagctgcagaccccgggcaaggcactctattcctgcatgcttgacgagcacggcggcgtcatcgacgacctgatcgtctatttctttgcggaagaccgtttccgcctggtcgtcaacgccggcaccgcggtcggcgatatcgactggatccgcgcccgcaacgaggccaccggcagcggcgtgaccatcacgccgcgccgcgaggacgttgcgcccgcgggcgtgccgccgctggcgatcgtcgcggtgcaggggcccaatgcccgcgccaaggtctggagcaccttcccgtcgacccagccttccgacgcgctcaagccgttcaacgcggtggtggtgcaggatccggccctcggcgaagtgatggtggcacgcaccggttacaccggcgaagacggcttcgaactggtggtaccggccgccagcgtcgccggcctgtgggaaaagctgcaagccgccggcgtgcgcccggccggcctgggtgcgcgcgacacgctgcgcctggaagccggcatgaacctgtacggccaggacatggatatcaaggtctcgccgctggatgcgggcctggcgtggacggtcgacctgcagagcgagcgcgacttcaccggcaaggcggcgctggccgcggccggttcgcgccagcagtttctcggcctgatcctgcgcgacaaaggtggcgtcctgcgtgcccaccagaaagtcatcacccccgccggtgacggcgaaatcaccagcggcacgttcagcccctcgctgtcgcaatcgatcgcgttcgcgcgcctgccgcaaggcgtgaacgtgggcgacaccgtgcaggtggagatccgcgaccgcaaactcaacgcgactgtggttaaactgccgtttgtgcgtcatggcaaggcactcgtgagctaa

SEQ ID NO: 70974 - protein, 375 aa, Cupriavidus taiwanensis
MTLQATPLNAIHRALGARMVDFGGWDMPVNYGSQIEEHHAVRNDAGMFDVSHMCVVDLAGPNTRAFLRGLLANNVDKLQTPGKALYSCMLDEHGGVIDDLIVYFFAEDRFRLVVNAGTAVGDIDWIRARNEATGSGVTITPRREDVAPAGVPPLAIVAVQGPNARAKVWSTFPSTQPSDALKPFNAVVVQDPALGEVMVARTGYTGEDGFELVVPAASVAGLWEKLQAAGVRPAGLGARDTLRLEAGMNLYGQDMDIKVSPLDAGLAWTVDLQSERDFTGKAALAAAGSRQQFLGLILRDKGGVLRAHQKVITPAGDGEITSGTFSPSLSQSIAFARLPQGVNVGDTVQVEIRDRKLNATVVKLPFVRHGKALVS

SEQ ID NO: 70975 - DNA, 1092 bp, Prosthecochloris aestuarii DSM 271
  CDS (1)..(1092): transl_table=11
atgaaaaaaactgcactgtatgcctggcatgaagctgccggggctaaaattatcgatttcggcggttatctgatgccggttcagtatagcggaatcatcgctgaacatacatgtgtcagaacgtctgccggtctgtttgacgtctcacatatggggaacttcatggtcaaggggagaggcgcaaaagcgtttctgcagcatatgacctcaaatgatgtcgacaagctttcggacggccaggcccagtataccctgctgctctatcctgagggaggcatcgttgatgatcttattatctaccgtatagatgccgacacctggtttatggtggtcaacgcaagcaacatggaaaaagattattcctggctgcaggaacatcttggatcgtttgaaggggttcagctcgaaaatcacacggaggaactctctttgatagccttgcagggtcctcgatcaatggagattctcgatcgcgtttttacaggaggtgaatgcagtgggatcaagccgtttcacttccgaaccgtgccgttcaacggcagggaggtgatcgtcgctgccacgggatataccggagagcgtggtgttgagatttccgttcccaacgacgcggcaacagcactctgggtcgcgttgatggaggccggcagtgctgacggtattcagcctatcggtttaggggcgcgcgatacgcttcgcctcgaaatgggctatcctctctacggccatgaaatcaatcgggagacgagtcccatcgaagcgcggctgaagtgggtgaccaggctcgacaagggaaattttgtcggcagggagtcctgtgttgctgtcgacatcaatccgcaacgtacggttgtcggtttcatgatgcatgaacgggcaattccccgtcagggctttactgtctacaatcgcgaccgtaaaccgcttggctcggtatgcagtggaacgatgtctcctacgctcaaacagccgatcggtaccgctgatgtgccgcgcggctatatgaagagcggaacaccgctctatctggaagtcaggggaaagttctataaaggagaggttgtcaaacttccatttgtcaacagagcctga

SEQ ID NO: 70976 - protein, 363 aa, Prosthecochloris aestuarii DSM 271
MKKTALYAWHEAAGAKIIDFGGYLMPVQYSGIIAEHTCVRTSAGLFDVSHMGNFMVKGRGAKAFLQHMTSNDVDKLSDGQAQYTLLLYPEGGIVDDLIIYRIDADTWFMVVNASNMEKDYSWLQEHLGSFEGVQLENHTEELSLIALQGPRSMEILDRVFTGGECSGIKPFHFRTVPFNGREVIVAATGYTGERGVEISVPNDAATALWVALMEAGSADGIQPIGLGARDTLRLEMGYPLYGHEINRETSPIEARLKWVTRLDKGNFVGRESCVAVDINPQRTVVGFMMHERAIPRQGFTVYNRDRKPLGSVCSGTMSPTLKQPIGTADVPRGYMKSGTPLYLEVRGKFYKGEVVKLPFVNRA

SEQ ID NO: 70977 - DNA, 1113 bp, Stenotrophomonas maltophilia R551-3
  CDS (1)..(1113): transl_table=11
atgacccagaagacgctgctcaacgatacccaccgcgcccttggcgccaagatggtcgatttcgggggttgggacatgcccatccactacggctcgcagctggacgaacaccacctggtgcgtcgtgagtccggtgtgttcgacgtcagccacatgaccgtggtcgacctgcgcggtgaccaggtcaagccgttcctgcgccgcctgctggccaactccgtggacaagctgaaggtgaccggcaaggccctgtactcgtgcatgctgaatccgcgcggcggcgtcatcgacgacctgatcgtctactacctgggcgacgatttcttccgcatggtggtcaatgcctccacccgcgagaaggacctggcctggctgcgcgagcaggctgcgccgttcggcgtcaccgtcgagcagcgcccggacctggccatcctcgccgtgcagggcccgcaggcgcgcgacatcgtcatcggcctggcccgcgaagccgaccgtgcagcgctgaccaagctgggccgcttcgccgcgctgcaggcgcagtccgacgatggcatcgagctgttcgtcgcccgcaccggctacaccggtgaagatggtttcgagatcctgctgccgcaggacgccgtggtcgcgttctggaatcgcctgctggcggcgggcgtgaagccggccggcctcggcgcacgcgacaccctgcgcctggaagccggcatgaacctgtatggccaggacatggacgaagcaatcagcccgtacgaagcggcgctggcctggaccgtgtcgctggacgagggccgcgacttcattggccgcgacgtgctggaagcgcagaaggccgcaggcaacgcacgccagatgatcggcctggtgatggacgagaagggcgtgctgcgtcatggccaggcggtgaccaccgccggtggccagggcgagatcctgtccggcaccttctcgccgaccctggccaagggcatcgccttcgcccgcgtgccggccggtgaactgggccaggtcaccgtcgatatccgcggccggcaggtgccggtgcgcgtggtcaagttcccgttcgtgcgcgaaggccaggcccagcccggcgtgcttggcgacgcgtga

SEQ ID NO: 70978 - protein, 370 aa, Stenotrophomonas maltophilia R551-3
MTQKTLLNDTHRALGAKMVDFGGWDMPIHYGSQLDEHHLVRRESGVFDVSHMTVVDLRGDQVKPFLRRLLANSVDKLKVTGKALYSCMLNPRGGVIDDLIVYYLGDDFFRMVVNASTREKDLAWLREQAAPFGVTVEQRPDLAILAVQGPQARDIVIGLAREADRAALTKLGRFAALQAQSDDGIELFVARTGYTGEDGFEILLPQDAVVAFWNRLLAAGVKPAGLGARDTLRLEAGMNLYGQDMDEAISPYEAALAWTVSLDEGRDFIGRDVLEAQKAAGNARQMIGLVMDEKGVLRHGQAVTTAGGQGEILSGTFSPTLAKGIAFARVPAGELGQVTVDIRGRQVPVRVVKFPFVREGQAQPGVLGDA

SEQ ID NO: 70979 - DNA, 1119 bp, Burkholderia cenocepacia PC184
  CDS (1)..(1119): transl_table=11
atgactgcactgaaccacaccccgctcaacgccgcgcaccgcgcgctcaatgcccgcatggtcgacttcggcggctgggacatgcccgtcaactacggctcgcagatcgaagaacacgctgccgtgcgcaccgacgccggcatgttcgacgtgtcgcacatgtgcgtcgtcgatttcaccggcagccgcgtgcgcgcgttcttcgagcatgcgatcgcgaaccacgtcggcaagctcaagacacccggcaaggcgctctactcgtgcctgctcaacccgcagggcggcgtcatcgacgatctgatcgtctattacttcaccgaagaattcttccgcgtggtcgtcaacgccggcaccgccgagaaagacatcgcgtggttcaaccagctgaacgagcaaggcggctacggcctgaccatcgcgccgcgccgcgatttcgcgatcgtcgccgtgcagggtccgaacgcccgtgaaaaggtctgggcgacggtgccgtccgcccgcgccgccaccagcgaactcaagccgttcaacgccgcgcaggtcgccggcacgccgttcggcgatctcaccgtcgcgcgcaccggctacaccggcgaagacggcttcgaagtgatcgtcccggccgtgcacgtcgaagcactgtggaacgccctccagcaaaacggcgtgcgtccgtgcgggctcggcgcgcgcgacacgctgcgcctcgaggccggcatgaacctgtacggccaggacatggacgacaccgtctcgccgctcgacgcgggcctcgcgtggacggtcgacctcaccgtgccgcgcgacttcgtcggccgcgccgccctggaagccaacggcacgcgcgccgcgttcgtcggcctgatcctgcagaaggaaaacggcaaggcgggcggcgtgctgcgcgcgcaccagaaggtcgtcacgccgcacggcgaaggcgagatcacgagcggcacgttctcgccgtcgatgcaggaatcgatcgcgttcgcgcgcgtgccggcggccgtccagatcggcgacatcgtccaggtgcaaattcgagacaagaatcttcccgcgcgcgtggtaaaactgccgttcgtgcgcaacggcaaggtcttcgctgcgtaa

SEQ ID NO: 70980 - protein, 372 aa, Burkholderia cenocepacia PC184
MTALNHTPLNAAHRALNARMVDFGGWDMPVNYGSQIEEHAAVRTDAGMFDVSHMCVVDFTGSRVRAFFEHAIANHVGKLKTPGKALYSCLLNPQGGVIDDLIVYYFTEEFFRVVVNAGTAEKDIAWFNQLNEQGGYGLTIAPRRDFAIVAVQGPNAREKVWATVPSARAATSELKPFNAAQVAGTPFGDLTVARTGYTGEDGFEVIVPAVHVEALWNALQQNGVRPCGLGARDTLRLEAGMNLYGQDMDDTVSPLDAGLAWTVDLTVPRDFVGRAALEANGTRAAFVGLILQKENGKAGGVLRAHQKVVTPHGEGEITSGTFSPSMQESIAFARVPAAVQIGDIVQVQIRDKNLPARVVKLPFVRNGKVFAA

SEQ ID NO: 70981 - DNA, 1134 bp, Burkholderia dolosa AUO158
  CDS (1)..(1134): transl_table=11
ttgcctgaggcctcgatgactgcactgaaacataccccgctcaacgccgcgcaccgcgcgctcaatgcccgcatggtcgatttcggcggctgggacatgcccgtcaactacggctcgcagatcgaagagcacgaagccgtgcgcaccgacgccggcatgttcgacgtgtcgcacatgtgcgtagtcgacttcaccggcagccgcgtgcgcgcgttcttcgagcgcgcgatcgcgaacaacgtcggcaagctgcgcacgcccggcaaggcgctctactcgtgcctgctcaatccgcagggcggcgtcatcgacgatctgatcgtctactacttcaccgaggaattcttccgcgtcgtcgtcaacgccggcaccgccgacaaggacgtcgcgtggttcaaccagctcaacgagcaaggcggctacggcgtgacgatcgcgccgcgccgcgatctggccatcgtcgcggtgcagggcccgaacgcgcgcgaaaaagcgtggacgacggtgcccgccgcgcgcgccgcgacgagcgagctgaagccgttcaacgccgcgcaggtcgccggcacgccgttcggcgacctcaccgtcgcgcgcaccggctacaccggcgaggacggcttcgaagtgatcgttcctgccgtgcacgttgtcgcgctgtggaacgcgctgcagcagaacggcgtgcgcccgtgcgggctcggcgcgcgcgacacgctgcgcctcgaagccggcatgaacctgtatggccaggacatggacgacaacgtgtcgccgctcgatgcgggcctcgcatggacggtcgatctgtcgacgccgcgcgaattcgtcggccgcgccgcgctcgagcgcgacggtacgcgcgccgcgttcgtcggcctgatcctgcagaaggaaaacggcaaggcgggcggcgtgctgcgcgcgcaccagaaggtcgtcacgccgcacggcgaaggcgagatcacgagcggcacgttctcgccgacgatgcaggaatcgatcgcgttcgcgcgcgtgccgacggccgtgcagatcggcgacacggtgcacgtgcagattcgcgacaagcaacttcccgcgcgcgtggtaaaactgccgttcgtgcgcaacggcaaggtcctcgctgcgtaa

SEQ ID NO: 70982 - protein, 377 aa, Burkholderia dolosa AUO158
MPEASMTALKHTPLNAAHRALNARMVDFGGWDMPVNYGSQIEEHEAVRTDAGMFDVSHMCVVDFTGSRVRAFFERAIANNVGKLRTPGKALYSCLLNPQGGVIDDLIVYYFTEEFFRVVVNAGTADKDVAWFNQLNEQGGYGVTIAPRRDLAIVAVQGPNAREKAWTTVPAARAATSELKPFNAAQVAGTPFGDLTVARTGYTGEDGFEVIVPAVHVVALWNALQQNGVRPCGLGARDTLRLEAGMNLYGQDMDDNVSPLDAGLAWTVDLSTPREFVGRAALERDGTRAAFVGLILQKENGKAGGVLRAHQKVVTPHGEGEITSGTFSPTMQESIAFARVPTAVQIGDTVHVQIRDKQLPARVVKLPFVRNGKVLAA

SEQ ID NO: 70983 - DNA, 1080 bp, Alteromonas macleodii 'Deep ecotype'
  CDS (1)..(1080): transl_table=11
atgtctagtaccaccgccctacacacaaagcacctagaagccggtgcgaaaatggtcgatttcttcggctgggatatgccaattaactatggttcacaaattgaagaacatcacgctgtgcgtcaagacgccggtatgtttgatgtgtctcatatgaccattgttgacgtaaaaggcgcacaagcgaaagcgtatcttcagtaccttttagccaacgacgtggcgaaattaaaagacaaaggcaaagcgctatacagcggcatgcttaacgaagaaggcggtgttgtagacgaccttatcgtttatcacttcgacgaaactaactatcgcctagtggttaactcagcgacacgcgaaaaagacatgaactggttgatgagcaaagcagaaggctttgacgtaaccatcaccgagcgccctgagtttgccatgattgccgtacaaggccctaacgcaaaagaaaaagcagcgaccttgtttagcgcagcgcaaaaagaagcggtagcgggcatgaagccattctttggcgtacaagcagaagacttgttcatcgccaccacaggttacaccggtgaagcaggctacgaaattatggtgccagctgaacaagcggaaagcttctggcaagcactactagacgcgggcgttaagccatgcggcctaggagcacgcgacacccttcgcctagaagcaggtatgaacctgtacggccaagatatggatgaaaccgtatcgccattagccgccaacatgggctggacaattacatgggaaccggccgaacgtgacttcgtagggcgtaaagcactagaagcgcagcgcgaagcaggtaccgacaagctagtaggcttggtgatgaccgaaaaaggcgtgctgcgtcacggtcttaaagtgaaaacagaaagcggcgaaggcgttatcacttcaggtacgttctctccaactttaggtcactcaattgcgatggcacgagtaccacgtgatgttggtgaaacagtagaagtggaaatgcgcaaaaagtgggttacagtaaaagtggttaagccctcctttgttcgcaatggaaaaagtgttttataa

SEQ ID NO: 70984 - protein, 359 aa, Alteromonas macleodii 'Deep ecotype'
MSSTTALHTKHLEAGAKMVDFFGWDMPINYGSQIEEHHAVRQDAGMFDVSHMTIVDVKGAQAKAYLQYLLANDVAKLKDKGKALYSGMLNEEGGVVDDLIVYHFDETNYRLVVNSATREKDMNWLMSKAEGFDVTITERPEFAMIAVQGPNAKEKAATLFSAAQKEAVAGMKPFFGVQAEDLFIATTGYTGEAGYEIMVPAEQAESFWQALLDAGVKPCGLGARDTLRLEAGMNLYGQDMDETVSPLAANMGWTITWEPAERDFVGRKALEAQREAGTDKLVGLVMTEKGVLRHGLKVKTESGEGVITSGTFSPTLGHSIAMARVPRDVGETVEVEMRKKWVTVKVVKPSFVRNGKSVL

SEQ ID NO: 70985 - DNA, 1077 bp, Francisella tularensis subsp. novicida GA99-3548
  CDS (1)..(1077): transl_table=11
atgctgaaaactcctctttatgaatcacatatagcagcaaatgctaagatggttgatttctcaggttggtcaatgccaattaactatggttcacaaattcaagagcataataatgttagagaagattgtggtatttttgatgtatcacatatgttagcagttgatattcaaggttctgaagctgagaagtttttacgctatcttttagctaatgatgttgctaaattacaggagaataaagctcaatatggctgtatgttaaatcatgatgctggtattgttgatgatttgattacttataaagttacagatgagcattttagaatagttgtcaatgctggtaatagagagtcagatgttgcatgttttaatcaaaatgctcaaaattttgatgttgcgataaccccacagactgatttagctatagttgcagtacagggaccaaaagctgttgacgttattaagcgtgttgttaccaaagaaattgctgctgaaattgaagcgctattgcctttttcatttaagttttttagtaaatggatggtagcacgtactggttatactggtgaagatggttttgaggtgattctccctgcaacgcaggtcaaaaaattctgggatagtctgcttgaaaatggagcacaacctgcagggttgggcgctcgtgatacattaagattagaagcggggatgcatctatatagtgctgatatggatacctctacgacacctctagaaagaggcttgggctggagcgttgatttatctgacgaacatagggactttattggtaagaaagcataccttgctaaaaaagcacaaggagttgatactaaatgggtcggtgtagtactaaaaacaaaaggtgtccttagagcaggtcaagaaattgattttgataatggtgaaaaaggctatataaccagtgggagtttttcaccaactttgaaagtagctattggattagcttatgtgcctaagcaagctgataatcctgtggtaaatattagaggtaaggagctcgaagtcgagctagttaaacctaagtttgttaaaaatggtaaatctttgatataa

SEQ ID NO: 70986 - protein, 358 aa, Francisella tularensis subsp. novicida GA99-3548
MLKTPLYESHIAANAKMVDFSGWSMPINYGSQIQEHNNVREDCGIFDVSHMLAVDIQGSEAEKFLRYLLANDVAKLQENKAQYGCMLNHDAGIVDDLITYKVTDEHFRIVVNAGNRESDVACFNQNAQNFDVAITPQTDLAIVAVQGPKAVDVIKRVVTKEIAAEIEALLPFSFKFFSKWMVARTGYTGEDGFEVILPATQVKKFWDSLLENGAQPAGLGARDTLRLEAGMHLYSADMDTSTTPLERGLGWSVDLSDEHRDFIGKKAYLAKKAQGVDTKWVGVVLKTKGVLRAGQEIDFDNGEKGYITSGSFSPTLKVAIGLAYVPKQADNPVVNIRGKELEVELVKPKFVKNGKSLI

SEQ ID NO: 70987 - DNA, 1095 bp, Salmonella enterica subsp. enterica serovar Gallinarum str. 287/91
  CDS (1)..(1095): transl_table=11
atggcccaacagacgcctttgtacgaacaacacacgctatgcggcgcccgcatggtcgattttcatggctggatgatgcccctgcattacggctctcagcttgatgaacaccacgctgtgcgcaccgatgccgggatgtttgatgtatcgcatatgaccattgtcgatcttcatggcagccgcacacgagagtttctacgttatctgctggccaacgacgtcgcgaagctaacgaagacgggtaaagccctctactccggtatgcttaacgcatcgggcggcgtgattgatgaccttatcatctactacttcactgaagatttcttccgtctcgttgttaactccgccacccgcgaaaaagacctctcctggattacccaacacgctgaaccttatgccatcgacattaccgttcgtgacgacctgtcgctgattgcggtacaggggccgaatgcgcaggaaaaagcggcgactctgtttactgacgaacagcgccatgcagtagaaggtatgaagccgttcttcggcgttcaggtgggcgatctgtttatcgccaccaccggttataccggcgaagcgggctatgaaatcgccatgccgaatgaaaaagcggcggatttctggcgtgcgctggtggaggcgggcgtgaagccgtgcggtcttggcgcgcgcgacacgctgcgtctggaagctggcatgaacctgtacggtcaggagatggatgaaggtatctctccgctggcggctaatatgggatggactatcgcctgggaacctgctgaccgcgactttattggccgtgaggcgctggagatgcagcgtgaaaaaggccatgagcagcttgtcggtctggtgatgaccgagaaaggcgtattgcgtaatgaactgccggtgcgttttaccgatgcgcagggcaatcagcaagaaggcattatcaccagcgggacgttttccccaacgttgggctacagcattgcgctggcgcgtgttccggcgggcatcggcgagacggcgattgtacaaattcgtaaccgtgaaatgccggtaaaagtgactaaacctgtttttgtgcgtaacggcaaagccgtcgcgtga

SEQ ID NO: 70988 - protein, 364 aa, Salmonella enterica subsp. enterica serovar Gallinarum str. 287/91
MAQQTPLYEQHTLCGARMVDFHGWMMPLHYGSQLDEHHAVRTDAGMFDVSHMTIVDLHGSRTREFLRYLLANDVAKLTKTGKALYSGMLNASGGVIDDLIIYYFTEDFFRLVVNSATREKDLSWITQHAEPYAIDITVRDDLSLIAVQGPNAQEKAATLFTDEQRHAVEGMKPFFGVQVGDLFIATTGYTGEAGYEIAMPNEKAADFWRALVEAGVKPCGLGARDTLRLEAGMNLYGQEMDEGISPLAANMGWTIAWEPADRDFIGREALEMQREKGHEQLVGLVMTEKGVLRNELPVRFTDAQGNQQEGIITSGTFSPTLGYSIALARVPAGIGETAIVQIRNREMPVKVTKPVFVRNGKAVA

SEQ ID NO: 70989 - DNA, 1119 bp, Burkholderia cenocepacia J2315
  CDS (1)..(1119): transl_table=11
atgactgcactgaatcacactccgctcaacgccgcgcaccgcgcgctcaatgcccgcatggtcgacttcggcggctgggacatgcccgtcaactacggctcgcagatcgaagaacacgctgccgtgcgcaccgacgccggcatgttcgacgtgtcgcacatgtgcgtcgtcgatttcaccggcagccgcgtgcgcgcgttcttcgagcatgcgatcgcgaacaacgtcggcaagctcaagacgcccggcaaggcactctactcgtgcctgctcaacccgcaaggcggcgtcatcgacgatctgatcgtctactacttcaccgaagaattcttccgcgtggtcgtcaacgccggcaccgccgacaaagacatcgcgtggttcaaccagctgaacgagcaaggcggctacggcctgacgatcgcgccgcgccgcgatttcgcgatcgtcgccgtccagggtccgaacgcccgcgaaaaggtctgggcgacggtgccttccgcccgcgccgccaccagcgaactcaagccgttcaacgccgcgcaggtcgccggcacgccgttcggcgatctcactatcgcccgcaccggctataccggcgaagacggcttcgaagtgatcgtcccggccgtgcacgtcgaagtgctgtggaatgcgctgcagcaacacggcgtgcgtccgtgcggactcggcgcgcgcgacacgctgcgcctcgaggccggcatgaacctgtacggccaggacatggacgacaccgtctccccgctcgacgcgggcctcgcatggaccgtcgacctcgccgcgccgcgcgacttcgtcggccgcgccgcactcgaagccaacggcacgcgcgccgcgttcgtcggcctgatcctgcagaaggaaaacggcaaggcgggcggcgtgctgcgcgcgcaccagaaggtcgtcacgccgcacggcgaaggcgagatcacgagcggcacgttctcgccgtcgatgcaggaatcgatcgcgttcgcgcgggtgccggcggccgtccagatcggcgacaccgtccaggtgcaaattcgagacaagaatcttcccgcgcgcgtggtaaaactgccgttcgtgcgcaacggcaaggtcctcgctgcgtaa

SEQ ID NO: 70990 - protein, 372 aa, Burkholderia cenocepacia J2315
MTALNHTPLNAAHRALNARMVDFGGWDMPVNYGSQIEEHAAVRTDAGMFDVSHMCVVDFTGSRVRAFFEHAIANNVGKLKTPGKALYSCLLNPQGGVIDDLIVYYFTEEFFRVVVNAGTADKDIAWFNQLNEQGGYGLTIAPRRDFAIVAVQGPNAREKVWATVPSARAATSELKPFNAAQVAGTPFGDLTIARTGYTGEDGFEVIVPAVHVEVLWNALQQHGVRPCGLGARDTLRLEAGMNLYGQDMDDTVSPLDAGLAWTVDLAAPRDFVGRAALEANGTRAAFVGLILQKENGKAGGVLRAHQKVVTPHGEGEITSGTFSPSMQESIAFARVPAAVQIGDTVQVQIRDKNLPARVVKLPFVRNGKVLAA

SEQ ID NO: 70991 - DNA, 1086 bp, Coprothermobacter proteolyticus DSM 5265
  CDS (1)..(1086): transl_table=11
ttggggctcaaaagaacctctttgtatgaagtgcataagacactgggagcaaagcttgttgaatttgccggctttgaaatgcccttgcagtacagtggcataatcgacgaacacatggctgtgcgaaccagtgctggcatgttcgatgtttcccacatgggcgagttttattacaagggcgacatcgatgccataaacatggtggttacggtggacctcacaaagctggaaccgttgaaggctgcttacaccatgctgttgaacgaaagtggtggcgtcgtcgatgacttaatcgtttaccgcctatcgccagatgaagtactgcttgtggtaaatgcggcgaatattgagaaggacttccagcacatacttaactacctgcccaaagaaggctctcacgtgttcgagaatgtgtccgacaagtggtttgatattgctgtgcagggaccaaaagccgtggacatattgaaaacctatttccctcaggttgttgatttggctgcctttgggtttgtctcagtgcctgaacatggccttatcataagcaggactggttatactggcgaggacggttttgaggtttacggccccatggaggaagcccccacgtggtggaataagttcatggatgctggttcttcactgggtttgaaaccagctggcttaggtgctcgtgacacacttcgcattgaagctggtttgcccctttatggtcacgaacttaatgaagaaacgtcgccgctggaatcgaattacgcttttgtcattgactgggataaaccgcagttcataggtcgagaagccttagtaaagcaaaaagaatcaggcattcaaaagaagctcatgggattggagattaccggtggtattgcccgagagggttacaaggtcttttctgaaggtgaagaagtgggtgtggttacttcgggaaccatggctcccttcttgaagaaaagcattgccatggcatttttgcgtgtggataaagcgaaaataggcacacctgttgaagttcaaatccatggacaaatggtgccagccaaggttgtgtcaaagatgttctacaagcgagggaaaacgcaatga

SEQ ID NO: 70992 - protein, 361 aa, Coprothermobacter proteolyticus DSM 5265
MGLKRTSLYEVHKTLGAKLVEFAGFEMPLQYSGIIDEHMAVRTSAGMFDVSHMGEFYYKGDIDAINMVVTVDLTKLEPLKAAYTMLLNESGGVVDDLIVYRLSPDEVLLVVNAANIEKDFQHILNYLPKEGSHVFENVSDKWFDIAVQGPKAVDILKTYFPQVVDLAAFGFVSVPEHGLIISRTGYTGEDGFEVYGPMEEAPTWWNKFMDAGSSLGLKPAGLGARDTLRIEAGLPLYGHELNEETSPLESNYAFVIDWDKPQFIGREALVKQKESGIQKKLMGLEITGGIAREGYKVFSEGEEVGVVTSGTMAPFLKKSIAMAFLRVDKAKIGTPVEVQIHGQMVPAKVVSKMFYKRGKTQ

SEQ ID NO: 70993 - DNA, 1074 bp, Ralstonia solanacearum MolK2
  CDS (1)..(1074): transl_table=11
atggtcgactttggcggctgggacatgccggtcaactacggctcccagatcgaggaacatcacgccgtgcgccgcgatgccggcatcttcgacgtttcgcacatgtgcgtggtcgacctcaccggtgcgcgggtacgcgatttcctgcgcgggctgctcgccaacaacgtcgacaagctgcagaccccgggcaaggcgctctacacctgcatgctcaaccccaagggcggggtgatcgacgacctgatcgtctatttcttccgtgaagactggttccgcctggtggtcaacgccggcactgcgccgaccgacctcgaatggatcgtcgcgcagaacgccgccgccggcactggcgtgaccatcacgccgcgccgctccgacaacaacgcgggcccggagccgctcggcatcgtggccgtgcagggcccgaacgcgcgcgccaagacctacgccgcattgccgggcacgcaggcggtgggcgaggcgctcaagccgttcaacgcgggcttcgccaccgtcgacggcgtgggcgagatcatggtcgcgcgcaccggctatacgggtgaagacggcttcgagctggtggtgcccgccgcccagatcgcgggcgtatgggagcgcctgctgcaggccggcgtgcgcccctgcggcctgggcgcgcgcgacacgctgcgcctggaagccggcatgaacctctacggccaggacatggacgagcacgtctcgccgctggacgccggcctggcctggacggtcgacctgcagagcgagcgcggcttcaacggcaaggcagcgctcgccgccaacggccagcgcgaccagttcgtcggcctgctgctgcgcgacaagggcggcgtgctgcgcgcccaccagaaagtcatcacgcccgccggtgacggcgaaatcaccagcggcaccttcagccccagcctgtcgcagtcgatcgcgctggcgcgcctgcccaaggacgtggccatcggcaccgacgtgcaggtcgagatccgcgaccgcaagctgaccgcgactgtggttaaactgccgttcgtgcgcaatggcaaggcgctggtcagctga

SEQ ID NO: 70994 - protein, 357 aa, Ralstonia solanacearum MolK2
MVDFGGWDMPVNYGSQIEEHHAVRRDAGIFDVSHMCVVDLTGARVRDFLRGLLANNVDKLQTPGKALYTCMLNPKGGVIDDLIVYFFREDWFRLVVNAGTAPTDLEWIVAQNAAAGTGVTITPRRSDNNAGPEPLGIVAVQGPNARAKTYAALPGTQAVGEALKPFNAGFATVDGVGEIMVARTGYTGEDGFELVVPAAQIAGVWERLLQAGVRPCGLGARDTLRLEAGMNLYGQDMDEHVSPLDAGLAWTVDLQSERGFNGKAALAANGQRDQFVGLLLRDKGGVLRAHQKVITPAGDGEITSGTFSPSLSQSIALARLPKDVAIGTDVQVEIRDRKLTATVVKLPFVRNGKALVS

SEQ ID NO: 70995 - DNA, 1095 bp, Anoxybacillus flavithermus WK1
  CDS (1)..(1095): transl_table=11
atgttacaaagaacaccgctatttcctctgtatgcagagtatggcgcaaaaacgattgattttggtggctgggagttgcctgtgcaattttctagcattaaagaagaacatgaagctgtacgaacgcgtgcagggttatttgatgtgtctcatatgggcgagtttgaagtgaaaggaaaagatagtgttgcttttttacaaaaaatgatgacaaacgacgttgcgaaattaacggacggtcgcgcccaatacacgttgatgtgttatgaagatgggggaactgttgatgatttacttgtttataaaaaagcggacgatcattatcttcttgtcgtaaacgctgccaatattgaaaaagattttgcttggctttctgagcatgttgttggggatgtcgaacttgtcaatatttcaaacgatattgcacaacttgcgctacaaggcccacttgcagaaaaagtattacagcaattaacgacggtcgatttatctacgatgaagtttttcgcttttgcagatcatgttgatgttgcaggagttcaaacgcttgtgtcccgaacaggatatacaggagaagacggatttgagctatattgtcgagcagaagatgccccaacgctttggcgcgccattttagaagcaggaaaagaagaaggggtacttccatgcgggctcggtgcacgcgacacgcttcgttttgaagcatgcttgccgctatatggacaagaactggccaaagacattaccccaatcgaagcagggcttggatttgcagtgaaaacgaataaagatgtcgactttttcggaaaagaaatattgaagaagcaaaaagaagaaggagcgccacggagacttgtcggaatcgaaatgattgacaaaggcattgcgcgtcacggatatgcggtgtatgtcaacaatgagcaaattggcttcgtcacgactggaacacaatcgccaacgcttaaaaaaaatatcggactagcgcttatttctactgcgttttcgtcacttgatacggaagtggaagtagacgttcgtgggaagcggttaaaagcaagagtggtggcaacaccgttttacaagcgtacaaaataa

SEQ ID NO: 70996 - protein, 364 aa, Anoxybacillus flavithermus WK1
MLQRTPLFPLYAEYGAKTIDFGGWELPVQFSSIKEEHEAVRTRAGLFDVSHMGEFEVKGKDSVAFLQKMMTNDVAKLTDGRAQYTLMCYEDGGTVDDLLVYKKADDHYLLVVNAANIEKDFAWLSEHVVGDVELVNISNDIAQLALQGPLAEKVLQQLTTVDLSTMKFFAFADHVDVAGVQTLVSRTGYTGEDGFELYCRAEDAPTLWRAILEAGKEEGVLPCGLGARDTLRFEACLPLYGQELAKDITPIEAGLGFAVKTNKDVDFFGKEILKKQKEEGAPRRLVGIEMIDKGIARHGYAVYVNNEQIGFVTTGTQSPTLKKNIGLALISTAFSSLDTEVEVDVRGKRLKARVVATPFYKRTK

SEQ ID NO: 70997 - DNA, 1311 bp, Thermosipho africanus TCF52B
  CDS (1)..(1311): transl_table=11
gtgtggaaaaaacttttagaggttgatggtgaaataaatgcaaggttaattgaaggaatgctaaaaacaaacaatatcgattgtgttataaaatcagctgatgaaccattccccaaagcttattttggttcaacttctttttttgaaatttatgtacctaaagatctttttgatgaagcaaataatttgcttaattcttttaaaaaggaggaattatatatgaaatatacaccattgtatgagcagcacgtaaagctaggggccaaaatggttgagtttgcaggttttcaaatgcctattcaatacactgggattaaagacgaagtaattgctgttagaaaagatgttggtatgtttgatgtttctcatatgggacaagtattagttgaaggaaaagattcaactaattttgttaattatttaattaccaatgattttaaaaatctctcaaatggtgaaattgtttatacagctatgtgtaatgaaaatggaggattcatagacgatttgcttgcatataaaatttcagacgaaaaagctttccttgttataaatgctgcaaacattgaaaaagactttgaatggatgaaaaacgtagcattaaactttgatgtcaagttagaaaataaatcagatgactatgcgctaatagcaatacaaggtccaaacgcacaaaagactttgcaaaaattgactgatatagatttagaaagtataggatactatacatttgttttcgggaaagtaaaagatgttgaagctttaatatctagaacaggttatacaggagaagatggttttgaaatttatactactgataaagatggtatagtaaaaatatgggaagaattacttaatttaggtgttaaacccgcaggacttggtgctagagatactttgaggcttgaagcttcactactactatatggcaatgacatggatgaaacagtaacaccactagaagcaggtataaaatgggccgtaaaatttgacaaagaatttgttggaaaagctgctttagaaaagcaacttgaagaaggtttaaaaagaagattaaaaggtttcaagttaatagataagggaatagcaaggcacggctacaaagttttcaaagatggaagggaaattggtgtagttacaagcggcaccttttcacctacattagacgaatcaattggcatggcattaatagaaactggttataagtcaggagatataattgaaatagaaattagaaacaaattggttaaagctgaaatagtaaaaatgccattttatagaggaagtgtaagatcaaaaaagaaaaaataa

SEQ ID NO: 70998 - protein, 436 aa, Thermosipho africanus TCF52B
MWKKLLEVDGEINARLIEGMLKTNNIDCVIKSADEPFPKAYFGSTSFFEIYVPKDLFDEANNLLNSFKKEELYMKYTPLYEQHVKLGAKMVEFAGFQMPIQYTGIKDEVIAVRKDVGMFDVSHMGQVLVEGKDSTNFVNYLITNDFKNLSNGEIVYTAMCNENGGFIDDLLAYKISDEKAFLVINAANIEKDFEWMKNVALNFDVKLENKSDDYALIAIQGPNAQKTLQKLTDIDLESIGYYTFVFGKVKDVEALISRTGYTGEDGFEIYTTDKDGIVKIWEELLNLGVKPAGLGARDTLRLEASLLLYGNDMDETVTPLEAGIKWAVKFDKEFVGKAALEKQLEEGLKRRLKGFKLIDKGIARHGYKVFKDGREIGVVTSGTFSPTLDESIGMALIETGYKSGDIIEIEIRNKLVKAEIVKMPFYRGSVRSKKKK

SEQ ID NO: 70999 - DNA, 1119 bp, Acidithiobacillus ferrooxidans ATCC 23270
  CDS (1)..(1119): transl_table=11
atgtcggcacaacatacggcacttcacgactggcatgtggcccacggcgcacgtatggtggattttgccggctgggagatgcctctgaactacggctcgcaactggccgagcatgaggcggtgcggcgggcggcgggactgtttgatgtctcgcacatgcggcctctggatttgagcgggccagatgcgcgggtgctgcttcggtatgcgctggcgaacgatgtggcaaagctggacgctgcgccgggcaaggcgctgtacagcacgatgttgcagggcgatggcgggattatcgacgatctgatcgtctaccatcgcggcggaggccggtatcggatcgtgctgaatgcggggggtgcggaggcggatacggcgcacctgcaggcccttgcggatgcccatggctggcgcgtgatcctgcagaagcggccagatctggggattctcgccgttcagggcccgacagcgcgggcgctggcggcgacggtactggcgattcccgcgttggcggatctgggcgtttttcacgcattggaacagggagatttttttgtcgggcgaaccggctataccggcgaggatggcgtcgaaatcgtcgccgctaacgggctgttaacggacctggcagaccggctgctggtggcgggtgtgcgccctgcgggtctggcggcgcgggatagtctgcgtctggaggcggggctgggtctgtacggtcaggatatgacaacggcggtttcgccttatgccagtaatctgggctggaccgtggacttgcgggccgcagaccggaattttctgggccgggcggcactggaggcggagttggcggctggtgacggtgcccggctcgtcggtctggccatgcgcgatgggattccccgccatggctatgtcgtcgaaaatgccgctggacagccttgcggggtggtcaccagcggtattttttcgcccagtttgcagtgcggtattgccctggcccgggtggatgcggtgctggcgccgggagcgctatctgcggtgctggtgcgtggggtgcggcgtccggcgctggtgataaaaccgcccttctggcgcaacggggcggcaaccttttcctttcctgaggagcatgaaatatga

SEQ ID NO: 71000 - protein, 372 aa, Acidithiobacillus ferrooxidans ATCC 23270
MSAQHTALHDWHVAHGARMVDFAGWEMPLNYGSQLAEHEAVRRAAGLFDVSHMRPLDLSGPDARVLLRYALANDVAKLDAAPGKALYSTMLQGDGGIIDDLIVYHRGGGRYRIVLNAGGAEADTAHLQALADAHGWRVILQKRPDLGILAVQGPTARALAATVLAIPALADLGVFHALEQGDFFVGRTGYTGEDGVEIVAANGLLTDLADRLLVAGVRPAGLAARDSLRLEAGLGLYGQDMTTAVSPYASNLGWTVDLRAADRNFLGRAALEAELAAGDGARLVGLAMRDGIPRHGYVVENAAGQPCGVVTSGIFSPSLQCGIALARVDAVLAPGALSAVLVRGVRRPALVIKPPFWRNGAATFSFPEEHEI

SEQ ID NO: 71001 - DNA, 1131 bp, Diaphorobacter sp. TPSY
  CDS (1)..(1131): transl_table=11
atgtccgccatgtccgacctgctcaccactcccctcaacgccctgcacatcgaactgggcgcccgcatggtgcccttcgccggctactccatgcccgtgcaataccccatgggcctgatggccgagcaccaccacacgcgcacggcggccggcctgtttgatgtgtcgcacatggggcagctcaagctggtcggccctgacgccgcagcagcattcgagacgctgatgcccgtggacgtggtcgacctgcccgtgggcaagcagcgctacggcctgctgctcaatgacgagggcggcatcatcgacgacctcatgttcttccgcatggcgcaggacgaactcttcgtgatcgtcaacggcgcctgcaaggtgggcgacattgcccacatccaggagcgcatcggccaacgctgccaggtgattcccatgcccgaccaggccctgctcgcgctgcagggcccacaggcggcagcggtgctcgcgcgtctggcaccaggcgtggacaaactggtgttcatgaccggcgggcatttcgacatcgccggggcgcagtgcttcgtgacgcgcagcggctacaccggagaggacggcttcgagatctcggtgcccgccacgcaggccgaggccctggcgcgcacgctgctggcccagcccgaggtcaagcccatcggcctgggcgcacgcaattcgctgcgcctggaagccggcttgtgtctgtatggcaacgacatcgacaccaccaccaccccacccgaagccggcctgaactgggccattcagaaggtgcgccgtacaggcggcgcgcgcgctggcggttttccaggtgctgacaaggtgctggcccagatcgacagcccggccactctcacgcgcaagcgcgtgggcctggtggcgctggagcgcgtgcccgtgcgtgagcacaccgagttgcaaaacgagtcgggcgagcgcatcggcgaagtcaccagcggcctgctggcccccactgccgacaagcccatcgccctggcctacgtaatgcccgcccatgccgcccccggcacccgtgtgaacgccatggtgcgcggcaaggccgtgcccatggaagtggctgccacgccctttgttcccacacgctactaccgcggctga

SEQ ID NO: 71002 - protein, 376 aa, Diaphorobacter sp. TPSY
MSAMSDLLTTPLNALHIELGARMVPFAGYSMPVQYPMGLMAEHHHTRTAAGLFDVSHMGQLKLVGPDAAAAFETLMPVDVVDLPVGKQRYGLLLNDEGGIIDDLMFFRMAQDELFVIVNGACKVGDIAHIQERIGQRCQVIPMPDQALLALQGPQAAAVLARLAPGVDKLVFMTGGHFDIAGAQCFVTRSGYTGEDGFEISVPATQAEALARTLLAQPEVKPIGLGARNSLRLEAGLCLYGNDIDTTTTPPEAGLNWAIQKVRRTGGARAGGFPGADKVLAQIDSPATLTRKRVGLVALERVPVREHTELQNESGERIGEVTSGLLAPTADKPIALAYVMPAHAAPGTRVNAMVRGKAVPMEVAATPFVPTRYYRG

SEQ ID NO: 71003 - DNA, 1116 bp, Aciduliprofundum boonei T469
  CDS (1)..(1116): transl_table=11
atgaagtgtactgcattgcatgaagtccataagaatatgggtgccaaaatgactgagtttgccgggtatgatatgcctttatggtatacgagcataatagatgagcacaaagctgtaagaaatagtgttggggtttttgatgtttcacatatgggcgatattattgtagaaggtcctgatgctacagagtttctaagttttatacttccaacagatttttctaaggtaaaagtgtggaaagcaacatatactgcttttataaatcataaaggtatacttatagatgatactatagtaacaaaattggcggaggatagatacttattggtgcccaatgctgccacatctgatttaatttataactggctttttgctctaagtggagggtacaatgtaaatataaaaaatttaacctctgagttttcctgcttagctgttcagggtccgaatgcagaaaaaaccttgcaaaaaatagttaacgaagatttaagtaaaatgggattttttgaagctagctatgtaggattgaaagagattagtatagaggataatgaaatatctggaaataaggcatttatctccagaactggttatactggagaggatggttttgaaataattgtaccaaatgagaatgctaaggatttatggttcaaagttcttgatgcgggaaaagagtttggtataaaaccctgtggtttaggagcgagggatactttaagaatggaaaagggatttttgcttagtggtcaggattttcatcctcagcatgagcctagaacgcctttggaggcggggacatcttggattattgattgggagcacgaatttttgggaagagagaaacttttaaaaatgaaagaagaaaagaaatatgatctcttcagaggagttatagtgaagggtagggggatacccagacatgggtacaagctttataaagatgaggaggaaataggttatcttaccagtggtacaatgtctcctactttgggagtaggcatagggctgggctatgtgaaaagaccttacattaaagtgggcacagaagtttatatagatataagaggtagaaaggtagaagcagagataagaaggccaagattggtaaagtaa

SEQ ID NO: 71004 - protein, 371 aa, Aciduliprofundum boonei T469
MKCTALHEVHKNMGAKMTEFAGYDMPLWYTSIIDEHKAVRNSVGVFDVSHMGDIIVEGPDATEFLSFILPTDFSKVKVWKATYTAFINHKGILIDDTIVTKLAEDRYLLVPNAATSDLIYNWLFALSGGYNVNIKNLTSEFSCLAVQGPNAEKTLQKIVNEDLSKMGFFEASYVGLKEISIEDNEISGNKAFISRTGYTGEDGFEIIVPNENAKDLWFKVLDAGKEFGIKPCGLGARDTLRMEKGFLLSGQDFHPQHEPRTPLEAGTSWIIDWEHEFLGREKLLKMKEEKKYDLFRGVIVKGRGIPRHGYKLYKDEEEIGYLTSGTMSPTLGVGIGLGYVKRPYIKVGTEVYIDIRGRKVEAEIRRPRLVK

SEQ ID NO: 71005 - DNA, 1092 bp, Alcanivorax sp. DG881
  CDS (1)..(1092): transl_table=11
atggtgctttttatggctcaccgcacagctttatacgacgcccatctcgctgctggcggcaagatggtggacttcggcggctgggatatgccgatcaattatggctcccagatcgaagagcatcacgccgtgcgtcaaaatgccggcgtgttcgatgtctcccacatgaccgtggtggatattgctggcgccggtgcccgtgattacctgcgccagctgctggccaacgacgtggaccgcattgatccgggccgcgccctgtacaccggcatgcttaacgacaatggcggcgtgatcgacgaccttatcgtctataaacaggacaatggctaccgactggtggtaaattgcgcgacccgtgagaccgacctggactggatggaaaagcaggccggcggttttgccgtggatatccacgagcgcccggaactggccatgctggcgattcaggggccgaaggcccgtgaaatccttgcggagctgctcagcggcgcccgtgccgaggcggtcagcagcctgaaaatttttgccttcgcgcaggacggtgactggatgatcgcccgcaccggctacaccggcgaagacggcgtggaaatcatgctgcccaacgcggatgcggtgaccctgtggggccagttgctggccgctggcgttgcccccatcggcctgggtgcccgtgacaccctgcgcctggaagcagggctgaacctgtacggcaacgatatggacaacaccattacgccgtgggaagccaacatgggctggacggtgatgctcaatgaccgggaattcatcggtcgccagccactgctcaaccagcagaaaaacggccatggcgaacaggtgggcctgattctggaaggcaagggcgtgttgcgcgcccaccagaaagtcttgctggccaatggcgaagaaggggaaatcaccagcggtaccttctcgcccacactggggaaatccatcgccctggcgcggttgcccgctggcgccaccggcaaggtcgatgtggaaatccgcaacaagcgccaggttgcacaggtggtcaagccgccgttcgtgcgtaatggcgaggtagtttataaagagctgtag

SEQ ID NO: 71006 - protein, 363 aa, Alcanivorax sp. DG881
MVLFMAHRTALYDAHLAAGGKMVDFGGWDMPINYGSQIEEHHAVRQNAGVFDVSHMTVVDIAGAGARDYLRQLLANDVDRIDPGRALYTGMLNDNGGVIDDLIVYKQDNGYRLVVNCATRETDLDWMEKQAGGFAVDIHERPELAMLAIQGPKAREILAELLSGARAEAVSSLKIFAFAQDGDWMIARTGYTGEDGVEIMLPNADAVTLWGQLLAAGVAPIGLGARDTLRLEAGLNLYGNDMDNTITPWEANMGWTVMLNDREFIGRQPLLNQQKNGHGEQVGLILEGKGVLRAHQKVLLANGEEGEITSGTFSPTLGKSIALARLPAGATGKVDVEIRNKRQVAQVVKPPFVRNGEVVYKEL

SEQ ID NO: 71007 - DNA, 1113 bp, Brevundimonas sp. BAL3
  CDS (1)..(1113): transl_table=11
atgaccgaccaagccctgaagaccacgcccctgaacgccgcgcaccgcgctctgggagcccggatggtgggcttcggcggctatgacatgccggtccagtatgagggcgtcctggccgagcaccgctggacccgcgaacacgccggcctgttcgacgtgtcgcacatgggccagtgcaagatcaccggcgaggacgcgaccgcccagttcgagcggttcgtgcccggcgactatgaaatcctgaaggccggcaagcaaaagtattcgctgctgctgaacaaggacggcgggatcatcgacgacctgatggccggccgcccggatcacgacggcctgttcgtcgtcgtcaacgccggcaacaaggacgaggatttcgccttctggagcgcaaacctcgaaggcgacgccaagctgaccgtgctggaccgcgccctgatcgccatccaggggccggaaaccgccgaagtcatggccgcgcatgagccgatcctggccgagatgggcttcatggaatgcgcccggctgatgctgttcggcgtcgactgctacgtctcgcgttcgggctataccggcgaggacggctatgagatttcggtgccggcggatcaggcagagcgcgtctggaacaccatcctggaagacgcccgcgtcaagccgatcggcctgggcgcccgcgacagcctgcggctcgaagccggcctgccgctgcacggccatgacatcgacccgacgaccagcccggtcgaaggcgccctgaccttcgccctgtccaagtcacgcaaggagcgcgccgacttcaacggcgccgaccgcatcctgaaggaactggccgacggtccttcgcgcatccgcatcggcctgatcgtcaaggaaggcgccccggcccgcgaaggcgccgagatcgccgacgctgacgggaacgtcatcggcaaggtcacctcgggcggcccctcccccaccctgggcaagaacatcgccatgggcttcgtgccgccggcctatgccgcgctgggtacggagttgaaggtcgtcgtgcgcggcaagtccgccgccgccgaagtcgtcgccatgcccttcgtggcgcaacgctattaccggaagccgaaggcgtaa

SEQ ID NO: 71008 - protein, 370 aa, Brevundimonas sp. BAL3
MTDQALKTTPLNAAHRALGARMVGFGGYDMPVQYEGVLAEHRWTREHAGLFDVSHMGQCKITGEDATAQFERFVPGDYEILKAGKQKYSLLLNKDGGIIDDLMAGRPDHDGLFVVVNAGNKDEDFAFWSANLEGDAKLTVLDRALIAIQGPETAEVMAAHEPILAEMGFMECARLMLFGVDCYVSRSGYTGEDGYEISVPADQAERVWNTILEDARVKPIGLGARDSLRLEAGLPLHGHDIDPTTSPVEGALTFALSKSRKERADFNGADRILKELADGPSRIRIGLIVKEGAPAREGAEIADADGNVIGKVTSGGPSPTLGKNIAMGFVPPAYAALGTELKVVVRGKSAAAEVVAMPFVAQRYYRKPKA

SEQ ID NO: 71009 - DNA, 1107 bp, Cyanobium sp. PCC 7001
  CDS (1)..(1107): transl_table=11
ttggatctgcagcgcacgcccctccatggggccatccaggcggcaggggcccgcctcgtgcccttcgccggctgggagatgcccgtgcagttcgcgggcctggtggccgaacaccaggcggtgcgccagcgctgcggcgtgttcgacatctcccacatgggggtgctcaccctgcgcggcgacggcgccaaggacgccctccagggcctggtgcccaccgacctgttcaggatcggcccgggcgaggcctgctacacggtgctgctcaacgagaagggcggcatccgcgacgatctgatcgtctatgaccgcggacgccaggccgatgccggcggtggggtgtgcgatgagctggtgctggtgatcaacgccgcctgcgccgacacggacaccgcctggatctgcggccagctcgaaccccaggggatcggcgtcagcgaccgcaagggcgacggcgtgctgctggcgctgcagggccccgaggcccagagccggctggaggccctcagcggcaccagcctcgacggcctgccgcgctttggtcaccgggaactgaagctggccggctgcaccgccttcgtgggacgcacgggctacaccggcgaggacggcttcgagctgctgctgccccgcgaggccggggtcgccctctggcagcaactggttggggcgggggtcaccccctgcgggctcggcgcccgcgacaccctgcgcctggaggccgccatgcacctctacggccaggagatggatgccaacaccacccccctggaagcgggcctgggctggctggtgcacctggagatgcccaagcccttcgtggggcgggaggtgctggagcggcagagcgccgagggggtgagccgccggctggtgggcctgatgcttcagggccgtgccatcgcccgccacggctatccggtgctgcacggcggcagggccgtgggggaggtgaccagcggcacctggtcgcccacgctgggcgaagcgatcgccctggcctacgtgcccacggaggccgcccggatcggcaccgagctggccgtggagatccgcggcaaggccgagccggcggtggtggtgaagcggcccttctaccgccgctag

SEQ ID NO: 71010 - protein, 368 aa, Cyanobium sp. PCC 7001
MDLQRTPLHGAIQAAGARLVPFAGWEMPVQFAGLVAEHQAVRQRCGVFDISHMGVLTLRGDGAKDALQGLVPTDLFRIGPGEACYTVLLNEKGGIRDDLIVYDRGRQADAGGGVCDELVLVINAACADTDTAWICGQLEPQGIGVSDRKGDGVLLALQGPEAQSRLEALSGTSLDGLPRFGHRELKLAGCTAFVGRTGYTGEDGFELLLPREAGVALWQQLVGAGVTPCGLGARDTLRLEAAMHLYGQEMDANTTPLEAGLGWLVHLEMPKPFVGREVLERQSAEGVSRRLVGLMLQGRAIARHGYPVLHGGRAVGEVTSGTWSPTLGEAIALAYVPTEAARIGTELAVEIRGKAEPAVVVKRPFYRR

SEQ ID NO: 71011 - DNA, 1116 bp, Pectobacterium atrosepticum SCRI1043
  CDS (1)..(1116): transl_table=11
atggcaaagcagactccgttgtaccaacaacatctggccgatggcgccaaaatggtggattttcatggctggatgatgccactgcattacggctcccaactggatgagcaccacattgtgcgtcgggacgctggcatttttgatgtctcccacatgactattgtcgatttgcatggtgtgagaacccgtgaattcctgcgttacctgctggcgaatgatgtcgccaaactcacacagccaggaaaagcactttataccggcatgttgaatgcttccggcggcgtgatcgacgatctgattgtttattttctgacggaagactatttccgtttggtagtgaactccgcgacgcgtgagaaagatcttgcctggatcgagcagcatgctgccgcgttcggtgtcgacatccgtgagcgtgacgagctggcgctcgtcgcggtacaaggtccgcaggcgcaggaaaaagttcaaggcctcctgaaggcaaaaggcctgagtgatgaggacgtagctgcggttgccagcatgaagccgttttttggcaaacaggcgggggacttcttcgtcgccacgacgggatatacgggcgaagcgggttatgaaattgcgctgccaaatgagcaggtggtcgatttctggcagcaactgctggcggttggcgtgaagccttgtgggctgggcgcacgcgatacgctgcggctggaagctgggatgaacctgtacggtcaggatatggatgaggggatttcgccgctggcggctaatatgggctggacgatcgcctggcagccggaagatcgccaatttatcgggcgtgaggcgttagtgcaccagcgtgaaaaaggcactgagcaactggttggtttggtgctgacggaaaaaggcgtattgcgcaatgatttatctgtgcgctttactgatagtgatggcgtaatgcgcgaaggggtgatcaccagcggatcgttctcgccgacgctcggcgtcagtatcgcgctggcgcgtgttccggcgggaattggtgaacaggcaatcgtgcagattcgtaaccgcgaactgcccgtgcgcgtgaccaaacccggctttgtccgtgccggaaaagccatcgttcagtattaa

SEQ ID NO: 71012 - protein, 371 aa, Pectobacterium atrosepticum SCRI1043
MAKQTPLYQQHLADGAKMVDFHGWMMPLHYGSQLDEHHIVRRDAGIFDVSHMTIVDLHGVRTREFLRYLLANDVAKLTQPGKALYTGMLNASGGVIDDLIVYFLTEDYFRLVVNSATREKDLAWIEQHAAAFGVDIRERDELALVAVQGPQAQEKVQGLLKAKGLSDEDVAAVASMKPFFGKQAGDFFVATTGYTGEAGYEIALPNEQVVDFWQQLLAVGVKPCGLGARDTLRLEAGMNLYGQDMDEGISPLAANMGWTIAWQPEDRQFIGREALVHQREKGTEQLVGLVLTEKGVLRNDLSVRFTDSDGVMREGVITSGSFSPTLGVSIALARVPAGIGEQAIVQIRNRELPVRVTKPGFVRAGKAIVQY

SEQ ID NO: 71013 - DNA, 1116 bp, Propionibacterium acnes KPA171202
  CDS (1)..(1116): transl_table=11
atgactacgcttcgacgtacaccactggcggccgtacacgagagcctcggagcatccttcaccgatttcgcgggctggaacatgcccgtgcggtactcctccgacctggccgaacaccacgccgtccgcaagaatgccggcatcttcgacctatcccacatgggagagatcaggatctctggccctgattctggagctgccctcgattacgccttggccggtaagctctccgctgtggcggaaggccgtgcgaagtattccctcctactcacagacgaggggggtgtcgttgatgacctcgtgacctaccatctgcctgacggtgactacctcgtcgttgccaatgctgccaatgccgaaactgatctcgcggaattcaccaagcgctgcgcacggttcgacgtcaccgtcacagacgagtcagcccagaccgccctcgtcgccgtgcaaggccccacagccgtgaagatcgtgctggcggccctccagaaggctaataccaccctcgactccgacgaggtccgcgacgtcaagtactaccgctgcctcaccggagaactggatggtttccccgtactcgttgctcgcaccggttacaccggagaggacggctacgagctatacgttccggccaaagccgccgcgcatctgtggcagctcctcatggacgctggcggcgaagatctcacaccgtgtggtctcgcctgccgtgacactttgcgcctggaagctgggatgcctctctacggacacgagttgggcaccgacatccatccctctcaagccgggcttgggcgagtcgtcaatttcaagaaggagggcgactttgtcggtcgctgtgccctcgagaaccgcgataccactgccgatcgtgtgctagtcgggctgaccggggaaggacgccgagccgggcgtgccggatatgctgtcgtgaacgaagacaaaacggtcggagccatcacctccggcatcctctcccccactctgggccatcccatcgcaatggctttcgttgatcctgacgtcgccaagatcggcacctcgcttagcgttgatgtgcggggcaaagccctcaacactaccgtcgtcgaattaccgttctacaagcggtcctga

SEQ ID NO: 71014 - protein, 371 aa, Propionibacterium acnes KPA171202
MTTLRRTPLAAVHESLGASFTDFAGWNMPVRYSSDLAEHHAVRKNAGIFDLSHMGEIRISGPDSGAALDYALAGKLSAVAEGRAKYSLLLTDEGGVVDDLVTYHLPDGDYLVVANAANAETDLAEFTKRCARFDVTVTDESAQTALVAVQGPTAVKIVLAALQKANTTLDSDEVRDVKYYRCLTGELDGFPVLVARTGYTGEDGYELYVPAKAAAHLWQLLMDAGGEDLTPCGLACRDTLRLEAGMPLYGHELGTDIHPSQAGLGRVVNFKKEGDFVGRCALENRDTTADRVLVGLTGEGRRAGRAGYAVVNEDKTVGAITSGILSPTLGHPIAMAFVDPDVAKIGTSLSVDVRGKALNTTVVELPFYKRS

SEQ ID NO: 71015 - DNA, 1098 bp, Yersinia pseudotuberculosis IP 32953
  CDS (1)..(1098): transl_table=11
atggctaagcagaccccgctgtatgaccaacatgtcgcgtgcggtgcgcgtatggtagattttcatggttggatgatgccattgcattatggctcccaaattgacgaacaccatcttgtgcggcaggacgcaggcatgtttgatgtctcccacatgaccatcgttgatttgcacggtaaccgtacccgtgagtttttgcgctatctgttggctaacgatgtagccaaactgacccaaccgggcaaagccctttacaccgggatgctgaatgaatccggcggtgttatcgatgatttgattgtttacttcctcagcgaagattatttccgtttagtggttaactccgccacccgtgataaagacctcgcttggataagtcagcatgctgaaccttatcaggtcgaggtcacggtgcgtgacgatctggcactgattgcagtacaaggcccacaagcccaacaaaaagttgccacgttactgaccaccgagcagcaacaggctattgcgggcatgaagccattctttggtattcaaaccggcgatttatttattgctaccacgggttataccggtgaagccgggtatgaaattgcgttgccgaaacagcaggttgttgcgttctggcagcaactattggccgccggtgtgaagcccgcaggtcttggtgcgcgtgatacgctgcgcttagaagcggggatgaacttatatggtcaggaaatggatgaaaaaacgtctccgttagccgctaatatggggtggacagtggcctggcaaccagaagatcgtcagtttattggtcgtgctgcgttggaaaggcagcgaatgaaggggactgagcaattggttggtctgatcatgacggaaaaaggcgtgttacgtaatgaattgccagtgtatttttttgatgccgcaggcaatcagcatgttggggtgataaccagcggttcattttcgccaacactgggtttcagtattgcgctagcccgtgtacccgcaggtatcggtgaacatgctgtggtacaaatccgtaaccgtgaaatgccggtacgggtaacaaaacccggttttgtgcgagcgggcaaagccatcgtattgtaa

SEQ ID NO: 71016 - protein, 365 aa, Yersinia pseudotuberculosis IP 32953
MAKQTPLYDQHVACGARMVDFHGWMMPLHYGSQIDEHHLVRQDAGMFDVSHMTIVDLHGNRTREFLRYLLANDVAKLTQPGKALYTGMLNESGGVIDDLIVYFLSEDYFRLVVNSATRDKDLAWISQHAEPYQVEVTVRDDLALIAVQGPQAQQKVATLLTTEQQQAIAGMKPFFGIQTGDLFIATTGYTGEAGYEIALPKQQVVAFWQQLLAAGVKPAGLGARDTLRLEAGMNLYGQEMDEKTSPLAANMGWTVAWQPEDRQFIGRAALERQRMKGTEQLVGLIMTEKGVLRNELPVYFFDAAGNQHVGVITSGSFSPTLGFSIALARVPAGIGEHAVVQIRNREMPVRVTKPGFVRAGKAIVL

SEQ ID NO: 71017 - DNA, 1128 bp, Symbiobacterium thermophilum IAM 14863
  CDS (1)..(1128): transl_table=11
atgaacgagtcgctgaaacggacgcccctgtacgagctgcatctgaagctgggcgcccgcatggtgcccttcggcggctgggagatgcccgtgcagtactccagcgtcatcgaggagcaccgggccgtgcgtgaggcggcgggcctcttcgacgtgtcgcacatgggcgagtttgaggtgagggggccccaggccctggacctcatccagctggtgagcaccaacgacgccgccaaactggcggtcgggcgggttcagtacgcgctgatgtgctacgagaacggcaccgtggtcgacgacatcctcatctaccggctggacgagcaccgctactggctggtggtcaacgccgggaacacccagaaggactgggaatggatcaacaccgcccgggagcgggccggcctgcacaacctggagctcatcgaccggtcggcggagatcgccctgctggccctgcaggggccgaaggcggaggagatcctgcagccgctcgcgaccggcgtcgtgctgtcgcagctggagcccttcagcctggcgaagaacgtcacggtatccggggtgccgaccctggtgctctcccgcacggggtacaccggcgaggacggcttcgagatctacgtgaaggccgaagacgtcgccgccctctgggaggccttgctggaggcgggcgacgagcaggggctcctgccctgcggcctcggcgcccgggacaccctgcggttcgaggcgaagctgcccctttacggccacgagatcagcgaccagcacaacccgctggaggcggggctgggcttcgccgtcaagctgaagaagggcgtggacttcatcggccgggacgccctggccaggatcaaagagcaggggccgacccggaagctggtgggcatcgagatgatcgaccggggcgtgccccggcagggttaccccgtcgccgtggggggcgaggtggtcggcgaggtgaccacgggaagcttctcgcccacgctggagaagaacattgcattggcctacgtgcccgtcgcccacagcgccgtgggcaccgaggtggaggtcatcatccggggccgggcgctgaaggcgcgggtcgtggagacccccttctaccggtcgccgcacagacgataa

SEQ ID NO: 71018 - protein, 375 aa, Symbiobacterium thermophilum IAM 14863
MNESLKRTPLYELHLKLGARMVPFGGWEMPVQYSSVIEEHRAVREAAGLFDVSHMGEFEVRGPQALDLIQLVSTNDAAKLAVGRVQYALMCYENGTVVDDILIYRLDEHRYWLVVNAGNTQKDWEWINTARERAGLHNLELIDRSAEIALLALQGPKAEEILQPLATGVVLSQLEPFSLAKNVTVSGVPTLVLSRTGYTGEDGFEIYVKAEDVAALWEALLEAGDEQGLLPCGLGARDTLRFEAKLPLYGHEISDQHNPLEAGLGFAVKLKKGVDFIGRDALARIKEQGPTRKLVGIEMIDRGVPRQGYPVAVGGEVVGEVTTGSFSPTLEKNIALAYVPVAHSAVGTEVEVIIRGRALKARVVETPFYRSPHRR

SEQ ID NO: 71019 - DNA, 1119 bp, Burkholderia pseudomallei K96243
  CDS (1)..(1119): transl_table=11
atgaccgttctcaaaaccaccccgcttcatgccgcgcatcgcgccctcaacgcccgcatggtcgatttcggcggctgggacatgcccgtcaactacggctcgcagatcgaagagcaccaggcggtgcgcaccgatgccggcatgttcgacgtgtcgcacatgtgcgtcgtcgatttcacgggcccgcgcgtgcgcgcgttcttcgagcacgcgatcgcgaacaacgtcgcgaagctgcaaacgcccggcaaggcgctctactcgtgcctgctgaacccgcaaggcggcgtgatcgacgatctgatcgtctactacttcaccgaggaattcttccgcgtcgtcgtcaacgccggcaccgcggagaaggacatcgcgtggttcaaccagctcaacgagcaaggcggcttcggcctcacgatcgcgccgcgccgcgacttcgcgatcgtcgccgcccaaggcccgaacgcgcgcgcgaaggtgtgggacaccgtcccctgcgcgcgcgcagcgacgagcgagctcaagccgttcaacgccgcgcaggtcgcgggcacgccgttcggcgatctcaccgtcgcgcgcaccggctacaccggcgaggacggcttcgagatcatcgtcccggcgacgcacgtggaagcgctgtggaacgcgctcgccgagcgcggcgtgcgcccgtgcgggctcggcgcgcgcgacacgctgcggctcgaggccggcatgaacctgtacggccaggacatggacgaaagcgtttccccgctcgacgcgggcctcgcgtggacggtcgacctgtccgcgccgcgcgcgttcgtcggccgcgacgcgctcgaagcgcacggctcgcgcgcggcattcgtcggcctgatcctgcagaaggagaacggccgcgcgggcggcgtgctgcgcgcgcaccagaaggtcgccacgccgcacggcgaaggcgagatcacgagcggcacgttctcgccgtcgatgcaggaatcgatcgcctttgcgcgcgtgccgaaggacgtcgcgatcggcgacacggtgcacgtgcagatccgcgacaagcaacttcccgcgcgcgtggtaaaactgccgttcgtgcgcaacggcaaggtcctcgctgcgtaa

SEQ ID NO: 71020 - protein, 372 aa, Burkholderia pseudomallei K96243
MTVLKTTPLHAAHRALNARMVDFGGWDMPVNYGSQIEEHQAVRTDAGMFDVSHMCVVDFTGPRVRAFFEHAIANNVAKLQTPGKALYSCLLNPQGGVIDDLIVYYFTEEFFRVVVNAGTAEKDIAWFNQLNEQGGFGLTIAPRRDFAIVAAQGPNARAKVWDTVPCARAATSELKPFNAAQVAGTPFGDLTVARTGYTGEDGFEIIVPATHVEALWNALAERGVRPCGLGARDTLRLEAGMNLYGQDMDESVSPLDAGLAWTVDLSAPRAFVGRDALEAHGSRAAFVGLILQKENGRAGGVLRAHQKVATPHGEGEITSGTFSPSMQESIAFARVPKDVAIGDTVHVQIRDKQLPARVVKLPFVRNGKVLAA

SEQ ID NO: 71021 - DNA, 1101 bp, Nocardia farcinica IFM 10152
  CDS (1)..(1101): transl_table=11
atgaccgagaccgacctgttgcgcggacctgttcacgacctgcacggcgagctgggggcgaccttcgccgagttcggcggctggcagatgccggtggcctacgcgggcaccgtgggcgagcaccaggcggtgcgcacgacggtcgggctcttcgacgtcagccatctcgggaaggcgacggtggccggaccgggcgccgcgcagttcgtgaacgccacgctcaccaacgatctgggccgcatccatcccggcaaggcccagtacaccctgtgctgttcggccgacggcggcgtcatcgacgacctgatcgcctactacgtcgccgacgacgagatcttcctcgtgccgaacgccgccaacaccgccgccgtggtcgccgagctggccgccgccgcaccggccggtgtcaccgtgacggatcagcatcgggactacgcggtgttcgcggtgcagggcccgcgttcggcgcaggtgctcgccgcgctggggctgccgaccgagatggagtacatggcgttcgccgacgcggcgtgggacgggcggccgatccgggtctgccgcaccggctacaccggcgagcacggctacgaggtgctgccgcggtgggccgacgcggagccggtgttccgcgccctgctcgagcaggtccgcgcggccgacggtcaaccggccgggctcggcgcccgcgacaccctgcgcaccgagatggggtatccgctgcacgggcacgaactctcgcgggagatctcgccggtgcaggcccgcaccggctgggcggtcggctggcgcaaaccgcagttctggggcaaggcggcgctggagcaggagaaggcggccgggccgcggcgaatcctgatggggctgaaggcgatcgatcgcggcgtgctgcggcaggggcagccggtgctgcgtgacggcgagcccgtcggcgagaccacctcgggcaccttctccccgacgctgaaggtcggcatcgccctcgccctgctcgacaccggtgcgggtctggagccgggcgccgaggtggcggtcgacgtgcgaggcaggcggctgcgctgcgaggtcgtcaagccgccgttcgtgccctcgcgcacgtcctga

SEQ ID NO: 71022 - protein, 366 aa, Nocardia farcinica IFM 10152
MTETDLLRGPVHDLHGELGATFAEFGGWQMPVAYAGTVGEHQAVRTTVGLFDVSHLGKATVAGPGAAQFVNATLTNDLGRIHPGKAQYTLCCSADGGVIDDLIAYYVADDEIFLVPNAANTAAVVAELAAAAPAGVTVTDQHRDYAVFAVQGPRSAQVLAALGLPTEMEYMAFADAAWDGRPIRVCRTGYTGEHGYEVLPRWADAEPVFRALLEQVRAADGQPAGLGARDTLRTEMGYPLHGHELSREISPVQARTGWAVGWRKPQFWGKAALEQEKAAGPRRILMGLKAIDRGVLRQGQPVLRDGEPVGETTSGTFSPTLKVGIALALLDTGAGLEPGAEVAVDVRGRRLRCEVVKPPFVPSRTS

SEQ ID NO: 71023 - DNA, 1083 bp, Legionella pneumophila str. Lens
  CDS (1)..(1083): transl_table=11
atgactgctaaaactcctcttcacactacgcacttagcatgtggtgccaaaatggtggatttccatggttgggatatgcctcttcattatggatctcagttaaacgaacatcatgcggtcagaaacgatgctggcatgtttgatgtctcacatatgaccatcgttgatattttaggcgccggtggccgtcaatttctgcgcaaactgctaaccaacgatgtcgatcaaattactcataatggaaaagccttatacagctgtatgtgtaatgaacacggcggaattatagatgacctgattgtatatcaacgcgcttccgataattaccgagtggtacttaattcggcaaccaggcaaaatgatgtggcctggattcgcgcaaaaagtgaaggatttgctgttggcttacaagaaagacgcgaattatcaatgctcgctgtacaaggtccaaatgccatagcgaaaacattgagtattcttgcacccgcccatgtagatgccgtttcaactcttacccctttcgaatgcgttgatgtggatcactggttttttgcccgcaccggctatacgggggaagatggccttgaaatcattgtccctaatgaatttgttactcaactctggaatgatctcctgaatgctggagtaacgccatgtggattaggggccagagataccctgagattagaggcaggaatgcttctttacggccaggatatggatgaaacaacaaccccactggaatctggtttgacctggacagtaaagtgggagccggaagatagaggatttatcggaatgggcgctttggtttctcaaaaacaacaaggaattaagcgtaaaatggtcggtttaaccttgttggacaaaggcattatgcgtcatggccaaaaggttattattgaaggctgccccgatggaattatcacaagcggcagttattctcctaccctgcagcaatctatagctttggcacgagttcccgtggaaacaggggaacaagtacttgttgacatacgcgggaagttaatccctgcaaaagtggggaagcctcgctttatcaaacaaggaaaacctgtttaa

SEQ ID NO: 71024 - protein, 360 aa, Legionella pneumophila str. Lens
MTAKTPLHTTHLACGAKMVDFHGWDMPLHYGSQLNEHHAVRNDAGMFDVSHMTIVDILGAGGRQFLRKLLTNDVDQITHNGKALYSCMCNEHGGIIDDLIVYQRASDNYRVVLNSATRQNDVAWIRAKSEGFAVGLQERRELSMLAVQGPNAIAKTLSILAPAHVDAVSTLTPFECVDVDHWFFARTGYTGEDGLEIIVPNEFVTQLWNDLLNAGVTPCGLGARDTLRLEAGMLLYGQDMDETTTPLESGLTWTVKWEPEDRGFIGMGALVSQKQQGIKRKMVGLTLLDKGIMRHGQKVIIEGCPDGIITSGSYSPTLQQSIALARVPVETGEQVLVDIRGKLIPAKVGKPRFIKQGKPV

SEQ ID NO: 71025 - DNA, 1092 bp, Haloarcula marismortui ATCC 43049
  CDS (1)..(1092): transl_table=11
atgacactgcgggcaccaccgctctctgcgattcacgagcgagcagacgcttcgttcaccgatttcggcgggtgggagatgccggtcgagttcgagtcgatccgcatagaacacgaggcagttcggagcgaagccgggaagttcgacgtttcgcacatgggacagataaccgtggccgggccggacgcggcgacgctgacacagcggctgaccaccaacgacgtgaccgtgctggacccgggcgaggcccagtacggggccatcacagatgaggatgggattatgctggacgacaccgttgtctaccgactgccggaaggcgcggccgatgagttcctgtttatcccgaacgccgggcacgacggagagatgaccgagcggtggctctctgagcgagatgagcgtgggcttgacgcgacggtgacgaaccggacagaggagtacgcgatgattgccgtccaagggcctgacgcgccggacctgctgtcggccgagacagatgtctcgctcactgccctgtctcggttcgaggtggctgccggggctgtcgccggcgtggactcgctaatcgcccggacgggctacactggcgaaccgggctttgaaatcctctgtccgcccgacgacgccggggtggtctgggacgcactggagtgtcaaccctgtgggctcggcgcgcgcgacaccctccgtttggaaatgggcttcctgctctccggccaggagttccatccggttgacgagcccagaacgccctacgaggccggtatcggctggacagttaagctcgatacggagttcgtcgctcgggacgcactggagggcgtcgccgcggacggtcccgaagagaagctcatcggcatcgagcttgtcgaccgcggcgtcccgcgccacgggtacgacgtgacaacgccggacggggagccgatcggccacatcaccagcggaacgatgagtccgacactgggagcaccgattgccctcgcctacgtcccgtcggcgtacgctgaaccggacaagtccgtccgcgtcgtcgtccgcggtgaaccgaagaaagcacgtaccaggagcacgccattcctcgatagatga

SEQ ID NO: 71026 - protein, 363 aa, Haloarcula marismortui ATCC 43049
MTLRAPPLSAIHERADASFTDFGGWEMPVEFESIRIEHEAVRSEAGKFDVSHMGQITVAGPDAATLTQRLTTNDVTVLDPGEAQYGAITDEDGIMLDDTVVYRLPEGAADEFLFIPNAGHDGEMTERWLSERDERGLDATVTNRTEEYAMIAVQGPDAPDLLSAETDVSLTALSRFEVAAGAVAGVDSLIARTGYTGEPGFEILCPPDDAGVVWDALECQPCGLGARDTLRLEMGFLLSGQEFHPVDEPRTPYEAGIGWTVKLDTEFVARDALEGVAADGPEEKLIGIELVDRGVPRHGYDVTTPDGEPIGHITSGTMSPTLGAPIALAYVPSAYAEPDKSVRVVVRGEPKKARTRSTPFLDR

SEQ ID NO: 71027 - DNA, 1095 bp, Geobacillus kaustophilus HTA426
  CDS (1)..(1095): transl_table=11
atgctaaagcgcacgcccctattctcggtgtacgcccgttgcggcgccaaaacgattgaatttggcggctgggaaatgccggtgcagttttccagcatcaaggaagaacatgaggctgtaagaacgcgcgccgggctgtttgacgtctcccatatgggggaaattgtcgtccgcggccgtgggagcctcgcgtttttgcaaaagctcatgaccaatgacgtcgccaaactgcggcccggccgggcgcaatatacgctcatgtgctatgaggacggcggcacagtcgatgatttgctcatctatcaaaaaggagagaatgactacttgctggtcgtcaacgcagcgaatacggaaaaagacttcgcttggctaagcgggcatgttgagggcgacgtcgagcttcaagatgtatcgtccgaaacggctcagcttgccttgcaagggccggcagcggagcgcgtcttgcagcgattgacggattttgatttggcggcgctgcgcccgttttcattcgccgacggcgtcgaagtctcgggcgtgaaggcgctcgtttcgcgcaccggctatacgggggaagacgggtttgagctatattgtaaagcggaagacgccgccgcgctatgggaggcgatcctagcggccggagctcgtgacagcgttctcccatgcggactgggggcgcgcgatacgctccgctttgaagcatgcctgccgctttacggtcaagagctgtccgactcgatttcaccagttgaagccgggcttggttttgccgtcaaaacggaaaaagagacgccgtttatcggccaagctgtattgaaacggcaaaaagaggaagggccgccgcgccggctcgtcggcattgaaatgatcgacagaggcattccgcgccacggataccttgtatttgccgacggcgaagaggtcgggttcgtcacgaccggcacgcagtcgccgacgctgaagaaaaacatcggcttggccttggtgaaagcggatgtggctgccatcggccgggaggtggaggtggacatccgcggcaagcggctgaaagcgaacatcgtgccgattccgttttacaggcgggccaagtga

SEQ ID NO: 71028 - protein, 364 aa, Geobacillus kaustophilus HTA426
MLKRTPLFSVYARCGAKTIEFGGWEMPVQFSSIKEEHEAVRTRAGLFDVSHMGEIVVRGRGSLAFLQKLMTNDVAKLRPGRAQYTLMCYEDGGTVDDLLIYQKGENDYLLVVNAANTEKDFAWLSGHVEGDVELQDVSSETAQLALQGPAAERVLQRLTDFDLAALRPFSFADGVEVSGVKALVSRTGYTGEDGFELYCKAEDAAALWEAILAAGARDSVLPCGLGARDTLRFEACLPLYGQELSDSISPVEAGLGFAVKTEKETPFIGQAVLKRQKEEGPPRRLVGIEMIDRGIPRHGYLVFADGEEVGFVTTGTQSPTLKKNIGLALVKADVAAIGREVEVDIRGKRLKANIVPIPFYRRAK

SEQ ID NO: 71029 - DNA, 1080 bp, Idiomarina loihiensis L2TR
  CDS (1)..(1080): transl_table=11
atgggtagcagaacgccactgtacgaagcacacgtaaaagcgggtgcaaagatggttgattttcacggctgggacatgccgctgaactacggttcacaaattgaagagcaccatgctgtacgccgtgactgcggtgttttcgatgtgtcgcacatgaccattgttgacgtagaaggctctcaggctcaggcgtttttgcgttacctgctggctaacgacgttgccaagctaaaaaccgaaggcaaagcacaatacaccagtatgttgaatgaaaacggcggtgttattgatgaccttattgtgtatttcttctcagaaaatgcctaccgcatggtcgttaactcagcaacccgtgaccgcgatctggcatggattgaaaaagttgcggccgattttgatgtcaccaccaaagagcgtgacgacatgggtatgctggctttgcagggccctaaagccgctgacaaaatccagggtgtattaaccgcagagcagtacgcagaaattgacggcatgaagccttttgtcgggaaagacgttggtgattactttattgcgaccacaggttacaccggcgaaaaaggctacgaaattgtggttccggctgagcagcttgaagccctgtggaatgacttgctaaaagccgatgttgctccatgtggactgggtgctcgtgatacactgcgcttagaagctggcatgaacctgtatggtcaggacatggatgagaacatcacgccgctggaagccaatatgggctggagcgtagcgtttgaaccggctgatcgcgactttattggtcgtaaagcattagagcagaaaaaagctgaaggtcacgacaagttagtcggccttgtgatggaagagaaaggtgtactgcgtcacggtcaaaaagtaaccgttgagggtggcgaaggtatcatcacttctggtacattctcgcctacacttggtttctcagttgcaatggctcgcgttccatcaagtgttggtgatacagcggaagtggaaatgcgtaaaaaacaaatgccggtgaaggtagttaagccaggtttcgtcagaaacggtcaatctgttttataa

SEQ ID NO: 71030 - protein, 359 aa, Idiomarina loihiensis L2TR
MGSRTPLYEAHVKAGAKMVDFHGWDMPLNYGSQIEEHHAVRRDCGVFDVSHMTIVDVEGSQAQAFLRYLLANDVAKLKTEGKAQYTSMLNENGGVIDDLIVYFFSENAYRMVVNSATRDRDLAWIEKVAADFDVTTKERDDMGMLALQGPKAADKIQGVLTAEQYAEIDGMKPFVGKDVGDYFIATTGYTGEKGYEIVVPAEQLEALWNDLLKADVAPCGLGARDTLRLEAGMNLYGQDMDENITPLEANMGWSVAFEPADRDFIGRKALEQKKAEGHDKLVGLVMEEKGVLRHGQKVTVEGGEGIITSGTFSPTLGFSVAMARVPSSVGDTAEVEMRKKQMPVKVVKPGFVRNGQSVL

SEQ ID NO: 71031 - DNA, 1083 bp, Aromatoleum aromaticum EbN1
  CDS (1)..(1083): transl_table=11
gtggcaaaacatacccctcttcacgccgttcatgtcgccgccggcgcccgcatggtcgatttcgccggctgggacatgccggtgaattacggctcgcagatcgaggaacaccacgtcgtgcgccgcgacgcgggaatgttcgacgtctcgcacatgctcggcctcgacctcgaaggcccggacgcgacgacgtggctgcgcggcctgctcgcgaacgatgtggccaagctgcatgagccgggcaaggcgctgtacagctgcatgctcaatcccgacggcggcgtcatcgacgacctgatcgtctattacttctccccgacgtcgtaccgcatcgtcgtcaatgccggcactgccgacaaggacgtcgcctggatgcgccagcacatcgcggcaagcggcgcgaacgtcacgctcgagagccgccgcgacctggcgatgatcgcggtgcaggggccgaacgcacgcgacaagacctgggcggcgctgcccgacacgcacgccgcgagcgaaagcctgaagccgttttcggccgcccgggtcggcgacctgctgatcgcgcgcaccggctataccggcgaggacggtttcgaaatcacgctgccggccgcgcgcgccgaagcagtctggaacgcgcttgccgcggcgggcgtcaagccctgcgggctcggcgcacgcgacacgttgcgcctcgaagccggcatgaacctgtacgggcaggacatggacgagacggtctcgccgctcgacgccggcctcgcctggactgtcgacctgaaagatgaatcgcgcgatttcgtcggtcgcgccgcgctcgtcgcgaaccctgcccgccgcaaggtgctcggcctgatcctcgaggacaaaggcgtgttgcgcgcgcacatgagggtgtttaccgccgccggtgaaggcgaaaccaccagcggcagcttctcgccgtcgctcgaaaaatcgatcgccttcgcgcgcctgccgctcggcgtcgagccgggcgaagtggtcgaagtcgatatccgcggtcgtcgcctgaaagcgcgcacggtcaagctgccgttcgtgcgcaacggcaaggcgctggtctga

SEQ ID NO: 71032 - protein, 360 aa, Aromatoleum aromaticum EbN1
MAKHTPLHAVHVAAGARMVDFAGWDMPVNYGSQIEEHHVVRRDAGMFDVSHMLGLDLEGPDATTWLRGLLANDVAKLHEPGKALYSCMLNPDGGVIDDLIVYYFSPTSYRIVVNAGTADKDVAWMRQHIAASGANVTLESRRDLAMIAVQGPNARDKTWAALPDTHAASESLKPFSAARVGDLLIARTGYTGEDGFEITLPAARAEAVWNALAAAGVKPCGLGARDTLRLEAGMNLYGQDMDETVSPLDAGLAWTVDLKDESRDFVGRAALVANPARRKVLGLILEDKGVLRAHMRVFTAAGEGETTSGSFSPSLEKSIAFARLPLGVEPGEVVEVDIRGRRLKARTVKLPFVRNGKALV

SEQ ID NO: 71033 - DNA, 1077 bp, Francisella tularensis subsp. tularensis SCHU S4
  CDS (1)..(1077): transl_table=11
atgctgaaaactcctctttatgaatcacatatggcagcaaatgctaagatggttgatttctcaggctggtcaatgccaattaactatggttcacaaattcaagagcataataatgttagagaagattgtggtatttttgatgtatcacatatgttagcagttgatattcaaggttctgaagctgagaagtttttacgctatcttttagccaatgatgttgctaaattacaggagaataaagctcaatatggctgtatgttaaatcatgatgctggtattgttgatgatttgattacttataaagttacagatgagcattttagaatagttgtcaatgctggtaatagagagtcagatgttgcatggtttaatcaaaatgctcaaaattttgatgttgcgataaccccacagactgatttagctatagttgcagtacagggaccaaaagctgttgccgttattaagcgtgttgttaccaaagaaattgctactgaaattgaagcgctattgcctttttcatttaagttttttagtaaatggatggtagcacgtactggttatactggtgaagatggttttgaggtgattctccctgcaacacaggtcaaaaaattctgggatagtctgcttgaaaatggagcacaacctgcagggttaggcgctcgtgatacattaagattagaagctgggatgcatctatatggtgctgatatggatacctctacgacaccgctagaaagaggcttgggctggagcgttgatttatctgacgaacatagggactttattggtaagaaagcatactttgctaaaaaagcacaaggagttgatactaaatgggtcggtgtagtactaaaaacaaaaggtgtccttagagcaggtcaagaaattgattttgataatggtgaaaaaggctatataaccagtgggagtttttcaccaactttgaaagtagctattggattagcttatgtgcctaagcaagctgataatcctgtggtaaatattagaggtaaggagctcgaagtcgagctagttaaacctaagtttgttaaaaatggtaaatctttgatataa

SEQ ID NO: 71034 - protein, 358 aa, Francisella tularensis subsp. tularensis SCHU S4
MLKTPLYESHMAANAKMVDFSGWSMPINYGSQIQEHNNVREDCGIFDVSHMLAVDIQGSEAEKFLRYLLANDVAKLQENKAQYGCMLNHDAGIVDDLITYKVTDEHFRIVVNAGNRESDVAWFNQNAQNFDVAITPQTDLAIVAVQGPKAVAVIKRVVTKEIATEIEALLPFSFKFFSKWMVARTGYTGEDGFEVILPATQVKKFWDSLLENGAQPAGLGARDTLRLEAGMHLYGADMDTSTTPLERGLGWSVDLSDEHRDFIGKKAYFAKKAQGVDTKWVGVVLKTKGVLRAGQEIDFDNGEKGYITSGSFSPTLKVAIGLAYVPKQADNPVVNIRGKELEVELVKPKFVKNGKSLI

SEQ ID NO: 71035 - DNA, 1119 bp, Synechococcus elongatus PCC 6301
  CDS (1)..(1119): transl_table=11
gtgactctgactgtgaccgtttctctcttgtcttcccctctgcattcagtgtgcacttcagcgggagctcggttcacggggtttgcaggctgggagttacccctgcagtttcaagggctcatgcaagagcatctcgctgttcgtgagcgagcagggctatttgatatttcccacatgggcaagtttcagttgcgcggctccggccttcgggcggctttgcaacgtctgctgcccagtgatttgacgactctgttgccggggcaggctcaatactcagtgcttttgaatgaagcaggaggctgccttgatgacctgattgtctactggcagggaattgtcgatggtgtcgaacaggcgtttttgattgtcaacgctgcgacgactgacagcgatcgcctctggctgacagagcatttaccgcccgcaatcgccctcctagatctcagtcaagacttggcgttagttgcgattcaaggtccccaagcgatcgctttccttcagcctcttgtcagttgcgatctggcagaactgccgcgctttagccacacggtgacttcgatcgctggtcaaccggcctttgttgcccgcaccggctacacgggcgaagatggctgcgaggtgatgctgccgcccgcagccgcgatcactctctggcaacagctgaccgccgctggggttgtgccctgtggactgggggctcgcgatacgctgcggctggaagccgctatgccgctctacggtcatgagctggacactgacaccaatcctctcgaagctggattgggctgggtagttcatctcgaccggaatcctgacttcctcgggcgcgatcgccttgtgcaagcgaaaaccaacggtctcgaacgtcgcttggtcggcctcgagctgcctggccggaatattgcccgacatggctatcctgttgcgatcgctgataccacggtcggaattgttaccagtggcagttggtcgcccaccctcagcaaagcgatcgcccttgcctacgtccctcccgccttggccaatcttgggcaggaactctgggtcgaaattcggggcaaacaggtgcccgccacagtcgtcaagcgccccttctaccgtggcagccagttccgttaa

SEQ ID NO: 71036 - protein, 372 aa, Synechococcus elongatus PCC 6301
MTLTVTVSLLSSPLHSVCTSAGARFTGFAGWELPLQFQGLMQEHLAVRERAGLFDISHMGKFQLRGSGLRAALQRLLPSDLTTLLPGQAQYSVLLNEAGGCLDDLIVYWQGIVDGVEQAFLIVNAATTDSDRLWLTEHLPPAIALLDLSQDLALVAIQGPQAIAFLQPLVSCDLAELPRFSHTVTSIAGQPAFVARTGYTGEDGCEVMLPPAAAITLWQQLTAAGVVPCGLGARDTLRLEAAMPLYGHELDTDTNPLEAGLGWVVHLDRNPDFLGRDRLVQAKTNGLERRLVGLELPGRNIARHGYPVAIADTTVGIVTSGSWSPTLSKAIALAYVPPALANLGQELWVEIRGKQVPATVVKRPFYRGSQFR

SEQ ID NO: 71037 - DNA, 1110 bp, Xanthomonas oryzae pv. oryzae KACC10331
  CDS (1)..(1110): transl_table=11
atgacccagaagaccatcctcaacgacacccatcgtgcgctcggcgccaaaatggtcgacttcggcggttgggacatgccgatccactatggctcgcagttggacgagcaccaccaagtgcgccgcgacgccggcatgttcgacgtcagccacatgaccgtggtcgacctgcacggtgcgcgcgtacgcgcgtttctgcgcgacctgctcgccaactcggtggacaagctcaaggtctgcggcaaggcgctgtacacctgcatgctcaatccgcagggtggggtgatcgacgacctcatcgtctattacatgagcgaagacttcttccggttggtggtcaatgccgccacccgcgaaaaagatctgcagtggatcggcgagcaggccgtacgcttcgatgtgcgcgtggaagagcgcagcgacttcgcgatgatcgccgtgcaaggccccaacgcacgcgccaatgtcatcgacctgctggacccggccgacaccgcagcggcgagcaagctcggccgtttcgctgcactgcaaacgcgttcgcgcgatggcatcgaattgtttcttgcgcgcaccggctacaccggcgaagacggtttcgaaatcgtgttgccgcaggaggccgccgtcgcgttctggaatgcattgctcgcgcagggcgtcaagccagcaggtctgggcgcacgcgacaccttgcgtctggaagcgggaatgcatctttacgggcaggacatggacgatgcggtcaccccctacgaagccgcgctggcctggacgattgccctggacgaaggacgcgacttcatcggtcgccgtgtgctcgagtcgcaaaaggcgcagggtgcaccgcgtcagttgatcggtgtggtgatggacgacaagggcgtgctgcgacatggccaggcggtgttcaccgccagtggcgaaggcgagattttgtccggcacgttctcgccgacgctcggcaaggcgatcgccttcgcgcgcgtgccggccggcagcatcgatcagctacgcgtggacatccgtggcaagcaggtgccgttgcgcgcggtgaaatttccgttcgttcgcgatggccaggcacagcccggcgtgctcggcgactga

SEQ ID NO: 71038 - protein, 369 aa, Xanthomonas oryzae pv. oryzae KACC10331
MTQKTILNDTHRALGAKMVDFGGWDMPIHYGSQLDEHHQVRRDAGMFDVSHMTVVDLHGARVRAFLRDLLANSVDKLKVCGKALYTCMLNPQGGVIDDLIVYYMSEDFFRLVVNAATREKDLQWIGEQAVRFDVRVEERSDFAMIAVQGPNARANVIDLLDPADTAAASKLGRFAALQTRSRDGIELFLARTGYTGEDGFEIVLPQEAAVAFWNALLAQGVKPAGLGARDTLRLEAGMHLYGQDMDDAVTPYEAALAWTIALDEGRDFIGRRVLESQKAQGAPRQLIGVVMDDKGVLRHGQAVFTASGEGEILSGTFSPTLGKAIAFARVPAGSIDQLRVDIRGKQVPLRAVKFPFVRDGQAQPGVLGD

SEQ ID NO: 71039 - DNA, 1170 bp, Corynebacterium jeikeium K411
  CDS (1)..(1170): transl_table=11
atgaccgaacttaagaagaccgcgctgcacctggtgcacgagaagttgggcgcgcgatttaccgacttcggcggctgggacatgcctctgaagtacagcagtgagctggacgagcaccacgctgtacgcaatgccgtgggcgtattcgacctctcccacatgggtgaggttcgcgtgaccggcccgcaggcagcggagttcctggaccacgcgctgatttcgaagctgtcggcagtgaaggtcggcaaggcgaagtactcgatgatctgcaccgaatccggtggcatcatcgacgacctgatcacctaccgcctgggcgacaacgagttcctgatcgtgccgaacgcgggcaacgtggacaacgtggtctccgcactgcagggccgcaccgagggctttgacgtggaggttaacaacgagtccgatgcgacctccatgatcgccgtacaggggcccaaggccgcgcaggcgatgctggagatcgtggagaacgtcgtggatgcacccgaggcatccggcgcgggcgagaccgttgccgaggctatcgaggggctgggttactacgcggcattcagcggtgttgccgcaggtcagcccgtgctggtggcccgcacaggctataccggcgaggacggtttcgagctgatcgtggctaacgatggtgcggagaccgtgtggaccaaggctatggaccaggctgcgcagctgggtggcctgccgtgtggcctggcctgccgcgacaccctgcgcctggaggctggcatgccgctgtacggcaacgagctatcgctgaagctcaccccggtcgatgctgggctgggcattcttgcggcgacgaagtctaaggactctttcgttggtcgtgacgccatcgtttccgccaaggaaaagggtacccagcaggtacttatcgggctggcgggcgagggtcgccgcgctgcccgtgggggatacgaggtgtttgccggtgacggcgagaaggccatcggtgccgtgacctccggtgcactgtcgccgacgctgggccacccggtggcattggcatacgtcgcgaagtccgcagtgtcctccggcgcggccgctgagggtgcgaccgtggaggtagacatccgcggcaagcgctttgaatacaaggttgtggcgctgccgttctactcccgcgagaagtaa

SEQ ID NO: 71040 - protein, 389 aa, Corynebacterium jeikeium K411
MTELKKTALHLVHEKLGARFTDFGGWDMPLKYSSELDEHHAVRNAVGVFDLSHMGEVRVTGPQAAEFLDHALISKLSAVKVGKAKYSMICTESGGIIDDLITYRLGDNEFLIVPNAGNVDNVVSALQGRTEGFDVEVNNESDATSMIAVQGPKAAQAMLEIVENVVDAPEASGAGETVAEAIEGLGYYAAFSGVAAGQPVLVARTGYTGEDGFELIVANDGAETVWTKAMDQAAQLGGLPCGLACRDTLRLEAGMPLYGNELSLKLTPVDAGLGILAATKSKDSFVGRDAIVSAKEKGTQQVLIGLAGEGRRAARGGYEVFAGDGEKAIGAVTSGALSPTLGHPVALAYVAKSAVSSGAAAEGATVEVDIRGKRFEYKVVALPFYSREK

SEQ ID NO: 71041 - DNA, 1083 bp, Pseudomonas fluorescens Pf-5
  CDS (1)..(1083): transl_table=11
atgggacagcgtacgcctctgtatgacctgcatctcgccctcggcgcgaaaatggtcgattttggcggttgggatatgcccttgcattacggctcgcaggtcgaggagcaccatcaggtgcgacgtgattgcggtgtgttcgatgtatcccacatgaccgtgatcgatgtcagcggtacccaggccaaggcctggctccagcggttgctggccaatgatgtcgaacgcctgcacaaccccggccaggctctgtacagcaccatgctcaatgagcggggcggcatcgttgacgacatgatcgtctatcgcctcgaagacgcttatcgcctggcgctcaatgccgccacccgtgatcaggacctggcctggatgcaggcgcagctgggggatttccaggtgcagctgcacgagcgcccggaactggcgatgctggcgatccagggccctcaggcgcggcacaagattgccgagctggtgacccagtcccgcggcaccctgatccagcagctcaagccattcgaagccggctttgacggcgactggttcattgcccggaccggctacaccggcgaggacggtctggagatcgtcctccctgccgaccaggccccggccttcttcaacgacctggtgggggcggggatctcgcccatcggcctgggcgcccgggacaccctgcgcctggaggccggcatgaacctctatggccaggacatccatcaggatgtctcgcccctggcggcgaacatggcctggagcattgcctgggaaccggcgtcacgtcagttcatcggtcgcagtgccctggaagccgaacgggcggccggggtgaagcagaaactggtgggcctggtgctcgaagaacgtggggttttacgcgcgcatcaggtggttcgtatcgccgatgttggcgaaggtgagatcaccagtggtagtttctcccctacgctgagtaaatcgatcgcactggcgcgggtgccgatggccaccgccgaccgtgccgaagtggaaatccgcggcaagtggtacccggtccgggtggtcaaaccgaccttcgtgcgccacggcaaaaccctgatctaa

SEQ ID NO: 71042 - protein, 360 aa, Pseudomonas fluorescens Pf-5
MGQRTPLYDLHLALGAKMVDFGGWDMPLHYGSQVEEHHQVRRDCGVFDVSHMTVIDVSGTQAKAWLQRLLANDVERLHNPGQALYSTMLNERGGIVDDMIVYRLEDAYRLALNAATRDQDLAWMQAQLGDFQVQLHERPELAMLAIQGPQARHKIAELVTQSRGTLIQQLKPFEAGFDGDWFIARTGYTGEDGLEIVLPADQAPAFFNDLVGAGISPIGLGARDTLRLEAGMNLYGQDIHQDVSPLAANMAWSIAWEPASRQFIGRSALEAERAAGVKQKLVGLVLEERGVLRAHQVVRIADVGEGEITSGSFSPTLSKSIALARVPMATADRAEVEIRGKWYPVRVVKPTFVRHGKTLI

SEQ ID NO: 71043 - DNA, 1089 bp, Colwellia psychrerythraea 34H
  CDS (1)..(1089): transl_table=11
atgactaataaaacagtattacatgcaaagcatttagcttcaggcgcaaaaatggttgatttctttggctgggatatgcctatcaactacggctctcaaattgaagagcatcacgcagtaagaaccgatgccggcatgtttgatgtttcacacatgacgattgttgatgtgcaaggcgcagatgcaaaagctttcttacgtcgtttagtaattaacgatgttgctaagttagcaacaccgggtaaagcgttatacacaggtatgttaaatgaagaaggcggcgtgattgatgatttaatcatctacttcttctcagatactgattaccgtttagttgttaactcagcgacacgtgtaaaagatcttgcttggatgactaagcaatctacaggttttgatatcactatcactgaacgtcctgaatttggcatgcttgccgtacagggcccagaagcgaaagcaaaagtagctaaactattaacagcagagcaaatcgaagctgttgaaggcatgaaacctttctttggtgtgcaagtaggtgatttatttattgccactacaggttatactggtgaagacggttacgaaattatagtaccaaataattcagctgaagatttttggcaaaaactattagacgaaggtgtagttccttgtggtctaggtgctcgtgatacactacgtttagaagctggcatgaacctttacggtttagatatggatgaaactgtttcgccattagccgctaacatggcgtggacaatcagctgggaacctacagaccgtgactttatcggtcgtgacgtattaacagctcaaaaagcagcgggtgatcaacctaagcttgttggtttagtactagaagcaaaaggtgtgcttcgttcacatcaagttgttgtgactgaatttggcaatggtgaaattacttctggcacgttctcgccaacgttaggccacagtgttgctttagcacgtgttccacgtagcgtgaaagtaggcgatacaatcgaagttgaaatgcgtaaaaaactgattaaagttcaggttacaaaacctagtttcgttcgtaacggcaaaaaagttttctaa

SEQ ID NO: 71044 - protein, 362 aa, Colwellia psychrerythraea 34H
MTNKTVLHAKHLASGAKMVDFFGWDMPINYGSQIEEHHAVRTDAGMFDVSHMTIVDVQGADAKAFLRRLVINDVAKLATPGKALYTGMLNEEGGVIDDLIIYFFSDTDYRLVVNSATRVKDLAWMTKQSTGFDITITERPEFGMLAVQGPEAKAKVAKLLTAEQIEAVEGMKPFFGVQVGDLFIATTGYTGEDGYEIIVPNNSAEDFWQKLLDEGVVPCGLGARDTLRLEAGMNLYGLDMDETVSPLAANMAWTISWEPTDRDFIGRDVLTAQKAAGDQPKLVGLVLEAKGVLRSHQVVVTEFGNGEITSGTFSPTLGHSVALARVPRSVKVGDTIEVEMRKKLIKVQVTKPSFVRNGKKVF

SEQ ID NO: 71045 - DNA, 1092 bp, Dechloromonas aromatica RCB
  CDS (1)..(1092): transl_table=11
atgctgaagaaaacagttttgaacgccgctcaccgcgcaatgaatgcccggatggtcgatttcggtggttgggacatgccggtcaactacggttcgcagatcgaggagcacaacgcggtccgcaacaactgcggcatgttcgatgtttcgcacatgtgcccggtcgacgtcgttggcgcggattgccgcaccttcctgtcccgcctcgtcgccaacgatgtggccaagctcaaggtttccggcaaggcgctctatgcggccatgctcaatgaagccggcggcgtcatcgacgacctgatcatctatttcctgaccgacacgcgcttccgcatcgtggtcaatgctggcaccgccgagaaggatctggcctggatgcaggccaaggtcgccgaatggaagctcgacgtgaccattacccagcgccgtgacggcgccaacaatctcggcatcatcgccgtccagggcccgaatgcccgtgccaaggtgtgggaagtgctgccgcagaccaaggccgcgaccgcaggcctgaaggctttcttcgccgctgaggtcgatcagtatttcattgccagcaccggctacaccggtgaagacggttacgaaatcatgatgccggccggcgaagcagaggctctgtggaacaagctcaatgctgctggtgttgccccctgcggcctcggtgcccgcgacacgctgcgcctggaagccggcatgaacctgtacggccaggacatggatgagacggtttcgccgctcgacgccggcctggcttggacggtttcgctgaacaccgaccgtgatttcgtcggcaaggctgcgttggtcaccaacggccagcagaagcagttcctcggcctgatcctgctcgacaagggcgtgctgcgcggccaccagaaggtcatgaccaagcaaggcgacggtgaaatcacctccggaagcttctcgccgacgctccagcagtccatcgctctcgcccgcctaccgctcggcgtgcagattggcgacgaagtcgaagtcgatatccgtggcaaggctttgaaagccaaggtcaccaaacccgtattcgcccgcaacggcaaagcagtcatctaa

SEQ ID NO: 71046 - protein, 363 aa, Dechloromonas aromatica RCB
MLKKTVLNAAHRAMNARMVDFGGWDMPVNYGSQIEEHNAVRNNCGMFDVSHMCPVDVVGADCRTFLSRLVANDVAKLKVSGKALYAAMLNEAGGVIDDLIIYFLTDTRFRIVVNAGTAEKDLAWMQAKVAEWKLDVTITQRRDGANNLGIIAVQGPNARAKVWEVLPQTKAATAGLKAFFAAEVDQYFIASTGYTGEDGYEIMMPAGEAEALWNKLNAAGVAPCGLGARDTLRLEAGMNLYGQDMDETVSPLDAGLAWTVSLNTDRDFVGKAALVTNGQQKQFLGLILLDKGVLRGHQKVMTKQGDGEITSGSFSPTLQQSIALARLPLGVQIGDEVEVDIRGKALKAKVTKPVFARNGKAVI

SEQ ID NO: 71047 - DNA, 1119 bp, Prochlorococcus marinus str. NATL2A
  CDS (1)..(1119): transl_table=11
atgaaattactgcaaactcctctttatcaagaatgcaaagaattaggcggtaaaatggtcccttttgcaaattgggaaatgcctgttagtttctctgggttaatagaagaacacaatgcagtaagaaaaaatgttggaatgttcgacatatctcacatgggtgttgtgcaattaaaaggtaaaaatatcaaaagtgcattacaaaatttagttccctcagacgtgtttcgaataggacctagtgaagcgtgttatacagtttttttaaaagaaaatggaggaattcaagacgatctaatcatttatgaccaaggagttttagatacaaatgaagagagtatagttctagttattaatgcggcaagaaaagaatctgacattgaatggttgagttcaaatctttttaaaaaggaaattacaatatccgaattcatgccagagggtgcattaattgcgatccaaggtccagaatctatcagtacacttgagaaaattctcgaagagcctttatctaatttgccacgttttggtcacagaactatcacttcaaatcccaatctaataaactcacaagaatcaatttttattgcacgaactggttatacaggagaggaaggtttcgaattcttgtcatctcctgaaacagcaaagtctatctggaagagtctaattgcgtcgggagttactccatgcggtctaggagcaagagatacactgcggttagaggcttctatgcatttatatggcaacgatatcaacctagatacaactccctttgaagctggcttgggttggttagttcatttagaaatgcctaatgatttcataggtaggaaagctctagaaaaacaagccgaagttggaacgcaaaaaaaacttgttggtattcaagtccttgataaaggaattgcaagaaaaggatatccagttctatacaacagcgaaactgttggaatagtcactagcggaacatggtctccaacattgcaaaaacccatagctcttgcttatgtgccaagcgaaattgcaaaagtcaatactcaaatagaagtagaaattagaagaaaaaaacatcctgcaataatcgtaaaaagacctttctatcgaaaaggtttttga

SEQ ID NO: 71048 - protein, 372 aa, Prochlorococcus marinus str. NATL2A
MKLLQTPLYQECKELGGKMVPFANWEMPVSFSGLIEEHNAVRKNVGMFDISHMGVVQLKGKNIKSALQNLVPSDVFRIGPSEACYTVFLKENGGIQDDLIIYDQGVLDTNEESIVLVINAARKESDIEWLSSNLFKKEITISEFMPEGALIAIQGPESISTLEKILEEPLSNLPRFGHRTITSNPNLINSQESIFIARTGYTGEEGFEFLSSPETAKSIWKSLIASGVTPCGLGARDTLRLEASMHLYGNDINLDTTPFEAGLGWLVHLEMPNDFIGRKALEKQAEVGTQKKLVGIQVLDKGIARKGYPVLYNSETVGIVTSGTWSPTLQKPIALAYVPSEIAKVNTQIEVEIRRKKHPAIIVKRPFYRKGF

SEQ ID NO: 71049 - DNA, 1128 bp, Ralstonia eutropha JMP134
  CDS (1)..(1128): transl_table=11
atgacgctccaggccacgcccctcaatgccatccaccgcgccctcggcgcccgcatggtcgacttcggcggctgggacatgccggtcaactacggctcccagatcgaggaacacaacgcggtgcgcagcgacgccggcatgttcgatgtgtcgcatatgtgcgtggtcgacctgaacggcgccaatacgcgtgcgttcctgcgcggcctgctggccaacaacgtcgataagctgcagacgccgggcaaggctttgtattcctgcatgctcgacgaaaaaggcggcgtgatcgacgacctgatcgtctacttcttcgccgaggatcgcttccgcctggtggtcaatgccagcaccgcgcttggcgatatcgagtggatccgcgcacgcaatgacgcgaccggcagcggcgtgaccatcaccccgcgccgtggcgatgtggcaccggcgggcgcgctgccgctggcgattgtcgccgtgcagggcccgaacgcgcgcaccaaggtgtggaacaccttcccgtccacccagccttccgacgctctcaagccattcaacgccgtcgtggtccacgacccggccatcggcgagatcatggtcgcgcgcaccggctacaccggcgaagacggctttgaactcgtggtgcctgccgagaacgtcgctgccgtgtgggaaaagctcgatgccgccggcgtgcgcccggccggcctcggcgcgcgcgacacgctgcgcctggaagccggcatgaacctgtacggccaggacatggatatcaacacctcgccgctcgacgccggcctggcctggaccgtcgacctgcagagcgagcgcgatttcaccggcaaggcggcgcttgccgccgccggccagcgccagcagttcctgggcctgatcctgcgtgacaagggcggcgtgctgcgcgcgcaccagaaggtcgtcaccgcggccggtgatggcgaaatcacgagcggcaccttcagcccgtcgctgtcgcaatcgatcgctttcgcgcgcctgccgatgggcgtggcggtcggcgacacggtgcaggtggagatccgcgaccgcaaactcgcggcgactgtggttaaactgccgtttgtgcgtaatggcaaggcactcgtgagctga

SEQ ID NO: 71050 - protein, 375 aa, Ralstonia eutropha JMP134
MTLQATPLNAIHRALGARMVDFGGWDMPVNYGSQIEEHNAVRSDAGMFDVSHMCVVDLNGANTRAFLRGLLANNVDKLQTPGKALYSCMLDEKGGVIDDLIVYFFAEDRFRLVVNASTALGDIEWIRARNDATGSGVTITPRRGDVAPAGALPLAIVAVQGPNARTKVWNTFPSTQPSDALKPFNAVVVHDPAIGEIMVARTGYTGEDGFELVVPAENVAAVWEKLDAAGVRPAGLGARDTLRLEAGMNLYGQDMDINTSPLDAGLAWTVDLQSERDFTGKAALAAAGQRQQFLGLILRDKGGVLRAHQKVVTAAGDGEITSGTFSPSLSQSIAFARLPMGVAVGDTVQVEIRDRKLAATVVKLPFVRNGKALVS

SEQ ID NO: 71051 - DNA, 1152 bp, Ralstonia eutropha JMP134
  CDS (1)..(1152): transl_table=11
atgcgcgagacgaacttgcacgctttgcgaaccccgctgtatgagcgccaccgcttgatccgggcccgaatggctgatgtcggtggctgggatctgcccattgcttatggatcccagatcgaagagcatcacaccgtgcgagaggatgccgcgatgttcgatgtgtcgcacatgtgcgcgcttgacgttcgcgggactgacgctcgagcgtttctcggcaggcttcttgccaacgacatcgggaagctgaaatcaccgggaaaggcgctctattcgtgcatgcttaaccgggaagggggcgtaatcgacgatcttgtcgtctactaccttagcgatgaatgctttcgcattgtcttgaatgcgcaggctgcaagccgtgacattgattggatgcgaacgcagatcgttgagagcggatgttccgtgacactggtgccacgtcgacaggatcttgtcactgacgatgtggaggcccttgcgatgatcgccgtgcaaggtcccaatgccagggagaaggtatttcgagccatgccgtcgacgcgcgccgccgacaaggtaaagccattcaattcatgcttcgtgcacgacgctgtcgtcggcgcgctgatgctggcgcgcacgggaaagaccggcgaggatggcttcgagataacgatgctggcgaagcatgccgttcacgtatgggacgcgttgcgttcgtccggcatctgcgcggcgggattccacgcatgggataccctgcggctcgaggccggcatgcacgtgccgggacgggacatgggcccgcagacgtctccatttgacgttggcctgggctggtctgttgatctcggggaaaagcgggactttgttggcaaggcagcgctacaagctcgcgctcaagcgtcgcaactcgtcggactcgcgttcgaaggaagcggtgcggtcgcgcgtacgcagagccccgtgatgagtctggaaggggaggtgatcgggaaggtcaccagcgggacatatagtccgacgcttcaaatggctatcgctctggcgctggtttcgccagacatcaagttgggctcgtctgtgagtgtcgaggtctacagcaagagagtctctgcaaaagtcgttcgtccaccttttgttcgggatggaagcccagtgggaaaacggtag

SEQ ID NO: 71052 - protein, 383 aa, Ralstonia eutropha JMP134
MRETNLHALRTPLYERHRLIRARMADVGGWDLPIAYGSQIEEHHTVREDAAMFDVSHMCALDVRGTDARAFLGRLLANDIGKLKSPGKALYSCMLNREGGVIDDLVVYYLSDECFRIVLNAQAASRDIDWMRTQIVESGCSVTLVPRRQDLVTDDVEALAMIAVQGPNAREKVFRAMPSTRAADKVKPFNSCFVHDAVVGALMLARTGKTGEDGFEITMLAKHAVHVWDALRSSGICAAGFHAWDTLRLEAGMHVPGRDMGPQTSPFDVGLGWSVDLGEKRDFVGKAALQARAQASQLVGLAFEGSGAVARTQSPVMSLEGEVIGKVTSGTYSPTLQMAIALALVSPDIKLGSSVSVEVYSKRVSAKVVRPPFVRDGSPVGKR

SEQ ID NO: 71053 - DNA, 1131 bp, Anabaena variabilis ATCC 29413
  CDS (1)..(1131): transl_table=11
atggctaatcaaaaagacactgccgaaaccttagcgagaactcctttgtatcaactgagtctagaactcaacgcccgtttgaccagctttggcgggtgggaaatgccagtacaattcagtgggattacccgcgaacacgaagcagtgagaaatgctgctgggatgtttgacatatctcacatggggaaatttaccctccaaggtaaaaacctgatttctcaactccaaggtttagttccttcagacttgagtaggttgcaaccaggacaagcccaatacaccgtgttgttaaacccccaaggaggaatcattgacgatatcattgtctactaccaaggtgaagacaacagtggtatgcaacaggcatttatcatcgtcaacgcagccaccaccagtaaagacaaagcatggatactgtcacaccttgaccaaaatcaggtgcaattccaagacatatcactagcaaaagtcttaattgccgtccaagggccaaaagccattgactatctccagccttttgtgcagcaaaatttacaaccaatcaaagccttcggacatctaggagccacagtactaggtcaagcaggttttatagcccgtacaggttacaccggggaagatggctttgagattttgttagacccagaagtgggagtggagttatggcgtagtttatctaatgcaggtgtcattccctgtggcttaggtgcaagagataccctgaggctagaagcagctatggcactctacggtcaagacatcaatgacaacaccactcctctagaagctgggttagggtggttagttcatttggataccaaaggagattttattggtcggtcagttttagaacaacaaaaggccacaggagtaaaacgccgcctcataggtttgcaagcccaaggacgtaacatcgcccgtcatggttaccaagttctctcagacggtaaagtagtaggcgaagtgactagcggtactctatcgcctacactaggtcatcccgttgctttagcctacgtccccagcaaactagcaaaagttggtcaacccctagaagtcgaaattcgcggtaaagcatacccagccgttgtagttaagcgaccattttatcgttcaagtcagaagggctag

SEQ ID NO: 71054 - protein, 376 aa, Anabaena variabilis ATCC 29413
MANQKDTAETLARTPLYQLSLELNARLTSFGGWEMPVQFSGITREHEAVRNAAGMFDISHMGKFTLQGKNLISQLQGLVPSDLSRLQPGQAQYTVLLNPQGGIIDDIIVYYQGEDNSGMQQAFIIVNAATTSKDKAWILSHLDQNQVQFQDISLAKVLIAVQGPKAIDYLQPFVQQNLQPIKAFGHLGATVLGQAGFIARTGYTGEDGFEILLDPEVGVELWRSLSNAGVIPCGLGARDTLRLEAAMALYGQDINDNTTPLEAGLGWLVHLDTKGDFIGRSVLEQQKATGVKRRLIGLQAQGRNIARHGYQVLSDGKVVGEVTSGTLSPTLGHPVALAYVPSKLAKVGQPLEVEIRGKAYPAVVVKRPFYRSSQKG

SEQ ID NO: 71055 - DNA, 1197 bp, Burkholderia pseudomallei 1710b
  CDS (1)..(1197): transl_table=11
atgcgccggcggttcgccgagttgccgttttgttttcgcgcccgggctcaaggcccggccgccttgcctgggaccccgatgaccgttctcaaaaccaccccgcttcatgccgcgcatcgcgccctcaacgcccgcatggtcgatttcggcggctgggacatgcccgtcaactacggctcgcagatcgaagagcaccaggcggtgcgcaccgatgccggcatgttcgacgtgtcgcacatgtgcgtcgtcgatttcacgggcccgcgcgtgcgcgcgttcttcgaacacgcgatcgcgaacaacgtcgcgaagctgcaaacgcccggcaaggcgctctactcgtgcctgctgaacccgcaaggcggcgtgatcgacgatctgatcgtctactacttcaccgaggaattcttccgcgtcgtcgtcaacgccggcactgcggagaaggacatcgcgtggttcaaccagctcaacgagcaaggcggcttcggcctcacgatcgcgccgcgtcgcgacttcgcgatcgtcgccgcccaaggcccgaacgcgcgcgcgaaggtgtgggacaccgtcccctgcgcgcgcgcagcgacgagcgagctcaagccgttcaacgccgcgcaggtcgcgggcacgccgttcggcgatctcaccgtcgcgcgcaccggctacaccggcgaggacggcttcgagatcatcgtcccggcgacgcacgtggaagcgctgtggaacgcgctcgccgagcgcggcgtgcgcccgtgcgggctcggcgcgcgcgacacgctgcggctcgaggccggcatgaacctgtacggccaggacatggacgaaagcgtttccccgctcgacgcgggcctcgcgtggacggtcgacctgtccgcgccgcgcgcgttcgtcggccgcgacgcgctcgaagcgcacggctcgcgcgcggcattcgtcggcctgatcctgcagaaggagaacggccgcgcgggcggcgtgctgcgcgcgcaccagaaggtcgccacgccgcacggcgaaggcgagatcacgagcggcacgttctcgccgtcgatgcaggaatcgatcgcctttgcgcgcgtgccgaaggacgtcgcgatcggcgacacggtgcacgtgcagatccgcgacaagcaacttcccgcgcgcgtggtaaaactgccgttcgtgcgcaacggcaaggtcctcgctgcgtaa

SEQ ID NO: 71056 - protein, 398 aa, Burkholderia pseudomallei 1710b
MRRRFAELPFCFRARAQGPAALPGTPMTVLKTTPLHAAHRALNARMVDFGGWDMPVNYGSQIEEHQAVRTDAGMFDVSHMCVVDFTGPRVRAFFEHAIANNVAKLQTPGKALYSCLLNPQGGVIDDLIVYYFTEEFFRVVVNAGTAEKDIAWFNQLNEQGGFGLTIAPRRDFAIVAAQGPNARAKVWDTVPCARAATSELKPFNAAQVAGTPFGDLTVARTGYTGEDGFEIIVPATHVEALWNALAERGVRPCGLGARDTLRLEAGMNLYGQDMDESVSPLDAGLAWTVDLSAPRAFVGRDALEAHGSRAAFVGLILQKENGRAGGVLRAHQKVATPHGEGEITSGTFSPSMQESIAFARVPKDVAIGDTVHVQIRDKQLPARVVKLPFVRNGKVLAA

SEQ ID NO: 71057 - DNA, 1083 bp, Pseudoalteromonas haloplanktis TAC125
  CDS (1)..(1083): transl_table=11
atgacttctaaaacagtactttatgctaagcaccttgaagcgggcgctaaaatggttgattttcatggctgggaaatgccaattaactacggttcgcaaatagaagagcacaatgcagtacgcaacgatgccggtatgtttgacgtatcgcacatgaccattgttgatatacaaggcgagcaagcacaagcatttttacaaaaactagtagcaaacgatgttgctaaacttaccgtacctggtaaagcgttatataccccaatgctaaatgagcaaggcggcgtaattgacgacttaataatttattttttcagtaacacctcttatcgcctagttgttaactcagcaactcgcgaaaaagacttagctcaccttgctaaaatatcagccgattttgccgttaccgttacagagcgtaacgaatttggcatgattgcagtgcaaggccctaacgctaaagctaaaactgccacattattaacagctgagcaaaatgcagcaatagagggtatgaaaccgttttttggcgtgcaaacaggtgatttatttattgccacaacgggttatactggcgaagacggttacgaaattgtagtgccaaaagagcaagctgccgatttatggcaacaactgttagacgcaggagttgcaccagcaggtttaggcgcacgcgacacgctacgtttagaagcgggcatgaacctttatggcctagatatggacgaaagcgtatcgccactagcggctaacatggcttggactattgcatgggaaccacaaagtcgtgactttattggccgtgatgtactagtacaacaacgcgccgaccaaagcactgataaacaagtaggcctagtgctagaagaaaaaggtatcttgcgcagtggctctaaagtaattgttgatggtggcgaaggtgttattacttctggcactttttcaccaacactgggttacagtgtagcgcttgcacgtgtaccacgttcaacgggcgacaccgctcaggtagaaatgcgtaaaaaattagttaccgtaaaagtagtaaagcctggctttgtacgtaacggtaaatcaatactttaa

SEQ ID NO: 71058 - protein, 360 aa, Pseudoalteromonas haloplanktis TAC125
MTSKTVLYAKHLEAGAKMVDFHGWEMPINYGSQIEEHNAVRNDAGMFDVSHMTIVDIQGEQAQAFLQKLVANDVAKLTVPGKALYTPMLNEQGGVIDDLIIYFFSNTSYRLVVNSATREKDLAHLAKISADFAVTVTERNEFGMIAVQGPNAKAKTATLLTAEQNAAIEGMKPFFGVQTGDLFIATTGYTGEDGYEIVVPKEQAADLWQQLLDAGVAPAGLGARDTLRLEAGMNLYGLDMDESVSPLAANMAWTIAWEPQSRDFIGRDVLVQQRADQSTDKQVGLVLEEKGILRSGSKVIVDGGEGVITSGTFSPTLGYSVALARVPRSTGDTAQVEMRKKLVTVKVVKPGFVRNGKSIL

SEQ ID NO: 71059 - DNA, 1116 bp, Nitrosococcus oceani ATCC 19707
  CDS (1)..(1116): transl_table=11
atgggaaaacatacggcgatatttgatctgcatcgctcggcgggagcccggttagtggactttgccggctgggatatgcctttgcactacggttcccaagtggcagagcatcaagcggtgcgccaaggggtggggatattcgatgtttcccatatgaccgtgatagagcttaaaggcgagaaggtacgtccttttttacaccagttgctagctaataacgtggaccgtttaaccgtccctggcacggcgctgtatagctgtatgcttaatacggagggtggagttattgatgaccttattgtttacctgatggcggagcaagaatttcgtgtggtctctaatgcgggaacccgggataaggtcttggcttggattgaatctcacgccgctcccttcaaagttcaagtggaagagcgtcctgagttggcgatgatcgccgtccaaggacccgaagctcgtgcccaggtccacggccagttacccgaatctttaaaggaaaaagttgttaaccttaagcgctttcaggctacctgggaggaggggctttttgttgcccgtaccggctatacgggggaggacggttatgaattactgttatcaggctcacaagcccaagactggtggcggcgcttgcaggcaggcggggcgaagccctgtggccttggggcgagggataccttaaggctagaagcaggaatgtgtctgtatggggcagatatggatgagaccacaacccccctggaatcaggtcttggatggacggtcgcctggaaacccccggagcgggattttataggtcgtgcggttttggaagcccagcaagctgcgggttgcccccatcaacaagtgggcttattgctccagggcaaggggctcatgcgcaatgggcagaccatcaccactaacttgggggaaggcgtggtgaccagtggtgggttttctcccagtttggagcgatccatcgcccttgcccgggtgccagtcggcgctgatggcccctgtgaagtccagatccgggggcgggcggtaccagccgctatggtcaaacctccctttgttcgcaatggccgagcctgtgtaccagcagagctcatggaacccatcgaggtaagttag

SEQ ID NO: 71060 - protein, 371 aa, Nitrosococcus oceani ATCC 19707
MGKHTAIFDLHRSAGARLVDFAGWDMPLHYGSQVAEHQAVRQGVGIFDVSHMTVIELKGEKVRPFLHQLLANNVDRLTVPGTALYSCMLNTEGGVIDDLIVYLMAEQEFRVVSNAGTRDKVLAWIESHAAPFKVQVEERPELAMIAVQGPEARAQVHGQLPESLKEKVVNLKRFQATWEEGLFVARTGYTGEDGYELLLSGSQAQDWWRRLQAGGAKPCGLGARDTLRLEAGMCLYGADMDETTTPLESGLGWTVAWKPPERDFIGRAVLEAQQAAGCPHQQVGLLLQGKGLMRNGQTITTNLGEGVVTSGGFSPSLERSIALARVPVGADGPCEVQIRGRAVPAAMVKPPFVRNGRACVPAELMEPIEVS

SEQ ID NO: 71061 - DNA, 1083 bp, Carboxydothermus hydrogenoformans Z-2901
  CDS (1)..(1083): transl_table=11
atggagaacttgaaaaggacgccgctttatgaggaacatattaagcttggtgcgaaaatggttccctttggcggatgggagatgccggtccagtataccggtattttagaagaacatatggccgttcggaccgatgtaggcatgtttgatgtttcccacatgggggaaatagaaattaccggaaagcaagcggaacggtttgttaattaccttatcaccaatgatgtttcccgccttaattccggcgacgtaatttacactactatgtgctatcccgatggaggtaccgttgacgaccttttggcttataagtattcgaccgaacggtatttgttggtggtaaacgcagccaataaagataaagatttagctcatattctccaatacaggtgggacgatgttactgttaccgatttatccgacgaaaccgccgaaattgctttgcagggtccaagagcccaggagattttgcagaagttaaccgcttttgatttaaatcaaattaaatattttggttttgccgaaattgaggttgcaggcgttccctgtcttgttagccgcaccggatataccggtgaagatggctttgaaatttattttgctccaaatttggctacaaaaatctggaatgaactcttaaatcttggtgtcaagccggcaggtcttggtgcccgggatacgttaagatttgaagcctgtcttcctttatacggccatgaactttccgccgaaatcacacccttagaagccggactgggctgggccgttaagtttaataaggaagattttataggaaaagaagctttacttgcccaaaaaaatgccgggcttaaaagaaaaattgttggtttggaaatgatcggagcaggaattccacgccaaggctacgaaatagtatttaaccaaaggggagtaggttttgtcacctccggtacctttgcaccgttcctcaagaaaaacctggcaatggctatggtggatcttgaggcggcggaaattggtaccgaggtggacgtaatcattcgggggaagggcgtgcgtgcccgcgtaatttcaagaccattttataaaagggggaaataa

SEQ ID NO: 71062 - protein, 360 aa, Carboxydothermus hydrogenoformans Z-2901
MENLKRTPLYEEHIKLGAKMVPFGGWEMPVQYTGILEEHMAVRTDVGMFDVSHMGEIEITGKQAERFVNYLITNDVSRLNSGDVIYTTMCYPDGGTVDDLLAYKYSTERYLLVVNAANKDKDLAHILQYRWDDVTVTDLSDETAEIALQGPRAQEILQKLTAFDLNQIKYFGFAEIEVAGVPCLVSRTGYTGEDGFEIYFAPNLATKIWNELLNLGVKPAGLGARDTLRFEACLPLYGHELSAEITPLEAGLGWAVKFNKEDFIGKEALLAQKNAGLKRKIVGLEMIGAGIPRQGYEIVFNQRGVGFVTSGTFAPFLKKNLAMAMVDLEAAEIGTEVDVIIRGKGVRARVISRPFYKRGK

SEQ ID NO: 71063 - DNA, 1110 bp, Xanthomonas campestris pv. vesicatoria str. 85-10
  CDS (1)..(1110): transl_table=11
atgacccagaagaccatcctcaacgacacccatcgtgcgcttggcgccaagatggtcgacttcggcggctgggacatgccgatccactacggctcgcaactggacgagcaccaccaggtgcgccgcgacgccggcatgttcgacgtcagccacatgacggtggtcgacctgcacggtgcgcgcgtgcgcgagtttctgcgctacctgctcgccaactcggtggacaagctcaaggtctccggcaaggcgctgtacacctgcatgctcaatccccagggcggtgtgatcgacgacctcatcgtctactacatgacggaagatttcttccgtctggtggtcaacgccgccacccgcgaaaaggacctgcagtggatcggcgagcaggccgcacgcttcgacgtgcgggtggaagagcgcagcgacttcgccatgattgccgtgcaaggtcccggcgcgcgcaccaaggtcatcgacctgctcgacccggccgacaccgcagcggcgagcaagctcggccgtttcgccgcgctgcagacgcgttcgcgcgatggcattgatttgttccttgcgcgcaccggctacaccggcgaagacggtttcgagatcgtgttgccgcaagaggctgccgtcgcattctggaatgcgttgctcgcgcagggcgtcaaacccgcaggcctgggtgcacgcgacaccctgcgtctggaagcgggcatgaatctctatgggcaggacatggacgatggcgttaccccttacgaggccgggctggcctggacgatcgccctggacgaaggacgcgacttcatcggtcgcagcgtgctcgaatatcaaaaggcgcagggcgcaccgcgtcagctgatcggtgtggtgatggacgagaagggcgtgttgcggcatggccagaccgtgctcaccgccagtggcgaaggcgagatcctgtccggcacgttctcgcccacgctgggcaaggcgatcgccttcgcgcgcgtgccggccggcagcatcgagcagctgcgggtggacatccgcggcaagcaggtgccgctgcgcgcagtgaagtttccgttcgtgcgcgatggccaggcacagcccggcgtgctcggcgactga

SEQ ID NO: 71064 - protein, 369 aa, Xanthomonas campestris pv. vesicatoria str. 85-10
MTQKTILNDTHRALGAKMVDFGGWDMPIHYGSQLDEHHQVRRDAGMFDVSHMTVVDLHGARVREFLRYLLANSVDKLKVSGKALYTCMLNPQGGVIDDLIVYYMTEDFFRLVVNAATREKDLQWIGEQAARFDVRVEERSDFAMIAVQGPGARTKVIDLLDPADTAAASKLGRFAALQTRSRDGIDLFLARTGYTGEDGFEIVLPQEAAVAFWNALLAQGVKPAGLGARDTLRLEAGMNLYGQDMDDGVTPYEAGLAWTIALDEGRDFIGRSVLEYQKAQGAPRQLIGVVMDEKGVLRHGQTVLTASGEGEILSGTFSPTLGKAIAFARVPAGSIEQLRVDIRGKQVPLRAVKFPFVRDGQAQPGVLGD

SEQ ID NO: 71065 - DNA, 1119 bp, Burkholderia sp. 383
  CDS (1)..(1119): transl_table=11
atgactgcactgaatcacaccccgctcaacgccgcgcaccgcgcgctcaatgcccgcatggtcgacttcggcggctgggacatgcccgtcaactacggctcgcagatcgaagagcatgaagccgtgcgcaccgacgccggcatgttcgacgtgtcgcacatgtgcgtggtcgatttcaccggcagccgcgtgcgcgcgttcttcgagcacgcgatcgcgaacaacgtcggcaagctcaagacgcccggcaaggccctctactcgtgcctgctcaatccgcagggcggcgtcatcgacgacctgatcgtctactacttcaccgaggaattcttccgcgtcgtcgtcaacgccggcacggccgagaaagacatcgcgtggttcaaccagctgaacgagcaaggcggcttcggcgtcacgatcacgccgcgccgcgatttcgcgatcgtcgccgtacagggcccgaacgcccgcgaaaaagcgtggtcgacggtgcccgccgcgcgcgccgccaccagcgaactgaagccgttcaacgccgcgcaggtcgccggcacgccgttcggcgatctcaccgtcgcgcgcaccggctacaccggtgaagacggtttcgaagtgatcgtcccggccgtgcacgtcgaagcgctgtggaacgcgctgcagcaaaacggcgtgcgcccgtgcgggctcggcgcgcgcgacacgctgcgcctcgaggccggcatgaacctgtacggccaggacatggacgacaccgtgtcgccgctcgacgcgggcctcgcgtggacggtcgaccttaccgcgccgcgcgacttcgtcggccgcgccgcactggaagccaacggcacccgcgccgcattcgtcggcctgatcctgcagaaggaaaacggcaaggccggcggcgtgctgcgcgcgcaccagaaggtcgtcacgccgcacggcgaaggcgagatcacgagcggcacgttctcgccgtcgatgcaggaatcgatcgcgttcgcgcgcgtgccggcggccgtccagatcggcgacctggtccaggtgcaaattcgcgacaagaatcttcccgcgcgcgtggtaaaactgccgttcgtgcgcaacggcaaggtcctcgctgcgtaa

SEQ ID NO: 71066 - protein, 372 aa, Burkholderia sp. 383
MTALNHTPLNAAHRALNARMVDFGGWDMPVNYGSQIEEHEAVRTDAGMFDVSHMCVVDFTGSRVRAFFEHAIANNVGKLKTPGKALYSCLLNPQGGVIDDLIVYYFTEEFFRVVVNAGTAEKDIAWFNQLNEQGGFGVTITPRRDFAIVAVQGPNAREKAWSTVPAARAATSELKPFNAAQVAGTPFGDLTVARTGYTGEDGFEVIVPAVHVEALWNALQQNGVRPCGLGARDTLRLEAGMNLYGQDMDDTVSPLDAGLAWTVDLTAPRDFVGRAALEANGTRAAFVGLILQKENGKAGGVLRAHQKVVTPHGEGEITSGTFSPSMQESIAFARVPAAVQIGDLVQVQIRDKNLPARVVKLPFVRNGKVLAA

SEQ ID NO: 71067 - DNA, 1098 bp, Pelodictyon luteolum DSM 273
  CDS (1)..(1098): transl_table=11
atgaaaaaaacagcattgtatccctggcacgagaaggccggggcgaggatcatcgatttcggcggctggctcatgccggttcagtattcaggcatcattgccgaacatcgggctgtccgcagtgcagcgggccttttcgatgtctcgcacatggggaatttctatgtgaaggggccccgtgcggaggagttcctccagcatatgaccaccaatgatctcagccgcgctaaaaacggtcaggcgcagtacaacgtgatgctctaccccaatggcggtatcgttgacgatctcatcatctaccgcatcgacgcccaaacctttttcatcatcgtcaacgcaggcaactgcgaaaaagattaccagtggctccaggagcatgcggcagaatatgatggtgtcgtgcttgaagaccattcctccgcgatgtcgctgatcgccctccagggtccgaaggccttcgatatcctgaaaaaggtgctgccttccctcgatgccccgtcactcggctcgttccacttctgcacgctggagtacagcggtgcggaactgatggtggcaagaaccgggtacacaggcgagatcggtgtggagatctgcatgccgaatgagatggcgctcccgctctgggaggacctgctcgaggccggccggcccgaggggatcctgccgatcggtctcggcgcccgcgacaccctccgccttgaaatgggatactcgctctacggtcacgaaatcgaccaggataccaatccgcttgaagcccgcctgaaatgggtggtgaaattggacaaagggcactttatcggccgggaggcctgtcttcaggtggaactgaatccgaaacgttcggttgcaggatttgtgcttgaggggcgcgcacttccgcgccagggctgcaagctcttcaacagcgatcatcaggagatcggacgggtgtgcagcggcaccctctcgccgacccttcaggagccggtgggcacctgcagcctccttcgcgagtaccagaagccgggcacgagggttttcgtcgagatccgcggtaccatgcagccgggtactatacggcccctgccgttcgtgaaaacctccctctcctaa

SEQ ID NO: 71068 - protein, 365 aa, Pelodictyon luteolum DSM 273
MKKTALYPWHEKAGARIIDFGGWLMPVQYSGIIAEHRAVRSAAGLFDVSHMGNFYVKGPRAEEFLQHMTTNDLSRAKNGQAQYNVMLYPNGGIVDDLIIYRIDAQTFFIIVNAGNCEKDYQWLQEHAAEYDGVVLEDHSSAMSLIALQGPKAFDILKKVLPSLDAPSLGSFHFCTLEYSGAELMVARTGYTGEIGVEICMPNEMALPLWEDLLEAGRPEGILPIGLGARDTLRLEMGYSLYGHEIDQDTNPLEARLKWVVKLDKGHFIGREACLQVELNPKRSVAGFVLEGRALPRQGCKLFNSDHQEIGRVCSGTLSPTLQEPVGTCSLLREYQKPGTRVFVEIRGTMQPGTIRPLPFVKTSLS

SEQ ID NO: 71069 - DNA, 1098 bp, Synechococcus sp. CC9902
  CDS (1)..(1098): transl_table=11
atgctgcgtacgcctctctatgagctctgccgcactggaggtggccgaatggtgcccttcgctggctgggagatgccggtgcaattcagtggcctaattcaggaacacaaagccgtacgcaacagcgtgggcatgttcgacatctcccacatgggagtgctgcgacttgagggggccaaccccaaagacaccctgcaacaactggtgcccagcgacctgcatcgaatcgggcccggcgaagcctgttacaccgttttgctcaacgaccagggcggcattcgagacgacttgatcatttacgacctcggcgccatcgacgaaaaacgaggcgccctcgtgctggtgattaacgctgcctgcgcagacagcgacaccgcctggattcgcgaacgcatggaaccggcgggcctcaccgtgaccgatatcaaaaacaatggcgttttactggcgctccaaggcccccaagccattcccctgctcgaacaactcagtggagaggatctcagcggcttgccccgctttggccatcgagacctccaaattcaaggcctgagcaattccgtcttcaccgcccgcacgggctacacgggtgaagatggcgccgagctcctgctcacggcagaagatggtcaacttctctggagccaactcctcgagaaaggtgtcgctccctgtggtcttggcgcccgtgacaccctgcgtctcgaggccgccatgcacctctatgggcaagacatgaacgccgacaccaaccccttcgaagcgggcttgggctggctcgtacatctagaaatgccggccgacttcattggtcgtcaagccctggaaagggctgcagagacgggtccaaacaaacggctcgtcggcctcaaattggaaggacgcgccatcgcgcgtcacgactacccagtgcttcacaacggcgagccggttggcgtggtgacgagcggaacctggtctcccacgctggaggagccgatcgccttggcttccatcccaaccgccctggccaaactgggtaccaacttgagcgtcgagatccgaggcaaagcccaacccgccacggttgttcggcgtcccttctacaaacgcccgtaa

SEQ ID NO: 71070 - protein, 365 aa, Synechococcus sp. CC9902
MLRTPLYELCRTGGGRMVPFAGWEMPVQFSGLIQEHKAVRNSVGMFDISHMGVLRLEGANPKDTLQQLVPSDLHRIGPGEACYTVLLNDQGGIRDDLIIYDLGAIDEKRGALVLVINAACADSDTAWIRERMEPAGLTVTDIKNNGVLLALQGPQAIPLLEQLSGEDLSGLPRFGHRDLQIQGLSNSVFTARTGYTGEDGAELLLTAEDGQLLWSQLLEKGVAPCGLGARDTLRLEAAMHLYGQDMNADTNPFEAGLGWLVHLEMPADFIGRQALERAAETGPNKRLVGLKLEGRAIARHDYPVLHNGEPVGVVTSGTWSPTLEEPIALASIPTALAKLGTNLSVEIRGKAQPATVVRRPFYKRP

SEQ ID NO: 71071 - DNA, 1113 bp, Prochlorococcus marinus str. MIT 9312
  CDS (1)..(1113): transl_table=11
atggatttgcttaaaagtcctttatatgcaaaatatgttcaatccaatgcaaaattagtggattttgcaggttgggaaatgcccatatcattttcaggattaatcaaagagcatgaatcagttaggtcttcagtaggattgtttgatatttctcacatgggtgtaatctctattaagggaatcaatccaaaggattatattcaaaaattttttcctactaatttatactccttttctgaaggtcaggggctttatacagtaatgctcaatgaaaaaggaggaataatagatgacttaataatttatgaccttggtatacaagacaatgacatatcagaagtattgttaatagttaacgcaagtagatatgaagtagattttcaatggataaaaaacaattcaaataaatatgaaatttcgataacaaactttaaaaaagacaaagtacttttagcactacaggggaaaaactcattcgatttatttgaacaatggattgaatcatcgatctcacatatccctaactttggatgcgaatataaaattttcgaacatatttctcctaaagaaaaaatcttcgtttccaagacaggatatacaggggaaaatggtctagaaatacttttatctaaaaaagcagcaattaatttatgggatttctcaatttccaaaaatgttgcgccttgtggtttaggagctagagatactcttagacttgaagcaggcatgcatctttatggccaagacattaatgaagaaacttctccatatgaagcagggttaggctggctagtacatctagaaaataatcacgaattctttggaagaagatttcttgaagagcagtcaagattaggtattcaaaaaaagttagttggtctctttatagaaggtaaagcaataggaagaaaaggttgcatagtacttaaaggtgaagaaaatattggaactatcactagcggcagttggtctccaactaaacaacaagctatagcttttgcatacatcaatacttcgcatgccttaataaataatgaagttcaaatactaataagaggcaaaaaattcaaaggttgcataacaaaaagatcgttttataaaaagaattattaa

SEQ ID NO: 71072 - protein, 370 aa, Prochlorococcus marinus str. MIT 9312
MDLLKSPLYAKYVQSNAKLVDFAGWEMPISFSGLIKEHESVRSSVGLFDISHMGVISIKGINPKDYIQKFFPTNLYSFSEGQGLYTVMLNEKGGIIDDLIIYDLGIQDNDISEVLLIVNASRYEVDFQWIKNNSNKYEISITNFKKDKVLLALQGKNSFDLFEQWIESSISHIPNFGCEYKIFEHISPKEKIFVSKTGYTGENGLEILLSKKAAINLWDFSISKNVAPCGLGARDTLRLEAGMHLYGQDINEETSPYEAGLGWLVHLENNHEFFGRRFLEEQSRLGIQKKLVGLFIEGKAIGRKGCIVLKGEENIGTITSGSWSPTKQQAIAFAYINTSHALINNEVQILIRGKKFKGCITKRSFYKKNY

SEQ ID NO: 71073 - DNA, 1083 bp, Nitrosospira multiformis ATCC 25196
  CDS (1)..(1083): transl_table=11
gtgaaaacaactcctctaaatcaaacccaccgcgatatgaacgccaagatggtggattttggcggctgggacatgcccctgcattacggttcgcagcttgatgagcaccacaaggtgcgcagcgatgcgggcatgttcgatgtgtcccatatgctcgccgtcgacatcgagggagagagcgcgcgcgcgttcctgcggcaactggttgccaacaatatagacaaactgacgcagctaggcaaggcgctttactcctgcatgctcaaccccgacggcggagtaatagatgatcttatcatctattttctgacggaatcgcatttccggatggtggtcaatgcagggaccgccgataaggatatggcatggatgctttcgcaacgcgaccgtattgcccccggtcttgaaatcacgccccgcagggatctagcgatgatcgcagtgcaaggccccaacgcccgcgccaaggtgtggcaggtacttccgggctctcagacggacacggagaatctgaagctgttccaggcagccttttttgacaagtactttatcgcccgcacaggttacaccggagaagacggtttcgagattacgcttcccgcagccgatgccacgaatttctggaataaacttcacgccgcgggagtggcccccgccggcttgggggcaagagatacgctccggctcgaagcgggcatgaacctttacgggcaggatatggatgaaaccatcaaccccctggaagcggggctgggctggacggtggatttgaagagcgatcgcgacttcatcgggaagcaggcgcttctggacaggcccgtcacccagcaactgactgggctggtgttgttggatcgcggagtattgcgcagccatcagaaggtggttacacaaaacgacgggggcgagggtgaaattaccagcggaggcttctcgcccacactcaatcagtctattgctctggcgcgcctgcctctggacgtctctcccggagacgaagttcaggtcgttgttcgggataaacggctgaaagcgaaggtcgtgaaatatcctttcgtccgcaatggcaagattctcgtttga

SEQ ID NO: 71074 - protein, 360 aa, Nitrosospira multiformis ATCC 25196
MKTTPLNQTHRDMNAKMVDFGGWDMPLHYGSQLDEHHKVRSDAGMFDVSHMLAVDIEGESARAFLRQLVANNIDKLTQLGKALYSCMLNPDGGVIDDLIIYFLTESHFRMVVNAGTADKDMAWMLSQRDRIAPGLEITPRRDLAMIAVQGPNARAKVWQVLPGSQTDTENLKLFQAAFFDKYFIARTGYTGEDGFEITLPAADATNFWNKLHAAGVAPAGLGARDTLRLEAGMNLYGQDMDETINPLEAGLGWTVDLKSDRDFIGKQALLDRPVTQQLTGLVLLDRGVLRSHQKVVTQNDGGEGEITSGGFSPTLNQSIALARLPLDVSPGDEVQVVVRDKRLKAKVVKYPFVRNGKILV

SEQ ID NO: 71075 - DNA, 1128 bp, Rhodospirillum rubrum ATCC 11170
  CDS (1)..(1128): transl_table=11
atggagccgcatttgtcggaccccaccgtttccctgctgaccacgccgctccacgccctccatctggagcgaggcgcccgcatggtgcccttcgccggctatgacatgcccgttcaatacccgatgggcgttctggccgagcatctgcacacccgcgcaagcgccgggctgttcgatgtctcgcacatgggccaagcccgtttggtcgggccgcagcgcatcgccgccctggaagccctggttccgggcgatctcgaaatcctcaaggaaggccgtcagcgctatacggtgctgaccaatgaccagggcggcattcttgacgacctgatggtcaccaagcgcgccgatgacctgttcctggtggtcaacgccgcctgcaaggacgccgatctcgaccatatcgaggcccatctggccggcttcgacgcccggctcgaacgcctgcccgacactgcgctgctcgccctgcaagggccgctggcggtttcggtgctggccggtttggatgccagggccgccgagatgggcttcatgtcggggcgctggctgagcctgtgcggggtcgattgcttcgttacccgctcgggctataccggcgaggacggttttgaaatcagcgtgcccgccgaagccgcccttgatctggcgcaaaccttgatcgccaatgaggcggtggccttgatcggcctgggggcgcgcgacagcctgcgcctggaggccgggttgtgcctctatggcagcgatatcgacaccaccaccaccccggtcgaagccggtctgtcgtggatcatcggcaagcgtcggcgggccgagggcggctttcccggggcttcggcgatccaacaagatctggcccaggggcccaagcgctgccgcgttggtctgcgtcccgagggcaaagcgccggtgcgcgcccattccgccatcctggggccccagggggaggtggttggcgaagtgacctcgggcggcttctcgcccagcctgtcggcgccgatcgccatgggcatggttccagccgaactggccgcgcccggcacggcggtttcgctggtggtgcgcggcaaggccttgcccgcccatgtggtcgagatgcccttcgtcgcccatcgctatcacaaggcatag

SEQ ID NO: 71076 - protein, 375 aa, Rhodospirillum rubrum ATCC 11170
MEPHLSDPTVSLLTTPLHALHLERGARMVPFAGYDMPVQYPMGVLAEHLHTRASAGLFDVSHMGQARLVGPQRIAALEALVPGDLEILKEGRQRYTVLTNDQGGILDDLMVTKRADDLFLVVNAACKDADLDHIEAHLAGFDARLERLPDTALLALQGPLAVSVLAGLDARAAEMGFMSGRWLSLCGVDCFVTRSGYTGEDGFEISVPAEAALDLAQTLIANEAVALIGLGARDSLRLEAGLCLYGSDIDTTTTPVEAGLSWIIGKRRRAEGGFPGASAIQQDLAQGPKRCRVGLRPEGKAPVRAHSAILGPQGEVVGEVTSGGFSPSLSAPIAMGMVPAELAAPGTAVSLVVRGKALPAHVVEMPFVAHRYHKA

SEQ ID NO: 71077 - DNA, 1101 bp, Moorella thermoacetica ATCC 39073
  CDS (1)..(1101): transl_table=11
atggccgatttaaaaaagacgcccctctacggggagcacgtggctgccggggccaaaatggtggaattcggcggctggttgatgcccgtccagtacagcagcattattgaggaacatcagcgggtgcgtaactgtgccgggctctttgacgtctcccatatgggggagattaccataaagggacctgacgccctggcgctggtccagaagctgcttaccaacgatgccgaccgggccaccggggacagggtcatctacagccctatgtgttacccggacgggggcgtagtcgacgacctgctggtctatccccggggagaaggggaatatctcctggtagtcaacgccggtaacattgacaaggactttgcctggatccaggagaacgctagcggtttccgggttgaggtcagcaatatctccgcagctacagctcaactggccctccaggggccacgagccctggaaattctccggcccctgacgagggtcgacctggcctccctgggttattaccgctggaccgagggccaggttctgggggttcattgcctgatctcccgcaccggctacaccggcgaagacggtttcgagctttactttgaggcggccgcagcccctaccatgtggcggaatatcctggccgccggcagggaggcaggcctggtcccggccggactgggggccagggatactctaaggctggaggcggccctgcccctttacggccacgagttgggcccggacatcagccccctggaggccggtttgcaccgctttgtccgcctggagaagggcgaatttaacgggagggaggccctggcagcccagcgggaagccggggtcaggaggcaactggtgggactgaccatgatcgaccgggggatcccccggccggaataccccgtcctggcggcaggcaaggagattggttacgttacctcaggttccctggcgccaaccctgggacaaaatatcgctctggccctggtggcggcaggaactgtctctaccggcggcgaagtagaagtgagcatccgcggccgtgtcaaccgcgcccgggtggtgaaactccccttctatcgccgccccaaaaagtaa

SEQ ID NO: 71078 - protein, 366 aa, Moorella thermoacetica ATCC 39073
MADLKKTPLYGEHVAAGAKMVEFGGWLMPVQYSSIIEEHQRVRNCAGLFDVSHMGEITIKGPDALALVQKLLTNDADRATGDRVIYSPMCYPDGGVVDDLLVYPRGEGEYLLVVNAGNIDKDFAWIQENASGFRVEVSNISAATAQLALQGPRALEILRPLTRVDLASLGYYRWTEGQVLGVHCLISRTGYTGEDGFELYFEAAAAPTMWRNILAAGREAGLVPAGLGARDTLRLEAALPLYGHELGPDISPLEAGLHRFVRLEKGEFNGREALAAQREAGVRRQLVGLTMIDRGIPRPEYPVLAAGKEIGYVTSGSLAPTLGQNIALALVAAGTVSTGGEVEVSIRGRVNRARVVKLPFYRRPKK

SEQ ID NO: 71079 - DNA, 1755 bp, Burkholderia thailandensis E264
  CDS (1)..(1755): transl_table=11
gtgagcgcgcggcggccccacgaacttccggggccgcccggccgacgatgcctcggcgcgcggcttcggcgcctttttcgcgcaagccgcgcgcgccgacgaaacgcttcacgattccgaccccggcacgctcaccgctcaccgctcaccgaatcatccgcagcccgcgccgccaacgcccggcgtccgccgccgcttgtcttcaagcgacagcgatttgcccaaattgacaacccatccgcgctcgcgtacattcgcccgcacgcgtcgggagagcgtgcggccgccattcgttgtcgatcgaaaggcaagccgcgccgccgaaggggcacacccgcaaactctcaggcaaaaggaccgaccgcgtcgaagaatccgtctgacgacatgcgtcgggcgacgtttttcgcactctggagagcggcagtagccgcgtgcgcgcaacgcgacgcacgggcaggctgcccaccgaaggggcgcgcgcgagccggatcgaatccgccgcgcaatctctcaggtatcgaggacagaggggcatgcacgcatcgcaggcggcttcacgcgccggcggttcgccgagttgccgttttgttttcgcgcccgggccaagtcccggccgccttgcctgggaccccgatgaccgttctcaaaatcaccccgcttcacgccgcgcatcgcgccctcaacgcccgcatggtcgatttcggcggctgggacatgcccgtcaactacggctcgcagatcgaagagcaccaggcggtgcgtaccgatgccggcatgttcgacgtgtcgcacatgtgtgtcgtcgatttcacgggcccgcgcgtgcgtgcgttcttcgagcacgcgctcgcgaacaacgtcgcgaagctgcaaacgcccggcaaggcgctctattcgtgcctgctgaacccgcaaggcggcgtcatcgacgatctgatcgtctactacttcaccgaggatttcttccgcgtcgtcgtcaacgccggcacggccgacaaggacgtcgcgtggttcagccagctcaacgagcaaggcggcttcggcctcacgatcgcgccgcgccgcgacttcgcgatcgtcgccgtccaggggccgaacgcgcgcgcgaaggtgtgggacaccgtgcccgccgcgcgcgccgcgacgagcgagctcaagcccttcaacgccgcgcaggtcgcaggcacgccgttcggcgacctcaccgtcgcgcgcaccggctacacgggcgaggacggcttcgagatcatcgtcccggcgatgcacgtcgaagcgctgtggaacgcgctcgccgaacgcggcgtgcgcccgtgcgggctcggcgcacgcgacacgctgcgcctcgaggccggcatgaatctctacggccaggacatggacgaaacggtatcgccgctcgacgccggtctcgcgtggacggtcgatctcgccgcgccgcgcgcgttcgtcggccgcgacgcgctcgaagcgaacggctcgcgcgcggcattcgtcggcctcatcctgcagaaggagaacggccgcgcgggtggcgtgctgcgcgcgcaccagaaggtcgtgacgccgcacggcgacggcgagatcacgagcggcacgttctcgccgacgatgcaggaatcgatcgcgttcgcacgcgtgccgaagggcgtcgccatcggcgacacggtgcacgtgcagatccgcgacaagaatcttcccgcgcgcgtggtaaaactgccgttcgtgcgcaacggcaaggtcctcgctgcgtaa

SEQ ID NO: 71080 - protein, 584 aa, Burkholderia thailandensis E264
MSARRPHELPGPPGRRCLGARLRRLFRASRARRRNASRFRPRHAHRSPLTESSAARAANARRPPPLVFKRQRFAQIDNPSALAYIRPHASGERAAAIRCRSKGKPRRRRGTPANSQAKGPTASKNPSDDMRRATFFALWRAAVAACAQRDARAGCPPKGRARAGSNPPRNLSGIEDRGACTHRRRLHAPAVRRVAVLFSRPGQVPAALPGTPMTVLKITPLHAAHRALNARMVDFGGWDMPVNYGSQIEEHQAVRTDAGMFDVSHMCVVDFTGPRVRAFFEHALANNVAKLQTPGKALYSCLLNPQGGVIDDLIVYYFTEDFFRVVVNAGTADKDVAWFSQLNEQGGFGLTIAPRRDFAIVAVQGPNARAKVWDTVPAARAATSELKPFNAAQVAGTPFGDLTVARTGYTGEDGFEIIVPAMHVEALWNALAERGVRPCGLGARDTLRLEAGMNLYGQDMDETVSPLDAGLAWTVDLAAPRAFVGRDALEANGSRAAFVGLILQKENGRAGGVLRAHQKVVTPHGDGEITSGTFSPTMQESIAFARVPKGVAIGDTVHVQIRDKNLPARVVKLPFVRNGKVLAA

SEQ ID NO: 71081 - DNA, 1101 bp, Sodalis glossinidius str. 'morsitans'
  CDS (1)..(1101): transl_table=11
atggctcagcagaccccgctgtatgaagagcaccacgcgagcggcgccaaaatggtggatttccacggctggatgatgccgcttcactatggttcccaactggatgaacatcatcaggtgcggcgcgatgtcggcatgtttgacgtgtcgcacatgaccattgtcgatttagccggaccgcgcacccgcgattttcttcgccatctgctggccaacgatgttgccaagctgacggtgcccggcaaagcgctttacaccgggatgcttaatgcgtccggtggcgtgatagacgaccttatcgtctatttcctttccgaaattgaattccgcctggttgtcaactctgagacacgtgataaagacgttgagtggatcacccgccacgccgagccgtatcaggtaacggtgaccgtgcgcgacgatctggcgctgatagcggtgcaggggccgcaggcgcaaagcaagacgcagacgctattcagctcgcaacagcggcaggcggtaagcggaatgaaaccgttttttggcgttcaggccaacgagttgtttattgccaccaccggctatactggcgaggctggctacgagattgcgttaccggcaacccaggccgccgatttctggcggcaactgctggcggccggcgtgaagccctgcggcctcggcgcgcgcgacaccctgcgcctggaagcggggatgaacctttacggtcaggaaatggatgaggggatctctccgctcgcggccaatatgggctggaccatcacttggcggccggaggggcgcgatttcatcggacgcgaggcgctggaggcccagcgcgccgccggcgacggcgagcaattggtcgggttggtgatgactgaaaaaggcgtattgcgcaacggcctgccagtccatttcaccgacgctgccggtaacatgcagcaagggatcatcaccagcggctcgttttcgccgacgctgggcgtcagcattgcactggcgcgggtgccggccggtatcggccagcaggcgatagttttgatccgtaaccgcgaaatgccggttaaggtcaccaaacccggttttgtgcgcgccggtaaagcggttgcgcaataa

SEQ ID NO: 71082 - protein, 366 aa, Sodalis glossinidius str. 'morsitans'
MAQQTPLYEEHHASGAKMVDFHGWMMPLHYGSQLDEHHQVRRDVGMFDVSHMTIVDLAGPRTRDFLRHLLANDVAKLTVPGKALYTGMLNASGGVIDDLIVYFLSEIEFRLVVNSETRDKDVEWITRHAEPYQVTVTVRDDLALIAVQGPQAQSKTQTLFSSQQRQAVSGMKPFFGVQANELFIATTGYTGEAGYEIALPATQAADFWRQLLAAGVKPCGLGARDTLRLEAGMNLYGQEMDEGISPLAANMGWTITWRPEGRDFIGREALEAQRAAGDGEQLVGLVMTEKGVLRNGLPVHFTDAAGNMQQGIITSGSFSPTLGVSIALARVPAGIGQQAIVLIRNREMPVKVTKPGFVRAGKAVAQ

SEQ ID NO: 71083 - DNA, 1116 bp, Frankia sp. CcI3
  CDS (1)..(1116): transl_table=11
atggcagagctgcgtcgatccccagagctgcgtcgatccccgctgtacgaccggcacgtcgaactgggcgcgaagatggccgggttcggtggctgggagatgccgatcgagtacaccggccgcggggtgctcgccgagcaccaggcggtccgcggcgcggtcgggatcttcgacgtcagccatctcggcaaggccaggatcgccggccccggcgccgccgccttcgtcaacgcctgcctgaccaacgacctgcgccggatcggccccggccaggcgcagtacaccttgtgctgcgaggagaccggcggggtcgtcgacgatctgatcgcctacctgtactccgacgaggaagtcttcctcgtcccgaacgccgcgaacaccgcacaggtcgtcgctcgcctcgccgcggcggcgccggcgggcgtgtccgtcaccgacctgcacaccgggtacggcgtggtagcggtccagggaccggcctgcgccgacctgctcggcgccctcggcctgcccaccggcgggacgtatatgagtttcgtcgacgcggagtggaagggccacccggtgatcgtgtgccggtcgggctacaccggagagcgaggctacgagctgttgccccgttgggacgacacccctgcgctgtgggatgcgctgttcgcggcgggtgggccgctcggcgtcgtgccggtcggcctcggtgcccgcgacacgctgcggaccgagatggggtatccgctgcatggccaggacctctctttgtcgatcacgccggtccaggctcgctccgggtgggccgtcggctgggacaaggatcgcttctggggacgcgacgccctgctcgcggagcggtccgccggcgcctcccgcctgctgtgggggctgcggtccaccggccgggtgattccccgtccgcacatgaccgtggcctccgcggctggtgccacggtcggtgaggtcaccagcggcacgttctctccgacgctgcgccaggggatcgggctcgccctgctggaccggtccgtgcaggggggcgacacggtgaacgtcgacgtccggggccgtccgagtcccatgacggttgtccggccgccgttcgtcaggtcctcgcccaagtag

SEQ ID NO: 71084 - protein, 371 aa, Frankia sp. CcI3
MAELRRSPELRRSPLYDRHVELGAKMAGFGGWEMPIEYTGRGVLAEHQAVRGAVGIFDVSHLGKARIAGPGAAAFVNACLTNDLRRIGPGQAQYTLCCEETGGVVDDLIAYLYSDEEVFLVPNAANTAQVVARLAAAAPAGVSVTDLHTGYGVVAVQGPACADLLGALGLPTGGTYMSFVDAEWKGHPVIVCRSGYTGERGYELLPRWDDTPALWDALFAAGGPLGVVPVGLGARDTLRTEMGYPLHGQDLSLSITPVQARSGWAVGWDKDRFWGRDALLAERSAGASRLLWGLRSTGRVIPRPHMTVASAAGATVGEVTSGTFSPTLRQGIGLALLDRSVQGGDTVNVDVRGRPSPMTVVRPPFVRSSPK

SEQ ID NO: 71085 - DNA, 1092 bp, Saccharophagus degradans 2-40
  CDS (1)..(1092): transl_table=11
atgcttaatgaaacagttttagcgccactacaccgcgaaattggtggcaagatggtcgattttggtggctgggatatgccattgcattacgggtcgcaggttgaagagcatcaaaaagtgcgtaccgatgccggtatgtttgatgtttctcacatgactgtagtggatgtgaccggcgctggtgctaagacgtttttacagtatgtgttggctaacgatgtggccaagcttaccaagaatggtaaggcgttgtattcgggcatgcttaaccatgagggtggcgtggttgatgatttgattgtgtaccttatggagtgggggtaccgcgttgtagtgaactgcgctacccgcgaaaaagatttagcctggatggtcgagcacgcaaaagggtttgaggttgcgctaaacgagcgcgacgatttggcgatgattgcggtgcaaggccctgctgcacgcgagaaaacggcgcaaattttgcccgaattgttaactatggatttagatatattccaaggcgccgatgtagccgcgctgggcgatgtaactttttttgtggcgcgcactggttacaccggtgaagacggttacgaaattatgctgcccactagcgatgccgatgcgttttggcgtgcgcttatggcggtgggtgtagcgccttgcggtttgggtgcgcgcgatacattgcgtttagaggcgggtatgaatttgtacggccacgagatggacgataacacctcgccgctggtggccaatatggcgtggacgattgcttggcagccagaagagcgcaattttattggtcgcgaggcgattagcgccgagaaagcggcgggcgttacccataagttggtgggcctagtgttgcaagatcgcggtgtgctgcgcgcagagcaggttgtaacctgtgaaggcgtagagggcgagggtgtaattaccagcggtactttttcgcctacattaagtaaatctgtggcgcttgcgcgcgtaccggtggcttttagcggtgagtgcacagtggctgtgcgcaataagcagttaaaagcgttggtggttaagcctagttttgtgcgtttgggtaaggctttggtttaa

SEQ ID NO: 71086 - protein, 363 aa, Saccharophagus degradans 2-40
MLNETVLAPLHREIGGKMVDFGGWDMPLHYGSQVEEHQKVRTDAGMFDVSHMTVVDVTGAGAKTFLQYVLANDVAKLTKNGKALYSGMLNHEGGVVDDLIVYLMEWGYRVVVNCATREKDLAWMVEHAKGFEVALNERDDLAMIAVQGPAAREKTAQILPELLTMDLDIFQGADVAALGDVTFFVARTGYTGEDGYEIMLPTSDADAFWRALMAVGVAPCGLGARDTLRLEAGMNLYGHEMDDNTSPLVANMAWTIAWQPEERNFIGREAISAEKAAGVTHKLVGLVLQDRGVLRAEQVVTCEGVEGEGVITSGTFSPTLSKSVALARVPVAFSGECTVAVRNKQLKALVVKPSFVRLGKALV

SEQ ID NO: 71087 - DNA, 1095 bp, Escherichia coli UTI89
  CDS (1)..(1095): transl_table=11
atggcacaacagactcctttgtacgaacaacacacgctttgcggcgctcgcatggtggatttccacggctggatgatgccgctgcattacggttcgcaaatcgacgaacatcatgcggtacgtaccgatgccggaatgtttgatgtgtcacatatgaccatcgtcgatcttcgcggcagccgcacccgggagtttttgcgttatctgctggcgaacgatgtggcgaaactcaccaaaagcggcaaagccctttactcggggatgttgaatgcctctggcggtgtgatagatgacctcatcgtctactactttactgaagatttcttccgcctcgttgttaactccgccacccgcgaaaaagacctctcctggattacccaacacgctgaacctttcggcatcgaaattaccgttcgcgatgacctttccatgattgccgtgcaagggccgaatgcgcaggcaaaagctgccacactgtttaatgacgcccagcgacaggcggtggaagggatgaaaccgttctttggcgtgcaggcgggcgatctgtttattgccaccactggttataccggtgaagcgggctatgaaattgcgctgcccaatgaaaaagcggcggatttctggcgcgcgctggtggaagcgggcgttaagccatgcggcctgggcgcgcgtgacacgctgcgtctggaagctggcatgaatttgtatagtcaggagatggacgaaaccatctctcctttagccgccaacatgggctggaccatcgcctgggaaccggcagatcgtgacttcatcggtcgtgaagctctggaagcgcagcgtgaacatggcacagaaaaactggttggtctggtgatgaccgaaaaaggcgtgctgcgtaatgaactgccggtacgttttactgatgcgcagggcaaccagcatgaaggcattatcaccagcgggactttctccccgacgctgggttacagcattgcgctggcgcgcgtgccggaaggtattggcgaaacggcgattgtgcaaattcgcaaccgtgaaatgccggttaaagtgacaaaacctgtttttgtgcgtaacggtaaagccgtcgcgtga

SEQ ID NO: 71088 - protein, 364 aa, Escherichia coli UTI89
MAQQTPLYEQHTLCGARMVDFHGWMMPLHYGSQIDEHHAVRTDAGMFDVSHMTIVDLRGSRTREFLRYLLANDVAKLTKSGKALYSGMLNASGGVIDDLIVYYFTEDFFRLVVNSATREKDLSWITQHAEPFGIEITVRDDLSMIAVQGPNAQAKAATLFNDAQRQAVEGMKPFFGVQAGDLFIATTGYTGEAGYEIALPNEKAADFWRALVEAGVKPCGLGARDTLRLEAGMNLYSQEMDETISPLAANMGWTIAWEPADRDFIGREALEAQREHGTEKLVGLVMTEKGVLRNELPVRFTDAQGNQHEGIITSGTFSPTLGYSIALARVPEGIGETAIVQIRNREMPVKVTKPVFVRNGKAVA

SEQ ID NO: 71089 - DNA, 1155 bp, Burkholderia xenovorans LB400
  CDS (1)..(1155): transl_table=11
atggccttttttgtttcgcgagatgcccgaggccccatgaccgaactcaaacacaccccgctcaacgccacccaccgtgcgctcaatgcccgcatggtcgatttcggcggctgggacatgcccgtcaactacggctcgcagatcgacgaacatcgcgccgtgcgcaccgacgccggcatgttcgacgtctcgcacatgtgcgtggtcgatttcaccggcgagcgcgtacgcgccttcttcgaatatgcgctggccaataacgtcgccaagctgcaaacgcccggccgcgcgctgtactcctgcctgctgaacccgaacggcggcgtgatcgacgacctgatcgtttattacttcggcgaagatcacttccgcgtggtcgtcaacgccggcaccgccgacaaggacatcgcctggttcggccagctcaacgccgaaggcggcttcggcctgaccatcacgccgcgccgagactacgcgatcgtcgccgtgcaaggcccgaacgctcgcgaaaaagtctggcaaaccgtgccggctacgcgcgccgccaccgaggcgttgaagccgttcaacgccgcccgtatcgcagacacgccgttcggcgaattgaccgttgcccgcaccggctacaccggcgaagacggcttcgaaatcatcgtgccggcggatcacgtggaagcgctgtggaacgcgctgcgcgcgcaaggtgtgcgcccggccggcctcggcgcgcgcgacacgttgcgcctcgaagccggcatgaacctgtacggccaggacatggacgacaatgtctcgccgctcgacgccggcctcgcctggacagtcgacctcacctcgccgcgcgacttcgtcggcaagagcaagctggaggcgggcggttcccaagccgcgttcgtcggcctgatcctgctgaaggaaaacggcaaggcggcaggcgtgctgcgtgctcatcagaaagtcgtcacaccgcaaggcgaaggcgaaatcaccagcggcactttttccccgaccatgcaggaatcgatcgcctttgcgcgcgtgccgaaaggcgtgcagccgggcgacaccgttcacgttcagattcgtgacaaaaacgttcccgcaagcgtggtaaaactgccgttcgtgcgcaatggcaaagtgctcgcggtttaa

SEQ ID NO: 71090 - protein, 384 aa, Burkholderia xenovorans LB400
MAFFVSRDARGPMTELKHTPLNATHRALNARMVDFGGWDMPVNYGSQIDEHRAVRTDAGMFDVSHMCVVDFTGERVRAFFEYALANNVAKLQTPGRALYSCLLNPNGGVIDDLIVYYFGEDHFRVVVNAGTADKDIAWFGQLNAEGGFGLTITPRRDYAIVAVQGPNAREKVWQTVPATRAATEALKPFNAARIADTPFGELTVARTGYTGEDGFEIIVPADHVEALWNALRAQGVRPAGLGARDTLRLEAGMNLYGQDMDDNVSPLDAGLAWTVDLTSPRDFVGKSKLEAGGSQAAFVGLILLKENGKAAGVLRAHQKVVTPQGEGEITSGTFSPTMQESIAFARVPKGVQPGDTVHVQIRDKNVPASVVKLPFVRNGKVLAV

SEQ ID NO: 71091 - DNA, 1095 bp, Shewanella denitrificans OS217
  CDS (1)..(1095): transl_table=11
atggctaataaaactgtactgtttcacaagcatctcgaatctaacgccaaaatggtggattttcacggctgggatatgccgctgaactacggctcacaaattgaagagcaccacgcagtgcgtcaagacgcaggcatgtttgacgtgtctcacatgacagtagtggacgtgaccggccaagacgcccgtgacttcctacgtaaattattagccaatgatgttgccaaattgactgtcccaggcaaggccctttacggcggtatgctggatgacaacgccggcgttatcgatgatttgatcacctattacttaagcgacactcactaccgcgtagtagtgaactcggccacccgtgaaaaagacttagcctggatagccaagcagtcggcgccttttagcgtcaccatcacagagcgcccagagcttgcgatgatcgcagtgcaaggcccgaacgccaaagccaaggccgccacagtatttacccctgagcaaaacagcgcagtagaaggcatgaagcctttctttggcttgcaatcaggcagcttgtttatcgccaccacaggttacacaggtgaagcgggctacgaaattatcgtcccagagcaagacgccgaagacttatggcaagcgctattgaataccggcgttaagccatgtggccttggtgctcgtgataccttgcgtcttgaagcaggcatgaacctctatggcctagacatggacgaaagcatcaacccgctagccgccaacatgggctggactatcgcgtgggagcctagcgatcgcgactttattggccgcgctgcactgaccgaattaaaagcccaaggcacagaaaaattagtcggcttggtgatggaagaaaagggcgttttacgccatgatatgccagtattcttcaccgacagtgacggcgttgagcagcaaggctatattactagcgggactttttcgccaacattgggctattctattgccatggcacgggtgcccgcgggcataggcgccatagccgaagtggaaatgcgcaagaagcgcgttgccgtaaaagtgattgcccctagctttgtgcgcaacggtaagcaagccttttag

SEQ ID NO: 71092 - protein, 364 aa, Shewanella denitrificans OS217
MANKTVLFHKHLESNAKMVDFHGWDMPLNYGSQIEEHHAVRQDAGMFDVSHMTVVDVTGQDARDFLRKLLANDVAKLTVPGKALYGGMLDDNAGVIDDLITYYLSDTHYRVVVNSATREKDLAWIAKQSAPFSVTITERPELAMIAVQGPNAKAKAATVFTPEQNSAVEGMKPFFGLQSGSLFIATTGYTGEAGYEIIVPEQDAEDLWQALLNTGVKPCGLGARDTLRLEAGMNLYGLDMDESINPLAANMGWTIAWEPSDRDFIGRAALTELKAQGTEKLVGLVMEEKGVLRHDMPVFFTDSDGVEQQGYITSGTFSPTLGYSIAMARVPAGIGAIAEVEMRKKRVAVKVIAPSFVRNGKQAF

SEQ ID NO: 71093 - DNA, 1173 bp, Psychrobacter cryohalolentis K5
  CDS (1)..(1173): transl_table=11
atgaccgatactcaaaatactaacagccaagctcctcaacgcacacccctttatcagtctcatgtcgagagtgatggcaaactggtggatttttctggttgggaattgccaatccattatggctcacaaatcgaagagcacgaagcggtgcgtactgatgccggtatgtttgacgtctctcatatggttattgtcgatatcaaaggcacggatgccaaagcatggctacagaagctattagctaacgatgtcgataaactaaaaacagctggtaaagccctttattctcctatgctaaatgaagaaggcggcatcatcgatgatttaatcgtttatctatcaaattctgatgaaactgaataccgtatcgtctcaaacgctgctactcgcgataaagacatggcgcaatttgacaaagtcgctgaaggttttgacatcagcatcactgagcggccagagcttgccatgattgccgtgcaaggaccaaacgccgttgaaaaactggcgcacaccaaacctagctgggcagataccttagctggtcttaagcctttcgttggtgctgatttaacagacatcgaaggtacagattggttcgtcgctcgtacgggctacaccggtgaagatggcgtcgaagtcattatgcatggcgatgatgcgccggcgttctttgagcaattaaaagccaatggtataaagcctgccggtcttggcgctcgtgatactttgcgtatggaagctggcatgaacctctatggtcatgatatgaatgaagatgttagcccttatgagtgcaacatgggctggacactggcgctaaaagacgatcgtgactttattggtcgcgatgctatggtcagcaaacgcaaacagtcaaaagatgacaatactgctatgaagcaagtgggcttattaatgactagccgtggcgtattacgtgaaggtatggaagtgaccattaatcaaggcactgataaagagcaaaaaggtatcattactagtggtactttctctcctagcctcaaaaattctatcgctatcgcccgtgttcctgctaccctagcagaagatgacaatgtgcaaattgatctgcgcggtaaaggtaagttcgtcgatgtacgcgtgcttaaactaccgtttgtccgtaatggcaagcagcagtttgactcgtag

SEQ ID NO: 71094 - protein, 390 aa, Psychrobacter cryohalolentis K5
MTDTQNTNSQAPQRTPLYQSHVESDGKLVDFSGWELPIHYGSQIEEHEAVRTDAGMFDVSHMVIVDIKGTDAKAWLQKLLANDVDKLKTAGKALYSPMLNEEGGIIDDLIVYLSNSDETEYRIVSNAATRDKDMAQFDKVAEGFDISITERPELAMIAVQGPNAVEKLAHTKPSWADTLAGLKPFVGADLTDIEGTDWFVARTGYTGEDGVEVIMHGDDAPAFFEQLKANGIKPAGLGARDTLRMEAGMNLYGHDMNEDVSPYECNMGWTLALKDDRDFIGRDAMVSKRKQSKDDNTAMKQVGLLMTSRGVLREGMEVTINQGTDKEQKGIITSGTFSPSLKNSIAIARVPATLAEDDNVQIDLRGKGKFVDVRVLKLPFVRNGKQQFDS

SEQ ID NO: 71095 - DNA, 1128 bp, Ralstonia metallidurans CH34
  CDS (1)..(1128): transl_table=11
atgacgctccaggccacgcccctcaacgccatccaccgcgccctcggcgcccgcatggtcgacttcggcggttgggacatgcccgtcaactacggctcccagatcgaggaacacaacgcggtacgcgccgacgccggcatgtttgacgtctcccacatgtgcgtggtggacctgagcggcatccacgcgcgcgccttcctgcgcggtctgctggccaacaacatcgacaagctgcaaacgccgggcaaggcgctctattcgtgcatgctcgatgagaaaggcggcgtcatcgacgacctgatcgtctacttctttgccgaggaccggttccgcctggtggtcaacgccagcactgccgtcggcgacatcgaatggatccagtcccgcaacacggccaccggcagcggcgtgacgatcaccccgcgccgtggcgacctggccccggcctgcgtgagcaagctggcgattgttgcagtgcagggcccgaacgcgcgccagaaggtgtacgacgcattcccgtcgacccagcccgccgacacgctcaagccgttcaacgcggtggtggtgcacgacgccgagatgggtgaactgatggtggcccgtaccggctacaccggcgaagacggcttcgaactcgttgtgccggcggagaacgtcgcgggcatctgggaaaagctgtccgcctcgggtgtgcgtcccgccggactcggcgcgcgcgacacgctgcggctggaagccggcatgaacctgtacggccaggacatggatatccacacttcaccgctcgatgcaggactgtcgtggaccgtcgacctgcaaagcgagcgcgacttcatcggcaagtcggcgctgctggccagcggccagcaaaagaccttcgccggcctgatcctgcgagacaagggtggcgtgctgcgcgcgcaccagaaggtcatcactccggccggcgacggcgaaatcaccagcggcacattcagcccgtcgctgtcgcagtcgatcgcctttgcccgccttccccgcgacattgcccccggcaccgaggtgcaggtggagattcgcgaccgcaaactgaccgcgactgtggttaaactgccgtttgtgcgcaatggcaaggcactcgtgagctga

SEQ ID NO: 71096 - protein, 375 aa, Ralstonia metallidurans CH34
MTLQATPLNAIHRALGARMVDFGGWDMPVNYGSQIEEHNAVRADAGMFDVSHMCVVDLSGIHARAFLRGLLANNIDKLQTPGKALYSCMLDEKGGVIDDLIVYFFAEDRFRLVVNASTAVGDIEWIQSRNTATGSGVTITPRRGDLAPACVSKLAIVAVQGPNARQKVYDAFPSTQPADTLKPFNAVVVHDAEMGELMVARTGYTGEDGFELVVPAENVAGIWEKLSASGVRPAGLGARDTLRLEAGMNLYGQDMDIHTSPLDAGLSWTVDLQSERDFIGKSALLASGQQKTFAGLILRDKGGVLRAHQKVITPAGDGEITSGTFSPSLSQSIAFARLPRDIAPGTEVQVEIRDRKLTATVVKLPFVRNGKALVS

SEQ ID NO: 71097 - DNA, 1143 bp, Acidobacteria bacterium Ellin345
  CDS (1)..(1143): transl_table=11
ttgaatccgccagtcgaggcaaacattcgcaaaactgcgctcaacgccacccatcgccaatccggcgccaaaatggtggactacagcggctgggacatgccggtcgagtacccctccgtcggcggcctcatgaaagagcacctcgccgtccgcgccggcgtcggcctcttcgacgtctcccacatgggcgacatccgtgtccacggccctgaagccctcaaggccgttcagtacctcaccatgaacgatgcctcgaaactcaacaccggccaggcgcaatactcggcaatgctttatcccaacggcactttcgtcgacgacgtcatcgtccacaaatttgccgacgacgactacctcctcgtcatcaacgctggcacccgcgaaaaagacgtcaactgggtcaaggacaacaccaggcaatttaaagtaacggttgaagatctcagcgaccagttcacccagatcgccatccagggtcccaagggcgtagataccctccagaaattgaccgacgtcgatctctcgaaggtcaagttctactggttcacccgcggcaccgttgccggacttaagaacgtcctgatcgcccgcaccggctacaccgccgaagacggcttcgagatctacatccccagcgacgccgccaccagcgaccgcgtctggaacgaactgctccaagccggaaaagaattcggcgtcgtccccgccgggctcggctcgcgcaacactctgcgcctcgaaggcaagctgccgctctacggccacgagatcagcgacgaaatcaacgtctgggaagccggacttgaccgcttccttaagatggacaaaggcgacttcatcggccgcgccgccctagaaaaagccaagaacgatggcgtgaagcgcgcactcgtaggtttggagacgatcgaacgcggcatcccgcgcgacggctacaaagttctcgatctcgaaggcaaagaaatcggctacgtaaccagcggctcgtatatgccgttcctaaaacgcaacctggcattagcctacgtcccagtcgaacaaagcgcgttagacaacatcgtcgccgtcgaaatccgtaaccaaccggtaaaagcaaaagtagtcccgtcgcagttctacaagcgacccaagaagagttcctag

SEQ ID NO: 71098 - protein, 380 aa, Acidobacteria bacterium Ellin345
MNPPVEANIRKTALNATHRQSGAKMVDYSGWDMPVEYPSVGGLMKEHLAVRAGVGLFDVSHMGDIRVHGPEALKAVQYLTMNDASKLNTGQAQYSAMLYPNGTFVDDVIVHKFADDDYLLVINAGTREKDVNWVKDNTRQFKVTVEDLSDQFTQIAIQGPKGVDTLQKLTDVDLSKVKFYWFTRGTVAGLKNVLIARTGYTAEDGFEIYIPSDAATSDRVWNELLQAGKEFGVVPAGLGSRNTLRLEGKLPLYGHEISDEINVWEAGLDRFLKMDKGDFIGRAALEKAKNDGVKRALVGLETIERGIPRDGYKVLDLEGKEIGYVTSGSYMPFLKRNLALAYVPVEQSALDNIVAVEIRNQPVKAKVVPSQFYKRPKKSS

SEQ ID NO: 71099 - DNA, 1125 bp, Deinococcus geothermalis DSM 11300
  CDS (1)..(1125): transl_table=11
atgtccgagtgttctggacagcggcaggcgcggctccggtacagttcaggggtgaccgacactcctgaaacgccgctcaagcggacgcccctgcatgccgcgcacctgcgcgcgggtgcccgtatggtgcctttcggcgggtgggagatgcccgtgcagtatacgggcgtcaaggccgaacacgacgccgtacgtacccgcgcgggcgtcttcgacgtgtcgcatatgggcgagttccgcgtgacggggccggacgccgaggcctttctccaacgcgtgaccaccaacgacgtgaccaagctgaagcctggccgcgcacagtacaactggcttcccaacgaatcgggcgggctggtcgacgacatctacgtctaccgggtggggccagaggaattcctgctcgtcgtgaacgccgccaacatcgagaaagactgggcgcaccttcagcgctacgcctctggcttcgacgtcgggctgagcgacgagtcggaccgttgggggctgctggccgtgcaaggcccgcagtcggaaacccttctacagccacatacggatgtcgacctgagcgcgaagaagaaaaacgcctacttcccggcgaccctgctgggcttcgacgtgtggctggcccgcaccggctacacgggtgaggacggcttcgagatcttcgtgaaggcggaggaggccgaggcactgtgggaggcactgctcgccctgggcctcactcccgctggcctgggcgcccgcgacacgctgcggctggaggcgggctttcccctctatggccacgagttcgcggaagacctgcaccccctggccagctcctacacctgggtcgtgaaggacaaggaccacgtgggccgcgcgggaatgcaggccgcgccgcccgtgcggctgatcggcctggcgctcgagcgtgttccggtgcgcgagggctacccggtgctgctcggcaacgagcgtatcggccacgtcaccagcggcaccagtagccccaccctgggccaccccatcgcaatggcactggtgcgggcagacgccgccgacgccgaagcctacgcggtggaggtgcgcggcaagacgcacccagcccggcgggtggcattgcccttttacaagcgggcgtag

SEQ ID NO: 71100 - protein, 374 aa, Deinococcus geothermalis DSM 11300
MSECSGQRQARLRYSSGVTDTPETPLKRTPLHAAHLRAGARMVPFGGWEMPVQYTGVKAEHDAVRTRAGVFDVSHMGEFRVTGPDAEAFLQRVTTNDVTKLKPGRAQYNWLPNESGGLVDDIYVYRVGPEEFLLVVNAANIEKDWAHLQRYASGFDVGLSDESDRWGLLAVQGPQSETLLQPHTDVDLSAKKKNAYFPATLLGFDVWLARTGYTGEDGFEIFVKAEEAEALWEALLALGLTPAGLGARDTLRLEAGFPLYGHEFAEDLHPLASSYTWVVKDKDHVGRAGMQAAPPVRLIGLALERVPVREGYPVLLGNERIGHVTSGTSSPTLGHPIAMALVRADAADAEAYAVEVRGKTHPARRVALPFYKRA

SEQ ID NO: 71101 - DNA, 1125 bp, Sphingopyxis alaskensis RB2256
  CDS (1)..(1125): transl_table=11
atgcacgaagacgatgagattccgatcgaaacggcgacgctgccgctcgacgcctggcaccgcgcgaagggtggccgcatggtcgcgttcgcgggttactggatgccgatccaatatgacggcatcatggccgaacatctgtggacgcgcgagaatgccgggctgttcgatgtcagccatatgggccagctggcgctgagcggcgagggcgtcgccaaggcgctcgaaacgctggtccccggcgatatttcggcgctgaagcccggccggatgcgctattcgctgctgctgaacgacgaaggcggtgtcctcgatgacctgatgatcaccaacgagggcgaccagttcggcatcgtcgtcaatggcgcggtcaaatgggacgatatcgcccatctgcgcgagcatctgcccgatgatatcacgctcaaccataatgaggattacggcctgctggcgttgcaggggccaaaggcggtgacggcgctcgcgcgccttgtgcccgaagcagcggacctcgtctttatgcaggcgatgccggcgacatggaacggccatgcgatcgcgatcagccgctcgggctataccggtgaggacgggttcgagatttcgctgccgaacgacgcgctggagagtttcgccgacgcgctttgcgcgatggaggaggtgaagcccatcggcctcggcgcgcgcgactcgctccgcctcgaagcgggattgccgctctatggccacgatctcgacgaaagcatcgacccggtcgaggccgacctggcctttgcgatcagcaagcgccgccgcgaagagggcggcttccccggcgcggcgcgcatccttgggcatctggccgacggctctccacgcaagcgcgtcggccttgtcatcgacggcaagctgccggtgcgcgagggcgccaaattgttcgacggcaacaccgagatcggcgtcgtgacgtcgggcggctttgcccccagcgtcggcgcgccgatcgccatgggttacgtcccgacggggctgtccgagccgggtaccgcggtcgccgccgaggtgcgcggcaagcgcgtcgcctgcaccgtcaccgccatgccattcattccgcaccgctatgtgcgcaaacagggagcctga

SEQ ID NO: 71102 - protein, 374 aa, Sphingopyxis alaskensis RB2256
MHEDDEIPIETATLPLDAWHRAKGGRMVAFAGYWMPIQYDGIMAEHLWTRENAGLFDVSHMGQLALSGEGVAKALETLVPGDISALKPGRMRYSLLLNDEGGVLDDLMITNEGDQFGIVVNGAVKWDDIAHLREHLPDDITLNHNEDYGLLALQGPKAVTALARLVPEAADLVFMQAMPATWNGHAIAISRSGYTGEDGFEISLPNDALESFADALCAMEEVKPIGLGARDSLRLEAGLPLYGHDLDESIDPVEADLAFAISKRRREEGGFPGAARILGHLADGSPRKRVGLVIDGKLPVREGAKLFDGNTEIGVVTSGGFAPSVGAPIAMGYVPTGLSEPGTAVAAEVRGKRVACTVTAMPFIPHRYVRKQGA

SEQ ID NO: 71103 - DNA, 1206 bp, Burkholderia cenocepacia AU 1054
  CDS (88)..(1206): transl_table=11
atgtaccggatcgctcgaggctatcagccgcggcggtcggcacatggccgttctgatccgcgcgcaagcgccttgcctgaggcctcgatgactgcactgaatcacaccccgctcaacgccgcgcatcgcgcgctcaatgcccgcatggtcgacttcggcggctgggacatgcccgtcaactacggctcgcagatcgaagaacacgctgccgtgcgcaccgacgccggcatgttcgacgtgtcgcacatgtgcgtcgtcgatttcaccggcagccgcgtgcgcgcattcttcgagcatgcgatcgcgaaccacgtcggcaagctcaagacgcccggcaaggccctctactcatgcctgctcaacccgcagggcggcgtcatcgacgatctgatcgtctactacttcaccgaagaattcttccgcgtggtcgtcaacgccggcaccgccgagaaagacatcgcgtggttcaaccagctgaacgagcaaggcggctacggcctgaccatcgcgccgcgccgcgatttcgcgatcgtcgccgtccagggcccgaacgcccgtgaaaaggtctgggcgacggtgccgtccgcccgcgccgccaccagcgaactcaggccgttcaacgccgcgcaggtcgccggcacgccgttcggcgatctcaccatcgcacgcaccggctacaccggcgaagacggcttcgaagtgatcgtcccggccgtacacgtcgaagtgctgtggaatgcgctgcagcaacacggcgtgcgtccgtgcgggctcggcgcgcgcgacacgctgcgcctcgaggccggcatgaacctgtacggccaggacatggacgacaccgtctccccgctcgacgcgggcctcgcgtggacggtcgacctcaccgcgccgcgcgacttcgtcggccgcgccgcactcgaagccaacggcacgcgcgccgcgttcgtcggcctgatcctgcagaaggagaacggcaaggcgggcggcgtgctgcgcgcacaccagaaggtcgtcacgccgcacggcgaaggcgagatcacgagcggcacgttctcgccgtcgatgcaggaatcgatcgcgttcgcgcgcgtgccggcagccgtccaggtcggcgacatcgtccaggtgcaaattcgagacaagaatcttcccgcgcgcgtggtaaaactgccgttcgtgcgcaacggcaaggtcctcgctgcgtaa

SEQ ID NO: 71104 - protein, 372 aa, Burkholderia cenocepacia AU 1054
MTALNHTPLNAAHRALNARMVDFGGWDMPVNYGSQIEEHAAVRTDAGMFDVSHMCVVDFTGSRVRAFFEHAIANHVGKLKTPGKALYSCLLNPQGGVIDDLIVYYFTEEFFRVVVNAGTAEKDIAWFNQLNEQGGYGLTIAPRRDFAIVAVQGPNAREKVWATVPSARAATSELRPFNAAQVAGTPFGDLTIARTGYTGEDGFEVIVPAVHVEVLWNALQQHGVRPCGLGARDTLRLEAGMNLYGQDMDDTVSPLDAGLAWTVDLTAPRDFVGRAALEANGTRAAFVGLILQKENGKAGGVLRAHQKVVTPHGEGEITSGTFSPSMQESIAFARVPAAVQVGDIVQVQIRDKNLPARVVKLPFVRNGKVLAA

SEQ ID NO: 71105 - DNA, 1089 bp, Myxococcus xanthus DK 1622
  CDS (1)..(1089): transl_table=11
atgaagatggcccggcaaacgcccctcaacgcggcacaccgcaagctgggggcccggatggtcgacttcgctggctgggacatgcccgtccagtacagctccgtcatcggcgagcatgaggccgtgcgcaccggcgtcggcctgttcgacgtctcccacatgggcgaggtggagttctccggtcccggcgccctggacacggtcaacgcgctcatctccaacgacctggcccgcgtcgcggacgggcaggcggtgtatgcgggcttgctcgacgagcgaggcaccttcgtggacgacgtggtcgcctaccgcttcagccccgagcgcatcttcatctgcgtcaactccagcaaccgcgagaaggacgtcgcgtggatgaaggcgcacgccaagggtgtggcacccgtggaccggagcgacgactacgcgcagattgccgtgcagggccccaaggccaccggcctggtccagcgcctgacgaagacggacctgtcgaagattggcacctaccgcttcgccgagggcgaggtcgccggggcgaagtgcctcatctcccgcaccggctacaccggcgaggacggcttcgagctgtacagcgcggccggggacgcagtggcgctgtgggacgcgctgctcaccgagggccagcaggacggcgtgaagccgtgtggcctgggcgcccgtgacagcctccgcacggagatgaagtacgcgctctacggcaacgacatcgatgaccagcacaccgcgctggaggccgggctggggtggatcgtcaagctcgacaaggcggccttcattggcaaggaagcgctggtggcgcagaaggccgcgggcgtgaagcgcaagctggtgggcttcgagctgaccggcagcggcattccgcgccacggctacgccatcctcaaggacggcgcgccggtgggggaggtgaccagcggcaccatgggccccaccgtgaagaaggccattggcatcggctacgtgcccaccgagctgtccacagagggctccaccttcgacgtggacatccgcggccgcgcggtgcccgcagtggtggtgaagaccccgttccacaagaagccctga

SEQ ID NO: 71106 - protein, 362 aa, Myxococcus xanthus DK 1622
MKMARQTPLNAAHRKLGARMVDFAGWDMPVQYSSVIGEHEAVRTGVGLFDVSHMGEVEFSGPGALDTVNALISNDLARVADGQAVYAGLLDERGTFVDDVVAYRFSPERIFICVNSSNREKDVAWMKAHAKGVAPVDRSDDYAQIAVQGPKATGLVQRLTKTDLSKIGTYRFAEGEVAGAKCLISRTGYTGEDGFELYSAAGDAVALWDALLTEGQQDGVKPCGLGARDSLRTEMKYALYGNDIDDQHTALEAGLGWIVKLDKAAFIGKEALVAQKAAGVKRKLVGFELTGSGIPRHGYAILKDGAPVGEVTSGTMGPTVKKAIGIGYVPTELSTEGSTFDVDIRGRAVPAVVVKTPFHKKP

SEQ ID NO: 71107 - DNA, 1119 bp, Rubrobacter xylanophilus DSM 9941
  CDS (1)..(1119): transl_table=11
atggtagcggtggcgaggggaaccctgcgccgcaccccgctctacgaggagcacagggccctgggcgcccggctcgtggacttcgcgggctgggagatgccggtgcagtacgcggggataaaggccgagcacgaggcggtgcgcacccgcgccgggctcttcgacgtctcgcacatgggggaggtggccttccgcggcccggacgccgagagggcgctgcagcgcctcctcacccgcgacgtctcccggctgggtgaggggcaggcgggctatgccgccgtctgcctggagagcggggggacggtggacgacgtgatcgcctaccgccgcggggagggcttcctcgtggtggtgaacgccgccaaccgcgagaaagacctcgcccacttccgcaggcacaccgcagacctcgacgtagagatctccgacgagacggaggagtgggcgctgctcgcgctgcagggcccggaggccgagcggctcctgcagccgttcgtcgcgggagacctctccgccctcgggcgctaccgcttcctcgagacgcacgtggacgggggggaggcgatcgtggcccgcaccggctacaccggagaggacggcttcgaggtctttctccgccccgcagaggccccctccctgtggcggcgcctcgtcgaggcgggggctgctccggccgggctcggggcgcgcgacacgctgcgcctggaggcggggatgtgcctctacggcaacgagctggacgaggagaccacgccgcttgaggccgggatctccttcgccgtccacctacacaaggaggaggagttcgtcgggcagcgggccctgcagagacagcgggagcgcgggctgcgcaaaaagctagtcggcttcgagctggaggggcggggcatagcccgccacggctacccggtcgccgtgggcggcgagcgggcgggcgtggtcaccagcgggacgatgtccccgacgctgggccgcgccatcgggctcgcctacgtcccccccgagacggagggcggcttcgaagtgctcatccgggagcggccggtcccggccaggatcgtcccgctccccttctaccggcgcaagagaaacgaccccgagggaggagccagtggctga

SEQ ID NO: 71108 - protein, 372 aa, Rubrobacter xylanophilus DSM 9941
MVAVARGTLRRTPLYEEHRALGARLVDFAGWEMPVQYAGIKAEHEAVRTRAGLFDVSHMGEVAFRGPDAERALQRLLTRDVSRLGEGQAGYAAVCLESGGTVDDVIAYRRGEGFLVVVNAANREKDLAHFRRHTADLDVEISDETEEWALLALQGPEAERLLQPFVAGDLSALGRYRFLETHVDGGEAIVARTGYTGEDGFEVFLRPAEAPSLWRRLVEAGAAPAGLGARDTLRLEAGMCLYGNELDEETTPLEAGISFAVHLHKEEEFVGQRALQRQRERGLRKKLVGFELEGRGIARHGYPVAVGGERAGVVTSGTMSPTLGRAIGLAYVPPETEGGFEVLIRERPVPARIVPLPFYRRKRNDPEGGASG

SEQ ID NO: 71109 - DNA, 1110 bp, Cytophaga hutchinsonii ATCC 33406
  CDS (1)..(1110): transl_table=11
atgagcgaaacagctgaagttattaaatctattcctttacaggatgtacacgttgccttaggtgcaaagatggtgccatttgccggttatatgatgcccgtgcgttattcttctgatattgaagaacacatggcggtgcgcaatgcggccggaatgtttgatgtttcgcatatgggtgagtttacattaaaaggcccgaaggcattggaagtaattcagcgcattactacaaacgatgcatctgtactgcctattggcaaagtgcagtacacagctttaactaaccccaaaggtggtatcatagatgatttgctggtatatcacatcggcgaagagtcctattacattgttgtcaacgcatcgaatattgaaaaagataaagcgtggtttttaaaaaatctagctgctgaaggcgcggattttcaggatatttctgaaaacacctgtctgtttgccgtacaggggccaaaagcgcatgaagtactggctcagttaaccacttatccggttgccggtatggaatattatagctgcgcgcatatggagcttgcaggccacaaggatgtattggttgcaacaacgggttatacaggtgccggcgggtttgaagtatatgtatcgaatgacatcgcaaaagatgtctggacgaaacttatgcaggccggagaagcagtaggcatgaagcctgtaggccttggtgcacgcgataccctgcgcctggaaatggggtattgtttatatggtaatgacattacagatgagactacgccattggaagcaggtttaggctggatcaccaagtttacaaaaacattcacaggttcagatattttacaggaacagaaaaaaaacggtgtagcacgtcagctggtaggctttgaaatgattgagcgtggaataccgcgcggtcattatgaattggccgatgcagcaggaaataaaatcggtgaagtcacatcaggcacacaatcaccgtgtttaggaaaaggaatcggtatgggctatgttgaaaagaaatatgctgcagcaggtacagaactattcgtaaatattagaggtaaattaattaaagcacaagttgttaagtttccgtttttacctaaaaaataa

SEQ ID NO: 71110 - protein, 369 aa, Cytophaga hutchinsonii ATCC 33406
MSETAEVIKSIPLQDVHVALGAKMVPFAGYMMPVRYSSDIEEHMAVRNAAGMFDVSHMGEFTLKGPKALEVIQRITTNDASVLPIGKVQYTALTNPKGGIIDDLLVYHIGEESYYIVVNASNIEKDKAWFLKNLAAEGADFQDISENTCLFAVQGPKAHEVLAQLTTYPVAGMEYYSCAHMELAGHKDVLVATTGYTGAGGFEVYVSNDIAKDVWTKLMQAGEAVGMKPVGLGARDTLRLEMGYCLYGNDITDETTPLEAGLGWITKFTKTFTGSDILQEQKKNGVARQLVGFEMIERGIPRGHYELADAAGNKIGEVTSGTQSPCLGKGIGMGYVEKKYAAAGTELFVNIRGKLIKAQVVKFPFLPKK

SEQ ID NO: 71111 - DNA, 1080 bp, Alcanivorax borkumensis SK2
  CDS (1)..(1080): transl_table=11
atggctcatcgcacagctttatacgacgctcatctcgccgccggtggcaagatggtggatttcggcggctgggatatgccgattaactatgggtcgcagatcgaagaacatcacgccgtgcgccaaaatgccggtgtgttcgacgtttctcatatgaccgtagtggatatcgccggcgccggcgcccgtgactacttacgccagctgctggcaaacgatgtggaccgcattgatccgggccgcgccctgtataccgggatgcttaacgataatggcggcgtgatcgatgaccttatcgtctacaaacgggacaatgactaccgtctggtggtaaattgcgcgacccgtgaaaccgatctgggctggatggaaaaacacgcgggcggttttgccgtggatatccatgagcgtccggaactggccatgttggcgattcaggggcccaaggcccgtgacattctcgctggccttttgaatggcagccgcgccgacgcggtgaaaagcctgaaagtgtttgccttcgcggaagacggtgattggatgattgcccgcaccggctacaccggtgaagacggcgtggaaatcatgctgcctaacgcggatgcgctgaccctgtgggagcaactgcttgaagcgggtgtatcgcctattggcctgggggcacgcgatacgctgcgcctggaagcgggcttgaatctctacggcaacgatatggatgagagcattacgccatgggaagccaacatgggttggaccgtaatgctcaatgaccgcgagttcatcggtcgccagcccctgctaaaccagaaagaaaatggccacagcgaacaggtgggtctgattttggaaggcaagggtgtattgcgcgcccatcagaaagttttaatgccgaatggggaagaaggggaaattaccagcggtactttctcgcccacgttaggtaaatccatcgccctggctcgtttgcctgccggcgccaccggtaaggtggatgtggaaattcgcaataaacggcaggtggctcaggtggttaagccgccgttcgtgcgtaatggtaacgcggtgtacaaggaacagtag

SEQ ID NO: 71112 - protein, 359 aa, Alcanivorax borkumensis SK2
MAHRTALYDAHLAAGGKMVDFGGWDMPINYGSQIEEHHAVRQNAGVFDVSHMTVVDIAGAGARDYLRQLLANDVDRIDPGRALYTGMLNDNGGVIDDLIVYKRDNDYRLVVNCATRETDLGWMEKHAGGFAVDIHERPELAMLAIQGPKARDILAGLLNGSRADAVKSLKVFAFAEDGDWMIARTGYTGEDGVEIMLPNADALTLWEQLLEAGVSPIGLGARDTLRLEAGLNLYGNDMDESITPWEANMGWTVMLNDREFIGRQPLLNQKENGHSEQVGLILEGKGVLRAHQKVLMPNGEEGEITSGTFSPTLGKSIALARLPAGATGKVDVEIRNKRQVAQVVKPPFVRNGNAVYKEQ

SEQ ID NO: 71113 - DNA, 1101 bp, Rhodococcus jostii RHA1
  CDS (1)..(1101): transl_table=11
atgaccgaggagcagttgtcgcagggccccgtccacgccgttcacgtcgaactcggggccacgttcgctcccttcggcggctgggagatgcccgtctcgtacgccggtgtcgtcgccgagcacaccgcggtgcgtgaatcggtgggggtgttcgacgtcagccacctcggcaaggccctcgtgcggggcagcggcgccgccgccttcgtcaactcggctctgaccaacgatctcgacaagatcgggccaggcaaggcgcagtacacgctgtgctgcacgccgtcgggcggcgtgatcgacgacctgatcgcctacttcgtcagccccgacgaggtattcctcgtccccaacgcggccaacaccgcggacgtggtcgcggcactggccgccacggcgcccgagggtgtcacggtggagaaccagcaccgggacttcggtgtgatcgccgtccagggcccgaagtcggccgaggtgctcaccgcgctcggcctgccgacggacatcgagtacatggccttcgccgacgccacctgggacggggttcccgtccgcgtttgccgcagcgggtacaccggagaggtcggattcgagctgctgccgcgctgggaggacagcgagaagctgttccgggccgcggtcgagctggtccgcgcgcacggcggccaggtcgccggtctcggggcgcgggacacgctgcgcaccgagatgggatacccgttgcacgggcacgaactgtcgctggagatctccccgctcgaggcgcgatgcggctgggcgatcgggtggaagaagccgaagttctggggcaaggagacgctcaccgacgagaaggagtccggcccggcgcgcaagctgtggggcatcaaggcactggaccgcggggttctccgcgccggtcagaccgtgctgcgcgacggcgagtcgatcggcgagaccacgtcgggcacgttctcgcccacgctgaaggtcgggatcgcattggcgctgctcgactccggggccggcgtgtcggcgggagacgagatcgccgtggacgtccggggacgctcgctgcgcgccgaggtggtgtctccgccgttcgtggagatcaacaccaagtaa

SEQ ID NO: 71114 - protein, 366 aa, Rhodococcus jostii RHA1
MTEEQLSQGPVHAVHVELGATFAPFGGWEMPVSYAGVVAEHTAVRESVGVFDVSHLGKALVRGSGAAAFVNSALTNDLDKIGPGKAQYTLCCTPSGGVIDDLIAYFVSPDEVFLVPNAANTADVVAALAATAPEGVTVENQHRDFGVIAVQGPKSAEVLTALGLPTDIEYMAFADATWDGVPVRVCRSGYTGEVGFELLPRWEDSEKLFRAAVELVRAHGGQVAGLGARDTLRTEMGYPLHGHELSLEISPLEARCGWAIGWKKPKFWGKETLTDEKESGPARKLWGIKALDRGVLRAGQTVLRDGESIGETTSGTFSPTLKVGIALALLDSGAGVSAGDEIAVDVRGRSLRAEVVSPPFVEINTK

SEQ ID NO: 71115 - DNA, 1146 bp, Trichodesmium erythraeum IMS101
  CDS (1)..(1146): transl_table=11
atggccaaatcaacagaatctaatacacaacctctttctcgtacacctctatatgacttaagcactgaacttaaggctagaatggtagaattttctgggtgggagatgccggtacaatacactagtatcagcaacgaacatgaggcagtacggacaaaagcaggaatgtttgacatttctcatatgggcaagttcattgctcaaggccatgatttaattgagaaaattcaatatttagtaccttcggacctgagcggcttagaacctggtaaagctcaatatactgtcttattaaattctcaaggaggcattattgatgacttcattttctatcgtcaaagtgatgaccctctaactaatgaagcacggggttttatgattgttaatgctgccactaaagctaatgataaaggatggatattaagtcatctagaaaatagtggtgttaaattccaagatatctctgaggaaaaagtgttattagctgtccaaggtccggatgcagagtcttatatacagcagtttgtcaaggaaaatttggcatcaattggattttttgggcatgcagatattactgtattggataaacctggtttcattgctagaactggttacactggggaagatgggtttgaaattatggttgaccccccggtgggtgtagagttatggcgcagtttgttgaatgctggggtgactccctgcggtttgggagcaagagatactttgcgtttagaagctgctatggcgctttatggtcaagatattgatattaagactactcctttagaagcaggtttaagttggttagttcacttggataaaaagggggagtttattgctcgtgaggtattagaaacacaaaagagggaaggagtatcaaaacgtttagtgggtttggaaatgctcgatcgcggtattgctcgtcatggttatcctgttttgagtgatggcaaagtggtaggggaagttactagcggtactaagtctcctactttagggaaagcgatcgctctggcttatgtacctaaaaaattagctaaggtaggtcaaaagttagaggtggaaattaggggtaaaaattatgcagctattgttgttaagcgccccttttatagaagtcaaaagtcaaaagttaaaagttaa

SEQ ID NO: 71116 - protein, 381 aa, Trichodesmium erythraeum IMS101
MAKSTESNTQPLSRTPLYDLSTELKARMVEFSGWEMPVQYTSISNEHEAVRTKAGMFDISHMGKFIAQGHDLIEKIQYLVPSDLSGLEPGKAQYTVLLNSQGGIIDDFIFYRQSDDPLTNEARGFMIVNAATKANDKGWILSHLENSGVKFQDISEEKVLLAVQGPDAESYIQQFVKENLASIGFFGHADITVLDKPGFIARTGYTGEDGFEIMVDPPVGVELWRSLLNAGVTPCGLGARDTLRLEAAMALYGQDIDIKTTPLEAGLSWLVHLDKKGEFIAREVLETQKREGVSKRLVGLEMLDRGIARHGYPVLSDGKVVGEVTSGTKSPTLGKAIALAYVPKKLAKVGQKLEVEIRGKNYAAIVVKRPFYRSQKSKVKS

SEQ ID NO: 71117 - DNA, 1128 bp, Ralstonia eutropha H16
  CDS (1)..(1128): transl_table=11
atgacgctccaggccacgcccctcaacgccatccaccgcgccctcggcgcccgcatggttgatttcggcggctgggacatgccggtcaactacggctcccagatcgaagaacacaatgctgtgcgcaccgacgccggcatgttcgacgtgtcgcacatgtgcgtggtcgacctcgccggcgccaatacccgcagcttcctgcgcggcctgctggccaacaatgtcgacaagctgcagaccccgggcaaggcgctctactcctgcatgctggatgagaaaggcggcgtgatcgacgacctgatcgtctacttctttgccgaggaccgcttccgcctggtcgtcaacgccagcaccgcgctgggcgacatcgaatggatccgcgcgcgcaatgccgccaccggcagcgatgtgaccatcacgccgcgccgcgaggacgttgcgcctgcaggcgtgcagcctctggcgatcgtcgccgtgcaggggcccaacgcccgcaccaaagtgtggagcactttcccctcgacccagccgtcggacacgctcaagcccttcaacgccgccgtggtccaggacccggccctcggcgagatcatggtggcgcgcaccggctacaccggcgaagacggcttcgaactggtggtgccggccgagaacgtcgccgccatctgggaaaagctgaacgccgccggcgtgcgcccggcgggcctgggcgcgcgcgacacgctgcgcctggaagccggcatgaacctgtacggccaggacatggatatcaacacctcgccgctggatgcgggcctggcctggaccgttgacctgcagagcgagcgtgacttcaccggcaaggcggcactggccgcagccggttcgcgccagcaattcctcggcctgatcctgcgtgacaaaggcggcgtcctgcgcgcccaccagaaagtgatcacgccggccggtgacggtgaaatcaccagcggcaccttcagcccgtcgctgtcgcagtccatcgcctttgcccgcctgcccaaggatgtcgccgtgggcgataccgtgcaggtggagatccgcgaccgcaaactcaacgcgactgtggttaaactgccgtttgtgcgtaatggcaaggcactcgtgagctga

SEQ ID NO: 71118 - protein, 375 aa, Ralstonia eutropha H16
MTLQATPLNAIHRALGARMVDFGGWDMPVNYGSQIEEHNAVRTDAGMFDVSHMCVVDLAGANTRSFLRGLLANNVDKLQTPGKALYSCMLDEKGGVIDDLIVYFFAEDRFRLVVNASTALGDIEWIRARNAATGSDVTITPRREDVAPAGVQPLAIVAVQGPNARTKVWSTFPSTQPSDTLKPFNAAVVQDPALGEIMVARTGYTGEDGFELVVPAENVAAIWEKLNAAGVRPAGLGARDTLRLEAGMNLYGQDMDINTSPLDAGLAWTVDLQSERDFTGKAALAAAGSRQQFLGLILRDKGGVLRAHQKVITPAGDGEITSGTFSPSLSQSIAFARLPKDVAVGDTVQVEIRDRKLNATVVKLPFVRNGKALVS

SEQ ID NO: 71119 - DNA, 1095 bp, Alkalilimnicola ehrlichei MLHE-1
  CDS (1)..(1095): transl_table=11
atgcaacgcaccccgctctatcgccgtcatcaggaagccggcgcccgcctggtggaatttgccggctggcagatgccgctggattacggctccgccctggccgaacaccgcgccgtgcgcgaggactgcggcctgttcgacgtctcccacatggccatcaccgatctcgagggccagggggcccgcgacgccctgcgcctgatcctcgccgccgatgtggcccggctcgacgaggccgcccccggcaaggccctctacggttgcctgctgaatgaggccggcggcatcatcgacgacctcatcgtcttccgccgcggcgcggaacgctaccgcatcgtctccaacgccgccacccggggcagcgtccagcgctggctggagcggctcactgcggccttcggcctgcagccggaggctcgtaccgacctggcaatgatcgcgctgcaggggccggccgcccccagtctcatcgaacagctgccggaggcagccgccgccgtgggcctgggcgccttcgaggccctggatggggagcggatcttcgtcagccgcaccggctacaccggcgaagacggcttcgaactgatcctgcccggcccccgggccagccaaacctgggaccacctggtggccgccggcgcccgaccctgcgggctggcggcccgggacagcctgcgcctggaggcgggcctgaacctgaacggccaggacatgaccccggagaccacgccgctggagtgcggcctgggctggaccgtgcactggacgccggaggatcgtgacttcatcggccgccatccgctggaggcccaacgccgggagggggcgccatggtgccggcagggcctggtcctgcgcgagcgcggcgtgccccgccacgggcatgcggtgctggacgccgccgaccgggtgatcggtgaggtcaccagcggcggctggtcgccggtattgcaacggggcattgccctggcccgggtgcccaacggcaccggggggccgctacgggtccgggtccgcgaccgcgccctgagcgccgagccggtccggccgcccttcgtccgcaatggcaagccgcgggtggacgtccccgactag

SEQ ID NO: 71120 - protein, 364 aa, Alkalilimnicola ehrlichei MLHE-1
MQRTPLYRRHQEAGARLVEFAGWQMPLDYGSALAEHRAVREDCGLFDVSHMAITDLEGQGARDALRLILAADVARLDEAAPGKALYGCLLNEAGGIIDDLIVFRRGAERYRIVSNAATRGSVQRWLERLTAAFGLQPEARTDLAMIALQGPAAPSLIEQLPEAAAAVGLGAFEALDGERIFVSRTGYTGEDGFELILPGPRASQTWDHLVAAGARPCGLAARDSLRLEAGLNLNGQDMTPETTPLECGLGWTVHWTPEDRDFIGRHPLEAQRREGAPWCRQGLVLRERGVPRHGHAVLDAADRVIGEVTSGGWSPVLQRGIALARVPNGTGGPLRVRVRDRALSAEPVRPPFVRNGKPRVDVPD

SEQ ID NO: 71121 - DNA, 1095 bp, Shewanella frigidimarina NCIMB 400
  CDS (1)..(1095): transl_table=11
atggctagcaaaacagtactttttaacaagcatttagaatctaaagccaagatggttgatttccacggttgggaaatgccgattaactacggctctcaaatcgaagaacatcacgcagtacgtcaagacgcaggcatgttcgacgtgtcgcacatgaccgtagttgacgttactggcagcgatgcttgtgccttcttacgtaagttacttgctaacgatgtcgccaagcttaccgtacctggtaaagccctttacggcggaatgctagacgaaaacgctggcatcatcgacgaccttattacctactacttaaccgacacccattaccgcgtagtggttaactccgctactcgcgacaaagacctcgcctggatcaacaaacaagccgcagcatttgatgttgttgtgactgaacgtccagagcttgcgatgattgccgtgcaaggccctaatgctaaagccaaagccgctactgtattttctgctgagcaaaacgctgccgttgaaggcatgaagccattctttggtgtgcaatcagccagcttatttattgccacaaccggttacaccggcgaagcgggctacgaaatcattgttccagaaaccgaagcagaagccttatggcaagcactactagatgcaggcgttaagccatgtggtttaggtgcacgtgacacattacgcttagaagcgggcatgaacctatacggtcaagacatggacgagtcaattaatccattagccgctaacatgggctggactgtagcgtgggagccaagcgagcgtgactttattggccgtgatgcacttaccgctattaaagcggctggcacagacaaattagtcggcttagtcatggaagaaaagggcgtcttacgccacgatatggcagtattttttaccgacgcagacggtgttgagcaccaaggtgtgatcaccagcggttcgttttcgccaacattaggctattctattgccatggcccgtgtgcctagtggtattggtgccatcgctgaagttgaaatgcgtaaaaagcgtgttaacgtaaaagtcatcgctccaagttttgtacgtaacggtaagcaagctttctaa

SEQ ID NO: 71122 - protein, 364 aa, Shewanella frigidimarina NCIMB 400
MASKTVLFNKHLESKAKMVDFHGWEMPINYGSQIEEHHAVRQDAGMFDVSHMTVVDVTGSDACAFLRKLLANDVAKLTVPGKALYGGMLDENAGIIDDLITYYLTDTHYRVVVNSATRDKDLAWINKQAAAFDVVVTERPELAMIAVQGPNAKAKAATVFSAEQNAAVEGMKPFFGVQSASLFIATTGYTGEAGYEIIVPETEAEALWQALLDAGVKPCGLGARDTLRLEAGMNLYGQDMDESINPLAANMGWTVAWEPSERDFIGRDALTAIKAAGTDKLVGLVMEEKGVLRHDMAVFFTDADGVEHQGVITSGSFSPTLGYSIAMARVPSGIGAIAEVEMRKKRVNVKVIAPSFVRNGKQAF

SEQ ID NO: 71123 - DNA, 1101 bp, Syntrophomonas wolfei subsp. wolfei str. Goettingen
  CDS (1)..(1101): transl_table=11
ttgaatttgaaaaggacagccctttttcccgtgcaccagaagtataatggtcgtatggtggatttcggcgggtgggaattgcccatccagtacgagagtatcattaaagaacatcacatggtgcggaagaaggcgggtctttttgatgtatcgcatatgggggaaatagaagtccgtggtgaaaaggccgaagcttttctgcaatacctgctgagcaacgatatcaataaaatagcgccgggacaggtgcagtataatataatgtgctatcctgacgggggcgtagtagatgaccttttggtttacaagtatacgaccgagcattatcttttggtggtgaatgccgccaacaccgataaagattttgagtggatcaagaaaaatgcttttcccggcgtggaaattgaaaacctttcggatgattatgcccaaatggcgattcaagggcctttggccgagcagattctgcagaaactgacggatttagagttgcatagcattaaatattattggtttcaggctaatgtggaaatagcggggaaaatagctattatttctcgtacaggctataccggcgaggatggatttgaaatctacctggctccggaggatgcgatagatgtctgggaagctattctggcggccggtggggaggatattgcccccattggtctgggggctagggatagcctgcgctttgaagccaaactgcccctctacgggcaggaattgggacctgatatcagcccgctggaagcccgcctgggtatttttgtgaagtttgattgtggtgattttattggccgggaggctctgctacggcaaaaagaaagccagcccccgcgggtgcaggcggagctattgatgctggagaggggtatacctcgctctcattacgaagtctgccaggagggtaaagtaattggccagctaagtagcggcggcctggctcccagcctggaaaaaaacctggctctggcactggtagatcgggaatactaccaaccaggggcggaagttgaggttatgatccgcaataaaccagttaaagcccagattgttaccggggctttttatcggaaaaaaacccaggcttcataa

SEQ ID NO: 71124 - protein, 366 aa, Syntrophomonas wolfei subsp. wolfei str. Goettingen
MNLKRTALFPVHQKYNGRMVDFGGWELPIQYESIIKEHHMVRKKAGLFDVSHMGEIEVRGEKAEAFLQYLLSNDINKIAPGQVQYNIMCYPDGGVVDDLLVYKYTTEHYLLVVNAANTDKDFEWIKKNAFPGVEIENLSDDYAQMAIQGPLAEQILQKLTDLELHSIKYYWFQANVEIAGKIAIISRTGYTGEDGFEIYLAPEDAIDVWEAILAAGGEDIAPIGLGARDSLRFEAKLPLYGQELGPDISPLEARLGIFVKFDCGDFIGREALLRQKESQPPRVQAELLMLERGIPRSHYEVCQEGKVIGQLSSGGLAPSLEKNLALALVDREYYQPGAEVEVMIRNKPVKAQIVTGAFYRKKTQAS

SEQ ID NO: 71125 - DNA, 1101 bp, Bordetella avium 197N
  CDS (1)..(1101): transl_table=11
atgtccgcctctttgaaacatactcccctggccgaaacccatctggccgctggcgcccgcatggtcgatttcggcggctgggaaatgccgctggcctatggctcgcaactggaagagcatcatgccgtgcgccaggatgccggcatgttcgacgtttcgcacatgttgaacgccgatatcaccggcccggacgcgacggcttttctgcgctatctggtggccaatgatgtcgcgcgcctgaacacaccgggcaaagccctttactcctgcatgctcaatccgcagggcggcgtgatcgacgacctgatcatttattacttcgcgccggactcctggcgcgtggtcgtcaatgccggtaccgccgaaaaagacatggcttggatggcgcgcgtggctgccgccggcaactttgatgtcgtcatcacgccccgccgggatctggccatgattgccgtgcagggccccaatgcccgcgccaaggtctgggcggcccgtcccgcctggcagcctgcatccgaggggcttggcccgttcacggccgccatcctgccggaagataccctggtggcccgcacgggctataccggagaagacggtttcgagattgtgctgccggccagcgctgccgttgcgctttggcaggatctggtcgctcagggtgtgcgtccctgcgggctgggcgcgcgcgacacgctgcgtctggaggcgggcatgaatctctacggccaggatatggatgaactcgttcagccgaatcaggctggtctgtcctggacggtgtcgctcaaagatgccgagcgccgcttcatcggccgcgatgcgctggagcaattcgccacgccctgcgcctttctgggcctgaagttgtccgagcgtggcgtcatgcgcgcgcacatggcggtgcgcacgccgcagggcatgggcctgaccaccagcggcaccatgtcgcccaccttgggcgtgtccatcgccttcgcccgtctgccgctcgatgtgcagccgggtagcgccgtcgaggtggacatccgcggcaaatgggtgccggcgctcgtctgcaaattgccctttgtgcgtaacggcaaagccgtcgaacactcgtaa

SEQ ID NO: 71126 - protein, 366 aa, Bordetella avium 197N
MSASLKHTPLAETHLAAGARMVDFGGWEMPLAYGSQLEEHHAVRQDAGMFDVSHMLNADITGPDATAFLRYLVANDVARLNTPGKALYSCMLNPQGGVIDDLIIYYFAPDSWRVVVNAGTAEKDMAWMARVAAAGNFDVVITPRRDLAMIAVQGPNARAKVWAARPAWQPASEGLGPFTAAILPEDTLVARTGYTGEDGFEIVLPASAAVALWQDLVAQGVRPCGLGARDTLRLEAGMNLYGQDMDELVQPNQAGLSWTVSLKDAERRFIGRDALEQFATPCAFLGLKLSERGVMRAHMAVRTPQGMGLTTSGTMSPTLGVSIAFARLPLDVQPGSAVEVDIRGKWVPALVCKLPFVRNGKAVEHS

SEQ ID NO: 71127 - DNA, 1083 bp, Pseudomonas aeruginosa UCBPP-PA14
  CDS (1)..(1083): transl_table=11
atgggattgcgcaccccgctttacgagctgcacgtcgcgctcggcgccaagatggtcgatttcggcggttgggacatgccgctgcactacggttcgcaggtcgaggagcaccatcaggtccggcgtgactgcggcgtcttcgacgtgtcccacatgaccgtggtcgacgtcgccggcgagcaggccacggcctatctgcagcatctcctggcgaacgacgtggcgcgcctcggcgagaccggcaaggcgctctacagcgcgatgctcaacgaagagggcggggtggtcgacgacctgatcgtctacctgaccgagaacggctaccgggtggtggtcaacgcctccacccgcgacaaggacatcgcctggatgcaggcgcaggccgccggcttcaaggtcgacctgcaggaacgcggcgacctggcgatgctcgccatccagggccccaacgcccgcgtgcacagctccgaactggtatccccggcacgcgccgcgctgatacgcgaactcaagccgttccagggccgtgccgagggcgactggttcatcgcccgcaccggctacaccggcgaggacggcctggagatcatgctgccggccgccgaggcgccgggcttcctcaacgagctggttggcgccgggatctccccggcgggcctgggggcgcgcgatacgctgcgcctggaggccgggctcaatctctacggccaggacatggacgaaagcgtttccccgcttgccgccaacatgggctggaccgtagcctgggagccggttgcgcgggacttcgtcggccgccgcgcgctggaagcgcagaaggccgccggcgaccagccgaagctggtcggcctggttctggaggagcgcggcgtgctgcgcgcccaccaggtggtgcgggtagctggcattggtgagggggagatcaccagcggcagcttttcgcctaccctgaacaagtccatcgcgctggcccgcgtgccggccgccaccggcgaccgcgccgaggtggaaatccgcggcaagtggtacccggtacgggtggtccagcccagtttcgtgcgtcacggcaagcccctgatctaa

SEQ ID NO: 71128 - protein, 360 aa, Pseudomonas aeruginosa UCBPP-PA14
MGLRTPLYELHVALGAKMVDFGGWDMPLHYGSQVEEHHQVRRDCGVFDVSHMTVVDVAGEQATAYLQHLLANDVARLGETGKALYSAMLNEEGGVVDDLIVYLTENGYRVVVNASTRDKDIAWMQAQAAGFKVDLQERGDLAMLAIQGPNARVHSSELVSPARAALIRELKPFQGRAEGDWFIARTGYTGEDGLEIMLPAAEAPGFLNELVGAGISPAGLGARDTLRLEAGLNLYGQDMDESVSPLAANMGWTVAWEPVARDFVGRRALEAQKAAGDQPKLVGLVLEERGVLRAHQVVRVAGIGEGEITSGSFSPTLNKSIALARVPAATGDRAEVEIRGKWYPVRVVQPSFVRHGKPLI

SEQ ID NO: 71129 - DNA, 1104 bp, Solibacter usitatus Ellin6076
  CDS (1)..(1104): transl_table=11
atgccagcagagcccgctcttcgttccacacccctaaactctgtccatcgaggcctcaaggcgaagatggtcgatttcggcgggtgggacatgcccgtccagtattcgggcatcatcgatgagcacaacgcggtccgtaacgccgtcggcgtcttcgatgtcagccacatgggcgaaatcgagatccgcggacccgaggcggcgaaactgaccgaccacgtcaccaccaacgccgttcacaaactcaagctgggccaggcccattattccggcctgctctacgagcacggcggcttcgtggacgacattctggtacataaggtcgctgacgatcacttcttcctctgcgtcaacgcctctaatcaggacaaggacttcgaacacatccgcgcccacaacaagttcgacgccgtggtggagaacaacggcgaccgctacgcgcagattgcgatccagggcccgaaggccgcggccactctgcagaagctgacgcccgtggatcttggcgcgatcaagtattactggttcaccgatggcgaggtctccggcaccccggcccgcatcgcgcacaccggctataccggcgaagacggcttcgaaatctacgtgccgccctcggaggctgtgcgcatgtggcagctggtgatggacgccggcgccgaattcggcatcaagccgtgcggcctgggcgcccgcaacaccctgcggctggaggccaagatggcgctctacggccatgaaatcgacgcctcgatttcaccgctcgaggccgatctcggctggatcgtaaagctcgataagggcgagttcgtgggcagcgcggcgctacgcaaacagaaagagagcggcatccagcgcaaattgatcggctttgaaatgtgcgcccgcggcatcggccgcgacggctacgaagtcttcctcgatggcgccgccgccgggtgggttaccagtggttcgccttccccgaccctgaataagaacatcgggatgtgttatctacctacggcacagtcggtacctggcaagtcgattcagataatgatccgcaaccagccagtggatgcggtgacggtggaaaccccgttttacaaacgagcgaaataa

SEQ ID NO: 71130 - protein, 367 aa, Solibacter usitatus Ellin6076
MPAEPALRSTPLNSVHRGLKAKMVDFGGWDMPVQYSGIIDEHNAVRNAVGVFDVSHMGEIEIRGPEAAKLTDHVTTNAVHKLKLGQAHYSGLLYEHGGFVDDILVHKVADDHFFLCVNASNQDKDFEHIRAHNKFDAVVENNGDRYAQIAIQGPKAAATLQKLTPVDLGAIKYYWFTDGEVSGTPARIAHTGYTGEDGFEIYVPPSEAVRMWQLVMDAGAEFGIKPCGLGARNTLRLEAKMALYGHEIDASISPLEADLGWIVKLDKGEFVGSAALRKQKESGIQRKLIGFEMCARGIGRDGYEVFLDGAAAGWVTSGSPSPTLNKNIGMCYLPTAQSVPGKSIQIMIRNQPVDAVTVETPFYKRAK

SEQ ID NO: 71131 - DNA, 1122 bp, Gramella forsetii KT0803
  CDS (40)..(1122): transl_table=11
ctgctgaattcaataaatttgcgcaaatttttgaaaataatgaaagaaatagccctgtctgaaaagcatagagaattgaacgccaaaatggtcccttttgccggttataacatgcctgtatcttacgaaggagtaaatattgagcatgaaactgttagaaaaaaattgggagtctttgacgtttctcatatgggtgaatttctaatttctggagaaaatgccctgaaattaattcagaaaataagttcaaatgatgcttcaaaacttgtagacgggaaagctcaatattcatgcatgcccaatcatgagggtggaattgtggacgatcttattatatatagaattgatgctgaaaaatacttattggtggtaaatgcttccaatatagaaaaagactggaattggatcgcacagcataataccatggatgcaacggtacgcgatatgagtgatgaaatgtcactacttgcgattcagggaccaaaagcagcagaagcgatgcaatctatcactgatgttgacctcgagaatatgaagttctacactttccaggtggataaatttgctgatgtggaaaaagtaatcatttcggcaacaggttataccggaagtggtggctttgaaatctatttcagaaatgaagatgctgcacaggtttggaatgctgtaatggaagcaggtaaagaatatggaatcaaaccaattggtttggcggcgagagatacacttcgactggaaatgggttactccctttatggaaatgatattaatgataccacttctcctatcgaagctggtttaggctggatcacgaaattttcaaaagatttcatcaatagcgaagaacttaaagcacagaaagagaatggtccggaacgtaagcttgtggcttttgaaatggatgaaagaggcattcctcgccagggatatgatattgttgacgaaaatggtaagaaaattggagaagtaacttcgggcaccatgtctccatccctagaaaaaggtataggtttaggatatgtaccggctgagcttgcaggtattggaaataaaatttcaatccagattcgcaaaaaagttgtttctgcaactcaggtgaaattgcccttttataaaggttaa

SEQ ID NO: 71132 - protein, 360 aa, Gramella forsetii KT0803
MKEIALSEKHRELNAKMVPFAGYNMPVSYEGVNIEHETVRKKLGVFDVSHMGEFLISGENALKLIQKISSNDASKLVDGKAQYSCMPNHEGGIVDDLIIYRIDAEKYLLVVNASNIEKDWNWIAQHNTMDATVRDMSDEMSLLAIQGPKAAEAMQSITDVDLENMKFYTFQVDKFADVEKVIISATGYTGSGGFEIYFRNEDAAQVWNAVMEAGKEYGIKPIGLAARDTLRLEMGYSLYGNDINDTTSPIEAGLGWITKFSKDFINSEELKAQKENGPERKLVAFEMDERGIPRQGYDIVDENGKKIGEVTSGTMSPSLEKGIGLGYVPAELAGIGNKISIQIRKKVVSATQVKLPFYKG

SEQ ID NO: 71133 - DNA, 1116 bp, Magnetococcus sp. MC-1
  CDS (1)..(1116): transl_table=11
atgcataggagtaaacccatgtcccaacagacccctctctacccctaccatgtcgaggccggtgccaagatggtggatttcgcgggttggatgatgcccgtgagctatggctcacagttgcaagagcatcatcaagtgcggcaacatgtgggtatgtttgatgtgtgccatatggggcatgtacaggtaagcggccctcaggccaccgcctatttgcaatttttgttgtgtaatgatgtggccaagctccgtgaagcagggcaggccatctataccggcatgctcaacagctctggtggggtgattgatgatctcatcgtctaccgggatgacgaacagcactaccatgtggtggttaatgccgccaaccgggaaggggatgtgcagtggatgcaggatcgcgcccaggattttgaaggggttacggttacgctggatccccagttgggcatgatcgcggtgcaggggcctgaggctcagcaacgggtggcagaactcttcgctggggtggagctggaggcgctcaagacgtttcgctcgatcataatcgaggggggacgcattgcccgcaccggttataccggggaggatggttttgagctgatctttcccgcgcagaccatcataaccctatggacgcgcttgcaggcgatgcaggtgccccccatcggtttgggggcgcgggataccctgcggctggaagcagggttaaatctgtacggttcggatatggaccacaagattgatccgctggcctgtggtatgggttggacggtagcttgggagcccaccacccgcatgtttttagggcgggactatctggagctgctgcgggagtcggggggctccagccagcaacgggtggggttgattttgaccgataaaggggttttgcgggctggtcagcctgtgctgtttcatgggcgtcccagtgggcacgtcaccagcggtacgtggtccccaaccctagagcagggtatcgccatggcccgtgtggatgccagcatcgaaatcggccagatggtggatgtggtgattcgtaatcgtagcatgccagcccgcgtggtgggcttgccctttgtgcggcatgggcaggtggtttataaagcctcctaa

SEQ ID NO: 71134 - protein, 371 aa, Magnetococcus sp. MC-1
MHRSKPMSQQTPLYPYHVEAGAKMVDFAGWMMPVSYGSQLQEHHQVRQHVGMFDVCHMGHVQVSGPQATAYLQFLLCNDVAKLREAGQAIYTGMLNSSGGVIDDLIVYRDDEQHYHVVVNAANREGDVQWMQDRAQDFEGVTVTLDPQLGMIAVQGPEAQQRVAELFAGVELEALKTFRSIIIEGGRIARTGYTGEDGFELIFPAQTIITLWTRLQAMQVPPIGLGARDTLRLEAGLNLYGSDMDHKIDPLACGMGWTVAWEPTTRMFLGRDYLELLRESGGSSQQRVGLILTDKGVLRAGQPVLFHGRPSGHVTSGTWSPTLEQGIAMARVDASIEIGQMVDVVIRNRSMPARVVGLPFVRHGQVVYKAS

SEQ ID NO: 71135 - DNA, 1077 bp, Candidatus Ruthia magnifica str. Cm (Calyptogena magnifica)
  CDS (1)..(1077): transl_table=11
atgagacaaacacctttgtatcaaatgcacatagagtcgcaaggaaagatggttgattttggagattgggaaatgccgcttaattacggttcacaaattgaagaacatcatcaagtacgccgtgatgcaggtatgtttgatgtctcgcatatgagtgtggtggattttaaaggcatcgaagcaaaagcatttttgcaaattttgattgctaatgatgttgataagttaaaaatacaaggtaaggcgttatatagttgcatgttaaatgagtcaggcggggtgatagatgatttgattatttattaccaagatgatgaatattatcgtatagtaattaatgcaggcactgccgaaaaagatatgacttggattaacgcccaggcaagtggttttgatgtatcggttgagtgtatgtctaatctagcaatgattgctgtacaaggtccaaatgcaagggtaaaggtatttacagctatgccaggggttgaagaggtttgtggtaagttaaagccatttaatgcggctagtttgggtggattattcattgcacgtacaggttatacaggcgaagatgggtttgagattatactgtcttcaagttcagcaaaatttacttggaaaatgttacttgaagcaggtattaggccttgtggcttgggtgcgcgtgacaccttgcgtctagaagcgggtatgagtttgtatggttcagagatgagtgataaggtttcaccacttgaagcagcattaacttggacaattgatctaactaatgaaaatcgtgcgtttataggtcgtgatgcattagaaatattaaaagaaaaaggcgttgaaaagactattgttgggttagttttagaaggtaaaggtataattcgaaatcatcaaaaagtaataactagtctaggcgaaggtgaggtaacttcaggcacattttcacccactattggtaaggcaattgcactggcaagtgtacctaagggtagctttggcgtatgtgaaattgagatacgaaaaaagaaagtttacgctaaaatagtcaaattgccattcgtgcgtaatggaaaagtattggtttaa

SEQ ID NO: 71136 - protein, 358 aa, Candidatus Ruthia magnifica str. Cm (Calyptogena magnifica)
MRQTPLYQMHIESQGKMVDFGDWEMPLNYGSQIEEHHQVRRDAGMFDVSHMSVVDFKGIEAKAFLQILIANDVDKLKIQGKALYSCMLNESGGVIDDLIIYYQDDEYYRIVINAGTAEKDMTWINAQASGFDVSVECMSNLAMIAVQGPNARVKVFTAMPGVEEVCGKLKPFNAASLGGLFIARTGYTGEDGFEIILSSSSAKFTWKMLLEAGIRPCGLGARDTLRLEAGMSLYGSEMSDKVSPLEAALTWTIDLTNENRAFIGRDALEILKEKGVEKTIVGLVLEGKGIIRNHQKVITSLGEGEVTSGTFSPTIGKAIALASVPKGSFGVCEIEIRKKKVYAKIVKLPFVRNGKVLV

SEQ ID NO: 71137 - DNA, 1116 bp, Nocardioides sp. JS614
  CDS (1)..(1116): transl_table=11
atggtggacctccacgaacaggagctgcgctccccgctccacgcacgtcacgtggccctcggggccaagttcgccgctttcggcggctggtcgatgccgttggagtactccaccggcatcgtcaaggagcacaccgcggtgcgcgagtcggtcggcatcttcgacgtcagccacctcggcaaggccgtggtggcggggccgggcgccgccgcgttcgtcaaccgcacgctgaccaacgacctcgaccggatcggccccggccaggcgcagtacacgctgtgctgcgacgacgcgaccggtggcgtggtcgacgacctgatcgtctacctgcacgccgaggaccgggtgctgctggtgcccaacgccgccaacaccgccgaggtggtccgccggctcgcggcggtggccccggacggggtcacggtcaccgaccggcaccgcgacttcgtggtgctcgccgtgcagggcacccgatcggacgaggtgctggccgaggtggggctgccgaccggccacgactacatgtccttcgtcgagcagacgttcgccgacgagaccgtcgtggtctgccgcaccggctacaccggcgagcgcggctacgagctgatcgcaccgaacgcggtcgccgagccgctctgggacgcgctgctcgccgccggcgaggagttcgggatgctgccctgcgggctcggcgcccgcgacacgctgcgcaccgagatgggctacccgctgcacggccaggacatctccctcgacgtcaccccgaacgaggcgcgcctgggctgggcggtcggatggcgcaaggacgccttctggggccgcgacaagctcaccgccgagaaggcggccggcccgaagcgccagctgcggggcctggtcgccaccggtcgcggcatcccgcgcccgcacatgagcgtgagcctcacccccgacgtgctgctcggcgaggtcacctccggaaccttctcgcccaccctgcgcaagggcatcggcctggcgctgatcccgtcgttcgtcgacccggaggccgaggtcggcgtcgacatccgcggccgtcgcgaggtcttccagctcgtgaagccgccgttcctcgacccgtccgtgcgggagggctga

SEQ ID NO: 71138 - protein, 371 aa, Nocardioides sp. JS614
MVDLHEQELRSPLHARHVALGAKFAAFGGWSMPLEYSTGIVKEHTAVRESVGIFDVSHLGKAVVAGPGAAAFVNRTLTNDLDRIGPGQAQYTLCCDDATGGVVDDLIVYLHAEDRVLLVPNAANTAEVVRRLAAVAPDGVTVTDRHRDFVVLAVQGTRSDEVLAEVGLPTGHDYMSFVEQTFADETVVVCRTGYTGERGYELIAPNAVAEPLWDALLAAGEEFGMLPCGLGARDTLRTEMGYPLHGQDISLDVTPNEARLGWAVGWRKDAFWGRDKLTAEKAAGPKRQLRGLVATGRGIPRPHMSVSLTPDVLLGEVTSGTFSPTLRKGIGLALIPSFVDPEAEVGVDIRGRREVFQLVKPPFLDPSVREG

SEQ ID NO: 71139 - DNA, 1095 bp, Shewanella amazonensis SB2B
  CDS (1)..(1095): transl_table=11
atggctaataaaactgtactctttagcaagcacctggaatcgaacgccaagatggtggacttccacggctggaatatgcccctcaactatggctcccaaatcgaagagcaccatgccgtgcgccgtgacgccggtatgttcgacgtatctcacatgactgtagtggacgttgaaggtgccgatgcccgcgctttcctgcgcaaactgctggctaacgacattgccaaactgaccgttcccggcaaagccctctacggcggcatgctgaaccacgacggcggcgtcattgacgacctcatcacctactatctcagcgacactcaataccgcgtggtagtgaactctgctacccgcgaaaaagatctggcgtggattggtgagcaggccaaaggcttcgatgtcaccatcaccgagcgtcctgaactggccatgattgccgtgcagggtcccaatgccaaagccaaagccgccaccgtatttactgccgagcaaaacgctgctgtagaaggtatgaagcctttcttcggcaagcaagctggcagcctctttattgccaccacaggttacacaggtgaagccggctacgagatcatcgtgccagaagccgaagccgaggccctgtggcaagccctgctggatgccggtgtgcagccatgtggtctgggtgcccgtgacaccctgcgcctggaagccggtatgaacctctacggtcaggacatggacgagagcgtcaacccactggccgccaacatgggctggaccattgcatgggaacctgcggatcgcgactttatcggccgtgaagcgctggaagccatcaaggccaagggcagcgacaaattagtcggtctggtgatggaagagaagggcgttctgcgccatgatatgccagtgttttttaccgacgccaatggcgttgagcaccagggcgtgatcaccagcggtacattctcacccactttgggctattctatcgcgatggctcgcgtacccggcgccatcggtgagactgccgaagtggaaatgcgcaagaagcgtgtgacggtgcgtgtcatcgcacccagcttcgtacgcaatggaaaacaagcattttaa

SEQ ID NO: 71140 - protein, 364 aa, Shewanella amazonensis SB2B
MANKTVLFSKHLESNAKMVDFHGWNMPLNYGSQIEEHHAVRRDAGMFDVSHMTVVDVEGADARAFLRKLLANDIAKLTVPGKALYGGMLNHDGGVIDDLITYYLSDTQYRVVVNSATREKDLAWIGEQAKGFDVTITERPELAMIAVQGPNAKAKAATVFTAEQNAAVEGMKPFFGKQAGSLFIATTGYTGEAGYEIIVPEAEAEALWQALLDAGVQPCGLGARDTLRLEAGMNLYGQDMDESVNPLAANMGWTIAWEPADRDFIGREALEAIKAKGSDKLVGLVMEEKGVLRHDMPVFFTDANGVEHQGVITSGTFSPTLGYSIAMARVPGAIGETAEVEMRKKRVTVRVIAPSFVRNGKQAF

SEQ ID NO: 71141 - DNA, 1122 bp, Arthrobacter aurescens TC1
  CDS (1)..(1122): transl_table=11
atgtctgagaactacaccgctctctacgagcagcacaaaaaggccggcgcttccttcacggacttcggcggctggcagatgccgctgaagtacgagtccgaactcgccgagcaccatgccgtccgtaacgcggcgggcctgttcgatctctcccacatgggcgaggtctgggtcagcggccccgacgctgcggccttcctggactacgccctggtgggcaagctgtcagcgatcgctgtaggcaaggccaagtattcgctgatctgcaacgccgacggcggcatcatcgacgacctcatctcctaccgacgcgctgaagacaagtacctggtagtccccaatgcgggcaacgccaaggtggtctccgcggcgctgctgaagcgcgcggccggttttgacgtcgtcgtcgaggacgtctctgccgagacgtcactcatcgccgtgcagggcccgaccgctgaagccatcctgctgcaactggtccatgcggaacagcacgagttggtcaccgaactgaagtactacgccgcggttgaggtatccatcaacggggaggacctgttgctcgcccgcaccggctacaccggggaagacggcttcgagatctacgtcccgaacgtcgacgccgcaggcctctgggaagcgctgctggaagccggtgaaggccacggactcatccccgcaggtctcgccgcccgcgattcgctccgccttgaagccggcatgccgctctacggcaacgagctctcccagcacgtcaatgcctacgcagcaggcctgggcccggtagtttccctggccaaggaaagcgactttgtgggcagggaggcactcaccgccatcaaggctgccggtgtggggtccacccttgggcagaagctcgtgggcctcaagggcacgggccgccgtgccgcgcgcgcccactactcggtgctcaaggacggctccctgatcggcgaagtctcctccggccagccaagcccgacgctcggttacccggtagcgatggcctacgtcgacgtcgagcattcagagccgggaacgatcgttgaggtcgacctccgaggcaaagccgaaccgttcgaagttgtcgccctgccgttctacaagcgccaaaagtag

SEQ ID NO: 71142 - protein, 373 aa, Arthrobacter aurescens TC1
MSENYTALYEQHKKAGASFTDFGGWQMPLKYESELAEHHAVRNAAGLFDLSHMGEVWVSGPDAAAFLDYALVGKLSAIAVGKAKYSLICNADGGIIDDLISYRRAEDKYLVVPNAGNAKVVSAALLKRAAGFDVVVEDVSAETSLIAVQGPTAEAILLQLVHAEQHELVTELKYYAAVEVSINGEDLLLARTGYTGEDGFEIYVPNVDAAGLWEALLEAGEGHGLIPAGLAARDSLRLEAGMPLYGNELSQHVNAYAAGLGPVVSLAKESDFVGREALTAIKAAGVGSTLGQKLVGLKGTGRRAARAHYSVLKDGSLIGEVSSGQPSPTLGYPVAMAYVDVEHSEPGTIVEVDLRGKAEPFEVVALPFYKRQK

SEQ ID NO: 71143 - DNA, 1131 bp, Acidovorax sp. JS42
  CDS (1)..(1131): transl_table=11
atgtccgccatgtccgacctgctcaccactcccctcaacgccctgcacatcgaactgggcgcccgcatggtgcccttcgccggctactccatgcccgtgcaataccccatgggcctgatggccgagcaccaccacacgcgcacggcggccggcctgtttgatgtgtcgcacatggggcagctcaagctggtcggccctgacgccgctgccgcgttcgagacgctgatgcccgtggacgtggtcgacctgcccgtgggcaagcagcgctacggcctgctcctcaatgacgagggcggcatcatcgacgacctcatgttcttccgcatggcgcaggacgagctcttcgtgatcgtcaacggcgcctgcaaggtgggcgacattgcccacatccaggcgcgcatcggccaacgctgccaggtgattcccatgcccgaccaggccctgctcgcgctgcagggcccacaggcggctgcggtgctcgcgcgtctggcaccaggcgtggacaaactggtgttcatgaccggcgggcatttcgacatcgccggggcgcagtgcttcgtgacgcgcagcggctacaccggagaggacggcttcgagatctcggtgcccgccacgcaggccgaggccctggcgcgcacgctgctggcccagcccgaggtcaagcccatcggcctgggcgcacgcaactcgctgcgtttggaagccggcttgtgcctgtatggcaacgacatcgacaccaccaccaccccgcccgaagccggcctgaactgggccatccagaaggtgcgccgtacaggcggcgcgcgcgctggcggttttcccggtgccgacaaggtgctggcccagatcgacagcccggccaccctcacgcgcaagcgcgtggccctggtggcgctggagcgcgtgcccgtgcgtgagcacaccgagttgcaaaacgagtcgggcgagcgcatcggcgaagtcaccagcggcctgctggcccccactgccgacaagcccatcgccctggcctacgtaatgcccgcccatgccgcccccggcacccgtgtgaacgccatggtgcgcggcaaggccgtgcccatggaagtggctgccacgccctttgttcccacacgctactaccgcggctga

SEQ ID NO: 71144 - protein, 376 aa, Acidovorax sp. JS42
MSAMSDLLTTPLNALHIELGARMVPFAGYSMPVQYPMGLMAEHHHTRTAAGLFDVSHMGQLKLVGPDAAAAFETLMPVDVVDLPVGKQRYGLLLNDEGGIIDDLMFFRMAQDELFVIVNGACKVGDIAHIQARIGQRCQVIPMPDQALLALQGPQAAAVLARLAPGVDKLVFMTGGHFDIAGAQCFVTRSGYTGEDGFEISVPATQAEALARTLLAQPEVKPIGLGARNSLRLEAGLCLYGNDIDTTTTPPEAGLNWAIQKVRRTGGARAGGFPGADKVLAQIDSPATLTRKRVALVALERVPVREHTELQNESGERIGEVTSGLLAPTADKPIALAYVMPAHAAPGTRVNAMVRGKAVPMEVAATPFVPTRYYRG

SEQ ID NO: 71145 - DNA, 1083 bp, Azotobacter vinelandii
  CDS (1)..(1083): transl_table=11
atgggactgcgcacgccgctctacgaccagcatctcgcactgggcgccaggatcgtcgatttcggcggctgggacatgcccctgcactatggttcgcaggtcgaggaacatcaccaggtgcgacgcgactgcggcgtcttcgacgtctcccacatgacggtggtggatgtcctgggcgcggatgccgggatctggctgcggcgcctgctggccaacgacgtggcgcacctgaaaagccccggcaaggccctctacagcgtcatgctcaacgagcgcggcggggtgatcgacgacctcatcgtctatctcgccgatttcggttaccgcctggtgctcaacgcggctacccgcgagcgcgacctggactggatacgcgggcaggccgccggcttcgtcgtcgaactgcgcgagcgtcgggatctggccatgctcgccatccaggggccgaaggcgcgggcgcgcaccggcgagttgctcgccgcttcgcgcgccgcgctgatccacgaactgcgcccgttcgagggcctgaccgaaggcgactggttcatcgcccgcaccggctataccggcgaggacggcctggaaatcctgctgccggcggcgcaggcgccggacttcttcaacgacctggtcggcgccggcatcgctcccggcggcctcggcgcccgcgacaccctgcgcctggaggcgggcctgaacctccacggccgggagatggacgagagcgtctcgccgctggcggcgaacctcggctggaccatcgcctgggaccccgccgggcgcgacttcatcggccgcgcggcgctggaagcgcagcgccgcgccggcggtcagcctaaactggtggggttgctgctggaggagcgcggcgtgctgcgcgcccgccaggtggtgcgggtggacggtctcggcgaaggcgagatcaccagcggcagcttctcgccgacgctgggcaagtccatcgccctggcccgggtaccggccgccaccggcgagcgcgccgaggtggagatccgcggccgctggctgcccgtccgcgtcgtccggccgaacttcgtccgccacggcaaggccttgatctag

SEQ ID NO: 71146 - protein, 360 aa, Azotobacter vinelandii
MGLRTPLYDQHLALGARIVDFGGWDMPLHYGSQVEEHHQVRRDCGVFDVSHMTVVDVLGADAGIWLRRLLANDVAHLKSPGKALYSVMLNERGGVIDDLIVYLADFGYRLVLNAATRERDLDWIRGQAAGFVVELRERRDLAMLAIQGPKARARTGELLAASRAALIHELRPFEGLTEGDWFIARTGYTGEDGLEILLPAAQAPDFFNDLVGAGIAPGGLGARDTLRLEAGLNLHGREMDESVSPLAANLGWTIAWDPAGRDFIGRAALEAQRRAGGQPKLVGLLLEERGVLRARQVVRVDGLGEGEITSGSFSPTLGKSIALARVPAATGERAEVEIRGRWLPVRVVRPNFVRHGKALI

SEQ ID NO: 71147 - DNA, 1125 bp, Azotobacter vinelandii
  CDS (1)..(1125): transl_table=11
atgaccacggaaaccctcgccaaaaccccgctgcacgccctgcacctcgaactgggcgcgcgcatggtgcccttcgccggctacgagatgccggtgcaatacccgctgggggtgctcaaggagcacctgcacagccgcgaccaggccggactgttcgacgtttcacacatgggccagatcctcctgcgcggcgccgatgccggcgcggccctggaaaccctggtaccggtggacatcgtcgagctgccggtgggccagcagcgctacgcgctgttcaccgacgacaacggcggcatcctcgacgacctgatggtcgccaacctgggcgacgagcgcctgttcctggtggtcaacgccgcctgcaaggagcaggacctcgcccacctgaaaacgcacatcggcgcgcgctgccagatcgaatcgctgttcgagtcgcgcgccctgctcgccctgcagggcctcagggcggtcgacgtgctggcgcgcctggcgccggaagtggcgcagatgaccttcatgcgcatcgccgagatcgagttgctcggcatcccgtgcatcgtcagccgctccggctacaccggcgaggacggcttcgagatctccgtgccggtcgagcacgccgataagctcgcccgcgccctgctcgctgaaccggaagtccagccgatcggcctcggcgcccgcgactcgctgcgcctggaagccggcctgtgcctgtacggccacgacatgagcagcgccaccacgccggtcgaggccagcctgctgtgggccatctccaaggcgcgccgcgagggtggcgcgcgcgccggcggctttcccggcgccgcgcggatcttcgcccagcagcaggaaggcgtggcttgcaggcgcgtcggcctgctgccgcaggagcgcacgccggtgcgcgaaggcacggagatcgtcgatgcccagggcgcgccgatcggcaaggtcaccagcggcggcttcgggccgagcctgggcgcgccgctggccatgggctatgtcgccagcgcccatgccgccgaaggcagcgaggtctgggccatcgtccgcggcaagcgcgtgccgatgaaggtcgccaggacgcccttcgtagcgcagcgctactatcgcggctga

SEQ ID NO: 71148 - protein, 374 aa, Azotobacter vinelandii
MTTETLAKTPLHALHLELGARMVPFAGYEMPVQYPLGVLKEHLHSRDQAGLFDVSHMGQILLRGADAGAALETLVPVDIVELPVGQQRYALFTDDNGGILDDLMVANLGDERLFLVVNAACKEQDLAHLKTHIGARCQIESLFESRALLALQGLRAVDVLARLAPEVAQMTFMRIAEIELLGIPCIVSRSGYTGEDGFEISVPVEHADKLARALLAEPEVQPIGLGARDSLRLEAGLCLYGHDMSSATTPVEASLLWAISKARREGGARAGGFPGAARIFAQQQEGVACRRVGLLPQERTPVREGTEIVDAQGAPIGKVTSGGFGPSLGAPLAMGYVASAHAAEGSEVWAIVRGKRVPMKVARTPFVAQRYYRG

SEQ ID NO: 71149 - DNA, 1095 bp, Crocosphaera watsonii WH 8501
  CDS (1)..(1095): transl_table=11
gtggctaattctcttttgcgcactcctttatacgatctcattgtagaacagaaagcgaaaatgacagcgttttctggttgggaaatgccggtacagtttactgggctaaagttagaacatcaaacggtaaggaacgaggtgggaatgtttgatatttctcacatggctaagtttagcttggagggagagggttggctttctctcttacagtctcttgttccttcggacttgagccgtttaaaccctggtcaagctcaatataccgtactattgaacccagatgggggcattatcgatgatattatcgtttactgtcaagggccagataaagctgtgattatcgctaatgcagccactaaagataaggataaacagtggatattatcgcatttagggacacacaaggttaattttagcgacttatctccagaaaaggttttattagccgtacaaggtccccaaacggtggaaaaattacagcccttcgtagaagcggatctaacgcaactatctttcttcggccacatagaaacccaggtattaggataccctgcttttatcgctcgcacgggatacactggagaggacggttttgaggtgatgatcgcctcggaaggtggacaagagttatggcgatcgctaattgaagccaatgtctctccttgtggtttaggggccagggataccctacgtttagaagcagctatgtgtctctatggacaagatatcgacgatcgcaccactcccttagaagctggtttaaaatggctggtgcatttggataaaaaagagcaatttatcgggcgagaggtattggaaaaacaagccacagaaggggttaaacggcgtttagtgggcttacaaatggaaggacgacatatcgcccgtcatgactatccggtggcttctgggggcaaaattgtcggggaggtgacaagcggtactatcggacccacattgggaaaggcgatctctttagcttatcttcctactgagttaagcaaaaaaggaacaactgttgaggtagaaatcagaggaaaattgtaccctgcgaaagtagttaaaaagcctttttatcggtcggaaaatcgttaa

SEQ ID NO: 71150 - protein, 364 aa, Crocosphaera watsonii WH 8501
MANSLLRTPLYDLIVEQKAKMTAFSGWEMPVQFTGLKLEHQTVRNEVGMFDISHMAKFSLEGEGWLSLLQSLVPSDLSRLNPGQAQYTVLLNPDGGIIDDIIVYCQGPDKAVIIANAATKDKDKQWILSHLGTHKVNFSDLSPEKVLLAVQGPQTVEKLQPFVEADLTQLSFFGHIETQVLGYPAFIARTGYTGEDGFEVMIASEGGQELWRSLIEANVSPCGLGARDTLRLEAAMCLYGQDIDDRTTPLEAGLKWLVHLDKKEQFIGREVLEKQATEGVKRRLVGLQMEGRHIARHDYPVASGGKIVGEVTSGTIGPTLGKAISLAYLPTELSKKGTTVEVEIRGKLYPAKVVKKPFYRSENR

SEQ ID NO: 71151 - DNA, 1107 bp, Xylella fastidiosa Dixon
  CDS (1)..(1107): transl_table=11
atgatcaaaaagaccattctcaatgacacccatcgagcactcggtgccaagatggtcgacttcagcggctgggaaatgcccattcactacggctcacagattgatgagcatcatcacgtcaggcgtaacgccggcatattcgacgtcagtcatatgaccgtcattgatttgcacgggacacaggtacgccccctcttgcgtcgactattagctaattcggtagataagctcaaagtacccggaaaagcactgtatagctgcatgttgaatccgcaaggcggtgtaatcgacgatttgatcgtctattacctacgtgaagattactttcgttttatcgtcaacgccgctacacgagaaaaggatttagcatggatcaatacacaagcatctgcgttcaacgtacgcgttgaagagcgtgcagacttggcaatgctcgccgtacaggggcctgccgcgcgcgcgcaggtcaccaacctattggccgagactcaccgcgacgcagtggaaaagctcggacgtttcgctgcactagaagtcgcatcgcactcgaaaaaaaccctctttatttcacgtactggatataccggtgaggacggctttgagatcttacttccacaagaagaaacgataacgttatggaatgcgctgttgaagacaggcgtgaaaccaatcggactaggcgcacgcgatacgttacgtctagaggcagggatgaatctctacggccaggatatggacgagcaggtttcaccctacgaagcagcactgggctggactgtcatgcttgatgaaggtcgcaacttcatcggtcgcaacgtgctggaacagcaaaagactaacggcgtatcacggcagatgataggcctactcatggatgagaagggagtgcttcgccatggtcagaaagtattgaccgcacaaggcgagggccacatcctttccggtacgttttcaccaaccttgaacaaggctatcggattcgcgcgcgtgccagccggaaaaccaagtgaggtccgggtcaacatacgtgaccgtgcaatccctgtgcgggttgtcaaattcccctttgtacgtgaaggccagacgcaaccaaacatttttgattga

SEQ ID NO: 71152 - protein, 368 aa, Xylella fastidiosa Dixon
MIKKTILNDTHRALGAKMVDFSGWEMPIHYGSQIDEHHHVRRNAGIFDVSHMTVIDLHGTQVRPLLRRLLANSVDKLKVPGKALYSCMLNPQGGVIDDLIVYYLREDYFRFIVNAATREKDLAWINTQASAFNVRVEERADLAMLAVQGPAARAQVTNLLAETHRDAVEKLGRFAALEVASHSKKTLFISRTGYTGEDGFEILLPQEETITLWNALLKTGVKPIGLGARDTLRLEAGMNLYGQDMDEQVSPYEAALGWTVMLDEGRNFIGRNVLEQQKTNGVSRQMIGLLMDEKGVLRHGQKVLTAQGEGHILSGTFSPTLNKAIGFARVPAGKPSEVRVNIRDRAIPVRVVKFPFVREGQTQPNIFD

SEQ ID NO: 71153 - DNA, 1107 bp, Xylella fastidiosa Ann-1
  CDS (1)..(1107): transl_table=11
atgattaaaaagaccattctcaatgacacccatcgagcactcggtgccaagatggtcgacttcagcggctgggaaatgcccattcactacggctcacagattgatgagcatcatcacgtcaggcgtaacgccggcatattcgacgtcagtcatatgactgtcattgatttgcacgggacgcaggtacgccccctcttgcgtcgactattagctaattcggtagataagctcaaagtaccaggaaaagcactgtatagctgcatgttgaatccgcaaggcggtgtaatcgacgatttgatcctctattacctacgtgaagattactttcgttttatcgtcaacgccgctacacgagaaaaggatttagcatggatcaatacacaagcatctgcgttcaacgtacgcgttgaagagcgtgcagacttggcaatgctcgccgtacaggggcctgccgcgcgcgcgcaggtcaccaacctattggccgagactcaccgcgacgcagtggaaaagctcggacgtttcgccgcactagaagtcgcatcgcactcgaaaaaacccctctttatttcacgtactggatataccggtgaggacggctttgagatcttacttccacaagaagaaacgataacgttatggaatgcgctgttgaagacaggcgtgaaaccaatcggactaggcgcacgcgatacgttacgtctagaggcagggatgaatctctacggccaggatatggacgagcaggtttcaccctacgaagccgcactgggctggactgtcatacttgatgaaggtcgcaacttcatcggtcgcaacgtgctggaacagcaaaagactaacggcgtatcacgacagatgataggcctactcatggatgagaagggagtgcttcgccatggtcagaaagtattgaccgcacaaggtgagggccacatcctttccggtacgttttcaccaaccttgaacaaggctatcggattcgcgcgcgtgccagccggaaaaccaagtgaggtccgagtcaacatacgtgaccgtgaaatccctgtgcgggttgtcaaattcccctttgtacgtgaaggccagacgcaaccaaacatttttgattga

SEQ ID NO: 71154 - protein, 368 aa, Xylella fastidiosa Ann-1
MIKKTILNDTHRALGAKMVDFSGWEMPIHYGSQIDEHHHVRRNAGIFDVSHMTVIDLHGTQVRPLLRRLLANSVDKLKVPGKALYSCMLNPQGGVIDDLILYYLREDYFRFIVNAATREKDLAWINTQASAFNVRVEERADLAMLAVQGPAARAQVTNLLAETHRDAVEKLGRFAALEVASHSKKPLFISRTGYTGEDGFEILLPQEETITLWNALLKTGVKPIGLGARDTLRLEAGMNLYGQDMDEQVSPYEAALGWTVILDEGRNFIGRNVLEQQKTNGVSRQMIGLLMDEKGVLRHGQKVLTAQGEGHILSGTFSPTLNKAIGFARVPAGKPSEVRVNIRDREIPVRVVKFPFVREGQTQPNIFD

SEQ ID NO: 71155 - DNA, 1098 bp, Yersinia bercovieri ATCC 43970
  CDS (1)..(1098): transl_table=11
atggctaagcagaccccgctgtatgaccaacacgtagcgtgcggtgcgcgcatggtagattttcatggctggatgatgccattgcattatggctcgcaaatcgacgagcaccatatcgtgcgccaggacgccggtatgtttgatgtttctcacatgacgatagtcgacctgcacggcgcgcgtacccgtgaattcctccgctacctgttagccaatgatgttgccaaactgaccctgccgggcaaagccctttacagcgggatgctgaatgcgtccggcggtgtcattgacgatttgattgtttacttcctccgcgaagactatttccgcttagtggttaactccgccacccgtgacaaagatctggcctggatcactcagcatgctgagccgtatcaggttgagattactgtgcgcgacgatctggcgctggtggccgtacaaggccctacggcgcaacagcgagtagccactttactgaccactgagcagcaacaagccgttgcaggaatgaaaccattctttggtattcaggcgggtgatttgtttgtcgccaccactggctatactggcgaggcgggctatgaaatcgcgctgccaaaagagcaggtggttgagttttggcaacaactgctcgccgctggcgtgaaacctgcgggtctgggtgcacgtgacactctgcggctggaagcgggtatgaatctctatggccaagagatggatgaatctgtctccccattagccgccaatatgggctggacggtggcctggttgccggaagatcgccagtttattggccgtgaagcactggagcagcagcgtgctaatggaactgagcaactggtcggcttgatcatgaccgaaaaaggcgtattacgtaatgagctgccggtgcatttcactgatgcttcgggtcaggcgcaggtgggggttatcaccagcggctccttctcgccaacactgggcttcagtatcgcgctggcccgtgtgcctgccggtatcggcgagagtgccgtagtgcagattcgtaatcgtgaaatgccagtgcgcgtcacaaaaccgggtttcgtgcgggccggtaagccggtcgtgcagtaa

SEQ ID NO: 71156 - protein, 365 aa, Yersinia bercovieri ATCC 43970
MAKQTPLYDQHVACGARMVDFHGWMMPLHYGSQIDEHHIVRQDAGMFDVSHMTIVDLHGARTREFLRYLLANDVAKLTLPGKALYSGMLNASGGVIDDLIVYFLREDYFRLVVNSATRDKDLAWITQHAEPYQVEITVRDDLALVAVQGPTAQQRVATLLTTEQQQAVAGMKPFFGIQAGDLFVATTGYTGEAGYEIALPKEQVVEFWQQLLAAGVKPAGLGARDTLRLEAGMNLYGQEMDESVSPLAANMGWTVAWLPEDRQFIGREALEQQRANGTEQLVGLIMTEKGVLRNELPVHFTDASGQAQVGVITSGSFSPTLGFSIALARVPAGIGESAVVQIRNREMPVRVTKPGFVRAGKPVVQ

SEQ ID NO: 71157 - DNA, 1098 bp, Yersinia mollaretii ATCC 43969
  CDS (1)..(1098): transl_table=11
atgtctaagcagaccccgttgtatgaccaacacgtggcgtgcggtgcgcgcatggtagattttcatggctggatgatgccattgcattatggctcccaaatcgacgagcaccatattgtgcgccaagacgccggtatgtttgatgtctctcacatgaccattgtcgatctgcacggcgcgcgtacccgtgaattcctccgctatctgttagccaatgatgttgctaaactgacccaaccgggcaaagccctttactccgggatgctgaatgcgtccggaggtgttattgatgatttgattgtctacttcctccgcgaagactatttccgcttagtggttaactccgccacccgtgacaaagatctggcttggatcacccaacatgctgagccttatcaggttgatgtcactgtgcgcgacgatctggcgttggtggcggtacaaggcccgacagcacaacagaaagtggccactttactgaccactgagcagcaacaagctatcgccggaatgaaaccattcttcggcattcaggcgggtgatttgtttatcgccaccactggctatactggtgaagcgggctatgaaatcgcgctgccaaaagagcaggtggttgagttttggcagcaacttcttgctgctggcgtgaaacctgctggccttggggcgcgtgacactctgcggctggaggcgggtatgaacctctacggccaagagatggatgagactatttcgccgttagccgccaatatgggctggacagtggcgtggttgccggaagatcgccagtttatcggccgtgaggcactggagcagcaaagggctaacgggagtgagcagttggtcggcttgatcatgaccgaaaaaggcgtattgcgtaatgagctgcctgtgcattttactgatgcctcaggtcaggcgcaggtgggtgtcatcaccagcggttctttctcgccaacactgggcttcagcattgcgctggcccgtgtgcctgccggtatcggtgagagtgccgttgtgcagattcgcaatcgtgaaatgccggtgcgcgtcaccaaaccgggtttcgtgcgggccggtaagccggtcgcgcagtaa

SEQ ID NO: 71158 - protein, 365 aa, Yersinia mollaretii ATCC 43969
MSKQTPLYDQHVACGARMVDFHGWMMPLHYGSQIDEHHIVRQDAGMFDVSHMTIVDLHGARTREFLRYLLANDVAKLTQPGKALYSGMLNASGGVIDDLIVYFLREDYFRLVVNSATRDKDLAWITQHAEPYQVDVTVRDDLALVAVQGPTAQQKVATLLTTEQQQAIAGMKPFFGIQAGDLFIATTGYTGEAGYEIALPKEQVVEFWQQLLAAGVKPAGLGARDTLRLEAGMNLYGQEMDETISPLAANMGWTVAWLPEDRQFIGREALEQQRANGSEQLVGLIMTEKGVLRNELPVHFTDASGQAQVGVITSGSFSPTLGFSIALARVPAGIGESAVVQIRNREMPVRVTKPGFVRAGKPVAQ

SEQ ID NO: 71159 - DNA, 1098 bp, Yersinia frederiksenii ATCC 33641
  CDS (1)..(1098): transl_table=11
atggctaagcagaccccactgtatgagcaacacgtggcgtgcggtgcgcgcatggtagattttcatggctggatgatgccattgcattatggttcccaaatcgacgaacaccatgtcgtacgcaccgatgccggtatgttcgatgtctcacatatgacgattgtcgatttacacggtgcccgtacccgtgaattcctacgctatctgctagccaatgatgtcgccaaactgacccaaccgggcaaagccctttacaccgggatgctgaatgcctccggcggtgttatcgacgatttgattgtttacttcctgcgcgaagactatttccgcttagtggttaactccgccacccgcgataaagacctggactggataactcagcatgctgcgccttatcaggttgaagttactgtgcgtgacgatctggcgctggtcgcagtgcaaggacctgaagcacaaaagaaagtagctaccttgttgactcctgagcaacaacaagcaatagcaggtatgaaaccattctttggtattcaagctgatgatttgtttattgccactaccggctataccggtgaagccggttacgaaatcgccttacccaaagagcgcgtagttgagttttggcaacagctgctggctgccggtgtgaaaccagccggtcttggcgcgcgtgacactttgcgtctggaagccggcatgaacctctatggccaggaaatggatgaaagtatttctccccttgccgccaacatgggctggacagtggcttggttgccagaggaccggcagtttatcggccgtgaagcactggaacagcaacgagccaagggtacagagcaactggttggcttgatcatgacggaaaagggcgtattacgtaatgagttgcccgtgcacttttctgatgcttcgggcaatcaacatgtgggcgtgataaccagcggttctttctcaccaacactgggtttcagtattgcattggcccgtgtccctgcggggataggtgaaagtgctgtggtacaaatccgtaaccgtgaaatgccagtgcgggtcacaaaaccgggttttgtgcgagcgggtaagccggtcgcgctgtaa

SEQ ID NO: 71160 - protein, 365 aa, Yersinia frederiksenii ATCC 33641
MAKQTPLYEQHVACGARMVDFHGWMMPLHYGSQIDEHHVVRTDAGMFDVSHMTIVDLHGARTREFLRYLLANDVAKLTQPGKALYTGMLNASGGVIDDLIVYFLREDYFRLVVNSATRDKDLDWITQHAAPYQVEVTVRDDLALVAVQGPEAQKKVATLLTPEQQQAIAGMKPFFGIQADDLFIATTGYTGEAGYEIALPKERVVEFWQQLLAAGVKPAGLGARDTLRLEAGMNLYGQEMDESISPLAANMGWTVAWLPEDRQFIGREALEQQRAKGTEQLVGLIMTEKGVLRNELPVHFSDASGNQHVGVITSGSFSPTLGFSIALARVPAGIGESAVVQIRNREMPVRVTKPGFVRAGKPVAL

SEQ ID NO: 71161 - DNA, 1104 bp, Blastopirellula marina DSM 3645
  CDS (1)..(1104): transl_table=11
atgacgctcgccaaaacgcctctttatgattggcatcatgccgctggcggccgcctggtcgatttcggcggctggtcgatgccggttcagtacacttcgattattgacgagcataacgcgacgcgcaccgcggtcggcatgttcgacgtctctcatatggctcgcttccgctttgacggggctggcgctggcgatttccttgacaaattgcttacccgcaaagcctcggtcgtgccgatgggcaagatccgctacagcctggtctgtaacgacgaagggggaatcctggacgacgttctgatttacaatctgggcgaaggagacaaccagtacttttggctggtggtgaacgccggaaatcgccaaaagatcgccgcttggatcgagcaacatctccccagcgaaggggtcgtctttaccgaccacacgctggagacggcgatgatcgcggtccaaggaccgaaagcgatcgcagcggtccagccgctgtgcgacgtaccgatcagtgatttgaaatattactcgggcgccctcggcacgctttgcggcgagccggcgctgatcagccgaaccggctataccggcgaagatggggtcgaagtgaccgtgccggccgccgcggcgattgcgatttgggaccagatattgaatgccgcccaaccgctcggcgggttgccgtgcggactaggggcacgcgatacgttgcgtctggaagcggcgatgccgttgtacgggcacgaactgtccgagtcgattgatccgatcaccgcgggcctcacgttcggcgtttcgtttgatcacgactttatcggcaaagaccggttggaagcggcgcgtgacgcggctccgccgatggtccgcgtcggcttccgctgtgcggatcgtcgcgttccgcgtgaacattgcactgtgcacatcggcgaccaacaagttggcgaagtgaccagcggtactttctcgccgaccctcaaccaaccgatcgcgatgggttatgttgatcccgcgattgcggtcagcggcacggcggtcgaaattgatattcgcggcaaacgtgttgcggccgaagtcgcgccgctccctttctattctcgtcctcgcacctaa

SEQ ID NO: 71162 - protein, 367 aa, Blastopirellula marina DSM 3645
MTLAKTPLYDWHHAAGGRLVDFGGWSMPVQYTSIIDEHNATRTAVGMFDVSHMARFRFDGAGAGDFLDKLLTRKASVVPMGKIRYSLVCNDEGGILDDVLIYNLGEGDNQYFWLVVNAGNRQKIAAWIEQHLPSEGVVFTDHTLETAMIAVQGPKAIAAVQPLCDVPISDLKYYSGALGTLCGEPALISRTGYTGEDGVEVTVPAAAAIAIWDQILNAAQPLGGLPCGLGARDTLRLEAAMPLYGHELSESIDPITAGLTFGVSFDHDFIGKDRLEAARDAAPPMVRVGFRCADRRVPREHCTVHIGDQQVGEVTSGTFSPTLNQPIAMGYVDPAIAVSGTAVEIDIRGKRVAAEVAPLPFYSRPRT

SEQ ID NO: 71163 - DNA, 1092 bp, Reinekea sp. MED297
  CDS (1)..(1092): transl_table=11
atggctaaacagaccccgctttttgatgcgcatcttgatagcggcgcaaaactggtcgatttcggcggttgggaaatgcccatcaattatggctcgcagatcagtgagcatcaggctgtgcgcgaatctgccggcatgtttgatgtctctcatatgaccattgtcgatatcctcggggacgacgctcaagcctttttacagaaactgctggcgaatgacgttgccaagctcaagacccccggcaaagctttgtatacagccatgctaaaccctcaaggcggggtgatcgatgatctgatcgtctatcgcctcgacgagggttaccgaacggttgtgaactgtgccacccgtgaaaaagatctcgaatggattcagcaacaggccaccgatatggccgtgactatcaaagagcgcgatgacctggccatggttgccattcaagggccacaatcggtagaaaaagcgacggtggccttgggtgaagaacacggtccgattgccaatcaggtaaagccatttcaaggcctgcccagcggcgactggtttattgcccgaaccggctacaccggcgaagacggcctcgaggtcatggtaccgaataacgaagtgaccgatttctggtccagactgctcgacaatggcgtacaaccctgcggtttaggcgcacgagacacgttgcgtttagaggcaggtatgaatctctacggcaacgacatggatgaacaaacccacccgttggagtccggcatggcctggaccgtggcctgggaaccggaagaacgtgactttatgggtcgcgacgccctgaccaaacttcgggaacaaggcggttatcgcaaactgatcggtctggttctggagcagcgcggcgttatgcgggcacaccagacattgcacgccagtgaagacggccccgcaattggcgaaattaccagtgggaccttctccccgaccctgaatcaatccattgcgatggcacggatcgatcgggaggtcaaggactcctgttttgtttcaatgcgcggtaagatgctgccggtaaaaatcgtgaaactgccgttcgtccgaaacggcaagaagcaatttgattaa

SEQ ID NO: 71164 - protein, 363 aa, Reinekea sp. MED297
MAKQTPLFDAHLDSGAKLVDFGGWEMPINYGSQISEHQAVRESAGMFDVSHMTIVDILGDDAQAFLQKLLANDVAKLKTPGKALYTAMLNPQGGVIDDLIVYRLDEGYRTVVNCATREKDLEWIQQQATDMAVTIKERDDLAMVAIQGPQSVEKATVALGEEHGPIANQVKPFQGLPSGDWFIARTGYTGEDGLEVMVPNNEVTDFWSRLLDNGVQPCGLGARDTLRLEAGMNLYGNDMDEQTHPLESGMAWTVAWEPEERDFMGRDALTKLREQGGYRKLIGLVLEQRGVMRAHQTLHASEDGPAIGEITSGTFSPTLNQSIAMARIDREVKDSCFVSMRGKMLPVKIVKLPFVRNGKKQFD

SEQ ID NO: 71165 - DNA, 1086 bp, Nitrococcus mobilis Nb-231
  CDS (1)..(1086): transl_table=11
atgggacagcatacgccactctacggaaaacattgcgaggcgggtgcccgtatcgttgatttcgcgggctgggacatgccgattcagtatggctcgcaaatcgaggagcaccgggcggtgcgccgcgacgccggtatgttcgacgtctctcacatggccatcgtcgagataaccggcgcgcgggcccaagagtgtctgcgccacctgctggccaacgacgtggcgaagctcaaagagccgggcaaagctctttacacttgtttgctgaacgagcagggcggcgtgctcgatgatctgatcgtctattatctcgctgaggggcgctaccgcaccgtagtcaacgcggccacgcgggataaggatctgagctggattaagatccaaggcgagcgatttcaggtccaggtcgaatatcgcgctgatctggcgatgctcgcggtgcaaggcccccaagcgcgtgagaaggtgctgcaagtcttgccctccgagctggccgccgccgcgcgggcactcgcgccgtttacggggcttgagcgtgagggggtcttcgtttcgcgcacgggctacactggcgaagatggttacgagatcatgttgccggccgccgcggcccccgccctctgggaggcgctgcgcgaacaaggggtgcagccgtgtgggctaggcgcgcgtgatacgctacgcctcgaggccggtatgaatctgtacggccaggacatggacgagacggttacgccattggagtctgggctagcctggacggtggcctgggagccggccgggcgggagtttatcggccgcgcagcgttgctggctcaacgcagcgccggagtgcagcgccagttggttggcctggtgctcgaggcgcgcggtgtgatccgtgcgcaccaagtggtccgtgacgatggggggctgaccggcaccgtgacgagcggcagtttcgccccgacgcttggcaaatccatcggccttgcccgggtgccggtggactttggcaggcgttgcgaagtgcagatccgcgatcattttctcccggcgcaagtgatcgatccgccgttcgtgcgccgcggccgggtactggtgtga

SEQ ID NO: 71166 - protein, 361 aa, Nitrococcus mobilis Nb-231
MGQHTPLYGKHCEAGARIVDFAGWDMPIQYGSQIEEHRAVRRDAGMFDVSHMAIVEITGARAQECLRHLLANDVAKLKEPGKALYTCLLNEQGGVLDDLIVYYLAEGRYRTVVNAATRDKDLSWIKIQGERFQVQVEYRADLAMLAVQGPQAREKVLQVLPSELAAAARALAPFTGLEREGVFVSRTGYTGEDGYEIMLPAAAAPALWEALREQGVQPCGLGARDTLRLEAGMNLYGQDMDETVTPLESGLAWTVAWEPAGREFIGRAALLAQRSAGVQRQLVGLVLEARGVIRAHQVVRDDGGLTGTVTSGSFAPTLGKSIGLARVPVDFGRRCEVQIRDHFLPAQVIDPPFVRRGRVLV

SEQ ID NO: 71167 - DNA, 1080 bp, Pseudoalteromonas tunicata D2
  CDS (1)..(1080): transl_table=11
atgacaaataaaacagttcttcacgctaagcacatcgaagctggcgctaaaatggtagattttcacggttgggaaatgccaatcaactacggttctcaaatcgaagagcacaacgcagtgcgcaccgatgcgggcatgtttgacgtatctcacatgacaatcgttgatgtgaaaggggccgatgccaaagcattcttacgcaaattagttgcaaacgatgttgctaaattaactgtaccgggtaaagcgctttacactggcatgttaaaccacgaaggtggtgtgattgacgacctaatcatttatttcttcagcgaaacagattaccgcttagttgtaaactcagccacacgcgaaaaagacttagcatggattgcacaaatctctgctgattttgccgttgaagtgactgagcgcccagagtttgcaatgattgcggtacaaggccctaatgcaaaagcaaaaacagccaccgtattaagtgcagcgcaaaacgctgcaattgaaggtatgaagccattttttggtgttcaagccgacaacttatttatagcaaccacgggttataccggtgaagcgggttatgaaattgttgttcataacgacgaagctgctgatttatggcaaaaattattagatgcgggtgttgcacctgctggtttaggcgcacgtgatacgctacgtttagaagcgggtatgaacctatatggtttagatatggatgaaactgtatcaccacttgctgctaatatggggtggaccattacatgggaaccagaagatcgtgatttcatcggccgcgctgctttagttaaacaaaaagcagaaggtgtcgataaattggttggtttagtctatgaagataaaggtgtattacgctcaggcagtaaagtcatcgtagaaggtggcgaaggtgtaatcacttctggtacattctcaccaaccttaggttacagtatcgcgcttgctcgcgtaccaaataccgttggtgagactgcgcaagtagaaatgcgtaaaaaattagttgacgtaaaagtggtggcaccatcatttgtacgttttggtaaaaaaataatttaa

SEQ ID NO: 71168 - protein, 359 aa, Pseudoalteromonas tunicata D2
MTNKTVLHAKHIEAGAKMVDFHGWEMPINYGSQIEEHNAVRTDAGMFDVSHMTIVDVKGADAKAFLRKLVANDVAKLTVPGKALYTGMLNHEGGVIDDLIIYFFSETDYRLVVNSATREKDLAWIAQISADFAVEVTERPEFAMIAVQGPNAKAKTATVLSAAQNAAIEGMKPFFGVQADNLFIATTGYTGEAGYEIVVHNDEAADLWQKLLDAGVAPAGLGARDTLRLEAGMNLYGLDMDETVSPLAANMGWTITWEPEDRDFIGRAALVKQKAEGVDKLVGLVYEDKGVLRSGSKVIVEGGEGVITSGTFSPTLGYSIALARVPNTVGETAQVEMRKKLVDVKVVAPSFVRFGKKII

SEQ ID NO: 71169 - DNA, 1119 bp, Oceanicola granulosus HTCC2516
  CDS (1)..(1119): transl_table=11
atgggcgaaccgcttcggacgccgctgcacgcgctgcatgtcgagcttggggcgcggatggtggtcttcgcgggctacgagatgccgctgcaatacccgatgggcgtgatgcaggagcacctccacacccgcgcgcgggccgggctgttcgacgtcagccacatggggcaggtcatcctgcgcgccgacagcaccgccgccgccgccgaggcgctcgagacgctggtgccggtcgacgtcgccggcctcgccgagggccgccagcgctacggcctcttcaccgacgacagcggcgggctgctcgacgacctgatgctggcgaaccggggcgatcacctgttcctcgtggtcaatgccgcgcgcaaggcccacgacctcgcgcacctgcgcacgctgcagggcgtcgaggtccacgagatcaccgaccgcgcgctgctggcgctgcagggcccggccgccgaggcggtgctggccgacctcgcgccggaggccgccgacatgcgcttcatggacgtcgcgacgctgacgctcgagggggccgagtgctgggtctcgcggtcgggctacaccggcgaggacggctacgagatctcggtgcccgccgaccgggccgaggcgctcgcccggcggctgctggcgcacggcgacgtcgcccccatcggcctcggcgcgcgcgacagcctgcggctcgaggccgggctttgcctctacggccacgacatcgacgagagcaccacgcccgccgaggcggcgctgggctgggcgatccagaaggtccgccgccgcgacggcgcccgcgccggcggctttcccggcgccgagacgatcctgcgcgagctcgccgacggccccgcccgccgccgggtcgggctgcgcccggagggccgcgcgccgatgcgcgagggcgtgccgctctacgcgggcgccgacgacgacacgccggtcgggcggatcacctcgggcggcttcggccccaccgttggcgggccggtcgcgatgggatatgtccccgccgaactggccgcgccgggcacggtcgtgcatggcgagctgcggggcaagcgcctgccgctcaccgtcaccgccctgcccttcaccccggccaacttcaaacgctga

SEQ ID NO: 71170 - protein, 372 aa, Oceanicola granulosus HTCC2516
MGEPLRTPLHALHVELGARMVVFAGYEMPLQYPMGVMQEHLHTRARAGLFDVSHMGQVILRADSTAAAAEALETLVPVDVAGLAEGRQRYGLFTDDSGGLLDDLMLANRGDHLFLVVNAARKAHDLAHLRTLQGVEVHEITDRALLALQGPAAEAVLADLAPEAADMRFMDVATLTLEGAECWVSRSGYTGEDGYEISVPADRAEALARRLLAHGDVAPIGLGARDSLRLEAGLCLYGHDIDESTTPAEAALGWAIQKVRRRDGARAGGFPGAETILRELADGPARRRVGLRPEGRAPMREGVPLYAGADDDTPVGRITSGGFGPTVGGPVAMGYVPAELAAPGTVVHGELRGKRLPLTVTALPFTPANFKR

SEQ ID NO: 71171 - DNA, 1107 bp, Neptuniibacter caesariensis
  CDS (1)..(1107): transl_table=11
atgggtaataaaaccgcactgtacgataagcaccaggaaatgggtgcgaagctggttgattttggcggctgggatatgccgatccattacggttcacaagttgatgagcaccataaggtccgccaggaagcgggcatgtttgacgtctcccatatgacggttgtagacgtaaccggtactgatgcaaaagaatatttaagatacttgctggccaacgatgttgctaaactgcagcagaaaggtaaagcaatgtatagcggcatgctcaatgaagatgccggggtcattgatgacctcatcgtttatctgatgactgagccaggtgttgctggtgaatggttccgagtagtggtgaactgtgcaacacgagagaaagatctgcgctggatgtcagatcaaacagcgagctttgatgacgttgcgctgactgagcagcctgatctggcgatggtagcggttcagggccctaaagcacttgaactggctaagcagtctgtatctgaatcccgtgcaacgctcattgatcagttaagcgtatttcagggcttagaatccgaaggctggtttattgccagaactggctatactggtgaggatggccttgagatcatgctgccggaagatgaggttgctgatttttggcaagcactcgctgatgcgggtgtaagcccgtgcggcctgggggcgcgagacacgcttcgtttggaagccggtatgaacctctacggtgctgatatggatgaaacggtatccccgttagccgctaacatggggtggaccattgcctgggaaccgcaggagcgtatttttatcggccgcgaagcgttacaggcgaaaaaagaggctgggatatctgagaaattagttggcctggtcatggaatcccgtggtgtgcttcgagcgcatcaaaaggtcgttgtgagtggtgttggcgaaggtgagattaccagtggtactttttcgcctacactaggatgtgcaattgcgatggcaagagtgccatctgcgactgcagatcaagccgaagtggatatcagaggaaaattagtccctgtgcgggttattcgtccctcttttgttcgtaatggcaaaaaagtttttgactga

SEQ ID NO: 71172 - protein, 368 aa, Neptuniibacter caesariensis
MGNKTALYDKHQEMGAKLVDFGGWDMPIHYGSQVDEHHKVRQEAGMFDVSHMTVVDVTGTDAKEYLRYLLANDVAKLQQKGKAMYSGMLNEDAGVIDDLIVYLMTEPGVAGEWFRVVVNCATREKDLRWMSDQTASFDDVALTEQPDLAMVAVQGPKALELAKQSVSESRATLIDQLSVFQGLESEGWFIARTGYTGEDGLEIMLPEDEVADFWQALADAGVSPCGLGARDTLRLEAGMNLYGADMDETVSPLAANMGWTIAWEPQERIFIGREALQAKKEAGISEKLVGLVMESRGVLRAHQKVVVSGVGEGEITSGTFSPTLGCAIAMARVPSATADQAEVDIRGKLVPVRVIRPSFVRNGKKVFD

SEQ ID NO: 71173 - DNA, 1074 bp, Halothermothrix orenii H 168
  CDS (1)..(1074): transl_table=11
atgaaaaaaacacctttgtttgagatccataaagagcttggagcccggttgattgagtttcacgggtggagtatgcctgtccagtataccagtattattgaagagcacaaagctgtcaggaaccagtgtggcttatttgatgtgtcccatatgggtgaaattttggtagaagggcccggggcattagaaagccttcagaaaattgttaccaacaatgtggcccggttaaaaaaaggccaggttctctatactcccatgtgtaaagatgatggtggtattattgatgaccttttagtttactgtctgggtcaagataagtatttaatggttgttaatgccagtaatatcgaaaaagattttaactgggtcagggataacagcaatcagagaacagaggttgttaatgaatctgacaattatgctcttttagcattgcagggcccgaattcaaagaaaatcctggaaaaagtttcttcagtaaaccttgatagcttgaaattttataattttacaacaggaaccctgaaaggagcagaagtcctgatttcacgaaccggatataccggggagctgggctatgagctttacctgtctccagataaagcggtagaggtgtggcaagccctgatggaagctggaagtgatctcggacttataccggctggattaggagccagggataccctcaggctggagaagggatactgtctttacggtaatgatatagatgaaaatacccacccccttgaggcaggactgggatggactgttaagtttgataaggctagctttattgggaaaagggccctgttaaagtataaggaagagggtttaagtagaaaactggttggttttaaacttaaaggaaggggaattccccgccatggttatcctataaaagataatggtgaccaaattggggtagttaccagtggtagtatgtcgcctactctcagtgaaggtatcggtatgggctatgtgagatatgataaagctactccgggagaatctataactattgttgtaagaaacagggcaataacaggggaagttgttaaattaccttttatataa

SEQ ID NO: 71174 - protein, 357 aa, Halothermothrix orenii H 168
MKKTPLFEIHKELGARLIEFHGWSMPVQYTSIIEEHKAVRNQCGLFDVSHMGEILVEGPGALESLQKIVTNNVARLKKGQVLYTPMCKDDGGIIDDLLVYCLGQDKYLMVVNASNIEKDFNWVRDNSNQRTEVVNESDNYALLALQGPNSKKILEKVSSVNLDSLKFYNFTTGTLKGAEVLISRTGYTGELGYELYLSPDKAVEVWQALMEAGSDLGLIPAGLGARDTLRLEKGYCLYGNDIDENTHPLEAGLGWTVKFDKASFIGKRALLKYKEEGLSRKLVGFKLKGRGIPRHGYPIKDNGDQIGVVTSGSMSPTLSEGIGMGYVRYDKATPGESITIVVRNRAITGEVVKLPFI

SEQ ID NO: 71175 - DNA, 1083 bp, Flavobacteria bacterium BBFL7
  CDS (1)..(1083): transl_table=11
atgaaaaatacagcactaacagcagtacacgaagcgctaagcgcaaaaatggttccttttgcaggttttaatatgcctgttcaatatgaaggagtgaatattgaacatcagaccgtacgtgataatgtaggtgtttttgatgtttctcatatgggtgaatttttaatttcaggaccagaggctttaaatttagttcaaaaagtatcgtctaatgatgcttcaaaacttaccgtaggtagagcacaatatgcttatttaccgaatgaaactggtggtattgtagatgatatgatcgtttataaaattaaagaagatcaatatttacttgttgttaatgcttccaatatcgataaagactgggatcatattacaaagcacaacacgatgagtgcagatatgagaaacctgtcagatgattactctttactggctattcaaggtcctaaagctgttgaagctatgcaatctttaacacctgtagatttaagtgctataaaattttatcattttgaagttgcagaatttgcaggtatagagaatgtaataattagtgcaacaggttatacaggttcaggaggttttgagatttactgtaaaaatagtgaggtagaacaaatctggaataaagtatttgaggctggagcagactttggaattaaacctataggtcttgctgctcgcgatacactgcgactagaaatgggttattgtttatatggtaacgatatagatgatacaacatcaccatacgaggctggactaggatgggttactaaattcactaaagaatttgtgaatcacgaacaattactagagcacaaagaaaaaggtgtggatagaaaattaatagcctttgagatggatgagcgtgctataccacgtggtggctatgagattaaagacagtagtcaaaaagatctaggaatcgttactagtggaacgatgtcgccatctatgggcataggaataggtatgggatatgtaccacctatttttgcaactcctggaagtaaaattcacatccagatacgtaagaagttagtacctgcaaccgttattaagttaccattctataaaaagtaa

SEQ ID NO: 71176 - protein, 360 aa, Flavobacteria bacterium BBFL7
MKNTALTAVHEALSAKMVPFAGFNMPVQYEGVNIEHQTVRDNVGVFDVSHMGEFLISGPEALNLVQKVSSNDASKLTVGRAQYAYLPNETGGIVDDMIVYKIKEDQYLLVVNASNIDKDWDHITKHNTMSADMRNLSDDYSLLAIQGPKAVEAMQSLTPVDLSAIKFYHFEVAEFAGIENVIISATGYTGSGGFEIYCKNSEVEQIWNKVFEAGADFGIKPIGLAARDTLRLEMGYCLYGNDIDDTTSPYEAGLGWVTKFTKEFVNHEQLLEHKEKGVDRKLIAFEMDERAIPRGGYEIKDSSQKDLGIVTSGTMSPSMGIGIGMGYVPPIFATPGSKIHIQIRKKLVPATVIKLPFYKK

SEQ ID NO: 71177 - DNA, 1083 bp, Psychroflexus torquis ATCC 700755
  CDS (1)..(1083): transl_table=11
atgaaatcaactgcacttaccgaaattcataaacaacttggagctaaaatagtcccttttgcaggttatgatatgcccgtatcttataccggagtaaatgaagaacatgaaaccgtaaggcaatctcttggtgtttttgatgtctcccatatgggtgaattttttattgaaggaaaagaagctttacagcttattcaaaaaataaccagtaatgatgcctccatacttatcgatggtcaagcacagtacacgtgcatgccaaacgagacaggaggaattatagacgatctcatcatctataagtttcacaacgaaaaatttatgatggtagtaaatgcttccaacatagagaaagattggaagtgggtaaaccaacacaacacatttgatgctattcctacaaatttatctgatgagtattctttgttagctatacaaggccctaaagctttggaagccatgcaaagcatatcacccctagacctatctgctatcaaattttatcattttgccgtaggtgagtttgcgggagctcaagatgtgattatttcggccacgggatatactggaagcggtggattcgaaatttattttaaaaataaagatgctgagttgatttggacttcagtatttgccgctggaaaagactttggaattaagcctattggattagccgctcgagatacgttgcgtttagaaatgggcatgtgtctatatggtaacgatatcgatgacacaacctctccaattgaagctaagttaggttggattactaaattcaccaaagactttatcaacgctgaggctttgaaagcagaaaaggaaaatggtccttgcagaaagcttgttgcttttgaactacaggaaaaaggtataccaagacatggttacgctattgtagacgaagaaggccatgacataggtcatgtcacctcaggtacaatgtcccctagtcttaaaaaagctatcggtatgggttatgttaaaacagaacactctaaatttggaacttctatttgtatccaaataagaaagaaaacaataaaagcgactattgtaaagcccccattttacaaggcttaa

SEQ ID NO: 71178 - protein, 360 aa, Psychroflexus torquis ATCC 700755
MKSTALTEIHKQLGAKIVPFAGYDMPVSYTGVNEEHETVRQSLGVFDVSHMGEFFIEGKEALQLIQKITSNDASILIDGQAQYTCMPNETGGIIDDLIIYKFHNEKFMMVVNASNIEKDWKWVNQHNTFDAIPTNLSDEYSLLAIQGPKALEAMQSISPLDLSAIKFYHFAVGEFAGAQDVIISATGYTGSGGFEIYFKNKDAELIWTSVFAAGKDFGIKPIGLAARDTLRLEMGMCLYGNDIDDTTSPIEAKLGWITKFTKDFINAEALKAEKENGPCRKLVAFELQEKGIPRHGYAIVDEEGHDIGHVTSGTMSPSLKKAIGMGYVKTEHSKFGTSICIQIRKKTIKATIVKPPFYKA

SEQ ID NO: 71179 - DNA, 1098 bp, Oceanobacter sp. RED65
  CDS (1)..(1098): transl_table=11
atgggccacaaaacgccgttatatcaagcgcacatcgatgctcaaggcaaaatcgtcgactttggtggctgggatatgccaatccactatggttcacagatccaagagcataacgctgttcgcgaagatgcaggcatgttcgacgtgagtcacatgacagtggttgacatcacaggcagtgatgcgactgcttatttgcaatatctactggcgaacgatgtagccaaactcaaaaccgaaggtaaggcgctatatacaggaatgctcaatgagcaaggcggtgtcattgatgacctcatcgtctataaggctgagcatcttggtggttaccgcttggtagtgaactgcgctacacgtgaaaaagatttggcttggatggaaaaacacagccataaattcaatgttgccctatcagagcaaccagaattagccatgatcgctgtacaaggtcccaatgcgatcgagaaagcaaagcaggcagcttcagaaaaagtcgccgctgtaattgaacagttggcagtattccaaggcctgccttgtggtgattggttcatcggccgcacgggttacaccggtgaagatggtcttgaaatcatggttcctgccgacgaagcagtagcgttctggaatgcgcttttagaagcagacgtgaagcctgcaggcttgggcgcccgcgataccttgcgcttagaagcaggcatgaatctatatggtaatgacatggacgaaactgtttcgccttggcaagccgctatgggttggactctagccttaaaagacgaccgcgaatttatcggtaaaaaggcattgctggccgaaaaagaagccggtatcgagtacaagcttgttggtttagtactggaaacccgtggcgtaatgcgtagccatcaaaaagttattttcacaggtagcgacaagactggcgaaatcacctctggcacgttcagcccgacactgcagcagtctattgcgttagctcgagttccgcgcgatacaggcacagagtgcgcggttgatatgcgaggcaaagcggtgcctgtacgcatggttagcgtaccatttgtgcgcaatggcgaaaaagtttacaaacccgtttaa

SEQ ID NO: 71180 - protein, 365 aa, Oceanobacter sp. RED65
MGHKTPLYQAHIDAQGKIVDFGGWDMPIHYGSQIQEHNAVREDAGMFDVSHMTVVDITGSDATAYLQYLLANDVAKLKTEGKALYTGMLNEQGGVIDDLIVYKAEHLGGYRLVVNCATREKDLAWMEKHSHKFNVALSEQPELAMIAVQGPNAIEKAKQAASEKVAAVIEQLAVFQGLPCGDWFIGRTGYTGEDGLEIMVPADEAVAFWNALLEADVKPAGLGARDTLRLEAGMNLYGNDMDETVSPWQAAMGWTLALKDDREFIGKKALLAEKEAGIEYKLVGLVLETRGVMRSHQKVIFTGSDKTGEITSGTFSPTLQQSIALARVPRDTGTECAVDMRGKAVPVRMVSVPFVRNGEKVYKPV

SEQ ID NO: 71181 - DNA, 1098 bp, Desulfitobacterium hafniense DCB-2
  CDS (1)..(1098): transl_table=11
gtgacggaactaaaaagaacaccactgtatgagcagcaccgccgggccggtgcgaagctcattgatttcggcggctgggaaatgccggttcaatacgccggagtcattgaggagcacaaggccgtgcgcagcaaagcggggctttttgatgtctctcatatgggtgaggtggagttgaagggaaaggatagccttgcttttttgcagtacctattgaccaatgatgtgtcgcgaattcaggataaccagattcagtattcccccatgtgcacctctgctgggggtgtggtggatgatctgctggtctatcgttatagccgggagcattttttgctggtggtcaatgcctccaatacggataaggattttgcctggatgcaggctcaagctgagggcttcgaaataagtctggaaaatcgctccggggactttgcccaattggctttgcaaggcccttgggcggagaaaatcctgcaaaagctgacaagtatggatttagcacagatcaactactattggtttaagcatggggaagtggacggagtcctttgcctgatttccaggacaggttataccggggaagacggctttgaaatttacctgcctcccgagcatgctccccggatgtgggaaagaattctcgaggttggagggtcggagggagttcagcccattggtctgggcgcccgggatactctccgttttgaagccaggctgcctttatacggcaatgaactggggccggatatcacacctttggaggccgggctagggttttttgtcaagctggagaaggataactttatcggtaaagaggcgttatcagcccagaaggaaaagggagtgccgagaaagttggtaggcctggaaatgatcgaacggggcatagcccgctcccattatccccttcagaaagagggtaaagaaatcggctttattacttcaggttctttttcacctactttaaacaaaaacattgcccttggcttgattcccccggagtatgctcaaataggggaaaccttggatgtgatcattcgtgggaaagccgttaaagcccggattattccttcactgttctacaaacggcaggggtaa

SEQ ID NO: 71182 - protein, 365 aa, Desulfitobacterium hafniense DCB-2
MTELKRTPLYEQHRRAGAKLIDFGGWEMPVQYAGVIEEHKAVRSKAGLFDVSHMGEVELKGKDSLAFLQYLLTNDVSRIQDNQIQYSPMCTSAGGVVDDLLVYRYSREHFLLVVNASNTDKDFAWMQAQAEGFEISLENRSGDFAQLALQGPWAEKILQKLTSMDLAQINYYWFKHGEVDGVLCLISRTGYTGEDGFEIYLPPEHAPRMWERILEVGGSEGVQPIGLGARDTLRFEARLPLYGNELGPDITPLEAGLGFFVKLEKDNFIGKEALSAQKEKGVPRKLVGLEMIERGIARSHYPLQKEGKEIGFITSGSFSPTLNKNIALGLIPPEYAQIGETLDVIIRGKAVKARIIPSLFYKRQG

SEQ ID NO: 71183 - DNA, 1080 bp, Rhodobacterales bacterium HTCC2255
  CDS (1)..(1080): transl_table=11
atgacaaataaaacggttttacatgcaaaacacatcgaagcgggcgctaagatggtggatttctttggctgggatatgcccattaactatggttcacaaatcgaagagcaccatgctgtacgtcgtgatgcaggcatgtttgatgtgtcacatatgacgattgtcgatgtgaaaggcgttcaagcccaagcgtatttacgttatttgttagccaacgatgtcgctaagttacaagacaaaggcaaagccctttactctggcatgatcaatgaagccggtggtgtggtcgatgatttgattgtctacttttttgatgaaactaactaccgcttggtggtgaactctgccactaaagaaaaagatttaaactggttaaataaacaagcccaagggtttgatgtgacggtcactgaacgtgatgaatttgcgatgattgctgtacaagggcctaatgccaaagcgcaagcgggtaagttattttctgctgcccaacaagaagcagttgcgggtatgaagccgttttatggcgtacaagcggaagacttattcatcgcgaccacgggttataccggtgaaactggctatgaaattatggtccctaatgcgcaagcagcagatttttggcaacaactacttgatttaggcgtggccccttgcggactcggtgcgcgtgataccttgcgtttagaagcgggcatgaatttatatggccaagacatggacgaaacgatttcaccacttgccgcaaacatgggctggacgatttcatgggagcctgagaatcgcaattttgtgggtcgtgatgtgttaacacagcaacgtgctgccggtacagataagttagttggtttagtcatgaaagaaaaaggtgtgttgcgcgctggtcaaaaagtcaccgttgccggtggagaaggcgtgatcacatctggtacattttcgccaacattaggccattctgtggcacttgcacgggtcagtaatacggtgactgatactgccgaagttgaaatgcgcaaaaagtgggttacagtagaagtggttaagcccagttttgtacgcaacggcaaaagcgttttataa

SEQ ID NO: 71184 - protein, 359 aa, Rhodobacterales bacterium HTCC2255
MTNKTVLHAKHIEAGAKMVDFFGWDMPINYGSQIEEHHAVRRDAGMFDVSHMTIVDVKGVQAQAYLRYLLANDVAKLQDKGKALYSGMINEAGGVVDDLIVYFFDETNYRLVVNSATKEKDLNWLNKQAQGFDVTVTERDEFAMIAVQGPNAKAQAGKLFSAAQQEAVAGMKPFYGVQAEDLFIATTGYTGETGYEIMVPNAQAADFWQQLLDLGVAPCGLGARDTLRLEAGMNLYGQDMDETISPLAANMGWTISWEPENRNFVGRDVLTQQRAAGTDKLVGLVMKEKGVLRAGQKVTVAGGEGVITSGTFSPTLGHSVALARVSNTVTDTAEVEMRKKWVTVEVVKPSFVRNGKSVL

SEQ ID NO: 71185 - DNA, 1092 bp, Stigmatella aurantiaca DW4/3-1
  CDS (1)..(1092): transl_table=11
  misc_feature (602)..(602): s is g or c
atggccttgcgcacgcccctcaacgaggcccaccgcaagctgggcgctcggatggtcgacttcgcgggttgggacatgcccgtccagtattcctccatcatcgccgagcacgaggcggtccgccgggcggtggggctcttcgacgtctcgcacatgggcgagatcgaattcacgggcccgggtgccctggagacggccaaccggctcatctccaacgatctggtccgctgcaaggacgggcaggccgtctatgcggggctgctgaccgagcaggggacgttcgtggacgatgtcgtcgcctaccggttctcgcccgagcgcatttttatttgcgtcaactcgagcaaccgcgagaaggacttcgcctggatgcgcgagcatgcccagggggtgaagcccgtggaccggagcagcgacttcgcgcagatcgccgtgcaggggcccaaggccgaggccctggtgcagcgcctgacgaagacggacgtctccaaggcccaggtggacacctaccgcttcaccgagggtgaggtcgccggggtgaagtgcatcatctcccggaccggatacaccggcgaggacggcttcgagctgtactgcgcctsggaccgggccgaagcgctgtggaacgcgctcctccaggaggggcaggcggacggggtgatggcgtgcggcctgggagcccgcgacagcctgcgcacggagatgaagtacgccctctatggcaacgacatcgatgaggcgcacaccgccctggaggccggtctgggctggatcgtcaagctggacaagcccgggggcttcatcgggaaacaggccctggagaagcagaaggccgagggcgtgcaacgcaagctggtgggcttcgtgctgaccggcagcggcattccccgtcacggttatcccatcctcaaggacgggcaacgggtgggagaggtgaccagcggcaccatgggcccttccgtcaagaagcccatcgggatgggctatgtccccgcggcgctggcttccgagggggccaccttcgatgtggagatccgcggccgtgccgtggcggcccaggtggtcaagacgcctttctggaagaagccctaa

SEQ ID NO: 71186 - protein, 363 aa, Stigmatella aurantiaca DW4/3-1
  misc_feature (201)..(201): The Xaa at location 201 stands for Ser, or Trp.
MALRTPLNEAHRKLGARMVDFAGWDMPVQYSSIIAEHEAVRRAVGLFDVSHMGEIEFTGPGALETANRLISNDLVRCKDGQAVYAGLLTEQGTFVDDVVAYRFSPERIFICVNSSNREKDFAWMREHAQGVKPVDRSSDFAQIAVQGPKAEALVQRLTKTDVSKAQVDTYRFTEGEVAGVKCIISRTGYTGEDGFELYCAXDRAEALWNALLQEGQADGVMACGLGARDSLRTEMKYALYGNDIDEAHTALEAGLGWIVKLDKPGGFIGKQALEKQKAEGVQRKLVGFVLTGSGIPRHGYPILKDGQRVGEVTSGTMGPSVKKPIGMGYVPAALASEGATFDVEIRGRAVAAQVVKTPFWKKP

SEQ ID NO: 71187 - DNA, 1104 bp, Chloroflexus aggregans DSM 9485
  CDS (1)..(1104): transl_table=11
atgctgaaacgaactcctctctacaacgcgcacctcgcaatgggcgcacgcatggtcgaattcggcggttgggagatgccggtgcagtaccgcgggatcatcgacgaacaccatgcggtgcggaatcgagccgggttgttcgatattagtcacatggggcggtttatgatccgcggcccgcaggccgaagcgttcctgcaacggatggtcacgtgcgatgtgagcactattccgctcggtcatgccggttatggtctcctgtgccgacccgatggtgggattgtggatgacatcttcctctaccatttacctgatgagtttatgatggtagtcaatgctgccaatcgtgctaaagattgggattggttgcagcagcataccaccggctttgaggtagagatcgaagatcgctctgagcggtgggcgatgctggcacttcaagggccgcaggcagagcatctgttggccggtgctgaaaattcaacgacggcggacatcggttcgttaccgttccacggcgtggcaatgacgaccatcttcgggcacaatgcgttaatcgctcgcaccggctacaccggcgaagatggttttgagatatttttcgaggcacaacacgccgaacgtttctggtacggtctgttggcgctcggtggcaatgccgtgcaagcctgtggcctcggtgctcgcgatagcttgcgctttgaagcttgtcttgctctgtacggtcatgaaattgacgagacgattaacccctacgaggcgcggttgggttgggttgtgaaattgaacaagggcgattttatcgggcgtgaggcgttgcaggcgattaaagcggccggtatcagtcgccgcctggttgggtttgagatggttgaaaaggggattgctcgcagtggctattcggtgcagcgggttagtggggaaacggtgggatttgtgaccagtggtatgccctcacccacccttggccgaccgttcgggatggcgtatgtgccgaccgacctgagtagcgaggggagtgaattcaatgttgtgatccgcgaacgtcccgtgcgggcgcgtgtggtaaagatgccattctataagccgcgctacaagcgctag

SEQ ID NO: 71188 - protein, 367 aa, Chloroflexus aggregans DSM 9485
MLKRTPLYNAHLAMGARMVEFGGWEMPVQYRGIIDEHHAVRNRAGLFDISHMGRFMIRGPQAEAFLQRMVTCDVSTIPLGHAGYGLLCRPDGGIVDDIFLYHLPDEFMMVVNAANRAKDWDWLQQHTTGFEVEIEDRSERWAMLALQGPQAEHLLAGAENSTTADIGSLPFHGVAMTTIFGHNALIARTGYTGEDGFEIFFEAQHAERFWYGLLALGGNAVQACGLGARDSLRFEACLALYGHEIDETINPYEARLGWVVKLNKGDFIGREALQAIKAAGISRRLVGFEMVEKGIARSGYSVQRVSGETVGFVTSGMPSPTLGRPFGMAYVPTDLSSEGSEFNVVIRERPVRARVVKMPFYKPRYKR

SEQ ID NO: 71189 - DNA, 1083 bp, Alteromonadales bacterium TW-7
  CDS (1)..(1083): transl_table=11
atgacttctaaaactgtactccatgctaagcacctagaagcgggcgcaaaaatggttgattttcatggctgggaaatgccaatcaactacggctcacaaatagaagaacataatgcagtgcgtaacgatgcaggcatgtttgacgtatcacacatgaccattgttgatattgaaggcgaccaagctaaagcatttttacgaaaacttgtagcaaacgacgtggctaaattaaccgtaccaggtaaagcactttacaccggcatgcttaacgagcaaggcggcgtaattgacgaccttattatttactttttcagcgaaacgttttaccgcttagtggttaactcggctacgcgcgaaaaagacttagcgcacttagctaatgtatcgagcgattttgccgttacagtgactgagcgtccagagtttgcaatgattgcagtgcaaggccctaacgcacgcgaaaaaacaggcacgcttttaaatgcagagcaacaagctgcagttgaaggcatgaagccgttttttggtgttcaagtgggtgatttatttattgctacaacgggttatactggcgaagacggttacgaaattgtagtaccaaacgaccaagcagccgatttatggcaacaactgctagacgcaggtgtagcgccagctggtttaggtgcacgtgacacgctacgtttagaagcaggtatgaacctttacggcctagatatggacgaaagcgtatcgccacttgcagctaacatggcatggaccattgcatgggaaccagaagatcgtgactttattggccgtgacgtactggttaaacaacgcgctgaaaaaagcaccgacaagcttgttggtttagtacttgaagaaaaaggcgtattgcgtagcggttcaaaagtaattgttgacggtggagaaggggttattacctcaggtactttttcacctacacttggttttagtgtagcccttgcacgtgtaccacgttcaacaggcgacactgctcaagtagaaatgcgcaaaaaattagttaacgttaaagtagtgaagcctagctttgtacgtaacggtaaatcaataatttaa

SEQ ID NO: 71190 - protein, 360 aa, Alteromonadales bacterium TW-7
MTSKTVLHAKHLEAGAKMVDFHGWEMPINYGSQIEEHNAVRNDAGMFDVSHMTIVDIEGDQAKAFLRKLVANDVAKLTVPGKALYTGMLNEQGGVIDDLIIYFFSETFYRLVVNSATREKDLAHLANVSSDFAVTVTERPEFAMIAVQGPNAREKTGTLLNAEQQAAVEGMKPFFGVQVGDLFIATTGYTGEDGYEIVVPNDQAADLWQQLLDAGVAPAGLGARDTLRLEAGMNLYGLDMDESVSPLAANMAWTIAWEPEDRDFIGRDVLVKQRAEKSTDKLVGLVLEEKGVLRSGSKVIVDGGEGVITSGTFSPTLGFSVALARVPRSTGDTAQVEMRKKLVNVKVVKPSFVRNGKSII

SEQ ID NO: 71191 - DNA, 1176 bp, Lyngbya sp. PCC 8106
  CDS (1)..(1176): transl_table=11
gtggctaagtcaactgaagttaaacacacagaaaccgaacacaatgagacacaaccgctttctcgtactcctttgtacgatgtcgctgtagcactcaacgctcgcatggttccgtttgccggatgggagatgcccgtgcaatactcaggaattaccaaagagcatgaggcggtgcgttcacaagcgggaatgtttgatatttcccacatgggtaagtttattttgatcggagagaacttaattgaaacgctacaaccgttggttccttctgatttgagtcgtttaaaacccaatcaagctcaatataccgttttattaaccgagcagggcggtatcctagacgatattattttttattatcagggcgaggatgcagacacggggactcaacgaggggtgatgattgtcaatgcggcgacttgttctcgcgataaagcttggatctcagcccagttagaaccaaccgatattaccctcgaagatttatcaaaatatcaagcgttaatggccgttcaggggccacaaactctcgaaaagttacagcctctcgtgactgaaaacttagattctattccgtttttcggacatctcaacgctacagttttaggacatcccgccttgatcgccagaactggatacaccggagaggatggctttgaaattatggttgctcccgaggtcgcagtacaattgtggcagcgtttgttagaagctggagttaccccttgtgggttgggggctagagatactctgcgtttagaagcggcgatggcgttgtatggtcaagatcttgataccacaacaacccctttggaagccggattaagttggttaattcactgggatagcaagggtgattttattggtcgttctatcctcgaaagtcagaaaacagaaggagtatcccggcgactggtggggttggaaatgcaaggtcgtcatatcgcccgtcatgggtatccggtgaagctcaatggagaaatcatcggggaaattaccagtgggactttatctccgactcttggaaaagcgatcgcgctcgcctatgttcccacagattttgctcgaattggtcagtctcttgatgtggaaattcgcgggaaaacttattctgcggaagttgttaagcgtcctttttatcgttcaacctctcgtctgtcaaaaataaaacggtga

SEQ ID NO: 71192 - protein, 391 aa, Lyngbya sp. PCC 8106
MAKSTEVKHTETEHNETQPLSRTPLYDVAVALNARMVPFAGWEMPVQYSGITKEHEAVRSQAGMFDISHMGKFILIGENLIETLQPLVPSDLSRLKPNQAQYTVLLTEQGGILDDIIFYYQGEDADTGTQRGVMIVNAATCSRDKAWISAQLEPTDITLEDLSKYQALMAVQGPQTLEKLQPLVTENLDSIPFFGHLNATVLGHPALIARTGYTGEDGFEIMVAPEVAVQLWQRLLEAGVTPCGLGARDTLRLEAAMALYGQDLDTTTTPLEAGLSWLIHWDSKGDFIGRSILESQKTEGVSRRLVGLEMQGRHIARHGYPVKLNGEIIGEITSGTLSPTLGKAIALAYVPTDFARIGQSLDVEIRGKTYSAEVVKRPFYRSTSRLSKIKR

SEQ ID NO: 71193 - DNA, 1137 bp, Nodularia spumigena CCY 9414
  CDS (1)..(1137): transl_table=11
gtggctaatcaacaagatatcacccaagccctagcgcgaacccccctatatcaaaggagtgcagaactcaaagcccgctttaccagctttggtggttgggaaatgcctgtacaatttactggtattagcaaagaacacgaagccgtgagaaacgctgctggaatgttcgatatttcccacatgggcaaatttaccctccaagggaaacacctcattgaccaacttcagcgtttagtaccttcagacttgaatcgattgcaaccaggtcaagcgcaatacaccgtattgttaaatccccaagggggaatcattgacgacatcattgtttattatcagggtgaaaataccactggtttacaacaggctgtaattgttgtcaatgcctcaaccacagctaaagataaagcatggttattgcaacagcttgatttaaatcaggtggaatttcaagacctgtcaccagaaaaagtgttaattgctgtgcaagggacaaaggcagttaaatatctccagcccttagttaaagaagatttagaaccaatcaaagcctttggacacctccaagcgtcaatactgggtaaacctgcctttatcgctcgcacaggttacaccggcgaagatggttttgaactcatgctagatccagatgtgggagtagaattgtgggaaaaactccatcaagctggcgttaccccctgcggactaggtgctagagataccctgcgactcgaagcagcaatggcgctttatggacaagatatcgacgataccaccacccccttagaagcaggtttgagttgggtagttcacctcgataccaaaggtgattttatcgggcgagaagttttagcacagcaaaaagccgatggagtgcagaagcgattaatcggtttacaaatgtcagggcgtaatatcgcccgtcatggctacccaattttatcagccgatgaagtcgtgggagaaattaccagtggtacattatcgcctacattgggttatcccatagccttagcctacgttcccacgacccttgcaaaggtgggtgaacagctatctgtagaaattcgtggcaaagtttacccaggtgttgtagtaaaacgtcccttttatcgctccaaaaatcgtgtcactagctga

SEQ ID NO: 71194 - protein, 378 aa, Nodularia spumigena CCY 9414
MANQQDITQALARTPLYQRSAELKARFTSFGGWEMPVQFTGISKEHEAVRNAAGMFDISHMGKFTLQGKHLIDQLQRLVPSDLNRLQPGQAQYTVLLNPQGGIIDDIIVYYQGENTTGLQQAVIVVNASTTAKDKAWLLQQLDLNQVEFQDLSPEKVLIAVQGTKAVKYLQPLVKEDLEPIKAFGHLQASILGKPAFIARTGYTGEDGFELMLDPDVGVELWEKLHQAGVTPCGLGARDTLRLEAAMALYGQDIDDTTTPLEAGLSWVVHLDTKGDFIGREVLAQQKADGVQKRLIGLQMSGRNIARHGYPILSADEVVGEITSGTLSPTLGYPIALAYVPTTLAKVGEQLSVEIRGKVYPGVVVKRPFYRSKNRVTS

SEQ ID NO: 71195 - DNA, 1098 bp, Thermosinus carboxydivorans Nor1
  CDS (1)..(1098): transl_table=11
atgagcgacaaaaagacgcccctctacgacatccacgtggctagcggcgccaaaatcatcgaatttggcggctggctcatgccggtgcagtataccggcattattgaagagcaccgggccgtgcggcaggcggcaggactcttcgacgtatcccacatgggagaagtgtcggtcagcgggccggacgccaccgactttgtgaataggctggtgaccaatgatgcttcccgtctcgccgtcaaccaggtgatgtacactcccatgtgctatgaccacggcggggtggttgatgatcttttggtctatcgccttggcgaacaagaatatctgttggtgattaacgccgccaatattgacaaagattacgcctggatggtgcagcacgcggcgaactatgacgttaccgtcaaaaatatttccgatgttaccgccgaactggcgctgcagggcccgcgggccgaagccatcctgcagcggttgaccgatgaagatttgagcaccattaaatattattggctgcgccggcatgtccgcgttgacggaatagactgtttgatttcccgaacgggttatacgggagaagacggctttgaaatttactgcgcgccggaggaagctggcagactatggaagcgcctgatggaggtcggcaagccgctgggactggtgccggccggattaggcgcccgtgatacgctgcggtttgaagccggcttgccgctttacggtcacgaactttccgaaagcatcacaccgctcgaagccggtcttggcgtctttgtcaagtttgacaaacaaagctttatcggctatgaggcgctactggcccagaaaaacgccggcatccggcgcaaaattgtcgggatcgagatggtagggcggggtattgcccgcgccggctatacctgtcatgccgccggccgggtcatcggcacggtgacaagcggcacctacgcccccacccttgataaaaacctggccttagccattttggaaacggagttttcggcgccggggacggaagtggcggtggaaatccgcggcaaactggtagaagccaaggttgttaccaaaccattttataaaaggaggaaataa

SEQ ID NO: 71196 - protein, 365 aa, Thermosinus carboxydivorans Nor1
MSDKKTPLYDIHVASGAKIIEFGGWLMPVQYTGIIEEHRAVRQAAGLFDVSHMGEVSVSGPDATDFVNRLVTNDASRLAVNQVMYTPMCYDHGGVVDDLLVYRLGEQEYLLVINAANIDKDYAWMVQHAANYDVTVKNISDVTAELALQGPRAEAILQRLTDEDLSTIKYYWLRRHVRVDGIDCLISRTGYTGEDGFEIYCAPEEAGRLWKRLMEVGKPLGLVPAGLGARDTLRFEAGLPLYGHELSESITPLEAGLGVFVKFDKQSFIGYEALLAQKNAGIRRKIVGIEMVGRGIARAGYTCHAAGRVIGTVTSGTYAPTLDKNLALAILETEFSAPGTEVAVEIRGKLVEAKVVTKPFYKRRK

SEQ ID NO: 71197 - DNA, 1098 bp, Microscilla marina ATCC 23134
  CDS (1)..(1098): transl_table=11
atggatttaaaaaccaccgatttaaaacaaactgccctcaacgacattcacgtagctctagggggtaaaatggtagagtttgctggctactctatgcccgttcgttatacttcagacaaagaagaacactttgcggtgcgtgaaaacgtaggggtgtttgatgtatcgcacatgggcgaatttttgctcaaaggcgaaggagcgctagaccttatccaaaaagtatcgtcaaacgatgcttctaagctttaccctggcagggtgcaatactcttgcctacccaacgaccagggcggtattgtagatgatttggtgatttatatgattgccgaaaatgaatattacctggtagtaaacgcctctaatgtacaaaaagactgggattggataagtaaacacaatacttatggggtagagatgaccaacttgtctgaccaaacctctatgcttgctatacaaggccctaaagccactcaagccctacagtcgcttaccgacgtaaaactagacgatatgaagttttacacttttgagaaagctacttttgctggagtgcccgacgttattatctcggcaactggctacactggcttgggcggagtagaactatatgttcctaatgagcacgccgaaactatttggaacaaaatatttgaagcaggcaaagactaccacattcaggccattggcttgggagcacgcgatactttgcgtcttgaaaagggatattgtttgtatggcaacgacatagatgatactacctcgccactagaggctggtttgggttgggtcactaagtttaccaaagattttgtaaactctgaagcgcttaaaaaacagaaagaagaaggtgtcaaacgcaagttggtagcttttaagatggtagataagggcattccccgccacggttacgaattgctggacaccgatggcaaaaacataggcaaggtaacttctggctctatgtctccctcgctcaatattggcattggcttgggttatgtaaccaaagaactaagcaaaccaggcaatgaaataatggtgcaggtacgcaacaaacaacttaaggctgaggtgattaaattgccattcatttag

SEQ ID NO: 71198 - protein, 365 aa, Microscilla marina ATCC 23134
MDLKTTDLKQTALNDIHVALGGKMVEFAGYSMPVRYTSDKEEHFAVRENVGVFDVSHMGEFLLKGEGALDLIQKVSSNDASKLYPGRVQYSCLPNDQGGIVDDLVIYMIAENEYYLVVNASNVQKDWDWISKHNTYGVEMTNLSDQTSMLAIQGPKATQALQSLTDVKLDDMKFYTFEKATFAGVPDVIISATGYTGLGGVELYVPNEHAETIWNKIFEAGKDYHIQAIGLGARDTLRLEKGYCLYGNDIDDTTSPLEAGLGWVTKFTKDFVNSEALKKQKEEGVKRKLVAFKMVDKGIPRHGYELLDTDGKNIGKVTSGSMSPSLNIGIGLGYVTKELSKPGNEIMVQVRNKQLKAEVIKLPFI

SEQ ID NO: 71199 - DNA, 1083 bp, Flavobacteria bacterium BAL38
  CDS (1)..(1083): transl_table=11
atgaaaaatacagcgttaacgcacattcacgaaagtttaggggctaaaatggttccgtttgcaggctacaatatgcctgtgcaatatgaaggagtaaatgcagaacacgaaatcgttagaaatggcgttggtgtttttgatgtttcgcacatgggagaatttttcttaaaaggcgaaaatgctttggctttaattcagaaagtaacttcaaatgatgcgtctaaattagttgacggaaaagctcaatattcttgtttaccaaataacgacggcggaattgttgacgatttaatcgtttataaaattgctgacaatcattatatgttggtagtgaatgcttctaatattgaaaaagattggaattggatttcatctcacaatgatttaggtgtagatatgcaaaacctttctgaaggctattcgttattagcaattcaaggaccaaaagctgcagcagctatgcaatctttaacttctatcaatttaacgaatatgggatattacacattccaaattggtgaatttgcaggtaaaagcgatgtaattgtttcggctacaggttatacaggttctggaggatttgaaatttactttaaaaacgaagatgcagaatatatttggaacaaagtttttgaagctggagccgctttcggaatcaagccaattggattagcagctcgtgatactttacgtttagaaatgggattctgtttatacggaaacgacatcaacgatacgacttcgcctttagaagctggtttaggatggattactaaatttgataaagagtttacgaattctgaaaacttgaaaaaacaaaaagaagcgggtgttgctcgtaaattagttggttttgaaatggtagaaagaggaattcctcgtcacgattatgaaattgcggatgctaacggaaatattgtaggaatagtaacttctggaacgcaatcaccttctatgggaattgctatcgggatgggatatgttccaacggctttagctacgccagattctgaaatttatattagaattagaaacaaagatattaaagcaaaagtggttaaaatgccattttacaagaaatag

SEQ ID NO: 71200 - protein, 360 aa, Flavobacteria bacterium BAL38
MKNTALTHIHESLGAKMVPFAGYNMPVQYEGVNAEHEIVRNGVGVFDVSHMGEFFLKGENALALIQKVTSNDASKLVDGKAQYSCLPNNDGGIVDDLIVYKIADNHYMLVVNASNIEKDWNWISSHNDLGVDMQNLSEGYSLLAIQGPKAAAAMQSLTSINLTNMGYYTFQIGEFAGKSDVIVSATGYTGSGGFEIYFKNEDAEYIWNKVFEAGAAFGIKPIGLAARDTLRLEMGFCLYGNDINDTTSPLEAGLGWITKFDKEFTNSENLKKQKEAGVARKLVGFEMVERGIPRHDYEIADANGNIVGIVTSGTQSPSMGIAIGMGYVPTALATPDSEIYIRIRNKDIKAKVVKMPFYKK

SEQ ID NO: 71201 - DNA, 1176 bp, Burkholderia pseudomallei 305
  CDS (1)..(1176): transl_table=11
ttgccgttttgttttcgcgcccgggctcaaggcccggccgccttgcctgggaccccgatgaccgttctcaaaaccaccccgcttcatgccgcgcatcgcgccctcaacgcccgcatggtcgatttcggcggctgggacatgcccgtcaactacggctcgcagatcgaagagcaccaggcggtgcgcaccgatgccggcatgttcgacgtgtcgcacatgtgcgtcgtcgatttcacgggcccgcgcgtgcgcgcgttcttcgaacacgcgatcgcgaacaacgtcgcgaagctgcaaacgcccggcaaggcgctctactcgtgcctgctgaacccgcaaggcggcgtgatcgacgatctgatcgtctactacttcaccgaggaattcttccgcgtcgtcgtcaacgccggcactgcggagaaggacatcgcgtggttcaaccagctcaacgagcaaggcggcttcggcctcacgatcgcgccgcgccgcgacttcgcgatcgtcgccgcccaaggcccgaacgcgcgcgcgaaggtgtgggacaccgtcccctgcgcgcgcgcagcgacgagcgagctcaagccgttcaacgccgcgcaggtcgcgggcacgccgttcggcgatctcaccgtcgcgcgcaccggctacaccggcgaggacggcttcgagatcatcgtcccggcgacgcacgtggaagcgctgtggaacgcgctcgccgagcgcggcgtgcgcccgtgcgggctcggcgcgcgcgacacgctgcggctcgaggccggcatgaacctgtacggccaggacatggacgaaagcgtttccccgctcgacgcgggcctcgcgtggacggtcgacctgtccgcgccgcgcgcgttcgtcggccgcgacgcgctcgaagcgcacggctcgcgcgcggcattcgtcggcctgatcctgcagaaggagaacggccgcgcgggcggcgtgctgcgcgcgcaccagaaggtcgccacgccgcacggcgaaggcgagatcacgagcggcacgttctcgccgtcgatgcaggaatcgatcgcctttgcgcgcgtgccgaaggacgtcgcgatcggcgacacggtgcacgtgcagatccgcgacaagcaacttcccgcgcgcgtggtaaaactgccgttcgtgcgcaacggcaaggtcctcgctgcgtaa

SEQ ID NO: 71202 - protein, 391 aa, Burkholderia pseudomallei 305
MPFCFRARAQGPAALPGTPMTVLKTTPLHAAHRALNARMVDFGGWDMPVNYGSQIEEHQAVRTDAGMFDVSHMCVVDFTGPRVRAFFEHAIANNVAKLQTPGKALYSCLLNPQGGVIDDLIVYYFTEEFFRVVVNAGTAEKDIAWFNQLNEQGGFGLTIAPRRDFAIVAAQGPNARAKVWDTVPCARAATSELKPFNAAQVAGTPFGDLTVARTGYTGEDGFEIIVPATHVEALWNALAERGVRPCGLGARDTLRLEAGMNLYGQDMDESVSPLDAGLAWTVDLSAPRAFVGRDALEAHGSRAAFVGLILQKENGRAGGVLRAHQKVATPHGEGEITSGTFSPSMQESIAFARVPKDVAIGDTVHVQIRDKQLPARVVKLPFVRNGKVLAA

SEQ ID NO: 71203 - DNA, 1098 bp, Planctomyces maris DSM 8797
  CDS (1)..(1098): transl_table=11
gtgtccgattcattattatatactgcctgtcatcagtggcatgtcgaccatggtggccgtatggtcgattttgcgggctgggaaatgcctttgctctattccaatatcaccacagaacatcaggcagtccgtaatgcggcaggactgtttgacattgcccacatgggacggctgtttttcaccgggcccgatgcgtgccgtttcctggatcggttgttgacgaacagcgtggaatcgctcaagccgggacagattcgctattcgctggtcacaaatgaatccggaggcattctggacgatgtactggtctaccgtttctctgacttttatatgctggtggtgaatgcttccaatcgtctgaaaatcgtggactggattgaagggcagcggagcggttttgatgttcggattgaagatcagacccgtgataaattcatgctggcattacagggcccgcagtcgttggcgattctcaatcccctggtggaagcagaactgagcgaaatcaaatattattacgggattgaaaccagggtctcaggtgttgacgcgctggtcagtcgcacgggctataccggcgaagacggctttgaagtcgtacttgatcagtcggaaggagcggcgctctgggagcgtttgatcgccgggggagagccctcgggactgatccctgctggcctgggatgccgggatactctgcgactggaggcggcgatgcctttgtatggtcatgagctggatgaatcgaccgatccttatactgcggggctgaatttcgcagtgaaactaaaggccgctgatttcatcgggaaagaggcattgatcgctgccaaggcacgcgatgatcgaaaagtccgtgttggttttaccctggaggggaagcgggcagcccgtgagggttcgctgttgttctcaggagatcagcaggtggggatggtgacatccgggtccttctcacccaccctggatctgccgatcgggatggcttacgttgaagccggattcgccgatgcagggcagattctggaagcagatatccgaggcaaacgataccctgtcaatgtgactgagctgcctttttacaaacgcgacacttag

SEQ ID NO: 71204 - protein, 365 aa, Planctomyces maris DSM 8797
MSDSLLYTACHQWHVDHGGRMVDFAGWEMPLLYSNITTEHQAVRNAAGLFDIAHMGRLFFTGPDACRFLDRLLTNSVESLKPGQIRYSLVTNESGGILDDVLVYRFSDFYMLVVNASNRLKIVDWIEGQRSGFDVRIEDQTRDKFMLALQGPQSLAILNPLVEAELSEIKYYYGIETRVSGVDALVSRTGYTGEDGFEVVLDQSEGAALWERLIAGGEPSGLIPAGLGCRDTLRLEAAMPLYGHELDESTDPYTAGLNFAVKLKAADFIGKEALIAAKARDDRKVRVGFTLEGKRAAREGSLLFSGDQQVGMVTSGSFSPTLDLPIGMAYVEAGFADAGQILEADIRGKRYPVNVTELPFYKRDT

SEQ ID NO: 71205 - DNA, 1077 bp, Lentisphaera araneosa HTCC2155
  CDS (1)..(1077): transl_table=11
atgtcagaagcaataaaaaccgctctttacgacaatcacaaaaaacatggtggtcgcattgttgactttgcgggctgggcacttcctgtgcaatacgattcaattattaaagaacaccaagccgttagagagaattctggcgtttttgattgctctcacatggggcagttttttgtctctggtcctgatgcgagtcgatttgtcaattatatgatttctaataacctcgataaaattgaaggagggcgtggactttatacgggtctgctctacgaaaatggcacctttgtagatgatatcatcgtctataaaaaagctgaagacaatatctttatggtggtgaatgctgcaaatgtcgacaaagactttgcgtggctcagtgaaaaactcaaagaaagcaattttgatgcacaaatcgtcaatcgctctgatgagtactcgctactcgctgtccaaggaccacaagcccccgaaaaactcaatcaattattcccaggtctatacgaccaactcaagacttttggtcattgtgacataggatttgcgggcgaaagcggcttgatgtgccgtacgggttacactggtgaagttggcgttgagctgattgtgaaaaatgctgttgcaggtgaattatttgattctttaattgagatcggtgtcaaagcctgtggcttaggttcacgtgattcactccgtttggaaaagggcttttcactttatggtcatgaaattaatgatcaaaccaacgctctcgaagccggcttaggctgggtctgcgacctcaataaagtaaacttcattggcaaggaagctttagagaaaattaaagccgagggaacaagtcgcaagttgattggtttcaaagctaatgtgcgccctattccgagagatggtgatacactgcttgattcagaaggtaatgagatcggttttgtcacatcaggcaccatgagtaaagcattggattgcggtatcggtttggcctatatttcgaaagcttactcaggcgatactgtgcaagttcaaactcgtcgtaaattaatggaagtagaaatctgcggacgtactttcgtttaa

SEQ ID NO: 71206 - protein, 358 aa, Lentisphaera araneosa HTCC2155
MSEAIKTALYDNHKKHGGRIVDFAGWALPVQYDSIIKEHQAVRENSGVFDCSHMGQFFVSGPDASRFVNYMISNNLDKIEGGRGLYTGLLYENGTFVDDIIVYKKAEDNIFMVVNAANVDKDFAWLSEKLKESNFDAQIVNRSDEYSLLAVQGPQAPEKLNQLFPGLYDQLKTFGHCDIGFAGESGLMCRTGYTGEVGVELIVKNAVAGELFDSLIEIGVKACGLGSRDSLRLEKGFSLYGHEINDQTNALEAGLGWVCDLNKVNFIGKEALEKIKAEGTSRKLIGFKANVRPIPRDGDTLLDSEGNEIGFVTSGTMSKALDCGIGLAYISKAYSGDTVQVQTRRKLMEVEICGRTFV

SEQ ID NO: 71207 - DNA, 1095 bp, Moritella sp. PE36
  CDS (1)..(1095): transl_table=11
atggctcaacaaacagtactgttcccgaagcacgtagaagcaggggcaaaaatggtggactttcatggttgggatatgccaatcaattacggttcccagattgctgaacataatgctgtccgcgaagatgcgggtatgttcgatgtgtcacacatgaccatcgttgatatcaaaggcgctgacgctaagtcgttcttacgttatttacttgccaatgatgtggcaaaattaactgtttctggtaaagctctatataccggaatgttacaacaagatggtggggttattgatgaccttatcgtttacttcttcaatgatgaatactaccgcctagtggttaactcagcgactcgtgttaaagatttagcatgggtaaacaaacaagctgcagaattcgccgttgaagtgactgaattacctgaactgtcaatgattgcagtacagggcccgaaagccaaagaaaaagccgctactgtattcaccgctgagcaaaacgccgcggttgaaggcatgaagccattctttggtgttcaatcgggtagtttgtttattgctacaacgggttataccggtgaagcaggttatgaaatcgttgttccacaagaccaagcttgcgatttatggcagaaacttgtggacgcaggtgtacaaccagcaggtctaggcgcacgtgacacactacgtctagaagccggcatgaacctttatggtttagatatggatgaaactgtatcgccgctagccgctaacatgggctggacaattgcttgggaaccacaagatcgtgactttatcggtcgcgcagcgctaactgctcaaaaagcagaaggtactgacaagcttgttggtttagtacttgaagcgaaaggtgtattacgaactggtcaaaaagtcgtattcactaacgcagcaggcgaagcatgtgaaggcgttatcaccagtggtagcttctcaccaacactgggttttagtattgcatttgcacgcgtaccagcatcaatcggtgaaacggctgaagttgaaatgcgtaaaaagcttgttactgtcgcagtaactaaacccgcgttcgttcgtaatggtaaaaaactagtttag

SEQ ID NO: 71208 - protein, 364 aa, Moritella sp. PE36
MAQQTVLFPKHVEAGAKMVDFHGWDMPINYGSQIAEHNAVREDAGMFDVSHMTIVDIKGADAKSFLRYLLANDVAKLTVSGKALYTGMLQQDGGVIDDLIVYFFNDEYYRLVVNSATRVKDLAWVNKQAAEFAVEVTELPELSMIAVQGPKAKEKAATVFTAEQNAAVEGMKPFFGVQSGSLFIATTGYTGEAGYEIVVPQDQACDLWQKLVDAGVQPAGLGARDTLRLEAGMNLYGLDMDETVSPLAANMGWTIAWEPQDRDFIGRAALTAQKAEGTDKLVGLVLEAKGVLRTGQKVVFTNAAGEACEGVITSGSFSPTLGFSIAFARVPASIGETAEVEMRKKLVTVAVTKPAFVRNGKKLV

SEQ ID NO: 71209 - DNA, 1104 bp, Plesiocystis pacifica SIR-1
  CDS (1)..(1104): transl_table=11
atggcagacctggccaagacacccctccacggcgcccacgttgccgccggcgccaaaatggtcgacttcacgggctggcacatgcccgtgcagtacagcgggattctcaaggagcaccgggcggtgcgcagctccgtcggcctgttcgacgtctcgcacatgggcgagatcgacttcgccggcccccgcgccctcgaggccgtgcagcgcctggtgaccaacgacgtcagcaagctcgtcgacggccaggcgctctacaccgcgacctgccgcccgagcggcggcatcgtcgacgactgcatcgtctaccgccgcggcgcccaggagctgcgcatcgtcgtcaacgcctcgaacatcgccaaggacgaggcccacttccgcgagcacgtcggcggctactgcgagatcgtcaaccgctcggcgcagacggccctgatcgccgtccagggtccgcaggcccgggagctgtgcgccaagctcggcggcgagtccctgctcgccatcgagggcttccactttggcccgggccagatcgccgggcacccggtcatcgccgcgcgcacgggctacaccggcgaggacggcttcgagctgttcgtcgagtacgccggcgcgaccccagtgtgggaggcgctcatcgagggcggcgcgaccccctgcggcctgggctcccgggacacgctgcgcctcgaggcgcgactgtgcctctacggcaacgacatcgacgagaccaccacgccctacgacgcgggcctgggctgggtcgtcaagctcaaggccggcgacttcgtcggccgcgacgccctcgtcgcgcaaaaggccaagggcatcgagcaaaagctgatcggcttcgccatcgagggcaagggcacggcccgcccgggctgggacattcgcgccctcgacgaggacggaagccccggcgacgcggtcatcggccgggtgacctccggcggccccgcgcccaccgtgggcggctccatcggcatgggctacgtgcccaaggccatgagcaaggccggcaccaagatcgccgtgtgcagcaagcacaagtccctgcccgcgaccctggtcaagggccccttctacaagcgcccccagtag

SEQ ID NO: 71210 - protein, 367 aa, Plesiocystis pacifica SIR-1
MADLAKTPLHGAHVAAGAKMVDFTGWHMPVQYSGILKEHRAVRSSVGLFDVSHMGEIDFAGPRALEAVQRLVTNDVSKLVDGQALYTATCRPSGGIVDDCIVYRRGAQELRIVVNASNIAKDEAHFREHVGGYCEIVNRSAQTALIAVQGPQARELCAKLGGESLLAIEGFHFGPGQIAGHPVIAARTGYTGEDGFELFVEYAGATPVWEALIEGGATPCGLGSRDTLRLEARLCLYGNDIDETTTPYDAGLGWVVKLKAGDFVGRDALVAQKAKGIEQKLIGFAIEGKGTARPGWDIRALDEDGSPGDAVIGRVTSGGPAPTVGGSIGMGYVPKAMSKAGTKIAVCSKHKSLPATLVKGPFYKRPQ

SEQ ID NO: 71211 - DNA, 1128 bp, Ralstonia pickettii 12D
  CDS (1)..(1128): transl_table=11
atgacgctccaacacacgccgctcaatgccatccaccgctcgctgggcgcccgcatggtcgactttggcggctgggacatgcccgtcaactacggctcccagatcgaagaacatcacgccgtgcgccaggacgccggcgtcttcgacgtctcgcacatgtgcgtggtcgacctcaccggtgcgcgtgtgcgcgacttcctgcgagggctgctcgccaacaacgtcgacaagctgcagacccccggcaaggcgctctacagttgcatgctgaaccccaagggcggagtgatcgacgacctgatcgtctacttcttccgcgaagactggttccgcctggtcgtcaacgccggcaccgcaccgacggacctggaatggatcgtcgcgcagaacgcggccgccggcaccgacgtgaccatcacgccgcgccgctccgacaacaacgcgggcgccgagccgctgggcattctggccgtgcaaggcccgaatgcgcgcgccaagacctacgccgcgctgcccggcacgcaggccgtgggcgaggcgctcaagcccttcaacgcgggctttgtcaccgtggaaaacgtgggcgagatcatggtggcacgcaccggctacaccggtgaggacggtttcgaactggtcgtgccggccgcgcagatcgcaggcgtgtgggaacgcctgctgcaggccggcgtgcgcccggcaggcctgggcgcgcgcgacacgctgcgcctggaggccggcatgaacctctacggccaggatatggacgagcacgtttcgccgctcgacgccggcctcgcttggacggtcgacctgcaaagcgaacgcgacttcacaggcaaggccgcgctgcaggctggcggccaacgcgaacagttcgtcggcctgatcctgcgcgacaagggcggcgtgctgcgcgcccaccagaaagtcatcaccgccgccggtgacggcgagatcaccagcggcacgttcagcccgagcctgtcgctctccatcgcactggcgcgcctgcccaaggacgtgaccattggcaccgacgtacaggtcgaaattcgcgaccgcaagttgaccgcgactgtggttaaactgccgttcgtgcgcaatggcaaggcgctggtcagctga

SEQ ID NO: 71212 - protein, 375 aa, Ralstonia pickettii 12D
MTLQHTPLNAIHRSLGARMVDFGGWDMPVNYGSQIEEHHAVRQDAGVFDVSHMCVVDLTGARVRDFLRGLLANNVDKLQTPGKALYSCMLNPKGGVIDDLIVYFFREDWFRLVVNAGTAPTDLEWIVAQNAAAGTDVTITPRRSDNNAGAEPLGILAVQGPNARAKTYAALPGTQAVGEALKPFNAGFVTVENVGEIMVARTGYTGEDGFELVVPAAQIAGVWERLLQAGVRPAGLGARDTLRLEAGMNLYGQDMDEHVSPLDAGLAWTVDLQSERDFTGKAALQAGGQREQFVGLILRDKGGVLRAHQKVITAAGDGEITSGTFSPSLSLSIALARLPKDVTIGTDVQVEIRDRKLTATVVKLPFVRNGKALVS

SEQ ID NO: 71213 - DNA, 1086 bp, Parabacteroides merdae ATCC 43184
  CDS (1)..(1086): transl_table=11
atgaaaacaactccgtttaccgatgtgcacattgcactcggtgccaaaatgcatgaatttgcaggtttcaacatgccgatcgaatacaccggtattatcgacgaacacatgaccgttgtgaatggtgtgggtgtgttcgatgtctcccacatgggcgagttttgggtaaaaggtccgaatgcgctggcttttatccagagcgttacctcgaacgacgcttccgtgttgccgatcggcaaagctcaatatacttgctttccgaatgacaagggcggtatcgtggacgacctgctggtctatcattatgaaccggaaaaataccttttggttgtcaatgcgggtaacatcgccaaagattgggattggtgcgtgagccataatacagtaggggcggaactggaaaactcttccgaccgtactgcacagttggctgtccagggcccgaaagccgtcgaagttttgcagcgcctgactccggtcgacctgtcttccattccttactattcgtttgtgacgggtgaatttgcaggttgcaagaacgtcatcatctccaatacgggatataccggagccggtggtttcgaactttatttttacccggatgatgccatgacgatctggaatgccatcttcgaagccggtaagcctgaaggtatcaaaccgatcggcctgggtgcacgcgacacgctacgtctggaaatgggcttctgtctgtatggcaacgatctcgacgacacgacttcgccgatcgaagccggtctgggttggatcaccaagttcgccgaaggcaagaacttcaccaatcgcgccgaactggaacgccagaagaaagaaggcgttagccgcaagctgtgtgccttcgagttggtagacaaaggtattccccgtcacggctatgagattgccgatgccgaaggcaacatcatcggtgtggtgacatccggaaccatgtcgcctgtcttgaagaaaggtatcggtatggggtatgtgaaacctgaatttgcaaaagccgggacggaaatctgtatcaaggttcgggggcgtaacttgaaagcccaggttgtaaaagcgccgttccgcaagtaa

SEQ ID NO: 71214 - protein, 361 aa, Parabacteroides merdae ATCC 43184
MKTTPFTDVHIALGAKMHEFAGFNMPIEYTGIIDEHMTVVNGVGVFDVSHMGEFWVKGPNALAFIQSVTSNDASVLPIGKAQYTCFPNDKGGIVDDLLVYHYEPEKYLLVVNAGNIAKDWDWCVSHNTVGAELENSSDRTAQLAVQGPKAVEVLQRLTPVDLSSIPYYSFVTGEFAGCKNVIISNTGYTGAGGFELYFYPDDAMTIWNAIFEAGKPEGIKPIGLGARDTLRLEMGFCLYGNDLDDTTSPIEAGLGWITKFAEGKNFTNRAELERQKKEGVSRKLCAFELVDKGIPRHGYEIADAEGNIIGVVTSGTMSPVLKKGIGMGYVKPEFAKAGTEICIKVRGRNLKAQVVKAPFRK

SEQ ID NO: 71215 - DNA, 1089 bp, Rickettsiella grylli
  CDS (1)..(1089): transl_table=11
atggaaaataaaacaattcttcacggacagcataaaaaaaatggggcgatactcgtcaattttgccggctgggaaatgccgttgcattatggttcacaaatacaagaacatcatgttgtcagacaagacagtggtttatttgatgtttcgcacatgcttgctgtcgatattataggtcaagccgcattaccctatcttagttttttattcgctaacaatccgcaacgtcttattccgggaaaagccttatatacctgcatgttaaatgatgccggtggagtcttagacgatttaattgtgtatcaactttctgaacacatttatcgtatcgtcattaacgccgcgaatcggcactctgatctggattggatgaaaaaacaagcgcagaatttcccgacgatttcgatcgttgaacggaccgatctcgccattattgccattcaaggtcctcatgcgataacaaaaacgctacaagccttcaatgcgcatcaacagtccttaataagcgcattaaagccgtttcattgtctccacgataatcattggtttatcgcaagaaccggttataccggtgaggatgggctcgaggttattttacccctgcatgaagcggaaaatttctggcaacgtctcattgaattagggagtaaaccatgcggattaggcgcacgggataccttgcgactcgaagcaggattaaatttacaaggttcagatatggatatcaccacgactcctttagaatccaacctggcgtggaccgtggcgtgggatccgattgatcgcagttttatcggccgtcaagcactcaaccaacaaaaagaaaatctcacgcgcaaacttgttgggttggtactcgaagaaaaaggacgtattctacgtaaccatcaaaaaattattacaccaaaaggagaaggtgaaatcaccagcgggagttactcaccgacgttaggtacttccattgcgttgggtagaatcccttacgcacaccatgaagattattgtgatgttatcatgggcacgaagcaatacaccgcacgtatcgttaaacctccttttatacgaaaaggaaaaaaaacgtttcactaa

SEQ ID NO: 71216 - protein, 362 aa, Rickettsiella grylli
MENKTILHGQHKKNGAILVNFAGWEMPLHYGSQIQEHHVVRQDSGLFDVSHMLAVDIIGQAALPYLSFLFANNPQRLIPGKALYTCMLNDAGGVLDDLIVYQLSEHIYRIVINAANRHSDLDWMKKQAQNFPTISIVERTDLAIIAIQGPHAITKTLQAFNAHQQSLISALKPFHCLHDNHWFIARTGYTGEDGLEVILPLHEAENFWQRLIELGSKPCGLGARDTLRLEAGLNLQGSDMDITTTPLESNLAWTVAWDPIDRSFIGRQALNQQKENLTRKLVGLVLEEKGRILRNHQKIITPKGEGEITSGSYSPTLGTSIALGRIPYAHHEDYCDVIMGTKQYTARIVKPPFIRKGKKTFH

SEQ ID NO: 71217 - DNA, 1056 bp, Hydrogenivirga sp. 128-5-R1-1
  CDS (1)..(1056): transl_table=11
atgggtgaacattttaaaatactgcccatgagaacccctctctacgaagtccacagaaaactcggtgcgcgcttcacggacttcaacgggtgggagatgcccctccagtactcggggatagtggacgaggtgaaggctgtcagagaaggcgcaggggtgtttgacatatcccacatggggaggttctttgtctctggaaaggacgccttcggcgttctccagaagctcacgacaaacaaccttgagaagttgaaacccgggagggttcagtacaacctcttcaccaacgaaaggggaggcgtaaaggacgatgtaaccgtatatatgctctcggaggaagagttcttcctctgtgtaaatgcgggcaacagggagaagataaaggagtgggtgggaaagcacataccccttgaggacgcctccgatagaaccgtccagatcgcccttcagggcagggagggcgagagaatactgagcaggttttacgacgtctccgacctgaagtactaccatttcaagacctttggggacacgattgtttcaagaaccggctacaccggggaggacggctttgaggtttacgcacccgtggacgaaggagtggagctctttaaagagctcgtgaaagaggtaaaatcctgcggtctcggggcgagggacgtcctcaggatagaggctggctttcccctctacggacacgagatctcagaagatataacgccccttgaggcgaacttagacaggttcgttgacctctccaaggagtttgtaggaagggaagcgctattggaaagaaaacccgagcgcaagctcttcggacttgagatggtggataagggtgtcccccgtgaggggtaccgagtattcaaggaagacagggagatcggagtggtctccagcgggaccttctcccccacactcggcaagggaatagccctctgcttcgttgatatagaggagaggaaggagggaaacgaagtcttccttgaggtaagaaacagactcctcagggctgtgctgaggaagtaccccttcgtgaaacgtcccaagaagtga

SEQ ID NO: 71218 - protein, 351 aa, Hydrogenivirga sp. 128-5-R1-1
MGEHFKILPMRTPLYEVHRKLGARFTDFNGWEMPLQYSGIVDEVKAVREGAGVFDISHMGRFFVSGKDAFGVLQKLTTNNLEKLKPGRVQYNLFTNERGGVKDDVTVYMLSEEEFFLCVNAGNREKIKEWVGKHIPLEDASDRTVQIALQGREGERILSRFYDVSDLKYYHFKTFGDTIVSRTGYTGEDGFEVYAPVDEGVELFKELVKEVKSCGLGARDVLRIEAGFPLYGHEISEDITPLEANLDRFVDLSKEFVGREALLERKPERKLFGLEMVDKGVPREGYRVFKEDREIGVVSSGTFSPTLGKGIALCFVDIEERKEGNEVFLEVRNRLLRAVLRKYPFVKRPKK

SEQ ID NO: 71219 - DNA, 1083 bp, Anaeromyxobacter dehalogenans 2CP-1
  CDS (1)..(1083): transl_table=11
atggccctgcgcacgccccttcacgacacgcacgtccgcgcaggcgcacggatcgtggagttcgccggctggcagatgccggtccagtactcgggcatcctcgccgagcacgagaccgtccgcacccgcgtcggcctgttcgacgtctcgcacatgggcgaggtcgtgttccgcggcccgcgggcgatcgcggcgctcggccgcctgttcacgaacgacctctccaaggtcgccgacggccaggcgcagtacggctgcctgtgccgcgactccggcggcatcgtggacgacgtggtggtctaccgccgctccgccgaggacctgctcgtctgcgtcaacgccggcaaccggcagaaggacttcgagtggctggcgggccacgccgccggcgccgacgtccgcaacgagtcggacgactgggcgcagctcgcgctccaggggccgctcgccgcccagctcctgcagcggctcaccaccgtgaacctctcggcgatgcgcagctaccgcttcggcgagggcgaggtggccggcgtccgctgcatcgtggcccgcaccggctacaccggcgaggacggcttcgagctgttctgccgctccgacctgggcccgcggctctgggacgcgctcatggaggcgggcgtgcccgagcgcatcgccccctgcggcctcggcgcccgcgactcgctgcggctcgagatggcgtaccgcctctacggctcggacatggacgagaccaccacgccgctcgaggccgggctggcctgggtggtgaagctcgacaagggcgacttcatcggccgcgaggcgctgctcaagcagaaggagcaggggctctcgcgcaagctggtggggttccagctcaccgacgcgggcatcccgcggcacggctacccggtgctgcaggacggccgcaaggtgggggacgtgaccagcgggaccaagagcccgtcgctcggcaccgccatcgggctcgcctacgtgccccccgcgctcgccgccgagggctccaccttcgcagtcgagatccgcggccgggccgcggcggccaaggccgtgaagacgccgttctacactcggaagtga

SEQ ID NO: 71220 - protein, 360 aa, Anaeromyxobacter dehalogenans 2CP-1
MALRTPLHDTHVRAGARIVEFAGWQMPVQYSGILAEHETVRTRVGLFDVSHMGEVVFRGPRAIAALGRLFTNDLSKVADGQAQYGCLCRDSGGIVDDVVVYRRSAEDLLVCVNAGNRQKDFEWLAGHAAGADVRNESDDWAQLALQGPLAAQLLQRLTTVNLSAMRSYRFGEGEVAGVRCIVARTGYTGEDGFELFCRSDLGPRLWDALMEAGVPERIAPCGLGARDSLRLEMAYRLYGSDMDETTTPLEAGLAWVVKLDKGDFIGREALLKQKEQGLSRKLVGFQLTDAGIPRHGYPVLQDGRKVGDVTSGTKSPSLGTAIGLAYVPPALAAEGSTFAVEIRGRAAAAKAVKTPFYTRK

SEQ ID NO: 71221 - DNA, 1107 bp, Paenibacillus larvae subsp. larvae BRL-230010
  CDS (1)..(1107): transl_table=11
atgttaaaacgaactcccctctaccccgtttacgagcagtacggtgcaaaaccgattgattttggcggctgggaactgcctgtacaattctccggcattcaaagggagcatgaggctgtccgcagccatgccggactttttgacgtttcccacatgggcgaagtgtttgtttccggccctgattctctatccttccttcaacatctgactaccaacgatttaagcaaaattcaagacggacaatgtcaatatacccttatgtgctatccggacggaggagtggtcgatgatcttttaatttaccgtcttagtgaacacaaatatatggcggttatcaacgcctccaatattgaaaaagaccttgaatggatacagcagcataataagtcgggagtaaaactcgataacgtttcggaccggaccgcacttctcgctcttcaaggaccgcttgccgaaactgtactgatgaagctggtggaaccgggtcaacatgagaaaatccgtgagctgaagcccttccgtttcgtccaggatgtcgccgttagcgggaagcgtgccattctttcccggaccggatataccggagaggacggatttgagctgtatgtggaaagcggtgatgcggtttacctgtggaacgaactgctgcgggtcggagaacccgaagggctgattcctgcgggcctgggtgcacgcgatacacttcgtttcgaagcacggcttcccctatatggacaagagctctctgctgatatttcaccacttgaagccggtttatctttcttcgtcaagcttgacaaaggagattttatcggacggaaagcgctttccttacaaaaagagcagggtgttccccgcaagctggcaggtgtggaattactggaacggggtattccccggagccattatccggtatatgcagacggtaaacaaatcggggaaatcactacaggtacccaatccccaaccctgaaaaaaagtgtagggcttgctttaatcgacagtgcttactcggccctggatactgagctgtatgtagagattcgcggcaggcagataaaagccaaagtagtcaaaaccccattctataaacgggcaggcaagtga

SEQ ID NO: 71222 - protein, 368 aa, Paenibacillus larvae subsp. larvae BRL-230010
MLKRTPLYPVYEQYGAKPIDFGGWELPVQFSGIQREHEAVRSHAGLFDVSHMGEVFVSGPDSLSFLQHLTTNDLSKIQDGQCQYTLMCYPDGGVVDDLLIYRLSEHKYMAVINASNIEKDLEWIQQHNKSGVKLDNVSDRTALLALQGPLAETVLMKLVEPGQHEKIRELKPFRFVQDVAVSGKRAILSRTGYTGEDGFELYVESGDAVYLWNELLRVGEPEGLIPAGLGARDTLRFEARLPLYGQELSADISPLEAGLSFFVKLDKGDFIGRKALSLQKEQGVPRKLAGVELLERGIPRSHYPVYADGKQIGEITTGTQSPTLKKSVGLALIDSAYSALDTELYVEIRGRQIKAKVVKTPFYKRAGK

SEQ ID NO: 71223 - DNA, 1755 bp, Burkholderia thailandensis TXDOH; identical to SEQ ID NO: 71079
  CDS (637)..(1755): transl_table=11

SEQ ID NO: 71224 - protein, 372 aa, Burkholderia thailandensis TXDOH
MTVLKITPLHAAHRALNARMVDFGGWDMPVNYGSQIEEHQAVRTDAGMFDVSHMCVVDFTGPRVRAFFEHALANNVAKLQTPGKALYSCLLNPQGGVIDDLIVYYFTEDFFRVVVNAGTADKDVAWFSQLNEQGGFGLTIAPRRDFAIVAVQGPNARAKVWDTVPAARAATSELKPFNAAQVAGTPFGDLTVARTGYTGEDGFEIIVPAMHVEALWNALAERGVRPCGLGARDTLRLEAGMNLYGQDMDETVSPLDAGLAWTVDLAAPRAFVGRDALEANGSRAAFVGLILQKENGRAGGVLRAHQKVVTPHGDGEITSGTFSPTMQESIAFARVPKGVAIGDTVHVQIRDKNLPARVVKLPFVRNGKVLAA

SEQ ID NO: 71225 - DNA, 1119 bp, Burkholderia pseudomallei DM98
  CDS (1)..(1119): transl_table=11
atgaccgttctcaaaaccaccccgcttcatgccgcgcatcgcgccctcaacgcccgcatggtcgatttcggcggctgggacatgcccgtcaactacggctcgcagatcgaagagcaccaggcggtgcgcaccgatgccggcatgttcgacgtgtcgcacatgtgcgtcgtcgatttcacgggcccgcgcgtgcgcgcgttcttcgaacacgcgatcgcgaacaacgtcgcgaagctgcaaacgcccggcaaggcgctctactcgtgcctgctgaacccgcaaggcggcgtgatcgacgatctgatcgtctactacttcaccgaggaattcttccgcgtcgtcgtcaacgccggcactgcggagaaggacatcgcgtggttcaaccagctcaacgagcaaggcggcttcggcctcacgatcgcgccgcgtcgcgacttcgcgatcgtcgccgcccaaggcccgaacgcgcgcgcgaaggtgtgggacaccgtcccctccgcgcgcgcagcgacgagcgagctcaagccgttcaacgccgcgcaggtcgcgggcacgccgttcggcgatctcaccgtcgcgcgcaccggctacaccggcgaggacggcttcgagatcatcgtcccggcgacgcacgtggaagcgctgtggaacgcgctcgccgagcgcggcgtgcgcccgtgcgggctcggcgcgcgcgacacgctgcggctcgaggccggcatgaacctgtacggccaggacatggacgaaagcgtttccccgctcgacgcgggcctcgcgtggacggtcgacctgtccgcgccgcgcgcgttcgtcggccgcgacgcgctcgaagcgcacggctcgcgcgcggcattcgtcggcctgatcctgcagaaggagaacggccgcgcgggcggcgtgctgcgcgcgcaccagaaggtcgccacgccgcacggcgaaggcgagatcacgagcggcacgttctcgccgtcgatgcaggaatcgatcgcctttgcgcgcgtgccgaaggacgtcgcgatcggcgacacggtgcacgtgcagatccgcgacaagcaacttcccgcgcgcgtggtaaaactgccgttcgtgcgcaacggcaaggtcctcgctgcgtaa

SEQ ID NO: 71226 - protein, 372 aa, Burkholderia pseudomallei DM98
MTVLKTTPLHAAHRALNARMVDFGGWDMPVNYGSQIEEHQAVRTDAGMFDVSHMCVVDFTGPRVRAFFEHAIANNVAKLQTPGKALYSCLLNPQGGVIDDLIVYYFTEEFFRVVVNAGTAEKDIAWFNQLNEQGGFGLTIAPRRDFAIVAAQGPNARAKVWDTVPSARAATSELKPFNAAQVAGTPFGDLTVARTGYTGEDGFEIIVPATHVEALWNALAERGVRPCGLGARDTLRLEAGMNLYGQDMDESVSPLDAGLAWTVDLSAPRAFVGRDALEAHGSRAAFVGLILQKENGRAGGVLRAHQKVATPHGEGEITSGTFSPSMQESIAFARVPKDVAIGDTVHVQIRDKQLPARVVKLPFVRNGKVLAA

SEQ ID NO: 71227 - DNA, 1077 bp, Gemmata obscuriglobus UQM 2246
  CDS (1)..(1077): transl_table=11
atgtcgaacctgcgcacgccgctgtaccagtggcacgtcgatcacaaagcgcggatggtgccgttcggcggctgggagatgccggtgcagtacgccgggatcgcgcccgagcacaaagcggtgcggtccggggccgggctgttcgacatctcgcacatggcgcgggtgaactttgacggccccgacgtgctcgcgtttctggagcgggtgttcaccaactccgttgccaccatgaaggcggggcaggtccgctacgggctggtgtgcaaggaggacggcggcatcctcgacgacatcctcgtgtaccgcctgccgggcagcttcgcggcggtcgtcaacgccagcaaccgcgagaagatcctcgcgtggttcgcgcagcagcgcaccgggctggcggtcgaggtggacgaccgcacccccgccacgacgatgatcgcggtgcaagggccgaaggcggtggagctggtcgcgggggtgttcgcggacgacgtgagcgcgctgaagtactacttcgcaacgcccagccactacctcggcagcccgtgcgtggtgagccgcaccgggtacaccggcgaggacgggttcgaggtgatcgtgccgaacgcgctcggcgagccgctgtggaacgagttcgtcgcgaagggggccgtgccgtgcgggctgggggcgcgggacacactccggctcgaagccgccatgccgctgtacggccacgagctgaacgagggcgtgaacccgatccaggccgggctggcgtgggcggtcaaactcgacaagggcgacttcctcggccgcgacgcgatccagaaagccgcaaccgcgaccgaaccggtgcgggtggggttggaaattgagggcaagcgcgccgcccgcgaggggtgcccggtgctcgccggggggcgaccggtcggcggcgtcaccagcgggagcctgtgcccgtggctggacaagtcgctcgcgatgggctacgtcgaaccggcggccgccgcggtgggcaccaaactcgaagtggacctgcgcggcgccaaattgcccgcgaccgtcgttcagctgccgttctacaaacggaagaagtga

SEQ ID NO: 71228 - protein, 358 aa, Gemmata obscuriglobus UQM 2246
MSNLRTPLYQWHVDHKARMVPFGGWEMPVQYAGIAPEHKAVRSGAGLFDISHMARVNFDGPDVLAFLERVFTNSVATMKAGQVRYGLVCKEDGGILDDILVYRLPGSFAAVVNASNREKILAWFAQQRTGLAVEVDDRTPATTMIAVQGPKAVELVAGVFADDVSALKYYFATPSHYLGSPCVVSRTGYTGEDGFEVIVPNALGEPLWNEFVAKGAVPCGLGARDTLRLEAAMPLYGHELNEGVNPIQAGLAWAVKLDKGDFLGRDAIQKAATATEPVRVGLEIEGKRAAREGCPVLAGGRPVGGVTSGSLCPWLDKSLAMGYVEPAAAAVGTKLEVDLRGAKLPATVVQLPFYKRKK

SEQ ID NO: 71229 - DNA, 1092 bp, Thauera sp. MZ1T
  CDS (1)..(1092): transl_table=11
atgactatcgctgccaaacagacccccctccacgccgcccacgtcgccgccggcgcacgcatggtcgacttcgccggctgggacatgccggtgaactacggttcgcagatcgaggagcatcacgccgtgcgccgcgacgccggcatgttcgacgtctcgcacatgctcgccctcgacctcgccggccccgacgcaaccacctggctgcgcggtctgctcgccaacgacgtcgccaagctcaaggataacggcaaggcgctctactcctgcatgctcaacgagcgcggcggcgtgatcgacgacctgatcgtctaccgcttcagcgatgccgactaccgcatcgtcgtaaacgccggcaccgccgacaaggacgtcgcctggatgcgccagcgcatcgccgcgaccggtgccaacgtgaccctgcaggcgcgccgcgacctggcgatgattgccgtccagggtccgcgcgcgatcgagcgcgccaccttggccctgccggagctctccaccgccaacggcgtgcccgcccccttctttggcgctcgcgtgggcgacctgctgatcgcacgtaccggctacaccggcgaggacggactggagatcgccgtccccgcgagccgcgccgaggcgatgtggaatgcgctcgccgccgccggtgtgcgtccctgcggcctgggcgcgcgcgacaccctacggctggaagccggcatgaacctctacggccaagacatggacgaccacgtttcccccctgaatgccggcctgtcgtggacggtggacatgaaggacgaggcgcgcgacttcctcggtcgcgccgcgctgcaggccaaccctgccagtcagcgcctgcttggcctcatcctcgaggacaagggcgtgctgcgctcgcacatgaaggtcttcacctccggcggcgaaggcgagaccaccagcggaagcttctcgcccacgctggaaaagtcgatcgccttcgcacgcgtccctctcgcgacgcagccgggcgaagccgtcgaggtggacattcgcggcaagcgcctgaaggcacgcaccgtcaagctgcccttcgtacgtaacggcaaggccctcgtctga

SEQ ID NO: 71230 - protein, 363 aa, Thauera sp. MZ1T
MTIAAKQTPLHAAHVAAGARMVDFAGWDMPVNYGSQIEEHHAVRRDAGMFDVSHMLALDLAGPDATTWLRGLLANDVAKLKDNGKALYSCMLNERGGVIDDLIVYRFSDADYRIVVNAGTADKDVAWMRQRIAATGANVTLQARRDLAMIAVQGPRAIERATLALPELSTANGVPAPFFGARVGDLLIARTGYTGEDGLEIAVPASRAEAMWNALAAAGVRPCGLGARDTLRLEAGMNLYGQDMDDHVSPLNAGLSWTVDMKDEARDFLGRAALQANPASQRLLGLILEDKGVLRSHMKVFTSGGEGETTSGSFSPTLEKSIAFARVPLATQPGEAVEVDIRGKRLKARTVKLPFVRNGKALV

SEQ ID NO: 71231 - DNA, 1119 bp, Burkholderia graminis C4D1M
  CDS (1)..(1119): transl_table=11
atgaccgaactcaaacacactccgctcaacgccacccatcgcgcgctgaatgcccgcatggtcgatttcggcggctgggacatgcccgtcaactacggctcgcagatcgacgaacaccgcgcggtgcgcaccgacgcgggcatgttcgacgtttcgcacatgtgcgtcgtcgatttcaccggcgagcgcgtgcgtgcgttcttcgaatacgcgctggccaacaacgtcggcaagctgcaaataccgggccgcgcgctctactcgtgcatgctgaaccccgacggcggcgtgatcgacgatctgatcgtctattacttcggcgaagatcatttccgcgtggtcgtcaacgcgggcaccgccgacaaagacatcgcgtggttcaatcaactgaacgaaggcggcttcggcctgacgatcatgccgcgccgcgatctcgcgatcgtcgccgtgcaaggtccgaacgcacgtgagaaggtctggcagacggcgccctccatccgcgccgccactgaggcgctgaagcccttcaacgccgcgcgcatcgaagccacgccgttcggcgaactgaccgtcgcccgcaccggctataccggcgaagacggcttcgagatcatcgttcctgcggaccacgtggttgcgctgtggaacgcgctgcaagcgcaaggcgtgcgcccggcaggtctcggcgcgcgcgacacgctgcgcctcgaagccggcatgaatctgtacggccaggacatggacgacaacatctcgccgctcgacgccggtctcgcgtggaccgtcgacctcgcttcgccgcgcgaattcgtcggcaaaagcaggctcgaactggacggctcgaaggccgcgttcgtcggcctgatcttgcgcaaggaaaacggcaaggccgcaggcgtgctgcgcgcgcatcagaaggtcgtcacgccgcacggcgaaggcgaaatcaccagcggcactttttctccgacgatgcaggaatcgatcgccttcgcgcgcgtgccgcaaggcgtgcagccgggcgacacggttcatgtgcagattcgcgacaaatccgttcctgcaagcgtggtaaaactgccgttcgtgcgcaacggcaaagtgctcgcggcggcctaa

SEQ ID NO: 71232 - protein, 372 aa, Burkholderia graminis C4D1M
MTELKHTPLNATHRALNARMVDFGGWDMPVNYGSQIDEHRAVRTDAGMFDVSHMCVVDFTGERVRAFFEYALANNVGKLQIPGRALYSCMLNPDGGVIDDLIVYYFGEDHFRVVVNAGTADKDIAWFNQLNEGGFGLTIMPRRDLAIVAVQGPNAREKVWQTAPSIRAATEALKPFNAARIEATPFGELTVARTGYTGEDGFEIIVPADHVVALWNALQAQGVRPAGLGARDTLRLEAGMNLYGQDMDDNISPLDAGLAWTVDLASPREFVGKSRLELDGSKAAFVGLILRKENGKAAGVLRAHQKVVTPHGEGEITSGTFSPTMQESIAFARVPQGVQPGDTVHVQIRDKSVPASVVKLPFVRNGKVLAAA

SEQ ID NO: 71233 - DNA, 1119 bp, Burkholderia ambifaria IOP40-10
  CDS (1)..(1119): transl_table=11
atgactgcactgaatcacaccccgctcaacgccgcgcatcgcgcgctcaatgcccgcatggtcgacttcggcggctgggacatgcccgtcaactacggctcgcagatcgaagaacacgaagccgtgcgcaccgacgccggcatgttcgacgtgtcgcacatgtgcgtcgtcgatttcaccggcagccgcgtgcgcgcgttcttcgagcacgcgatcgcgaacaacgtcggcaagctcaagacccccggcaaggcgctctactcgtgcctgctcaatccgcagggcggcgtcatcgacgacctgatcgtctattacttcaccgaagacttcttccgcgtcgtcgtcaacgccggcacggccgagaaggacatcgcgtggttcaaccagctcaacgagcaaggcggctacggcctgaccatcgcgccgcgccgcgatttcgcgatcgtcgcagtgcagggcccgaacgcccgtgaaaaggtctggacgacggtgcccgccgcgcgcgccgccaccagcgaactgaagccgttcaacgccgcgcgggtcgccggcacgccgttcggcgagctcaccgtcgcgcgcaccggctacaccggcgaagacggcttcgaagtgatcgtcccggccgtgcacgtcgaagcgctgtggaccgcgctgcagcaaaacggcgtgcgcccgtgcgggctcggcgcgcgcgacacgctgcgcctcgaggccggcatgaacctgtacggccaggacatggacgagaccgtgtccccgctcgacgcgggcctcgcatggacggtcgacctgtcggcaccgcgcgacttcgtcggccgcgccgcgctcgagcgcgacggcacgcgcgccgcgttcgtcgggctgatcctgcaaaaggaaaacggcaaggcgggcggcgtgctgcgcgcgcaccagaaggtcgtcacgccgcacggcgaaggcgagatcacgagcggcacgttctcgccgtcgatgcaggaatcgatcgcgttcgcacgcgtgccagcggccgtccacgtcggcgacaccatacatgtgcagattcgagacaagcaactgcccgcgcgcgtggtaaaactgccgttcgtgcgcaacggcaaggtcctcgctgcgtaa

SEQ ID NO: 71234 - protein, 372 aa, Burkholderia ambifaria IOP40-10
MTALNHTPLNAAHRALNARMVDFGGWDMPVNYGSQIEEHEAVRTDAGMFDVSHMCVVDFTGSRVRAFFEHAIANNVGKLKTPGKALYSCLLNPQGGVIDDLIVYYFTEDFFRVVVNAGTAEKDIAWFNQLNEQGGYGLTIAPRRDFAIVAVQGPNAREKVWTTVPAARAATSELKPFNAARVAGTPFGELTVARTGYTGEDGFEVIVPAVHVEALWTALQQNGVRPCGLGARDTLRLEAGMNLYGQDMDETVSPLDAGLAWTVDLSAPRDFVGRAALERDGTRAAFVGLILQKENGKAGGVLRAHQKVVTPHGEGEITSGTFSPSMQESIAFARVPAAVHVGDTIHVQIRDKQLPARVVKLPFVRNGKVLAA

SEQ ID NO: 71235 - DNA, 1119 bp, Burkholderia ambifaria MEX-5
  CDS (1)..(1119): transl_table=11
atgactgcactgaatcacaccccgctcaacgccgcgcatcgcgcgctcaatgcccgcatggtcgacttcggcggctgggacatgcccgtcaactacggctcgcagatcgaagaacacgaagccgtgcgcaccgacgcaggcatgttcgacgtgtcgcacatgtgcgtcgtcgatttcaccggcagccgcgtgcgcgcgttcttcgagcacgcgatcgcgaaccacgtcggcaagctcaagacccccggcaaggcgctctactcgtgcctgctcaatccgcagggcggcgtcatcgacgacctgatcgtctattacttcaccgaagacttcttccgcgtcgtcgtcaacgccggcacggccgagaaggacatcgcgtggttcaaccagctcaacgaacaaggcggctacggcctgaccatcacgccgcgccgcgatttcgcgatcgtcgccgtgcagggcccgaacgcccgtgaaaaggtctggacgacggtgcccaccgcgcgcgccgccaccagcgaactgaagccgttcaacgccgcgcgggtcgccggcacgccgttcggcgagctcaccatcgcgcgcaccggctacaccggcgaagacggcttcgaagtgatcgtcccggccgtgcacgtcgaggcgctgtggaccgcgctgcagcaaaacggcgtgcgcccgtgcgggctcggcgcgcgcgacacgctgcgcctcgaggccggcatgaacctgtacggccaggacatggacgagaccgtgtccccgctcgacgcgggcctcgcatggacggtcgacctgtcggcaccgcgcgacttcgtcggccgcgccgcgctcgagcgcgacggcacgcgcgccgcgttcgtcggcctgatcctgcaaaaggaaaacggcaaggcgggcggcgtgctgcgcgcgcaccagaaggtcgtcacgccgcacggcgaaggcgagatcacgagcggcacgttctcgccgtcgatgcaggaatcgatcgcgttcgcgcgcgtgccggcggccgtccaggtcggcgacaccattcatgtgcagattcgagacaagcaacttcccgcgcgcgtggtaaaactgccgttcgtgcgcaacggcaaggtcctcgctgcgtaa

SEQ ID NO: 71236 - protein, 372 aa, Burkholderia ambifaria MEX-5
MTALNHTPLNAAHRALNARMVDFGGWDMPVNYGSQIEEHEAVRTDAGMFDVSHMCVVDFTGSRVRAFFEHAIANHVGKLKTPGKALYSCLLNPQGGVIDDLIVYYFTEDFFRVVVNAGTAEKDIAWFNQLNEQGGYGLTITPRRDFAIVAVQGPNAREKVWTTVPTARAATSELKPFNAARVAGTPFGELTIARTGYTGEDGFEVIVPAVHVEALWTALQQNGVRPCGLGARDTLRLEAGMNLYGQDMDETVSPLDAGLAWTVDLSAPRDFVGRAALERDGTRAAFVGLILQKENGKAGGVLRAHQKVVTPHGEGEITSGTFSPSMQESIAFARVPAAVQVGDTIHVQIRDKQLPARVVKLPFVRNGKVLAA

SEQ ID NO: 71237 - DNA, 1110 bp, Cyanothece sp. PCC 8801
  CDS (1)..(1110): transl_table=11
atgagtaatctattgcgtacccctttatttgatctaattgttcaacaaaaagctaaattgactgagttttcgggttgggaaatgcccgttcaatttagtaaacttaaagacgaacatcaagcagtccgtaccgatgtgggaatgtttgatatctcccacatgggaaaatttgcgcttcaagggactgaattactcaaaagcttacaatttctcgttccctcagacttagaacgcttacaaccgggacaagcgcaatataccgtactcctcaaccctcaagggggcattattgatgatatcatcgtttattaccaaggaattacggaaacaggagaacaacgggctaatatcattgttaatgcggggacaacggaaaaagataaaacgtggctattatcccatttagacacacaaaagattacttttaaggatttatctggggaaaaagtccttattgcggttcaaggaccccaaagcgtggctaaactgcaagcttttgtccaagaagatctcagtcaagtaggattttttggacattttgaaggaactgtgctaaccaaacccgcttttattgcccgcacgggctatactggggaagatggatttgaagtgatggttgatcccgaagtaggacaagacctctggcgatcgctattccaagcaggggtaactccctgtgggttaggggcacgggataccctacgcttagaagcagctatgtgtctctatagccaggatattgatgataataccacccccttagaagcgggattaaattggttagtccatctcgatagcaaaggagactttatcggacgcgatatcctcgaaaaacagaaagcgcagggggtagaacgtcgtttagtggggttgcaaatggaaggccgtcatattgctcgtcatggctatcctgtgctgtatgagggtaaaatagtgggggaagtgaccagtggaaccttacctccaaccgtgggtaaagcgatcgccctagcgtacgttcctcgcagtttagggaaagtcggaacaccccttgaggtagaaattcgcggtcaaaattgccaagcaattgtcgttaaaaagcctttttatcgttctcctaaccgtttttaa

SEQ ID NO: 71238 - protein, 369 aa, Cyanothece sp. PCC 8801
MSNLLRTPLFDLIVQQKAKLTEFSGWEMPVQFSKLKDEHQAVRTDVGMFDISHMGKFALQGTELLKSLQFLVPSDLERLQPGQAQYTVLLNPQGGIIDDIIVYYQGITETGEQRANIIVNAGTTEKDKTWLLSHLDTQKITFKDLSGEKVLIAVQGPQSVAKLQAFVQEDLSQVGFFGHFEGTVLTKPAFIARTGYTGEDGFEVMVDPEVGQDLWRSLFQAGVTPCGLGARDTLRLEAAMCLYSQDIDDNTTPLEAGLNWLVHLDSKGDFIGRDILEKQKAQGVERRLVGLQMEGRHIARHGYPVLYEGKIVGEVTSGTLPPTVGKAIALAYVPRSLGKVGTPLEVEIRGQNCQAIVVKKPFYRSPNRF

SEQ ID NO: 71239 - DNA, 1167 bp, Micrococcus luteus NCTC 2665
  CDS (1)..(1167): transl_table=11
atgagcgattcgacgcgcaactccccgctgcacccggtccacgaggccgcgggcgccacgttcacggacttcggcggctggaacatgcccctgaagtacggctccgagctggccgagcacaaggccgtccgcacctccgcaggcctgttcgacctctcccacatgggcgaggtccgggtcaccggcccggaggccggggccatgctggaccacgccctctcgagcgtgctctccacgttgaagcccggccgcgccaagtacgccctgtgcctgacggacgccggcaccatcctggacgacacgatcgtctaccggatggacgacggcgaggccggctccgagcccgactacctggtggtgcccaacgctggcaacatcgccgcggtccacaccgccctgaaccagcgggcgtcgggctgggatgccgtcgtcgaggacgagtcctcgaccaccgccctcgtggccgtgcagggcccgcaggccgagaggatcctcgcccgggccatgccggaggccgcggcgcagctggccgagctgaagtactacggccacctgaccctgaccgtgcccacggacgccggcgacgtcaccgccgtcgtcgcccgcaccggctacaccggtgaggacggcttcgagctgttcctgcccgccgcctccaccgccgaggccggcgaccgcggctccgccgtgtggaacacgatgctctcggccgcggacgaggcgggcgtggagctgacgctgtgcgggctcgcctcgcgggactcgctgcgcctcgaggcgggcatgccgctctacggcaacgagctggacaccgggcaccagccgcacgcctctggcgtcggcttcgcggtgcccgcgagcaaggaggccgacttcgtcggccggtccgcgctggtcggcagggacgacgtcgaggaggtcgtcgtggggctgcagggcgcgggtcggcgtgccggccggcacggttacgccgtgctggacgagtccggcgagcgggtgggcgaggtgacctcgggcgcccccagcccgaccctcggacaccccatcgccctggcccgtgtccgccgcgacgtggccgccgagggcacgtccctgcaggtggacctgcgcggccgcggcgagccgttcaccgtggtggccacgccgttctaccgccgggagcgctga

SEQ ID NO: 71240 - protein, 388 aa, Micrococcus luteus NCTC 2665
MSDSTRNSPLHPVHEAAGATFTDFGGWNMPLKYGSELAEHKAVRTSAGLFDLSHMGEVRVTGPEAGAMLDHALSSVLSTLKPGRAKYALCLTDAGTILDDTIVYRMDDGEAGSEPDYLVVPNAGNIAAVHTALNQRASGWDAVVEDESSTTALVAVQGPQAERILARAMPEAAAQLAELKYYGHLTLTVPTDAGDVTAVVARTGYTGEDGFELFLPAASTAEAGDRGSAVWNTMLSAADEAGVELTLCGLASRDSLRLEAGMPLYGNELDTGHQPHASGVGFAVPASKEADFVGRSALVGRDDVEEVVVGLQGAGRRAGRHGYAVLDESGERVGEVTSGAPSPTLGHPIALARVRRDVAAEGTSLQVDLRGRGEPFTVVATPFYRRER

SEQ ID NO: 71241 - DNA, 1095 bp, Providencia stuartii ATCC 25827
  CDS (1)..(1095): transl_table=11
atggcaaagcaaaccccgctatatgatgaacatatagcctgcggtgcgaaaatggtggattttcatggttggatgatgccattgcactacgggtcacaaatcaatgaacataatttagtgagaaccgatgctgggatgtttgatgtctcccacatgactattgttgatctacatggtgaaggttgccgcgatttccttcgctatcttctcgcaaatgatattgccaagctgaccgacaaagggaaggcactttatacggggatgttaaatgcttcaggcggagtcattgacgatttaattgtttattaccttaatgatgatttctaccgcttggttgtcaactccgcgacccgtgataaggatatcgcatggattgaacagcatatgaaatcgtatcctgtctctattgaagtgcgtgatgatcttgccctattagcggttcaaggccctacagcgcaacaaaaagtccattcgctattgacgccatcacaatgtgccctgttggcagatatgaagccattctatggggtgcaagccgatgaactctttattgcaactacgggctatactggcgaaaaaggctatgaaatagcattgccgaaagcgcaagtggtcgagttttggcatcaattgctgaaagccggtgttcatcccgcagggttaggtgcgcgtgatactttgcgccttgaggctggcatgaatttatatgggcaagacatggatgagactatctcaccactggctgccaatatgggatggacgatcgcttggaagcctgaagaccgccaattcatcggtcgtgaagcattagagaaattaaaagagcaaggcaccgaaaaattagtcggtattgttatgcgtgaaaaaggcatattacgagcaggccaaacggtacgtttcaccgacgatttaggtaaattacaagaaggggttattaccagcggctctttctcgccaacactcggtttcagtattgccttggcacgtgtgccaaaagaaatacaagataaagccattgttgaaatacgtaaccgagaaatgcctgttgaggtggtaaaacctgggtttgtgcgggaaggaaaagccctcgtttaa

SEQ ID NO: 71242 - protein, 364 aa, Providencia stuartii ATCC 25827
MAKQTPLYDEHIACGAKMVDFHGWMMPLHYGSQINEHNLVRTDAGMFDVSHMTIVDLHGEGCRDFLRYLLANDIAKLTDKGKALYTGMLNASGGVIDDLIVYYLNDDFYRLVVNSATRDKDIAWIEQHMKSYPVSIEVRDDLALLAVQGPTAQQKVHSLLTPSQCALLADMKPFYGVQADELFIATTGYTGEKGYEIALPKAQVVEFWHQLLKAGVHPAGLGARDTLRLEAGMNLYGQDMDETISPLAANMGWTIAWKPEDRQFIGREALEKLKEQGTEKLVGIVMREKGILRAGQTVRFTDDLGKLQEGVITSGSFSPTLGFSIALARVPKEIQDKAIVEIRNREMPVEVVKPGFVREGKALV

SEQ ID NO: 71243 - DNA, 1146 bp, Cyanothece sp. PCC 7424
  CDS (1)..(1146): transl_table=11
gtgacaaactcagactcatcctcaaaccctctcctacgcactcccttatatgacctgaccttacaacaaaaggctaaatttactgccttttctggttgggaaatgccgatacagtttagcggggtgaagcaagaacatgaagtagtacgggccaaagttggaatgtttgatatctcccatatgggaaagtttgtttttcaaggcaaagagattattaaacagttacaagggttagttccttctaatttaagtcgtttaaagcccggtcaggcacaatataccgttttgcttaaccccgatgccggaattattgacgatattatcatttactatcagggagagacaacagagggtgagcaacaagttaccatgattgtcaatgctgccactaccgacaaagataaaacttggatactcgatcatctttcctcagagtcgatacaatttgaagacctttctcaacaaaaagctttaattgctgttcaaggcatatccgccgaaacctttctacaaaccttcgtcaaagaaaatttatcccaggtaaaactgtttgaacatctcaacgcaaccatattagagcaaccgggatttattgctagaacaggatacaccggtgaggatgggtttgaggtgatggtcgacccagacataggacaacaattatggcgcaagttgtcagaactcggtgtaaccccttgcgggttgggggctagagatactctgcgtttagaagcctcattagctttgtatggtcaagatattgatgagacaaccacacccctagaagccgggttaggatggttagttcatttaaaaaccttaaaagataattttatcggtcgagcggtattagaacaacaaaaagcccaaggggtaactcgttgtttagtggggttacagatggaaggacgacatattgcccgtcatggttatccggtcatctcaaagggtaaaaccgtaggcgaagtcactagcgggacaatatcccctactttaggagtagcgatcgccctggcttatgttcccgccgaattgagtcaagtgggacaattattagacgtggaaattcgagggaaaacttatccggcaaaagtcgttaaacgccctttttatcgatcgccgagtaaatcgaagactgttatttaa

SEQ ID NO: 71244 - protein, 381 aa, Cyanothece sp. PCC 7424
MTNSDSSSNPLLRTPLYDLTLQQKAKFTAFSGWEMPIQFSGVKQEHEVVRAKVGMFDISHMGKFVFQGKEIIKQLQGLVPSNLSRLKPGQAQYTVLLNPDAGIIDDIIIYYQGETTEGEQQVTMIVNAATTDKDKTWILDHLSSESIQFEDLSQQKALIAVQGISAETFLQTFVKENLSQVKLFEHLNATILEQPGFIARTGYTGEDGFEVMVDPDIGQQLWRKLSELGVTPCGLGARDTLRLEASLALYGQDIDETTTPLEAGLGWLVHLKTLKDNFIGRAVLEQQKAQGVTRCLVGLQMEGRHIARHGYPVISKGKTVGEVTSGTISPTLGVAIALAYVPAELSQVGQLLDVEIRGKTYPAKVVKRPFYRSPSKSKTVI

SEQ ID NO: 71245 - DNA, 1050 bp, Thermus aquaticus Y51MC23
  CDS (1)..(1050): transl_table=11
atgaagacgaccccgctctaccaggcccacctgcgccacggggggcgcatggtggcgttcgcgggctgcgccctgcccctccagtacacctccatcgtggaggagcacctggccgtgcggaggaaggccggcctctttgacgtgagccacatgggggagttcctgatccggggcgaggaggccctgccctttctgcagtgggccacggtcaacgacgtgggcaagctcaaggtgggccgggcccagtactccatgctccccagcgaaaggggcggcgtggtggacgacatctacctctaccgcctgggcgaggcggtttacctgatggtggtcaacgccgccaacatcgccaaggacctggaccacctgaaggccctggcccggggtttccgggtggaggtggaagacgtttccgaggccaccgcccttctggccctccaggggcccgaggcggcggcgatcctccagagcctcaccggggcggacctctccgcccgtaggaagaacgacgtctttgaggcccaggtggcggggcgccccgcccgcctcgcccgcactggctacaccggcgaggacggctttgagctcttcctggcccccgaggatgccgaggccatctttgaggcccttctggcggcaggggcgaggccctgtggccttggggcccgggacaccctgaggctcgaggcgggctttcccctctacggccacgagctcaccgaggccaccaaccccctctgcaccccctgggcctgggtggtgaagagggaaaaggactttttaggcaaggaggccatgctcgcctcgccctgccgggaaaagcttgtgggcctggtcctggagacggggattccccgggagggctacgccgtcctttccgaaaagggccccgtgggccgggtgaccagcgggggctactcgccgcttctggagaaggggatcgccctggcctacgtggaaaaggaggccgagggccccttctttgtggaggtcagggggcgggccgtccccgcctccattagcccgctgccctttgtgccgctaaaatag

SEQ ID NO: 71246 - protein, 349 aa, Thermus aquaticus Y51MC23
MKTTPLYQAHLRHGGRMVAFAGCALPLQYTSIVEEHLAVRRKAGLFDVSHMGEFLIRGEEALPFLQWATVNDVGKLKVGRAQYSMLPSERGGVVDDIYLYRLGEAVYLMVVNAANIAKDLDHLKALARGFRVEVEDVSEATALLALQGPEAAAILQSLTGADLSARRKNDVFEAQVAGRPARLARTGYTGEDGFELFLAPEDAEAIFEALLAAGARPCGLGARDTLRLEAGFPLYGHELTEATNPLCTPWAWVVKREKDFLGKEAMLASPCREKLVGLVLETGIPREGYAVLSEKGPVGRVTSGGYSPLLEKGIALAYVEKEAEGPFFVEVRGRAVPASISPLPFVPLK

SEQ ID NO: 71247 - DNA, 1128 bp, Cyanothece sp. PCC 7425
  CDS (1)..(1128): transl_table=11
ttggctgcagacacctcttcccctgaagcattacaacgcacccacctctaccacctgcataaagaacgggatgcccgcatgaccggctttggcggttgggaaatgcccgttcagtacctcggtatcagtacagagcatgtagcggtcaggcaaagcgtggggatgtttgatatttcccacatgggtaaattcaggctgagcggcaaggatttgcgcacccacctccaacctctggttccctctgatctgagcggactccagcccggtgttgccaaatactcggtgtttctaaatgccagaggtggagttctggatgatctgattttctatgtgctggaagcagatcaaacgggcatcgaacaggggttgttgattgttaacgctgctaccacagccaaggataaagcctggttactccatcacctggagactgaagcggttgaactagaggacatttctgcgtcaaacgttttgattgccctccagggtcccgatgccgctaacactctgcagcctctggtggacgtagatctatctttgctgaaaaactatacccactgctcggttcgcttgctagatacgactgcctggctagctcggactggctataccggcgaggatgggtttgagatcatggtggaggcagcaacgggagaagccctgtggcgatcgctgctggacttaggggtgatgccctgtggtttgggggcccgcgataccctgcgcttagaagccgccatgcccctctatggtcaggatattgatgattccaccacccccctggaagccgggctgggctgggtggtcagttgggataaagaggactttatcggcaaagcaagcctaattcagcagaaacaggccggggtgccacgacgactggtgggcttacagatgcagggccgccacattgcccgtcctggatatgctgttctgtttgcagatcaaccggtcggaaccgttaccagtggcagctttacccccaccctggcccaaccgatcgctctggcctacgttccccccgaactggctgcagttgggcaggaattagcggtggagatccggggcaaagcctgtcctgccacagttgtttcccgtcccttttatcgtcgccgtaaaagtgggtaa

SEQ ID NO: 71248 - protein, 375 aa, Cyanothece sp. PCC 7425
MAADTSSPEALQRTHLYHLHKERDARMTGFGGWEMPVQYLGISTEHVAVRQSVGMFDISHMGKFRLSGKDLRTHLQPLVPSDLSGLQPGVAKYSVFLNARGGVLDDLIFYVLEADQTGIEQGLLIVNAATTAKDKAWLLHHLETEAVELEDISASNVLIALQGPDAANTLQPLVDVDLSLLKNYTHCSVRLLDTTAWLARTGYTGEDGFEIMVEAATGEALWRSLLDLGVMPCGLGARDTLRLEAAMPLYGQDIDDSTTPLEAGLGWVVSWDKEDFIGKASLIQQKQAGVPRRLVGLQMQGRHIARPGYAVLFADQPVGTVTSGSFTPTLAQPIALAYVPPELAAVGQELAVEIRGKACPATVVSRPFYRRRKSG

SEQ ID NO: 71249 - DNA, 1113 bp, Arthrospira maxima CS-328
  CDS (1)..(1113): transl_table=11
atgaaaccaaccctgactcgcacccctctgtatgacctatccgttgaactcaaaggcaggatggttcccttttcgggctgggaaatggcggttcagtattccggtattacccaagaacatcaagcagtgcgatcgcaagtgggactatttgacatctcccacatgggcaaattttacctcgaaggtgaacagctaatcaatgccctcgaacccctatttccctctagtctcagtcgtctgcaacccggtcaagcccaatatacagtcctattaaatggcagtggcggcatattggatgatgtgattttttactaccaaggcttagacccagccacgggaaaccagcggggaatgatgattgttaatgcagccaccaagtccagagataaggcttgggtggtcgcccatttggaaggaaccggagtcgccctagaagacctatctcgcagccaggtattaattgcagtccagggaccccaagcggaagctgtccttggatccctagtagaagcggacttatcagcagttgccaattttggacatatagaaactacccttttcggaaaacctgcatttatcgcccggactggatacacgggagaggatgggtttgaagtcatggtaaatcccgacaccggagtaaatctatttcgggagttaatagaagtgggagccacgccctgtggtttgggggctagagataccctgcgtttagaagcggcaatggctttgtatgggcaagatattgatacccatagcacccctttagaggctggtttaggctggttaatccattgggatgagaagggggactttatcggtcgtgagtccctagaagcgcaaaaatccgggggtttatcgaggcggttagtggggctagaaatgcagggccgatatattgcccgccacggttattctgtgaaggctggcggcgaagtggtgggagaaattaccagcggcacgatgtcgcctaccctgggaaaggcgatcgccttagcctatgttcccgtagaattagccaaaatcggcagccaagtagaagtagaaatccgtaatcaaatctaccccgcaacggttgttaaacgtcccttctatcgttccccacatcggtag

SEQ ID NO: 71250 - protein, 370 aa, Arthrospira maxima CS-328
MKPTLTRTPLYDLSVELKGRMVPFSGWEMAVQYSGITQEHQAVRSQVGLFDISHMGKFYLEGEQLINALEPLFPSSLSRLQPGQAQYTVLLNGSGGILDDVIFYYQGLDPATGNQRGMMIVNAATKSRDKAWVVAHLEGTGVALEDLSRSQVLIAVQGPQAEAVLGSLVEADLSAVANFGHIETTLFGKPAFIARTGYTGEDGFEVMVNPDTGVNLFRELIEVGATPCGLGARDTLRLEAAMALYGQDIDTHSTPLEAGLGWLIHWDEKGDFIGRESLEAQKSGGLSRRLVGLEMQGRYIARHGYSVKAGGEVVGEITSGTMSPTLGKAIALAYVPVELAKIGSQVEVEIRNQIYPATVVKRPFYRSPHR

SEQ ID NO: 71251 - DNA, 1092 bp, Thioalkalivibrio sp. HL-EbGR7
  CDS (1)..(1092): transl_table=11
atgagcaagcagaccccgctgtatgagaaacacctggaagccggcgcccgcatggtggacttcggcggctggtccatgcccctgcattacggctcccagatcgaggaacaccacgccgtgcgccgcgatgccggcatgttcgacgtctcccacatgaccgtggtggacgtgcagggcaacggtgcccgcgactacctgcgcttcctgctggccaacgacgtggcgaaactcaaggtgcccggcaaggccctgtacagttgcatgctcacccccgagggcggggtggtggacgacctgatcacctactatctctccgatacgttctatcgcctggtggtcaacgcggccacccgggacaaggatctggcctggatgcgggatcgggccaccggtttcgatgtgctgctccaggagcgggacgatctcgccatggtggcggtgcagggtccccatggccgtgacaaggccctgtcggtattggatggcgagatcgcccgggtcgccgatgccctgtctcccttcgtgggcgggcaggccggcgactggttcgtgggccgcaccggttacaccggcgaggacggcttcgagatcatgctgcccgccgccgaggcacccgccttctgggaccgcctcaaggtggccggcgtgcagcccgccggcctcggcgcccgggacaccctgcgcctggaggcgggcatgaatctctacggccaggacatggacgagcaggtctcgcccctggaatcgggtctcgcctggaccgtggccttcgagcccgccgagcgtgacttcgtcggccgtgcggccctggaaaaacagaaggcggcaggcggcctgcgccgtttcgtgggcctggtgctggagggccgtggcgtgctgcgcggccacatgcgcgtgctgtgcggtgcggccggcgagggcgagatcaccagcggcggcttctcgcccaccctgggtgtctccatcgccctggcccgggtgcccgcgggcaccggcgagcgcgtggaagtggacgtgcgcggcaagccccagccggccaggctggtcaagccccccttcgtgcgcaacggccaggcctgcgtggagatctga

SEQ ID NO: 71252 - protein, 363 aa, Thioalkalivibrio sp. HL-EbGR7
MSKQTPLYEKHLEAGARMVDFGGWSMPLHYGSQIEEHHAVRRDAGMFDVSHMTVVDVQGNGARDYLRFLLANDVAKLKVPGKALYSCMLTPEGGVVDDLITYYLSDTFYRLVVNAATRDKDLAWMRDRATGFDVLLQERDDLAMVAVQGPHGRDKALSVLDGEIARVADALSPFVGGQAGDWFVGRTGYTGEDGFEIMLPAAEAPAFWDRLKVAGVQPAGLGARDTLRLEAGMNLYGQDMDEQVSPLESGLAWTVAFEPAERDFVGRAALEKQKAAGGLRRFVGLVLEGRGVLRGHMRVLCGAAGEGEITSGGFSPTLGVSIALARVPAGTGERVEVDVRGKPQPARLVKPPFVRNGQACVEI

SEQ ID NO: 71253 - DNA, 1095 bp, Enterobacter cancerogenus ATCC 35316
  CDS (1)..(1095): transl_table=11
atggctcaacagactcctttgtacgaacaacacgtgttatgcggcgcacgcatggtggatttccatggctggatgatgccgctgcactatggctcgcagattgatgagcaccacgcggtgcgcacggatgccgggatgttcgacgtatcccacatgaccattgtcgacctgcgcggcagccgcacccgggagtttttgcgttatctgctggcaaacgacgtcgcgaagctaaaaacgccgggcaaagcgctttataccggcatgcttaatgcctccggcggcgtgattgatgacctaatcgtctattacttctccgaagatttcttccgcctcgttgtaaactccgccacccgcgaaaaagacctctcctggatttcccaacacgccgaaccttacgccatcgacatcaccgtgcgtgacgatctgtcgctgatcgccgtgcaggggccgaacgcgcaggcgaaagccgccacgctgttcaccgatgaacagcgccacgctaccgaaggcatgaagccgttcttcggcgtgcaggcgggcgatctgttcatcgcgaccaccggctataccggtgaagcgggttatgaaattgcgatgccgaatgagaaggccgcggcgttctggctagcgctggtagaggcgggcgtgaagcctgcgggcctgggcgcgcgcgatacgctgcgtctggaagccggtatgaacctctacggtcaggagatggacgaaggcgtgtcgccgctggcggctaacatgggctggaccattgcctgggaaccggctgaccgcgactttattggccgtgaagcgctggagatgcagcgcgagaagggcaccgaccagctggttggcctggtgatgaccgagaagggcgtgctgcgcggcgagctgccggtacgtttcaccgatgccgacggcaatcaccgcgagggggtgatcaccagcgggtccttctccccgacgcttggctacagtattgccctggcgcgcgtcccggcgggcattggcagcacggcggtggtgcagatccgcaaccgcgagatgccggtcaacgtgaccaaaccgatttttgttcgcgccggtaagccggtcgcttaa

SEQ ID NO: 71254 - protein, 364 aa, Enterobacter cancerogenus ATCC 35316
MAQQTPLYEQHVLCGARMVDFHGWMMPLHYGSQIDEHHAVRTDAGMFDVSHMTIVDLRGSRTREFLRYLLANDVAKLKTPGKALYTGMLNASGGVIDDLIVYYFSEDFFRLVVNSATREKDLSWISQHAEPYAIDITVRDDLSLIAVQGPNAQAKAATLFTDEQRHATEGMKPFFGVQAGDLFIATTGYTGEAGYEIAMPNEKAAAFWLALVEAGVKPAGLGARDTLRLEAGMNLYGQEMDEGVSPLAANMGWTIAWEPADRDFIGREALEMQREKGTDQLVGLVMTEKGVLRGELPVRFTDADGNHREGVITSGSFSPTLGYSIALARVPAGIGSTAVVQIRNREMPVNVTKPIFVRAGKPVA

SEQ ID NO: 71255 - DNA, 1074 bp, Oryza sativa subsp. japonica
  CDS (1)..(1074)
atggtcccgttcgccgggtggagcatgcccatccagtacaaggacaccatcatggactccaccctcaaatgccgcgccaacggcagcctcttcgacgtctcccacatgtgcggcctcagcctccacggccgccaggccatccccttcctcgagtccctcgtcgtcgccgacgtcgcggcgctcaaggacggcaccgggacgctcaccgtcttcaccaacgaccgcggcggcgccatcgacgactccgtcgttaccaaggtcaccgaccagcacatctacctcgtcgtcaacgccgggtgcagggacaaggatctcgcccacattggggagcacatggaggccttcaacaagaagggcggcgacgtcaagtggcacgtccacgatgagcgctcgcttcttgcattgcagggacctcttgctgcaccaactctccagttgctgacaaaagaagatttaagcaaaatgtatttcagtgacttcaagatgattgacatcaatggatatgcttgctttctcaccagaactggttataccggtgaagatgggtttgaaatctctgttccatcagagaatgcagttgatcttgcaaaggccctcctggagaaatctgaaggcaaggtgagactgactggtttaggtgcccgtgacagtctccgcttggaggctggcctctgcctgtacggcaacgacatggagcaacacatcacaccagttgaggctggtctctcatgggcaattggcaagaggaggaaagcagaaggcggcttcctgggagcagatgtgatcctcaagcagctccaggaaggcccaaagatcaggcgtgtcggtctcctctcgcaaggaccgcctcctcggagtcatagtgagattgtgagcaactccggggagaacattggtgaggttaccagtggagggttcagcccctgcttgaagaagaacatcgccatgggctacgtaaaatccggtttgcacaaggctgggacagagttcaaggttgtcgtccgtgggaagtcctacgatgccgtcgtcaccaagatgccgttcgtgccgaccaagtactacaaaccctcatag

SEQ ID NO: 71256 - protein, 357 aa, Oryza sativa subsp. japonica
MVPFAGWSMPIQYKDTIMDSTLKCRANGSLFDVSHMCGLSLHGRQAIPFLESLVVADVAALKDGTGTLTVFTNDRGGAIDDSVVTKVTDQHIYLVVNAGCRDKDLAHIGEHMEAFNKKGGDVKWHVHDERSLLALQGPLAAPTLQLLTKEDLSKMYFSDFKMIDINGYACFLTRTGYTGEDGFEISVPSENAVDLAKALLEKSEGKVRLTGLGARDSLRLEAGLCLYGNDMEQHITPVEAGLSWAIGKRRKAEGGFLGADVILKQLQEGPKIRRVGLLSQGPPPRSHSEIVSNSGENIGEVTSGGFSPCLKKNIAMGYVKSGLHKAGTEFKVVVRGKSYDAVVTKMPFVPTKYYKPS

SEQ ID NO: 71257 - DNA, 1107 bp, Microcystis aeruginosa PCC 7806
  CDS (1)..(1107): transl_table=11
atggctaaccaagaagcaacttcccccgctattcgtacccccttatacaacttaattgcccaacaaaccagcaaatttaccccttttgcgggttgggagatgccgatacagtttagcggcctaaaaatcgaacataatgctgtccgcaacggtgtcgggatgtttgacatttcccacatgggcaaatttatcctaactggagataatctggttcaatctctccaaaccctagttccctctaatttagcccgtttaaaggcaggaaaagcacaatatagcgttttacttaacccagagggtggtataatcgatgatattatcttttactaccaaagcgaaagccagggcgtattaattgttaatgcctcaaccaccgataaagatcgagaatggattttaggcaatttagagggttcgggggtcaaattaaaggatttatcgcgagaaagggtcttaattgccctgcaaggacccaaagcagccacaattttacagcccttgattggggaaaaattaagcgattttggcctatttaatcactgggaaagccagcttttcggggaaaaagtttttatcgctaggaccggttacacgggagaagatgggtttgaaattatggccccccctgaaatcgggcagcaactttggacagaattcttaaatttaggggtgactccctgcggtttaggggcccgggataccctgcgtttagaggcagctttagccctttatggacaggatatcgacgatagcacgagtcccctagaggctggcttaaattggttggttcatctgccagaaaaaggcgattttatcggtcgcaatgtccttgaagaccaaaaacttaatggtgtcaatcggctcttggtaggattgcagatgtccggcaaacatatcgcccgtcacgattatccggtagtattcgctggggaagtggtgggtaaagtcaccagtggcactttatcaccaactttaaacacagcgatcgctttagcctatcttcccacacctttcgcctcgatcggacaagcgatcgaagtggaaattcgcggcagtacctaccccgctaccgtcgttaaaaaacccttttataaaagtaaaaagtaa

SEQ ID NO: 71258 - protein, 368 aa, Microcystis aeruginosa PCC 7806
MANQEATSPAIRTPLYNLIAQQTSKFTPFAGWEMPIQFSGLKIEHNAVRNGVGMFDISHMGKFILTGDNLVQSLQTLVPSNLARLKAGKAQYSVLLNPEGGIIDDIIFYYQSESQGVLIVNASTTDKDREWILGNLEGSGVKLKDLSRERVLIALQGPKAATILQPLIGEKLSDFGLFNHWESQLFGEKVFIARTGYTGEDGFEIMAPPEIGQQLWTEFLNLGVTPCGLGARDTLRLEAALALYGQDIDDSTSPLEAGLNWLVHLPEKGDFIGRNVLEDQKLNGVNRLLVGLQMSGKHIARHDYPVVFAGEVVGKVTSGTLSPTLNTAIALAYLPTPFASIGQAIEVEIRGSTYPATVVKKPFYKSKK

SEQ ID NO: 71259 - DNA, 1227 bp, Populus trichocarpa
  CDS (1)..(1227)
atgaggggaggaggtttgtggcaacttggccaatcaattacccgccgacttgctcaggttgataagaaggttgtgggacgtcgatactttgcctcagaagctgagctgaaaaagactgttctttatgacttccatgttgctaatggtggcaagatggtgccatttgctgggtggggcatgcccattcagtacaaggactctatcatggaatcaacggtgaattgtagacagaacggtagcctttttgatgtctcacatatgtgtgggttgagcctcaagggcaaggactgtattcctttcctagagaagcttgttattgctgatgttgccgcgcttgcacctggaactgggactctaactgtctttactaatgagaaaggaggagcaattgatgattcagtgatcaccaaagttcagaatgatcacatgtacatagttgtgaatgcagggtgtagagataaggatcttgctcacattgaggagcatatgaaggcatttaaggcaaaaggtggagatgtctcatggcacatccatgatgagagatctcttctcgccctccagggtcctctttctgcttctgttctccaacacctgacaaaagatgatttgagcaagttatactttggggagttccgtattacagacatcaatggagcgtactgctttatcactaggacaggatacactggagaagatggatttgaaatatcagttccttcagagaatgcagtggatcttgccaaagcaatcctagaaaaatctgaaggaaaaataaggttgacagggcttggtgcccgggacagtctccgacttgaagctgggctgtgcttatatggtaatgacatggaacagcacataacaccagtagaggcaggactgtcttgggcgatagggaagagaaggaaggctgaaggtggctttctgggtgctgaagtaatactcaaacaacttgcagaaggtccaaaaattaggcttgtaggatttacctctactggtccacctcccagatcccacagtgagattcaggatgagaaagggactaacattggagaaattacaagtggaggatttagcccatgcctcaagaaaaatatagccatggggtacgtgaaatctggttcacacaaggcaggcaccaaagctaaaatactggtacgtgggaaggcctatgatggagttgtcacaaaaaagccatttgtaccaactaaatattacaagccatcttaa

SEQ ID NO: 71260 - protein, 408 aa, Populus trichocarpa
MRGGGLWQLGQSITRRLAQVDKKVVGRRYFASEAELKKTVLYDFHVANGGKMVPFAGWGMPIQYKDSIMESTVNCRQNGSLFDVSHMCGLSLKGKDCIPFLEKLVIADVAALAPGTGTLTVFTNEKGGAIDDSVITKVQNDHMYIVVNAGCRDKDLAHIEEHMKAFKAKGGDVSWHIHDERSLLALQGPLSASVLQHLTKDDLSKLYFGEFRITDINGAYCFITRTGYTGEDGFEISVPSENAVDLAKAILEKSEGKIRLTGLGARDSLRLEAGLCLYGNDMEQHITPVEAGLSWAIGKRRKAEGGFLGAEVILKQLAEGPKIRLVGFTSTGPPPRSHSEIQDEKGTNIGEITSGGFSPCLKKNIAMGYVKSGSHKAGTKAKILVRGKAYDGVVTKKPFVPTKYYKPS

SEQ ID NO: 71261 - DNA, 1227 bp, Populus tremuloides
  CDS (1)..(1227)
atgaggggaggaggtttgtggcaacttggcctatcaataacccgccgccttgctcagactgataagaaggctgtgggacgtcgatactttgcctcagaagctgagatgaaaaagactgtcctttatgacttccatgttgctaatggtggcaagatggtgccatttgctgggtggagcatgcccattcagtacaaggactccatcatggaatcgacggtgaattgtagacagaatggtagcctttttgatgtctcacatatgtgtgggtttagcctgaagggaaaggactgtgttcctttcctagagaaacttgttattgctgatgttgctgcgcttgcacctggaactgggactctaactgtctttactaatgagaaaggaggagcaattgatgattcagtgatcaccaaggtgacggatgatcacatgtacatagttgtgaatgcagggtgtaaagataaggatcttgctcacatcgaggcacatatgaagtcattcaaggcaaagggtggagatgtctcatggcacatccatgatgagagatctcttcttgccctccagggtcctcttgctgcccctgttctccaacacctgacaaaagaggatttgagcaaggtatactttggggagttccgtattacagacatcaatggagtgcgctgctttattaataggacagggtacactggtgaagatggatttgaaatttctgttccttcagagaatgcagtggatctggccaaagcaaccctagaaaaatctgaaggaaaagtgaggttgacagggcttggtgctcgggacagtctccgacttgaagctgggctgtgcttatatggtaatgacatggaacagcacataacaccagtagaggcaggactgaattgggcgatagggaagagaaggaaggcagaaggcggctttctgggtgctgaagtaatactcaaacaacttgcagaaggtccaaaaatcaggcttgtaggatttagctctactggtccacctcctagatcccacagtgagattcaggatgagaaagggactagcattggagaaattactagtggaggatttagcccatgcctcaagaaaaatatagccatggggtacgtgaaatctggtttccacaagtcaggcaccaaagcgaaaatactggtacgtgggaaggcctatgatggagttgtcacaaaaaagccatttgtaccaactaaatattacaagccatcttaa

SEQ ID NO: 71262 - protein, 408 aa, Populus tremuloides
MRGGGLWQLGLSITRRLAQTDKKAVGRRYFASEAEMKKTVLYDFHVANGGKMVPFAGWSMPIQYKDSIMESTVNCRQNGSLFDVSHMCGFSLKGKDCVPFLEKLVIADVAALAPGTGTLTVFTNEKGGAIDDSVITKVTDDHMYIVVNAGCKDKDLAHIEAHMKSFKAKGGDVSWHIHDERSLLALQGPLAAPVLQHLTKEDLSKVYFGEFRITDINGVRCFINRTGYTGEDGFEISVPSENAVDLAKATLEKSEGKVRLTGLGARDSLRLEAGLCLYGNDMEQHITPVEAGLNWAIGKRRKAEGGFLGAEVILKQLAEGPKIRLVGFSSTGPPPRSHSEIQDEKGTSIGEITSGGFSPCLKKNIAMGYVKSGFHKSGTKAKILVRGKAYDGVVTKKPFVPTKYYKPS

SEQ ID NO: 71263 - DNA, 1227 bp, Populus tremuloides
  CDS (1)..(1227)
atgaggggaggaggtttgtggcaacttggccaatcaattacccgccgacttgctcaggttgataagaaggttgtgggacgtcgatactttgcctcagaagctgagctgaaaaagactgttctttatgacttccatgttgctaatggtggcaagatggtgccatttgctgggtggagcatgcccattcagtacaaggactctatcatggaatcaacggtgaattgtagacagaacggtagcatttttgatgtctcacatatgtgtgggtttagcctcaagggcaaggactgtattcctttcctagagaagcttgttattgctgatgttgccgcgcttgcacctggaactgggactctaactgtttttactaatgagaaaggaggagcaattgatgattcagtgatcaccaaagttcagaatgatcacatgtacatagttgtgaatgcagggtgtagagataaggatcttgctcacattgaggagcatatgaaggcatttaaggcaaaaggtggagatgtctcatggcacatccatgatgagagatctcttctcgccctccagggtcctctttctgcttctgctctccaacacctgacaaaagatgacttgagcaagttatactttggggagttccgtattacagacatcaatggagcgcactgctttatcactaggacaggatacactggagaagatggatttgaaatatcagttccttcagagaatgcagtggatcttgccaaagcaatactagaaaaatctgaaggaaaaataaggttgacagggcttggtgcccgggacagtctccgacttgaagctgggctgtgcttatatggtaatgacatggaacagcacataacaccagtagaggcaggactgtcttgggcgatagggaagagaaggaaggcagaaggtggctttctgggtgctgaagtaatactcaaacaacttgcagaaggtccaaaaatcaggcttgtaggatttacctctactggtccacctcccagatcccacagtgagattcaggatgagaaagggactaacattggagaaattacaagtggaggatttagcccatgcctcaagaaaaatatagccatggggtacgtgaaatctggttcacacaaggcaggcaccaaagctaaaatactggtacgtgggaaggcctatgatggagttgtcacaaaaaagccatttgtaccaactaaatattacaagccatcgtaa

SEQ ID NO: 71264 - protein, 408 aa, Populus tremuloides
MRGGGLWQLGQSITRRLAQVDKKVVGRRYFASEAELKKTVLYDFHVANGGKMVPFAGWSMPIQYKDSIMESTVNCRQNGSIFDVSHMCGFSLKGKDCIPFLEKLVIADVAALAPGTGTLTVFTNEKGGAIDDSVITKVQNDHMYIVVNAGCRDKDLAHIEEHMKAFKAKGGDVSWHIHDERSLLALQGPLSASALQHLTKDDLSKLYFGEFRITDINGAHCFITRTGYTGEDGFEISVPSENAVDLAKAILEKSEGKIRLTGLGARDSLRLEAGLCLYGNDMEQHITPVEAGLSWAIGKRRKAEGGFLGAEVILKQLAEGPKIRLVGFTSTGPPPRSHSEIQDEKGTNIGEITSGGFSPCLKKNIAMGYVKSGSHKAGTKAKILVRGKAYDGVVTKKPFVPTKYYKPS

SEQ ID NO: 71265 - DNA, 1125 bp, Microcoleus chthonoplastes PCC 7420
  CDS (1)..(1125): transl_table=11
atggctaagccaaaaccttctcttgcaagaactcctctgtttgacctcgccgttgaacaaaatgcccgcttcactggcttttcgggttgggaaatgccagtccaatacagcagtattggacaagaacacgaagcagtacgcaccgatgcgggaatgttcgatatctcccacatgggaaaatttgcttttaccgggaagcagctatggcaagcgttacagcgattagtcccatcagatttgagtcgattacaaccgggtcaagctcaatacacggtattgttgaatcctcaagggggcatcattgatgatgtgattgtttaccacaaaggggaggatgaaacgggcgaatcgcaggcgatgatgattgttaatgcggcaacctgtcagaaggataaagagtggttgttagcacaactggagaacaccgaggtaaaattactagacctttcccaggaaaacatcttgatagccctacaaggatctcaagctgagacttacttacagccgtttgtccaggaagacttaacttcactgaaatcctttggacatctcaatgcaacgattctagatcaacccggatttatcgccaggacagggtacactggcgaagatgggtttgaggtgatggttaaaccggaggttggggtacaactgtggcgtcgtctgttccaggctggagtgactccctgtggtttgggagcaagagatacgttgcgactagaagcagggttggcactttatggacaagatattgatgatacgacgactcccctagaagctggtttaagttggctggtacatttagaccgtaaaggcgattttatcgggcgttctgtactagaagcccaaaaagccaatggtgtggaacgtcggttagtggggattgaaatgcaggggcgacatatagcccgtcacggttactcggtactatctgagggacaagtcgtgggagagataacgagtggtacctattcaccaacactaggaagagcgatcgcgcttgcctattgtcccacatccctcgccaagaggggtcaacagttagaggtagaaattcgcggtaagacttatcccgccgttatcgtcaaaaaacccttttatcgcgccaaaaaaccttcgagttag

SEQ ID NO: 71266 - protein, 374 aa, Microcoleus chthonoplastes PCC 7420
MAKPKPSLARTPLFDLAVEQNARFTGFSGWEMPVQYSSIGQEHEAVRTDAGMFDISHMGKFAFTGKQLWQALQRLVPSDLSRLQPGQAQYTVLLNPQGGIIDDVIVYHKGEDETGESQAMMIVNAATCQKDKEWLLAQLENTEVKLLDLSQENILIALQGSQAETYLQPFVQEDLTSLKSFGHLNATILDQPGFIARTGYTGEDGFEVMVKPEVGVQLWRRLFQAGVTPCGLGARDTLRLEAGLALYGQDIDDTTTPLEAGLSWLVHLDRKGDFIGRSVLEAQKANGVERRLVGIEMQGRHIARHGYSVLSEGQVVGEITSGTYSPTLGRAIALAYCPTSLAKRGQQLEVEIRGKTYPAVIVKKPFYRAKKPSS

SEQ ID NO: 71267 - DNA, 1104 bp, Verrucomicrobiae bacterium DG1235
  CDS (1)..(1104): transl_table=11
atgtcagacgcgaagcgtactcctctctatgatttcaatgtagccaatggcgggcggatggtcgatttcgccggctgggagatgccggtacagtacgagagtatcgtggaagagcacaaggccacgcggacagcggccggcttgtttgacgtgagccatatgggcgaggtgacggttaagggtcctcagtcggaggcgtttctgaactacgtgctgaccaacgacgtttcgacgatggacgacggcaaggcgctctacagccttatgtgtcagcccgatgggggcgtggtggacgacctgcttgtctaccggatggcggagggctcctatctgctttgtctgaacgcggcgaacgcggtgaaagatgtggcttggctagagaaggaggctgctaatttcgaggtggagctagtcgacgtatccgaaaagtacggactggttgccctgcagggtccgaaggccttcccgatattgaaaggcctgagctcggtggatctttcggggcttggctactatcggttcgtgcaaggcgagatcgctgggatctcctgcattatcagccgcaccggttatacgggcgaagtgggcgtggagctttttgtggcggcggaaaaaaccgctgagctagcggaggccttgtttgacgctggcaaggcggatggtctggttctagctggccttggggctcgcgatagtttgcggcttgaggctgggtattcactttacggacacgagatcgatgagaagataggaccggtcgaggctggtttgatgtggaccgtaagtctcaagaagccgtgcgattttattggtaaggaggcgattctctcgaaaaagcagagcggtcctgcgcaaaagatcgtgtttttcaagacaggcgggcgtcgtatcgcccgtcccggaacggaggtcgtatccggcggcgctgctgtggggacggtggtttccgggaccttttcgccgattttgaacgaggcaattggctcggctttggtggacgccgctgtcgcgaagtctgacgagcttgcggttgatctccgtggcaaggcgttcccgatcgagcgggcgcggccgccctttctgcctttgaatccgcaggcctga

SEQ ID NO: 71268 - protein, 367 aa, Verrucomicrobiae bacterium DG1235
MSDAKRTPLYDFNVANGGRMVDFAGWEMPVQYESIVEEHKATRTAAGLFDVSHMGEVTVKGPQSEAFLNYVLTNDVSTMDDGKALYSLMCQPDGGVVDDLLVYRMAEGSYLLCLNAANAVKDVAWLEKEAANFEVELVDVSEKYGLVALQGPKAFPILKGLSSVDLSGLGYYRFVQGEIAGISCIISRTGYTGEVGVELFVAAEKTAELAEALFDAGKADGLVLAGLGARDSLRLEAGYSLYGHEIDEKIGPVEAGLMWTVSLKKPCDFIGKEAILSKKQSGPAQKIVFFKTGGRRIARPGTEVVSGGAAVGTVVSGTFSPILNEAIGSALVDAAVAKSDELAVDLRGKAFPIERARPPFLPLNPQA

SEQ ID NO: 71269 - DNA, 1092 bp, gamma proteobacterium HTCC5015
  CDS (1)..(1092): transl_table=11
atgacacagcaaaccccgctctaccaatgccatgtcgacatgggcgccaagatcgtcgattttgccggctggtcgatgcctattcagtacacgtcccaaattgaagagcaccatcaggtgcgcagcgatgcaggcatgtttgatgtctcgcatatgacggtggtcgatttgcacggcgagcgcgtacgcgactttctcagctatgtgatggccaatgatattgccaaggtgactaagcgtggcaaggcgctttacaccgcgatgctcaatgagcagggcggcgtcatcgacgacctgattatctactatctcgaagaccactttttccgcttggttgtgaacgcggcgacgcgcgataaagatttggcgtggctggaacagcaagcggcggcattctctgtcgaggtcaaagagcgcagtgatttggcaatgattgccgtccaagggccgaaggccatcgaaaaagcgctgcaattgattcccgaagagtttcgcgaaagcgtcttggcgctgagtaaatttgaggcctgtgaggtggcagagttgtttgtcgctcgcaccggttacaccggtgaagacggcttggaaatcatcttgcccaatgagtcggcccccgacttttggaaagcgctcgataaagtgggcgttgcgcccattgggctcggcgcgagggacagcctgcgtctcgaggcgggaatgaatttgtacggcaacgacatggacgaatcgaccacacctttggtctcagcgctgggatggactgtggcgatgaaggacgagcgggatttcattggtcgcgctgccctagagcagcaaaagcaagcgggtgtcccgcaaaaactcgtgggtttggtgctagagggtcgcggcgtgatgcgcgctcatcagaaggtgtttgtcgacggtgatgaagtgggcgagctgacctctggcggtttctcgcctacactcaaaaactctattggcctagcgcgaatcgctcgcgatagtgcgtcgctgggcgacacggtcgagattgaaattcgcaacaaacgcattgctgcgcgcattgttaagtaccctttcgtacgcgatgggcaggcacaaatctaa

SEQ ID NO: 71270 - protein, 363 aa, gamma proteobacterium HTCC5015
MTQQTPLYQCHVDMGAKIVDFAGWSMPIQYTSQIEEHHQVRSDAGMFDVSHMTVVDLHGERVRDFLSYVMANDIAKVTKRGKALYTAMLNEQGGVIDDLIIYYLEDHFFRLVVNAATRDKDLAWLEQQAAAFSVEVKERSDLAMIAVQGPKAIEKALQLIPEEFRESVLALSKFEACEVAELFVARTGYTGEDGLEIILPNESAPDFWKALDKVGVAPIGLGARDSLRLEAGMNLYGNDMDESTTPLVSALGWTVAMKDERDFIGRAALEQQKQAGVPQKLVGLVLEGRGVMRAHQKVFVDGDEVGELTSGGFSPTLKNSIGLARIARDSASLGDTVEIEIRNKRIAARIVKYPFVRDGQAQI

SEQ ID NO: 71271 - DNA, 1104 bp, Photorhabdus asymbiotica subsp. asymbiotica ATCC 43949
  CDS (1)..(1104): transl_table=11
atggcaaaacaaactccattgtatgaccagcatctggcctgtggtgcgcgcatggtagattttcatggctggatgatgcctttgcattacggttcacaaatggatgaacatcatactgtccgcactgatgcgggtatgtttgatgtttcccatatgacgattgtggatttgcatggtactggctgccgtgatttcctgcgttatttactggcaaatgacattgctaaactcacagagaaaggtaaagccttatataccgggatgcttaacgcttccggcggtgttattgatgacctgattgtttattattttagtcacgatttttatcggatggtggtcaattctgcgacccgtgagaaagatctggcctggattaatgaacatgcaactcattactcagtcgatattcaagttcgcgatgatctggcgttgatcgccattcaaggccctgaagctcaggcaaaagtacaatctctgttgaatgatgaacaaaaacaggctatcgccggtatgaaaccattctttggtattcaggctgatgagctgtttatcgcaacgacgggctataccggagaagcgggttatgaaatagcgatgccaaaagagcaggccgcaaatttctggcaaaaattacttagtgctggcattaagcccgcagggttaggggcacgtgatactttgcggcttgaagcgggtatgaacctctatggacaggatatggatgaaactatttctccattagccgcgaatatgggctggacaatcgcctggaaaccagaagatcgccagtttataggccgtgaagcgctggaaagacagcgtaaagagggcacagatcaattggttggcttggtgatgagagagaaaggtgtgttacgcagtggcttaacggttagtttcactgatgagatgggcaccttacactctggcgttattaccagcggtacgttctccccaacattaggattcagtattgcccttgctcgtgtaccgcaagggattggtgaacaggcaattgtacaaatacgtcatcgtgagatgccggttcaggtagtcaaacctggttttgtgcgggtgggtaaacctctcgtatatacccaataa

SEQ ID NO: 71272 - protein, 367 aa, Photorhabdus asymbiotica subsp. asymbiotica ATCC 43949
MAKQTPLYDQHLACGARMVDFHGWMMPLHYGSQMDEHHTVRTDAGMFDVSHMTIVDLHGTGCRDFLRYLLANDIAKLTEKGKALYTGMLNASGGVIDDLIVYYFSHDFYRMVVNSATREKDLAWINEHATHYSVDIQVRDDLALIAIQGPEAQAKVQSLLNDEQKQAIAGMKPFFGIQADELFIATTGYTGEAGYEIAMPKEQAANFWQKLLSAGIKPAGLGARDTLRLEAGMNLYGQDMDETISPLAANMGWTIAWKPEDRQFIGREALERQRKEGTDQLVGLVMREKGVLRSGLTVSFTDEMGTLHSGVITSGTFSPTLGFSIALARVPQGIGEQAIVQIRHREMPVQVVKPGFVRVGKPLVYTQ

SEQ ID NO: 71273 - DNA, 1095 bp, Providencia rustigianii DSM 4541
  CDS (1)..(1095): transl_table=11
atggtaaagcaaacgacgctatatgatgagcatatagcctgtggcgcaaagatggtggatttccatggctggatgatgccattgcactatggttcgcaaatcaacgaacataatattgtccgaaccgatgcagggatgtttgatgtctctcatatgacaattgttgatttacatggcgaaggctgccgtgatttcctccgctatctcctcgcaaatgatattgcaaagttaaccatcaaaggcagagcactttatacaggaatgctgaatgcgtccggtggcgtaattgatgacttgattgtttactatctcgatgatgatttctaccgtttagtggtcaattcagcgactcgtgaaaaagacttagaatggattgaagagcacgcaaaaggttatgctgttgaaattaccgttcgtgatgatttggcattattagccgttcaagggccacatgcccaacaaaaagtccattctctactgaccgatgcacagtgtgctgcgattcaagatatgaagccattttatggtgtacaaacgggtgacctgtttgtggcaactacggggtataccggtgagaaaggctatgaaatcgcgatgccaaaggaacaggtggttgaattttggcgtaagctgttaaacgcaggcgttcatccagccggattaggtgctcgtgatacgctgcgtcttgaggcaggaatgaatctttatgggcaggatatggatgagagtatttcgccattagctgccaacatgggctggacgattgcttgggaacctcaagatagacagtttattggtcgtgaagcgctggaaaaactgcgggagcaaggaaccgaaaaattagtcggtattgtgatgcgtgaaaaaggtattttgcgtgcagaacaagtcattcgttttactgacgaattaggcaagttacagcaaggtgtcattaccagcggaacattttcgccgactttaggttttagtatcgcgttagcacgtgtgccaaacgatattcaaagtagtgcaattgttgagattcgccatcgggaaatgccggttgaagtagttaaaccgggcttcgttcgcgaaggtaaacctttagtttag

SEQ ID NO: 71274 - protein, 364 aa, Providencia rustigianii DSM 4541
MVKQTTLYDEHIACGAKMVDFHGWMMPLHYGSQINEHNIVRTDAGMFDVSHMTIVDLHGEGCRDFLRYLLANDIAKLTIKGRALYTGMLNASGGVIDDLIVYYLDDDFYRLVVNSATREKDLEWIEEHAKGYAVEITVRDDLALLAVQGPHAQQKVHSLLTDAQCAAIQDMKPFYGVQTGDLFVATTGYTGEKGYEIAMPKEQVVEFWRKLLNAGVHPAGLGARDTLRLEAGMNLYGQDMDESISPLAANMGWTIAWEPQDRQFIGREALEKLREQGTEKLVGIVMREKGILRAEQVIRFTDELGKLQQGVITSGTFSPTLGFSIALARVPNDIQSSAIVEIRHREMPVEVVKPGFVREGKPLV

SEQ ID NO: 71275 - DNA, 1176 bp, Providencia alcalifaciens DSM 30120
  CDS (1)..(1176): transl_table=11
atgaaacggggtttacagaaaaaatttataccgtcatcacgcaatcaccccatcagacacagtaatgtaaagagggtattcatggtaaagcaaacaactctatatgatgagcatatagcctgcggtgcaaaaatggtggatttccacgggtggatgatgccactgcactatggttcgcaaatcaacgaacataatattgtccgaaccgatgcaggaatgtttgatgtttcccacatgaccattgttgatttacatggtgaaggctgccgcgattttctccgttatcttctcgccaatgatattgccaaactcacgatcaaaggccgcgcactgtataccggtatgctgaatgcatccggtggtgtgattgatgatttgattgtttattaccttgacgatgatttctatcgtttggtggttaactctgcgacacgagacaaagacattgcatggattgaacagcatgctaaagagtatgctgttgcaatcactgtacgcgatgatctcgcgttattagccgttcaaggtccaaaggcacaagataaagttcactctttactgactgaagagcagcgtgctgcaattaaagatatgaagcctttctatggtgtacaaactggcgatctgtttattgcaacaacaggttataccggtgagaaaggctatgaaatcgcaatgccaaagcagcaagttgtagagttttggcgcaagctgcttaaagcgggtgtgcatccagctggcttgggtgctcgtgatacgttacgccttgaagcaggtatgaatttatatgggcaagatatggacgagtctatttctccattggcagccaatatgggatggacaattgcttgggaaccgcaagatcggaactttatcggtcgtgaagcattggaaaagcaacgtgctcaaggttcagacaaactggttggtattgtcatgcgtgaaaaaggcattttacgtgctgaacaggttgtgcgctttaccgacgaatcgggtaaattgcatgagggagtgatcactagcggttcattttctccaacgttgggtttcagtatcgcattagcgcgtgtaccgaatgggattaaaaatcaggccatcgttgaaattcgccatcgtgaaatgccggttgaagtggttaagccggggttcgtacgtgaaggtaaggcattagtataa

SEQ ID NO: 71276 - protein, 391 aa, Providencia alcalifaciens DSM 30120
MKRGLQKKFIPSSRNHPIRHSNVKRVFMVKQTTLYDEHIACGAKMVDFHGWMMPLHYGSQINEHNIVRTDAGMFDVSHMTIVDLHGEGCRDFLRYLLANDIAKLTIKGRALYTGMLNASGGVIDDLIVYYLDDDFYRLVVNSATRDKDIAWIEQHAKEYAVAITVRDDLALLAVQGPKAQDKVHSLLTEEQRAAIKDMKPFYGVQTGDLFIATTGYTGEKGYEIAMPKQQVVEFWRKLLKAGVHPAGLGARDTLRLEAGMNLYGQDMDESISPLAANMGWTIAWEPQDRNFIGREALEKQRAQGSDKLVGIVMREKGILRAEQVVRFTDESGKLHEGVITSGSFSPTLGFSIALARVPNGIKNQAIVEIRHREMPVEVVKPGFVREGKALV

SEQ ID NO: 71277 - DNA, 1224 bp, Ricinus communis
  CDS (1)..(1224)
atgagaggaggtctatggcaacttggtcaatcaatcacccgtcgtctttctcaagctgataagaaggctgtggcccgtcgatacttcgcctctgaagctgatctcaaaaagactgtactatatgactttcatgtggctcatggtgggaagatggtgccatttgctgggtggagcatgcccattcagtacaaggattctatcatggactctactgtgaactgtaggcagaacggcagcctatttgatgtctcccatatgtgtggactgagtctcaagggaaaggattgcgtccctttccttgagaagcttgttattgctgatgttgctgggcttgcacatggaactggcactctaactgtctttacaaatgagaaaggaggagcaattgatgattctgtgatcaccaaagttaaggatgatctcttatacatagttgtgaatgcggggtgtagggacaaggatttggctcacattgaggagcacatgaaggcattcaagacaaagggtggtgatgtctcatggcacattcatgacgagagatctcttcttgcacttcagggacctcttgctgccccagttcttcaacacctgacaaaagaggatctgagcaagatatactttggggaatttcatatgattgacatcaatggatcacactgctttctcactaggactgggtatactggtgaagatggatttgaaatctctgttgcttcggagcatgctgtggatcttgccaaggcaatcttagaaaaatctgaaggaaaaataagattgacagggctgggtgcacgtgacagcctccgacttgaagctgggttgtgtttatatggtaatgacatggaacaacacataacacctgtagaggcaggattgacatgggccatagggaaaaggcgaaagtctgaaggtggctttcttggtgctgaggtaatactcaaacaactagcagagggtcccaaaatcaggcgtgtaggatttacctcttctggtccaccacctagatcccacagtgagattcagaatgataaaggggaaaatattggagaaatcaccagtggaggatttagtccatgcctcaagaagaacattgctatggggtatgtgaaatctggattacacaaggcaggcaccaatgttaaaatacttgtgcgagggaaggcctatgatggagttgtcacaaaaatgccatttgtaccaactaaatattacaagccatcctaa

SEQ ID NO: 71278 - protein, 407 aa, Ricinus communis
MRGGLWQLGQSITRRLSQADKKAVARRYFASEADLKKTVLYDFHVAHGGKMVPFAGWSMPIQYKDSIMDSTVNCRQNGSLFDVSHMCGLSLKGKDCVPFLEKLVIADVAGLAHGTGTLTVFTNEKGGAIDDSVITKVKDDLLYIVVNAGCRDKDLAHIEEHMKAFKTKGGDVSWHIHDERSLLALQGPLAAPVLQHLTKEDLSKIYFGEFHMIDINGSHCFLTRTGYTGEDGFEISVASEHAVDLAKAILEKSEGKIRLTGLGARDSLRLEAGLCLYGNDMEQHITPVEAGLTWAIGKRRKSEGGFLGAEVILKQLAEGPKIRRVGFTSSGPPPRSHSEIQNDKGENIGEITSGGFSPCLKKNIAMGYVKSGLHKAGTNVKILVRGKAYDGVVTKMPFVPTKYYKPS

SEQ ID NO: 71279 - DNA, 1176 bp, Lepeophtheirus salmonis (salmon louse)
  CDS (1)..(1176)
atgattcctcgcttattaccaacactaagacgaggcctatcaactgctgagcaggtgaagaaaacatgcttgtatgattttcatatccaaaaaggtggcaaaatggtagaatttgcgggctattctatgccaatgcaatatatagacatgggtataggagagtctcatcaacacacaagaaaaaaatgctctattttcgatgtatcacatatgcaacaaagcaaagtatatggaaaggacagaaggcagttcattgagagcctaacaacattagatttgaagactttgaaggaagatagtggaagtttaacaatatttacaaatgaaaaaggggggatcgttgatgatctcattgtgatgaacacaagtctggattttctttatctcgtgactaatgcaggatgtaaagaaaaggatattttgctgatgaagaaaaaagttttagaaatgaaaagtgataatatggatatcgaactggagatcataaatgatcatgcacttatcgctatacaaggaccaaaaatggcagaatactttcaaccccatacagatgttgatttaaaaaagttgaaattcatgcagacttcgttgggtactgtttgtggggtacctatgtgcagaataacaagatgtggctacactggtgaagatggagtggaggtttccataccaaacgaacatgccgaggcagttttgcaaaagttaacaaattcaaattcttcgatcaaattagcaggtcttggagctcgtgactctcttagattggaggcagggctttgtttgtatggaaatgacatgaatgaagacattactcctgttgaagctagtttaaactggttgatttcaaaatcacgaagaaaggaaggaggctttccaggtcattcaatcatattaaatcaattatctaaaaaagatttccagtccaaaagaataggattggtttccaatggtcctccaccaagaagtggaatggaaatacttgattccaaagagaaccagattggtgttattacctcaggttgtccatcaccgacattaaagcataacgttgcaatgggatatataaataaatccatgtctaaaattggcaatactgtatatgtaaaagtaaggaataagattgttgaagcaacgatttctaaaatgccctttgtgaagtgtaactattttaactag

SEQ ID NO: 71280 - protein, 391 aa, Lepeophtheirus salmonis (salmon louse)
MIPRLLPTLRRGLSTAEQVKKTCLYDFHIQKGGKMVEFAGYSMPMQYIDMGIGESHQHTRKKCSIFDVSHMQQSKVYGKDRRQFIESLTTLDLKTLKEDSGSLTIFTNEKGGIVDDLIVMNTSLDFLYLVTNAGCKEKDILLMKKKVLEMKSDNMDIELEIINDHALIAIQGPKMAEYFQPHTDVDLKKLKFMQTSLGTVCGVPMCRITRCGYTGEDGVEVSIPNEHAEAVLQKLTNSNSSIKLAGLGARDSLRLEAGLCLYGNDMNEDITPVEASLNWLISKSRRKEGGFPGHSIILNQLSKKDFQSKRIGLVSNGPPPRSGMEILDSKENQIGVITSGCPSPTLKHNVAMGYINKSMSKIGNTVYVKVRNKIVEATISKMPFVKCNYFN

SEQ ID NO: 71281 - DNA, 1239 bp, Micromonas sp. RCC299
  CDS (1)..(1239)
atggctcttcgacacgcggctcagcgcctggcgcagcgcgccgcgcccctcgcgggccaggccgctcgcccgttactcatccccttctaccgccacatggcctccgacgccaacctcctgaagacggctctgtacgacttccacctcgagatgggcggcaagatggtccccttcgcgggccacagcatgcccatccagtacaaggacagcatcatggaggccacccagcactgccggagcaaggcttccatcttcgacgtctctcacatgctcggctcgtccatgcgcggtaaggacgcgatcgagttcgtcgagtccatcgtcgtcggcgacatccgcggcctgaagaacggcaccggtaccctctccgtggtgaccaacgacaagggcggcatcatcgacgacaccgtggtgaccaaggtgaacgacgaggatgtgtacatcgtgctcaacggcgcgtgcagcgagaaggaccaggcgcacatcaacaagcacctgaaggcgttcaaggccaagggtaaggactgcgagtttatcgtccacggtgaccgctccctgctcgcgtttcagggtcccaaggctgtcgacgtgctccagcccctgacggacatcgacctgagcaagctgtactttgggatgttcaccgagacgtccatcgcgggcaagcccgtgtggctgacccgcacggggtacaccggcgaggacggcttcgagatctcgctcaagaagaccgacaccgtcgccctcacgaagaagctcctcgagaaccccgacgcccgcatgtgcggcctcggcgcgcgcgattccctccgcctggaggcgggcctgtgcctctacggcaacgacctcaacgaggacattggtcccatcgaagccggcctgacctggaccatcggcaagtcccgccgcgagaagtgcgatttcgtcggcggcgacgtcatcaaggcgcagctcgagacacccgcgtccgtcaccaagcgacgcatcggcctcaaggttggcaaaggcgcgcccgcgcgagcggggtccaagatcctcgcacccgacggcgccgaggtcggcgaggtcaccagcggcggattttcccccgtgctccaggagaacatcgccatggggtacgtgctcaagtcccacgccaaggcgggcacggagctgcaggtggagacgcgcggaaggaagagcgaggcggtcgcgaccaagatgcccttcgtcacctgccactaccaccgcccggcgtaa

SEQ ID NO: 71282 - protein, 412 aa, Micromonas sp. RCC299
MALRHAAQRLAQRAAPLAGQAARPLLIPFYRHMASDANLLKTALYDFHLEMGGKMVPFAGHSMPIQYKDSIMEATQHCRSKASIFDVSHMLGSSMRGKDAIEFVESIVVGDIRGLKNGTGTLSVVTNDKGGIIDDTVVTKVNDEDVYIVLNGACSEKDQAHINKHLKAFKAKGKDCEFIVHGDRSLLAFQGPKAVDVLQPLTDIDLSKLYFGMFTETSIAGKPVWLTRTGYTGEDGFEISLKKTDTVALTKKLLENPDARMCGLGARDSLRLEAGLCLYGNDLNEDIGPIEAGLTWTIGKSRREKCDFVGGDVIKAQLETPASVTKRRIGLKVGKGAPARAGSKILAPDGAEVGEVTSGGFSPVLQENIAMGYVLKSHAKAGTELQVETRGRKSEAVATKMPFVTCHYHRPA

SEQ ID NO: 71283 - DNA, 1266 bp, Ostreococcus tauri
  CDS (1)..(1266)
atgcgtcgcttcgtggtcgatgccgcgcgtcgccacgcgcgatgcgcggtcgcgcgtccgtcgagcgcgcgcgcggtgcgagcgctggtgccggacgtgacgccggcgtacgcgcgcgcgtacgcggacgtgagcgcgctgaagcgcacgccgttgtacgacgtgcacgtcgcgcgcggtggaaagttggttgacttcgccgggtacgcgctgccgattcaatacggagactcgatcatggaggcgacgcagcactgccggacgaacgcgtcgttgtttgatgtgtcgcacatgcttgggtcgagcatcagggggaaggatgcgacggcgttcttggaatctctcgtcgtcgcggacctgaaggggttgaagaacggcacggggacgctgagcgtgatgacgaatgaaaagggcgggatcatcgacgatacggtgatcacgaagatcaacgatcacgattactacgtcgtgctcaacgccggatgcgcggaaaaggatcagaagcacatcaacgcccacttggccaaggccaaggcgaacggtatggatgttgatttcatcgtgcactcgaaccgttcgctcttggcgtttcaaggcccgaagacgatggaggtgctccagcgcttcaccgatttcgatctctccaagctctacttcggtatgttcacggagatgaccgtgaacggtggtaaggtttgggtgactcgtaccggttacacgggcgaggacggcttcgagatctccgtcccgaacgaggacgcggtgaagctcgccgaggcgctcgagggccaacccgaagttcgcttcgccgcgctcggtccgagagattctctccgcctcgaggccggtctctgcctctacggtaacgacttgaacgaagatatcaccccgccggaggctggtttgacgtggaccatcggcaaggcgcgtcgggagaagtgtgacttcgtcggcggcgagatcatcaagaagcagctcgagaacccggcgtcgatcccgcagcgacgcgtcggcctcaccttcaccggtaagggcgcccccgctcgccagcactccatcattctcgacatggacggtaacaccatcggtgaggtcacctctggtggcttctccccggtgctccaaaagaacatcgccatgggttacgtcgccaaggcgttcgccaaggcgggcaccgaggtccaggtcgagacgcgaggcaagcgcacggccgccgtgacgtcaaagatgcccttcgtgaacaccacctactacaagcccgagtaa

SEQ ID NO: 71284 - protein, 421 aa, Ostreococcus tauri
MRRFVVDAARRHARCAVARPSSARAVRALVPDVTPAYARAYADVSALKRTPLYDVHVARGGKLVDFAGYALPIQYGDSIMEATQHCRTNASLFDVSHMLGSSIRGKDATAFLESLVVADLKGLKNGTGTLSVMTNEKGGIIDDTVITKINDHDYYVVLNAGCAEKDQKHINAHLAKAKANGMDVDFIVHSNRSLLAFQGPKTMEVLQRFTDFDLSKLYFGMFTEMTVNGGKVWVTRTGYTGEDGFEISVPNEDAVKLAEALEGQPEVRFAALGPRDSLRLEAGLCLYGNDLNEDITPPEAGLTWTIGKARREKCDFVGGEIIKKQLENPASIPQRRVGLTFTGKGAPARQHSIILDMDGNTIGEVTSGGFSPVLQKNIAMGYVAKAFAKAGTEVQVETRGKRTAAVTSKMPFVNTTYYKPE

SEQ ID NO: 71285 - DNA, 1275 bp, Musa acuminata
  CDS (1)..(1275)
atgagaggaggcggcctctggcagctcagccaatgcctcgcccgccgcctcgcccgatccaagcccggcgccatgccccgcgccttcgccaccgcccccgctgcggagacggtggagctcaagaagacggcgctccacgacttccacgtcgagcacggcggcaaaatggtgcctttcgccgggtggagcatgccgctgcagtacaaggactcgatcatggactccaccctccactgccgcgccgccgccggcctcttcgatgtctcccacatgtgcggcctcagcctccgcggtcgcgattgcgccccattcctcgagaccctcgtcatcgctgacgtcgccggcctccgccctggcactgggaccctcaccgtcttcaccaacgagcgcggcggcgccatcgacgattccgtggtgaccaaggtgggagacgaccacatctacctggtggtaaacgccgggtgcagggacaaggacctggcgcacatcggcgcgcacttggaggccttcaaggccaagggaggggatgtggagtggcacattcatgatgaaaggtctttgcttgcgctccagggtcctatggctgcaccagttctccagttattaatgaaagacgatctaagcaaaatctattttggtgaatttcgcacattgaacatcaacggagcccattgtttcctcacaagaactggcaatccagtatctaatcttcctgaaatcatcagctacacaggtgaagatggatttgaaatctcggttccatccgagcatgccgtagatcttacaaaggcaattctggagaaatctgaagggaaggtgaggttgacaggtttaggtgctcgtgacagtctccgtctggaagctggcctatgtctctatggcaatgacatggagcagcataccacacctgttgaagctggcctttcctgggcaattggcaagagaagaagagcagaaggtggcttcttgggagcagaagtgatcttaaagcagctacaggaagggccaccagtaaggcgtgtcggtttcttctcaaacggcccacccccacgaagccacagcgagatcttgagcagcagcagcggagaaaagatcggcgaggtgaccagcggtggattcagcccctgcttgaagaagaacatagcaatggggtacgtgaagtcgggtttccacaagcctggaactgaagtcaagatcgtcattcgtgggaaggccaatgatggcatcgtcacgaagatgcccttcgttccaaccaagtattataagccatcttag

SEQ ID NO: 71286 - protein, 424 aa, Musa acuminata
MRGGGLWQLSQCLARRLARSKPGAMPRAFATAPAAETVELKKTALHDFHVEHGGKMVPFAGWSMPLQYKDSIMDSTLHCRAAAGLFDVSHMCGLSLRGRDCAPFLETLVIADVAGLRPGTGTLTVFTNERGGAIDDSVVTKVGDDHIYLVVNAGCRDKDLAHIGAHLEAFKAKGGDVEWHIHDERSLLALQGPMAAPVLQLLMKDDLSKIYFGEFRTLNINGAHCFLTRTGNPVSNLPEIISYTGEDGFEISVPSEHAVDLTKAILEKSEGKVRLTGLGARDSLRLEAGLCLYGNDMEQHTTPVEAGLSWAIGKRRRAEGGFLGAEVILKQLQEGPPVRRVGFFSNGPPPRSHSEILSSSSGEKIGEVTSGGFSPCLKKNIAMGYVKSGFHKPGTEVKIVIRGKANDGIVTKMPFVPTKYYKPS

SEQ ID NO: 71287 - DNA, 1101 bp, Bacillus thuringiensis subsp. konkukian
  CDS (1)..(1101): transl_table=11
atgattacattacaacgtacaccgttatttgatgtatacgcgaagtatggtgggaaaacaatcgacttcggtggttgggagttaccagttcaattttcaagcattaaagaagaacatgaagctgtacgtacagcggcgggtttgttcgatgtgtctcatatgggagaagttgaggtaaaaggtgtagatagtttagcatttttacaacgtgttgttacaaatgacgtatctaccttaaaggtaggaggcgcacaatatacagcaatgtgctacgaaaatggtggtacagtagatgatttattaatctacaaacgtggtgaagaagactatttattagttatcaacgcatcaaatatcgagaaagattacgaatggttagctagccatgtaattggcgatgcgacagtagtcaatgtttctagcgaagttgcacagcttgcaattcaaggaccaaaagcagaaggcattttacaaaaagttgtgtcagaagatttaaaagaaattaagttctttaaatttaaaaacgatattcttgtagatggaattccagcacttgtatctcgtacaggttacacaggtgaagatggatttgaaatttactgtaagagtgaagatgcagcaaaactttgggagaaacttcttgaagttggagcagaagaaggcttaaaagcatgtggtttaggtgctcgtgatacacttcgcttcgaagcaacattaccactttatggtcaagaattatcaaaagatattacaccgattgaagctggaattggctttgcggtaaaaacaaataaagaagcagacttctttggaaaagcaacgttaaaagagcaaaaagaaaacggtgcgcctcgcaaattagtcggcatcgaagtaattgaacgtggaattcctcgtacgcattaccctgtatttatcggagaagaaaaaatcggggaagtaacgagtggtacacaatctccaacgttaaagaaaagcattggtttagcactaattgatgtaaaatacgcagcagttgatacagaagtagaaattgaaattcgtaataaacgcgtcaaagcagtagttgttccaacaccattttataaacgttcaaagtaa

SEQ ID NO: 71288 - protein, 366 aa, Bacillus thuringiensis subsp. konkukian
MITLQRTPLFDVYAKYGGKTIDFGGWELPVQFSSIKEEHEAVRTAAGLFDVSHMGEVEVKGVDSLAFLQRVVTNDVSTLKVGGAQYTAMCYENGGTVDDLLIYKRGEEDYLLVINASNIEKDYEWLASHVIGDATVVNVSSEVAQLAIQGPKAEGILQKVVSEDLKEIKFFKFKNDILVDGIPALVSRTGYTGEDGFEIYCKSEDAAKLWEKLLEVGAEEGLKACGLGARDTLRFEATLPLYGQELSKDITPIEAGIGFAVKTNKEADFFGKATLKEQKENGAPRKLVGIEVIERGIPRTHYPVFIGEEKIGEVTSGTQSPTLKKSIGLALIDVKYAAVDTEVEIEIRNKRVKAVVVPTPFYKRSK

SEQ ID NO: 71289 - DNA, 1152 bp, Coxiella burnetii
  CDS (61)..(1152): transl_table=11
ttgaattgcgaggtatttgcttggcataagcgcgcctcctcccttataatctccagccatatggcaagacattcacccctctacgaagaacacgctaaagcgaaagcccactttgtggatttcgcggggtgggaaatgcctttgcattatggatcacagattgaagaacatcaccaagtgcgccaacgagcgggtatttttgatgtttctcacatgggcgttatcgacctcgaaggtgaagaagctactgcttttttgcgttatcttttagccaatgatgttgcaaaactcagtgacgtcggacgggctttgtatacctgtatgcttaacccacaaggcggcgttatcgatgatcttattgtttatcgagtggcgccgacgggttatcggttagtagtgaacgctgcaacgcgcgataaagacatcgcttggataaaagaaaaaggcgctggctacaaggtttcaatttctgaacgccctgaaatgtgcattcttgccgttcaaggcccacaagccatcgctgcggctaaatccatttttgatgaagcgctgtatgcgcaattggaagcccttaaacctttccactttatttcatcaccgacgcgagatttgcaaatagcccgaacaggctacacgggtgaagatggacttgaaataattgtccccgcttctcgcgcgacggatctttgggcgcgcttcgttcaccagggagtgaaaccttgtggtttaggagcacgcgataccttgcgcttagaagccggtttaaatttatatgggacagatatggacgaaacgacttctcctttaatttccaatctcagctggacggtgtcctggaacgacgcggatcgcaattttataggtcggcgcgccttggaaaaacaattggacgagaatgtcaaagaacgacttatcggtttagtgatggaagaacccggcatattacgcaatcaccaaaaagtttggttgacagaggatggggaaggaataattaccagcggcggtttttcgcctacattgggtcacgccattgcattggctcgcgtacctgttggagaagtggaaaaagcaactgtggagcgtcgtggtaaaaaaattcctgtaaaaataattaaaccgccctttgttcgacgtggtaaaaaaacattttga

SEQ ID NO: 71290 - protein, 363 aa, Coxiella burnetii
MARHSPLYEEHAKAKAHFVDFAGWEMPLHYGSQIEEHHQVRQRAGIFDVSHMGVIDLEGEEATAFLRYLLANDVAKLSDVGRALYTCMLNPQGGVIDDLIVYRVAPTGYRLVVNAATRDKDIAWIKEKGAGYKVSISERPEMCILAVQGPQAIAAAKSIFDEALYAQLEALKPFHFISSPTRDLQIARTGYTGEDGLEIIVPASRATDLWARFVHQGVKPCGLGARDTLRLEAGLNLYGTDMDETTSPLISNLSWTVSWNDADRNFIGRRALEKQLDENVKERLIGLVMEEPGILRNHQKVWLTEDGEGIITSGGFSPTLGHAIALARVPVGEVEKATVERRGKKIPVKIIKPPFVRRGKKTF

SEQ ID NO: 71291 - DNA, 1224 bp, Flaveria anomala
  CDS (1)..(1224)
atgaggggaggactatggcaactaggtcaatcaatcacccgtcggcttggtcaatctgataaaaagaccattgtccgcaggtgctatgcctcagaggctgacctcaagaagaccgttctgtatgatttccacgttgcccatggtggaaagatggtaccttttgctggttggagcatgccaatccagtacaaagattcaatcatggattccactataaattgcagggaaaacggtagtctttttgatgtttcacatatgtgtgggctaagtcttaaagggaaagactgtgtcgcgtttcttgagaagcttgtggttgctgatgtggctggacttgctcctggtaccggctcgctcactgttttcacaaatgagaaaggtggagcgatcgatgattctgtgatcaccaaagtgaccgatgaccacatttacttggttgttaatgcggggtgtcgagataaagatttggcgcacattgaagaacatatgaaggcttttaaagccaaaggtggggatgtaagctggcacatctatgatgagagatctcttttggctcttcagggtcctcttgcaggttctactcttcagcacttgactaaagaggatttgagtaaaatgtactttggggacttccgtattattgacatcaatggttccaaatgttttctaactagaaccgggtacactggtgaagatggatttgagatttctgttccctcagaaaatgcagtcgatcttgcaaaagcgattctagaaaaatctgaaggcaaagtaaggttgactggtcttggtgcgcgtgacagtcttcgtctcgaagctgggttgtgtctttatggcaatgacatggagcaacacataacccctgtggaggctgggctcacttgggccattggcaagagaagacgggctgagggtggttttctcggagctgatgtgatcctgaagcaaattgctgatggtcctgcaatcaggcgagttgggcttttctcaacaggcccaccagcccgcagccacagtgagattcagaacgagaagggggagaacatcggtgaggttactagtggagggtttagcccatgcttgaagaagaacataggcatggggtatgtgaagtcaggattgcacaaaccaggtaccaaactcaagattgtgatccgagggaaaacgtatgaagggtcggttaccaaaatgcccttcgtacccacaaagtactacaagccagcataa

SEQ ID NO: 71292 - protein, 407 aa, Flaveria anomala
MRGGLWQLGQSITRRLGQSDKKTIVRRCYASEADLKKTVLYDFHVAHGGKMVPFAGWSMPIQYKDSIMDSTINCRENGSLFDVSHMCGLSLKGKDCVAFLEKLVVADVAGLAPGTGSLTVFTNEKGGAIDDSVITKVTDDHIYLVVNAGCRDKDLAHIEEHMKAFKAKGGDVSWHIYDERSLLALQGPLAGSTLQHLTKEDLSKMYFGDFRIIDINGSKCFLTRTGYTGEDGFEISVPSENAVDLAKAILEKSEGKVRLTGLGARDSLRLEAGLCLYGNDMEQHITPVEAGLTWAIGKRRRAEGGFLGADVILKQIADGPAIRRVGLFSTGPPARSHSEIQNEKGENIGEVTSGGFSPCLKKNIGMGYVKSGLHKPGTKLKIVIRGKTYEGSVTKMPFVPTKYYKPA

SEQ ID NO: 71293 - DNA, 1224 bp, Flaveria pringlei
  CDS (1)..(1224)
atgaggggaggactatggcaactaggtcaatcaatcactcgtcggcttggtcaatctgataaaaagaccattgcccgcaggtgctatgcctcagaggctgacctcaagaaaaccgttctgtatgatttccacgttgccaatggtggaaagatggtaccttttgctggttggagcatgccaatccagtacaaagattcaatcatggagtccactataaattgcagggaaaacggtagtctttttgatgtttctcatatgtgtgggctaagtcttaaaggaaaagattgtgtcccgtttcttgagaagcttgtggttgctgatgtggctggacttcgtcctggtaccggctcgctcactgttttcacaaatgagaaaggtggagctattgatgattctgtgatcactaaagtgaccgatgatcacatttacttggttgttaatgcggggtgtcgagataaagatttggctcacattgaagaacatatgaaggcttttaaagccaaaggtggggatgtaagctggcacatttatgatgagagatctcttttggctcttcagggtcctcttgcaggctctactcttcagcacttgactaaagaggatttgagtaaaatgtactttggggacttccgtattattgatatcaatggttccaaatgttttctaactagaaccgggtatacaggtgaagatggatttgagatttctgttccctcagaaaatgcagttgatcttgcaaaagcaattctagaaaaatctgaaggcaaagtaaggttgactggtcttggtgcgcgtgacagtcttcgtcttgaagctgggttgtgtctttatggcaatgacatggagcaacacataacccccgtggaggccgggctcacatgggccattggcaaaagaagacgggctgagggtggttttctcggagctgatgtgatcctgaagcaaattgctgatggtcctgcaatcaggcgagttgggcttttctcaacgggcccaccagcccggagccacagtgagattcagaacgagaagggggagaacattggtgaggttactagcggagggtttagcccgtgcttgaagaagaacataggcatggggtatgtgaagtcgggattgcacaaaccaggtaccaaactcaagattgtgatccgagggaaaacgtatgaagggtcggttaccaaaatgccctttgtacccacaaaatactacaagccagcataa

SEQ ID NO: 71294 - protein, 407 aa, Flaveria pringlei
MRGGLWQLGQSITRRLGQSDKKTIARRCYASEADLKKTVLYDFHVANGGKMVPFAGWSMPIQYKDSIMESTINCRENGSLFDVSHMCGLSLKGKDCVPFLEKLVVADVAGLRPGTGSLTVFTNEKGGAIDDSVITKVTDDHIYLVVNAGCRDKDLAHIEEHMKAFKAKGGDVSWHIYDERSLLALQGPLAGSTLQHLTKEDLSKMYFGDFRIIDINGSKCFLTRTGYTGEDGFEISVPSENAVDLAKAILEKSEGKVRLTGLGARDSLRLEAGLCLYGNDMEQHITPVEAGLTWAIGKRRRAEGGFLGADVILKQIADGPAIRRVGLFSTGPPARSHSEIQNEKGENIGEVTSGGFSPCLKKNIGMGYVKSGLHKPGTKLKIVIRGKTYEGSVTKMPFVPTKYYKPA

SEQ ID NO: 71295 - DNA, 1224 bp, Flaveria trinervia
  CDS (1)..(1224)
atgaggggaggactatggcaagtaggtcaatcaatcacccgtcggcttggtcaatctgataaaaagaccattgtccgcaggtggtatgcctcagaggctgacctcaagaagaccgttctgtatgatttccacgttgccaatggtggaaagatggtaccttttgctggttggagcatgccaatccagtacaaagattcaatcatggaatccactataaactgcagggaaaacggtagtctttttgatgtttcacatatgtgtgggctaagtcttaaagggaaagactgtgtcgcgtttcttgaaaagcttgtggttgctgatgtggctggacttgctcctggtaccggctcactcaccgttttcacaaatgagaaaggtggagctattgatgattctgtgatcactaaagtgactgatgatcacatttacttggttgttaatgcggggtgtcgagataaagatttggctcacattgaacaacatatgaaggcttttaaagccaaaggtggggatgtaagctggcacattcatgatgagagatcccttttggctcttcagggtcctcttgcaggttctactcttcagcacttgactaaggacgacttgagtaaaatgtactttggggacttccgtattattgatatcagtggttccaaatgttttctaactagaactgggtatactggtgaagatggatttgagatttctgttccctcagaaaatgcagtcgatcttgcaaaagcaattctagaaaaatctgaaggcaaagtaaggttgactgggcttggtgcgcgtgacagtcttcgtctcgaagctgggttgtgtctttatggcaatgacatggagcaacacataacccctgtggaggccgggctcacatgggccattggcaagagaagacgggctgagggtggctttctcggagctgaagtgatcctgaagcaaattgctgatggtcctgcaatcaggcgagttgggcttttctcaacaggcccaccagcccggagccacagtgagattcagaacgagcagggggagaacattggtgaggttactagcggagggtttagcccgtgcttgaagaagaacataggcatggggtacgtgaagtcaggattgcacaaaccaggtaccaaactcaagattgtgatccgagggaagacgtatgaagggtcggttaccaaaatgccctttgtacccacgaaatactacaagccagcataa

SEQ ID NO: 71296 - protein, 407 aa, Flaveria trinervia
MRGGLWQVGQSITRRLGQSDKKTIVRRWYASEADLKKTVLYDFHVANGGKMVPFAGWSMPIQYKDSIMESTINCRENGSLFDVSHMCGLSLKGKDCVAFLEKLVVADVAGLAPGTGSLTVFTNEKGGAIDDSVITKVTDDHIYLVVNAGCRDKDLAHIEQHMKAFKAKGGDVSWHIHDERSLLALQGPLAGSTLQHLTKDDLSKMYFGDFRIIDISGSKCFLTRTGYTGEDGFEISVPSENAVDLAKAILEKSEGKVRLTGLGARDSLRLEAGLCLYGNDMEQHITPVEAGLTWAIGKRRRAEGGFLGAEVILKQIADGPAIRRVGLFSTGPPARSHSEIQNEQGENIGEVTSGGFSPCLKKNIGMGYVKSGLHKPGTKLKIVIRGKTYEGSVTKMPFVPTKYYKPA

SEQ ID NO: 71297 - DNA, 1104 bp, Gloeobacter violaceus
  CDS (25)..(1104): transl_table=11
atggtggcccgtagtctgggtttgatgagcgacctcaagcgtacccctctttgcgcgcagcacctgcaacttggtgcgcgcctcgttcccttcggcggctgggagatgcccctgcagtacagcaccctcacccgcgaacaccgggccgtgcgcaccgctgtgggtcttttcgacatctcccacatgggcaagtacaccctctcggggccggacgtgctggcccagatccagaggctggtgccctcggatctggctcgattgcaacccgggcaagcccagtacaccgtcctgctcaatgagcaagccgggatcatcgacgatctcattttttactgccgcagcccagagcattgggtggtgatcgtcaacggcgccaccaacgacaaagaccgccgctggctcgcagaacacctgcagggcgttcacttcgacgacctgaccggcacccacacgctgctggcgctgcagggaccggcggcggtcgagacgctgcaaccgctggtggacatagaccttgcccggttgggccgctttgagcacgcccaggtctcgctggcgggcaaaccggcttttctggccaggaccggctataccggcgaggacggttttgagatcatgagtctcgagcccgaaggcatcgcgctgtggcaatccctcaccgcagccggtgtgccgccctgcggcctcggtgcccgcgataccttgcgcctcgaggcggcgatgcacctgtacggccaggatatggacgaatcgaccacgccgctcgaggcgtccctgggttgggtgatcgattgggacaagcccgattacttcggccgggagattttgctggcccaaaaggcccagggcaccgagcggcggctggtcgggctcaccgtcgaaggccggcagattgcccgccatggctacggcctttttgacggtgagcagcaggtgggggttgtcaccagcggcaccctcaccccgacggtcgaccggcccattgcgcttgcctacgtgggcaaaccttttgcccccatcggttctaggctcgaagtcgacattcgcggccgccgggccatggccaccgtcgtcaagcgtcccttctaccgccgcgcgctgtaa

SEQ ID NO: 71298 - protein, 359 aa, Gloeobacter violaceus
MSDLKRTPLCAQHLQLGARLVPFGGWEMPLQYSTLTREHRAVRTAVGLFDISHMGKYTLSGPDVLAQIQRLVPSDLARLQPGQAQYTVLLNEQAGIIDDLIFYCRSPEHWVVIVNGATNDKDRRWLAEHLQGVHFDDLTGTHTLLALQGPAAVETLQPLVDIDLARLGRFEHAQVSLAGKPAFLARTGYTGEDGFEIMSLEPEGIALWQSLTAAGVPPCGLGARDTLRLEAAMHLYGQDMDESTTPLEASLGWVIDWDKPDYFGREILLAQKAQGTERRLVGLTVEGRQIARHGYGLFDGEQQVGVVTSGTLTPTVDRPIALAYVGKPFAPIGSRLEVDIRGRRAMATVVKRPFYRRAL

SEQ ID NO: 71299 - DNA, 1227 bp, Mesembryanthemum crystallinum
  CDS (1)..(1227)
atgagagggggagggctatggcagcttgggcaatcagttactaggcgtcttgctcaggctgaaaagaaagtcattgcacgtcgatgctttgcctcagaggcagatcttaagaagaccgctctctatgacttccatgttgcaaatggtgggaaaatggtaccttttgctggatggagcatgccgattcaatacaaagattcaatcatggattccactatcaattgcagagagaatggcagtctttttgatgttgcgcacatgtgtgggctgagccttaaggggaaggattgcattcctttccttgagaagcttgttgttggagatattgctggacttgctcctggaactgggactctatccgttctcacaaatgagaagggaggagcaatcgatgacactgtaatcacaaaggtgactgatgatcacatttatctggttgtcaatgcgggttgcagagagaaggatcttgcacatattgaggagcatatgaaggcattcaaggctaagggtggggatgtctcgtggcacattcatgatgagagatctcttctagctcttcagggccctcttgctgcccctgttcttcaacatttgaccaaagaggacttgagcaagttctactttgggcaatttactttcctggatatcaatggattcccctgttatctcactaggactgggtatactggtgaagatggctttgaaatttcagttcccaatgagtatgcagttgacctagctaaggcaatgttggagaaatctgaaggaaaggtaagactaactggacgcggtgctcgagacagcttaaggctagaggccgggttgtgtctatatggaaatgacctagaacaacatattacacctatcgaggcaggtctgacttgggctgttgggaagaggaggagagcagaaggtggttttcttggtgcagaagtgatactcaaacaaattgccgatggcccaccacagaggcgtgtagggttcatctcttcaggaccaccggctagaggtcatagcgagattcagaatgaaaagggagaaagcattggtgaaattaccagtggaggatttagcccttgccttaagaagaacatagctatgggttatgtgaaatctgggaaccacaaagcaggcactaaagttaacatccttgtaagaggaaagccctatgaaggggttgtcacaaaaatgccattcgtgcccacaaaatactacaagtcaccctaa

SEQ ID NO: 71300 - protein, 408 aa, Mesembryanthemum crystallinum
MRGGGLWQLGQSVTRRLAQAEKKVIARRCFASEADLKKTALYDFHVANGGKMVPFAGWSMPIQYKDSIMDSTINCRENGSLFDVAHMCGLSLKGKDCIPFLEKLVVGDIAGLAPGTGTLSVLTNEKGGAIDDTVITKVTDDHIYLVVNAGCREKDLAHIEEHMKAFKAKGGDVSWHIHDERSLLALQGPLAAPVLQHLTKEDLSKFYFGQFTFLDINGFPCYLTRTGYTGEDGFEISVPNEYAVDLAKAMLEKSEGKVRLTGRGARDSLRLEAGLCLYGNDLEQHITPIEAGLTWAVGKRRRAEGGFLGAEVILKQIADGPPQRRVGFISSGPPARGHSEIQNEKGESIGEITSGGFSPCLKKNIAMGYVKSGNHKAGTKVNILVRGKPYEGVVTKMPFVPTKYYKSP

SEQ ID NO: 71301 - DNA, 1107 bp, Neisseria meningitidis serogroup A
  CDS (7)..(1107): transl_table=11
ttgagaatgattactctgaaaaccaccccatttcatcaagcccatcaagatgcaggcgcgaagctggtagattttgccggctgggagctgcccatccattatggttcgcaaatcgccgaacacgaagccgtgcgcaccgacgcaggtatgtttgacgtatcccatatgcttgttaccgacgtagcaggcgcaaatgccaaagcctttttccgcaaattgattgccaacgatgtcgccaagctcgcttttgtcggcaaagccctttattccgctttgctcaacgacaacggcggcgtgattgacgacttgatcgtttaccgcaccaatgaagccgaaacccaataccgcatcgtgtccaacggcgcgactcgcgaaaaagatacggcacaattccacaaagtcggacaagagttcggtgtttccttcaatccgcgctacgacctcggcatgctcgccgtacaaggccctaaagccattgaaaaactcctgaccgtcaaacccgaatgggcagatgtcgtccataacctcaaaccgttccaaggcgcggatttgggcaacgactggtttgtcgcccgcaccggctacaccggcgaagacggcgtcgaagtcatcctgcccggcaccgaagccgtcgcattcttcaaagccctgcaagcagcaggcgtacaaccttgcggtctcggcgcgcgcgacaccctgcgcatggaagccggcatgaacctctacggcaacgatatggacgacgataccagcccgctcgaagcaggcatgggttggaccgttgatttgaaagacgaaagccgcgattttgtcggcaaagctgccttgttggcattgaaagaaaaaggcgttgccgtcaaacaggtcggtttgctgctcggcaaaggcggcatcctgcgcgcgcatatggaagtgttgaccgacaaaggcaaaggcgaaaccaccagcggcgtattctctccaagtctgaaacaatccatcgccatcgcccgcgtaccgaaagattttgacggcgataccgccaaagtgctgattcgcggcaaggaagcggacgtgcgcgtactgaagctgccgttcgtccgcaacggtcaaaaacagtttgattaa

SEQ ID NO: 71302 - protein, 366 aa, Neisseria meningitidis serogroup A
MITLKTTPFHQAHQDAGAKLVDFAGWELPIHYGSQIAEHEAVRTDAGMFDVSHMLVTDVAGANAKAFFRKLIANDVAKLAFVGKALYSALLNDNGGVIDDLIVYRTNEAETQYRIVSNGATREKDTAQFHKVGQEFGVSFNPRYDLGMLAVQGPKAIEKLLTVKPEWADVVHNLKPFQGADLGNDWFVARTGYTGEDGVEVILPGTEAVAFFKALQAAGVQPCGLGARDTLRMEAGMNLYGNDMDDDTSPLEAGMGWTVDLKDESRDFVGKAALLALKEKGVAVKQVGLLLGKGGILRAHMEVLTDKGKGETTSGVFSPSLKQSIAIARVPKDFDGDTAKVLIRGKEADVRVLKLPFVRNGQKQFD

SEQ ID NO: 71303 - DNA, 1116 bp, Oceanobacillus iheyensis
  CDS (1)..(1116): transl_table=11
atgagtgaacaaaaacgtacaccaattttcacagagtatgcatctcatggtgcgaaaacgattgattttggaggatgggatttacctgtacaattctctagtattaaacatgaacatgaagtaacaagaaccaaagcaggtctttttgacgtatctcatatgggagaaatttcagtgaaagggccaaaaagtgaatcttttttgcaatacgtattaacaaatgacatttctaaattggaaccaggtaaagcacaatatacgattatgtgttatgaagatggtggtactgtagatgatttaattgtttacaaattagacgatgaagattatttgttagtagtaaatgctgcaaacacggaaaaagatgcaaattggataaaacagaaaaatacgtattcaaacgatgagattgttattgaagatgtatctaatcagtatgttcagcttgcaatacaaggacctaaagctgtagagattttacagaaatgtacagatgaaaatgtacaagaaattaaattttttagatttaagaacaatgtagctttaaaaggaatagaagctaaggcacttatttcacgcactggatataccggtgaagatggtttcgaaatatatatcgacgcttcctcaggagtagcattgtggaaattgcttttagaaaaaggagaagcaaatggacttgagccaataggattaggggctcgagatactttacgatttgaagctaatttagcattatatggtcaggaattatcaaaagatatttccccaatagaagctggattaggcttcgcagtaaaagttaataaaggaccggattttatcgggaaagaagtattaaagaaccaagtggaaaatgggactgatcgtaagttagtaggaattgaaatgattgataaaggtattccacgtcatgaatatgaggtattaaaagataataaagaaattggatttataacttctggaacccaatctccgactctaaacaagaatgttgggttagctttaattaatatttcgtatacagaaataggcactgaagttgatgtgaaagttcgaaaacgtatattgaaggctaaaatagttccgacaccgttttataaacggggaagataa

SEQ ID NO: 71304 - protein, 371 aa, Oceanobacillus iheyensis
MSEQKRTPIFTEYASHGAKTIDFGGWDLPVQFSSIKHEHEVTRTKAGLFDVSHMGEISVKGPKSESFLQYVLTNDISKLEPGKAQYTIMCYEDGGTVDDLIVYKLDDEDYLLVVNAANTEKDANWIKQKNTYSNDEIVIEDVSNQYVQLAIQGPKAVEILQKCTDENVQEIKFFRFKNNVALKGIEAKALISRTGYTGEDGFEIYIDASSGVALWKLLLEKGEANGLEPIGLGARDTLRFEANLALYGQELSKDISPIEAGLGFAVKVNKGPDFIGKEVLKNQVENGTDRKLVGIEMIDKGIPRHEYEVLKDNKEIGFITSGTQSPTLNKNVGLALINISYTEIGTEVDVKVRKRILKAKIVPTPFYKRGR

SEQ ID NO: 71305 - DNA, 1227 bp, Pisum sativum
  CDS (1)..(1227)
atgagagggggtttgtggcaacttggccaatcgatcactcgccgtcttgcgaacggaggagataagaaggctgttgcgcggcgatgtttcgctacagaatctgagctgaagaagacagttctgtatgacttccatgttgctcatggtggaaagatggttccttttgctggttggagtatgcctattcaatacaaagactcaatcatggactcaacgttaaactgtagacagaacggtagtcttttcgatgtttctcatatgtgtggtcttagtctcaagggaaaggatgttgtttcgttccttgagaagctcgtcattgcggatgttgctgctcttgcccacggaaccgggactttgactgttttcactaatgaaaagggaggggcgatcgatgattccgtgattactaaggtgacagatgatcatctttacttggttgtcaatgctgggtgcagagataaagatttggctcatattgaggagcatatgaaggcattcaaggccaaaggcggtgatgtgtcgtggcacattcatgatgagagatctctactcgctcttcagggtcctcttgctgctcctgttcttcaacatctgacaaaagaggatttgagcaagctgtactttggggagttccgcgtgttggacatcaatggctcgcagtgctttctcacacggacagggtacactggtgaagatggatttgagatctcagttccttcagagcatggagttgaacttgccaaggcactgctggaaaaatctgaagggaaaataagattgacaggactcggtgctagagatagtctacgtctcgaagctggactgtgcttatacggaaatgacctggaacagcacattacacctattgaagcaggactgacatgggctataggtaagagaaggagagcagaaggtggttttctaggagctgatgttatcctgaaacagctcgcagacggtccttccattaggcgtgtcggtttcatttcttctggtccacctccaagaagccacagcgagattcaagatgaaggaggaaacaacattggtgaagtgaccagtggtggattcagtccttgtctcaagaagaacatagctattggatatgtcaaatctggattgcacaaagcaggtaccaaagtaaagatcattattcgaggtaaacagaatgaaggagttgtcacgaaaatgccgttcgtacccacaaaatactataagccttcatag

SEQ ID NO: 71306 - protein, 408 aa, Pisum sativum
MRGGLWQLGQSITRRLANGGDKKAVARRCFATESELKKTVLYDFHVAHGGKMVPFAGWSMPIQYKDSIMDSTLNCRQNGSLFDVSHMCGLSLKGKDVVSFLEKLVIADVAALAHGTGTLTVFTNEKGGAIDDSVITKVTDDHLYLVVNAGCRDKDLAHIEEHMKAFKAKGGDVSWHIHDERSLLALQGPLAAPVLQHLTKEDLSKLYFGEFRVLDINGSQCFLTRTGYTGEDGFEISVPSEHGVELAKALLEKSEGKIRLTGLGARDSLRLEAGLCLYGNDLEQHITPIEAGLTWAIGKRRRAEGGFLGADVILKQLADGPSIRRVGFISSGPPPRSHSEIQDEGGNNIGEVTSGGFSPCLKKNIAIGYVKSGLHKAGTKVKIIIRGKQNEGVVTKMPFVPTKYYKPS

SEQ ID NO: 71307 - DNA, 1221 bp, Solanum tuberosum
  CDS (1)..(1221)
atgagaggaggattgtggcaacttggacaatcgatcaccagacgtctggctcaggctgataagaagactattggtcgtagatgctttgcttcagatgctgatctgaagaagactgttctatatgacttccatgttgtcaatgggggaaagatggtgcctttcgctggttggagtatgcctatccagtataaggactcaattatggactctacagtaaattgtagggagaatggtagtctctttgatgtttctcatatgtgtgggctaagcctcaaggggaaagatactatccctttcctggaaaagcttgttattgctgatgttgctgggcttgctcctgggactggttctctcacagttttcacaaatgagaagggaggtgcaattgatgattcagtggtcaccaaggtgactaatgatcacatctaccttgttgtaaatgcgggttgcagggacaaggatcttgcacacattgaggagcacatgaaatcattcaagtcaaagggtggtgatgtttcatggcacatccatgatgagagatctcttttagcccttcagggcccccttgctgctccagttcttcaatatctgacaaaagatgatttgagcaagatgtactttggggaattcagggttttggatatcaatggggcaccatgcttccttacaaggacagggtatactggtgaagatggatttgaaatttcagtaccttcagaaaatgctcttgatcttgcaaaagctcttctggagaaatcagaagggaagattcggttaacaggtttaggagctcgtgacagtcttcgtcttgaggctggattgtgcttatacggcaatgacatggagcagcacacaacacctgtagaggcagggctgacatgggccatagggaagagaagaagggcagaaggaggcttccttggtgctgaggtaatactaaagcaaattgaagaaggtcctaaaatcaggcgagttggctttttctcttcaggcccaccccctagaagtcacagtgaaattcaagattcaaatggacaaaatattggagaaatcaccagtggtggtttcagcccttgtcttaagaagaacatagcaatgggatacgtaaaaacaggtaaccacaaggcagggaccaatgtcaagattgtgattcgaggaaagtcttatgatggggtggttaccaagatgccttttgtacccaccaagtactacaagccataa

SEQ ID NO: 71308 - protein, 406 aa, Solanum tuberosum
MRGGLWQLGQSITRRLAQADKKTIGRRCFASDADLKKTVLYDFHVVNGGKMVPFAGWSMPIQYKDSIMDSTVNCRENGSLFDVSHMCGLSLKGKDTIPFLEKLVIADVAGLAPGTGSLTVFTNEKGGAIDDSVVTKVTNDHIYLVVNAGCRDKDLAHIEEHMKSFKSKGGDVSWHIHDERSLLALQGPLAAPVLQYLTKDDLSKMYFGEFRVLDINGAPCFLTRTGYTGEDGFEISVPSENALDLAKALLEKSEGKIRLTGLGARDSLRLEAGLCLYGNDMEQHTTPVEAGLTWAIGKRRRAEGGFLGAEVILKQIEEGPKIRRVGFFSSGPPPRSHSEIQDSNGQNIGEITSGGFSPCLKKNIAMGYVKTGNHKAGTNVKIVIRGKSYDGVVTKMPFVPTKYYKP

SEQ ID NO: 71309 - DNA, 1224 bp, Glycine max
  CDS (1)..(1224)
atgagggggggcttatggcaactcgggcaatcaatcactcgccgtcttgcccagggtgataagaaggctgttgctcgtaggtattttgcctcagatgctgagctgaaaaagacagtcgtttatgacttccatgttgctaatggagggaagatggtgccatttgctggatggagcatgccaattcaatataaggactcaattatggactcaacccttaactgtagggagaatggtagcctttttgatgtttcccatatgtgcgggctaagcctcaagggaaaggactctgttccgttccttgaaaagcttgtcattgctgatgttgctgggcttgcccctggaactggttcattgactgtcttcacaaatgaaaaaggaggggcaattgatgattcagttattaccaaggtgaaggatgatcacatatacttggttgtgaatgctggatgtagggataaagatctggctcatattgaggagcatatgaaggcattcaaggccaaaggtggtgatgtgtcatggcacatccatgatgagagatctcttcttgctctgcagggtcctcttgctgctccggttcttcaacacctgacaaaagcagatttaagcaagatgtactttgggggtttccaagtgttggacatcaatggtgtgcagtgctttctcacacggacagggtatactggggaagatggatttgagatatcaattccctcagagagtgcagtggatcttgccaaggcaattcttgaaaaatctgaagggaagataagattgacaggattaggtgctcgagatagtctacgccttgaagctggattgtgtttatatggcaatgacttggaacagcacattacacctattgaggcaggactgacatgggccatagggaagagaaggagagcagaagggggttttctaggtgctgatgttatactaaaacagcttgaagaaggccctaagatcaggcgtgttggtttcttttcttctggccctcctcccagaagccacagtgagattcaagatgaaggagggaacaacattggggaagtcacaagtggcggattcagtccttgcctcaagaagaacatagccattggatatgtgaaatcaggattgcacaaagcaggcaccaaagtaaagattattattcgaggaaagtctaatgaaggagttgttacaaagatgccatttgtaccaacaaaatactataagccgtcctaa

SEQ ID NO: 71310 - protein, 407 aa, Glycine max
MRGGLWQLGQSITRRLAQGDKKAVARRYFASDAELKKTVVYDFHVANGGKMVPFAGWSMPIQYKDSIMDSTLNCRENGSLFDVSHMCGLSLKGKDSVPFLEKLVIADVAGLAPGTGSLTVFTNEKGGAIDDSVITKVKDDHIYLVVNAGCRDKDLAHIEEHMKAFKAKGGDVSWHIHDERSLLALQGPLAAPVLQHLTKADLSKMYFGGFQVLDINGVQCFLTRTGYTGEDGFEISIPSESAVDLAKAILEKSEGKIRLTGLGARDSLRLEAGLCLYGNDLEQHITPIEAGLTWAIGKRRRAEGGFLGADVILKQLEEGPKIRRVGFFSSGPPPRSHSEIQDEGGNNIGEVTSGGFSPCLKKNIAIGYVKSGLHKAGTKVKIIIRGKSNEGVVTKMPFVPTKYYKPS

SEQ ID NO: 71311 - DNA, 1251 bp, Linum usitatissimum
  CDS (1)..(1251)
atgatgagagggggaggtctatggcaatcaatggcgcgacacctctctcgccgcccggacaacaaaaaatccgccgcctccgccgtcgccaccggcggccggagatacctagcgtccgatgctgccgatctgaagaagacagtcctgtacgatttccacgtgtcccacggcgggaagatggtccctttcgcagggtggagcatgccgattcagtacaaggattcaatcatggactcgaccaccaactgcagggagaatgggagcttgttcgacgtgtctcacatgtgtgggctgagtctcaaggggaaagacgccatttctttccttgagaagcttgtgattgctgatgttgcctcgcttgctcctggcactggctctttgactgttttcactaatgagaaaggtggagccattgatgactctgtcattactaaagtgaccgatgaccacctttacttggtggttaatgctgggtgtagggacaaggatctggctcacattgaggagcatatgaaggcttttaaggctaaaggtggtgatgttgcttggcatattcatgatgagcgatcccttcttgccctccagggtcctctagcagcaccagttcttcaacacttgactaaggatgatttgagcaaaatgtactttggtgagttccgtatcttggacatcaatggctcttcctgctacctcactcggacagggtacactggcgaagacggtttcgagatctcggtcccttcagagaacgcagtggacttagccaaagcactcctcgaaaagtctgagggcaagataaggctgacagggctaggtgctcgtgacagtcttcgtctggaagctgggctgtgtctgtacggtaatgacatggaacagcacattactccagtggaggcaggattgacttgggccatagggaagaggagaagagctgaaggtggattccttggcgcggaagtgattctgaagcagctcgaggaaggtccgaagatcaggcgtgttgggttcacatcttcaggtccgcccccgaggtcccacagcgagatccaggacacaaacggggcgaacattggggaggtgactagcggagggtttagtccgtgcctcaagaagaacatttccatggggtacgtgaaatccgggctgcacaaggccggaaccactgtgaagttggtggtaagggggaaagcttatgatggtgttgttactaagatgccttttgtacctaccaaatactacaagcctacctaa

SEQ ID NO: 71312 - protein, 416 aa, Linum usitatissimum
MMRGGGLWQSMARHLSRRPDNKKSAASAVATGGRRYLASDAADLKKTVLYDFHVSHGGKMVPFAGWSMPIQYKDSIMDSTTNCRENGSLFDVSHMCGLSLKGKDAISFLEKLVIADVASLAPGTGSLTVFTNEKGGAIDDSVITKVTDDHLYLVVNAGCRDKDLAHIEEHMKAFKAKGGDVAWHIHDERSLLALQGPLAAPVLQHLTKDDLSKMYFGEFRILDINGSSCYLTRTGYTGEDGFEISVPSENAVDLAKALLEKSEGKIRLTGLGARDSLRLEAGLCLYGNDMEQHITPVEAGLTWAIGKRRRAEGGFLGAEVILKQLEEGPKIRRVGFTSSGPPPRSHSEIQDTNGANIGEVTSGGFSPCLKKNISMGYVKSGLHKAGTTVKLVVRGKAYDGVVTKMPFVPTKYYKPT

SEQ ID NO: 71313 - DNA, 1230 bp, Brassica napus
  CDS (1)..(1230)
atgagaggagggagtctatggcagctaggccaatccataacccgtcgtcttgctcaatccgacaagaaacctctgtcaccacgccgctacttcgcctccggcgctgaccttaaaaaaaccgccctttacgacttccacgtcgcccacggcggaaagatggttcctttcgccggttggagcatgccgattcagtacaaagactccatcatcgactcgactgttaactgcagggtcaacgggagtttgtttgatgttgcgcatatgtgtggtctgagcctcaagggcaaagactgtgttccttttctcgagacgctagtggttgctgacgtggcgggtttggctcctggaaccgggagcttgactgtgtttacgaatgagaagggtggtgctattgatgactcggtgattactaaagtgactgatgagcatatctacttggtggtgaatgctggttgtagggataaggatttggctcatattgaagagcacatgaaggcttttaaatccaaaggaggtgatgtctcttggcatattcatgatgagagatctcttctcgcccttcagggtcctttggctgctccggtgcttcaacacctcactaaagaagacttgagcaagctttactttgggcagttccagatcctggacattaatggttccacctgcttccttaccaggaccgggtatactggggaagatgggtttgagatctcggttccatccgagcatgcagttgatttagccaaagcaatcttggagaaatccgagggaaaagtaagactcacaggtctaggagcaagagacagtctcaggctagaagcagggctttgtctctacggcaacgacatggagcaacacatttctcctgttgaagctgggctcacatgggccatagggaagcgtagaagagccgaaggagggtttcttggagctgatgtgatcctcaaacagcttcaagatggacctactatcagaagagttggattcttctcttcgggaccaccagcaaggtcgcatagcgaggtgcatgatgagagtggtaacaagattggagagatcacgagtggtgggtttagccccaacttgaagaagaacatagctatggggtatgtgaagtcaggtcagcacaagaatgggactaaagtcaagatcttggtccgtgggaaaccttatgaaggtaacatcaccaagatgccgttcgttgccaccaaatactacaagccatcataa

SEQ ID NO: 71314 - protein, 409 aa, Brassica napus
MRGGSLWQLGQSITRRLAQSDKKPLSPRRYFASGADLKKTALYDFHVAHGGKMVPFAGWSMPIQYKDSIIDSTVNCRVNGSLFDVAHMCGLSLKGKDCVPFLETLVVADVAGLAPGTGSLTVFTNEKGGAIDDSVITKVTDEHIYLVVNAGCRDKDLAHIEEHMKAFKSKGGDVSWHIHDERSLLALQGPLAAPVLQHLTKEDLSKLYFGQFQILDINGSTCFLTRTGYTGEDGFEISVPSEHAVDLAKAILEKSEGKVRLTGLGARDSLRLEAGLCLYGNDMEQHISPVEAGLTWAIGKRRRAEGGFLGADVILKQLQDGPTIRRVGFFSSGPPARSHSEVHDESGNKIGEITSGGFSPNLKKNIAMGYVKSGQHKNGTKVKILVRGKPYEGNITKMPFVATKYYKPS

SEQ ID NO: 71315 - DNA, 1224 bp, Glycine max
  CDS (1)..(1224)
atgagggggggcttgtggcaacttgggcaatcgatcactcgccgtcttgcccatggagataagaaggctgttgctcgtcgatgttttgcctcagaagctgagctgaaaaagacagtgtttcatgacttccatgttgctcatggtgggaagatggttccatttgctgggtggagcatgccaatccaatacaaggactcaatcatggactctaccatcaactgtagggagaatggtagcctctttgatgtttcccatatgtgtgggctgagcctcaaagggaaggacgctgccccattccttgaaaagctggtcattgccgatgttgctgggcttgcccctggaactgggacgttgactgttttcacaaatgaaaagggaggtgcaattgatgattcagtaattactaaggtgacggatgaccacatatatttggttgtgaatgctggctgcagggataaagatctggctcatattgaggaacacatgaaagcattcaaggccaaaggtggtgatgtgtcttggcacatccacgatgagagatccctacttgctctgcagggtcctcttgctgcccccgttcttcaacacctgacaaaagaggatttgagcaagctctactttggggagttccgtgtgttggacatcaatggctcagagtgttttcttaccaggacagggtatactggggaagatggatttgagatctcagttccttcagagcatggagtagatcttgccaaagcaatactggaaaaatctgaagggaaggtaagattgacaggattgggagctagagatagtctgcgacttgaagctggattgtgcttatatggaaatgacatggaacagcacattacacctattgaggcaggactaacatgggctatagggaagaggaggagagcagaaggtggttttctaggagctgatgttatcctgaaacagcttgaagaaggtcctaaaatcaggcgtgttggtttcttttcttctggtccacctcccagaagccacagtgagattcaagatgaaggaggcaacaacattggggaaatcaccaggggtggattcagtccttgcctccagaagaacatagccatgggatatgtgaaatctggattgcacaaggcagccaccaaagtaaagattattattcggggaaaacccaatgaaggagtcgttacaaaaatgccatttgtaccaacaaaatactataagccttcctga

SEQ ID NO: 71316 - protein, 407 aa, Glycine max
MRGGLWQLGQSITRRLAHGDKKAVARRCFASEAELKKTVFHDFHVAHGGKMVPFAGWSMPIQYKDSIMDSTINCRENGSLFDVSHMCGLSLKGKDAAPFLEKLVIADVAGLAPGTGTLTVFTNEKGGAIDDSVITKVTDDHIYLVVNAGCRDKDLAHIEEHMKAFKAKGGDVSWHIHDERSLLALQGPLAAPVLQHLTKEDLSKLYFGEFRVLDINGSECFLTRTGYTGEDGFEISVPSEHGVDLAKAILEKSEGKVRLTGLGARDSLRLEAGLCLYGNDMEQHITPIEAGLTWAIGKRRRAEGGFLGADVILKQLEEGPKIRRVGFFSSGPPPRSHSEIQDEGGNNIGEITRGGFSPCLQKNIAMGYVKSGLHKAATKVKIIIRGKPNEGVVTKMPFVPTKYYKPS

SEQ ID NO: 71317 - DNA, 1227 bp, Oryza sativa
  CDS (1)..(1227)
atgagagggctactcgcgtgcgccacgctcgcccgccgcgccgccggcgcgacgtcgacggcgcggcggcacctggcgggcgcggccgaggcggcggaggcggagctgaagaagacggcgctgtacgacttccacgtcgcgcacggcgggaagatggtgccgttcgccgggtggagcatgcccatccagtacaaggacaccatcatggactccaccctcaactgccgcgccaacggcagcctcttcgacgtctcccacatgtgcggcctcagcctccacggccgccaggccatccccttcctcgagtccctcgtcgtcgccgacgtcgcggcgctcaaggacggcaccgggacgctcaccgtcttcaccaacgaccgcggcggcgccatcgacgactccgtcgttaccaaggtcaccgaccagcacatctacctcgtcgtcaacgccgggtgcagggacaaggatctcgcccacattggggagcacatggaggccttcaacaagaagggcggcgacgtcaagtggcacgtccacgatgagcgctcgcttcttgcattgcagggacctcttgctgcaccaactctccagttgctgacaaaagaagatttaagcaaaatgtatttcagtgacttcaagatgattgacatcaatggatatgcttgctttctcaccagaactggttataccggtgaagatgggtttgaaatctctgttccatcagagaatgcagttgatcttgcaaaggccctcctggagaaatctgaaggcaaggtgaggctcaccggtttaggagcacgtgacagtctccgcttggaagctggcctctgcctgtacggcaacgacatggagcaacacatcacaccagttgaggctggtctctcatgggcaattggcaagaggaggaaagcagaaggcggcttcctgggagcagatgtgatcctcaagcagctccaggaaggcccaaagatcaggcgtgtcggtctcctctcgcaaggaccgcctcctcggagtcatagcgagattgtgagcagctccggggagaacattggtgaggttaccagtggagggttcagcccctgcttgaagaagaacatcgccatgggctacgtaaaatccggtttgcacaaagctgggacagagttcaaggttgtcgtccgtgggaagtcctacgatgccgtcgtcaccaagatgccgttcgtgccgaccaagtactacaaaccctcatag

SEQ ID NO: 71318 - protein, 408 aa, Oryza sativa
MRGLLACATLARRAAGATSTARRHLAGAAEAAEAELKKTALYDFHVAHGGKMVPFAGWSMPIQYKDTIMDSTLNCRANGSLFDVSHMCGLSLHGRQAIPFLESLVVADVAALKDGTGTLTVFTNDRGGAIDDSVVTKVTDQHIYLVVNAGCRDKDLAHIGEHMEAFNKKGGDVKWHVHDERSLLALQGPLAAPTLQLLTKEDLSKMYFSDFKMIDINGYACFLTRTGYTGEDGFEISVPSENAVDLAKALLEKSEGKVRLTGLGARDSLRLEAGLCLYGNDMEQHITPVEAGLSWAIGKRRKAEGGFLGADVILKQLQEGPKIRRVGLLSQGPPPRSHSEIVSSSGENIGEVTSGGFSPCLKKNIAMGYVKSGLHKAGTEFKVVVRGKSYDAVVTKMPFVPTKYYKPS

SEQ ID NO: 71319 - DNA, 1248 bp, Triticum aestivum
  CDS (1)..(1248)
atgagaggcctcctcgcgtgcgccacgctggcccgccgcgccgccgccgcctcatccacgggcgccgcctccaccaccgccgcgcgccgccaccttgcgggcgcggcggaggcggccgaggcggagctgaagaagacggcgctctacgacttccacgtggcgcacgggggcaagatggtgcccttcgccggctggagcatgcccatccagtacaaggacaccatcatggactccaccctcaactgccgcgccaacggcagcctcttcgacgtctcccacatgtgcggcctcagcctgcagggccgccaggccatccccttcctcgagtccctcgtcgtcgccgacgtcgccgcgctcaaggacggcacggggtccctcaccgtcttcaccaacgacaagggcggcgccatcgacgactccgtcgtcaccaaggtcaacgaccaccacgtctacctcgtcgtcaacgccggctgccgggacaaggacctcgcccacatcggcgcccacatggaggcgttccagaagaagggcggcgacgtcaagtggcacgtccacgacgagcgctccctcctcgccctgcagggtcctcttgctgcaccaactctccagttgctgacaaaggaagatttgagcaaaatgtacttcagtgatttcaagatgattgacatcaatggatctgcttgcttcctcaccagaactggttacaccggcgaagatggatttgaaatctctgttccatcagagaacgcggtcgatctcgcaaaggccctcctggagaagtccgaaggcaaggtgaggctgaccggcctgggcgcccgcgacagtctccggctggaggctggcctctgcctgtacggcaacgacatggagcagcacatcacgccggtggaggccggcctctcatgggcgatcggcaagcggaggaaggccgagggcggcttcctgggcgcggaggtgatcctgaagcagctcaaggaaggccccaagatccggcgcgtgggcatcttctcgcaggggccgcccccgcggagccacagcgagatcgtgagcggcaccggggagaacatcggcgaggtgacgagcggcgggttcagcccgtgcctgaagaagaacatcgccatggggtacgtgaagaacggcctgcacaaggccggcacggagttcaaggtggtcgtccgcggcaagcagtacgacgccgtcgtcaccaagatgcccttcgtgcccaccaagtactacaaggccccttag

SEQ ID NO: 71320 - protein, 415 aa, Triticum aestivum
MRGLLACATLARRAAAASSTGAASTTAARRHLAGAAEAAEAELKKTALYDFHVAHGGKMVPFAGWSMPIQYKDTIMDSTLNCRANGSLFDVSHMCGLSLQGRQAIPFLESLVVADVAALKDGTGSLTVFTNDKGGAIDDSVVTKVNDHHVYLVVNAGCRDKDLAHIGAHMEAFQKKGGDVKWHVHDERSLLALQGPLAAPTLQLLTKEDLSKMYFSDFKMIDINGSACFLTRTGYTGEDGFEISVPSENAVDLAKALLEKSEGKVRLTGLGARDSLRLEAGLCLYGNDMEQHITPVEAGLSWAIGKRRKAEGGFLGAEVILKQLKEGPKIRRVGIFSQGPPPRSHSEIVSGTGENIGEVTSGGFSPCLKKNIAMGYVKNGLHKAGTEFKVVVRGKQYDAVVTKMPFVPTKYYKAP

SEQ ID NO: 71321 - DNA, 22 bp, Artificial sequence
  primer
atgctcaagaaatcgccacttc

SEQ ID NO: 71322 - DNA, 23 bp, Artificial sequence
  primer
ctacttgcttagcagcacctttc

SEQ ID NO: 71323 - protein, 453 aa, Artificial sequence
  consensus sequence
  Variant (2)..(2): Xaa in position 2 is any amino acid
  Variant (4)..(6): Xaa in position 4 to 6 is any amino acid
  Variant (8)..(8): Xaa in position 8 is any amino acid
  Variant (9)..(14): Xaa in position 9 to 14 is any or no amino acid
  Variant (16)..(16): Xaa in position 16 is any amino acid
  Variant (18)..(18): Xaa in position 18 is any amino acid
  Variant (21)..(21): Xaa in position 21 is any amino acid
  Variant (24)..(25): Xaa in position 24 to 25 is any amino acid
  Variant (27)..(31): Xaa in position 27 to 31 is any amino acid
  Variant (32)..(34): Xaa in position 32 to 34 is any or no amino acid
  Variant (37)..(39): Xaa in position 37 to 39 is any amino acid
  Variant (41)..(43): Xaa in position 41 to 43 is any amino acid
  Variant (45)..(45): Xaa in position 45 is any amino acid
  Variant (52)..(57): Xaa in position 52 to 57 is any amino acid
  Variant (59)..(73): Xaa in position 59 to 73 is any amino acid
  Variant (74)..(78): Xaa in position 74 to 78 is any or no amino acid
  Variant (80)..(81): Xaa in position 80 to 81 is any amino acid
  Variant (82)..(84): Xaa in position 82 to 84 is any or no amino acid
  Variant (86)..(86): Xaa in position 86 is any amino acid
  Variant (87)..(88): Xaa in position 87 to 88 is any or no amino acid
  Variant (90)..(96): Xaa in position 90 to 96 is any amino acid
  Variant (97)..(97): Xaa in position 97 is any or no amino acid
  Variant (100)..(101): Xaa in position 100 to 101 is any amino acid
  Variant (104)..(115): Xaa in position 104 to 115 is any amino acid
  Variant (116)..(125): Xaa in position 116 to 125 is any or no amino acid
  Variant (127)..(127): Xaa in position 127 is any amino acid
  Variant (130)..(134): Xaa in position 130 to 134 is any amino acid
  Variant (136)..(155): Xaa in position 136 to 155 is any amino acid
  Variant (156)..(170): Xaa in position 156 to 170 is any or no amino acid
  Variant (172)..(172): Xaa in position 172 is any amino acid
  Variant (176)..(176): Xaa in position 176 is any amino acid
  Variant (178)..(196): Xaa in position 178 to 196 is any amino acid
  Variant (197)..(226): Xaa in position 197 to 226 is any or no amino acid
  Variant (230)..(240): Xaa in position 230 to 240 is any amino acid
  Variant (245)..(245): Xaa in position 245 is any amino acid
  Variant (247)..(247): Xaa in position 247 is any amino acid
  Variant (249)..(268): Xaa in position 249 to 268 is any amino acid
  Variant (269)..(284): Xaa in position 269 to 284 is any or no amino acid
  Variant (291)..(291): Xaa in position 291 is any amino acid
  Variant (298)..(299): Xaa in position 298 to 299 is any amino acid
  Variant (303)..(310): Xaa in position 303 to 310 is any amino acid
  Variant (311)..(313): Xaa in position 311 to 313 is any or no amino acid
  Variant (315)..(316): Xaa in position 315 to 316 is any amino acid
  Variant (318)..(327): Xaa in position 318 to 327 is any amino acid
  Variant (328)..(336): Xaa in position 328 to 336 is any or no amino acid
  Variant (338)..(338): Xaa in position 338 is any amino acid
  Variant (340)..(351): Xaa in position 340 to 351 is any amino acid
  Variant (352)..(360): Xaa in position 352 to 360 is any or no amino acid
  Variant (362)..(369): Xaa in position 362 to 369 is any amino acid
  Variant (370)..(375): Xaa in position 370 to 375 is any or no amino acid
  Variant (377)..(387): Xaa in position 377 to 387 is any amino acid
  Variant (388)..(395): Xaa in position 388 to 395 is any or no amino acid
  Variant (397)..(398): Xaa in position 397 to 398 is any amino acid
  Variant (402)..(403): Xaa in position 402 to 403 is any amino acid
  Variant (406)..(406): Xaa in position 406 is any amino acid
  Variant (408)..(410): Xaa in position 408 to 410 is any amino acid
  Variant (411)..(411): Xaa in position 411 is any or no amino acid
  Variant (413)..(421): Xaa in position 413 to 421 is any amino acid
  Variant (422)..(429): Xaa in position 422 to 429 is any or no amino acid
  Variant (431)..(435): Xaa in position 431 to 435 is any amino acid
  Variant (436)..(437): Xaa in position 436 to 437 is any or no amino acid
  Variant (439)..(450): Xaa in position 439 to 450 is any amino acid
  Variant (451)..(452): Xaa in position 451 to 452 is any or no amino acid
TXLXXXHXXXXXXXVXFXGWXMPXXYXXXXXXXXEHXXXRXXXGXFDVSHMXXXXXXGXXXXXXXXXXXXXXXXXXXXLXXXXXGXXXYXXXXXXXXGGXXDDXXXXXXXXXXXXXXXXXXXXXXVXNAXXXXXDXXXXXXXXXXXXXXXXXXXXXXXXXXXXXXXXXXXAXQGPXAXXXXXXXXXXXXXXXXXXXXXXXXXXXXXXXXXXXXXXXXXXXXXXXXXRTGXXXXXXXXXXXYTGEXGXEXXXXXXXXXXXXXXXXXXXXXXXXXXXXXXXXXXXXGLGARDXLRLEAGXXLYGXXXXXXXXXXXPXXAXXXXXXXXXXXXXXXXXXXFXGXXXXXXXXXXXXXXXXXXXXXGXXXXXXXXXXXXXXRXXXXXXXXXXXXXXXXXXXGXXTSGXXSPXLXXXXIXXXXXXXXXXXXXXXXXGXXXXXXXRXXXXXXXXXXXXXXF

SEQ ID NO: 71324 - protein, 11 aa, Artificial sequence
  protein pattern
  Variant (7)..(7): Xaa in position 7 is any amino acid
  Variant (9)..(9): Xaa in position 9 is any amino acid
  Variant (11)..(11): Xaa in position 11 is Ile, Leu or Val
TGYTGEXGXEX

SEQ ID NO: 71325 - DNA, 687 bp, Azotobacter vinelandii
  CDS (1)..(687): transl_table=11
atgggtcagaaagtacatcccgtaggcattcgcctgggaatcgtcaaggagcacacctcggtttggtatgccgaccgcaagaattacgcggactatttgtatgccgacctgaaggtgcgtgagtatctccaagacaaactaaaaagcgcgtccgtgagccgcatcgatatcgctcgtccggctcaaaccgcacgcatcaccatccacaccgcgcgtcccggtatcgtgatcggcaagaagggtgaggatgtcgagaagctgcgtcaggacctgaccaagcaaatgggtgtgccggtgcacatcaacatcgaagagatccgcaagccggaactcgacagtatgctggttgctcagagcgtggcccagcagcttgagcgtcgcgtgatgttccgtcgcgccatgaagcgtgcggtacagaacgccatgcgcattggtgccaagggcatcaagatccaggtgagtggtcgtctgggcggtgccgaaatcgcccgtaccgaatggtaccgcgaaggccgtgtgccgctgcacaccctgcgcgcggatatcgattacgccacctacgaagcgcacaccacctacggtgtgatcggcgtcaaggtttggatcttcaagggcgaggtcatcggtggccagcacgaagagctcaagccgcaagcgcctgcgcctcgcaaaaaagctgctaagtaa

SEQ ID NO: 71326 - protein, 228 aa, Azotobacter vinelandii
MGQKVHPVGIRLGIVKEHTSVWYADRKNYADYLYADLKVREYLQDKLKSASVSRIDIARPAQTARITIHTARPGIVIGKKGEDVEKLRQDLTKQMGVPVHINIEEIRKPELDSMLVAQSVAQQLERRVMFRRAMKRAVQNAMRIGAKGIKIQVSGRLGGAEIARTEWYREGRVPLHTLRADIDYATYEAHTTYGVIGVKVWIFKGEVIGGQHEELKPQAPAPRKKAAK

SEQ ID NO: 71327 - DNA, 849 bp, Kineococcus radiotolerans SRS30216
  CDS (1)..(849): transl_table=11
atgggacagaaggtcaacccgttcgggttccgactgggcatcaccaccgaccaccgcagccggtggttcgccgactccaccaagactggtcagcgctacgccgactacgtcaaggaggacgtcgcgatccgcaggctcatgtccaagggcatggagcgggccggcatctccaaggtggagatcgagcgcacccgtgaccgcgtgcgcgtcgacatccacaccgcccggccgggcatcgtcatcggccgtcgcggcgcggaggccgaccgcatccgcaccgagctcgagaagctcaccggcaagcaggtgcagctgaacatcctcgaggtcaagaaccccgaggtggacgcccagctcgtcgcgcagggtgtcgccgagcagctcgccagccgcgtctcgttccgccgcgccatgcgcaaggggatgcagacgacgatgcgctccggggccaagggcatccgggtgcagtgcgccggccgtctcggcggcgccgagatgagccgttcggagttctaccgcgaaggccgtgtgccgctgcacaccctgcgcgcgaacatcgactacgggttctacgaggcccgcacgaccttcggccgcatcggcgtgaaggtctggatctaccacggcgacatcaccagccgtgagctcgcccagtcgcaggccgccgccccgcgcgccccgcgtcgcaacgagcgcggcgaccgccccgaccgcggtgcgcgtcgcacccgtcctgcccaggacaccaccgcgcccgtcgccgaggccgttgccaccggcagcgccccgaccggcaccgcggcgaccgagccggtcatcggcaagggttccaacggaacggaggcctga

SEQ ID NO: 71328 - protein, 282 aa, Kineococcus radiotolerans SRS30216
MGQKVNPFGFRLGITTDHRSRWFADSTKTGQRYADYVKEDVAIRRLMSKGMERAGISKVEIERTRDRVRVDIHTARPGIVIGRRGAEADRIRTELEKLTGKQVQLNILEVKNPEVDAQLVAQGVAEQLASRVSFRRAMRKGMQTTMRSGAKGIRVQCAGRLGGAEMSRSEFYREGRVPLHTLRANIDYGFYEARTTFGRIGVKVWIYHGDITSRELAQSQAAAPRAPRRNERGDRPDRGARRTRPAQDTTAPVAEAVATGSAPTGTAATEPVIGKGSNGTEA

SEQ ID NO: 71329 - DNA, 645 bp, Medicago truncatula
  CDS (1)..(645)
atgggacaaaaaatacatccgcttggtttcagacttggtacaactcaaaatcatgattctatttggtttgcacaaccaagaaattattccgagaatctaaaagaagataaaataatacgagattgtatcaagaattatatacaaaaaacccccggtgtcgagggaattggacgaataaagattaaaaaaacaatcgatcagattcaagtcataatctatatggtacttccaacgttattaacggagggtaagcctcgaagaatcgaagaattacagactaatgtacaaaaaaaacttaattgtgtgacgcgaaaaattaacattacaagtacaagaattccaaatgcttatagcgaccctaatattcttgcagaatttatagctggacaattaaagaatagaatttcgtttaggaaagcaatcaaaaaagctattgaattagctgaacaggcaggtacaaaaggagttcaagtacaaattgcgggacgtatcgacggaaaagaaattgcacgtgtcgaatggattagagaaggtagggttcctctacaaaccattcgagctaaaattgattattgttcctatccagttcgaactatttatggggtattaggaatcaaagtttggatatttctaaacaacgactaa

SEQ ID NO: 71330 - protein, 214 aa, Medicago truncatula
MGQKIHPLGFRLGTTQNHDSIWFAQPRNYSENLKEDKIIRDCIKNYIQKTPGVEGIGRIKIKKTIDQIQVIIYMVLPTLLTEGKPRRIEELQTNVQKKLNCVTRKINITSTRIPNAYSDPNILAEFIAGQLKNRISFRKAIKKAIELAEQAGTKGVQVQIAGRIDGKEIARVEWIREGRVPLQTIRAKIDYCSYPVRTIYGVLGIKVWIFLNND

SEQ ID NO: 71331 - DNA, 759 bp, Xanthobacter autotrophicus Py2
  CDS (1)..(759): transl_table=11
atgggtcagaaggtcaatccggtcgggctccggctcggcatcaaccgcacgtgggacagccgctggttcgccaacaagggcgaatacggcaagctgctccacgaggacatcaagatccgcgagatgctgttcaagcagctcaagcaggcggctgtgtccaaggtggtgatcgagcgtccgcacaagaagtgccgcgtgaccatctactccggtcgtcccggtgtggtcatcggcaagaagggcgcggacatcgacaagctgcgcaagaaggtgtcggagatgacctcctcggaggtcttcatcaacatcgtcgagatccgcaagcccgagatcgacgcccgtctcgtcgccgaatccatcgcccagcagctcgagcgccgcgtggcgttccgccgggccatgaagcgcgcggtgcagtctgccatgcgtctcggtgccgaaggcatccgcatcaattgctcgggccgcctcggcggcgctgagatcgcgcgccttgaatggtaccgcgaaggtcgcgtgccgctgcacaccctgcgtgcggacgtggactacggcaccgccacggccttcaccacctacggcacctgcggtgtcaaggtgtgggtcttcaagggcgagatcctcgagcacgatcccatggcgcaggacaagcgccaggccgagcaggaagccggtccctcctcgcgtccccagcggcgtgagcgcggcgaccgcgagcgtggcgatcgcggcgaccgcgatcgcggccaccgcgcctga

SEQ ID NO: 71332 - protein, 252 aa, Xanthobacter autotrophicus Py2
MGQKVNPVGLRLGINRTWDSRWFANKGEYGKLLHEDIKIREMLFKQLKQAAVSKVVIERPHKKCRVTIYSGRPGVVIGKKGADIDKLRKKVSEMTSSEVFINIVEIRKPEIDARLVAESIAQQLERRVAFRRAMKRAVQSAMRLGAEGIRINCSGRLGGAEIARLEWYREGRVPLHTLRADVDYGTATAFTTYGTCGVKVWVFKGEILEHDPMAQDKRQAEQEAGPSSRPQRRERGDRERGDRGDRDRGHRA

SEQ ID NO: 71333 - DNA, 702 bp, Escherichia coli O157:H7 EDL933
  CDS (1)..(702): transl_table=11
  misc_feature (511)..(511): r is g or a
atgggtcagaaagtacatcctaatggtattcgcctgggtattgtaaaaccatggaactctacctggtttgcgaacaccaaagaattcgctgacaacctggacagcgattttaaagtacgtcagtacctgactaaggaactggctaaagcgtccgtatctcgtatcgttatcgagcgtccggctaagagcatccgtgtaaccattcacactgctcgcccgggtatcgttatcggtaaaaaaggtgaagacgtagaaaaactgcgtaaggtcgtagcggacatcgctggcgttcctgcacagatcaacatcgccgaagttcgtaagcctgaactggacgcaaaactggttgctgacagcatcacttctcagctggaacgtcgcgttatgttccgtcgtgctatgaagcgtgctgtacagaacgcaatgcgtctgggcgctaaaggtattaaagttgaagttagcggccgtctgggcggcgcggaaatcgcacgtaccgaatggtaccgcgaargtcgcgtaccgctgcacactctgcgtgctgacatcgactacaacacctctgaagcgcacaccacttacggtgtaatcggcgttaaagtgtggatcttcaaaggcgagatcctgggtggtatggctgctgttgaacaaccggaaaaaccggctgctcagcctaaaaagcagcagcgtaaaggccgtaaataa

SEQ ID NO: 71334 - protein, 233 aa, Escherichia coli O157:H7 EDL933
  misc_feature (171)..(171): The Xaa at location 171 stands for Gly, or Ser.
MGQKVHPNGIRLGIVKPWNSTWFANTKEFADNLDSDFKVRQYLTKELAKASVSRIVIERPAKSIRVTIHTARPGIVIGKKGEDVEKLRKVVADIAGVPAQINIAEVRKPELDAKLVADSITSQLERRVMFRRAMKRAVQNAMRLGAKGIKVEVSGRLGGAEIARTEWYREXRVPLHTLRADIDYNTSEAHTTYGVIGVKVWIFKGEILGGMAAVEQPEKPAAQPKKQQRKGRK

SEQ ID NO: 71335 - DNA, 714 bp, Pseudomonas putida KT2440
  CDS (1)..(714): transl_table=11
ttgcggacaagtaacggagtcgatcagatgggtcagaaagtacatcccactggcattcgcctgggaatcgtcaaggagcacacctccgtctggtacgcagacggtgctacttacgcagattacctgttgaaggatctgaaaacgcgtgagtacctccaagacaaactaaaaagcgcgtccgtaagccgtatcgatattcatcgtccggctcaaactgcacgcatcaccatccacaccgctcgtcccggtatcgttatcggtaagaaaggtgaagatgtcgagaagctgcgtcaggacctgaccaagcagatgggtgtgcctgtgcacatcaacatcgaagagatccgcaagccggaactcgacgctatgctggttgcgcagagcgtagctcagcagctggaacgccgtgtaatgttccgtcgcgccatgaagcgtgcggtacagaacgccatgcgtattggtgccaagggcatcaagatccaggtgagcggtcgtctcggcggtgctgagattgctcgtaccgagtggtatcgcgaaggtcgtgtgcctctgcacaccctgcgtgccgatatcgactacaacacctacgaagctcacaccacttacggtgtgatcggtgtgaaggtttggatcttcaaaggcgaagttattggtggtcgccaagaagaactgaaaccacaagcaccagcgcctcgtaaaaaagctgctaagtaa

SEQ ID NO: 71336 - protein, 237 aa, Pseudomonas putida KT2440
MRTSNGVDQMGQKVHPTGIRLGIVKEHTSVWYADGATYADYLLKDLKTREYLQDKLKSASVSRIDIHRPAQTARITIHTARPGIVIGKKGEDVEKLRQDLTKQMGVPVHINIEEIRKPELDAMLVAQSVAQQLERRVMFRRAMKRAVQNAMRIGAKGIKIQVSGRLGGAEIARTEWYREGRVPLHTLRADIDYNTYEAHTTYGVIGVKVWIFKGEVIGGRQEELKPQAPAPRKKAAK

SEQ ID NO: 71337 - DNA, 798 bp, Mycoplasma gallisepticum R
  CDS (1)..(798): transl_table=4
ataaatatgggtcaaaaagtaaactctaacggtttaagatttggaattaataagaactgacaatctcgttgggtagctaaaactaatcaacaaactggtgactgaattgttcaggacgaaaagattagaaactacttattcaagaagttccacagcgctttcatttcaaacgttgatatcgaaagaacacaaacttcaatccgtgttttcatctacgcttctcaaccagggattatcttaggtaaagaagccgccaacatcaaagttatcttattagcaattaacaagatcgttggtcgtcatatcaaagttgatgttgacgttcttgaagtgggtaacccttcattaagtgctaagatcgtggctagagaattagctgatgcgattgaaaatcgtacaccattaagaacagcgatgcgtcaagcacttaaacgcgtattaaaagctggtgctaaagggattaaagttttagtttcaggtcgtttaaacggtgtggaaattgctagagataagatgtacattgaaggtaatgtaaccttatcaaccctaagaactgatatcgactacgcactagaagaagcacaaatgtcttatggtgtgatcggtgttaaagtttgaattaaccgtggggaaatttttggtaaagatttctacaaaaaacaagcacacattgttaaaccaaaaggtagtgaagctaaccatcaaagaagaaactcaaataaatctaaagattaccgagataacaaaaacaaacagtttaacaaaaaccaccaaaatcaacaacctgctaaggagtaa

SEQ ID NO: 71338 - protein, 265 aa, Mycoplasma gallisepticum R
MNMGQKVNSNGLRFGINKNWQSRWVAKTNQQTGDWIVQDEKIRNYLFKKFHSAFISNVDIERTQTSIRVFIYASQPGIILGKEAANIKVILLAINKIVGRHIKVDVDVLEVGNPSLSAKIVARELADAIENRTPLRTAMRQALKRVLKAGAKGIKVLVSGRLNGVEIARDKMYIEGNVTLSTLRTDIDYALEEAQMSYGVIGVKVWINRGEIFGKDFYKKQAHIVKPKGSEANHQRRNSNKSKDYRDNKNKQFNKNHQNQQPAKE

SEQ ID NO: 71339 - DNA, 852 bp, Herminiimonas arsenicoxydans
  CDS (1)..(852): transl_table=11
atgggacagaagatacatccaaccggtttccgtctttcggttacgcgcaattgggcatcgcgttggtatgctggcaatagcaactttgccaccatgctcaacgaagatctcaaagttcgcgcatacctgaagaccaaactgaagaatgcttcggttggccgcgtcatcattgagcgtccggcaaaaaatgctcgcattacaatttacagctcgcgccctggtgtcgtgatcggtaaaaaaggcgaagacatcgaagtattgaaatccgcgctgaccaaaatgatgggcgtgccggttcatgtgaatatcgaagaaattcgcaagcctgaaaccgacgcacaactgatcgctgattcgattgcgcagcaattggaaaaacgcatcatgttccgtcgtgcaatgaagcgcgcgatgcaaaacgccatgcgcctcggcgcacaaggtatcaagatcatgtcgtccggtcgtttgaacggtatcgagatcgcacgtaaagaatggtatcgcgaaggtcgcgtgccactccacacattgcgtgcagagatcgattacggtttcggcgaagctgaaaccacctacggcatcatcggtatcaaggtctgggtctacaaaggtgatcgtttgcctagcggcgaaccgccagtcgatctgaccaaagaagatgacaccaaacgtcgtggcccacgccgtgacgatggcaaaccaagcagccgtccacgtactgcacgcccagaaggccaaccaggtgctgcagctgcaccaggcgccgcgccggctgccaaacgtgttcgtgccaagaagccggatgccgctgttgacggtgctgttccggctgagaaagcaggagaataa

SEQ ID NO: 71340 - protein, 283 aa, Herminiimonas arsenicoxydans
MGQKIHPTGFRLSVTRNWASRWYAGNSNFATMLNEDLKVRAYLKTKLKNASVGRVIIERPAKNARITIYSSRPGVVIGKKGEDIEVLKSALTKMMGVPVHVNIEEIRKPETDAQLIADSIAQQLEKRIMFRRAMKRAMQNAMRLGAQGIKIMSSGRLNGIEIARKEWYREGRVPLHTLRAEIDYGFGEAETTYGIIGIKVWVYKGDRLPSGEPPVDLTKEDDTKRRGPRRDDGKPSSRPRTARPEGQPGAAAAPGAAPAAKRVRAKKPDAAVDGAVPAEKAGE

SEQ ID NO: 71341 - DNA, 720 bp, Dichelobacter nodosus VCS1703A
  CDS (1)..(720): transl_table=11
atgggtcaaaaaatacatccgattggttttcgtttaggagtttctaaggactggacttcgaaatggtatgccgaaggtacggattatgcgaattaccttgaaaaagattttgaagtacgtgaatttttgcggaaaaaattagcgcacgcttccgttagtaaaattcaaatcgaacgcccgcgtaatggcgcacaaattactattttcaccgcaagaccaggtatcgtaattggtaaaaaaggtgaagatattgaaattttgaaaaaagaagtcggcaaaattcttggtgtcgcaacttcaattaatattgaagaaattcgccgaccagaattagattcctatttggtagcagataatattgctaaacaattggaacgccgcgtgatgttccgtcgtgcgatgaaacgtgcggttgcatcaacaatgcgtttgggtgcggtaggcgttaaagtcagtatttctggacgcttgaatggtgccgaaattgcgcgtaccgaatggtatcgtgaaggcagagtgccgttacatactttgcgtgcagatattgattatggtttagcagaagcatataccacttatggcgttattggcgtaaaagtttggatctttaaaggtgaaaatcttgaaggcttagaagcagatacgtccaatactaatgaattgtctgatgaaaagcgtaatcgtcgcaaaccgcgcaacgcaaatcgtcgtaaggaataa

SEQ ID NO: 71342 - protein, 239 aa, Dichelobacter nodosus VCS1703A
MGQKIHPIGFRLGVSKDWTSKWYAEGTDYANYLEKDFEVREFLRKKLAHASVSKIQIERPRNGAQITIFTARPGIVIGKKGEDIEILKKEVGKILGVATSINIEEIRRPELDSYLVADNIAKQLERRVMFRRAMKRAVASTMRLGAVGVKVSISGRLNGAEIARTEWYREGRVPLHTLRADIDYGLAEAYTTYGVIGVKVWIFKGENLEGLEADTSNTNELSDEKRNRRKPRNANRRKE

SEQ ID NO: 71343 - DNA, 732 bp, Synechococcus sp. WH 7803
  CDS (1)..(732): transl_table=11
atgggacacaaaatccatccaaccggcttacgcctggggatcacccaggagcaccggtcacgctggtacgcctccagcaaaagctatccgaccctccttaaggaagacgatcggattcgcaagttcatccacaagaagtacggctccgccggcatcagtgatgtgctgattgcccgcaaggctgatcagcttgaagtggaactgaaaaccgcacgccccggcgtgttggtcggccgccagggcagcggcattgaagagctgcgctctggcatccagaaaaccgtgggtgatccgaaccgtcaggtccggatcaacgtggttgaagtggaacgagtcgatgccgacgctttcctgttggcggaatacatcgcccaacagctggaaaagcgtgtggccttccgtcgcaccatccgcatggccgtgcagcgtgcccagcgcgctggtgttctcggcctgaaaattcaggtgtctggtcgcctcaacggcgccgagattgcccgaaccgagtggacccgcgaaggtcgtgtcccccttcacaccctgcgtgcagacatcgattacgccaccaaggtggccagcacgacctacggcgtgctgggcatcaaggtttgggtgttcaagggcgaagtgctgggagatgaagcccagcagcaactgcctgtgggggcaaccccgcggcgtcgggccggccgcaggccccaacagttcgaagaccgctccaacgaggggtga

SEQ ID NO: 71344 - protein, 243 aa, Synechococcus sp. WH 7803
MGHKIHPTGLRLGITQEHRSRWYASSKSYPTLLKEDDRIRKFIHKKYGSAGISDVLIARKADQLEVELKTARPGVLVGRQGSGIEELRSGIQKTVGDPNRQVRINVVEVERVDADAFLLAEYIAQQLEKRVAFRRTIRMAVQRAQRAGVLGLKIQVSGRLNGAEIARTEWTREGRVPLHTLRADIDYATKVASTTYGVLGIKVWVFKGEVLGDEAQQQLPVGATPRRRAGRRPQQFEDRSNEG

SEQ ID NO: 71345 - DNA, 663 bp, Chloranthus spicatus
  CDS (1)..(663): transl_table=11
atgggacaaaaaataaatccacttggtttcagacttggtgcaacccaaggtcatcattccctttggttcgcacaaccaaaaagttattccagaggtctccaggaagatgaaaaaataaaggattgtatcaagaattatgtacaaaaaaatatgagaatatcctcggattacgaaggaattgcacatatagagattaaaaaaagaatcgatctgattcaggtcataatctatatgggatcaaaaaattcgttaatgttaatagagggtccaacacgaggaatcgaagaattacagatcaatgtacaaaaagagtttcattctgcgaaccagagactcaatattgacatcacagaagttgcaaacccttatggacaacctaatcttcttgcagaatatatagctcgacaattaaagaagagagtttcgttccgaaaggcaatgaaaaaaactattgaattcgctgaacaagcagatacaaaaggaattcaagtgcaaatttcaggacgcatcgacggaaaagaaattgcgcgtgtcgaatgggtcagagaaggtagggttcccctacaaactattcgagctaaaattgattattgttcctatacagttcgaactatccatggggtattgggcataaaaatttgggtatttgtagacgataaataa

SEQ ID NO: 71346 - protein, 220 aa, Chloranthus spicatus
MGQKINPLGFRLGATQGHHSLWFAQPKSYSRGLQEDEKIKDCIKNYVQKNMRISSDYEGIAHIEIKKRIDLIQVIIYMGSKNSLMLIEGPTRGIEELQINVQKEFHSANQRLNIDITEVANPYGQPNLLAEYIARQLKKRVSFRKAMKKTIEFAEQADTKGIQVQISGRIDGKEIARVEWVREGRVPLQTIRAKIDYCSYTVRTIHGVLGIKIWVFVDDK

SEQ ID NO: 71347 - DNA, 657 bp, Buxus microphylla
  CDS (1)..(657): transl_table=11
atgggacaaaaaataaatccactaggttttagacttggtacaacccaaggtcatcattccctttggtttgcacaaccaaaaagttattccgagggtctacaggaagatcaaaaaatacgggattgtatcaagaattatgtacaaaaaaatatgagaatatcctcaggtgccgagggaattgcacgtatagagattcaaaaaagaatcgatctgatccaagttataatctatatgggattcccaaagttgttaatagagggtagaccacgaggagttgaagaattgcagatcaatgtacaaaaagagtttaattctgtaaaccgaaaactaaacattgctatcacaagaattgcaaaaccttatggacaacctaatattcttgcggaatttatagctggacaattaaagaatagggtttcgtttcgaaaggcaatgaaaaaggctattgaattaactgaacaggcagatacaaaaggaattcaaatacaaattgcagggcgtatcgacggaaaagaaattgcacgtgtcgaatggatccgagaaggtagggttcccctacaaaccattcgagctaaaatttattattgttcctatacagttcgaactatctatggggtattaggaataaaaatttggatatttgtagacgaggaataa

SEQ ID NO: 71348 - protein, 218 aa, Buxus microphylla
MGQKINPLGFRLGTTQGHHSLWFAQPKSYSEGLQEDQKIRDCIKNYVQKNMRISSGAEGIARIEIQKRIDLIQVIIYMGFPKLLIEGRPRGVEELQINVQKEFNSVNRKLNIAITRIAKPYGQPNILAEFIAGQLKNRVSFRKAMKKAIELTEQADTKGIQIQIAGRIDGKEIARVEWIREGRVPLQTIRAKIYYCSYTVRTIYGVLGIKIWIFVDEE

SEQ ID NO: 71349 - DNA, 657 bp, Illicium oligandrum
  CDS (1)..(657): transl_table=11
atgggacaaaaaataaatccacttggtttcagacttggtacaacccaaagtcatcattgcctttggttcgcacaaccaaaaaattattccgggggtctccaggaagatgaaaaaatacgggattgtatcaagaattatgtacaaaaacatatgagagtatcctcaggtttcgaaggaattgcgcgtatagggattcaaaaaaaaatcgatctgatccaggtcataatccatattggattcccccattttttaatagagggtcgagcccgaggaatcgaagaattacagatcaatgtacaaaaaaagttaaattctgtgaaccggagactcaacattgctatcacaagagttgcaaaaccgtatggacaacccactattcttgcagaatatatagctctacaattaaagaatagagtttcgtttcgaaaggcaatgaaaaaagctattgaattaactgaacaagcggacacaaagggaattcaggtacaaatttcggggcgtatcaacggaaaagaaattgcccgtgtcgaatggatcagagaaggtagggttcccctacagacgattcgagctaaaatcgatcattgttcctatgcagttcgaactatctatggggtattaggcatcaaaatttggatatttctagacgaggaataa

SEQ ID NO: 71350 - protein, 218 aa, Illicium oligandrum
MGQKINPLGFRLGTTQSHHCLWFAQPKNYSGGLQEDEKIRDCIKNYVQKHMRVSSGFEGIARIGIQKKIDLIQVIIHIGFPHFLIEGRARGIEELQINVQKKLNSVNRRLNIAITRVAKPYGQPTILAEYIALQLKNRVSFRKAMKKAIELTEQADTKGIQVQISGRINGKEIARVEWIREGRVPLQTIRAKIDHCSYAVRTIYGVLGIKIWIFLDEE

SEQ ID NO: 71351 - DNA, 651 bp, Dioscorea elephantipes
  CDS (1)..(651): transl_table=11
atgggacaaaaaataaatccacttggtttcagacttggtacaacccaaagtcatcattccttttggttcgcacaaccaagaaatttttccacgggtctacaggaagatgaaaaaatacgaaatagtatcaagaactatatacaaaaaaataggagaatatcctcaggtttcgaaggaattgcacgtataagaataaaaaaaagaattgatttgattcaggtcataatccacattggattcccaaatttgttaatagaaggacgaacacgaggaattgaagaattacagataaatgtgcaaaaagagtttcatttttcgaatcgcagactcaagattgctatcacaagagttgaaaaaccttatgaacaagcaaatattcttgcagaatatatagctttacaattaaaaaatagagtttcgtttcgaaaggcaatgaaaaaggctattgaattaactgaacaaacggatacaaaaggaattcaagtgcaaattgcagggcgtatcgacggaaaagaaattgcacgtgttgaatggatcagagaagggagagttcccctacaaacaattcgcgctaaaattgatcattgttcctatacaattcgaactatctatggagtattaggcataaaaatttggatatttgtagactag

SEQ ID NO: 71352 - protein, 216 aa, Dioscorea elephantipes
MGQKINPLGFRLGTTQSHHSFWFAQPRNFSTGLQEDEKIRNSIKNYIQKNRRISSGFEGIARIRIKKRIDLIQVIIHIGFPNLLIEGRTRGIEELQINVQKEFHFSNRRLKIAITRVEKPYEQANILAEYIALQLKNRVSFRKAMKKAIELTEQTDTKGIQVQIAGRIDGKEIARVEWIREGRVPLQTIRAKIDHCSYTIRTIYGVLGIKIWIFVD

SEQ ID NO: 71353 - DNA, 657 bp, Cycas taitungensis
  CDS (1)..(657): transl_table=11
atgggacagaaaatgaatccacttggttttagacttggtataacccaaaatcatcgttcccattggtttgcgcaacaaaaaaattattccgaagatctccgggaagatgaaaaaataagtaattgcattgtgaattatatacgaagacatatgaggagttcctcgaatcatggaggaattgcacgtgtagaaattagaagaaagatcgatttaattcaggtcgaaatccatattggatttcccaacttgttgatagaaaatcggggtcggggaagtgaacaattaagaaccgatgtacgaaatatgcttaatcctgtggatggaaaactaaacattgctatagtgaaagttgcgaaaccttatggagaacctaatattcttgcggaatttattgccctgcaactagaggatagagtttcactcggaagaacagtcaaaagagctattgaactggctgaacaggcagatataaaaggtattcaaatacaaattgcaggacgtctcgacggaaatgaaattgcccgtgtcgaatgggctagagaaggtagggttcccctacagaccattcgagccaaaattgatcattgttattatccagctcaaactatctatggagtattagggattaaaatttggatcttcggggatgagaaatga

SEQ ID NO: 71354 - protein, 218 aa, Cycas taitungensis
MGQKMNPLGFRLGITQNHRSHWFAQQKNYSEDLREDEKISNCIVNYIRRHMRSSSNHGGIARVEIRRKIDLIQVEIHIGFPNLLIENRGRGSEQLRTDVRNMLNPVDGKLNIAIVKVAKPYGEPNILAEFIALQLEDRVSLGRTVKRAIELAEQADIKGIQIQIAGRLDGNEIARVEWAREGRVPLQTIRAKIDHCYYPAQTIYGVLGIKIWIFGDEK

SEQ ID NO: 71355 - DNA, 741 bp, Mannheimia succiniciproducens MBEL55E
  CDS (1)..(741): transl_table=11
ttgtgtcagatcgttaatcgtagaggaatagcaatgggtcaaaaagtaaatccacatggtattcgcctaggtatcgttaagccttggagctctacttggttcgcgaatacacaagatttcgcatctaatttagacggcgatttcaaagtacgtaaattcttgaataaagaattagcgaatgcttcagtatcacgtatcactattgaacgtcctgctaaaagtattcgtgtaacaattcacacagctcgtccgggtatcgttatcggtaaaaaaggcgaagatgttgaaaaattacgtaacgcagtggcgaaaatcgcaggcgttccggcacaaatcaacattgctgaagtgaaaaaacctgagctggatgcgaaattagtcgcggatagcatcgcttctcaattagaacgtcgtgtgatgttccgtcgcgcaatgaaacgtgcggtacaaaatgcaatgcgtttaggtgccaaaggtatcaaagttgaagtaagcggtcgtttaggtggtgcagaaattgcacgttctgagtggtatcgtgaaggtcgcgtaccattacatacattacgtgcggacatcgattataatacttctgaagctcatactacatacggtgtaatcggcgttaaagtgtggatcttcaaaggtgaaattcttggtggaatggctgcaattgcacaacaaccagaacaacaacctgctgcgcctaaaaaggcaccacgcggcaaaggtcgtaagtaa

SEQ ID NO: 71356 - protein, 246 aa, Mannheimia succiniciproducens MBEL55E
MCQIVNRRGIAMGQKVNPHGIRLGIVKPWSSTWFANTQDFASNLDGDFKVRKFLNKELANASVSRITIERPAKSIRVTIHTARPGIVIGKKGEDVEKLRNAVAKIAGVPAQINIAEVKKPELDAKLVADSIASQLERRVMFRRAMKRAVQNAMRLGAKGIKVEVSGRLGGAEIARSEWYREGRVPLHTLRADIDYNTSEAHTTYGVIGVKVWIFKGEILGGMAAIAQQPEQQPAAPKKAPRGKGRK

SEQ ID NO: 71357 - DNA, 684 bp, Magnetospirillum magnetotacticum MS-1
  CDS (1)..(684): transl_table=11
atgggtcagaaagtcaatccgatcggcctgcgcgtcggtatcaaccgcacctgggactcccggtggttcgcggatgagaactacgccaagctgctgcaccaggacctgaagctgcgcaagtatctgcgcgacaagctggcccaggccggtgtgtcgcgtgtggtcatcgagcgtcccgccaagaaggcccgcatcaccatccataccgcccgtccgggcgtggtgatcggcaagaagggcgcggatatcgaggtgctgcgcaaggagctctcgaagatgaccggtggtgaggttcacctcaacatcgtcgagatccgcaagccggaactggatgcccagctggtggccgagtccatcgcccagcagctcgagcgccgtgtcgccttccgtcgcgccatgaagcgcgccgtgcagtcggccatgcgtctgggcgcccagggcattcgtatcaactgctccggccgtctgggtggcgctgaaatcgcccgcatggagtggtaccgcgaaggccgcgttccgctgcacacgctgcgcgctgacgttgattatggcgtgggcaccgcccacaccacctacggcagctgcggcgtcaaggtttgggtgttcaagggcgagatcctcgctcatgaccccatggcccaggacaagcgggctgcgggcgaaaccgccccggctggccgttga

SEQ ID NO: 71358 - protein, 227 aa, Magnetospirillum magnetotacticum MS-1
MGQKVNPIGLRVGINRTWDSRWFADENYAKLLHQDLKLRKYLRDKLAQAGVSRVVIERPAKKARITIHTARPGVVIGKKGADIEVLRKELSKMTGGEVHLNIVEIRKPELDAQLVAESIAQQLERRVAFRRAMKRAVQSAMRLGAQGIRINCSGRLGGAEIARMEWYREGRVPLHTLRADVDYGVGTAHTTYGSCGVKVWVFKGEILAHDPMAQDKRAAGETAPAGR

SEQ ID NO: 71359 - DNA, 654 bp, Rickettsia akari str. Hartford
  CDS (1)..(654): transl_table=11
atggggcagaaagtttgtgcacatggttttagagtgggaccgactttaattaaaggttgggattccgtattatatgcagaaaaacattataaaactctttttatacaagatctaaaaattagggatttaataaataaggggtttaatcaagctcaagttagcagagttctgattgaacgtccttctaataaaagtattataattagtattaatgccaagaaaccaaatattattatcggtagaaatggtagtgaaattgataagctaaaaaaagctattgagaaaatgacttttttaaaagaagtgtatataaatattcacgaagttagaaagtttaatatagatgctgctatagtagctcaaactatagcattacagcttgaaaaaagagtttcttttagaaaagctatgaaaacggcaattcaggcttcacttaagcaaggtggacaaggtataagagttagttgttcagggcgacttggaggtgctgaaattgctagaaccgagtggtatatagaaggaagaatgccgttacatactttaagagctgatattgattattcaacagctgaggctataacgacttatggagttataggggttaaagtgtggatttataaaggtgaatatacagaaaataaaagatataattaa

SEQ ID NO: 71360 - protein, 217 aa, Rickettsia akari str. Hartford
MGQKVCAHGFRVGPTLIKGWDSVLYAEKHYKTLFIQDLKIRDLINKGFNQAQVSRVLIERPSNKSIIISINAKKPNIIIGRNGSEIDKLKKAIEKMTFLKEVYINIHEVRKFNIDAAIVAQTIALQLEKRVSFRKAMKTAIQASLKQGGQGIRVSCSGRLGGAEIARTEWYIEGRMPLHTLRADIDYSTAEAITTYGVIGVKVWIYKGEYTENKRYN

SEQ ID NO: 71361 - DNA, 726 bp, Crocosphaera watsonii WH 8501
  CDS (1)..(726): transl_table=11
atgggacaaaaaatacatccaattggttttcgtctcggtattaccaaagaacataaatcctgttggtatgccgataaaaaacgctatcccgagctattacaagaagacttagtggtcagggagtatatagaaaaaaatctcagtaatgccggtattgccgatattcgcatcgagagaaaagcagatcagatcgatctggctattcacaccgctagacccggtgttgtagtaggtagaggaggaagcggtatcgagcaactgagaactggtttacaaaaagctcttggtgaaaatcgtcaaattcgcatcaacgtcatcgaagtagcaagggttgatgctgacgctgctctgatcgccgaatatattggccaacaactagaaagacgggtttctttccgtcgtgtagtacgccaagctatccaaagggcccaacgggccgaagtaaaaggcatcaaaatccaagtaggtggacgtttaaacggggctgaaatcgccagaagcgaatgggtaagggagggtcgagtgccactgcacacccttagagccgacatcgattattgctatcgcaccgcccaaaccatttacggtattttaggcattaaagtctggatattcaaaggcgaggttattccagggcaagaacaagaagccatggctgcaccagcaccaacccccagaaagaaacgtcgcccccaacagtttgaagaccgttccaacgaagaataa

SEQ ID NO: 71362 - protein, 241 aa, Crocosphaera watsonii WH 8501
MGQKIHPIGFRLGITKEHKSCWYADKKRYPELLQEDLVVREYIEKNLSNAGIADIRIERKADQIDLAIHTARPGVVVGRGGSGIEQLRTGLQKALGENRQIRINVIEVARVDADAALIAEYIGQQLERRVSFRRVVRQAIQRAQRAEVKGIKIQVGGRLNGAEIARSEWVREGRVPLHTLRADIDYCYRTAQTIYGILGIKVWIFKGEVIPGQEQEAMAAPAPTPRKKRRPQQFEDRSNEE

SEQ ID NO: 71363 - DNA, 756 bp, Prosthecochloris aestuarii DSM 271
  CDS (1)..(756): transl_table=11
ttgggtcagaaagttaatcctactggatttagattagggattatcagggactggacatccaggtggtatgatgattcgcctgtgattgctgaaaaactgaagcaggatcatgttatccgtaactatgtccaggcacgcttgaaaagagagcgcgccggtattgcaaagattgttatcgagcgtacgacaaaacatattaagatcaatatctttgcggcccggccgggcgccgttgtcggcagaaagggagaggaaatcaacaatctgtcccaggagttgagccgtattaccggacgagaggttaagatcgatgttatcgaagtgatcaagccagagatcgaagctcagcttatcggcgaaaatatcgcttatcagcttgagaacagggtatctttccgtcgtgctatgaagcaggctatccagcaggctatgcgtgcaggtgcagagggtatccgtattcgctgtgcaggaaggcttggtggtgttgaaattgcacgttcagagcagtacaaggaaggcaagattccgttgcatacattgagagccaacgttgattatgcgagcgttaccgcgcacaccattgccggagcgatcggaatcaaggtatgggtctacaagggtgaggttctcgttcagcgcatcgatgctattgaagaggatgaactcaagaaaatcaaggatcgccgcggtgagcagcgttcacgtggacgcgacagccgtaacagaagacgtcgtaaaccgagacagacgacctga

SEQ ID NO: 71364 - protein, 251 aa, Prosthecochloris aestuarii DSM 271
MGQKVNPTGFRLGIIRDWTSRWYDDSPVIAEKLKQDHVIRNYVQARLKRERAGIAKIVIERTTKHIKINIFAARPGAVVGRKGEEINNLSQELSRITGREVKIDVIEVIKPEIEAQLIGENIAYQLENRVSFRRAMKQAIQQAMRAGAEGIRIRCAGRLGGVEIARSEQYKEGKIPLHTLRANVDYASVTAHTIAGAIGIKVWVYKGEVLVQRIDAIEEDELKKIKDRRGEQRSRGRDSRNRRRRKPRQTT

SEQ ID NO: 71365 - DNA, 720 bp, Xylella fastidiosa Ann-1
  CDS (1)..(720): transl_table=11
atggggcataaagttcatccgattggaattcgtctgggtatatctgcagattggaattccaagtggtacgcaaataaggctgaatttgcgggatatttggccgcagatcttaaagtgcgccaagtgttacgtaaaaaaatgtctcaggctggtatcagtaaaatacttattgagcgtccttctaatgctgcttgtgttagcatgcatgttgctcgccctggtgtagttattggtaagcgcggtgaagatattgaaatgttgagaaagcaactcagtgatattatgggcgtttccgtccatatcaatgtcattgaagtacgtaaacctgagcttgatgcacagttggtcgctgaatcggtcgctcaacagttagaacgtaggattatgtttcgtcgtgctatgaagcgttcggttagcaatgcgatacgcttgggtgctttagggataaagattagtgttgctggacgtcttaatggcgctgagattgctcgatctgaatggtaccgtgaaggtcgtgtcccattgcaaactttgcgtgctgatataggttatggtttttctgaagcgcatacgaactatggtgttactggtgtcaaggttttgatatatcatggagatattttcagtttttccagtgtgggtcaggaaaagcaggatgatggttcgcgcggtgatcgtaatgctgaccgttcatctcgtcgttcccgtgaggtgaggtga

SEQ ID NO: 71366 - protein, 239 aa, Xylella fastidiosa Ann-1
MGHKVHPIGIRLGISADWNSKWYANKAEFAGYLAADLKVRQVLRKKMSQAGISKILIERPSNAACVSMHVARPGVVIGKRGEDIEMLRKQLSDIMGVSVHINVIEVRKPELDAQLVAESVAQQLERRIMFRRAMKRSVSNAIRLGALGIKISVAGRLNGAEIARSEWYREGRVPLQTLRADIGYGFSEAHTNYGVTGVKVLIYHGDIFSFSSVGQEKQDDGSRGDRNADRSSRRSREVR

SEQ ID NO: 71367 - DNA, 723 bp, Oceanicola batsensis HTCC2597
  CDS (1)..(723): transl_table=11
atgggtcagaaagtcaatccgatcggcatgcgcctccaggtcaaccgcacctgggacagccgctggtacgccgataccaaggactacggcgatcttctgctggaagacgtccgcatgcgcgaattcatcaaggaagagtgcaagcaggccggtgtcgcccgcatcatcatcgaacgtccgcacaagaagtgccgtgtgaccatccacaccgcgcgtcctggtgtcatcatcggcaagaagggcgcggacatcgaggtcctgcgcaagaagctggcgaagatgaccgacagcgaactgcacctcaacatcgtcgaggtccggaagccggagctggacgccgcgctggtgggcgagtccatcgcacagcagctcgagcgccgggtgtccttccgccgcgcgatgaagcgggccgtgcagaacgccatgcgcatgggcgccctgggtatccgggtgaacgtcgcgggccgtctgggaggtgcggaaatcgcgcggaccgaatggtaccgcgagggccgtgtgcccctgcacacgctgcgcgccgacatcgactatgcccactccgaggcgtcgaccccctacgggatcatcggcatcaaggtgtggatcttcaaaggcgaaatcctggagcatgacccgcaggcgcgcgatcgccgtgcgcaggagcttcaggacggtcctgccccccgtggtgccggcggtggccgccgcgaccgcgaccggtaa

SEQ ID NO: 71368 - protein, 240 aa, Oceanicola batsensis HTCC2597
MGQKVNPIGMRLQVNRTWDSRWYADTKDYGDLLLEDVRMREFIKEECKQAGVARIIIERPHKKCRVTIHTARPGVIIGKKGADIEVLRKKLAKMTDSELHLNIVEVRKPELDAALVGESIAQQLERRVSFRRAMKRAVQNAMRMGALGIRVNVAGRLGGAEIARTEWYREGRVPLHTLRADIDYAHSEASTPYGIIGIKVWIFKGEILEHDPQARDRRAQELQDGPAPRGAGGGRRDRDR

SEQ ID NO: 71369 - DNA, 732 bp, Prochlorococcus marinus str. MIT 9211
  CDS (1)..(732): transl_table=11
atgggacataaaattcacccaaatggcttgaggcttggaattacccaagagcatcgttctcgttggtatgcctccagtaagacatatccaacccttcttcaagaagatgatcgtattagaggatttattcaaaagaaatatgcatctgcagggattagtgatgtattgatagctcgtaaagcagatcagttagaagttgaattgaaaacagctaggcctggagtcattgttgggagacagggtagtggcattgaagaattaagatctggtattcaaaagactattggtgatagaagtcgacaagttcgaattaatgttgttgagattgagcgagtggatgctgatgcacaccttttagcggaatatatagctcaacaacttgagaaacgtgttgcttttcgaagaacaattcgtatggctgtgcaacgtgctcaaagggcaggagtgcttgggctgaagattcaggtaggggggaggttaaatggagcagaaattgcccgatctgaatggactagagaaggacgtgtccctttgcatactcttcgtgctgagattgattatgcaaataagactgctaatacaacttatggtgtattgggcataaaagtttgggtgtttaaaggagaggttctttctaaagaagatcaacctttgccagttggtgcaagtccgagaagaaaaggtagtagaagacctcagcagtttgaggacagatccaatgatggtaaataa

SEQ ID NO: 71370 - protein, 243 aa, Prochlorococcus marinus str. MIT 9211
MGHKIHPNGLRLGITQEHRSRWYASSKTYPTLLQEDDRIRGFIQKKYASAGISDVLIARKADQLEVELKTARPGVIVGRQGSGIEELRSGIQKTIGDRSRQVRINVVEIERVDADAHLLAEYIAQQLEKRVAFRRTIRMAVQRAQRAGVLGLKIQVGGRLNGAEIARSEWTREGRVPLHTLRAEIDYANKTANTTYGVLGIKVWVFKGEVLSKEDQPLPVGASPRRKGSRRPQQFEDRSNDGK

SEQ ID NO: 71371 - DNA, 696 bp, Erythrobacter sp. NAP1
  CDS (1)..(696): transl_table=11
atgggtcagaagagtaacccaatcggtctgcgtctccagatcaaccgcacgtgggacagccgctggtacgccgaagggcgcgactacgccggcctgctcgcggaagacatcaagatgcgcaagtacatccttgaaagcctgccccaggcagcgatctcgaaggttgtgatcgagcgtccggccaagctgtgccgcgtttcgatttatgctgcgcgtccgggcgtcatcatcggcaagaagggcgcagacatcgaaaagctgcgcgccaagctgtcgaccatgacttcgagcgaagtgaagctgaacatcgttgagatccgcaagccggaaatcgacgccaagctcgtcgctcagggcgtggctgaccagctggttcgccgtgtcgctttccgccgcgccatgaagcgtgcggttcagtcggcactgcgtcttggcgctgaaggtatcaagatcgtgtgcggtggccgtctcggcggcgctgaaatcgcccgcgtcgaatggtaccgcgaaggccgcgtgccgcttcacaccctgcgtgcgaacatcgactacgctgaaaccgaagcgctcaccgcttacggcatcatcgggatcaaggtctggatcttcaagggcgagattctggcccacgatccgaccgcgcaggaccgtctcatgatggaagctcagacttccggcgtgcgtccggctcgctga

SEQ ID NO: 71372 - protein, 231 aa, Erythrobacter sp. NAP1
MGQKSNPIGLRLQINRTWDSRWYAEGRDYAGLLAEDIKMRKYILESLPQAAISKVVIERPAKLCRVSIYAARPGVIIGKKGADIEKLRAKLSTMTSSEVKLNIVEIRKPEIDAKLVAQGVADQLVRRVAFRRAMKRAVQSALRLGAEGIKIVCGGRLGGAEIARVEWYREGRVPLHTLRANIDYAETEALTAYGIIGIKVWIFKGEILAHDPTAQDRLMMEAQTSGVRPAR

SEQ ID NO: 71373 - DNA, 729 bp, Synechococcus sp. WH 5701
  CDS (1)..(729): transl_table=11
atgggacacaagatccatccaaccggcctgcgcctggggatcacccaggaccaccgctcccgttggtacgcccccagcaagacctatccgaccctcctccaggaggatgaccggattcgctgcttcattcacaagaagtacgcctcagccggtatcagcgatgtgctgatcgcccgcaaggccgaccagctggaggtcgagctcaagacggcccgacccggtgtgctggtgggacgccagggcagcggcatcgaggaactgcgcgccggcattcagaaaaccgtcggtgatcgcaaccgccaggtgcgcatcaacgtggtggaagtggagcgggtcgacgccgatgccttcctgctggccgagtacatcgcccagcagctggagaagcgggtggcgttccgccgggtcatgcgcatgaccgtgcagcgggcccagcgggccggcgtgctcggcctcaagatccaggtgagtgggcgcctcaatggcgccgaaatcgcccggaccgaatggacccgggaaggccgggttccgctgcacaccctccgcgccgacatcgattacgccaccaaggtggcgaccaccacctacggggtgctgggaatcaaggtgtgggtgttcaaaggtgaagtgcttcctggtcaacaggaaaaactccccgtcggggcagcaccacggcgccgcgccaatcgccggccccaacagttcgaagaccgctccaacgaggagtga

SEQ ID NO: 71374 - protein, 242 aa, Synechococcus sp. WH 5701
MGHKIHPTGLRLGITQDHRSRWYAPSKTYPTLLQEDDRIRCFIHKKYASAGISDVLIARKADQLEVELKTARPGVLVGRQGSGIEELRAGIQKTVGDRNRQVRINVVEVERVDADAFLLAEYIAQQLEKRVAFRRVMRMTVQRAQRAGVLGLKIQVSGRLNGAEIARTEWTREGRVPLHTLRADIDYATKVATTTYGVLGIKVWVFKGEVLPGQQEKLPVGAAPRRRANRRPQQFEDRSNEE

SEQ ID NO: 71375 - DNA, 708 bp, Pseudoalteromonas tunicata D2
  CDS (1)..(708): transl_table=11
atgggacaaaaagttcatcctactggtattcgcctaggtatttctaaaccttgggtgtctacttggtacgcgaatactaaagattttcctgaaatgctttttggtgatcacaaagtacgtacattccttactaaggaattgaaagcggcttctgtgtctaaaatcatcatcgagcgtccagctaaatcaatccgagtaacaattcacacggctcgccctggtattgttatcggtaaaaaaggcgaagacgtagagaaattacgtcttgtagtatctaaaattgcaggtgtaccggctcagatcaacatttctgaaatccgtaaaccagaattagatgcaaaattagttgctgacagcatcgcatctcagcttgagcgtcgcgttatgttccgtcgcgctatgaagcgtgcggttcaaaatgcaatgcgcattggcgctaaaggtatcaaagttgaagttagcggtcgtctaggcggcgctgaaatcgcacgttctgaatggtatcgtgaaggtcgtgtacctttacatactcttcgtgcagatattgattattcaacttctgaagctttaaccacttatggcatcatcggtgtaaaagtttggatcttcaaaggcgaagtgatcggtggtttaccactgaaacaacaagagcaagagaagccggccaaaccacgtgcaccgaagaaagccaaaaaaagtgctaagtag

SEQ ID NO: 71376 - protein, 235 aa, Pseudoalteromonas tunicata D2
MGQKVHPTGIRLGISKPWVSTWYANTKDFPEMLFGDHKVRTFLTKELKAASVSKIIIERPAKSIRVTIHTARPGIVIGKKGEDVEKLRLVVSKIAGVPAQINISEIRKPELDAKLVADSIASQLERRVMFRRAMKRAVQNAMRIGAKGIKVEVSGRLGGAEIARSEWYREGRVPLHTLRADIDYSTSEALTTYGIIGVKVWIFKGEVIGGLPLKQQEQEKPAKPRAPKKAKKSAK

SEQ ID NO: 71377 - DNA, 681 bp, Oceanospirillum sp. MED92
  CDS (1)..(681): transl_table=11
atgggtcagaaagtacatccaacgggtattcgtctcggtattgttaaagatcacacttctgtgtggtacgcagacaagagcgaatacgcaagcaagctgcagaatgatctgcaggtgcgtgagtacctggataagcagcttgaaaaagcatctgtaagccgcatcgaaatcgagcgtcctgcacagaatgctaagattactattcacacagctcgtccgggcatcgtgattggtaagaaaggtgaagatgttgagaaacttcgtaacacagtatcagaaatgatgggtgttcctgttcacatcaacatcgaagaaattcgtaagccagaactggacgcacgccttgtagcacagggtgtggctagccagctggagcgtcgtgttatgttccgtcgtgcgatgaagcgcgcggtacagaacgctatgcgtcttggtgctaaaggtatcaagattcagcttggtggtcgtctgggtggtgccgagatcgctcgtagcgaatggtatcgtgaaggtcgtgtgccattgcacacacttcgtgcggatatcgattacgctacatatgaagcgcacactacttacggtgtgatcggcgttaaagtctggatcttcaagggcgagattcttggcggcatcgaacaggtgcgtgctgagaaaaatgcgcctaagaagaaaggtaagtga

SEQ ID NO: 71378 - protein, 226 aa, Oceanospirillum sp. MED92
MGQKVHPTGIRLGIVKDHTSVWYADKSEYASKLQNDLQVREYLDKQLEKASVSRIEIERPAQNAKITIHTARPGIVIGKKGEDVEKLRNTVSEMMGVPVHINIEEIRKPELDARLVAQGVASQLERRVMFRRAMKRAVQNAMRLGAKGIKIQLGGRLGGAEIARSEWYREGRVPLHTLRADIDYATYEAHTTYGVIGVKVWIFKGEILGGIEQVRAEKNAPKKKGK

SEQ ID NO: 71379 - DNA, 723 bp, Flavobacteria bacterium BBFL7
  CDS (1)..(723): transl_table=11
atgggacaaaaaactaatccgataggaaatcgtttaggtatcatcagaggatgggaatctaactggtacggtggtaatgattatggtgataagcttgccgaagatgataagatacgtaagtatattcatgctcgtctttcaaaagctagtgtgtctagagttattattgagcgtacattgaaacttgtgacggtaacgataactactgctagacctggtataattattgggaaaggtggacaagaagtggatcgtctaaaagaagagcttaagaagattacaggtaaggatgttcagattaatattcatgaaattaagcgtccagaacttgatgcctttttagtaggtgcaagtgtggctcgccagattgagaacagaatttcttatcgacgtgctataaagatggctattgcagcggcaatgcgtatgaatgctgaaggtattaaaatccagatctcaggtagattgaatggtgctgagatggcgcgttctgagtcctacaaagatggtagaattcctttgtctacgttccgtgccgatatcgactatgctttagttgaggctcatactacttatggtcgtttgggtgttaaagtatggattatgaaaggtgaggtatatggaaaacgtgagttatctccattagtaggcttatctaaaaaacaaagtaaatcagatggcggttctggcaacagaggtggaaatcgtcgtcgtagaaaataa

SEQ ID NO: 71380 - protein, 240 aa, Flavobacteria bacterium BBFL7
MGQKTNPIGNRLGIIRGWESNWYGGNDYGDKLAEDDKIRKYIHARLSKASVSRVIIERTLKLVTVTITTARPGIIIGKGGQEVDRLKEELKKITGKDVQINIHEIKRPELDAFLVGASVARQIENRISYRRAIKMAIAAAMRMNAEGIKIQISGRLNGAEMARSESYKDGRIPLSTFRADIDYALVEAHTTYGRLGVKVWIMKGEVYGKRELSPLVGLSKKQSKSDGGSGNRGGNRRRRK

SEQ ID NO: 71381 - DNA, 660 bp, delta proteobacterium MLMS-1
  CDS (1)..(660): transl_table=11
ttgggccagaaagtcaatccaattggtttacggctgaatatcgtgcgcacctgggattccatttggtacgccgatcgtgattacgccaggaattttcttgaggaccagagcctgagaaaatatcttaaaaaacgcctttatcacgccggggtttcccggatccagatcgccagaaccggcgacaagatcagggtacggctgcataccgcccgcccgggagtggtgatcggcaagaaaggggcggagatcgatgtgcttaaaaatgatcttgagcggcggaccggtcgctcctgtgcccttgatattcaggaagtgcggcggcccgaggccgacgcccagttggttgccgaaaatgtcgcccagcagttggaaagacggatcgcctttcgtcgggccatgaaaaaggccatcaatatggccttgaagtttggcgccaaaggggttaggatagcctgttccggccgcctcggtggggctgagatgtcccgccgcgagtggtaccgtgaaggtcgggttcccctccataccctacgggccgatattgattacggcctggctgaggccaaaaccacctatggggtcattggcgttaaagtctggatctttaaaggcgaggttttgagcgaagaggatcgccgccccgaggagcaggcggcatag

SEQ ID NO: 71382 - protein, 219 aa, delta proteobacterium MLMS-1
MGQKVNPIGLRLNIVRTWDSIWYADRDYARNFLEDQSLRKYLKKRLYHAGVSRIQIARTGDKIRVRLHTARPGVVIGKKGAEIDVLKNDLERRTGRSCALDIQEVRRPEADAQLVAENVAQQLERRIAFRRAMKKAINMALKFGAKGVRIACSGRLGGAEMSRREWYREGRVPLHTLRADIDYGLAEAKTTYGVIGVKVWIFKGEVLSEEDRRPEEQAA

SEQ ID NO: 71383 - DNA, 693 bp, Oceanobacter sp. RED65
  CDS (1)..(693): transl_table=11
atgggtcagaaagtacatccaacaggtatacgcctgggcattaccaaagatcataattctgtttggtatgcgggcaaagatacatatgcagatcagttgctaactgacattcaagtgcgctctatgattgaaaaacgtctagagaaagcatctgtaagtaaagtaacgattgagcgtccagctcaaactgcaaaaatcaccattcacactgctcgtccgggtatcgtgattggtaagaaaggtgaagacgtagatgcacttcgtaaagatgttgctgacatgatgggtatcccagttcacctaaacattgaagaaattcgcaagccggatctagacgcaaaattggtagctcaatctgtagctaaccaacttgagcgtcgcgtgatgttccgtcgtgccatgaagcgtgctgtacaaaatgcaatgcgcggtggtgctgaaggtatcaagatccaagttggcggtcgtttgggcggtgctgagatcgcgcgttctgagtggtatcgtgaaggtcgtgtacctctacatactctacgtgctgatatcgattacgctacctatgaagcacacactacttacggtgttattggtgtaaaagtgtggatcttcaaaggcgaaatccttggtggcatcgacgaagttcgtgcccgcgctaaaagcggcggtgctaaaaagcaacgccaagcgaagtaa

SEQ ID NO: 71384 - protein, 230 aa, Oceanobacter sp. RED65
MGQKVHPTGIRLGITKDHNSVWYAGKDTYADQLLTDIQVRSMIEKRLEKASVSKVTIERPAQTAKITIHTARPGIVIGKKGEDVDALRKDVADMMGIPVHLNIEEIRKPDLDAKLVAQSVANQLERRVMFRRAMKRAVQNAMRGGAEGIKIQVGGRLGGAEIARSEWYREGRVPLHTLRADIDYATYEAHTTYGVIGVKVWIFKGEILGGIDEVRARAKSGGAKKQRQAK

SEQ ID NO: 71385 - DNA, 660 bp, Desulfitobacterium hafniense DCB-2
  CDS (1)..(660): transl_table=11
gtgggtcaaaaagtaaatcctaaaggcctcagggtcggaattatccgtgactgggaaggccgttggtttgcagataaaaactacctggaactccttcatgaagatttgaaggttcgcaaatttgtgaagaccaaattacagcaagcaggtgttcctaaagttgagattgaacgggcagccaaccgggttaaggtttcgatttatgcggctaagccgggaatcgtcatcggccggggcggtactgaagtagaaaatctccgcaagcaactggaagccatgacaggcaaacaagtggctgtcaacatcgtggaagttaagaagcctgagcttgatgcacaactggttgctgagagtgtcgctcagcaattagagaagcgtgtgtctttccgccgggctatgaaacaaaccgtacagcgcaccatgcgtcaaggcggtcagggaattaagatttcctgcagcggccgtttaggcggtgcggaaatcgcacggaccgagtggtacagtgaagggaaagttcccctccatactcttcgtgccgacattgattatggatttgctgaagcaaataccacctatggaaagattggcgtaaaagtctggatatataaaggagaggttcttcccgccaagaaggtcgctcaggtggaaggaggaaaataa

SEQ ID NO: 71386 - protein, 219 aa, Desulfitobacterium hafniense DCB-2
MGQKVNPKGLRVGIIRDWEGRWFADKNYLELLHEDLKVRKFVKTKLQQAGVPKVEIERAANRVKVSIYAAKPGIVIGRGGTEVENLRKQLEAMTGKQVAVNIVEVKKPELDAQLVAESVAQQLEKRVSFRRAMKQTVQRTMRQGGQGIKISCSGRLGGAEIARTEWYSEGKVPLHTLRADIDYGFAEANTTYGKIGVKVWIYKGEVLPAKKVAQVEGGK

SEQ ID NO: 71387 - DNA, 702 bp, Alteromonadales bacterium TW-7
  CDS (1)..(702): transl_table=11
atgggacaaaaagttcatcctactggtattcgcctaggtatatctaaaccttgggtttctacctggtacgcgagttctaaagatttctctgatcagctttttggcgatcacaaagttcgtgcattccttacaaaggaattaaaaacagcttctgtgtctaaaatcgttattgagcgtccagcaaaatcaatccgcgtaacaatccacacggctcgtccgggtgttgttatcggtaaaaaaggcgaagacgtagaaaaattacgtcaagcagtaactaaaatcgctggtgtacctgctcagattaatatctctgaagtacgtaagccagaacttgatgcacaactagtagcagacggcattgcctctcaactagagcgtcgtgttatgttccgtcgcgctatgaagcgttcggtacaaaatgcaatgcgcatcggttcaaaagggattaaagttgaagttagcggtcgtcttggcggcgcagaaatcgcacgttcagaatggtatcgtgaaggtcgtgtacctctacatactcttcgtgctgatatcgactacgcaacttctgaagccttaaccacttatggtatcattggtgttaaagtttggattttcaaaggcgaagttattggtggtttaccactagtacaagagcaagagaagccagctaaacgcgcaccaaagaaagccaagaaaagtgctaagtag

SEQ ID NO: 71388 - protein, 233 aa, Alteromonadales bacterium TW-7
MGQKVHPTGIRLGISKPWVSTWYASSKDFSDQLFGDHKVRAFLTKELKTASVSKIVIERPAKSIRVTIHTARPGVVIGKKGEDVEKLRQAVTKIAGVPAQINISEVRKPELDAQLVADGIASQLERRVMFRRAMKRSVQNAMRIGSKGIKVEVSGRLGGAEIARSEWYREGRVPLHTLRADIDYATSEALTTYGIIGVKVWIFKGEVIGGLPLVQEQEKPAKRAPKKAKKSAK

SEQ ID NO: 71389 - DNA, 684 bp, marine gamma proteobacterium HTCC2143
  CDS (1)..(684): transl_table=11
atggggcagaaagtacacccaataggcatacggttaggcattacgaaacagcacacttctatttggtatgcggaaggcggagcttacgccgagcatctcattaacgatttggaagttcgcgagtttctagaaaaaaagctcaatagcgcatcggttagccgtatcgttatagagcgtccggcgcagactgcgcggattactatccacactgctcggcccggtatcattatcggtaagaagggtgaggatgtagataagttgcggaaagagctgagcgccaaaatgggtgttccggttcacattaatatcgaagagatccgcaagcccgatctggacgcaaagttagttgcgcagaacgtggcggggcagttggagcgtcgcgtaatgttcagacgcgcgatgaagcgtgttgtgcaaaatgcaatgcgccagggtgcccaggggattaaagttcaggtcagcggtcgtgttggtggtgcagagattgcacgtaccgaatggtaccgtgaagggcgagttcctttgcatactctacgcgcagacatagattattcggcttatgaagcggcaacgacttacggcattattggcgtaaaggtttggatctttaagggcgaggtaatcggcggtgtagaagaagtcgaagtgcaagctaagggtaaaaaaggcgcaagcaacaagtag

SEQ ID NO: 71390 - protein, 227 aa, marine gamma proteobacterium HTCC2143
MGQKVHPIGIRLGITKQHTSIWYAEGGAYAEHLINDLEVREFLEKKLNSASVSRIVIERPAQTARITIHTARPGIIIGKKGEDVDKLRKELSAKMGVPVHINIEEIRKPDLDAKLVAQNVAGQLERRVMFRRAMKRVVQNAMRQGAQGIKVQVSGRVGGAEIARTEWYREGRVPLHTLRADIDYSAYEAATTYGIIGVKVWIFKGEVIGGVEEVEVQAKGKKGASNK

SEQ ID NO: 71391 - DNA, 672 bp, marine gamma proteobacterium HTCC2080
  CDS (1)..(672): transl_table=11
atgggtcagaaagtacatccaaccggtattcgccttggcattgtcaaggaccacaattcggtttggtatgcagatagcaaggcttacgccaagaacttgatcagtgatcttgaggttcgagattatgtgcttaagaagcttgatgcagcctcagtcagtcgtgtcgttattgaacggcctgcacagactgctcgtttgacaatccacacggcccgccccggcatcgtgatcggcaagaagggcgaggatgtagagaaactgcgtcgcgacctgagcgcgaagatgggtgtgccagtgcacattaacatcgaagagattcgcaaacccgatttggatgctcgtttagttgcgcagaacgtagctcagcagttagagcgacgtgtcatgtttcgccgcgcgatgaagcgggtcgtgcagaatgccatgcgccagggcgcgcagggtatcaaagttcaagtcggtggccggctcggtggtgcagaaattgcgcgttccgaatggtaccgcgaaggtcgcgtgccgctgcacacattgcgcgctgacattgattacgcaacctatgaagctcacaccacttatggcgttattggcgtcaaggtatggatcttcaagggtgaagttattggtagtgaagacgagggccaagagccccgtcgctcatcggcaagttga

SEQ ID NO: 71392 - protein, 223 aa, marine gamma proteobacterium HTCC2080
MGQKVHPTGIRLGIVKDHNSVWYADSKAYAKNLISDLEVRDYVLKKLDAASVSRVVIERPAQTARLTIHTARPGIVIGKKGEDVEKLRRDLSAKMGVPVHINIEEIRKPDLDARLVAQNVAQQLERRVMFRRAMKRVVQNAMRQGAQGIKVQVGGRLGGAEIARSEWYREGRVPLHTLRADIDYATYEAHTTYGVIGVKVWIFKGEVIGSEDEGQEPRRSSAS

SEQ ID NO: 71393 - DNA, 684 bp, Marinobacter sp. ELB17
  CDS (1)..(684): transl_table=11
atgggtcataaagtaaatccgatcggctttcgcctgggtgtgatcaaagagcacaactcagtatggtatgccgataaaaaggactacgcgaaaaacctgttgaacgacattcaggtccgtgaattcctcgacaagcgtctggtaaaggcgtctgtcagtaagattgtgatcgagcgccctgctcagaacgcccgcatcacgatccataccgcccgcccgggtattgttatcgggaagaagggtgaagatgttgaccgtcttcgtcgtgaagtcagcgacatgatgggtgtgcctgtgcacatcaacatcgaagaagtccgcaagccggacctggatgcccgtttggtagcgcaaaacgttgctggtcagttggagcgtcgtgtgatgttccgtcgtgctatgaagcgcgcggtacagaacgccatgcgtcaaggcgccaagggcatcaagattcaggttggcggtcgtctcgggggagctgaaattgcccgttccgagtggtatcgcgaaggtcgtgttccgctgcatacattgcgtgcagatattgattacggaacctacgaagcgcataccacttacggcgtaatcggcgtcaaggtatggatcttcaaaggtgagattcttggtggtatggagcaagtccgtgctgacaagaaagcctctgggaagaaaggttctaagtaa

SEQ ID NO: 71394 - protein, 227 aa, Marinobacter sp. ELB17
MGHKVNPIGFRLGVIKEHNSVWYADKKDYAKNLLNDIQVREFLDKRLVKASVSKIVIERPAQNARITIHTARPGIVIGKKGEDVDRLRREVSDMMGVPVHINIEEVRKPDLDARLVAQNVAGQLERRVMFRRAMKRAVQNAMRQGAKGIKIQVGGRLGGAEIARSEWYREGRVPLHTLRADIDYGTYEAHTTYGVIGVKVWIFKGEILGGMEQVRADKKASGKKGSK

SEQ ID NO: 71395 - DNA, 747 bp, Picris echioides phyllody phytoplasma
  CDS (1)..(747): transl_table=11
atgggacaaaagagtaatcctaatggactaaggttaggtattatccaaaattggaaatctcaatggtatgttgaagataaacaagttcctaatttagttcatgaagattttaaaatccgaaatttaataaaaaagttttatatgagaggcattatttcagatatcgaaataaaacgtttaaaaaaatctaataacgaagaaattactattaatttatttacttctaaaattggattaatacaaggtgtcgacaataaaacaaaaaataaattattgcaaaaaattgaaaaaataataaataaaaaagtattaataaatgtttttgaagtaaaaacattagataaaatagccagtttggtagcgcaaaatattgctattcaattacaacaaagaagctattttcgtgcagtacaaaaaatttcagctcaaaaagttttaaagagcggagctaagggcgttaaaataattctttcaggccgtttagggggcgctgaaattgctcgtagagaaactatttctttaggtttagtccctttaaatacttttagagctgatattgattatgctttagaagaagcacatacaacttatggtgttttaggtgttcaagtatggattttccatggagaagtttttcctaataaaactattgcagatacaagacaattttttgtacaaccacaagaaacaagaaaacactttgttcgaagatatccacaaaagaattttaagaaaaatgcatcttaa

SEQ ID NO: 71396 - protein, 248 aa, Picris echioides phyllody phytoplasma
MGQKSNPNGLRLGIIQNWKSQWYVEDKQVPNLVHEDFKIRNLIKKFYMRGIISDIEIKRLKKSNNEEITINLFTSKIGLIQGVDNKTKNKLLQKIEKIINKKVLINVFEVKTLDKIASLVAQNIAIQLQQRSYFRAVQKISAQKVLKSGAKGVKIILSGRLGGAEIARRETISLGLVPLNTFRADIDYALEEAHTTYGVLGVQVWIFHGEVFPNKTIADTRQFFVQPQETRKHFVRRYPQKNFKKNAS

SEQ ID NO: 71397 - DNA, 720 bp, Alfalfa witches
  CDS (1)..(720): transl_table=11
gtgggtcaaaagagtagtcctattattttaagattatcattacttcgtaattggtcatctaattggtatgcagaagataaaaaagttcctttgttaattaatgaagattatcgtattagaaattttattaacaattattatcctttgggaactattgctcgcgtggaaattcaacgtttaaaaaaagagaatgaagaaaatattgaaatttttttacatactcctaaaataggagttgttgtaggatctgacaataaagaaaaaaacaaactagtacaagaagtatataaattaattaaaaaaaatattaatattcatgtaattgaagttaaaaatcctgaaaaagtagcctctttaatagctcaaaatatagctgcacaattacaacaaagagctttttttagagctgtgaaaaaaatgtatattcaaaaagctttaaaagcgggagttaaaggaattaagattagtcttaaagggcgtttaagtggtgctgaaattgctcgaacagaaaccactattaaaggtattttacctttaggaacttttcgttctaaaattgattatgcatatgttgccgctaaaactattcatggggtattaggtgttaaagtttgggtttgtgatggtaattattctcctaaagatgatcgggaaatttctaaaacaatatctcgtgaaaatatatctaattcaaaaccagaaaatcaagtaaataaataa

SEQ ID NO: 71398 - protein, 239 aa, Alfalfa witches
MGQKSSPIILRLSLLRNWSSNWYAEDKKVPLLINEDYRIRNFINNYYPLGTIARVEIQRLKKENEENIEIFLHTPKIGVVVGSDNKEKNKLVQEVYKLIKKNINIHVIEVKNPEKVASLIAQNIAAQLQQRAFFRAVKKMYIQKALKAGVKGIKISLKGRLSGAEIARTETTIKGILPLGTFRSKIDYAYVAAKTIHGVLGVKVWVCDGNYSPKDDREISKTISRENISNSKPENQVNK

SEQ ID NO: 71399 - DNA, 723 bp, Acholeplasma sp
  CDS (1)..(723): transl_table=4
atgggtcaaaaaactaatccaaacggacttcgtttaggaatcatccgttcatgggaatcaaaatggtatgcaaacgaaaaagatgtacctgcattaattaatgaagactacaacattcgtaaatatttaaacaaagtttacaaaaaagccggcgtttctcaaattgaaatcgaacgtcttaaaggtaaagcaaaagatcgtattaaagttactttatatactgctaaacctggtattgtaattggtagagatggtgaaacaagaaataaagctgtttctgaattagaatacttaactaaaaaagaaatcgtatttaacgtagttgaagttaaacgccctgaaaaagttgcagaattagttgcacaaaacatggctgaacaacttgaaaatcgtgcgtcattcagacgtgttcaaaagattgctatccaacgtgccttaaaatcaggtgctaaaggagttaaaactttagtatcaggtcgtctaggtggagctgaaatggctcgtagcgaaggatattcagaaggacgcgttccattacatactttacgtgcagacgtagactatgcaacagctgaagctcatacaacatatggagttttaggtatcaaagtatgggttttccatggcgaagtattacctggacaaacaatcttagatacaagaaaaccatttgaagcttctgcaccaagaccacaaagacgcaatcgtaaaggaggcaaataa

SEQ ID NO: 71400 - protein, 240 aa, Acholeplasma sp
MGQKTNPNGLRLGIIRSWESKWYANEKDVPALINEDYNIRKYLNKVYKKAGVSQIEIERLKGKAKDRIKVTLYTAKPGIVIGRDGETRNKAVSELEYLTKKEIVFNVVEVKRPEKVAELVAQNMAEQLENRASFRRVQKIAIQRALKSGAKGVKTLVSGRLGGAEMARSEGYSEGRVPLHTLRADVDYATAEAHTTYGVLGIKVWVFHGEVLPGQTILDTRKPFEASAPRPQRRNRKGGK

SEQ ID NO: 71401 - DNA, 687 bp, Magnetospirillum gryphiswaldense
  CDS (1)..(687): transl_table=11
atgggtcagaaagtcaatccgatcggcctgcgcctcggcatcaaccgcacctgggattcccgttggttcgccgacggcgactacgccaagatgctgcacgaggatctgaagctgcgtgattacctgcgcaagaagctggctcaggccggcgtgtcgcgggtgatcatcgagcgtccggccaagaaggcccgcattaccattcacaccgcccgtccaggcgtggtgatcggtaagaagggtgccgacatcgaagtgctgcgcaagacgctcagcaagatgaccggtggcgaagttcatctgaacatcgtcgaaatccggaagccggaactggacgctcagctggtggccgagtccatcgcccagcagctggaacgtcgcgtgtccttccgccgcgccatgaagcgtgcggtgcagtcggccatgcgtctgggcgcccagggcatccgtatcaactgctcgggccgtttgggcggcgccgaaatcgctcgcatggaatggtaccgcgaaggccgcgtgcccctgcacaccttgcgcgccgacatcgattacggtatcggcaccgccaagaccacctatggtacctgcggtatcaaggtgtgggtgttcaagggcgagatcctggctcatgatcccatggctcaggacaagcgcgccgccggcgagtccgctcccgtcgaccgtcgctga

SEQ ID NO: 71402 - protein, 228 aa, Magnetospirillum gryphiswaldense
MGQKVNPIGLRLGINRTWDSRWFADGDYAKMLHEDLKLRDYLRKKLAQAGVSRVIIERPAKKARITIHTARPGVVIGKKGADIEVLRKTLSKMTGGEVHLNIVEIRKPELDAQLVAESIAQQLERRVSFRRAMKRAVQSAMRLGAQGIRINCSGRLGGAEIARMEWYREGRVPLHTLRADIDYGIGTAKTTYGTCGIKVWVFKGEILAHDPMAQDKRAAGESAPVDRR

SEQ ID NO: 71403 - DNA, 645 bp, Gnetum parvifolium
  CDS (1)..(645): transl_table=11
atgggtcaaaaagtaaatccacttgggtttagactgggtgtaactcagaaaaattattccgtttggtttgcacaaaatagagattattcaaaaactctacaagaagacgtaaaaatcaatcaaaacatcgaaaaattttttcaaaaacagaggaaacactcttatttaggaattgcacaaatagagattcaaagaaaagtgaatttgattaatgtaacaatctatacaggattttctagtttgttaaacaacgaaaaaggagaatttagcgaattaaaaaacaaaataaggcagagtcttggtccgataaatcaaaaattgaacattaaagtaggaatactgtcaaagccatatcaaaacgctaaaattctcgcagaatatattgcccagcaactggaaaagagggtcgccgtgaaaaaaatactacaaaaagcggttgaactagcacaaaaagaagatatcgaaggtattcgtatacaagttgcaggtcgtttaggcggtagagaaaggacccgaaaagccaaaatcaaaataggtagagttacgttacaaacacttcgagctgaaatggactattgttgttatacagttcgaacaatccacggaactttcggaattctactgtggatcttcatgaaagaataa

SEQ ID NO: 71404 - protein, 214 aa, Gnetum parvifolium
MGQKVNPLGFRLGVTQKNYSVWFAQNRDYSKTLQEDVKINQNIEKFFQKQRKHSYLGIAQIEIQRKVNLINVTIYTGFSSLLNNEKGEFSELKNKIRQSLGPINQKLNIKVGILSKPYQNAKILAEYIAQQLEKRVAVKKILQKAVELAQKEDIEGIRIQVAGRLGGRERTRKAKIKIGRVTLQTLRAEMDYCCYTVRTIHGTFGILLWIFMKE

SEQ ID NO: 71405 - DNA, 759 bp, Paulownia witches
  CDS (1)..(759): transl_table=11
gtgggtcaaaaaactaatcctaacggcttaagattaggcattattagaacttgggaatctcaatggtgtgttaatgataaagaaattcctaatttaattaaagaagattttttaattcgtaaactaatcaataattttactaaaaaaagtgctatcagtcaaattgacattgaacgcctaaaagaaaaaaataaaaaccgtatcactatttctgtccacaccgctaaaccaggcgttattattggaaaagatggcgatacacgcaacaaattagttgccaaactcaaagaacttacccaaaaagacgttaatcttaacgtgttagaagttaaaaactctgataaaaacgctttattaattgctcaaaatatggctgaacaactagaaaatcgtatgtttttccgccgtgttcaaaaaatggcaatccaaaaagccctaaaagctggtgccaaaggagtaaaaactttaatttctggtcgtttgggtggtgctgaaatagctcgtagcgaaggacatgccgaaggcagagttcctctacacactctaagagcagacatcgattacgctgctgttgaagctcacactacttatggagttttaggaattaaagtatggattttccacggtgaagttttaccaggacaaaccattttagacgctagaaaaccgtttgcttctcaatcttctaacactcctaacagacgccctcgcaatttcaaaggaggcaacaataatcatgttaatgccaaaaagaactaa

SEQ ID NO: 71406 - protein, 252 aa, Paulownia witches
MGQKTNPNGLRLGIIRTWESQWCVNDKEIPNLIKEDFLIRKLINNFTKKSAISQIDIERLKEKNKNRITISVHTAKPGVIIGKDGDTRNKLVAKLKELTQKDVNLNVLEVKNSDKNALLIAQNMAEQLENRMFFRRVQKMAIQKALKAGAKGVKTLISGRLGGAEIARSEGHAEGRVPLHTLRADIDYAAVEAHTTYGVLGIKVWIFHGEVLPGQTILDARKPFASQSSNTPNRRPRNFKGGNNNHVNAKKN

SEQ ID NO: 71407 - DNA, 762 bp, Fremyella diplosiphon
  CDS (1)..(762): transl_table=11
gtgggacaaaagattcatccagttggttttcggctgggtattacacaagaacaccaatctcgctggtttgccgttcctgataaatatccagaactgctccaagaagactacaaactccgtcaatatatcgaacaaaagctaggcagacttgctcaaaacaacgctggcatttcagaggtaaggattgagcggaaagccgaccaaatcgacttagaagttcgtacagctagacctggcgtagtagtaggtcgtggtggtcaaggtatcgaatccttacgtaccggactgcaagaacttttgggtagcaatcgccaaattcgcatcaacgtagtagaagtacaacgagttgatgctgatgcttatttgattgcggaatatatcgctcaacaactagaacgacgtgtatctttccgtcgggtagtacgccaagcgattcaacgtgcccaacgcgctggtgttcaaggcattaaagttcaagtgagcggacggctcaacggtgcagaaattgcccgtacagaatggactcgtgaaggtagagtacctctacataccttaagagctgacatcgattactcttactgcacagctaaaaccgtttatggaattctgggcatcaaagtatgggtatttaaaggcgaaatcatccccggacaagaagaagccgcacccgcacccacatctcgtgaacgcgaacgcgaacctcgtcgccgtcaacaacaacgccgtcgccaacaatttgaagaccgctcaaatgaagggtaa

SEQ ID NO: 71408 - protein, 253 aa, Fremyella diplosiphon
MGQKIHPVGFRLGITQEHQSRWFAVPDKYPELLQEDYKLRQYIEQKLGRLAQNNAGISEVRIERKADQIDLEVRTARPGVVVGRGGQGIESLRTGLQELLGSNRQIRINVVEVQRVDADAYLIAEYIAQQLERRVSFRRVVRQAIQRAQRAGVQGIKVQVSGRLNGAEIARTEWTREGRVPLHTLRADIDYSYCTAKTVYGILGIKVWVFKGEIIPGQEEAAPAPTSREREREPRRRQQQRRRQQFEDRSNEG

SEQ ID NO: 71409 - DNA, 720 bp, Oryza sativa subsp
  CDS (1)..(720)
atgggacaaaaaataaatccacttggtttcagacttggtacaacccaaaatcaccattccttttggttcgcacaaccaaaaaattattctgaaggtctacaggaagataaaaaaatacggaattgtatcaagaactatatacaaaagaataggaaaaagggctcgaatagaaaaatagaagcagactcaagtttcgaagtaattacacataataaaaaaatggactcaggctcaagttccgaagtaattacacatatagaaattcaaaaagaaatcgatacaatccacgtcataatccatattggattccccaatttattaaagaaaaaaggagcaatcgaagaattagagaaagatctacaaaaagaagttaattctgtaaaccagagacttaatattgggatcgaaaaagtgaaagaaccttatagacaacctaacattcttgtagaatatatagctttccaattaaaaaatagagtttcattccgaaaggcaatgaaaaaagccattgaattaactaaaaaaacagatataaagggagtaaaagtaaaaattgcaggccgtctcgcgggaaaagaaattgcgcgtgccgaatgcatcaaaaaaggtagacttcccctccaaacaattcgcgctaaaattgattattgctgctatccaattcgaactatctatggagtattaggagttaaaatttggatattcgtagacgaagaataa

SEQ ID NO: 71410 - protein, 239 aa, Oryza sativa subsp
MGQKINPLGFRLGTTQNHHSFWFAQPKNYSEGLQEDKKIRNCIKNYIQKNRKKGSNRKIEADSSFEVITHNKKMDSGSSSEVITHIEIQKEIDTIHVIIHIGFPNLLKKKGAIEELEKDLQKEVNSVNQRLNIGIEKVKEPYRQPNILVEYIAFQLKNRVSFRKAMKKAIELTKKTDIKGVKVKIAGRLAGKEIARAECIKKGRLPLQTIRAKIDYCCYPIRTIYGVLGVKIWIFVDEE

SEQ ID NO: 71411 - DNA, 657 bp, Acorus calamus
  CDS (1)..(657): transl_table=11
atgggacaaaaaataaatccacttggtttcagacttggtgcaacccaaagtcatctttccctttggttcgcacaaccaaaaagttattctatgggtttacaggaagatgaaaaaatacgggagtgtatcaagaattatgtacaaaaaaacccgagactgtcttcaggattcgaaggaatagcgcgtatagaaattaaaaaaagaatcgatctgatccaggtcataatctatatcggattcccaaatttattcatagagggtcgaacgcaaggaatcaaagaattacagatgagtgtacaaaaaagattaaattctgtgaatcagagactcaacattgctatcgcaagaatttcaaaaccttatgggcaacccaatattcttgctgaatatatagctttacaactaaaaaatagagtttcgtttcgaaaagcaatgaaaaaagctattgaattgactgaacaagcagatacaaaaggaattcaaattcaaatcgcaggacgtatcgatggaaaagaaattgcacgtgtcgaatggataagagaaggtagggttcccctacaaaccattcgagctaaaattgatcattgtttccataaagttcaaactatctatggggtattaggcataaaaatttggatatttgtagacgaggaataa

SEQ ID NO: 71412 - protein, 218 aa, Acorus calamus
MGQKINPLGFRLGATQSHLSLWFAQPKSYSMGLQEDEKIRECIKNYVQKNPRLSSGFEGIARIEIKKRIDLIQVIIYIGFPNLFIEGRTQGIKELQMSVQKRLNSVNQRLNIAIARISKPYGQPNILAEYIALQLKNRVSFRKAMKKAIELTEQADTKGIQIQIAGRIDGKEIARVEWIREGRVPLQTIRAKIDHCFHKVQTIYGVLGIKIWIFVDEE

SEQ ID NO: 71413 - DNA, 720 bp, Agrostis stolonifera
  CDS (1)..(720): transl_table=11
atgggacaaaaaataaatccactcggtttcagacttggtacaacccaaaaacaccattccttttggttcgcacaaccaaaaaattattctgaaggtctacaggaagataaaaaaataaggaattgtatcaagaactatatacaaaagaataggaaaaagggctcgaatagaaaaatagaatcagactcaagttccgaagtaattacacataatagaaaaacggactcaggttcaagttctgaagtaattacacgtatagaaattcaaaaagaaatcgatacgatccacgtcataatccatattggattccctaatttattaaagaaaaaaggagcaatcgaagaattagagaaagatctacaaaaggaaattcattctgtaaaccaaagacttaatatttctattgaaaaagtgaaagagccttatagggagcctaacattcttgcagaatatatagctttccaattaaaaaatagagtttcattccgaaaggcaatgaaaaaagccattgaattaactaaaaaagcagatataaggggagtcaaagtaaaaattgcgggtcgtctcggaggaaaagaaattgcacgtgccgaatgcatcaaaaagggtagactccccctccaaacaattcgcgctaaaattgattattgctgctatccaattcgaactatctatggagtattaggtgtaaaaatttggatattcgtagacgaagaataa

SEQ ID NO: 71414 - protein, 239 aa, Agrostis stolonifera
MGQKINPLGFRLGTTQKHHSFWFAQPKNYSEGLQEDKKIRNCIKNYIQKNRKKGSNRKIESDSSSEVITHNRKTDSGSSSEVITRIEIQKEIDTIHVIIHIGFPNLLKKKGAIEELEKDLQKEIHSVNQRLNISIEKVKEPYREPNILAEYIAFQLKNRVSFRKAMKKAIELTKKADIRGVKVKIAGRLGGKEIARAECIKKGRLPLQTIRAKIDYCCYPIRTIYGVLGVKIWIFVDEE

SEQ ID NO: 71415 - DNA, 657 bp, Amborella trichopoda
  CDS (1)..(657): transl_table=11
atgggacagaaaataaatccacttggtttcagacttggcacaacccaaagtcatcgttccctttggttcgcacaaccaaaggattattcgaggaatctacaagaagatgaaaaaatacgggattgtatcaagaattatgtacaaaaacacatgagaatatcctcagggttccaaggaattgcacgtctagggattcaaaaaagaatcgatctcatccaggtcacaatctatattgggtcctccaatttgttaattgagggcccaacccgaggaatcgaagaattacgaacagatgtacaaaaaaagttaaattctatgaaccggagactcaacattactatcacaagaattgcaagaccctatgaacaacctaatattcttgcagaatatattgctctgcaattaaaaaatagagtttcatttcgaaaagcaatgaaaaaagctattgaattagctgaacaagcaaatacaaaggggattcgggtacaaattgcggggcgtctgaacggaaaagagattgcccgtgtcgaatggatcagagaaggcagggttcccctacacactattcgagctaaaattgattattgttcttatatggttcaaactatctacggggtattagggatcaaaatttggatatttgtagatgaagaataa

SEQ ID NO: 71416 - protein, 218 aa, Amborella trichopoda
MGQKINPLGFRLGTTQSHRSLWFAQPKDYSRNLQEDEKIRDCIKNYVQKHMRISSGFQGIARLGIQKRIDLIQVTIYIGSSNLLIEGPTRGIEELRTDVQKKLNSMNRRLNITITRIARPYEQPNILAEYIALQLKNRVSFRKAMKKAIELAEQANTKGIRVQIAGRLNGKEIARVEWIREGRVPLHTIRAKIDYCSYMVQTIYGVLGIKIWIFVDEE

SEQ ID NO: 71417 - DNA, 657 bp, Angiopteris evecta
  CDS (1)..(657): transl_table=11
atgggacaaaaaattaatccacttggttttcgagttggtgtaacccaacaacattattcctattggttcgcacaaccaaagaattattcgaaattccttgaggaagatgagaaggtacgtacgtgtattgagaaatatgtgcagaaacaaataaagaattcatcgaattatggaggaattgcacgtattgaaatcgaggggaaaacggatttactccaaattgaaatctatacaggattccctgattcgttggtagaagaaaatggtctaggaattgataaattaagaacaaatatagagaatttgctgaaaaaaaaaagtcagaaaattcaaataactctaaagaatgttctacaaccttatggagaaccaagaatacttgccgagcatattgctttacaactagaaaatcgagttgcttttcgcagaactgtgaaaaaagctattgaactagctaaaaaaacagacattaaaggtattaagatacagatagctggccgtcttaacggaaatgagattgctcgtgtcgaatgggttagagaaggtagggttccgctacaaactattagagctcatattaattattgctattacccggcgcaaacaatttatggggttctaggaataaaaatttgggtgttccgagatgaagaataa

SEQ ID NO: 71418 - protein, 218 aa, Angiopteris evecta
MGQKINPLGFRVGVTQQHYSYWFAQPKNYSKFLEEDEKVRTCIEKYVQKQIKNSSNYGGIARIEIEGKTDLLQIEIYTGFPDSLVEENGLGIDKLRTNIENLLKKKSQKIQITLKNVLQPYGEPRILAEHIALQLENRVAFRRTVKKAIELAKKTDIKGIKIQIAGRLNGNEIARVEWVREGRVPLQTIRAHINYCYYPAQTIYGVLGIKIWVFRDEE

SEQ ID NO: 71419 - DNA, 657 bp, Anthoceros formosae
  CDS (1)..(657)
atgggacaaaaaattaatccacttggttttcgacttggggttacgcagaatcactgttcccattggtttgcaaaacctaataattattacaaacttcttgaagaagatgaaaaaatgcgtaattgtatttataattatgtgcgtaagcatataaaaagttcgtcaaattatggaggaattgcacgcattgaaattgaaagaaagacagatttaattcaaattgaaatatatacaggatttcctgcccttcttgttgaaagtcgtggtcgaggcattgaagaattaaaagcagatgtacaaactgtattgaatcttgggaataggaagcttcgcatggctctaaccgaagtggaagaaccatatacagaacccaatattcttgcggaatatattgctttacaattagaaaacagagttgcttttagaagaactatgaagaaagcgattgaacttacaagaaagacaagtgtgaaaggtataaagatacagattgcaggacgtcttaatggagctgaaatagctcgtgtcgagtgggctagagaaggtagagttccattacaaactattcgagctcaaataaattattgttattacccagctcaaaccatttatggagtattaggaataaaggtatggatatttcaaacggaagaatga

SEQ ID NO: 71420 - protein, 218 aa, Anthoceros formosae
MGQKINPLGFRLGVTQNHCSHWFAKPNNYYKLLEEDEKMRNCIYNYVRKHIKSSSNYGGIARIEIERKTDLIQIEIYTGFPALLVESRGRGIEELKADVQTVLNLGNRKLRMALTEVEEPYTEPNILAEYIALQLENRVAFRRTMKKAIELTRKTSVKGIKIQIAGRLNGAEIARVEWAREGRVPLQTIRAQINYCYYPAQTIYGVLGIKVWIFQTEE

SEQ ID NO: 71421 - DNA, 657 bp, Arabis hirsuta
  CDS (1)..(657): transl_table=11
atgggacaaaaaataaatccacttggtttcagacttggtacaacccaaagtcatcattctgtttggtttgcacaaccaaaaaagtattctgaaggtttagaagaagataaaaaaatacgagactgtattaaaaattatgtccaaaaaaatataagaatatcctctggtatggagggaattgcacgtatcgaaattcaaaaaagaatcgatctcattcaaatcataatctatatgggatttcctaaattattaattgaagataaaccccggagagtcgaagaattacagatgaatgttcaaaaagaacttaattgtgtcaatagaaaactcaacattgctattaccagaatttccaatccgtatgggcagcctaatattcttgcagaatttatcgccggccaattaaaaaatcgtgtttcttttcgaaaagcaatgaaaaaagctattgaattaactgaacaggcaaatacaaaaggaattcaagtacaaattgcaggacgtatcgacggaaaagaaattgcacgtgttgaatggatcagagaaggcagagttcctttacaaacaattgacgctaaaatagattattgttcctatacagttcgaactatttatggggttttaggaataaaaatttggatattcgtagacgaagaataa

SEQ ID NO: 71422 - protein, 218 aa, Arabis hirsuta
MGQKINPLGFRLGTTQSHHSVWFAQPKKYSEGLEEDKKIRDCIKNYVQKNIRISSGMEGIARIEIQKRIDLIQIIIYMGFPKLLIEDKPRRVEELQMNVQKELNCVNRKLNIAITRISNPYGQPNILAEFIAGQLKNRVSFRKAMKKAIELTEQANTKGIQVQIAGRIDGKEIARVEWIREGRVPLQTIDAKIDYCSYTVRTIYGVLGIKIWIFVDEE

SEQ ID NO: 71423 - DNA, 657 bp, Arabidopsis thaliana
  CDS (1)..(657): transl_table=11
atgggacaaaaaataaatccacttggtttcagacttggtacaacccaaagtcatcattctctttggtttgcacaaccaaaaaagtattctgaaggtttagaagaagataaaaaaatacgagactgtattaaaaattatgtccaaaaaaatataagaatatcctctggtatggagggaattgcacgtattgaaattcaaaaaagaatcgatctcatccagatcataatctatatgggatttcctaaattattaattgaagataaaccccgaagagtcgaagaattacagatgaatgttcaaaaagaactaaattgtgtcaatagaaaactcaacattgctattaccagaatttccaatccgtatggggatcctaatattcttgcagaatttatcgctggacaattaaaaaatcgcgtttcttttcgaaaagcaatgaaaaaagctattgaattaactgaacaggcgaatacaaaaggaattcaagtacaaattgcaggacgtatcgacggaaaagaaattgcacgtgttgaatggatcagagaaggcagagttcctttacaaacaattgaagctaaaattgattattgttcctatacagttcgaactatttatggggttttaggaataaaaatttggatattcgtagacgaagaataa

SEQ ID NO: 71424 - protein, 218 aa, Arabidopsis thaliana
MGQKINPLGFRLGTTQSHHSLWFAQPKKYSEGLEEDKKIRDCIKNYVQKNIRISSGMEGIARIEIQKRIDLIQIIIYMGFPKLLIEDKPRRVEELQMNVQKELNCVNRKLNIAITRISNPYGDPNILAEFIAGQLKNRVSFRKAMKKAIELTEQANTKGIQVQIAGRIDGKEIARVEWIREGRVPLQTIEAKIDYCSYTVRTIYGVLGIKIWIFVDEE

SEQ ID NO: 71425 - DNA, 657 bp, Atropa belladonna
  CDS (1)..(657): transl_table=11
atgggacaaaaaataaatccacttggtttcagactgggtacaacccaaggtcatcattccctttggttttcacaaccaaaaaattattctgaaggtttacaagaagatcaaaaaataagagattgtatcaagaattatgtacaaaagaatatgagaacgtcctctggcgtcgagggaattgcacgtatagagattcaaaaaagaatcgatctgatccaggtcataatctttatgggattcccaaaattattaatagaaagtcgaccgcgcggaatcgaagaattacaaatgaccttacaaaaagaattaaattgtgtaaaccgaaaactgaacattgctgtcacaagaattgcaaaaccttacggaaaccctaatattcttgcagaatttatagctggacaattaaagaatagagtttcatttcgaaaagcaatgaaaaaggctattgaattaacagaacaagcagatacaaaaggaattcaaatacaaattgcggggcgtatcgacggaaaagaaattgcacgtgtcgaatggatcagagaaggtagggttcccctacaaacgattcgagctaaaattgattattgcgcttatacagttcgaactatctatggagtattgggcatcaaaatttggatatttctagacgaggaataa

SEQ ID NO: 71426 - protein, 218 aa, Atropa belladonna
MGQKINPLGFRLGTTQGHHSLWFSQPKNYSEGLQEDQKIRDCIKNYVQKNMRTSSGVEGIARIEIQKRIDLIQVIIFMGFPKLLIESRPRGIEELQMTLQKELNCVNRKLNIAVTRIAKPYGNPNILAEFIAGQLKNRVSFRKAMKKAIELTEQADTKGIQIQIAGRIDGKEIARVEWIREGRVPLQTIRAKIDYCAYTVRTIYGVLGIKIWIFLDEE

SEQ ID NO: 71427 - DNA, 657 bp, Barbarea verna
  CDS (1)..(657): transl_table=11
atgggacaaaaaataaatccacttggtttcagacttggtacaacccaaagtcatcattctctttggtttgcacaaccaaaaaagtattctgaaggtttagaagaagataaaaaaatacgagactgtattaaaaattatgtccaaaaaaatataagaatatcctctggtatggagggaattgcacgtatcgaaattcaaaaaagaatcgacctcatccagatcataatctatatgggatttcctaaattattaattgaagataaaccccgaagagtcgaagaattacggatgaatgttcaaaaagaacttaattgtgtcaatagaaaactcaacattgctattaccagaatttccaatccgtatggggatcctaatattcttgcagaatttatagctggacaattaaaaaatcgcgtttcttttcgaaaagcaatgaaaaaagctattgaattaactgaacaggcgaatacaaaaggaattcaagtacaaattgcaggacgtatcgacggaaaagaaattgcacgtgttgaatggatcagagaaggcagagttcctttacaaacaattgaagctaaaattgattattgttcctatacagttcgaactatttatggagtcttaggaataaaaatttggatattcgtagacgaagcataa

SEQ ID NO: 71428 - protein, 218 aa, Barbarea verna
MGQKINPLGFRLGTTQSHHSLWFAQPKKYSEGLEEDKKIRDCIKNYVQKNIRISSGMEGIARIEIQKRIDLIQIIIYMGFPKLLIEDKPRRVEELRMNVQKELNCVNRKLNIAITRISNPYGDPNILAEFIAGQLKNRVSFRKAMKKAIELTEQANTKGIQVQIAGRIDGKEIARVEWIREGRVPLQTIEAKIDYCSYTVRTIYGVLGIKIWIFVDEA

SEQ ID NO: 71429 - DNA, 657 bp, Calycanthus fertilis var
  CDS (1)..(657): transl_table=11
atggggcaaaaaataaatccactcggtttccgacttggtgaaaaccaaagtcatcattccctttggttcgcacaaccaaaaagttattgcagaggtctacaggaagatgaaaaaatacgggattgtatcaagatatatgtacaaaaaaatatgagaatatcctcaggtttcgaaggaattgcgcatatagagattcaaaaaaaaatggatctgatccaggtcataatctctattggattcccaaattttttaatagaaggtggaacccgaggaatcgaagaattacagatgaatgtacaaaagaggtttcattctgcgaaccggagacttaacattgctattacaagagttgcaaaaccttatggacaacctaatattcttgcagaatatatagctcgacaattaaagaatagagtttcctttcgaaaggcaatgaaaaaagttattgaattaactgaacaagcggacacaaaaggaattcaagtgcaaattgcagggcgtatcgacggaaaagaaattgcacgtgtcgaatggatcagagaaggcagggttcccctacaaaccattcgagctaaaattgatcattgttcctatacagttcgaaccatatatggggtattgggcataaaaatttggatatttgtagacgaacaataa

SEQ ID NO: 71430 - protein, 218 aa, Calycanthus fertilis var
MGQKINPLGFRLGENQSHHSLWFAQPKSYCRGLQEDEKIRDCIKIYVQKNMRISSGFEGIAHIEIQKKMDLIQVIISIGFPNFLIEGGTRGIEELQMNVQKRFHSANRRLNIAITRVAKPYGQPNILAEYIARQLKNRVSFRKAMKKVIELTEQADTKGIQVQIAGRIDGKEIARVEWIREGRVPLQTIRAKIDHCSYTVRTIYGVLGIKIWIFVDEQ

SEQ ID NO: 71431 - DNA, 660 bp, Chara vulgaris
  CDS (1)..(660): transl_table=11
atgggacaaaaaatacatccacttggtttccggcttggcttcatacaagaacattattctcattggtttgcaaaagcaaattcttattcagaattactacaagaagataaagaaataaggtcatgtatttataatcatatacgtaatcatgtacgtaattcttcaaattatggaggaattgctcgaattaatatttatcgtagaactgacttagttcagttacaaattcatactggatttccagcattgcttattgaaaaccggattagaggattagaacatcttcgacgagacatacaagaaaagattgatcacaaaaaacgaaaattacgtatgactcttgtagaagttttgaagccttatacagagcctactatacttgcagaatacattgctcttcaacttgagaatagggtcgcttttcgaagagtcatgaaaaaagctattcaactggcaaaaatctcagatataaaaggaattaaaatccaaattgcaggacgtttaaatggtgctgaaattgctcggaacgaatggatacaaaaaggtagattacctcttcaaatgttgagagcgaatattcattattgtcattatcctgctcatacaatttatggagttctaggaatcaaagtatggatctttagagaaaaaataatttga

SEQ ID NO: 71432 - protein, 219 aa, Chara vulgaris
MGQKIHPLGFRLGFIQEHYSHWFAKANSYSELLQEDKEIRSCIYNHIRNHVRNSSNYGGIARINIYRRTDLVQLQIHTGFPALLIENRIRGLEHLRRDIQEKIDHKKRKLRMTLVEVLKPYTEPTILAEYIALQLENRVAFRRVMKKAIQLAKISDIKGIKIQIAGRLNGAEIARNEWIQKGRLPLQMLRANIHYCHYPAHTIYGVLGIKVWIFREKII

SEQ ID NO: 71433 - DNA, 654 bp, Chlorokybus atmophyticus
  CDS (1)..(654): transl_table=11
atgggacaaaagattcatcctcttggtttccgacttggtattacacaagatcatcgttctcattggtttgcaaaaccagcacaatatcggcagttgttgcaagaagataactctataagaaactttttaagaaccaagctaatcaacgcaggcattgctaggattgatattcaacgcaaagcagatcaagtcgaaattgaagtgcgcactgctcgtcccggactcatagtaggacgtagtggaaaaggcgttgaaaatttacttcgagatctgcaagaacaatttaagaataaacgtagatttcgtatcaccatcacatatattccggaacctgacttggaatctactctaatagctgaatttatagctcaacgattagaagcacgtgctccttttcgacgagctatgcgacaagccatacaacgtgccaccagggcgggtgtagaaggaatcaagattcaagttgccggaagattaaatggtgcagaaatagctcgaagtgaatgggttagagaaggtcgagttccgctacaaactcttcgagctaatatagattacagttattgccaagcaaaaaccatctatggaattcttggtattaaagtatggatgtttaaaggagaaaaattctcttcaaaagctgtaacaacttaa

SEQ ID NO: 71434 - protein, 217 aa, Chlorokybus atmophyticus
MGQKIHPLGFRLGITQDHRSHWFAKPAQYRQLLQEDNSIRNFLRTKLINAGIARIDIQRKADQVEIEVRTARPGLIVGRSGKGVENLLRDLQEQFKNKRRFRITITYIPEPDLESTLIAEFIAQRLEARAPFRRAMRQAIQRATRAGVEGIKIQVAGRLNGAEIARSEWVREGRVPLQTLRANIDYSYCQAKTIYGILGIKVWMFKGEKFSSKAVTT

SEQ ID NO: 71435 - DNA, 696 bp, Chlorella vulgaris
  CDS (1)..(696): transl_table=11
atgggacaaaaagtacatccaatcggatttcggcttggaatcactcaaaaacatcgcagttattggtgcacaactcctcaaaagtccgctttatggatccaagatgccagttttttaagaaattttattaaaaaaaaatatattggtgctggaatcacacatattgaaattcaaagacaagatgttgattcgccttctctaggaatacaaatttatgcagctcgtcttcggcaaattgcaggtaatgattcaaaaggtttagagcgtttacaagaggaacttgtaaaacaacttcaaattttttatagaaaacgtaatctagtagagccaggcactattcatcttcgtttatccgtaaaacctcttcgagcaccagaagcttacgctgaagtcctggcagaaaaattagtagaagaattagaacaacgaaaacctttcagacgtgcaatgcgacaaactgttcaaagagctttacgtgctggtgtgaaaggaattaaagttcaaatttctgggcgtttaaatggtgccgatattgctcgttcggaagatgttcgtgaaggtccagttcctttacaaacattgcgtgcagatattgattactcatctaaaccagctaaaacaatttttgggcttttaggtattaaaatttgggtttttcgtggtgaacgactaacaagaataagtaacgtacgttaa

SEQ ID NO: 71436 - protein, 231 aa, Chlorella vulgaris
MGQKVHPIGFRLGITQKHRSYWCTTPQKSALWIQDASFLRNFIKKKYIGAGITHIEIQRQDVDSPSLGIQIYAARLRQIAGNDSKGLERLQEELVKQLQIFYRKRNLVEPGTIHLRLSVKPLRAPEAYAEVLAEKLVEELEQRKPFRRAMRQTVQRALRAGVKGIKVQISGRLNGADIARSEDVREGPVPLQTLRADIDYSSKPAKTIFGLLGIKIWVFRGERLTRISNVR

SEQ ID NO: 71437 - DNA, 660 bp, Citrus sinensis
  CDS (1)..(660): transl_table=11
atgggacaaaaaataaatccactaggtttccggcttggtacaacacaaagtcatcattctctttggtttgcaaaaccaaaaaactattgcgagggtctacaagaagatcaaaaaatacgaaactttattaagaattatataaaaaaaaatatcagaatatcttccggtgttgagggaattgcacggatagagattcaaaaaagaattgatctaattcaagttataatctatatagggttcccaaaattattactagaaaatagaccgcgaagaattgaagaattacagatgaatgtacaaaaagaacttaattgtgtgaatcgaaaaataaacattgctattacacgaattacaaatccttatggacaccccaatattcttgccgaatttatagccggacaattaaaaaatagagtttcttttcgaaaagcaatgaaaaaagctattgaattaacggaacaggccgatacaaaaggaattcaagtacaaattgcagggcgtcttgacggaaaagaaattgcgcgcgccgaatggatcagagaaggtagagttcctctacaaaccattggagctaaaattgattattgttcctatacggttcgaactatctacggggtattgggaatcaaaatttggatatttgtagacgaaaaaaaataa

SEQ ID NO: 71438 - protein, 219 aa, Citrus sinensis
MGQKINPLGFRLGTTQSHHSLWFAKPKNYCEGLQEDQKIRNFIKNYIKKNIRISSGVEGIARIEIQKRIDLIQVIIYIGFPKLLLENRPRRIEELQMNVQKELNCVNRKINIAITRITNPYGHPNILAEFIAGQLKNRVSFRKAMKKAIELTEQADTKGIQVQIAGRLDGKEIARAEWIREGRVPLQTIGAKIDYCSYTVRTIYGVLGIKIWIFVDEKK

SEQ ID NO: 71439 - DNA, 657 bp, Coffea arabica
  CDS (1)..(657): transl_table=11
atgggacaaaaaataaatccacttggttttagacttggtacaacccaaggtcatcattctctttggtttacacaagcaaaaaattattctgagggtctacaagaagatcaacaaataagaaattgtattaaaaattatgttcaaaagaatacgaaaatatcctctggggtagagggaattgcacgtatagagattcaaaaaagaatcgatttgatccaagtaataatttttatgggattcccaaaaccattactagaaaatcaaccacgaggaatcgaagaattacagacgaatctacaaaaaaaatgtaattctgtgaacagaaaatttaacattgctatcacaaaaattgcaaaaccttatggaaaccctaatattcttgcagaatatatagctgggcaattaaagaatagagtttcatttcgaaaagcaatgaaaaaggctattgaattaactgaacaagcaaatacaaagggaattcaagtccaaattgcaggtcgtatcgacggaaaagaaattgcacgcgtcgaatggattagaaggggtagggttcctctacaaaccattcgagctaaaattgattattgttcctatacagttcgaactatctatggtgtattaggcataaaaatttggatatttatagacgaggaataa

SEQ ID NO: 71440 - protein, 218 aa, Coffea arabica
MGQKINPLGFRLGTTQGHHSLWFTQAKNYSEGLQEDQQIRNCIKNYVQKNTKISSGVEGIARIEIQKRIDLIQVIIFMGFPKPLLENQPRGIEELQTNLQKKCNSVNRKFNIAITKIAKPYGNPNILAEYIAGQLKNRVSFRKAMKKAIELTEQANTKGIQVQIAGRIDGKEIARVEWIRRGRVPLQTIRAKIDYCSYTVRTIYGVLGIKIWIFIDEE

SEQ ID NO: 71441 - DNA, 657 bp, Crucihimalaya wallichii
  CDS (1)..(657): transl_table=11
atgggacaaaaaataaatccacttggtttcagacttggtacaacccaaagtcatcattctctttggtttgcacaaccaaaaaagtattctgaaggtttagaagaagataaaaaaatacgagactgtattaaaaattatgtccaaaaaaatataagaatatcctctggtatggagggaattgcacgtatcgaaattcaaaaaagaatcgatctcatccagatcataatctatatgggatttcctaaattattaattgaagataaaccccgaagagtcgaagaattacagatgaatgttcaaaaagaacttaattgtgtcaataaaaaactcaacattgctattaccagaatttccaatccgtatggggatccgaatattcttgcagaatttatagctggacaattaaaaaatcgcgtttcttttcgaaaagcaatgaaaaaagctattgaattaactgaacaggcgaatacaaaaggaattcaagtacaaattgcaggacgtatcgacggaaaagaaattgcacgtgttgaatggatcagagaaggcagagttcctttacaaacaattgaagctaaaattgattattgttcctctacagttcgaactatttatggggtcttaggaataaaaatttggatattcgtagacgaagactaa

SEQ ID NO: 71442 - protein, 218 aa, Crucihimalaya wallichii
MGQKINPLGFRLGTTQSHHSLWFAQPKKYSEGLEEDKKIRDCIKNYVQKNIRISSGMEGIARIEIQKRIDLIQIIIYMGFPKLLIEDKPRRVEELQMNVQKELNCVNKKLNIAITRISNPYGDPNILAEFIAGQLKNRVSFRKAMKKAIELTEQANTKGIQVQIAGRIDGKEIARVEWIREGRVPLQTIEAKIDYCSSTVRTIYGVLGIKIWIFVDED

SEQ ID NO: 71443 - DNA, 657 bp, Cucumis sativus
  CDS (1)..(657): transl_table=11
atgggacaaaaaataaatccactcggttttcgacttggtgcaacccaagggcatcattctctgtggtttgcacaccccaaaaaatattctgaaggtttacaagaagatcaaaaaatacgagattgtatccagaattatgtacaaaaaaacatgagaattttttctggtgttgaaggaattgcacgtatcgagattcaaaaaagaattgatcttattcaagtgataatctttatgggattcccaaagttagtaatagacgatgggtctcgaaaaatcgaagaattacagattaatgtacaaaaagaattcaattctgggaaccgaaaactcaacattgctattacaagaataggaaacccttatggacaccctaatattctcgcagaatttatagccggacaattaaagaatagagtttcatttcgcaaagcaatgaaaaaagctattgaattaactgaacaggcgggtacaaagggaattcaagtacaaattgccggacgtatagacggaaaagaaattgcacgtgtcgaatggatcagagaaggacgggttcctctacaaaccattcgagctaaaattgattattgttgctatccagttcgaactatctatgggatattaggcataaaaatttggatatttgtagacgagcaataa

SEQ ID NO: 71444 - protein, 218 aa, Cucumis sativus
MGQKINPLGFRLGATQGHHSLWFAHPKKYSEGLQEDQKIRDCIQNYVQKNMRIFSGVEGIARIEIQKRIDLIQVIIFMGFPKLVIDDGSRKIEELQINVQKEFNSGNRKLNIAITRIGNPYGHPNILAEFIAGQLKNRVSFRKAMKKAIELTEQAGTKGIQVQIAGRIDGKEIARVEWIREGRVPLQTIRAKIDYCCYPVRTIYGILGIKIWIFVDEQ

SEQ ID NO: 71445 - DNA, 657 bp, Daucus carota
  CDS (1)..(657): transl_table=11
atgggacaaaaaataaatccacttggtttcagacttggtacaacccaaagtcatcattccctttggtttacacaaccaaaaaattattccgaaggtctacaagaagatcaaaaaataagagattttattaagaattatgtacaaaaaaatctgaaaatttcctctggcgtcgagggaattgcacgtatagaaattcacaaacgaatcgatctgatccaggtcattatctatatgggattcccaaagttattaatagaaaatcgaccgggaggaatcgaaaaattgcagatgaatttacaaaaagaatttaattgtgtcaaccgaaaacttaacattactatcacaagaattgcaaaaccttacggaagccctaatattcttgcagaatttatagccggccaattaaagaatagagtttcttttcgaaaagcaatgaaaaaggctattgaattaactgaacaagcagatacaaaaggaattcaagtacaaatttcaggacgtatcgacggaaaagaaattgcgcgtgtcgaatggatcagagagggcagggttccccttcaaaccattcgagctaaaatagattattgttcttatacagttcgaactatatatggagttttaggcattaaaatttggatatttttagacggggaataa

SEQ ID NO: 71446 - protein, 218 aa, Daucus carota
MGQKINPLGFRLGTTQSHHSLWFTQPKNYSEGLQEDQKIRDFIKNYVQKNLKISSGVEGIARIEIHKRIDLIQVIIYMGFPKLLIENRPGGIEKLQMNLQKEFNCVNRKLNITITRIAKPYGSPNILAEFIAGQLKNRVSFRKAMKKAIELTEQADTKGIQVQISGRIDGKEIARVEWIREGRVPLQTIRAKIDYCSYTVRTIYGVLGIKIWIFLDGE

SEQ ID NO: 71447 - DNA, 657 bp, Draba nemorosa
  CDS (1)..(657): transl_table=11
atgggacaaaaaataaatccactcggtttcagacttggtacaacccaaagtcatcattctctttggtttgcacaaccaaaaaagtattctgaaggtttagaagaagataaaaaaatacgagactgtattaaaaattatgtccaaaacaatataagaatatcctctggtatggagggaattgcacgtatcgaaattcaaaaaagaatcgatctcattcaaatcataatctatatgggatttcctaaattattaattgaagataaaccacgaagaatcgaagaattacagataaatgttcaaaaagaacttaattgtgtcaatagaaaactcaacattgctattaccagaatttccaacccgtacgggcatcctaatattctggcagagtttatcgcaggccaattaaaaaaccgtgtttcttttcgaaaagcaatgaaaaaagctattgaattaactgaacaggcgaatacaaaaggaattcaagtacaaattgcaggacgtatcgacggaaaagaaattgcacgtgttgaatggatcagagaaggcagagttcctttacaaacaattgacgctaaaattgattattgttcctatacagttcgaactatttatggggtcttaggaataaaaatttggatattcgtagacgaagaataa

SEQ ID NO: 71448 - protein, 218 aa, Draba nemorosa
MGQKINPLGFRLGTTQSHHSLWFAQPKKYSEGLEEDKKIRDCIKNYVQNNIRISSGMEGIARIEIQKRIDLIQIIIYMGFPKLLIEDKPRRIEELQINVQKELNCVNRKLNIAITRISNPYGHPNILAEFIAGQLKNRVSFRKAMKKAIELTEQANTKGIQVQIAGRIDGKEIARVEWIREGRVPLQTIDAKIDYCSYTVRTIYGVLGIKIWIFVDEE

SEQ ID NO: 71449 - DNA, 651 bp, Drimys granadensis
  CDS (1)..(651): transl_table=11
atgggaaaaaaaataaatccacttggtttccgacttggtgcaaaccaaagtcatcgttccctttggttcgcacaaccaaaaagttattccaggggtctccaagaagatgaaaaaatacgggattgtatcaagaattatgtacaaaaaaatatgagatctggttcagaaggaatttcacatatagagattaaaaaaaaaatcgacctgatccaggtcataatctatattggattcccaaatttgttaatagagggtcgaacgcgaggaatcgaagaattacggatcaatgtacaaaaagggtttcgttctgtgaaccgtagacttaacattgctatcacaagagttgcaaaaccttatggacaacctaatattcttgcagaatatatagctctacaattaaagaatagagtttcgtttcgaaaggcaatgaaaaaagctattgaattaactgaacaagctgatacaaaaggaattcaagtgcaaattgcagggcgtatcgacggaaaagaaattgcacgtgtcgaatggatcagagaaggtagggttcccctacaaaccattcgagctaaaattgatcattgttcctatacagttcgaactatctatggggtattaggcatcaaaatttggatatttgtagatgagcagtaa

SEQ ID NO: 71450 - protein, 216 aa, Drimys granadensis
MGKKINPLGFRLGANQSHRSLWFAQPKSYSRGLQEDEKIRDCIKNYVQKNMRSGSEGISHIEIKKKIDLIQVIIYIGFPNLLIEGRTRGIEELRINVQKGFRSVNRRLNIAITRVAKPYGQPNILAEYIALQLKNRVSFRKAMKKAIELTEQADTKGIQVQIAGRIDGKEIARVEWIREGRVPLQTIRAKIDHCSYTVRTIYGVLGIKIWIFVDEQ

SEQ ID NO: 71451 - DNA, 663 bp, Epifagus virginiana
  CDS (1)..(663): transl_table=11
atgggacaaaaaataaatccacttggttttaggcttggtacaacccaaagtcatcattccttttggtttgcacaaccaaaaaattattataagggtatacaagaagatcaaaaaataagagattttataaaaaattatgtaaaaaataatattataatatcccctgacaccgaaggaattgcctatatagagattcaaaaaagaatcgattttttaaaaataatgatttttataggattcaaaaagtttttaatagaaaatagacaactaggaattattaaagaagcattacatatagatttaaaaaaaaactttcattatgttaatagaaaacttataattgatatcataagaattacaaaaccttatagaaaccctaatattcttgcagaatttatagccgatcaattaaagaatagagtttcttttagaaaaacaatgaaaaaagctattgaattaacggaaagcgaagatacaaaaggaattcaagtacaaatttcagggcgtatcgacggaaaagaaattgcacgtgttgaatggatcagagagggcagagtccccctacaaactattcaagctaaaataaattattgttcctatatggttaggactacccacggggtattaggcataaaaatttggatttttatagaaaaggaatag

SEQ ID NO: 71452 - protein, 220 aa, Epifagus virginiana
MGQKINPLGFRLGTTQSHHSFWFAQPKNYYKGIQEDQKIRDFIKNYVKNNIIISPDTEGIAYIEIQKRIDFLKIMIFIGFKKFLIENRQLGIIKEALHIDLKKNFHYVNRKLIIDIIRITKPYRNPNILAEFIADQLKNRVSFRKTMKKAIELTESEDTKGIQVQISGRIDGKEIARVEWIREGRVPLQTIQAKINYCSYMVRTTHGVLGIKIWIFIEKE

SEQ ID NO: 71453 - DNA, 651 bp, Eucalyptus globulus subsp
  CDS (1)..(651): transl_table=11
atgggacaaaaaataaatccacttggtttcagacttggtacaacccaaggtcatcattctatttggtttgcacaagccaaaaattattccgatggtctgcaagaagatcaaaaaatacgaaattgtatcaagaattatttacaaaaaaatatgagaatatcctctggtgtggagggaattgcacgcatagaaattcgaaaaagaattgatctgattcaagtcataatttatatgggattcccaaagttattactagaaggcaagacgcgaagaatcgaagaattacagatgaatgtacaaaaagaacttaattgtgtgaaccgaaaactcaacattgctattacaagaattacaaacccttatgggcaccctaatattcttgcagaatttatagccggacagttaaagaatagagtttcatttcgcaaagcaataaaaaaggctattgaattaaccgaacaggcagatacaaaaggaattcaagtacaaattgcaggtcgcctggacggaaaagaaattgcacgtgtcgaatggatgagagaaggtagggttcctctacaaaccattcgagctaaaattgattattgttcctatggagtccgaacggtctatggagtattaggcatcaaaatttggatattttgggaataa

SEQ ID NO: 71454 - protein, 216 aa, Eucalyptus globulus subsp
MGQKINPLGFRLGTTQGHHSIWFAQAKNYSDGLQEDQKIRNCIKNYLQKNMRISSGVEGIARIEIRKRIDLIQVIIYMGFPKLLLEGKTRRIEELQMNVQKELNCVNRKLNIAITRITNPYGHPNILAEFIAGQLKNRVSFRKAIKKAIELTEQADTKGIQVQIAGRLDGKEIARVEWMREGRVPLQTIRAKIDYCSYGVRTVYGVLGIKIWIFWE

SEQ ID NO: 71455 - DNA, 657 bp, Gossypium barbadense
  CDS (1)..(657): transl_table=11
atgggacaaaaaataaatccacttggtttcagacttggtacaacccaaagtcatcattctctttggtttgcacaaccgaaaaagtattccgagggtctacaagaagataaaaaaataagagactgtatcaagaattatgtacaaaaaaatacgagactatcttctggtgtcgagggaattgcacgtatagagattcaaaaaagactggatctaattcaggtgataatctatatgggatttcctaaattattaattgaagataagccacgaaaactcgaagaactacagatgaatgtgcaaaaagaacttaattgtatgaaccgaaaactcaacattgctattacaagaattggaaatccttatgggcaccctaatattcttgccgaatttatagccggacaattaaagaatcgagtttcatttcgaaaggcaatgaaaaaggctattgaattaactgagcaagcggatacaaaaggaattcaaatacaaattgcagggcgtatcgacggaaaagaaatcgcacgtgtcgaatggatccgagaaggtagggttcctctacaaaccattggagcgaaaattgagtattgctcttatagagttcgaactatctatggggtattaggaatcaaaatttggatatttatagacgaagaataa

SEQ ID NO: 71456 - protein, 218 aa, Gossypium barbadense
MGQKINPLGFRLGTTQSHHSLWFAQPKKYSEGLQEDKKIRDCIKNYVQKNTRLSSGVEGIARIEIQKRLDLIQVIIYMGFPKLLIEDKPRKLEELQMNVQKELNCMNRKLNIAITRIGNPYGHPNILAEFIAGQLKNRVSFRKAMKKAIELTEQADTKGIQIQIAGRIDGKEIARVEWIREGRVPLQTIGAKIEYCSYRVRTIYGVLGIKIWIFIDEE

SEQ ID NO: 71457 - DNA, 657 bp, Helianthus annuus
  CDS (1)..(657): transl_table=11
atgggacaaaaaataaatccaattggtttcagacttggtacaacccaaggtcatcattccctttggttcgcacaaccaaaaaattattctgagggtctgcaagaagatcaaaaaataagaaattatataaagaattatgtacaaaaaaatatgaaaacatcttctggcgtcgagggaattgcacgtatagagattcaaaaaagaatcgacctgatccaaatcataatctatatgggatttccaaaaatattaattgaaagtcgaccccgaggaatcgaagaattacagatgaatttacaaaaagaatttaattctgtaaatcggaaacttaacattgctatcacacgaattgaaaagccttatggaaaccctaatattcttgcagaatttatagccggacaattaaaaaatagagtttcttttcgcaaagcaatgaaaaaggctatagaattaactgaacaagcagatacaaaaggaattcaagtgcaaattgcaggacgtatcgacggaaaagaaattgcgcgtgttgaatggatcagagagggtagggttccactacaaaccattcgcgctaaaattgattattgttcctatacagttcgaacaatctatggggtattaggcatcaaaatttggatctttatagaaggggaataa

SEQ ID NO: 71458 - protein, 218 aa, Helianthus annuus
MGQKINPIGFRLGTTQGHHSLWFAQPKNYSEGLQEDQKIRNYIKNYVQKNMKTSSGVEGIARIEIQKRIDLIQIIIYMGFPKILIESRPRGIEELQMNLQKEFNSVNRKLNIAITRIEKPYGNPNILAEFIAGQLKNRVSFRKAMKKAIELTEQADTKGIQVQIAGRIDGKEIARVEWIREGRVPLQTIRAKIDYCSYTVRTIYGVLGIKIWIFIEGE

SEQ ID NO: 71459 - DNA, 720 bp, Hordeum vulgare
  CDS (1)..(720): transl_table=11
atgggacaaaaaataaatccactcggtttcagacttggtacaacccaaaaacaccattccttttggttcgcacaaccaaaaaattattctgaaggtctacaggaagataaaaaaataagggattgtatcaagaactatatacaaaagaataggaaaaagggctcgaatagaaaaatagaatcagactcaagttccgaagtaattacacataatagaaaaatggactcaggttcaagttccgaagtaattacacatatagaaattcaaaaagaaatcgatacgatccacgtcataatccatattggattcccaaatttattaaagaaaaaaggagcaatcgaagaattagagaaagatctacaaaaggaaattaactctgtaaaccagagatttaatatttctatcgaaaaagttaaagaaccttatagacagcctaacattcttgcagaatatatagctttccaattaaaaaatagagtttcattccgaaaggcaatgaaaaaagccattgaattaactaaaaaagcagatataaggggagtaaaagtaaaaattgcgggtcgtctcggaggaaaagaaattgcacgtgccgaatccattaaaaggggcagacttcccctccaaacaatccgcgctaaaattgattattgctgctatccaattcgaactatctatggagtattaggtgtaaaaatttggatattcgtagacgaagaataa

SEQ ID NO: 71460 - protein, 239 aa, Hordeum vulgare
MGQKINPLGFRLGTTQKHHSFWFAQPKNYSEGLQEDKKIRDCIKNYIQKNRKKGSNRKIESDSSSEVITHNRKMDSGSSSEVITHIEIQKEIDTIHVIIHIGFPNLLKKKGAIEELEKDLQKEINSVNQRFNISIEKVKEPYRQPNILAEYIAFQLKNRVSFRKAMKKAIELTKKADIRGVKVKIAGRLGGKEIARAESIKRGRLPLQTIRAKIDYCCYPIRTIYGVLGVKIWIFVDEE

SEQ ID NO: 71461 - DNA, 660 bp, Huperzia lucidula
  CDS (1)..(660): transl_table=11
atgggacaaaagattaatccacttggttttcggctgggcataaccaaaaatcataattctcattggtttgcaaaaccaaataattattccgagtttctacaagaagatagaaaagtacgtaattgtatagataattatgtacacagacatgtaaaaaactcttccaattatggaggagttgcacgtgtggaaattcaaagaaaaacagatttaattttagtagagatacatacgggatttccagccttattagtagaaagccatggtcaaggaattgaacaaataaggaaggatgtacaacaaaatctattagattctaaaattcgaagagttcacgtaacttcgacggaaatagcaaaaccatatggggaacctaatatacttgcggagtatattgctatacaactggaaaaccgagttgcttttagaagaaccattagaaaagccattgaactggcgaaagaaacagatatcaaaggtattaaaatacaaattgcgggacgtcttaatggaactgaaattgctcgtgttgaatgggctagagaaggtagagtccctctgcaaactctacgagctcaaattgattattgttactatccagcccaaactatttatggagtattaggaataaaaatctggatttttcgggatgaggaataa

SEQ ID NO: 71462 - protein, 219 aa, Huperzia lucidula
MGQKINPLGFRLGITKNHNSHWFAKPNNYSEFLQEDRKVRNCIDNYVHRHVKNSSNYGGVARVEIQRKTDLILVEIHTGFPALLVESHGQGIEQIRKDVQQNLLDSKIRRVHVTSTEIAKPYGEPNILAEYIAIQLENRVAFRRTIRKAIELAKETDIKGIKIQIAGRLNGTEIARVEWAREGRVPLQTLRAQIDYCYYPAQTIYGVLGIKIWIFRDEE

SEQ ID NO: 71463 - DNA, 666 bp, Jasminum nudiflorum
  CDS (1)..(666): transl_table=11
atgggacaaaaaataaatccacttggtttcagacttggtacaacccaaggtcaccattccctttggatttcacaaccaaaaaattattctaagggtttaaaagaagatcaaaacataagagattttatccaaaattatatacaaaagaatatgagaatatcctcccgcgaccgcgtcgagggaattgcacgtatagaaattaaaaaaacaattgatttgatccagatcataatctttatgggattcccgatagaaaatagaccgcgaaaagtcaaagaaaaaataaaagaattacagattcacctagaaaaagaatttcattatgtgaaaaaaaaacttaagattgctatcacaaaaattgcaaaaccttatcaaaacccaaaaattcttgcagaatttctagctggacaattaaaagatagagtttcatttcgaaaagcaatgaaaaaggctattgaattggctgaacaagcagatacagaaggaattcgagtacaaatggcagggcgtatcaacggaaaagatattgcacgggtcgaatggatcagaaggggtaggcttcccctacaaaccattcgaactaaaattgattattgttgctatacaattcgaactatctatggggtattgggtatcaaaatttggatatttatagacgaaaaataa

SEQ ID NO: 71464 - protein, 221 aa, Jasminum nudiflorum
MGQKINPLGFRLGTTQGHHSLWISQPKNYSKGLKEDQNIRDFIQNYIQKNMRISSRDRVEGIARIEIKKTIDLIQIIIFMGFPIENRPRKVKEKIKELQIHLEKEFHYVKKKLKIAITKIAKPYQNPKILAEFLAGQLKDRVSFRKAMKKAIELAEQADTEGIRVQMAGRINGKDIARVEWIRRGRLPLQTIRTKIDYCCYTIRTIYGVLGIKIWIFIDEK

SEQ ID NO: 71465 - DNA, 657 bp, Lactuca sativa
  CDS (1)..(657): transl_table=11
atgggacaaaaaataaatccaattggtttcagacttggtacaacccaaggtcatcattccctttggttcgcacaaccaaaaaattattctgagggtctgcaagaagataaaaaaataagaacttatatccagaattatgtacaaaaaaatatgaaaacatcttctggcgtcgagggaattgcacgtatagagattcaaaaaagaatcgacctgatccaaatcataatctatatgggatttccaaaaatcttaattgaaagtcgaccccgaggaatcgaagaattacagatgaatttacaaaaagaatttcattctgtaaatagaaaacttaacattgctatcacacgaattgaaaagccttacggaaaccctaatattcttgcagaatttatagcgggccaattaaaaaatagagtttcttttcgcaaagcaatgaaaaaggctatagaattaactgaacaagcagatacaaaaggaattcaagtgcaaattgcaggacgtatcgacggaaaagaaattgcgcgtgttgaatggatcagagaggggagggttccactacaaaccattcgagctaaaattgattattgttgctatacagttcgaacgatctatggggtattaggcatcaaaatttggatatttatagacggggaataa

SEQ ID NO: 71466 - protein, 218 aa, Lactuca sativa
MGQKINPIGFRLGTTQGHHSLWFAQPKNYSEGLQEDKKIRTYIQNYVQKNMKTSSGVEGIARIEIQKRIDLIQIIIYMGFPKILIESRPRGIEELQMNLQKEFHSVNRKLNIAITRIEKPYGNPNILAEFIAGQLKNRVSFRKAMKKAIELTEQADTKGIQVQIAGRIDGKEIARVEWIREGRVPLQTIRAKIDYCCYTVRTIYGVLGIKIWIFIDGE

SEQ ID NO: 71467 - DNA, 657 bp, Lepidium virginicum
  CDS (1)..(657): transl_table=11
atgggacaaaaaataaatccacttggtttcagacttggtacaacccaaagtcatcattctctttggtttgcacaaccaaaaaagtattctgaaggtttagaagaagataaaaaaatacgagactgtattaaaaagtatgtccaaaaaaatataagaatatcctctggtatggagggaattgcacgtatcgaaattcaaaaaagaatcgatctcatccagatcataatctatatgggatttcctaaattattaattgaagataaacctcgaagagtcgaagaattacagatgaatgttcaaaaagaacttaattgtgtcaatagaaaactcaacattgctattaccagaatttccaatccatatggggatcctaatattcttgcagaatttatagctggacaattaaaaaatcgcgtttcttttcgaaaagcaatgaaaaaagctattgaattaactgaacaggcgaatacaaaaggaattcaagtacaaattgcaggacgtattgacggaaaagaaattgcacgtgttgaatggatcagagaaggcagagttcctttacaaacaattgaagctaaaattgattattgttcctatacagttcgaactatttatggggtcttaggaataaaaatttggatattcgtagacgaagaataa

SEQ ID NO: 71468 - protein, 218 aa, Lepidium virginicum
MGQKINPLGFRLGTTQSHHSLWFAQPKKYSEGLEEDKKIRDCIKKYVQKNIRISSGMEGIARIEIQKRIDLIQIIIYMGFPKLLIEDKPRRVEELQMNVQKELNCVNRKLNIAITRISNPYGDPNILAEFIAGQLKNRVSFRKAMKKAIELTEQANTKGIQVQIAGRIDGKEIARVEWIREGRVPLQTIEAKIDYCSYTVRTIYGVLGIKIWIFVDEE

SEQ ID NO: 71469 - DNA, 660 bp, Liriodendron tulipifera
  CDS (1)..(660): transl_table=11
atgggccaaaaaataaatccacttggtttccgacttggtggagaaaaccaaaagcatagatccctttggttcgcacaaccaaaaagttattccataggtctccaggaagatgaaaaaatacgagattgtatcaagaattatgtacaaaaaaatatgagaatatcctcaggtttcgaaggaattgcacatatagagattaaaaaaaaaatcgatctgatccaggtcataatctatattggattcccaaatttgttaatagagggtcgaacacgaggaatcgaagaattacagatcaatgtacaaaaaggatttcattctgtgaaccggagacttaacattgctatcacaagagttgcaaaaccttatggacaacctaatattcttgcagaatatatagctctacaattaaagaatagagtttcctttcgaaaggcaatgaaaaaagctattgaattaactgaacaagcggatacaaaaggaattcaagtgcaaattgcagggcgtatcgacggaaaagaaattgcacgtgtcgaatggatcagagaaggtagggttcccctacaaactattcgagctaaaattgatcattgttcctatacagttcgaactatctatggggtattaggcatcaaaatttggatatttgtagacgagcaataa

SEQ ID NO: 71470 - protein, 219 aa, Liriodendron tulipifera
MGQKINPLGFRLGGENQKHRSLWFAQPKSYSIGLQEDEKIRDCIKNYVQKNMRISSGFEGIAHIEIKKKIDLIQVIIYIGFPNLLIEGRTRGIEELQINVQKGFHSVNRRLNIAITRVAKPYGQPNILAEYIALQLKNRVSFRKAMKKAIELTEQADTKGIQVQIAGRIDGKEIARVEWIREGRVPLQTIRAKIDHCSYTVRTIYGVLGIKIWIFVDEQ

SEQ ID NO: 71471 - DNA, 657 bp, Lobularia maritima
  CDS (1)..(657): transl_table=11
atgggacaaaaaataaatccacttggtttcagacttggtacaacccaaagtcatcgttctctttggtttgcacaaccaaaaaagtattctgaaggtttagaagaagataaaaaaatacgcgactgtattaaaaattatgtccaaaaaaatataagaatatcctctggtatggagggaattgcacgtatcgaaattcaaaaaagaatcgatctcattcagatcataatctatatgggatttccaaaattattaattgaagataaaccccgaagggtcgaagaattacagatgactgtgcaaaaagaactgaattgtgtcaatcgaaaactcaacattgctattaccagaatttccaatccgtatgggcatccgaatattcttgcagaatttatagctggccaattaaaaaaccgcgtttcttttcgaaaagcaatgaaaaaagctattgaattaactgaacaggcgaatacaaaaggaattcaagtacaaattgcaggacgtatcgacggaaaagaaattgcacgtgttgaatggatcagagagggtagagttcctttacaaacaattgaagctaaaattgattattgttcctatacagttcgaactatttatggggtcttaggaataaaaatttggatattcgtagacgaagaataa

SEQ ID NO: 71472 - protein, 218 aa, Lobularia maritima
MGQKINPLGFRLGTTQSHRSLWFAQPKKYSEGLEEDKKIRDCIKNYVQKNIRISSGMEGIARIEIQKRIDLIQIIIYMGFPKLLIEDKPRRVEELQMTVQKELNCVNRKLNIAITRISNPYGHPNILAEFIAGQLKNRVSFRKAMKKAIELTEQANTKGIQVQIAGRIDGKEIARVEWIREGRVPLQTIEAKIDYCSYTVRTIYGVLGIKIWIFVDEE

SEQ ID NO: 71473 - DNA, 657 bp, Lotus japonicus
  CDS (1)..(657): transl_table=11
atgggacaaaaaataaatccgcttggtttcagacttggtacaactcaaagtcatgattctatttggtttgcacaaccaacaaattattccgagaatttaaaagaagataaaaaaataagagattgtatcaagacttatatacaaaaaactataaaaatatcttcgggtgtcgagggaattggacggataaagattcaaaaaagaatcgatctgattcaagtcataatctatatgggatttccaaagttattaatagacggtaagcctcgaagaatcgaagaattacagataaatgtgcaaaaaaaaatgaattatgtgaatagaaaactcaacatagctattacaagaattgcaaatgcttatagagatcctaatattcttgcagaattcatagccggacaattaaaaaatagagtttcgtttcgtaaagcaatgaaaaaagctattgagttaactgaacaggcggggacaaaaggagttcaagtacaaattgcgggacgtatcgacggaaaagaaattgcacgcgtagaatggatccgagaaggtagggttcccctacaaaccattcgagctaaaattgattattgttcctatacagttcgaactatttatggcgtattagggatcaaagtttggatatttttaaacaaagaataa

SEQ ID NO: 71474 - protein, 218 aa, Lotus japonicus
MGQKINPLGFRLGTTQSHDSIWFAQPTNYSENLKEDKKIRDCIKTYIQKTIKISSGVEGIGRIKIQKRIDLIQVIIYMGFPKLLIDGKPRRIEELQINVQKKMNYVNRKLNIAITRIANAYRDPNILAEFIAGQLKNRVSFRKAMKKAIELTEQAGTKGVQVQIAGRIDGKEIARVEWIREGRVPLQTIRAKIDYCSYTVRTIYGVLGIKVWIFLNKE

SEQ ID NO: 71475 - DNA, 675 bp, Zea mays
  CDS (1)..(675): transl_table=11
atgggacaaaaaataaatccactcggtttcagacttggtacaacccaaaatcaccattccttttggttcgcacaaccaaaaaattattctgaaggtctacaggaagataaaaaaatacggaattgtatcaagaactatatacaaaagaataggaaaaaaggctcgaatagaaaaatggaatcagactcaagttctgaagtaattacacatatagaaattcaaaaagaaatcgatacaatccacgtcataatccatattggattccccaacttattaaagaaaaagggagcaatcgaagaattagagaaagatctccaaaaggaagttaattctgtaaaccagagacttaatattgctatcgaaaaggttaaagaaccttatagacaacctaatattcttgcggaatatatagctttccaattaaaaaatagagtttcattccgaaaagcaatgaaaaaagctattgaattaactaaaaaagcggatataaagggaataaaaatccaaattgcgggtcgtctagcaggaaaagaaattgcacgtgccgaatgcatcaaaaagggtagactacccctccaaacaattcgcgctaaaattgattattgctgctatccaattcgaactatctatggagtattaggtgtcaaaatttggatattcgtagaagaagaataa

SEQ ID NO: 71476 - protein, 224 aa, Zea mays
MGQKINPLGFRLGTTQNHHSFWFAQPKNYSEGLQEDKKIRNCIKNYIQKNRKKGSNRKMESDSSSEVITHIEIQKEIDTIHVIIHIGFPNLLKKKGAIEELEKDLQKEVNSVNQRLNIAIEKVKEPYRQPNILAEYIAFQLKNRVSFRKAMKKAIELTKKADIKGIKIQIAGRLAGKEIARAECIKKGRLPLQTIRAKIDYCCYPIRTIYGVLGVKIWIFVEEE

SEQ ID NO: 71477 - DNA, 654 bp, Marchantia polymorpha
  CDS (1)..(654): transl_table=11
atgggacaaaaaataaacccacttggttttagacttggtataacacaaaatcaccgctcatattggtttgcaaacaaaaaatattctaaagtttttgaagaagataaaaaaatacgtgactgtattgaattatatgtacaaaaacatataaaaaattcttcaaattatggaggaattgctcgtgttgaaattaaaagaaaaacagatttaattcaagttgaaatatatacaggatttcctgctttattagtagaaagccgaggtcaaggaattgaacaattaaaattaaatgtacaaaatatattatcttcagaagatagaagactccgaatgactttaatcgaaattgccaaaccctacggagaaccaaaaattcttgcaaaaaaaattgctttaaaattagaaagtagggttgcttttagacgaacaatgaaaaaagccattgaattagcaaaaaaaggaaatataaaaggaattaaaatacaaatagcaggtagacttaatggagctgaaattgctcgtgttgaatgggcacgagaaggtagagttcctttacaaacaataagagcacgaattaattattgctattacgcagctcaaacaatttacggagtattaggaatcaaagtttggatatttcaagatgaagaataa

SEQ ID NO: 71478 - protein, 217 aa, Marchantia polymorpha
MGQKINPLGFRLGITQNHRSYWFANKKYSKVFEEDKKIRDCIELYVQKHIKNSSNYGGIARVEIKRKTDLIQVEIYTGFPALLVESRGQGIEQLKLNVQNILSSEDRRLRMTLIEIAKPYGEPKILAKKIALKLESRVAFRRTMKKAIELAKKGNIKGIKIQIAGRLNGAEIARVEWAREGRVPLQTIRARINYCYYAAQTIYGVLGIKVWIFQDEE

SEQ ID NO: 71479 - DNA, 642 bp, Mesostigma viride
  CDS (1)..(642): transl_table=11
atgggacaaaagattcatcctcttgggtttcggcttggagttacacaagaacatcgtgcccattggtttgcaaaaccttctgaatataagtttttagtagaagaagataattatatacgtaaatatttaaatgcaaaattagctaatgctggtgttgcacgaattgatattcaacgtaaagcagatcaagtggagattgaaatatatacagctcgtcctggacttgttgttggacgtacaggaaagggaattgaaaatttaatcagagatttacaagataaattaagaaataaacgaaagtttagaatcacaatcacttatcttcaagaacctgatttagaatctactcttattggagaatttattgcacaaagacttcaagaaagaaaacctttccgacgtgctatcagacaagcagttcaacgagctaaaagagcaggcgtacaaggaattaaaattcaagttgctggcagattaaatggcgctgaaattgctagaagtgaatgggtacgtgaaggtagagtgcctttacaaactctgcgtgcagatattgattatagtcattgccaagcaaaaactatttatggcattattggtatcaaagtttggatatttaaaggtgaaaaaatatctattaattaa

SEQ ID NO: 71480 - protein, 213 aa, Mesostigma viride
MGQKIHPLGFRLGVTQEHRAHWFAKPSEYKFLVEEDNYIRKYLNAKLANAGVARIDIQRKADQVEIEIYTARPGLVVGRTGKGIENLIRDLQDKLRNKRKFRITITYLQEPDLESTLIGEFIAQRLQERKPFRRAIRQAVQRAKRAGVQGIKIQVAGRLNGAEIARSEWVREGRVPLQTLRADIDYSHCQAKTIYGIIGIKVWIFKGEKISIN

SEQ ID NO: 71481 - DNA, 648 bp, Morus indica
  CDS (1)..(648): transl_table=11
atgggacaaaaaataaatccgcttggtttcagacttggtgcaacccaaggtcatcattccctttggtttgcacaaccaaaaaattattccgaggatctacaagaagatcaaaaaatacgagattgtatcaagaattatataaaaaaaaatatgaaaattttttctagtgtcgagggaattgcatgtatagagattcaaaaaagaatcgacttgattcaagtcataatctatatgggattcccaaagttattaatagaacatcaaaaaatcgaagaattacagatgaatatacaaaaagaacttaattctgtgaaccgtaaactaaacatggctattacaagaattgcaaatccttacggacaccctaatattcttgcagaatttatagccggacaattaaaaaatagagtgtcattccgcaaagcaatgaaaaaagctattgaattaactgaacaggcaggtacaaaaggaattcaaatacaaattgcagggcgtatcgacggaaaagaaattgcacgtgtcgaatggatcagagaaggtagggtgcctctacaaaccattaaggctaaaattgattactgttcctatacagttcgaactatctatggggctttaggtatcaaaatttggatatttgtagacgagtaa

SEQ ID NO: 71482 - protein, 215 aa, Morus indica
MGQKINPLGFRLGATQGHHSLWFAQPKNYSEDLQEDQKIRDCIKNYIKKNMKIFSSVEGIACIEIQKRIDLIQVIIYMGFPKLLIEHQKIEELQMNIQKELNSVNRKLNMAITRIANPYGHPNILAEFIAGQLKNRVSFRKAMKKAIELTEQAGTKGIQIQIAGRIDGKEIARVEWIREGRVPLQTIKAKIDYCSYTVRTIYGALGIKIWIFVDE

SEQ ID NO: 71483 - DNA, 657 bp, Nandina domestica
  CDS (1)..(657): transl_table=11
atgggacaaaaaataaatccacttggtttcagacttggtacaacccaaagtcatcattccctttggtttgcacaaccaaaaaattattctgaaggtctacaggaagatcaaaaaatacaggattgtatcagaaattatgtacaaaaaaatatgagaatctcctctggtgttgagggaattgcacgtatagagattcaaaaaagaatcgatctgatccaggtcataatatatatggggtttccaaaattgttaatagagggtagatcacgaggaatcgaagaattacagagcagtgtacaaaaaagatttaattctgtaaaccgaaaacttaacattgctatcacaagaattgcaaaaccttatggacaccctaacattcttgcagaatttatagccggacaattaaagaatagagtttcatttcgaaaggcaataaaaaaagctattgaattaacggaacaagcggatacaaaaggaattcaagtccaaatagcggggcgtatcgacggaaaagaaattgcacgtgtcgaatggattagagaaggtagggttcccctacaaaccattcgagctaaaattgattattgttcctatacagttcgaactatttatggggcattaggcatcaaaatttggatatttacagacgaggagtaa

SEQ ID NO: 71484 - protein, 218 aa, Nandina domestica
MGQKINPLGFRLGTTQSHHSLWFAQPKNYSEGLQEDQKIQDCIRNYVQKNMRISSGVEGIARIEIQKRIDLIQVIIYMGFPKLLIEGRSRGIEELQSSVQKRFNSVNRKLNIAITRIAKPYGHPNILAEFIAGQLKNRVSFRKAIKKAIELTEQADTKGIQVQIAGRIDGKEIARVEWIREGRVPLQTIRAKIDYCSYTVRTIYGALGIKIWIFTDEE

SEQ ID NO: 71485 - DNA, 666 bp, Nephroselmis olivacea
  CDS (1)..(666): transl_table=11
atgggacagaaaattcacccacttgggtttcgtcttggtattacacaacaacaccgatctacctggtttgcgcctcgaaaactttatgtatcttggattcacgaagaacgtcagttacgtgactatctgaaaactcgtttagcagatgcaggagttgctaatgtgcagctgacacgtcaatctgatcgaattgaagttgagattcatacagcctgtcctggggctattgttggacgaactggacaaggtcttgaaattctacgcgaggatattcaaaaacgtcttccaaaggtacgtcgtgtgatcgttcatgtagttgaaattgctaaccctgatgcacaagctgtactcattggtggcattattgccaaacaacttgaagaacgtatcccatttcgacgcgctgtccgccaagctgtgcaacgtgctatgcgtgctcctggagtcgaaggcatcaaaattgaagtgtccggtcgcttaaatggtgcagaaatcgctcggagtgagtgggtgcgtgaaggccgtgtacctcttcatactcttcgcgcagatgtagattattgtgattgtacggcccaaacaatttatggcgtacttggtattaaagtgtggattttccgaggtgaaattcgaccagtgcgtcaagttctggctcctggcacctag

SEQ ID NO: 71486 - protein, 221 aa, Nephroselmis olivacea
MGQKIHPLGFRLGITQQHRSTWFAPRKLYVSWIHEERQLRDYLKTRLADAGVANVQLTRQSDRIEVEIHTACPGAIVGRTGQGLEILREDIQKRLPKVRRVIVHVVEIANPDAQAVLIGGIIAKQLEERIPFRRAVRQAVQRAMRAPGVEGIKIEVSGRLNGAEIARSEWVREGRVPLHTLRADVDYCDCTAQTIYGVLGIKVWIFRGEIRPVRQVLAPGT

SEQ ID NO: 71487 - DNA, 657 bp, Nicotiana sylvestris
  CDS (1)..(657): transl_table=11
atgggacaaaaaataaatccacttggtttcagactgggtacaacccaaggtcatcattccctttggttttcacaaccaaaaaattattctgaaggtttacaagaagatcaaaaaataagagattgtatcaagaattatgtacaaaagaatatgagaacgtcctctggcgtcgagggaattgcacgtatagagattcaaaaaagaatcgatctgatccaggtcataatctttatgggattcccaaaattattaatagaaagtcgaccgcgcggaatcgaagaattacaaacgaccttacaaaaagaatttcattgtgtaaaccgaaaactgaacattgctgtcacaagaattgcaaaaccttatggaaaccctaatattcttgcagaatttatagctggacaattaaagaatagagtttcctttcgaaaagcaatgaaaaaggctattgaattaacagaacaagcagatacaaaaggaattcaaatacaaattgcggggcgtatcgacggaaaagaaattgcacgtgtcgaatggatcagagaaggtagggttcccctacaaacgattcgagcgaaaattgattattgctcttatacagttcgaactatctatggagtattgggcatcaaaatttggatatttctagacgaggaataa

SEQ ID NO: 71488 - protein, 218 aa, Nicotiana sylvestris
MGQKINPLGFRLGTTQGHHSLWFSQPKNYSEGLQEDQKIRDCIKNYVQKNMRTSSGVEGIARIEIQKRIDLIQVIIFMGFPKLLIESRPRGIEELQTTLQKEFHCVNRKLNIAVTRIAKPYGNPNILAEFIAGQLKNRVSFRKAMKKAIELTEQADTKGIQIQIAGRIDGKEIARVEWIREGRVPLQTIRAKIDYCSYTVRTIYGVLGIKIWIFLDEE

SEQ ID NO: 71489 - DNA, 657 bp, Nicotiana tomentosiformis
  CDS (1)..(657): transl_table=11
atgggacaaaaaataaatccacttggtttcagactgggtacaactcaaggtcatcattccctttggttttcacaaccaaaaaattattcggaaggtttacaagaagatcaaaaaataagagattgtatcaagaattatgtacaaaagaatatgagaacgtcctctggcgtcgagggaattgcacgtatagaaattaaaaaaagaatcgatctgatccaggtcataatctttatgggattcccaaaattattaatagaaagtcgcccgcgcggaatcgaagaattacaaacgaccttacaaaaagaatttaattgtgtaaaccgaaaactgaacattgctgtcacaagaattgcaaaaccttatggaaaccctaatattcttgcagaatttatagctggacaattaaagaatagagtttcctttcgaaaagcaatgaaaaaggctattgaattaacagaacaagcagatacaaaaggaattcaaatacaaattgcggggcgtatcgacggaaaagaaattgcacgtgttgaatggatcagagaaggtagggttcccctacaaacgattcgagcgaaaattgattattgctcttatacagttcgaactatctatggagtattgggcatcaaaatttggatatttctagaccaggaataa

SEQ ID NO: 71490 - protein, 218 aa, Nicotiana tomentosiformis
MGQKINPLGFRLGTTQGHHSLWFSQPKNYSEGLQEDQKIRDCIKNYVQKNMRTSSGVEGIARIEIKKRIDLIQVIIFMGFPKLLIESRPRGIEELQTTLQKEFNCVNRKLNIAVTRIAKPYGNPNILAEFIAGQLKNRVSFRKAMKKAIELTEQADTKGIQIQIAGRIDGKEIARVEWIREGRVPLQTIRAKIDYCSYTVRTIYGVLGIKIWIFLDQE

SEQ ID NO: 71491 - DNA, 657 bp, Nymphaea alba
  CDS (1)..(657): transl_table=11
atgggacagaaaataaatccacttggtttcagacttggtacaacccaaagtcatcgttccttttggttcgcacaaccaaaaaattattccaaaggtctccaggaagatgaaaaaatacgggattgtatcaagaattatgtacaaaaacatatgagaatatcctcaggttttgaaggaattgcacgtatagatattaaaaaaagaatcgatttgatccaagtcataattcatattggattcgccaatatgttaatggagggtagagcccgaggaatcgaagaattacagactaatgtacaaaaaagctttcattctgtgaaccgaagactcaacattgctattgcaagagttgcaagaccttacgggcaacctaatattcttgcagaatatatcgctctgcaattaaagaatagagtttcctttcgaaaggcaatgaaaaaagctattgaattagctgaacaagcggatgcaaagggaattcaggtacaaattgcaggacgtctcaatggaaacgaaattgcccgcgttgaatggattagagaaggtagggttcccctgcagaccattcgagttaaaattgatcattgttcctatccagttcgaactatctatggagtattagggataaaaatttggatatttttggatgaagagtaa

SEQ ID NO: 71492 - protein, 218 aa, Nymphaea alba
MGQKINPLGFRLGTTQSHRSFWFAQPKNYSKGLQEDEKIRDCIKNYVQKHMRISSGFEGIARIDIKKRIDLIQVIIHIGFANMLMEGRARGIEELQTNVQKSFHSVNRRLNIAIARVARPYGQPNILAEYIALQLKNRVSFRKAMKKAIELAEQADAKGIQVQIAGRLNGNEIARVEWIREGRVPLQTIRVKIDHCSYPVRTIYGVLGIKIWIFLDEE

SEQ ID NO: 71493 - DNA, 657 bp, Oenothera hookeri
  CDS (1)..(657): transl_table=11
atggcccaaaaaataaatcccctcggtttcagacttggtacaactcaagtcatcattcgattggttgcacaaccaaaagattattctgacggtctacaagaagatcaaaaaatacgagattgtatccaaaattatatacaaaaaaatatgcaaatatcctcggattcgggtgtcgaggggattgcccgaatagagattcgaaaaagaattgatctgattcaagtcaaaatctatatgggattcccaaagttattaatagaagatgggacacgaagaatcgaagaattacagaggattgtacaaaaagaaatcaattctgtgaaccgaaaaatcaacattactattacaaaaattacaaaaccctacggagaccccaatattctggcagaatttatagccggacaattaaataatagagtttcctttcgcaaagcaatccaaaaggctattgaattagccgaacaggcggatacaaaaggaattcgagtacaaattggagggcgcatcaacggaggagagatagcacgtgtcctatggatgaaagaaggtcgggttcctctacaaaccattcgagctaaaattgattattgtgtctatacagtccgaactatccatgggctattaggcatcaaaatttggatatttagagaggattag

SEQ ID NO: 71494 - protein, 218 aa, Oenothera hookeri
MAQKINPLGFRLGTTQVIIRLVAQPKDYSDGLQEDQKIRDCIQNYIQKNMQISSDSGVEGIARIEIRKRIDLIQVKIYMGFPKLLIEDGTRRIEELQRIVQKEINSVNRKINITITKITKPYGDPNILAEFIAGQLNNRVSFRKAIQKAIELAEQADTKGIRVQIGGRINGGEIARVLWMKEGRVPLQTIRAKIDYCVYTVRTIHGLLGIKIWIFRED

SEQ ID NO: 71495 - DNA, 708 bp, Oltmannsiellopsis viridis
  CDS (1)..(708): transl_table=11
atgggacaaaaagtacatcctttaggtttccgtttaggagttacccaaaaacaccgttcacaatggtttgctaaaccacaagaatactcacaattagtactagaagatcattttttacgtgaagaattaaataaacgttttccaaacagtggaattattgacttatttattcaacgtaaagtagatcgtacacaagtagaagtagaaattcgtacaacccgtccaggtttacttgtaggtcgtaaacgtcaaaattgtgataagttaaaacaattacgtgacgaattacaggttgaattaaataaattccgcgctaaaaacggtgtatcacctacagcaaaagtagctcttcaggtaactacagtccaaaataaatcttcagaagcaatcgttattgctgaattcttagtaaaccaactagaacgacgtattgctttccgtcgtgctttacgacgtgttttaagtattattcaacgtgaccgtgttcaaggagcaaaaatccaagtatcaggtcgtttaaacggtgcagaaattgctcgttcagagtggattcgtacagggcgtgtacctttacaaactctacgtgcagatgttgattactgtcatcgtgaagcaaaaactatttatggtattttaggtattaaagtttggacgtttaaaggtgaaattaaacctgtacgaaaagcagtagaggtacctgtagcgtaa

SEQ ID NO: 71496 - protein, 235 aa, Oltmannsiellopsis viridis
MGQKVHPLGFRLGVTQKHRSQWFAKPQEYSQLVLEDHFLREELNKRFPNSGIIDLFIQRKVDRTQVEVEIRTTRPGLLVGRKRQNCDKLKQLRDELQVELNKFRAKNGVSPTAKVALQVTTVQNKSSEAIVIAEFLVNQLERRIAFRRALRRVLSIIQRDRVQGAKIQVSGRLNGAEIARSEWIRTGRVPLQTLRADVDYCHREAKTIYGILGIKVWTFKGEIKPVRKAVEVPVA

SEQ ID NO: 71497 - DNA, 636 bp, Ostreococcus tauri
  CDS (1)..(636): transl_table=11
atgggtcaaaaagttcatccgattggattccgaattggtgtaacacaaactcaccgttcacaatggtttgcaaaaccaaaagattatgcaaaactcgtggaagaagatcttttaatccgtgaatttgctgagagtcgtctccctgatgcgggcatctctcgcattaatatttcacgtcaagtagatcgtattgaaattgaatttttcactgcacgtccacgtgcacttgtaggagcaaaaggagaaactttaactcaactccgcgatgagattaaagcaaaactcccagacactcgtaacgttgcattatatgtaacaaaaacacaacaaccggagatggaagcaatttgtattgctgaaaatatcgcggaacaacttgaaaagcgtactcccttccgccgtacaatgcgtcaagcaattatgcgtgctcgtaaagcaggggctgaaggaattaaaattcaaatttctggacgtttaaatggagctgaaattgctcgtcacgaatgggctcgtgaagggcgtgtacctttacatacaattcgtgctgatattgattatgcaacagctcgtgctcaaacaatctacggaattttaggcattaaagtatgggtttgtaagggggagaaatcatgttaa

SEQ ID NO: 71498 - protein, 211 aa, Ostreococcus tauri
MGQKVHPIGFRIGVTQTHRSQWFAKPKDYAKLVEEDLLIREFAESRLPDAGISRINISRQVDRIEIEFFTARPRALVGAKGETLTQLRDEIKAKLPDTRNVALYVTKTQQPEMEAICIAENIAEQLEKRTPFRRTMRQAIMRARKAGAEGIKIQISGRLNGAEIARHEWAREGRVPLHTIRADIDYATARAQTIYGILGIKVWVCKGEKSC

SEQ ID NO: 71499 - DNA, 660 bp, Panax ginseng
  CDS (1)..(660): transl_table=11
atgggacaaaaaataaatccactcggtttcagacttggtacaacccaaggtcatcattccctttggtttgcacaaccaaaaaattattccgaaggtttacaagaagatcaaaaaataagagattttatcaagaattatgtacaaaaaaatatgaaaatttcctctagcgttgagggaattgcacgtatagagattcaaaaacgaatcgatctgatccaggtcataatctatatgggattcccaaagttattaatagaaagtcgaccgcgaggaatcgaagaattgcagatgaatctacaaaaagaatttaagtctgtgaaccaaaaacttaacattgctatcacaagaattgcaaaaccttacggaagccctaatattcttgcggaatttatagccggccaattaaagaatagagtttcatttcgaaaagcaatgaaaaaggctattgaattaaccgaacaagcagatacaaaaggaattcaagtacaaattgcagggcgtatcgacggaaaagaaattgcgcgtgtggaatggatcagagaaggtagggttcccctgcaaaccattcgagctaaaatcgattattgttcctatactgttcgaactatttatggagtattaggcatcaaaatttggatatttatagacggggaagaataa

SEQ ID NO: 71500 - protein, 219 aa, Panax ginseng
MGQKINPLGFRLGTTQGHHSLWFAQPKNYSEGLQEDQKIRDFIKNYVQKNMKISSSVEGIARIEIQKRIDLIQVIIYMGFPKLLIESRPRGIEELQMNLQKEFKSVNQKLNIAITRIAKPYGSPNILAEFIAGQLKNRVSFRKAMKKAIELTEQADTKGIQVQIAGRIDGKEIARVEWIREGRVPLQTIRAKIDYCSYTVRTIYGVLGIKIWIFIDGEE

SEQ ID NO: 71501 - DNA, 651 bp, Phaseolus angularis
  CDS (1)..(651): transl_table=11
atgggacaaaaaataaatccgcttggtttcagacttggtacaactcaaagtcatgattctatttggtttgcacaaccaacaaaatattctgagaatatacaagaagataaaaaaatacgagattggataaaaaattatatacaaaaaaatagaagaatatcctcgggtgtcgagggaattggagagataaagattcaaaaaagaatcgatctgattcaagtcataatatatatgggatttccaaagttattaatagagggtaagcctcaaaaaatcgaagaattacagacgaatatgcacaaaaaactgaattgtgtaaatagaaaactaaacattgctattgtaaaagttacaaatgcttataaacaccctaatattcttgcagaatttatagctggacaattaaagaatagagtttcatttcgtaaagcaatgaaaaaagctattgaattaactgaacaagcaggtacaaaaggagttcaagtacagattgcaggacgtattgatggaaaagaaattgcacgtgtcgaatggattagagaaggtagggttcctctacaaaccattcgagctaaaattgaatattgttgttatacagttcgaactatttatggagttttagggataaaagtttggatattttctaaataa

SEQ ID NO: 71502 - protein, 216 aa, Phaseolus angularis
MGQKINPLGFRLGTTQSHDSIWFAQPTKYSENIQEDKKIRDWIKNYIQKNRRISSGVEGIGEIKIQKRIDLIQVIIYMGFPKLLIEGKPQKIEELQTNMHKKLNCVNRKLNIAIVKVTNAYKHPNILAEFIAGQLKNRVSFRKAMKKAIELTEQAGTKGVQVQIAGRIDGKEIARVEWIREGRVPLQTIRAKIEYCCYTVRTIYGVLGIKVWIFSK

SEQ ID NO: 71503 - DNA, 645 bp, Phaeodactylum tricornutum
  CDS (1)..(645): transl_table=11
atggggcaaaaaacacatcctttaggatttagattaggtattacacaagaacataaatcaacgtggtatgctaattttaatcaatatgccaacattttgaaggaggatgataaaattcgaacatatattcatactatttctaaagcaaatagtattgcaaacgttcgaattaatcgtaacgggctaaatgatcagattcaactaaatattgaaactggaaaaccaggtatcttagttggtgacttaggtgctggtcttgagacattgttaaataatgttaaaaaatttttaccagcaaatcgtcaattgacaatcaatgttttggaagttgaaaaagtcgatttagatgcttcacttttagctgacttagttgccgaacaattagagaaacgtattgcatttcgtcgcgcaattcgtgaagcactacaacgagcacaaaaacagaatgtaaatggtattaaaattcaagtctctggtcgtttaaatggcgctgaaattgctagaagcgaatggattcgtgaagggcgagttcctttacaaacattacgagcagatattgattacgcaacacaagaagccaatacaatctatggcgttttaggaatcaaagtttggttatttaaaagtgaaattttatcaaagtaa

SEQ ID NO: 71504 - protein, 214 aa, Phaeodactylum tricornutum
MGQKTHPLGFRLGITQEHKSTWYANFNQYANILKEDDKIRTYIHTISKANSIANVRINRNGLNDQIQLNIETGKPGILVGDLGAGLETLLNNVKKFLPANRQLTINVLEVEKVDLDASLLADLVAEQLEKRIAFRRAIREALQRAQKQNVNGIKIQVSGRLNGAEIARSEWIREGRVPLQTLRADIDYATQEANTIYGVLGIKVWLFKSEILSK

SEQ ID NO: 71505 - DNA, 651 bp, Phaseolus vulgaris
  CDS (1)..(651): transl_table=11
atgggacaaaaaataaatccgcttggtttcagacttggtacaactcaaagtcatgattctatttggtttgcacaaccaacaaaatattccgagaatatacaagaagataaaaaaatacgagattggatcaaaaattatatacaaaaaaatataagaatatcctcgggtgtcgagggaattggagagataaagatccaaaaaagaatcgatctgattcaagtcataatatatatgggatttcccaagttattaatagaaggtaagccgcataaaatcgaagaattccagacgaatatgcacaaaaaactgaattgtgtgaataaaaaactaaacattgctattgtaaaaataacaaatgcttataaacaccctaatattcttgcagaatttatagctggacaattaaagaatagagtttcatttcgtaaagcaatgaaaaaagctattgaattaactgaacaagcaggtacaaaaggagttcaagtacagattgcagggcgtattgatggcaaagaaattgcgcgtgtagaatggataagagaaggtagggttcctttacaaaccattcgagctaaaattgaatattgttgttatacagttcgaactatttatgggattttagggataaaagtttggatattttctaaataa

SEQ ID NO: 71506 - protein, 216 aa, Phaseolus vulgaris
MGQKINPLGFRLGTTQSHDSIWFAQPTKYSENIQEDKKIRDWIKNYIQKNIRISSGVEGIGEIKIQKRIDLIQVIIYMGFPKLLIEGKPHKIEEFQTNMHKKLNCVNKKLNIAIVKITNAYKHPNILAEFIAGQLKNRVSFRKAMKKAIELTEQAGTKGVQVQIAGRIDGKEIARVEWIREGRVPLQTIRAKIEYCCYTVRTIYGILGIKVWIFSK

SEQ ID NO: 71507 - DNA, 657 bp, Physcomitrella patens
  CDS (1)..(657): transl_table=11
atgggacaaaaaattaacccacttggttttcgacttggtgtcactcagaatcatcattcttattggtttgcgcaaccaaaaaattattctaaacttcttcaagaagatcaaaaaatgcgtaattgtattgagaattatgtatataaaaatataagaaattcttcaaattatggaggaattgcccgtattgaaatcaaaagaaaaacagatttaattcaagttgaaatacatacaggctttcctgctttactagtagaaaatcgtaaacgcggtattgaacaattaaaaacagacgtacaaagtattttaacttctggagaccgtaaacttcgtatgactttaaccgaagtaacaaaaccatatggagaaccaaatattcttgcagaatatattgctttgcaattagaaagtcgagttgcttttagaagaactatgaaaaaagctattgaattagcaaaaaaaacaaatattaaaggtattaaaatccaaattgcaggtcgtcttaacggagctgaaattgctcgggtagaatgggctagagaaggaagagtgcctttacaaactcttcgagctaaaattgattattgttattacccagctcaaacaatttatggagtattgggaataaaaatttggatatttcaagatgaaaagtag

SEQ ID NO: 71508 - protein, 218 aa, Physcomitrella patens
MGQKINPLGFRLGVTQNHHSYWFAQPKNYSKLLQEDQKMRNCIENYVYKNIRNSSNYGGIARIEIKRKTDLIQVEIHTGFPALLVENRKRGIEQLKTDVQSILTSGDRKLRMTLTEVTKPYGEPNILAEYIALQLESRVAFRRTMKKAIELAKKTNIKGIKIQIAGRLNGAEIARVEWAREGRVPLQTLRAKIDYCYYPAQTIYGVLGIKIWIFQDEK

SEQ ID NO: 71509 - DNA, 657 bp, Picea abies
  CDS (1)..(657)
atggcgcagaaaataaatccacttggttttagacttggtgtaacccaaaatgatcgttcccattggttcgcgcaacaaaggaattattccaaagatctccgagaagatcaaaaaatacgtacttgcattgaaaactatgtacgaacacatataaagagctcctcgaattatggaggaattgcacgtgtagagattagcagaaagatcgatttgattcaggtcaaaatatatataggatttcccaacttgttgttaatagaaggtaggggttttcaaggaattgaaaaattaaaaaacgatgtactaaatatgctcgattctgtggaccgaaaacttcacattgctatagaaaaagttgcgaaaccctatagaaaacctaatattcttgcggagtatattgccctacaactagagaagagagttccattcagaaaaacaatgaagaaagctattgaactggctgaacgggaagaggtagaaggtattcagatccaaattgcaggacgtctcgacggaaaggaaattgcccgggtcgaatgggacaggggaggtagggttcccctacagacaattcgggctaggattgattattgttattatccggttcaaaccatctatggagttttagggatcaaaatttggatcttagaagagtag

SEQ ID NO: 71510 - protein, 218 aa, Picea abies
MAQKINPLGFRLGVTQNDRSHWFAQQRNYSKDLREDQKIRTCIENYVRTHIKSSSNYGGIARVEISRKIDLIQVKIYIGFPNLLLIEGRGFQGIEKLKNDVLNMLDSVDRKLHIAIEKVAKPYRKPNILAEYIALQLEKRVPFRKTMKKAIELAEREEVEGIQIQIAGRLDGKEIARVEWDRGGRVPLQTIRARIDYCYYPVQTIYGVLGIKIWILEE

SEQ ID NO: 71511 - DNA, 654 bp, Pinus koraiensis
  CDS (1)..(654): transl_table=11
atggcgcagaaaataaatccacttggttttagacttggtgtaacccaaaatgatcgttcccattggttcgcacaacaaaggaattattccaaagatctccgagaagatcaaaaaatacgtacttgcattgaaaactatgtacgaacacatataaagagctcctcgaattatggaggaattgcacgtgtagagattcgcagaaagatcgacttgattcaggtcaaaatctatattggatttcccaacttgttgttaatagaaggtaggggtcaaggaattgaaaaattaagaaacgatgtactaaatatgctcgattctgcggaccgaaaacttcacattgctatagaaaaagttgcgaaaccctatagaaaacctaatattcttgcggagtatattgccctacagctagagaagagagttccattcagaaaaacaatgaagaaagctattgaactggctgaacgggaagaggtagaaggtattcagatccaaattgcaggacgtctcgacggaaaggaaattgcccgggtcgaatgggacaggggaggtagggttcccctacagacaattcgggctaggattgattattgttattatccggttcaaaccatctatggagttttagggatcaaaatttggattttggaagagtag

SEQ ID NO: 71512 - protein, 217 aa, Pinus koraiensis
MAQKINPLGFRLGVTQNDRSHWFAQQRNYSKDLREDQKIRTCIENYVRTHIKSSSNYGGIARVEIRRKIDLIQVKIYIGFPNLLLIEGRGQGIEKLRNDVLNMLDSADRKLHIAIEKVAKPYRKPNILAEYIALQLEKRVPFRKTMKKAIELAEREEVEGIQIQIAGRLDGKEIARVEWDRGGRVPLQTIRARIDYCYYPVQTIYGVLGIKIWILEE

SEQ ID NO: 71513 - DNA, 654 bp, Pinus thunbergii
  CDS (1)..(654): transl_table=11
atggcgcagaaaataaatccacttggttttagacttggtgtaactcaaaatgagcgttcccattggttcgcacaacaaaggaattattccaaagatctccgagaagatcaaaaaatacgtacttgcattgaaaactatgtacgaacgcatataaagagctcctcgaattatggaggaattgcacgtgtagagattcgcagaaagatcgatttgattaaggtcaaaatctatattggatttcccaacttgttgttaatagaaggtaggggtcaaggaattgaaaaattaagaaacgatgtactaaatatgctcgattctgtggaccgaaaacttcacattgctatagaaaaagttgcgaaaccctatagaaaacctaatattcttgcagagtatattgccctacaactagagaagagagttccattcagaaaaacaatgaagaaagctattgaactggctgaacgggaagaggtagaaggtattcagatccaaattgcaggacgtctcgatggaaaggaaattgcccgggtcgaatgggacaggggaggtagggttcccctacagacaattcgggctaggattgattattgttattatccggttaaaaccatctatggagttttagggataaaaatttggattttagaagagtag

SEQ ID NO: 71514 - protein, 217 aa, Pinus thunbergii
MAQKINPLGFRLGVTQNERSHWFAQQRNYSKDLREDQKIRTCIENYVRTHIKSSSNYGGIARVEIRRKIDLIKVKIYIGFPNLLLIEGRGQGIEKLRNDVLNMLDSVDRKLHIAIEKVAKPYRKPNILAEYIALQLEKRVPFRKTMKKAIELAEREEVEGIQIQIAGRLDGKEIARVEWDRGGRVPLQTIRARIDYCYYPVKTIYGVLGIKIWILEE

SEQ ID NO: 71515 - DNA, 654 bp, Platanus occidentalis
  CDS (1)..(654): transl_table=11
atgggtcaaaaaataaatccactcggtttcagacttggtacaacccaaaatcatcattccgtttggtttgcacaaccaaaaagttattccgagggcctccaggaagatcaaaaaatacgggattgtatcaagaattatgtacaaaaaaataagagaatacccttagtcgagggaattgcacgtatagagattcaaaaaagaattgatctaatccaggtcataatctatatgggattcccaaagttgttaatagaggatagaccacgaggaatcgaagaattacagatcaatttacaaaaagaatttaattccatgaaccgaaaacttaacattgctatcacaagaattgcaaaaccttatggacaacctaatattcttgcagaatatatagccggacaattaaagagtagagtttcatttcgaaaggcaatgaaaaaagctattgaattaactgaacaaacagatacaaaaggaattcaagtacaaattgcagggcgtatcgacggaaaagaaattgcacgtgtcgaatggatcagagaaggtagggttcccctacaaaccattcgagctaaaattgattattgttcctatacagttcgaactatctatggggtattgggcatcaaaatttggatatttgtagacgaggaataa

SEQ ID NO: 71516 - protein, 217 aa, Platanus occidentalis
MGQKINPLGFRLGTTQNHHSVWFAQPKSYSEGLQEDQKIRDCIKNYVQKNKRIPLVEGIARIEIQKRIDLIQVIIYMGFPKLLIEDRPRGIEELQINLQKEFNSMNRKLNIAITRIAKPYGQPNILAEYIAGQLKSRVSFRKAMKKAIELTEQTDTKGIQVQIAGRIDGKEIARVEWIREGRVPLQTIRAKIDYCSYTVRTIYGVLGIKIWIFVDEE

SEQ ID NO: 71517 - DNA, 657 bp, Populus alba
  CDS (1)..(657): transl_table=11
atgggacaaaaaataaatccacttggtttcagacttggtacaacccaagatcattattctctttggtttgcacaaccaaaaaatttttctgagggtctgcaagaagatcaaaaaataagaaattgtatcaaaaattatgtacaaaaaaatatgaaaatttcttctggtgttgaaggaattggacatatagagattcaaaaacgaatcgatgtgattcaagttataatctatttaggattcccaaaatttttaacagaaggtaaacctaaaaggatcaaagaattacagataaatgtacaaaaagaacttaattgtatgaaccgaaaactcaacatttctattacaagaattgaaaacccttacatgcacccgaatgttcttgcagaatttatagccggacaattaaagaatcgagtttcatttcgcaaagcaatgaaaaaggctattgaattaactgagcagagcaatacaaaaggaattcaagtacaaattgcagggcgtcttgatggaaaagaaattgcacgcgccgaatgggttagagagggcagggttcctctacaaactcttcgagctaaaattaattattgttcttatacagttagaactatttatggggtcttaggtataaaaatttggatatttgtagacgaggaatag

SEQ ID NO: 71518 - protein, 218 aa, Populus alba
MGQKINPLGFRLGTTQDHYSLWFAQPKNFSEGLQEDQKIRNCIKNYVQKNMKISSGVEGIGHIEIQKRIDVIQVIIYLGFPKFLTEGKPKRIKELQINVQKELNCMNRKLNISITRIENPYMHPNVLAEFIAGQLKNRVSFRKAMKKAIELTEQSNTKGIQVQIAGRLDGKEIARAEWVREGRVPLQTLRAKINYCSYTVRTIYGVLGIKIWIFVDEE

SEQ ID NO: 71519 - DNA, 657 bp, Populus trichocarpa
  CDS (1)..(657): transl_table=11
atgggacaaaaaataaatccacttggtttcagacttggtacaacccaagatcattattctctttggtttgcacaaccaaaaaatttttttgagggtctgcaagaagatcaaaaaataagaaattgtatcaaaaattatgtacaaaaaaatatgaaaatttcttctggtgttgaaggaattggacatatagagattcaaaaacgaatcgatgtgattcaagttataatctacttaggattcccaaaatttttaacagaaggtaaacctaaaaggatcaaagaattacagataaatgtacaaaaagaacttaattgtatgaaccgaaaactcaacatttctattacaagaattgaaaacccttacatgcacccgaatgttcttgcagaatttatagccggacaattaaagaatcgagtttcatttcgcaaagcaatgaaaaaggctattgaattaactgagcagagcaatacaaaaggaattcaagtacaaattgcagggcgtcttgatggaaaagaaattgcacgcgccgaatgggttagagagggcagggttcctctacaaactcttcgagctaaaattaattattgttcttatacagttagaactatttatggggtcttaggtataaaaatttggatatttgtagacgaggaatag

SEQ ID NO: 71520 - protein, 218 aa, Populus trichocarpa
MGQKINPLGFRLGTTQDHYSLWFAQPKNFFEGLQEDQKIRNCIKNYVQKNMKISSGVEGIGHIEIQKRIDVIQVIIYLGFPKFLTEGKPKRIKELQINVQKELNCMNRKLNISITRIENPYMHPNVLAEFIAGQLKNRVSFRKAMKKAIELTEQSNTKGIQVQIAGRLDGKEIARAEWVREGRVPLQTLRAKINYCSYTVRTIYGVLGIKIWIFVDEE

SEQ ID NO: 71521 - DNA, 690 bp, Pseudendoclonium akinetum
  CDS (1)..(690): transl_table=11
atgggtcaaaaaatacatccgctcggttttcgactgggaattactcaagaacatcggtcaaaatggtatgctaaagcaagtgattatccacgattagttttggaagataaaaaattacgtgataatctttttaaacaatatccaaaagcaaatattgtcgatattataattaagcgtcgacaaactactcaagatcttgaaactaaagaatcggtagatgttattgaagtatctatttatacagcggttcctggaaaaataattggtcgttcaaaagctacaattacggaattaaaagaaagtttagaaaaactttgtcaattggaccgcatgaaacacaatttacctcaaattcgtattattttaacgattttaaaagttcaaaatccttattcatctgcttctgtaattgctgattatttaattgaacaacttgagcagaggataccttttcgagcagcgttaaaaaaagcattagaacgtattcgtttagctaaattagagggaataaaaatagaaatttcgggtcgtttaaatggggctgaaattgctcgttccgagtgggttcgaaaaggtagggttccattgcaaacattgagagccgatattgattattcagcaaaaacagcaaaaaccatttatggaattttagggattaaggtttgggcttttaaaggtgaaagaacttaa

SEQ ID NO: 71522 - protein, 229 aa, Pseudendoclonium akinetum
MGQKIHPLGFRLGITQEHRSKWYAKASDYPRLVLEDKKLRDNLFKQYPKANIVDIIIKRRQTTQDLETKESVDVIEVSIYTAVPGKIIGRSKATITELKESLEKLCQLDRMKHNLPQIRIILTILKVQNPYSSASVIADYLIEQLEQRIPFRAALKKALERIRLAKLEGIKIEISGRLNGAEIARSEWVRKGRVPLQTLRADIDYSAKTAKTIYGILGIKVWAFKGERT

SEQ ID NO: 71523 - DNA, 663 bp, Psilotum nudum
  CDS (1)..(663): transl_table=11
atgggacaaaaaatccatccacttggatttcgacttggtacaactcaaaatcattgttcttattggttcgcacaatctaaaaaaatttattcaaaattggttaaagaggataaggaaatacgtaattgtatagaaaaatatgtgcaaaagcatacaaataacccttttcattatggaggaattgcacgaatcgagatttatagaaagacagatttgattcgagtcgaaatacatatgggatttacagacttactaacagagaatgggggtattagatttgaacaattaaaatctaatatagaaaaaattgttaattctaaaaatcaaaaactttgtctgattcttatcaaaattgataaaccttatacagaaccaaaagtattggcagaatacatagccttacaattagaaaatcgagttgtttttaggaaagcggtcaaaaaagctcttgaacttgctggaaattttaagaataaaggtggtattaaaatacaaatagcaggccgtctcaatggaattgagattgctcgtgttgaatggactagggagggtagagttcctttacaaaccataagagctcacataaattattactattatccagctaaaactatttatggaatattaggaataaaagtatggatttaccaaaatgatgaataa

SEQ ID NO: 71524 - protein, 220 aa, Psilotum nudum
MGQKIHPLGFRLGTTQNHCSYWFAQSKKIYSKLVKEDKEIRNCIEKYVQKHTNNPFHYGGIARIEIYRKTDLIRVEIHMGFTDLLTENGGIRFEQLKSNIEKIVNSKNQKLCLILIKIDKPYTEPKVLAEYIALQLENRVVFRKAVKKALELAGNFKNKGGIKIQIAGRLNGIEIARVEWTREGRVPLQTIRAHINYYYYPAKTIYGILGIKVWIYQNDE

SEQ ID NO: 71525 - DNA, 657 bp, Solanum bulbocastanum
  CDS (1)..(657): transl_table=11
atgggacaaaaaataaatccacttggtttcagactgggtacaacccaaggtcatcattccctttggttttcacaacccaaaaattattctgagggtttacaagaagataaaaaaataagagattgtatcaagaattatgtacaaaagaatatgagaacgtcctctggcatcgagggaattgcacgtatagagattcaaaaaagaatcgatctgatccaggtcataatctttatgggattcccaaaattattaatagaaagtcgaccgcgcggaatcgaagaattacaaatgaccttacaaaaagaatttaattgtgtaaaccgaaaactgaacattgctgtcacaagaattgcaaaaccttacggaaaccctaatattcttgcagaatttatagctggacaattaaagaatagagtttcatttcgaaaagcaatgaaaaaggctattgaattaacagaacaagcggatacaaaaggaattcaaatacaaattgcggggcgtatcgacggaaaagaaattgcacgtgtcgaatggatcagagaaggcagggttcccctacaaacgattcgagctaaaattgattattgctcttatacagttcgaactatctatggaatattgggcatcaaaatttggatatttctagacgaggaataa

SEQ ID NO: 71526 - protein, 218 aa, Solanum bulbocastanum
MGQKINPLGFRLGTTQGHHSLWFSQPKNYSEGLQEDKKIRDCIKNYVQKNMRTSSGIEGIARIEIQKRIDLIQVIIFMGFPKLLIESRPRGIEELQMTLQKEFNCVNRKLNIAVTRIAKPYGNPNILAEFIAGQLKNRVSFRKAMKKAIELTEQADTKGIQIQIAGRIDGKEIARVEWIREGRVPLQTIRAKIDYCSYTVRTIYGILGIKIWIFLDEE

SEQ ID NO: 71527 - DNA, 657 bp, Solanum lycopersicum
  CDS (1)..(657): transl_table=11
atgggacaaaaaataaatccacttggtttcagactgggtacaacccaaagtcatcattccctttggttttcacaacccaaaaattattctgagggtttacaagaagataaaaaaatcagagattgtatcaagaattatgtacaaaaaaatatgagaacgtcctctggcatcgagggaattgcacgtatagagattcaaaaaagaatcgatctgatccaggtcataatctttatgggattcccaaaattattaatagaaagtcgaccgcgcggaatcgaagaattacaaatgaccttacaaaaagaatttaattgtgtaaaccgaaaactgaacattgctgtcacaagaattgcaaaaccttacggaaaccctaatattcttgcagaatttatagctggacaattaaagaatagagtttcatttcgaaaagcaatgaaaaaggctattgaattaacagaacaagcggatacaaaaggaattcaaatacaaattgcggggcgtatcgacggaaaagaaattgcacgtgtcgaatggatcagagaaggcagggttcccctacaaacgattcgagctaaaattgattattgctcttatacagttcgaactatctatggaatattgggcatcaaaatttggatatttctagacgaggaataa

SEQ ID NO: 71528 - protein, 218 aa, Solanum lycopersicum
MGQKINPLGFRLGTTQSHHSLWFSQPKNYSEGLQEDKKIRDCIKNYVQKNMRTSSGIEGIARIEIQKRIDLIQVIIFMGFPKLLIESRPRGIEELQMTLQKEFNCVNRKLNIAVTRIAKPYGNPNILAEFIAGQLKNRVSFRKAMKKAIELTEQADTKGIQIQIAGRIDGKEIARVEWIREGRVPLQTIRAKIDYCSYTVRTIYGILGIKIWIFLDEE

SEQ ID NO: 71529 - DNA, 651 bp, Glycine max
  CDS (1)..(651): transl_table=11
atgggacaaaaaataaatccgcttggtttcagacttggtacaactcaaagtcatgattctatttggtttgctcaaccaacaaattattccgagaatatacaagaagataaaaaaatacgagattgtatcaaaaattatatacaaaaaaatataagaatatcctctggtgttgagggaattggacagataaagattcaaaaaagaattgatcttattcaagttataatatatatgggatttccaaagttattaatagagggtaagtctcaaaaaatcgaagaattacagacgaatatgcaaaaaaaactgaattgtgtgaatcgaaaactaaacattgctattgtaaaagttgcaaatgcttataaacaccctaatattattgcagaatttatagctggacaattaaagaatagagtttcgtttcgtaaagcaatgaaaaaagctattgaattaactgaacaggcgggtacaaaaggagttcaagtacaaattgcaggacgtatcgacggaaaagaaattgcacgtgttgaatggatcagagaaggtagagttcctctacaaaccattcgagcgaaaatagattattgttgctatacagttcgaactatttatggggttttagggatcaaagtttggatattttctaaataa

SEQ ID NO: 71530 - protein, 216 aa, Glycine max
MGQKINPLGFRLGTTQSHDSIWFAQPTNYSENIQEDKKIRDCIKNYIQKNIRISSGVEGIGQIKIQKRIDLIQVIIYMGFPKLLIEGKSQKIEELQTNMQKKLNCVNRKLNIAIVKVANAYKHPNIIAEFIAGQLKNRVSFRKAMKKAIELTEQAGTKGVQVQIAGRIDGKEIARVEWIREGRVPLQTIRAKIDYCCYTVRTIYGVLGIKVWIFSK

SEQ ID NO: 71531 - DNA, 657 bp, Spirogyra maxima
  CDS (1)..(657)
atgggtcaaaaaattcatccacttggttttcgtcttggtgtaacccaagaacatttatcaaattggtttgcacggcctagccgttattctgatcttcttgaagaagatgaaaaaataagaaattgtattaaagaatatgtacgaacacatattcgtaattcttctaattatggtggtatttctcgtgtaaaaattcaacgtaaaactgatctagtacaagtagatatacatacaggattccctgccttattgatagaaggaagaggaaaaggattattagttttaaaacaaagtgtactaaattcaattagcactgaacgaaaattaaaaatcactttgtctgaaatagataaatattatgcagaagcaaatattcttgcagaatatatcgctttacaacttgaaagtcgagtagctttcagaagaacaatgaaaaaagcaattcaattagctatggaacaaggtaaagtaaaaggtattaaaatacaaattgcaggacgactaaatggagctgaaattgctcgtattgaatgggctcgtgaaggaagggtgccgctacagactctccgagcatgcattgattattgtcattatccagctcaaaccacttatggtgtactagggattaaagtttggatttttaaaggtgaggaataa

SEQ ID NO: 71532 - protein, 218 aa, Spirogyra maxima
MGQKIHPLGFRLGVTQEHLSNWFARPSRYSDLLEEDEKIRNCIKEYVRTHIRNSSNYGGISRVKIQRKTDLVQVDIHTGFPALLIEGRGKGLLVLKQSVLNSISTERKLKITLSEIDKYYAEANILAEYIALQLESRVAFRRTMKKAIQLAMEQGKVKGIKIQIAGRLNGAEIARIEWAREGRVPLQTLRACIDYCHYPAQTTYGVLGIKVWIFKGEE

SEQ ID NO: 71533 - DNA, 657 bp, Spinacia oleracea
  CDS (1)..(657): transl_table=11
atgggacaaaaaataaatccacttggtttccgacttggtacaacacaaagtcattattccctttggttttcacaaccaaaaaactatgcagaaggtctacaagaagatcaaaaaataagggattgtataaaaaattatgtacaaaaaaatacaaaaacatcctcgggtgtcgaaggaattgcacgtattgaaattcaaaaaagaatcgatctgatacaggtgataatccatatgggattcccaaaattattaatagaaaatagaccacaaggggtcgaagacctaaaaataaatgtacaaaaagaattgaattgcgtgaaccgaaaactcaacatcgctattacaagaattgcaaaaccttacggggaccctaatattcttgcagaatttatagccggacaactaaagagtagggtatcatttcgaaaagcaatgaaaaaagctatcgaattaaccgaacaagctgatacaaaaggaattcaaatccaaattgccggccgtatcgatggaaaagaaattgcacgtatcgaatggataagagaaggtagggttcccctacaaacgattcgcgcaaaaatcgattattgtgcctataccgttcgaacaatctatggcgtattggggataaaaatttggatatttatgggcgaggaataa

SEQ ID NO: 71534 - protein, 218 aa, Spinacia oleracea
MGQKINPLGFRLGTTQSHYSLWFSQPKNYAEGLQEDQKIRDCIKNYVQKNTKTSSGVEGIARIEIQKRIDLIQVIIHMGFPKLLIENRPQGVEDLKINVQKELNCVNRKLNIAITRIAKPYGDPNILAEFIAGQLKSRVSFRKAMKKAIELTEQADTKGIQIQIAGRIDGKEIARIEWIREGRVPLQTIRAKIDYCAYTVRTIYGVLGIKIWIFMGEE

SEQ ID NO: 71535 - DNA, 660 bp, Staurastrum punctulatum
  CDS (1)..(660): transl_table=11
atgggacaaaaaattcatccacttggttttcgtcttggtgttactcaaagtcatttgtctaattggtgtgtccaacctagtcagtattcagaacttcttcaagaagatgaaaaattgcgtggttgtattaaagaatacgtacggaaatatgttcgtactgctgaaaattatggaggtattgatcgtattgaaattcaacgaaaaacgtctgcaattaaagttgaaatacatacaggttttcctaaattatttgtagagaagttaggtcctcgtcttaaagaaataagacgggaaatgcaaaatactctacaaaaatctaaacatcttaaatttataatatctttagccgaagtagaaaaaccttatgcaaaagcaactattttagcagaatatattgctgtacaagttgaacgacgagttgcttttagaaaaacaataaagaaagctattcaacttgccaaagaacaaggaaatgtaaaaggtattaaaatacaaattgctggaagattaaatggagctgaaattgcccgaagtgagtgggctcgagaaggtcgagttcctttacaaactttacgcgcacaaattgactattgtcattatccggcccatactatctatggggttcttggaattagagtttggatttttcaagaaaaataa

SEQ ID NO: 71536 - protein, 219 aa, Staurastrum punctulatum
MGQKIHPLGFRLGVTQSHLSNWCVQPSQYSELLQEDEKLRGCIKEYVRKYVRTAENYGGIDRIEIQRKTSAIKVEIHTGFPKLFVEKLGPRLKEIRREMQNTLQKSKHLKFIISLAEVEKPYAKATILAEYIAVQVERRVAFRKTIKKAIQLAKEQGNVKGIKIQIAGRLNGAEIARSEWAREGRVPLQTLRAQIDYCHYPAHTIYGVLGIRVWIFQEK

SEQ ID NO: 71537 - DNA, 657 bp, Vitis vinifera
  CDS (1)..(657): transl_table=11
atgggacaaaaaataaatccactgggtttcagacttggtacaacccaaggtcatcattcgctttggtttgcacaaccaaaaaattattccaagggtctacaagaagatcaaaaaatacgggattgtatcaagaattatgtacaaaaaaatataagaatatcctctggtgtcgagggaattgcacgtatagagattcaaaaaagaatcgatctgattcaggtcataatctatatgggattcccaaagttattagtagaaggtaaaccacgaagaattgaagaattacagatgaatgtacaaaaagaattgaattacgtgaaccgaaaactcaacattgctattacaagaattacaaaaccttacggacatcctaatattcttgcagaatttatagccggacaattaaggaatagagtttcgtttcgcaaggcaataaaaaaagctattgaattaactgaacaggcagatacaaaaggaattcaagtacaaattgcagggcgtatcgacggaaaagaaattgcacgtgttgaatggattagagaaggaagggttcccctacaaaccattcgagctaaaattgattattgttcctatagagttcgaactatatatggggtattaggcatcaaaatttggatatttgtagacgaggaataa

SEQ ID NO: 71538 - protein, 218 aa, Vitis vinifera
MGQKINPLGFRLGTTQGHHSLWFAQPKNYSKGLQEDQKIRDCIKNYVQKNIRISSGVEGIARIEIQKRIDLIQVIIYMGFPKLLVEGKPRRIEELQMNVQKELNYVNRKLNIAITRITKPYGHPNILAEFIAGQLRNRVSFRKAIKKAIELTEQADTKGIQVQIAGRIDGKEIARVEWIREGRVPLQTIRAKIDYCSYRVRTIYGVLGIKIWIFVDEE

SEQ ID NO: 71539 - DNA, 720 bp, Triticum aestivum
  CDS (1)..(720): transl_table=11
atgggacaaaaaataaatccactcggtttcagacttggtacaacccaaaaacaccattccttttggttcgcacaaccaaaaaattattcggaaggtctacaggaagataaaaaaataagggattgtatcaagaactatatacaaaagaataggaaaaagggctcgaatagaaaaatagaatcagactcaagttccgaagtaattacacataatagaaaaatggactcaggttcaagttccgaagtaattacacatatagaaatccaaaaagaaatcgatacgatccacgtcataatccatattggattcccaaatttattaaagaaaaaaggagcaatcgaagaattagagaaagatctacaaaaggaaattaactctgtaaaccagagatttaatatttctatcgaaaaagttaaagaaccttatagacagcctaacattcttgcagaatatatagctttccaattaaaaaatagagtttcattccgaaaggcaatgaaaaaagccattgaattaactaaaaaagcagatataaggggagtaaaagtaaaaattgcgggtcgtctcggaggaaaagaaattgcacgcgccgaatccattaaaaagggtagacttcccctccaaacaattcgcgctaaaattgattattgctgctatccaattcggactatctatggagtattaggtgtaaaaatttggatattcgtagacgaagaataa

SEQ ID NO: 71540 - protein, 239 aa, Triticum aestivum
MGQKINPLGFRLGTTQKHHSFWFAQPKNYSEGLQEDKKIRDCIKNYIQKNRKKGSNRKIESDSSSEVITHNRKMDSGSSSEVITHIEIQKEIDTIHVIIHIGFPNLLKKKGAIEELEKDLQKEINSVNQRFNISIEKVKEPYRQPNILAEYIAFQLKNRVSFRKAMKKAIELTKKADIRGVKVKIAGRLGGKEIARAESIKKGRLPLQTIRAKIDYCCYPIRTIYGVLGVKIWIFVDEE

SEQ ID NO: 71541 - DNA, 711 bp, Zygnema circumcarinatum
  CDS (1)..(711): transl_table=11
atgggacaaaaaattcatccacttggcttccgtcttggtgtaacccaaaatcatcattctacttggtttgcgcctcttaacaattattcagaattacttaaagaagacgagagaatacgtaattgtattcaacaatatgtgcgcaaatatgttcgcagttcttctcgttctgcagaaattgctcgcgttcaaattcaaaaaaagacagatcttgtagaagtacaaattcatacagcctctccatcactgctagtgcaaactcgcgttcctaatcgttctacaaatactcaggaaattggtattgaatatttaagacgtaatattcaaaacactttaaatccagggaatagaaagcttaatatgactttgtcccaagtagctaaaccttatggagaagcaattattttagcagaatatattgctttacagttagagagtagggtagcttttcggaagacaatgaaacaagctattaaattagctaacaagagtggaaatgccagaggaataaaaattcaaatagcgggacgtttaaatggagctgaaatagctcgtgtggaatgggctagagagggaagagtacctttacatactttaagagcacaaattgattattgccactatccagctcaaactatatatggtgttttaggaattaaagtatgggtttttcaaaataaatcactcatttccaataatcagcaaatgtaa

SEQ ID NO: 71542 - protein, 236 aa, Zygnema circumcarinatum
MGQKIHPLGFRLGVTQNHHSTWFAPLNNYSELLKEDERIRNCIQQYVRKYVRSSSRSAEIARVQIQKKTDLVEVQIHTASPSLLVQTRVPNRSTNTQEIGIEYLRRNIQNTLNPGNRKLNMTLSQVAKPYGEAIILAEYIALQLESRVAFRKTMKQAIKLANKSGNARGIKIQIAGRLNGAEIARVEWAREGRVPLHTLRAQIDYCHYPAQTIYGVLGIKVWVFQNKSLISNNQQM

SEQ ID NO: 71543 - DNA, 753 bp, Acinetobacter sp
  CDS (1)..(753): transl_table=11
atgggtcagaaggttcatccaatcggtatccgcctaggtgttgtgaaacgtcataacgctaactggtatgcgaatccgaaacaatacgctgaatacttgcttaaagatcttcaagttcgtgagtttttaactaaaaaacttaagagcgcgatggtgagcaatattcttatcgaacgtccaacaggcgctgctaaagttactattagcactgctcgtcctggtatcgtgatcggtaaaaaaggcgaagatattgaaaaattacagcgcgaacttaccaacatcatgggtgttcctgcgcaagtaagcatcaatgagatcgatcgtccagatttagacgcgcgtctagttgctgaagcaattgcttctcaattggaaaaacgtgtaatgttccgtcgtgcaatgaagcgtgcggtacaaaactcaatgcgtgctggtgcgaaaggtatcaaagttgaagtttctggccgtttaggtggtgcagagattgctcgtaccgaatggtatcgtgaaggtcgtgtacctttgcatacacttcgtgcagacatcgactatgcaactatgcgtgctgaaacaacttacggtacgattggtgttaaagtttggattttccgtggtgagatcttaggtggcatgaaacaagtcatgaaccctgcaccacaagaagaacgtccagctaaacgcggtcgtggtcgtggtgaaggtcaagagcgtcgtggtcgtcgttcagaccgtgctgctgacaagggagaataa

SEQ ID NO: 71544 - protein, 250 aa, Acinetobacter sp
MGQKVHPIGIRLGVVKRHNANWYANPKQYAEYLLKDLQVREFLTKKLKSAMVSNILIERPTGAAKVTISTARPGIVIGKKGEDIEKLQRELTNIMGVPAQVSINEIDRPDLDARLVAEAIASQLEKRVMFRRAMKRAVQNSMRAGAKGIKVEVSGRLGGAEIARTEWYREGRVPLHTLRADIDYATMRAETTYGTIGVKVWIFRGEILGGMKQVMNPAPQEERPAKRGRGRGEGQERRGRRSDRAADKGE

SEQ ID NO: 71545 - DNA, 672 bp, Acidobacteria bacterium
  CDS (1)..(672): transl_table=11
atgggacagaaagtccatccttacggattccgcctcggatataccaagccgtggaagtcgcgttggtttatcgagcgggactacgacaaactgctgctcgaagacgtcaagctgaaggccgagctgaaagagaagctcaagtcggcgggcgtgagctccattgaagtggagcgcccgggcaacaagctgcgcattatcattcgcaccgcgcgtccgggcatcatcatcggccgcaaaggcgcagagatcgataagctcaagggcgagctccagaagcggacgaaccgcgaggtgtacatcgacatccaggaagtgcacaagcctgagctcgatgcacagctggtggcggagtcgatcgcgttgcagctcgagaagcgcgtaggcttccggcgcgcgatgcgcaagtcggtggactcggcgctgcgtttcggttgcaaggggatcaaggtccgcgtgagtggccgcctgaacggcaatgaaatcgcccgttccgagtggtacctgcagggccggttgccgctgcacacgctgcgtgccgacatcgactacggattcgcggaagcgcggaccacgtacggtgtgatcggcgtcaaggcgtgggtctacaagggcgagattcttcccgcggccaagaagcgtgagccgcaggtggcgaccgccggcaatttctaa

SEQ ID NO: 71546 - protein, 223 aa, Acidobacteria bacterium
MGQKVHPYGFRLGYTKPWKSRWFIERDYDKLLLEDVKLKAELKEKLKSAGVSSIEVERPGNKLRIIIRTARPGIIIGRKGAEIDKLKGELQKRTNREVYIDIQEVHKPELDAQLVAESIALQLEKRVGFRRAMRKSVDSALRFGCKGIKVRVSGRLNGNEIARSEWYLQGRLPLHTLRADIDYGFAEARTTYGVIGVKAWVYKGEILPAAKKREPQVATAGNF

SEQ ID NO: 71547 - DNA, 867 bp, Acidovorax sp
  CDS (1)..(867): transl_table=11
atgggacagaaaatccatcctaccggctttcgcctttcggtcagccgcaactgggccagccgctggtatgccagcaaccgtgacttcgccggcatgctggccgaagacatcaaggtgcgcgagtacctgaaggccaagctgaagaacgccgccgtgtcgcgcatcctgatcgagcgtcctgccaagaacgcccgtatcacgatcttctcggcacgtcccggcgtggtgatcggcaagaagggcgaggacatcgagaacctgaagaaggaactcgcaacccgcctgggcgtgcctgtcgccgtgaacatcgaagaagtgcgcaagcccgaaatcgatgccaagctgatcgccgactcgatcacccagcagctggaaaagcgcatcatgttccgccgcgccatgaagcgcgccatgcagaacgcgatgcgcctgggcgcccagggcatcaagatcatgtcctcgggccgtctgaacggcatcgaaatcgcccgtaccgagtggtaccgcgaaggccgtgtgccgctgcacacactgcgcgccgacatcgactacggcacctccgaagccaagaccacctatggtgtgatcggcgtgaaggtgtgggtctacaagggcgacacgctgggccgcaacgatctgcccgccgccgagacgccgcgtcctgaagaagagcgccgtccccgtggcccgcgccgcgatggccgcccaggcgaccgcgccggtgctggccgtggcggccgccgcccgatgggcaccaatgcagcccctgccgacggtagcgacaagcctgccggcgctggtggcgattccgttaagcgcgtcaagagcgcgcccgctgccgcagcggcggacggtaaaggagaataa

SEQ ID NO: 71548 - protein, 288 aa, Acidovorax sp
MGQKIHPTGFRLSVSRNWASRWYASNRDFAGMLAEDIKVREYLKAKLKNAAVSRILIERPAKNARITIFSARPGVVIGKKGEDIENLKKELATRLGVPVAVNIEEVRKPEIDAKLIADSITQQLEKRIMFRRAMKRAMQNAMRLGAQGIKIMSSGRLNGIEIARTEWYREGRVPLHTLRADIDYGTSEAKTTYGVIGVKVWVYKGDTLGRNDLPAAETPRPEEERRPRGPRRDGRPGDRAGAGRGGRRPMGTNAAPADGSDKPAGAGGDSVKRVKSAPAAAAADGKGE

SEQ ID NO: 71549 - DNA, 708 bp, Actinobacillus actinomycetemcomitans
  CDS (1)..(708): transl_table=11
atgggtcaaaaagtacatccacatggtattcgcctgggtattgtaaaaccttggagctctacttggtttgcgaatacacaagacttcgccgataatcttgaaggcgatttcaaagtacgtcaattcttaaataaagaattagcgaatgcttcagtttcacgtattactattgaacgtcctgcaaagagcattcgtgtgactattcacacagcccgccctggtatcgtaattggtaagaaaggtgaagatgttgagaaattgcgtaacgcagtggcaaaaattgccggcgttcctgcacaaatcaatattgctgaagtgaaaaaacctgaattagatgcaaaattagttgcagatagcatcgcttcacaattagaacgtcgtgtaatgttccgtcgtgctatgaaaaaagcggtacaaaatgcaatgcgtttaggcgctaaaggtatcaaagttgaagttagtggtcgtttaggcggtgcagaaattgctcgttctgaatggtatcgtgaaggtcgtgtacctctacatacattgcgtgcggacatcgactataacactgctgaagctcatacaacatacggcgtaatcggcgttaaagtatggatcttcaaaggtgagattcttggtggaatggctgcgctagcgcaaccggaacaacaacctaccgacaagcctaaaaaggttccgcgcggtaaaggtcgtaagtaa

SEQ ID NO: 71550 - protein, 235 aa, Actinobacillus actinomycetemcomitans
MGQKVHPHGIRLGIVKPWSSTWFANTQDFADNLEGDFKVRQFLNKELANASVSRITIERPAKSIRVTIHTARPGIVIGKKGEDVEKLRNAVAKIAGVPAQINIAEVKKPELDAKLVADSIASQLERRVMFRRAMKKAVQNAMRLGAKGIKVEVSGRLGGAEIARSEWYREGRVPLHTLRADIDYNTAEAHTTYGVIGVKVWIFKGEILGGMAALAQPEQQPTDKPKKVPRGKGRK

SEQ ID NO: 71551 - DNA, 732 bp, Agrobacterium tumefaciens
  CDS (1)..(732): transl_table=11
atgggtcagaaaatcaatccaatcggcttccgcctcggcatcaaccgtacctgggatagccgctggtacgctgacaccgctgaatacggcaagcttctgcatgaagacctgaagatccgggcttacctgatcaaggaactcaagcaggctggcatcgccaaggtcgtcattgagcgtccgcacaagaagtgccgcgtcacgatccactcggctcgtccgggtctgatcatcggcaagaagggtgcagacatcgagaagcttcgcaagaagctttccgagatgaccaactccgaaacgcacctcaacatcgttgaagtgcgcaagccggaaatcgacgctactctggtagctcagtcgatcgcccagcagctcgagcgccgcgttgctttccgccgtgcgatgaagcgcgctgttcagtccgcaatgcgtcttggcgccgaaggcatcaagatcacctgcggcggtcgtcttggtggtgctgaaatcgctcgtaccgaatggtaccgcgaaggtcgcgttccgctgcacacgctgcgtgcggacatcgactacggcacggccgaagctgaaaccgcattcggcatctgcggcatcaaggtctggatcttcaagggcgaaatccttgagcacgatccgatggcttctgagcgtcgcggtctcgaaggcgacgcacagggccctgcaagccgtgagcgtggcgatcgtcccgatcgtcgtcgcgaaaacgcttga

SEQ ID NO: 71552 - protein, 243 aa, Agrobacterium tumefaciens
MGQKINPIGFRLGINRTWDSRWYADTAEYGKLLHEDLKIRAYLIKELKQAGIAKVVIERPHKKCRVTIHSARPGLIIGKKGADIEKLRKKLSEMTNSETHLNIVEVRKPEIDATLVAQSIAQQLERRVAFRRAMKRAVQSAMRLGAEGIKITCGGRLGGAEIARTEWYREGRVPLHTLRADIDYGTAEAETAFGICGIKVWIFKGEILEHDPMASERRGLEGDAQGPASRERGDRPDRRRENA

SEQ ID NO: 71553 - DNA, 681 bp, Alkalilimnicola ehrlichei
  CDS (1)..(681): transl_table=11
atggggcacaaagtacatcctacgggttttcgtctcggtgtcaccgaagactggcggtccatgtggtacgccggcagcagtaacttcggtgagtacctcaacaccgatctgcaggtgcgcaacttcattcgtaagaagctcgcgcacgcatcggtgagccggatccgcatcgagcggcccgcaaagaacgcgctggtgaccatccacaccgcccgtcccggcattgtcattgggaaaaagggcgaggatatcgatcggctgcggggcgaagtggcccggctgatgggtgtaccggtgcacatcaacattgaagagatccgcaagccggagctcgacgccaagctggtcgccgagagtgtggcccagcagctggagcggcgcatcatgttccgccgcgccatgaagcgggccgtgggcaacgccatgcggctcggcgcccagggcatcaaggtgcacgtctccggtcgtctcaacggcgccgagatcgcgcgcagcgagtggtaccgcgaggggcgcgtgccgctgcataccctgcgcgccaacatcgactacggggtcgccgaggcccacaccacctatggcgtgatcggcgtcaaggtctgggtcttcaagggcgagatcatcgacagcgacgcccagccggcggctggtggcgaaggcgcccgtcagggcaagggttga

SEQ ID NO: 71554 - protein, 226 aa, Alkalilimnicola ehrlichei
MGHKVHPTGFRLGVTEDWRSMWYAGSSNFGEYLNTDLQVRNFIRKKLAHASVSRIRIERPAKNALVTIHTARPGIVIGKKGEDIDRLRGEVARLMGVPVHINIEEIRKPELDAKLVAESVAQQLERRIMFRRAMKRAVGNAMRLGAQGIKVHVSGRLNGAEIARSEWYREGRVPLHTLRANIDYGVAEAHTTYGVIGVKVWVFKGEIIDSDAQPAAGGEGARQGKG

SEQ ID NO: 71555 - DNA, 756 bp, Anaeroplasma abactoclasticum
  CDS (1)..(756): transl_table=11
atgggtcaaaaagtaagtccaatgggattacgtgtaggaattaaccgtgaatgggatgctgcatggtatgcagaaaagactcaagtagcaaacttattattagaagacttaaagattcgtaagtatattaatgaagtttatgctaaggctgctatttcacgtgtaattatcgaacgtgttaagggtccaaacaataaggatcgtgtaaaaattacattacacacagcaaaacctggtgtagttattggtcatgaagctgaaacaaagaacaaagttgttaaagaattaggcttcatcactaagaagaatataattttaaatgttgttgaggttagaagacctgaattagacgcaacattagtagcaaagtcaatcgctgaacaattagaagcacgtgcttctttcagaagagttcaaaaggttgcaattcaaagagcattaaaggctggtgctaagggtgctaagacattaatttctggtcgtttaggcggcgctgaaatcgcacgtagcgaaggttataatgaaggtcaagtacctctacaaactttacgtgcagatgttgattacgctgtagcagaagcacatacaacttatggtaagcttggtattaaggtatggatttataagggtgaagtattcgatgttcaaccaagagcattccaagaagaaaagaagcctgcaaagaaattcaacaaaaagcctgtagcagctaagcctgctaataaggaagaaaaaagctctaaggaggtaaagtaa

SEQ ID NO: 71556 - protein, 251 aa, Anaeroplasma abactoclasticum
MGQKVSPMGLRVGINREWDAAWYAEKTQVANLLLEDLKIRKYINEVYAKAAISRVIIERVKGPNNKDRVKITLHTAKPGVVIGHEAETKNKVVKELGFITKKNIILNVVEVRRPELDATLVAKSIAEQLEARASFRRVQKVAIQRALKAGAKGAKTLISGRLGGAEIARSEGYNEGQVPLQTLRADVDYAVAEAHTTYGKLGIKVWIYKGEVFDVQPRAFQEEKKPAKKFNKKPVAAKPANKEEKSSKEVK

SEQ ID NO: 71557 - DNA, 636 bp, Anaplasma phagocytophilum
  CDS (1)..(636): transl_table=11
atggggcagaagtctaatcccattggattgagattaaagatagttgggacgtgggattcactatggtatgccaatagggattatgcgacgaaattgcatgaggatcttctgttgcggagcttcgtgaagaagacatttcatcatgctgcggtgagtaaggtggttatagccagaaaggtggatgccgtaattatcaatatacactctgctaggccgggggtcattattggtaagaagggtgttgatattgacagaataaagcagaagatcgctaagatggtgaatcatgaagtggagttgcatattgttgaggtcaagaaacctgatttgaaggctgtcctgatagcagagaatatagcgcagcagcttgagaagcgtgtttcgttcaggcgtgctatgaagaggggtgtgcaaaactgtctcaagatgggggctaagggtgtgaaagttagctgtgctggccgtttaggtggtgcggagatagctagaaccgagtggtataaagaaggtagtgttcctttgcacacatttagggccaatattgactacagctgtgttgaggcgaagaccatatatggcatagttggtgttaaagtatgggtttatgttggtgattcaagggctgtggtcgagtaa

SEQ ID NO: 71558 - protein, 211 aa, Anaplasma phagocytophilum
MGQKSNPIGLRLKIVGTWDSLWYANRDYATKLHEDLLLRSFVKKTFHHAAVSKVVIARKVDAVIINIHSARPGVIIGKKGVDIDRIKQKIAKMVNHEVELHIVEVKKPDLKAVLIAENIAQQLEKRVSFRRAMKRGVQNCLKMGAKGVKVSCAGRLGGAEIARTEWYKEGSVPLHTFRANIDYSCVEAKTIYGIVGVKVWVYVGDSRAVVE

SEQ ID NO: 71559 - DNA, 783 bp, Anabaena variabilis
  CDS (1)..(783): transl_table=11
gtgggacaaaaaattcatccagttggctttcgcctgggaattacccaagaacaccaatcgcgttggtttgccgaacctagccgctatccagaacttctacaagaagaccacaaactacgtcaatatatagaacaaaaactgggtagactcgcacaaaataacgcaggtatttccgaagtacggattgaacggaaagccgatcaaattgatctagaagtgcgtacagctcgcccaggcgtagttgtaggtcgtggtgggcaaggtattgaagcattgcgtactggactacaaacacttttgggtggtaatcgccaaattcgcatcaacgtagtagaagtacaacgagttgatgctgatgcttacctgattgccgaatttattgctcaacagttggaacgtcgtgtttccttccgtcgggtagtgcgtcaagcaattcaacgcgctcaaaaagctggcattcaaggcatcaaagttcaagttagcggtcgcctcaacggtgcagaaatcgcccggacagagtggacacgggaaggtagagtacctctacacaccttaagagctgatattgactactcttactgcacagccaaaaccgtttacggtattcttggcatcaaagtttgggtattcaaaggcgaaatcatccccggacaagaagtagcggcaccaccgccttcaacccgtgaccgcgaccgtgaccgtggcgatcgcgatcgtgaaccccgccgtcgtcaacaacaacgccgccgccagcagtttgaagaccgctccaacgaaggatag

SEQ ID NO: 71560 - protein, 260 aa, Anabaena variabilis
MGQKIHPVGFRLGITQEHQSRWFAEPSRYPELLQEDHKLRQYIEQKLGRLAQNNAGISEVRIERKADQIDLEVRTARPGVVVGRGGQGIEALRTGLQTLLGGNRQIRINVVEVQRVDADAYLIAEFIAQQLERRVSFRRVVRQAIQRAQKAGIQGIKVQVSGRLNGAEIARTEWTREGRVPLHTLRADIDYSYCTAKTVYGILGIKVWVFKGEIIPGQEVAAPPPSTRDRDRDRGDRDREPRRRQQQRRRQQFEDRSNEG

SEQ ID NO: 71561 - DNA, 696 bp, Aquifex pyrophilus
  CDS (1)..(696): transl_table=11
atgggtcagaaaacgcacccgataggcttcagactgggcgttattaaggactggccttcaaagtggtacccacccaaaaaggattacgcaaagctccttcacgaagacctgaagataaagaactacataaagaagaggtataaggttgcgggtgtatccaaggttgagatagagagaattgttgataaggtaaggataaagatacataccgcaaagcccgcaatagttatcggaagaagagggcaggaagttgacagacttaagaaaacgatagagagaatgcttcccggaaaggagataagcatctcagttcttgaggttaaggttcccgagcttgatgcccagctcgtagcggaggatatagccctccagatagagagaagggtatcccacagaagggctatgaaaagggccattgataacgcgcttaaggcgggacagaagggagtaaaggttcaggttaagggaaggataggaggagcggctagagcaaggaaggagtggttcctcgtgggaaggatgcccctccagactctcagggcggacatagattacggatttgcaaccgcttacacaaaatacggaattctcagcgtaaaggtttggatatacaagggagacgttctcaagggcggtaaagaggaaattctcaagaagatagaggaagaaataaagcaggctgcaaaggagggttaa

SEQ ID NO: 71562 - protein, 231 aa, Aquifex pyrophilus
MGQKTHPIGFRLGVIKDWPSKWYPPKKDYAKLLHEDLKIKNYIKKRYKVAGVSKVEIERIVDKVRIKIHTAKPAIVIGRRGQEVDRLKKTIERMLPGKEISISVLEVKVPELDAQLVAEDIALQIERRVSHRRAMKRAIDNALKAGQKGVKVQVKGRIGGAARARKEWFLVGRMPLQTLRADIDYGFATAYTKYGILSVKVWIYKGDVLKGGKEEILKKIEEEIKQAAKEG

SEQ ID NO: 71563 - DNA, 783 bp, Azoarcus sp
  CDS (1)..(783): transl_table=11
atgggtcagaaaatccatccgactggcttccgcctcgctgtcacgcgtgattggggttcgcgctggttcgcatccagccgcgacttctccaagatgttgcacgaggacctgaaggtccgcgattacctgaagaagcgtcttgctcacgcctccgtcggtcgcgtcgtgatcgagcgtccggcgaagaacgcccgcgtcacgctgttcagcgcgcgtcccggcgtcgtgatcggcaagaagggcgaagacatcgaggcgctcaagcgcgacctgcagaagatcgttggcgtgccggtgcacgtgaacatcgaagaggtccgcaagcccgagatcgatgccaagctgattgccgactcgatcgcgcaacagctcgaaaagcggatcatgttccgtcgtgcgatgaagcgcgcgatgcagaatgccatgcgcctgggcgcgcagggtatcaagatcatgagctccgggcgtctgaacggtgcggaaattgcccgtactgagtggtaccgcgagggtcgcgtgccgcttcatacgctgcgcgccaacatcgactacggtgtctcggaagcccagaccacctacggtgtgatcggcatcaaggtgtgggtattcaagggcgaaatgctgggtcgcaacgagcagccggtcgttgccgaacccgaagccgacaaccgtcgcggtcgtcgcggtgcgccgcgtaacgacgggggcgagggtcgtccgggtcgtcgtcccgctcgccgcggtgacggccagggtcggcaagaagatagcaggagtgaatga

SEQ ID NO: 71564 - protein, 260 aa, Azoarcus sp
MGQKIHPTGFRLAVTRDWGSRWFASSRDFSKMLHEDLKVRDYLKKRLAHASVGRVVIERPAKNARVTLFSARPGVVIGKKGEDIEALKRDLQKIVGVPVHVNIEEVRKPEIDAKLIADSIAQQLEKRIMFRRAMKRAMQNAMRLGAQGIKIMSSGRLNGAEIARTEWYREGRVPLHTLRANIDYGVSEAQTTYGVIGIKVWVFKGEMLGRNEQPVVAEPEADNRRGRRGAPRNDGGEGRPGRRPARRGDGQGRQEDSRSE

SEQ ID NO: 71565 - DNA, 837 bp, Azoarcus sp
  CDS (1)..(837): transl_table=11
atgggtcagaaaattcatccgaccgggttccgccttgcggtcactcgtgattggaattcccgttggttcgcatcgagcggtgattactcgagaatgttgcacgaggacctgaaagtccgcgattttctcaagaagcgtcttgctcacgcatcggtggggcgcgttgtcatcgaacgcccggcgaagaacgcacggatcacccttttcagcgcacgccctggtgtcgtgatcggcaagaagggcgaggacatcgaactgctcaagcgcgagcttcagaagatcatgggcgtgccggtgcacgtcaatatcgaagaagtgcgcaagccggaagtcgatgccaagctgatcgccgactcgatcgcccagcagctcgaaaagcggatcatgttccgccgcgccatgaagcgcgcaatgcagaatgcaatgcggctcggcgcacagggcatcaagatcatgagcgccggacgactgaacggcgccgaaatcgctcgcaccgagtggtaccgcgaaggccgcgttccgctgcatacgctgcgtgccgatatcgactatggcgtatccgaagcgaagaccacctacggcatcatcggtatcaaggtgtgggtgtacaagggtgagatgctcgggcgcaacgagcggcctgcggtcgtcgagaacgagaacgaggctcgtcgcggtcgccgcgcgcctcgcaatgatgccggtgacaaccgcggcgccaagcgccccgcacgtcgcacgggtgccgaacaagcgggagctggcgacaaggccggcacccggaccaggaaagcgggagtagacgatgctgcagccgtcgagaaggaagtatcgtaa

SEQ ID NO: 71566 - protein, 278 aa, Azoarcus sp
MGQKIHPTGFRLAVTRDWNSRWFASSGDYSRMLHEDLKVRDFLKKRLAHASVGRVVIERPAKNARITLFSARPGVVIGKKGEDIELLKRELQKIMGVPVHVNIEEVRKPEVDAKLIADSIAQQLEKRIMFRRAMKRAMQNAMRLGAQGIKIMSAGRLNGAEIARTEWYREGRVPLHTLRADIDYGVSEAKTTYGIIGIKVWVYKGEMLGRNERPAVVENENEARRGRRAPRNDAGDNRGAKRPARRTGAEQAGAGDKAGTRTRKAGVDDAAAVEKEVS

SEQ ID NO: 71567 - DNA, 735 bp, Bacteroides fragilis
  CDS (1)..(735): transl_table=11
atgggacaaaaagttaatccaataagcaaccgtttaggaattatcagaggatgggattctaactggtatggtggaaatgattacggtgactctttgctggaagatagcaagatccgtaaatatcttaatgcaagacttgcgaaagcaagtgtatcaagaatcgtaattgaacgtacgctgaagctcgttactattactgtttgcactgctcgtccgggtattattatcggtaaaggtggccaggaagttgataagttgaaggaagagttgaaaaaggttaccgacaaagatattcaaatcaatatctttgaagtgaaaagaccggaactggatgctgtgattgttgctaacaacatcgctcgtcaggtagaaggtaaaattgcctatcgccgtgccattaaaatggctatcgcaaatacaatgcgtatgggtgcggaaggtatcaaaattcagatttcaggacgtttgaatggagctgaaatggcccgttctgaaatgtataaggaaggaagaactccgttgcacactttcagagcagacatcgactattgccatgcagaagcattgacaaaagtgggtcttctcggtattaaagtttggatctgtagaggtgaagtttttggtaagagagaattagctcccaactttacacaaagcaaagagagtggtcgtggaaacaatggtggaaacaacggcggcggaaagaacttcaaaagaaagaaaaataatcgctaa

SEQ ID NO: 71568 - protein, 244 aa, Bacteroides fragilis
MGQKVNPISNRLGIIRGWDSNWYGGNDYGDSLLEDSKIRKYLNARLAKASVSRIVIERTLKLVTITVCTARPGIIIGKGGQEVDKLKEELKKVTDKDIQINIFEVKRPELDAVIVANNIARQVEGKIAYRRAIKMAIANTMRMGAEGIKIQISGRLNGAEMARSEMYKEGRTPLHTFRADIDYCHAEALTKVGLLGIKVWICRGEVFGKRELAPNFTQSKESGRGNNGGNNGGGKNFKRKKNNR

SEQ ID NO: 71569 - DNA, 663 bp, Bacillus clausii
  CDS (1)..(663): transl_table=11
atgggtcaaaaagtaaatccagtcggtctgcgcgtcggcgtcatccgtgattgggattctaaatggtatgccggcaagaaagactacgcagacttgcttcacgaagacatcgcgattcgcgagcatgtagaaggccgtctgaaagatgcctctgtctctaaagttgaaattgagcgtgctgcgaaccgtgtgaacattacaatttctactgccaagccaggtatggtgatcggaaaaggcggttcagaagttgaagcgcttcgtaaatctcttaatgagctaacaggaaaacgcgtgcacattaacatttcagaaatcaagcaagcagaccttgatgcaaagcttgttgctgaaaacattgctcgtcaacttgaaaaccgtatttcattccgtcgtgcaatgaaacaagcaattcaacgcactatgcgcgctggtgcaaaaggaattaaaacacaagtgtcaggccgccttggcggagcagacattgctcgtgcagagcactatagcgaaggaactgttccacttcacacgcttcgtgctgatattgactatggtacagctgaagctgatacaacatacggtaaaatcggcgtaaaaatctgggtttatcgtggtgaagtccttccaacgaaaggaacgaacaaagaggaaggaggcaactaa

SEQ ID NO: 71570 - protein, 220 aa, Bacillus clausii
MGQKVNPVGLRVGVIRDWDSKWYAGKKDYADLLHEDIAIREHVEGRLKDASVSKVEIERAANRVNITISTAKPGMVIGKGGSEVEALRKSLNELTGKRVHINISEIKQADLDAKLVAENIARQLENRISFRRAMKQAIQRTMRAGAKGIKTQVSGRLGGADIARAEHYSEGTVPLHTLRADIDYGTAEADTTYGKIGVKIWVYRGEVLPTKGTNKEEGGN

SEQ ID NO: 71571 - DNA, 666 bp, Bdellovibrio bacteriovorus
  CDS (1)..(666): transl_table=11
gtgggtcagaaggttaatccaattggtctaagagtcggtgttatcagaacttgggattctcgctggtatgcgaagggtcaacaatattatgaaaacctccacgaagacatccgtttgagaaagttccttaaggataaacttaagaacgcgggtgtagcgaaaattgaaatggaacgtgctgcgaagaagattaaaatcatcatctccacagctcgcccaggtgttgttattggtaaaaaaggtagtggtatcgacgctcttaaagcggaagttcagaaacttacacccaacgaagttttcctgagcatccaagaagtgcgcaaaccagacctcgatgctcagctcgttgctgagagcattgctcaacaacttgagaaacgtatctcttggagaagagctcttaaaaaatctattgcagctgcgatcaaaggcggcgtgagaggtatcaagatccgtgtttccgggcgtcttgatggtgcagagattgcgcgttcagagtggtacaatgagaagagcgttcctcttcatacattgcgtgctgatatcgactacggtacagcagaatccctgacagcatacggtatcatcggtctgaaagtttggatctataaaggcgatatcttatctgctcgcgaagttgaggaggcaggtcgtgttaagtcctaa

SEQ ID NO: 71572 - protein, 221 aa, Bdellovibrio bacteriovorus
MGQKVNPIGLRVGVIRTWDSRWYAKGQQYYENLHEDIRLRKFLKDKLKNAGVAKIEMERAAKKIKIIISTARPGVVIGKKGSGIDALKAEVQKLTPNEVFLSIQEVRKPDLDAQLVAESIAQQLEKRISWRRALKKSIAAAIKGGVRGIKIRVSGRLDGAEIARSEWYNEKSVPLHTLRADIDYGTAESLTAYGIIGLKVWIYKGDILSAREVEEAGRVKS

SEQ ID NO: 71573 - DNA, 708 bp, Blochmannia floridanus
  CDS (1)..(708): transl_table=11
atgggtcagaaagtacatccaaatgggatgcgtttagggattattaaatcttggcattctacttggtatgcaaataataaaaatttttctaataatttaaataatgattttgaggtacggaaatttttattaggacaattatcaaaagctttggtatctcgtataattattgaaagacctgcaaagagtattcgcgtgaccatttatacagctaggcctggtgtaattattggtagaaagggagaagatattgagaaattaagagagaaggtgtcaaaaatttctggtgttcctactaagttgaatatttctgaaattcgaaaaccggagttggaagcgaagttgttagctgataatatagcatctcaattagaacgtagagtgatatttagaagagcgataaagcgagtggttcaaagtgctatgcgtttaggagcgaaaggaattaaagttgaagttagcggaaggttaagtggagctgagattgcacgtactgaatggtatagggaaggacgagtgccattgcatacttttcgagcagatattgattatagtttatcagaagcccatacttcgtatggggtagtaggggttaaagtatgggtttttaaaggtgaaattttagataaagtgttatttcatatagataagtctaaagattcgttgataaatgatttttctaaaaaaaaaagaaaatctagagtataa

SEQ ID NO: 71574 - protein, 235 aa, Blochmannia floridanus
MGQKVHPNGMRLGIIKSWHSTWYANNKNFSNNLNNDFEVRKFLLGQLSKALVSRIIIERPAKSIRVTIYTARPGVIIGRKGEDIEKLREKVSKISGVPTKLNISEIRKPELEAKLLADNIASQLERRVIFRRAIKRVVQSAMRLGAKGIKVEVSGRLSGAEIARTEWYREGRVPLHTFRADIDYSLSEAHTSYGVVGVKVWVFKGEILDKVLFHIDKSKDSLINDFSKKKRKSRV

SEQ ID NO: 71575 - DNA, 792 bp, Bordetella bronchiseptica
  CDS (1)..(792): transl_table=11
atgggtcagaaaattcaccccactgggttccgtctcgcggtcacccgtaattggacctcgcgttggttcgccgacgacaaggctttcggcaccatgctggccgaagacatccgcgttcgcgagtacctgaagaagaagctgaagagcgcttccgtcggtcgcgtcatcatcgagcgtcccgccaagaacgcccgcatcaccgtttactcggcccgtccgggtgtggtgatcggcaagcgcggcgaggacatcgagaacctgaaggccgatctgcagcgtctgatgggcgtgcccgtgcacgtcaacatcgaggaaatccgcaagccggaaaccgacgcccagctgatcgccgactcgatctcgcagcagctcgaaaagcgcatcatgttccgccgcgcgatgaagcgcgccatgcagaacgccatgcgcctgggtgctcaaggcatcaagatcatgagctcgggccgtctgaacggcatcgaaatcgcgcgcaccgaatggtaccgcgaaggccgtgtaccgcttcacacgctgaaggcgaacatcgactacggcacctcggaagcccacaccacctatggtgtgattggcatcaaggtgtgggtctacaagggcgatatgctggccaatggcgagctgcctcccgaagccgccaccccgcgtgaagaagagcgtcgtccgcgccgcgccccacgtggcgatcgtccggacggtgcccgtaccggtcgtccgggtggtcgtggccgtggtccccgcaaggcggacgcggctccggcgcctgaaggagaataa

SEQ ID NO: 71576 - protein, 263 aa, Bordetella bronchiseptica
MGQKIHPTGFRLAVTRNWTSRWFADDKAFGTMLAEDIRVREYLKKKLKSASVGRVIIERPAKNARITVYSARPGVVIGKRGEDIENLKADLQRLMGVPVHVNIEEIRKPETDAQLIADSISQQLEKRIMFRRAMKRAMQNAMRLGAQGIKIMSSGRLNGIEIARTEWYREGRVPLHTLKANIDYGTSEAHTTYGVIGIKVWVYKGDMLANGELPPEAATPREEERRPRRAPRGDRPDGARTGRPGGRGRGPRKADAAPAPEGE

SEQ ID NO: 71577 - DNA, 726 bp, Bradyrhizobium japonicum
  CDS (1)..(726): transl_table=11
atgggtcaaaagatcaatccgatcggtctgcgtctcggcatcaaccggacctgggattcccgctggttcgccggcaagcaggaatacggcaagctgctgcacgaggacgtcaagatccgtgagatcctgcacaaggagctcaagcaggcggccgtcgcccgcatcgtgatcgagcgtccgcacaagaagtgccgcgtcaccatccactcggcccgtccgggcgtggtgatcggcaagaagggcgccgacatcgacaagctgcgtaagcgggtcgcggacatcacttcgtccgacgtcgtcatcaacatcgtcgagatccgcaagccggagctcgatgcgacgctggtggccgagtcgatcgcgcagcagctggagcgccgcgtggcgttccgccgtgccatgaagcgcgccgtgcagtcggcgatgcgtctcggcgcggaaggcatccgcatcaactgctcgggacgtctgggcggtgcggaaatcgcgcgcatggagtggtaccgcgaaggtcgcgtgccgctgcacacgctgcgcgccgacatcgactacggcgttgcgaccgcgttcacgaccttcggcacctgcggcgtcaaggtctggatcttcaagggcgagatcctcgagcacgatccgatggcccaggacaagagaatggccgaaggcgagaccggcggcggtggtgatcgtggtggccgtcagcgccgcgacaacgctgcggtctga

SEQ ID NO: 71578 - protein, 241 aa, Bradyrhizobium japonicum
MGQKINPIGLRLGINRTWDSRWFAGKQEYGKLLHEDVKIREILHKELKQAAVARIVIERPHKKCRVTIHSARPGVVIGKKGADIDKLRKRVADITSSDVVINIVEIRKPELDATLVAESIAQQLERRVAFRRAMKRAVQSAMRLGAEGIRINCSGRLGGAEIARMEWYREGRVPLHTLRADIDYGVATAFTTFGTCGVKVWIFKGEILEHDPMAQDKRMAEGETGGGGDRGGRQRRDNAAV

SEQ ID NO: 71579 - DNA, 711 bp, Bradyrhizobium sp
  CDS (1)..(711): transl_table=11
atgggtcaaaagatcaatccgatcggtctgcgtctcggcattaaccggacctgggattcgcgctggttcgccggcaaggccgagtacggcaagctgctgcatgaagacgtcaagatccgcgagatcctgcacaaggagctcaagcaggcggccgtcgcccgcatcgtgatcgagcgtccgcacaagaagtgccgcgtcaccatccactcggctcgtccgggcgtcgtgatcggcaagaagggcgcggacatcgacaagctgcgcaagcgcgtcgccgacatcacttcgtcggacgtcgtcatcaacatcgtcgagatccgcaagccggagctcgatgccacgctggtcgccgagtcgatcgcgcagcagctcgagcgccgtgttgcgttccgccgcgccatgaagcgcgccgtgcagtctgcgatgcgtctcggcgccgagggcatccgcatcaactgctcgggtcgtctgggcggcgccgaaatcgcccgcatggagtggtatcgtgagggccgggtgccgctgcacacgctgcgcgccgacatcgactacggtgtggctaccgcgttcacgaccttcggcacctgcggcgtgaaggtctggatcttcaagggcgagatcctcgagcacgatccgatggcacaggacaagcggatgaacgagggcggtggcgaaagcccgtcgccgcgttcgcgccgcgacgcggcctga

SEQ ID NO: 71580 - protein, 236 aa, Bradyrhizobium sp
MGQKINPIGLRLGINRTWDSRWFAGKAEYGKLLHEDVKIREILHKELKQAAVARIVIERPHKKCRVTIHSARPGVVIGKKGADIDKLRKRVADITSSDVVINIVEIRKPELDATLVAESIAQQLERRVAFRRAMKRAVQSAMRLGAEGIRINCSGRLGGAEIARMEWYREGRVPLHTLRADIDYGVATAFTTFGTCGVKVWIFKGEILEHDPMAQDKRMNEGGGESPSPRSRRDAA

SEQ ID NO: 71581 - DNA, 711 bp, Brucella melitensis
  CDS (1)..(711): transl_table=11
atgggtcagaagattaatccgatcggtcttcgtctcggcgtcaaccgcacctgggattcgcgttggtacgcgaataccggtgagtacggcaagctgctgcatgaagatgtcaagatccgcgagttcctcaccgaagaactcaagcaggctgcgatctccaagatcgtgattgagcgtccgcacaagaagtgccgcgtgacgatccattcggctcgccccggcatcatcatcggcaagaagggtgcagacatcgaaaagctccgcaagaagctttccgagatgaccaatgccgatacgtcgctcaacattgttgaagttcgcaagcccgaagtcgatgctacgctgatcgctcagtcgatcgctcagcagctcgaacgccgtgtggcattccgtcgcgccatgaagcgtgccgttcagtcggcaatgcgtcttggagccgaaggtatccgtatcaactgctcgggtcgtctgggtggtgcggaaatcgctcgcatggaatggtaccgtgaaggccgtgttccgcttcacacgctgcgcgccgatatcgattacggcacggcagaagcgaagaccgcttatggtatctgcggcgtgaaggtctgggtcttcaagggcgagatccttgaacacgatccgatggcttccgagcgtcgtgcggtcgagggtgacaatcagggttcctcgtcgaaccgccgccgcgaaaacgcttaa

SEQ ID NO: 71582 - protein, 236 aa, Brucella melitensis
MGQKINPIGLRLGVNRTWDSRWYANTGEYGKLLHEDVKIREFLTEELKQAAISKIVIERPHKKCRVTIHSARPGIIIGKKGADIEKLRKKLSEMTNADTSLNIVEVRKPEVDATLIAQSIAQQLERRVAFRRAMKRAVQSAMRLGAEGIRINCSGRLGGAEIARMEWYREGRVPLHTLRADIDYGTAEAKTAYGICGVKVWVFKGEILEHDPMASERRAVEGDNQGSSSNRRRENA

SEQ ID NO: 71583 - DNA, 702 bp, Buchnera aphidicola subsp
  CDS (1)..(702): transl_table=11
atgggtcagaaagtacatcctaatggtatgcgattgggtataataaaaaaatggaattctgtctggtttgctaacactaaagactttgcggatcatttagatagtgactataaagttcgtcagtttttaatgaaaacattagaaaaagcttcaatttccagaatcattatcgaaagaccagctaaaagtattcgagtgacgatttatactgctagaccaggtattgttattggaaaaaaaggtgaagatgttgaaaagttaagaatttctattgctaaaattactggagtgccggttcaaattaatatttctgaagtgcgtaaacctgaattagatgctaaacttgtttctgatagtattacctctcaacttgagagaagagtaatgtttcgtcgtgctatgaaacgatctgttcaaaacgcaatgagacaaggtgcaaaaggcattaaagttgaagttagtggacgtttaggaggagcagaaatagctcgtagagagtggtatagagaaggaagagttcctcttcatacattacgcgcaaatattgattatagcatttcagaagctcatacaacatatggggtgataggcgtaaaggtttggatttttaaaggtgaaatattaggtggaatggaaactgttgaaagattagataaaccttctgtccaaacaaaaaagcagtatcgtaaaaatagaaagtaa

SEQ ID NO: 71584 - protein, 233 aa, Buchnera aphidicola subsp
MGQKVHPNGMRLGIIKKWNSVWFANTKDFADHLDSDYKVRQFLMKTLEKASISRIIIERPAKSIRVTIYTARPGIVIGKKGEDVEKLRISIAKITGVPVQINISEVRKPELDAKLVSDSITSQLERRVMFRRAMKRSVQNAMRQGAKGIKVEVSGRLGGAEIARREWYREGRVPLHTLRANIDYSISEAHTTYGVIGVKVWIFKGEILGGMETVERLDKPSVQTKKQYRKNRK

SEQ ID NO: 71585 - DNA, 702 bp, Buchnera aphidicola subsp
  CDS (1)..(702): transl_table=11
atgggtcaaaaagtacatcctaatggtatgcgactgggtataataaaaaaatggaattctgtatggtttgccaatacaaaagactttgctgaccatctagatagtgattataaagttcgtcaatttttgatgaaaaaattagtaaaagcatcagtttctcgcattattattgaaaggccagctaaaagtattcgtgttactatttatactgctagaccaggtatcgtgataggaaaaaaaggagaagatgtagaaaaacttaggattaatattgcaaaaatcactggcgttccagctcaaatcaatatttctgaagtacgtaaaccagagttagatgctaaacttgtttcagaaagtattacttctcagttagaaagacgagttatgtttcgacgcgccatgaaaagatctgttcaaaatgccatgagacaaggtgcaaaaggtattaaagtagaagttagtggccgattaggaggtgctgaaattgctcgtagagaatggtatcgagaaggaagagtaccattgcatactcttcgtgcaaatattgattatagtatttcagaagcacatacaacatacggtgtaataggtgtaaaagtatggatttttaaaggagaaatactgggtggaatgtcaactattgaaaaattagaaaaatcttccattcaaataaaaaagcaacatcgcaaaaatcgtaagtag

SEQ ID NO: 71586 - protein, 233 aa, Buchnera aphidicola subsp
MGQKVHPNGMRLGIIKKWNSVWFANTKDFADHLDSDYKVRQFLMKKLVKASVSRIIIERPAKSIRVTIYTARPGIVIGKKGEDVEKLRINIAKITGVPAQINISEVRKPELDAKLVSESITSQLERRVMFRRAMKRSVQNAMRQGAKGIKVEVSGRLGGAEIARREWYREGRVPLHTLRANIDYSISEAHTTYGVIGVKVWIFKGEILGGMSTIEKLEKSSIQIKKQHRKNRK

SEQ ID NO: 71587 - DNA, 708 bp, Buchnera aphidicola subsp
  CDS (1)..(708): transl_table=11
atgggtcaaaaagtacatcctaatggtatgaggttagggataattaaacattggaattcggtgtggttttcaaatagtaaagattttgctaaaattttagatagtgattatcaagtgcgtttatttttaagaaaggagttatttaaagcgtctgtttctaggattgttatagagcgtccgtcaaaaagtattcgagtgacaatatatagtgcgcggcctggtatagtaataggaaaaaaaggggaagacgtagaaaaattgaggttgtctataacaaatattactggtgtacctacgcaaattaacattgctgaaattcgaaaaccagaattagatgcaaaattagtagctgataatatagtatcacaattagaacgaagaattatgtttcgtagagctatgaaaagagctgtacaaaatgctatgagacagggtgctaagggtattaaagtagaaataagtggtcgtttgggtggaacagaaattgcaagaagagaatggtatcgagaaggtcgtgttcctttacatacattgcgtgctgatattgaatacaatgtttctgaagcccatactacatatggtgttattggtgtaaaagtttggatatttaagggagaaattttaggcggtataggatctattccaaaaatagaaaaacaaaaacctatgtctcaattaaaaaagcatcaacgaagatataggaaataa

SEQ ID NO: 71588 - protein, 235 aa, Buchnera aphidicola subsp
MGQKVHPNGMRLGIIKHWNSVWFSNSKDFAKILDSDYQVRLFLRKELFKASVSRIVIERPSKSIRVTIYSARPGIVIGKKGEDVEKLRLSITNITGVPTQINIAEIRKPELDAKLVADNIVSQLERRIMFRRAMKRAVQNAMRQGAKGIKVEISGRLGGTEIARREWYREGRVPLHTLRADIEYNVSEAHTTYGVIGVKVWIFKGEILGGIGSIPKIEKQKPMSQLKKHQRRYRK

SEQ ID NO: 71589 - DNA, 801 bp, Burkholderia thailandensis
  CDS (1)..(801): transl_table=11
atgggacagaaaattcatccgactggcttccgcctggctgtcagccgcaattgggcttcgcgctggtacgcgaacaacaacaatttcgcggcgatgcttcaggaagacatcggtgttcgtgagtacctgaagaagaagctgaagaacgcttcggtcggccgcgtcatcattgagcgtccggcgaagaacgcgcgcatcacgattttcagctcgcgtccgggcgtcgtcatcggcaagaagggcgaggatatcgaactgctgaagacggaactgcaacgccgcatgggtgtgccggttcacgtcaacatcgaagagatccgcaagccggaaaccgatgcgcaactgatcgccgattcgatcacgcagcagctcgagcgccggatcatgttccgccgcgcgatgaagcgcgcgatgcagaacgcgatgcgtctgggtgcccagggcatcaagatcatgagcgccggtcgtctgaacggcatcgaaatcgcgcgtaccgagtggtaccgcgaaggccgcgtgcccctgcacacgctgcgcgccgacatcgattacgcgacttcggaagcgaagacgacgtacggcgtcatcggcgtcaaggtatgggtgtacaagggcgacacgcttggccgcaacgatgcgccggtggtcgaggaagtgaccgaagacaagcgtccgcgtcgcaatgcgcgtccgggcgaccgtcgtccgcgccgtgacggcgaaggcggcgctccgggcgctcgccgtggcggtccgcgccgcggcgccggcaagccggaagacggcaagactggagaataa

SEQ ID NO: 71590 - protein, 266 aa, Burkholderia thailandensis
MGQKIHPTGFRLAVSRNWASRWYANNNNFAAMLQEDIGVREYLKKKLKNASVGRVIIERPAKNARITIFSSRPGVVIGKKGEDIELLKTELQRRMGVPVHVNIEEIRKPETDAQLIADSITQQLERRIMFRRAMKRAMQNAMRLGAQGIKIMSAGRLNGIEIARTEWYREGRVPLHTLRADIDYATSEAKTTYGVIGVKVWVYKGDTLGRNDAPVVEEVTEDKRPRRNARPGDRRPRRDGEGGAPGARRGGPRRGAGKPEDGKTGE

SEQ ID NO: 71591 - DNA, 807 bp, Burkholderia xenovorans
  CDS (1)..(807): transl_table=11
atgggacagaaaattcatccgactggcttccgtttggccgtcagccgcaattgggcgtcgcgttggtacgcgaacaacaacaatttcgcggcgatgttgcaggaagacatcggtgttcgtgaatacctgaagaagaagctgaagaacgcttcggttggtcgtgtcgttatcgagcgtccggcgaaaaacgcgcgcatcacgatttatagttcgcgtccgggtgtggtcatcggtaagaagggcgaagatatcgagctgctgaagtcggaactgcaacgccgcatgggcgttccggtccacgtcaacatcgaagaaatccgcaagccggaaaccgacgcgcaactgatcgcggattcgatcacgcagcagctcgagcgccggatcatgttccgccgcgcaatgaaacgtgcgatgcaaaacgcaatgcgtctgggtgctcagggcatcaagatcatgagcgctggccgcctgaacggtatcgaaatcgcccgtacggaatggtatcgcgaaggtcgcgtgccgcttcatacgctgcgtgctgatatcgactacgcaacgtcggaagcaaagacgacgtacggcatcatcggcgtgaaggtgtgggtctacaagggcgacacgctcggccgcaacgacgcaccggtggttgaagaagtcgccgaagaaaagcgtccgcgccgcaacgcacgtccgggtggcgatcgtcgtccgcgtcgcgatggtgaaggtggtggcccggcaggtgctcgccgtggcgctcctcgtcgtgctggcggtgccggcgacggcgggaagactggagaataa

SEQ ID NO: 71592 - protein, 268 aa, Burkholderia xenovorans
MGQKIHPTGFRLAVSRNWASRWYANNNNFAAMLQEDIGVREYLKKKLKNASVGRVVIERPAKNARITIYSSRPGVVIGKKGEDIELLKSELQRRMGVPVHVNIEEIRKPETDAQLIADSITQQLERRIMFRRAMKRAMQNAMRLGAQGIKIMSAGRLNGIEIARTEWYREGRVPLHTLRADIDYATSEAKTTYGIIGVKVWVYKGDTLGRNDAPVVEEVAEEKRPRRNARPGGDRRPRRDGEGGGPAGARRGAPRRAGGAGDGGKTGE

SEQ ID NO: 71593 - DNA, 702 bp, Campylobacter jejuni
  CDS (1)..(702): transl_table=11
atgggacaaaaagttaatccaattggtctaagactaggaatcaatagaaactgggaatcaagatggtttccaactaaagcaaatttagtagaaaatatcggtgaagattacaaaatcagagctttcttaaaaagaaaactttattacgcaggaattagccaaattttagtagaaagaactgctaaaaaacttcgcgttactgtagttgctgcaagaccaggtatcatcatcggtaaaaaaggtagtgatgttgataatttaagaaaagaattgcaagatttaatcggtaaagatgtaaatatcaatatcaaagaagaaagaaaagcaggagcttcagctcaacttgctgctgaaagtgttgcaactcaacttgaaaaaagaattgcttttagaagagcaatgaaaaaagtaatccaaggtgcgcaaaaagcaggtgctaaaggaattaaagtttcagtttccggtcgtttaggcggtgctgaaatggcaagaacagaatggtatcttgaaggacgcgttccacttcatactttaagagcaaaaatcgattatggttttgcagaagctagaactacttatggaaacataggagttaaagtatggatctttaaaggtgaagtattgcacaaaggtatgcaacctgaaaaaactgaagaaagtgctccagctaaaaagccaagacgcacaagaaggggtaaataa

SEQ ID NO: 71594 - protein, 233 aa, Campylobacter jejuni
MGQKVNPIGLRLGINRNWESRWFPTKANLVENIGEDYKIRAFLKRKLYYAGISQILVERTAKKLRVTVVAARPGIIIGKKGSDVDNLRKELQDLIGKDVNINIKEERKAGASAQLAAESVATQLEKRIAFRRAMKKVIQGAQKAGAKGIKVSVSGRLGGAEMARTEWYLEGRVPLHTLRAKIDYGFAEARTTYGNIGVKVWIFKGEVLHKGMQPEKTEESAPAKKPRRTRRGK

SEQ ID NO: 71595 - DNA, 753 bp, Caulobacter crescentus
  CDS (1)..(753): transl_table=11
atgggtcagaaagtcaatccggtcgggctgcggctcggcatcaaccgcacctgggacagccgttggttcgccgacggcaaccagtacggcaagctgctgcaccaagacctcgcggtccgcgccgctctgaagaagcgcctgtaccaagctggtgtctcgcgcatcatcatcgagcgtccgcacaagaagtgccgcgtgacgatctatgccgcccgtccgggcgtcatcatcggcaagaagggcgctgacatcgacaagctccgcaaggacctgtcgatcatgaccgagggcgaagtccacctgaacatcgtcgagatccgcaagccggaaaccgacgctcagctggtcgccgagtccatcgctcagcagctggagcgccgtatcgcgttccgtcgcgccatgaagcgctcgatccagtcggccgtgcgcctcggcgccaagggcatccggatcaacgtttcgggccgtctgggcggcgctgaaatcgctcgcatggagtggtatcgcgaaggtcgcgtgccgctgcacaccctgcgcgccgacatcgacttcggtttcgccgaagccaagaccacctacggcatcatcggcgtgaagacctggatcttcaagggcgaggtgctcgagcatgatccgatggcgctcgacaagcgtctggctaccgagtccggccccgccggcgaaggtggcggacgtgagcgtggtgatcgtcccgaccggggcgaccgtcgtgaccgtcgcgatcgcgcctaa

SEQ ID NO: 71596 - protein, 250 aa, Caulobacter crescentus
MGQKVNPVGLRLGINRTWDSRWFADGNQYGKLLHQDLAVRAALKKRLYQAGVSRIIIERPHKKCRVTIYAARPGVIIGKKGADIDKLRKDLSIMTEGEVHLNIVEIRKPETDAQLVAESIAQQLERRIAFRRAMKRSIQSAVRLGAKGIRINVSGRLGGAEIARMEWYREGRVPLHTLRADIDFGFAEAKTTYGIIGVKTWIFKGEVLEHDPMALDKRLATESGPAGEGGGRERGDRPDRGDRRDRRDRA

SEQ ID NO: 71597 - DNA, 672 bp, Chlamydophila caviae
  CDS (1)..(672): transl_table=11
atgggtcagaaaggatgtccaatcggttttcgtacagctgttactaaaaaatggcgttccctgtggtacggaaacaaacaagagtttggtaaatttcttatcgaagatgtgaaaattcgagaacatttaagaaaaaaaccttcttgtcaaggggctgcgggctttattgtaagacgtatgagcggtaaaattgaagttacaattcaaacagctcgcccaggactagttatcgggaaaaaaggggcagaggtagatcttttaaaagaagagctaagaaagcttactggtaaagaagtttgggtagaaatcgcagaaattaaacgccctgaattgaatgcaaaactagttgcagacaatatcgccagacaaatcgagcgtcgagtttcctttagacgcgctatgaaaaaggctatgcagtccgttatggatgccggcgctattggtgttaagatacaggtttctggaagattggcaggcgctgagattgcccgttctgaatggtataaaaatggccgcgttcctctgcatacattgagagctgatattgattacgccacagcatctgcagagactacttacggaattatcggtgtaaaagtttggattaatcttggtgaaaaaacctctacagctaatgctaatactggcgctacggcaccagctgcacaatag

SEQ ID NO: 71598 - protein, 223 aa, Chlamydophila caviae
MGQKGCPIGFRTAVTKKWRSLWYGNKQEFGKFLIEDVKIREHLRKKPSCQGAAGFIVRRMSGKIEVTIQTARPGLVIGKKGAEVDLLKEELRKLTGKEVWVEIAEIKRPELNAKLVADNIARQIERRVSFRRAMKKAMQSVMDAGAIGVKIQVSGRLAGAEIARSEWYKNGRVPLHTLRADIDYATASAETTYGIIGVKVWINLGEKTSTANANTGATAPAAQ

SEQ ID NO: 71599 - DNA, 762 bp, Chlorobium tepidum
  CDS (1)..(762): transl_table=11
ttgggtcagaaagtaaatccaactggattcagactgggaatcatcaaagactggacttcccgctggtacgatgacggaccggttatcgccgaaaagatcaagcaggatcaggttatccgcaactacgtccatgcaaggctgaagaaagagaaagccggcatagctaagattgttatcgagcgcacgaccaagcatatcaagatcaatatctatgcggctcgtccgggcgctatcgttggccacaagggtgaggagatcaataacctttcccaggagctgactcgcatcaccggcaaagaggtcaagatcgatgtcatcgaagtgatcaagccggaaatcgaagcgcagctcatcggcgagaatatcgcttatcagcttgaaaatcgcgtctccttccgccgtgccatgaagatggcgatccagcaggcgatgcgtgccggcgctgaaggcgtcaggattcgctgtgcaggccgtctcggcggtgctgaaattgctcgtgccgagcaatacaaagaaggaaagattccgcttcacacgctccgcgccaacgtcgattacgcaagcgtgaccgctcacaccatcgccggtgctatcggcatcaaggtctgggtgtacaagggcgaggttctcgtgcagaggctcgacgccattgaagaggaagagatgaagaaaatgcaggaacgccgtggtgattcccgtggcaggggtcgtggcgatgggcgcggagcaaaacgccgccgccgtcccgccaagaaggcctga

SEQ ID NO: 71600 - protein, 253 aa, Chlorobium tepidum
MGQKVNPTGFRLGIIKDWTSRWYDDGPVIAEKIKQDQVIRNYVHARLKKEKAGIAKIVIERTTKHIKINIYAARPGAIVGHKGEEINNLSQELTRITGKEVKIDVIEVIKPEIEAQLIGENIAYQLENRVSFRRAMKMAIQQAMRAGAEGVRIRCAGRLGGAEIARAEQYKEGKIPLHTLRANVDYASVTAHTIAGAIGIKVWVYKGEVLVQRLDAIEEEEMKKMQERRGDSRGRGRGDGRGAKRRRRPAKKA

SEQ ID NO: 71601 - DNA, 702 bp, Chromobacterium violaceum
  CDS (1)..(702): transl_table=11
atgggtcagaagattcatccgacgggattccgtcttgccgttaacaaaaactggtcttccaagtggttcgcgtcctcgcagaacttcccggaaatgctgaagcaggatatcgaagttcgcgaattcctgaagaagcgtctgggtcacgcttcggttggccgcgtaaccatcgagcgtccggccaagtccgcccgcatcaccattcacagcgcccgtccgggcgtcgtgatcggcaagaagggcgaagacattgaagttctgaagcaagaactgcaaaagcgcctgggtgtgccggttcacgtgaacatcgaagaagttcgcaagccggaactggacgcgcaaatcatcgccgacggcatcgcttcccagctggagaagcgcgtgatgttccgtcgcgccatgaagcgcgccatgcagaacgccatgcgtctgggtgccgaaggcatcaagatcatgtcgtccggccgtctgaacggcatcgacatcgctcgcagcgaatggtaccgcgaaggccgcgtgccgctgcataccctgcgcgccgatgtggattacgctacctctgaagccaagaccacctacggtatcatcggcatcaaggtatgggtgtacaagggcgagctgaagccgggccaggttcaggcgactccggctgctcccgagaagaaaatgagaaagggtgcccgcaatgctgcagccaactag

SEQ ID NO: 71602 - protein, 233 aa, Chromobacterium violaceum
MGQKIHPTGFRLAVNKNWSSKWFASSQNFPEMLKQDIEVREFLKKRLGHASVGRVTIERPAKSARITIHSARPGVVIGKKGEDIEVLKQELQKRLGVPVHVNIEEVRKPELDAQIIADGIASQLEKRVMFRRAMKRAMQNAMRLGAEGIKIMSSGRLNGIDIARSEWYREGRVPLHTLRADVDYATSEAKTTYGIIGIKVWVYKGELKPGQVQATPAAPEKKMRKGARNAAAN

SEQ ID NO: 71603 - DNA, 669 bp, Clostridium acetobutylicum
  CDS (1)..(669): transl_table=11
ttgggtcagaaagttaatccgcacggtttaagagtcggcgttattaaagagtggaacgcaaaatggtatgcaaatagtaaaaacttttcgtcatatctagtacaggataacaagataagaaaatttgttaaaaataaactttcaagtgctggagtttctagaattgaaatagaaagagcagcaaaaagagttaagcttaatatacacactgctaaacctggaatggttataggtaaaggtggtcaaggaatagaagctttaaagaaagatttagttaattttgttgacaaagaaaatgttcttatcaacatagtagaagttaaaaatagtgatgcaaatgcacagcttatggctgaaaatatagcacaacaacttgaaagaagaatatctttcagaagagctatgaaacaaacaatacagcgagctatgagaacaggagctaaaggagtcaaaactgcttgtgctggaagacttgctggagctgaaatagcaagaactgaacagtatcatgaaggtacaattccacttcaaacattaagagctgatattgattatggatttgcagaagccgatactacttatggaaaaataggagtaaaagtatgggtttataatggtgaaattcttcccactaaaaaaattgaaaaaaaggaagaagctaacgcataa

SEQ ID NO: 71604 - protein, 222 aa, Clostridium acetobutylicum
MGQKVNPHGLRVGVIKEWNAKWYANSKNFSSYLVQDNKIRKFVKNKLSSAGVSRIEIERAAKRVKLNIHTAKPGMVIGKGGQGIEALKKDLVNFVDKENVLINIVEVKNSDANAQLMAENIAQQLERRISFRRAMKQTIQRAMRTGAKGVKTACAGRLAGAEIARTEQYHEGTIPLQTLRADIDYGFAEADTTYGKIGVKVWVYNGEILPTKKIEKKEEANA

SEQ ID NO: 71605 - DNA, 696 bp, Colwellia psychrerythraea
  CDS (1)..(696): transl_table=11
atgggtcaaaaagttaatcctaccggtattcgcttaggtatcacgaaacctttcgcgtctacttggtttgcaagcaacaaagattttgctagcaacttagacggcgatcataaggttcgcgaatttttaaaagaaaagcttaagcgtgcatcactttctaaagtggtaatcgaacgtccagctaaatctatccgcgtaacaattcacacggctcgtccaggtgttgttatcggtaagaaaggcgaagatgttgagaaactacgtttagccgtttctaaaattgctggtgttcctgctcaaatcaacatcgctgaagtacgtaagccagaaatggatgcgcagcttgttgcagacagcattgctagtcaattagaacgtcgtgttatgttccgtcgcgctatgaagcgtgcagttcaaaacgcaatgcgtttaggcgctaaaggcatcaaagtacaagttagtggtcgtttaggcggcgctgatatcgcacgtgcagaatggtatcgtgagggtcgtgtacctttacatactttacgtgctgatattgactacgcaattgcgcgtggtaacactacttacggtgttattggtatcaaagtttggattttcaaaggtgaaatcattggtaacatgcctctacaggcagaagtaccagcggctaaacctaaaagaaaaaccaaccgcaagcctaagtag

SEQ ID NO: 71606 - protein, 231 aa, Colwellia psychrerythraea
MGQKVNPTGIRLGITKPFASTWFASNKDFASNLDGDHKVREFLKEKLKRASLSKVVIERPAKSIRVTIHTARPGVVIGKKGEDVEKLRLAVSKIAGVPAQINIAEVRKPEMDAQLVADSIASQLERRVMFRRAMKRAVQNAMRLGAKGIKVQVSGRLGGADIARAEWYREGRVPLHTLRADIDYAIARGNTTYGVIGIKVWIFKGEIIGNMPLQAEVPAAKPKRKTNRKPK

SEQ ID NO: 71607 - DNA, 684 bp, Coxiella burnetii
  CDS (1)..(684): transl_table=11
atgggtcaaaaggtcaatccagtaggcatgcgcattggtatcactagagattggacatccaattggtacgccgataaaaaagattttgctgatcgtttaaacgaagatctcaatgtacgtcaattgctgcaaaaacgattaaaaggcgcggcggtaagccggattcagatcgagcgaccggcgcggaatgcaaaaattatcattcattctgctcgtcctggtgtcatcattgggaaaaaaggcggcgagattgaagctttacgtgacgagattttcaaagtgatgaaggtgcctgtgcacatcaccatcgaagaagtcagaaagccagaattagacgctaaattagtcgctgaaaacatagctcaacaattagaacgtcgggtcatgttccgccgtgcaatgaagcgcgctgtacagaacacgctccgtcaaggtgcattaggtgtcaagattagtgtgagtggtcgactgggcggcgctgaaattgcgcgaaccgaatggtaccgtgaaggacgggtgcctttgcacacgttccgtgccgacatcgattacgccacggcgagcgctaaaacgacctacggtattattggcgtgaaggtatggatttttaaaggcgaggtgcatgcaccaaaaccacaggctgaagaagccgctccacaagagactgaagaagaagtgaagtag

SEQ ID NO: 71608 - protein, 227 aa, Coxiella burnetii
MGQKVNPVGMRIGITRDWTSNWYADKKDFADRLNEDLNVRQLLQKRLKGAAVSRIQIERPARNAKIIIHSARPGVIIGKKGGEIEALRDEIFKVMKVPVHITIEEVRKPELDAKLVAENIAQQLERRVMFRRAMKRAVQNTLRQGALGVKISVSGRLGGAEIARTEWYREGRVPLHTFRADIDYATASAKTTYGIIGVKVWIFKGEVHAPKPQAEEAAPQETEEEVK

SEQ ID NO: 71609 - DNA, 786 bp, Dechloromonas aromatica
  CDS (1)..(786): transl_table=11
atgggacagaaaattcatccgactggcttccgcctggcagtcaccaaaaactggagttcgcgctggtacgctaacagcaaagacttccctggcatgttgaacgaagacatcaaggttcgtgaatatctgaagcgcaagctcgcgcacgcttcagttggtcgtgtcctgatcgaacgtccggcaaagaatgcccgcgtcaccgtttactccgcccgtccgggtgtcgttatcggtaagaagggcgaagatatcgagcaactgcgtacggaccttcagcgcatcatgggcgttcccgtccatgtgtcgatcgaagaaatccgcaagccggaaatcgatgcgcagttgatcgctgattcgattgcgcaacaactcgaaaagcgcatcatgttccgtcgtgccatgaagcgcgcgatgcagaacgccatgcgtcttggtgctcaaggtatcaaggtgatgagcgctggtcgtctgaacggtgcagaaattgcccgtagcgagtggtatcgcgaaggtcgtgtgccgttgcacaccctgcgcgccgacatcgactatgcaacctctgaagcgctgaccacttacggcattatcggtatcaaggtctgggtttacaagggcgacatgcttgatcgtaatgagcaaccggtggcagaagaaccggctgccgatgaccgtcgtccgcgtcgtaccccgggcaggcccgatggtgacaagccgcgtacccgtaccgtcaagaaagttgacggtgcagctgatccggccaagcgcgtaagaaaggcaggtgcttaa

SEQ ID NO: 71610 - protein, 261 aa, Dechloromonas aromatica
MGQKIHPTGFRLAVTKNWSSRWYANSKDFPGMLNEDIKVREYLKRKLAHASVGRVLIERPAKNARVTVYSARPGVVIGKKGEDIEQLRTDLQRIMGVPVHVSIEEIRKPEIDAQLIADSIAQQLEKRIMFRRAMKRAMQNAMRLGAQGIKVMSAGRLNGAEIARSEWYREGRVPLHTLRADIDYATSEALTTYGIIGIKVWVYKGDMLDRNEQPVAEEPAADDRRPRRTPGRPDGDKPRTRTVKKVDGAADPAKRVRKAGA

SEQ ID NO: 71611 - DNA, 750 bp, Deinococcus radiodurans
  CDS (1)..(750): transl_table=11
atgggtaacaagatcaaccccaacggcttccgcctcggcgtgacgaagggctggaacagccgctggtacgccggcaagaagcagtacgccagcctgctcaaggaagacgagcagatccgtcagctgatcaacaagaagctggccgccgctggcatcgcccgcatcgaaatcgaacgcgccggccagcaggtcaacgtgatcatctccgccgccaagcccggcgtggtgatcggtaagggcggcgagagcatcaaggaactgcgcggtgacatcgagcgtctggtgtctgccggtacggtggccgtgaacgtcgccgagatccccaaccccaatatcagtgccccgctggtcgccctgcgcatcgccgagcagatcgagcgccgcttcgcgttccgccgcgccatgaagcaggccgcgcagcgcgtgatggagtcgggcgcccgcggcgtcaaggtgatcctcagcggtcgcctcggcggcgccgagcaggcccgcaccgagaaggtgctcgaaggccgcgtgcccctgcacaccctgcgcgccgacatcgactacggcaccgcgctggcccggactacctacggcatcctgggcatcaaggtgctggtgttcaacggtgaagtgatcggcggcaagaccgaaacctttgcccgtcctcagcgccgtgaccgcgacgagcgccgtcctgaaggtggcgaccgcccggcccgccgccgtccgaccgcgcgccgccgcaccggaggtgaatga

SEQ ID NO: 71612 - protein, 249 aa, Deinococcus radiodurans
MGNKINPNGFRLGVTKGWNSRWYAGKKQYASLLKEDEQIRQLINKKLAAAGIARIEIERAGQQVNVIISAAKPGVVIGKGGESIKELRGDIERLVSAGTVAVNVAEIPNPNISAPLVALRIAEQIERRFAFRRAMKQAAQRVMESGARGVKVILSGRLGGAEQARTEKVLEGRVPLHTLRADIDYGTALARTTYGILGIKVLVFNGEVIGGKTETFARPQRRDRDERRPEGGDRPARRRPTARRRTGGE

SEQ ID NO: 71613 - DNA, 639 bp, Desulfovibrio vulgaris
  CDS (1)..(639): transl_table=11
atgggtcagaaagtacatccgttcgggttccggctggggtacaacaagaactggcagtcccgctggtacagcaagaaagagtaccctgccttcgtgtttgaagaccacaacatccgcaagttcgtgaagaagaccctctaccatgcgggtcttgcgaagatcgagatcgaacgtgccggcggtaaggtgcgcctcattctgagcaccgcccgtcccggtatcgtcatcggtcgcaagggtgtggaaatcgagaagctccgtgccgacctgcgcaagaagttcaagcgcgagttcgccatcgaagtgaacgagatccgccgccctgaagtcgaatcgcagcttgtggctgagaacatcgctcttcagcttgagcgtcgcgtcgccttccgtcgtgccatgaagcgcacggtgagcatggctcgcaagttcggtgctgaaggcatcaaggtcacctgctccggtcgacttgccggtgctgaaatcgcgcgtaccgaatggtaccgtgacggccgcgtgccgctgcagaccctgcgcgctgacatcgacttcggctttgccgaggcccgtaccacgtacggtgtgatcggcgtcaaggtctggatattcaagggtgaactccttgacaacgaggtagcgtag

SEQ ID NO: 71614 - protein, 212 aa, Desulfovibrio vulgaris
MGQKVHPFGFRLGYNKNWQSRWYSKKEYPAFVFEDHNIRKFVKKTLYHAGLAKIEIERAGGKVRLILSTARPGIVIGRKGVEIEKLRADLRKKFKREFAIEVNEIRRPEVESQLVAENIALQLERRVAFRRAMKRTVSMARKFGAEGIKVTCSGRLAGAEIARTEWYRDGRVPLQTLRADIDFGFAEARTTYGVIGVKVWIFKGELLDNEVA

SEQ ID NO: 71615 - DNA, 636 bp, Ehrlichia chaffeensis
  CDS (1)..(636): transl_table=11
atgggtcagaagtctaatcctattggattaaggttaaagataatcaatacatgggattctttgtggtatgcaaataaggattatactacaaagttacatgaggattttttattgcgtaagtttataaagaaagctttctatcatgcttcaattagtaaggttgttatagctagaaaagtagatgtaattatggttaatgtatattctgctaagcctggtgtgatcataggtaagaaaggtgctgatattgataaagtaaaacagcagattgttaaaatgataaataataatattgaattgaatataatagaggtgaaaaaacctgaattaaaggcagttttaatagcagaaaatatagcacagcaattagaaaagaggatatcttttagacgtgcaatgaaaagaagtgtccaaagctgtttaaaaataggtgcaaaaggaataaaagttagctgtgctggtagattaggtggggctgaaattgctaggactgaatggtataaagaaggaagtgttccattgcatactttcagagctaatatagattatggtttttctgaagcaaaaacaatttatggaataataggtgttaaggtttgggtctaccttggtgatacgaagtcaagtaatgaataa

SEQ ID NO: 71616 - protein, 211 aa, Ehrlichia chaffeensis
MGQKSNPIGLRLKIINTWDSLWYANKDYTTKLHEDFLLRKFIKKAFYHASISKVVIARKVDVIMVNVYSAKPGVIIGKKGADIDKVKQQIVKMINNNIELNIIEVKKPELKAVLIAENIAQQLEKRISFRRAMKRSVQSCLKIGAKGIKVSCAGRLGGAEIARTEWYKEGSVPLHTFRANIDYGFSEAKTIYGIIGVKVWVYLGDTKSSNE

SEQ ID NO: 71617 - DNA, 702 bp, Erwinia carotovora subsp
  CDS (1)..(702): transl_table=11
atgggtcagaaagtacatcctaatggtattcgcctgggtattgtcaaaccttggaactctacctggtatgcgaataccaaagaattcgctgacaacctagacagcgattttaaagttcgtaaatacctgacgaaggaactggagaaggcttccgtttcccgtatcgttatcgaacgtcctgcaaaaagcatccgtgtgactattcacactgctcgtccaggcatcgtgatcggtaaaaaaggtgaagatgttgagaaactgcgcaaagtcgtagcggatatcgctggcgtacctgcacagatcaatatcgcagaagttcgtaaacctgaactggacgcaaaactggttgctgacagcatcacttcgcagctggaacgtcgtgtgatgttccgtcgtgctatgaagcgtgcggtacagaatgccatgcgtctaggcgctaaaggtattaaagttgaagtaagcggtcgtcttggcggcgctgaaatcgcgcgtaccgaatggtaccgtgaaggtcgtgttccgttgcatacactgcgtgcggatatcgactacaacacctccgaagcgcacaccacttatggtgttatcggtgtgaaagtgtggatcttcaaaggtgagattctgggtggtatggctgcagttgaacaaccggaaaaaccgtctgctcaacctaaaaagcagcagcgtaaaggccgcaagtaa

SEQ ID NO: 71618 - protein, 233 aa, Erwinia carotovora subsp
MGQKVHPNGIRLGIVKPWNSTWYANTKEFADNLDSDFKVRKYLTKELEKASVSRIVIERPAKSIRVTIHTARPGIVIGKKGEDVEKLRKVVADIAGVPAQINIAEVRKPELDAKLVADSITSQLERRVMFRRAMKRAVQNAMRLGAKGIKVEVSGRLGGAEIARTEWYREGRVPLHTLRADIDYNTSEAHTTYGVIGVKVWIFKGEILGGMAAVEQPEKPSAQPKKQQRKGRK

SEQ ID NO: 71619 - DNA, 660 bp, Fusobacterium nucleatum subsp
  CDS (1)..(660): transl_table=11
gtgggacaaaaagtagaccctagaggactaagacttgggattacaagagcttgggattctaattggtatgcagataaaaaagagtatgtaaaatacttccatgaagatgtgcaaataaaagaatttataaagaaaaactacttccatacagggatttcgaaggtaagaattgaaagaacatctccttcacaagtagttgtacatatacatactggaaaagcaggattaataattggaagaaaaggtgctgaaatagatgcactaagagcaaaacttgaaaaattaacaggtaaaaaagtaactgttaaagtacaagaaataaaagacttaaatggagatgcagtattagttgcagaatcaatagctgctcaaattgaaaagagaattgcttacaaaaaagctatgactcaagctatttcaagatcaatgaaatctccagaagttaaaggaataaaagtaatgatttcaggaagattaaatggtgctgaaattgctagatctgaatgggcagttgaaggaaaagttcctttacatacattaagagcagatatagattatgcagtagcaacagctcatacaacttatggagcattaggaataaaagtatggatattccatggtgaagttcttcctagtaagaaagaaggaggggaagcttaa

SEQ ID NO: 71620 - protein, 219 aa, Fusobacterium nucleatum subsp
MGQKVDPRGLRLGITRAWDSNWYADKKEYVKYFHEDVQIKEFIKKNYFHTGISKVRIERTSPSQVVVHIHTGKAGLIIGRKGAEIDALRAKLEKLTGKKVTVKVQEIKDLNGDAVLVAESIAAQIEKRIAYKKAMTQAISRSMKSPEVKGIKVMISGRLNGAEIARSEWAVEGKVPLHTLRADIDYAVATAHTTYGALGIKVWIFHGEVLPSKKEGGEA

SEQ ID NO: 71621 - DNA, 657 bp, Geobacillus kaustophilus
  CDS (1)..(657): transl_table=11
gtgggtcaaaaggtcaacccgatcggtctgcgcatcggcatcattcgtgactgggaatcgagatggtatgcggaaaaagactatgcagatctgttgcacgaagacttgaaaatccgtgaatacattagcaaacgcctgcaagacgcggccgtctcccgcgtggagattgaacgggcagccaaccgggtcaacgtaacgatccataccgccaaaccgggcatggtcatcgggaaaggcggttcggaagtggaagcgctccgtaaagcgctcgcgcaattgaccggtaaacgcgtccatatcaacattgtagaaatcaaaaaaccagacttggatgcacgtcttgttgctgaaaatatcgctcgtcagcttgaaaaccgcgtatcgttccgccgggcgcaaaaacaagcgatccaacgtgcgatgcgcgctggggcgaaagggatcaaaacgatggtatccggccgtttgggcggggctgacatcgctcgttcggagcattacagcgaagggacggttccactccatacgctgcgcgctgacattgactatggaacggcagaagccgatacgacgtacggaaaaatcggcgtgaaagtatggatttatcgtggagaagtccttccgaccaagaaaaaagctgaggaaggaggaaaataa

SEQ ID NO: 71622 - protein, 218 aa, Geobacillus kaustophilus
MGQKVNPIGLRIGIIRDWESRWYAEKDYADLLHEDLKIREYISKRLQDAAVSRVEIERAANRVNVTIHTAKPGMVIGKGGSEVEALRKALAQLTGKRVHINIVEIKKPDLDARLVAENIARQLENRVSFRRAQKQAIQRAMRAGAKGIKTMVSGRLGGADIARSEHYSEGTVPLHTLRADIDYGTAEADTTYGKIGVKVWIYRGEVLPTKKKAEEGGK

SEQ ID NO: 71623 - DNA, 636 bp, Geobacter sulfurreducens
  CDS (1)..(636): transl_table=11
ttgggtcagaaagtaaatcctgttggattcaggcttggtgttatacggacgtgggattcgcggtggtacgcggaggccgattactcgaagcttctgcacgaggatctcaagcttcgtaattttcttaaaaagcgtctctacaattcaggcgtttccaagatagagattgagcgggccgcgaataaggccaagatcaacatctataccgcccggcccggccttatcatcggtaagaagggcgctgaggtggaaaccctgaagaaagagcttgccaagctcactgacaaagagatctacctcaatattcaggaagtcaggaagcctgagctcgatgcgcagctcgtggcggagaacgttgcccttcagctcgaacgtcgtgtcgcatttcgccgcgcgatgaagaagagtgttacgtcctccctcaagttcggcgccaaaggtatcaggataacctgctcgggacgtcttggcggtgctgagatgtcgcggaccgaatggtaccgtgaaggcagggtgccgcttcatacgctgagagctgatattgactacggctttgcggaagcgaagacgacctacggtattattggtgtcaaggtcctcatctttaagggcgaagttctccccggtcaaaaatag

SEQ ID NO: 71624 - protein, 211 aa, Geobacter sulfurreducens
MGQKVNPVGFRLGVIRTWDSRWYAEADYSKLLHEDLKLRNFLKKRLYNSGVSKIEIERAANKAKINIYTARPGLIIGKKGAEVETLKKELAKLTDKEIYLNIQEVRKPELDAQLVAENVALQLERRVAFRRAMKKSVTSSLKFGAKGIRITCSGRLGGAEMSRTEWYREGRVPLHTLRADIDYGFAEAKTTYGIIGVKVLIFKGEVLPGQK

SEQ ID NO: 71625 - DNA, 744 bp, Gloeobacter violaceus
  CDS (1)..(744): transl_table=11
atgggacagaaagtacatccgatcggcctgcgtctgggcattatccgtgaccaccgctcgcgctggttcgccaaggcgggcgagtaccccgcactgttggccgaagaccacaaaattcgcgcctatatcgtcaagaaactggcgagcggcggcatcgccgatgtcgacatcgagcgcaaggccgatcaggtggagatcaccatccgcaccgcccggccgggcgtggtggtcggccgcggcggcgcgggcatcgacgaactgaaggccaatctcgaaaagctgatcggccgccgccagatccgcatcaatgtcgtcgaggtccagcgcgtcgacgccgaggcggccctgatcgccgagtacatcgtcggccaactggagcggcgcgtcgccttcaggcgcgcggtgcgccaggccatccagcgcgcccagcgcgccggggtgcagggcatcaaggtgatggtggcaggccgcctcaacggggccgaaattgcccgctcggagtggacgcgcgagggacgcattccgctgcataccctcagagccgacatcgattacgcctacaaaattgcccagacgacctacggcacgctgggggtcaaagtctggattttccgcggcgagattttgcctggcgccggcggcccggcggcggctcccgaggaggtggcggcccagcccaagcctgatcagcgtccccgccgccgcaaaaagatccagtacgaagaacgcaccgacgagcagtag

SEQ ID NO: 71626 - protein, 247 aa, Gloeobacter violaceus
MGQKVHPIGLRLGIIRDHRSRWFAKAGEYPALLAEDHKIRAYIVKKLASGGIADVDIERKADQVEITIRTARPGVVVGRGGAGIDELKANLEKLIGRRQIRINVVEVQRVDAEAALIAEYIVGQLERRVAFRRAVRQAIQRAQRAGVQGIKVMVAGRLNGAEIARSEWTREGRIPLHTLRADIDYAYKIAQTTYGTLGVKVWIFRGEILPGAGGPAAAPEEVAAQPKPDQRPRRRKKIQYEERTDEQ

SEQ ID NO: 71627 - DNA, 678 bp, Gluconobacter oxydans
  CDS (1)..(678): transl_table=11
atgggacacaaggtcaatccgatcgggcttcggctcggcgtcaaccgtacctgggacagccgctggtacgccggtcaagactacgcacgtctgctgcatgaagacctgaagcttcgtgcattcctgcgtcgcaagctgtccggcgcaggcgtgtcccgcgttgttatcgagcgtccggccaagaagccccgcgtgacgatctacgccgcccgtccgggcgtcgtgatcggcaagaagggccaggacatcgacgcgctccgcaaggaactgagccgtatggcgaagaccgacgtggcgctgaacatcgtcgagatccgcaagccggaaatcgatgcgaccctcgttgccgagaacattgctcagcagctggaacgtcgtgttgctttccgtcgtgccatgaagcgcgcaattcagtccgcaatgcgtcttggtgcccagggcatccggatcacctgcggtggtcgtctgggtggtgctgaaatcgctcgtgccgaaaagtatcgtgagggacgtgttcccctgcatacgcttcgcgccgacatcgattacggtacggcaaccgccaagacaacgtatggcacctgcggtgtgaaggtatggatcttcaagggtgagatcctggctcatgacccgctggcacaggatcgtcgtgctgcggagcaggctccccagcgctaa

SEQ ID NO: 71628 - protein, 225 aa, Gluconobacter oxydans
MGHKVNPIGLRLGVNRTWDSRWYAGQDYARLLHEDLKLRAFLRRKLSGAGVSRVVIERPAKKPRVTIYAARPGVVIGKKGQDIDALRKELSRMAKTDVALNIVEIRKPEIDATLVAENIAQQLERRVAFRRAMKRAIQSAMRLGAQGIRITCGGRLGGAEIARAEKYREGRVPLHTLRADIDYGTATAKTTYGTCGVKVWIFKGEILAHDPLAQDRRAAEQAPQR

SEQ ID NO: 71629 - DNA, 705 bp, Haemophilus ducreyi
  CDS (1)..(705): transl_table=11
atgggtcagaaagtacatcctaatggtattcgccttggtattgttaaaccttggaactctacttggttcgcgaatacacaagatttcgccgataatttagatggcgatttcaaagtacgtaaatttttaaataaagagttagcgaatgcttcagtgtcgcgtatcattattgaacgtcctgcaaaaagtattcgtgtcactattcacacagcgcgcccaggtatcgttattggtaaaaaaggcgaagatgttgaaaaactacgtaacgcagtatcacaaattgctggcgttcctgcgcaaatcaacattgctgaagtgaaaaaaccagaattagatgctaaattagtagctgatagtattgcttctcaacttgaacgtcgtgtaatgttccgccgtgcaatgaaacgtgctgtacaaaatgcaatgcgtttaggtgctaaaggcattaaagttgaagttagtggtcgtttaggtggtgcagaaattgctcgctcagagtggtatcgtgaaggtcgagtaccattgcatacgcttagagcagatatcgattataatactgcagaagctcatacaacttatggcgtaataggcgtaaaagtttggatcttcaaaggtgaaattctcggtggtatggctgcagtgattgagtcagaacaacaaccagcggcacagcctaaaaagcaagctcgcaaaggtcgtaaataa

SEQ ID NO: 71630 - protein, 234 aa, Haemophilus ducreyi
MGQKVHPNGIRLGIVKPWNSTWFANTQDFADNLDGDFKVRKFLNKELANASVSRIIIERPAKSIRVTIHTARPGIVIGKKGEDVEKLRNAVSQIAGVPAQINIAEVKKPELDAKLVADSIASQLERRVMFRRAMKRAVQNAMRLGAKGIKVEVSGRLGGAEIARSEWYREGRVPLHTLRADIDYNTAEAHTTYGVIGVKVWIFKGEILGGMAAVIESEQQPAAQPKKQARKGRK

SEQ ID NO: 71631 - DNA, 708 bp, Haemophilus influenzae
  CDS (1)..(708): transl_table=11
atgggtcaaaaagtacatccacatggtattcgcctaggtattgttaaaccttggagctctacttggttcgcgaatacacaagacttcgctgacaatcttgaaggcgatttcaaagtacgcaaattcttaaataaagaattagcaagtgcttcagtttcacgtattactattgagcgtccagctaaaagtattcgtgtaactattcacacagctcgtcctggtatcgtaatcggtaaaaaaggcgaagatgttgaaaaattacgtaacgcagtgtctaaaatcgctggcgttcctgctcaaatcaacattgctgaagtgaaaaaacctgaattagatgcgaaattagttgcagatagcatcgcttctcaattagaacgtcgtgtaatgttccgtcgtgcaatgaaacgtgcggtacaaagtgctatgcgtttaggtgctaaaggtatcaaagttgaggttagcggtcgtttaggtggtgcagaaatcgcacgttcagaatggtatcgtgaaggtcgcgtacctctacatactcttcgtgcggacatcgattataacactgcagaagctcacacaacttacggcgtaatcggcgttaaagtgtggatcttcaaaggtgaaattcttggtggaatggctgccgttgcgcaatcagaacaacaacctgccgacaagcctaaaaaggctcctcgcggtaaaggtcgtaagtaa

SEQ ID NO: 71632 - protein, 235 aa, Haemophilus influenzae
MGQKVHPHGIRLGIVKPWSSTWFANTQDFADNLEGDFKVRKFLNKELASASVSRITIERPAKSIRVTIHTARPGIVIGKKGEDVEKLRNAVSKIAGVPAQINIAEVKKPELDAKLVADSIASQLERRVMFRRAMKRAVQSAMRLGAKGIKVEVSGRLGGAEIARSEWYREGRVPLHTLRADIDYNTAEAHTTYGVIGVKVWIFKGEILGGMAAVAQSEQQPADKPKKAPRGKGRK

SEQ ID NO: 71633 - DNA, 708 bp, Haemophilus somnus
  CDS (1)..(708): transl_table=11
atgggtcaaaaagtacatccacatggtattcgcctaggtattgttaagccttggaactctacttggtttgcgaatacacaagatttcgctgataatttagacggtgatttcaaagtacgtcaattcttgaataaagaattagcgaatgcttcagtttcacgcattactattgagcgtccggcgaaaagcatccgtgtaacaattcacacagctcgtccaggtatcgtaattggtaaaaaaggcgaagatgttgaaaaattacgtaacgcagtagctgctattgcaggcgttccggctcaaatcaacattgctgaagtgaaaaaacctgaattagatgcaaaattagttgcaggtagcattgcttcacaacttgaacgtcgagtaatgttccgtcgtgctatgaaaaaagcagtacaaaacgcaatgcgtttaggtgctaaaggcatcaaagttgaagtaagtggtcgtctaggtggcgcagaaattgcacgttctgaatggtatcgcgaaggtcgtgtaccactacatacattacgtgcggacatcgattataacacctcagaagctcatactacatacggcgtaattggcgttaaagtatggatcttcaaaggtgaaattcttggtggaatggctgcaattgcacaacaaccggaacaacaaccagccacgcctaaaaaggctccacgtggtaaaggtcgtaagtaa

SEQ ID NO: 71634 - protein, 235 aa, Haemophilus somnus
MGQKVHPHGIRLGIVKPWNSTWFANTQDFADNLDGDFKVRQFLNKELANASVSRITIERPAKSIRVTIHTARPGIVIGKKGEDVEKLRNAVAAIAGVPAQINIAEVKKPELDAKLVAGSIASQLERRVMFRRAMKKAVQNAMRLGAKGIKVEVSGRLGGAEIARSEWYREGRVPLHTLRADIDYNTSEAHTTYGVIGVKVWIFKGEILGGMAAIAQQPEQQPATPKKAPRGKGRK

SEQ ID NO: 71635 - DNA, 711 bp, Helicobacter hepaticus
  CDS (1)..(711): transl_table=11
atgggtcaaaaagttaatccaataggtttaaggttaggtattaatcgtaattggtcttctcggtggttttctgtgtcgcaaacaacaccttcaaatatattagaagaccataagattcgtaagtttttgaaacgtgaaatgtattatgcgggtgtaagcgaatttattattgaacgtgcagcaaataagattcgtgtaaccgttgtagcttcgcgtccgggattgattattggcaaaaaaggtgtggatattgataagcataaagaagcattgaaaaagattcttcataaggaagtgtttattaatattaaagaggcaaaacgtccacaagcaaatgcgcaacttgcggcagaaaatattgcaacacagcttgaaaagcgtgtagcttttagacgcgctatgaaaaaggttatgcaggctgcaatgaaagcgggagcgaaaggtattaaagtaaaggtatcaggacgtttagcaggagcagaaatggcaagaacagaatggtatatggaaggtcgcgtgcccttacatactttgcgtgcaaaaattgattatggttttgcagaggcgatgacaacttatggaatcattggcgtaaaagtatggatttttaaaggcgaggtgcttcataaaggcattttgccagagaaaaaagaagagagcaagagcggcgataaagaagtgcgttctaaatcacgaagagggaggcaataa

SEQ ID NO: 71636 - protein, 236 aa, Helicobacter hepaticus
MGQKVNPIGLRLGINRNWSSRWFSVSQTTPSNILEDHKIRKFLKREMYYAGVSEFIIERAANKIRVTVVASRPGLIIGKKGVDIDKHKEALKKILHKEVFINIKEAKRPQANAQLAAENIATQLEKRVAFRRAMKKVMQAAMKAGAKGIKVKVSGRLAGAEMARTEWYMEGRVPLHTLRAKIDYGFAEAMTTYGIIGVKVWIFKGEVLHKGILPEKKEESKSGDKEVRSKSRRGRQ

SEQ ID NO: 71637 - DNA, 705 bp, Helicobacter pylori J99
  CDS (1)..(705): transl_table=11
atgggacaaaaagttaatccggtaggtttgagattaggtattaataggaattggacttccagatggttccctagcactcgcaccgctccaagcaatattgatgaggacaataagattaggaaattccttaaaaaagagctttattatgccggcgtgagcgagattgtgattgaaagagcggctaaaaaactgcgcgttacggtcgtagcggctcgcccagggcttatcattggtaaaaaaggcgtggatattgagaaggtcaaagaaggcttaaaaacgctcatcaaaaaagaagtctccattaatatcaaagaagtcaaacgcccccaagctgacgcccaattagccgcagaaaatgtagccacccaattagaaaaaagggtcgctttccgccgcgcgatgaaaaaggtcatgcaagcggcgttaaaatccggtgctaaagggattaaggtgcgcgtttctggccgtttagcaggggctgaaatcgctcgcaccgaatggtatatggaagggcgcgtgcctttacacactttaagggctaagattgattatggctttgctgaagcgatgacagtatatggtattattggcgtgaaagtgtggattttcaaaggggaagttttacaaaaaggtatccaatttgagaaaaaagaagaggctaaagaagaaagagagcctagaagaagcagaagagggaggcaataa

SEQ ID NO: 71638 - protein, 234 aa, Helicobacter pylori J99
MGQKVNPVGLRLGINRNWTSRWFPSTRTAPSNIDEDNKIRKFLKKELYYAGVSEIVIERAAKKLRVTVVAARPGLIIGKKGVDIEKVKEGLKTLIKKEVSINIKEVKRPQADAQLAAENVATQLEKRVAFRRAMKKVMQAALKSGAKGIKVRVSGRLAGAEIARTEWYMEGRVPLHTLRAKIDYGFAEAMTVYGIIGVKVWIFKGEVLQKGIQFEKKEEAKEEREPRRSRRGRQ

SEQ ID NO: 71639 - DNA, 681 bp, Idiomarina loihiensis
  CDS (1)..(681): transl_table=11
atgggtcagaaagtacatcctaatggtattcgcctaggtatctccagaccatggaatgcaacctggtatgcgaatacaaatgagttcgctgataacctgcacagtgattttcaggtacgtaagttcctgaacaaagaactgcgcaatgcatcagtctctcgtatcgttatcgatcgtccagctaagagcgttcgtgtgactattcacacagcacgtcctggcgtggttatcggtaagaaaggcgaagacgtagaaaagctgcgtaagcaagtttctaagttgacaggtgctcctgcgcaaatcaacatctcagaagttcgtaagcctgagttggattcgcagctggtagctgacaatattgctggtcagttggaacgtcgtgtcatgttccgtcgtgctatgaaacgtgccgtacaaaacgccattcgcttgggtgccaaaggtatcaaagttgaagtgagtggtcgtttaggcggcgcagagattgcacgtactgagtggtatcgtgaaggccgtgtaccgctgcacacattacgtgcagacatcgactactcgacctcagaagcgaacaccacttacggtatcatcggtgttaaggtctggattttccgtggtgaagttcttggtggacttccaactgaagaaaagccagctcctaagcgcggcaagaaccgtaagtaa

SEQ ID NO: 71640 - protein, 226 aa, Idiomarina loihiensis
MGQKVHPNGIRLGISRPWNATWYANTNEFADNLHSDFQVRKFLNKELRNASVSRIVIDRPAKSVRVTIHTARPGVVIGKKGEDVEKLRKQVSKLTGAPAQINISEVRKPELDSQLVADNIAGQLERRVMFRRAMKRAVQNAIRLGAKGIKVEVSGRLGGAEIARTEWYREGRVPLHTLRADIDYSTSEANTTYGIIGVKVWIFRGEVLGGLPTEEKPAPKRGKNRK

SEQ ID NO: 71641 - DNA, 675 bp, Lactobacillus acidophilus
  CDS (1)..(675): transl_table=11
atgggtcaaaagattaacccaaacggttttcgtctcggtgtcatccgtgactgggaatcaaaatggtatgctgacaaaggatacaaggaaactttaaaagaagaccttcaaattagaaaatttatctcagaaaaattgaaggatgcttcagtatctactgttgaaattgaacgtgcagccaacagaattaatatctcaattcatactgctaagccaggtatggtaattggtaaaggtggttctgaagttgaagctttaagaaaacaattaaatgctttaactggtaagcaagttcacattaatattgttgaaattaagaagccagatcttgatgctgaattggtagcagatagtattgctcgtcaacttgaagctcgtattgctttcagacgtgctatgcgtcaagctactcaaagagctatgctcgctggtgccaagggtattaaggttcaaacttcaggtcgtttgaacggtgccgacatggcaagaagagaatggcacactgaaggacgtgttccattacaaactttgagagctgatattgattatgcttgggtaaatgctttcactacttatggtgaaattggtgttcaagtttggatcaaccgtggtgaaatcttacctactcgtaagaacaagccagcttcaaagccagcgaagggaggaaatagataa

SEQ ID NO: 71642 - protein, 224 aa, Lactobacillus acidophilus
MGQKINPNGFRLGVIRDWESKWYADKGYKETLKEDLQIRKFISEKLKDASVSTVEIERAANRINISIHTAKPGMVIGKGGSEVEALRKQLNALTGKQVHINIVEIKKPDLDAELVADSIARQLEARIAFRRAMRQATQRAMLAGAKGIKVQTSGRLNGADMARREWHTEGRVPLQTLRADIDYAWVNAFTTYGEIGVQVWINRGEILPTRKNKPASKPAKGGNR

SEQ ID NO: 71643 - DNA, 654 bp, Lactococcus lactis subsp
  CDS (1)..(654): transl_table=11
gtgggtcaaaaagtacatccaataggaatgcgtgttggcgttattcgcgattgggatgccaaatggtatgctgaaaaagaatattcggattaccttcacgaagacttggcaattcgtcaacttatccaaactaaacttgctgatgcttcagtatcattgattgaaactgaacgtgcaattaacaaagttatcgtaactttgcacactgctaaaccaggtatggttatcggtaaatcaggagctaacgttgatgcactccgtgcagaactcaacaaacttactggtaaacaagttcacatcaacatcgttgaaatcaaaaaacctgatttggacgctcatcttgttggtgaaggaattgctaaacaacttgaagcacgtattgctttccgtcgtgctcaaaaacaagcaatccaacgtgcaatgcgcgctggtgcaaaagggatcaaaactcaagtttctggtcgtttgaatggtgctgatattgcccgtgctgaaggatattcagaaggtacagttccactccacacactccgtgcggacatcgactacgcttgggaagaagcagacacaacttatggtaaactcggcgttaaagtttggatctaccgtggtgaagttctccctactaaaaaatctgtgaaaggagaaaaataa

SEQ ID NO: 71644 - protein, 217 aa, Lactococcus lactis subsp
MGQKVHPIGMRVGVIRDWDAKWYAEKEYSDYLHEDLAIRQLIQTKLADASVSLIETERAINKVIVTLHTAKPGMVIGKSGANVDALRAELNKLTGKQVHINIVEIKKPDLDAHLVGEGIAKQLEARIAFRRAQKQAIQRAMRAGAKGIKTQVSGRLNGADIARAEGYSEGTVPLHTLRADIDYAWEEADTTYGKLGVKVWIYRGEVLPTKKSVKGEK

SEQ ID NO: 71645 - DNA, 654 bp, Lactobacillus plantarum
  CDS (1)..(654): transl_table=11
gtgggtcaaaaagtaaatccaaccggattacgtgtaggaatcattcgcgactgggaagcaaaatggtacgctgaaaaagattttgctgcctacttgaacgaagatttacgcatccgtaagtatatcgaacaacgacttgccgacgcttccgtctccaccgttgaaatcgaacgcgctgcaaaccgcgtaaacatttcaatccataccgcaaaaccagggatggttattggtaagggtggttctgaagttgaagctcttcgtaaagaattaaacaatttaactggtaagcgagtacacatcaacatcatcgaaatcaagaagcctgatttagatgctaaattagttggtgaaagtattgcgcgtcaattggaaggccgggttgctttccgtcgtgcgatgcgtggtgctatgcaacgtacaatgcgttccggtgctaagggtattaagacacaagttgctggccgtttaaacggtgccgacatgtctcgtgttgaagcatactcagatggtacggttccattgcatacgcttcgtgctgacatcgactattcatgggtcgaagcacggacgacttacggtaaattaggtgttaagacctggatctaccgtggcgaaatcttgccagaaaagaaatctgctaaaggaggaaactaa

SEQ ID NO: 71646 - protein, 217 aa, Lactobacillus plantarum
MGQKVNPTGLRVGIIRDWEAKWYAEKDFAAYLNEDLRIRKYIEQRLADASVSTVEIERAANRVNISIHTAKPGMVIGKGGSEVEALRKELNNLTGKRVHINIIEIKKPDLDAKLVGESIARQLEGRVAFRRAMRGAMQRTMRSGAKGIKTQVAGRLNGADMSRVEAYSDGTVPLHTLRADIDYSWVEARTTYGKLGVKTWIYRGEILPEKKSAKGGN

SEQ ID NO: 71647 - DNA, 678 bp, Leptospira interrogans serogroup Icterohaemorrhagiae serovar
  CDS (1)..(678): transl_table=11
atgggacaaaaagtaaatccaatcggtttaagaatcgggatcacaagaggatgggactcaatttggttctctcagtccgattataaaaagaatcttcatgaagatattaagatccgtaagttcgttcagaatcgttttaataatgcaggtgttgttaaagtggtaatcgagagatttcctgagaagatcaatgtaaatcttcatactgcaaaacccggaatcgtgatcggccaaaaaggtgcgaacatcgaagccgttaagaaaattcttaagacgatgaccgacaaaccggtaaacttgaacatcatcgaagtcaaaaaaccagaaacggttgctcagtgtattgcagaatccatcgctcttcaaatcgaacaaagacaaccttttcggagagttatgaaacaagaacttcgtcgtgcgatgagaggcggggtagaaggaattaaaatcttaatctccggtcgtttgaatggagcggacatggcaagaagagaaaactacaaggaaggaagaattcctctgcatactcttcgtgcaaaaattgatctcggcttcaaagaagcaaaaaccacttttggacaaatcggtgttaaggtttggacttatagtggagactttattcagagcaaagaagaatctgaagaagataaatacgcagttaagagaagaaccagctaa

SEQ ID NO: 71648 - protein, 225 aa, Leptospira interrogans serogroup Icterohaemorrhagiae serovar
MGQKVNPIGLRIGITRGWDSIWFSQSDYKKNLHEDIKIRKFVQNRFNNAGVVKVVIERFPEKINVNLHTAKPGIVIGQKGANIEAVKKILKTMTDKPVNLNIIEVKKPETVAQCIAESIALQIEQRQPFRRVMKQELRRAMRGGVEGIKILISGRLNGADMARRENYKEGRIPLHTLRAKIDLGFKEAKTTFGQIGVKVWTYSGDFIQSKEESEEDKYAVKRRTS

SEQ ID NO: 71649 - DNA, 657 bp, Listeria innocua
  CDS (1)..(657): transl_table=11
gtgggtcaaaaagtacatccaataggtatgcgtatcggtgtcatccgtgattgggactccaaatggtacgcggaaaaagattatgcggacttcttacatgaagatttacgcatccgtgattatgttgcaaaacgtttatctgacgcttctgtttctcgcgtagaaatcgaacgtgcagctaaccgtgtgaatatcactattcatactgctaaacctggtatggttatcggtaaaggtggttctgaagttgaagcattacgcaaaaacttaaacgaacttactcaaaaacgtgttcatatcaatatcgtagaaatcaaacgtgctgacctagacgcaaaattggttgctgaaaacatcgctcgtcaattggaaggtcgtgtatctttccgtcgtgcgcaaaaacaagctatccaacgtactatgcgtgctggagcaaaaggtatcaaaactcaagtatctggtcgtcttggcggagcggatatcgctcgtgctgaacactatagcgaaggaacagtacctcttcatacattgcgtgccgacatcgactacgcatgggaagaagctgacacaacttatggtaaactaggcgttaaagtctggatctaccgtggtgaagtccttcctacgaagaaaaacaatgtggaaggaggaaaataa

SEQ ID NO: 71650 - protein, 218 aa, Listeria innocua
MGQKVHPIGMRIGVIRDWDSKWYAEKDYADFLHEDLRIRDYVAKRLSDASVSRVEIERAANRVNITIHTAKPGMVIGKGGSEVEALRKNLNELTQKRVHINIVEIKRADLDAKLVAENIARQLEGRVSFRRAQKQAIQRTMRAGAKGIKTQVSGRLGGADIARAEHYSEGTVPLHTLRADIDYAWEEADTTYGKLGVKVWIYRGEVLPTKKNNVEGGK

SEQ ID NO: 71651 - DNA, 633 bp, Magnetococcus sp
  CDS (1)..(633): transl_table=11
atgggacagaaggttcatccgacagggttccgtttgggaaccaccaaaacctgggacacgcgctggtttgcagacagaaattatgcagatctgttgcttgaggatatcaaaattcgagcttggttaaaaaaacgtctggcccatgccagtgtttccaagatcgtcattgagcgtcctgcccagaaagcgcgcatcaacattcacaccgcgcgccccggcattatcattggtaagaagggcggcgatatcgagaagttgaaaaacgatatcaaggcaatcaccagttcggaagtgcagatcaacattgttgagatccgtaagcctgaagcggatgcacagttggttgccgagaacgtagcccaacagttggagcgtcgggttgcttttcgccggagcatgaagcgggctgttacctcggccatgcgtttgggtgcagaaggtattcgtattaactgcgcgggtcgtcttggtggggctgagattgcccgtaccgagtggtaccgtgaaggccgtgtgcccctgcacaccctgcgtgcagatatcgactacggttttgctgaggcacataccacctacggcatcattggcgttaaggtatgggtctacaaaggcatgctcattgaaaagaaataa

SEQ ID NO: 71652 - protein, 210 aa, Magnetococcus sp
MGQKVHPTGFRLGTTKTWDTRWFADRNYADLLLEDIKIRAWLKKRLAHASVSKIVIERPAQKARINIHTARPGIIIGKKGGDIEKLKNDIKAITSSEVQINIVEIRKPEADAQLVAENVAQQLERRVAFRRSMKRAVTSAMRLGAEGIRINCAGRLGGAEIARTEWYREGRVPLHTLRADIDYGFAEAHTTYGIIGVKVWVYKGMLIEKK

SEQ ID NO: 71653 - DNA, 672 bp, Methylococcus capsulatus
  CDS (1)..(672): transl_table=11
atggggcagaaagtcaatcctactggaattcgtctgggatatatcaaagattggtcgtcgcgctggttcgcggacagcaagtcatatcccgtatttctcaacaacgacctcaaggttcgcgagtttctgaagcagaaactcaagcatgcgtcggtcagccggatccagatcaatcggttggcgaacaatgcccaaatcacgatccatacggcgaggcccggaatagtcatcggcaagcggggtgaggacatcgacgcgctgcgccgggatgtgtcgcgcttcatgggtgttcccgtgcaggtcagcgtcgaagagatccgcaagcccgagctggatgcgcagctcgtagcagaaggcgtggcgcagcagcttgagaagcgcatcatgttccggcgcgccatgaagcgcgcggtgcagaacacgctgcgtgtaggggccgagggtatcaagatcagtgtcgccggcaggctcaacggcgccgagatcgcgcggacggaatggtatcgcgagggtcgggtgccgcttcacacctttcgcgcggacatcgattacggtttcgccgaagcggtaacgacgtatggggtcatcggcgttaaggtgtggattttcaaaggcgaggtgttcgagcccgtgcacacggagccgaaaacccgcagtgcggtcgaagcttga

SEQ ID NO: 71654 - protein, 223 aa, Methylococcus capsulatus
MGQKVNPTGIRLGYIKDWSSRWFADSKSYPVFLNNDLKVREFLKQKLKHASVSRIQINRLANNAQITIHTARPGIVIGKRGEDIDALRRDVSRFMGVPVQVSVEEIRKPELDAQLVAEGVAQQLEKRIMFRRAMKRAVQNTLRVGAEGIKISVAGRLNGAEIARTEWYREGRVPLHTFRADIDYGFAEAVTTYGVIGVKVWIFKGEVFEPVHTEPKTRSAVEA

SEQ ID NO: 71655 - DNA, 711 bp, Methylobacillus flagellatus
  CDS (1)..(711): transl_table=11
atgggtcagaaaattcatccgtttggtttccgtctgagcgtccagaagaactggtcttctcgttggtatgccaatagcaataatttccctgcgatgttgagcagcgatatcaaggtgcgtgagtttctcaagaagaagcttgcccatgctgctgtcagcaagatcgtgatcgagcgtcctgcgaagaacgccaagatcaccatctacagcgcccgtcctggtatcgtgatcggcaagaagggcgaagacatcgagtccttgcgttccggattgcagggcttgatgggtgttcctgttcacttgaacatcgaagaagtccgcaagcctgaaattgatgcgacactgattgctgaaagtattgcccagcagcttgaaaagcgcgtgatgttccgtcgcgccatgaagcgtgcgatgcagaacgcaatgcgtctgggtgcccaaggcatcaagattatgagctcaggtcgtttgaatggtattgaaatcgcacgtaccgagtggtaccgcgaaggccgtgtgcctttgcatacactgcgtgccgatatcgattacggtgtggcagaagcgaagactacctacggtatcattggtatcaaggtatgggtattcaagggcgaagtgttcggcaacaagatcgaacaagccgctcaacccgctgagccagaaaagaaagtaagaaagtcgggggcaaaaaatgctgcaaccagctag

SEQ ID NO: 71656 - protein, 236 aa, Methylobacillus flagellatus
MGQKIHPFGFRLSVQKNWSSRWYANSNNFPAMLSSDIKVREFLKKKLAHAAVSKIVIERPAKNAKITIYSARPGIVIGKKGEDIESLRSGLQGLMGVPVHLNIEEVRKPEIDATLIAESIAQQLEKRVMFRRAMKRAMQNAMRLGAQGIKIMSSGRLNGIEIARTEWYREGRVPLHTLRADIDYGVAEAKTTYGIIGIKVWVFKGEVFGNKIEQAAQPAEPEKKVRKSGAKNAATS

SEQ ID NO: 71657 - DNA, 678 bp, Mycoplasma mobile
  CDS (1)..(678): transl_table=4
atgggacaaaaagttaatccaaatggatttagatatggtgtaactaaaaaacataacaccttatgatatgcggataaaaaagattttgctgatattttattacaagatgataaaatctacagattttttaacaagtttacacgtgaatatttaattggtaaagtggaaattagaagaaatcaaaatggtcatttaagtgtacttgttcatagtgcaaaacctggagctattttaggtcaaaatggagaaaacatcaataaattaactcaagatattcaaaaacttttaagaaacaaagaacttaaattaaatattgaagtagttaatattaaaaatcctgacttaaatgcaatcattttagcagaacaaattgctattaaattagaaaatagagcaccttttagagttgcacaaaaatttgcaattagaaatgcaatgaaaagtggagcaaaaggaattaaaactcaagtttcaggacgtttaaatggtgtagatatggctcgttcagaaggatattctgaaggagaaatgaaattacatactttaagacaagatgttgattttgcaatggcgactgcaagaacaacttatggtgcaattggagttaaagtttgagtttcaaaaggtgaatttttagacgggaatggtgaaaaaaatgttacaaccgaaaagaactaa

SEQ ID NO: 71658 - protein, 225 aa, Mycoplasma mobile
MGQKVNPNGFRYGVTKKHNTLWYADKKDFADILLQDDKIYRFFNKFTREYLIGKVEIRRNQNGHLSVLVHSAKPGAILGQNGENINKLTQDIQKLLRNKELKLNIEVVNIKNPDLNAIILAEQIAIKLENRAPFRVAQKFAIRNAMKSGAKGIKTQVSGRLNGVDMARSEGYSEGEMKLHTLRQDVDFAMATARTTYGAIGVKVWVSKGEFLDGNGEKNVTTEKN

SEQ ID NO: 71659 - DNA, 663 bp, Myxococcus xanthus
  CDS (1)..(663): transl_table=11
ttgggacagaaagttcatccgatcgggttccggcttggtgtcatcaagacctgggactccaagtggttcgagcacaagaactacgcgcagtggctccacgaggacatccgcatccgcgagttcgtgaagaagtcgctgaaccacgcgggcgtgtcgaaggtggaaatcgagcgcgcggccaacaaggtcaaggtcaacgtccacactgcgcggccgggcatcgtcatcggcaagcgcggcgcgggcattgagacggtgaagaaggacctccagcagttcacgaagaacgaggtcttcctcaacatcgtcgaggtccgcaaggctgagaccgacgcgcagttggtggcggagaacatcgccacgcagctcgagcgccgcatcgcgttccgccgggccatgaagaaggccctgcagacggcgatgaagttcggtgccaagggcatccgcgtggcctgctcgggccgcctcggtggcgcggagatggcgcgctacgagtggtaccgcgagggtcgcgtgcccctgcacaccctgcgcgcggacattgactacggtttcgccgaggcgaagacgacctacggcaagatcggctgcaaggtctgggtctgcaagggcgaggtcctcccgggcaagggtggccaggcccccatgccctccaaccggtaa

SEQ ID NO: 71660 - protein, 220 aa, Myxococcus xanthus
MGQKVHPIGFRLGVIKTWDSKWFEHKNYAQWLHEDIRIREFVKKSLNHAGVSKVEIERAANKVKVNVHTARPGIVIGKRGAGIETVKKDLQQFTKNEVFLNIVEVRKAETDAQLVAENIATQLERRIAFRRAMKKALQTAMKFGAKGIRVACSGRLGGAEMARYEWYREGRVPLHTLRADIDYGFAEAKTTYGKIGCKVWVCKGEVLPGKGGQAPMPSNR

SEQ ID NO: 71661 - DNA, 693 bp, Neisseria gonorrhoeae
  CDS (1)..(693): transl_table=11
atgggacaaaagattaaccctacaggctttcgcctggcggtaactaaagactgggcttcaaaatggtttgctaaaagtaccgacttttctactgttttgaagcaggatatcgatgttcgcaattatttgcgtcaaaaattggccaatgcttcggttggtcgagtaattattgaacgccctgcaaaatctgcacgcattaccattcactccgctcgtccgggtgtggttatcggtaaaaaaggtgaggatatcgaagttttgaaacgtgacttgcaagtcttgatgggtgtacctattcatgtaaatattgaagagattcgccgtcctgagttggatgctcaaattattgctgacggtatcgcccagcagttggaaaaacgcgttcaattccgtcgtgctatgaaacgagcaatgcaaaatgcaatgcgttctggtgctaaaggcattaagattatgacttcaggccgtctgaatggtgcggatattgcccgtagcgaatggtatcgtgaaggtcgcgtgccactgcatactttacgtgcaaatgtagattatgcaaccagcgaagcgcacaccacatatggtgtattgggtctgaaagtttgggtttatacggaaggcaatattaaatcttccaaacctgaacatgagagtaaacaaagaaaggcaggtagacgtaatgctgcagccaactag

SEQ ID NO: 71662 - protein, 230 aa, Neisseria gonorrhoeae
MGQKINPTGFRLAVTKDWASKWFAKSTDFSTVLKQDIDVRNYLRQKLANASVGRVIIERPAKSARITIHSARPGVVIGKKGEDIEVLKRDLQVLMGVPIHVNIEEIRRPELDAQIIADGIAQQLEKRVQFRRAMKRAMQNAMRSGAKGIKIMTSGRLNGADIARSEWYREGRVPLHTLRANVDYATSEAHTTYGVLGLKVWVYTEGNIKSSKPEHESKQRKAGRRNAAAN

SEQ ID NO: 71663 - DNA, 693 bp, Neisseria meningitidis serogroup A
  CDS (1)..(693): transl_table=11
atgggacaaaagattaaccctacaggctttcgcctggcggtaactaaagactgggcttcaaaatggtttgctaaaagcaccgacttttctactgttttgaagcaggatatcgatgttcgcaattatttgcgtcaaaaattggccaatgcttcggttggtcgagtggttattgaacgccctgcaaaatctgcacgcattaccattcactccgctcgtccgggtgtggttataggtaaaaaaggtgaggatatcgaggttttgaaacgtgacttgcaagtcttgatgggtgtacctgttcatgtaaatattgaagagattcgccgtcctgagttggatgctcaaattattgctgacggtattgcccagcagttggaaaagcgcgttcaattccgtcgtgctatgaaacgagcaatgcaaaatgcaatgcgttctggtgctaaaggcattaagattatgacttcaggccgtctgaatggtgcggatattgcccgtagcgaatggtatcgtgaaggtcgcgtgccactgcatactttacgtgcaaatgtagattatgcaaccagcgaagcgcacaccacatatggtgtattgggtctgaaagtttgggtttatacggaaggcaatattaaatcttccaaacctgaacatgagagtaaacaaagaaaggcaggtagacgtaatgctgcagccaactag

SEQ ID NO: 71664 - protein, 230 aa, Neisseria meningitidis serogroup A
MGQKINPTGFRLAVTKDWASKWFAKSTDFSTVLKQDIDVRNYLRQKLANASVGRVVIERPAKSARITIHSARPGVVIGKKGEDIEVLKRDLQVLMGVPVHVNIEEIRRPELDAQIIADGIAQQLEKRVQFRRAMKRAMQNAMRSGAKGIKIMTSGRLNGADIARSEWYREGRVPLHTLRANVDYATSEAHTTYGVLGLKVWVYTEGNIKSSKPEHESKQRKAGRRNAAAN

SEQ ID NO: 71665 - DNA, 648 bp, Nitrosomonas europaea
  CDS (1)..(648): transl_table=11
atgggtcaaaaaattaatccaactgggttcaggttatcagttttaaaaaactggtcttcacgttggtatacaaatacaaagaagttttcggattttttaaatgaagacattagtgttaggcaatatcttcaaaagaaactggcacatgcttcagttggaagtatcataattgaacgaccctcaaaaaatgcgaagattacgatacatacgtcacgtcctggtgtagttataggtaagaaaggcgaagatatagagattcttcgtagaaatgtcgaaaaattgatgaatgtaccggtgcacatcaatatagaggaaatacgaaaacctgagattgatgcgcagcttattgccgcaagtattactcagcagctcgaaaaaagaataatgttcagaagggcgatgaagagagctatacagaatgctatgcgccttggtgctcaagggataaaaattatgagttccggcagattaaatggtatagaaatagctcgaactgaatggtatagagaaggcagggtgccacttcatacgttacgtgcagaagttgattacggaacctcagaagccagaacaacatatggaatcattggtgttaaagtatgggtttttaaaggtgagcaacttggtattaaggaaaggcaaaactaa

SEQ ID NO: 71666 - protein, 215 aa, Nitrosomonas europaea
MGQKINPTGFRLSVLKNWSSRWYTNTKKFSDFLNEDISVRQYLQKKLAHASVGSIIIERPSKNAKITIHTSRPGVVIGKKGEDIEILRRNVEKLMNVPVHINIEEIRKPEIDAQLIAASITQQLEKRIMFRRAMKRAIQNAMRLGAQGIKIMSSGRLNGIEIARTEWYREGRVPLHTLRAEVDYGTSEARTTYGIIGVKVWVFKGEQLGIKERQN

SEQ ID NO: 71667 - DNA, 804 bp, Nocardia farcinica
  CDS (1)..(804): transl_table=11
atgggacagaagatcaatccccacggcttccgcctcggtatcaccaccgactggaagtcccgttggtacgcggacaagcagtacgcggactacgtgaaggaagacgtcgcgatccgcaagctcctggccaccggcatggagcgcgcgggcatctcgaaggtcgagatcgagcgcacccgtgaccgcgtgcgggtggacatccacaccgcgcgtccgggcatcgtgatcggccgtcgcggcgccgaggccgaccgcatccgcgccgagctggagaagctcaccggcaagcaggtgcagctgaacatcctcgaggtcaagaaccccgagtcggatgcccagctcgtcgcccagggtgtggccgagcagctgtccaaccgtgtggcgttccggcgcgcgatgcgcaaggccatccagtcggccatgcgttcgccgaacgtcaagggcatccgggtgcagtgctcgggccgcctcggcggcgccgaaatgtcgcgctcggagttctaccgtgagggtcgggtgccgctgcacacgctgcgcgccgacatcgactacggcctctacgaggccaagaccaccttcggtcgcatcggcgtgaaggtctggatctacaagggcgacatcgtcggtggcaagcgtgagctgaccgccgcgagcgctccggccggcgatcgtgatcgtccgcgccgcgagcggccgagccgtccgcgtcggtccggttccaccggcaccaccgcgaccagcactgaggccgggcgcgccgccaccgcggtggtggaagctccggcagagaatcaggagggctga

SEQ ID NO: 71668 - protein, 267 aa, Nocardia farcinica
MGQKINPHGFRLGITTDWKSRWYADKQYADYVKEDVAIRKLLATGMERAGISKVEIERTRDRVRVDIHTARPGIVIGRRGAEADRIRAELEKLTGKQVQLNILEVKNPESDAQLVAQGVAEQLSNRVAFRRAMRKAIQSAMRSPNVKGIRVQCSGRLGGAEMSRSEFYREGRVPLHTLRADIDYGLYEAKTTFGRIGVKVWIYKGDIVGGKRELTAASAPAGDRDRPRRERPSRPRRSGSTGTTATSTEAGRAATAVVEAPAENQEG

SEQ ID NO: 71669 - DNA, 696 bp, Novosphingobium aromaticivorans
  CDS (1)..(696): transl_table=11
atgggtcacaagtcgaaccccatcggtctgcgcctgcagatcaaccgcacctgggacagccgctggtacgcggaaggtcgcaactacgcgcagatgcttgaggaagacctcaagatccgcaagtacatcgtcgagaacctgccgcaggcagcgatttcgaaggttgtgatcgagcgtcccgccaagctgtgccgcgtgtcgatctatgccgcccgtccgggcgtcatcatcggcaagaagggcgccgacatcgagaagcttcgctcgaagcttgccacgatgaccggcagcgacgtgaagctgaacatcgtcgagatccgcaagccggaaatcgattcgaagctcgtcgctcagggcgttgccgaccagctggtccgccgcgttgccttccgccgtgcgatgaagcgcgcggtgcagtcggcgctgcgccttggtgccgaaggcatcaagatcacctgcggcggccgtctcggcggtgcggaaatcgcccgcgtcgaatggtaccgcgaaggtcgcgttccgctgcacacgctgcgcgcgaacatcgactacgcggaagccgaagcccacaccgcctatggcgtgatcggcatcaaggtctggatcttcaagggtgagatcctcggccatgacccgatggcgcaggaccgcctgatgatggaagcccagacttccggcgtccgtccggcacgctga

SEQ ID NO: 71670 - protein, 231 aa, Novosphingobium aromaticivorans
MGHKSNPIGLRLQINRTWDSRWYAEGRNYAQMLEEDLKIRKYIVENLPQAAISKVVIERPAKLCRVSIYAARPGVIIGKKGADIEKLRSKLATMTGSDVKLNIVEIRKPEIDSKLVAQGVADQLVRRVAFRRAMKRAVQSALRLGAEGIKITCGGRLGGAEIARVEWYREGRVPLHTLRANIDYAEAEAHTAYGVIGIKVWIFKGEILGHDPMAQDRLMMEAQTSGVRPAR

SEQ ID NO: 71671 - DNA, 642 bp, Oceanobacillus iheyensis
  CDS (1)..(642): transl_table=11
gtgggtcaaaaaataaatccaacgggtcttcgcgtaggtatcattaaagactgggagtctaaatggtatgctggtaaagactatgcagacttgctacatgaagatattaaaatcagagaatatcttgaaaatcgtttaagcacagctgctgtttcttctattgaaatcgagcgtgctgcaaaccgtgtaaacattacgatccatactggtaagccaggaatggtaatcggtaaaggcggttctgaagtagaagctttacgtaaatcattaaacaacttgactggcaaacgagttcatatcaatattgttgaaatcaaaaaagttgatttagatgcaacattggttgctgacagtattgctcgtcaattagaaaatcgtatttcattccgtcgtgctcaaaagcaagctatccaacgtgcaatgcgtggaggagcaaaaggaattaaaacacaagtatccggacgtcttggcggtgcagatatcgctcgtgcggaacattacagtgaaggtacagtgccacttcatactttacgtgcagatattgactatggtacagcagaagctgatactacgtacggtaaactaggcgttaaagtatggatttatcgtggagaagtccttccaactaaaactgataagtaa

SEQ ID NO: 71672 - protein, 213 aa, Oceanobacillus iheyensis
MGQKINPTGLRVGIIKDWESKWYAGKDYADLLHEDIKIREYLENRLSTAAVSSIEIERAANRVNITIHTGKPGMVIGKGGSEVEALRKSLNNLTGKRVHINIVEIKKVDLDATLVADSIARQLENRISFRRAQKQAIQRAMRGGAKGIKTQVSGRLGGADIARAEHYSEGTVPLHTLRADIDYGTAEADTTYGKLGVKVWIYRGEVLPTKTDK

SEQ ID NO: 71673 - DNA, 804 bp, Oenococcus oeni
  CDS (1)..(804): transl_table=11
atgggccaaaagattaatccaattggattccgtgttggagtcattcgtgactgggatgctaaatggtatgccgacaaaaaggaatacgttcctgctttacaagaagacttgcggattcgcaaatatcttgaaacgaatttaaaagatgcagctgttgatcgtatcacaatcgaacgtactgaacctactcgcattaatttaactattcatactgctaagcctggtattgttattggtcgtggcggtgctgatgttgagcgtttgcgtagtgaattgtcaaagatagttgatacttataagggtcaacacaagcgcgtcaatatcaatattgtcgagattcgtaaaccagatttaaatgctcaccttgttggccaacaaattgctgccgatttagagaggcgtgttgctttccgtcgcgcaatgcgtggagctattcaacgtgttcaacgtgctggcgctaagggtgttcgcacaatggtatcaggacgtttgaatggagctgatattgctcgtaaagagcaatatacggagggcaccgttcctcttcatactttacgtgctgatattgattattcttgggacgaagcgatgacttcttacggtaatcttggtattaaaacatggatttatcgtggcgatgccgagaatggccaattcattaaagatgaggatgttgctgctgcagcgaataatcgtggccgtggcaataatcgtggccgtggaaacagtcgtcagaatggtggtcgttctcgtcgccctcgtcaaggtcaagcttctactcaaggacgaggaggtaataactaa

SEQ ID NO: 71674 - protein, 267 aa, Oenococcus oeni
MGQKINPIGFRVGVIRDWDAKWYADKKEYVPALQEDLRIRKYLETNLKDAAVDRITIERTEPTRINLTIHTAKPGIVIGRGGADVERLRSELSKIVDTYKGQHKRVNINIVEIRKPDLNAHLVGQQIAADLERRVAFRRAMRGAIQRVQRAGAKGVRTMVSGRLNGADIARKEQYTEGTVPLHTLRADIDYSWDEAMTSYGNLGIKTWIYRGDAENGQFIKDEDVAAAANNRGRGNNRGRGNSRQNGGRSRRPRQGQASTQGRGGNN

SEQ ID NO: 71675 - DNA, 645 bp, Protochlamydia amoebophila
  CDS (1)..(645): transl_table=11
atgggacaaaaagtcaacccaataagtttccgccttgttcgtacacgtgattggcgctccaaatggtttgctaataagaaagaatttggagatcttctagttgaagatcaaatcattcgtgcttatttattgaaaaaacctgctttagtaggtgtttcagcaatcaaaattaagcgcatgagcggaaaagtcgaagtcacaattgtgacagcacgcccaggtcttgtgatcgggaaaaaaggtgctgagatcgatgtgttgaaaggggaattaagtaaattaacaggaaaagaagtctgggtagctgttgaagaagtgaaacggccagacatggatgcgaaaatcgttgcagatagtatagcaaagcaacttgaaagacgtattccttttcgtcgcgcaatgaaaaaagcgatgcaatcatcgattgatgctggtgcattcggtattaaagttcagttgtctggccgtattggtggtgcagagattgctcgtacagaatggtataaagaaggtagcacgcctcttcatacgcttcgtgccgatattgattatgcgacaggtcgagctgaaactacttatggtagtataggtgtgaaggtttggatttatcgcggtgaagacaacttagcgaagaaggaggcttaa

SEQ ID NO: 71676 - protein, 214 aa, Protochlamydia amoebophila
MGQKVNPISFRLVRTRDWRSKWFANKKEFGDLLVEDQIIRAYLLKKPALVGVSAIKIKRMSGKVEVTIVTARPGLVIGKKGAEIDVLKGELSKLTGKEVWVAVEEVKRPDMDAKIVADSIAKQLERRIPFRRAMKKAMQSSIDAGAFGIKVQLSGRIGGAEIARTEWYKEGSTPLHTLRADIDYATGRAETTYGSIGVKVWIYRGEDNLAKKEA

SEQ ID NO: 71677 - DNA, 708 bp, Pasteurella multocida
  CDS (1)..(708): transl_table=11
atgggtcaaaaagtacatccacatggtattcgcctaggtattgttaagccttggagctctacttggtttgcgaatacacaagatttcgctgataatttagacggcgacttcaaagtacgtaaattcttgaataaagaattagcgaatgcttccgtttcacgcatcactattgagcgtccagcgaaaagcatccgtgttacaattcacacagctcgtccaggtatcgttatcggtaagaaaggcgaagatgttgaaaaattacgtaacgcagttgcggctatcgcaggcgttccagctcaaatcaacattgctgaagtgaaaaaacctgaattagatgcaaaattagttgcagacagcatcgcttctcaattagaacgtcgtgtaatgttccgtcgtgctatgaaacgtgcagtacaaaacgcaatgcgtttaggtgctaagggtatcaaagttgaagtaagcggtcgtttaggtggtgcagaaattgcacgttcagaatggtatcgtgaaggtcgtgtacctctacatacattacgtgcggacatcgactataacactgctgaagcacatactacatacggtgtaatcggtattaaagtatggatcttcaaaggtgaaatcctcggtggaatggctgcaattgcgcaaccagaacaacaacctgctgacaagcctaaaaaggctccacgcggcaaaggtcgtaagtaa

SEQ ID NO: 71678 - protein, 235 aa, Pasteurella multocida
MGQKVHPHGIRLGIVKPWSSTWFANTQDFADNLDGDFKVRKFLNKELANASVSRITIERPAKSIRVTIHTARPGIVIGKKGEDVEKLRNAVAAIAGVPAQINIAEVKKPELDAKLVADSIASQLERRVMFRRAMKRAVQNAMRLGAKGIKVEVSGRLGGAEIARSEWYREGRVPLHTLRADIDYNTAEAHTTYGVIGIKVWIFKGEILGGMAAIAQPEQQPADKPKKAPRGKGRK

SEQ ID NO: 71679 - DNA, 702 bp, Photorhabdus luminescens subsp
  CDS (1)..(702): transl_table=11
atgggtcagaaagtacatcctaatggtattcgcctgggtattgtcaaaccttggaactctacttggtatgcgaatactaaagaattcgctgacaacctagacagcgattttaaagttcgccagtacttgaagaaagaactggcaaaagcgtctatttcacgcattgttattgaacgtcctgctaaaagtattcgtgtaactattcacactgctcgcccaggtatcgtaatcggtaagaaaggtgaagacgtagaaaaactgcgtaaaactgtagcggaaatcgctggtgttcctgcgcaaattaatatctctgaagtacgtaagcctgaactggacgcgaaactggttgctgacagtattacttcacagttggaacgtcgtattatgttccgtcgtgctatgaagcgtgcagtccagaatgcgatgcgtcaaggcgctaaaggcattaaagtggaagttagtggccgtttaggcggtgctgaaatcgcgcgtcctgaatggtatcgtgaaggtcgtgtaccgttgcacacactgcgtgcagatatcgactacaacacttcagaagcgcacaccacttatggtgtactcggcgttaaggtatggatcttcaaaggtgagatcttgggtggtatggctgctgttgaacaggcggaaaaaccggctgcacaacctaaaaagcagcagcgcaaaggccgcaagtaa

SEQ ID NO: 71680 - protein, 233 aa, Photorhabdus luminescens subsp
MGQKVHPNGIRLGIVKPWNSTWYANTKEFADNLDSDFKVRQYLKKELAKASISRIVIERPAKSIRVTIHTARPGIVIGKKGEDVEKLRKTVAEIAGVPAQINISEVRKPELDAKLVADSITSQLERRIMFRRAMKRAVQNAMRQGAKGIKVEVSGRLGGAEIARPEWYREGRVPLHTLRADIDYNTSEAHTTYGVLGVKVWIFKGEILGGMAAVEQAEKPAAQPKKQQRKGRK

SEQ ID NO: 71681 - DNA, 690 bp, Photobacterium profundum
  CDS (1)..(690): transl_table=11
atgggtcagaaagtacatcctaatggtattcgtctaggcatcgttaagccttggaataccacttggtttgctaatagccaagaattcgctgacaacctagatggcgacttcaaggtacgtcagtttcttattaaagaactgaaaaaagcatctttatctcgtgttgttatcgagcgcccagcgaagagcatccgtgtgactattcacactgctcgtcctggtatcgttatcggtaagaaaggcgaagatgtagaaaaactacgtgctcatatttcaaagatcgcgggtgttccagctcagatcaatatttctgaagtacgtaagccagagctagacgctcaattagttggtgacagcatcgcgtctcaacttgaacgtcgtgttatgttccgtcgcgctatgaagcgtgcagttcaaaacgctatgcgtcttggcgctaagggtatcaaagttcaagtaggtggtcgtttaggcggcgctgaaatcgcacgttcagagtggtatcgtgaaggtcgtgtacctctacacactcttcgtgctgacattgattacgcaacttcttcggctcacacccaatacggtgtaatcggcgttaaagtttggatcttcaaaggtgaagttctaggcggtatgccaattgaagagcctaaggctgacaagcctaagaagcagcgcaaaagccgtaaataa

SEQ ID NO: 71682 - protein, 229 aa, Photobacterium profundum
MGQKVHPNGIRLGIVKPWNTTWFANSQEFADNLDGDFKVRQFLIKELKKASLSRVVIERPAKSIRVTIHTARPGIVIGKKGEDVEKLRAHISKIAGVPAQINISEVRKPELDAQLVGDSIASQLERRVMFRRAMKRAVQNAMRLGAKGIKVQVGGRLGGAEIARSEWYREGRVPLHTLRADIDYATSSAHTQYGVIGVKVWIFKGEVLGGMPIEEPKADKPKKQRKSRK

SEQ ID NO: 71683 - DNA, 759 bp, Phytoplasma sp
  CDS (1)..(759): transl_table=11
gtgggtcaaaaaactaatcctaacggcttaagattaggcattattagaacttgggaatctcaatggtgtgttaatgataaagaaattcctaatttaattaaagaagattttttaattcgtaaactaatcaataattttactaaaaaaagtgctatcagtcaaattgacattgaacgcctaaaagaaaaaaataaaaaccgtatcactatttctgtccacaccgctaaaccaggcgttattattggaaaagatggcgatacacgcaacaaattagttgccaaactcaaagaacttacccaaaaagacgttaatcttaacgtgttagaagttaaaaactctgataaaaacgctttattaattgctcaaaatatggctgaacaactagaaaatcgtatgtttttccgccgtgttcaaaaaatggcaatccaaaaagccctaaaagctggtgccaaaggagtaaaaactttaatttctggtcgtttgggtggtgctgaaatagctcgtagcgaaggacatgccgaaggcagagttcctctacacactctaagagcagacatcgattacgctgctgttgaagctcacactacttatggagttttaggaattaaagtatggattttccacggtgaagttttaccaggacaaaccattttagacactagaaaaccgtttgcttcccaatcttctaacactcctaacagacgccctcgcaatttcaaaggaggcaacaataatcatgttaatgccaaaaagaactaa

SEQ ID NO: 71684 - protein, 252 aa, Phytoplasma sp
MGQKTNPNGLRLGIIRTWESQWCVNDKEIPNLIKEDFLIRKLINNFTKKSAISQIDIERLKEKNKNRITISVHTAKPGVIIGKDGDTRNKLVAKLKELTQKDVNLNVLEVKNSDKNALLIAQNMAEQLENRMFFRRVQKMAIQKALKAGAKGVKTLISGRLGGAEIARSEGHAEGRVPLHTLRADIDYAAVEAHTTYGVLGIKVWIFHGEVLPGQTILDTRKPFASQSSNTPNRRPRNFKGGNNNHVNAKKN

SEQ ID NO: 71685 - DNA, 759 bp, Phytoplasma sp
  CDS (1)..(759): transl_table=11
gtgggtcaaaaaactaatcctaacggcttaagattaggcattattagaacttgggaatctcaatggtatgttaacgataaagaaattcctaatttaattaaagaagattttttaattcgtaaactaatcaataattttgctaaaaaaagcgctatcagtcaaattgacatcgaacgcctaaaagaaaaaaataaaaaccgtatcactatttttgtccacaccgctaaaccaggcgttattattggaaaagacggcgatacacgcaacaaattagttgtcaaactcaaagaacttacccaaaaagaagttaatcttaacgttttagaagttaaaaactctgataaaatcgctttattaattgctcaaaatatggctgaacaactagaaaatcgtatgtttttccgccgtgttcaaaaaatggcaatccaaaaagccctaaaagcaggcgctaaaggagtaaaaactttaatttctggtcgtttgggtggtgctgaaatagctcgaagcgaaggacatgccgaaggcagagttcctctacacactctaagagcagacatcgattacgctgctgttgaagctcacactacttatggagttttaggaattaaagtatggattttccacggtgaagttttaccaggacaaactattctagacactagaaaaccgtttgcttcccaatcttctaacacccctaacagacgccctcgcaatttcaaaggaggcaacaataatcatgttaatgccaaaaagaactaa

SEQ ID NO: 71686 - protein, 252 aa, Phytoplasma sp
MGQKTNPNGLRLGIIRTWESQWYVNDKEIPNLIKEDFLIRKLINNFAKKSAISQIDIERLKEKNKNRITIFVHTAKPGVIIGKDGDTRNKLVVKLKELTQKEVNLNVLEVKNSDKIALLIAQNMAEQLENRMFFRRVQKMAIQKALKAGAKGVKTLISGRLGGAEIARSEGHAEGRVPLHTLRADIDYAAVEAHTTYGVLGIKVWIFHGEVLPGQTILDTRKPFASQSSNTPNRRPRNFKGGNNNHVNAKKN

SEQ ID NO: 71687 - DNA, 732 bp, Prochlorococcus marinus
  CDS (1)..(732): transl_table=11
atgggacataaaatccacccaaacggtttacgcttaggaattactcaagaacatcgttctcgttggtatgcctcaagtaaaacctatcctttactacttcaggaggatgaccgtattcgagttttcattcaaaagaagtatggggctgcaggtatcagtgatgttttgattgcgcgtaaagcagatcaactcgaggttgagctcaaaactgcacgtccaggagtgatcgttggtcgtcaaggcagtggaattgaagagttaagatctggaatacaaaagacaattggtgatcgcagtagacaggtacgtattaatgttgttgaaattgaacgagttgatgcagatgcacaccttttagctgaatacatagctcagcaacttgaaaaaagagtcgctttcagaagaacgatacgtatggcggttcaacgagctcaaagggctggagttcttggcctaaaaattcaggtaggtggccgtttgaatggagcagaaattgctagatctgaatggactagagagggacgtgtccctctacatactcttagagccgagattgattatgcaaataagactgccaatacaacgtatggcgttcttggcattaaggtttgggtttttaaaggtgaagttctttctaaagaagaacagcctttgcctgtgggagcaagtcctagaaggaaaggcaatcgaaggcctcaacaatttgaggacagatctaatgatggaaaataa

SEQ ID NO: 71688 - protein, 243 aa, Prochlorococcus marinus
MGHKIHPNGLRLGITQEHRSRWYASSKTYPLLLQEDDRIRVFIQKKYGAAGISDVLIARKADQLEVELKTARPGVIVGRQGSGIEELRSGIQKTIGDRSRQVRINVVEIERVDADAHLLAEYIAQQLEKRVAFRRTIRMAVQRAQRAGVLGLKIQVGGRLNGAEIARSEWTREGRVPLHTLRAEIDYANKTANTTYGVLGIKVWVFKGEVLSKEEQPLPVGASPRRKGNRRPQQFEDRSNDGK

SEQ ID NO: 71689 - DNA, 687 bp, Pseudomonas aeruginosa
  CDS (1)..(687): transl_table=11
atgggtcagaaagtacatcccaatggcattcgcctgggtatcgtcaaggagcacacctccgtttggtacgcagaccgcaagaactatgcggattacctgtttgccgacctgaaggtgcgtgagtacctccaagacaaactaaaaagcgcgtccgtaagccgtatcgatattcatcgtccggctcaaaccgcacgcatcaccatccacaccgctcgtcccggcatcgtgatcggcaagaaaggtgaagatgttgagaaactgcgccaggacctgaccaagcaaatgggtgtgcccgtgcacatcaacatcgaggaaatccgcaagccggaactcgatgccatgctggttgcgcagagcgtagcccagcagctggagcgtcgcgtaatgttccgtcgcgccatgaagcgcgccgtacagaacgccatgcgcattggtgccaagggcatcaagattcaggtcagcggtcgtctgggtggggctgaaatcgcccgtaccgaatggtatcgcgaaggtcgtgtgcccctgcacaccctgcgcgccgatatcgactatgccacctacgaagcgcacaccacttacggtgtgatcggtgtcaaggtttggatcttcaagggcgaggtcatcggtggccgccaggaagagctgaagccggttgcacccgctcctcgtaaaaaagctgctaggtaa

SEQ ID NO: 71690 - protein, 228 aa, Pseudomonas aeruginosa
MGQKVHPNGIRLGIVKEHTSVWYADRKNYADYLFADLKVREYLQDKLKSASVSRIDIHRPAQTARITIHTARPGIVIGKKGEDVEKLRQDLTKQMGVPVHINIEEIRKPELDAMLVAQSVAQQLERRVMFRRAMKRAVQNAMRIGAKGIKIQVSGRLGGAEIARTEWYREGRVPLHTLRADIDYATYEAHTTYGVIGVKVWIFKGEVIGGRQEELKPVAPAPRKKAAR

SEQ ID NO: 71691 - DNA, 714 bp, Pseudomonas putida; identical to SEQ ID NO: 71335
  CDS (28)..(714): transl_table=11

SEQ ID NO: 71692 - protein, 228 aa, Pseudomonas putida
MGQKVHPTGIRLGIVKEHTSVWYADGATYADYLLKDLKTREYLQDKLKSASVSRIDIHRPAQTARITIHTARPGIVIGKKGEDVEKLRQDLTKQMGVPVHINIEEIRKPELDAMLVAQSVAQQLERRVMFRRAMKRAVQNAMRIGAKGIKIQVSGRLGGAEIARTEWYREGRVPLHTLRADIDYNTYEAHTTYGVIGVKVWIFKGEVIGGRQEELKPQAPAPRKKAAK

SEQ ID NO: 71693 - DNA, 795 bp, Ralstonia eutropha
  CDS (1)..(795): transl_table=11
atgggacagaagattcatccgactggcttccgtctggccgtcagccgtaactgggcttcgcgttggtacgccaacaatacgaagttcgccggcatgctgaaggaagacatcgaagttcgcgacttcctgaagaagaagctcaagaacgcatcggttggccgcgtggtcatcgagcgtccggcccgtaacgcacgtatcaccatttacagctcgcgtccgggagtggtgatcggcaagaagggtgaggacatcgaactgctcaaggctgaactgcagcgtcgcatgggcgtgcccgtgcacgtgaacatcgaggaaatccgcaagccggaaaccgatgctcagctgatcgccgattcgatcacccagcagctcgagcgccgtatcatgttccgccgcgccatgaagcgtgcgatgcagaacgcgatgcgcctgggcgcccagggtatcaagatcatgagctcgggccgtctgaacggtatcgaaatcgcacgtaccgagtggtaccgcgaaggccgtgtgcccctgcacaccctgcgcgccgacatcgactacggcttctccgaagcagaaaccacctacggcatcatcggtgtcaaggtgtgggtctacaagggtgatcacctcggccgcaatgacgcgccggtggtggaagagccgcaagacgaccgtcgtcgtcgtccgggtcgtccggaaggccgtcgccgtgaaggcgaaggtcgcccgggtggcaaccgtcgcggtggcgccggtgccggtcgccgcgctgcgcctggcgatgcgaagagtggagaataa

SEQ ID NO: 71694 - protein, 264 aa, Ralstonia eutropha
MGQKIHPTGFRLAVSRNWASRWYANNTKFAGMLKEDIEVRDFLKKKLKNASVGRVVIERPARNARITIYSSRPGVVIGKKGEDIELLKAELQRRMGVPVHVNIEEIRKPETDAQLIADSITQQLERRIMFRRAMKRAMQNAMRLGAQGIKIMSSGRLNGIEIARTEWYREGRVPLHTLRADIDYGFSEAETTYGIIGVKVWVYKGDHLGRNDAPVVEEPQDDRRRRPGRPEGRRREGEGRPGGNRRGGAGAGRRAAPGDAKSGE

SEQ ID NO: 71695 - DNA, 798 bp, Ralstonia metallidurans
  CDS (1)..(798): transl_table=11
atgggacagaagattcatccgactggcttccgtctggccgtcagccgtaactgggcttcgcgttggtacgccaacaacacgaagttcgccggcatgctgaaagaagacatcgaagttcgcgagttcctgaagaagaagctcaagaacgcatcggttggccgcgtcgtgatcgagcgtcctgcccgtaatgcacgtatcaccatttacagctcgcgtccgggcgtggtgatcggcaagaagggtgaggacatcgaactgctgaaggccgagctgcaacgtcgcatgggtgtgcccgtgcacgtgaacatcgaggaaatccgcaagccggaaaccgatgcgcagctgatcgccgattcgatcacgcagcagctcgagcgccgcatcatgttccgtcgcgccatgaagcgcgcgatgcagaacgcgatgcgtctgggtgcccaaggcatcaagatcatgagctcgggtcgtctgaacggtatcgaaatcgcacgtaccgagtggtaccgcgaaggccgtgtgcccctgcacaccctgcgcgccgacatcgactacggcttctccgaagccgaaaccacctacggcatcatcggtgtcaaggtgtgggtctacaagggtgatcacctgggccgcaacgatgcgcccgtggttgaagagccgcaagaagaccgtcgtcgtcgcccgggtcgtccggaaggccgtcgccgcgaaggtgaaggccgtccggctggcaaccgccgcggtggtgccggtgctggtcgtcgtgctgcgcctggcgcagatgcgaagagtggagaataa

SEQ ID NO: 71696 - protein, 265 aa, Ralstonia metallidurans
MGQKIHPTGFRLAVSRNWASRWYANNTKFAGMLKEDIEVREFLKKKLKNASVGRVVIERPARNARITIYSSRPGVVIGKKGEDIELLKAELQRRMGVPVHVNIEEIRKPETDAQLIADSITQQLERRIMFRRAMKRAMQNAMRLGAQGIKIMSSGRLNGIEIARTEWYREGRVPLHTLRADIDYGFSEAETTYGIIGVKVWVYKGDHLGRNDAPVVEEPQEDRRRRPGRPEGRRREGEGRPAGNRRGGAGAGRRAAPGADAKSGE

SEQ ID NO: 71697 - DNA, 795 bp, Ralstonia solanacearum
  CDS (1)..(795): transl_table=11
atgggacagaagattcatccgactggcttccgtctggctgtcagccgtaactgggcttcgcgttggtacgccagcaatacccagtttgcgggcatgctcaaggaagacatcgaagttcgcgagtttctgaagaagaagctgaagaacgcttcggtgggccgcgtggtcatcgagcgtccggccaagaatgcacgcatcaccatttacagctcgcgtccgggcgtggtgatcggcaagaagggcgaggacatcgaactgctgaaggctgagctgcagcgtcgcatgggcgtgcccgtgcacgtgaacatcgaagaaatccgcaagccggaagtcgatgcgcagctgatcgccgactcgatcacgcagcagctcgagcgccgcatcatgttccgccgcgccatgaagcgcgcgatgcagaacgcgatgcgcctcggcgcccagggcatcaagatcatgagctcgggccgtctgaacggcatcgaaatcgcccgtaccgagtggtatcgcgaaggccgtgtgcccctgcatacgctgcgcgccgacatcgactacggcttctccgaagcggaaactacctacggcatcatcggtgtcaaggtgtgggtgtacaagggcgaccacctgggtcgcaacgacgcgcccgtcgtggaagagccgcaagaagagcgtcgcaagcgtccgggtcgtccggaaggccgtcgccgtgagggcgagggtcgcccgggtggtcagcgccgcggtgctggcgcaggtggccgccgttccggcggcgccgacgccaagactggagaataa

SEQ ID NO: 71698 - protein, 264 aa, Ralstonia solanacearum
MGQKIHPTGFRLAVSRNWASRWYASNTQFAGMLKEDIEVREFLKKKLKNASVGRVVIERPAKNARITIYSSRPGVVIGKKGEDIELLKAELQRRMGVPVHVNIEEIRKPEVDAQLIADSITQQLERRIMFRRAMKRAMQNAMRLGAQGIKIMSSGRLNGIEIARTEWYREGRVPLHTLRADIDYGFSEAETTYGIIGVKVWVYKGDHLGRNDAPVVEEPQEERRKRPGRPEGRRREGEGRPGGQRRGAGAGGRRSGGADAKTGE

SEQ ID NO: 71699 - DNA, 732 bp, Rhizobium leguminosarum bv
  CDS (1)..(732): transl_table=11
atgggtcagaaaatcaatccaatcggtttccgcctcggcatcaaccgtacctgggatagccgctggtttgcggacaatgccgagtacggtcagctgctgcacgaagacctgaagatgcgcaagttcgtcatgagcgaactgaagcaggccgggatttccaaggtggtcatcgagcgtccgcacaagaagtgccgcgtcacgatccactcggcacgtccgggcctgatcatcggccgcaagggcgcagacatcgacaagctccgcaagaagctgtcggagatgacgaattcggaaacgcacctcaacatcgtcgaagtgcgcaagcccgaagtcgatgcgacgctggtcgctcagtcgatcgcccagcagctcgagcgtcgcgtggctttccgtcgcgccatgaagcgcgccgttcagtccgcgatgcgtcttggcgccgaaggcatcaagatcacctgcgctggccgtctcggcggcgctgaaatcgcccgtacggaatggtaccgcgaaggtcgtgtgccgttgcacaccctgcgcgccgacatcgactacggcacggctgaagcagaaaccgcgttcggcatctgcggcatcaaggtctggatcttcaagggcgaaatccttgagcatgatccgatggcttccgagcgccgcgcgatggaaggtgacgcccagggtccggcaagccgtgatcgtgaccgcgacagagaccgtcgccgcgacaacgcttga

SEQ ID NO: 71700 - protein, 243 aa, Rhizobium leguminosarum bv
MGQKINPIGFRLGINRTWDSRWFADNAEYGQLLHEDLKMRKFVMSELKQAGISKVVIERPHKKCRVTIHSARPGLIIGRKGADIDKLRKKLSEMTNSETHLNIVEVRKPEVDATLVAQSIAQQLERRVAFRRAMKRAVQSAMRLGAEGIKITCAGRLGGAEIARTEWYREGRVPLHTLRADIDYGTAEAETAFGICGIKVWIFKGEILEHDPMASERRAMEGDAQGPASRDRDRDRDRRRDNA

SEQ ID NO: 71701 - DNA, 726 bp, Rhizobium loti
  CDS (1)..(726): transl_table=11
atgggccagaaagtcaatccgatcggtcttcgcctcggcatcaaccgtacctgggattcgcgctggttcgcgaacaccggggagtacggcaagctgctgcatgaggacatcaagatccgcaagtatcttgagaaggaactcaagcaggccgcgatctccaaggtcgtgatcgagcgcccgcacaagaagtgccgcgtcaccatccatgccgcgcgcccgggtctgatcatcggcaagaagggcgccgacatcgagaagcttcgcaagaagctaatggagatgacgaagtccgagacgcacctcaacatcgtcgaagtgcgcaagccggagatcgacgcgaccctggtcgcccagtcgatcgcccagcagctcgagcgtcgtatcgcgttccgccgcgccatgaagcgcgccgtgcagtcggcgatgcgcctcggtgccgaaggcatccgcatcaactgctcgggccgtctcggcggcgccgaaatcgctcgcatggagtggtaccgcgaaggtcgcgtgccgctgcacacgctgcgcgccgatgtcgactacggcacagccgaagcgaatacggcttacggcatctgcggcgtcaaggtctgggtattcaagggcgagatcctcgagcacgatccgatggcttcggaacgtcgcgcgaccgagggtgatgctgcgcatggcggtggtggtgatcgcgaacgcggtcgtcgtcgcgaaaacgcctga

SEQ ID NO: 71702 - protein, 241 aa, Rhizobium loti
MGQKVNPIGLRLGINRTWDSRWFANTGEYGKLLHEDIKIRKYLEKELKQAAISKVVIERPHKKCRVTIHAARPGLIIGKKGADIEKLRKKLMEMTKSETHLNIVEVRKPEIDATLVAQSIAQQLERRIAFRRAMKRAVQSAMRLGAEGIRINCSGRLGGAEIARMEWYREGRVPLHTLRADVDYGTAEANTAYGICGVKVWVFKGEILEHDPMASERRATEGDAAHGGGGDRERGRRRENA

SEQ ID NO: 71703 - DNA, 714 bp, Rhizobium meliloti
  CDS (1)..(714): transl_table=11
atgggccagaagattaatccgatcggtttccgtctcggcatcaaccggacctgggatagccgttggttcgcggataacgcggaatacggccagcttcttcacgaagacctgaagatccgcgcctatctgatggaagagctgaagtcggccggtatcgccaaggtcgtgatcgagcgtccgcacaagaagtgccgcgtgacgatccactcggctcgcccgggcctgatcatcggcaagaagggcgccgacatcgaaaagcttcgcaagaagctttccgagatgaccaattcggaaacgcacctcaacatcgtcgaagtgcgcaagccggaagtcgacgcaacgctcgttgcgcagtcgatcgctcagcagctcgagcgccgcgtagcgtttcgtcgtgcgatgaagcgtgccgttcagtcggcgatgcgcctcggcgccgaaggcatcaagatcacttgcgccggccgtcttggcggtgcggaaatcgcccgtaccgaatggtatcgtgaaggccgcgttccgctgcatacgctgcgcgccgacatcgactacggtacggccgaagccgaaaccgctttcggaatctgcggtgtcaaggtctggatcttcaagggcgaaatccttgagcacgatccgatggcttccgagcgccgcgcgaccgagagtgacaaccagggcggtagcggcagagagcgtcgccgcgagaacgcgtaa

SEQ ID NO: 71704 - protein, 237 aa, Rhizobium meliloti
MGQKINPIGFRLGINRTWDSRWFADNAEYGQLLHEDLKIRAYLMEELKSAGIAKVVIERPHKKCRVTIHSARPGLIIGKKGADIEKLRKKLSEMTNSETHLNIVEVRKPEVDATLVAQSIAQQLERRVAFRRAMKRAVQSAMRLGAEGIKITCAGRLGGAEIARTEWYREGRVPLHTLRADIDYGTAEAETAFGICGVKVWIFKGEILEHDPMASERRATESDNQGGSGRERRRENA

SEQ ID NO: 71705 - DNA, 672 bp, Rhodospirillum rubrum
  CDS (1)..(672): transl_table=11
atgggacagaaagtcaatccgatcgggctgcgtcttggtatcaaccggacgtgggactcccgctggttcgccggccgcgactatgcgtcgctgctgcaccaggatctggcgatcaagaagtatctgaagagcaagctggcccaggccggcgtctcgcggatcgtcatcgaacgtccggccaagaaggcccgcatcaccatccataccgcccgtccgggcgtggtgatcggcaagaagggccaggacatcgagaacctgcgcaagaagctgcaggtgatgacgggcaacgaggttcacctcaacatcgtcgaaatccgtaagccggagctcgacgcccagttggtggccgagaatatcgcccagcagctcgagcgtcgcgtcgccttccgccgcgccatgaagcgcgccgttcagtcggcgatgcgtctgggggccctgggcatccgaatcaactgtggtggccgtctgggtggcgcggaaatcgcccgcaccgaatggtatcgcgaaggtcgcgtgccgttgcataccctgcgtgcggacgtggactacggcaccgccgcggcccacaccacctatggcgtctgtggcgttaaagtctgggtgttcaagggcgagatcatggaacacgatcccatggcccaagataagcgctcccaggaccagggccgctga

SEQ ID NO: 71706 - protein, 223 aa, Rhodospirillum rubrum
MGQKVNPIGLRLGINRTWDSRWFAGRDYASLLHQDLAIKKYLKSKLAQAGVSRIVIERPAKKARITIHTARPGVVIGKKGQDIENLRKKLQVMTGNEVHLNIVEIRKPELDAQLVAENIAQQLERRVAFRRAMKRAVQSAMRLGALGIRINCGGRLGGAEIARTEWYREGRVPLHTLRADVDYGTAAAHTTYGVCGVKVWVFKGEIMEHDPMAQDKRSQDQGR

SEQ ID NO: 71707 - DNA, 675 bp, Saccharophagus degradans
  CDS (1)..(675): transl_table=11
atgggtcagaaagtacatccaacaggtattcgacttggtattgtcaaaaagcatacatctacatggtatgccggcaaagctgagtatgcagacaagttgaatcaagatttgcaggtacgcaaatatattcaaaacgctttggcgcacgcatctgtgagccgtatcgatatcgagcgtcctgcgaacactgcacgtgtgactattcacactgctcgtccaggtatcgtaattggtaaaaaaggcgaagatgttgaaaaactacgcactgagctaactaagcaaatgggcgttcctgttcatatcaacatcgaagaaattcgtaaaccagacttagatgctgccttggctgctcaaagtgtggctcagcagttagagcgtcgtgttatgttccgtcgcgctatgaagcgcacagttcaaaatgcaatgcgtcaaggtgctgagggcgttaaagttcaggttggtggtcgtttgggcggtgctgaaatcgcacgttccgaatggtaccgcgaaggtcgtgtacctttgcacactctccgtgctgatattgactacgcaactgcagaagcttcaaccacttacggcatcattggcgtaaaagtttggatcttcaaaggcgagatcattggcggtatcgaagaagttgaagccaatcagaaaaagaaaggctctaagtaa

SEQ ID NO: 71708 - protein, 224 aa, Saccharophagus degradans
MGQKVHPTGIRLGIVKKHTSTWYAGKAEYADKLNQDLQVRKYIQNALAHASVSRIDIERPANTARVTIHTARPGIVIGKKGEDVEKLRTELTKQMGVPVHINIEEIRKPDLDAALAAQSVAQQLERRVMFRRAMKRTVQNAMRQGAEGVKVQVGGRLGGAEIARSEWYREGRVPLHTLRADIDYATAEASTTYGIIGVKVWIFKGEIIGGIEEVEANQKKKGSK

SEQ ID NO: 71709 - DNA, 693 bp, Shewanella oneidensis
  CDS (1)..(693): transl_table=11
atgggacagaaagtacatcctaatggtatccgtctgggtatcaccaagccttggatctctacctggtacgcagataagtcagattatgcaaataacctgaacagcgactgggaagtgcgtaagtatcttgcagacaaactgcaagctgcgtcagtatctaagattgttattgaacgcccagcgaaaagcatccgcgttactattcacactgcccgtccaggcgttgtgatcggtaagaaaggtgaagacgttgaagtattgcgtgctgcagtttcaaaactggctggcactcctgctcaaattaacatcgctgagatccgtaaacctgagctagatgccaagttagttgctgactctattgcacagcaattagagcgccgtgttatgttccgtcgcgcgatgaagcgtgcggtacaaaacgcaatgcgtattggtgctcaaggtatcaaagttgaagttagtggccgtttaggcggtgctgagattgcgcgctctgagtggtaccgtgaaggtcgtgtacctttgcacacactgcgtgctgatatcgactattcaacctctgaaagtcacactcaatacggtgtgattggtattaaagtttggatcttcaaaggtgaagttctggacggaatgctgccacagattgaagagccgaaacagcagcaacctaagcgcaagcctcgtggtaaatag

SEQ ID NO: 71710 - protein, 230 aa, Shewanella oneidensis
MGQKVHPNGIRLGITKPWISTWYADKSDYANNLNSDWEVRKYLADKLQAASVSKIVIERPAKSIRVTIHTARPGVVIGKKGEDVEVLRAAVSKLAGTPAQINIAEIRKPELDAKLVADSIAQQLERRVMFRRAMKRAVQNAMRIGAQGIKVEVSGRLGGAEIARSEWYREGRVPLHTLRADIDYSTSESHTQYGVIGIKVWIFKGEVLDGMLPQIEEPKQQQPKRKPRGK

SEQ ID NO: 71711 - DNA, 702 bp, Shigella flexneri
  CDS (1)..(702): transl_table=11
atgggtcagaaagtacatcgtaatggtattcgcttgggtattgtaaaaccatggaactctacttggtttgcgaacaccaaagaattcgctgacaacctggacagcgattttaaagtacgtcagtacctgactaaggaactggctaaagcgtccgtatctcgtatcgttatcgagcgtccggctaagagcatccgtgtaaccattcacactgctcgcccgggtatcgttatcggtaaaaaaggtgaagacgtagaaaaactgcgtaaggtcgtagcggacatcgctggcgttcctgcacagatcaacatcgccgaagttcgtaagcctgaactggacgcaaaactggttgctgacagcatcacttctcagctggaacgtcgcgttatgttccgtcgtgctatgaagcgtgctgtacagaacgcaatgcgtctgggcgctaaaggtattaaagttgaagttagcggccgtctgggcggcgcggaaatcgcacgtaccgaatggtaccgcgaaggtcgcgtaccgctgcacactctgcgtgctgacatcgactacaacacctctgaagcgcacaccacttacggtgtaatcggcgttaaagtgtggatcttcaaaggcgagatcctgggtggtatggctgctgttgaacaaccggaaaaaccggctgctcagcctaaaaagcagcagcgtaaaggccgtaaataa

SEQ ID NO: 71712 - protein, 233 aa, Shigella flexneri
MGQKVHRNGIRLGIVKPWNSTWFANTKEFADNLDSDFKVRQYLTKELAKASVSRIVIERPAKSIRVTIHTARPGIVIGKKGEDVEKLRKVVADIAGVPAQINIAEVRKPELDAKLVADSITSQLERRVMFRRAMKRAVQNAMRLGAKGIKVEVSGRLGGAEIARTEWYREGRVPLHTLRADIDYNTSEAHTTYGVIGVKVWIFKGEILGGMAAVEQPEKPAAQPKKQQRKGRK

SEQ ID NO: 71713 - DNA, 708 bp, Silicibacter pomeroyi
  CDS (1)..(708): transl_table=11
atgggacataaagtcaatccgatcggcatgcgtcttcaggtcaatcgcacctgggacagccgctggtacgcagataccaaggactatggcaatctgctgcttgaagacctcgcaatccgcgaattcatcaaggaagagtgcaagcaggctggcgttgcccgtgtgatcatcgagcgtccgcacaagaagtgccgcgtgacgatccacaccgcgcgtccgggcgtgatcatcggcaaaaaaggcgccgatatcgagaccctgcgcaagaagctggcgaacatgaccgacagcgaactgcacctgaacatcgtcgaagtgcgcaagcccgagatggatgctcagctggtcgccgagtcgatcgcacagcagctggaacgccgcgtgtccttccgccgtgcgatgaagcgcgcggtgcaaaactcgatgcggatgggtgccctgggcatccgtgtgaacgtcgccggccgtctgggcggtgccgagatcgcacggaccgagtggtatcgcgagggccgtgtgcccctgcacaccctgcgtgccgacatcgattatgctctggccgaggcctcgaccccttacgggatcatcgggatcaaggtctggatcttcaaaggcgagatcctcgagcatgatccgcaggcgcgtgaccgcaaggcacaggaactccaggacggtccggccccgcgtggcgccggtggccgccgctaa

SEQ ID NO: 71714 - protein, 235 aa, Silicibacter pomeroyi
MGHKVNPIGMRLQVNRTWDSRWYADTKDYGNLLLEDLAIREFIKEECKQAGVARVIIERPHKKCRVTIHTARPGVIIGKKGADIETLRKKLANMTDSELHLNIVEVRKPEMDAQLVAESIAQQLERRVSFRRAMKRAVQNSMRMGALGIRVNVAGRLGGAEIARTEWYREGRVPLHTLRADIDYALAEASTPYGIIGIKVWIFKGEILEHDPQARDRKAQELQDGPAPRGAGGRR

SEQ ID NO: 71715 - DNA, 720 bp, Silicibacter sp
  CDS (1)..(720): transl_table=11
atgggacataaagtcaatccggttggcatgcgcctgcagatcaaccgcacctgggacagccgctggtacgctgacaccaaggactacggtgatctcctcctcgaggacatcaagatccgtgagttcatcaaagaagagtgcaagcaggccggtgttgcccgcgtgatcatcgaacgcccccacaagaagtgccgtgtgaccattcacaccgcgcgtccgggcgtgatcatcggcaaaaaaggcgcggacatcgaagttcttcgcaagaagatcgcttccatgaccgactccgagctgcacctcaacatcgttgaggttcgcaagccggaactcgacgcacagctcgttggcgagtccatcgctcagcagctggagcgccgtgtgtccttccgccgcgcgatgaagcgggccgtgcagaacgccatgcgcatgggcgccctgggtatccgggtgaacgtcgctggtcgtctgggcggtgcagaaatcgcacgtaccgaatggtaccgtgaaggtcgtgtgccgttgcacaccctgcgcgcagacatcgattacgcacactctgaagcatccaccccctatggtatcatcggtatcaaggtctggatcttcaaaggtgagatcatggagcatgatcctcaggcgcgtgatcgcaaggctcaggaactccaggacggtccggcacctcgcggtgcaggcggtaaccgtcgtggcgatcgctaa

SEQ ID NO: 71716 - protein, 239 aa, Silicibacter sp
MGHKVNPVGMRLQINRTWDSRWYADTKDYGDLLLEDIKIREFIKEECKQAGVARVIIERPHKKCRVTIHTARPGVIIGKKGADIEVLRKKIASMTDSELHLNIVEVRKPELDAQLVGESIAQQLERRVSFRRAMKRAVQNAMRMGALGIRVNVAGRLGGAEIARTEWYREGRVPLHTLRADIDYAHSEASTPYGIIGIKVWIFKGEIMEHDPQARDRKAQELQDGPAPRGAGGNRRGDR

SEQ ID NO: 71717 - DNA, 708 bp, Sphingopyxis alaskensis
  CDS (1)..(708): transl_table=11
atgggccagaagagcaatccgatcggcctgcgcctgcaggtcaaccgcacctgggacagccgctggttcgccgaaggcgaagactatggccgcatgttggtcgaggatctgaagatccgccaatatgtgttcaaggccctgccgcaggcggcgatctcgaaggtcgtgatcgagcgtcccgccaagctgtgccgcgtgtcgatctatgccgcccgtccgggcgtcatcatcggcaagaagggcgccgacatcgaaaagctgcgcaagaagctgggcgagatgacgggcagcgacgtgtcgctgaacatcgtcgaaatccgcaagcccgaagttgacgccaagctcgtcgcgcagggcatcgccgaccagctcgaacgccgcgtcgccttccgccgcgcgatgaagcgcgccgtccagtcggcgatgcgtctcggcgccgaaggcatccgcatcaactgcgccggccgtctgggcggcgcggaaatcgcacgcaccgaatggtatcgcgaaggccgggtgccgctgcacacgctgcgcgccaatgtcgattatgccgaggccgaagcgcacaccgcctatggcgtgtgcgggatcaaggtgtggatcttcaagggcgagatactgggtcacgacccgatggcgaccgaccgtctgatgctcgatgcgcagacgacgggtgtccgtccggcgcgtgaagatcgccgctaa

SEQ ID NO: 71718 - protein, 235 aa, Sphingopyxis alaskensis
MGQKSNPIGLRLQVNRTWDSRWFAEGEDYGRMLVEDLKIRQYVFKALPQAAISKVVIERPAKLCRVSIYAARPGVIIGKKGADIEKLRKKLGEMTGSDVSLNIVEIRKPEVDAKLVAQGIADQLERRVAFRRAMKRAVQSAMRLGAEGIRINCAGRLGGAEIARTEWYREGRVPLHTLRANVDYAEAEAHTAYGVCGIKVWIFKGEILGHDPMATDRLMLDAQTTGVRPAREDRR

SEQ ID NO: 71719 - DNA, 654 bp, Staphylococcus aureus
  CDS (1)..(654): transl_table=11
gtgggtcaaaaaattaatccaatcggacttcgtgttggtattatccgtgattgggaagctaaatggtatgctgaaaaagacttcgcttcacttttacacgaagatttaaaaatccgtaaatttattgataatgaattaaaagaagcatcagtttctcacgtagagattgaacgtgctgcaaatcgtatcaacattgcaattcatactggtaaacctggtatggtaattggtaaaggcggttcagaaatcgaaaaattacgcaacaaattaaatgcgttaactgataaaaaagtacacatcaacgtaattgaaatcaaaaaagttgatcttgacgctcgtttagtagctgaaaacatcgcacgtcaattagaaaaccgtgcttcattccgtcgtgtacaaaaacaagcaatcactagagctatgaaacttggtgctaaaggtatcaaaactcaaatatctggtcgtttaggcggagctgacatcgctcgtgctgaacaatattcagaaggaactgttccacttcatacgttacgtgctgacatcgattatgcacacgctgaagctgacactacttacggtaaattaggcgttaaagtatggatttatcgtggagaagttcttcctactaagaacactagtggaggaggaaaataa

SEQ ID NO: 71720 - protein, 217 aa, Staphylococcus aureus
MGQKINPIGLRVGIIRDWEAKWYAEKDFASLLHEDLKIRKFIDNELKEASVSHVEIERAANRINIAIHTGKPGMVIGKGGSEIEKLRNKLNALTDKKVHINVIEIKKVDLDARLVAENIARQLENRASFRRVQKQAITRAMKLGAKGIKTQISGRLGGADIARAEQYSEGTVPLHTLRADIDYAHAEADTTYGKLGVKVWIYRGEVLPTKNTSGGGK

SEQ ID NO: 71721 - DNA, 828 bp, Streptomyces avermitilis
  CDS (1)..(828): transl_table=11
atgggccagaaggttaacccgcatgggttccggctcggcatcaccacggacttcaagtcccgttggtacgccgacaagctgtacaaggactacgtcaaggaagacgtcgccatccgtcggatgatgacgtccggcatggagcgcgccggcatctcgaaggttgagatcgagcgcacccgtgaccgcgtgcgggtggacatccacaccgcgcgtcccggcatcgtcatcggccgccgtggcgccgaggccgaccgcatccgcggtgacctcgagaagctcacgggcaagcaggtccagctgaacatcctcgaggtcaagaaccccgagaccgacgctcagctggttgctcaggccgttgccgagcagctgtcctcccgcgtctccttccgccgtgccatgcgtaagagcatgcagtcggcgatgaaggcgggcgccaagggcatcaagatccagtgtggtggccgtctcggcggcgccgagatgtcccgctcggagttctaccgcgagggtcgtgtgcccctgcacacgcttcgtgcgaacgtcgactacggcttcttcgaggccaagacgaccttcggccgcatcggtgtgaaggtctggatctacaagggcgacgtcaagaacatcgccgaggtccgcgccgagaacgccgctgcccgcgccggcaaccgcccggcccgtggtggcgctgaccgcccggcccgtggtggccgcggtggcgagcgtggcggtcgcggtcgtaagccgcagcaggctcccgctgccgaggcccccaaggccgaggctccggctgccgctccggctgagagcaccggaacggaggcctga

SEQ ID NO: 71722 - protein, 275 aa, Streptomyces avermitilis
MGQKVNPHGFRLGITTDFKSRWYADKLYKDYVKEDVAIRRMMTSGMERAGISKVEIERTRDRVRVDIHTARPGIVIGRRGAEADRIRGDLEKLTGKQVQLNILEVKNPETDAQLVAQAVAEQLSSRVSFRRAMRKSMQSAMKAGAKGIKIQCGGRLGGAEMSRSEFYREGRVPLHTLRANVDYGFFEAKTTFGRIGVKVWIYKGDVKNIAEVRAENAAARAGNRPARGGADRPARGGRGGERGGRGRKPQQAPAAEAPKAEAPAAAPAESTGTEA

SEQ ID NO: 71723 - DNA, 834 bp, Streptomyces coelicolor
  CDS (1)..(834): transl_table=11
atgggccagaaggtaaacccgcacgggttccggctcggcatcaccaccgacttcaagtcgcgttggtacgccgacaagctgtacaaggactacgtcaaggaagacgtcgccatccgccggatgctgacgtccggcatggagcgcgccggcatctccaaggtcgagatcgagcgcacccgtgaccgcgtccgcgtggacatccacacggctcgtccgggcatcgtcatcggccgccgcggtgcggaggccgacaagatccgcggtcagctcgagaagctcaccggcaagcaggtccagctgaacatcctcgaggtcaagagccccgagaccgacgctcagctggttgcccaggccgtcgccgagcagctctcctcccgcgtctccttccgtcgcgccatgcgcaagagcatgcagggcacgatgaaggccggcgccaagggcatcaagatccagtgcggtggccgcctcggtggcgccgagatgtcccgctcggagttctaccgcgagggccgtgtgcccctgcacacgctccgcgcgaacgtggactacggcttcttcgaggccaagacgaccttcggccgcatcggtgtgaaggtctggatctacaagggcgacgtcaagaacatcgccgaggtccgcgccgagaacgccgccgcgcgtgcgggcaaccgcccggcccgcggtggcggcaacgaccgcccggcccgtggtggccgcggtggcgagcgtcgcgggcgcaagccgcagcagcagtcggctccggccgccgaggcccccaaggccgaggcgcccgccgctgccgctccggctgagagcaccggaacggaggcctga

SEQ ID NO: 71724 - protein, 277 aa, Streptomyces coelicolor
MGQKVNPHGFRLGITTDFKSRWYADKLYKDYVKEDVAIRRMLTSGMERAGISKVEIERTRDRVRVDIHTARPGIVIGRRGAEADKIRGQLEKLTGKQVQLNILEVKSPETDAQLVAQAVAEQLSSRVSFRRAMRKSMQGTMKAGAKGIKIQCGGRLGGAEMSRSEFYREGRVPLHTLRANVDYGFFEAKTTFGRIGVKVWIYKGDVKNIAEVRAENAAARAGNRPARGGGNDRPARGGRGGERRGRKPQQQSAPAAEAPKAEAPAAAAPAESTGTEA

SEQ ID NO: 71725 - DNA, 651 bp, Syntrophus aciditrophicus
  CDS (1)..(651): transl_table=11
ttggggcagaaggttaatcccatcggtctgagactgggaatcaacaagaattggaattctcggtggtatgctgataagagctatcgctcgatgctgtatgaagatctcaaaattcgcggttatctgaaaaagaagctttatcatgcggggatatcgcatatagacatcgaaagagcggtcaataaggcaaaggtgaatatttatgctgcgcgtcctggaatcataatcggcaaaaaaggtgcggagattgaaaagctgaagaaagagctggagaacgtttccagtagcgaaatcatcatcaatatcctggaagtcagaaaaccggagattgacgctcagcttgttgccgaaaacatcgctacgcagttggagcggagagttgcatttcgtagagcaatgaagaaatgtgttttaaccgcactaaaatttggagccaaagggatcagagtaagttgttccggaagactaggtggcgctgaaatgtcaagaacggagtggtatcgtgaaggcagagtgcccctgcatacattaagagcggatatagacagcggttttacggaagcaaagactgcttatgggcagatcggcatcaaggtattgatatttcacggtgaagtgcttccgggaagaaaggaacttgaaaaaccatag

SEQ ID NO: 71726 - protein, 216 aa, Syntrophus aciditrophicus
MGQKVNPIGLRLGINKNWNSRWYADKSYRSMLYEDLKIRGYLKKKLYHAGISHIDIERAVNKAKVNIYAARPGIIIGKKGAEIEKLKKELENVSSSEIIINILEVRKPEIDAQLVAENIATQLERRVAFRRAMKKCVLTALKFGAKGIRVSCSGRLGGAEMSRTEWYREGRVPLHTLRADIDSGFTEAKTAYGQIGIKVLIFHGEVLPGRKELEKP

SEQ ID NO: 71727 - DNA, 723 bp, Synechocystis sp
  CDS (1)..(723): transl_table=11
atgggacaaaaaatacatccagttggcttccgcctcggcatcactaaggaccacaaatcctgttggtatgccgaccccaagcgctatccggagcttttacaggaagaccacaaaattcgccaatatattgagaaaaccctcaacaatgccggtatttccgatatccgcattgagcgtaaagctgaacagattgagttgggtattcacaccgctcgccccggggtagttgtcggtcgaggcggctctggtattgaacaactacgggaaggcttgcaaaaactgctgggttcagcccgtcagattcgagtcaatgtcatcgaagtccccaatgctgatgcggatgcggctctaatggccgagtacatcggtcaacagttagaacgtcgggtttccttccgccgggtggtgcgccaagcattgcaaagggcagaaagggccgaagttaagggtatcaaaatacaagttagcggtcgcctaaatggggcagaaattgcccggacggaatgggttcgggaaggccgggtgcctctccataccctgcgggcagacattgattatgcctaccgcaccgccctgaccacctacggcattttagggattaaggtctggatttttaaaggggaagtcatccctggccaggaagccgccatcgttgctccccccagccaaccccgtcgcaaatcccgtcggcaacagttcgatgaccgttcccaggacggttaa

SEQ ID NO: 71728 - protein, 240 aa, Synechocystis sp
MGQKIHPVGFRLGITKDHKSCWYADPKRYPELLQEDHKIRQYIEKTLNNAGISDIRIERKAEQIELGIHTARPGVVVGRGGSGIEQLREGLQKLLGSARQIRVNVIEVPNADADAALMAEYIGQQLERRVSFRRVVRQALQRAERAEVKGIKIQVSGRLNGAEIARTEWVREGRVPLHTLRADIDYAYRTALTTYGILGIKVWIFKGEVIPGQEAAIVAPPSQPRRKSRRQQFDDRSQDG

SEQ ID NO: 71729 - DNA, 720 bp, Thermus thermophilus
  CDS (1)..(720): transl_table=11
atgggaaataagatccaccccatcggtttccggctcggcatcacccgggactgggagtcccgctggtacgccggcaagaagcagtaccgccacctgctcctcgaggaccagaggatccggggccttttggagaaggagctctactcggcgggcctcgcccgggtggacattgagcgggccgccgacaacgtggccgtgaccgtccacgtggccaagcccggggtggtcatcggccggggtggcgagcggatccgggtgctccgggaggagctggccaagctcaccggcaagaacgtggccctgaacgtccaggaggtgcagaaccccaacctctccgcccccctcgtggcccagcgggtggcggagcagattgagcgccgcttcgccgtgcgccgggccatcaagcaggcggtccagcgggtcatggagtccggggccaagggggccaaggtgatcgtctccggccgcatcggcggggccgagcaggcgcgcaccgagtgggccgcccagggacgggtccccctccacaccctgcgtgctaacatagactacggctttgccttggcccggaccacctacggcgtcctcggggtcaaggcctacatcttcctgggcgaggtgatcggcggccagaagcccaaggcccggcccgagctgccgaaggccgaggagaggccccgccgccgtcgccctgccgtgcgcgtgaagaaggaggagtga

SEQ ID NO: 71730 - protein, 239 aa, Thermus thermophilus
MGNKIHPIGFRLGITRDWESRWYAGKKQYRHLLLEDQRIRGLLEKELYSAGLARVDIERAADNVAVTVHVAKPGVVIGRGGERIRVLREELAKLTGKNVALNVQEVQNPNLSAPLVAQRVAEQIERRFAVRRAIKQAVQRVMESGAKGAKVIVSGRIGGAEQARTEWAAQGRVPLHTLRANIDYGFALARTTYGVLGVKAYIFLGEVIGGQKPKARPELPKAEERPRRRRPAVRVKKEE

SEQ ID NO: 71731 - DNA, 705 bp, Thiobacillus denitrificans
  CDS (1)..(705): transl_table=11
atgggacaaaaaatacatccgattggattccgcctcggtgttcagcgcatctggacggccaagtggtatggctcgaaccgtaatttctccgacacgctgctcgaagacatcaaggttcgcgattacctgaagaagaagctctcgcacgcctcggtctcgaaggtgctcatcgagcgtccggcgaagaacgcgcggatcacaatcttcagtggtcgccccggtgtcgtgatcggcaagaagggtgaggacatcgaggtgctgcgcggcgaactcgcgcgactgatgtcggtgccggtgcacgtcaacatcgaagaagtgcgcaagcccgagaccgatgcgcagatcgtcgccgacggcatcgcccagcagctcgagaagcgtgtcatgttccgccgtgccatgaagcgcgcgatgcaaaacgcgatgcgcctcggcgcccagggcatcaagatcatgagctcgggtcgtctgaacggcgccgagatcgcgcgtaccgagtggtaccgtgaaggccgcgtgccgctccataccctgcgtgccgaaatcgactacggtttcgcggaagccaagaccacctacgggatcatcgggatcaaggtttgggtatacaaaggcgatgcattgacccgcggtgagcagcctgcagctgccgaacaggaaaagcgcggcaagaaatcaggagtgaaacatgctgcagccagctag

SEQ ID NO: 71732 - protein, 234 aa, Thiobacillus denitrificans
MGQKIHPIGFRLGVQRIWTAKWYGSNRNFSDTLLEDIKVRDYLKKKLSHASVSKVLIERPAKNARITIFSGRPGVVIGKKGEDIEVLRGELARLMSVPVHVNIEEVRKPETDAQIVADGIAQQLEKRVMFRRAMKRAMQNAMRLGAQGIKIMSSGRLNGAEIARTEWYREGRVPLHTLRAEIDYGFAEAKTTYGIIGIKVWVYKGDALTRGEQPAAAEQEKRGKKSGVKHAAAS

SEQ ID NO: 71733 - DNA, 729 bp, Trichodesmium erythraeum
  CDS (1)..(729): transl_table=11
atgggacaaaaaatacatccaactggttttagactgggtattacccaagagcatcgttctcgttggtatgctgaccctaagaactatccagataccttgcaagaagatcacaaaattcgtcaatatgtgaaggcgactcttgctaatgcaggaatttctcaaatcagagttgagagaaaagcagagcagattgatttagaagttagaacagctagaccaggtgtagtagttggtcggggcggtgcaggaattgattctttgagggtagggttacaaaaacttttgggtagtaaccgtcagatcagaatcaatgttgttgaagtcacaaaagtagatactgatgctatgctcattggtgaatatattgctcaacaactagaaaaaagggtttcttttcgtcgggttgtacgtcaagctataactagagcacaaaaagctggtgtagaaggcattaagatacaagttagtggcagggtcaatggagcagaaattgctcgtactgaggttaccagagaaggtagtgtacctttgcatacattaagagctaatattgattatgcctactgtaccgctaaaacaatttacggtatccttggtattaaaatttgggtttttaagggagaaataattcctggtcaagaagaaattgccaatgcaaaagtaaatcaaccaaaacgtagacaacaaaaacgtcgtcaacaatatgatgataggtctaacgaagggtga

SEQ ID NO: 71734 - protein, 242 aa, Trichodesmium erythraeum
MGQKIHPTGFRLGITQEHRSRWYADPKNYPDTLQEDHKIRQYVKATLANAGISQIRVERKAEQIDLEVRTARPGVVVGRGGAGIDSLRVGLQKLLGSNRQIRINVVEVTKVDTDAMLIGEYIAQQLEKRVSFRRVVRQAITRAQKAGVEGIKIQVSGRVNGAEIARTEVTREGSVPLHTLRANIDYAYCTAKTIYGILGIKIWVFKGEIIPGQEEIANAKVNQPKRRQQKRRQQYDDRSNEG

SEQ ID NO: 71735 - DNA, 702 bp, Vibrio cholerae
  CDS (1)..(702): transl_table=11
atgggtcagaaagtacatccaaatggtattcgtctaggcatcgttaagccttggaatgctacatggtttgctaacaccaaagatttcgctgacaacctagacggcgacttcaaggtacgtcaatacctgtctaaggaattggcaaacgcgtctctgtcacgcatcgttatcgaacgtcctgcgaaaagcatccgtgtgactattcacactgctcgtccaggtgttgttatcggtaagaaaggcgaagacgttgaaaaactgcgtgcagcagtagcaaaaattgctggcgtaccagcgcaaatcaacatcgctgaagtacgtaagcctgagctggatggtcagcttgtggctgatagcatcgcgtctcaactagagcgtcgcgtaatgttccgtcgtgctatgaagcgcgcagtacaaaacgcaatgcgcctaggcgctaaaggtatcaaagtggaagtaagcggtcgtttaggcggcgctgaaatcgctcgttcagagtggtatcgtgaaggtcgcgtacctctacacactctgcgtgctgacattgattacgcaacttcttcggctcacaccacctacggtgtaatcggcgttaaagtctggatcttcaaaggtgagatcctaggcggtatgccagcagcaactgaagctgcagagccaaaggctgacaagccgaagaagcagcgtaaaggccgtaagtaa

SEQ ID NO: 71736 - protein, 233 aa, Vibrio cholerae
MGQKVHPNGIRLGIVKPWNATWFANTKDFADNLDGDFKVRQYLSKELANASLSRIVIERPAKSIRVTIHTARPGVVIGKKGEDVEKLRAAVAKIAGVPAQINIAEVRKPELDGQLVADSIASQLERRVMFRRAMKRAVQNAMRLGAKGIKVEVSGRLGGAEIARSEWYREGRVPLHTLRADIDYATSSAHTTYGVIGVKVWIFKGEILGGMPAATEAAEPKADKPKKQRKGRK

SEQ ID NO: 71737 - DNA, 699 bp, Vibrio parahaemolyticus
  CDS (1)..(699): transl_table=11
atgggtcaaaaagtacatccaaatggtattcgtctaggcatcgttaagccttggaatgctacatggtttgctaacaccaaagatttcgctgacaacctagacggcgacttcaaggtacgtcagttccttacaagtgaactgaaaaaagcgtctctatcacgtatcgttatcgagcgtcctgctaagagtatccgtgtgactattcacactgctcgtccaggcgttgttatcggtaagaaaggtgaagacgttgagaagctacgcgcagctgtagctaaaattgcaggtgtaccagcgcaaattaacatcgctgaagtacgtaagcctgaactagatgcgcaacttgttggtgacagcatcgcgtctcagctagagcgtcgcgttatgttccgtcgtgctatgaagcgcgcagtacaaaacgctatgcgtctaggcgctaaaggtatcaaagtggaagtaagcggtcgtctaggcggcgctgaaatcgcacgttcagagtggtaccgtgaaggccgtgtgcctctacacactctacgtgctgacattgattacgcaacttcttcggctcacactcaatacggtgtgatcggcattaaaacttggatcttcaaaggtgaaatcctaggtggtatgccagcagctaacgctgtagagcctaaaggcgacaagcctaagaagcagcgtaaaggccgtaagtaa

SEQ ID NO: 71738 - protein, 232 aa, Vibrio parahaemolyticus
MGQKVHPNGIRLGIVKPWNATWFANTKDFADNLDGDFKVRQFLTSELKKASLSRIVIERPAKSIRVTIHTARPGVVIGKKGEDVEKLRAAVAKIAGVPAQINIAEVRKPELDAQLVGDSIASQLERRVMFRRAMKRAVQNAMRLGAKGIKVEVSGRLGGAEIARSEWYREGRVPLHTLRADIDYATSSAHTQYGVIGIKTWIFKGEILGGMPAANAVEPKGDKPKKQRKGRK

SEQ ID NO: 71739 - DNA, 702 bp, Vibrio vulnificus
  CDS (1)..(702): transl_table=11
atgggtcaaaaagtacatcctaatggtattcgtctaggcatcgttaagccttggaatgctacatggtttgctaacaccaaagatttcgctgacaacctagacggcgacttcaaggtacgtcagttcctaactaaggaactttcaaaagcgtctctatcacgtatcgttatcgagcgtcctgctaagagcatccgtgtgactattcacactgctcgtccaggcgttgttatcggtaagaaaggtgaagacgttgagaagctacgcacagctgtagcgaaaattgcaggtgtaccagcgcaaattaacatcgctgaagtacgtaagcctgaactagatgcgcaacttgttggtgacagcatcgcgtctcagctagagcgtcgtgtaatgttccgtcgtgctatgaagcgtgcggtacaaaacgcaatgcgtctaggtgctaagggtatcaaagtggaagtaagcggtcgtctaggcggcgctgaaatcgcacgttctgagtggtaccgtgaaggccgtgtgcctctacacactctacgtgcagacattgattacgcaacttcttcggctcacaccacatacggtgtaatcggcattaaagtttggatcttcaaaggtgagatcctaggcggtatgccagcagcaactgaagctgcagagccaaaggctgacaagcctaagaagcagcgtaaaggccgtaagtaa

SEQ ID NO: 71740 - protein, 233 aa, Vibrio vulnificus
MGQKVHPNGIRLGIVKPWNATWFANTKDFADNLDGDFKVRQFLTKELSKASLSRIVIERPAKSIRVTIHTARPGVVIGKKGEDVEKLRTAVAKIAGVPAQINIAEVRKPELDAQLVGDSIASQLERRVMFRRAMKRAVQNAMRLGAKGIKVEVSGRLGGAEIARSEWYREGRVPLHTLRADIDYATSSAHTTYGVIGIKVWIFKGEILGGMPAATEAAEPKADKPKKQRKGRK

SEQ ID NO: 71741 - DNA, 711 bp, Wigglesworthia glossinidia brevipalpis
  CDS (1)..(711): transl_table=11
atgggacaaaaagtaaatccaaatggtatcaggcttggtataattaagtcatggagctctacttggtatgcaaatactaaagaattttcaaaaaatttaattagtgattttaaagttagagaatttttaaaaaagtctttatctaaagcatatgtatctaagttaatcatagaaagacctgcgaaaagtattagaataaatatatataccgctaggccaggaatagtaatcggaagaaaaggggaagatgttgataaattaagaaaagaaatatctaacattaccggagttcctgctcaaattagtattacagaaattaaaaggccggaattagatgcaaaattagtatcagaaaatatagcttctcaattagaaagaagaattatgttcagaagagctatgaaacgtgcagtacaaaatgcaattagattaggagcaaaaggaataaaagtagaagtaagtggaagattaggaggagcagaaatagcaagaaaagaatggtatagagaaggcagagttcctcttcatacttttagagcagatatagattataatacatcagaagctcatacaacatatggaatcattggagtaaaagtaacaatttttaaaggagaaatattaggaaactcatctccatatattaatgaaaaaaaatatatgcccactaaaaagggtaataaaaaaattagaaaatatacaaaggaataa

SEQ ID NO: 71742 - protein, 236 aa, Wigglesworthia glossinidia brevipalpis
MGQKVNPNGIRLGIIKSWSSTWYANTKEFSKNLISDFKVREFLKKSLSKAYVSKLIIERPAKSIRINIYTARPGIVIGRKGEDVDKLRKEISNITGVPAQISITEIKRPELDAKLVSENIASQLERRIMFRRAMKRAVQNAIRLGAKGIKVEVSGRLGGAEIARKEWYREGRVPLHTFRADIDYNTSEAHTTYGIIGVKVTIFKGEILGNSSPYINEKKYMPTKKGNKKIRKYTKE

SEQ ID NO: 71743 - DNA, 711 bp, Wolinella succinogenes
  CDS (1)..(711): transl_table=11
atgggtcaaaaagtcaatcctataggtcttagattaggcatcaaccgaaactgggcgtcacgatggttccctaactatcaaaccgctcctttgaatatcagcgaagatcacaagattcgaaaattcctcaaaaaagagctctattatgcgggcgtgagcgagattatcattgagcgaacggctaagaagcttcgagtgactgtggtagcggctcgacctggaatcatcatcggtaaaaaaggtgcagatattgagaaactcaaagaagcactcaaaaagatcgttgataaagagatctctattaatattaaggaagtgaagcgcccccaagcgaacgctcaattggccgctgaaaatgtcactatgcaactagagcgacgagtcgcttttagacgcgcaatgaaaaaagtgatgcaagcggctatgaaagcaggcgctaaaggaatcaaaatcaaagtttcaggtcgattggctggagcggagatggcgcgaacagagtggtatatggaaggacgagttcctcttcatacattgcgagcgaagattgattacggttttgctgaggcgatgaccacttatggaatcatcggggcaaaagtttggatctttaaaggtgaagttcttcaaaaaggaatccagcctgagaagaaagaagaggctcctgctcgagataaagagggtagaggcacacgaagaagagggaggcaataa

SEQ ID NO: 71744 - protein, 236 aa, Wolinella succinogenes
MGQKVNPIGLRLGINRNWASRWFPNYQTAPLNISEDHKIRKFLKKELYYAGVSEIIIERTAKKLRVTVVAARPGIIIGKKGADIEKLKEALKKIVDKEISINIKEVKRPQANAQLAAENVTMQLERRVAFRRAMKKVMQAAMKAGAKGIKIKVSGRLAGAEMARTEWYMEGRVPLHTLRAKIDYGFAEAMTTYGIIGAKVWIFKGEVLQKGIQPEKKEEAPARDKEGRGTRRRGRQ

SEQ ID NO: 71745 - DNA, 735 bp, Xanthomonas axonopodis pv
  CDS (1)..(735): transl_table=11
atgggtcataaagttcatccgactggaatccgcctcggcatcgccaaggactggaattccaagtggtacgcaaacaaggccgagttcgcctcctatttggcagccgacctgaaagtgcgtgaaatgctgcgcaagaagctcgcgcaggcaggtgtcagcaagatcttgatcgagcgccctgccaaaaccgcccgcgtgaccattcacaccgcccgtccgggtgtggtgatcggcaagcgtggcgaggacatcgaaaagctgcgcaaggaagtgagcgagctgatgggcgttccggcgcacatcaacgtcaccgaagtgcgcaagccggagctggacgcgcagctggtcgccgagtcgatcgcgcagcagcttgagcgtcgcatcatgttccgccgtgcaatgaagcgctcggtcggtaacgcgatgcgcctgggtgccctgggcatcaaggtcaatgtggctggccgcctcaacggtgcagaaatcgcccgttcggagtggtaccgcgaaggccgcgtgccgctgcacacgctacgtgccgacattgattacggttttgccgaggcgtccacgacgtacggcatcatcggtatcaaggtctggatctataagggcgaagtcttcgacttctctcaggttggccaggaaaagcaggacgacagcccgcgcaacgatcgtaacgatcgcggcgaccgtggtgaccgcccgtcgcgcccggctcgtgaagcgaggtaa

SEQ ID NO: 71746 - protein, 244 aa, Xanthomonas axonopodis pv
MGHKVHPTGIRLGIAKDWNSKWYANKAEFASYLAADLKVREMLRKKLAQAGVSKILIERPAKTARVTIHTARPGVVIGKRGEDIEKLRKEVSELMGVPAHINVTEVRKPELDAQLVAESIAQQLERRIMFRRAMKRSVGNAMRLGALGIKVNVAGRLNGAEIARSEWYREGRVPLHTLRADIDYGFAEASTTYGIIGIKVWIYKGEVFDFSQVGQEKQDDSPRNDRNDRGDRGDRPSRPAREAR

SEQ ID NO: 71747 - DNA, 720 bp, Xylella fastidiosa
  CDS (1)..(720): transl_table=11
atggggcataaagttcatccgattggaattcgtctgggtatatctgcagattggaattccaagtggtacgcaaataaggctgaatttgcgggatatttggccgcagatcttaaagtgcgccaagtgttacgcaaaaaaatgtctcaggctggtatcagtaagatacttattgagcgtccttctaatactgcttgtgttagcatgcacgttgctcgccctggtgtagttattggtaagcgcggtgaagatattgaaatgttgagaaagcaagtcagtgatattatgggtgtttccgtccatatcaatgtcattgaagtacgtaaacctgagcttgatgcacagttggtcgctgaatcggttgctcaacagttagaacgtaggattatgtttcgtcgtgcgatgaagcgttcggtgggtaatgcgatgcgtttgggtgctttagggataaagattagtgttgctggacgtcttaatggtgctgagattgctcgatctgaatggtaccgtgaaggtcgtgtgccgttgcaaactttgcgtgccgatataggttatggtttttctgaagcgcataccaactatggtgttactggtgtcaaggttttgatatatcatggagatattttcagtttttccagtgtgggtcaggaaaagcaggatgatatttcgcgcggtgatcgtaatgctgaccgttcatctcgtcgttcccgtgaggtgaggtga

SEQ ID NO: 71748 - protein, 239 aa, Xylella fastidiosa
MGHKVHPIGIRLGISADWNSKWYANKAEFAGYLAADLKVRQVLRKKMSQAGISKILIERPSNTACVSMHVARPGVVIGKRGEDIEMLRKQVSDIMGVSVHINVIEVRKPELDAQLVAESVAQQLERRIMFRRAMKRSVGNAMRLGALGIKISVAGRLNGAEIARSEWYREGRVPLQTLRADIGYGFSEAHTNYGVTGVKVLIYHGDIFSFSSVGQEKQDDISRGDRNADRSSRRSREVR

SEQ ID NO: 71749 - DNA, 753 bp, Ziziphus jujube witches
  CDS (1)..(753): transl_table=11
atgggtcaaaagagtaatcctaatggtttgagattaggaataattaggacttgggaatctaaatggtatgatgttgataaaaaagttccttttttagtcggtgaagattttaaaattagacctttgattaaaaatcattatcctaaatcaactatttctcaaatagaaattaaacgtttaaaaaaatcaaatgatgaatttattgaaatcgatttatatacttcaaaaataggtatcattcaaggtccagaaaataagaataaaaatagtttaattaataaaatagaaaaattaattaataaaaaagttcaaattaatattttcgaagtaaaagcaattaataaaattgctgttttagttgctcaaaatatcgctatgcaattacaacaaagagctttttataaagctgttttaaaatcagctattcaaaaagctttaaaaagcggcgttaaaggcattaagattattattacaggccgtttaggcggagctgaaaaagccagaagagattctatttcgatgggagtcgttcctttgaatactttgagagctgatattgattacgcttttgaagaagcccatactacttatggtgttttaggcgttaaagtaattattaatcatggtgaggttttacctaataaaaccatagcagatactagacaaatattttcttctcaatatgaaaataaaaaaaataataataaaagacattttgctgataagaaaaattttaaaaaaagcacgtcttaa

SEQ ID NO: 71750 - protein, 250 aa, Ziziphus jujube witches
MGQKSNPNGLRLGIIRTWESKWYDVDKKVPFLVGEDFKIRPLIKNHYPKSTISQIEIKRLKKSNDEFIEIDLYTSKIGIIQGPENKNKNSLINKIEKLINKKVQINIFEVKAINKIAVLVAQNIAMQLQQRAFYKAVLKSAIQKALKSGVKGIKIIITGRLGGAEKARRDSISMGVVPLNTLRADIDYAFEEAHTTYGVLGVKVIINHGEVLPNKTIADTRQIFSSQYENKKNNNKRHFADKKNFKKSTS

SEQ ID NO: 71751 - DNA, 720 bp, Oryza sativa
  CDS (1)..(720)
atgggacaaaaaataaatccacttggtttcagacttggtacaacccaaaatcaccattccttttggttcgcacaaccaaaaaattattctgaaggtctacaggaagataaaaaaatacggaattgtatcaagaactatatacaaaagaataggaaaaagggctcgaatagaaaaatagaagcagactcaagtttcgaagtaattacacataataaaaaaatggactcaggctcaagttccgaagtaattacacatatagaaattcaaaaagaaatcgatacaatccacgtcataatccatattggattccccaatttattaaagaaaaaaggagcaatcgaagaattagagaaagatctacaaaaagaagttaattctgtaaaccagagacttaatattgggatcgaaaaagtgaaagaaccttatagacaacctaacattcttgcagaatatatagctttccaattaaaaaatagagtttcattccgaaaggcaatgaaaaaagccattgaattaactaaaaaaacagatataaagggagtaaaagtaaaaattgcaggccgtctcgcgggaaaagaaattgcgcgtgccgaatgcatcaaaaaaggtagacttcccctccaaacaattcgcgctaaaattgattattgctgctatccaattcgaactatctatggagtattaggagttaaaatttggatattcgtagacgaagaataa

SEQ ID NO: 71752 - protein, 239 aa, Oryza sativa
MGQKINPLGFRLGTTQNHHSFWFAQPKNYSEGLQEDKKIRNCIKNYIQKNRKKGSNRKIEADSSFEVITHNKKMDSGSSSEVITHIEIQKEIDTIHVIIHIGFPNLLKKKGAIEELEKDLQKEVNSVNQRLNIGIEKVKEPYRQPNILAEYIAFQLKNRVSFRKAMKKAIELTKKTDIKGVKVKIAGRLAGKEIARAECIKKGRLPLQTIRAKIDYCCYPIRTIYGVLGVKIWIFVDEE

SEQ ID NO: 71753 - DNA, 657 bp, Brassica napus
  CDS (1)..(657)
atgggacaaaaaataaatccacttggtttcagacttggtacaacccaaagtcatcattctatttggtttgcacaaccaaaaaagtattctgaaggtttagaagaagataaaaaaatacgagactgtattaaaaattatgtccaaaaaaatataagaatatcctctggtatggagggaattgcacgtatcgaaattcaaaaaagaatcgatctcattcagatcataatctatatgggatttcctaaattattaattgaagataaaccccgaagaatcgaagaattacagatgaatgttcaaaaagaacttaattgtgtcaatagaaaactcaacattgctattacccgaatttccaatccgtatgggcatcctaatattcttgcagaatttatagctggccaattaaaaaatcgcgtttcttttcgaaaagcaatgaaaaaagctattgaattaactgaacaggcgaatacaaaaggaattcaagtacaaattgcaggacgtatcgacggaaaagaaattgcacgtgttgaatggatcagagaaggcagagttcctttacaaacaattgaagctaaaattgattattgttcctatacagttcgaactatttatggggttttaggaataaaaatttggatattcgtagacgaagaataa

SEQ ID NO: 71754 - protein, 218 aa, Brassica napus
MGQKINPLGFRLGTTQSHHSIWFAQPKKYSEGLEEDKKIRDCIKNYVQKNIRISSGMEGIARIEIQKRIDLIQIIIYMGFPKLLIEDKPRRIEELQMNVQKELNCVNRKLNIAITRISNPYGHPNILAEFIAGQLKNRVSFRKAMKKAIELTEQANTKGIQVQIAGRIDGKEIARVEWIREGRVPLQTIEAKIDYCSYTVRTIYGVLGIKIWIFVDEE

SEQ ID NO: 71755 - DNA, 651 bp, Glycine max
  CDS (1)..(651)
atgggacaaaaaataaatccgcttggtttcagacttggtacaactcaaagtcatgattctatttggtttgctcaaccaacaaattattccgagaatatacaagaagataaaaaaatacgagattgtatcaaaaattatatacaaaaaaatataagaatatcctctggtgttgagggaattggacagataaagattcaaaaaagaattgatcttattcaagttataatatatatgggatttccaaagtttttaatagagggtaagtctcaaaaaatcgaagaattacagacgaatatgcaaaaaaaactgaattgtgtgaatcgaaaactaaacattgctattgtaaaagttgcaaatgcttataaacaccctaatattattgcagaatttatagctggacaattaaagaatagagtttcgtttcgtaaagcaatgaaaaaagctattgaattaactgaacaggcgggtacaaaaggagttcaagtacaaattgcaggacgtatcgacggaaaagaaattgcacgtgttgaatggatcagagaaggtagagttcctctacaaaccattcgagcgaaaatcgattattgttgctatacagttcgaactatttatggggttttagggatcaaagtttggatattttctaaataa

SEQ ID NO: 71756 - protein, 216 aa, Glycine max
MGQKINPLGFRLGTTQSHDSIWFAQPTNYSENIQEDKKIRDCIKNYIQKNIRISSGVEGIGQIKIQKRIDLIQVIIYMGFPKFLIEGKSQKIEELQTNMQKKLNCVNRKLNIAIVKVANAYKHPNIIAEFIAGQLKNRVSFRKAMKKAIELTEQAGTKGVQVQIAGRIDGKEIARVEWIREGRVPLQTIRAKIDYCCYTVRTIYGVLGIKVWIFSK

SEQ ID NO: 71757 - DNA, 20 bp, Artificial sequence
  primer
atgggtcagaaagtacatcc

SEQ ID NO: 71758 - DNA, 20 bp, Artificial sequence
  primer
ttacttagcagcttttttgc

SEQ ID NO: 71759 - protein, 278 aa, Artificial sequence
  consensus sequence
  Variant (5)..(6): Xaa in position 5 to 6 is any amino acid
  Variant (8)..(8): Xaa in position 8 is any amino acid
  Variant (10)..(10): Xaa in position 10 is any amino acid
  Variant (14)..(19): Xaa in position 14 to 19 is any amino acid
  Variant (20)..(21): Xaa in position 20 to 21 is any or no amino acid
  Variant (23)..(23): Xaa in position 23 is any amino acid
  Variant (25)..(25): Xaa in position 25 is any amino acid
  Variant (27)..(33): Xaa in position 27 to 33 is any amino acid
  Variant (34)..(38): Xaa in position 34 to 38 is any or no amino acid
  Variant (40)..(41): Xaa in position 40 to 41 is any amino acid
  Variant (43)..(45): Xaa in position 43 to 45 is any amino acid
  Variant (47)..(62): Xaa in position 47 to 62 is any amino acid
  Variant (63)..(93): Xaa in position 63 to 93 is any or no amino acid
  Variant (95)..(104): Xaa in position 95 to 104 is any amino acid
  Variant (105)..(115): Xaa in position 105 to 115 is any or no amino acid
  Variant (117)..(120): Xaa in position 117 to 120 is any amino acid
  Variant (122)..(132): Xaa in position 122 to 132 is any amino acid
  Variant (133)..(143): Xaa in position 133 to 143 is any or no amino acid
  Variant (145)..(158): Xaa in position 145 to 158 is any amino acid
  Variant (159)..(172): Xaa in position 159 to 172 is any or no amino acid
  Variant (174)..(179): Xaa in position 174 to 179 is any amino acid
  Variant (180)..(183): Xaa in position 180 to 183 is any or no amino acid
  Variant (185)..(191): Xaa in position 185 to 191 is any amino acid
  Variant (193)..(194): Xaa in position 193 to 194 is any amino acid
  Variant (197)..(197): Xaa in position 197 is any amino acid
  Variant (200)..(201): Xaa in position 200 to 201 is any amino acid
  Variant (203)..(204): Xaa in position 203 to 204 is any amino acid
  Variant (207)..(207): Xaa in position 207 is any amino acid
  Variant (209)..(209): Xaa in position 209 is any amino acid
  Variant (211)..(211): Xaa in position 211 is any amino acid
  Variant (213)..(222): Xaa in position 213 to 222 is any amino acid
  Variant (223)..(223): Xaa in position 223 is any or no amino acid
  Variant (225)..(225): Xaa in position 225 is any amino acid
  Variant (227)..(231): Xaa in position 227 to 231 is any amino acid
  Variant (234)..(235): Xaa in position 234 to 235 is any amino acid
  Variant (237)..(237): Xaa in position 237 is any amino acid
  Variant (242)..(242): Xaa in position 242 is any amino acid
  Variant (245)..(246): Xaa in position 245 to 246 is any amino acid
  Variant (253)..(253): Xaa in position 253 is any amino acid
  Variant (255)..(255): Xaa in position 255 is any amino acid
  Variant (258)..(258): Xaa in position 258 is any amino acid
  Variant (262)..(267): Xaa in position 262 to 267 is any amino acid
  Variant (269)..(269): Xaa in position 269 is any amino acid
  Variant (272)..(273): Xaa in position 272 to 273 is any amino acid
  Variant (275)..(275): Xaa in position 275 is any amino acid
  Variant (277)..(277): Xaa in position 277 is any amino acid
MGQKXXPXGXRLGXXXXXXXXSXWXAXXXXXXXXXXXXLXXDXXXRXXXXXXXXXXXXXXXXXXXXXXXXXXXXXXXXXXXXXXXXXXXXXXXIXXXXXXXXXXXXXXXXXXXXXIXXXXPXXXXXXXXXXXXXXXXXXXXXXLXXXXXXXXXXXXXXXXXXXXXXXXXXXXNXXXXXXXXXXPXXXXXXXAXXIAXQLXXRXXFRXAXKXAXXXXXXXXXXXGXIXXXXXGRXXGXEIARXEWXXEGRVPLXTXRAXIDYXXXXXXTXYGXXGXKXW

SEQ ID NO: 71760 - protein, 53 aa, Artificial sequence
  protein pattern
  Variant (2)..(2): Xaa in position 2 is Ala, Ile, Leu or Val
  Variant (3)..(6): Xaa in position 3 to 6 is any amino acid
  Variant (7)..(7): Xaa in position 7 is Ala, Gly or Ser
  Variant (10)..(10): Xaa in position 10 is Ile, Leu or Val
  Variant (11)..(11): Xaa in position 11 is Ala, Asp, Gly, Asn or Ser
  Variant (13)..(14): Xaa in position 13 to 14 is any or no amino acid
  Variant (16)..(17): Xaa in position 16 to 17 is any or no amino acid
  Variant (20)..(20): Xaa in position 20 is any amino acid
  Variant (22)..(25): Xaa in position 22 to 25 is any amino acid
  Variant (27)..(27): Xaa in position 27 is any amino acid
  Variant (31)..(31): Xaa in position 31 is any amino acid
  Variant (33)..(33): Xaa in position 33 is Phe, Ile or Leu
  Variant (34)..(34): Xaa in position 34 is any amino acid
  Variant (35)..(35): Xaa in position 35 is Ala or Val
  Variant (36)..(36): Xaa in position 36 is any amino acid
  Variant (37)..(37): Xaa in position 37 is Ile or Val
  Variant (38)..(38): Xaa in position 38 is any amino acid
  Variant (39)..(39): Xaa in position 39 is Phe, His or Tyr
  Variant (40)..(45): Xaa in position 40 to 45 is any amino acid
  Variant (47)..(47): Xaa in position 47 is any amino acid
  Variant (48)..(48): Xaa in position 48 is Phe, His or Tyr
  Variant (50)..(51): Xaa in position 50 to 51 is any amino acid
  Variant (53)..(53): Xaa in position 53 is Ile, Leu or Val
GXXXXXXGRXXGXXIXXARXEXXXXGXVPLXTXXXXXXXXXXXXXTXXGXXGX

SEQ ID NO: 71761 - protein, 13 aa, Artificial sequence
  protein pattern
  Variant (5)..(5): Xaa in position 5 is Ile or Val
  Variant (6)..(6): Xaa in position 6 is any amino acid
  Variant (8)..(8): Xaa in position 8 is any amino acid
  Variant (10)..(10): Xaa in position 10 is Phe, Ile, Leu or Met
  Variant (12)..(12): Xaa in position 12 is Ile, Leu or Val
  Variant (13)..(13): Xaa in position 13 is Ala, Gly, Asn or Ser
MGQKXXPXGXRXX

SEQ ID NO: 71762 - protein, 24 aa, Artificial sequence
  protein pattern
  Variant (2)..(7): Xaa in position 2 to 7 is any amino acid
  Variant (8)..(8): Xaa in position 8 is any or no amino acid
  Variant (10)..(10): Xaa in position 10 is any or no amino acid
  Variant (12)..(12): Xaa in position 12 is Glu or Lys
  Variant (13)..(13): Xaa in position 13 is any amino acid
  Variant (15)..(15): Xaa in position 15 is Ala, Ile or Val
  Variant (16)..(16): Xaa in position 16 is any amino acid
  Variant (19)..(19): Xaa in position 19 is Lys or Arg
  Variant (20)..(20): Xaa in position 20 is Ala, Ser, Thr or Val
  Variant (21)..(21): Xaa in position 21 is any amino acid
  Variant (22)..(22): Xaa in position 22 is Lys or Arg
  Variant (23)..(23): Xaa in position 23 is any amino acid
  Variant (24)..(24): Xaa in position 24 is Ala, Cys, Gly, Ser, Thr or Val
LXXXXXXXQXLXXRXXFRXXXXXX

SEQ ID NO: 71763 - DNA, 369 bp, Azotobacter vinelandii
  CDS (1)..(369): transl_table=11
atgattcagactcaatccatgctcgatgtggccgacaacagtggtgctcgccgcgtcatgtgcatcaaggtactgggtggctcgcaccgccgttacgccggcatcggcgacatcatcaaggttaccgtgaaggaagcgattccgcgcggcaaggtcaagaagggccaggtcatgaccgctgtcgtggttcgcacccggcacggcgtgcgtcgccccgatggctccatcattcgcttcgacggtaatgcggccgtcctgctcaacaacaagcaggagccgatcggcacccgcatcttcgggccggtcactcgtgagcttcgttccgagaagttcatgaagatcgtctcgcttgcccctgaagtgctgtaa

SEQ ID NO: 71764 - protein, 122 aa, Azotobacter vinelandii
MIQTQSMLDVADNSGARRVMCIKVLGGSHRRYAGIGDIIKVTVKEAIPRGKVKKGQVMTAVVVRTRHGVRRPDGSIIRFDGNAAVLLNNKQEPIGTRIFGPVTRELRSEKFMKIVSLAPEVL

SEQ ID NO: 71765 - DNA, 832 bp, Sorghum bicolor
  CDS (131)..(643)
  misc_feature (821)..(821): n is a, g, c or t
gcacgaggccctcctcacctcctccccccgggacggaggcttttctggcggcggcggcggcggctcggcgagcaaacgccggcgacgtgcagcacctggaaagctcaggcaaagagcagggtagcaggaaatggcagcattcctgaggtcaaaatgtccatcagttgggcgtactttgatgggaagccttggaaatagtttgtttggagccgccaactcttctgttggggcagtaacaagaccttctcattgtgatgctatcagtcagcaaatcagaacattcatccagatgaggaccaacctcaaggtcgtggataactctggggccaagcgggttatgtgcatacaatccttgagggggaagaaaggggcaagactcggggacacgatcatcggatctgtcaaggaggcccagcctcgtggcaaggtcaagaaaggggacgttgtctatggtgtggtcgtccgcgctgccatgaagaaaggacgcagcgacggcagtgagatccagttcgacgacaacgcgatagtcctcgtgaacaacaagggcgagctgatcggcacccgcgtcttcggtcccgtgccccatgagctgagaaagaagaagcacctcaagatcctggcactggctgagcacatcgtttgaggccgtgttgtcatggttcttaggtgtctgcctgttagttctgcagagcgaaatgtttgtgggaatgtttccgttctctgtttgaataatgcattctgaaatgatagcatgaaccatttgaactccatttgagtccctggcaaattcatggtctcgacttgcatctgacgtaaacagntctattgcccg

SEQ ID NO: 71766 - protein, 170 aa, Sorghum bicolor
MAAFLRSKCPSVGRTLMGSLGNSLFGAANSSVGAVTRPSHCDAISQQIRTFIQMRTNLKVVDNSGAKRVMCIQSLRGKKGARLGDTIIGSVKEAQPRGKVKKGDVVYGVVVRAAMKKGRSDGSEIQFDDNAIVLVNNKGELIGTRVFGPVPHELRKKKHLKILALAEHIV

SEQ ID NO: 71767 - DNA, 513 bp, Triticum aestivum
  CDS (1)..(513)
atggcggcgttcctgaggtcaaagtgctcgtcagttgggcgtacgttgatgggaagcgttggaaacaatctgtatgggggtatcaattcgtctgctgaaacagtgacaagaccatctcactgtgacgctatcagccagcaaatcaggacattcatccagatgagaaccaacctcaaggtggtagacaactctggagccaagagggtcatgtgcatacagtccttgagggggaagaaaggagctaggcttggggacatgataattggttctgtgaaggaagcgcaacctcgtggcaaggtcaagaaaggtgatgtggtctacggtgtggttgtccgtgccgctatgaagaaaggacgcagtgacggcagcgaggtccagtttgatgacaacgctatcgtcatcgtgaacaacaaaggcgagctgattggcactcgcgtcttcggtcctgttcctcatgagctcaggaagaagaagcatctcaagatcttggcgttggctgaacacatagtttga

SEQ ID NO: 71768 - protein, 170 aa, Triticum aestivum
MAAFLRSKCSSVGRTLMGSVGNNLYGGINSSAETVTRPSHCDAISQQIRTFIQMRTNLKVVDNSGAKRVMCIQSLRGKKGARLGDMIIGSVKEAQPRGKVKKGDVVYGVVVRAAMKKGRSDGSEVQFDDNAIVIVNNKGELIGTRVFGPVPHELRKKKHLKILALAEHIV

SEQ ID NO: 71769 - DNA, 369 bp, Helicobacter pylori
  CDS (1)..(369): transl_table=11
atgatacagagttttacaagattgaatgtcgctgacaatagcggcgctaaagaaatcatgtgcattaaggtgttaggaggcagccacaaacgctatgcgagcgtgggtagcgtgatcgtggcttccgtgaaaaaagctatccctaatggtaaggtgaagcgcggtcaagtcgtcaaagccgttgtggtgagaacgaaaaaagaaatccaaagaaaaaatggttctttggtgcgttttgatgacaatgcagcagtgatcttggacgctaaaaaagatccggttggcacaaggatttttgggccagtgagccgagaagtgcgttacgctaatttcatgaaaattatttctctagcaccggaggttgtataa

SEQ ID NO: 71770 - protein, 122 aa, Helicobacter pylori
MIQSFTRLNVADNSGAKEIMCIKVLGGSHKRYASVGSVIVASVKKAIPNGKVKRGQVVKAVVVRTKKEIQRKNGSLVRFDDNAAVILDAKKDPVGTRIFGPVSREVRYANFMKIISLAPEVV

SEQ ID NO: 71771 - DNA, 372 bp, Salmonella typhi
  CDS (1)..(372): transl_table=11
  misc_feature (345)..(345): n is a, g, c or t
atgatccaagaacagactatgctgaacgtcgccgacaactccggtgcacgtcgcgtaatgtgtatcaaggttctgggtggctcgcaccgtcgctacgcaggcgtaggcgacatcattaagatcaccatcaaagaagcgattccgcgtggtaaggtcaaaaaaggtgatgtgctgaaggcggtagtggtgcgcaccaagaagggtgttcgtcgcccggacggttctgtcattcgcttcgatggtaatgcatgcgttattttaaacaataacagcgagcagcctatcggtacgcgtatttttgggccggtaactcgtgaacttcgtaacgagaagttcatgaaaatnatctctctggcaccagaagtactctaa

SEQ ID NO: 71772 - protein, 123 aa, Salmonella typhi
  misc_feature (115)..(115): The Xaa at location 115 stands for Ile, or Met.
MIQEQTMLNVADNSGARRVMCIKVLGGSHRRYAGVGDIIKITIKEAIPRGKVKKGDVLKAVVVRTKKGVRRPDGSVIRFDGNACVILNNNSEQPIGTRIFGPVTRELRNEKFMKXISLAPEVL

SEQ ID NO: 71773 - DNA, 369 bp, Chlamydia trachomatis
  CDS (1)..(369): transl_table=11
atgatccagcaagaaagtcagttaaaagttgccgataatacaggggctaagaaagttaagtgtttcaaggttctaggcggatctcgtcgacgttatgcaacggtcggtgatgtgattgtatgctctgtaagagatattgagcctgatagttccgtaaagaagggggatgttgttaaggctgtaatcgtacggactcgaaacgatatccatcgtaaagatggttctacactaagattcgatacgaatagttgtgtaatcatcgatgataaaggcaatcctaaaggaactagaatttttgggcctgtagcaagggagattcgagacagaggctttgttaagattagctctttggctcccgaggtgatttaa

SEQ ID NO: 71774 - protein, 122 aa, Chlamydia trachomatis
MIQQESQLKVADNTGAKKVKCFKVLGGSRRRYATVGDVIVCSVRDIEPDSSVKKGDVVKAVIVRTRNDIHRKDGSTLRFDTNSCVIIDDKGNPKGTRIFGPVAREIRDRGFVKISSLAPEVI

SEQ ID NO: 71775 - DNA, 369 bp, Lactococcus lactis; IL1403
  CDS (1)..(369)
atgattcaaacagaatctcgtttgaaagttgcagataactcaggtgctaaagaacttttgactatccgtgttctcggtggttcatcacgtaagtttgctggtatcggtgatatcgttgtagctacagttaaatcagctgcccctggtggagcagttaaaaaaggtgaagttgtgaaagcagtcatcgttcgtactaaatctggtgcgaaacgtcctgacggttcatacatcaaatttgatgaaaatgcagcagtgctcatccgtgacgataaaactcctcgcggaacacgtatctttggcccagttgcccgcgaactccgcgaaggtggctacatgaagatcgtttcacttgctccagaagtactctaa

SEQ ID NO: 71776 - protein, 122 aa, Lactococcus lactis; IL1403
MIQTESRLKVADNSGAKELLTIRVLGGSSRKFAGIGDIVVATVKSAAPGGAVKKGEVVKAVIVRTKSGAKRPDGSYIKFDENAAVLIRDDKTPRGTRIFGPVARELREGGYMKIVSLAPEVL

SEQ ID NO: 71777 - DNA, 369 bp, Clostridium acetobutylicum
  CDS (1)..(369): transl_table=11
atgatacaagcacaaacaatgttaaaggttgcagataattctggagctaaggaaataatgtgtgttagagtattaggtggttccaagagaaaatggggaaacattggtgatataatagttgctagcgttaaaagtgcaacaccaggtggtgttgttaaaaagggtgaagttgttaaggcagttgtagtaagatccgcaaagggtttaagaagagctgacggttcatatataaaatttgacgagaatgcagcagttttaataaaagacgataaacagccaagaggaactcgtatttttggaccggttgccagggagttaagagataaagattttaacaaaatattatcattagcacctgaagttctataa

SEQ ID NO: 71778 - protein, 122 aa, Clostridium acetobutylicum
MIQAQTMLKVADNSGAKEIMCVRVLGGSKRKWGNIGDIIVASVKSATPGGVVKKGEVVKAVVVRSAKGLRRADGSYIKFDENAAVLIKDDKQPRGTRIFGPVARELRDKDFNKILSLAPEVL

SEQ ID NO: 71779 - DNA, 369 bp, Campylobacter jejuni
  CDS (1)..(369): transl_table=11
atgattcaaagttttacaagacttgcagttgctgataatagcggtgcaaaagaattaatgtgtatcaaggttttagggggtagcaaaagaagatacgctaccgtaggtgatgtaatcgttgcatctgttaaaaaagctttaccaaatggaaaagttaaaaaaggtcaagtggtaaaagcggttatcgttagaactaaaaaagaaattcatagagataatggttctttgattcgttttgatgaaaatgctgcggttattcttgacaacaaaagagagcctatcggaactcgtatctttgggccagtgggcagagaagttagatatggtggctttatgaaaatcgtttcactagcaccggaggtattataa

SEQ ID NO: 71780 - protein, 122 aa, Campylobacter jejuni
MIQSFTRLAVADNSGAKELMCIKVLGGSKRRYATVGDVIVASVKKALPNGKVKKGQVVKAVIVRTKKEIHRDNGSLIRFDENAAVILDNKREPIGTRIFGPVGREVRYGGFMKIVSLAPEVL

SEQ ID NO: 71781 - DNA, 369 bp, Listeria monocytogenes
  CDS (1)..(369): transl_table=11
atgattcaacaagaaagtcgtatgaaagtggctgataactctggtgctcgtgaagttttaactattaaagtactaggtggatcaggacgcaaaactgctaacattggcgatgttgtcgtgtgtaccgttaaacaagcaacaccaggcggcgttgtcaaaaaaggtgaagttgttaaagcagtaatcgttcgtactaagagtggagcacgtcgtcaagacggttcttacatcaagtttgatgaaaatgcatgtgtcattatccgtgacgataaaagtcctcgtggaacacgtatttttggacctgttgctcgcgaacttcgtgaaaacaactttatgaagatcgtttctttagctccagaagttctttaa

SEQ ID NO: 71782 - protein, 122 aa, Listeria monocytogenes
MIQQESRMKVADNSGAREVLTIKVLGGSGRKTANIGDVVVCTVKQATPGGVVKKGEVVKAVIVRTKSGARRQDGSYIKFDENACVIIRDDKSPRGTRIFGPVARELRENNFMKIVSLAPEVL

SEQ ID NO: 71783 - DNA, 369 bp, Treponema pallidum
  CDS (1)..(369): transl_table=11
atgattcaggtgcagtcgcggttgaacgtcgcggataattctggagccaggttggtgcagtgtattaaggtggtgggtggatcccgtcgccggtacgcgagtgttggggatatcatcgtggtggcagtgaaggatgcacttcccacttctgtgattaagaaaggatcagtagagaaggccgtcattgtacgagtttctaaggaatatcgtcgcgtagacggtacttatattcgatttgacgacaatgcctgtgttgttatcgatgctaatggaaatcctaaggggaagcgtatttttggtcctgttgcgcgggagctgcgggatatggattttacgaaaatcgtgtctttagctcctgaggttttgtga

SEQ ID NO: 71784 - protein, 122 aa, Treponema pallidum
MIQVQSRLNVADNSGARLVQCIKVVGGSRRRYASVGDIIVVAVKDALPTSVIKKGSVEKAVIVRVSKEYRRVDGTYIRFDDNACVVIDANGNPKGKRIFGPVARELRDMDFTKIVSLAPEVL

SEQ ID NO: 71785 - DNA, 372 bp, Vibrio cholerae
  CDS (1)..(372): transl_table=11
atgatccaaatgcaaactatgctggatgcagctgataactcaggcgctcgcagcgtaatgtgtattaaggttctgggtggctctcaccgtcgttacgcccacgttggcgacatcatcaaagttaccgttaaggaagcaattcctcgcggtaaagtaaagaaaggtgatgtattaaaggcggtggtagttcgcacccgtaaaggcgtacgtcgtccagacggttctgtcattcgcttcgaccgtaatgcttgcgttctgttgaacaacaacagtgagcaacctatcggtacacgtatctttggtccagtgactcgtgaacttcgtaatgcgaaattcatgaagattgtatcactggctccagaagttctgtaa

SEQ ID NO: 71786 - protein, 123 aa, Vibrio cholerae
MIQMQTMLDAADNSGARSVMCIKVLGGSHRRYAHVGDIIKVTVKEAIPRGKVKKGDVLKAVVVRTRKGVRRPDGSVIRFDRNACVLLNNNSEQPIGTRIFGPVTRELRNAKFMKIVSLAPEVL

SEQ ID NO: 71787 - DNA, 372 bp, Yersinia pestis
  CDS (1)..(372): transl_table=11
atgatccaagaacagactatgctgaacgtggccgacaactccggtgcacgtcgcgtaatgtgtatcaaggttctaggtggctcgcaccgtcgctacgcaggcatcggcgacatcatcaagatcaccatcaaggaagcaattcctcgtggcaaggtgaagaaaggcgatgttctgaaggcggtagtggtgcgcaccaagaagggtgtacgtcgcccggacggttctgtcattcgcttcgatggtaacgcttgtgttattttaaataataacagcgagcagccaatcggcacgcgtatttttgggccggtaactcgtgaactgcgtaatgagaagttcatgaaaattatctctctggcaccagaagtactctaa

SEQ ID NO: 71788 - protein, 123 aa, Yersinia pestis
MIQEQTMLNVADNSGARRVMCIKVLGGSHRRYAGIGDIIKITIKEAIPRGKVKKGDVLKAVVVRTKKGVRRPDGSVIRFDGNACVILNNNSEQPIGTRIFGPVTRELRNEKFMKIISLAPEVL

SEQ ID NO: 71789 - DNA, 372 bp, Klebsiella pneumoniae subsp. pneumoniae MGH 78578
  CDS (1)..(372): transl_table=11
atgatccaagaacagactatgctgaacgtcgccgacaactccggtgcacgtcgcgtaatgtgtatcaaggttctgggtggctcgcaccgtcgctacgcaggcgtaggcgacatcatcaagatcaccatcaaagaagcaattccgcgtggtaaggtcaaaaaaggtgatgtgctgaaggcggtagtggtgcgcaccaagaagggtgttcgtcgcccggacggttctgtcattcgcttcgatggtaatgcatgcgttattctgaacaataacagcgagcagcctatcggtacgcgtatttttgggccggtaactcgtgaacttcgtaccgagaagttcatgaaaattatctctctggcaccagaagtactctaa

SEQ ID NO: 71790 - protein, 123 aa, Klebsiella pneumoniae subsp. pneumoniae MGH 78578
MIQEQTMLNVADNSGARRVMCIKVLGGSHRRYAGVGDIIKITIKEAIPRGKVKKGDVLKAVVVRTKKGVRRPDGSVIRFDGNACVILNNNSEQPIGTRIFGPVTRELRTEKFMKIISLAPEVL

SEQ ID NO: 71791 - DNA, 369 bp, Medicago truncatula
  CDS (1)..(369)
atgattcaacctcaaacctatttaaatgtagccgataatagcggagcccgcgaattgatgtgtattcgaatcataggagctagtaatcgacggtatgcttatattggtgacattgttgttgctgtaatcaaaaaagcagtaccaaattcatctttagaaagatctgaagtgatcagggctgtaattgtacgtacttgtaaagaactaaaacgtagtaatggtataataataaagtatgatgataatgcggcggttctcattgataaagaaggaaatccaaaaggaactcgaattttttccgcaatagcccgagaattgagacagttaaatttcactaaaatagtttcattagcacccgaggtattataa

SEQ ID NO: 71792 - protein, 122 aa, Medicago truncatula
MIQPQTYLNVADNSGARELMCIRIIGASNRRYAYIGDIVVAVIKKAVPNSSLERSEVIRAVIVRTCKELKRSNGIIIKYDDNAAVLIDKEGNPKGTRIFSAIARELRQLNFTKIVSLAPEVL

SEQ ID NO: 71793 - DNA, 369 bp, Leptosira terrestris
  CDS (1)..(369)
atgattcaaccccaaacttatttaaatgtggctgataatagtggagccagaaaattaatgtgtattcgaattttaggcggcagacaaaaacaatatggtaaaattggtgatgtaattattgcagttgtaaaagatgcattacccaacatgcctctaaaaaaatcagaaattgtgcgtgcagtaattgttcgaacccgtaaaggagtcaatcggaataatggtacaagtataagatttgatgagaatgcagctgttattattaacaaagaaggaaatccgcgaggaacaaggatttttggacctgttgctcgagaattaagagaacgtaattttactaaattggtttctttagcgcctgaagtattataa

SEQ ID NO: 71794 - protein, 122 aa, Leptosira terrestris
MIQPQTYLNVADNSGARKLMCIRILGGRQKQYGKIGDVIIAVVKDALPNMPLKKSEIVRAVIVRTRKGVNRNNGTSIRFDENAAVIINKEGNPRGTRIFGPVARELRERNFTKLVSLAPEVL

SEQ ID NO: 71795 - DNA, 423 bp, Bombyx mori
  CDS (1)..(423)
atgtctaagagaggacgtggtggttccgcgggagcgaaattccgtatctccctgggtctcccagtgggagcagtaatcaactgcgccgacaacacaggggcaaagaatctgtatgtgatcgctgtccaaggtatcaaaggtcgcctgaacagactgccggcggccggttccggggacatgattgtggccacagtcaaaaagggtaaacctgaactccggaaaaaggtaatgccggcagtggtcatcaggcagcggaaaccgttcagaaggcgtgatggagtatttatatactttgaggacaatgcgggtgtcatagtcaataacaagggcgaaatgaagggctcggccatcacagggcctgtagccaaagaatgtgctgatctgtggccgcgtattgcctcaaacgcgagctctatcgcttga

SEQ ID NO: 71796 - protein, 140 aa, Bombyx mori
MSKRGRGGSAGAKFRISLGLPVGAVINCADNTGAKNLYVIAVQGIKGRLNRLPAAGSGDMIVATVKKGKPELRKKVMPAVVIRQRKPFRRRDGVFIYFEDNAGVIVNNKGEMKGSAITGPVAKECADLWPRIASNASSIA

SEQ ID NO: 71797 - DNA, 591 bp, Arabidopsis thaliana
  CDS (1)..(591)
atggcgacagctttagcttccaagctctccaaaggacgttcattgcttggaggtctttgcaatgctttctctggtttgatgaattcctcctccaatggaatgatgaatggaagcatcctctctcagcaacaacataggacattcattcaaatggggacgattctcaaatgcgtggataactcgtgtgctaaagaggtgatgtgcattcaatccctgagaggtaagaaaggagcaagacttggcgatatcattgttggttcagtgaaagaagctaacccaattgttcaaaaaaaagtaaagaaagacgctatcccaaaaggtaaagtgaagaaagggatggtcgtgtacggtgtggttgtgcgtgctgcgatgcctaaaggacgtgctgatggaagccaagtcaagtttgatgacaatgccattgtagttgttggcattaaggaaaagaaagggcagaataattcacatggttccaagaggaaaatggagtacaaccaaccgactggtacccgagtgtttggtcctgtcccgcacgagatgcgcctcaggaaacagctcaagatcctttctttggctcagcacattgtttga

SEQ ID NO: 71798 - protein, 196 aa, Arabidopsis thaliana
MATALASKLSKGRSLLGGLCNAFSGLMNSSSNGMMNGSILSQQQHRTFIQMGTILKCVDNSCAKEVMCIQSLRGKKGARLGDIIVGSVKEANPIVQKKVKKDAIPKGKVKKGMVVYGVVVRAAMPKGRADGSQVKFDDNAIVVVGIKEKKGQNNSHGSKRKMEYNQPTGTRVFGPVPHEMRLRKQLKILSLAQHIV

SEQ ID NO: 71799 - DNA, 519 bp, Arabidopsis thaliana
  CDS (1)..(519)
atggccgctgcttttgcttccagattaacccgaggaggacgttcattgcttggaggtcttaacaatggtggttcgatgaattcttctaatggaatgatgaatgaaagtatcctctctcagcagcagagaaggacatttattcagatggggactgttctcaaagtcgtggacaattcaggtgcgaagaaagtgatgtgtattcaagctctaaaggggaaaaaaggagctagacttggagatactatagttgcttcagtgaaagaagcgatgccaaacggtaaagtgaagaaaggagcggttgtgtatggtgtggttgttcgtgctgcgatgcagagaggtcgtgttgatggaagtgaagttaggtttgatgataacgcggttgttcttgttgatagtaaagataagaatactaaaactgatcgccagccgattggtactagagtgtttggtcctgttcctcatgagcttcgcaagaagaaacatctcaagattcttgctttggctcaacacgttgcgtga

SEQ ID NO: 71800 - protein, 172 aa, Arabidopsis thaliana
MAAAFASRLTRGGRSLLGGLNNGGSMNSSNGMMNESILSQQQRRTFIQMGTVLKVVDNSGAKKVMCIQALKGKKGARLGDTIVASVKEAMPNGKVKKGAVVYGVVVRAAMQRGRVDGSEVRFDDNAVVLVDSKDKNTKTDRQPIGTRVFGPVPHELRKKKHLKILALAQHVA

SEQ ID NO: 71801 - DNA, 369 bp, Psilotum nudum
  CDS (1)..(369): transl_table=11
atgattcaacctcaaagttatttaaaagtaacagacaacagtggagctcgaaaattgatgtgtattcgaattctaggaaccaacaattgcaaatacgcaaatactggtgacactattatagctgtagtgaaagaatcagtacccaatatgccagtcaagaaatcagaaatagtccgagcagtcattgtacgtactcgcaaagaaatgaaacgcgataatggaataataatacgattcgatgataatgcagcagttgttattaaccgggaaggaaacttaaaaggaactagagtccatggtccagttgatcgggaactatggaagaaaaattttactaaaatagtatctttagctcctgaagctttttaa

SEQ ID NO: 71802 - protein, 122 aa, Psilotum nudum
MIQPQSYLKVTDNSGARKLMCIRILGTNNCKYANTGDTIIAVVKESVPNMPVKKSEIVRAVIVRTRKEMKRDNGIIIRFDDNAAVVINREGNLKGTRVHGPVDRELWKKNFTKIVSLAPEAF

SEQ ID NO: 71803 - DNA, 381 bp, Schizosaccharomyces pombe 972h-
  CDS (1)..(381)
atgatcggacttaaaggtatactcaaagttatcgacaattccggtgctaccttagctgagtgcattcgtgtagttcgcgcgggaaaattcgcttcacttggtgatgaagtggtagtagtggtaaaaaaggcacgaagcggttcatcagttactgctgctaataaagttaaacgcggtgatatccaccatgctatcattgttcggacgaaatcaccagttcgaagacccgatggtcgttatgttcgttttgatgataatgcctgcgtcttggttaataaggagtgtgagcctctgggaacccgtatcttgtcagtcgttgccaacgagctcagaacaaaacatcatactaaaatagcatctcttgctccacgaaccatctga

SEQ ID NO: 71804 - protein, 126 aa, Schizosaccharomyces pombe 972h-
MIGLKGILKVIDNSGATLAECIRVVRAGKFASLGDEVVVVVKKARSGSSVTAANKVKRGDIHHAIIVRTKSPVRRPDGRYVRFDDNACVLVNKECEPLGTRILSVVANELRTKHHTKIASLAPRTI

SEQ ID NO: 71805 - DNA, 369 bp, Chlorobium tepidum TLS
  CDS (1)..(369): transl_table=11
atgatccagaaagagactaacctggttgtcgccgataatagcggagcgaaaaaagtacggtgcattcatgttttcggcggtaccggcaggcgttatgccgcgcttggagaccagatcatggtatcggttaaggctgcggttcctggcggcgtcgtcaagaaaaaagatgtctgcaaggcagttgtggtcaggtgcgtcaaggagcagaaaagaaaagatggttcctatatcaggtttgacgagaatgccgtcgtgctgcttaatgcacagggcgagccgagaggcacccgtattttcggcccggtggcgcgcgagcttcgcgacaaaagatatatgaaaatcgtttcgctggctccggaggttctctga

SEQ ID NO: 71806 - protein, 122 aa, Chlorobium tepidum TLS
MIQKETNLVVADNSGAKKVRCIHVFGGTGRRYAALGDQIMVSVKAAVPGGVVKKKDVCKAVVVRCVKEQKRKDGSYIRFDENAVVLLNAQGEPRGTRIFGPVARELRDKRYMKIVSLAPEVL

SEQ ID NO: 71807 - DNA, 369 bp, Bifidobacterium longum NCC2705
  CDS (1)..(369): transl_table=11
atgattcagcaggaaacgcggcttcatgtcgccgacaacacgggtgcgaaggaactcctcgccatccgcgtgctcggcggatcgaagcgacgctatgccggcatcggcgacgtgatcgtcgcctccgtcaaggacgccattcctggcgggtcggtcaagaagggcgacgtggttaaggccgttgtcgtccgtaccgtcaaggaatcccgccgtgcggatggttcctacatcaagttcgacgagaacgccgccgtcattctcggctccggccgtgaaccgaagggcactcgtatcttcggaccggtcggtcgtgaactgcgcgagcacaagttcatgaagatcgtgtccctcgccccggaggtgatctga

SEQ ID NO: 71808 - protein, 122 aa, Bifidobacterium longum NCC2705
MIQQETRLHVADNTGAKELLAIRVLGGSKRRYAGIGDVIVASVKDAIPGGSVKKGDVVKAVVVRTVKESRRADGSYIKFDENAAVILGSGREPKGTRIFGPVGRELREHKFMKIVSLAPEVI

SEQ ID NO: 71809 - DNA, 369 bp, Streptococcus mutans UA159
  CDS (1)..(369): transl_table=11
atgattcaatcagaaagtcgtttaaaagtcgctgacaacagtggtgcccgcgaaatcctgactatcaaagttcttggcggttcaggtcgtaaatttgcgaacatcggtgatgtcatcgttgcttcagtaaaacaagctactcctggtggtgcggttaaaaaaggtgatgtggtgaaagccgttattgttcgtactaaatcaggtgctcgtcgtgctgatggttcatacatcaaatttgatgagaatgcagctgttattatccgtgatgataaaacacctcgcggaactcgtatctttggtcctgttgctcgtgaattgcgtgaaggtaacttcatgaagatcgtgtcactagcgccagaagtactttaa

SEQ ID NO: 71810 - protein, 122 aa, Streptococcus mutans UA159
MIQSESRLKVADNSGAREILTIKVLGGSGRKFANIGDVIVASVKQATPGGAVKKGDVVKAVIVRTKSGARRADGSYIKFDENAAVIIRDDKTPRGTRIFGPVARELREGNFMKIVSLAPEVL

SEQ ID NO: 71811 - DNA, 420 bp, Corynebacterium efficiens YS-314
  CDS (1)..(420): transl_table=11
gtgtttgggacggaaatccagcacacattaatccaggtcaggagaccagtagtgattcagcaggaatcgcgtctgaagatcgccgacaacactggtgcacgtgaaatcctgtgcatccgcgttctcggtggatccacccgacgttttgctggcattggtgacgttatcgtcgccactgtcaaggaagcagcccccggcggcaacgtgaagtctggcgagatcgtcaaggctgtcatcgtgcgcaccaagaaggagacccgtcgtgccgacggttcttacatctccttcgatgagaacgccgccgtcatcatcaagaacgacaacgagccacgcggtacccgcatcttcggccctgtcgcacgtgaactccgcgagaagaagttcatgaagatcgtttctctcgcaccggaggtgatttaa

SEQ ID NO: 71812 - protein, 139 aa, Corynebacterium efficiens YS-314
MFGTEIQHTLIQVRRPVVIQQESRLKIADNTGAREILCIRVLGGSTRRFAGIGDVIVATVKEAAPGGNVKSGEIVKAVIVRTKKETRRADGSYISFDENAAVIIKNDNEPRGTRIFGPVARELREKKFMKIVSLAPEVI

SEQ ID NO: 71813 - DNA, 372 bp, Tropheryma whipplei TW08/27
  CDS (1)..(372): transl_table=11
ttgatacaacaggagtctcggcttaaggtcgcagataacacaggtgccaagagtttgtcggttatacgtgtgcttggtgggtcgaatagacggttcggatcattgggtgatgttgtggttgcgagcgtgaaggatgcggtcccgggcagttcggccgttaaaaagggtgatgttgtcaaggctgtaattgtccgctctactaaagaggttaggcgtacggacgggtcatatatcagatttgatgataatgcggctgttattctgcggcctgacaatgatcccagggggactcgcatattcggtccggttgctcgtgaacttcgtgatcgtaagtttacgaggataatttcccttgccccagaggtggtctag

SEQ ID NO: 71814 - protein, 123 aa, Tropheryma whipplei TW08/27
MIQQESRLKVADNTGAKSLSVIRVLGGSNRRFGSLGDVVVASVKDAVPGSSAVKKGDVVKAVIVRSTKEVRRTDGSYIRFDDNAAVILRPDNDPRGTRIFGPVARELRDRKFTRIISLAPEVV

SEQ ID NO: 71815 - DNA, 369 bp, Enterococcus faecalis V583
  CDS (1)..(369): transl_table=11
gtgatccaacaagaaagtcgtttaagagtcgctgacaattctggcgcacgtgaaattttaacgatcaaagtcctaggcggatctggtcgtaaaactgctaacatcggtgacgttattgttgctactgtcaaacaagcaacgccaggtggggttgttaaaaaaggtgaagtagttaaagccgttatcgttcgtacaaaatctggcgctcgtcgtgctgacggttcttacatcaaatttgatgaaaatgctgcggtaattatccgtgacgataaaagcccacgcggaacacgtatcttcggaccagttgcacgtgaattacgtgaaaacaacttcatgaagatcgtttctctagcaccagaagtattataa

SEQ ID NO: 71816 - protein, 122 aa, Enterococcus faecalis V583
MIQQESRLRVADNSGAREILTIKVLGGSGRKTANIGDVIVATVKQATPGGVVKKGEVVKAVIVRTKSGARRADGSYIKFDENAAVIIRDDKSPRGTRIFGPVARELRENNFMKIVSLAPEVL

SEQ ID NO: 71817 - DNA, 369 bp, Nitrosomonas europaea ATCC 19718
  CDS (1)..(369): transl_table=11
atgattcagatgcaatcattactgaaagtggctgataacactggggcacgtacagtgatgtgtattaaagtcttgggcggttcaaaaagaaggtttgccgggatcggtgatgttatcaaggtcgctgtaaaagatgctgctccacggggacgtattaaaaggggcgaagtatataatgcagttatcgtgcgtactgcaaagggaattcgtagagctgatggctctttagtcaaatttgatactaacgcagcagtaatcctgaataataagttagagccaataggtactaggatttttggtccggttacacgggagctccgtacggcaaaattcatgaagattgtttcacttgctcctgaagttatataa

SEQ ID NO: 71818 - protein, 122 aa, Nitrosomonas europaea ATCC 19718
MIQMQSLLKVADNTGARTVMCIKVLGGSKRRFAGIGDVIKVAVKDAAPRGRIKRGEVYNAVIVRTAKGIRRADGSLVKFDTNAAVILNNKLEPIGTRIFGPVTRELRTAKFMKIVSLAPEVI

SEQ ID NO: 71819 - DNA, 522 bp, Arabidopsis thaliana
  CDS (1)..(522)
atggccgctgcttttgcttccagattaacccgaggaggacgttcattgcttggaggtcttaacaatggtggttcgatgaattcttctaatggaatgatgaatgaaagtatcctctctcagcagcagcagagaaggacatttattcagatggggactgttctcaaagtcgtggacaattcaggtgcgaagaaagtgatgtgtattcaagctctaaaggggaaaaaaggagctagacttggagatactatagttgcttcagtgaaagaagcgatgccaaacggtaaagtgaagaaaggagcggttgtgtatggtgtggttgttcgtgctgcgatgcagagaggtcgtgttgatggaagtgaagttaggtttgatgataacgcggttgttcttgttgatagtaaagataagaatactaaaactgatcgccagccgattggtactagagtgtttggtcctgttcctcatgagcttcgcaagaagaaacatctcaagattcttgctttggctcaacacgttgcgtga

SEQ ID NO: 71820 - protein, 173 aa, Arabidopsis thaliana
MAAAFASRLTRGGRSLLGGLNNGGSMNSSNGMMNESILSQQQQRRTFIQMGTVLKVVDNSGAKKVMCIQALKGKKGARLGDTIVASVKEAMPNGKVKKGAVVYGVVVRAAMQRGRVDGSEVRFDDNAVVLVDSKDKNTKTDRQPIGTRVFGPVPHELRKKKHLKILALAQHVA

SEQ ID NO: 71821 - DNA, 369 bp, Helicobacter hepaticus ATCC 51449
  CDS (1)..(369): transl_table=11
atgatacaaagttttacaagattaagcgttgcagataatagcggtgcaaaagagattatgtgcattaagattctaggcggaagtcatagaagatatgcacgtgtaggtgatgtcattgtggcatctgtgaaaaaagctattccaaatggcaaggtaaaaaaggggcaggttgttaaggcggtagttgtgcgaacaaaaaaagagattcatagagaaaatggctctttagtgcgctttgatgataatgcggcggtgattcttgatgcgaagaaagaacccattggcacgagaatctttggaccagtaagtagagaagtgcgatacgcgaattttatgaaaatagtatcgttagctccggaggtgttatag

SEQ ID NO: 71822 - protein, 122 aa, Helicobacter hepaticus ATCC 51449
MIQSFTRLSVADNSGAKEIMCIKILGGSHRRYARVGDVIVASVKKAIPNGKVKKGQVVKAVVVRTKKEIHRENGSLVRFDDNAAVILDAKKEPIGTRIFGPVSREVRYANFMKIVSLAPEVL

SEQ ID NO: 71823 - DNA, 369 bp, Rhodopirellula baltica SH 1
  CDS (1)..(369): transl_table=11
atgatccaacaagaatcccgcctcgatgtcgccgacaacaccggtgctcgagaagtcatgtgcatcaaggtgctcggcggcagtcggcgtcgtttcgccaccgttggcgacgtgatcgtatgcagcgtcaagagtgtgattcctggcagcgaagtgaagaagaaggccgttgtgcgtgccgtcatcgtccgggtgaagcaaccaacccgtcgtcctgacggaagctacatccgttttgattccaacgcggttgtgttggttgacaaagaccgcaacccacgcggaacacgcatcttcggtgcggtcgcccgtgagttgcgagaaaacaacttcatgaaaatcgtcagcctggccaacgaagtggtctga

SEQ ID NO: 71824 - protein, 122 aa, Rhodopirellula baltica SH 1
MIQQESRLDVADNTGAREVMCIKVLGGSRRRFATVGDVIVCSVKSVIPGSEVKKKAVVRAVIVRVKQPTRRPDGSYIRFDSNAVVLVDKDRNPRGTRIFGAVARELRENNFMKIVSLANEVV

SEQ ID NO: 71825 - DNA, 372 bp, Wigglesworthia glossinidia endosymbiont of Glossina brevipalpis
  CDS (1)..(372): transl_table=11
atgattcaagtacaaactatattgtcagttgcagataattctggagcacgtttagtaatgtgtattaaagttttaggaggctctcgtcgtagatatgctaaaatatcagacataataaaaatagctgttaaagaagctatacctagagcaaaagtaaaaaaaggagaagttttaaaagctgttatagtaagaactaaaaaaaacttgcatagatcagatggatcagttttaagatttgataaaaacgcttgtgttttattaaacgatagcacagaacaaccaattggaactcgtatttttgggccagttactagagagctaagaactgaaaaatttatgaaaataatttctttagcaccagaagttttataa

SEQ ID NO: 71826 - protein, 123 aa, Wigglesworthia glossinidia endosymbiont of Glossina brevipalpis
MIQVQTILSVADNSGARLVMCIKVLGGSRRRYAKISDIIKIAVKEAIPRAKVKKGEVLKAVIVRTKKNLHRSDGSVLRFDKNACVLLNDSTEQPIGTRIFGPVTRELRTEKFMKIISLAPEVL

SEQ ID NO: 71827 - DNA, 372 bp, Candidatus Blochmannia floridanus
  CDS (1)..(372): transl_table=11
gtgattcaagaacgtacaattttaaatgtagcggataattccggtgcacgttttgcaatgtgcattaaagttttaggtggatctaagcgtcgttatgctaatattggagatgttattaaagttactgttaaagaagctattcctaaagctaaagtaaagaaaggagatgttttacaagctgttatagtgcgtacaaaaaaaggaattcgcagaatagatgggtctattatacgatttgataataatgcttgtgtgctattgaatgatactaatatgcagccattaggaactcgaatttttggtccagttactcgtgagttacgttatgctaattttgtgagaattatttctttggctcctgaagttttataa

SEQ ID NO: 71828 - protein, 123 aa, Candidatus Blochmannia floridanus
MIQERTILNVADNSGARFAMCIKVLGGSKRRYANIGDVIKVTVKEAIPKAKVKKGDVLQAVIVRTKKGIRRIDGSIIRFDNNACVLLNDTNMQPLGTRIFGPVTRELRYANFVRIISLAPEVL

SEQ ID NO: 71829 - DNA, 366 bp, Porphyromonas gingivalis W83
  CDS (1)..(366): transl_table=11
atgatacaacaagaatcaagactcgttgtcgctgacaacagcggagcaaaagaagctctctgtattcgtgttttgggcggcacgcgcagacgttatgcctctgtgggtgatatcatcgtggtttcggtcaagagtgttatcccttcaagcgatatcaagaaaggtgctgtctccaaagctgtaatcgtacgtacgaagaaagaagttcgtcgtcccgatggatcgtatatccgttttgacgacaatgcttgtgtcttgctgaatgcagccggtgatattcgtggcagccgtatcttcggaccggtcgcacgcgaactgcgtggaacaaatatgaaaattgtttctctcgctcccgaagtattataa

SEQ ID NO: 71830 - protein, 121 aa, Porphyromonas gingivalis W83
MIQQESRLVVADNSGAKEALCIRVLGGTRRRYASVGDIIVVSVKSVIPSSDIKKGAVSKAVIVRTKKEVRRPDGSYIRFDDNACVLLNAAGDIRGSRIFGPVARELRGTNMKIVSLAPEVL

SEQ ID NO: 71831 - DNA, 369 bp, Wolinella succinogenes DSM 1740
  CDS (1)..(369): transl_table=11
atgatccagagttttactagattgacagtcgctgacaacagtggcgccaaagaggtaatgtgcatcaaggttcttggcggaagcaagagacgatacgcaaccgttggcgacgtgattatcgcttctgttaagaaagcccttcccaatggaaagatcaagaaaggtcaagtggtgaaggctgttgtcgtgcgaactaaaaaagaggttcagcgagacaatggttctttgattcgattcgatgacaacgccgcggtcatccttgacaacaagcgagagcctgtaggcacgcgtatttttggacccgtaggtcgagaagtgcgatacgccaacttcatgaaaattgtctctcttgcaccggaggtactctaa

SEQ ID NO: 71832 - protein, 122 aa, Wolinella succinogenes DSM 1740
MIQSFTRLTVADNSGAKEVMCIKVLGGSKRRYATVGDVIIASVKKALPNGKIKKGQVVKAVVVRTKKEVQRDNGSLIRFDDNAAVILDNKREPVGTRIFGPVGREVRYANFMKIVSLAPEVL

SEQ ID NO: 71833 - DNA, 402 bp, Gloeobacter violaceus PCC 7421
  CDS (1)..(402): transl_table=11
atgatccagcagcagtcccggctgagcgtggccgacaacaccggagcgcgcgaactgttgtgcatccgcgtgctcggctcgaccgtcggctccaagggtctcaccaaaggcggcggcaaccgccgctatgccttcgtgggcgacatagtcgtggccgtggtcaaagatgccgcccccaacatgggggtcaaaaaatctgaggtggtgcgcgcggtggtggtgcgcacccgccaggcgattcgccgcgacaacggcatggtcatccgctttgacgacaatgccgcggtgatcatcgacaaaaacggcaacccccgcggcacgcgcgtctttggaccggtggcgcgcgagttgcgcgagaaaaatttcaccaagatcatttccctggccccggaggtgctctga

SEQ ID NO: 71834 - protein, 133 aa, Gloeobacter violaceus PCC 7421
MIQQQSRLSVADNTGARELLCIRVLGSTVGSKGLTKGGGNRRYAFVGDIVVAVVKDAAPNMGVKKSEVVRAVVVRTRQAIRRDNGMVIRFDDNAAVIIDKNGNPRGTRVFGPVARELREKNFTKIISLAPEVL

SEQ ID NO: 71835 - DNA, 363 bp, Onion yellows phytoplasma OY-M
  CDS (1)..(363): transl_table=11
atgattcaacgagaaagtcgtttagttgtagttgacaacagcggtgctaaagaagttttagttattggtattttaggaggcactcgtcgtagtcatgtaaatatcggagatattgtattagtaactgttaaatcaggttctggtacagttaaaaaacatgacgttctaaaagctgtcattgtacgcaccaaaaaaggtctaagacgtaaaaatggctcttacattaaatttgacgacaatgctgtagtacttttaaaagaagatttaaatattattggcacccgtatttttggtccagtagttagagaattgagtgataagaaattttccaaaatagtttctttagcccaattagttttgtaa

SEQ ID NO: 71836 - protein, 120 aa, Onion yellows phytoplasma OY-M
MIQRESRLVVVDNSGAKEVLVIGILGGTRRSHVNIGDIVLVTVKSGSGTVKKHDVLKAVIVRTKKGLRRKNGSYIKFDDNAVVLLKEDLNIIGTRIFGPVVRELSDKKFSKIVSLAQLVL

SEQ ID NO: 71837 - DNA, 369 bp, Lactobacillus johnsonii NCC 533
  CDS (1)..(369): transl_table=11
gtgatccaacacgaaagccgtttaaaggttgctgacaactccggtgcaagagaactcctagttatcaagattttaggtggttctaagcgtaagaccggtaatattggtgatatcgtagttgctgctgttaaacaagcaacaccaggtggcgttgtcaaaaaaggtgatgttgtaaaagcagttattgttagaacaaaatcaggtgcacgccgtgaagatggttcatacatcaagttcgacgaaaatgcagcagttgtaattaatgctgataagagtcctcgtggaactcgtatttttgggcctgtagcccgtgaactgcgtgagcacgatttcatgaagatcgtatctcttgctcctgaagtcttataa

SEQ ID NO: 71838 - protein, 122 aa, Lactobacillus johnsonii NCC 533
MIQHESRLKVADNSGARELLVIKILGGSKRKTGNIGDIVVAAVKQATPGGVVKKGDVVKAVIVRTKSGARREDGSYIKFDENAAVVINADKSPRGTRIFGPVARELREHDFMKIVSLAPEVL

SEQ ID NO: 71839 - DNA, 423 bp, Nasonia vitripennis
  CDS (1)..(423)
atgtcgaagagaggacgtggtggatcggcgggagccaagttccgcatatcgctgggtttgccggttggagccgtgatcaactgcgccgacaacaccggtgctaagaacctgtatgtcatcgccgtacagggaatcaaaggtcgcctgaaccgtcttccagcagccggatcaggtgacatgattgttgctacagtcaagaagggaaagcctgaactcaggaaaaaggttatgccggcggtggttattcggcagcggaaaccgttccgcaggaaggacggggtgtttatatactttgaagacaatgcaggggtcattgtcaacaataagggtgaaatgaaaggttctgctatcacaggtccagttgcaaaagaatgtgcagatttatggcccagaattgcatctaatgctagcagtatcgcttaa

SEQ ID NO: 71840 - protein, 140 aa, Nasonia vitripennis
MSKRGRGGSAGAKFRISLGLPVGAVINCADNTGAKNLYVIAVQGIKGRLNRLPAAGSGDMIVATVKKGKPELRKKVMPAVVIRQRKPFRRKDGVFIYFEDNAGVIVNNKGEMKGSAITGPVAKECADLWPRIASNASSIA

SEQ ID NO: 71841 - DNA, 420 bp, Magnaporthe grisea 70-15
  CDS (1)..(420)
atggccaagctttcgcgtggtgcccccggtggcaagctcaagatgaccctgggtctcccagttggtgccatcatgaactgcgccgacaactcgggtgccaggaacctttacatcatttccgtcaagggtatcggtgccaggctcaacaggctgccggccggtggtgttggcgacatggttatggctaccgtcaagaagggcaagcctgagctgaggaagaaggttcaccccgccgtcatcgtccgccagtccaagccgtggaagcgcaccgacggtgtcttcctgtacttcgaggacaacgctggtgtcatcgtcaaccccaagggtgagatgaagggctccgccatcaccggtcccgtcggcaaggaggccgctgagctgtggccccgtattgccagcaactccggtgtcgtcatgtaa

SEQ ID NO: 71842 - protein, 139 aa, Magnaporthe grisea 70-15
MAKLSRGAPGGKLKMTLGLPVGAIMNCADNSGARNLYIISVKGIGARLNRLPAGGVGDMVMATVKKGKPELRKKVHPAVIVRQSKPWKRTDGVFLYFEDNAGVIVNPKGEMKGSAITGPVGKEAAELWPRIASNSGVVM

SEQ ID NO: 71843 - DNA, 396 bp, Magnaporthe grisea 70-15
  CDS (1)..(396)
atgattcaattaaagtcgatgctcaactgcatcgacaactcgggcgccgccttggtcgagtgcgccctgatcgtcggccagaagaggcatgcatcgataggtgaccgcatcgtcgtcgtcgtccaggagcaacgcaagaaccccaacgagggcgccgccgcgctggccgcctccaacaaggtcaagcgcggagatatccgccacgccattgttgtccgcacaaagtacaaggtccaacgcaaggacggctctgtcgtccgattcgacgacaatgcctgcgttctcatcaacaaggccggtgaccccgtcggctcgcgcgtcaacggcatcgttggcatggagcttcgaaaggccaagtggagcaagattctgagcatggcgcccatgcatatataa

SEQ ID NO: 71844 - protein, 131 aa, Magnaporthe grisea 70-15
MIQLKSMLNCIDNSGAALVECALIVGQKRHASIGDRIVVVVQEQRKNPNEGAAALAASNKVKRGDIRHAIVVRTKYKVQRKDGSVVRFDDNACVLINKAGDPVGSRVNGIVGMELRKAKWSKILSMAPMHI

SEQ ID NO: 71845 - DNA, 420 bp, Gibberella zeae PH-1
  CDS (1)..(420)
atggccaagatctcgcgtggtgcccctggtggcaagctcaagatgaccctgggtctccctgtcggtgccgtcatgaactgcgctgacaactccggtgcccgaaacctctacatcatcgccgtcaagggtattggtgctcgcctgaaccgattgcccgctggtggtgtcggtgacatggtcatggccaccgtcaagaagggaaagcccgaactccgaaagaaggtccaccccgccgttatcgtccgacagtccaagccctggaagcgattcgacggtgtcttcctgtacttcgaggacaacgctggtgtcatcgtcaaccccaagggtgagatgaagggctccgccattaccggccccgtcggtaaggaggctgctgagttgtggccccgtattgccagcaactctggtgtcgtcatgtaa

SEQ ID NO: 71846 - protein, 139 aa, Gibberella zeae PH-1
MAKISRGAPGGKLKMTLGLPVGAVMNCADNSGARNLYIIAVKGIGARLNRLPAGGVGDMVMATVKKGKPELRKKVHPAVIVRQSKPWKRFDGVFLYFEDNAGVIVNPKGEMKGSAITGPVGKEAAELWPRIASNSGVVM

SEQ ID NO: 71847 - DNA, 396 bp, Gibberella zeae PH-1
  CDS (1)..(396)
atgattcaattaaagacaatgcttaactgcatcgacaactcgggcgctgcccttgttgaatgcgtcttggtcgttggccaaaagcgacatgcccgaatcggtgaccgtgtcgttgttgtcgtccaggagcagcgtggtagctcctccggtggcatggccggtatgtctgccgccaacaaggtcaagcgaggtgacattcgtcacgccgtcgtcgtccgaacccgataccctacacagcgccccgacggatcaatcgtcaagtttgacgacaacgcctgtgttttgttgaacaaggctggtgaccccgtcggttcacgtatcaacggcgctgttggcgctgagctgaagcgcaagaagtggagcaagatcttgtcaatggctcccatgcaggcataa

SEQ ID NO: 71848 - protein, 131 aa, Gibberella zeae PH-1
MIQLKTMLNCIDNSGAALVECVLVVGQKRHARIGDRVVVVVQEQRGSSSGGMAGMSAANKVKRGDIRHAVVVRTRYPTQRPDGSIVKFDDNACVLLNKAGDPVGSRINGAVGAELKRKKWSKILSMAPMQA

SEQ ID NO: 71849 - DNA, 414 bp, Candida glabrata CBS 138
  CDS (1)..(414)
atgtcaggtaacggtgctcaaggtactaaattcagaatttctctaggtttgccaaccggtgccatcatgaactgtgctgacaactctggtgccagaaacttgtacatcatggctgtcaagggttccggttccagattgaacagattgccagctgcctctctaggtgatatggttatggctactgttaagaagggtaagccagaattgagaaagaaggttatgccagctatcgttgtccgtcaatccaaggcttggagaagaaaggacggtgtctacctatacttcgaagacaacgctggtgtcattgctaacccaaagggtgaaatgaagggttccgctatcactggtccagtcggtaaggaatgtgctgacttgtggccaagagttgcctccaactccggtgtcgtcgtctaa

SEQ ID NO: 71850 - protein, 137 aa, Candida glabrata CBS 138
MSGNGAQGTKFRISLGLPTGAIMNCADNSGARNLYIMAVKGSGSRLNRLPAASLGDMVMATVKKGKPELRKKVMPAIVVRQSKAWRRKDGVYLYFEDNAGVIANPKGEMKGSAITGPVGKECADLWPRVASNSGVVV

SEQ ID NO: 71851 - DNA, 417 bp, Candida glabrata CBS 138
  CDS (1)..(417)
atgatttatctgaagtctatcatcaaagttattgacaactcgggagcacaactagccgagtgcatcaaggttattggcaagggttcacctaaatcgccaggtagagtaggagacaggattgtttgcgtcatacagaaggccagaccactaactcagaatattactggtacagctactacaaatagagtaaaaaaaggtgatatttgtcatgccatagtggtcagaactaagcaaactaacgaatatagaagagacggttctatgataagtttcggcgacaacgcctgtgtattgataaataagaatactggggaaccattgggtactagaatcatggcaaatgatggtgtagtagatagaaccttaaaagataagggattcaataagatctgctcattagctagcaaagctttataa

SEQ ID NO: 71852 - protein, 138 aa, Candida glabrata CBS 138
MIYLKSIIKVIDNSGAQLAECIKVIGKGSPKSPGRVGDRIVCVIQKARPLTQNITGTATTNRVKKGDICHAIVVRTKQTNEYRRDGSMISFGDNACVLINKNTGEPLGTRIMANDGVVDRTLKDKGFNKICSLASKAL

SEQ ID NO: 71853 - DNA, 417 bp, Kluyveromyces lactis NRRL Y-1140
  CDS (1)..(417)
atgatttatttgaagtcttttttgaaagtcattgacaactcaggtgctcaaattgccgaatgtatcaaagtacttggaaaaggttcgccaaaatctccaggtagaataggtgacaaaatcgtctgtgtggtgaagaaggctaaaccattaacacaaactattactgggcaatccaataacaacagagtgaagaaaggtgatattgtacacgctgtggtggtacgtaccaagcaaagaaatatgatacgtcctgatggatcaacaattgcgttcggtgacaatgcttgtgtattaatcaacaagaataatggtgaacctctagggtcaagaattatgggtaacgatggtgttgtcggcagagaactaagggaaaagggctacaacaagatttgctctctagcaagtaaagttttgtaa

SEQ ID NO: 71854 - protein, 138 aa, Kluyveromyces lactis NRRL Y-1140
MIYLKSFLKVIDNSGAQIAECIKVLGKGSPKSPGRIGDKIVCVVKKAKPLTQTITGQSNNNRVKKGDIVHAVVVRTKQRNMIRPDGSTIAFGDNACVLINKNNGEPLGSRIMGNDGVVGRELREKGYNKICSLASKVL

SEQ ID NO: 71855 - DNA, 414 bp, Kluyveromyces lactis NRRL Y-1140
  CDS (1)..(414)
atgtcaggtaacggtgctcaaggtactaaattcagaatttctttaggtctaccaactggtgccattatgaattgtgctgacaattctggtgctagaaacttgtacatcatggccgtcaagggttctggttcaagattgaacagattgccagctgcatctctaggtgatatggttatggctactgtcaagaagggtaagcctgaattgagaaagaaggttatgccagctatcgttgtcagacaatccaaggcttggagaagaaaggacggtgtcttcttgtacttcgaagacaatgccggtgtcattgctaaccctaagggtgaaatgaagggttccgctgttactggtccagtcggtaaggaatgtgccgacttgtggccaagaattgcttccaactctggtgttgttgtttaa

SEQ ID NO: 71856 - protein, 137 aa, Kluyveromyces lactis NRRL Y-1140
MSGNGAQGTKFRISLGLPTGAIMNCADNSGARNLYIMAVKGSGSRLNRLPAASLGDMVMATVKKGKPELRKKVMPAIVVRQSKAWRRKDGVFLYFEDNAGVIANPKGEMKGSAVTGPVGKECADLWPRIASNSGVVV

SEQ ID NO: 71857 - DNA, 399 bp, Debaryomyces hansenii CBS767
  CDS (1)..(399)
atgatatatttgaagacattattaaacgttatagacaactcgggagctcaggtcgctgaatgtattaaagttttacgtcacgggcctagaaatttcgctaaagttggtgatgaaataacagtagtcgttaaacaagccagatcgatgaacaaagaaataacaggccaatctgcaaataacagagtgaaaagaagagacatatgccgtgctatagttgttagaacgaaatcacctttcattagaccggatggttcaacggtgagattcgatgataatgcctgtgtcttgatcaacaagaatggtgatccattaggaaccagagtttcttctgtcgttgccaaagaattgagagagttgcaatacaataagattgtgtcattggccccaaaaaccttttag

SEQ ID NO: 71858 - protein, 132 aa, Debaryomyces hansenii CBS767
MIYLKTLLNVIDNSGAQVAECIKVLRHGPRNFAKVGDEITVVVKQARSMNKEITGQSANNRVKRRDICRAIVVRTKSPFIRPDGSTVRFDDNACVLINKNGDPLGTRVSSVVAKELRELQYNKIVSLAPKTF

SEQ ID NO: 71859 - DNA, 408 bp, Yarrowia lipolytica CLIB122
  CDS (1)..(408)
atgtctggagcttctggtaccaaatacaagatgtcgatggccctgcccgtcggagccatcatgaactgcgctgacaactctggtgctcgaaacctgtacgtcattgccgtcaagggctgcggtgctcgacttaaccgactgcccgccgctggtgccggtgacatggtcatggccaccgtcaagaagggtaagcccgagctccgaaagaaggtcatgcctgccattgttgttcgacagtccaagccctggagaagaaaggatggtgtctacctctacttcgaggacaacgccggtgtcattgtcaaccccaagggtgagatgaagggatccgccatcaccggccccgttgccaaggagtgcgccgacctctggccccgaatcgcctccaactctggtgttgtcgtttaa

SEQ ID NO: 71860 - protein, 135 aa, Yarrowia lipolytica CLIB122
MSGASGTKYKMSMALPVGAIMNCADNSGARNLYVIAVKGCGARLNRLPAAGAGDMVMATVKKGKPELRKKVMPAIVVRQSKPWRRKDGVYLYFEDNAGVIVNPKGEMKGSAITGPVAKECADLWPRIASNSGVVV

SEQ ID NO: 71861 - DNA, 390 bp, Yarrowia lipolytica CLIB122
  CDS (1)..(390)
atgttgtacctcaagtctctgatcaactgcatcgacaactctggtgctctgctggtcgagtgcatcaaggtgctgcgaaagtcacccaagaactacgccggtgtcggcgacaagattgtttgtgtcgtcaagcgggcccgacccattcctaacggctcttccatcacccagaaggcccgaaagggtgaaatcaagcgggctgtcattgtgcgaaccaagaaggagatccgacgacccgacggctcctacatccagtttgatgacaacgcctgtgtgctgatcaacgacgccaacgagcccgtgggtaaccgactcaacggagtcgttgccaaggaggtgcgagagcgaggcttcaccaaggtcgcttctctagctccccgagtcttgtaa

SEQ ID NO: 71862 - protein, 129 aa, Yarrowia lipolytica CLIB122
MLYLKSLINCIDNSGALLVECIKVLRKSPKNYAGVGDKIVCVVKRARPIPNGSSITQKARKGEIKRAVIVRTKKEIRRPDGSYIQFDDNACVLINDANEPVGNRLNGVVAKEVRERGFTKVASLAPRVL

SEQ ID NO: 71863 - DNA, 360 bp, Aspergillus nidulans FGSC A4
  CDS (1)..(360)
atgattcaattaaagacgttattgaattgcatcgataactccggcgccgccgtcgtcgaatgcgtgaacgtcttgaaaaagaagcgggccgcaacagttggtgaccggattgtaattgtcgttcagaaacaacggaacttcggacctgagggcacgagcagcaccggcatcgccaacaaagttcgccgaggagacattcgacacgctgtcgtggtccgggtgaagaaggaaatgcaaaggccggacggaacccttgtcaagtttgatgataacgcttgcgtgctggtgaacaaatccggagaccccatcggaaccagaatgaacgagcatacttttcctggaatctccctgataacataa

SEQ ID NO: 71864 - protein, 119 aa, Aspergillus nidulans FGSC A4
MIQLKTLLNCIDNSGAAVVECVNVLKKKRAATVGDRIVIVVQKQRNFGPEGTSSTGIANKVRRGDIRHAVVVRVKKEMQRPDGTLVKFDDNACVLVNKSGDPIGTRMNEHTFPGISLIT

SEQ ID NO: 71865 - DNA, 399 bp, Candida albicans SC5314
  CDS (1)..(399): transl_table=12
atgatttaccttaaaagtttgcttaatgttattgacaactctggtgctcaggttgttgaatgtatcaaggtgttgcgtcacaagccaaagagttgtgctcaaattggtgatagaataacgtgtgttgtgaaacaggccagaccattgcaacaagagttgactggacaatcgtcaaccaatagagtcaagagaagagatatatgccaagccgtggttgtcagaaccagggctccactcaagagaaaggacgggagtgttgttagatttgacgataatgcttgtgtgttgatcaataagaatggtgaacccttgggtactagaatatcgtcggtggtggccaaggaattaaaggatttaaactacaacaagattgtggcattagctccaaagactttttag

SEQ ID NO: 71866 - protein, 132 aa, Candida albicans SC5314
MIYLKSLLNVIDNSGAQVVECIKVLRHKPKSCAQIGDRITCVVKQARPLQQELTGQSSTNRVKRRDICQAVVVRTRAPLKRKDGSVVRFDDNACVLINKNGEPLGTRISSVVAKELKDLNYNKIVALAPKTF

SEQ ID NO: 71867 - DNA, 348 bp, Candida albicans SC5314
  CDS (1)..(348): transl_table=12
atgaattgtgctgataactctggtgccagaaacttgtacgttttagccgtcaaaggtactggtgccagattaaacagattaccagctgctgctgccggtgatatggttatggccactgttaaaaaaggtaaaccagaattaagaaagaaagttatgccagctattgttattagacaaagtaaaccatggagaagaagagatggtgtttatttgtatttcgaagataatgctggtgttattgttaatccaaaaggtgaaatgaaaggtagtgctattactggtccagttgctaaagaatgtgctgatttatggccacgtattgcttctaactctggtgttgttgtttaa

SEQ ID NO: 71868 - protein, 115 aa, Candida albicans SC5314
MNCADNSGARNLYVLAVKGTGARLNRLPAAAAGDMVMATVKKGKPELRKKVMPAIVIRQSKPWRRRDGVYLYFEDNAGVIVNPKGEMKGSAITGPVAKECADLWPRIASNSGVVV

SEQ ID NO: 71869 - DNA, 399 bp, Ustilago maydis 521
  CDS (1)..(399)
atgttgggcctgaaagcgcgaatggccatcatcgacaactccggcgggctgattgcagaatgcgtgaatgtactgcgaaacaagacaacccaaggtctaggtcgagttggtgatgagattgttgtcgtagtacagaaagctcgcccagtctccaacacgccaggccaagcaaacacacaaaaggttcgtcggggcgatgtccgacatgccgtcatcgtgcgcactaaaaaggagatgaccagaccagacggtcgtgtcatccgcttcgacgacaatgcatgcgtcctgctgaacaacaagaaggagccgctaggcacacgagtcaatggtgtcgtagccaacgagctccgtgctgcaggctggggcaaaatcgcaagtctggcgcccaaggtcatctag

SEQ ID NO: 71870 - protein, 132 aa, Ustilago maydis 521
MLGLKARMAIIDNSGGLIAECVNVLRNKTTQGLGRVGDEIVVVVQKARPVSNTPGQANTQKVRRGDVRHAVIVRTKKEMTRPDGRVIRFDDNACVLLNNKKEPLGTRVNGVVANELRAAGWGKIASLAPKVI

SEQ ID NO: 71871 - DNA, 411 bp, Ustilago maydis 521
  CDS (1)..(411)
atgtccaaggccgctgttggtaccaagttccgaatgactctggctctgccagtcggtgccgtcatgaactgcgccgacaactcgggtgccaagaaccttttcgtcattgccgtccatggcattggtgctcgtcttaaccgtctccctgccgccgccgccggtgacatggttgtcgcttccgtcaagaagggtaagcccgagctccgaaagaaggtcatgcccgctgtcgtcgttcgccagcgcaagccctggaggcgtcgtgacggtgtcttcctctacttcgaggacaacgccggtgtcattgtcaaccccaagggtgagatgaagggttccgctatcactggtcccgttgctaaggagtgcgccgacatctggccacgtatcgcctcgaacgccggtaccgtcgtctaa

SEQ ID NO: 71872 - protein, 136 aa, Ustilago maydis 521
MSKAAVGTKFRMTLALPVGAVMNCADNSGAKNLFVIAVHGIGARLNRLPAAAAGDMVVASVKKGKPELRKKVMPAVVVRQRKPWRRRDGVFLYFEDNAGVIVNPKGEMKGSAITGPVAKECADIWPRIASNAGTVV

SEQ ID NO: 71873 - DNA, 417 bp, Cryptococcus neoformans var. neoformans B-3501A
  CDS (1)..(417)
atgtccatcaagtccgctgccgccggtaccaagttccgcatgtccctcggtctccccgtcggtgccgtcatgaactgcgctgacaactctggtgccaagaacctttacgttatctccgttattggtttcggtgcccgacttaaccgactccccgctgccgctgccggtgacatggttatggcctccgtcaagaagggtaagcctgagcttcgtaagaaggtcatgcccgctgttatctgccgacagaggaagccctggaggagaagggatggtatcttcctctactttgaggacaatgccggtgtaattgtcaacgccaagggtgagatgaagggttctgccatcaacggacctgtcgctaaggaatgtgccgacctctggccccgtatcgcctccaacgctggtaccgtcgtctaa

SEQ ID NO: 71874 - protein, 138 aa, Cryptococcus neoformans var. neoformans B-3501A
MSIKSAAAGTKFRMSLGLPVGAVMNCADNSGAKNLYVISVIGFGARLNRLPAAAAGDMVMASVKKGKPELRKKVMPAVICRQRKPWRRRDGIFLYFEDNAGVIVNAKGEMKGSAINGPVAKECADLWPRIASNAGTVV

SEQ ID NO: 71875 - DNA, 450 bp, Cryptococcus neoformans var. neoformans B-3501A
  CDS (1)..(450)
atgattggattgaagggtattctcaatgttattgacaacaccggagctctcaaggttgaatgcatcaatgtcttgaaagtcaagacaagactaaagtccactggctttgccactgttggggatgagattgtttgtgtcgtcaacaaagcccgtcctatccccgccaacgaagtcgtcaagaatcccaatgcctcatccaacattcaaaaaatccgcaagggcgatatacgacgagcagtagttgtgcgcgtgaagaagaccactcaacggccagatggaagcgtggtcagattcgatgatagtgctgcggttttgttgaacaacaagggtgaaatgttgggcacaaggattgttgggcctgtggcgagcgagttgagaaagattaagggcggtgcgggcagcggtggaagatgggagaagatcgttatgctggcgcccaaagttgtttaa

SEQ ID NO: 71876 - protein, 149 aa, Cryptococcus neoformans var. neoformans B-3501A
MIGLKGILNVIDNTGALKVECINVLKVKTRLKSTGFATVGDEIVCVVNKARPIPANEVVKNPNASSNIQKIRKGDIRRAVVVRVKKTTQRPDGSVVRFDDSAAVLLNNKGEMLGTRIVGPVASELRKIKGGAGSGGRWEKIVMLAPKVV

SEQ ID NO: 71877 - DNA, 423 bp, Tribolium castaneum
  CDS (1)..(423)
atgtctaagagaggacgtggtggttccgcgggagccaaattcaggatttccctgggtttgcccgtcggtgcagtcatcaattgtgctgacaacacaggagcaaaaaacttgtatgtaatcgctgtgcaaggtatcggcggtcggttgaaccgtcttccggctgctggttccggcgatatgatcgtagcgactgtgaaaaagggcaaaccggaacttcgtaagaaagtcatgcctgcggttgtgatcaggcaacggaagcccttcagaaggaaggatggggtgtttatatactttgaagacaatgcgggggtcattgtgaacaataaaggagaaatgaaggggtcggctatcacaggacctgtggcgaaggaatgtgcagacttgtggcccaggatcgcctcaaatgcgagcagtatcgcctga

SEQ ID NO: 71878 - protein, 140 aa, Tribolium castaneum
MSKRGRGGSAGAKFRISLGLPVGAVINCADNTGAKNLYVIAVQGIGGRLNRLPAAGSGDMIVATVKKGKPELRKKVMPAVVIRQRKPFRRKDGVFIYFEDNAGVIVNNKGEMKGSAITGPVAKECADLWPRIASNASSIA

SEQ ID NO: 71879 - DNA, 369 bp, Nuphar advena
  CDS (1)..(369): transl_table=11
atgattcaacctcagacccatttgaatgtagcggacaacagcggagctcgaaaactgatgtgtattcgaatcataggagctagtaattaccgatatgctcatatcggtgacgttattgttgctgtaatcaaagaagcagtgccaaatatgcccctggaaagatcagaagtaatcagagctgtaattgtacgtacatgtaaagaactcaaacgcgacaacggtatgataatacggtatgatgacaatgcagcagttgtcattgatcaagaaggaaatccaaaaggcactcgagtttttggttcgattgctcgtgaattgagacagttaaatttcactaagatagtctcattagctcccgaagtattataa

SEQ ID NO: 71880 - protein, 122 aa, Nuphar advena
MIQPQTHLNVADNSGARKLMCIRIIGASNYRYAHIGDVIVAVIKEAVPNMPLERSEVIRAVIVRTCKELKRDNGMIIRYDDNAAVVIDQEGNPKGTRVFGSIARELRQLNFTKIVSLAPEVL

SEQ ID NO: 71881 - DNA, 366 bp, Prochlorococcus marinus str. MIT 9303
  CDS (1)..(366): transl_table=11
atgattcagcaggaatccttcctcactgttgccgataacagtggcgccaagcgaatccaatgcatccgtgtgctgggctcaaaccgtcgctatgcccatgtaggcgacatcatcgtggcagcagtaaaagacgcgatgccgaatatgagcgtcaagaaatccgaggtcgtcaaagctgtggtggttcgcacaaaagcaaccctgcgccgagagactggcaactcgattcgtttcgacgacaacgccgcagtgctcattaacgaggacaaaaaccctagaggcactcgtgtttttgggccggtggctcgggaacttcgcgagcgcaacttcaccaaaatcgtatccctcgctccggaggtgatctga

SEQ ID NO: 71882 - protein, 121 aa, Prochlorococcus marinus str. MIT 9303
MIQQESFLTVADNSGAKRIQCIRVLGSNRRYAHVGDIIVAAVKDAMPNMSVKKSEVVKAVVVRTKATLRRETGNSIRFDDNAAVLINEDKNPRGTRVFGPVARELRERNFTKIVSLAPEVI

SEQ ID NO: 71883 - DNA, 369 bp, Chlorokybus atmophyticus
  CDS (1)..(369): transl_table=11
atgattcaatctcaaacttatctaaatgttgctgacaatagtggtgctcgtaaaataatgtgtataagggtattaggaggcagtcagcgccaatatgctactattggagatgttattattgctgttgtcaaagattccgtgcctaatatggctttaaaacgctcagaagttgttagagcagttgttgtaagaacccggaaggggttaagacgtgacaatggtatgactattcgatttgatgataatgctgctgttgtcattaataaagaaggaaatccgagaggaactcgagtttttggacccgtggctagagaacttagagatcgaaattttacaaagattgtttccttagccccagaagttttatag

SEQ ID NO: 71884 - protein, 122 aa, Chlorokybus atmophyticus
MIQSQTYLNVADNSGARKIMCIRVLGGSQRQYATIGDVIIAVVKDSVPNMALKRSEVVRAVVVRTRKGLRRDNGMTIRFDDNAAVVINKEGNPRGTRVFGPVARELRDRNFTKIVSLAPEVL

SEQ ID NO: 71885 - DNA, 369 bp, Angiopteris evecta
  CDS (1)..(369): transl_table=11
atgattcaacctcaaagttatttaaatgtagcagataacagtggagctcgaaaactaatgtgtattcgagtattgggaactagtgatcgcgaatatgcagatactggtgatgtaattgttgctgtagttaaagaagcggtacctaatatgccgttaaagaaatcagaagttgttagagcagtagttgtgcgtacttgcaaggaactaaaacgtgataatggaatgagaatacgattcgatgacaatgcagcagttgttatcaatcaagaaggaaatcctagagggactcgggtctttggtcccatcgctagagaattgagagaatataatttcaccaaaataatctcactagctcctgaagtattgtga

SEQ ID NO: 71886 - protein, 122 aa, Angiopteris evecta
MIQPQSYLNVADNSGARKLMCIRVLGTSDREYADTGDVIVAVVKEAVPNMPLKKSEVVRAVVVRTCKELKRDNGMRIRFDDNAAVVINQEGNPRGTRVFGPIARELREYNFTKIISLAPEVL

SEQ ID NO: 71887 - DNA, 369 bp, Clostridium difficile 630
  CDS (1)..(369): transl_table=11
atgatacaacaagaatcacgtctaagagttgctgataactcaggagctaaagaacttttatgtatacgtgttctaggcggaagtaaaagaagatatggtaacataggcgacgttatagttgctactgttaaaagtgcaacacctggtggagttgtaaaaaaaggtaaggttgttaaagctgttatagtaagaagcaaacaaggcgtaagacgtaatgacggaagctatatatcttttgatgaaaatgctgctgttataataaaggacgataaaactccagtaggaactcgtatattcgggcctgttgctagagagttaagagacaatgaattcatgaaaatagtttctcttgctccagaagtactataa

SEQ ID NO: 71888 - protein, 122 aa, Clostridium difficile 630
MIQQESRLRVADNSGAKELLCIRVLGGSKRRYGNIGDVIVATVKSATPGGVVKKGKVVKAVIVRSKQGVRRNDGSYISFDENAAVIIKDDKTPVGTRIFGPVARELRDNEFMKIVSLAPEVL

SEQ ID NO: 71889 - DNA, 369 bp, Herminiimonas arsenicoxydans
  CDS (1)..(369): transl_table=11
atgattcaaactgaaagccggctcgaagtagccgacaacacgggtgctcgcgaagtgatgtgcatcaaggtgctcggcggttcaaagcgccgttacgcaggcattggcgatgtgattaaagtcactgtcaaggttgctgcgccacgtggtcgcgtgaaaaagggcgaaatttataacgcagttgttgtgcgtactgccaaaggtgttcgtcgtcaagatggctccctcgtcaagttcgacagcaatgcagcagttttgcttaatgcaaagctggagccaattggtacgcgtatttttggaccggttacacgtgaactgcgcactgagcgcttcatgaagatcgtttctctcgcgcctgaagttctgtaa

SEQ ID NO: 71890 - protein, 122 aa, Herminiimonas arsenicoxydans
MIQTESRLEVADNTGAREVMCIKVLGGSKRRYAGIGDVIKVTVKVAAPRGRVKKGEIYNAVVVRTAKGVRRQDGSLVKFDSNAAVLLNAKLEPIGTRIFGPVTRELRTERFMKIVSLAPEVL

SEQ ID NO: 71891 - DNA, 369 bp, Populus trichocarpa
  CDS (1)..(369): transl_table=11
atgatccaatctcagacccatttgaatgtagcagataatagcggagctcgagaattgatgtgtattcgaatcataggaactagtaatcgccgatatgctcatatcggcgacattattattgctgtgatcaaggaagcagtccccaattcacctctagaaagatctgaagtgatcagagctgtaattgtgcgtacttctaaagaactcaaacgcgacaacggtatgataatacgatatgatgacaacgctgcagttgtaattgatcaagaaggaaatccaaagggaactcgaatttttggtgcaatcgctcgggaattgagacagttaaatttcactaaaatagtttcattagcacctgaagtattataa

SEQ ID NO: 71892 - protein, 122 aa, Populus trichocarpa
MIQSQTHLNVADNSGARELMCIRIIGTSNRRYAHIGDIIIAVIKEAVPNSPLERSEVIRAVIVRTSKELKRDNGMIIRYDDNAAVVIDQEGNPKGTRIFGAIARELRQLNFTKIVSLAPEVL

SEQ ID NO: 71893 - DNA, 369 bp, Burkholderia vietnamiensis G4
  CDS (1)..(369): transl_table=11
atgatccagaccgaatctcggctcgaagtagccgacaacacgggtgcgcgtgaagtcatgtgcatcaaggtgctcggcggctcgaagcgtcgttatgccggcattggcgacatcatcaaggtgaccgtcaaagaagcaacgccgcgcgggcgcgtgaagaaaggcgaaatctacaacgccgtggtggtccgcaccgccaagggtgttcgccgtcaagacggctcgctgatcaagttcgacggcaacgccgctgtgcttttgaataacaagcttgagccgatcggcacccgcattttcgggccggtgacgcgtgagctgcgtagcgaacgattcatgaagatcgtttcgctggcgccggaagtgctgtaa

SEQ ID NO: 71894 - protein, 122 aa, Burkholderia vietnamiensis G4
MIQTESRLEVADNTGAREVMCIKVLGGSKRRYAGIGDIIKVTVKEATPRGRVKKGEIYNAVVVRTAKGVRRQDGSLIKFDGNAAVLLNNKLEPIGTRIFGPVTRELRSERFMKIVSLAPEVL

SEQ ID NO: 71895 - DNA, 369 bp, Phaseolus vulgaris
  CDS (1)..(369): transl_table=11
atgattcaacctcaaactcatttaaatgtagcggataacagcggagcacgtaaactgatgtgtattcgaattctaggagctagtaatcgacgatatgcttatattggcgacattgttgttgctgtaatcaaacaagcagtaccaaatacgaacttagaaagatcagaagtgatcagagctgtaattgtacggacttgtaaacaactaaaacgtagcaacggtataataattcagtatgatgataatgctgcagttgtaattgatcaagaaggaaatccaaaaggaactcgaatcttttgcgcaatcgcccgggaattgagacagttaaatttcactaaaatagtttcattagcacccgaggtattataa

SEQ ID NO: 71896 - protein, 122 aa, Phaseolus vulgaris
MIQPQTHLNVADNSGARKLMCIRILGASNRRYAYIGDIVVAVIKQAVPNTNLERSEVIRAVIVRTCKQLKRSNGIIIQYDDNAAVVIDQEGNPKGTRIFCAIARELRQLNFTKIVSLAPEVL

SEQ ID NO: 71897 - DNA, 369 bp, Arabis hirsuta
  CDS (1)..(369): transl_table=11
atgattcaaccacaaacctatttgaatgtagcagacaacagcggggctcgagaattgatgtgtattcgaataataggagctagtaatcgccgatatgctcatattggtgacgttattgttgctgtaattaaggaagcaataccaaatagtccgctagaaagatcagaagtgatcagagctgtaattgtacgtacttgtaaagaactcaaacgtaacaatgggacaataatacgatatgatgacaatgccgcagttgtcattgatcaagaaggaaatccaaaaggaactcgagtttttggggcgatcccacgggagttgagacaattaaactttactaaaatagtttcattagctcctgaggtattataa

SEQ ID NO: 71898 - protein, 122 aa, Arabis hirsuta
MIQPQTYLNVADNSGARELMCIRIIGASNRRYAHIGDVIVAVIKEAIPNSPLERSEVIRAVIVRTCKELKRNNGTIIRYDDNAAVVIDQEGNPKGTRVFGAIPRELRQLNFTKIVSLAPEVL

SEQ ID NO: 71899 - DNA, 369 bp, Capsella bursa-pastoris
  CDS (1)..(369): transl_table=11
atgattcaaccacaaacctatttgaatgtagcagacaacagcggggctcgaaaattgatgtgtattcgaataataggagctagtaatcgccgatatgctcatattggtgacgttattgttgctgtaatcaaagaagcaataccaaatactcctctagaaagatcagaagtgattagagctgtaattgtacgtacttgtaaagaactcaaacgtaacaatgggacgataatacgatatgatgacaatgccgcagttgtcattgatcaagaaggaaatccaaaaggaactcgagtatttggggcgatcccacgggaattgagacaattaaactttactaaaatagtttcattagctcctgaggtcttataa

SEQ ID NO: 71900 - protein, 122 aa, Capsella bursa-pastoris
MIQPQTYLNVADNSGARKLMCIRIIGASNRRYAHIGDVIVAVIKEAIPNTPLERSEVIRAVIVRTCKELKRNNGTIIRYDDNAAVVIDQEGNPKGTRVFGAIPRELRQLNFTKIVSLAPEVL

SEQ ID NO: 71901 - DNA, 369 bp, Dichelobacter nodosus VCS1703A
  CDS (1)..(369): transl_table=11
atgattcaaatgcaatctcgcttatcggtagcggataatagcggtgctcgtgaattgcaatgcattaaagttttaggcggatctcatcgtcgttacgcaggtatcggagatgtgattaaagtttctgtaaaagatgcgatgccgcgtggtcgggttaaaaaaggcgacgtttacaatgcattgattgtgcgtactaaaaaaggggttcggcgccgtgatggttccgttttacgttttgatggcaacgctgcagttttattaaatagcaaacttgagccaattggtactcgtgtttttggaccggttgcgcgtgagttgcgtagtgagaaatttatgaaaattatctcattggcgcctgaagtgttgtag

SEQ ID NO: 71902 - protein, 122 aa, Dichelobacter nodosus VCS1703A
MIQMQSRLSVADNSGARELQCIKVLGGSHRRYAGIGDVIKVSVKDAMPRGRVKKGDVYNALIVRTKKGVRRRDGSVLRFDGNAAVLLNSKLEPIGTRVFGPVARELRSEKFMKIISLAPEVL

SEQ ID NO: 71903 - DNA, 369 bp, Chloranthus spicatus
  CDS (1)..(369): transl_table=11
atgattcaacctaagacccatttgaatgtagcagacaacagcggggctcgcgaattgatgtgtattcgaatcataggagctagtaatcaccgatatgctcatattggtgacgttattgttgctgtaatcaaagaagcagtgccaaatatgcctttagaaagatcagaagtgatcagagctgtaattgtacgtacatgtaaagaacttaaacgcgacaacggtatgataatacgatatgatgacaatgcagcagttgtcattgatcaagaaggaaatccaagaggaactcgagtttttggcgcaatcgctcgggaattgagacagttgaatttcactaaaatagtctcattagctcctgaggtattataa

SEQ ID NO: 71904 - protein, 122 aa, Chloranthus spicatus
MIQPKTHLNVADNSGARELMCIRIIGASNHRYAHIGDVIVAVIKEAVPNMPLERSEVIRAVIVRTCKELKRDNGMIIRYDDNAAVVIDQEGNPRGTRVFGAIARELRQLNFTKIVSLAPEVL

SEQ ID NO: 71905 - DNA, 369 bp, Buxus microphylla
  CDS (1)..(369): transl_table=11
atgattcaacctcagacctatttgaatgtagcggacaacagcggggctcgaaaattgatgtgtattcgaatcgtaggagctagtaatcgccgatatgctcatattggtgacgttattgttgcggtaatcaaagaagcagtacctaatatgcctctagaaagatcagaagttatcagagctgtaattgtacgtacatgtaaagaactcaatcgcggcaacggtatgataatacgatatgatgacaatgcagcagttgtcattgatcaagaaggcaatccaaaaggaactcgagtttttggtgcgatcgcccgggaattgagacagttgaattttactaaaatagtttcattagctcctgaagtattataa

SEQ ID NO: 71906 - protein, 122 aa, Buxus microphylla
MIQPQTYLNVADNSGARKLMCIRIVGASNRRYAHIGDVIVAVIKEAVPNMPLERSEVIRAVIVRTCKELNRGNGMIIRYDDNAAVVIDQEGNPKGTRVFGAIARELRQLNFTKIVSLAPEVL

SEQ ID NO: 71907 - DNA, 369 bp, Illicium oligandrum
  CDS (1)..(369): transl_table=11
atgattcaacctcagacccatttaaatgtagcggacaacagcggggctcgagaactgatgtgtattcgaatcataggagctagtaatcaccgatatgctcatatcggtgacgttattgttgctgtaatcaaagaagcagtgcccaacatgcctctggaaagatcagaagtgatcagagctgtaattgtacgtacatgtaaagaactcaaacgtgacaacggtatgataatacgatatgatgacaatgcagcagttgtcattgatcaagaaggaaatccaaaaggaacgcgagtttttggtgcgatcgctcgggaattaagacagttaaatttcactaagatagtctcattagctcccgaggtattataa

SEQ ID NO: 71908 - protein, 122 aa, Illicium oligandrum
MIQPQTHLNVADNSGARELMCIRIIGASNHRYAHIGDVIVAVIKEAVPNMPLERSEVIRAVIVRTCKELKRDNGMIIRYDDNAAVVIDQEGNPKGTRVFGAIARELRQLNFTKIVSLAPEVL

SEQ ID NO: 71909 - DNA, 369 bp, Dioscorea elephantipes
  CDS (1)..(369): transl_table=11
atgattcaaccccaaacccttttgaatgtagcagataacagcggggctcgagaattgatgtgtattcgaatcataggggcagggaatccccgatatgctcatattggtgacgttattgttgctgtaatcaaagaagcagtacccaatatgcctctagaaagatcagaagtaattagagctgtaattgtacgtacatgtaaagaactcaaacgtaacaacggtatcataatacgatatgatgacaatgcagcagttgtcattgatcaagaaggaaatccaaaaggaactcgagtttttggtgcgattcctcgggaattgagacagtttaattttactaaaatagtttcattagctcccgaggtattataa

SEQ ID NO: 71910 - protein, 122 aa, Dioscorea elephantipes
MIQPQTLLNVADNSGARELMCIRIIGAGNPRYAHIGDVIVAVIKEAVPNMPLERSEVIRAVIVRTCKELKRNNGIIIRYDDNAAVVIDQEGNPKGTRVFGAIPRELRQFNFTKIVSLAPEVL

SEQ ID NO: 71911 - DNA, 369 bp, Cycas taitungensis
  CDS (1)..(369): transl_table=11
atgattcaacctcaaacttattcaaatgtagcggacaacagtggagcccgaaaactaatgtgcatccgggttctaaaagctagtaatcgtcaatacgctcatattggtgacgttatcattgctataattaaagaagcagtaccaaatatgcccttaaaagaatcagaaatagttagagccgtagttgtacgcacctgtaaagaacttaaacgtgacaatggaatgataatacgatctgatgacaatgcagcagttatcgttgatcaggaaggaaatccaagaggaacccgggtttttggttcagttgctcgggaattgagacaattgaattttgccaaaatagtttcattggctcccgaagtcttataa

SEQ ID NO: 71912 - protein, 122 aa, Cycas taitungensis
MIQPQTYSNVADNSGARKLMCIRVLKASNRQYAHIGDVIIAIIKEAVPNMPLKESEIVRAVVVRTCKELKRDNGMIIRSDDNAAVIVDQEGNPRGTRVFGSVARELRQLNFAKIVSLAPEVL

SEQ ID NO: 71913 - DNA, 369 bp, Candidatus Protochlamydia amoebophila UWE25
  CDS (1)..(369): transl_table=11
atgattcaacaagaaagcgagctagaagtagctgataactcgggtgcaaaacgagtcaaatgctttaaagtattaggtggatcaaagcgtcgttatgcccatgttggggatattgtcgttgcttctgttcaagatgctcatcctgaaggaagtgttaagaaaggggatgttgttaaagttgttatcattcgtacaaaatcatacattaaacgtaaagatggtacgaaaatacggtttgatacaaacagctgcgtcttaattgacgacaagaagaacccaaagggaactcgtatctttggacctgttgcacgtgaagtgcgcgatagagactttttaaagattagttctctcgcaccagaagtgatttaa

SEQ ID NO: 71914 - protein, 122 aa, Candidatus Protochlamydia amoebophila UWE25
MIQQESELEVADNSGAKRVKCFKVLGGSKRRYAHVGDIVVASVQDAHPEGSVKKGDVVKVVIIRTKSYIKRKDGTKIRFDTNSCVLIDDKKNPKGTRIFGPVAREVRDRDFLKISSLAPEVI

SEQ ID NO: 71915 - DNA, 369 bp, Mesoplasma florum L1
  CDS (1)..(369): transl_table=4
atgattcaaacattatcaaaattaaaagtagcagataactcaggtgctaaagaagttcgtgttattcgtaatttaggtggatcagttagaaagtttacaggaattggagacatcatcgtttgttcagttcaatcagcaactccaggaggagctgttaaaaaaggtcaagttgttaaagctgttattgttagaactactagagaattaaaaagagaagatggtacatacatccgtttctcagaaaatgctgtagtaattattaaagaagataaatcaccacgtggaactcgtattttcggtccaattgcacgtgaaattaaagaagctggatttgcaaaaatcgcatctctagctccagaagtattatag

SEQ ID NO: 71916 - protein, 122 aa, Mesoplasma florum L1
MIQTLSKLKVADNSGAKEVRVIRNLGGSVRKFTGIGDIIVCSVQSATPGGAVKKGQVVKAVIVRTTRELKREDGTYIRFSENAVVIIKEDKSPRGTRIFGPIAREIKEAGFAKIASLAPEVL

SEQ ID NO: 71917 - DNA, 369 bp, Symbiobacterium thermophilum IAM 14863
  CDS (1)..(369): transl_table=11
gtgattcaggttcagactcgcctccaggttgccgacaacaccggcgccaaggagctgatgtgcatcaaggtccttggcgggtcctggcggcggtatgccaacatcggcgacgtcatcgtctgctcggtcaaggaagccagcccgggcggcgtggtgaagaagggcgacgtcgtgcgggccgtcgtggtgcgcaccaagaaggggctgcgccgcgaggacggttcctatattcgcttcgacgagaacgctgccgtaatcctgaaggacgacaaggagccccggggcacccgcatcttcggcccggtggcgcgcgagctgcgcgacaaggagttcatgaagatcatctccctggctcctgaggtcctgtag

SEQ ID NO: 71918 - protein, 122 aa, Symbiobacterium thermophilum IAM 14863
MIQVQTRLQVADNTGAKELMCIKVLGGSWRRYANIGDVIVCSVKEASPGGVVKKGDVVRAVVVRTKKGLRREDGSYIRFDENAAVILKDDKEPRGTRIFGPVARELRDKEFMKIISLAPEVL

SEQ ID NO: 71919 - DNA, 369 bp, Bacillus licheniformis ATCC 14580
  CDS (1)..(369): transl_table=11
atgattcaacaagagactcgtttaaaagtagctgataactctggtgcccgtgaagtgttaacaatcaaggtgcttggtggttctggacgcaaaacagctaacattggtgatgtcattgtttgcacggttaaacaagcaacaccaggaggcgttgtcaaaaaaggtgatgtcgtgagagctgtagtcgtacgttctaagagcggtgcacgcagaaatgacggatcttacatcaaattcgatgagaatgcatgtgttatcatccgtgacgacaaaagcccgcgcggaactcgtatcttcggacctgtagcacgtgaacttcgtgataacaacttcatgaaaattgtttctctagctccagaagtactttaa

SEQ ID NO: 71920 - protein, 122 aa, Bacillus licheniformis ATCC 14580
MIQQETRLKVADNSGAREVLTIKVLGGSGRKTANIGDVIVCTVKQATPGGVVKKGDVVRAVVVRSKSGARRNDGSYIKFDENACVIIRDDKSPRGTRIFGPVARELRDNNFMKIVSLAPEVL

SEQ ID NO: 71921 - DNA, 366 bp, Legionella pneumophila subsp. pneumophila str. Philadelphia 1
  CDS (1)..(366): transl_table=11
atgatccaaatgcagacagtgcttgaagtagctgataacagcggagcacgtaaagtaatgtgtattaaagtacttggtggatcacacagacggtatgcccgtgtaggtgatgtaattaaagtaagcgtaaaagatgctataccaagaagtaaggtaaaaaagggtgctgtaatgagagcggtagtcgttagaactgctcaaggtgttcgaagagatgatggttcattgattcgatttgatgataatgcagcagttcttttaaacaaccaaaacgagccaataggaacacgtatatttggcccggttacacgcgagttaagagaaagatttatgaagataatttctcttgccgcagaggtattgtaa

SEQ ID NO: 71922 - protein, 121 aa, Legionella pneumophila subsp. pneumophila str. Philadelphia 1
MIQMQTVLEVADNSGARKVMCIKVLGGSHRRYARVGDVIKVSVKDAIPRSKVKKGAVMRAVVVRTAQGVRRDDGSLIRFDDNAAVLLNNQNEPIGTRIFGPVTRELRERFMKIISLAAEVL

SEQ ID NO: 71923 - DNA, 360 bp, Anaplasma marginale str. St. Maries
  CDS (1)..(360): transl_table=11
atgatacaaaaaaacgcgatcttggatgtagcagataattcgggcgcccgcaaagtgctgtgcatagggtttttgggtggaaagaagcgcgccttggtgggggatgttattgttgtgtctgctagggttgttgcgcctagaggcaaggttaataaaggtagggtgtataaagctgttgttgtgaggaccaagggcccgattcgtcgtttggatggcagcactatcaggttttccagtaatgctgttgtgttggtgaacgaccagggtgaccctctgggtacgagagtatttggccctgttaggaagctgcccgttggtgagttcaccaaggttatgtccttggctgtggaggttttgtga

SEQ ID NO: 71924 - protein, 119 aa, Anaplasma marginale str. St. Maries
MIQKNAILDVADNSGARKVLCIGFLGGKKRALVGDVIVVSARVVAPRGKVNKGRVYKAVVVRTKGPIRRLDGSTIRFSSNAVVLVNDQGDPLGTRVFGPVRKLPVGEFTKVMSLAVEVL

SEQ ID NO: 71925 - DNA, 369 bp, Bacillus clausii KSM-K16
  CDS (1)..(369): transl_table=11
atgatccaacaagaaagccgcttaaaagtcgccgacaactctggggcccgtgaagtgctctgcattaaagtgctaggtggctctgggcgtaagatagcgaacattggcgatgtcattgtttgttcggtaaaagaagcaacaccagggggcgttgtcaagaaaggcgacgttgtaaaagctgtaatcgttcgttcaaaaagtggtgtacgccgcaatgatggttcttacatcaagtttgacgaaaacgcagcagtcattgtccgtgacgacaaaagcccgcgcggaactcgtatctttggaccagttgcacgtgaacttcgtgacaaccagttcatgaaaatcgtttctcttgctccagaagttctttaa

SEQ ID NO: 71926 - protein, 122 aa, Bacillus clausii KSM-K16
MIQQESRLKVADNSGAREVLCIKVLGGSGRKIANIGDVIVCSVKEATPGGVVKKGDVVKAVIVRSKSGVRRNDGSYIKFDENAAVIVRDDKSPRGTRIFGPVARELRDNQFMKIVSLAPEVL

SEQ ID NO: 71927 - DNA, 369 bp, Thermobifida fusca YX
  CDS (1)..(369): transl_table=11
gtgattcagcaggagtcgcgactcaaggtcgccgacaacacgggtgcgaaggagctgctgaccatccgtgtccttggcggctcgggcaggcggtacgcgagcatcggtgacacgattgtggcgaccgtcaaggacgccctgcccggcgcgggggtcaagaagggcgacatcgtcaaagccgttgtcgtgcgcaccacgaaggaacgccgtcggcccgacggcttctacatccgcttcgatgagaacgccgccgtgctcatcaaggacggtggggacccgcggggcacccgtattttcggcccggtcggccgtgaactgcgagacaagaagttcatgcgcatcatttcgctggcgccggaggtgctctag

SEQ ID NO: 71928 - protein, 122 aa, Thermobifida fusca YX
MIQQESRLKVADNTGAKELLTIRVLGGSGRRYASIGDTIVATVKDALPGAGVKKGDIVKAVVVRTTKERRRPDGFYIRFDENAAVLIKDGGDPRGTRIFGPVGRELRDKKFMRIISLAPEVL

SEQ ID NO: 71929 - DNA, 360 bp, Ehrlichia canis str. Jake
  CDS (1)..(360): transl_table=11
atgatacagaaaaatactttactggatgttgctgataattctggtgcgcgtaaggtgttgtgtataggattattaaatggtaaaaagtctgcttcagttggtgatgtaattgttgtttctactaaagtaattactccaagaggaaaagttagcaaaggaaaagtttataaagcagtagttgtaagagtaaaaaaagcagtgcgtagattagatggaagtattataagattttcaagtaatgctgttgtattaattaatgatcaaggtgatccattagggactcgtgtatttggtccaattaagaaattaccttttggtcttttttctaaagttatgtctttagctgtagaggtattgtaa

SEQ ID NO: 71930 - protein, 119 aa, Ehrlichia canis str. Jake
MIQKNTLLDVADNSGARKVLCIGLLNGKKSASVGDVIVVSTKVITPRGKVSKGKVYKAVVVRVKKAVRRLDGSIIRFSSNAVVLINDQGDPLGTRVFGPIKKLPFGLFSKVMSLAVEVL

SEQ ID NO: 71931 - DNA, 369 bp, Dehalococcoides sp. CBDB1
  CDS (1)..(369): transl_table=11
atggttcaacagtataccaggttaaacgtagcagataataccggcgctaagaaaataatgtgcatcaacgttttgggcggaagccacaaaatacaagctaaagttggtgatgttatagtagctgcggtaaaaaaatccagccctgatgcccaggctaaatccggcacggtggtaaaggctgttgtggtacgcattaccaagccttatgcccgcccggatggctcttatataaagtttgatgataacgctgcagttattctgaatgacaagatggagcccaaaggcacccgtatttttggcccggtggcccgcgagcttcgtgataaaaaattcaccaagatcttgtcgctggcgcctgaggtattgtag

SEQ ID NO: 71932 - protein, 122 aa, Dehalococcoides sp. CBDB1
MVQQYTRLNVADNTGAKKIMCINVLGGSHKIQAKVGDVIVAAVKKSSPDAQAKSGTVVKAVVVRITKPYARPDGSYIKFDDNAAVILNDKMEPKGTRIFGPVARELRDKKFTKILSLAPEVL

SEQ ID NO: 71933 - DNA, 369 bp, Acorus calamus
  CDS (1)..(369): transl_table=11
atgattcaacctcagacccttttaaatgtagcggataacagcggggctcgagaattgatgtgtattcgaatcataggagccagtaatcgccgatatgctcatattggtgacgttattgttgctgtaatcaaagaagcagtacccaatatgtctctagaaagatcagaagtggtcagagctgtaattgtacgtacatgtaaagaactcaaacgtgacaacggtatgataatacgatatgatgacaatgcagcagttgtcattgatcaagaagggaatccaaaaggaactcgagtttttggtgcgatcgctcgggaattgagacatttgaatttcactaaaatagtttccctagctcctgaggtattataa

SEQ ID NO: 71934 - protein, 122 aa, Acorus calamus
MIQPQTLLNVADNSGARELMCIRIIGASNRRYAHIGDVIVAVIKEAVPNMSLERSEVVRAVIVRTCKELKRDNGMIIRYDDNAAVVIDQEGNPKGTRVFGAIARELRHLNFTKIVSLAPEVL

SEQ ID NO: 71935 - DNA, 369 bp, Frankia sp. CcI3
  CDS (1)..(369): transl_table=11
gtgattcagcaggagtcgcgacttcgggtcgccgacaacaccggagcgcgggagattctctgcatccgggtgctcggcggctctgggcgtcgttacgcggggatcggcgacatcatcgtcggcacggtgaaggacgccctgcccggcgccggcgtgaagcgcggcgacgtggtcaaggcggtcgtggtgcgtaccaccaaggagcgccggcggccggacggctcctacatccgcttcgacgagaacgcggcggtgctcatccgggacggtggtgaccctcggggcacccgcatcttcgggccggtcggccgggagctgcgtgacaagaagttcatgaagatcatctcgctggcgccggaggtgctgtga

SEQ ID NO: 71936 - protein, 122 aa, Frankia sp. CcI3
MIQQESRLRVADNTGAREILCIRVLGGSGRRYAGIGDIIVGTVKDALPGAGVKRGDVVKAVVVRTTKERRRPDGSYIRFDENAAVLIRDGGDPRGTRIFGPVGRELRDKKFMKIISLAPEVL

SEQ ID NO: 71937 - DNA, 369 bp, Desulfitobacterium hafniense Y51
  CDS (1)..(369): transl_table=11
atgatccaagttcaaactcgcctcagagtcggagacaattctggagctaaagaactgatgtgcatcaaggtgcttggcggttcaatgcgccgctatgcatcgattggagatataatcgtcgcttctgttaaagaagcaacacctggcggcgttgtcaaaaagggagatgtcgtcaaagcggttgttgtgcgcaccaagaaagaaattaaacgtaaagacggcacttatatccgtttcagcgaaaatgctgccgttgtaattaaagatgatagaagcccgcggggaactcgtattttcggacccgttgcccgggaattgcgtgataaggattttatgaaaatcatctctctcgcaccggaagtaatctaa

SEQ ID NO: 71938 - protein, 122 aa, Desulfitobacterium hafniense Y51
MIQVQTRLRVGDNSGAKELMCIKVLGGSMRRYASIGDIIVASVKEATPGGVVKKGDVVKAVVVRTKKEIKRKDGTYIRFSENAAVVIKDDRSPRGTRIFGPVARELRDKDFMKIISLAPEVI

SEQ ID NO: 71939 - DNA, 369 bp, Rubrobacter xylanophilus DSM 9941
  CDS (1)..(369): transl_table=11
atgatccagcaggagacgaggttaaaggtcgcggacaactccggagcccgcagcctcctgtgcatccgggtgctcggcggcagcaagcgccgcagcgccgggataggggatgtcatcgtggcctcggtcaaggaggccacgccggggggggcggtcaagaagggcgacgtggtgcgggccgtggtggtgcggaccaagaaggagacgcgccgggaggacggctcctacatccggttcggggagaacgccggggtgctcataaacagcgacggctccccgcgcgggacccgcatctttggcccggtcgcccgcgagctccgggagaaggggtacaccaggatcatctcgcttgcaccggaggtgttgtag

SEQ ID NO: 71940 - protein, 122 aa, Rubrobacter xylanophilus DSM 9941
MIQQETRLKVADNSGARSLLCIRVLGGSKRRSAGIGDVIVASVKEATPGGAVKKGDVVRAVVVRTKKETRREDGSYIRFGENAGVLINSDGSPRGTRIFGPVARELREKGYTRIISLAPEVL

SEQ ID NO: 71941 - DNA, 369 bp, Trichodesmium erythraeum IMS101
  CDS (1)..(369): transl_table=11
atgattcaacaacaatctttactaaatgtagctgataatagcggtgcccgaaaactaatgtgtatccgagtagtgggtggtggaaatcgtcgatatgctcacataggtgatgtaattatagctgtagtcaaagatgcatctcctaatatggctgtgaaaaaatcagatgtagtaagagctgttgtggttcgcactaaaaaaggtttacgtcgagatagcggtatgagtattagatttgacgataacgcagcagtgatcattaaccaggatggaaacccacgtggtactcgtgtttttggcccagttgctcgtgaattacgagacaaaaattttactaaaattgtatccttagcaccggaggtactgtaa

SEQ ID NO: 71942 - protein, 122 aa, Trichodesmium erythraeum IMS101
MIQQQSLLNVADNSGARKLMCIRVVGGGNRRYAHIGDVIIAVVKDASPNMAVKKSDVVRAVVVRTKKGLRRDSGMSIRFDDNAAVIINQDGNPRGTRVFGPVARELRDKNFTKIVSLAPEVL

SEQ ID NO: 71943 - DNA, 369 bp, Platanus occidentalis
  CDS (1)..(369): transl_table=11
atgattcaacctcagacccatttgaatgtagcggacaacagcggggctcgagaattgatgtgtattcgaatcataggagctagtaatcgccgatatgctcatattggtgacgttattgttgctgtaatcaaagaagcagtgcccaatatgcctctagagagatcagaagtgatcagagctgtaattgtacgtacatgtaaagaactcaaacgcgacaacggtatgataataagatatgatgacaatgcagcagttgtcattgatcaagaaggaaatccaaaaggaactcgagtttttggtgcgatcgctcgggaattgagacagttgagttttactaaaatagtttcattagctcctgaggtattataa

SEQ ID NO: 71944 - protein, 122 aa, Platanus occidentalis
MIQPQTHLNVADNSGARELMCIRIIGASNRRYAHIGDVIVAVIKEAVPNMPLERSEVIRAVIVRTCKELKRDNGMIIRYDDNAAVVIDQEGNPKGTRVFGAIARELRQLSFTKIVSLAPEVL

SEQ ID NO: 71945 - DNA, 369 bp, Nandina domestica
  CDS (1)..(369): transl_table=11
atgattcaacctcaaacccatttaaatgtagcggacaacagcggggctagagaattaatgtgtattcgaatcataggagctagtaatcgacgatatgctcatattggtgacgttattgttgctgtaatcaaagaagcagtgccccatatgcctctacaaagatcagaagtgatcagagctgtaattgtacgtacacgtaaagaactcaaacgtgacaacggtatgataatacaatatgatgacaatgcagcagttgtcattgatcaagaaggaaatccaagaggaactcgagtttttggcgcgatcgctcgagaattgagacagttgaattttacgaaaatagtttcattagctcctgaggtattataa

SEQ ID NO: 71946 - protein, 122 aa, Nandina domestica
MIQPQTHLNVADNSGARELMCIRIIGASNRRYAHIGDVIVAVIKEAVPHMPLQRSEVIRAVIVRTRKELKRDNGMIIQYDDNAAVVIDQEGNPRGTRVFGAIARELRQLNFTKIVSLAPEVL

SEQ ID NO: 71947 - DNA, 366 bp, Pelargonium x hortorum
  CDS (1)..(366): transl_table=11
atgattcaatctcagacccttttgaatgtagcggacaacagcggtgcccggaaattgatgtgtattcgaatcgtaggagctagcaatcaacgatatgctcatattggcgacgttattgttgctgtaattaaggaagcaaagccaacttcggctctaaaacgatcagaagtgatcaaagctgtaattgtacgtacttgtaaagaattcaaatgtgatgatggtatgataataagatatgatgacaatgctgcagttgtcattaataaagacagaaatccagtaggaactcgcatttttggtgcgatccccctagaattgcatcaaaatttcgacaaaatagtttcattagcgcgtgaagtaatataa

SEQ ID NO: 71948 - protein, 121 aa, Pelargonium x hortorum
MIQSQTLLNVADNSGARKLMCIRIVGASNQRYAHIGDVIVAVIKEAKPTSALKRSEVIKAVIVRTCKEFKCDDGMIIRYDDNAAVVINKDRNPVGTRIFGAIPLELHQNFDKIVSLAREVI

SEQ ID NO: 71949 - DNA, 369 bp, Pediococcus pentosaceus ATCC 25745
  CDS (1)..(369): transl_table=11
gtgatccaacaagagagtcgtttgaaagttgctgacaattctggagcacgtgaactgttggttattaaagtattgggtggttcccgtgttaaatttggttacattggtgacattatcgttgctactgttaaacaagcaacaccaggtggcgttgtcaaaaaaggtgacgttgtaaaagctgttgttgttcgtacaaaacaaggtgcacaccgtgctgatggttcatacatcaaatttgacgaaaatgctgcagtattaattaaagatgataagagccctcaaggaactcgtatctttggcccagttgcacgtgaattacgtgacaaggactacatgaagatcgtttctttggctcctgaagtattgtaa

SEQ ID NO: 71950 - protein, 122 aa, Pediococcus pentosaceus ATCC 25745
MIQQESRLKVADNSGARELLVIKVLGGSRVKFGYIGDIIVATVKQATPGGVVKKGDVVKAVVVRTKQGAHRADGSYIKFDENAAVLIKDDKSPQGTRIFGPVARELRDKDYMKIVSLAPEVL

SEQ ID NO: 71951 - DNA, 369 bp, Oenococcus oeni PSU-1
  CDS (1)..(369): transl_table=11
atgattcaacaagaaagtcgccttaaagttgctgataactctggcgctcgtgaaattttgacaatcaaagttcttggcggttccggaaggaaatttgctaatatcggcgatatgattgtcgccactgttaaacaagctattcctggcggcaccgttaagaaaggtgatgttgttaaagcggttatcgttcgtacggttagtggtgttcatcgaattgatggttcatatattaaatttgatgaaaatgccgctgtcatcgttagagatgataagtcgccggttggtacacgtatttttggacctgtcgcacgtgaattacgcgataacaactatatgcgtattgtaagtcttgcgccggaagttctataa

SEQ ID NO: 71952 - protein, 122 aa, Oenococcus oeni PSU-1
MIQQESRLKVADNSGAREILTIKVLGGSGRKFANIGDMIVATVKQAIPGGTVKKGDVVKAVIVRTVSGVHRIDGSYIKFDENAAVIVRDDKSPVGTRIFGPVARELRDNNYMRIVSLAPEVL

SEQ ID NO: 71953 - DNA, 369 bp, Solibacter usitatus Ellin6076
  CDS (1)..(369): transl_table=11
atgattggaatgcgtacgattctcgaggtggccgataacagcggcgcgcgcaggctttcctgcattctgccgcgcggcggcgacctcggtttgcgcgccggcttgggcgacgtagtgacggctgccgtgaaagaagcggctcccgattcggcgattaagaagggtaaagtggtgcgctgcgtgatcgtccgcatgcgcaaggaaacgcggcgcaaggatggaacctatatccggttcgattccaacgcggcggtgttgatcaacgatgtgggcgagccggtgggtacgcgcgtcttcggtccggtcgcgcgcgaattgcgcgacaagaagttcatgaagatcgtgtcgctggcccccgaggtaatctaa

SEQ ID NO: 71954 - protein, 122 aa, Solibacter usitatus Ellin6076
MIGMRTILEVADNSGARRLSCILPRGGDLGLRAGLGDVVTAAVKEAAPDSAIKKGKVVRCVIVRMRKETRRKDGTYIRFDSNAAVLINDVGEPVGTRVFGPVARELRDKKFMKIVSLAPEVI

SEQ ID NO: 71955 - DNA, 369 bp, Shewanella sp. ANA-3
  CDS (1)..(369): transl_table=11
atgatccaaatgcaatcgactcttgacgtcgcatgtaacagcggcgcacgcagagttcagtgtattaaggtcttgggtggctctcatcgtcgttatgccggtatcggcgacatcatcaaggtttctgttaaagaagcaattcctcgcgctaaagcgaagaaaggtgatgtgtataacgcggtggtagtccgtactaagaaaggcgtacgtcgtccagacggttctgtcattcgcttcgatcggaatgcagcagttcttctgaacaacaacctgcagccgattggcactcgtatctttggaccagtgacacgtgaattgcgctctgagcagttcatgaagattgtctcgctggcaccagaagtactgtaa

SEQ ID NO: 71956 - protein, 122 aa, Shewanella sp. ANA-3
MIQMQSTLDVACNSGARRVQCIKVLGGSHRRYAGIGDIIKVSVKEAIPRAKAKKGDVYNAVVVRTKKGVRRPDGSVIRFDRNAAVLLNNNLQPIGTRIFGPVTRELRSEQFMKIVSLAPEVL

SEQ ID NO: 71957 - DNA, 369 bp, Mycobacterium smegmatis str. MC2 155
  CDS (1)..(369): transl_table=11
gtgattcagcaggaatcgcggttgaaggtcgccgacaacacgggcgccaaggagatcttgtgcatccgcgttctcggtggctcgtcgcggcgctacgccggaatcggcgatgtcatcgtggcgaccgtcaaggacgccatcccgggcggcaacgtcaagcgtggcgatgtcgtcaaggccgtcgtggtccgcaccgtcaaggagcggcgtcgtgctgacggcagctacatcaagttcgatgagaacgccgccgtcatcatcaagaacgacaacgatccgcgcggcacgcgcatcttcggccccgtgggccgcgaactgcgcgagaagaagttcatgaagatcgtctcgcttgccccggaggtgctgtaa

SEQ ID NO: 71958 - protein, 122 aa, Mycobacterium smegmatis str. MC2 155
MIQQESRLKVADNTGAKEILCIRVLGGSSRRYAGIGDVIVATVKDAIPGGNVKRGDVVKAVVVRTVKERRRADGSYIKFDENAAVIIKNDNDPRGTRIFGPVGRELREKKFMKIVSLAPEVL

SEQ ID NO: 71959 - DNA, 369 bp, Nocardioides sp. JS614
  CDS (1)..(369): transl_table=11
atgatccagcaggagtcgcggctcaaggtcgccgacaacaccggtgcgaaggagatcctttgcatccgtgttctcggtggctcgggtcggcgctacgccggtatcggcgacgtcatcgtcgccaccgtgaaggatgcgatccccggtggcaacgtgaagaagggtgacgtcgtcaaggctgtcgtcgtgcgcaccgtcaaggagcgtcgccgccccgacggctcgtacatccgcttcgacgagaacgccgccgtcatcctcaagaacgacggcgagccgcgaggcacccgcatcttcggccccgtgggccgtgagctgcgcgagaagaagttcatgaagatcatctcgctcgccccggaggtgctctga

SEQ ID NO: 71960 - protein, 122 aa, Nocardioides sp. JS614
MIQQESRLKVADNTGAKEILCIRVLGGSGRRYAGIGDVIVATVKDAIPGGNVKKGDVVKAVVVRTVKERRRPDGSYIRFDENAAVILKNDGEPRGTRIFGPVGRELREKKFMKIISLAPEVL

SEQ ID NO: 71961 - DNA, 369 bp, Azoarcus sp. BH72
  CDS (1)..(369): transl_table=11
atgattcaaatgcagtccaagttggacgttgctgacaacaccggtgcgcgttcggttatgtgcatcaaggtgctgggcggctccaagcgtcggtacgccagtatcggcgacatcatcaaggtcaccgtgaaagacgccgccccgcgtggtcgcgtcaagaagggtgacgtctacaacgcagtcgttgtccgtactgccaagggtgttcgtcgtccggacggctcgctggtgaagttcgataacaacgccgcggtgcttctgaacaacaagctcgagccgatcggcacgcgcatctttgggccggtgacgcgcgaactgcgctccgagcgcttcatgaagatcgtgtcgcttgcgccggaagtgctctga

SEQ ID NO: 71962 - protein, 122 aa, Azoarcus sp. BH72
MIQMQSKLDVADNTGARSVMCIKVLGGSKRRYASIGDIIKVTVKDAAPRGRVKKGDVYNAVVVRTAKGVRRPDGSLVKFDNNAAVLLNNKLEPIGTRIFGPVTRELRSERFMKIVSLAPEVL

SEQ ID NO: 71963 - DNA, 369 bp, Acidovorax sp. JS42
  CDS (1)..(369): transl_table=11
atgatccaaacagaatctcggttagacgttgccgacaataccggcgcgaagtccgtcctgtgcatcaaggtgctgggcggttccaagcgtcgctatgccagcgttggcgacatcatcaaggtgagcgtgaaggaagctgctccgcgtggccgcgtcaagaagggcgaggtctacagcgcagtggttgtgcgtacggcgaagggtatccgccgcggcgacggttcgctcgtgaagttcgacggcaatgcagcagtgttgctcaattccaagctggagcccatcggcacccgcatcttcggccccgtgacgcgtgaactgcgtaccgagcgcttcatgaagatcgtgtccctggctcccgaagttctctga

SEQ ID NO: 71964 - protein, 122 aa, Acidovorax sp. JS42
MIQTESRLDVADNTGAKSVLCIKVLGGSKRRYASVGDIIKVSVKEAAPRGRVKKGEVYSAVVVRTAKGIRRGDGSLVKFDGNAAVLLNSKLEPIGTRIFGPVTRELRTERFMKIVSLAPEVL

SEQ ID NO: 71965 - DNA, 369 bp, Rickettsia rickettsii
  CDS (1)..(369): transl_table=11
atgattcaaatgcagagcatcttggaagttgcagataattccggtgctaaaaaagttatgtgtattaaagttttaggtggctctcaccatatggtggcaaagctgggtgatgttatagttgtatctgttaaagacgctatacccggcggtaaggttaaaaagggtgatgtttataaaggcctgattgttcgtaccaagactggagtagtaagacctgatggtagtacaataaaatttgatcaaaacgcattagtgcttttgaataaacaagatgaacctatcggtactagagtttttggtcctgttacaagagaacttagagcgaaaaaatatgttagaataatgtcgcttgcagaggaagtgttataa

SEQ ID NO: 71966 - protein, 122 aa, Rickettsia rickettsii
MIQMQSILEVADNSGAKKVMCIKVLGGSHHMVAKLGDVIVVSVKDAIPGGKVKKGDVYKGLIVRTKTGVVRPDGSTIKFDQNALVLLNKQDEPIGTRVFGPVTRELRAKKYVRIMSLAEEVL

SEQ ID NO: 71967 - DNA, 369 bp, Prosthecochloris aestuarii DSM 271
  CDS (1)..(369): transl_table=11
atgatccagaaagagactaatctggttgtggctgataatagtggtgccaaaaaagttcgctgtatccatgtcttcggcggtacaggcagacgctatgctgcaatcggtgaccagatcatggttactgtaaaagctgccgttcccggtggcgttgtcaagaaaaaagacgtatgcaaggccgttgttgtccgctgcgccaaagagaagaagagaaaagacggttcatatatccgcttcgatgaaaacgcagtcgttcttctcaatgcacagggcgaacccagaggcactcgtattttcggtcctgtagcgcgcgaactcagagacagaaaatatatgaagattgtctctcttgctcctgaagtgctctga

SEQ ID NO: 71968 - protein, 122 aa, Prosthecochloris aestuarii DSM 271
MIQKETNLVVADNSGAKKVRCIHVFGGTGRRYAAIGDQIMVTVKAAVPGGVVKKKDVCKAVVVRCAKEKKRKDGSYIRFDENAVVLLNAQGEPRGTRIFGPVARELRDRKYMKIVSLAPEVL

SEQ ID NO: 71969 - DNA, 369 bp, Croceibacter atlanticus HTCC2559
  CDS (1)..(369): transl_table=11
atgttacaacaagaatctagattaagagtagcagacaatacaggagcaaaagaagttttgactatccgtgtattgggaggtaccaaacgcagatatgcgtctgtaggagataaaattgttgtcagtgtaaaagaggcaacaccaaacggtggaattaaaaaaggtgccgtttctacagcagtagttgtacgtactaagaaagaagttcgtagaccagacggttcatatatccgttttgatgacaatgcatgtgtattgttgaatcctactggtgagatgagaggaacacgtgtctttggacctgttgctagagaacttcgtgataagcagttcatgaaaattgtatcactagcgccagaggtgctgtaa

SEQ ID NO: 71970 - protein, 122 aa, Croceibacter atlanticus HTCC2559
MLQQESRLRVADNTGAKEVLTIRVLGGTKRRYASVGDKIVVSVKEATPNGGIKKGAVSTAVVVRTKKEVRRPDGSYIRFDDNACVLLNPTGEMRGTRVFGPVARELRDKQFMKIVSLAPEVL

SEQ ID NO: 71971 - DNA, 369 bp, Roseovarius nubinhibens ISM
  CDS (1)..(369): transl_table=11
atgatccagatgcagaccaatctggatgtcgctgacaactccggcgctcgccgggtgcagtgcatcaaggttctgggtggttccaagcgtaaatacgcatccgttggcgacatcatcgtcgtctcggtcaaggaagccatcccgcgcggtcgcgtgaaaaagggcgacgtccgtaaggccgtcgtcgtgcgcaccgccaaagaggttcgtcgtgaagacggcaccgccatccgttttgaccgcaacgccgccgtgatcctgaacaacgcaggtgagccggtcggtacgcgtatctttggcccggtggttcgtgagcttcgcgcgaagaacttcatgaagatcatctcgctcgccccggaggtgctgtga

SEQ ID NO: 71972 - protein, 122 aa, Roseovarius nubinhibens ISM
MIQMQTNLDVADNSGARRVQCIKVLGGSKRKYASVGDIIVVSVKEAIPRGRVKKGDVRKAVVVRTAKEVRREDGTAIRFDRNAAVILNNAGEPVGTRIFGPVVRELRAKNFMKIISLAPEVL

SEQ ID NO: 71973 - DNA, 369 bp, Oceanicola batsensis HTCC2597
  CDS (1)..(369): transl_table=11
atgatccagatgcagaccaatctggatgtcgctgacaactccggcgcgcgccgggtgcagtgcatcaaggtcctcggcggttcgcaccgccgttacgcgtcggttggcgacatcatcgttgtctcggtgaaggaagccattccgcgcggccgtgtgaagaagggcgacgtccgcaaggccgtcgtcgtccgcaccgccaaggaagttcgccgcgaagacggcacctccatccgcttcgaccgcaacgccgccgtcatcctgaacaacgcaggtgaaccggtcggcacccgtatcttcgggccggtcgtgcgcgagctgcgtgccaagaacttcatgaagatcatctcgcttgctccggaggtgctgtga

SEQ ID NO: 71974 - protein, 122 aa, Oceanicola batsensis HTCC2597
MIQMQTNLDVADNSGARRVQCIKVLGGSHRRYASVGDIIVVSVKEAIPRGRVKKGDVRKAVVVRTAKEVRREDGTSIRFDRNAAVILNNAGEPVGTRIFGPVVRELRAKNFMKIISLAPEVL

SEQ ID NO: 71975 - DNA, 369 bp, Erythrobacter sp. NAP1
  CDS (1)..(369): transl_table=11
atgatccagatgcaatccaatctcgacgtcgcggacaacagcggcgcaaagcgcgtccagtgcattaaggtgctgggcgggtcgaagcgtcgttttgcctccgttggcgacgtgatcgtggtttccgtcaaggaagcccagccgcgcgcaaaggtgaagaagggcgacgttcaccgcgccgtcatcgtgcgcacccgcaaggatgtgcgccgccccgacggcagcgtaatccgcttcgacagcaactccgctgtcctggtcaacaagtcgaacgagccgatcggcacccgtatcttcgggccggtggttcgcgaacttcgtggccgcggcttcatgaagattatctcgctcgctccggaggtgctctaa

SEQ ID NO: 71976 - protein, 122 aa, Erythrobacter sp. NAP1
MIQMQSNLDVADNSGAKRVQCIKVLGGSKRRFASVGDVIVVSVKEAQPRAKVKKGDVHRAVIVRTRKDVRRPDGSVIRFDSNSAVLVNKSNEPIGTRIFGPVVRELRGRGFMKIISLAPEVL

SEQ ID NO: 71977 - DNA, 369 bp, Pseudoalteromonas tunicata D2
  CDS (1)..(369): transl_table=11
atgatccaaatgcaaactcagctggacgttgcttgtaatagcggcgctcgcaaagtgcagtgtattaaagtcttaggtggttcgcaccgtcgttatgctgcaattggcgacatcattaaagtttctgttaaagaagcaattcctcgcgctaaagtgaagaaaggtgatgtgttaaatgcagttgttgtgcgtacacgtaaaggcgttcgtcgtccagacggttctttgatccgtttcgatggtaatgcagctgtaatgttaaacagtaatctacagcctataggtactcgtatctttggtcctgtgactcgcgaacttcgtacagacaagttcatgaaaatcgtttcactagccccagaagtactataa

SEQ ID NO: 71978 - protein, 122 aa, Pseudoalteromonas tunicata D2
MIQMQTQLDVACNSGARKVQCIKVLGGSHRRYAAIGDIIKVSVKEAIPRAKVKKGDVLNAVVVRTRKGVRRPDGSLIRFDGNAAVMLNSNLQPIGTRIFGPVTRELRTDKFMKIVSLAPEVL

SEQ ID NO: 71979 - DNA, 372 bp, Photobacterium sp. SKA34
  CDS (1)..(372): transl_table=11
atgatccaaatgcaaagtatgctttatgcagcggataactccggcgcacgtagcgtaatgtgtattaaggttctgggtggttctcaccgtcgctatgcacatatcggtgacatcatcaagattacagtgaaggaagcaattcctcgcggtaaagtaaagaaaggtgatgtactgaaagcggtggttgtacgcacccgtaaaggcgttcgtcgtcaagatggctctgtcattcgctttgaccgtaatgcttgcgtattgttgaacgacactactgagcaacctatcggtacccgtatctttggcccagtgactcgtgaacttcgtaactcgaaattcatgaagattgtatcactagcgccagaagtactttaa

SEQ ID NO: 71980 - protein, 123 aa, Photobacterium sp. SKA34
MIQMQSMLYAADNSGARSVMCIKVLGGSHRRYAHIGDIIKITVKEAIPRGKVKKGDVLKAVVVRTRKGVRRQDGSVIRFDRNACVLLNDTTEQPIGTRIFGPVTRELRNSKFMKIVSLAPEVL

SEQ ID NO: 71981 - DNA, 369 bp, Oceanospirillum sp. MED92
  CDS (1)..(369): transl_table=11
atgattcaaactgaatctatgcttgatgttgctgataacagtggcgctaagcgagtgcagtgtattaaggtcctgggtggttctcaccgccgctacgcttctgtaggtgacattattaaagttaccgttaaagaagcgattcctcgcggtaaagtgaagaaaggtcaggttcttaacgccgtagtggtacgtacccgtaaaggtgttcgtcgtccagacggttcagtaatccgctttgatactaactctgcggttcttctgaacgctagcgatgcaccaattggtactcgtatcttcggcccagtgacgcgtgaacttcgctcagagaagttcatgaaaatcatttccctggcgcctgaagtgctataa

SEQ ID NO: 71982 - protein, 122 aa, Oceanospirillum sp. MED92
MIQTESMLDVADNSGAKRVQCIKVLGGSHRRYASVGDIIKVTVKEAIPRGKVKKGQVLNAVVVRTRKGVRRPDGSVIRFDTNSAVLLNASDAPIGTRIFGPVTRELRSEKFMKIISLAPEVL

SEQ ID NO: 71983 - DNA, 369 bp, Xanthobacter autotrophicus Py2
  CDS (1)..(369): transl_table=11
atgatccagatgcagaccaatctcgacgtggcggacaattccggtgcgcgtcgcgtcatgtgcatcaaggtacttggcggttccaagcggaagtatgcccacgtgggcgacatcatcgtggtgtcggtcaaggaagctatcccgcgcggccgcgtgaagaagggcgacgtgatgaaggccgtggtggttcgcaccgccaaggacattcgtcgcgtcgacggctcggtgatccgcttcgaccgcaacgcggccgtgctgatcaacaacaacaaggagccggtgggtactcgtatcttcggaccggttccgcgcgagctgcgctcgaagaaccacatgaagatcatctcgctggcgccggaggtgctgtga

SEQ ID NO: 71984 - protein, 122 aa, Xanthobacter autotrophicus Py2
MIQMQTNLDVADNSGARRVMCIKVLGGSKRKYAHVGDIIVVSVKEAIPRGRVKKGDVMKAVVVRTAKDIRRVDGSVIRFDRNAAVLINNNKEPVGTRIFGPVPRELRSKNHMKIISLAPEVL

SEQ ID NO: 71985 - DNA, 369 bp, Flavobacteria bacterium BBFL7
  CDS (1)..(369): transl_table=11
atgttacaacaagaatcaagacttaaggtagctgataatactggtgctaaagaagtgctttgtattagagtattaggtggtactaaaagaaggtatgcatcagtaggagataaaattgttgtttctgtaaaagaggctactcctaatggtaatatcaaaaaaggtgctgtttctaccgcagtagtagttagaactaaaaaagaggtgcgtcgaccagatggatcttatatacgatttgacgataatgcatgtgtattattgaatcctaattcagagatgagaggaactcgtgtattcgggccggttgcgagagaattgcgtgataagcaatttatgaaaattgtttcattggctccagaagtattataa

SEQ ID NO: 71986 - protein, 122 aa, Flavobacteria bacterium BBFL7
MLQQESRLKVADNTGAKEVLCIRVLGGTKRRYASVGDKIVVSVKEATPNGNIKKGAVSTAVVVRTKKEVRRPDGSYIRFDDNACVLLNPNSEMRGTRVFGPVARELRDKQFMKIVSLAPEVL

SEQ ID NO: 71987 - DNA, 369 bp, Rickettsiella grylli
  CDS (1)..(369): transl_table=11
atgatacaaatgcaaacagaattagcagtggctgataatagtggcgcgcgtagtgttatgtgcattaaagtattgggcggatcaaaacggcggtatgcaggtgttggggatgttattcgagtgagtgtaaaggatgctgtcccgcgagggaaagtgaaaaaaggagaagtgtggcatgctgttgtcgttcgtacgaaaaaaagagtgcgtagaggcgacggtagcgtaatccgtttcgatagtaatgcagttattttattgactgcgcagttgcaacctttaggtacgcgtgtgtttggtcctgttcccagagaactacgtaccgaacggtttatgaaaattatctctttggcttctgaagtattataa

SEQ ID NO: 71988 - protein, 122 aa, Rickettsiella grylli
MIQMQTELAVADNSGARSVMCIKVLGGSKRRYAGVGDVIRVSVKDAVPRGKVKKGEVWHAVVVRTKKRVRRGDGSVIRFDSNAVILLTAQLQPLGTRVFGPVPRELRTERFMKIISLASEVL

SEQ ID NO: 71989 - DNA, 369 bp, Oceanobacter sp. RED65
  CDS (1)..(369): transl_table=11
atgatccaaacacaaactatgctagaggtcgctgataacagcggcgcaaagcgcgtaatgtgtattaaagtactgggcggatctcatcgtcgttacgcgcgtgtgggtgacctaattaaagttactgttaaggaagcaattcctcgcggtaaagttaaaaaaggtcaagtgttgaatgctgttgttgttcgcactaaagctggtgttcgtcgtcaggacggttctttgatccgtttcgacacaaacgcagctgtgttgttgaacgccagtgaagcaccaatcggtactcgtattttcggaccagtgactcgtgaacttcgctcagagaagttcatgaagattgtttcactggctcctgaagtactgtag

SEQ ID NO: 71990 - protein, 122 aa, Oceanobacter sp. RED65
MIQTQTMLEVADNSGAKRVMCIKVLGGSHRRYARVGDLIKVTVKEAIPRGKVKKGQVLNAVVVRTKAGVRRQDGSLIRFDTNAAVLLNASEAPIGTRIFGPVTRELRSEKFMKIVSLAPEVL

SEQ ID NO: 71991 - DNA, 369 bp, Alteromonadales bacterium TW-7
  CDS (1)..(369): transl_table=11
atgatccaaatgcaaactcagctggaagttgctgataacagcggcgctcgcaaagtgcagtgtataaaagtccttggtggttcacaccgtcgctacgcagcgattggcgacatcattaaagtttctgtaaaagaagctattcctcgcggtaaagtgaagaaaggtgatgttaaaaacgcggtagttgtgcgtaccagaaaaggtgttcgccgtccagatggttctctgatccgtttcgacagcaacgcggctgttatcttaaatgataacttgcagccaattggtacacgtattttcggccctgtgactcgcgaacttcgtaatgacaagttcatgaaaatcgtttcactagccccagaagtactgtaa

SEQ ID NO: 71992 - protein, 122 aa, Alteromonadales bacterium TW-7
MIQMQTQLEVADNSGARKVQCIKVLGGSHRRYAAIGDIIKVSVKEAIPRGKVKKGDVKNAVVVRTRKGVRRPDGSLIRFDSNAAVILNDNLQPIGTRIFGPVTRELRNDKFMKIVSLAPEVL

SEQ ID NO: 71993 - DNA, 369 bp, marine gamma proteobacterium HTCC2143
  CDS (1)..(369): transl_table=11
atgattcaaacagaatcgtatctagatgttgcagataacagcggtgctcgccgtgttatgtgtatcaaagtgttaggtggttcgcatcgccgttatgcacgtataggcgacttgatcaaagttaccgtaaaggaagcaattcctcgcggtaaagtaaaaaaaggtcaggttatgacggctgttgttgtccgtactaagaagggtgttcgtcgcggagatggttctttaatcaaattcgacgacaatgctgcagttatcctgaatgctcaggacgcgccgattggtactcgtatctttggcccagtaacccgcgaactgcgcggtgagaaatttatgaaaattatctctctagctcccgaagtactgtaa

SEQ ID NO: 71994 - protein, 122 aa, marine gamma proteobacterium HTCC2143
MIQTESYLDVADNSGARRVMCIKVLGGSHRRYARIGDLIKVTVKEAIPRGKVKKGQVMTAVVVRTKKGVRRGDGSLIKFDDNAAVILNAQDAPIGTRIFGPVTRELRGEKFMKIISLAPEVL

SEQ ID NO: 71995 - DNA, 369 bp, marine gamma proteobacterium HTCC2080
  CDS (1)..(369): transl_table=11
atgattcagacccagtcgtatttggaagttgcagataacagtggcgctaggcgcgttatgtgcatcaaggttttgggcggctccaagcgtcggtatgctcgcgtaggtgatttgatcaaagtcaccgttaaagaagcaattccgcgtggcaaagttaagaagggtcaggtcatgacggccgtggtcgtgcgaaccagaaaaggcgtccgtcgccccgatggctcactgattaagtttgacgaaaatgccgcggtgattttgaacgctcaaaatgcgcctatcggcacacgaatttttggtccggtaactcgcgagctccgcggcgaaaagttcatgaaaattatttcccttgcgcccgaagtgatttga

SEQ ID NO: 71996 - protein, 122 aa, marine gamma proteobacterium HTCC2080
MIQTQSYLEVADNSGARRVMCIKVLGGSKRRYARVGDLIKVTVKEAIPRGKVKKGQVMTAVVVRTRKGVRRPDGSLIKFDENAAVILNAQNAPIGTRIFGPVTRELRGEKFMKIISLAPEVI

SEQ ID NO: 71997 - DNA, 369 bp, Candidatus Desulfococcus oleovorans Hxd3
  CDS (1)..(369): transl_table=11
atgatccagaccgagacacgactgaaggtggccgacaactcaggcgctaaaattgtctattgtatcaaggtgttgggcggctcccggcgaagatacgccacggtgggagacgtgattgtggtctctgtcaaggaggcgattcccaactcgaaggtgaaaaagggcgatgtgctcaaggccgtcattgtgcgcaccaaaaaagagatcaagcggcctgatggctcctatatccgttttgatgaaaattcagcggtgctgatctccggcaacaatgagcccctgggaacccgtattttcggtccggtggcaagggagcttcgggccaaacggttcatgaagattgtttccctggcaccggaagtgctgtaa

SEQ ID NO: 71998 - protein, 122 aa, Candidatus Desulfococcus oleovorans Hxd3
MIQTETRLKVADNSGAKIVYCIKVLGGSRRRYATVGDVIVVSVKEAIPNSKVKKGDVLKAVIVRTKKEIKRPDGSYIRFDENSAVLISGNNEPLGTRIFGPVARELRAKRFMKIVSLAPEVL

SEQ ID NO: 71999 - DNA, 369 bp, Marinobacter sp. ELB17
  CDS (1)..(369): transl_table=11
atgattcagactcaaacaatgcttgaagtcgcggataacagcggtgcgcgtcaggtgatgtgcatcaaggtcctgggcggttcacacaggcgttatgctgcaatcggggacattatcaaggtaaccgttaaggaagccattccccgcggtaaagtaaaaaaaggccaggtactgaaggctgtcgtggtgcgcacccgtaaaggtgtgcgtcgtccagatggatctctgatccgttttgacggcaacgcggccgtacttctgaacgcccaggacgcacccattggtacccgtatcttcggaccggttacccgtgaactgcgaaatgagaagttcatgaagattatctcactggcacccgaagtactttaa

SEQ ID NO: 72000 - protein, 122 aa, Marinobacter sp. ELB17
MIQTQTMLEVADNSGARQVMCIKVLGGSHRRYAAIGDIIKVTVKEAIPRGKVKKGQVLKAVVVRTRKGVRRPDGSLIRFDGNAAVLLNAQDAPIGTRIFGPVTRELRNEKFMKIISLAPEVL

SEQ ID NO: 72001 - DNA, 369 bp, unidentified eubacterium SCB49
  CDS (1)..(369): transl_table=11
atgttacaacaagaatcaagacttagagtcgcagacaacaccggtgcaaaagaggtacttactattcgtgtactaggtggaacaaagaggagatacgcttcaataggtgataagattgtagtttctgtaaaagaagctacacctaatggatctgttaagaaggggactgtttcaacagcagttgttgtacgtgtaaagaaggaagttagaagaccagatggatcttatatccgttttgatgataacgcttgtgttttattaggacctcaaggggaaatgagaggaacacgtgtttttggaccggttgctagagaacttcgtgacaagcagtttatgaagattgtatcattggcaccagaggtgctttaa

SEQ ID NO: 72002 - protein, 122 aa, unidentified eubacterium SCB49
MLQQESRLRVADNTGAKEVLTIRVLGGTKRRYASIGDKIVVSVKEATPNGSVKKGTVSTAVVVRVKKEVRRPDGSYIRFDDNACVLLGPQGEMRGTRVFGPVARELRDKQFMKIVSLAPEVL

SEQ ID NO: 72003 - DNA, 369 bp, Magnetospirillum gryphiswaldense
  CDS (1)..(369): transl_table=11
atgatccagatgcaaaccaacctggacgtcgccgataattcgggtgcccgccgggtgcagtgcatcaaggttttgggcggttcgcaccgcaccatcgccaatgtgggcgacgttatcgtcgtctccattaaggaagcgattccccgcggcaaggtgaagaagggtgacgtgcatcgcgccgtcatcgtccgcaccgccaaggaaatccgccgggctgatggtaccgcgatccgtttcgataccaatgccgccgtgctcatcaacaagcagggcgaaccgatcggcacccgtatttttggcccggtcacccgtgaacttcgcggtaagaagttcatgaagatcatctcgctggctccggaggtgctctaa

SEQ ID NO: 72004 - protein, 122 aa, Magnetospirillum gryphiswaldense
MIQMQTNLDVADNSGARRVQCIKVLGGSHRTIANVGDVIVVSIKEAIPRGKVKKGDVHRAVIVRTAKEIRRADGTAIRFDTNAAVLINKQGEPIGTRIFGPVTRELRGKKFMKIISLAPEVL

SEQ ID NO: 72005 - DNA, 369 bp, Gnetum parvifolium
  CDS (1)..(369)
atgattcaatctcaaacttttctgaatattgctgataacagcggagcacgaaaaatcatgtgcattcgagttgtaggaacaacctatcaaaaatacgcttatatcggggacataattatcgctatcattaaagaagtagtccctaatacaaaaatggaaaaatccgaaatagtgagagcggtcgttattcgtacttcgaaagaattccaacgtgacgacgggatgagaatccgatccgacgataatgcagctattattattgatcagaaaggaaatccaaaaggaactcgagtctttgggccagttcttcaagaattgagacaatggaattttacaaaaataatatcactggctcccgaagtattatga

SEQ ID NO: 72006 - protein, 122 aa, Gnetum parvifolium
MIQSQTFLNIADNSGARKIMCIRVVGTTYQKYAYIGDIIIAIIKEVVPNTKMEKSEIVRAVVIRTSKEFQRDDGMRIRSDDNAAIIIDQKGNPKGTRVFGPVLQELRQWNFTKIISLAPEVL

SEQ ID NO: 72007 - DNA, 474 bp, Arabidopsis thaliana
  CDS (1)..(474)
atgtgtttattcagcttttcgaacctcgttttaatcgttgttgatttggatttttttcgattagggcgtggaggtacctctggtaacaaattcaggatgtcactgggtcttccggtggcggcgacggtgaactgtgccgataacaccggtgctaagaatctctacatcatttccgtgaaaggtatcaaaggtcgtcttaatcgattaccttctgcttgcgtcggagacatggtgatggccaccgtcaaaaagggtaagcctgatctcaggaaaaaggttcttcctgccgtcatcgttaggcaacgcaaaccatggcgccgaaaggatggtgttttcatgtacttcgaagataatgctggagtcattgtcaaccccaagggagaaatgaaaggttctgcaattactggtcctattgggaaagagtgtgctgatctttggccaaggattgctagtgctgccaatgccattgtctaa

SEQ ID NO: 72008 - protein, 157 aa, Arabidopsis thaliana
MCLFSFSNLVLIVVDLDFFRLGRGGTSGNKFRMSLGLPVAATVNCADNTGAKNLYIISVKGIKGRLNRLPSACVGDMVMATVKKGKPDLRKKVLPAVIVRQRKPWRRKDGVFMYFEDNAGVIVNPKGEMKGSAITGPIGKECADLWPRIASAANAIV

SEQ ID NO: 72009 - DNA, 369 bp, Spirogyra maxima
  CDS (1)..(369)
atgatccaacctcaatcttatcttaatgtggctgataacagtggagctcgtaaattaatgtgtattcgtgttttaggatctaacaatcgaaaatatgcgaatattggcgacatgattattgctgtagttaaagaagctgttcctaatatgcctcttaagagatcagaagtaatacgtgcagttatagtacgtactcgtaaaggactcaaacgtgataacggtatgattttacgttttgatgataatgcagctgtagtaattaacacagaaggaaatccacgtggtacacgtgtctttggtccagtagctcgtgaattaagagaattaaattttactaagatagtatctttagctcctgaagtgctttaa

SEQ ID NO: 72010 - protein, 122 aa, Spirogyra maxima
MIQPQSYLNVADNSGARKLMCIRVLGSNNRKYANIGDMIIAVVKEAVPNMPLKRSEVIRAVIVRTRKGLKRDNGMILRFDDNAAVVINTEGNPRGTRVFGPVARELRELNFTKIVSLAPEVL

SEQ ID NO: 72011 - DNA, 396 bp, Aspergillus oryzae
  CDS (1)..(396)
atgattcaactaaagacgatgctgaattgcatcgacaactccggcgccgcagttgtcgagtgcgtgaatgtcctgaagaagaagcggccggccacagtcggtgaccgaatcgttgtggtggttcagaaacagcggaactttggccccgaaagctcgaacaacagtggtattgcaaacaaagtccgtcgcggagatattcgtcatgccgtcgtcgtccgagcgaagaaagaaatgcagagaccagatggctccattgtcaagttcgatgataatgcctgcgtgttggtgaacaagtctggagacccgatcggcacaagaatgaacggagtcgtggctacggaactacgaggaaagcaatggtcgaaaattttgtcgttggcaccgatgcatgtataa

SEQ ID NO: 72012 - protein, 131 aa, Aspergillus oryzae
MIQLKTMLNCIDNSGAAVVECVNVLKKKRPATVGDRIVVVVQKQRNFGPESSNNSGIANKVRRGDIRHAVVVRAKKEMQRPDGSIVKFDDNACVLVNKSGDPIGTRMNGVVATELRGKQWSKILSLAPMHV

SEQ ID NO: 72013 - DNA, 420 bp, Aspergillus oryzae
  CDS (1)..(420)
atgtctggaagaggtcgtggttcctcgggcaacaagctcaagatgtcgctcggtctgccttgcggcgccgtcatgaactgctgcgacaactccggtgcccgtaacctttacatcatctccgttaagggtaccggtgcccgcctcaaccgtctccccgccgctggtgtcggtgacatggtcatggccaccgtcaagaagggaaagcccgagctccgtaagaaggtcatgcccgccgttgtcgtccgtcagagcaagccctggagacgtcccgatggtatctacctctacttcgaggacaacgctggtgtcatcgtcaacgccaagggtgagatgaagggatccgccatcaccggccccgtcggaaaggaggctgctgagctctggcctcgtatcgcttccaactctggtgttgtcatgtaa

SEQ ID NO: 72014 - protein, 139 aa, Aspergillus oryzae
MSGRGRGSSGNKLKMSLGLPCGAVMNCCDNSGARNLYIISVKGTGARLNRLPAAGVGDMVMATVKKGKPELRKKVMPAVVVRQSKPWRRPDGIYLYFEDNAGVIVNAKGEMKGSAITGPVGKEAAELWPRIASNSGVVM

SEQ ID NO: 72015 - DNA, 423 bp, Biphyllus lunatus
  CDS (1)..(423)
atgtcgaagagaggacgtggtggttccgcgggagctaaattcaggatctccctggctttaccagttggtgccgttattaatcgcgcagacaatactggtgctaaaaatttatatgtaattgccgtgcaaggtatcgggggtcgcttgaaccgtctccctgccgcaggatctggtgacatgatcgtagcgacggttaaaaagggtaaacccgagcttcgtaagaaggttatgcctgcggtcgtcatcagacaacgcaagccattccgcaggaaggacggcgttttcatctatttcgaagacaatgccggcgtcatcgtgaacaacaagggcgaaatgaaaggatcggcgatcaccggacccgtcgctaaagagtgcgcggatctgtggcccaggatcgcgtcgaacgcgagcagcatcgcctga

SEQ ID NO: 72016 - protein, 140 aa, Biphyllus lunatus
MSKRGRGGSAGAKFRISLALPVGAVINRADNTGAKNLYVIAVQGIGGRLNRLPAAGSGDMIVATVKKGKPELRKKVMPAVVIRQRKPFRRKDGVFIYFEDNAGVIVNNKGEMKGSAITGPVAKECADLWPRIASNASSIA

SEQ ID NO: 72017 - DNA, 423 bp, Triticum aestivum
  CDS (1)..(423)
atgtcgaagcgagggcgcggaggttctgctggtaacaagttccggatgtcgctgggtctgccggtggcagccactgtcaactgtgctgacaacactggtgccaagaacctgtacatcatctccgtgaagggaatcaaggggcgcctcaacaggcttccttctgcctgcgttggtgacatggttatggccactgtcaagaagggaaagcctgacctcaggaagaaggtcatgccggctgtcatcgtcaggcagcgcaagccgtggcgccgaaaggacggtgtcttcatgtactttgaagacaatgctggagtcattgtgaacccaaagggagagatgaaaggttctgccatcactggaccgatcgggaaggagtgcgccgacctgtggcccaggattgccagcgccgcgaatgccatcgtctga

SEQ ID NO: 72018 - protein, 140 aa, Triticum aestivum
MSKRGRGGSAGNKFRMSLGLPVAATVNCADNTGAKNLYIISVKGIKGRLNRLPSACVGDMVMATVKKGKPDLRKKVMPAVIVRQRKPWRRKDGVFMYFEDNAGVIVNPKGEMKGSAITGPIGKECADLWPRIASAANAIV

SEQ ID NO: 72019 - DNA, 513 bp, Triticum aestivum
  CDS (1)..(513)
atggcagcattcctcaggtccaagtgttcgtcagttggacgtgctatgatgggaagcctgggaaacaatctctacgggggcgctacctcgtccattgaaacggtggcaagaccatctcgttctgatgctgtctgccagcaaatcagaacattcatccagatgagaacaaacctcaaggtggtggacaactcaggagccaagcgggttatgtgcatacagtcccttagggggaagaaaggagcgaggctcggggacatgatcatcggttctgtcaaggaagcgcagcctcgcggcaaggtcaagaaaggagacgtggtgtacggggtggtcgtccgtgctgccatgaagaaggggcgcagcgatggtagcgaggtccagttcgacgacaatgcgatcgtcatcgtgaacaacaagggtgagctgattggcacccgcgtctttggtcccgtcccccatgagctcaggaagaagaagcatctcaagatcctggcactggccgagcacatagtttga

SEQ ID NO: 72020 - protein, 170 aa, Triticum aestivum
MAAFLRSKCSSVGRAMMGSLGNNLYGGATSSIETVARPSRSDAVCQQIRTFIQMRTNLKVVDNSGAKRVMCIQSLRGKKGARLGDMIIGSVKEAQPRGKVKKGDVVYGVVVRAAMKKGRSDGSEVQFDDNAIVIVNNKGELIGTRVFGPVPHELRKKKHLKILALAEHIV

SEQ ID NO: 72021 - DNA, 399 bp, uncultured archaeon GZfos35D7
  CDS (1)..(399): transl_table=11
atgaagggcattcgggcatcaatgacacgcccgcttaacgcgggagcaaagttaaactgcgtggacaataccggcgcaagggtcgtaggagtcatctcagtcattggctaccgcggtgtaaagaaccggtatccgaaggcgggcattggagatatgcttgtagtgtctgtgaagaaaggcactcccgagatgcgcaggcaaatcctgcgggctgtggtgatccggcagaagaaggaatataaacgcccgaatggcatgcgcgtgtcgtttgaggacaatgcagtggtaatcactgacgacgacggcatcccaaagggtaccgagatcaaaggaccggtcgcaagagaggtggcagagcggttcccgaagatagcgtctgcagcaacgatcgtggtatag

SEQ ID NO: 72022 - protein, 132 aa, uncultured archaeon GZfos35D7
MKGIRASMTRPLNAGAKLNCVDNTGARVVGVISVIGYRGVKNRYPKAGIGDMLVVSVKKGTPEMRRQILRAVVIRQKKEYKRPNGMRVSFEDNAVVITDDDGIPKGTEIKGPVAREVAERFPKIASAATIVV

SEQ ID NO: 72023 - DNA, 372 bp, Oryza sativa subsp
  CDS (1)..(372)
atgattcaacctcagacccttttaaatgtagcagataacactggagctcgaaaattaatgtgtattcgagtcataggagctgctagtagtcagcgatatgctcgtattggtgatgttattgttgctgtaatcaaagacgtagtgccccaaatgcctctagaaagatccgaagtaattcgagctgtaattgtacgtacatgtaaagagttcaaatgcgaagacggtataataatacgctatgacgacaatgcagcggttatcattgatcaaaaaggaaatccaaaaggaactcgcgtttttggcgcgatcgccgaggaattgagagaattgaattttactaaaatagtttcattagctcctgaagtattataa

SEQ ID NO: 72024 - protein, 123 aa, Oryza sativa subsp
MIQPQTLLNVADNTGARKLMCIRVIGAASSQRYARIGDVIVAVIKDVVPQMPLERSEVIRAVIVRTCKEFKCEDGIIIRYDDNAAVIIDQKGNPKGTRVFGAIAEELRELNFTKIVSLAPEVL

SEQ ID NO: 72025 - DNA, 372 bp, Oryza sativa subsp
  CDS (1)..(372)
atgattcaacctcagacccttttaaatgtagcagataacagtggagctcgaaaattgatgtgtattcgagtcataggagctgctagtaatcagcaatatgctcgtattggtgatgttattgttgctgtaatcaaagacgcagtgccccaaatgcctctagaaagatctcaagtaattcgagctgtaattgtacgtacatgtaaagagttcaaatgcgaagacggtataataatacgctatgacgacaatgcagcggttatcattgatcaaaaaggaaatccaaaaggaactcgcgtttttggcacgatcgtcgaggaattgagagaattgaattttactaaactagtttcattagctcctgaagtattataa

SEQ ID NO: 72026 - protein, 123 aa, Oryza sativa subsp
MIQPQTLLNVADNSGARKLMCIRVIGAASNQQYARIGDVIVAVIKDAVPQMPLERSQVIRAVIVRTCKEFKCEDGIIIRYDDNAAVIIDQKGNPKGTRVFGTIVEELRELNFTKLVSLAPEVL

SEQ ID NO: 72027 - DNA, 423 bp, Antonospora locustae
  CDS (1)..(423)
atgccgagcaagcacgtcctggaggacagaagaccaaaaatccgttcgacgtgcggtgtgcaggtggggacccggatagcatgcgcagacaacacgggagcaaagataatgcagataatcggtgtaaagggcgtccgcgggcgactcaacaggctgcctgcggcgtctgtgggcgacgttgtactctgctcggttaagaagggccggccagacatgcgcaagaagatcgtcctgtgcgttgtcatcaggcagaagaaggcgtggagacgacgcgacgggtcgcacatctgctttgaggacaacgcggcggttgttataacaaacaaaggcgaccctaagggcacacagattgcaggccctgtgccccgtgaggtcgccgacatatggcccaagatatcatcgaacgcaccggcaatcatttaa

SEQ ID NO: 72028 - protein, 140 aa, Antonospora locustae
MPSKHVLEDRRPKIRSTCGVQVGTRIACADNTGAKIMQIIGVKGVRGRLNRLPAASVGDVVLCSVKKGRPDMRKKIVLCVVIRQKKAWRRRDGSHICFEDNAAVVITNKGDPKGTQIAGPVPREVADIWPKISSNAPAII

SEQ ID NO: 72029 - DNA, 372 bp, Fremyella diplosiphon
  CDS (1)..(372): transl_table=11
attgtgattcaaccccagacttacctgaatgtcgcagataatagtggtgcccggaagctaatgtgcatccgcgtgttaggcgcaggcaaccgccgttatggtggcgtgggtgataaaattattgccgttgtcaaagatgctcaaccaaatatggctgtgaaaaagtcagatgtggtagaggcagtaattgtccgcactcgtaaaagtattaatcgagacagcggtatgagcattcgatttgacgataacgctgcagtaatcatcaacaaagatggtaatcctagaggcacacgggtatttggcccagtcgcacgggaactgcgtgataagaacttcaccaaaatagtttcgttggctccggaggtgctgtaa

SEQ ID NO: 72030 - protein, 123 aa, Fremyella diplosiphon
MVIQPQTYLNVADNSGARKLMCIRVLGAGNRRYGGVGDKIIAVVKDAQPNMAVKKSDVVEAVIVRTRKSINRDSGMSIRFDDNAAVIINKDGNPRGTRVFGPVARELRDKNFTKIVSLAPEVL

SEQ ID NO: 72031 - DNA, 423 bp, Oikopleura dioica
  CDS (1)..(423)
atgtcaaagcgtgcacgcggtggtaaaggaggtggaaagttccatatctccctggccctcccagttgctgccgttatgaactgcgctgataacactggcgccaagtccctttacgtcatcgccgttgctggcatcaaaggtcgattgaaccgactcccagccgccggatcaggagatctcgtcatggcctccgtgaagaaaggaaagccagaactccgaaagaaggtccaccccgccgtcgttgtccgacagtccaaggctttccgaagacgagacggtacttttctttacttcgaagataacgccggtgttatcgtcaataacaagggagaaatgaagggctctgccgtcactggacccgtcgcgaaggaatgcgctgatctctggccccgtatttcttctaactcatccaccattgcctaa

SEQ ID NO: 72032 - protein, 140 aa, Oikopleura dioica
MSKRARGGKGGGKFHISLALPVAAVMNCADNTGAKSLYVIAVAGIKGRLNRLPAAGSGDLVMASVKKGKPELRKKVHPAVVVRQSKAFRRRDGTFLYFEDNAGVIVNNKGEMKGSAVTGPVAKECADLWPRISSNSSTIA

SEQ ID NO: 72033 - DNA, 369 bp, Spiroplasma kunkelii
  CDS (1)..(369): transl_table=4
atgatccaacaagaatcaagattaaaagttgctgataactctggggcaaaagaagtgttagtaattaaaaatttgggtggttcatgacgaaagtttactaatattggggatatcgttgtatgtacaattaaaagagcaacccctggtggaattgtcaaaaaaggacaagttgttaaagcggttatcgtgcgtactagacgtggtttaaaacgaagtgatggaacacaaattcaattttcagaaaatgctgtagtattaattaaagatgataaaaacccacgtggaacacggatttttgggtcaatcgcccgggaagttaaagatgctggttttgtaaaaattgcatcattagcaccagaagtattatag

SEQ ID NO: 72034 - protein, 122 aa, Spiroplasma kunkelii
MIQQESRLKVADNSGAKEVLVIKNLGGSWRKFTNIGDIVVCTIKRATPGGIVKKGQVVKAVIVRTRRGLKRSDGTQIQFSENAVVLIKDDKNPRGTRIFGSIAREVKDAGFVKIASLAPEVL

SEQ ID NO: 72035 - DNA, 372 bp, Candidatus Portiera aleyrodidarum
  CDS (1)..(372): transl_table=11
atgatacaaacacaaactaacttagaattagccgataatagtggcgcaaaaaaagtacaatgtataaaagtattaggcggttctcgtcgtagatatgctaatataggcgatttgattaaaataacagttaaagaagcaatacctaagggaaaagttaagaaagggcaagtaatgaaagccgtagttgtacgcacaaaaaaaggtataagacgtaaagatggttcaattattagattcgatagtaatgcagttgttttattaaataatactaatgaacaacttgtaggtactcgtatttttggccctgtaacaagagagttacgtacagaaaaatttatgaagattgtgtctttggcatcagaggtgttgtga

SEQ ID NO: 72036 - protein, 123 aa, Candidatus Portiera aleyrodidarum
MIQTQTNLELADNSGAKKVQCIKVLGGSRRRYANIGDLIKITVKEAIPKGKVKKGQVMKAVVVRTKKGIRRKDGSIIRFDSNAVVLLNNTNEQLVGTRIFGPVTRELRTEKFMKIVSLASEVL

SEQ ID NO: 72037 - DNA, 423 bp, Branchiostoma belcheri tsingtauense
  CDS (1)..(423)
atgtcgaagcgaggacgtggtggtgcgtcgggggcaaagttccgcatctctctcggtctccccgtgggagccgtgatcaactgcgcggacaacacaggggccaaaaacttgtacatcattgccgtcaagggcatcaagggtcgtctgaaccggctccctgctgctggtgtgggagacatggtcatggcaacagtcaagaagggaaaaccagaactccggaaaaaggtgatgccagcagtggtgattcgacagcggaaatcatatcgaagaaaggacggggtgttcttatacttcgaagacaacgcgggggtaatagtcaacgtcaagggtgaaatgaaaggttcggccatcacaggtcctgtggcgaaggagtgtgccgacctctggcccaggatcgcctccaatgctggcagcatcgcctga

SEQ ID NO: 72038 - protein, 140 aa, Branchiostoma belcheri tsingtauense
MSKRGRGGASGAKFRISLGLPVGAVINCADNTGAKNLYIIAVKGIKGRLNRLPAAGVGDMVMATVKKGKPELRKKVMPAVVIRQRKSYRRKDGVFLYFEDNAGVIVNVKGEMKGSAITGPVAKECADLWPRIASNAGSIA

SEQ ID NO: 72039 - DNA, 513 bp, Arabidopsis thaliana
  CDS (1)..(513)
atgaattcctcctccaatggaatgatgaatggaagcatcctctctcagcaacaacataggacattcattcaaatggggacgattctcaaatgcgtggataactcgtgtgctaaagaggtgatgtgcattcaatccctgagaggtaagaaaggagcaagacttggcgatatcattgttggttcagtgaaagaagctaacccaattgttcaaaaaaaagtaaagaaagacgctgtcccaaaaggtaaagtgaagaaagggatggtcgtgtacggtgtggttgtgcgtgctgcgatgcctaaaggacgtgctgatggaagccaagtcaagtttgatgacaatgccattgtagttgttggcattaaggaaaagaaagggcagaataattcacatggttccaagaggaaaatggagtacaaccaaccgactggtacccgagtgtttggtcctgtcccgcacgagatgcgcctcaggaaacagctcaagatcctttctttggctcagcacattgtttga

SEQ ID NO: 72040 - protein, 170 aa, Arabidopsis thaliana
MNSSSNGMMNGSILSQQQHRTFIQMGTILKCVDNSCAKEVMCIQSLRGKKGARLGDIIVGSVKEANPIVQKKVKKDAVPKGKVKKGMVVYGVVVRAAMPKGRADGSQVKFDDNAIVVVGIKEKKGQNNSHGSKRKMEYNQPTGTRVFGPVPHEMRLRKQLKILSLAQHIV

SEQ ID NO: 72041 - DNA, 372 bp, Oryza sativa subsp
  CDS (1)..(372)
atgattcaacctcagacccttttaaatgtagcagataacagtggagctcaaaaattgatgtgtattcgagtcataggagctgctagtaatcagcgatatgctcgtattggtgatgttattgttgctgtaatcaaagacgcagtgccccaaatgcctctagaaagatccgaagtaattcgagctgtaattgtacgtacatgtaaagagttcaaatgcgaagacggtataataatacgctatgacgacaatgcagcggttatcattgatcaaaaaggaaatccaaaaggaactcgcgtttttggcgcgatcgccgaggaattgagagaattgaattttactaaaatagtttcattagctcctgaagtattataa

SEQ ID NO: 72042 - protein, 123 aa, Oryza sativa subsp
MIQPQTLLNVADNSGAQKLMCIRVIGAASNQRYARIGDVIVAVIKDAVPQMPLERSEVIRAVIVRTCKEFKCEDGIIIRYDDNAAVIIDQKGNPKGTRVFGAIAEELRELNFTKIVSLAPEVL

SEQ ID NO: 72043 - DNA, 369 bp, Phaseolus angularis
  CDS (1)..(369): transl_table=11
atgattcaacctcaaactcatttgaatgtagcggataacagcggagcacgtgaactgatgtgtattcgaatcctaggagctagtaatcgacgatatgcttatattggcgacattgttgttgctgtaatcaaacaagcagtaccaaatacgaacttagaaagatctgaagtgatcagagctgtaattgtacgtacttgtaaacaactaaaacgtagcaacggtataataattcagtatgatgataatgctgcagttataattgatcaagaaggaaatccaaaaggaactcgaatcttttgcgcaatcgcccgggaattgagacagttaaatttcactaaaatagtttcattagcacctgaggtattataa

SEQ ID NO: 72044 - protein, 122 aa, Phaseolus angularis
MIQPQTHLNVADNSGARELMCIRILGASNRRYAYIGDIVVAVIKQAVPNTNLERSEVIRAVIVRTCKQLKRSNGIIIQYDDNAAVIIDQEGNPKGTRIFCAIARELRQLNFTKIVSLAPEVL

SEQ ID NO: 72045 - DNA, 519 bp, Arabidopsis thaliana
  CDS (1)..(519)
atggccgctgcttttgcttccagattaacccgaggaggacgttcattgcttggaggtcttaacaatgttggttcgatgaattcttctaatggaatgatgaatgaaagtatcctctctcagcagcagagaaggacatttattcagatggggactgttctcaaagtcgtggacaattcaggtgcgaagaaagtgatgtgtattcaagctctaaaggggaaaaaaggagctagacttggagatactatagttgcttcagtgaaagaagcgatgccaaacggtaaagtgaagaaaggagcggttgtgtatggtgtggttgttcgtgctgcgatgcagagaggtcgtgttgatggaagtgaagttaggtttgatgataacgcggttgttcttgttgatagtaaagataagaatactaaaactgatcgccagccgattggtactagagtgtttggtcctgttcctcatgagcttcgcaagaagaaacatctcaagattcttgctttggctcaacacgttgcgtga

SEQ ID NO: 72046 - protein, 172 aa, Arabidopsis thaliana
MAAAFASRLTRGGRSLLGGLNNVGSMNSSNGMMNESILSQQQRRTFIQMGTVLKVVDNSGAKKVMCIQALKGKKGARLGDTIVASVKEAMPNGKVKKGAVVYGVVVRAAMQRGRVDGSEVRFDDNAVVLVDSKDKNTKTDRQPIGTRVFGPVPHELRKKKHLKILALAQHVA

SEQ ID NO: 72047 - DNA, 591 bp, Arabidopsis thaliana
  CDS (1)..(591)
atggcgacagctttagcttccaagctctccaaaggacgttcattgcttggaggtctttgcaatgctttctctggtttgatgaattcctcctccaatggaatgatgaatggaagcatcctctctcagcaacaacataggacattcattcaaatggggacgattctcaaatgcgtggataactcgtgtgctaaagaggtgatgtgcattcaatccctgagaggtaagaaaggagcaagacttggcgatatcattgttggttcagtgaaagaagctaacccaattgttcaaaaaaaagtaaagaaagacgctgtcccaaaaggtaaagtgaagaaagggatggtcgtgtacggtgtggttgtgcgtgctgcgatgcctaaaggacgtgctgatggaagccaagtcaagtttgatgacaatgccattgtagttgttggcattaaggaaaagaaagggcagaataattcacatggttccaagaggaaaatggagtacaaccaaccgactggtacccgagtgtttggtcctgtcccgcacgagatgcgcctcaggaaacagctcaagatcctttctttggctcagcacattgtttga

SEQ ID NO: 72048 - protein, 196 aa, Arabidopsis thaliana
MATALASKLSKGRSLLGGLCNAFSGLMNSSSNGMMNGSILSQQQHRTFIQMGTILKCVDNSCAKEVMCIQSLRGKKGARLGDIIVGSVKEANPIVQKKVKKDAVPKGKVKKGMVVYGVVVRAAMPKGRADGSQVKFDDNAIVVVGIKEKKGQNNSHGSKRKMEYNQPTGTRVFGPVPHEMRLRKQLKILSLAQHIV

SEQ ID NO: 72049 - DNA, 375 bp, Arabidopsis thaliana
  CDS (1)..(375)
atggggactgttctcaaagtcgtggacaattcaggtgcgaagaaagtgatgtgtattcaagctctaaaggggaaaaaaggagctagacttggagatactatagttgcttcagtgaaagaagcgatgccaaacggtaaagtgaagaaaggagcggttgtgtatggtgtggttgttcgtgctgcgatgcagagaggtcgtgttgatggaagtgaagttaggtttgatgataacgcggttgttcttgttgatagtaaagataagaatactaaaactgatcgccagccgattggtactagagtgtttggtcctgttcctcatgagcttcgcaagaagaaacatctcaagattcttgctttggctcaacacgttgcgtga

SEQ ID NO: 72050 - protein, 124 aa, Arabidopsis thaliana
MGTVLKVVDNSGAKKVMCIQALKGKKGARLGDTIVASVKEAMPNGKVKKGAVVYGVVVRAAMQRGRVDGSEVRFDDNAVVLVDSKDKNTKTDRQPIGTRVFGPVPHELRKKKHLKILALAQHVA

SEQ ID NO: 72051 - DNA, 606 bp, Arabidopsis thaliana
  CDS (1)..(606)
atggacggcatcgaaatggcgacagctttagcttccaagctctccaaaggacgttcattgcttggaggtctttgcaatgctttctctggtttgatgaattcctcctccaatggaatgatgaatggaagcatcctctctcagcaacaacataggacattcattcaaatggggacgattctcaaatgcgtggataactcgtgtgctaaagaggtgatgtgcattcaatccctgagaggtaagaaaggagcaagacttggcgatatcattgttggttcagtgaaagaagctaacccaattgttcaaaaaaaagtaaagaaagacgctatcccaaaaggtaaagtgaagaaagggatggtcgtgtacggtgtggttgtgcgtgctgcgatgcctaaaggacgtgctgatggaagccaagtcaagtttgatgacaatgccattgtagttgttggcattaaggaaaagaaagggcagaataattcacatggttccaagaggaaaatggagtacaaccaaccgactggtacccgagtgtttggtcctgtcccgcacgagatgcgcctcaggaaacagctcaagatcctttctttggctcagcacattgtttga

SEQ ID NO: 72052 - protein, 201 aa, Arabidopsis thaliana
MDGIEMATALASKLSKGRSLLGGLCNAFSGLMNSSSNGMMNGSILSQQQHRTFIQMGTILKCVDNSCAKEVMCIQSLRGKKGARLGDIIVGSVKEANPIVQKKVKKDAIPKGKVKKGMVVYGVVVRAAMPKGRADGSQVKFDDNAIVVVGIKEKKGQNNSHGSKRKMEYNQPTGTRVFGPVPHEMRLRKQLKILSLAQHIV

SEQ ID NO: 72053 - DNA, 372 bp, Agrostis stolonifera
  CDS (1)..(372): transl_table=11
atgattcaacctcagacccttttaaatgtagcagataatagtggagctcgaaaattgatgtgtattcgagtcataggagctgctggtaatcagcgatatgctcgtattggtgatgttattgttgctgtaatcaaagacgcattgccccaaatgcccctagaaagatccgaagtaattagagctgtaattgtacgtacatgtaaagagttcaaatgtgaagacggtataataatccgctatgatgacaatgcagcggttataattgatcaaaaaggaaatccaaaaggaactcgagtttttggcgcgattgctgaggaattgagagaattgaattttaccaaaatagtttcattagctcctgaagtattataa

SEQ ID NO: 72054 - protein, 123 aa, Agrostis stolonifera
MIQPQTLLNVADNSGARKLMCIRVIGAAGNQRYARIGDVIVAVIKDALPQMPLERSEVIRAVIVRTCKEFKCEDGIIIRYDDNAAVIIDQKGNPKGTRVFGAIAEELRELNFTKIVSLAPEVL

SEQ ID NO: 72055 - DNA, 369 bp, Anthoceros formosae
  CDS (1)..(369)
atgattcaaccccaaacttatttaaatgtagcagacaacagtggagctcgaaaactgatgtgtattcgaattctaggagctagtaatcgtaaatatggcaatattggtgacataattattgctgtaactaaggaagcggtacctaatatgcctctaaaaaaatcagaagtagttagagctgtaattgtacgtacttgtaaagaagttagacgtgataatggaatgaccataagatttgatgacaatgtagctgctacaactaatcaagagggaaatcctaaaggaactcgagtttttggtccagttgctcgagaatcaagaggatataattttactaagataattccactagctcctgaagtgttataa

SEQ ID NO: 72056 - protein, 122 aa, Anthoceros formosae
MIQPQTYLNVADNSGARKLMCIRILGASNRKYGNIGDIIIAVTKEAVPNMPLKKSEVVRAVIVRTCKEVRRDNGMTIRFDDNVAATTNQEGNPKGTRVFGPVARESRGYNFTKIIPLAPEVL

SEQ ID NO: 72057 - DNA, 369 bp, Arabidopsis thaliana
  CDS (1)..(369): transl_table=11
atgattcaaccacaaacctatttgaatgtagcagacaacagcggggctagagaattgatgtgtattcgaataataggagctagtaatcgccgatatgctcatattggtgacgttattgttgctgtaatcaaagaagcaataccaaatactcctctagaaagatcagaagtgattagagctgtaattgtacgtacttgtaaagaactcaaacgtaacaatgggacgataatacgatatgatgacaatgccgcagttgtcattgatcaagaaggaaatccaaaaggaactcgagtttttggggcgatcccacgggaattgagacaattaaactttactaaaatagtttcattagctcctgaggtattataa

SEQ ID NO: 72058 - protein, 122 aa, Arabidopsis thaliana
MIQPQTYLNVADNSGARELMCIRIIGASNRRYAHIGDVIVAVIKEAIPNTPLERSEVIRAVIVRTCKELKRNNGTIIRYDDNAAVVIDQEGNPKGTRVFGAIPRELRQLNFTKIVSLAPEVL

SEQ ID NO: 72059 - DNA, 369 bp, Atropa belladonna
  CDS (1)..(369): transl_table=11
atgattcaacctcagacccatttaaatgtagcggataacagcggggctcgagaattaatgtgtattcgaatcataggagctagcaatcgtcgatatgctcatattggtgacgttattgttgctgtgatcaaagaagcagtaccaaatatgcccctagaaagatcagaaatagtcagagctgtaattgtgcgtacctgtaaagaactcaaacgtgacaacgggatgataatacgatatgatgacaatgctgcagttgttattgatcaagaaggaaatccaaaaggaactcgaatttttggtgcaatcgcccgggaattgagagaattaaattttactaaaatagtttcattagctcccgaggtattataa

SEQ ID NO: 72060 - protein, 122 aa, Atropa belladonna
MIQPQTHLNVADNSGARELMCIRIIGASNRRYAHIGDVIVAVIKEAVPNMPLERSEIVRAVIVRTCKELKRDNGMIIRYDDNAAVVIDQEGNPKGTRIFGAIARELRELNFTKIVSLAPEVL

SEQ ID NO: 72061 - DNA, 369 bp, Calycanthus fertilis var
  CDS (1)..(369): transl_table=11
atgattcaacctcagacccatttgaatgtagcggacaacagcggggctcgagaattgatgtgcattcgaatcataggggctagtaatcgccgatatgctcatatcggtgacgttattgttgctgtaatcaaagaagcagtgcccaatatgcctctcgaaagatcagaagttattcgagctgtaattgtacgtacatgtaaagaactcaaacgcgacaacggtatgataatacgatatgatgacaatgcggcagttgtcattgatcaagaaggaaatccaaaaggaactcgagtttttggagcgattgctcgggaattgagaaagttaaatttcactaaaatagtctcattagcccctgaagtcttataa

SEQ ID NO: 72062 - protein, 122 aa, Calycanthus fertilis var
MIQPQTHLNVADNSGARELMCIRIIGASNRRYAHIGDVIVAVIKEAVPNMPLERSEVIRAVIVRTCKELKRDNGMIIRYDDNAAVVIDQEGNPKGTRVFGAIARELRKLNFTKIVSLAPEVL

SEQ ID NO: 72063 - DNA, 369 bp, Chaetosphaeridium globosum
  CDS (1)..(369): transl_table=11
atgatccaaccacaatcatatctcaatgttgcagataatagtggagcccgtaaaattatgtgtattcgtattttaggaggtagcaataaaaaatacggacatataggggacaccattatcggagttgtaaaagaagctataccaaatatgactttaaaaaaatctgaagttgtacgagctgtaatagtacgcacttgtaaagaattaaaacgtaaaaatggtactattttacgttttgatgaaaacgcagctgttattattaatcaagaaggtaatccacgtggtacacgtatttttggtccagtagctagagaattaagagaagctaattttactaaaattgtatcattagcacctgaagttttataa

SEQ ID NO: 72064 - protein, 122 aa, Chaetosphaeridium globosum
MIQPQSYLNVADNSGARKIMCIRILGGSNKKYGHIGDTIIGVVKEAIPNMTLKKSEVVRAVIVRTCKELKRKNGTILRFDENAAVIINQEGNPRGTRIFGPVARELREANFTKIVSLAPEVL

SEQ ID NO: 72065 - DNA, 369 bp, Chara vulgaris
  CDS (1)..(369): transl_table=11
atgatccaaactcaatcttttctgaatgtagctgacaatagtggagcaagaaaactaatgtgtatacgaatactaaatagtagtaactgcaaatatgctaatataggagatacaattattgccgtagtaaaagaagcaattcctaatatgtcaattaaaaaatctgaaatagtaaaagcagtagtagttcgtacacgtaaaggaatcaaaaggcaaagtggtataacaatccgtttcgatgataatgcagcagtaattattaatcaagatggaaatccaagaggaacacgtgtttttggacctgtagctagagaattaagagaagagaactttacaaaaattgtttctttagctccagaagttctttaa

SEQ ID NO: 72066 - protein, 122 aa, Chara vulgaris
MIQTQSFLNVADNSGARKLMCIRILNSSNCKYANIGDTIIAVVKEAIPNMSIKKSEIVKAVVVRTRKGIKRQSGITIRFDDNAAVIINQDGNPRGTRVFGPVARELREENFTKIVSLAPEVL

SEQ ID NO: 72067 - DNA, 369 bp, Chlamydomonas reinhardtii
  CDS (1)..(369): transl_table=11
atgattaaacctttatcttatttaaatgtagcagataatagtggtgctcgtgaattaatgtgtattcgtgctcttggtggcagttatcgtgaatcggcaaatattggtgatgttattattgcagttgttaaagatgcattaccaaatatgcctgtaaaacgttcagatattgtacgagctgttattgtacgtacacgtaaaggtatccgtcgtgaaaatggtatggcaattcgttttgatgataacgctgcagttattattaacaaagaaggaaatcctcgtggtacacgtgtttttggtccaattgcacgtgaattacgtgataaaaattttacaaaaattgtttctttagcacctgaagttttataa

SEQ ID NO: 72068 - protein, 122 aa, Chlamydomonas reinhardtii
MIKPLSYLNVADNSGARELMCIRALGGSYRESANIGDVIIAVVKDALPNMPVKRSDIVRAVIVRTRKGIRRENGMAIRFDDNAAVIINKEGNPRGTRVFGPIARELRDKNFTKIVSLAPEVL

SEQ ID NO: 72069 - DNA, 369 bp, Chlorella vulgaris
  CDS (1)..(369): transl_table=11
atgattcaaccacaaacgtatcttcgagtggcagacaatacaggtgcccgtgaactcatgtgtattcgagttttaggaggtgggaaacaaagagcagctacagttggtgatattattattgctgtagtcaaagatgctactccaaacatgcctgttaaaagatctgatattgttcgcgcagtcattgttcgtacacgaaaaaacgtacgaagagtaaatggaacaagtattcgctttgacgaaaacgctgcagttattataaataaagaaaataatcctcggggaactcgagtttttggtccggtagcacgtgaactacgtgatggtaattttacaaaaattatttcgctggcaccggaagtcttataa

SEQ ID NO: 72070 - protein, 122 aa, Chlorella vulgaris
MIQPQTYLRVADNTGARELMCIRVLGGGKQRAATVGDIIIAVVKDATPNMPVKRSDIVRAVIVRTRKNVRRVNGTSIRFDENAAVIINKENNPRGTRVFGPVARELRDGNFTKIISLAPEVL

SEQ ID NO: 72071 - DNA, 369 bp, Citrus sinensis
  CDS (1)..(369): transl_table=11
atgattcaacctcaaacccatttgaatgtagcagacaatagcggtgcccgagaattgatgtgtattcgaatcataggagccagtaatcgtagatatgctcatattggtgacgttattgttgctgtgatcaaggaagcagtacccaatacgcctctagaaagatcagaagtgatcagagctgtaattgtacgtacttgtaaagaactcagacgtgataacggtatgataatacggtacgatgacaatgctgcagttgtcattgatcacgaaggaaatccaaagggaactcgagtttttggtgcgatcgcccgggaattgagacagttgaattttactaaaatagtttcattagcacctgaagtattataa

SEQ ID NO: 72072 - protein, 122 aa, Citrus sinensis
MIQPQTHLNVADNSGARELMCIRIIGASNRRYAHIGDVIVAVIKEAVPNTPLERSEVIRAVIVRTCKELRRDNGMIIRYDDNAAVVIDHEGNPKGTRVFGAIARELRQLNFTKIVSLAPEVL

SEQ ID NO: 72073 - DNA, 369 bp, Coffea arabica
  CDS (1)..(369): transl_table=11
atgattcaacctcaaacccatttaaatgtagcagataacagcggggctcgagaattgatgtgtattcgaatcataggagctagcaatcgtcgatatgctcatattggtgatgttattgttgctgtgatcaaagaagcagtaccaaatatgcccctagaaaggtcagaagtcgtcagagctgtaattgtgcgtacctgtaaagaactcaaacgtgacaatggtatgataatacgatatgatgacaacgctgcagttgttattgaccaagaaggaaatccaaaaggaactcgaatttttggcgcgatcgcccgggagttgagacaattaaattttactaaaatagtctcattagctcccgaggtattataa

SEQ ID NO: 72074 - protein, 122 aa, Coffea arabica
MIQPQTHLNVADNSGARELMCIRIIGASNRRYAHIGDVIVAVIKEAVPNMPLERSEVVRAVIVRTCKELKRDNGMIIRYDDNAAVVIDQEGNPKGTRIFGAIARELRQLNFTKIVSLAPEVL

SEQ ID NO: 72075 - DNA, 369 bp, Cucumis sativus
  CDS (1)..(369): transl_table=11
atgattcaacctcaaacccttttgaatgtagcagataacagcggagcccgagaattgatgtgtattcgaatcataggggctagtaatcgacgatatgctcatattggtgacgttattgttgctgtaatcaagaaagccgtcccaaatacacctttagaaagatcagaagtgatcagagctgtaattgtacgtacttgtaaagaactcaaacgagaaaatggtatgataatacgatatgatgacaatgctgcggttgttattgatcaagaaggaaatccaaaaggaactcgaatttttggtgcgattgcccgagaattgagacagttaaatttcacaaaaataatttcattagcacctgaagtattataa

SEQ ID NO: 72076 - protein, 122 aa, Cucumis sativus
MIQPQTLLNVADNSGARELMCIRIIGASNRRYAHIGDVIVAVIKKAVPNTPLERSEVIRAVIVRTCKELKRENGMIIRYDDNAAVVIDQEGNPKGTRIFGAIARELRQLNFTKIISLAPEVL

SEQ ID NO: 72077 - DNA, 369 bp, Daucus carota
  CDS (1)..(369): transl_table=11
atgattcaaccccagacccttttgaatgtagcagataacagcggggctcgagaattgatgtgtattcgaatcataggagctagcaatcgtcgatatgctcatatcggtgacgttattgttgctgtgatcaaagaagcagtgccaaatatgcccctagcaagatcagaggtggtcagagctgtaattgtacgtacttgtaaagaactcaaacgtgataacggtatgataatacgatatgatgacaatgctgcggttgtcattgaccaagaaggaaaccccaaaggaactcgaatttttggtgcaattgcccgtgaattgagacagttaaattttactaaaatagtttcattagctccggaggtattgtaa

SEQ ID NO: 72078 - protein, 122 aa, Daucus carota
MIQPQTLLNVADNSGARELMCIRIIGASNRRYAHIGDVIVAVIKEAVPNMPLARSEVVRAVIVRTCKELKRDNGMIIRYDDNAAVVIDQEGNPKGTRIFGAIARELRQLNFTKIVSLAPEVL

SEQ ID NO: 72079 - DNA, 369 bp, Drimys granadensis
  CDS (1)..(369): transl_table=11
atgattcaacctcagacccatttgaatgtagcagacaacagcggggctcgagaattgatgtgtattcgaatcatcggagctagtaatcgccgatatgctcatatcggtgatgttattgttgctgtaatcaaagaagcagtacccaatatgcctctccaaagatcagaagtgatcagagctgtaattgtacgtacatgtaaagaactcaaacgtgacaacggtatgataatacgatatgatgacaatgcagcggttgtcattgatcaagaaggaaatccaaaaggaactcgagtttttggcgcgatcgctcgggaattgagacagttgaatttcactaaaatagtctcattagctcctgaggtattataa

SEQ ID NO: 72080 - protein, 122 aa, Drimys granadensis
MIQPQTHLNVADNSGARELMCIRIIGASNRRYAHIGDVIVAVIKEAVPNMPLQRSEVIRAVIVRTCKELKRDNGMIIRYDDNAAVVIDQEGNPKGTRVFGAIARELRQLNFTKIVSLAPEVL

SEQ ID NO: 72081 - DNA, 369 bp, Eucalyptus globulus subsp
  CDS (1)..(369): transl_table=11
atgattcaacctcaaagccatttgaatgtagcggataacagcggggcccgagaattaatgtgtattagaatcataggagctagtaatcgccgatatgctcatatcggtgacattattgttgctgtgatcaaggaagcattaccaaacacacctctagaaagatcagaggtgatcagagctgtaattgtacgtacttgtaaagaacttaaacgtgacaacggtatgataatacgatatgatgataatgctgcagttgtgattgatcaagaaggaaatccaaaaggaactcgagtttttggtgcgattgcccgagaattgagacagttaaatttcactaaaatagtttcattagcacctgaggtattataa

SEQ ID NO: 72082 - protein, 122 aa, Eucalyptus globulus subsp
MIQPQSHLNVADNSGARELMCIRIIGASNRRYAHIGDIIVAVIKEALPNTPLERSEVIRAVIVRTCKELKRDNGMIIRYDDNAAVVIDQEGNPKGTRVFGAIARELRQLNFTKIVSLAPEVL

SEQ ID NO: 72083 - DNA, 369 bp, Gossypium barbadense
  CDS (1)..(369): transl_table=11
atgattcaacctcagacccatttgaatgtagcagataacagcggggcccgagaattgatgtgtattcgagtcataggagctagtaatcgccgatatgctcatattggtgacgttattgttgctgtgatcaaggaagcagtaccaaatacacctctagaaagatcagaagtgatcagagctgtaattgtacgtactcgtaaagaactcaaacgcgacaacgggatgataatacgatatgatgacaatgctgccgttgtcattgatcaagaaggaaatccaaaaggaactcgaatttttggtgcgatcgcccgggaattgagacagttaaatttcactaaaatagtttcattagctcccgaggtattataa

SEQ ID NO: 72084 - protein, 122 aa, Gossypium barbadense
MIQPQTHLNVADNSGARELMCIRVIGASNRRYAHIGDVIVAVIKEAVPNTPLERSEVIRAVIVRTRKELKRDNGMIIRYDDNAAVVIDQEGNPKGTRIFGAIARELRQLNFTKIVSLAPEVL

SEQ ID NO: 72085 - DNA, 369 bp, Helianthus annuus
  CDS (1)..(369): transl_table=11
atgattcaacctcagacccatttgaatgtagcagataacagcggggctcgagaattgatgtgtattcgaatcataggagctagcaatcgtcgatatgctcatattggtgacgttattgttgctgtgatcaaagacgcagttccaaacatgcctctagaaagatcagaagtggtcagagctgtaattgtccgtacttgtaaagaacttaaacgtgacaacggtatgataatacgatatgatgacaatgctgcagttgtgattgatcaagaaggaaatccaaaaggaactcgcgtttttggtgcgattgcccgagaattgagacagttcaattttactaaaatagtttcattagctcccgaggtattataa

SEQ ID NO: 72086 - protein, 122 aa, Helianthus annuus
MIQPQTHLNVADNSGARELMCIRIIGASNRRYAHIGDVIVAVIKDAVPNMPLERSEVVRAVIVRTCKELKRDNGMIIRYDDNAAVVIDQEGNPKGTRVFGAIARELRQFNFTKIVSLAPEVL

SEQ ID NO: 72087 - DNA, 369 bp, Huperzia lucidula
  CDS (1)..(369): transl_table=11
atgattcaacctcaaacgtatttgaatgtagcagacaacagtggagctaaaaaaccaatgtgtattcgaattttaaaagctagtaatcgtaaatatgcaaatactggtaacgtaattgtagcggtagttaaagaagcagtaccaaatatgcctcttcgtaaatcagaaatagttagagctgtagttgtacgtacctgtaaagaactaaaacgtaacaatggaatgataatacaatttgatgacaacgcagcagtgatcatcaatcaagagggaaatcctagaggaactcgagtttttggtccagttgctcgagaatcaagagaattcaattttactaaaatagtttcattggctcctgaagtattataa

SEQ ID NO: 72088 - protein, 122 aa, Huperzia lucidula
MIQPQTYLNVADNSGAKKPMCIRILKASNRKYANTGNVIVAVVKEAVPNMPLRKSEIVRAVVVRTCKELKRNNGMIIQFDDNAAVIINQEGNPRGTRVFGPVARESREFNFTKIVSLAPEVL

SEQ ID NO: 72089 - DNA, 369 bp, Liriodendron tulipifera
  CDS (1)..(369): transl_table=11
atgattcaacctcagacccatttgaatgtagcggacaacagcggggctcgagaattgatgtgtattcgaatcataggagctagtaatcaccgatatgctcatattggtgacgttattgttgctgtaatcaaagaagcagtgcccaatatgcctctcgaaagatcagaagtgatcagagctgtaattgtacgtacatgtaaagaactcagacgtgacaacggtatgataatacgatatgatgacaatgcagcagttgtcattgatcaagaaggaaatccaaaaggaactcgggtttttggagcgatcgctcgagaattgagacagttgaatttcactaaaatagtctcattagctcctgaggtattataa

SEQ ID NO: 72090 - protein, 122 aa, Liriodendron tulipifera
MIQPQTHLNVADNSGARELMCIRIIGASNHRYAHIGDVIVAVIKEAVPNMPLERSEVIRAVIVRTCKELRRDNGMIIRYDDNAAVVIDQEGNPKGTRVFGAIARELRQLNFTKIVSLAPEVL

SEQ ID NO: 72091 - DNA, 369 bp, Lotus japonicus
  CDS (1)..(369): transl_table=11
atgattcaacctcaaacccatttaaatgtagccgataatagcggagcccgcaaattgatgtgtattcgaatcataggagctagtaatcgacgatacgcttatattggtgacattgttgttgctgtaatcaaagaagcagtaccgaatacacccttagaaagatcagaagtgatcagagctgtaattgtacgtacttgtaaagaactcaaacgtagcaatggtataataatacagtatgatgataatgctgcagttgtcattgatcaagaaggaaatccaaaaggaactcgaattttttgcgcaatcgcccgggaattgagacagttcaatttcactaaaatagtttcattagcgcctgagatattataa

SEQ ID NO: 72092 - protein, 122 aa, Lotus japonicus
MIQPQTHLNVADNSGARKLMCIRIIGASNRRYAYIGDIVVAVIKEAVPNTPLERSEVIRAVIVRTCKELKRSNGIIIQYDDNAAVVIDQEGNPKGTRIFCAIARELRQFNFTKIVSLAPEIL

SEQ ID NO: 72093 - DNA, 372 bp, Zea mays
  CDS (1)..(372): transl_table=11
atgattcaacctcagacccttttaaatgtagcagataacagtggagctcgaaaattgatgtgtattcgagtcataggagccgctggtaatcagcgatatgctcgtattggtgatgttattattgctgtaatcaaagacgcagtgccccaaatgcctctagaaagatccgaagtaattcgagctgtaattgtacgtacacgtaaagaattcaaaggcgacgacggtataataatacgctatgatgacaatgcagcagttatcattgatcaaaaaggaaatccaaaaggaactcgagtttttggcgcggttgccgaagaattaagagaattgaatttgactaaaatagtttcattagctcctgaagtattataa

SEQ ID NO: 72094 - protein, 123 aa, Zea mays
MIQPQTLLNVADNSGARKLMCIRVIGAAGNQRYARIGDVIIAVIKDAVPQMPLERSEVIRAVIVRTRKEFKGDDGIIIRYDDNAAVIIDQKGNPKGTRVFGAVAEELRELNLTKIVSLAPEVL

SEQ ID NO: 72095 - DNA, 369 bp, Marchantia polymorpha
  CDS (1)..(369): transl_table=11
atgattcaacctcaaacttatttaaatgttgcagataatagtggagctcgaaaactaatgtgcattcgagttataggaacgagtaatcgaaaatatgcaaatattggtgatattattattgctgttgttaaagaagcagtgccaaatatgcctattaaaaaatccgaaattgtaagagctgtaattgtacgtacgtgtaaagaatttaaacgaaataatggatccataataaaatttgatgataatgcagcagttgttattaatcaagaaggaaatccaaaaggaactcgagtttttggtccaattgctagagaattaagagaatctaattttactaaaatagtttcgttagctccagaagttttataa

SEQ ID NO: 72096 - protein, 122 aa, Marchantia polymorpha
MIQPQTYLNVADNSGARKLMCIRVIGTSNRKYANIGDIIIAVVKEAVPNMPIKKSEIVRAVIVRTCKEFKRNNGSIIKFDDNAAVVINQEGNPKGTRVFGPIARELRESNFTKIVSLAPEVL

SEQ ID NO: 72097 - DNA, 369 bp, Mesostigma viride
  CDS (1)..(369): transl_table=11
atgatacaagctcaatcttatcttaatgtagcagataatagtggcgctaaaaaaataatgtgtattcgtgtattaggtggcagtcaacgtaaatatgctgctattggtgatgttattattggtgtagtaaaagattctgttccgaatatgtcattaaaaaaatcagaagtagtaagagctgtagttgtacgcacttgtaaagggattcgaagagaaaatggtatgactataagatttgatgataatgctgctgttgtaattaacaaagatggcaatcctaaaggcaccagagtttttggccctgtcgctagagaattaagagatcgtaattttacaaaaattgtttctcttgcaccagaagtgttataa

SEQ ID NO: 72098 - protein, 122 aa, Mesostigma viride
MIQAQSYLNVADNSGAKKIMCIRVLGGSQRKYAAIGDVIIGVVKDSVPNMSLKKSEVVRAVVVRTCKGIRRENGMTIRFDDNAAVVINKDGNPKGTRVFGPVARELRDRNFTKIVSLAPEVL

SEQ ID NO: 72099 - DNA, 369 bp, Morus indica
  CDS (1)..(369): transl_table=11
atgattcaacctcaaacccatttgaatgtagcggataatagcggagccagaaaattgatgtgtattcgaatcataggagctagtaatcgacgatatgctaagattggtgacgttgttgttgctgtaatcaaggaagcaataccaaatacaccgctagaaagatcagaagtgatcagagccgtaattgtacgtacttgtaaagaactcaaacgcgacaatggtatgataatacgatatgatgacaatgctgcagttgttattgatcaagaaagaaatccaaaaggaactcgaatttttggcgcaatcgcccgggaattaagacaattaaatttcactaaaatagtttcgttagcgcctgaagtattgtaa

SEQ ID NO: 72100 - protein, 122 aa, Morus indica
MIQPQTHLNVADNSGARKLMCIRIIGASNRRYAKIGDVVVAVIKEAIPNTPLERSEVIRAVIVRTCKELKRDNGMIIRYDDNAAVVIDQERNPKGTRIFGAIARELRQLNFTKIVSLAPEVL

SEQ ID NO: 72101 - DNA, 366 bp, Nephroselmis olivacea
  CDS (1)..(366): transl_table=11
atgattcaacctcaaaccatcctacaagtggcggacaatagtggagctcgccaactcatgtgcattcgtgtacttggtggaagaaaacgctatgccagcattggtgacgttattattgccgttgtgaaagatgcgattcctaatatgcctgtcaaaaaatctgatgtagtacgtgcagttgttgttcgtacttcgaagccggttcgccgagatacaggtatgttgattcgttttgatgataatgcagctgtcattgtcaaccaagaaggtaacccacgtggcacgcgtgtcttcggacctgtcgcacgtgaactccgtgatcgtcagtttatgaaaattatttctctagcacctgaagtgctttaa

SEQ ID NO: 72102 - protein, 121 aa, Nephroselmis olivacea
MIQPQTILQVADNSGARQLMCIRVLGGRKRYASIGDVIIAVVKDAIPNMPVKKSDVVRAVVVRTSKPVRRDTGMLIRFDDNAAVIVNQEGNPRGTRVFGPVARELRDRQFMKIISLAPEVL

SEQ ID NO: 72103 - DNA, 369 bp, Nicotiana sylvestris
  CDS (1)..(369): transl_table=11
atgattcaacctcagacccatttaaatgtagcggataacagcggggctcgagaattgatgtgtattcgaatcataggagctagcaatcgtcgatatgctcatattggtgacgttattgttgctgtgatcaaagaagccgtaccaaatatgcccctagaaagatcagaagtagtcagagctgtaattgtgcggacctgtaaagaactcaaacgtgacaacgggatgataatacgatatgatgacaatgctgcagttgttattgatcaagaaggaaatccaaaaggaactcgaatttttggtgcaatcgcccgggaattgagagaattaaattttactaaaatagtttcattagctcccgaggtattataa

SEQ ID NO: 72104 - protein, 122 aa, Nicotiana sylvestris
MIQPQTHLNVADNSGARELMCIRIIGASNRRYAHIGDVIVAVIKEAVPNMPLERSEVVRAVIVRTCKELKRDNGMIIRYDDNAAVVIDQEGNPKGTRIFGAIARELRELNFTKIVSLAPEVL

SEQ ID NO: 72105 - DNA, 369 bp, Nicotiana tomentosiformis
  CDS (1)..(369): transl_table=11
atgattcaacctcagacccatttaaatgtagcggataacagcggggctcgagaattgatgtgtattcgaatcataggagctagcaatcgtcgatatgctcatattggtgacgttattgttgctgtgatcaaagaagccataccaaatatgcccctagaaagatcagaagtagtcagagctgtaattgtgcggacctgtaaagaactcaaacgtgacaacgggataataatacgatatgatgacaatgctgcagttgttattgatcaagaaggaaatccaaaaggaactcgaatttttggtgcaatcgcccgggaattgagagaattaaattttactaaaatagtttcattagctcccgaggtattataa

SEQ ID NO: 72106 - protein, 122 aa, Nicotiana tomentosiformis
MIQPQTHLNVADNSGARELMCIRIIGASNRRYAHIGDVIVAVIKEAIPNMPLERSEVVRAVIVRTCKELKRDNGIIIRYDDNAAVVIDQEGNPKGTRIFGAIARELRELNFTKIVSLAPEVL

SEQ ID NO: 72107 - DNA, 369 bp, Nymphaea alba
  CDS (1)..(369): transl_table=11
atgattcaacctcagacccttttgaatgtagcggacaacagcggagcccgaaaacttatgtgtattcgaatcataggagctagtaattaccgatatgctcatatcggtgacgttattgttgctgtaatcaaagaagcagtgccaaatatgcccctggaaagatcagaagtaatcagagctgtaattgtacgtacatgtaaagaactcaagcgcgacaacggtatgataatccggtatgatgacaatgcagcagttgtcattgatcaagaaggaaatccaaaaggcacccgagtttttggttcgattgctcgtgaattgagacagttaaatttcactaagatagtctcattagctcccgaagtattataa

SEQ ID NO: 72108 - protein, 122 aa, Nymphaea alba
MIQPQTLLNVADNSGARKLMCIRIIGASNYRYAHIGDVIVAVIKEAVPNMPLERSEVIRAVIVRTCKELKRDNGMIIRYDDNAAVVIDQEGNPKGTRVFGSIARELRQLNFTKIVSLAPEVL

SEQ ID NO: 72109 - DNA, 369 bp, Oenothera hookeri
  CDS (1)..(369): transl_table=11
atgattcaacctcaaacccgtttgaatgtcgcggataacagtggggctcgagaattaatgtgtattcgaatcatcggagctagtaatcgtcgatatgctcatatcggtgacattattgttgctgtgatcaaggaagcattaccaagcacctccctagaaagatcagaagtggtcagagctgtaattgtacgtacttgtaaagaacttaaatgtgacgacggtatcataatacgatatgatgacaatgctgctgttgtcattgatcaagaaggaaatccaaaaggaacccgagtttttggtgcgattgcccacgaattgagagagttaagtttcactaaaatagtttcattagcacctgaggtattataa

SEQ ID NO: 72110 - protein, 122 aa, Oenothera hookeri
MIQPQTRLNVADNSGARELMCIRIIGASNRRYAHIGDIIVAVIKEALPSTSLERSEVVRAVIVRTCKELKCDDGIIIRYDDNAAVVIDQEGNPKGTRVFGAIAHELRELSFTKIVSLAPEVL

SEQ ID NO: 72111 - DNA, 369 bp, Oltmannsiellopsis viridis
  CDS (1)..(369): transl_table=11
atgattcaacctcaaacatatgtaaacgtcgcagataatagtggagcacgaaaattaatgtgtatccgtgtcttagacgctagttttaaacaatctgccaatattggcgatacaattattgctgttgtaaaagaggctattccaaatatgcctctaaaaaaatctgatattgttcgtgctgttattgtacgttctgctaaagggattcgtcgtccagacggaacaattattcgttttgatgacaatgcagcagttgttattaataaagaaggaaacccacgtggtacacgtgtttttggtcctgtagctcgtgaacttcgtgaacgagaatttactaaaattgtttctttagcaccagaagttttataa

SEQ ID NO: 72112 - protein, 122 aa, Oltmannsiellopsis viridis
MIQPQTYVNVADNSGARKLMCIRVLDASFKQSANIGDTIIAVVKEAIPNMPLKKSDIVRAVIVRSAKGIRRPDGTIIRFDDNAAVVINKEGNPRGTRVFGPVARELREREFTKIVSLAPEVL

SEQ ID NO: 72113 - DNA, 372 bp, Oryza nivara
  CDS (1)..(372): transl_table=11
atgattcaacctcagacccttttaaatgtagcagataacagcggagctcgaaaattgatgtgtattcgagtcataggagctgctagtaatcagcgatatgctcgtattggtgatgttattgttgctgtaatcaaagacgcagtgccccaaatgcctctagaaagatccgaagtaattcgagctgtaattgtacgtacatgtaaagagttcaaatgcgaagacggtataataatacgctatgacgacaatgcagcggttatcattgatcaaaaaggaaatccaaaaggaactcgcgtttttggcgcgatcgccgaggaattgagagaattgaattttactaaaatagtttcattagctcctgaagtattataa

SEQ ID NO: 72114 - protein, 123 aa, Oryza nivara
MIQPQTLLNVADNSGARKLMCIRVIGAASNQRYARIGDVIVAVIKDAVPQMPLERSEVIRAVIVRTCKEFKCEDGIIIRYDDNAAVIIDQKGNPKGTRVFGAIAEELRELNFTKIVSLAPEVL

SEQ ID NO: 72115 - DNA, 360 bp, Ostreococcus tauri
  CDS (1)..(360): transl_table=11
atgattcaaccacagacatatctcgaggttgcggacaatagtggagcacgtaaattaatgtgtattcgcgtattgaaccgtaaaattggacatattggtgatgtaatcattgctgtcgtaaaagaagcattgcctaacatgccaattaaaaagtccgaagttgttcgtgcagtcattgtacgtacagcacacactattcaacgtgacaacggtatgtcaattcgttttgacgataatgccgcggttattattaacaaagagggaaacccacgtggtacacgtgttttcggtccaatcgcacgtgaattacgtgaacgcgattttatgaagattgtttctctcgcaccagaagttctttaa

SEQ ID NO: 72116 - protein, 119 aa, Ostreococcus tauri
MIQPQTYLEVADNSGARKLMCIRVLNRKIGHIGDVIIAVVKEALPNMPIKKSEVVRAVIVRTAHTIQRDNGMSIRFDDNAAVIINKEGNPRGTRVFGPIARELRERDFMKIVSLAPEVL

SEQ ID NO: 72117 - DNA, 369 bp, Panax ginseng
  CDS (1)..(369): transl_table=11
atgattcaacctcagacccttttgaatgtagcggataacagcggggctcgagaattgatgtgtattcgaatcataggagctagcaatcgtcgatatgctcatatcggtgacgttattgttgctgtgatcaaagaagcagtgccaaacatgcccctagcaagatcagaagtggtcagagctgtaattgtacgtacttgtaaagaactcaaacgtgataacggtatgataatacgatatgatgacaatgctgcggttgtcatcgatcaagaaggaaacccaaagggaactcgggtttttggtgcaattgcccgggaattgagacagttaaattttactaaaatagtttcattagctccggaggtattataa

SEQ ID NO: 72118 - protein, 122 aa, Panax ginseng
MIQPQTLLNVADNSGARELMCIRIIGASNRRYAHIGDVIVAVIKEAVPNMPLARSEVVRAVIVRTCKELKRDNGMIIRYDDNAAVVIDQEGNPKGTRVFGAIARELRQLNFTKIVSLAPEVL

SEQ ID NO: 72119 - DNA, 366 bp, Phaeodactylum tricornutum
  CDS (1)..(366): transl_table=11
atgatttatcctcaaacaatgttaacagtagccgataatacgggtgctaaaaaagttatgtgtattcgggtattaggtggcaacaagaaatatgcaaaaattggtgatacaattattgcagttgttaaagaagccttaccaaatatgcctgtaaaacgttccgatgtggtaagagccgttgttgtgcgaacaaagaaaagtattcgtcgacaagatggtatgtatattcgatttgatgataacgcggctgtaattgtgaatatggataataatcctcgtgggactcgagtttttggacctgttgctcgtgaaattcgcgataaaaattattcaaaaattgtatccttagcgccggaggttttataa

SEQ ID NO: 72120 - protein, 121 aa, Phaeodactylum tricornutum
MIYPQTMLTVADNTGAKKVMCIRVLGGNKKYAKIGDTIIAVVKEALPNMPVKRSDVVRAVVVRTKKSIRRQDGMYIRFDDNAAVIVNMDNNPRGTRVFGPVAREIRDKNYSKIVSLAPEVL

SEQ ID NO: 72121 - DNA, 369 bp, Physcomitrella patens
  CDS (1)..(369): transl_table=11
atgattcaacctcaaacttatttaaatgtagctgataatagtggagcgcgcaaattaatgtgtatacaaattttaggcgcaagtaatcgtaaatatgcacatattggtgatattattattgccgtagttaaagaagcaataccaaatatgccattaaaaaaatcagaagtagttcgagcagttgttgtacgaacttgtaaagaacttaaacgtaaaaacggaactattatacaatttgatgataatgctgcagttattattaatcaagaaggaaatcctaaaggaactcgagtttttggccctgttgcacgagaattacgtgaatctaattttactaaaatagtttcgttagcacctgaagtattataa

SEQ ID NO: 72122 - protein, 122 aa, Physcomitrella patens
MIQPQTYLNVADNSGARKLMCIQILGASNRKYAHIGDIIIAVVKEAIPNMPLKKSEVVRAVVVRTCKELKRKNGTIIQFDDNAAVIINQEGNPKGTRVFGPVARELRESNFTKIVSLAPEVL

SEQ ID NO: 72123 - DNA, 369 bp, Pinus koraiensis
  CDS (1)..(369)
atgattcagtctcaaacttatttgaatatagcggataacagtggagcccgaaaaataatgtgtattcgagttctaggagcaagtaatcgtaaatgcgctcatataggtgatgttataattgctataattaaagaagcagtacctaacatgcccctggaaaaatcggaagtagttagagccgtagttatacgcacctgtaaagaatttgaacgtgacaatggaatgatgatacgatctgatgacaatgcagccgttgtcattgatcaggaaggaaatccaaaaggaactcgagtttttggtccggttgctcaggaattgagacaattgaatttcactaaaatagtttcattggctcccgaagtcttataa

SEQ ID NO: 72124 - protein, 122 aa, Pinus koraiensis
MIQSQTYLNIADNSGARKIMCIRVLGASNRKCAHIGDVIIAIIKEAVPNMPLEKSEVVRAVVIRTCKEFERDNGMMIRSDDNAAVVIDQEGNPKGTRVFGPVAQELRQLNFTKIVSLAPEVL

SEQ ID NO: 72125 - DNA, 369 bp, Populus alba
  CDS (1)..(369): transl_table=11
atgatccaatctcagacccatttgaatgtagcagataatagcggagctcgagaattgatgtgtattcgaatcataggaactagtaatcgccgatatgctcatatcggcgacgttattattgctgtgatcaaggaagcagtccccaattcacctctagaaagatctgaagtgatcagagctgtaattgtgcgtacttctaaagaactcaaacgcgacaacggtatgataatacgatatgatgacaacgctgcagttgtaattgatcaagaaggaaatccaaagggaactcgaatttttggtgcaatcgctcgggaattgagacagttaaatttcactaaaatagtttcattagcacctgaagtcttataa

SEQ ID NO: 72126 - protein, 122 aa, Populus alba
MIQSQTHLNVADNSGARELMCIRIIGTSNRRYAHIGDVIIAVIKEAVPNSPLERSEVIRAVIVRTSKELKRDNGMIIRYDDNAAVVIDQEGNPKGTRIFGAIARELRQLNFTKIVSLAPEVL

SEQ ID NO: 72127 - DNA, 369 bp, Pseudendoclonium akinetum
  CDS (1)..(369): transl_table=11
atgattcgacctcaaactattttaaatgtagctgataatagcggtgcaaaaaaattgatgtgcattcgtgttttgggtggaagttataaacaaagtgcgaatattggtgatattattattgctgttgttaagcaagccactccaaatatgcccttaaaaaaatctgacaaagttcgggccgttgttgtaaggacagcccagggtgttcaaagagaaaacggaacttttattcgttttgacgataatgctgcggttgttattaataaagatgacaacccacgcggaacaagagtgtttggtccagttgctcgtgaattaagagatagaaaatttacaaaaattgtgtccttagctccggaagttttatag

SEQ ID NO: 72128 - protein, 122 aa, Pseudendoclonium akinetum
MIRPQTILNVADNSGAKKLMCIRVLGGSYKQSANIGDIIIAVVKQATPNMPLKKSDKVRAVVVRTAQGVQRENGTFIRFDDNAAVVINKDDNPRGTRVFGPVARELRDRKFTKIVSLAPEVL

SEQ ID NO: 72129 - DNA, 372 bp, Saccharum hybrid
  CDS (1)..(372): transl_table=11
atgattcaacctcagacccttttaaatgtagcagataacagtggagctcgaaaattgatgtgtattcgagtcataggagccgctggtaatcagcgatatgctcgtattggtgatgttattattgctgtaatcaaagacgcagtgccccaaatgcctctagaaagatccgaagtaattcgagctgtaattgtacgtacacgtaaagaattcaaaggcgacgacggtataataatacgctatgatgacaatgcagcagttatcattgatcaaaaaggaaatccaaaaggaactcgagtttttggcgcggttgccgaagaattaagagaattgaattatactaaaatagtttcattagctcctgaagtattataa

SEQ ID NO: 72130 - protein, 123 aa, Saccharum hybrid
MIQPQTLLNVADNSGARKLMCIRVIGAAGNQRYARIGDVIIAVIKDAVPQMPLERSEVIRAVIVRTRKEFKGDDGIIIRYDDNAAVIIDQKGNPKGTRVFGAVAEELRELNYTKIVSLAPEVL

SEQ ID NO: 72131 - DNA, 366 bp, Scenedesmus obliquus
  CDS (1)..(366): transl_table=11
atgattcaaccacaatcttatttaaatgtagctgataatagtggtgctcgcaaattaatgtgtattcgagtattaggtggtggtcgtcaaacagcaacaatcggcgatgttattatcgctgttgtgaaagacgctttaccaaatatgccattaaaaaaatcagatgttgttcgtgcagttattgttcgtacaagcaaaggagttcgtcgtgaaaatgggatgatgctttgctttgatgataatgctgctgttgttattaataaagaaggaaatccaagaggaacacgtgtttttggtccaattgctcgtgaacttcgtgatcgtaattttacaaaaattgtttctttagctcctgaagttgtttaa

SEQ ID NO: 72132 - protein, 121 aa, Scenedesmus obliquus
MIQPQSYLNVADNSGARKLMCIRVLGGGRQTATIGDVIIAVVKDALPNMPLKKSDVVRAVIVRTSKGVRRENGMMLCFDDNAAVVINKEGNPRGTRVFGPIARELRDRNFTKIVSLAPEVV

SEQ ID NO: 72133 - DNA, 372 bp, Sorghum bicolor
  CDS (1)..(372): transl_table=11
atgattcaacctcagacccttttaaatgtagcagataacagtggagctcgaaaattgatgtgtattcgagtcataggagccgctggtaatcagcgatatgctcgtattggtgatgttattattgctgtaatcaaagacgcagtgcccaaaatgcctctagaaagatccgaagtaattcgagctgtaattgtacgtacacgtaaagaattcaaaggcgacgacggtataataatacgctatgatgacaatgcagcagttatcattgatcaaaaaggaaatccaaaaggaactcgagtttttggcgcggttgccgaagaattaagagaattgaattttactaaaatagtttcattagctcctgaagtattataa

SEQ ID NO: 72134 - protein, 123 aa, Sorghum bicolor
MIQPQTLLNVADNSGARKLMCIRVIGAAGNQRYARIGDVIIAVIKDAVPKMPLERSEVIRAVIVRTRKEFKGDDGIIIRYDDNAAVIIDQKGNPKGTRVFGAVAEELRELNFTKIVSLAPEVL

SEQ ID NO: 72135 - DNA, 369 bp, Glycine max
  CDS (1)..(369): transl_table=11
atgattcaacctcaaactcatttgaatgtagctgataatagcggagcacgcgaactgatgtgtattcgaatcctaggagctagtaatcgacgatatgcttatattggtgacattgttgttgctgtaatcaaacaagcagtaccaaatacgaacttagaaagatcagaagtgatcagagctgtaattgtacgtacttgtaaagaactcaaacgtagcaacggtataataattcagtatgatgataatgctgcagttgtcattgatcaagaaggaaatccaaaaggaactcgaatcttttgtgcaatcgcccgggaattgagacagttaaatttcactaaaatagtttcattagcacccgaggtattataa

SEQ ID NO: 72136 - protein, 122 aa, Glycine max
MIQPQTHLNVADNSGARELMCIRILGASNRRYAYIGDIVVAVIKQAVPNTNLERSEVIRAVIVRTCKELKRSNGIIIQYDDNAAVVIDQEGNPKGTRIFCAIARELRQLNFTKIVSLAPEVL

SEQ ID NO: 72137 - DNA, 366 bp, Spinacia oleracea
  CDS (1)..(366)
atgattcaacctcagacccatttgaatgtagcagacaacagcggggctcgagaattgatgtgtattcgaatcataggagctagcaaccgtcgatatgctcgtattggtgacgttattgttgctgtgatcaaagaagcaatccccaacacgcccttagaaagatcagaagtgatcagagctgtagttgtacgtacttgtaaagaactaaaacgcgacaacggtatgataatacgatatgatgacaatgctgcagttatcattgatcaagaaggaaatccaaaaggaactcgaatttttggtgcaattgcccgggaattgcgacaaaaatttgcgaaaatagtttcattagctcctgaggtattataa

SEQ ID NO: 72138 - protein, 121 aa, Spinacia oleracea
MIQPQTHLNVADNSGARELMCIRIIGASNRRYARIGDVIVAVIKEAIPNTPLERSEVIRAVVVRTCKELKRDNGMIIRYDDNAAVIIDQEGNPKGTRIFGAIARELRQKFAKIVSLAPEVL

SEQ ID NO: 72139 - DNA, 369 bp, Staurastrum punctulatum
  CDS (1)..(369): transl_table=11
atgattcaacctcaatcttatttaaatgtagccgataatagtggagctcgaaggcttatgtgtattcgtgttttaggatcaagtaatcgtaaatatgcaaacattggtgatatgattattgctgtagtaaaagaagctgttcctaatatgccattaaaaaaatcagaagttgttcgagcagtaattgttcgaacttgcaaaggtattaaacgcaataatggaatgatacttcgttttgatgataatgcagctgtagttgtaaatcaagaaggaaatccaagaggaacacgggtttttggaccagtagcacgagaattaagagattttaattttactaaaattgtctctttagcaccagaagttttataa

SEQ ID NO: 72140 - protein, 122 aa, Staurastrum punctulatum
MIQPQSYLNVADNSGARRLMCIRVLGSSNRKYANIGDMIIAVVKEAVPNMPLKKSEVVRAVIVRTCKGIKRNNGMILRFDDNAAVVVNQEGNPRGTRVFGPVARELRDFNFTKIVSLAPEVL

SEQ ID NO: 72141 - DNA, 369 bp, Stigeoclonium helveticum
  CDS (1)..(369): transl_table=11
atgattcgtcctcaatcttatttaaatgttgctgataatacaggggcacgcaaagttatgtgtatacgtgttttaggcgggattcaaggccaaactgctaatattggtgatgttataattgcagttgttaaagatgctttaccaaatacaggtgttaaaaaatctgatattgtgagagcagtagtagtacgtacacgtaaaggtattcgtcgagaaaacggaatgtttatccgttttgaagataatgcagcagtcgttattaataaagaaggaaatcctagaggaacacgtatttttggtcctgttgcacgtgaattacgcgatcgtaactttacaaaaattgtttctttagcaccagaagttttataa

SEQ ID NO: 72142 - protein, 122 aa, Stigeoclonium helveticum
MIRPQSYLNVADNTGARKVMCIRVLGGIQGQTANIGDVIIAVVKDALPNTGVKKSDIVRAVVVRTRKGIRRENGMFIRFEDNAAVVINKEGNPRGTRIFGPVARELRDRNFTKIVSLAPEVL

SEQ ID NO: 72143 - DNA, 369 bp, Vitis vinifera
  CDS (1)..(369): transl_table=11
atgattcaaccccagacccatttgaatgtagcggacaacagcggggcccgagaattgatgtgtattcgaatcataggaactagtaatcgccgatacgctcatattggtgacgttattgttgctgtgatcaaagaagtagtaccaaatatgcctctagaaagatcagaagtaatcagagctgtaattgtacgtacctgtaaagaactcaaacgtgacaacggtatgataatacgatatgatgacaatgctgcagttattattgatcaagaaggaaacccaaaaggaactcgaatttttggtgcgatcgtccgggaattgagacagttaaattttactaaaatagtttccttagcccctgaggtattataa

SEQ ID NO: 72144 - protein, 122 aa, Vitis vinifera
MIQPQTHLNVADNSGARELMCIRIIGTSNRRYAHIGDVIVAVIKEVVPNMPLERSEVIRAVIVRTCKELKRDNGMIIRYDDNAAVIIDQEGNPKGTRIFGAIVRELRQLNFTKIVSLAPEVL

SEQ ID NO: 72145 - DNA, 372 bp, Triticum aestivum
  CDS (1)..(372): transl_table=11
atgattcaacctcagacccttttaaatgtagccgataatagtggagctcgaaaattgatgtgtattcgagtcataggagctgctggtaatcagcgatatgctcgtattggtgatgttattgttgctgtaatcaaagacgcattgccccaaatgcctctagaaagatccgaagtaattcgagctgtaattgtacgtacatgtaaagagttcaaatgcgaagacggtataataatccgctatgatgacaatgctgcggttataattgatcaaaaaggcaatccaaaaggaactcgagtttttggcgcgattgccgaggaattgagaggattgaattttaccaaaatagtttcattagctcctgaagtattataa

SEQ ID NO: 72146 - protein, 123 aa, Triticum aestivum
MIQPQTLLNVADNSGARKLMCIRVIGAAGNQRYARIGDVIVAVIKDALPQMPLERSEVIRAVIVRTCKEFKCEDGIIIRYDDNAAVIIDQKGNPKGTRVFGAIAEELRGLNFTKIVSLAPEVL

SEQ ID NO: 72147 - DNA, 369 bp, Zygnema circumcarinatum
  CDS (1)..(369): transl_table=11
atgattcaacctcagtcttatttaaatgtagccgacaacagcggagctcgaaagctcatgtgtattcgtgtactgggatctagcaatcgaaagtatgctcacattggtgacatggttattgcagttgttaaagaaacagtacctaatatgcctttgaaaaaatcagaaattgtaagagcagttatagtacgtacacgtaaaggtcttaaacgtgataatgggatggtgctacgttttgatgataatgctgcggttgtcatcaatcaagaaggcaatccaagaggaacacgagtttttggtccagttgccagagaattgagagacttaaattttactaaaatagtttctttagctcctgaagtgctttaa

SEQ ID NO: 72148 - protein, 122 aa, Zygnema circumcarinatum
MIQPQSYLNVADNSGARKLMCIRVLGSSNRKYAHIGDMVIAVVKETVPNMPLKKSEIVRAVIVRTRKGLKRDNGMVLRFDDNAAVVINQEGNPRGTRVFGPVARELRDLNFTKIVSLAPEVL

SEQ ID NO: 72149 - DNA, 369 bp, Acinetobacter sp
  CDS (1)..(369): transl_table=11
atgattcaaaccgaaagtatgctcgacgtagcagacaatagtggtgcacgccgcgtacaatgtatcaaagtactaggtggttcacatcgtcgttatgcttctgttggcgacattattaaagttactgttaaagaagcaattccacgtggccgtgttaaaaaaggtgacgtgatgaatgctgttgtagtacgtactaagttcggtattcgtcgtccagacggttctgtaatccgttttgatgacaatgcagctgtattgttaaacaacaacaaagctccgattgccacccgtattttcggaccagtgactcgtgaacttcgtactgaacagttcatgaaaattatttcattggctcctgaagttctataa

SEQ ID NO: 72150 - protein, 122 aa, Acinetobacter sp
MIQTESMLDVADNSGARRVQCIKVLGGSHRRYASVGDIIKVTVKEAIPRGRVKKGDVMNAVVVRTKFGIRRPDGSVIRFDDNAAVLLNNNKAPIATRIFGPVTRELRTEQFMKIISLAPEVL

SEQ ID NO: 72151 - DNA, 372 bp, Acidobacteria bacterium
  CDS (1)..(372): transl_table=11
atggcagtgcaaatgagaacgatgctcgaggttgccgacaacagcggcgcccgcaagctccagatgatcaacccgctgggcggcggcgccggacacgtggcgcacctcggtgacgtggtgacggccgcggtgaaggaagcttcgccggacggcaccgcgaagaagggcacggttgtgaaggccgtgatcgtgcggacgcacaaggagcatcgccgcaaggacggcacctacattcgcttcgacacgaatgcggcagtgctgatcaatgacaccggcgagccggtggggacccgtgtcttcggaccggtggcccgcgagctgcgcgagaagaagttcctgaagattgtttcactcgcccccgaagttctgtag

SEQ ID NO: 72152 - protein, 123 aa, Acidobacteria bacterium
MAVQMRTMLEVADNSGARKLQMINPLGGGAGHVAHLGDVVTAAVKEASPDGTAKKGTVVKAVIVRTHKEHRRKDGTYIRFDTNAAVLINDTGEPVGTRVFGPVARELREKKFLKIVSLAPEVL

SEQ ID NO: 72153 - DNA, 423 bp, Aeropyrum pernix
  CDS (1)..(423): transl_table=11
gtggctaagaagaagaagtatggtgtcgtggtgtcacgctatggagtcaacaccgggctgcaggtggggagctatgtacctgttgctgataacagtggcgccaaggaggttatgataataagcgttccccaggttaagacgaggctaaggaggctgccttcggccggtgtcggagaccttgttgttgttagtgtgaagaaggggactccccagatgaggaggcaggtggtttacgctgttgtggttaggcagaggaggcctttcagaaggcccgacggaacctgggtctctttcgaggacaacgcggttgttatagtcaaccccgacggcacgccgaggggtagcgaggtcaggggtcctattgctagggaggccgccgagaggtggccgagggtggctaaaatagctaccatgatagtatga

SEQ ID NO: 72154 - protein, 140 aa, Aeropyrum pernix
MAKKKKYGVVVSRYGVNTGLQVGSYVPVADNSGAKEVMIISVPQVKTRLRRLPSAGVGDLVVVSVKKGTPQMRRQVVYAVVVRQRRPFRRPDGTWVSFEDNAVVIVNPDGTPRGSEVRGPIAREAAERWPRVAKIATMIV

SEQ ID NO: 72155 - DNA, 369 bp, Agrobacterium tumefaciens
  CDS (1)..(369): transl_table=11
atgattcagatgcaaacaaacctcgacgtggcggataattccggcgcacgtcgtgtcatgtgcatcaaggtgctgggcggctcgaagcgcaaatatgcttctgttggcgacattattgtcgtttccatcaaggaagctattccgcgcggccgcgtcaagaagggcgatgtgatgaaggcggttgtcgtgcgcaccgccaaggacatccgccgcgctgacggcagcgtcatccgtttcgataacaacgcagccgttcttatcgacaacaagaaagagcccatcggcacccgtatcttcggaccggttccgcgcgaacttcgcgccaagaaccacatgaagatcatctcgctggctccggaagtactgtaa

SEQ ID NO: 72156 - protein, 122 aa, Agrobacterium tumefaciens
MIQMQTNLDVADNSGARRVMCIKVLGGSKRKYASVGDIIVVSIKEAIPRGRVKKGDVMKAVVVRTAKDIRRADGSVIRFDNNAAVLIDNKKEPIGTRIFGPVPRELRAKNHMKIISLAPEVL

SEQ ID NO: 72157 - DNA, 369 bp, Alkalilimnicola ehrlichei
  CDS (1)..(369): transl_table=11
atgattcagatgcagaccaccctgggtgtagccgacaattccggcgcgcgccaggtccagtgtattaaggtgctcgggggctcccggcgccgttatgccggcatcggcgacattatcaaggtgagcgtcaaggatgcgatcccgcgtgggcgggtcaagaagggcgaggtgtacaacgccgtcgtcgttcggacccgccgcggtgtacgccgtccggacggctccgtcatccgattcgacggcaatgccgccgtgctgctgaataaccagcttcagcccattggaacccgcgtattcgggcccgtgacccgggagctgcgcagcgagaagttcatgcgcatcatctccctggcgcccgaggtgctttga

SEQ ID NO: 72158 - protein, 122 aa, Alkalilimnicola ehrlichei
MIQMQTTLGVADNSGARQVQCIKVLGGSRRRYAGIGDIIKVSVKDAIPRGRVKKGEVYNAVVVRTRRGVRRPDGSVIRFDGNAAVLLNNQLQPIGTRVFGPVTRELRSEKFMRIISLAPEVL

SEQ ID NO: 72159 - DNA, 366 bp, Aquifex aeolicus
  CDS (1)..(366): transl_table=11
atgatacagaggcaaacttacttaaatgtagcggacaactccggtgcgaaaaaggttcaggttataggtataccttatgctccgaggaagtacgcaacgctaggagacgttgttacggtaaccgtaaaggaagccctgcctcagggaaacgcaaagaaaggaaagatttacagggctattatcgtaagaaccgctaaagaggtcaggagacctgatggaagctacataaagtttgacgacaacgcctgcgttctcctgaaccagtacggagaacctttgggaactcgtgttctgggacctatagcgagagaggtgaggaataaaggctttaccaagatagcttcacttgctccggaggtagtgtaa

SEQ ID NO: 72160 - protein, 121 aa, Aquifex aeolicus
MIQRQTYLNVADNSGAKKVQVIGIPYAPRKYATLGDVVTVTVKEALPQGNAKKGKIYRAIIVRTAKEVRRPDGSYIKFDDNACVLLNQYGEPLGTRVLGPIAREVRNKGFTKIASLAPEVV

SEQ ID NO: 72161 - DNA, 399 bp, Archaeoglobus fulgidus
  CDS (1)..(399): transl_table=11
atgaaggcaataagagctaacattccaagagcgctgccaacaggagcgaggcttgtttgcgccgacaacaccggagcgagggagcttgaaattattgcggtaaagggatacaagggcgtcaggaggagatatcccgctgcaggcgtaggagacatagttgttgtgaccgtaaagaagggaactcccgaaataaggaagcaggttcactatgcagtcatagtgaggcagagaaaggagtaccgcagaccagacggaacgagggtgaagtttgaggacaacgctgcagtgattacaaacgagaggggagagcctaggggctcggaaatcagaggtgctgttgcgagagaggctgcggagcgctttagcaaaataggcaccattgcatccgtaatcgtgtga

SEQ ID NO: 72162 - protein, 132 aa, Archaeoglobus fulgidus
MKAIRANIPRALPTGARLVCADNTGARELEIIAVKGYKGVRRRYPAAGVGDIVVVTVKKGTPEIRKQVHYAVIVRQRKEYRRPDGTRVKFEDNAAVITNERGEPRGSEIRGAVAREAAERFSKIGTIASVIV

SEQ ID NO: 72163 - DNA, 369 bp, Bacillus halodurans
  CDS (1)..(369): transl_table=11
atgatccaacaagaaagccgtttaaaagtagctgataactctggtgctcgtgaattgctttgcattaaagtgctaggtggttctggacgcaagactgcgaacattggtgacgttatcgtttgctctgtcaagcaagcaacaccagggggcgttgtcaagaagggtgacgttgtaaaagcggttatcgtccgttctaagagcggtgttcgtcgtaacgatggttcgtacattaagtttgacgagaacgctgctgtgatcgttcgtgacgataagagcccgcgtgggactcgtattttcggaccggttgcacgtgaacttcgtgacaatcaattcatgaaaatcgtttctttagctccggaagttctttaa

SEQ ID NO: 72164 - protein, 122 aa, Bacillus halodurans
MIQQESRLKVADNSGARELLCIKVLGGSGRKTANIGDVIVCSVKQATPGGVVKKGDVVKAVIVRSKSGVRRNDGSYIKFDENAAVIVRDDKSPRGTRIFGPVARELRDNQFMKIVSLAPEVL

SEQ ID NO: 72165 - DNA, 369 bp, Bacillus subtilis
  CDS (1)..(369): transl_table=11
atgattcaacaagagactcgtttaaaagtagctgacaactctggcgcacgtgaagtacttactattaaagttcttggtggttctggacgtaaaacagctaacattggtgatgtaattgtttgcacggttaaacaagcaacaccaggaggcgttgtcaaaaaaggtgaagtcgtaaaagctgttatcgttcgcactaaaagcggagcgcgcagaagtgacggttcatacatcagcttcgatgagaatgcatgtgttatcatccgtgacgacaagagcccacgcggaactcgtatcttcggaccagttgctcgtgaattgcgtgaaaacaactttatgaaaattgtttctctagctccagaagttatctaa

SEQ ID NO: 72166 - protein, 122 aa, Bacillus subtilis
MIQQETRLKVADNSGAREVLTIKVLGGSGRKTANIGDVIVCTVKQATPGGVVKKGEVVKAVIVRTKSGARRSDGSYISFDENACVIIRDDKSPRGTRIFGPVARELRENNFMKIVSLAPEVI

SEQ ID NO: 72167 - DNA, 369 bp, Bartonella henselae
  CDS (1)..(369): transl_table=11
atgattcagatgcaaacaaacctcgacgttgccgataattccggtgcccgtcgtgtcatgtgcatcaaggtgttaggcggttcaaagcgcaaatatgcttcggtcggtgacattattgttgtttcggttaaggatgctattcctcgtggccgtgttaaaaaaggtgatgtgatgaaggctgtagtggttcgtactgctaaggatattcgtcgggcggacggtagtgttattcgttttgatggtaatgctgctgttttggtggataataagaaagagccgatcggtacacgtatctttggaccagttccccgcgaacttcgcgctaggaatcatatgaagatcatctcgctcgctcctgaagtgttataa

SEQ ID NO: 72168 - protein, 122 aa, Bartonella henselae
MIQMQTNLDVADNSGARRVMCIKVLGGSKRKYASVGDIIVVSVKDAIPRGRVKKGDVMKAVVVRTAKDIRRADGSVIRFDGNAAVLVDNKKEPIGTRIFGPVPRELRARNHMKIISLAPEVL

SEQ ID NO: 72169 - DNA, 369 bp, Bartonella quintana
  CDS (1)..(369): transl_table=11
atgattcagatgcaaacgaacctcgacgttgccgataattccggtgcccgtcgtgttatgtgcatcaaggtgttaggcggttcaaagcgtaaatatgcttcggtcggcgacattattgttgtttcggtcaaggatgctattcctcgtggccgtgttaaaaaaggtgatgtgatgaaagctgtagtagttcgtactgctaaggatattcgtcgcgcagacggtagtgtcattcgttttgatagtaatgctgctgttttagtggataataagaaagagccgatcggtacacgtatctttggtccagttcctcgcgaacttcgtggtaggaatcatatgaagatcatctcgctcgctcctgaagtattgtaa

SEQ ID NO: 72170 - protein, 122 aa, Bartonella quintana
MIQMQTNLDVADNSGARRVMCIKVLGGSKRKYASVGDIIVVSVKDAIPRGRVKKGDVMKAVVVRTAKDIRRADGSVIRFDSNAAVLVDNKKEPIGTRIFGPVPRELRGRNHMKIISLAPEVL

SEQ ID NO: 72171 - DNA, 369 bp, Bordetella bronchiseptica
  CDS (1)..(369): transl_table=11
atgatccaaatgcagaccacgctggacgtggccgacaacactggtgcgcgtgctgtcatgtgcatcaaggtgctcggtggctccaagcgccgttatgccggtatcggcgacatcatcaaggtgagcgtcaaagatgcggctccgcgcggacgcgtcaagaaaggcgaaatctacaacgctgtggtggtgcgtaccgccaagggcgtgcgccgcaaagacggttcgctgatccgtttcggtggcaatgccgccgtgttgctcaatgccaagctggagccgatcggcacccgcatcttcggacccgttacgcgtgaactgcgtaccgagcggttcatgaagatcgtgtcgctggccccggaagtgctgtaa

SEQ ID NO: 72172 - protein, 122 aa, Bordetella bronchiseptica
MIQMQTTLDVADNTGARAVMCIKVLGGSKRRYAGIGDIIKVSVKDAAPRGRVKKGEIYNAVVVRTAKGVRRKDGSLIRFGGNAAVLLNAKLEPIGTRIFGPVTRELRTERFMKIVSLAPEVL

SEQ ID NO: 72173 - DNA, 369 bp, Borrelia garinii
  CDS (1)..(369): transl_table=11
atgattcagatgcaaacttatttaacaattgctgataatactggtggcaagctagctcaatgtattaaagtgcttggtggtagtaaaaggcgttatgccaaaatcggggacataataactattgtagtaaaacaagcaattcctaattcttctgttaaaaaaggagatgtttgtaaagctgtaattattaggacttctaaggaagtaagacgtaagaacggaacttatgttagatttgatgataatgcttgtgtgatacttgatgccaatttgagccctaggggtaaaagggtgtttgggcctgttgcaagagaacttagggatgctaattttatgaaggtagtatcattggcctcagaagtaatatag

SEQ ID NO: 72174 - protein, 122 aa, Borrelia garinii
MIQMQTYLTIADNTGGKLAQCIKVLGGSKRRYAKIGDIITIVVKQAIPNSSVKKGDVCKAVIIRTSKEVRRKNGTYVRFDDNACVILDANLSPRGKRVFGPVARELRDANFMKVVSLASEVI

SEQ ID NO: 72175 - DNA, 369 bp, Bradyrhizobium japonicum
  CDS (1)..(369): transl_table=11
atgattcagatgcagaccaacctcgacgtggccgacaattctggcgcacgccgtgtcatgtgtatcaaggtgctcgggggctccaagcgccgctacgccacgatcggcgacatcatcgtcgtctcgatcaaggaagcgattccgcgtggcaaggtgaagaagggcgacgtgatgaaggccgtcgtggtgcgcgtccgcaaggacatccgccgcgccgacggttcggtcatccgcttcgaccgcaacgccgccgtgctgatcaacaaccagtccgagccggtcggcacccgtatcttcgggcccgtgccgcgcgagctgcgcgccaagaatcacatgaagatcatttccctcgcgccggaggtgctgtga

SEQ ID NO: 72176 - protein, 122 aa, Bradyrhizobium japonicum
MIQMQTNLDVADNSGARRVMCIKVLGGSKRRYATIGDIIVVSIKEAIPRGKVKKGDVMKAVVVRVRKDIRRADGSVIRFDRNAAVLINNQSEPVGTRIFGPVPRELRAKNHMKIISLAPEVL

SEQ ID NO: 72177 - DNA, 369 bp, Brucella melitensis
  CDS (1)..(369): transl_table=11
atgattcagatgcaaacaaacctcgacgtggcggataattccggcgcacgtcgtgtcatgtgcatcaaggtgctgggcggctcgaagcggcgttatgcttccgttggcgacatcattgtggtgtcgatcaaggaagctattccgcgcggccgcgtcaaaaagggtgacgtgatgaaggcggttgtggtacgcaccgccaaggatatccgtcgtccggacggcagcgttattcgtttcgataacaatgcagccgttctcatcgataataagaaagagccgatcggcacgcgtatcttcggaccggttccgcgcgaactgcgcgcaaagaaccacatgaagatcatctcgctggctccggaagttctataa

SEQ ID NO: 72178 - protein, 122 aa, Brucella melitensis
MIQMQTNLDVADNSGARRVMCIKVLGGSKRRYASVGDIIVVSIKEAIPRGRVKKGDVMKAVVVRTAKDIRRPDGSVIRFDNNAAVLIDNKKEPIGTRIFGPVPRELRAKNHMKIISLAPEVL

SEQ ID NO: 72179 - DNA, 369 bp, Buchnera aphidicola subsp
  CDS (1)..(369): transl_table=11
atgattcaagaacaaacaattcttcatgtagctgataactctggcgcacgatctgctatgtgtattaaagttttaggtggttcacgtcgtcgctatgcagcgataggtgatgtaattaaaattacaattaaagaagcaatacctagaggaaaagtaaaaaaaggagaagttcttaaagcggtagtagtaagaactaaaaaaggggttagaagatctgatggttctgttattcgttttgataccaatgcttgtgttgtattaaacaataacgaacaacctatcggtactcgtatttttggtcctgttacacgtgaattaagaacagaaaaatttatgaaaattatttcactagctcctgaagttctttag

SEQ ID NO: 72180 - protein, 122 aa, Buchnera aphidicola subsp
MIQEQTILHVADNSGARSAMCIKVLGGSRRRYAAIGDVIKITIKEAIPRGKVKKGEVLKAVVVRTKKGVRRSDGSVIRFDTNACVVLNNNEQPIGTRIFGPVTRELRTEKFMKIISLAPEVL

SEQ ID NO: 72181 - DNA, 372 bp, Buchnera aphidicola subsp
  CDS (1)..(372): transl_table=11
atgatccaagaacagactatgctgaacgtcgccgacaactccggtgcacgtcgcgtaatgtgtatcaaggttctaggtggctcgcaccgtcgctacgcaggcgtcggcgacatcatcaaaattaccatcaaggaagcaattcctcgcggtaaggtgaagaaaggcgatgtgctgaaggcggtagtggtgcgcaccaagaagggtgtacgtcgcccggacggttctgtcattcgcttcgatggtaatgcatgcgttattttaaataataatagcgagcagcctgtcggtacgcgtatttttgggccggtaactcgtgaactgcgtaatgaaaggttcatgaaaattatctctctggcaccagaagtactctaa

SEQ ID NO: 72182 - protein, 123 aa, Buchnera aphidicola subsp
MIQEQTMLNVADNSGARRVMCIKVLGGSHRRYAGVGDIIKITIKEAIPRGKVKKGDVLKAVVVRTKKGVRRPDGSVIRFDGNACVILNNNSEQPVGTRIFGPVTRELRNERFMKIISLAPEVL

SEQ ID NO: 72183 - DNA, 369 bp, Buchnera aphidicola subsp
  CDS (1)..(369): transl_table=11
atgattcaagaacaaactattttgaatgtagctgataattctggtgctcgttcagctatgtgtattaaagtgctcggtggttcccgtcgccgatacgcacgtattggtgacataattaaaattacaatcaaggaagccatacctcgtggaaaagtaaaaaaaggagaagtattaaaagctgtagttgtcagaacaaaaaaaggagtaagacgctctgatggttctataattcgttttgataataatgcttgtgttgtgttaaataataatgaacaacctgttggtactcgtatttttggacctgttacgcgtgaattgagaattgaaaaatttatgaaaattatttcgttagctccggaagttttgtaa

SEQ ID NO: 72184 - protein, 122 aa, Buchnera aphidicola subsp
MIQEQTILNVADNSGARSAMCIKVLGGSRRRYARIGDIIKITIKEAIPRGKVKKGEVLKAVVVRTKKGVRRSDGSIIRFDNNACVVLNNNEQPVGTRIFGPVTRELRIEKFMKIISLAPEVL

SEQ ID NO: 72185 - DNA, 369 bp, Buchnera aphidicola subsp
  CDS (1)..(369): transl_table=11
atgatacaggaacagagtatattaaatgtagcggataattctggtgctcgtctcgctatgtgtattaaagtacttggtggatctcgtcgtcggtatgcaggaatcggtgatatcattaagatttctataaaagaagctatacctagaggaaaagtaaagaagggagaagtatttaaagctgtaataataagaacaaaaaaaggtgttaaacgttcagatggttctataattcgatttgacactaatgcttgtgttgtattaaataataatgatcaaccaatagggacaagaatttttggccctgttactcgggaacttcgaaatgataaattcatgaaaattatttcattagctccagaggttttgtaa

SEQ ID NO: 72186 - protein, 122 aa, Buchnera aphidicola subsp
MIQEQSILNVADNSGARLAMCIKVLGGSRRRYAGIGDIIKISIKEAIPRGKVKKGEVFKAVIIRTKKGVKRSDGSIIRFDTNACVVLNNNDQPIGTRIFGPVTRELRNDKFMKIISLAPEVL

SEQ ID NO: 72187 - DNA, 369 bp, Burkholderia mallei
  CDS (1)..(369): transl_table=11
atgatccagaccgaatctcggcttgaagtggccgacaacacgggtgcgcgtgaagtcatgtgcatcaaggtgctcggcggctcgaagcgtcgttatgccagcattggcgacatcatcaaggtgagcgtcaaagaggcaacgccgcgcgggcgcgtgaagaaaggcgaaatctacaacgccgtggtggtccgcaccgccaagggcgttcgtcgtcaagacggctcgctgatcaagttcgacggcaacgccgctgtgcttttgaataacaagctcgagccgatcggcacccgtatcttcgggccggtgacgcgtgagctgcgtagcgaacgattcatgaagatcgtgtcgctggcgccggaagtgctgtaa

SEQ ID NO: 72188 - protein, 122 aa, Burkholderia mallei
MIQTESRLEVADNTGAREVMCIKVLGGSKRRYASIGDIIKVSVKEATPRGRVKKGEIYNAVVVRTAKGVRRQDGSLIKFDGNAAVLLNNKLEPIGTRIFGPVTRELRSERFMKIVSLAPEVL

SEQ ID NO: 72189 - DNA, 369 bp, Burkholderia xenovorans
  CDS (1)..(369): transl_table=11
atgatccagaccgaaactcggcttgaagtggccgacaacacgggtgcacgtgaagtcatgtgcatcaaggtgctcggcggctcgaagcgtcgttatgccagcattggcgacatcatcaaggtgaccgtcaaagaagcaacgccgcgcgggcgcgtgaagaaaggcgaaatttataacgccgtggtggttcgtaccgccaagggcgtgcgccgtcaggacggctcgctgatcaagttcgatggcaacgccgctgtgttgttgaatgccaagctcgaacctattggcacccgtattttcgggcctgtcacgcgcgagttgcgcagcgaacgattcatgaagatcgtttcgttggcacctgaagtgctgtaa

SEQ ID NO: 72190 - protein, 122 aa, Burkholderia xenovorans
MIQTETRLEVADNTGAREVMCIKVLGGSKRRYASIGDIIKVTVKEATPRGRVKKGEIYNAVVVRTAKGVRRQDGSLIKFDGNAAVLLNAKLEPIGTRIFGPVTRELRSERFMKIVSLAPEVL

SEQ ID NO: 72191 - DNA, 369 bp, Carboxydothermus hydrogenoformans
  CDS (1)..(369): transl_table=11
gtgattcaagtacaaaccatattgaattccgccgataacaccggcgcgaaaaaattaatgtgcatccgggttttaggaggatccaaccggagatatgcaagtttaggtgatataatcgtttgctccgttaaggaagcaacacccgatgccgttgtgaaaaagggagaggtggttaaagcagtagttgttcggaccaaaaaagaagtgcgccggccggacggtacgtatattaaatttgacgaaaatgctgcagtaattattaaggacgataagagcccacggggtacccgaatttttggaccggtagcccgggaactgagggaaaaggatttcatgaaaatcatctccctggctccggaagtcctttaa

SEQ ID NO: 72192 - protein, 122 aa, Carboxydothermus hydrogenoformans
MIQVQTILNSADNTGAKKLMCIRVLGGSNRRYASLGDIIVCSVKEATPDAVVKKGEVVKAVVVRTKKEVRRPDGTYIKFDENAAVIIKDDKSPRGTRIFGPVARELREKDFMKIISLAPEVL

SEQ ID NO: 72193 - DNA, 369 bp, Chlamydia muridarum
  CDS (1)..(369): transl_table=11
atgatccagcaagaaagtcaattaaaagttgccgataatacgggcgctaaaaaggtaaagtgtttcaaggtcctcggtggatctcgtcggcgttatgcaacagtcggtgatgtgattgtttgctcagtaagagacgttgagcctgatagttccgtaaaaaaaggggacgttgttaaggccgttattgtgcggactcggaatgatattcgtcgtaaagatggttctacactgagatttgataccaatagctgtgtaatcattgatgacaaaggcaatcctaagggaactcgaatttttgggcctgtagcgcgagaaattcgagatcgaggcttcattaaaattagctctctggctcctgaggtgatttaa

SEQ ID NO: 72194 - protein, 122 aa, Chlamydia muridarum
MIQQESQLKVADNTGAKKVKCFKVLGGSRRRYATVGDVIVCSVRDVEPDSSVKKGDVVKAVIVRTRNDIRRKDGSTLRFDTNSCVIIDDKGNPKGTRIFGPVAREIRDRGFIKISSLAPEVI

SEQ ID NO: 72195 - DNA, 369 bp, Chromobacterium violaceum
  CDS (1)..(369): transl_table=11
atgatccaaatgcagaccatgcttgaggtcgctgacaacactggtgcacgtcatgttcagtgcatcaaagtgctgggtggctccaagcgtcgctatgctagcgtaggtgacatcatcaaggtgagcatcaaggatgccgctccgcgtggacgcgtcaaaaaaggcgacgtatacaacgcggtcgtggtacgcactgccaaaggcgtgcgccgtccggatggctctttgatcaagtttgacagcaatgctgctgttctgctcaataacaagcttgagccgatcggcactcgcatcttcggacccgttacgcgcgaactgcgtaccgagcgtttcatgaagatcgtatcgctggctcctgaagttctgtaa

SEQ ID NO: 72196 - protein, 122 aa, Chromobacterium violaceum
MIQMQTMLEVADNTGARHVQCIKVLGGSKRRYASVGDIIKVSIKDAAPRGRVKKGDVYNAVVVRTAKGVRRPDGSLIKFDSNAAVLLNNKLEPIGTRIFGPVTRELRTERFMKIVSLAPEVL

SEQ ID NO: 72197 - DNA, 369 bp, Colwellia psychrerythraea
  CDS (1)..(369): transl_table=11
atgatccaaatgcaatcacagctgaatgttgctgataacagtggcgctaagcgtgttcaatgtataaaggttcttggtggctcgcaccgtcgctatgcacgcattggtgatatcatcaaagttgccgtaaaggaagcaagtcctcgcggtaaagtaaaaaaaggtgatgttcacactgcggtagtggtgcgcactaagaaaggtgttcgtcgtacagatggttctgctatccgttttgacgaaaacgcggctgtaatgttaaatgctaacttacaaccaattggtactcgtattttcgggcctgtgacacgtgaacttcgtaatgaaaaatttatgaagatcgtatcattagcaccagaagtactataa

SEQ ID NO: 72198 - protein, 122 aa, Colwellia psychrerythraea
MIQMQSQLNVADNSGAKRVQCIKVLGGSHRRYARIGDIIKVAVKEASPRGKVKKGDVHTAVVVRTKKGVRRTDGSAIRFDENAAVMLNANLQPIGTRIFGPVTRELRNEKFMKIVSLAPEVL

SEQ ID NO: 72199 - DNA, 369 bp, Corynebacterium diphtheriae
  CDS (1)..(369): transl_table=11
gtgattcagcaggaatcgcgtctgcgggttgccgataacaccggtgcacgagagattctgtgcatccgcgttctcggtggctccacccgacgttttgctggcattggcgacgtcatcgtcgctaccgtcaaggaagctaccccaggtggcaacgttaaggctggcgaagtcgttaaggctgttatcgtccgcgctaagaaggaaacccgtcgtccagacggttcctacatcaagttcgatgaaaacgctgctgttttgatcaagaacgacaacgagccacgtggtacccgtatcttcggcccagtagctcgcgagcttcgtgacaagaagttcatgaagatcgtttctctcgcaccggaggtgatctag

SEQ ID NO: 72200 - protein, 122 aa, Corynebacterium diphtheriae
MIQQESRLRVADNTGAREILCIRVLGGSTRRFAGIGDVIVATVKEATPGGNVKAGEVVKAVIVRAKKETRRPDGSYIKFDENAAVLIKNDNEPRGTRIFGPVARELRDKKFMKIVSLAPEVI

SEQ ID NO: 72201 - DNA, 369 bp, Corynebacterium glutamicum
  CDS (1)..(369): transl_table=11
gtgattcagcaggaatcgcgtctgaaggtcgccgacaacactggtgcacgtgaaattctgtgcatccgcgttctcggtggatccacccgacgttttgctggcattggtgacgtcatcgtcgccactgtcaaggaagcaaccccaggcggcaacgtaaagtctggcgaaatcgtcaaggctgttatcgttcgcaccaagaaggagacccgtcgtgcagacggttcttacatctccttcgatgagaacgctgccgtcatcatcaagaacgacaacgagccacgtggcacccgtatcttcggaccagttgctcgtgaacttcgtgagaagaagttcatgaagatcgtttctctcgcaccggaggtgatttaa

SEQ ID NO: 72202 - protein, 122 aa, Corynebacterium glutamicum
MIQQESRLKVADNTGAREILCIRVLGGSTRRFAGIGDVIVATVKEATPGGNVKSGEIVKAVIVRTKKETRRADGSYISFDENAAVIIKNDNEPRGTRIFGPVARELREKKFMKIVSLAPEVI

SEQ ID NO: 72203 - DNA, 369 bp, Dechloromonas aromatica
  CDS (1)..(369): transl_table=11
atgattcagatgcagacgactctggatgtcgccgataacaccggcgcacgttcagtaatgtgtatcaaagtgctgggtgggtccaggcgccgttatgcgggcattggtgacatcatcaaggtcagcatcaaggatgctgctccgcgtggccgtgtcaaaaagggtgacgtttacaacgccgtggtggttcgcactgccaagggtgttcgtcgtccggatggctcgctggtgcgctttgatggcaatgccgcagtccttctcaacaacaagctcgagccgattggcacgcgcatctttggcccggtaacccgcgaactgcgtaccgagcgcttcatgaagatcgtgtcgctggctcctgaagtgctgtaa

SEQ ID NO: 72204 - protein, 122 aa, Dechloromonas aromatica
MIQMQTTLDVADNTGARSVMCIKVLGGSRRRYAGIGDIIKVSIKDAAPRGRVKKGDVYNAVVVRTAKGVRRPDGSLVRFDGNAAVLLNNKLEPIGTRIFGPVTRELRTERFMKIVSLAPEVL

SEQ ID NO: 72205 - DNA, 369 bp, Desulfovibrio desulfuricans
  CDS (1)..(369): transl_table=11
atgatccaggtagaatctgctctgcaagtggcggataactccggtgccaaaaaagttgcctgcatcaaggtgctgggcggctctaagcgccgttacgcttccgtcggcgacgtcatcgtcgtatccgtgaaggaggccctgcctcactccaaggtgaaaaagggcgatgtcatgaaggcggttgtcgttcgtactgccaaggaaatccgtcgtaacgacggctcctacatcaagttcgataccaacgctgccgtactgctgaacaagcagggcgagcccgtcggcacccgtatcttcggtcccgttgcacgtgaactgcgcgcacggaactacatgaagattgtgtctctggcccctgaagttctgtag

SEQ ID NO: 72206 - protein, 122 aa, Desulfovibrio desulfuricans
MIQVESALQVADNSGAKKVACIKVLGGSKRRYASVGDVIVVSVKEALPHSKVKKGDVMKAVVVRTAKEIRRNDGSYIKFDTNAAVLLNKQGEPVGTRIFGPVARELRARNYMKIVSLAPEVL

SEQ ID NO: 72207 - DNA, 372 bp, Escherichia coli O157
  CDS (1)..(372): transl_table=11
atgatccaagaacagactatgctgaacgtcgccgacaactccggtgcacgtcgcgtaatgtgtatcaaggttctgggtggctcgcaccgtcgctacgcaggcgtaggcgacatcatcaagatcaccatcaaagaagcaattccgcgtggtaaggtcaaaaaaggtgatgtgctgaaggcggtagtggtgcgcaccaagaagggtgttcgtcgcccggacggttctgtcattcgcttcgatggtaatgcttgtgttcttctgaacaacaacagcgagcagcctatcggtacgcgtatttttgggccggtaactcgtgagcttcgtagtgagaagttcatgaaaattatctctctggcaccagaagtactctaa

SEQ ID NO: 72208 - protein, 123 aa, Escherichia coli O157 [sequence omitted]

SEQ ID NO: 72209 - DNA, 372 bp, Erwinia carotovora subsp
  CDS (1)..(372): transl_table=11
atgatccaagaacagactatgctgaacgtggccgataattccggtgcacgtcgcgtaatgtgtatcaaggttctaggtggctcgcaccgtcgctacgcaggcgttggcgatatcatcaaaattaccatcaaggaagcaattcctcgcggtaaggtgaaaaaaggcgacgtgctgaaggcggtagtggtgcgcaccaagaagggtgttcgtcgcccggacggttctgtcattcgcttcgatggaaatgcttgcgttattttaaacaataacagcgaacagcctatcggtacgcgtatttttgggccggtaactcgtgaactgcgtaatgagaagttcatgaaaattatctctctggcaccagaagtactttaa

SEQ ID NO: 72210 - protein, 123 aa, Erwinia carotovora subsp
MIQEQTMLNVADNSGARRVMCIKVLGGSHRRYAGVGDIIKITIKEAIPRGKVKKGDVLKAVVVRTKKGVRRPDGSVIRFDGNACVILNNNSEQPIGTRIFGPVTRELRNEKFMKIISLAPEVL

SEQ ID NO: 72211 - DNA, 369 bp, Geobacter metallireducens
  CDS (1)..(369): transl_table=11
atgattcagatgcagaccattttggatgttgcggataattccggagccagaaagctattttgtataaaggttcttggcggatccaaaagaaaatatgctggaattggtgatattattgttgcttctgtaagagaagcgattccgaattccaaagtgaaaaagggtgatgtcgtcaaggcggtaattgttagaaccgccaaagaggttggacgccttgacggttcgtacatccgttttgacgataattcggctgtggttattaacaatcagcgtgaacctgtcggcactcggatcttcggtccggtcgcaagagaactgagggcgcggaaattcatgaaaattgtgtctcttgcacctgaggttctgtaa

SEQ ID NO: 72212 - protein, 122 aa, Geobacter metallireducens
MIQMQTILDVADNSGARKLFCIKVLGGSKRKYAGIGDIIVASVREAIPNSKVKKGDVVKAVIVRTAKEVGRLDGSYIRFDDNSAVVINNQREPVGTRIFGPVARELRARKFMKIVSLAPEVL

SEQ ID NO: 72213 - DNA, 369 bp, Gluconobacter oxydans
  CDS (1)..(369): transl_table=11
atgattcatcccgagaccaacctggacgtcgccgacaactccggcgcacgtcgggtgcagtgcatcaaggtgctgggcggttccaagcggaagaccgcctcggtcggcgacgtcattgtcgtgtccgtcaaggaagcaattccccgcggcaaggtgaagaagggtgacgtccatcaggccgttatcgttcgcacctcctacccggtccgtcgtgcagatggctccgccatccgcttcgacaagaatgctgccgttctgctgaacaagcagcaggagccgattggtacgcgtatctttggcccggtggttcgtgagctgcgtgcgcgcaagttcatgaagatcatctcgctggctccggaggtgctgtaa

SEQ ID NO: 72214 - protein, 122 aa, Gluconobacter oxydans
MIHPETNLDVADNSGARRVQCIKVLGGSKRKTASVGDVIVVSVKEAIPRGKVKKGDVHQAVIVRTSYPVRRADGSAIRFDKNAAVLLNKQQEPIGTRIFGPVVRELRARKFMKIISLAPEVL

SEQ ID NO: 72215 - DNA, 372 bp, Haemophilus ducreyi
  CDS (1)..(372): transl_table=11
atgatccaagaacagactatgctggatgttgctgataactcaggggctcgtagcgtaatgtgtatcaaggttctaggtggatcgcaccgtcgttacgctgcaattggtgacattatcaaagttactgtgaaagaagcaattcctcgcggtaaagtaaaaaaaggtgatgtattaaaagcagttgttgtgcgcaccaagaagggtgttcgtcgcccagatggctcagttattcgtttcgatggtaatgcttgtgtcattttaaataataacactgagcaaccaattggtacgcgtatttttggacctgtgactcgtgaacttcgttctgagaaattcatgaagatcatttctttggctccagaagtactgtaa

SEQ ID NO: 72216 - protein, 123 aa, Haemophilus ducreyi
MIQEQTMLDVADNSGARSVMCIKVLGGSHRRYAAIGDIIKVTVKEAIPRGKVKKGDVLKAVVVRTKKGVRRPDGSVIRFDGNACVILNNNTEQPIGTRIFGPVTRELRSEKFMKIISLAPEVL

SEQ ID NO: 72217 - DNA, 372 bp, Haemophilus influenzae
  CDS (1)..(372): transl_table=11
atgatccaagaacagactatgctggatgttgctgataattcaggcgctcgcagcgtaatgtgtatcaaggttctaggtggatcgcaccgtcgttatgctgcgattggtgacatcatcaaaattactgtaaaagaagcaattccacgcggtaaagtaaaaaaaggtgatgtattaaaagcagttgttgtgcgcaccaagaagggtgttcgtcgcccagatggctcagttattcgtttcgatggtaacgcttgtgtaattttaaataataacactgagcaaccaatcggtactcgtatttttggaccagtgactcgtgaacttcgttctgagaaattcatgaagatcatttctttagctccagaagtactgtaa

SEQ ID NO: 72218 - protein, 123 aa, Haemophilus influenzae
MIQEQTMLDVADNSGARSVMCIKVLGGSHRRYAAIGDIIKITVKEAIPRGKVKKGDVLKAVVVRTKKGVRRPDGSVIRFDGNACVILNNNTEQPIGTRIFGPVTRELRSEKFMKIISLAPEVL

SEQ ID NO: 72219 - DNA, 399 bp, Haloarcula marismortui
  CDS (1)..(399): transl_table=11
atggaagcactcggtgctgacgtcacgcaaggcctagagaagggctcgctcatcacgtgtgcggacaacacgggagcgcgcgaactcaaggtcatttccgtccacggctactcgggaacgaagaaccgccaccccaaagctgggctgggcgacaagatcacggtctcggtcaccaaggggacgcccgaaatgcgtcgtcaggtgctcgaagccgtcgtcgtccgccagcgaaagccgatccgtcgacccgacggcacccgcgtcaagttcgaagacaacgcggccgtcatcgtcgacgaaaacgaggacccgcgcgggaccgagctgaaaggtccaatcgcacgggaagtcgcacagcgattcggcagtgtggcatcagcagcgacgatgattgtatag

SEQ ID NO: 72220 - protein, 132 aa, Haloarcula marismortui
MEALGADVTQGLEKGSLITCADNTGARELKVISVHGYSGTKNRHPKAGLGDKITVSVTKGTPEMRRQVLEAVVVRQRKPIRRPDGTRVKFEDNAAVIVDENEDPRGTELKGPIAREVAQRFGSVASAATMIV

SEQ ID NO: 72221 - DNA, 369 bp, Idiomarina loihiensis
  CDS (1)..(369): transl_table=11
atgatccaaatgcaaactaccctggacgttgccgataactccggcgcgcgcagcgtacaatgtattaaggttctaggtggttcgcaccgtcgctacgcaaacatcggcgatatcatcaaagttactgtcaaggaagcaattccgcgcggtaaggtgaagaaaggcgatgtagtgaatgcggtggtcgttcgcaccagaaaaggcgtccgtcgacaagacgggtcggtcatccgttttgaccgcaacgcggctgtgttgttgaataacaaccaacagcccattggcacacgtattttcgggccggtaactcgtgaactgcgttcagagcagtttatgaagattatctcgctggcaccagaagtactataa

SEQ ID NO: 72222 - protein, 122 aa, Idiomarina loihiensis
MIQMQTTLDVADNSGARSVQCIKVLGGSHRRYANIGDIIKVTVKEAIPRGKVKKGDVVNAVVVRTRKGVRRQDGSVIRFDRNAAVLLNNNQQPIGTRIFGPVTRELRSEQFMKIISLAPEVL

SEQ ID NO: 72223 - DNA, 369 bp, Leifsonia xyli subsp
  CDS (1)..(369): transl_table=11
gtgattcagcaggaatcccgactcaaggttgccgacaacacgggcgcgaaggaactcctgaccatccgcgttctcggtggctccggtcgtcgctacgcgggcctgggcgacgtcatcgtcgccacggtcaaagacgccatccccggcggaaacgtcaagaagggcgatgtcgtcaaggccgtcatcgtgcgcacgcggaagaacacccggcgcacggacggctcttacatcaagttcgacgagaacgccgccgtgatcctgaagaacgacggtgacccccgcggaacccgtatcttcggcccggtcggccgtgagcttcgcgacaagaagttcatgaagatcatctcgctggccccggaggtgctgtaa

SEQ ID NO: 72224 - protein, 122 aa, Leifsonia xyli subsp
MIQQESRLKVADNTGAKELLTIRVLGGSGRRYAGLGDVIVATVKDAIPGGNVKKGDVVKAVIVRTRKNTRRTDGSYIKFDENAAVILKNDGDPRGTRIFGPVGRELRDKKFMKIISLAPEVL

SEQ ID NO: 72225 - DNA, 369 bp, Mesorhizobium sp
  CDS (1)..(369): transl_table=11
atgattcagatgcaaacaaacctcgacgtggcggataattccggcgcccgtcgtgtcatgtgcatcaaggtgctcggcggctcgaagcggaaatatgcctccgtcggcgacatcatcgtcgtttcggtcaaggaggccatcccgcgcggccgcgtgaagaagggcgacgtgatgaaggcggtggtggttcgcaccgccaaggatattcgccgtcccgatgggagcgtcatccgctttgacagcaatgccgccgttctggtggacaataagagagaaccgatcggcacccgtatcttcggaccggttccgcgcgagctgcgcgccaagaaccacatgaagattatctcgttggcgccggaagttctctaa

SEQ ID NO: 72226 - protein, 122 aa, Mesorhizobium sp
MIQMQTNLDVADNSGARRVMCIKVLGGSKRKYASVGDIIVVSVKEAIPRGRVKKGDVMKAVVVRTAKDIRRPDGSVIRFDSNAAVLVDNKREPIGTRIFGPVPRELRAKNHMKIISLAPEVL

SEQ ID NO: 72227 - DNA, 369 bp, Methylococcus capsulatus
  CDS (1)..(369): transl_table=11
atgatacagatgcagacctgtctggatgtcgcagacaacagcggcgcgcggcaagtcatgtgtattaaggtccttggtgggtccaagcggcggtacgcgaatgtcggcgacatcatcaaggtcagtgtaaaggacgctatcccccggggacgcgtcaaaaagggtgaagtctataacgccgtggtcgttcgcactcgcaagggtgtgcggcgtgccgacggctctctgatccggtttgacaacaacgcggcagtcattctgaacaaccagcatcagcccattggcacccgcattttcgggccggttacgcgtgaacttcgttcggagaagttcatgaagattatctctctggcaccggaagtgctttga

SEQ ID NO: 72228 - protein, 122 aa, Methylococcus capsulatus
MIQMQTCLDVADNSGARQVMCIKVLGGSKRRYANVGDIIKVSVKDAIPRGRVKKGEVYNAVVVRTRKGVRRADGSLIRFDNNAAVILNNQHQPIGTRIFGPVTRELRSEKFMKIISLAPEVL

SEQ ID NO: 72229 - DNA, 369 bp, Methylobacillus flagellatus
  CDS (1)..(369): transl_table=11
atgattcaaatgcagtctcggctggatgttgccgataacactggtgcgcgttctgttatgtgcatcaaggtgttgggtggttctaagcgtcgttatgcaggcattggtgacatcatcaaggtcagtgttaaggatgctgccccacgtggccgcgtcaaaaaaggcgaggtttatagcgcggttgttgtgcgtactgcgaagggtgttcgtcgtccagacggttccctcgttaagttcgacagcaatgcggcggtattgttgaacaataagctggaaccgattggcacccgtatttttgggccggtgacacgtgagctacgtggcgagcgtttcatgaaaatcgtttctctggcacccgaagttttataa

SEQ ID NO: 72230 - protein, 122 aa, Methylobacillus flagellatus
MIQMQSRLDVADNTGARSVMCIKVLGGSKRRYAGIGDIIKVSVKDAAPRGRVKKGEVYSAVVVRTAKGVRRPDGSLVKFDSNAAVLLNNKLEPIGTRIFGPVTRELRGERFMKIVSLAPEVL

SEQ ID NO: 72231 - DNA, 402 bp, Methanopyrus kandleri
  CDS (1)..(402): transl_table=11
gtgaaggcgattaaggcgaagtccccgcatgccgcgctaccggtgggcgcgcggctggtctgcgcggacaacacgggtgccagggagctccagatcatcgccgtgaagggctacaagggcgtccgtaggaggctaccgaacgccgggatcggcgacatggtagtgtgctcggtgaaggaaggtactccggacatgcgaaaggaagtcgtgaacgccgtcatcgtgcgtcagcgcaaggagtaccgccgtcccgacggaacgcgcgtgaagttcgaggacaacgcggccgtcatcgtgacgccggacggagccccgcgaggctccgagatcaggggccccgtggccaaggaggccgcggagcgctggcccaggatcggtagcatcgcgagcatcatcgtctag

SEQ ID NO: 72232 - protein, 133 aa, Methanopyrus kandleri
MKAIKAKSPHAALPVGARLVCADNTGARELQIIAVKGYKGVRRRLPNAGIGDMVVCSVKEGTPDMRKEVVNAVIVRQRKEYRRPDGTRVKFEDNAAVIVTPDGAPRGSEIRGPVAKEAAERWPRIGSIASIIV

SEQ ID NO: 72233 - DNA, 369 bp, Micrococcus luteus
  CDS (1)..(369): transl_table=11
gtgatccagcaggagtcgcggctcaaggtcgccgacaacaccggtgcgaaggaaatcctgaccatccgtgtgctcggcggttccggacgccgctacgcaggcatcggcgacaccatcgtcgccaccgtgaaggacgccatccccggcggcaacgtcaagaaggcgcacgtcgtcaaggccgtggtggtccgcacccgcaagcagtcccgccgtcccgacggctcgtacatcaagttcgacgagaacgcggcggtcatcctgaagaccgacggcgagccccgtggcacgcgcatcttcggccccgtgggtcgcgagctgcgtgacaagaagttcatgaagatcgtgtcgctcgccccggaggtgatctga

SEQ ID NO: 72234 - protein, 122 aa, Micrococcus luteus
MIQQESRLKVADNTGAKEILTIRVLGGSGRRYAGIGDTIVATVKDAIPGGNVKKAHVVKAVVVRTRKQSRRPDGSYIKFDENAAVILKTDGEPRGTRIFGPVGRELRDKKFMKIVSLAPEVI

SEQ ID NO: 72235 - DNA, 369 bp, Moorella thermoacetica
  CDS (1)..(369): transl_table=11
atgatccagcagcagacgcttctcaaagtcggcgacaataccggcgcgcgcaagctaatgtgcatccgcgttctaggcgggtccaaacggcgttatgccagcgtcggcgatgtgataatcgcatcggttaaagaagcaacgccagggggcgtggttaaaaagggcgatgtcgtccgggcggtagtagtacggaccaaaaaggctgtcaaacgaccggacggttcctatattagattcaacgagaacgcggcggtaattatcaacgagcagaacaatcccaggggcacgcggatttttggacctgtggcccgggaactgcgggaaaaagattttatgaagatcatttccctggccccggaagttctctaa

SEQ ID NO: 72236 - protein, 122 aa, Moorella thermoacetica
MIQQQTLLKVGDNTGARKLMCIRVLGGSKRRYASVGDVIIASVKEATPGGVVKKGDVVRAVVVRTKKAVKRPDGSYIRFNENAAVIINEQNNPRGTRIFGPVARELREKDFMKIISLAPEVL

SEQ ID NO: 72237 - DNA, 369 bp, Mycobacterium leprae
  CDS (1)..(369): transl_table=11
gtgattcagcaggaatcgcgactgaaggtggccgacaacaccggcgccaaggagatcttgtgcatacgagtgctcggcggctcgtcccgacgctacgccagcattggtgatgtcatcgtcggcaccgtcaaggacgctattcctggcggcaacgtcaaacgcggagatgtcgtcaaagccgtcgtggtacgcaccgccaaagagtgcaggcgtcccgacggcagctacatcaagttcgatgaaaacgctgctgtgatcatcaagcctgacaacgatccgcgcggaactcgcatcttcgggccggtcggccgcgaacttcgtgagaaacgattcatgaagatcatctcgctggctccggaggtgctgtag

SEQ ID NO: 72238 - protein, 122 aa, Mycobacterium leprae
MIQQESRLKVADNTGAKEILCIRVLGGSSRRYASIGDVIVGTVKDAIPGGNVKRGDVVKAVVVRTAKECRRPDGSYIKFDENAAVIIKPDNDPRGTRIFGPVGRELREKRFMKIISLAPEVL

SEQ ID NO: 72239 - DNA, 369 bp, Myxococcus xanthus
  CDS (1)..(369): transl_table=11
atgattcagatgacgagcgtgctcgacgtggcggacaactcgggcgcgaagaaggtgttctgcatcaaggtgctcggtggttcgaagcgcaagtatgcgtccatcggcgacgtgattgtcgtctcggtgcgcgaggcgcttcccaactcgaaggtgaagaagggtgacgtggccaaggccgtcatcgttcgcaccaagcgcgaggtgggtcgtccggacggcagctacatcaagttcgacggcaactccgcggtcctcatcaacaaggacatggagcccattggtacgcgtatcttcgggccggtggcccgtgagctccgcgcccgcaagttcatgaagatcatctcgctggcgcccgaagtcctctga

SEQ ID NO: 72240 - protein, 122 aa, Myxococcus xanthus
MIQMTSVLDVADNSGAKKVFCIKVLGGSKRKYASIGDVIVVSVREALPNSKVKKGDVAKAVIVRTKREVGRPDGSYIKFDGNSAVLINKDMEPIGTRIFGPVARELRARKFMKIISLAPEVL

SEQ ID NO: 72241 - DNA, 369 bp, Neisseria gonorrhoeae
  CDS (1)..(369): transl_table=11
atgattcaaatgcagaccatcttagatgtggctgataactctggtgcgcgtcgcgtaatgtgtatcaaggtattgggcggatctaagcgtcgctacgcttctgttggcgatattattaaagtggcagttaaagatgcggttccgcgtggccgtgtcaaaaaaggcgatgtatataatgcggtagttgttcgtactgctaagggtgtgcgtcgtcctgatggtgcgttaattaaattcgataacaatgccgccgtgttgctgaataataaacttgaacctttgggtactcgtatctttggtccggtaacccgtgaattgcgtactgagcgatttatgaaaatcgtttcattggcacctgaagtattataa

SEQ ID NO: 72242 - protein, 122 aa, Neisseria gonorrhoeae
MIQMQTILDVADNSGARRVMCIKVLGGSKRRYASVGDIIKVAVKDAVPRGRVKKGDVYNAVVVRTAKGVRRPDGALIKFDNNAAVLLNNKLEPLGTRIFGPVTRELRTERFMKIVSLAPEVL

SEQ ID NO: 72243 - DNA, 369 bp, Nocardia farcinica
  CDS (1)..(369): transl_table=11
gtgattcagcaggagtcgcgactgcgcgtcgccgacaacacgggtgcgaaggaaatcctctgcatccgcgttctcggtggttcgtcgcgtcgctatgccggtatcggcgacgtcatcgtcgccactgtgaaggacgccatccccggcggcaacgtcaagcggggtgacgtggtgaaggccgtcgtcgtgcgcaccgtcaaggagcgccgccgtccggacggttcctacatcaagttcgacgagaacgccgccgtgctcatcaaggcggacaacgatccgcgcggcacccgcatcttcggcccggtcggccgcgagctgcgcgacaagaagttcatgaagatcgtctcgctggccccggaggtgctctga

SEQ ID NO: 72244 - protein, 122 aa, Nocardia farcinica
MIQQESRLRVADNTGAKEILCIRVLGGSSRRYAGIGDVIVATVKDAIPGGNVKRGDVVKAVVVRTVKERRRPDGSYIKFDENAAVLIKADNDPRGTRIFGPVGRELRDKKFMKIVSLAPEVL

SEQ ID NO: 72245 - DNA, 372 bp, Photorhabdus luminescens subsp
  CDS (1)..(372): transl_table=11
atgatccaagaacagactatgctgaacgtggccgacaactccggtgcacgtcgcgtaatgtgtatcaaggttctgggtggctcgcaccgtcgctatgcacacgtcggcgacatcataaaagtcaccatcaaggaagcaattcctcgtggtaaagtgaaaaaaggtgatgtcctgaaagcggtagtggtgcgcaccaggaagggtgttcgtcgccctgacggttctgtcattcgcttcgatggcaatgcttgcgtgttgttaaacaacacaagtgagcaagttatcggtacgcgtatttttgggccggtaactcgtgaacttcgtaatgaaaagttcatgaaaattatctccctggcaccagaagtactctaa

SEQ ID NO: 72246 - protein, 123 aa, Photorhabdus luminescens subsp
MIQEQTMLNVADNSGARRVMCIKVLGGSHRRYAHVGDIIKVTIKEAIPRGKVKKGDVLKAVVVRTRKGVRRPDGSVIRFDGNACVLLNNTSEQVIGTRIFGPVTRELRNEKFMKIISLAPEVL

SEQ ID NO: 72247 - DNA, 372 bp, Photobacterium profundum
  CDS (1)..(372): transl_table=11
atgatccaaatgcaaagtacgcttgacgcagccgataactccggcgctcgtcgcgtaatgtgtattaaggttctgggtggttctcaccgccgttacgcacacatcggtgatatcatcaagattactgtgaaagaagcaattcctcgcggtaaagttaagaaaggtgatgttctgaaggcggtggttgtacgcacccgtaaaggcgttcgtcgccaagacggctctgtcattcgcttcgaccgtaatgcttgcgtattattgaacgatactacagagcaaccgatcggtactcgtatttttggcccagtgacacgtgaacttcgtaatacgaaattcatgaaaatcgtatcactagcgcctgaagtactgtaa

SEQ ID NO: 72248 - protein, 123 aa, Photobacterium profundum
MIQMQSTLDAADNSGARRVMCIKVLGGSHRRYAHIGDIIKITVKEAIPRGKVKKGDVLKAVVVRTRKGVRRQDGSVIRFDRNACVLLNDTTEQPIGTRIFGPVTRELRNTKFMKIVSLAPEVL

SEQ ID NO: 72249 - DNA, 369 bp, Propionibacterium acnes
  CDS (1)..(369): transl_table=11
atgatccagcaggagacgcgactcaaggtcgccgacaacactggtgcgaaggagcttctttgcatccgtgttctcggtggatcgaagcgtcgctacgcctacctcggtgacaccatcgtgtgcaccgtcaaggatgccatccccggcggaaacgtgaagaagggcgaggtcgtcaaggccgtcgtcgttcggaccgtcaagtcgcaccgccgtccggacgggtcctacatcaagttcgacgagaacgctgccgtcctccttaagggagacggggagcctcgtggtacccgtatcttcggccccatcgcccgcgagctgcgtgagaagaagttcatgcgcatcgtctcgcttgccccggaggtgatctga

SEQ ID NO: 72250 - protein, 122 aa, Propionibacterium acnes
MIQQETRLKVADNTGAKELLCIRVLGGSKRRYAYLGDTIVCTVKDAIPGGNVKKGEVVKAVVVRTVKSHRRPDGSYIKFDENAAVLLKGDGEPRGTRIFGPIARELREKKFMRIVSLAPEVI

SEQ ID NO: 72251 - DNA, 369 bp, Pseudomonas aeruginosa
  CDS (1)..(369): transl_table=11
atgattcagactcaatccatgctcgatgtcgctgacaacagcggcgcgcgtcgtgtgatgtgcatcaaggtgctcggcggttcccaccgccgttacgccggcatcggcgacatcatcaaggtcaccgtcaaggaagcgattccgcgcggcaaagtgaagaagggccaggtcatgactgccgtggtcgttcgcaccaagcacggcgtgcgtcgtaccgacggttccatcatccgcttcgacggcaacgccgccgtcctgctgaacaacaagcaggagccgatcggcacccgtatctttgggccagtgactcgtgaactccgtaccgagaagttcatgaagatcgtctcgctcgcccccgaagtgctgtaa

SEQ ID NO: 72252 - protein, 122 aa, Pseudomonas aeruginosa
MIQTQSMLDVADNSGARRVMCIKVLGGSHRRYAGIGDIIKVTVKEAIPRGKVKKGQVMTAVVVRTKHGVRRTDGSIIRFDGNAAVLLNNKQEPIGTRIFGPVTRELRTEKFMKIVSLAPEVL

SEQ ID NO: 72253 - DNA, 369 bp, Pseudomonas fluorescens
  CDS (1)..(369): transl_table=11
atgattcagactcaatccatgctcgatgtggccgataacagcggcgctcgccgcgttatgtgcatcaaggtgctgggtggctcccatcgtcgttacgctggtatcggtgacatcatcaaagttaccgtcaaggaagcaattcctcgcggtaaggtgaaaaaaggccaagtgatgactgctgttgtagtccgcactcgccatggtgttcgtcgtgcagacggctccatcatccgctttgatggcaacgctgctgttctgttgaacaacaagcaagagccgatcggcacccgtatctttgggccagtgacccgtgaacttcgcaacgagaagttcatgaagatcgtctcgctcgccccagaagtgctgtaa

SEQ ID NO: 72254 - protein, 122 aa, Pseudomonas fluorescens
MIQTQSMLDVADNSGARRVMCIKVLGGSHRRYAGIGDIIKVTVKEAIPRGKVKKGQVMTAVVVRTRHGVRRADGSIIRFDGNAAVLLNNKQEPIGTRIFGPVTRELRNEKFMKIVSLAPEVL

SEQ ID NO: 72255 - DNA, 426 bp, Pyrococcus abyssi
  CDS (1)..(426): transl_table=11
atggcgaagaagggtgctggtgcaacaagggggataacacctgtaaggccaactagggctatcccagttggtgcctacttaacggtagcggataacagcggagctaaggttatccaagtcatcggcgtcgttgagtaccatggaactaggagaaggcttgcatctgctggcgttggagatatggtggttgctaccgttaagaagggaaggccagatatgaggcatcaggtagttagggcagtaataatcagacaaagaaaggagtacaggagattagacggtatgagaataaagttcgaagacaacgccgcagttatagtaactccagaaggagttccaaggggaaccgagataagagggcctgtggctagagaagcagctgagagatgggttagaattgggagtatagcgagtataatcgtgtga

SEQ ID NO: 72256 - protein, 141 aa, Pyrococcus abyssi
MAKKGAGATRGITPVRPTRAIPVGAYLTVADNSGAKVIQVIGVVEYHGTRRRLASAGVGDMVVATVKKGRPDMRHQVVRAVIIRQRKEYRRLDGMRIKFEDNAAVIVTPEGVPRGTEIRGPVAREAAERWVRIGSIASIIV

SEQ ID NO: 72257 - DNA, 369 bp, Ralstonia eutropha
  CDS (1)..(369): transl_table=11
atgattcagacagaaagccggctcgaagtggccgataacactggtgcgcgcgaagtgctgtgcatcaaggtcctgggtgggtccaagcgccgctacgcgagcgttggcgacatcatcaaagtgaccgtcaaggacgcagctccgcgcggccgtgtgaagaagggcgatatctacaacgccgtcgtcgtgcgcaccgccaagggcgtgcgtcgcgcggatggctcgctcgtcaagttcgacggtaacgccgctgtcctgctgaacaacaagctcgagccgatcggcacccgtatcttcgggccggtgactcgtgaactccgtaccgagcgcttcatgaagatcgtgtcgctcgctccggaagtgctgtaa

SEQ ID NO: 72258 - protein, 122 aa, Ralstonia eutropha
MIQTESRLEVADNTGAREVLCIKVLGGSKRRYASVGDIIKVTVKDAAPRGRVKKGDIYNAVVVRTAKGVRRADGSLVKFDGNAAVLLNNKLEPIGTRIFGPVTRELRTERFMKIVSLAPEVL

SEQ ID NO: 72259 - DNA, 369 bp, Ralstonia solanacearum
  CDS (1)..(369): transl_table=11
atgattcagacagaaagccggctcgaagtggccgataacacgggtgcgcgtgaagtgatgtgcatcaaggtgctgggcggttcgaagcgtcgctacgctagcgttggcgacatcatcaaggtcagcgtcaaggacgctgccccgcgtggccgcgtcaagaagggcgacatctacaacgccgtggtggtccgtaccgccaagggcgtgcgccgtcctgacggctcgctcatcaagttcgacggcaatgccgccgtgctgctgaacaccaagcttgagccgatcggcacccgtatcttcgggccggtcactcgcgaactccgtaccgagcgcttcatgaagatcgtgtcgctcgcgccggaagtgctgtaa

SEQ ID NO: 72260 - protein, 122 aa, Ralstonia solanacearum
MIQTESRLEVADNTGAREVMCIKVLGGSKRRYASVGDIIKVSVKDAAPRGRVKKGDIYNAVVVRTAKGVRRPDGSLIKFDGNAAVLLNTKLEPIGTRIFGPVTRELRTERFMKIVSLAPEVL

SEQ ID NO: 72261 - DNA, 369 bp, Rhizobium leguminosarum bv
  CDS (1)..(369): transl_table=11
atgattcagatgcaaacaaacctcgacgtcgcggataattccggcgcacgtcgtgtcatgtgcatcaaggtgctgggcggctcgaagcgtaagtatgcctcgatcggcgacgtcatcgtcgtttcgatcaaggaagcgatcccgcgcggccgtgtgaagaagggtgacgtgatgaaggcggttgtcgttcgcaccgccaaggacatccgtcgtgcagatggctccgtcatccgcttcgacaccaacgcagcagtcctcatcgacaacaagaaagagccgatcggcacccgtatcttcggaccggttccgcgcgaacttcgcgccaagaaccacatgaagatcatctcgctggctcccgaagtactgtaa

SEQ ID NO: 72262 - protein, 122 aa, Rhizobium leguminosarum bv
MIQMQTNLDVADNSGARRVMCIKVLGGSKRKYASIGDVIVVSIKEAIPRGRVKKGDVMKAVVVRTAKDIRRADGSVIRFDTNAAVLIDNKKEPIGTRIFGPVPRELRAKNHMKIISLAPEVL

SEQ ID NO: 72263 - DNA, 369 bp, Rhizobium loti
  CDS (1)..(369): transl_table=11
atgattcagatgcaaacaaacctcgacgtggcggataattccggcgcgcgtcgtgtcatgtgcatcaaggtgctgggcggctcgaagcggaaatacgcttccgtgggcgacatcatcgtggtgtccatcaaggaagccattccgcgcggccgcgttaagaagggcgatgtgatgaaggcggtcgtggttcgcacggccaaggacatccgccgcccggacggcagcgtgatccgtttcgacaagaacgcggccgttctcgtcgacaacaagaaagagccgatcggcacgcgtatcttcggaccggttccgcgcgaactccgcgccaagaaccacatgaagatcatctcgctcgcgcctgaagtgctgtaa

SEQ ID NO: 72264 - protein, 122 aa, Rhizobium loti
MIQMQTNLDVADNSGARRVMCIKVLGGSKRKYASVGDIIVVSIKEAIPRGRVKKGDVMKAVVVRTAKDIRRPDGSVIRFDKNAAVLVDNKKEPIGTRIFGPVPRELRAKNHMKIISLAPEVL

SEQ ID NO: 72265 - DNA, 369 bp, Rhizobium meliloti
  CDS (1)..(369): transl_table=11
atgattcagatgcaaacaaacctcgacgtggcggataattccggcgcacgtcgtgtcatgtgcatcaaggtgctgggcggctccaagcgcaaatacgcgtcgatcggcgacatcatcgtcgtttcgatcaaggaagccattccgcgcggccgcgtgaagaagggtgatgtcatgaaggctgttgtcgttcgcaccgcgaaagacatccgccgtgcggatggcagcgtcatccgtttcgacaccaacgcagccgttctcatcgacaacaagaaagagccgatcggcacccgtatcttcggaccggttccgcgcgaactccgcgccaagaaccacatgaagatcatctcgctggctccggaagtactctaa

SEQ ID NO: 72266 - protein, 122 aa, Rhizobium meliloti
MIQMQTNLDVADNSGARRVMCIKVLGGSKRKYASIGDIIVVSIKEAIPRGRVKKGDVMKAVVVRTAKDIRRADGSVIRFDTNAAVLIDNKKEPIGTRIFGPVPRELRAKNHMKIISLAPEVL

SEQ ID NO: 72267 - DNA, 369 bp, Rhodopseudomonas palustris
  CDS (1)..(369): transl_table=11
atgattcagatgcagaccaacctcgacgtggccgacaattcaggcgcacgccgtgtgatgtgcatcaaggtgattgggggatccaagcgccggtatgcgaccgtgggtgacgtcattgtggtctcgatcaaggaagcgattccgcggggcaaggtgaagaagggtgacgtgatgaaggccgtggtggtccgtgtccgcaaggacatccgccgcgctgacggctccgtcattcgcttcgaccgcaacgccgccgttctgatcaacaatcagtccgagccgattggcacccgtatctttgggccggtgccgcgcgagctgcgtgcgaagaaccacatgaagatcatttcgctggcgccggaggtgctgtga

SEQ ID NO: 72268 - protein, 122 aa, Rhodopseudomonas palustris
MIQMQTNLDVADNSGARRVMCIKVIGGSKRRYATVGDVIVVSIKEAIPRGKVKKGDVMKAVVVRVRKDIRRADGSVIRFDRNAAVLINNQSEPIGTRIFGPVPRELRAKNHMKIISLAPEVL

SEQ ID NO: 72269 - DNA, 369 bp, Rhodospirillum rubrum
  CDS (1)..(369): transl_table=11
atgattcagatgcaaactaggctcgatgtcgccgataattcgggcgcccgtcaggtgcagtgcatcaaggtccttggtggctcgaagcgaatgatcgccggggttggcgatatcatcgtcgtttcggtcaaggaagcgattccccgtggccgcgtgaagaagggtgacgtccatcgcgccgtcatcgttcgcaccgccaaggaaatccgtcgccccgatggcacgtcgatccggtttgaccgcaatgccgccgttctgctcaacaagcagaacgagccgatcggaacccgcatcttcggaccggtggtgcgcgaactgcgcgcccgcaagttcatgaagatcatctcgctggctccggaggtgctgtga

SEQ ID NO: 72270 - protein, 122 aa, Rhodospirillum rubrum
MIQMQTRLDVADNSGARQVQCIKVLGGSKRMIAGVGDIIVVSVKEAIPRGRVKKGDVHRAVIVRTAKEIRRPDGTSIRFDRNAAVLLNKQNEPIGTRIFGPVVRELRARKFMKIISLAPEVL

SEQ ID NO: 72271 - DNA, 369 bp, Rhodobacter sphaeroides
  CDS (1)..(369): transl_table=11
atgatccagatgcagaccaatctggatgtcgctgacaactccggcgctcgccgagttcagtgcatcaaggttctgggtggttcccaccgtcgctatgccagcgtcggcgacatcatcgtggtgtcggtgaaggaagccatcccgcgcggtcgcgtgaagaagggcgatgtccgcaaggccgtcgtcgtgcgcaccgccaaggaagtccgtcgtgaagacggcaccaccatccgcttcgaccgcaacgccgccgtcatcctgaacaaccagggcgaaccggtcggcacccgtatcttcgggccggtcgtgcgcgagctgcgtgccaagaacttcatgaaaatcatctcgctggcgccggaggtgctctga

SEQ ID NO: 72272 - protein, 122 aa, Rhodobacter sphaeroides
MIQMQTNLDVADNSGARRVQCIKVLGGSHRRYASVGDIIVVSVKEAIPRGRVKKGDVRKAVVVRTAKEVRREDGTTIRFDRNAAVILNNQGEPVGTRIFGPVVRELRAKNFMKIISLAPEVL

SEQ ID NO: 72273 - DNA, 369 bp, Rhodococcus sp
  CDS (1)..(369): transl_table=11
gtgattcagcaggagtcgcggctgcgcgtcgccgacaacacgggtgccaaggagattctctgcatccgcgttctcggtggttcgtctcgccgctacgccgggatcggtgacatcatcgtcgccaccgtcaaggacgccatcccgggtggaaacatcaagaagggcgaggtcgtcaaggccgtcatcgtccgtaccaccaaggagcgtcgccgtccggacgggtcgtacatcaagttcgacgagaacgccgccgtcctcatcaagccggacaacgatccccgtggcacccgcatcttcggccccgtcggccgtgagctgcgtgagaagaagttcatgaagatcgtctcgctcgccccggaggtgctgtga

SEQ ID NO: 72274 - protein, 122 aa, Rhodococcus sp
MIQQESRLRVADNTGAKEILCIRVLGGSSRRYAGIGDIIVATVKDAIPGGNIKKGEVVKAVIVRTTKERRRPDGSYIKFDENAAVLIKPDNDPRGTRIFGPVGRELREKKFMKIVSLAPEVL

SEQ ID NO: 72275 - DNA, 369 bp, Saccharophagus degradans
  CDS (1)..(369): transl_table=11
atgattcaaacgcaaagctatttggatgtggccgacaacagtggtgcccgtcgagtgatgtgtatcaaggtattgggcggttcacaccgtcgttatgccggtgtaggcgacatcattaaagttaccgtaaaagaagcaattcctcgcggtaaagttaaaaaaggccaggtaatgaatgctgttgttgtacgcaccaaaaaaggtgtacgccgcgcagatgggtctttgattcgcttcgacgataatgctgcagtgatactgaatgctcagaatgcacctgtagggacccgtatttttgggccagtaactcgtgagcttcgcggtgagaagttcatgaagattatctctttggcaccagaagtactttaa

SEQ ID NO: 72276 - protein, 122 aa, Saccharophagus degradans
MIQTQSYLDVADNSGARRVMCIKVLGGSHRRYAGVGDIIKVTVKEAIPRGKVKKGQVMNAVVVRTKKGVRRADGSLIRFDDNAAVILNAQNAPVGTRIFGPVTRELRGEKFMKIISLAPEVL

SEQ ID NO: 72277 - DNA, 369 bp, Shewanella oneidensis
  CDS (1)..(369): transl_table=11
atgatccaaatgcaatcgactcttgacgtcgcatgtaacagcggcgcacgcagagttcagtgtattaaggtcttgggtggctctcatcgtcgttatgccggtatcggcgacatcatcaaagtttctgttaaagaagcaattcctcgcgctaaagcgaagaaaggtgatgtgtataacgcggtggtagtccgtactaagaaaggcgtacgtcgtccagacggttctgtcattcgcttcgatcggaatgcagctgttcttttgaacaacaacctgcagccgattggtactcgtatctttggaccagtgacacgtgaattgcgtaatgagcaatttatgaaaattgtctcgctggcaccagaagtactgtaa

SEQ ID NO: 72278 - protein, 122 aa, Shewanella oneidensis
MIQMQSTLDVACNSGARRVQCIKVLGGSHRRYAGIGDIIKVSVKEAIPRAKAKKGDVYNAVVVRTKKGVRRPDGSVIRFDRNAAVLLNNNLQPIGTRIFGPVTRELRNEQFMKIVSLAPEVL

SEQ ID NO: 72279 - DNA, 369 bp, Silicibacter pomeroyi
  CDS (1)..(369): transl_table=11
atgatccagatgcaaaccaatctggatgtcgctgacaactccggcgctcgccgagttcagtgcatcaaggttctgggtggttccaagcgtaaatacgcctccgtcggcgacatcattgtcgtctcggtgaaggaagccatcccgcgcggccgcgtgaagaaaggtgacgtccgcaaggccgtcgtcgtgcgcaccgccaaagaagtccgtcgcgaagacggcaccgcgatccgcttcgatcgcaacgccgccgtcatcctgaacaacaacaacgagccggtcggtacccgtatctttggcccggttgttcgtgaactgcgcgcgaagaacttcatgaagatcatctcgctggctccggaggtgctgtaa

SEQ ID NO: 72280 - protein, 122 aa, Silicibacter pomeroyi
MIQMQTNLDVADNSGARRVQCIKVLGGSKRKYASVGDIIVVSVKEAIPRGRVKKGDVRKAVVVRTAKEVRREDGTAIRFDRNAAVILNNNNEPVGTRIFGPVVRELRAKNFMKIISLAPEVL

SEQ ID NO: 72281 - DNA, 369 bp, Staphylococcus epidermidis
  CDS (1)..(369): transl_table=11
atgatccaacaagaaacacgcttaaaagtagcagacaattctggtgctcgtgaagttcttacaattaaagtattaggtggatctggtcgcaaaacagcgaacattggtgatattattgtatgtactgttaaaaatgcaacaccaggtggcgttgtcaaaaaaggtgacgttgtaaaagctgttgtagttcgtacaaaatcaggtgttcgtcgtgaagacggttcatatattaaatttgacgaaaatgcatgtgttatcatccgtgatgacaaaggcccacgtggtactcgtatctttggtcctgttgctcgtgaattacgtgaaggaaacttcatgaaaattgtatcactagctccagaagtactataa

SEQ ID NO: 72282 - protein, 122 aa, Staphylococcus epidermidis
MIQQETRLKVADNSGAREVLTIKVLGGSGRKTANIGDIIVCTVKNATPGGVVKKGDVVKAVVVRTKSGVRREDGSYIKFDENACVIIRDDKGPRGTRIFGPVARELREGNFMKIVSLAPEVL

SEQ ID NO: 72283 - DNA, 369 bp, Streptomyces avermitilis
  CDS (1)..(369): transl_table=11
gtgatccagcaggagtcgcgactgcgtgtcgccgacaacactggtgcgaaggagatcctttgcatccgtgtgctcggtggctccggtcgccgctacgcgggcatcggtgacgtcatcgtcgccaccgtcaaggacgcgatcccgggcggcaacgtgaagaagggtgacgtcgtcaaggctgtcatcgttcgcaccgtcaaggagcgccgccgtccggacggctcgtacatccgcttcgacgagaacgccgccgtcattctgaagaacgacggcgaccctcgcggcacccgtatcttcggccctgtcggccgtgagctgcgcgagaagaagttcatgaagatcatctcgctcgcgccggaggtgctgtaa

SEQ ID NO: 72284 - protein, 122 aa, Streptomyces avermitilis
MIQQESRLRVADNTGAKEILCIRVLGGSGRRYAGIGDVIVATVKDAIPGGNVKKGDVVKAVIVRTVKERRRPDGSYIRFDENAAVILKNDGDPRGTRIFGPVGRELREKKFMKIISLAPEVL

SEQ ID NO: 72285 - DNA, 369 bp, Streptomyces coelicolor
  CDS (1)..(369): transl_table=11
gtgatccagcaggagtcgcggctgcgtgtcgccgacaacacgggtgcgaaggaaatcctgaccatccgtgtgctcggtggctcgggccgccgctacgcgggtatcggtgacgtcatcgtcgccaccgtcaaggacgcgatccccggtggcaacgtgaagaagggtgacgtcgtcaaggcggtcatcgttcgcaccgtcaaggagcgccgccgtcccgacggctcgtacatccgcttcgacgagaacgccgccgtcattctgaagaacgacggcgaccctcgcggcacccgtatcttcggcccggtgggccgtgagctgcgcgagaagaagttcatgaagatcatctccctcgcgccggaggtgctgtga

SEQ ID NO: 72286 - protein, 122 aa, Streptomyces coelicolor
MIQQESRLRVADNTGAKEILTIRVLGGSGRRYAGIGDVIVATVKDAIPGGNVKKGDVVKAVIVRTVKERRRPDGSYIRFDENAAVILKNDGDPRGTRIFGPVGRELREKKFMKIISLAPEVL

SEQ ID NO: 72287 - DNA, 417 bp, Sulfolobus acidocaldarius
  CDS (1)..(417): transl_table=11
atgccagaaaaaatgaatgttttagggagcaggaaaggatttacccctgctctacagcataatagtagtgtagttgttgctgataatagtggagctaaagaggctgtaattattggtatttatgggtataggggtgttctcaggagagttccttttgctaatatagcagatttagtgatggtatcagtaaggaagggttctcctgatgttagaaaacagaagtttaaggctgtaatagtaagacaaagaatgccctttaggaggccagatggtacgtggatatcatttgaggataatgcagttgtgattataaatcctgacggtactcctaaaggaactgaggttagaggtcctatagctagggaagctgctgagagatggcctaaaatagccagtgtagcaactatggtgatatga

SEQ ID NO: 72288 - protein, 138 aa, Sulfolobus acidocaldarius
MPEKMNVLGSRKGFTPALQHNSSVVVADNSGAKEAVIIGIYGYRGVLRRVPFANIADLVMVSVRKGSPDVRKQKFKAVIVRQRMPFRRPDGTWISFEDNAVVIINPDGTPKGTEVRGPIAREAAERWPKIASVATMVI

SEQ ID NO: 72289 - DNA, 369 bp, Synechococcus elongatus
  CDS (1)..(369): transl_table=11
atgattcaacaggaaacctatctcaatgttgctgataatagcggcgccaaaaaactcctttgcattcgtgtgctcgggggcagtaaccgtcgctacggtagtgtgggcgatgtgatcattgccaccgtcaaagatgccacccccaatatggcagtgaagaaatccgatgtagttcgcgctgtcattgtgcgcacccgcaaaagcattcgccgcgaaagtggcatgagcatccgctttgatgacaacgccgctgtcttgatcaaccaagatggcaaccctcgcggtacccgtgtctttggccctgtagctcgcgaactgcgggataaaaacttcacaaaaattgtttcattggcaccggaggtactctaa

SEQ ID NO: 72290 - protein, 122 aa, Synechococcus elongatus
MIQQETYLNVADNSGAKKLLCIRVLGGSNRRYGSVGDVIIATVKDATPNMAVKKSDVVRAVIVRTRKSIRRESGMSIRFDDNAAVLINQDGNPRGTRVFGPVARELRDKNFTKIVSLAPEVL

SEQ ID NO: 72291 - DNA, 369 bp, Thermus aquaticus
  CDS (1)..(369): transl_table=11
atgatccagccccagacctacctggaggtggccgacaacaccggggcccgcaagatcatgtgcatccgggtcctcaagggctccaacgccaagtacgccacggtgggggacgtgatcgtggccagcgtcaaggaggccatcccccgcggcgccgtgaaggagggcgacgtggtcaaggcggtggtggtgcgcaccaagaaagaggtcaagcggcccgacggctccgccatccgctttgacgacaacgccgccgtcatcatcaacaaccagttggagccccgcggcacccgcgtcttcggcccggtggcccgcgagctccgggagaagggcttcatgaagatcgtctccctggctccggaggtgctctga

SEQ ID NO: 72292 - protein, 122 aa, Thermus aquaticus
MIQPQTYLEVADNTGARKIMCIRVLKGSNAKYATVGDVIVASVKEAIPRGAVKEGDVVKAVVVRTKKEVKRPDGSAIRFDDNAAVIINNQLEPRGTRVFGPVARELREKGFMKIVSLAPEVL

SEQ ID NO: 72293 - DNA, 369 bp, Thermotoga maritima
  CDS (1)..(369): transl_table=11
atgatacagcaagagacctacctcaatgtggcagacaactccggcgctaaaaagctcagagttataagagttatcggtgggttccataaaaagtacggaacggttggagatatagttgtgtgttcagtcagagaagccatcccaaattctgatgtgaaaaaaggagacgtagtcagagcggttattgtgagaacaaagaaggaaatcagaaggaacgatggtacttacatcagattcgatgacaacgcggctgttctcattgacaagttcaacgctcccagaggtaccagaatctttggaccggtcgcgagggaactcagagaaaaggggttcatgaaaatagtatccctcgcaccagaagtttggtga

SEQ ID NO: 72294 - protein, 122 aa, Thermotoga maritima
MIQQETYLNVADNSGAKKLRVIRVIGGFHKKYGTVGDIVVCSVREAIPNSDVKKGDVVRAVIVRTKKEIRRNDGTYIRFDDNAAVLIDKFNAPRGTRIFGPVARELREKGFMKIVSLAPEVW

SEQ ID NO: 72295 - DNA, 369 bp, Thiobacillus denitrificans
  CDS (1)..(369): transl_table=11
atgattcagatgcagtccgtattggacgtggctgacaacacgggtgcgcgctcggttatgtgcatcaaagtgttgggcggcagtcatcgccgctacgccggcgtgggcgacattatcaaggtcagcatcaaggacgctgcgccgcgtggacgtgtcaagaagggcgacgtgtacaacgccgtcgtcgtgcgtaccgccaagggtgtgcgtcgcccggatggttcgctcgtccgcttcgacggcaacgcagcggtgctgctcaacaacaaactcgagccgatcggtacccgcatcttcgggccggtcacccgtgaattgcgtaccgagaagttcatgaagatcgtctcgctggcgcccgaggttctgtga

SEQ ID NO: 72296 - protein, 122 aa, Thiobacillus denitrificans
MIQMQSVLDVADNTGARSVMCIKVLGGSHRRYAGVGDIIKVSIKDAAPRGRVKKGDVYNAVVVRTAKGVRRPDGSLVRFDGNAAVLLNNKLEPIGTRIFGPVTRELRTEKFMKIVSLAPEVL

SEQ ID NO: 72297 - DNA, 369 bp, Treponema denticola
  CDS (1)..(369): transl_table=11
atgatacaggttgaaacaagattaaacgttgccgataactcaggcgctaaactcgtcgaatgtattaaggttatcggcggatcaaaacgtagatacgcaggtattggggatataatcgttgtggcagtaaaagaagccttgcccacatcggttattaaaaagggtacggtagaaaaagccgttattgtgcgtgtttcaaaagaataccgccgtcccgacggaacttatattcgctttgacgataacgcttgcgtaattgttgacgataataaaaaccctaagggaaaacgtattttcggccctgtagccagagagcttcgtgatcatgatttcatgaagatagtttctcttgctccggaagttctttaa

SEQ ID NO: 72298 - protein, 122 aa, Treponema denticola
MIQVETRLNVADNSGAKLVECIKVIGGSKRRYAGIGDIIVVAVKEALPTSVIKKGTVEKAVIVRVSKEYRRPDGTYIRFDDNACVIVDDNKNPKGKRIFGPVARELRDHDFMKIVSLAPEVL

SEQ ID NO: 72299 - DNA, 372 bp, Vibrio parahaemolyticus
  CDS (1)..(372): transl_table=11
atgatccaaatgcaaagtatgctggacgcagctgataactcaggcgcacgcagcgtaatgtgtattaaggttctgggtggctcacaccgccgttatgcacatatcggtgacgtcatcaaagttactgttaaggaagcaattcctcgcggtaaagttaaaaaaggtgacgttatgaaggcggttgtagtgcgcacccgtaaaggcgtacgtcgtcctgacggttctgtcattcgcttcgaccgaaatgcttgcgtactgttgaataacactactgagcaaccaatcggtacacgtatctttggtcctgtgacacgcgaacttcgtggcgataagttcatgaagatcgtttcactggctccagaagttctgtaa

SEQ ID NO: 72300 - protein, 123 aa, Vibrio parahaemolyticus
MIQMQSMLDAADNSGARSVMCIKVLGGSHRRYAHIGDVIKVTVKEAIPRGKVKKGDVMKAVVVRTRKGVRRPDGSVIRFDRNACVLLNNTTEQPIGTRIFGPVTRELRGDKFMKIVSLAPEVL

SEQ ID NO: 72301 - DNA, 372 bp, Vibrio vulnificus
  CDS (1)..(372): transl_table=11
atgatccaaatgcaaagtatgctggacgcagctgataactcaggcgctcgcagcgtaatgtgtattaaggttctgggtggctctcaccgccgttatgcacatatcggtgacgttatcaaagttactgttaaggaagcaattcctcgcggtaaagttaaaaaaggtgacgttctgaaggcggtggtagttcgcacccgtaaaggcgtacgtcgtccagacggttctgtcattcgcttcgaccgaaatgcttgtgtgttgctaaacaacaacactgagcaaccaatcggtacacgtatctttggtcctgtgactcgcgaacttcgtggcgataagttcatgaagatcgtttcactggctccagaagttctgtaa

SEQ ID NO: 72302 - protein, 123 aa, Vibrio vulnificus
MIQMQSMLDAADNSGARSVMCIKVLGGSHRRYAHIGDVIKVTVKEAIPRGKVKKGDVLKAVVVRTRKGVRRPDGSVIRFDRNACVLLNNNTEQPIGTRIFGPVTRELRGDKFMKIVSLAPEVL

SEQ ID NO: 72303 - DNA, 369 bp, Xanthomonas axonopodis pv
  CDS (1)..(369): transl_table=11
atgatccagatgcagagctacctcgatgtcgccgacaattcgggtgccaaggaagtgatgtgcatcaaggtgctgggcggctccaaacgccgttacgcacatattggtgacatcatcaaggtgaccgtcaaggacgccattccgcgtggcaaggtcaagaagggcgaagtctacgacgccgtcgtggtgcgtacccgtaagggtgtgcgccgtcccgacggttcgctgatccgcttcgatggcaacgccgctgtgctgttgaacaataagcaggagccgatcgggacccgcatcttcgggccggtgacgcgcgagctgcgttccgagaagttcatgaagatcgtctcgctcgctcccgaagtgctgtga

SEQ ID NO: 72304 - protein, 122 aa, Xanthomonas axonopodis pv
MIQMQSYLDVADNSGAKEVMCIKVLGGSKRRYAHIGDIIKVTVKDAIPRGKVKKGEVYDAVVVRTRKGVRRPDGSLIRFDGNAAVLLNNKQEPIGTRIFGPVTRELRSEKFMKIVSLAPEVL

SEQ ID NO: 72305 - DNA, 369 bp, Xylella fastidiosa
  CDS (1)..(369): transl_table=11
atgattcaaatgcagagttaccttggtgttgctgataattctggcgctaaggaagtaatgtgtattaaggttttaggtggttcgaaacgtcgttatgcaagcattggtgacattattaaagtcactgtgaaagaagctatccctcgcgggaaagttaaaaaaggtgaggtttatgatgctgttgtcgttcgtactcgcagtggagttcgtcgtcccgatggttcactaatccgttttgacggtaacgcggcggtgttattgaataataagcaagaacccattggtacccgtgtttttgggccggtaactcgagagcttcgctctgagaaattgatgaagatagtctctcttgcccccgaagtactgtga

SEQ ID NO: 72306 - protein, 122 aa, Xylella fastidiosa
MIQMQSYLGVADNSGAKEVMCIKVLGGSKRRYASIGDIIKVTVKEAIPRGKVKKGEVYDAVVVRTRSGVRRPDGSLIRFDGNAAVLLNNKQEPIGTRVFGPVTRELRSEKLMKIVSLAPEVL

SEQ ID NO: 72307 - DNA, 369 bp, Xylella fastidiosa
  CDS (1)..(369): transl_table=11
atgattcaaatgcagagttaccttggtgttgctgataattctggcgctaaggaagtaatgtgtattaaggttttaggcggttcgaaacgtcgttatgcaagtattggtgacgttattaaagtcactgtgaaagaagctatccctcgcgggaaagttaaaaaaggtgaggtttatgatgctgttgtcgttcgtactcgcagtggagtgcgtcgtcccgatggttcactaatccgttttgacggtaacgcggcggtgttattgaataataagcaagaacccattggtacgcgtgtctttgggccggtaactcgagagcttcgttctgagaaattgatgaagatagtctctctcgcccctgaagtactgtga

SEQ ID NO: 72308 - protein, 122 aa, Xylella fastidiosa
MIQMQSYLGVADNSGAKEVMCIKVLGGSKRRYASIGDVIKVTVKEAIPRGKVKKGEVYDAVVVRTRSGVRRPDGSLIRFDGNAAVLLNNKQEPIGTRVFGPVTRELRSEKLMKIVSLAPEVL

SEQ ID NO: 72309 - DNA, 423 bp, Aedes aegypti
  CDS (1)..(423)
atgtcgaagagaggacgtggaggttccgcgggaggcaaattccgcatctcgcttggtctgccagttggcgccgtcatcaattgcgctgataacaccggtgctaagaacctgtacgtaatcgccgtccatggaatccgtggtcgtctgaatcgattgcccgccgccggagttggtgacatgttcgtcgccaccgtcaagaagggtaaaccggaactccgtaagaaggtcatgccagcggtcgtcatccggcagcgaaaacccttccgcaggcgggatggcgttttcctctattttgaggacaatgcgggcgtcatagtaaacaacaagggcgaaatgaagggttcggctatcactggccctgttgcgaaggaatgtgctgacctgtggccccgtatcgcgtccaatgctggatcgatagcttaa

SEQ ID NO: 72310 - protein, 140 aa, Aedes aegypti
MSKRGRGGSAGGKFRISLGLPVGAVINCADNTGAKNLYVIAVHGIRGRLNRLPAAGVGDMFVATVKKGKPELRKKVMPAVVIRQRKPFRRRDGVFLYFEDNAGVIVNNKGEMKGSAITGPVAKECADLWPRIASNAGSIA

SEQ ID NO: 72311 - DNA, 423 bp, Arabidopsis thaliana
  CDS (1)..(423)
atgtcgaagcgaggacgtggaggaacgtctggtaacaaattcaggatgtcacttggtctgcccgttgcagccacagtgaactgtgcagacaacactggtgctaagaacctttacatcatctctgttaaaggaatcaaaggtcgtctcaatcggttaccttctgcttgtgttggtgacatggttatggccactgtcaagaaaggtaaaccagacctcaggaaaaaggttcttcctgctgtgattgttaggcaacgtaagccatggcgccgaaaggacggtgttttcatgtactttgaagataatgctggagtgattgtgaaccctaagggagaaatgaaaggttctgcaattactggacctattgggaaagagtgtgcggatctctggccaaggattgctagtgctgctaacgccattgtctga

SEQ ID NO: 72312 - protein, 140 aa, Arabidopsis thaliana [sequence omitted]

SEQ ID NO: 72313 - DNA, 441 bp, Encephalitozoon cuniculi
  CDS (1)..(441)
atggcagccgagaagaagacggaggtcctggagaagaagatctcgatcaagcctcgatataagatgacaagaggcatccaggtggagaccctgatgaagtgtgcagataacagcggagcaaagatactcaggtgcattggggtgaagagatacaggggaaggctcaacaggcttccagctgcagcaccgggagacatctgcgttgtgtccgtcaagaagggaaagccagagcttcggaagaaggtgcactatgccattctcataaggcagaagaagatctggagacgcaccgacggatcccacatcatgtttgaggacaatgctgctgttctcatcaacaacaagggggagctgagaggggcgcagatagccgggcccgtgcccagggaagttgcagacatgtggcccaagatatcgtcccaggcgtcatccatcaattga

SEQ ID NO: 72314 - protein, 146 aa, Encephalitozoon cuniculi
MAAEKKTEVLEKKISIKPRYKMTRGIQVETLMKCADNSGAKILRCIGVKRYRGRLNRLPAAAPGDICVVSVKKGKPELRKKVHYAILIRQKKIWRRTDGSHIMFEDNAAVLINNKGELRGAQIAGPVPREVADMWPKISSQASSIN

SEQ ID NO: 72315 - DNA, 420 bp, Schizosaccharomyces pombe
  CDS (1)..(420)
atgtctcgtggacgcggtgcagcttccggtactaagtacaggatgaccttgggtcttcctgttcaagccatcatgaattgtgctgacaactctggtgctaagaacctttatatcgtgtctgtcttcggcactggtgcacgtcttaatcgtctaccagctgcaagctgtggtgatatggtccttgctactgtgaagaagggtaaacccgacttgcgtaagaagatcatgcctgctattgttgttcgccagcgtaaggcttggcgccgcaaggatggtgtctatctttactttgaggacaatgccggtgttattgtcaaccctaagggtgaaatgaagggttctgcaatcactggtcccgttgctaaggagtgtgctgacctttggcctcgtattgcctctaatgccggtactgtagtttaa

SEQ ID NO: 72316 - protein, 139 aa, Schizosaccharomyces pombe
MSRGRGAASGTKYRMTLGLPVQAIMNCADNSGAKNLYIVSVFGTGARLNRLPAASCGDMVLATVKKGKPDLRKKIMPAIVVRQRKAWRRKDGVYLYFEDNAGVIVNPKGEMKGSAITGPVAKECADLWPRIASNAGTVV

SEQ ID NO: 72317 - DNA, 423 bp, Nicotiana tabacum
  CDS (1)..(423)
atgtcgaagagaggtcgcggaggttccgcggggaacaaattcaggatgtcactgggtttgccggtggcagctaccattaactgcgccgataacactggtgcaaagaacctttacatcatttcggtgaaaggtatcaaaggaaggcttaacaggttgccatcagcttgtgtaggtgacatggtcatggctacagtgaagaagggtaagcccgatctcaggaaaaaggttatgccagctgtcgttgttcgtcagcgcaagccctggcgccgaaaggatggtgttttcatgtacttcgaagataatgctggtgtaattgtgaatgccaaaggcgaaatgaaaggatctgcaattacagggccaatcgggaaagagtgtgccgatctgtggcctaggattgcaagtgctgctaatgctatcgtgtag

SEQ ID NO: 72318 - protein, 140 aa, Nicotiana tabacum
MSKRGRGGSAGNKFRMSLGLPVAATINCADNTGAKNLYIISVKGIKGRLNRLPSACVGDMVMATVKKGKPDLRKKVMPAVVVRQRKPWRRKDGVFMYFEDNAGVIVNAKGEMKGSAITGPIGKECADLWPRIASAANAIV

SEQ ID NO: 72319 - DNA, 414 bp, Saccharomyces cerevisiae
  CDS (1)..(414)
atgtccggtaacggtgctcaaggtactaagtttagaatctcattaggtctaccagtcggtgccatcatgaactgtgctgacaacagtggtgccagaaacttgtacattatcgccgtcaaaggctctggttccagattgaacagattgccagccgcctctctaggtgatatggttatggccaccgttaagaagggtaagccagaattgagaaagaaggttatgccagctattgttgtccgtcaagctaagtcttggagaagaagagacggtgtctttttgtacttcgaagacaatgctggtgtcatcgctaatcctaagggtgaaatgaagggttccgccatcactggtccagtcggtaaggaatgtgccgatttatggccaagagttgcatctaactccggtgttgttgtgtaa

SEQ ID NO: 72320 - protein, 137 aa, Saccharomyces cerevisiae
MSGNGAQGTKFRISLGLPVGAIMNCADNSGARNLYIIAVKGSGSRLNRLPAASLGDMVMATVKKGKPELRKKVMPAIVVRQAKSWRRRDGVFLYFEDNAGVIANPKGEMKGSAITGPVGKECADLWPRVASNSGVVV

SEQ ID NO: 72321 - DNA, 417 bp, Saccharomyces cerevisiae
  CDS (1)..(417)
atgatatttctaaaatctgtcatcaaggtaatcgacaattcaggtgcacaattagcagaatgtattaaagtaataaggaaagggtcccccaagagtcctgcaatggttggagacagaatagtctgtgttatacagaaagcaaagcccttgactcaaaacattacggggacagccaacaccaaccgtgtcaaaaaaggtgatatttgtcacgcaattgtcgtaaggtctaaacagcgtaacatgtgcagaaaggatggctccaccgttgcattcggagatactgcttgcgttttgattaataaaaataccggtgaacctctggggacaagaattatggctaatgatggttgtgtagatagaacactgaaagacaagggatacaataagatatgctctttggcaagtagggtcatataa

SEQ ID NO: 72322 - protein, 138 aa, Saccharomyces cerevisiae
MIFLKSVIKVIDNSGAQLAECIKVIRKGSPKSPAMVGDRIVCVIQKAKPLTQNITGTANTNRVKKGDICHAIVVRSKQRNMCRKDGSTVAFGDTACVLINKNTGEPLGTRIMANDGCVDRTLKDKGYNKICSLASRVI

SEQ ID NO: 72323 - DNA, 504 bp, Oryza sativa
  CDS (1)..(504)
atgaagggaaaatcctaccgaggcaattgtatttgttttggtagatatgctcttcaagcacttgaacccacttggattacggcgaggcagatagaagcaggacgaagagcaatgacacgatatgcacgtcgtggtggaaaaatctggacccttttaaatgtagcagataacagtggagctcgaaaattgatgtgtattcgagtcataggagctgctagtaatcagcgatatgctcgtattggtgatgttattgttgctgtaatcaaagatgcagtgccccaaatgcctctagaaagatccgaagtaattcgagctgtaattgtacgtacatgtaaagagttcaaatgcgaagacggtataataatacgctatgacgacaatgcagcggttatcattgatcaaaaaggaaatccaaaaggaactcgcgtttttggcgcgatcgccgaggaattgagagaattgaattttactaaaatagtttcattagctcctgaagtattataa

SEQ ID NO: 72324 - protein, 167 aa, Oryza sativa
MKGKSYRGNCICFGRYALQALEPTWITARQIEAGRRAMTRYARRGGKIWTLLNVADNSGARKLMCIRVIGAASNQRYARIGDVIVAVIKDAVPQMPLERSEVIRAVIVRTCKEFKCEDGIIIRYDDNAAVIIDQKGNPKGTRVFGAIAEELRELNFTKIVSLAPEVL

SEQ ID NO: 72325 - DNA, 423 bp, Oryza sativa
  CDS (1)..(423)
atgtcgaagcgagggaggggtgggtcggcggggaacaagttccggatgtcgctgggtctgccggtggcggcgacggtgaactgcgccgacaacaccggcgccaagaacctctacatcatctccgtgaagggcatcaaggggaggctcaaccggctgccgtcggcctgcgtcggcgacatggtcatggccaccgtcaagaaggggaagcccgacctccggaagaaggtcatgcccgccgtcatcgtccgccagcgcaagccgtggcgccgcaaggacggcgtctacatgtacttcgaagacaatgctggggtgattgtgaatcccaagggtgagatgaaaggttctgctatcactggacccattggtaaggagtgcgccgacctctggccaaggattgctagcgcagcaaatgccattgtctag

SEQ ID NO: 72326 - protein, 140 aa, Oryza sativa
MSKRGRGGSAGNKFRMSLGLPVAATVNCADNTGAKNLYIISVKGIKGRLNRLPSACVGDMVMATVKKGKPDLRKKVMPAVIVRQRKPWRRKDGVYMYFEDNAGVIVNPKGEMKGSAITGPIGKECADLWPRIASAANAIV

SEQ ID NO: 72327 - DNA, 552 bp, Oryza sativa
  CDS (1)..(552)
atggtgggttgtgagcacatggctttgaaggtcgtgctcatgacaattaaggaccgactgagaagcggcgagaagtccgtggaggtcgctggggagtccattgcctctggttgtagagagggtgattatgatccaggaatggtgcgctgtggtgagttgtattgtgtagagggtattgtcacagcctctattcggacccttttaaatgtagcagataacagtggagctcgaaaattgatgtgtattcgagtcataggagctgctagtaatcagcgatatgctcgtattggtgatgttattgttgctgtaatcaaagacgcagtgccccaaatgcctctagaaagatccgaagtaattcgagctgtaattgtacgtacatgtaaagagttcaaatgcgaagacggtataataatacgctatgacgacaatgcagcggttatcattgatcaaaaaggaaatccaaaaggaactcgcgtttttggcgcgatcgccgaggaattgagagaattgaattttactacaatagtttcattagctcctgaagtattataa

SEQ ID NO: 72328 - protein, 183 aa, Oryza sativa
MVGCEHMALKVVLMTIKDRLRSGEKSVEVAGESIASGCREGDYDPGMVRCGELYCVEGIVTASIRTLLNVADNSGARKLMCIRVIGAASNQRYARIGDVIVAVIKDAVPQMPLERSEVIRAVIVRTCKEFKCEDGIIIRYDDNAAVIIDQKGNPKGTRVFGAIAEELRELNFTTIVSLAPEVL

SEQ ID NO: 72329 - DNA, 513 bp, Oryza sativa
  CDS (1)..(513)
atggcagcattcctgaggtcaaaatgttcgtcagttggacgtaccttgatgggaggccttgggaacaatctatttggagccgttaactcatctgttgaaacggtgtcaagaccatctcattgtgatcctatctttcagcaaatcagaacattcatccagatgagaacaaacctaaaggtggtagacaactctggtgccaagcgcgttatgtgcatccagtccttgagggggaagaaaggagcgaggctcggggacactataattggatctgtcaaggaagcacagcctcgtggtaaggtgaagaaaggagatgtggtctatggagtggttgtccgtgctgctatgaagcgaggacgcaacgatggcagcgagatccagtttgatgacaacgcgattgtccttgtgaacaacaaaggcgagctgattggcactcgtgtatttggtcctgttccccacgaactcaggaaaaagaagcatctcaagatcctagcgttagcggaacacatagtttga

SEQ ID NO: 72330 - protein, 170 aa, Oryza sativa
MAAFLRSKCSSVGRTLMGGLGNNLFGAVNSSVETVSRPSHCDPIFQQIRTFIQMRTNLKVVDNSGAKRVMCIQSLRGKKGARLGDTIIGSVKEAQPRGKVKKGDVVYGVVVRAAMKRGRNDGSEIQFDDNAIVLVNNKGELIGTRVFGPVPHELRKKKHLKILALAEHIV

SEQ ID NO: 72331 - DNA, 531 bp, Brassica napus
  CDS (1)..(531)
atggcggcagctttagcttcaagaatctcccgtggaggacgttcattgcttggaggtcttaagaatgatttctccggatcgattatttcttccaatggaatgatgaacgaaagtatcctcctctctcagcagcaacagagaaggacatttattcaaatggggacggttctcaaagtcgtggacaactctggagccaagaaagtgatgtgtattcaagctctcaagggtaagaaaggagctaggcttggcgacacgatcgttgcttcggtgaaagaagccatgccaaacggtaaagtgaagaaaggagcggttgtgtacggtgtggttgtgagagctgcgatgcagagaggtcgtgtcgatggaagcgaggttaggttcgatgataacgcggttgttcttgttgataataaagacaagaagactaaaactgatcggcagccgattgggactcgagtgtttggtcctgttcctcacgagcttcgcaagaagaaacatctcaagatccttgctttggctcaacacattgcttga

SEQ ID NO: 72332 - protein, 176 aa, Brassica napus
MAAALASRISRGGRSLLGGLKNDFSGSIISSNGMMNESILLSQQQQRRTFIQMGTVLKVVDNSGAKKVMCIQALKGKKGARLGDTIVASVKEAMPNGKVKKGAVVYGVVVRAAMQRGRVDGSEVRFDDNAVVLVDNKDKKTKTDRQPIGTRVFGPVPHELRKKKHLKILALAQHIA

SEQ ID NO: 72333 - DNA, 513 bp, Hordeum vulgare
  CDS (1)..(513)
atggcggcgttcctgaggtcaaagtgctcctcagttgggcgtacgttgatgggaggcgtcggaaacaatctgtatgggggtatcaattcgtctgctcaaactgtgacaagaccatctcactgtgatgctatcagccagcaaatcaggacattcatccagatgagaaccaacctcaaggtggtagacaactctggagccaagcgggtcatgtgcatacagtccttgagggggaagaaaggagcgaggctcggggacatgataattggttctgtgaaggaagcgcaacctcgtggcaaggtcaagaaaggtgatgtggtctacggtgtggttgtccgtgctgctatgaagaaagggcgcagtgacggcagcgaggtccagttcgatgacaacgctatagtcatcgtgaacaacaaaggcgagctgattggcactcgcgtctttggtcctgttccccacgagctcaggaagaagaagcatctcaagatcttggcgttggctgagcacatagtttaa

SEQ ID NO: 72334 - protein, 170 aa, Hordeum vulgare
MAAFLRSKCSSVGRTLMGGVGNNLYGGINSSAQTVTRPSHCDAISQQIRTFIQMRTNLKVVDNSGAKRVMCIQSLRGKKGARLGDMIIGSVKEAQPRGKVKKGDVVYGVVVRAAMKKGRSDGSEVQFDDNAIVIVNNKGELIGTRVFGPVPHELRKKKHLKILALAEHIV

SEQ ID NO: 72335 - DNA, 582 bp, Brassica napus
  CDS (1)..(582)
atggcggcagctttagcttccagactcaccaaaggacgttcactgcttggaggtcttaccaatgctttctccggtttgatgagttcatccagtggaagcatcctttctcagcagcaacaaaggacgttcattcaaatgggaactactctcaaagtcgtggataactctggtggaaaagaggtgacgtgcattcaatctctaaggggaaagaaaggagcaagacttggcgatatcgtcatcggttcagtgaaagaggctgcacataaagtcgatgtaaagaaagggaaagatgccatacaaaagggtaaagtgaagaaagggaacgtcgtgtacggtgtggttgtgcgtgctgctatgcagaaagggcgtgttgatggaagccaagtgaggtttgacgacaacgccatcgttattttgggcattaaggagaaaaagaaagatgaaaatggtaaggaaaaaaagaaaaggtatgcgggtggttttcaccaaccgcttggtacccgagtgtttggtcctgtcccgcacgagatgcgcctcaagaagcagctcaagatcctttctctggctcagcatcttgtttga

SEQ ID NO: 72336 - protein, 193 aa, Brassica napus
MAAALASRLTKGRSLLGGLTNAFSGLMSSSSGSILSQQQQRTFIQMGTTLKVVDNSGGKEVTCIQSLRGKKGARLGDIVIGSVKEAAHKVDVKKGKDAIQKGKVKKGNVVYGVVVRAAMQKGRVDGSQVRFDDNAIVILGIKEKKKDENGKEKKKRYAGGFHQPLGTRVFGPVPHEMRLKKQLKILSLAQHLV

SEQ ID NO: 72337 - DNA, 501 bp, Glycine max
  CDS (1)..(501)
atggctgcagcctttgcttccagatgctctcgtgtgggccgttctctgtctggtggattaagcaacagttcccctggtttatttacctcatcacatggcatgacatgcaacaatttgttttctcagcaacaacgtaccttcatacagatgaggactgttctcaaggttgtcgataactcaggggctaaaaaggtgatgtgcatacaggcattgaaagggaagaaaggggcaagattaggtgacacaataatagcatctgtgaaggaagcacatcctaatggaaaagtgaagaaaggaaaggttgtatatggggtagtggtgcgtgcagcaatgcaaaaggggcgttgtgatggcagtgaagtcaagtttgatgataatgctgtggtgcttgttgacaagcaaggacaacctattggaaccagagtttttggaccagtgcctcatgagctaaggcaaaagaagcatgtcaagattcttaccttggcagggcacattgcataa

SEQ ID NO: 72338 - protein, 166 aa, Glycine max
MAAAFASRCSRVGRSLSGGLSNSSPGLFTSSHGMTCNNLFSQQQRTFIQMRTVLKVVDNSGAKKVMCIQALKGKKGARLGDTIIASVKEAHPNGKVKKGKVVYGVVVRAAMQKGRCDGSEVKFDDNAVVLVDKQGQPIGTRVFGPVPHELRQKKHVKILTLAGHIA

SEQ ID NO: 72339 - DNA, 513 bp, Zea mays
  CDS (1)..(513)
atggcggcgttcctgaggtcaaaatgttcaccagttggacgtactttgatgggaagccttggaaatagtttgtttggggctgccaactcttctgttggggcaataacaaggccttctcattgcgatgctatcagtcagcaaatcagaacattcatccagatgaggactaacctgaaggtggtcgataactccggggccaagcgggtgatgtgcatccagtccctgagggggaagaaaggagcaaggctcggggacatgatcatcggatccgtaaaggaggcccagcctcgtggcaaggtcaagaaaggagacgtagtctacggcgtggtcgtccgtgccgccatgaagaaaggacgcagcgacggcagcgaggtccagttcgacgacaacgcggtggtcctcgtgaacaagaagggcgagctgatcggcacccgcgtctttggccccgtcccccacgagctgaggaagaagaagcacctcaagatcctggccctggctgaacacattgtttga

SEQ ID NO: 72340 - protein, 170 aa, Zea mays
MAAFLRSKCSPVGRTLMGSLGNSLFGAANSSVGAITRPSHCDAISQQIRTFIQMRTNLKVVDNSGAKRVMCIQSLRGKKGARLGDMIIGSVKEAQPRGKVKKGDVVYGVVVRAAMKKGRSDGSEVQFDDNAVVLVNKKGELIGTRVFGPVPHELRKKKHLKILALAEHIV

SEQ ID NO: 72341 - DNA, 21 bp, Artificial sequence
  primer
atgattcagactcaatccatg

SEQ ID NO: 72342 - DNA, 21 bp, Artificial sequence
  primer
ttacagcacttcaggggcaag

SEQ ID NO: 72343 - protein, 194 aa, Artificial sequence
  consensus sequence
  Variant (4)..(7): Xaa in position 4 to 7 is any amino acid
  Variant (8)..(23): Xaa in position 8 to 23 is any or no amino acid
  Variant (25)..(25): Xaa in position 25 is any amino acid
  Variant (30)..(30): Xaa in position 30 is any amino acid
  Variant (33)..(36): Xaa in position 33 to 36 is any amino acid
  Variant (39)..(41): Xaa in position 39 to 41 is any amino acid
  Variant (43)..(45): Xaa in position 43 to 45 is any amino acid
  Variant (46)..(59): Xaa in position 46 to 59 is any or no amino acid
  Variant (61)..(61): Xaa in position 61 is any amino acid
  Variant (62)..(62): Xaa in position 62 is any or no amino acid
  Variant (65)..(65): Xaa in position 65 is any amino acid
  Variant (67)..(70): Xaa in position 67 to 70 is any amino acid
  Variant (72)..(72): Xaa in position 72 is any amino acid
  Variant (74)..(74): Xaa in position 74 is any amino acid
  Variant (75)..(88): Xaa in position 75 to 88 is any or no amino acid
  Variant (90)..(95): Xaa in position 90 to 95 is any amino acid
  Variant (96)..(98): Xaa in position 96 to 98 is any or no amino acid
  Variant (100)..(101): Xaa in position 100 to 101 is any amino acid
  Variant (104)..(104): Xaa in position 104 is any amino acid
  Variant (107)..(112): Xaa in position 107 to 112 is any amino acid
  Variant (113)..(113): Xaa in position 113 is any or no amino acid
  Variant (115)..(116): Xaa in position 115 to 116 is any amino acid
  Variant (118)..(121): Xaa in position 118 to 121 is any amino acid
  Variant (124)..(124): Xaa in position 124 is any amino acid
  Variant (127)..(127): Xaa in position 127 is any amino acid
  Variant (129)..(135): Xaa in position 129 to 135 is any amino acid
  Variant (136)..(154): Xaa in position 136 to 154 is any or no amino acid
  Variant (156)..(156): Xaa in position 156 is any amino acid
  Variant (160)..(160): Xaa in position 160 is any amino acid
  Variant (163)..(164): Xaa in position 163 to 164 is any amino acid
  Variant (165)..(169): Xaa in position 165 to 169 is any or no amino acid
  Variant (173)..(173): Xaa in position 173 is any amino acid
  Variant (174)..(185): Xaa in position 174 to 185 is any or no amino acid
  Variant (188)..(188): Xaa in position 188 is any amino acid
  Variant (192)..(193): Xaa in position 192 to 193 is any amino acid
MIQXXXXXXXXXXXXXXXXXXXXLXVADNXGAXXXXCIXXXGXXXXXXXXXXXXXXXXXAXXGDXIXXXXKXAXXXXXXXXXXXXXXXPXXXXXXXXXVXXAVXVRXXXXXXXRXXGXXXXFDXNAXVXXXXXXXXXXXXXXXXXXXXXXXXXXPXGTRXFGXXXXXXXELRXXXXXXXXXXXXXKIXSLAXXV

SEQ ID NO: 72344 - protein, 20 aa, Artificial sequence
  protein pattern
  Variant (2)..(4): Xaa in position 2 to 4 is any amino acid
  Variant (5)..(5): Xaa in position 5 is Ser or Thr
  Variant (6)..(6): Xaa in position 6 is any amino acid
  Variant (7)..(7): Xaa in position 7 is Ile or Leu
  Variant (8)..(10): Xaa in position 8 to 10 is any amino acid
  Variant (13)..(13): Xaa in position 13 is Ser or Thr
  Variant (16)..(17): Xaa in position 16 to 17 is any amino acid
  Variant (18)..(18): Xaa in position 18 is Ala, Ile, Leu, Pro or Val
  Variant (19)..(19): Xaa in position 19 is any amino acid
  Variant (20)..(20): Xaa in position 20 is Ala, Cys, Thr or Val
IXXXXXXXXXDNXGAXXXXX

SEQ ID NO: 72345 - protein, 8 aa, Artificial sequence
  protein pattern
  Variant (4)..(4): Xaa in position 4 is Ile or Val
  Variant (7)..(7): Xaa in position 7 is Ala, Pro, Ser or Thr
  Variant (8)..(8): Xaa in position 8 is Ile or Val
GTRXFGXX

SEQ ID NO: 72346 - DNA, 1311 bp, Azotobacter vinelandii
  CDS (1)..(1311): transl_table=11
atgcgtatcagcattttcggactgggctatgtaggtgcagtatgcgccggctgtctttcgggacgtgggcacgaagtggtcggcgtggatatttccgccgccaagatcgacatgatcaatcagggcaaatcccccatcgtcgagccgggactgggagaactgctggccgagggcgtgaagaccggccgcctgcgcggcaccaccaacgtgaccgaagcggtcctcgccactgagctgtccatgctctgcgtcggcacgccgagcaagctgaacggcgacctggagctcgactacatcgaggaagtttgccgccagatgggttccgccctgcgcgacaagaccgaacgccacaccgtggtggtgcgcagcaccgtgctgccgggcaccgtgcacaacgtggtcattccgattctcgaggagttctccggcaagaaggccggcgtcgacttcggtgtggcggtcaaccccgagttcctgcgcgagagcaccgcgatcaaggactacaacttcccgccgatgaccgtgatcggtgagctggacaaggcctcgggcgacgccctggcgtccatctacgccgaactcgacgccccgatcgtccgcaaggacatcgccgtcgccgagatgatcaagtacacctgcaacgtctggcacgcgaccaaggtcaccttcgccaacgagatcggcaacatcgccaaggccgccggcgtcgatggccgcgaggtgatggaagtggtctgcatggacaacaagctcaacctgtcccagtactacatgcgccccggcttcgccttcggcggttcctgcctgcccaaggacgtcagcgccctcagctaccgtgcccacctgtgggacatcgaggcgccgctgatcagctcgctgatgcgcagcaacgccgcccaggtgcagaaagcctacgacatgatcgacaagcacggctcgcgcaaggtcgccctgctcggcctgagcttcaaggccggcaccgacgacctgcgcgaaagcccccagctcgagctggccgagatgctgatcggcaagggcttcaagctgagcatcttcgacagcaacgtcgagtacgcccgtgaccacggcgccaacggccactacatcaagaacgagatcccccacgtctccgccctgttgcagtccgatctggacaaggtcgtcgcggaagccgacgtcatcgttctcggcaacgccgatccgcgcttcgagaagctggccaaggacgtgccggccggcaagaaggtcatcgacctggtcggcttcatgcctcagcgcaccgccggtgccgcagaaggcatctgctggtaa

SEQ ID NO: 72347 - protein, 436 aa, Azotobacter vinelandii
MRISIFGLGYVGAVCAGCLSGRGHEVVGVDISAAKIDMINQGKSPIVEPGLGELLAEGVKTGRLRGTTNVTEAVLATELSMLCVGTPSKLNGDLELDYIEEVCRQMGSALRDKTERHTVVVRSTVLPGTVHNVVIPILEEFSGKKAGVDFGVAVNPEFLRESTAIKDYNFPPMTVIGELDKASGDALASIYAELDAPIVRKDIAVAEMIKYTCNVWHATKVTFANEIGNIAKAAGVDGREVMEVVCMDNKLNLSQYYMRPGFAFGGSCLPKDVSALSYRAHLWDIEAPLISSLMRSNAAQVQKAYDMIDKHGSRKVALLGLSFKAGTDDLRESPQLELAEMLIGKGFKLSIFDSNVEYARDHGANGHYIKNEIPHVSALLQSDLDKVVAEADVIVLGNADPRFEKLAKDVPAGKKVIDLVGFMPQRTAGAAEGICW

SEQ ID NO: 72348 - DNA, 1317 bp, Xanthobacter autotrophicus Py2
  CDS (1)..(1317): transl_table=11
atgcgtgtgaccatgatcggagcgggctatgtgggcttggtctccggcgcgtgctttgcggatttcggccatacggttacgtgcgtcgacacgcacgagggcaagattgcggcgctgaagcgcggtgaaatcccgatcttcgagcccggcctcgacgatctcgtggcctcgaacgtgaaagccgagaggctgttcttcaccaccagccttgccgaaggcgtcgccgatgcggaagccgtgttcatcgcggtgggcacgccgtcgcggcgcggcgacggccatgccgacctctcctacgtgcatcaggccgcccgcgacatcgccagcgcgatgacgggctatacggtgatcgtgaccaaatccaccgtgcccgtcggcaccggcgacgaggtggagcgcatcatccgcgagacccggccggacgctgaattctccgtcgtctccaaccccgagttcctgcgcgaaggcgccgccatcatcgatttcaagcggcccgaccgcatcgtggtgggcaccgacgaggagcgcgccaaggaggtcatgaccaacctctaccgcccgctgttcctcaaccagtcgccgctgctgttcacctcgcgccgcaccgccgaactgatcaagtatgcggccaacgccttcctcgccaccaagatcaccttcatcaacgagatctcggacctgtgcgagaaggtgggcggcaacgtccaggacgtggcccgcggcatcggcctcgacaaccgcatcggctccaagttcctgcacgcgggtcccggctacggcggatcctgcttcccgaaggacactctggccctcatcaagaccgcccaggactatgatgcgcccatccgcatcgtggagacggtcgtgtcggtgaacgaccagcgcaagcgcgccatggcccgcaaggtcatcaccgcgctcggcggatcggtgcgcggcaagaccgtcggcgtgctgggcctcaccttcaagccgaacaccgacgacatgcgcgacgcgccgtccatcgccatcatcaccgcccttcaggatgccggcgccaccatccgggcgcacgatcccgaaggcgttgagcaggccaagatggtgctgagcaacgtcgactatgtggatagcccctatcaggcggcggacggggccgacgccctggtcatcgtcaccgaatgggacgccttccgcgccctcgacctcaagcgcatccagtcgatgatggcccagccggtggtggtggacctgcgcaacatctaccgccccgaggagatggcgagcctcggcttcaggtacagcagcgtcgggcgcggcctcgccgacctctga

SEQ ID NO: 72349 - protein, 438 aa, Xanthobacter autotrophicus Py2
MRVTMIGAGYVGLVSGACFADFGHTVTCVDTHEGKIAALKRGEIPIFEPGLDDLVASNVKAERLFFTTSLAEGVADAEAVFIAVGTPSRRGDGHADLSYVHQAARDIASAMTGYTVIVTKSTVPVGTGDEVERIIRETRPDAEFSVVSNPEFLREGAAIIDFKRPDRIVVGTDEERAKEVMTNLYRPLFLNQSPLLFTSRRTAELIKYAANAFLATKITFINEISDLCEKVGGNVQDVARGIGLDNRIGSKFLHAGPGYGGSCFPKDTLALIKTAQDYDAPIRIVETVVSVNDQRKRAMARKVITALGGSVRGKTVGVLGLTFKPNTDDMRDAPSIAIITALQDAGATIRAHDPEGVEQAKMVLSNVDYVDSPYQAADGADALVIVTEWDAFRALDLKRIQSMMAQPVVVDLRNIYRPEEMASLGFRYSSVGRGLADL

SEQ ID NO: 72350 - DNA, 1446 bp, Oryza sativa (japonica cultivar-group)
  CDS (1)..(1446)
atggtgaagatctgctgcctcggagccggctatgtcggcggcccgaccatggcggtcatcgccctcaagtgccccgacgtcgaggtggtcgtcgtcgacatctccgccgcccgcatcgacgcctggaacagcgacgcgctcccgatctacgagccgggcctcgacgacgtcgtgcgccgctgccgcgggaggaacctcttcttcagcagcgacgtcgagaggcacgtcggcgaggccgacatcgtcttcgtctccgtgaacacccccaccaaggcccgcggcctcggcgccggcaaggccgccgacctcacctactgggagagcgcggcgcggatgatcgccgccgtggcgacgtccgacaaggtcgtcgtcgagaagtccaccgtgccggtcaagaccgcggaggccatcgagaagatcctcgaccacaacggccgcgacggcgtcggcttccagatcctctccaacccggagttcctcgccgagggcaccgccatccgcgacctgctcgcccccgaccgcgtcctcatcggcggccgcgagaccgccgcggggcgcgccgccgtccaggcgctcaaggacgtgtacacccgatgggtccccgaggagaggatcctcaccaccaacctctggtccgccgagctgtccaagctcgccgccaacgcgttcctggcccagaggatctcgtccgtcaacgccatgtccgcgctctgcgaggccaccggcgccgacgtcgccgaggtcgcctacgccgtgggcaaggactccaggatcggcgccaagtttctcaacgccagcgtgggattcggtggctcctgcttccagaaagacatcctcaacctggtgtacatctgcgagtgcaatggcctccccgaggtggccaactactggaagcaggttatcaagatcaacgactaccagaagagccggttcgtgaaccgcgtggtgtcgtccatgttcaacaccgtggccggcaagaagatcgccgtgctgggcttcgccttcaagaaggacaccggcgacaccagggagacgcccgccatcgacgtctgcaaggggctgatcggcgacaaggccaaggtgagcatctacgacccccaggtgacggaggaccaggtccagcgcgacctcgccatgagcaagttcgattgggatcacccggtccatctccagccgatgagccccacggccatcaagcaggtgtccgtcgcctgggacgcctacgaggcggccagggccgcccacggcgtctgcatcctcactgagtgggacgagttcaggagcctcgactacgcgaggatctacgggggaatgcagaagccggcgttcgtgttcgacgggcgcaacgtggttgacgctgagaagctgagggagattggattcatcgtctactccattggcaagcctctcgatgcctggctcaaggacatgcctgctgttgcctga

SEQ ID NO: 72351 - protein, 481 aa, Oryza sativa (japonica cultivar-group)
MVKICCLGAGYVGGPTMAVIALKCPDVEVVVVDISAARIDAWNSDALPIYEPGLDDVVRRCRGRNLFFSSDVERHVGEADIVFVSVNTPTKARGLGAGKAADLTYWESAARMIAAVATSDKVVVEKSTVPVKTAEAIEKILDHNGRDGVGFQILSNPEFLAEGTAIRDLLAPDRVLIGGRETAAGRAAVQALKDVYTRWVPEERILTTNLWSAELSKLAANAFLAQRISSVNAMSALCEATGADVAEVAYAVGKDSRIGAKFLNASVGFGGSCFQKDILNLVYICECNGLPEVANYWKQVIKINDYQKSRFVNRVVSSMFNTVAGKKIAVLGFAFKKDTGDTRETPAIDVCKGLIGDKAKVSIYDPQVTEDQVQRDLAMSKFDWDHPVHLQPMSPTAIKQVSVAWDAYEAARAAHGVCILTEWDEFRSLDYARIYGGMQKPAFVFDGRNVVDAEKLREIGFIVYSIGKPLDAWLKDMPAVA

SEQ ID NO: 72352 - DNA, 1332 bp, Bacillus anthracis
  CDS (1)..(1332): transl_table=11
atgaatatatctatagtaggaacaggctatgttggcttagtaacaggtgtgtgtctatcagaagtaggtcataacgtcacttgtattgatatagacgaagaaaaagtaaaaaaaatgaaattgggttattcaccaatatttgagccatgtttagaggaattaatgaagaataatattataaagggaagattacattttacaactaactatgttgatggagctgatggggcagaaattttttatattgcagttggtacaccacaaaaagaggacggttcagccgatttaagctttattaagcaagcagctattaatattgctcgtacaattaagaatgatgttattattgtggtaaaaagtaccgtgcctgtaggcaccaatatatatattaagaatcttattttgaaaaatttaaattatgatgtaaaagtagatattatttcaaatccagaatttttacgtgaaggttcagctgtaaatgatactttttatggggatcgtattgtaattggatcggaaaataaaacatcggcaaatgttatggaagaagtatataaaccctttggtacaccaatattcaaaacagatatccaaagtgccgaaatgataaagtatgcgtctaatacattcttagccacaaaaattagttttattaatgggatagcgaatttatgtgaaatggttggagcagatgtggaaaaggtagcacaagggatgggacaagataaaagaattggttctcaatttttaaatgcaggaataggatacggtggatcatgttttcctaaagatacacatgcgttggttaaagtttctgaaagtttacaacataaatttcatcttttagaatctgttattaagctgaataaaaatcaacaaacagttttgatagaaaaaataaaaaaacgttttggaagtattgttggcaaaaaaattgctttattaggactttcttttaaaccgaatacggatgatttaagagaagctccctctattcccatagcaagaaaattagtagaagaaggtgcacaggtgattgcatatgacccagttgcaattaagaacgcgcgagaagtgttgcctaaagaggtacattatgtatattctactatggaggctcttactgaagcagacattgccttagttctaacagagtgggatgaagtggtcgattctttactattaaaagcaagtcaattaatgaaagaacccgtaatttttgatggtcgaaattgtttcgaacttaatgaggctaaaaattacgatgttgaataccactcgattggaagaccctcagttttaagagaagtaaaaggagagataacagcttga

SEQ ID NO: 72353 - protein, 443 aa, Bacillus anthracis
MNISIVGTGYVGLVTGVCLSEVGHNVTCIDIDEEKVKKMKLGYSPIFEPCLEELMKNNIIKGRLHFTTNYVDGADGAEIFYIAVGTPQKEDGSADLSFIKQAAINIARTIKNDVIIVVKSTVPVGTNIYIKNLILKNLNYDVKVDIISNPEFLREGSAVNDTFYGDRIVIGSENKTSANVMEEVYKPFGTPIFKTDIQSAEMIKYASNTFLATKISFINGIANLCEMVGADVEKVAQGMGQDKRIGSQFLNAGIGYGGSCFPKDTHALVKVSESLQHKFHLLESVIKLNKNQQTVLIEKIKKRFGSIVGKKIALLGLSFKPNTDDLREAPSIPIARKLVEEGAQVIAYDPVAIKNAREVLPKEVHYVYSTMEALTEADIALVLTEWDEVVDSLLLKASQLMKEPVIFDGRNCFELNEAKNYDVEYHSIGRPSVLREVKGEITA

SEQ ID NO: 72354 - DNA, 1398 bp, Archaeoglobus fulgidus DSM 4304
  CDS (1)..(1398): transl_table=11
atgtggaatggcccactcttaaattaccgtgatactttcccccaatttagaacttttgtggcaattgtgaatgctataaataacataaggataaacttaatatccgttcttactagacaccatacaatgaagatagcaattttaggaagtggatacgttggaatagtcacgggtattggttttgctgaacttggtcacgagatagtattcatagatgttgatgaaagaaaagttgaaatgttaaattcatcaaaaccaccgatatacgaaagaggactcgaagaacttatgaagaaaaacaggggcaaatacagagccactacagactacagagaagctctggagagttcggagctaacattcatatgcgttggaacaccatcgaaaggtgatggctctattgatctaaaatacgctgaatcggcatcgaaagaaataggaaaggctttgaaaaacaacgataactttcatgtcgtcgtggttaaaagcacagtcgttccgggaacaacggaggataaaataaaaccgataatcgagaaagaatctggcaaaaaagcgttcgaagatttcggtttagctatgaatcccgaattcttgagggaaggcaacgctgtttatgatttcttcaatccggatagaatagtgattggtgttaaggatgaaaggactaaatcggtcttagaggaattgtataaacctttcgattgcccaaagcttatcacagagataaaaaccgctgaaatgataaaatacgcatcgaacgcttttttagctacgaagataagcttcgccaacgagataggaaacatatgcaagaagcttaggattgatgtttacaaggtgtttgagggtgttggtttggaccacagaataaatccatcatttttcagagctgggattggattcggggggagctgttttcctaaggatgttagagctttgattaggaagtctgaagaactcggcgagaatccgaagatactgaaagctgttatggaagtaaatgagagacagccgttaaagatgatagaacttctgaagaagcacattcctaacttaagaggaaagaagatcggagttctgggtttggcgttcaaacccgatacggatgacgtaagagagagtagggctataccaatcgtcaaagctctgctggaagagggggcagagatcatagcctacgatccaaaggccatagaaaactttaggaaatttttccctcaagtagaatatgctaactcagctgaagatgttattacaaaatcggatgctgtgctgatagttaccgaatggaaggagttcgaggagcttgattacagcggtaaaattgttattgatggaagaagagttgagaaggctatgaaagaagctaagatatacaaaggggtgtgttggtaa

SEQ ID NO: 72355 - protein, 465 aa, Archaeoglobus fulgidus DSM 4304
MWNGPLLNYRDTFPQFRTFVAIVNAINNIRINLISVLTRHHTMKIAILGSGYVGIVTGIGFAELGHEIVFIDVDERKVEMLNSSKPPIYERGLEELMKKNRGKYRATTDYREALESSELTFICVGTPSKGDGSIDLKYAESASKEIGKALKNNDNFHVVVVKSTVVPGTTEDKIKPIIEKESGKKAFEDFGLAMNPEFLREGNAVYDFFNPDRIVIGVKDERTKSVLEELYKPFDCPKLITEIKTAEMIKYASNAFLATKISFANEIGNICKKLRIDVYKVFEGVGLDHRINPSFFRAGIGFGGSCFPKDVRALIRKSEELGENPKILKAVMEVNERQPLKMIELLKKHIPNLRGKKIGVLGLAFKPDTDDVRESRAIPIVKALLEEGAEIIAYDPKAIENFRKFFPQVEYANSAEDVITKSDAVLIVTEWKEFEELDYSGKIVIDGRRVEKAMKEAKIYKGVCW

SEQ ID NO: 72356 - DNA, 1284 bp, Pyrococcus abyssi GE5
  CDS (1)..(1284): transl_table=11
atgaatgtttcgattattggttctggttatgttggtcttgttactgggatgggctttgttaagctgggaaatagggtcattttcgttgatgttgatgagtggaaggtgagagtgataaataacgcccaacctccaatctatgaggagggcctcgaagaactcatgcaagagttcaagggcaagtactacgccaccaacaactatcgtgaagcaattctcaactcagacataacgttcataaccgtcggaactccatccaaaccagacggtacaatagacctaacctacgtgaaaaacgcagctaaagaaatcggtaaagcattaaaagaaaaggataactttcatatcgtcgtcgtcaagagcaccgtcctcccaggaactactgaaggtgtaataagaccaatcctggagaagtactctggcaagaaggcattccaagatttcggcctagcaatgaaccccgagttcctaagagagggagtagcactaaaggactttctaaacccagacagaatcgtaattggagttcaagacgagaggacaaagaaagttctagaaaaactctacgaaccgttcaacgcaccaaaactcttcactgatattaaaacggctgaaatgattaaatacgcatcaaacgcctttctcgcaacgaaaataagctttgccaatgagattggaaacatatgcaaaaaactcggcatagactcctggaaagtctttgagggagtcggcttagaccacagaataagcccacacttctttagaagtggaatcggatttggaggatcatgcttcccaaaagacttaaaagctctaatcaaaaaggcagaagagcttggagaagacccaataatactaaaagcagtgctgcaagtaaacgagagacaaccactaaagctaatcgaactcctgaaaaaacacgtcccaaacctaaaggacatgaaagttggcgtcctaggcctagcattcaaaccgaacaccgatgacgtcagggaaacgagggcttacattgtgattaaaaaactcctcgaagaaggagcaaaagtaattgcttatgatccaaaagccatggagaatttcaagcgcttttatccagacgttggaaggcaaataagctatgccaactctgcggaggaagttttaagagaagttgacgttatcctgatactcaccgagtggcgtgattttgaaagtcttgactactcgggtaaaatcgttattgatggtaggcgtgtaagatccgctgagaagacagcgaagatttacgagggggtgtgctggtga

SEQ ID NO: 72357 - protein, 427 aa, Pyrococcus abyssi GE5
MNVSIIGSGYVGLVTGMGFVKLGNRVIFVDVDEWKVRVINNAQPPIYEEGLEELMQEFKGKYYATNNYREAILNSDITFITVGTPSKPDGTIDLTYVKNAAKEIGKALKEKDNFHIVVVKSTVLPGTTEGVIRPILEKYSGKKAFQDFGLAMNPEFLREGVALKDFLNPDRIVIGVQDERTKKVLEKLYEPFNAPKLFTDIKTAEMIKYASNAFLATKISFANEIGNICKKLGIDSWKVFEGVGLDHRISPHFFRSGIGFGGSCFPKDLKALIKKAEELGEDPIILKAVLQVNERQPLKLIELLKKHVPNLKDMKVGVLGLAFKPNTDDVRETRAYIVIKKLLEEGAKVIAYDPKAMENFKRFYPDVGRQISYANSAEEVLREVDVILILTEWRDFESLDYSGKIVIDGRRVRSAEKTAKIYEGVCW

SEQ ID NO: 72358 - DNA, 1446 bp, Arabidopsis thaliana
  CDS (1)..(1446)
atggtgaagatatgctgcataggagctggttatgtgggtggtccaaccatggcggtgatggctcttaagtgtcctgagattgaagtagtcgttgtggatatctctgaaccaaggatcaatgcttggaacagtgataggcttcctatttacgagccgggattggaagatgtggtgaaacaatgcagagggaaaaacctcttctttagcacagacgtggagaaacatgtatttgagagtgatattgtatttgtctcagttaacactccaaccaaaacacaaggtcttggtgctggcaaagctgctgatcttacttactgggagagtgctgctcggatgatcgctgatgtctccaaatctagcaaaatcgttgttgagaaatccacggttcctgtgaggacagcagaggctattgaaaagatactgacacataacagcaaaggcatagagtttcagattctctctaaccctgaatttcttgctgagggtactgcaattaaggatctttataacccagaccgtgtgttgattggtggtagggatactgcagcagggcaaaaggctattaaagctttaagagatgtttatgctcattgggttccagtggaacaaatcatttgcacgaacctgtggtccgctgagctctctaagcttgcagcaaatgcattcttagctcagaggatatcatctgtcaatgccatgtcagctctatgtgaggcaactggcgctgatgttacacaagttgcgcatgccgtgggtacagatactagaattggtccaaagttcttgaatgctagtgttggttttggtggatcatgtttccaaaaggacatcctaaatcttatctatatttgtgaatgcaacggcttgcccgaagcagctaattactggaaacaagtcgtaaaggtgaacgactatcagaaaatacggtttgcaaaccgggttgtttcttcaatgtttaacacagtctcgggcaagaaaatcgcgatcctcggttttgccttcaagaaggacacaggtgacacgagagagactccagcgattgatgtttgtaacagattagttgcagacaaggccaagctgagcatatacgacccacaagttcttgaagaacagatcagaagagatctttccatggctaggtttgactgggaccaccctgttcctcttcagcagattaaagctgaaggtatctcagagcaagtgaatgtcgtctcagatgcttacgaggcaactaaagatgcgcacggcctatgtgtcttaaccgaatgggatgagtttaaatccttggacttcaagaaaatctttgacaatatgcagaaaccagcttttgtgttcgatggtaggaatgttgttgatgcagtgaagctgcgtgagatcggtttcatcgtctactccattggtaaaccgcttgattcatggctcaaggatatgcctgctgtggcatga

SEQ ID NO: 72359 - protein, 481 aa, Arabidopsis thaliana
MVKICCIGAGYVGGPTMAVMALKCPEIEVVVVDISEPRINAWNSDRLPIYEPGLEDVVKQCRGKNLFFSTDVEKHVFESDIVFVSVNTPTKTQGLGAGKAADLTYWESAARMIADVSKSSKIVVEKSTVPVRTAEAIEKILTHNSKGIEFQILSNPEFLAEGTAIKDLYNPDRVLIGGRDTAAGQKAIKALRDVYAHWVPVEQIICTNLWSAELSKLAANAFLAQRISSVNAMSALCEATGADVTQVAHAVGTDTRIGPKFLNASVGFGGSCFQKDILNLIYICECNGLPEAANYWKQVVKVNDYQKIRFANRVVSSMFNTVSGKKIAILGFAFKKDTGDTRETPAIDVCNRLVADKAKLSIYDPQVLEEQIRRDLSMARFDWDHPVPLQQIKAEGISEQVNVVSDAYEATKDAHGLCVLTEWDEFKSLDFKKIFDNMQKPAFVFDGRNVVDAVKLREIGFIVYSIGKPLDSWLKDMPAVA

SEQ ID NO: 72360 - DNA, 1293 bp, Halobacterium sp. NRC-1
  CDS (1)..(1293): transl_table=11
atgcgagtgagtatcgttggtagcggctacgtcggcacaacggttgccgcgtgtttcaccgacatgggccacgacgtcgtcaacgtcgacatcgaccaagacatcgtcgacgcaatcaacgccggcaaagcaccaattcacgaacctggcctcgatgacctacttgcgacccatggtggggatacactcgcggcgaccacagactacgaggatgtccttgagacggacgtcacgttcctcgcgctcccaacgccctccaaagaggacggcagcatcgacacgtcaattatcgaagcagccgccgaaaccctcggcgacacccttcgtgagaaggacggtgatcacgttgtcgtcacgaagagcacagtcatcccgaggacgaccacagagacactcgcgccgattctcgcggatgcttccggcaagcagctcggcgcggatctccacgtcgcgatgaacccggagttcctccgcgagggtacagccgtcgaggacttccaaaacccggacaaaattgttttcggcagcgacagcgagaccgccatcgacacgctccacgagatcttcaagcccctcatcgaagcgtccgacgcgactgtcgtcgagacgggcgttgaggaagcggagatgatcaagtacgcgaacaacgccttcctcgcgtcaaaagtcagcctcatcaacgatattggaaacatctgcaaggagttcggcgtcgacgcctacgaggtcgccgatgccatcggtctcgacgaccgcatcagcgagcgcttcctccgtagtggtcttggctggggtggtagctgcttcgggaaggacacgaacgccatcattcacgccgccacggaaaccggctacgagccggcgatgcttgaagcggccgtggcggtcaacgaccgccagccagagcgcctcctctcgctgctcgacgaccacggagacgtcgagagcgagcgcgtcgccgtgcttggacttgcgttcaagcccggcactgacgatgtccgggactccagggcgatccccgttattaatggccttcaagagcgtggtgcaaacgtcgctgcctacgacccagtcgccgccgagaacatgcgcacgcacttcccagacatcgagtatactgacgcaccacaggacgcactcgcggatgcaagcgcgtgcgtcgtctgtactgactgggacgagttcgctgtacttgacgatgaattcgatgccatggaaacacgagtcgtcgtcgacggccgacgcattatcgagcgccgcgacggactcacgtacgagggacttacctggtag

SEQ ID NO: 72361 - protein, 430 aa, Halobacterium sp. NRC-1
MRVSIVGSGYVGTTVAACFTDMGHDVVNVDIDQDIVDAINAGKAPIHEPGLDDLLATHGGDTLAATTDYEDVLETDVTFLALPTPSKEDGSIDTSIIEAAAETLGDTLREKDGDHVVVTKSTVIPRTTTETLAPILADASGKQLGADLHVAMNPEFLREGTAVEDFQNPDKIVFGSDSETAIDTLHEIFKPLIEASDATVVETGVEEAEMIKYANNAFLASKVSLINDIGNICKEFGVDAYEVADAIGLDDRISERFLRSGLGWGGSCFGKDTNAIIHAATETGYEPAMLEAAVAVNDRQPERLLSLLDDHGDVESERVAVLGLAFKPGTDDVRDSRAIPVINGLQERGANVAAYDPVAAENMRTHFPDIEYTDAPQDALADASACVVCTDWDEFAVLDDEFDAMETRVVVDGRRIIERRDGLTYEGLTW

SEQ ID NO: 72362 - DNA, 1341 bp, Agrobacterium tumefaciens str. C58
  CDS (1)..(1341): transl_table=11
ttgacttccccagacatttcccggaccctgctttccagcatcgaaaacaaaagcgccaaagcgggggtgatcggcctcggctatgtcggcctgccgcttgccatgacggtcgctaaggccggtttcaaggtcgtcggtttcgacatcgaccccggtaaaattaccgcgatcgaagcgggccgcagctatatcgaggcggtttccgatgaggtgctggcaagtgtgcggcaggatgacggtttcgttgccaccagcgattttttgaggctggccgaatgcgatgtgatcgccatttgcgtgccgacgccgctgacgaaatatcgcgagccggacctttcttatgtcgaaaagacctgccgggatattgccgcacatctgcgcaaggggcagctcgtggtgctggaatcgaccacctatcctggcacgaccgacggggtggtgaagaccattctggagagcaccggcctcgtctctggcgtcgatttcttcatcggcttttcgcccgagcgggaagatccgggcaatcgcgatttcgagacctcgaccattccgaaggttgtcgccggtgacggcgaggctgccggaaagctgatggccgccttctacggctcagtggtgaagaagatcgttccggtttcgaccaatgccacggccgaggcggtgaaaatcaccgaaaacgtcttccgtgccgtcaatatcgcgctcgtcaacgaactcaaggtcgtctacgaggcgatgggcatcgacatatgggaagtgatcgacgcggcaaaaaccaagccgttcggtttcatgccgttttatcccggtcccggtctcggcggtcattgcataccgatcgaccctttctacctcacctggaaatcgcgcgaatatgaattgccgacgcggttcatcgagcttgccggcgaaatcaataccggcatgccgcgccatgtcgtcgggcgggttgctgaagcgctggatatccattcggggaaggcgctcagccgctcgaaagtgctggtcgtcggtctcgcttacaagaaaaacgtgcccgacattcgcgaaagtccgtcgctgaagctcttggagcttattcaggagcgcggtggcgatgcggcctatttcgatccctatgtggcggaaatcccgaaaacccgggaatatagccaccttatgggcatgaaatccatatcctgggacagggagaccatcggcagcttcgatgccgttcttgtcgcgacggatcacgacaatgtcgactatgccgcgcttagcgactgggcgccgctgatcatcgatacacgaaatgtcttcgcgcgccgggatatcgccgcaaaacacatcatcaaggcctga

SEQ ID NO: 72363 - protein, 446 aa, Agrobacterium tumefaciens str. C58
MTSPDISRTLLSSIENKSAKAGVIGLGYVGLPLAMTVAKAGFKVVGFDIDPGKITAIEAGRSYIEAVSDEVLASVRQDDGFVATSDFLRLAECDVIAICVPTPLTKYREPDLSYVEKTCRDIAAHLRKGQLVVLESTTYPGTTDGVVKTILESTGLVSGVDFFIGFSPEREDPGNRDFETSTIPKVVAGDGEAAGKLMAAFYGSVVKKIVPVSTNATAEAVKITENVFRAVNIALVNELKVVYEAMGIDIWEVIDAAKTKPFGFMPFYPGPGLGGHCIPIDPFYLTWKSREYELPTRFIELAGEINTGMPRHVVGRVAEALDIHSGKALSRSKVLVVGLAYKKNVPDIRESPSLKLLELIQERGGDAAYFDPYVAEIPKTREYSHLMGMKSISWDRETIGSFDAVLVATDHDNVDYAALSDWAPLIIDTRNVFARRDIAAKHIIKA

SEQ ID NO: 72364 - DNA, 1332 bp, Agrobacterium tumefaciens str. C58
  CDS (1)..(1332): transl_table=11
atgcggattgtgatgatcggttcgggttatgtcggcctcgtgtccggcgcgtgttttgcagattttggccatgatgtggtctgcgtcgacaagatgccggagaaaatcgaggctttgaaaagcggccatattccgatcttcgagccgggtctggaaaccatcgtcgccaacaacgccaaggctggccggttgagcttcacgacagatctttccgccgctgtcgccaatgccgatgtcgtcttcatcgcggtcggtacgccttcgcggcgcggggatggacatgccgatctcggttatgtctacgcggcagcgaaagagatcgcccatgctcttgatggtttcaccgtcatcgtcaccaaatccactgttcccgttggcaccggcgacgaggtggagcgcatcattcgcgaggaaaacccctcggccgattttgccgtggtttccaacccggaattcctgcgcgaaggggctgccatcgaggatttcaagcggccggaccgcattgtcgtcggcctctcggatgagcgcgcacgccctgtgatgaccgaagtttaccgcccgctttacctcaaccagtcgccgctgctcttcaccacaaggcgcgcttccgaactcatcaaatatgccgccaacgcctttctggcgatgaagatcaccttcatcaacgaaatggctgacctctgcgaaaaggtcggcgccaatgtgcaggatgtttcccgcgggattggtctcgatggccgtatcggctcgaaattcctgcatgccggccccggttatggtggctcctgtttcccgaaggatacgctggcgctcgccaagaccgcgcaggattatgatgcgccggtacggctgatcgaaaccaccatcgccgtcaacgacacgcgcaagcgcgccatgggccgcaaggtcatcaatgcggtgggcggtgacgtgcgcggcaagaaaatcgccgtgctgggcctgaccttcaagccgaacactgacgacatgcgcgacagcccggccatcgccatcatccagaccctgcaggatggcggcgcaaaggtggtcggctacgatccggaaggcatggcgaatgcccggcacctgatggaagatatcgactatgcggcaggcccttacgaggcagcggaaggcgccgacgccgtcgtgatcgtgacggaatggaaccagttccgcgcgctagacctgccgcgcctcaaagccatcatgaaaagtcctgtgctcgtggatttgcgcaatatctaccgcacggacgaggtcgccggccatggcttcatctatgccgcggtgggtcgcccgcatgaaggcagttcgggcaacgacacctga

SEQ ID NO: 72365 - protein, 443 aa, Agrobacterium tumefaciens str. C58
MRIVMIGSGYVGLVSGACFADFGHDVVCVDKMPEKIEALKSGHIPIFEPGLETIVANNAKAGRLSFTTDLSAAVANADVVFIAVGTPSRRGDGHADLGYVYAAAKEIAHALDGFTVIVTKSTVPVGTGDEVERIIREENPSADFAVVSNPEFLREGAAIEDFKRPDRIVVGLSDERARPVMTEVYRPLYLNQSPLLFTTRRASELIKYAANAFLAMKITFINEMADLCEKVGANVQDVSRGIGLDGRIGSKFLHAGPGYGGSCFPKDTLALAKTAQDYDAPVRLIETTIAVNDTRKRAMGRKVINAVGGDVRGKKIAVLGLTFKPNTDDMRDSPAIAIIQTLQDGGAKVVGYDPEGMANARHLMEDIDYAAGPYEAAEGADAVVIVTEWNQFRALDLPRLKAIMKSPVLVDLRNIYRTDEVAGHGFIYAAVGRPHEGSSGNDT

SEQ ID NO: 72366 - DNA, 1275 bp, Agrobacterium tumefaciens str. C58
  CDS (1)..(1275): transl_table=11
gtgatcggcctcggctatgtcggcctgccgcttgccatgacggtcgctaaggccggtttcaaggtcgtcggtttcgacatcgaccccggtaaaattaccgcgatcgaagcgggccgcagctatatcgaggcggtttccgatgaggtgctggcaagtgtgcggcaggatgacggtttcgttgccaccagcgattttttgaggctggccgaatgcgatgtgatcgccatttgcgtgccgacgccgctgacgaaatatcgcgagccggacctttcttatgtcgaaaagacctgccgggatattgccgcacatctgcgcaaggggcagctcgtggtgctggaatcgaccacctatcctggcacgaccgacggggtggtgaagaccattctggagagcaccggcctcgtctctggcgtcgatttcttcatcggcttttcgcccgagcgggaagatccgggcaatcgcgatttcgagacctcgaccattccgaaggttgtcgccggtgacggcgaggctgccggaaagctgatggccgccttctacggctcagtggtgaagaagatcgttccggtttcgaccaatgccacggccgaggcggtgaaaatcaccgaaaacgtcttccgtgccgtcaatatcgcgctcgtcaacgaactcaaggtcgtctacgaggcgatgggcatcgacatatgggaagtgatcgacgcggcaaaaaccaagccgttcggtttcatgccgttttatcccggtcccggtctcggcggtcattgcataccgatcgaccctttctacctcacctggaaatcgcgcgaatatgaattgccgacgcggttcatcgagcttgccggcgaaatcaataccggcatgccgcgccatgtcgtcgggcgggttgctgaagcgctggatatccattcggggaaggcgctcagccgctcgaaagtgctggtcgtcggtctcgcttacaagaaaaacgtgcccgacattcgcgaaagtccgtcgctgaagctcttggagcttattcaggagcgcggtggcgatgcggcctatttcgatccctatgtggcggaaatcccgaaaacccgggaatatagccaccttatgggcatgaaatccatatcctgggacagggagaccatcggcagcttcgatgccgttcttgtcgcgacggatcacgacaatgtcgactatgccgcgcttagcgactgggcgccgctgatcatcgatacacgaaatgtcttcgcgcgccgggatatcgccgcaaaacacatcatcaaggcctga

SEQ ID NO: 72367 - protein, 424 aa, Agrobacterium tumefaciens str. C58
MIGLGYVGLPLAMTVAKAGFKVVGFDIDPGKITAIEAGRSYIEAVSDEVLASVRQDDGFVATSDFLRLAECDVIAICVPTPLTKYREPDLSYVEKTCRDIAAHLRKGQLVVLESTTYPGTTDGVVKTILESTGLVSGVDFFIGFSPEREDPGNRDFETSTIPKVVAGDGEAAGKLMAAFYGSVVKKIVPVSTNATAEAVKITENVFRAVNIALVNELKVVYEAMGIDIWEVIDAAKTKPFGFMPFYPGPGLGGHCIPIDPFYLTWKSREYELPTRFIELAGEINTGMPRHVVGRVAEALDIHSGKALSRSKVLVVGLAYKKNVPDIRESPSLKLLELIQERGGDAAYFDPYVAEIPKTREYSHLMGMKSISWDRETIGSFDAVLVATDHDNVDYAALSDWAPLIIDTRNVFARRDIAAKHIIKA

SEQ ID NO: 72368 - DNA, 1284 bp, Pyrococcus furiosus DSM 3638
  CDS (1)..(1284): transl_table=11
atgagagtttcggttgttggctctggttatgttgggcttgtcacagggataggttttgtcaagcttgggaatagcgttatcttcgttgatgttgatgagaggaagatccaaatgattaataatgctcaacctccaatttatgaggagggtttggaagaattaatgcaagaatttagaggtaaatattacgctactaacgattatagagatgcaattctcaattctgacattacgttcatagccgttggaactccctcaagagaagacggttcgattgaccttacatacgttaaagaagccagcagagctattggaaaggcactaagagaaaaggaagattatcatgttgtcgtagttaagagcactgtcctcccaggaactaccgaggaagttgtaagaccaatccttgaaaagtattctggtaagaaggcaatccaagactttggccttgcaatgaatccagagtttttgagagaaggtactgcattgaaggacttcctcaacccggatagaatagtcattggtgttcaagatgagaggactaagaaagtcctcgaagagctttatgctcccattaatgcaccaaagttaattgtggacattaagactgctgaaatgataaagtacgcctcaaacgctttcctagcaacaaagataagctttgcaaacgagattgggaatatttgtaaaaaactcggaatagattcttggaaagtttttgaaggagttggcctagatcataggataagcccctacttcttcaggactggaattggctggggtggctcatgctttccaaaagatgtcagagccttaattaggaaggcggaagaactgggagaggacccaataatcctaaaggcagttgttgaggtcaatgagaggcaacctctcaagcttattgaattgctaaagaagcatgttccagaccttaagggaaaaactgtcggagtgttaggattagcattcaagccaaacactgatgacgtgagagagactagggcttatattatagtcagaaaacttctggaaaaaggagctcacattatagcttacgatccaaaagccatggagaatttcaagcgcttttatccggatgttggggaaaagatagaatacgctaactcgcctgaagaagttcttgaaaaatctgatgttattttgatagttacagagtggaatgaatttgagaaggtagattactctgggaaaattgttattgacggtaggagaattagagctgccgagaaaacagcgagaatttacgagggggtgtgctggtga

SEQ ID NO: 72369 - protein, 427 aa, Pyrococcus furiosus DSM 3638
MRVSVVGSGYVGLVTGIGFVKLGNSVIFVDVDERKIQMINNAQPPIYEEGLEELMQEFRGKYYATNDYRDAILNSDITFIAVGTPSREDGSIDLTYVKEASRAIGKALREKEDYHVVVVKSTVLPGTTEEVVRPILEKYSGKKAIQDFGLAMNPEFLREGTALKDFLNPDRIVIGVQDERTKKVLEELYAPINAPKLIVDIKTAEMIKYASNAFLATKISFANEIGNICKKLGIDSWKVFEGVGLDHRISPYFFRTGIGWGGSCFPKDVRALIRKAEELGEDPIILKAVVEVNERQPLKLIELLKKHVPDLKGKTVGVLGLAFKPNTDDVRETRAYIIVRKLLEKGAHIIAYDPKAMENFKRFYPDVGEKIEYANSPEEVLEKSDVILIVTEWNEFEKVDYSGKIVIDGRRIRAAEKTARIYEGVCW

SEQ ID NO: 72370 - DNA, 1320 bp, Corynebacterium glutamicum ATCC 13032
  CDS (1)..(1320): transl_table=11
atgcggatgacagtgattggtacgggttaccttggcgctacgcacgcggcctgcatggctgagcttagccatgaggttcttggtgttgatgtcgatgaggcaaagattgcgtcgttgaaggacagcaaggtcccattttttgagccgggtttgcctgaggttttggagcgcaatctggaaaatggtcgcctgaacttcactactgattatgcggaggctgcggctttcgcgcaggtgcatttcttgggcgtgggtactcctcagcagaagggtacttatgcggcggatctgacgtatgttcgtcaggttgttgaggatttggtgccgctgcttgagggcgagcacattattttcggcaagtctacggttccggttggtactgctgagcagttgcaggagcttgctgattctctggtcaagcctggttcgcacgtggagatcgcgtggaatccggagttcttgcgtgagggctacgcggtcaaagacaccatcactccggaccgcatcgtggtgggtgtgcgtgagggggcgacagcagaggcgatcgctcgcgaggtttacgccaccgcgattgctgccgataccccatttttggtgactgatcttgctaccgctgagctggtgaaagtttccgcgaatgcgttcttggccaccaagatttccttcatcaatgcggtcgctgagatttgtgagcagaccggcgccgatgtggttgcgcttgcggatgccatcggtcacgacgatcgtatcggccgaaagttcttaggcgcgggcctgggattcggtggcggttgtttgcctaaagacatccgcgctttcatggcacgcgcgggcgaattgggtgctgaccaggcattaacgttcttgcgtgaggtcgattccatcaatatgcgtcgtcgcgaccgtgtggtgcagctggccaaagagatgtgtggcggttcgctgctgggcaagcgggttacagtgctcggcgccgcattcaaacccaactcggacgatgtccgcgattctccggcgctgtcggtcgcgggttcgctgtcgctccagggtgcggcggtctcggtctacgacccggaagctatggacaacgctcgacgcgtcttcccgacgctcagctatgcgtccagcactaaagaggcgcttatcgacgcccacctcgtcgttcttgccactgaatggcaagaattccgcgaccttgaccccgaagtggcgggaggggtcgtcgagaagcgcgctattattgatggccgaaacgtcctcgatgttgccaaatggaaggccgccggttgggaaatggaagcgctcggccgcaacctttag

SEQ ID NO: 72371 - protein, 439 aa, Corynebacterium glutamicum ATCC 13032
MRMTVIGTGYLGATHAACMAELSHEVLGVDVDEAKIASLKDSKVPFFEPGLPEVLERNLENGRLNFTTDYAEAAAFAQVHFLGVGTPQQKGTYAADLTYVRQVVEDLVPLLEGEHIIFGKSTVPVGTAEQLQELADSLVKPGSHVEIAWNPEFLREGYAVKDTITPDRIVVGVREGATAEAIAREVYATAIAADTPFLVTDLATAELVKVSANAFLATKISFINAVAEICEQTGADVVALADAIGHDDRIGRKFLGAGLGFGGGCLPKDIRAFMARAGELGADQALTFLREVDSINMRRRDRVVQLAKEMCGGSLLGKRVTVLGAAFKPNSDDVRDSPALSVAGSLSLQGAAVSVYDPEAMDNARRVFPTLSYASSTKEALIDAHLVVLATEWQEFRDLDPEVAGGVVEKRAIIDGRNVLDVAKWKAAGWEMEALGRNL

SEQ ID NO: 72372 - DNA, 1284 bp, Methanosarcina acetivorans C2A
  CDS (1)..(1284): transl_table=11
atgaaagtttcggttataggttcaggatatgtgggttcggtcacagcagcctgttttgcagaggtaggacacgaagtcatctgtgtagatatcgacagtaaaaaaacagagcagataaactcaggcattcctccaatctacgaggaggggcttgaagaacttttgcaaaagtatgcaggaaaaaaactcatagcaactactgattatgaatttgcagtcaatgaaacggatatttcctttatttgtgttggaaccccttcggcagaagacgggagtatagacctttcaattgtccgggcagcagctgcaagtatcggtgcagttctagcaaagaaagaaggctaccatgtggtagtagtaaaaagtacagtcgtgcccgaaacaacagaaaaatttgtcctgccgatccttgaggaaacctcggggaagaaagccggaaaagatttcggagtcgcaatgaacccggaattccttagggaaggaaaagctgtccatgacttcatgcaccctgacaaaatagttgtcggggcgattgaccgaagatcaggagacatggtttccgaactctacaggatcttcgaatgcgagatcacacatacagggccggcaaccgcagaaatgatcaaatacgcaaataactccctgcttgcaaccaagatctcctttgcaaatgaaattgggaatatctgcaaaaatctggggatcgatacctatgaagtaatggaagctgttgggaaggacttcaggatttccccaaagtttttaaattccggagcaggttttggagggtcatgtttcccgaaagacgtaaaagcactcataggaaaagcaaaagcaatcggatactctcccgtgctccttgagtccgtaatagctgtaaatgaaaggcaaccccttcttatgactgaaattctccagaggaaaataggagatcttgcaggcaaaaagattgcagtccttggccttgccttcaagaacgaaacggatgacataagagaatccagatcaattcctgtgatcgctgaactcctcaggcttgaagcccgggtttcggcctatgacccgatggcaaccgagaacatgaaacgtatctttcctgcagtcgaatactttggtagcgcctcggatgcgcttatagatgcagacgcctgccttgttatgacagaatgggacgagttcaggaatcttgactccgagttccagggcatgaaaagaaaaatagttattgatggaaggcggatagttaaagcgaaaaatgtggattatgagggactctgctggtga

SEQ ID NO: 72373 - protein, 427 aa, Methanosarcina acetivorans C2A
MKVSVIGSGYVGSVTAACFAEVGHEVICVDIDSKKTEQINSGIPPIYEEGLEELLQKYAGKKLIATTDYEFAVNETDISFICVGTPSAEDGSIDLSIVRAAAASIGAVLAKKEGYHVVVVKSTVVPETTEKFVLPILEETSGKKAGKDFGVAMNPEFLREGKAVHDFMHPDKIVVGAIDRRSGDMVSELYRIFECEITHTGPATAEMIKYANNSLLATKISFANEIGNICKNLGIDTYEVMEAVGKDFRISPKFLNSGAGFGGSCFPKDVKALIGKAKAIGYSPVLLESVIAVNERQPLLMTEILQRKIGDLAGKKIAVLGLAFKNETDDIRESRSIPVIAELLRLEARVSAYDPMATENMKRIFPAVEYFGSASDALIDADACLVMTEWDEFRNLDSEFQGMKRKIVIDGRRIVKAKNVDYEGLCW

SEQ ID NO: 72374 - DNA, 1326 bp, Streptomyces coelicolor A3(2)
  CDS (1)..(1326): transl_table=11
atgagggtcagcgttttcggcctcggctacgtgggctgcgtgtcggccgcgtgcctggccggcatggggcaccaggtcgtcggggtggatgtgaaccaggcgaaggtcgacctggtcaacgacggcaaggccccggtggtcgaggaacggatcggcgagctgatcgccgaggtcgtgggcagcggagcactgcgcgccaccggcgacgtccgcgaggcgatcatggagagcgagatatccctggtctgcgtgggcaccccgtcggagcccaacggcagcttgtgcaccacgtacttggaacgcgtcaccgaggagatcggcaccgcgctcgccgaacggggcgggggcggtgggcggcacaccgtggtgttccgcagcaccatgctccccggcacctgcgcgaacctgctggtgccgatcctggagaagtacgtcggcggcaccgccggggtggacttcggggtcgcggtcaacccggagttcctgcgtgagggcacgagcgtgcgggacttcttcgacccgcccaagaccgtcatcggcgaactcgacgcggccggcggcgacgcggtgctggccctgtacgacagcctgcccggcgaggtgttccgggtgccggtcgcgacggccgaggcgatcaagtacgccgacaacgccttccacgggctcaagatcggcttcgcgaacgagctgggcgcggtgtgccatgcgctcggggtggactcgcaccaggtgatggacgtgttcctggccgaccgcaagctgaacatcagccccgcctacctgcggcccggtttcgccttcggcggctcctgcctgcccaaggacctgcggagcctggtccacgcggcacagcgggccgacgtctcggtgcccatcctctcccacgtgctgccctccaactccgcgcacctggagcgcgcggtcgagctggtggagcgcaccgggaagcgccgggtggggatgttcggactgtccttcaaacccggcaccgacgacctccgcgagagtccgctcgtggagctggcggagcgcctcttcggcaagggttacgacctcaggatccacgacgccaacgtgagcctgtcccggctgctcggcgcgaaccgcgagtacgtcgagacccggctgccgcacctcgcccaactgctcgcggactccgtcgacgaggtcctcgaccacgccgaggtgtgcctggtcgggaccagggacccggccgtgctctcggcgctgccccacggcgccgggccgctgctgatcgacctcatccaccttcccgacgccgacacgcgccggaccgaaccggggtacatgggccttgcttggtga

SEQ ID NO: 72375 - protein, 441 aa, Streptomyces coelicolor A3(2)
MRVSVFGLGYVGCVSAACLAGMGHQVVGVDVNQAKVDLVNDGKAPVVEERIGELIAEVVGSGALRATGDVREAIMESEISLVCVGTPSEPNGSLCTTYLERVTEEIGTALAERGGGGGRHTVVFRSTMLPGTCANLLVPILEKYVGGTAGVDFGVAVNPEFLREGTSVRDFFDPPKTVIGELDAAGGDAVLALYDSLPGEVFRVPVATAEAIKYADNAFHGLKIGFANELGAVCHALGVDSHQVMDVFLADRKLNISPAYLRPGFAFGGSCLPKDLRSLVHAAQRADVSVPILSHVLPSNSAHLERAVELVERTGKRRVGMFGLSFKPGTDDLRESPLVELAERLFGKGYDLRIHDANVSLSRLLGANREYVETRLPHLAQLLADSVDEVLDHAEVCLVGTRDPAVLSALPHGAGPLLIDLIHLPDADTRRTEPGYMGLAW

SEQ ID NO: 72376 - DNA, 1344 bp, Streptomyces coelicolor A3(2)
  CDS (1)..(1344): transl_table=11
atggccctgaagatcaccgtgatcggtaccggctatctcggcgccacccacgcggcggccatggccgagctcggtttcgaggtgctgggtctcgacgtggtgcccgagaagatcgagacgctccagcggggcgaggtcccgatgtacgagcccggtctgcgggagctgctgggcaagcacgtcgccgggatcgagggctccagcgggcggctgcgcttcaccaccgacttcgccgaggtcgcggccttcggcgacgtgcacttcctgtgtgtgaacaccccgcagaagcacggcgagtacgcctgcgacatgtcgtacgtcgactccgcgctggcctccctggcgccgcacctgaccggccccgctctggtcgtcggcaagtcgaccgtgccggtgggctccgccgaccggctggccgcctacctggccgagcacgcgccggccggcgacggggccgagctggcctggaacccggagttcctgcgcgagggcttcgccgtcgaggacaccctgcaccccgaccgcctggtggtcggcgtgcgcagcgagcgggccgagcggctgctgcgcgaggtgtacgcgacgccgatcgaggagggctcgccgttcgtcgtcacggacttcccgacggcggagctggtgaagaccgccgcgaactccttcctcgccaccaagatctccttcatcaacgcgatggcggaggtctgcgaggccgcgggcggcgacgtcgccaagctggcggaggcgatcgggtacgacgaccggatcgggaagaagttcctgcgggccgggatcggcttcggcggcggctgtctgccgaaggacatccgggcgttcatggcgcgcgccggtgagctgggcgccgaccaggcgctgaccttcctgcgcgagatcgactccgtcaacatgcgccagcgcggccggatggtggagctgacccggcaggcgctgggcggcggccccttcctcggcaagcgcgtcgcggtgctcggcgccaccttcaagcccgactcggacgacgtacgggactcccccgcgctgaacgtcgccgggcaggtgcacctccagggcgcccaggtgacggtgtacgaccccaagggcatggagaacgcccggcggctcttcccgaccctcggctacgccgactcggcgctggaggcggtgcggggcgctgacgtggtcctgcacctcacggagtggcgggagttccgcgagctggaccccgaggtgctgggcgaggcggctgcggcccgggtgatcctggacgggcgcaacgccctggatccggcgctgtggcggaaggccggctggacgtaccgggcgatgggccgcccgaccgcctga

SEQ ID NO: 72377 - protein, 447 aa, Streptomyces coelicolor A3(2)
MALKITVIGTGYLGATHAAAMAELGFEVLGLDVVPEKIETLQRGEVPMYEPGLRELLGKHVAGIEGSSGRLRFTTDFAEVAAFGDVHFLCVNTPQKHGEYACDMSYVDSALASLAPHLTGPALVVGKSTVPVGSADRLAAYLAEHAPAGDGAELAWNPEFLREGFAVEDTLHPDRLVVGVRSERAERLLREVYATPIEEGSPFVVTDFPTAELVKTAANSFLATKISFINAMAEVCEAAGGDVAKLAEAIGYDDRIGKKFLRAGIGFGGGCLPKDIRAFMARAGELGADQALTFLREIDSVNMRQRGRMVELTRQALGGGPFLGKRVAVLGATFKPDSDDVRDSPALNVAGQVHLQGAQVTVYDPKGMENARRLFPTLGYADSALEAVRGADVVLHLTEWREFRELDPEVLGEAAAARVILDGRNALDPALWRKAGWTYRAMGRPTA

SEQ ID NO: 72378 - DNA, 1254 bp, Methanosarcina mazei Go1
  CDS (1)..(1254): transl_table=11
gtgggttcggtcaccgctgcttgctttgcagaagtcgggcacgaagttatctgcgtagatattgacaggaaaaaaacggagcagataaacgcaggcatccctcccatttatgaagaaggacttggagagcttttgcaaaaatatgcaggaaaaaagctcatagcaattactgattatgaacttgcggtcaaagagacagagatctcctttatctgtgtagggacaccttctgcagatgacgggactatagacctttcaattgtcagggcagcagcagcaagtataggtaaagcccttgcaaaaaaagatgcttatcatgtagtggtggtaaaaagtacagtagttcctgaaactacagaaaaattcgtcctccccattcttgaggaaacatcaggaaagaaagccggaaaagactttggtgtggcaatgaatccggagttcctgagggaaggaaaggcagtccaggattttatgaacccggataaaatagtggtcggtgcaattgacaaaagatcaggaaatcttgtttccgagctttatcgcacatttgaatgtgaggtcacgcgcacaggccctgcaactgcagaaatgataaaatatgcaaacaactcccttcttgcaaccaagatttcttttgccaatgaaataggaaatatttgcaaaaaaatggggatagatacatatgaggtcatggaagcagttggtaaagacttcagaatttccccgaaattcctgaactcaggggcaggtttcggagggtcctgcttcccaaaggacgtcaaagctcttataggaaaagcaaaaacaataggatactctccagtactacttgagtccgtaatagctgtaaatgagaaacagcctcttcttatgaccgaaatcctgcaaagaaaaataggaaaccctgcggacaaaaagattgctgttctcggacttgccttcaagaatgaaactgacgatataagagaatccaggtcaattcctgtaattgccgaacttcttagacttggggcaaaagtttcagcttatgacccgatggcagctgaaaacatgaaacgtattttcccttcaatcgaatactgtgacaatgcctcagatgcgcttaaagatgcagacgcctgtcttgtgatgacagagtgggatgagttcagaaaccttgactccgaattccagaacatgaaagaaaaaataattattgatggaaggcggataatcaaagctaaaaatattgattatgaggggctctgctggtga

SEQ ID NO: 72379 - protein, 417 aa, Methanosarcina mazei Go1
MGSVTAACFAEVGHEVICVDIDRKKTEQINAGIPPIYEEGLGELLQKYAGKKLIAITDYELAVKETEISFICVGTPSADDGTIDLSIVRAAAASIGKALAKKDAYHVVVVKSTVVPETTEKFVLPILEETSGKKAGKDFGVAMNPEFLREGKAVQDFMNPDKIVVGAIDKRSGNLVSELYRTFECEVTRTGPATAEMIKYANNSLLATKISFANEIGNICKKMGIDTYEVMEAVGKDFRISPKFLNSGAGFGGSCFPKDVKALIGKAKTIGYSPVLLESVIAVNEKQPLLMTEILQRKIGNPADKKIAVLGLAFKNETDDIRESRSIPVIAELLRLGAKVSAYDPMAAENMKRIFPSIEYCDNASDALKDADACLVMTEWDEFRNLDSEFQNMKEKIIIDGRRIIKAKNIDYEGLCW

SEQ ID NO: 72380 - DNA, 1329 bp, Pseudomonas putida KT2440
  CDS (1)..(1329): transl_table=11
atgaaggtcacggttttcggaaccggctatgtcggcctgacccaggcagtgtgcctggcccaggtaggccattcggtgttgtgcatggatgtcgatgccgatcgggtggccagcctgagtgaaggccattgcccgatcttcgagcccggccttgcgccgctgctggagaagaacctcgcctgcggtcggctgcgcttcaccacggatgccgcagcggctgccaactatgcccggttgcagttcattgccgtcggtactccgccgcaagccgatggtagcgccgacctgaagcacgttttcgccgtggtcgacagcatcctcgaacacgctgacgggcccaaagtaatcgtcaacaagtccaccgtgccggtgggtacggtacaccgcatcaaggcacgcatcgcccaggccgtggccgataccagccgcttccaggtgatcagcaacccggagtttctcaaggaagggtctgcggtggatgactgcatgcgcccccagcgcatcatcatcggcggcgcagaagcggccgaagtggagttgctacgcgagctttacctgccgttcaaccgcaaccgcgaaaagttcatggtcatggacgcgcgcagtgccgagctgaccaagtacgcagccaactgcatgctggccaccaagatttccttcatcaacgaaatcgccaacctggccgagcacctgggggccgacatcgaaatggtgcgccgtggcatcggctcggacccgcgcatcggttacgacttcatctacgccggctgcggttttggcggctcgtgcttccccaaagacctgcaagccctgcgccacagtgccgaggcggaaggcttcgagacacagttgctgcgggcagtagagtcggtcaacgagcagcagaagggccggctgttcagcaagatccagcgccattaccccggcggcctgcggggcaaggtgtttgccctgtgggggttgtcgttcaagcccaataccaatgatatccgcgaagcttccagccgggtcctgctggaagcactgtgggccgcgggcgcgcgggtgcaggctcacgaccctcaggccatggaagaaatccggcgccactacggcccgcgtgccgacctgcaactggtgccctgcaaggacgatgcgttgcggggcgccgatgccctggtgatcgtcaccgaatggcaggactaccgtgtgctcaacctggacgaggtgccgcagcagctggccgaccgggtggtgttcgatggccgcaacctgtacgaacccgagcacatggcctcggcagggctggcttactacggcatcggacgtggcaagattgcgccagcttga

SEQ ID NO: 72381 - protein, 442 aa, Pseudomonas putida KT2440
MKVTVFGTGYVGLTQAVCLAQVGHSVLCMDVDADRVASLSEGHCPIFEPGLAPLLEKNLACGRLRFTTDAAAAANYARLQFIAVGTPPQADGSADLKHVFAVVDSILEHADGPKVIVNKSTVPVGTVHRIKARIAQAVADTSRFQVISNPEFLKEGSAVDDCMRPQRIIIGGAEAAEVELLRELYLPFNRNREKFMVMDARSAELTKYAANCMLATKISFINEIANLAEHLGADIEMVRRGIGSDPRIGYDFIYAGCGFGGSCFPKDLQALRHSAEAEGFETQLLRAVESVNEQQKGRLFSKIQRHYPGGLRGKVFALWGLSFKPNTNDIREASSRVLLEALWAAGARVQAHDPQAMEEIRRHYGPRADLQLVPCKDDALRGADALVIVTEWQDYRVLNLDEVPQQLADRVVFDGRNLYEPEHMASAGLAYYGIGRGKIAPA

SEQ ID NO: 72382 - DNA, 1263 bp, Bradyrhizobium japonicum USDA 110
  CDS (1)..(1263): transl_table=11
atgaaaattgcagtgttcggacttggttacgtcggtatgacgaccgccgcctgcctggcgaggagcggtcacgaagtcatcggcgtcgacgtcagcgatgaaaaagtcgcaatcgtcaatgcgggcaactcgccgatcaccgagcccggtcttgacgagcttgtcgcgcgagccgtcaggaagggcctgctgagcgcgacgcagaacgcgcgcggacatctcgacaattgcgcgttggccatcgtttgtgtgggtacgcccagtgcaccggacggatcacacaacatgagcttcatagtcgaggtttcccaccagatcgcggaactggtgcgcccagctcgatcgacaaagctgaccgtcgtattccgctccacggtgcggcccggcacgatcgaggaactggtgcttccgatcttcgagaacgcacttaaaggtcgcatggatcgagtcgagcttgtctacaatcccgaattcctgcgcgagtcagtcgcgatcgaagacttcttcaatccgccgaagatcgtgatcgggacgaaggatggagaacgatgcgcggtgcttgatgagttgaacgcaaccatcaatgcgccaactttctacacgacctatcgtgcggcggagataacaaaattcgtcgacaacacattccatgcggtaaaggttgcctttgccaacgaagtgggccgggtttgcgagaaactgggcatcagcgcgacgaccgtccatcagatattcgtctctgataccaagctcaacatctcgccctattatctgagaccaggcggcgcattcggtggctcatgcctaccgaaagacgtccgtgcgctgcaatatatcgcaagcgatgtcggggcgcatacttacctcgtggattcgcttctgaggtcgaatgatgcgcataagaatttcctgtttgagagctgcctgaaagcccttcccacaggcggacacgtgctcatgctggggctctctttcaaggaagacagcgacgatcttcgcgaaagccccaacatcgatttagctcgtaaattccttcagtcgcatatcgacctatcgatctacgacccccaagtcgagccctccaaattgctgggacagaatcttggctatgcgttctctagtctgcccgcattgcgcaagcttctagtctcaagatcgatcgccgagtcggggtcattcgacctcgtcgtcgacaccagaggttgggcgaaaacaatggcgttacgtactcggcgggtcatcaatgtcaacacgctttcgtaa

SEQ ID NO: 72383 - protein, 420 aa, Bradyrhizobium japonicum USDA 110
MKIAVFGLGYVGMTTAACLARSGHEVIGVDVSDEKVAIVNAGNSPITEPGLDELVARAVRKGLLSATQNARGHLDNCALAIVCVGTPSAPDGSHNMSFIVEVSHQIAELVRPARSTKLTVVFRSTVRPGTIEELVLPIFENALKGRMDRVELVYNPEFLRESVAIEDFFNPPKIVIGTKDGERCAVLDELNATINAPTFYTTYRAAEITKFVDNTFHAVKVAFANEVGRVCEKLGISATTVHQIFVSDTKLNISPYYLRPGGAFGGSCLPKDVRALQYIASDVGAHTYLVDSLLRSNDAHKNFLFESCLKALPTGGHVLMLGLSFKEDSDDLRESPNIDLARKFLQSHIDLSIYDPQVEPSKLLGQNLGYAFSSLPALRKLLVSRSIAESGSFDLVVDTRGWAKTMALRTRRVINVNTLS

SEQ ID NO: 72384 - DNA, 1341 bp, Helicobacter hepaticus ATCC 51449
  CDS (1)..(1341): transl_table=11
gtgcatattacaattataggtagtggttatgttggacttgtagcaggggcttgctttgctcaaatgggaaataatgttgtatgccttgatgtggattctaagaaaattttgcaacttcaaaaaggggatattccgatttatgagcccggtttggaatctttagtgcgcgaaaatactgcacttggcacactttgttttactactgacaaaaaagaagcaatttctaatgctgaagtaatttttatcgcagttggcacacctatgggcgatgatggaagtgcagatttatcttatgtgcgcaatgtagcaatggatattgggacgtatatagagcgtgaatatgtggttatagtggataaaagcacagttcctgttggcactgcacgggaagtgcgaaaactaatagaatccacgctcctaaagcgtcatatcacttcagtagcttttgatgtggtaagtaatccagaatttcttaaagagggaatggcgattaaagactttatgagccctgatagagtagtgattggaacagattctacaagagcattagatacaatgaagacactctacgcaccttttttgcttaaaagcgatagatttatttctatggggatagaatctgcggaaatgacaaaatatgccgcaaatgctatgcttgctacgaaaattagctttattaatgaaatgagtcaaatttgtgagcgcgtgggagcaaatattaatgatgtgcgattaggtattggttcagatgcgcgtattggatatagttttatttatccgggttgtggctatggtgggagttgttttcctaaagatgtgcgtgcattagaaaaaaccgcaaaagattttggctatgatgcgtgtattttaggtgcagttcaacgtgtaaataatgagcaaaaaatgcttttggtagaaaaaatcgtgcgctattttggcgaagatttatcagggcttagttttgcattgtggggacttagctttaagccagaaactgatgatatgcgagaagcaagctccttggtgcttatagagcagttaagtaaaaggggagcaaaaattaaagcttatgacccaaaggcttatggacaggcacaattctatcttaaagattatatgcaatctcttaccttagaggagagtaaatatgaggcattaaaggattgtgcggcgcttgtgattgtaacagaatggcgtgagtttagaagcccagactttaatgaaattgcaaaacttcttatgaatcctattatttttgatggacgaaatatttatcaacatcttgatatggaatctaaaggatttgagtattaccaaattggtgtaaagcataataactaa

SEQ ID NO: 72385 - protein, 446 aa, Helicobacter hepaticus ATCC 51449
MHITIIGSGYVGLVAGACFAQMGNNVVCLDVDSKKILQLQKGDIPIYEPGLESLVRENTALGTLCFTTDKKEAISNAEVIFIAVGTPMGDDGSADLSYVRNVAMDIGTYIEREYVVIVDKSTVPVGTAREVRKLIESTLLKRHITSVAFDVVSNPEFLKEGMAIKDFMSPDRVVIGTDSTRALDTMKTLYAPFLLKSDRFISMGIESAEMTKYAANAMLATKISFINEMSQICERVGANINDVRLGIGSDARIGYSFIYPGCGYGGSCFPKDVRALEKTAKDFGYDACILGAVQRVNNEQKMLLVEKIVRYFGEDLSGLSFALWGLSFKPETDDMREASSLVLIEQLSKRGAKIKAYDPKAYGQAQFYLKDYMQSLTLEESKYEALKDCAALVIVTEWREFRSPDFNEIAKLLMNPIIFDGRNIYQHLDMESKGFEYYQIGVKHNN

SEQ ID NO: 72386 - DNA, 1389 bp, Gloeobacter violaceus PCC 7421
  CDS (1)..(1389): transl_table=11
atgaaagtaggggttatcggcaccggttacgtcggcctggtcacgggcgcctgcctgtctaccatcggccacaccgtcgtctgcatggacaacaacaccgccaaagtcgaaggcttgcgccagggcgtcatgccgatttacgaacccggactcgacgagttggtcgctgcggccgtcgccgccgggcggctgcagttcaccaccggcatggccgagaccgttcaagacagtgacgtcgtcttcatcaccgtgggcaccccctcccgggcggacggctcgccggacctctctgccgtgcgcgccgtggcccgctccatcggctcccacctggacggccgcttccgggtgattgtgaacaaatcgaccgtgccggtcggttcgggcaactgggtgcgcatgctggtcgaagacggggcgaacctcgttgccgccaccgccagaagcggccagcacgcgggcaacggtctggcggtgctcgcccccgccgccccgccgaacttcagtgtggcgagcaacccggaatttttgcgcgaaggcagcgcggtctgggacaccttcaatcctgatcgcatcgtcatcggggcggaggacgcccgcgccgtcgaagtgatgcgccgactgtacgcccactgggtgagtcccgccgacaccgatacccaggcggtgccgatggtggtgacggacttggcctccgccgagatgatcaagtacgccgccaacgcctttctggccaccaaaatcagcttcatcaacgaaatcgccaacatctgcgagcgggtgggggcggatgtcacccgcatcgccgaggcgatcggactcgacaagcgcatcggccgctcgtttctgaacgccggggcgggctggggcggttcgtgctttccaaaagacgtctcggccttggtctcgacggcggctgagtatggctacaactgcgagttgctgaaggcgaccttgtcggtcaacgagcaccagcgccaactggtgatcgagaaattgcagcgggagctgcgcattctcaagggtcggacggtggcgctgtggggattggccttcaaaccgcacaccgacgacatccgttgcgcgccggcgttggcggtggcggagcatctgctcaatctcggttgccgggtggtggcccacgacccggtggtgacggcggcccaggtgcaaggtcaactgccggacttgcaagtggcgggtagtgctctggaggctgtccagggggccgatgcgctgttggtgatgaccgagtggcccgagtacggtgggatcgacccgcagacggtggcggcggtactgcgccaaccgattgtcatcgacgcgcgcaactgcctggacacccaggcggtgcagggtgccgggctgcgctacgtcggtgtcggccgctaa

SEQ ID NO: 72387 - protein, 462 aa, Gloeobacter violaceus PCC 7421
MKVGVIGTGYVGLVTGACLSTIGHTVVCMDNNTAKVEGLRQGVMPIYEPGLDELVAAAVAAGRLQFTTGMAETVQDSDVVFITVGTPSRADGSPDLSAVRAVARSIGSHLDGRFRVIVNKSTVPVGSGNWVRMLVEDGANLVAATARSGQHAGNGLAVLAPAAPPNFSVASNPEFLREGSAVWDTFNPDRIVIGAEDARAVEVMRRLYAHWVSPADTDTQAVPMVVTDLASAEMIKYAANAFLATKISFINEIANICERVGADVTRIAEAIGLDKRIGRSFLNAGAGWGGSCFPKDVSALVSTAAEYGYNCELLKATLSVNEHQRQLVIEKLQRELRILKGRTVALWGLAFKPHTDDIRCAPALAVAEHLLNLGCRVVAHDPVVTAAQVQGQLPDLQVAGSALEAVQGADALLVMTEWPEYGGIDPQTVAAVLRQPIVIDARNCLDTQAVQGAGLRYVGVGR

SEQ ID NO: 72388 - DNA, 1440 bp, Nasonia vitripennis
  CDS (1)..(1440)
atgccgataacgaagatctgctgcatcggcgcgggctatgtgggcggcccaacctgcagcgttatcgccctgaaatgtccccacattcgcgtgacggtggtcgacaagagctacgaacgcatcgcccagtggaactcgtcgaagctgccgatctacgagccgggcctcgatgacgtcgtccagcagcgccgcaacaagaacctcttcttctccaccgatatcgcccaggcgatcgaagaagccgagctgatcttcatctcggtgaacacgccgacgaagaccttcggcaacggcaagggccgcgccgccgatctgaagtacgtggaaagcgcggcccgaatgatcgccgacatagcgaccggcgacaaaatcgtcgtggagaagagcacagtgccggtccgcgcagccgagagcatcatgaacatcctgcgagccaatcacaagcccggcgtttcctatcagatcttatccaatcccgagtttctggccgagggaacggcgatcgaggatctgctcaacgccgatcgagtattgattggtggcgaggaatcgccggagggtcaagcggcaattgagcagctctgccaagtctacgagcactggataccacgaaaaaacatcatcaccaccaacacttggagctcggaattgtcaaaattggcagccaacgccattctcgctcagaggatatccagcataaactcgctgtcggccgtctgcgaagccacgggagccgatgtctcggaagtcgctcgggccgttggcctcgactcgaggatcggcccgaagttcatgcaggcttccgttggtttcggcggatcttgctttcagaaggacatactcaatctcgtttacatctgcgagtgcttgaacctgcccgaggtcgcagcctactggcagcaggtcatcgacatgaacgagtatcagaagtcgcgattctcagccaaggtgatcgagtcgctcttcaacacggtgacggacaagaagatctcgctgctgggcttcgccttcaagaagaacacgggcgatacgcgcgagtcgccagccatccacgttgccaaaacactgctggacgagggagccaaactgcacatttacgaccccaaggtcgaagaatcgcagattcttctggatctaactcatccgagtgtgacagcagaaccggaacatgtgagagaaagaatcagtatttacaaggacgcgtacagcgctaccaagaatacacacgcgatcgtcatctgcacggagtgggatgaatttatggaattggacttcaaaaggatctacgcggatatgatgaagcctgcttacatcttcgatggcagaaagatcctggaccacgacaagctgcagaaaattggattcatcgtgcaaaccatcggaaaaaagttaattaggtcttctatctccagagtctggggaagccaaactcagatgtaa

SEQ ID NO: 72389 - protein, 479 aa, Nasonia vitripennis
MPITKICCIGAGYVGGPTCSVIALKCPHIRVTVVDKSYERIAQWNSSKLPIYEPGLDDVVQQRRNKNLFFSTDIAQAIEEAELIFISVNTPTKTFGNGKGRAADLKYVESAARMIADIATGDKIVVEKSTVPVRAAESIMNILRANHKPGVSYQILSNPEFLAEGTAIEDLLNADRVLIGGEESPEGQAAIEQLCQVYEHWIPRKNIITTNTWSSELSKLAANAILAQRISSINSLSAVCEATGADVSEVARAVGLDSRIGPKFMQASVGFGGSCFQKDILNLVYICECLNLPEVAAYWQQVIDMNEYQKSRFSAKVIESLFNTVTDKKISLLGFAFKKNTGDTRESPAIHVAKTLLDEGAKLHIYDPKVEESQILLDLTHPSVTAEPEHVRERISIYKDAYSATKNTHAIVICTEWDEFMELDFKRIYADMMKPAYIFDGRKILDHDKLQKIGFIVQTIGKKLIRSSISRVWGSQTQM

SEQ ID NO: 72390 - DNA, 1464 bp, Yarrowia lipolytica CLIB122
  CDS (1)..(1464)
atgtctcgaccagtctctgaccagcacgttgctcacaagaaaatcaccaaggtgtgctgtctgggcgccggctacgtcggctcccccacgtcggcggtgattgcccacaagtccggcgacctccaggtgacgattgccgacatttccaccgagcgaatctcgcgatggatcaacgccaccaacgaaaaggagctgcccatctatgagcccggtctcttcgacgtgctcgagtgccgaggccgaaacctgcacttcaccgccgacattgacaaggctattgaggaggccgatctcattttcgtgtctgtcaacactcccacgaaaaagaagggtatgggcgcgggctttgccgccgacctgggctacgtggagtctgccacacgacgaatcgccaaggtggctacctcggacaagattgtggtggaaaagtcgaccgtgccctgccgaaccgcccagagcatgcgaaagatcctcgaggccaacggcaagcccggagtgcactttgacattctgtccaaccccgagttcctcgccgagggtaccgccatcaaggacctgctgtcgcctgaccgtgttctcatcggctccctcgacaatgaccgaggcaagtctgccgcagcttcccttgccgagatctacgccaactgggttcctcgagagcgaatcatcaccaccaacgtgtggtcgtccgagctgtccaagctggtcgccaacgccctgctcgcccagcgaatctcctccatcaatgccgtgtctgccatctgtgaggccactggtgctgacgtcgacgaggtcgcctacgcctgtggtctcgatacccgaatcggccccaagttccttaaggcctctgtaggatttggaggctcgtgtttccagaaggatattctcaacctggtctacctgtctgagtcactgcatctgcctgaggtggctgcttactggaagcaggtggttgacatgaacgagtaccagaagagccgattcaccaagcgggtcatccagtcgctcttcaacactctgaccggcaagaagattgcactgttcggttttgctttcaagaaggacactggagacacccgagagtctgctgccattgccctggccaagaactttgtgcaggagcagtgccaggtgtctatttacgaccccaaggttgaggagcagcagatctggttggatctgtccgagcctggagttgattcgtcgctcactgaggccaagaagtatgtcactatcgctaaggatgctttcgaggctgccaaggatgctgatgccattgtcattgccaccgagtgggacgccttcaaggataccgagctcgactacgagaagatttacgagcagatgaacaagcctgctttcatctttgatggacgactgattctggactctaagaagctcgagaagatgggcttcaaggtggaagttattggaaagacaagatctgagctttcctttgagtaa

SEQ ID NO: 72391 - protein, 487 aa, Yarrowia lipolytica CLIB122
MSRPVSDQHVAHKKITKVCCLGAGYVGSPTSAVIAHKSGDLQVTIADISTERISRWINATNEKELPIYEPGLFDVLECRGRNLHFTADIDKAIEEADLIFVSVNTPTKKKGMGAGFAADLGYVESATRRIAKVATSDKIVVEKSTVPCRTAQSMRKILEANGKPGVHFDILSNPEFLAEGTAIKDLLSPDRVLIGSLDNDRGKSAAASLAEIYANWVPRERIITTNVWSSELSKLVANALLAQRISSINAVSAICEATGADVDEVAYACGLDTRIGPKFLKASVGFGGSCFQKDILNLVYLSESLHLPEVAAYWKQVVDMNEYQKSRFTKRVIQSLFNTLTGKKIALFGFAFKKDTGDTRESAAIALAKNFVQEQCQVSIYDPKVEEQQIWLDLSEPGVDSSLTEAKKYVTIAKDAFEAAKDADAIVIATEWDAFKDTELDYEKIYEQMNKPAFIFDGRLILDSKKLEKMGFKVEVIGKTRSELSFE

SEQ ID NO: 72392 - DNA, 1416 bp, Cryptococcus neoformans var. neoformans B-3501A
  CDS (1)..(1416)
atggcccccatcactgtcaagaagatctgctgtatcggcgctggttatgtcggcggtcctacttgcgccgttatcgcgttgaagtgcccccaaattcaagtcaccattgttgacctcaaccagcagcgaattgacgcctggaactctgacaatctccctatctacgagcctggtctcgatgaggttgtcaaggccaccaggggcaagaacctcttcttcagcactgatgttgacaagggtatcgaggacgccgacctcatctttgtttccgtcaacacccccaccaagaagtctggtgtcggtgccggctacgctgccgacttgaagttccttcagctcgccactcgacgaatcgctgaggtcgctacctcttccaaaatcgtcgtcgagaagtccaccgtgccctgcagaactgccgagtctatgcggaccattctcgaggccaactgcaggcccggatgccatttcgatatcctttctaaccctgagttccttgccgagggtaccgctatctccgatcttttcaaccctgaccgagttcttattggttctctccagaccgaacaaggtatcgatgcttgccaagctctttctggcgtctacgccaactgggttcctaaggagcgaattttgaccgtcggcctttggtcttctgagctttccaagctcgctgccaacgccatgttggctcagcgaatttcctctgttaacgccctctctgccatttgcgaggctactggcgccaacattgacgaggtctcctacgctgtcggtaaggacacgcgaatgggttccaagttcctcaaggcgtctgtcggtttcggtggttcttgtttccagaaggacattctcaacttggtctacctttctgagtctctccaccttcccgaggttgccaagtactggcgtgcggttgttgagatgaatgaataccagaagagccgattcgcccgaaaagttgttgacaccctcttcaacaccatcactggaaagaagattgcgattcttggttgggccttcaagaaggacactggtgacacccgagagtctccttccatcggcatcgccaaccacttcttgtccgagaaggctcgtatcgctgtctatgaccctcaagtcacagagtctcagatctggcttgacatgactgatgtacgcagctacggagagattcccgctgagcccatccaaccccaccttacaatctgcaagagtgtcgaggaggcttgtgccaacgcggaggccatcgtcatctgcactgaatgggacgagttcaagactcttgactggaagaagatctacgacaactgtccccgacccgcttttgtctttgatggtcgactcatcctcaaccgacaggagctcaccaacatcggtttcaaggtcgtcactatcggtactggcgaccgtatttaa

SEQ ID NO: 72393 - protein, 471 aa, Cryptococcus neoformans var. neoformans B-3501A
MAPITVKKICCIGAGYVGGPTCAVIALKCPQIQVTIVDLNQQRIDAWNSDNLPIYEPGLDEVVKATRGKNLFFSTDVDKGIEDADLIFVSVNTPTKKSGVGAGYAADLKFLQLATRRIAEVATSSKIVVEKSTVPCRTAESMRTILEANCRPGCHFDILSNPEFLAEGTAISDLFNPDRVLIGSLQTEQGIDACQALSGVYANWVPKERILTVGLWSSELSKLAANAMLAQRISSVNALSAICEATGANIDEVSYAVGKDTRMGSKFLKASVGFGGSCFQKDILNLVYLSESLHLPEVAKYWRAVVEMNEYQKSRFARKVVDTLFNTITGKKIAILGWAFKKDTGDTRESPSIGIANHFLSEKARIAVYDPQVTESQIWLDMTDVRSYGEIPAEPIQPHLTICKSVEEACANAEAIVICTEWDEFKTLDWKKIYDNCPRPAFVFDGRLILNRQELTNIGFKVVTIGTGDRI

SEQ ID NO: 72394 - DNA, 1431 bp, Strongylocentrotus purpuratus
  CDS (1)..(1431)
atggtgataaagaagatatgttgcatgggggcagggtatgttggaggtcccacatgctcggtgattgccctcaaatgtcctgaggtcactgtcactgtcgtcgacctcagccaagctcggatagatgcatggaattcctctgatttcaagctgcctatctatgagccaagtttggagaaggttgtaagagaatgcaggggaagaaaccttttcttctcaaccgatgttgattctgcaatccaagaggctgatctcatattcatttcggtcaacactcctacgaagacatttggattaggcaagggcagagcagcagacctgaagtacattgaggcagcagcacgtcgtattgctgatgtagctacctcggataagatagtggttgaaaagagcacagtaccagtcaaagctgcacagagtatacagagaatactcacagcaaataccaagccaggctgcagatatgaggtgctgtccaatccagagttcctagcagaggggtcggccatcaaggatttattggaaccagacagggtactcataggaggggatacttctcacagcggactaaaggccattgatgaacttgcatccatctatgtgaactgggtaccaaaggatcgtatcatcaagacaaatacgtggtcttcggaactctccaagttggctgccaatgcattcttagctcagagaatttccagcatcaactcgatcagtgcagtatgtgaggcaacgggcgctgacgtgagcgaggtagcacatgccatcggtatggactctaggctaggaccaaagttcctccaagcaagtttaggtttcgggggtagctgtttccagaaggatgttttaaatcttgtgtacctctgtgaagcctgcaatataccagaagtggcacaatactggcagcaggtgattgacatgaatgattaccagaggaggcggtttgccaacaagatcatcgcttgtctgttcaacacggtgacagacaagaagatagccatccttggctttgccttcaagaaagatacaggtgacacaagagagtcttccagcatctacctcagtaaattcctgatggacgagggcgccaaactcagcatttacgaccctcaggtcgcgcctgctcagattttgtgtgagcttaccaaccccagtatatcagcagatcctgaaagagttgagaagcttgtaaccatacactcagatccctatgaggctctgaagggaacccatgcatttgtggtttgcacagagtgggatgaattcaaggattacgactacctacgtatctacaaagacatgctcaagcctgccttcgcatttgacggcagacgactccttgacagctccctcctcgagaatctcggcttccacgtagaggtcgtaggtcgtaagagctggaagaacggtatcctacccgtcactccatag

SEQ ID NO: 72395 - protein, 476 aa, Strongylocentrotus purpuratus
MVIKKICCMGAGYVGGPTCSVIALKCPEVTVTVVDLSQARIDAWNSSDFKLPIYEPSLEKVVRECRGRNLFFSTDVDSAIQEADLIFISVNTPTKTFGLGKGRAADLKYIEAAARRIADVATSDKIVVEKSTVPVKAAQSIQRILTANTKPGCRYEVLSNPEFLAEGSAIKDLLEPDRVLIGGDTSHSGLKAIDELASIYVNWVPKDRIIKTNTWSSELSKLAANAFLAQRISSINSISAVCEATGADVSEVAHAIGMDSRLGPKFLQASLGFGGSCFQKDVLNLVYLCEACNIPEVAQYWQQVIDMNDYQRRRFANKIIACLFNTVTDKKIAILGFAFKKDTGDTRESSSIYLSKFLMDEGAKLSIYDPQVAPAQILCELTNPSISADPERVEKLVTIHSDPYEALKGTHAFVVCTEWDEFKDYDYLRIYKDMLKPAFAFDGRRLLDSSLLENLGFHVEVVGRKSWKNGILPVTP

SEQ ID NO: 72396 - DNA, 1443 bp, Tribolium castaneum
  CDS (1)..(1443)
atggttgttaaaaaaatttgttgtgtgggggctggttacgtcggtggcccaacgtgtagtgtcatagctttgaaatgtccagaaattcatgtaacagtggtagatttatcaaaatcacgaattgatcaatggaattcggacaaacttcctatttacgagccgggtttggacgaaattgttaaacaatgcagagggaggaatctatttttctccaccgacattgaaactgcaattttagaagctgacttaatatttatttcagtgaatacgccgacaaagaccattggaaatgggaagggcagggcccctgacttgaaatacgtcgaaggcgccgctcgaatgattgccgaaatcgcacaaagcgataaaatcgtcgtcgaaaaaagcacagttccggtccgagccgctgaaagcattctaaaaattttaagtgccaaccaaaaaccgggagtttcttatcagattctctcaaatccggaatttttagccgaaggcacagctattaacgatttgattaatgccgaccgtgttctaatcggtggtgaagaaagtcctaaaggaaaagcagcaattgaagaattgtgcggtatttacgaacattggattccacgagaaaaaattttcacaacaaatacttggtcatcggaattatccaaacttgctgcgaatgcaatgttggctcaacgaatctcaagtattaattcattgtcggctgtttgtgaagcaaccggtgctgatgtttccgaagttgcgactgctgttggattagattcgaggattggatcgaaatttttgcaagcttctattggttttggcgggagctgtttccaaaaagacatcctcaatttggtctacatttgcgaatgtttgaatttaccggaagtcgcagcctactggcaacaagtcgtcgatatgaacgaataccaaaaatcacgtttcacagccaaagtcattcaatcactgtttaatacagtgagtggtaaaacagtcacgattttgggtttcgcatttaagaaaaatactggagatacgagggaaaccccagctatacatgtggctaaaacattactcgacgaaggcgctacgttgaaaatctacgaccctaaagtcgaagaagaccagatttactacgatttgactcatccggcagtttgtgagtctccggaaacggtcaaaaaggccatttctgtataccacgatgcttactcagcgtgtgaaaattcgcatgctattgttttgtgcacagagtgggatgaattcaagacgcttgattatcacaagatttaccacgttatgatgaaaccagcttatgtgttcgatggacgaaaaattctagaccatcaaactttgatcgatattggatttcacgtacaaactataggaaagactttgcaaaggccacttttgactagattttgtggggggaatacctgcatgcattag

SEQ ID NO: 72397 - protein, 480 aa, Tribolium castaneum
MVVKKICCVGAGYVGGPTCSVIALKCPEIHVTVVDLSKSRIDQWNSDKLPIYEPGLDEIVKQCRGRNLFFSTDIETAILEADLIFISVNTPTKTIGNGKGRAPDLKYVEGAARMIAEIAQSDKIVVEKSTVPVRAAESILKILSANQKPGVSYQILSNPEFLAEGTAINDLINADRVLIGGEESPKGKAAIEELCGIYEHWIPREKIFTTNTWSSELSKLAANAMLAQRISSINSLSAVCEATGADVSEVATAVGLDSRIGSKFLQASIGFGGSCFQKDILNLVYICECLNLPEVAAYWQQVVDMNEYQKSRFTAKVIQSLFNTVSGKTVTILGFAFKKNTGDTRETPAIHVAKTLLDEGATLKIYDPKVEEDQIYYDLTHPAVCESPETVKKAISVYHDAYSACENSHAIVLCTEWDEFKTLDYHKIYHVMMKPAYVFDGRKILDHQTLIDIGFHVQTIGKTLQRPLLTRFCGGNTCMH

SEQ ID NO: 72398 - DNA, 1329 bp, Mycobacterium sp. JLS
  CDS (1)..(1329): transl_table=11
atgagtcgtcgtattgcggtgttcggcacgggatatctcggcgccacccacgctgcgtgtatggccgatctgggccacgaggtgctcggcgtggatgtcgacgaaggcaagttggcgaagctggcgatgggggagttgccgttctacgagcccggcctgcccgaggtgctgcgcaagaacatcgatgccgggcggctacggtttaccacttcgtacaaggaggcggccgacttcgcagacgtgcacttcattgccgtcgggacgccgcagaagcagggcgaactcgccgcggatctgcggtacgtcgactcggtggtggagacgctggcaccgctactgaccggtcccgcggtgattttcgggaagtcgacagttcctgcggggaccgcctcgcgtctgagcgcgcgggcgcgcgacttgtcgcctgcaggagaccaggtggagctcgcgtggaatccggaattcctgcgggaggggttcgcggtcaaggacacgttgcatcccgaccgcatcgtcctcggcgtcgactcgagcaggtcaagtgccgccgaggacgccgcacgggacgtctacgccgtgctgctcgaggaacaaattccgtttctggtgaccgacttggccacggccgagctggtgaagacgtcggctaatgcgtttctcgcgacgaagatttcgttcatcaacgcgatcgccgaggtttgtgaggcaacgggtgcagatgtgtcggtgttggcggacgcgatcgggcatgacgcccgaatcggccggcgattcctgaacgcaggtatcggctttggcggcggctgcttgccaaaggatatccgggctttcatcgcgatggcgggtgaattgggcgcgggccaggcatttgcacttctgcgcgaggtcgacagcattaatatgcggcggcgcaacaaaatggttgagctggcgcgggaggcggctggtggctcattgatcggcgcacgagttgcggtgctcggcgcggccttcaagcctgattccgatgacgtgcgggattctccggcactgaatatagctgggcagatgcagcttcaaggcgcctcggtaagtgtctatgaccccgaggcaatgcagaacgcccggcagctgttcccaacgctgcactacgcctcggacatccgtgaggcgtgcgcgggtgccgatatggtgatgatcctaacggagtggaagcagttcgtagcgctcgatcctgcggcgctcggcgaggtggcgcgccggcggaccatcattgacggacggaactgcctcgatccagcgacatggcgtggtgctggttggacttatcggggaatcggcaagccgtaa

SEQ ID NO: 72399 - protein, 442 aa, Mycobacterium sp. JLS
MSRRIAVFGTGYLGATHAACMADLGHEVLGVDVDEGKLAKLAMGELPFYEPGLPEVLRKNIDAGRLRFTTSYKEAADFADVHFIAVGTPQKQGELAADLRYVDSVVETLAPLLTGPAVIFGKSTVPAGTASRLSARARDLSPAGDQVELAWNPEFLREGFAVKDTLHPDRIVLGVDSSRSSAAEDAARDVYAVLLEEQIPFLVTDLATAELVKTSANAFLATKISFINAIAEVCEATGADVSVLADAIGHDARIGRRFLNAGIGFGGGCLPKDIRAFIAMAGELGAGQAFALLREVDSINMRRRNKMVELAREAAGGSLIGARVAVLGAAFKPDSDDVRDSPALNIAGQMQLQGASVSVYDPEAMQNARQLFPTLHYASDIREACAGADMVMILTEWKQFVALDPAALGEVARRRTIIDGRNCLDPATWRGAGWTYRGIGKP

SEQ ID NO: 72400 - DNA, 1311 bp, Bradyrhizobium sp. ORS278
  CDS (1)..(1311): transl_table=11
atgaatatcagtatcttcggcctgggctatgttggaaccgtctgtgcggcctgtctggccgagctcggacaccacatcatcggcgtcgacaaggcaggtgccaaggttgaactgatccaggcaggccagtccccggtcatcgaacccggaatctccgaaaaggtcgcggcagccgtggctgccggccgcctgaccgcttcgaccgatgcaacggcggcaatcgctgccaccgacatctcgatgatctgcgtcggaaccccttccgcggcttcgggagacctcgacctgaccgccattcgtcaagtcgcagccgaaatcggccacggcctcagagagaagcccacgtcccatctcgtggtcatccgatcgacggtcctgccagggacgtcccaaaggattgtcgttcctctgatcgaggaggcctcgggaaagaaggccgggaccgattttgagatcagcttcaatccggagttcctccgggagggatgcgcaatcgcggacttcaactccccgtccaagacggttgtcggcgctgaccgcagcgagacggccgcacgcattctctcgctctatgagcagctccccggcgccaagatcgcggcctcgatcgaaactgccgaactcgcgaagtacatcgataatacctggcatgcgctcaaggtcgcatttgccaacgaggtcggcgtgatcgccaagacgttggatatcgatagccgcgaggtcatcgacattttcctgcaggatacccgcctgaatatatcagccgcctatcttcgaccaggcttcgccttcggcggctcgtgtctccccaaggatatcaaggcgctcaagcacctcgctggtcgtcatggactgagcgtcccggtcatcgagaacgtcctgccgagcaacgacatggtgatgtcgcgtggtgtcgattggattctggctcagccgggccgaaaggtggcgtttctcggcatcagcttcaaggccggcaccgacgatgttcgcgaaagcccgttcgttcttttggtcaacgggctgctgagccgagaccgcgaggtccgcgtctacgatcccaatgtgcgcctgtcccaactgatcggtgccaacagggacttcctcatgcgcaaccggcagatcgccgatattctcgtcgatgatgtcgctgagacgatcgactgggccgacatcatcgtgctgaccaccaatgatccgcgcttcatcgatgccctgcgcagcacacgcgccgaccagaccgtcctcgaactgacggaggcccggctgccggcggatgtccaggcgaccgtgaaaggcttccactggtga

SEQ ID NO: 72401 - protein, 436 aa, Bradyrhizobium sp. ORS278
MNISIFGLGYVGTVCAACLAELGHHIIGVDKAGAKVELIQAGQSPVIEPGISEKVAAAVAAGRLTASTDATAAIAATDISMICVGTPSAASGDLDLTAIRQVAAEIGHGLREKPTSHLVVIRSTVLPGTSQRIVVPLIEEASGKKAGTDFEISFNPEFLREGCAIADFNSPSKTVVGADRSETAARILSLYEQLPGAKIAASIETAELAKYIDNTWHALKVAFANEVGVIAKTLDIDSREVIDIFLQDTRLNISAAYLRPGFAFGGSCLPKDIKALKHLAGRHGLSVPVIENVLPSNDMVMSRGVDWILAQPGRKVAFLGISFKAGTDDVRESPFVLLVNGLLSRDREVRVYDPNVRLSQLIGANRDFLMRNRQIADILVDDVAETIDWADIIVLTTNDPRFIDALRSTRADQTVLELTEARLPADVQATVKGFHW

SEQ ID NO: 72402 - DNA, 1329 bp, Methylococcus capsulatus str. Bath
  CDS (1)..(1329): transl_table=11
atgaaagtcaccatctttggttccggctatgtgggattggttaccggcgcttgtctggccgaagtcggcaacgacgtcgtctgcatcgacatcgacgctggcaagatcgaacgcctcgagcggggcgaggtgccgatctacgagcccggcctcgataccatcatcaaacgcaacatggtggccggccgcttgcagttcaccaccgatatcgacctgggcgtgagccacggcctgttccagttcatcgccgtcggcacgccgcccgacgaggacggctcggccgatctgcaatacgtgctggccgtggcgcgcagcatcggcgagcggatgcaggaataccgggtggtcgtcaacaagtccaccgtaccggtgggaacggcggacaaggtgcgtggcgcggtgagtgaggtgctggcccggcgtggtgtggccatcgagttcgacgtggtctccaatccggaattcctgaaggaaggcgcggccatcgaggacttcatgaagccggaccggatcgtggtcggcaccgataacccgcgcaccacggaactgctgcgcgccctctatgcccctttcaaccgtagccacgaccgcatggtgtgcatggacatccgctccgccgagctgaccaagtatgccgccaatgccatgctggccaccaagatcagcttcatgaacgagctggccaacctcgccgagcggctgggcgcagatatcgagaaggtccgggtcggtatcggttccgatccgcgcatcggctaccatttcatctatcccggctgcggttacggcggctcctgtttccccaaggacgtcaaggccctggagcgtaccgcccgcgatgccggttatcccgcccagttgctgcaggcggtggaggccgtgaacgaccgccagaaggaaaagctgttcgagaaaatcagcgcctatttcgggggcgatctggccggcaagaccatagcggtctggggactggccttcaagccgaacaccgacgacatgcgcgaagcacccagccgcaccctgatggaagcgctgtggcgggcgggggcgaaagtacgggcgttcgatcccgtggcgcaggaggaagcccatcgcatctatggcgaccgggcggacctgatcctgtgcgattcgccggaatcggccctgcgaggcgccgatgcgctggcggtggttaccgaatggaacgtgttccgcagtcccgatttcgacgaaatcaagcagtccctcacccgtcccgcggtgttcgacggccgcaacatctacgatccagcacagatgaaggccaaggggttcgattatttcgccatcgggcgaggctcagtctga

SEQ ID NO: 72403 - protein, 442 aa, Methylococcus capsulatus str. Bath
MKVTIFGSGYVGLVTGACLAEVGNDVVCIDIDAGKIERLERGEVPIYEPGLDTIIKRNMVAGRLQFTTDIDLGVSHGLFQFIAVGTPPDEDGSADLQYVLAVARSIGERMQEYRVVVNKSTVPVGTADKVRGAVSEVLARRGVAIEFDVVSNPEFLKEGAAIEDFMKPDRIVVGTDNPRTTELLRALYAPFNRSHDRMVCMDIRSAELTKYAANAMLATKISFMNELANLAERLGADIEKVRVGIGSDPRIGYHFIYPGCGYGGSCFPKDVKALERTARDAGYPAQLLQAVEAVNDRQKEKLFEKISAYFGGDLAGKTIAVWGLAFKPNTDDMREAPSRTLMEALWRAGAKVRAFDPVAQEEAHRIYGDRADLILCDSPESALRGADALAVVTEWNVFRSPDFDEIKQSLTRPAVFDGRNIYDPAQMKAKGFDYFAIGRGSV

SEQ ID NO: 72404 - DNA, 1317 bp, Azoarcus sp. EbN1
  CDS (1)..(1317): transl_table=11
atgaaaataagcattttcggcctcggttacgtcggagcggtgtcgctcgcgtgcctcgcgcgcgacgggcacaacgttgtcggcgtcgacatcgacgccgcgaagctcgacctgatccgcgccggcacgactccggtcgtcgaggaagggatggtcgagctgatggagaaagtcgctgcgagcggccggatcacggtcacgaccgacacgcgccaggccctgcgcgacagcgacctctcgctggtctgcgtcggcacgccgtcggcagcgaacggcagccaggaccagggcgcggtgctgcggctggcgaaggatctcggccgcgcgatcgccgaaaaggacgtgccgcacgtcgtcgtgttccgttcgacgctcgtgccgggcacggtcgaagagacgctccgcccgatcatcgaggccgaatccggcaagcgcgacggcgaaggctttcacctgtgcttccagccggagttcctgcgcgaaggcagctcgatccgcgactacgacaagccgccgttcaccgttgtcggcgcgaatcacgcgtatccggtcgagcgtctgcgcgaactcttcggccacctgccgtgcaaattcctgcagacctcggtacgcgccgccgagatgatgaagtactgctgcaacaactttcacgcgctcaagatcacgttcgcgaacgagaccgcgcgcctgtgcgaggcgctcggcgtcgacgcgttcgaagtcatgaacctcgtctgccaggacacgcagctgaacatctctccggcatacctgaagcccggcttcgcgttcggcggctcctgcctgccgaaggatctgcgggcgacgacttacttcgccaagatgcatgacgtcgaagtgccgatgctgtccggcatcctgcagtccaaccgccagcacatcgaccgcgcgatcgcgaaagtgctcgaatccggccaccgcaagatcggcatgctcggcctgtcgttcaagaccggcaccgacgacctgcgcgagagcccactcgtcgtactcgccgaacagctgatcggcaaaggcatgcagctctcgatctacgaccccgacgtgcaactctcgcgcctgctcggcgcaaaccgccgcttcatcgaaacccagttgccgcacatcggcgatctattgaaggcggatctcgccgaagtcatcgcgtcggtggacgtgctcgtcgtcggcgtgtcgaacccgctgatcttcgacgtcctcgcgacgcattcgcggcccgggcagtacgtgctcgacctggtcaatctgccgaatgcggagatgatcgaggcgcgggtcgaagggctgtgctggtga

SEQ ID NO: 72405 - protein, 438 aa, Azoarcus sp. EbN1
MKISIFGLGYVGAVSLACLARDGHNVVGVDIDAAKLDLIRAGTTPVVEEGMVELMEKVAASGRITVTTDTRQALRDSDLSLVCVGTPSAANGSQDQGAVLRLAKDLGRAIAEKDVPHVVVFRSTLVPGTVEETLRPIIEAESGKRDGEGFHLCFQPEFLREGSSIRDYDKPPFTVVGANHAYPVERLRELFGHLPCKFLQTSVRAAEMMKYCCNNFHALKITFANETARLCEALGVDAFEVMNLVCQDTQLNISPAYLKPGFAFGGSCLPKDLRATTYFAKMHDVEVPMLSGILQSNRQHIDRAIAKVLESGHRKIGMLGLSFKTGTDDLRESPLVVLAEQLIGKGMQLSIYDPDVQLSRLLGANRRFIETQLPHIGDLLKADLAEVIASVDVLVVGVSNPLIFDVLATHSRPGQYVLDLVNLPNAEMIEARVEGLCW

SEQ ID NO: 72406 - DNA, 1380 bp, Synechococcus elongatus PCC 6301
  CDS (1)..(1380): transl_table=11
atgagagtcagtgtgattggaaccggctatgtcggcctcgtgaccggcacttgtctggcacatattggccatgaggtgctctgcatcgacaacaacaccgccaagatcgagcagattcaggcgggtcaaatcccaatctatgagccgggactagaagatctgattcaacgagcgacagcggccggacggctgcagttcagtacagatttggctgctggcgtcgctcatgctgaggtgatttttatcgccgtgggaacgccgcctctgcccaacggcgaagctgatatgcgctttgtggaagcagtagcgcggggcattggggaacatttggatggcgaaacctatcgggtgattgtcaataaatcgacggtgccgattggctcgggcgattgggtgcggatgttgatactcgatggcatgttggcgcgacgacaggccttagtcccagttggggcggcgatcgctgatagcgaggatttgccccaaggttgttttgatgtggtcagcaatccggagttcctgcgggaaggcacagcgatttacgacaccttcaaccccgatcgtattgttctggggggcagcagcgatcgcgcctttgccaagatgcaggaactctacgaaccgattgtgcagcgccagtttgccgtcgatcgcgatcgcccacccgtgccggtgctgcgaacggatctgggttcggccgaaatgatcaaatatgcagccaatgcttttctggcgaccaaaatcagcttcatcaatgaagtcgccaacatctgcgatcgcgtcggcgcggacgttgtccaagttgccaaagggatgggactggatgcgcggattggcagccgcttcctcaatgctggcttgggctggggtggttcttgttttcccaaggatgtctcggccttggtccacatcgcccaggactatggctatccggctgccttgctagaagccacgatcgcggtcaatcaacgtcagaggctgatcttgctggagaagctgcagcaggaactaaaaattctcaagggcaaaacgatcggtctgctggggctaacctttaagcccgataccgatgacctacgcgatgctccctccctgaccttggccgagcagttgttgcggctaggtgccaaggtcaaagcctatgacccgatcgtcaaaacggccccgatcgcgggtctggaaattacaacctcccccctcgatctcgccagcggctgtgatgccttggctctcgtgacggaatggcaagagtttcaggagctggactacctgcccttggctgcccgaatgcggcgaccgctgatcattgatggccgcaactgcctcgatcgcgatcgccttcagatgcagggcttccgctacatcgggatcggtcgctaa

SEQ ID NO: 72407 - protein, 459 aa, Synechococcus elongatus PCC 6301
MRVSVIGTGYVGLVTGTCLAHIGHEVLCIDNNTAKIEQIQAGQIPIYEPGLEDLIQRATAAGRLQFSTDLAAGVAHAEVIFIAVGTPPLPNGEADMRFVEAVARGIGEHLDGETYRVIVNKSTVPIGSGDWVRMLILDGMLARRQALVPVGAAIADSEDLPQGCFDVVSNPEFLREGTAIYDTFNPDRIVLGGSSDRAFAKMQELYEPIVQRQFAVDRDRPPVPVLRTDLGSAEMIKYAANAFLATKISFINEVANICDRVGADVVQVAKGMGLDARIGSRFLNAGLGWGGSCFPKDVSALVHIAQDYGYPAALLEATIAVNQRQRLILLEKLQQELKILKGKTIGLLGLTFKPDTDDLRDAPSLTLAEQLLRLGAKVKAYDPIVKTAPIAGLEITTSPLDLASGCDALALVTEWQEFQELDYLPLAARMRRPLIIDGRNCLDRDRLQMQGFRYIGIGR

SEQ ID NO: 72408 - DNA, 1320 bp, Bacillus clausii KSM-K16
  CDS (1)..(1320): transl_table=11
ttggaacaaatcgccgtcgtcggcaccggctacgttggcctcgtaaccggcgttgccttgtcggatattggccactcggttacatgcgtagacattgatgaacagaaagttgaattgatgcaaagcggtgtttctccgatttatgaaccgggtttgtcggagctaatgacgaaaaacattaaagcaggtcggttgtcctttacgactaagcatcaacaggcatttgcaggggctgatgcgatttatatagcggtgggcactccacagaaggaagatggcatggctgatcttcgctttattgaggcagtcgcagaccatattgctgagcaccttacccattatgcggtggttgtcacgaaaagcacggtaccggttggaaccaatgattacattaaatcttacattgaaaagcatacggatgtaccattcgatgttgtctcgaatcctgagtttttgcgtgaaggttcagcggtacatgatacgttccatggtgaccgtattgtcatcggtgccgacagtgtgattgctggtgatttgattgaggaaatcaacaagccgtttggcattcctgtttttcggacggacattcgcagtgctgagatgattaagtatgcgtcgaatgcgtttcttgccacaaagatcagttttgtcaatgagattgctaatttatgcgagaaattgaatgcgaacgtagatgatgttgcgagaggcatgggacaagataagcggattggcgacaaatttttaaatgctggaattggctatggcggctcctgttttccgaaggatacgagcgcgcttgtgcaaattgctggcaatgtcgagcatgaatttacattgttaaaagcagtcattgaagttaactataagcaacaacgcctgcttgttgaaaaagcgagagaacactttggttcgttgcgcggtaaaacgattgcgatgttagggttggcgtttaagccgaatacagatgatatgcgtgaagcagcttccatcattctagcgcaagaacttattttagcaggcgcccgtgttgttgcttatgacccaatcgccatggaaaatgcgagaaacgtgcttcccgctgctgtcgactatgcagacagtgcgtttgctgctattcaaggcgcagatacggcgtttgtggtgacggagtgggatgagatttgtgccctcacgcctggagatttcaaagcgaatctaaaagaaccggttgtgtttgatgggcgcaattgctttaacatcgaaacgatgaaagaagctggattgaattactattctgtggggcgtccagttgtaaagacggagaaagagttagtttga

SEQ ID NO: 72409 - protein, 439 aa, Bacillus clausii KSM-K16
MEQIAVVGTGYVGLVTGVALSDIGHSVTCVDIDEQKVELMQSGVSPIYEPGLSELMTKNIKAGRLSFTTKHQQAFAGADAIYIAVGTPQKEDGMADLRFIEAVADHIAEHLTHYAVVVTKSTVPVGTNDYIKSYIEKHTDVPFDVVSNPEFLREGSAVHDTFHGDRIVIGADSVIAGDLIEEINKPFGIPVFRTDIRSAEMIKYASNAFLATKISFVNEIANLCEKLNANVDDVARGMGQDKRIGDKFLNAGIGYGGSCFPKDTSALVQIAGNVEHEFTLLKAVIEVNYKQQRLLVEKAREHFGSLRGKTIAMLGLAFKPNTDDMREAASIILAQELILAGARVVAYDPIAMENARNVLPAAVDYADSAFAAIQGADTAFVVTEWDEICALTPGDFKANLKEPVVFDGRNCFNIETMKEAGLNYYSVGRPVVKTEKELV

SEQ ID NO: 72410 - DNA, 1317 bp, Pseudomonas fluorescens Pf-5
  CDS (1)..(1317): transl_table=11
atgcgcatcagcatatttggtttgggttacgtcggtgcagtatgtgccggttgcctgtccgcacggggccatgaagtggttggcgtagatatctccaaagacaagatcgacctgatcaacgccggcaagtcgccgatcgtcgaaccgggcctgggcgaacttctggcgcaaggaatccagaccgctcgtctgcgtggcaccaccaacttcgccgaggccattcgcgataccgacctgtcgatgatctgcgtcggtaccccgagcaagaagaacggcgacctggaactggactacatcgaatcggtgtgccgcgagatcggtttcgtcctgcgcgacaaggccacccgccacaccatcgtggtgcgcagcaccgtgctgccgggcaccgtgaagaacgtggtgatcccgatcctcgaagactgctcgggcaagaaggccggggtggatttcggcgtcgcggtgaaccccgagttcctgcgtgaaagcaccgcgatcaaggactacgacttcccgcccatgaccgtgatcggccagttcgaccaggcctccggtgatgtgctgcaagcgctgtacgaagagctcgatgcaccgatcatccgcaaggacatcgaagtcgccgagatgatcaagtacacctgcaacgtctggcacgccaccaaggtcaccttcgccaacgagatcggcaacatcgccaaggcggtgggcgtggacggccgtgaagtgatggacgtggtctgccaggacaagaccctcaacctgtcccagtactacatgcgcccgggcttcgccttcggcggatcgtgcctgcccaaggacgtgcgcgccctgacctaccgcgccggctccctggacattgaggcgcccctgctcaactcgctgatgcgcagcaatgaatcccaggtgcagaacgccttcgacatcgtttccagccatgacaagcgcaaggtcgccctgctgggcctgagcttcaaggccggcaccgacgacctgcgcgagagcccgctggtggaactggcggaaatgctcatcggcaagggcttcgacctgagcatctacgacagcaacgtcgagtacgcccgggttcacggcgccaacaaggactacatcgagtcgaagatcccccacgtttcgtccctgctcaactcggacttcgacgcggtaatcggcaactccgacgtgatcattctcggcaaccgcgacgagaagttccgcgccctggccgaagacgtgccccacggcaagcaggtcatcgacctggtgggcttcatgtccaaggctacctgcagcaaaggccgtaccgaagggatctgctggtaa

SEQ ID NO: 72411 - protein, 438 aa, Pseudomonas fluorescens Pf-5
MRISIFGLGYVGAVCAGCLSARGHEVVGVDISKDKIDLINAGKSPIVEPGLGELLAQGIQTARLRGTTNFAEAIRDTDLSMICVGTPSKKNGDLELDYIESVCREIGFVLRDKATRHTIVVRSTVLPGTVKNVVIPILEDCSGKKAGVDFGVAVNPEFLRESTAIKDYDFPPMTVIGQFDQASGDVLQALYEELDAPIIRKDIEVAEMIKYTCNVWHATKVTFANEIGNIAKAVGVDGREVMDVVCQDKTLNLSQYYMRPGFAFGGSCLPKDVRALTYRAGSLDIEAPLLNSLMRSNESQVQNAFDIVSSHDKRKVALLGLSFKAGTDDLRESPLVELAEMLIGKGFDLSIYDSNVEYARVHGANKDYIESKIPHVSSLLNSDFDAVIGNSDVIILGNRDEKFRALAEDVPHGKQVIDLVGFMSKATCSKGRTEGICW

SEQ ID NO: 72412 - DNA, 1320 bp, Dechloromonas aromatica RCB
  CDS (1)..(1320): transl_table=11
atgaaaattaccgtcgtcggtaccggctatgtgggactggtcagtggcacctgtctggccgaagtaggcaacgatgttctttgtctggacgttgatccggaaaagattcgcatcctcgaagaaggtggcattcccatcttcgaacccggtctgcaagacatggtccgccgcaacgttgcggccggccgcctgcacttcaccaccgacgttgaaaaggctgtacagcacggcacggtccagttcattgcggtcggtaccccgcccgatgaagacggctcggccgaccttcagtacgtcctcggcgccgcccgtaacatcggccgcctgatgaccgactacaaggtcgtcgtcgacaagagtaccgtgccagtcggtaccggggccaaggtccatgctgccattgctgacgagttgcagaagcgcggagtcaagacgccttacagcgtcgtatcgaatccggaattcctgaaggagggtgctgcggtcgaggacttcatgcgtcccgaccgtattgtcgtcggggccgaagacgaacaggccatccatttgatgcgtgctctgtacgccccgttccagcgcaaccacgagcgtctgatcgtcactgatatcaagagtgccgagctcaccaagtacgccgccaatgccatgctcgccacccgcatcagcttcatgaacgaactggccaacctggccgaagtgctgggtgccgacatcgaaatggttcgccagggtatcggctccgacccgcgtatcggctatcacttcctctatcccggttgcggctacggcggctcctgcttccccaaggacgtcaaggcgctgatcaagaccgcccaggacgacgccgatatcaccctcaaggtgctcaccgcggttgaagaagccaacgatgcccagaagcacatcctgaccaagaaactcaaagccaggttcggcgatctcaaaggcaagcacttcgccctctgggggctcgccttcaagcccaacaccgacgacatgcgcgaagcagctagccgtgaattgattgccgacctgtttgaggctggagccacggtcaccgcctacgacccggtcgccatgcacgaaacgcagcgtatctacggcgacgaatcgcgtctgaaatacgccgaaaatccgatgggtgcgcttaccgatgccgatgcattggtcatcgtgaccgagtggaaagaattccgcagcccggacttcgaagagatcaagaaggccctgaagaatccggtaatctttgatggtcgtaacctgtatgacccgaaattcgtacgagcttcgggcatcgagtatttcgcgatcgggcgttaa

SEQ ID NO: 72413 - protein, 439 aa, Dechloromonas aromatica RCB
MKITVVGTGYVGLVSGTCLAEVGNDVLCLDVDPEKIRILEEGGIPIFEPGLQDMVRRNVAAGRLHFTTDVEKAVQHGTVQFIAVGTPPDEDGSADLQYVLGAARNIGRLMTDYKVVVDKSTVPVGTGAKVHAAIADELQKRGVKTPYSVVSNPEFLKEGAAVEDFMRPDRIVVGAEDEQAIHLMRALYAPFQRNHERLIVTDIKSAELTKYAANAMLATRISFMNELANLAEVLGADIEMVRQGIGSDPRIGYHFLYPGCGYGGSCFPKDVKALIKTAQDDADITLKVLTAVEEANDAQKHILTKKLKARFGDLKGKHFALWGLAFKPNTDDMREAASRELIADLFEAGATVTAYDPVAMHETQRIYGDESRLKYAENPMGALTDADALVIVTEWKEFRSPDFEEIKKALKNPVIFDGRNLYDPKFVRASGIEYFAIGR

SEQ ID NO: 72414 - DNA, 1317 bp, Pseudomonas fluorescens PfO-1
  CDS (1)..(1317): transl_table=11
atgcgcatcagcatatttggtttgggttacgttggcgcagtatgtgccggttgcctgtctgctcggggccacgacgtggtgggcgtcgatgttgccaaagacaagatcgacatgatcaacgctggcaaatctcccattgttgaaccgggcctgggtgagttgctcgcacaaggtatccagaccggtcgtctgcgcggtacgaccaacttcgccgaagcgattcgcgacaccgacctgtcgatgatctgcgtcggtacgccgagcaagaagaacggcgacctggaactgaactacatcgaagcggtatgccgcgagatcggttttgtcctgcgtgaaaagtccacccgtcacaccatcgtcgtgcgcagcaccgtactgccgggcaccgtggcaaacgttgtcatcccgattctcgaagactgctccggcaagaaagccggcgtcgatttcggcgtggcggtcaacccagagttcctgcgtgaatccaccgcgatcgccgactacgacctgccaccgatgaccgtcatcggcgagttcgacaaggcgtcgggtgacgttctgcaatcgctgtacgaagaactcgacgcaccgatcatccgcaaggacatcgccgtcgccgagatgatcaaatacacctgcaacgtctggcacgccaccaaagtgaccttcgccaacgagatcggcaacatcgccaaagcagtgggcgtcgatggccgcgaagtgatggacgtggtctgccaggacaagaccctcaacctgtcccagtactacatgcgcccgggcttcgctttcggcggttcgtgcctgcccaaagacgtgcgcgccctgacctaccgtgccggctcgctggacgtggaagcgccgctgctcaactcgctgatgcgcagcaacgaatcgcaagtacagaacgccttcgacatcgttgaaagccacgacaaacgcaaagtcgccctgctcggcctgagcttcaaggccggcaccgacgacctgcgcgaaagtccgttggtggaactggccgagatgctgatcggcaagggttacgacctgagcatctacgacagcaacgtccagtacgcccgtgtccacggcgcgaacaaggactacatcgagtcgaagatcccgcacgtatcgtccctgctcaattcggacttcgattcggtgatcgacaactccgacgtgatcatcctcggcaaccgcgacgagaagttccgcgccctcgccgaagaagcgccgcagggcaagcaggtgatcgacctggtgggcttcatgtccaaggccaccagtgccggtagccgcaccgaagggatctgctggtaa

SEQ ID NO: 72415 - protein, 438 aa, Pseudomonas fluorescens PfO-1
MRISIFGLGYVGAVCAGCLSARGHDVVGVDVAKDKIDMINAGKSPIVEPGLGELLAQGIQTGRLRGTTNFAEAIRDTDLSMICVGTPSKKNGDLELNYIEAVCREIGFVLREKSTRHTIVVRSTVLPGTVANVVIPILEDCSGKKAGVDFGVAVNPEFLRESTAIADYDLPPMTVIGEFDKASGDVLQSLYEELDAPIIRKDIAVAEMIKYTCNVWHATKVTFANEIGNIAKAVGVDGREVMDVVCQDKTLNLSQYYMRPGFAFGGSCLPKDVRALTYRAGSLDVEAPLLNSLMRSNESQVQNAFDIVESHDKRKVALLGLSFKAGTDDLRESPLVELAEMLIGKGYDLSIYDSNVQYARVHGANKDYIESKIPHVSSLLNSDFDSVIDNSDVIILGNRDEKFRALAEEAPQGKQVIDLVGFMSKATSAGSRTEGICW

SEQ ID NO: 72416 - DNA, 1404 bp, Burkholderia sp. 383
  CDS (1)..(1404): transl_table=11
atgaaggtacggatcgccatcgtcggcacgggctacgtcgggctggtcagcggcgcgtgctttgcggatctcgggcatgacgtcgtctgcatcgacaacaatcgcggcaagatcgacgcgctgaacgaaggacgcatgccgatctacgaaccgggcctcgacgccgtcgtcgcacgcaacgtcgaacgcggcacgctgcgcttcagcagcgacctcgcggcgagcgtgtgcgatcgcgacgcggtattcatcgcggtcggcacgccgacgctgccgggcaccgaccaggcagacctgcagtacgtcgaggcggccgcgcgcgagatcgcgtcgaacctgaccggtttcgcggtcgtcgtcacgaagtcgaccgtgccggtcggcaccaaccggatcgtcaagcagatcgtcgaacgctgcgcgccggacggcatcgacacggcgatcgcatcgaatccggagttcctgcgcgaagggtcggcgatcgacgatttcatgcacccggaccgcgtcgtgttcggcgccgagcatccgcgtgcgatcgagatcatgaaggccatctatgcgccgctggaagcgatgggccatctcgtgcttgcaaccgagatcgaaacggccgaactcgtgaaatacgcggcgaatgcattcctcgcggtgaagatcagctacatcaacgagatctcggacctgtgcgaagccgtcggcgccgatgtcgaactggtcgcgaacggcatgggcctcgaccgccgcatcggcgcatcgttcctgaaggccggccccggctggggcggctcgtgctttccgaaggacacgcgcgcactgaaggcgacggcttccgaacatgcggtgccgctgcgcatcgtcagcgcggcgatcgaatcgaatgcgctgcgcaaggagcagatcctgcgccgcatcgagaaggcctgcggcggctcgatcaaggacaagcgcatcgcggtgctcggcctcacgttcaaaggccagaccgacgacgtgcgcgaaagcccgagcatcgacgtgatccagctgctcgtcggcgcgggcgcgcatatccgcgcatacgacccggcgcgtccgcacgaagcgtcgcggctgctgccgcaggtattcatggagggctccgcgatcgatgcggtgcgcagcgcggacgccgtcgtcgtgatgaccgaatggaaggcgttcgaggcactcgatctcgccgacctcgcggatcacatggccgatcccgtgatgctcgacatgcgcaacctgttcagcgaacggctcgctgtcgacagcggctttcgccgctacgaacgcgtgggccgctcgtgcggcgaacgcacgccggccgacccggcaccggaacaacagcacgcgaacgaggacacccggccgcagcgcggcctgcttcaagactga

SEQ ID NO: 72417 - protein, 467 aa, Burkholderia sp. 383
MKVRIAIVGTGYVGLVSGACFADLGHDVVCIDNNRGKIDALNEGRMPIYEPGLDAVVARNVERGTLRFSSDLAASVCDRDAVFIAVGTPTLPGTDQADLQYVEAAAREIASNLTGFAVVVTKSTVPVGTNRIVKQIVERCAPDGIDTAIASNPEFLREGSAIDDFMHPDRVVFGAEHPRAIEIMKAIYAPLEAMGHLVLATEIETAELVKYAANAFLAVKISYINEISDLCEAVGADVELVANGMGLDRRIGASFLKAGPGWGGSCFPKDTRALKATASEHAVPLRIVSAAIESNALRKEQILRRIEKACGGSIKDKRIAVLGLTFKGQTDDVRESPSIDVIQLLVGAGAHIRAYDPARPHEASRLLPQVFMEGSAIDAVRSADAVVVMTEWKAFEALDLADLADHMADPVMLDMRNLFSERLAVDSGFRRYERVGRSCGERTPADPAPEQQHANEDTRPQRGLLQD

SEQ ID NO: 72418 - DNA, 1266 bp, Novosphingobium aromaticivorans DSM 12444
  CDS (1)..(1266): transl_table=11
ttgaagatcgcaattctcggccttggctatgttggttgcaccgcagcagggtgcattgccagccagggccatcacgtggtcgggatcgacgtgaacctgggcaaggtcgaaacgctgaacacgggcaaatcgccagtctatgaaccgggtctcgacgacctgatcgccaaagctcgcgcggaaggccgattgcatgcggttaccgagatcggctcggcgctcgacgattgcgacatcgcgatcgtctgcgtcggcacgccaagcggcgtcgatggcgcgcacaacatgagcttcatcgtacaggtatcgcgggcaatcgcggcatccgtgcgacccgaccgcaagacgccccttacggtcgtgtaccgatcgaccatgcgccccggcacgaccgagcaaatgatccttccgatcttccgttcggtgatcggcgaggactgcgaaaagcttatcgagctggtctacaacccggagttcctgcgcgaggccactgcgatcgaggactatttccacccgcccaagatcgtcctcggaacgatcgatggcgccccgtccgagaagatggtggcgcttcatgaaggcatcgaagcgccgatcttccacgtgggcattcgcgaagcagaaatcacgaagttcgtggacaacacctggcacgccgtgaaggtcgctttcgccaacgaggtcggccgggtgtgccagaacctgggcatttcggcaaagcaggtgcacgagatcttcgtctcggacacaaagctcaacatctcggcctactacacgcgtcccggcggccccttcggaggatcttgcctgcccaaggacgtccgcgcgctgcagcatatcgcggccgataccggtgcgcagacccatctcgtcgattccttgctgcgcagcaatgatgcgcacaagcaccaccagttcctgcaggtgaccaaggatctccagccgggcgcaagggtcctgctggtcggccttgcgttcaaggcggacaccgacgacctgcgcgagagccctgcggtggacatggcccgcaagctgctcgacgcgggctacgcgctcgacatctacgatccgcaactgcggcccgagagcctggtcggccagaacctcggctatgcctatgcgatccttccgtccatcgacgggctgctggtggacaagacgaccgcggaagcgcgcgactacggcgtggtgattgcgaccaatcgcctcattcgcgacctcgcgcttccgggccgccgtatcgtcgacgtgagcgccattgcatga

SEQ ID NO: 72419 - protein, 421 aa, Novosphingobium aromaticivorans DSM 12444
MKIAILGLGYVGCTAAGCIASQGHHVVGIDVNLGKVETLNTGKSPVYEPGLDDLIAKARAEGRLHAVTEIGSALDDCDIAIVCVGTPSGVDGAHNMSFIVQVSRAIAASVRPDRKTPLTVVYRSTMRPGTTEQMILPIFRSVIGEDCEKLIELVYNPEFLREATAIEDYFHPPKIVLGTIDGAPSEKMVALHEGIEAPIFHVGIREAEITKFVDNTWHAVKVAFANEVGRVCQNLGISAKQVHEIFVSDTKLNISAYYTRPGGPFGGSCLPKDVRALQHIAADTGAQTHLVDSLLRSNDAHKHHQFLQVTKDLQPGARVLLVGLAFKADTDDLRESPAVDMARKLLDAGYALDIYDPQLRPESLVGQNLGYAYAILPSIDGLLVDKTTAEARDYGVVIATNRLIRDLALPGRRIVDVSAIA

SEQ ID NO: 72420 - DNA, 1290 bp, Acidobacteria bacterium Ellin345
  CDS (1)..(1290): transl_table=11
atgaacatctctattgtgggtctgggatatgtaggtgcagtttcagcggcgtgcctggcgagccgagggcacaatgtctggggcgtggatatcaacgccgacaaggttgctgcactgaacgaagggaagtcgccgatcatcgagccaaagctcgctgaattgctctctgcggcggtttcgagcggcaaactgcgcgccacgtgcgacatgtccgaagctctcgcacaaacagacatttgcttcgtctcggttgcgacgccgagccggaagaacggccagatcgacgccggccacttgctgcgggcctgtcaacagatagcggatgttatcaagttgctagatcgcaaacaggtcatcgtcatccggagcagtgtgctccccagtgttttcgaagaggcgacgaagctgttcgcgacgcatgtgccagggttggcagaactttgcatcaatccggagtttttgcgtgaaggctcggcgattgccgactacgagaacccaccttttacggtgatcggtactgacaagccggaggtagagaaaatgctccgcgacttgtactccgatctcagcgctccggtgtacgttcttggcgctaaggaagcgacgttggtgaagtacgccagtaatgccttccacgctctcaaagtcgcattcgcgaatgaaatcggagcggtctgccacgagaacggtatcgacggtgacgctgtaatggaagtgttttgcaaagacaataagctgaacatctctcatcggtatttgcgccctggctttgcttttggtggttcctgtcttccgaaagatgtgcgtgccctcctctatgccggcaaggttgcggacattgagttgccattgctgcgcggcgtgttggatagcaacgagtgcgtgattgagcgtgcgttcgacgcgattctcgagacaggtgctcgtcgcatcggtctcgtgggcttaagctttaagaagaacaccgacgatctccgcgaaagcccattcgttgaactggcggagcgcctcgttggcaaaggactcgccctgcgaatctatgacccgaatgtctccgtggcacgcctggtgggcgcgaatcgtgagtacatccaacagcgattggtgcatctttcctctctgctcacagagtcgatcgaagaactcgctgtagcgtgcgacctcatcattattgggcacaagttcgaaggcgtcgaaaaacttcaggcccatcgcgatcgatatcacatactcgacctgaccggtccattcgcacttcatccacggcaatcggctgccaaggcaggatag

SEQ ID NO: 72421 - protein, 429 aa, Acidobacteria bacterium Ellin345
MNISIVGLGYVGAVSAACLASRGHNVWGVDINADKVAALNEGKSPIIEPKLAELLSAAVSSGKLRATCDMSEALAQTDICFVSVATPSRKNGQIDAGHLLRACQQIADVIKLLDRKQVIVIRSSVLPSVFEEATKLFATHVPGLAELCINPEFLREGSAIADYENPPFTVIGTDKPEVEKMLRDLYSDLSAPVYVLGAKEATLVKYASNAFHALKVAFANEIGAVCHENGIDGDAVMEVFCKDNKLNISHRYLRPGFAFGGSCLPKDVRALLYAGKVADIELPLLRGVLDSNECVIERAFDAILETGARRIGLVGLSFKKNTDDLRESPFVELAERLVGKGLALRIYDPNVSVARLVGANREYIQQRLVHLSSLLTESIEELAVACDLIIIGHKFEGVEKLQAHRDRYHILDLTGPFALHPRQSAAKAG

SEQ ID NO: 72422 - DNA, 1380 bp, Rubrobacter xylanophilus DSM 9941
  CDS (1)..(1380): transl_table=11
atgagagagtttgatgtggccgtggtgggcagcggttacgtgggcctggtgaccggggcctgcctggcctacatcggccaccgcgtgacctgcgtggacaagaacgagcgccgggtggcggacctccagcgggggaagatgcccatctacgagccgggcttggaggagatggtcgcccggggacgctccgcggggcagctgcggttcaccgccgaccttcccggctgcgcgagggaggccgaggtggtcttcatagccgtggacaccccgcccggggaggacggctcggcagacctctccaacgtcgccgccgtggcccgctccatcggccgggcgctctcggaggccggggagagggagcggccgctcatcgtggtgaacaagagcacggtgccggtgggcagcggagactacgtctccatgctcgttcgcgagggggccgaggaggccgggaacggctcggtggacttccgcgtcgtctccaaccccgagttcctgcgggaggggagcgcggtctacgactcgctgtttcccgacaggatcgtgctcggggcggagtcgcgggaggccctggacaccatgcgcgagctctacgagcccatcatagagcagagcttccccgccgagatggacccccggcccaaggccgcggtccccttcgtcaccaccgacctggcgagcgccgagatgataaagtacgccgccaacgcctttcttgcgaccaagatcagctttatcaacgagatcgccaacatctgcgagctggtcggggcggacgtctccagcgtggcctacgggatcgggctcgacggcaggatcggcccccggttcctcagcgcggggatcggctggggcggctcctgcttcccgaaggacgtctcggccctgcgctccatagcccgcgagtacgactacgagccgctgctcctggacgccgcggtctgcgtcaacgagcgccagagaaagcaggtgatctccaagctgcagcgagagctgcacaccctcaagggcaagcgggtcgccctcctgggcctgacgttcaagcccaacaccgacgacctgcgggaggcccccagcctggagatcgcccgcaccctctcctccctcggggcgcgggtggtgggctacgacccggtggcggccaaggaggccgcccggctccagccggagctcaaggcggccttcgacccgtacgaggcgctccgcggggcccacgcggcggtggtcgtcaccgagtgggaggaggtgcgctcgctcgaccccgcgcgggccgcctccctcatggaggagccccgggtgctggtggacgggcgcaacgccctcgacccggagcgctgccggcggggcgggctgctctacaggggcttcgggcgtgcctga

SEQ ID NO: 72423 - protein, 459 aa, Rubrobacter xylanophilus DSM 9941
MREFDVAVVGSGYVGLVTGACLAYIGHRVTCVDKNERRVADLQRGKMPIYEPGLEEMVARGRSAGQLRFTADLPGCAREAEVVFIAVDTPPGEDGSADLSNVAAVARSIGRALSEAGERERPLIVVNKSTVPVGSGDYVSMLVREGAEEAGNGSVDFRVVSNPEFLREGSAVYDSLFPDRIVLGAESREALDTMRELYEPIIEQSFPAEMDPRPKAAVPFVTTDLASAEMIKYAANAFLATKISFINEIANICELVGADVSSVAYGIGLDGRIGPRFLSAGIGWGGSCFPKDVSALRSIAREYDYEPLLLDAAVCVNERQRKQVISKLQRELHTLKGKRVALLGLTFKPNTDDLREAPSLEIARTLSSLGARVVGYDPVAAKEAARLQPELKAAFDPYEALRGAHAAVVVTEWEEVRSLDPARAASLMEEPRVLVDGRNALDPERCRRGGLLYRGFGRA

SEQ ID NO: 72424 - DNA, 1356 bp, Trichodesmium erythraeum IMS101
  CDS (1)..(1356): transl_table=11
atgaaagtttctatgattggtacgggatatgtaggtctagtgtctggggtttgctttgccgaaaaggggcattcggttatttgtgtagatattgaccaagataaggtcgattctattaatcagggcattcccccaatatatgagaagggtttgcaggagttgttgcaaaaaaatattggtgatggcttacaagctgtcaccgacttgggacaggcagtacaagaaactgaaatttctatgattgctgttggcactccttttgatggtaaggaaattgacttgggttatatcaagcaggtttctcagcaaataggggaagctttaaggaataaaaattcttatcatttggtcgttatcaaaagtacggtagtaccaggtactactgaaaatgtggtgttaccaatattagaggaaacttctggcaaaaaagcaggggtggattttggtctggggatgaatcctgaatttttgagggaaggggaagctattgaggattttatgtttcttgataggattattttaggtggaattgatgctaaaagtattagcttactggagcttttataccaagttttcgagggcatagaaaagctaactacaaattgcactacggcagaaatgattaagtacactgctaattcacttttggctactatgatttcgttttctaatgaaataggtaatctctgtagtgctgttggtggtgtagatgtggttgaggtgatgcaaggagttcatttggataaacgctttagcccaattacggctagtggcgatcgcattactcctgcttttctgagctacttacaagcaggttgtggttttggtggtagttgctttcctaaagatataaaagctttaactgcttatggcagtaaactgggaaaccagatggaaattctggaggctgcgattagagtgaatgttgctcaacctcagaaagttttggatttgttgaaaaagcattttccttcgactgagggggtaaaggtaagtgttttgggtctagcttttaaacctgggactgatgatatccgagagtctccggcgattcctatcattgaatctctcttaagtcaaggtgcgatagttaagacttacgatccatttgctcaaaaggaggctcaaaagtatttttgtgaaaatgaattgctgttttgtgatgatttaactgatgctttagatgctgtagaggcagtaataatagtcacttgctggtctgagtttgaggctctcccacggctattagctggtaaggataatccaccagttgtggttgatggcagaagaatgttgggtaaacagagtgtttctatctatgaaggaataggttggtcctccaaatcaaagtattga

SEQ ID NO: 72425 - protein, 451 aa, Trichodesmium erythraeum IMS101
MKVSMIGTGYVGLVSGVCFAEKGHSVICVDIDQDKVDSINQGIPPIYEKGLQELLQKNIGDGLQAVTDLGQAVQETEISMIAVGTPFDGKEIDLGYIKQVSQQIGEALRNKNSYHLVVIKSTVVPGTTENVVLPILEETSGKKAGVDFGLGMNPEFLREGEAIEDFMFLDRIILGGIDAKSISLLELLYQVFEGIEKLTTNCTTAEMIKYTANSLLATMISFSNEIGNLCSAVGGVDVVEVMQGVHLDKRFSPITASGDRITPAFLSYLQAGCGFGGSCFPKDIKALTAYGSKLGNQMEILEAAIRVNVAQPQKVLDLLKKHFPSTEGVKVSVLGLAFKPGTDDIRESPAIPIIESLLSQGAIVKTYDPFAQKEAQKYFCENELLFCDDLTDALDAVEAVIIVTCWSEFEALPRLLAGKDNPPVVVDGRRMLGKQSVSIYEGIGWSSKSKY

SEQ ID NO: 72426 - DNA, 1338 bp, Solibacter usitatus Ellin6076
  CDS (1)..(1338): transl_table=11
gtgtcgcatggcatactaaaggtcgtggatcccgtttccctagcagtaaacccccagaaaattgccgtgcttggacttggttacgttggctgcgtaaccgccgcctgcctggcgcggatcggccaccgtgtcaccggcgtggaccgggatcagttcaaagtggacagcgtgcttggcggccgggcgcctttcttcgagcctggattggaggaactggttggagacggcgtggccacgggtcgcctctccgcgacggtctcgctggcggatgcggtagccgatgccgacgtggccctgatttgcgtgggcacgccatcggaaaagaacgggaacctggggctggaccaattgcgccgcgtgtcccaggagcttgcggaactgctgccgggacggacgaagcgcctgatcgtggcagtgcgcagcacggtctatcccggaacctgcgaagagatcgttctgccggcgtttggtggttcgcccctggtcgccgtggtctcgaacccggagtttctgcgcgagggcgcggcggttcgcgacttcatggagccttcgctgctcgtggtgggcggatcctcgcccgaggctgtccggcaggtggcaggcatttattcggggctggcggtggaaccctcgattgtggcgctgcgtacggcggagatgatcaagtacgcttgcaacgccttccatgcggtgaagatctccttcgccaatgagattggggcgctggcgggcgaactggggatcgatggcgcggaggtcatggagacgctctgccgcgatcattcgctgaatatctcgcccgcctacctgaagccgggatttgcgttcggcggctcctgcctgcccaaggatttgcgtgcgctggtttatcgcgcttcgcggctggacctgaaactgccgatgctggaatccgtactgccctccaataatgcacagttggaccgggcgattgcggtggcgctggatcttccgggcgagcgcatcggcgtcttcggcctggcattcaaggaaaacaccgacgacctgcgcgagagtccggtggtgctgctgctggagaccctgatcggcaaggggcgcaaggtccgggtgcacgacccgcacatccagctcggcgagatttacggtagcaatcagcgttacatcatgaacgccatccctcatatcggcaatctgctggacgaccggttggatggcatgctggagtgggccgaccacattctggtggcgcagaagccctcccccgccgtgcaggcgcgacttatcgcaagcggcaagccgctgatcgacctggtgggtgcgctgcggcgcgatttgggccgggccacggtatccgtttag

SEQ ID NO: 72427 - protein, 445 aa, Solibacter usitatus Ellin6076
MSHGILKVVDPVSLAVNPQKIAVLGLGYVGCVTAACLARIGHRVTGVDRDQFKVDSVLGGRAPFFEPGLEELVGDGVATGRLSATVSLADAVADADVALICVGTPSEKNGNLGLDQLRRVSQELAELLPGRTKRLIVAVRSTVYPGTCEEIVLPAFGGSPLVAVVSNPEFLREGAAVRDFMEPSLLVVGGSSPEAVRQVAGIYSGLAVEPSIVALRTAEMIKYACNAFHAVKISFANEIGALAGELGIDGAEVMETLCRDHSLNISPAYLKPGFAFGGSCLPKDLRALVYRASRLDLKLPMLESVLPSNNAQLDRAIAVALDLPGERIGVFGLAFKENTDDLRESPVVLLLETLIGKGRKVRVHDPHIQLGEIYGSNQRYIMNAIPHIGNLLDDRLDGMLEWADHILVAQKPSPAVQARLIASGKPLIDLVGALRRDLGRATVSV

SEQ ID NO: 72428 - DNA, 1491 bp, Mycobacterium smegmatis str. MC2 155
  CDS (1)..(1491): transl_table=11
ttggcaaagggtgttagcattgcgatctcgactggcagaatgctggcccaagggcttgcggcgcgggaagggcagtcgatgccgagaattgataactcacagggtggtgattcactcgccgcccgggaattcaagggtgtcgcagaatccttcgcgccctctggccgagcggtgcgacgcgtcgcggttttcggtcttggttatgtaggcagcgttactgcggcctgtcttgccagccgcggtcattcggtcatcggcgtcgatgtcaggcgcgagaaggtcgacatgatcaaccgcggtcagagcccggtggtagaaggcggcctcggcgaactcatcttcggcgaggtcgccgccggccggctcagcgcgaccacgaatcccgctgatgctgtggcgaatacagatatcgcgctggtatgcgtcggaacgccctcggccgcgaacgggagcctcctcacgacgtatctcgagcgggtaagtgaagacataggtgctgcactcgcgggccgtgcaggacgctacaccgttgtaatacggtcgacggttctgccttggacatgtgagcagatcgttcttccgcgcctgcaggccgcatcgggactgcgggccggcgaggatttcggggtggcggtcaatcctgaattcttacgtgaaggcagttcgatccgggacttcttcgagccaccgaagatcgtcatcggccagttcgacgccgtcagcggagacgtggttgcccaactgtatgagggaatgtcagctcctgtttttcgcgtgccactcgccgtcgccgagatggtgaagtatgcggacaacggatttcacgcactcaaaacgggtttcgccaacgagatcggagcagtctgcaaggccatgggccttgacagtcatgccgtcatggacatcttcgtggccgatacaaagctcaacatctcgagggcctacctgcggccgggcttcgcattcggcggctcgtgcctgcccaaggatctccgcgcactcatccatcgtgcacggacctccgacgtccccctgccgatcttggagagtgtctgcatttccaacaacggccagatcgatcgtgcgttcaatgtcatcgaggcgaccggcaagcgtcgcgtcggtctgctcggcctcgccttcaaatcgggtaccgatgacttgcgggaaagccccttggtggcactggcggaacgccttgtcggacgcggcttcgacttgcagatctacgacccacaagtctccgcgtcacggctgctcggtgccaatcgagccttcgccgaagcgcgaattccgtgtctttcacagtgtgtttcggactcgcccgacgaagtcgtcaaccatgccgaggtgtgcgttgtcggcgcagcggatccagagtcgatcgctgctctgaggcgcgtcgacgggcgcatcgtggtcgacctggtgcggtttccggggtcggtggactaccaggacgatcctcgctacatcggcatcagttggtga

SEQ ID NO: 72429 - protein, 496 aa, Mycobacterium smegmatis str. MC2 155
MAKGVSIAISTGRMLAQGLAAREGQSMPRIDNSQGGDSLAAREFKGVAESFAPSGRAVRRVAVFGLGYVGSVTAACLASRGHSVIGVDVRREKVDMINRGQSPVVEGGLGELIFGEVAAGRLSATTNPADAVANTDIALVCVGTPSAANGSLLTTYLERVSEDIGAALAGRAGRYTVVIRSTVLPWTCEQIVLPRLQAASGLRAGEDFGVAVNPEFLREGSSIRDFFEPPKIVIGQFDAVSGDVVAQLYEGMSAPVFRVPLAVAEMVKYADNGFHALKTGFANEIGAVCKAMGLDSHAVMDIFVADTKLNISRAYLRPGFAFGGSCLPKDLRALIHRARTSDVPLPILESVCISNNGQIDRAFNVIEATGKRRVGLLGLAFKSGTDDLRESPLVALAERLVGRGFDLQIYDPQVSASRLLGANRAFAEARIPCLSQCVSDSPDEVVNHAEVCVVGAADPESIAALRRVDGRIVVDLVRFPGSVDYQDDPRYIGISW

SEQ ID NO: 72430 - DNA, 1317 bp, Azoarcus sp. BH72
  CDS (1)..(1317): transl_table=11
atgaagatcagcattttcggcctgggctatgtcggcgcggtatcgctcgcctgccttgcgcgcgacggccaccaggttgtgggcgtggatatcgacgccaccaagctcgaactcatccgctccggcaccacgccggtggttgaagaaggcatggtggagctgatggcgaacgtcgccgccagcggccgtgtgagcgtcaccaccgatgtgcgccaggcggtcctcgataccgaaatctcgttgatctgcgtcggcacgccgtccgcccccaatggcagccaggaccagggcgcggtgctgcggctggcacgtgacctcggccgcgcgctggccgagaagtctgcaccgcacgtgctggtgttccgctccacgctggtgcccggcacggtcgagggcagcctcaagccgatcatcgaaaccgaatccggcaagcgcgacggcgaggatttccacctctgcttccagccggagttcctgcgcgagggctcgtcgatccgcgactacgacaagccgccgtttaccgtggtcggcgccaaccacgcctacccggccgaacgcctgcgcgagctgttcggccatctgccgtgcaagttcctcgaaacctcggtgcgcgcggccgagatgatgaagtactgctgcaacaacttccacgcgctgaagatcaccttcgccaacgagaccgcgcgcctgtgcagcgcgcttggggtcaatccgttcgaggtcatggaactggtgtgccaggacacccagctcaacatctcgcgggcctacctcaagcccggcttcgccttcggcggttcctgcctgcccaaggacctgcgtgccaccagctacctggccaagacccacgacgtcgaactgccgatgctgaacggcatcctgcagtccaaccgtcaccacgtcgaagaggcgatccagaaggtgcttgcgtccggctgccggcgggtgggcatgctgggactgtcgttcaagaccggcaccgacgacctgcgtgaaagtccgctggtgacgctggccgagcaactgatcggcaagggcatgcagctctctatctatgacccggatgtgcagctctcacgcctgctcggtgccaaccggcgattcatcgaaacccagttgccccacatcggcgaactgctgaagccggaactcgatgcggtgatcggcgaggccgaagtgctgatcgtgggcgtctccagccccgccatcttcgatgcgctcgctacccacagccggcccgagcagaaggtgcttgacctggtccgcctgcccaacccgcaggcgctgcgggccgaggttgaagggctgtgctggtaa

SEQ ID NO: 72431 - protein, 438 aa, Azoarcus sp. BH72
MKISIFGLGYVGAVSLACLARDGHQVVGVDIDATKLELIRSGTTPVVEEGMVELMANVAASGRVSVTTDVRQAVLDTEISLICVGTPSAPNGSQDQGAVLRLARDLGRALAEKSAPHVLVFRSTLVPGTVEGSLKPIIETESGKRDGEDFHLCFQPEFLREGSSIRDYDKPPFTVVGANHAYPAERLRELFGHLPCKFLETSVRAAEMMKYCCNNFHALKITFANETARLCSALGVNPFEVMELVCQDTQLNISRAYLKPGFAFGGSCLPKDLRATSYLAKTHDVELPMLNGILQSNRHHVEEAIQKVLASGCRRVGMLGLSFKTGTDDLRESPLVTLAEQLIGKGMQLSIYDPDVQLSRLLGANRRFIETQLPHIGELLKPELDAVIGEAEVLIVGVSSPAIFDALATHSRPEQKVLDLVRLPNPQALRAEVEGLCW

SEQ ID NO: 72432 - DNA, 1302 bp, Nostoc punctiforme PCC 73102
  CDS (1)..(1302): transl_table=11
atgaaaattagcatttttggtttgggatatgtcggtgctgtaacagcagcttgcttggcacgagatggacacgaagtaattggggtagatgtaaatcctgaaaaagtggatttgattgccaaaggagagtcacccattgtagagcctgggctaagtcagttgctggttgatggagtggcagctaatttaattacagctactacagatactgaagcggcagtgctagcatcagatgtttctctaattagtgttggtacacctccaatagagagaggagaaccggatcttacttacgtttggaatgtgtgcaagcagattgcgaaagcctccatccataagactgaaagccatgtcgttgttttgcgtagcactgtccccccaggaacattagaaaaatgtcagaatcttatagatagtattacaggtaataactctatccatttagcatttaacccagaatttttacgcgaaggttcagctatcaaagattacgatcaaccaccttacaccattattggtacagaatctcctgtggcagaagcagcagtacggcaaatgtatgccacagtagatgcaccgttcaccgtagtcaaaccatctgtggcagaaatggttaaatatgtggccaattgctggcacgctgccaaggtaggctttgctaatgaaatcggacgagttgcaaaagcttttggcgtagatgggcgggaagtaatgaatatcatcgtccaggatacgaagttaaatatttcccctgtttatatgcgtcctggatttgcctacggtggttcttgcctgcccaaggatttgagtgctttgctttactatgcaaggaatatggatgtaccagtacccctgctaaacgccctaccaactactaacagccttcaagttgatttggctgcccaacaagtgttacgccttggggcaaggaagattgcaattttaggattggcattcaagccaggtacagatgacttaagagaaagtccagcagtgctgctagttaagcggttgattggggaaggctgccagataaaaatttatgaccaggctgtttatgaagctcggttaatgggaaccaatctgacctatatccaaaataacctccctcattttgaggagctactagttgcagaagcagaacaagctctgaaagatgcagaattagtaatagttactcatgctaatccagagtttcgccaaatattacaggaagcgctcaaagaaatacaagttttggatttggcaagtgtatttactgaaccgattgaagagttaaattattgtggtattgcttggtaa

SEQ ID NO: 72433 - protein, 433 aa, Nostoc punctiforme PCC 73102
MKISIFGLGYVGAVTAACLARDGHEVIGVDVNPEKVDLIAKGESPIVEPGLSQLLVDGVAANLITATTDTEAAVLASDVSLISVGTPPIERGEPDLTYVWNVCKQIAKASIHKTESHVVVLRSTVPPGTLEKCQNLIDSITGNNSIHLAFNPEFLREGSAIKDYDQPPYTIIGTESPVAEAAVRQMYATVDAPFTVVKPSVAEMVKYVANCWHAAKVGFANEIGRVAKAFGVDGREVMNIIVQDTKLNISPVYMRPGFAYGGSCLPKDLSALLYYARNMDVPVPLLNALPTTNSLQVDLAAQQVLRLGARKIAILGLAFKPGTDDLRESPAVLLVKRLIGEGCQIKIYDQAVYEARLMGTNLTYIQNNLPHFEELLVAEAEQALKDAELVIVTHANPEFRQILQEALKEIQVLDLASVFTEPIEELNYCGIAW

SEQ ID NO: 72434 - DNA, 1311 bp, Erythrobacter sp. NAP1
  CDS (1)..(1311): transl_table=11
atgaaaattgcaatggttgggtcaggctatgtcgggctcgtttctggcgcctgctttgccgatttcgggcacgacgtggtctgcatcgacaaggatcagggaaagatcgaccggctgcacgacgggatcatgccgatctacgagccgggcctcgacgcgctggttgaaagcaatgtgaaggcaggccgtctttcattcaccacttcgcttgccgaagggatcaaggatgccgcagcggttttcattgctgtgggcacaccaagccgccgcggcgatggtcatgccgacctgtccttcgtttatgcagtcgccaaggaggtgggagagagcctcgcgaacgatgctgtcgtcgtcaccaagtcgaccgtccccgtgggtaccggcgacgaggtcgagcgcctcctgaaagagtcgggcacaccgcatcgtgtttcggtcgtctcgaaccctgagttccttcgtgaaggtgcagctattggcgacttcaagcgcccggatcgcatcgtcatcggtgccgaagatgatttcggtcgtgaggtaatgcgcgaggtataccgaccgctgttcctcaacgaaagtccgatcctgttcacctcgcgccgcaccagcgaactgatcaagtacgccgccaacgcattcctcgcgaccaagatcaccttcatcaacgagatggctgatctgtgcgagaaagtcggcgcgaacgtacaggacgtgagccgcgggatcggaatggacaaccgcattggcgcaaagttccttcacgctggacctggttatggcggctcgtgcttcccgaaggacacgctcgcgctgctcaagactgcggaagactatgacagccccacccgcatcatcgaagcggtggtcaaggtcaacgacagccgcaagcgcgccatgggccgcaaggtgctggattcgatcggcgggccggagaacgcgcgcggcaaaaaggtcgcgctgcttggccttaccttcaagcccaataccgacgacatgcgggactcgcccgcgatagcggtcgcacagacgctcaccgatgcgggcgtcaaggtttccgcattcgatccggaaggtatggaacaggcaaggccgctaatgcccgccgtgaacatgtgtgacgatccctatgcagcgatcgaggatgcagacgcgaccgtgatcgtgacagagtgggatgcgtttcgcgcgctcgacctgtctcgggtcaaggatctggcaaaggctccggtgctggtcgacctgcgaaatatctacaatcccgacgatgtccgcaacgccggtttcacctacgcgagcattggccgcgactga

SEQ ID NO: 72435 - protein, 436 aa, Erythrobacter sp. NAP1
MKIAMVGSGYVGLVSGACFADFGHDVVCIDKDQGKIDRLHDGIMPIYEPGLDALVESNVKAGRLSFTTSLAEGIKDAAAVFIAVGTPSRRGDGHADLSFVYAVAKEVGESLANDAVVVTKSTVPVGTGDEVERLLKESGTPHRVSVVSNPEFLREGAAIGDFKRPDRIVIGAEDDFGREVMREVYRPLFLNESPILFTSRRTSELIKYAANAFLATKITFINEMADLCEKVGANVQDVSRGIGMDNRIGAKFLHAGPGYGGSCFPKDTLALLKTAEDYDSPTRIIEAVVKVNDSRKRAMGRKVLDSIGGPENARGKKVALLGLTFKPNTDDMRDSPAIAVAQTLTDAGVKVSAFDPEGMEQARPLMPAVNMCDDPYAAIEDADATVIVTEWDAFRALDLSRVKDLAKAPVLVDLRNIYNPDDVRNAGFTYASIGRD

SEQ ID NO: 72436 - DNA, 1329 bp, delta proteobacterium MLMS-1
  CDS (1)..(1329): transl_table=11
atgaagatcgcggtggttggtaccggctatgtcggcctggtcagtggtgcctgtctggctgagttcgggcatcaggtggtgtgcatggacctggatgccgggcgcattgaggccctgcggcaaggggaaattcccatctatgaacccggtctggatgatctggtggccaagaatgtgcgcgaagggcggctttcctttaccaccgagctggcctgtgccatggccggggcgcgggcggtgtttatcgccgtgggcacccccagccagcgacggggcaacggttatgccgacctgagctacatttacgccgccgccaaggatatcgccggcctgctggaagataactacaccgtggtcatcgacaagagcacggtgccggtgggcaccggccgccaggtgcggcggatcatcgccgaggccaatccggcggcggatttcgatgtggcttccaacccggagtttctgcgggagggggcggcgatcaacgatttcatgcggcccgaccgggtggtgctcggggtggagagcgaaagggccgccgaggtgttgcaggagatttacaaccccctttatctcaacgccaccccctttgtggtcaccagccttgaaaccgccgagctaagcaagtacgccgccaacgcctttttggccatgaagatcagctttatcaacgagatggccaatttgtgcgaggcggtggggggtgatgtcaaacctttggcccgggcggtggggcttgatggccggatcggggccaagtttctccaccccggccccggctacggcggctcctgtttccccaaggacaccctggccctgctgcgcatcgcccaggagcacggcagttccagccgcctggtggaggcggcggtggaggttaatgccgcccagaagggcaggatgatcaagaagatccgcgacgccatcggcggcagcgaggccggtaaaaccatcgcggtgctggggctgaccttcaagccggaaaccgacgacatgcgggaagcgccggcgctgaccattctgccggccctgctggaaaaaggggccaggctgcaggtccacgacccccaggggatgaaagaggccgccgccttgatgcccgactgccattaccgggaaaatgcctacgaggcggcggcgggcgcccacgccctggtgctgctcaccgaatggaaccagtaccgcgccctggacctggagcgtttgcggcagagcatgcaaaccccgctgttcatcgacctgcgcaacgtctacgagccggaaaaaatgcaggccgccggttttacctacgtcggggtcggccgccggggtctgtcccttccgcagtga

SEQ ID NO: 72437 - protein, 442 aa, delta proteobacterium MLMS-1
MKIAVVGTGYVGLVSGACLAEFGHQVVCMDLDAGRIEALRQGEIPIYEPGLDDLVAKNVREGRLSFTTELACAMAGARAVFIAVGTPSQRRGNGYADLSYIYAAAKDIAGLLEDNYTVVIDKSTVPVGTGRQVRRIIAEANPAADFDVASNPEFLREGAAINDFMRPDRVVLGVESERAAEVLQEIYNPLYLNATPFVVTSLETAELSKYAANAFLAMKISFINEMANLCEAVGGDVKPLARAVGLDGRIGAKFLHPGPGYGGSCFPKDTLALLRIAQEHGSSSRLVEAAVEVNAAQKGRMIKKIRDAIGGSEAGKTIAVLGLTFKPETDDMREAPALTILPALLEKGARLQVHDPQGMKEAAALMPDCHYRENAYEAAAGAHALVLLTEWNQYRALDLERLRQSMQTPLFIDLRNVYEPEKMQAAGFTYVGVGRRGLSLPQ

SEQ ID NO: 72438 - DNA, 1329 bp, Rickettsiella grylli
  CDS (1)..(1329): transl_table=11
atgcgaattaatctttttggtgcaggttatgtcggcttggtcacagcagcgtgtttagctgaacatggaaataaagtgctttgtattgatattgatcaagaaaaaataaagcgtttacaacaaggtgaatgccctattcatgagcctaatctacccaatttactcgataaaaacttacgtgctgggcgtcttcattttagcactcatcctgaagatggcattcaacatggtttttatcagtttattaccgtgaatacgccccaagacgaggatgggtctgctgatttaagtcacgtacttaaggttgcagaatgcattggtcaattattggttgaacccaaattaattgtcaataagtcaaccgtacccgtcggtactgctcataaagtaaaagcaatcattcaaaatcagcttaatcaacgtggactcaagattcctttttatgttgcttcgaatcctgaatttttacgtgaaggcgctgcagtaaatgattttatgcaatcggatcggattattgttggtacggaaaataaagacgctgaattccacctgagaaatctttataggccttttaatcgtaacaatgatcgtttaattgcgatggatattcgttcagctgaattgacaaaatatgcggctaatgcttttttagcgactaaaattagttttatcaatgaaatgagtcaactggcagaacgtttaaacgccgatatagaacaggttcgtattggtattggttccgatccacggattggttatcattttatcaatcctggatgtggttacggtggctcttgctttccgaaagacgtacttgctttagaagccaccgcaaaatccgtggattaccatgcacgtttgttaaatgctgttcatcacgttaataataaccaaaaaaaacttttatttaataaactatctcagtattttcaacataatctacacgggaaaaccattgccttatggggtttggcgtttaagcccaatacggatgatatgcgtgaagccccgagcaccgtttttatcactgcggccttggctcaaggaatgaaaattcaagcttatgaccccgtcgcaatgactgaagccatgcgtttatatgccaaacacgatcattttagctgtagcgcgagtgcagaagatgccttaatagaggccgatgccttagttatcgtcaccgagtgggacatcttttttaatccaaacttcgaactgattaaaaaacgtctaaaagatccggttatctttgatggcagaaatctttatgaccccaattatttaaaacaattaaaaattaaatactatagtattgggcgtggggggcattag

SEQ ID NO: 72439 - protein, 442 aa, Rickettsiella grylli
MRINLFGAGYVGLVTAACLAEHGNKVLCIDIDQEKIKRLQQGECPIHEPNLPNLLDKNLRAGRLHFSTHPEDGIQHGFYQFITVNTPQDEDGSADLSHVLKVAECIGQLLVEPKLIVNKSTVPVGTAHKVKAIIQNQLNQRGLKIPFYVASNPEFLREGAAVNDFMQSDRIIVGTENKDAEFHLRNLYRPFNRNNDRLIAMDIRSAELTKYAANAFLATKISFINEMSQLAERLNADIEQVRIGIGSDPRIGYHFINPGCGYGGSCFPKDVLALEATAKSVDYHARLLNAVHHVNNNQKKLLFNKLSQYFQHNLHGKTIALWGLAFKPNTDDMREAPSTVFITAALAQGMKIQAYDPVAMTEAMRLYAKHDHFSCSASAEDALIEADALVIVTEWDIFFNPNFELIKKRLKDPVIFDGRNLYDPNYLKQLKIKYYSIGRGGH

SEQ ID NO: 72440 - DNA, 1338 bp, Pseudomonas putida GB-1
  CDS (1)..(1338): transl_table=11
atgaaagtcacggttttcggtactggctatgtcggcctcacccaggcagtgtgcctggcccaggtgggccattcggtgttgtgcatggatgtcgatgccgaacgagttgccaacctcagtgcaggccattgcccgatcttcgagcccggccttgcgccgctgctggagaaaaacctggcttgcggtcgcctgcgtttcaccacggatgccagggcagcagttcactacgccaggctgcagttcatcgcagtcggcactccgccacaagccgatggcagcgccgacctgaagcacgtttttgccgtggtcgacagcatcctcgaacatgccgacggcaccaaggtgatcgtcaacaaatccaccgcgccagtcggcacggtgcaccgcatcaaatcgcgtatagcccaggccgtggccgacaccagtcgtttccaggtcatcagcaacccggaatttctcaaggaaggctcggccgtggatgattgcatgcgtccggaccgcatcatcatcggcggcgccgaaccggccgaagtggaattgctgcgcgaactgtacctgccgttcagccgcaaccgcgaaaagcttatgaccatggatgcgcgcagcgccgagctgaccaagtatgcggccaactgcatgctggcgaccaagatctccttcatcaacgaaatcgccaacctggccgagtacctgggggccgatatcgagatggtgcgccgtggcatcggctccgacccgcgcattggctatgacttcatctacgccggttgcggctttggcggctcgtgcttccccaaggacttgcaagccctgcgccgcagcgccgaggctgaaggcttcgagccgcagttgctgcgtgcggtggagtcggtcaacgaacatcaaaagggccggttgttcagcaagatccagcggcattatcccggtggcctgcggggcaaggtatttgccttgtgggggttgtcgttcaagcccaacaccaacgacatacgcgaggcctccagccgggtcctgctggaggccctgtgggccgctggcgcgcgggtacaggcccatgacccgcaggcgatggaagaaatcctgcggcattacggcccgcgcgccgacctgcaactggtgccctgcaaggacgatgcactggagggtgccgatgcgctggtaatcatcaccgagtggcaggactaccgcgtgctcaacctggaaaaagtgccgcaacaattggccgaccgagtggtattcgacgggcgcaacctgttcgagcccgagcacatggccaccgccggcctcacctattacggtattggtcgcggccaggtgcagccagcatgcccgtactga

SEQ ID NO: 72441 - protein, 445 aa, Pseudomonas putida GB-1
MKVTVFGTGYVGLTQAVCLAQVGHSVLCMDVDAERVANLSAGHCPIFEPGLAPLLEKNLACGRLRFTTDARAAVHYARLQFIAVGTPPQADGSADLKHVFAVVDSILEHADGTKVIVNKSTAPVGTVHRIKSRIAQAVADTSRFQVISNPEFLKEGSAVDDCMRPDRIIIGGAEPAEVELLRELYLPFSRNREKLMTMDARSAELTKYAANCMLATKISFINEIANLAEYLGADIEMVRRGIGSDPRIGYDFIYAGCGFGGSCFPKDLQALRRSAEAEGFEPQLLRAVESVNEHQKGRLFSKIQRHYPGGLRGKVFALWGLSFKPNTNDIREASSRVLLEALWAAGARVQAHDPQAMEEILRHYGPRADLQLVPCKDDALEGADALVIITEWQDYRVLNLEKVPQQLADRVVFDGRNLFEPEHMATAGLTYYGIGRGQVQPACPY

SEQ ID NO: 72442 - DNA, 1317 bp, Pseudomonas putida GB-1
  CDS (1)..(1317): transl_table=11
atgcgtatcagcatctttggtttgggttatgtgggtgcagtctgtgcaggctgcctgacggcgcgtggccatgaagtgatcggtgtggacgtgtccagcaccaagatcgacctgatcaaccagggcaagtcgcccatcgtcgaacctggcctggaagcactgctgcaacagggcatcgccaatggccgcctgcgtggcaccaccgacttcgccgaagccatccgtgccagcgatgtgtcgatgatctgcgtgggtacgcccagcaagaaaaacggcgacctgggccttgagtacatcgaatcggtgtgccgtgaaatcggctacgtgctgcgtgacaccacccgccgtcacaccatcgtggtgcgcagcaccgtgctgccgggcaccgtcaagaatgtggtcatcccgatcctcgaagactgctcgggcaaaaaggccggcgtcgacttcggtgtcgcggtcaacccggaattcctgcgtgaaagcaccgccatcaaggactacgaccagccaccgatgacggttatcggcgaactggacagcgccagcggcgacatcctccaggccctgtacgaagagcttgacgccccggtcatccgcaagccgatcgaggtggccgagatgatcaagtacacctgcaacgtgtggcacgccaccaaggtcaccttcgccaacgaaatcggcaacattgccaaggcggtaggcgttgatggccgtgaagtgatggacgtggtctgccaggacacggtgctgaacctgtcccagtactacatgcgcccaggtttcgccttcggcggctcgtgcctgcccaaggacgtgcgtgccctcacctaccgtgctgccagtctcgatgtgcgcgcaccgctgctcgactcgctgatgcgcagcaacgaatcgcaggtgcagaacgctttcgagctgatcgaagcccacgacaagcgcaaggtcgccctgctgggcctgagcttcaaagccggcaccgacgacctgcgcgaaagcccactggtcgagctggccgagcgcctgatcggcaagggctaccagttggacatctacgacgagaacgtccagtacgcccgcgtccacggcgccaacaaggactacatcgaatcgaagatcccgcatgtgtcgtcgctgctcaatgccaacttccagcaggtgatcgacaacgccgacatcatcgtcctcggcaaccgtgacgagcagttccgcgcgctggcccagcaagcgccagctggcaagcaagtaatcgacttggtcggtttcatgagcaaaccaacctgcaccaccagccgtaccgaaggcatctgctggtaa

SEQ ID NO: 72443 - protein, 438 aa, Pseudomonas putida GB-1
MRISIFGLGYVGAVCAGCLTARGHEVIGVDVSSTKIDLINQGKSPIVEPGLEALLQQGIANGRLRGTTDFAEAIRASDVSMICVGTPSKKNGDLGLEYIESVCREIGYVLRDTTRRHTIVVRSTVLPGTVKNVVIPILEDCSGKKAGVDFGVAVNPEFLRESTAIKDYDQPPMTVIGELDSASGDILQALYEELDAPVIRKPIEVAEMIKYTCNVWHATKVTFANEIGNIAKAVGVDGREVMDVVCQDTVLNLSQYYMRPGFAFGGSCLPKDVRALTYRAASLDVRAPLLDSLMRSNESQVQNAFELIEAHDKRKVALLGLSFKAGTDDLRESPLVELAERLIGKGYQLDIYDENVQYARVHGANKDYIESKIPHVSSLLNANFQQVIDNADIIVLGNRDEQFRALAQQAPAGKQVIDLVGFMSKPTCTTSRTEGICW

SEQ ID NO: 72444 - DNA, 1326 bp, Amycolatopsis orientalis
  CDS (1)..(1326): transl_table=11
gtggccgtcgtcggcgccggatacgtcgggctgaccaccgcggcgtgtctcgcctcgctcgggcaccgggtccgatgcaccgattccgatcgcggcaaattggcccggctcaaacgaggcgaggtcgacatcctggaaaagggcctgcccggtctggtcgccgagggaatcgccgccggacggctcggtttcgtcgagtcggccgcggaggccgtcgagaccgcggaggccgtgttcctttgtgtacccaccccgatgggcgagggcgggatggccgatctgtcggccgtcatcgacgtcgcgaccaaggtccgtgacgtgctttcgccgggttgtgtactggtgaacaagtcgaccgtgccggtcgggaccgcggccagggtcgccgcgctgctcggccgggacgacgtcgcggtggtgagcaatccggagttcctccgcgagggcaccgccgtccacgacttcctcaacccggaccggatcgtcgtcggttccgacacgcgcggcccggcggaacgggtcgcggcgctctacgcccggctcggcgccccgacggtgctgaccgacgcggcgagcgcggagatggtcaagtacgccgccaactgtttcctcgcgacgaaactgtcctatgtgaacgccatcgccgaactgtgcgagcggctcggcgccgacatcggcgacgtcaccgaaggcatgggctacgaccgccggatcggcccgacgttcctctcgccggggccgggctggggcggttcctgcctgcccaaggacaccatggcgctcaaacaggtcgccgaggtcgcgggtttcgagttcggcctgctcgacgaggtcatctcgggcaacgcgaaacaggcgtcccgagtggtcgaacggatcgccgtcgcctgtggactcgacgcggacgcggacctcaccggcctgcggatcggcctgctcgggctgaccttcaaggcgggcaccaacgacctccgggattccccggcgctcagcgtcgcccggctgctggccgagcgcggcgcggagctgaccggatacgaccccggtctcaccggcgccgaacctccgatccccggcgtccgggtcgtcgacgacccctactacatcgcgaaggacgcgcacgcgctcgtcctgctgaccgattggccgcagttccgtgccctcgactggccgcggatcgccggtctgctcgaaggaccggtcgtcatcgacacccgcaaccacctcgaccccgacgcgctcagccgggccggcatcgcctggcgcggcttcggcaggcccccggtcgacccggtgcgcacgccgtccctcgaccccgttccctga

SEQ ID NO: 72445 - protein, 441 aa, Amycolatopsis orientalis
MAVVGAGYVGLTTAACLASLGHRVRCTDSDRGKLARLKRGEVDILEKGLPGLVAEGIAAGRLGFVESAAEAVETAEAVFLCVPTPMGEGGMADLSAVIDVATKVRDVLSPGCVLVNKSTVPVGTAARVAALLGRDDVAVVSNPEFLREGTAVHDFLNPDRIVVGSDTRGPAERVAALYARLGAPTVLTDAASAEMVKYAANCFLATKLSYVNAIAELCERLGADIGDVTEGMGYDRRIGPTFLSPGPGWGGSCLPKDTMALKQVAEVAGFEFGLLDEVISGNAKQASRVVERIAVACGLDADADLTGLRIGLLGLTFKAGTNDLRDSPALSVARLLAERGAELTGYDPGLTGAEPPIPGVRVVDDPYYIAKDAHALVLLTDWPQFRALDWPRIAGLLEGPVVIDTRNHLDPDALSRAGIAWRGFGRPPVDPVRTPSLDPVP

SEQ ID NO: 72446 - DNA, 1434 bp, Chlamydomonas reinhardtii
  CDS (1)..(1434)
atgaagattgcctgcatcggtgctggctacgtgggtggccccacgatggccatggtggcgctgaagtgccccgagattgaggtggtcgtcgttgacatcaacgaggagcgtatcaaggcctggaacagcgagaagctgccgatctacgagcctggcctgttcgaggtggtgaaggagtgccgcggccgcaacctgttcttctccactgacaccaagaagcacgtgggcgaggctgacattgtgttcgtgtccgtcaacacgcccaccaagacccacggcattggcgccggccgtgccgccgacctgacctactgggagggcgccgcccgcctgatcgcctcggtgtccaccagcagcaagattgtggtggagaagtcgactgtgcccgtcaagaccgccgaagccatcggcaaggtgctcaagcgcaactgccaggaccccaacgtcaactttgagatcctgtccaaccccgagttcctggctgagggcacggccatggaggacctgaagcaccccgaccgcgtgctcattggcggcgccgacaccgagagcggccagaaggccatccggaccctggccgaggtgtacgcgcactggatcccccgcgagcgcatcctcaccgccaacctgtggtcggctgagctggccaagctgaccgccaacgccttcctggcgcagcgcatcagctccgtcaacgccatcagcgcgctgtgcgaggccaccggcgccgacgtgagccaggtggcgcacgccatcggcacggacagccgcatcggccccaagttcctgaacgcctcggtgggcttcggcggctcatgcttccagaaggacatcctgaacctgtgctacgtgtgcgagagcgtgggcctcaaggaggtggccgactactggctgcaggtggtgtccatgaacgactaccagaagcagcgctttgtggagcgcgtcatcggcgccatgttcaacaccgtgtcgggcaagaagatcgctgtgtacggctttgccttcaagaaggacacgggcgacactcgcgagacgcccgccattgacgtgtgcaagggcctcatccgcgacggcgccaagtgctgcatcttcgaccccgaggtcaaggccgagcagatcttccgcgacctgtccgcgcccaagttcgagtgggaccgccccaactacagccgcagccagagccacatgctggagaatgtgcaggtgcagtcggaccccatcgccgccgccgacggcgcgcacgccatctgcgtgctgactgagtgggacgagttcaagcactacgactatgcggcgctgtacgagaagatggtcaagcccgccttcatctttgatggccgcaacatcctggaccacgccaagctgcgcgagatcggcttcatcgtctacgccctgggcaagcccctggaccccttcctggtcaagggctattaa

SEQ ID NO: 72447 - protein, 477 aa, Chlamydomonas reinhardtii
MKIACIGAGYVGGPTMAMVALKCPEIEVVVVDINEERIKAWNSEKLPIYEPGLFEVVKECRGRNLFFSTDTKKHVGEADIVFVSVNTPTKTHGIGAGRAADLTYWEGAARLIASVSTSSKIVVEKSTVPVKTAEAIGKVLKRNCQDPNVNFEILSNPEFLAEGTAMEDLKHPDRVLIGGADTESGQKAIRTLAEVYAHWIPRERILTANLWSAELAKLTANAFLAQRISSVNAISALCEATGADVSQVAHAIGTDSRIGPKFLNASVGFGGSCFQKDILNLCYVCESVGLKEVADYWLQVVSMNDYQKQRFVERVIGAMFNTVSGKKIAVYGFAFKKDTGDTRETPAIDVCKGLIRDGAKCCIFDPEVKAEQIFRDLSAPKFEWDRPNYSRSQSHMLENVQVQSDPIAAADGAHAICVLTEWDEFKHYDYAALYEKMVKPAFIFDGRNILDHAKLREIGFIVYALGKPLDPFLVKGY

SEQ ID NO: 72448 - DNA, 1311 bp, Vibrio sp
  CDS (1)..(1311): transl_table=11
atgcgaatcagtatctttggtttgggttatgtcggtgcagtctgtgccggttgcctgtctgcccgcggtcacgaagtagttggtgtggatatttccagcaccaagatcgacctgatcaacaacggcaaatcacctatcgttgaaccgggtctggaagagctgttgcagaaaggtatcagtaccggaaaactgcgcggcactacagacttcgccgaagccattcgcgccaccgacctgtcgatgatctgcgtcggtacgccgagcaagaagaacggcgatctggaactggattacattgaatcggtgtgccgcgaaatcggttatgtcctgcgtgacaaagccactcgccacactatcgtggttcgcagtaccgtactgccgggcactgttgccaacgttgttatcccgattctggaagactgctccggcaagaaagccggtgttgacttcggcgtcgccgtcaaccctgagttcctgcgcgaaagtactgcgatcaaggactacgacctgccgccaatgaccgtgatcggcgagttcgacaaagcgtcgggcgacgttctgcaatcgctgtacgaagaactcgatgcaccgatcattcgcaaggacatcgctgttgccgagatgatcaagtacacctgcaacgtctggcacgccgccaaggtcaccttcgccaacgagatcggcaacatcgccaaggccgtcggcgtcgatggccgcgaggtgatggacgtggtctgccaggatcacaagctcaatctctccaagtactacatgaaacccggcttcgccttcggcggttcctgcctgcccaaggacgtacgcgcgctgaactaccgcgccggcagcctggacgtggaagctccactgatcggctcgctgatgcgcagcaacgccgcccaggtgcagaaggccttcgacatcatcgccagccaggattcgcgcaaggtcgccctgctcggcctgagcttcaaggccggcaccgatgacctgcgtgaaagcccgcaggtggaactggcggaaatgctcatcggcaagggtttcgacctgagcatctacgaccgcaacgtcgaatacgcccgtgtccacggggccaacgaggaatacatcgagtcgaagatcccgcacgtttcctcgctgctcaacagcgatctcgaagacgtcgtggccaaggccgacatcatcgttctgggcaacagcgacgagcgtttcgccaagctggctgagcaggcgccgagcggcaagcgggtgatcgacctggtcggcttcatgccccacgccagcaatggcgtggccgaaggcatctgctggtaa

SEQ ID NO: 72449 - protein, 436 aa, Vibrio sp
MRISIFGLGYVGAVCAGCLSARGHEVVGVDISSTKIDLINNGKSPIVEPGLEELLQKGISTGKLRGTTDFAEAIRATDLSMICVGTPSKKNGDLELDYIESVCREIGYVLRDKATRHTIVVRSTVLPGTVANVVIPILEDCSGKKAGVDFGVAVNPEFLRESTAIKDYDLPPMTVIGEFDKASGDVLQSLYEELDAPIIRKDIAVAEMIKYTCNVWHAAKVTFANEIGNIAKAVGVDGREVMDVVCQDHKLNLSKYYMKPGFAFGGSCLPKDVRALNYRAGSLDVEAPLIGSLMRSNAAQVQKAFDIIASQDSRKVALLGLSFKAGTDDLRESPQVELAEMLIGKGFDLSIYDRNVEYARVHGANEEYIESKIPHVSSLLNSDLEDVVAKADIIVLGNSDERFAKLAEQAPSGKRVIDLVGFMPHASNGVAEGICW

SEQ ID NO: 72450 - DNA, 1428 bp, Ostreococcus tauri
  CDS (1)..(1428)
atggaagcgtctctcgatgtcgtgcgtcgcgtcgcagtatgctgcatcggcgccgggtacgtgggggggcccaccatggcgatgatcgcgcaaaagtgtccggatatcgaggtcaccgtggtggacatctcgcaaccgcgcatcgacgcgtggaactcgagtgagttaccgatttatgaacctggtttggatgagattgtgttcgcgcggagagggaagaatttgttcttctccacggatgtggagggggcgattcgtaagtgcgagatgatcttcgtgagcgtgaacacgccgacgaagaaaaccggcctcgggaaggggaaggcggcggatttaacgtactgggaactggctgcgagaacgatcgcggcgtgctcggagagcgataagatcatcgtcgagaagtccacggtgccggtgcgcacggcggaggctatcgaaaaggtgcttcaacgaaactgcccgcacgaaggcgttcgattcgacatcttgtccaacccggaattcttggcggaggggacggcgatgacggatctcaacgctcccgatcgcgttctgatcggaggtaagatcgagaaccccgagggtcaggctgctgtggacgctttggtcgaagtgtacgcgaactgggtgccgcgagcgcaaattctcaccgccaacttgtggtcggctgagctctccaagctcgcggcgaacgccttcctggcgcagcgcatctcttcgatcaatgccatgagtgcgttgtgcgaggccacgggtgcggacgtcaagcaagtgtcccacgccatcggcacggattctcgcattggcccaaagttcctcaacgcctctgtcggtttcggcggttcgtgcttccaaaaggatattttgaacttggcgtacatctgcgagtgccacggtttgcacgaggtcgcgaactactggcacagcgtcgtcggtatgaacgactaccagaagagccgcttcgtcaggcgcatgatctctgccatgttcaacaccatcagtggcaagaagattgccatgctcggtttcgcgttcaagaaggataccggcgatactcgtgagtctccggcgatcgatgtgggacacggactcatcgaggacggtgccaagctcaacatttacgatccgaaggtggcggcggatcaaattaagatggatatgggtgacgaagcgatgaagagaatcacgtgctgcacgtctcacaccgaggcgttgacgggcgcgcacgctgtgtgcatcatgacggaatgggacgagttcaaggaatacgattgggaagcgatttacggtgtcatggagaagcccgctttcgtgttcgacgggcgtctcatcttggaccaccagaagttgaaggatatcggcttcatcgtatacgcgctgggtaagccgctcgatccgttcctcaagggcgccgagggtgtatga

SEQ ID NO: 72451 - protein, 475 aa, Ostreococcus tauri
MEASLDVVRRVAVCCIGAGYVGGPTMAMIAQKCPDIEVTVVDISQPRIDAWNSSELPIYEPGLDEIVFARRGKNLFFSTDVEGAIRKCEMIFVSVNTPTKKTGLGKGKAADLTYWELAARTIAACSESDKIIVEKSTVPVRTAEAIEKVLQRNCPHEGVRFDILSNPEFLAEGTAMTDLNAPDRVLIGGKIENPEGQAAVDALVEVYANWVPRAQILTANLWSAELSKLAANAFLAQRISSINAMSALCEATGADVKQVSHAIGTDSRIGPKFLNASVGFGGSCFQKDILNLAYICECHGLHEVANYWHSVVGMNDYQKSRFVRRMISAMFNTISGKKIAMLGFAFKKDTGDTRESPAIDVGHGLIEDGAKLNIYDPKVAADQIKMDMGDEAMKRITCCTSHTEALTGAHAVCIMTEWDEFKEYDWEAIYGVMEKPAFVFDGRLILDHQKLKDIGFIVYALGKPLDPFLKGAEGV

SEQ ID NO: 72452 - DNA, 1329 bp, Rhizobium leguminosarum bv
  CDS (1)..(1329): transl_table=11
atgcgcatcacgatgattggatcaggctatgtcggcctcgtttcaggcgtttgctttgcggatctcggccacgacgtcatctgcgtcgacaaggatctgagtaagatcgaagcccttcgcgaaggccgcattccgatctacgagccgggtctcgagcaactggtcgccgaaaataccagcaccggccggctgtccttttcgaccgatgtcggcgaaagtgtccgcagcgccgacgtcgtgttcatcgctgtcggcacaccgtcccgacgcggcgacggccacgcggatctctcctatgtctacgccgctgcacgcgagatcgccacctatgtggaaggcttcaccgttatcgtcaccaagtcgacggtgccggtcggcacgggtgacgaggtcgagcggatcatgcgcgaaaccaatcccgcggcagatgtcgccgtcgtttccaatccggaattcctgcgcgaaggcgccgccatcgaggatttcaagcgtcctgaccgtatcgtcgtcgggctgaacgacgaccgggcacgcgaaaccatgaccgaggtctatcgcccgctttacctcaaccaggcacccctggtcttcaccactcgccgcacctcggaactgatcaaatatgcggccaatgcatttcttgcgatgaagatcaccttcatcaacgagatcgccgatctctgcgagcgggtcgacgcaaacgtccaggacgtttcgcgcggcatcggtctcgatggccgtatcggctccaagttcctgcatgccggcccgggttacggcggctcgtgcttccccaaggatacgctagctcttgccaagacggcgcaggattacgatgcgccgatgcgtctcatcgagacgacgatctcgatcaatgacaaccgcaagcgggcgatgggacgcaaagtcatttcggccgtcggcggagacattcgcggcaagaagatcgcaatcctcgggctgaccttcaagccgaacaccgacgacatgcgcgacagcccggcaatcgcagtcatccagaccctgcaggacaacggcgcgcaagtggtcggctacgaccccgagggcatggaaacgacccgcaaggtgatcgagaacatcgaatatgcaagcggactctacgaagcagcggctggtgcggatgcgcttgtcatcgtcaccgagtggaaccagttccgcgcgctcgatttcaaccgcctgaagcagtcgatgcgcgctccaatcctggtcgatctgcgcaatatctaccgcagcgacgaggtccgcaagtacgggtttacctatactggcatcggcaccaatctctatcaggatgtgaccaacacctga

SEQ ID NO: 72453 - protein, 442 aa, Rhizobium leguminosarum bv
MRITMIGSGYVGLVSGVCFADLGHDVICVDKDLSKIEALREGRIPIYEPGLEQLVAENTSTGRLSFSTDVGESVRSADVVFIAVGTPSRRGDGHADLSYVYAAAREIATYVEGFTVIVTKSTVPVGTGDEVERIMRETNPAADVAVVSNPEFLREGAAIEDFKRPDRIVVGLNDDRARETMTEVYRPLYLNQAPLVFTTRRTSELIKYAANAFLAMKITFINEIADLCERVDANVQDVSRGIGLDGRIGSKFLHAGPGYGGSCFPKDTLALAKTAQDYDAPMRLIETTISINDNRKRAMGRKVISAVGGDIRGKKIAILGLTFKPNTDDMRDSPAIAVIQTLQDNGAQVVGYDPEGMETTRKVIENIEYASGLYEAAAGADALVIVTEWNQFRALDFNRLKQSMRAPILVDLRNIYRSDEVRKYGFTYTGIGTNLYQDVTNT

SEQ ID NO: 72454 - DNA, 1341 bp, Erwinia amylovora
  CDS (1)..(1341): transl_table=11
atgaaagtcaccgtatttggtatcggctatgtgggtctggttcaggctgcggttctggccgaagtcggacatgacgttctttgcatcgatgtcgacgaaaacaaagtcgaaaatctaaagaaagggatcatccccattttcgaaccgggcttgacgccgctggttatgcagaattacgaggctggtcgccttaaattctctacacatgctgaagagggcgtcaatcgcggggtcatgcagtttattgccgttggcacgccaccggacgaagatggctcagcggacctgaagtacgtcacggcggttgcgaggactattgctcagcatatgcaagggcataaggtcgtgctggataaatccaccgttccggtcggtaccgctgaccgcgttcgccaggtgatggaggagaccctgaaagggcgcggtgctgcgctaagctttgatgtggtgtccaatcctgaattcctgaaagaaggtgcggcagtcagcgactgtatgcgtccggagcgcattgtcatcggcacggacaatgatgaagtggtggaactgctgcgtgaactgtacgagccgttcaaccgtaatcatgaccggatgatcctgatggacattcgcagtgcagagctgaccaagtatgcggcaaactgcatgctggcgaccaaaatcagctttatgaacgaaatttccaacctggcggagcgcctgggtgctgacgtggaaaaagtacgtcaggggattggttctgactcacgcatcggctattcgtttatctatcctggctgtggttatggcggttcctgcttcccgaaagacgttcaggctctgatccgcactgcggaacagattggctaccagccgcgcctgctgcaggcggtagaagacgtcaacgacgcgcaaaaacataagctgccaacgtttatcaaacgtcacttcggtgaaaacctgcgcggtaaaacgtttgccttatgggggctgtcattcaagccgaacaccgatgatatgcgtgaagcgtccagccgggtgttgatggaagcactgtggcaagccggggcgagcgtgcatgcttttgatccggaagccatggatgaagcgcaacgtatctacggccaccgcagtgacctgaagctgatgggaaccaaagaagcggcgttacagggtgcggatgggttggttatctgcactgggtggcagaatttccgcgcacctgattttgacgtgattaaaaatgcactcaaagaacccgtgatttttgatggtcgtaacctgtatgatccagaaagaatcatcaagcgcggttttgtttattatgcaattggccgcggagcatctctcaacattgcataa

SEQ ID NO: 72455 - protein, 446 aa, Erwinia amylovora
MKVTVFGIGYVGLVQAAVLAEVGHDVLCIDVDENKVENLKKGIIPIFEPGLTPLVMQNYEAGRLKFSTHAEEGVNRGVMQFIAVGTPPDEDGSADLKYVTAVARTIAQHMQGHKVVLDKSTVPVGTADRVRQVMEETLKGRGAALSFDVVSNPEFLKEGAAVSDCMRPERIVIGTDNDEVVELLRELYEPFNRNHDRMILMDIRSAELTKYAANCMLATKISFMNEISNLAERLGADVEKVRQGIGSDSRIGYSFIYPGCGYGGSCFPKDVQALIRTAEQIGYQPRLLQAVEDVNDAQKHKLPTFIKRHFGENLRGKTFALWGLSFKPNTDDMREASSRVLMEALWQAGASVHAFDPEAMDEAQRIYGHRSDLKLMGTKEAALQGADGLVICTGWQNFRAPDFDVIKNALKEPVIFDGRNLYDPERIIKRGFVYYAIGRGASLNIA

SEQ ID NO: 72456 - DNA, 1407 bp, Cryptococcus neoformans var
  CDS (1)..(1407)
atggcccccatcactgttaagaagatctgctgtatcggcgctggttatgtcggcggccccacttgcgctgttatcgcgttgaagtgcccccaaattcaagtcaccattgtcgacctcaaccaacagcgaattgacgcctggaactctgacaacctccctatctatgaacctggtctcgatgaggttgtcaaggccaccaggggcaagaacctcttcttcagcactgatgttgacaagggtattgaggaggcagacctcatctttgtttccgtcaatacccccaccaaaaagtctggtgtcggtgccggctatgcagctgacttgaagttccttcagctcgccactcgacgaatcgctgaggtcgctacctcttccaagatcgtcgttgaaaagtccaccgtcccctgcagaactgccgaatctatgcgaaccattctcgaggccaactgcaggcccggatgccacttcgacattctttctaaccctgagttccttgccgagggtaccgctatctccgatcttttcaaccctgatcgagtccttattggctctctccagacccaacaaggtatcaatgcttgccaggctctttccgacgtctacgccaactgggttcctagggagcgaattttgaccgtcggcctctggtcttctgagctttccaagctcgcagccaacgctatgttggcccagcgaatttcctctgttaacgccctctctgccatctgtgaggctactggggccaacattgacgaggtctcctacgctgtcggtaaggacacccgaatgggttccaagttcctcaaggcgtctgtcggtttcggtggttcttgtttccagaaggacattctcaacttggtctacctttctgagtctctccatcttcccgaggttgccaaatactggcgtgccgttgttgagatgaatgaataccagaagggccgattcgcccgaaaggttgttgacaccctcttcaacaccattaccggcaagaagattgccattcttggttgggccttcaagaaggacactggtgacacccgagagtctccttccatcagcatcgccaaccacttcttgtcggagaaggctcgtatcgctgtctacgaccctcaagtcacagagtctcagatctggctcgacatgactgactacggagagatccccgctgagcccatccagccccaccttacaatctgcaagagtgtcgaggaggcttgtgctaatgccgaggccatcgtcatctgcactgaatgggacgagttcaagactcttgactggaagaagatctacgacaactgtccccgacctgcttttgtcttcgatggtcgactcatcctcaaccgacaggagctcaccaacatcggtttcaaggtcgtcactatcggtaccggcgaccgtgtttaa

SEQ ID NO: 72457 - protein, 468 aa, Cryptococcus neoformans var
MAPITVKKICCIGAGYVGGPTCAVIALKCPQIQVTIVDLNQQRIDAWNSDNLPIYEPGLDEVVKATRGKNLFFSTDVDKGIEEADLIFVSVNTPTKKSGVGAGYAADLKFLQLATRRIAEVATSSKIVVEKSTVPCRTAESMRTILEANCRPGCHFDILSNPEFLAEGTAISDLFNPDRVLIGSLQTQQGINACQALSDVYANWVPRERILTVGLWSSELSKLAANAMLAQRISSVNALSAICEATGANIDEVSYAVGKDTRMGSKFLKASVGFGGSCFQKDILNLVYLSESLHLPEVAKYWRAVVEMNEYQKGRFARKVVDTLFNTITGKKIAILGWAFKKDTGDTRESPSISIANHFLSEKARIAVYDPQVTESQIWLDMTDYGEIPAEPIQPHLTICKSVEEACANAEAIVICTEWDEFKTLDWKKIYDNCPRPAFVFDGRLILNRQELTNIGFKVVTIGTGDRV

SEQ ID NO: 72458 - DNA, 1317 bp, Streptomyces sp
  CDS (1)..(1317): transl_table=11
atgagagtcagcgtgttcggactcggttacgtgggctgcgtgtcggccgcgtgcctggcgagcatgggtcacgaggtcatcggggtggacgtcaacccggtgaaggtggacctggtcaacgacggcaaggcgcccgtcgtcgaggagcggatcggcgagctgatcgccgaggtggtgggcagcggggcgctgcgggccaccaccgacgtacgcgaggcgatcgcgggcagcgaggtgtcgctgatctgcgtgggcaccccgtcggagcccaacggcagcctgtgcacgacctacttggagcgggtgaccgaacagatcggcgcggcgctggccgagcggggcgggcggcacaccgtggtgttccgcagcacgatgctgccgggcacctgcctcggtctgctggtgccggtcctggagaagcacgtcggcggcaccgcgggcgtggacatcggtgtcgcggtcaacccggagttcctgcgcgagggcaccagcgtgcgggacttcttcgacccgccgaagaccgtcatcggtgaactcgacccggcgagcggcgacgtcgtcgcggcgctctacgcggacctgcccggcgaggtgttccgggtgccggtgccgacggccgaggcgatcaagtacgcggacaacgccttccacgggctgaagatcggcttcgcgaacgaactgggcgcggtgtgccgggcgctcggggtcgactcgcaccaggtgatggacgtgttcctcgccgaccgcaagctgaacatcagccccgcctacctgcgtcccggcttcgccttcggcggctcctgcctgccgaaggacctgcgcagcctggtccacgcggcgcagcgggccgacgtgtcggtgccgatcctcgcccatgtgctgccttccaacgaggagcacctgcagcgcgcgatcgagctggtggagcgcaccgggagacgcaaggtgggcctgttcgggctgtcgttcaagcccggcaccgacgacctgcgcgagagccccctcgtcgaactggcggagcggctcttcggcaaggggtacgacctgcgcatccacgacgccaacgtgagcctgtcccggctgctcggcgcgaaccgcgagtacatcgagacccggctgccgcacctcgcccagctgctcgccgactccgtggacgaggtgctggagcacgccgaggtcgtcctggtcgggaccaaggaccccgccgtgctgtcggcgctgccgcacggcggcgggcccgtgatcgtcgacctcgtccgcctccccgacgccgaggcgcgccgggccgaacccgggtacgtgggccttgcctggtga

SEQ ID NO: 72459 - protein, 438 aa, Streptomyces sp
MRVSVFGLGYVGCVSAACLASMGHEVIGVDVNPVKVDLVNDGKAPVVEERIGELIAEVVGSGALRATTDVREAIAGSEVSLICVGTPSEPNGSLCTTYLERVTEQIGAALAERGGRHTVVFRSTMLPGTCLGLLVPVLEKHVGGTAGVDIGVAVNPEFLREGTSVRDFFDPPKTVIGELDPASGDVVAALYADLPGEVFRVPVPTAEAIKYADNAFHGLKIGFANELGAVCRALGVDSHQVMDVFLADRKLNISPAYLRPGFAFGGSCLPKDLRSLVHAAQRADVSVPILAHVLPSNEEHLQRAIELVERTGRRKVGLFGLSFKPGTDDLRESPLVELAERLFGKGYDLRIHDANVSLSRLLGANREYIETRLPHLAQLLADSVDEVLEHAEVVLVGTKDPAVLSALPHGGGPVIVDLVRLPDAEARRAEPGYVGLAW

SEQ ID NO: 72460 - DNA, 1446 bp, Arabidopsis thaliana
  CDS (1)..(1446)
atggtgaagatatgctgcataggagctggttatgtgggtggtccaaccatggcggtgatggctcttaagtgtcctgagattgaagtagtcgttgtggatatctctgaaccaaggatcaatgcttggaacagtgataggcttcctatttacgagccgggattggaagatgtggtgaaacaatgcagagggaaaaacctcttctttagcacagacgtggagaaacatgtatttgagagtgatattgtatttgtctcagttaacactccaaccaaaacacaaggtcttggtgctggcaaagctgctgatcttacttactgggagagtgctgctcggatgatccctgatgtctccaaatctagcaaaatcgttgttgagaaatccacggttcctgtgaggacagcagaggctattgaaaagatactgacacataacagcaaaggcatagagtttcagattctctctaaccctgaatttcttgctgagggtactgcaattaaggatctttataacccagaccgtgtgttgattggtggtagggatactgcagcagggcaaaaggctattaaagctttaagagatgtttatgctcattgggttccagtggaacaaatcatttgcacgaacctgtggtccgctgagctctctaagcttgcagcaaatgcattcttggctcagaggatatcatctgtcaatgccatgtcagctctatgtgaggcaactggcgctgatgttacacaagttgcgcatgccgtgggtacagatactagaattggtccaaagttcttgaatgctagtgttggttttggtggatcatgtttccaaaaggacatcctaaatcttatctatatttgtgaatgcaacggcttgcccgaagcagctaattactggaaacaagtcgtaaaggtgaacgactatcagaaaatacggtttgcaaaccgggttgtttcttcaatgtttaacacagtctcgggcaagaaaatcgcgatcctcggttttgccttcaagaaggacacaggtgacacgagagagactccagcgattgatgtttgtaacagattagttgcagacaaggccaagctgagcatatacgacccacaagttcttgaagaacagatcagaagagatctttccatggctaggtttgactgggaccaccctgttcctcttcagcagattaaagctgaaggtatctcagagcaagtgaatgtcgtctcagatgcttacgaggcaactaaagatgcgcacggcctatgtgtcttaaccgaatgggatgagtttaaatccttggacttcaagaaaatctttgacaatatgcagaaaccagcttttgtgttcgatggtaggaatgttgttgatgcagtgaagctgcgtgagatcggtttcatcgtctactccattggtaaaccgcttgattcatggctcaaggatatgcctgctgtggcatga

SEQ ID NO: 72461 - protein, 481 aa, Arabidopsis thaliana
MVKICCIGAGYVGGPTMAVMALKCPEIEVVVVDISEPRINAWNSDRLPIYEPGLEDVVKQCRGKNLFFSTDVEKHVFESDIVFVSVNTPTKTQGLGAGKAADLTYWESAARMIPDVSKSSKIVVEKSTVPVRTAEAIEKILTHNSKGIEFQILSNPEFLAEGTAIKDLYNPDRVLIGGRDTAAGQKAIKALRDVYAHWVPVEQIICTNLWSAELSKLAANAFLAQRISSVNAMSALCEATGADVTQVAHAVGTDTRIGPKFLNASVGFGGSCFQKDILNLIYICECNGLPEAANYWKQVVKVNDYQKIRFANRVVSSMFNTVSGKKIAILGFAFKKDTGDTRETPAIDVCNRLVADKAKLSIYDPQVLEEQIRRDLSMARFDWDHPVPLQQIKAEGISEQVNVVSDAYEATKDAHGLCVLTEWDEFKSLDFKKIFDNMQKPAFVFDGRNVVDAVKLREIGFIVYSIGKPLDSWLKDMPAVA

SEQ ID NO: 72462 - DNA, 1344 bp, Acetobacter xylinus
  CDS (1)..(1344): transl_table=11
gtgcgaattgctatgatcggtggaggctacgtggggttggtctccggcacatgttttgcggaattcggcacggatgttgccattgttgaaaccaaccccgaccgtctggccgccttgcgtgaagggcggatcccgatttatgaacccggcctcgaccgcctggtggcggaaaatgtggaggcggggcgcctgacgtttggcgatgacatggccgctgccgtaaagggggctgatgccgtgttcgtggccgtgggcacgccctcgcgccggggcgacgggcaggccgatacgagttacgtctatgccgcggtcgagcaggtcgcgcgcgtggccgagggttatacgctgatcgtgaccaaatccaccgtgccggtgggcaccgggcgcgagattgccaagatcgtgcacgcgacgcggccggacctcgatttcgatgtcgcatcgaatcccgagttcctgcgcgagggcaacgccattgtcgatttcatgaagcccgaccgggtcattatcggcacagaccagtcaaagccgggcggcacggagcgcgcgcagaacatcctgcgcaagctttaccgcccgctctacctgcttgagcgccccattgtctttaccggcctggaaacggcggaactgatcaaatacgccgccaactccttcctggccatgaagatcaccttcatcaacgagatttctgacctgtgcgagaaggtgggcgcagatgtgaatgatgtcgcccgctccatcgggcttgacgggcgcatcggcaagaagttcctccaccccagccccggctttggtgggtcgtgcttccccaaggatacgcgcgcgctgaccgccatcgggcgcaacgcgggctcgcccgtgcggctgatcgaaaccacggttgccgtcaatgaactgcgcatgaaggccatgggcgagcgcgtgatcgcgctggcgggcggcgatgtgaagggcctgacgattggcgtgctcggcctgaccttcaagcccgagaccgatgacatgcgcgaggcggcctcgattgtcgtgcttgaccagctcgacaaggcgggcgcgcagatccgtgcgttcgaccccgcaggcatggaaacggcccgccccgtgctgccccagggcgtgacctactgcaaggacgcgcttgatgccgccacgggggcggatattctcgtggtgctgaccgagtggaatgaattccgctccctctcccccgagaagctcaagacccgcatgacaggccgcaaggttgctgacctgcgcaacatctgggatcccgagagcctgaaggaagcgggcttcgattacatctcgctcggccggccggacatggtgcacaccgcctga

SEQ ID NO: 72463 - protein, 447 aa, Acetobacter xylinus
MRIAMIGGGYVGLVSGTCFAEFGTDVAIVETNPDRLAALREGRIPIYEPGLDRLVAENVEAGRLTFGDDMAAAVKGADAVFVAVGTPSRRGDGQADTSYVYAAVEQVARVAEGYTLIVTKSTVPVGTGREIAKIVHATRPDLDFDVASNPEFLREGNAIVDFMKPDRVIIGTDQSKPGGTERAQNILRKLYRPLYLLERPIVFTGLETAELIKYAANSFLAMKITFINEISDLCEKVGADVNDVARSIGLDGRIGKKFLHPSPGFGGSCFPKDTRALTAIGRNAGSPVRLIETTVAVNELRMKAMGERVIALAGGDVKGLTIGVLGLTFKPETDDMREAASIVVLDQLDKAGAQIRAFDPAGMETARPVLPQGVTYCKDALDAATGADILVVLTEWNEFRSLSPEKLKTRMTGRKVADLRNIWDPESLKEAGFDYISLGRPDMVHTA

SEQ ID NO: 72464 - DNA, 1311 bp, Azotobacter vinelandii
  CDS (1)..(1311): transl_table=11
atgcgtatcagcattttcggactgggctatgtaggtgcagtatgcgccggctgtctttcgggacgtgggcacgaagtggtcggcgtggatatttccgccgccaagatcgacatgatcaatcagggcaaatcccccatcgtcgagccgggactgggagaactgctggccgagggcgtgaagaccggccgcctgcgcggcaccaccaacgtgaccgaagcggtcctcgccactgagctgtccatgctctgcgtcggcacgccgagcaagctgaacggcgacctggagctcgactacatcgaggaagtttgccgccagatgggttccgccctgcgcgacaagaccgaacgccacaccgtggtggtgcgcagcaccgtgctgccgggcaccgtgcacaacgtggtcattccgattctcgaggagttctccggcaagaaggccggcgtcgacttcggtgtggcggtcaaccccgagttcctgcgcgagagcaccgcgatcaaggactacaacttcccgccgatgaccgtgatcggtgagctggacaaggcctcgggccgacgcctggcgtccatctacgccgaactcgacgccccgatcgtccgcaagggcatcgccgtcgccgagatgatcaagtacacctgcaacgtctggcacgcgaccaaggtcaccttcgccaacgagatcggcaacatcgccaaggccgccggcgtcgatggccgcgaggtgatggaagtggtctgcatggacaacaagctcaacctgtcccagtactacatgcggcccggcttggcgttcggcggttcctgcctgcccaaggacgtcagcgccctcagctaccgtgcccacctgtgggacatcgaggcgccgctgatcagttcgctgatgcgcagcaacgccgcccaggtgcagaaagcctacgacatgatcgacaagcacggctcgcgcaaggtcgccctgctcggcctgagcttcaaggccggcaccgacgacctgcgcgaaagcccccagctcgagctggccgagatgctgatcggcaagggcttcaagctgagcatcttcgacagcaacgtcgagtacgcccgtgaccacggcgccaacggccactacatcaagaacgagatcccccacgtctccgccctgttgcagtccgatctggacaaggtcgtcgcggaagccgacgtcatcgttctcggcaacgccgatccgcgcttcgagaagctggccaaggacgtgccggccggcaagaaggtcatcgacctggtcggcttcatgcctcagcgcaccgccggtgccgcagaaggcatctgctggtaa

SEQ ID NO: 72465 - protein, 436 aa, Azotobacter vinelandii
MRISIFGLGYVGAVCAGCLSGRGHEVVGVDISAAKIDMINQGKSPIVEPGLGELLAEGVKTGRLRGTTNVTEAVLATELSMLCVGTPSKLNGDLELDYIEEVCRQMGSALRDKTERHTVVVRSTVLPGTVHNVVIPILEEFSGKKAGVDFGVAVNPEFLRESTAIKDYNFPPMTVIGELDKASGRRLASIYAELDAPIVRKGIAVAEMIKYTCNVWHATKVTFANEIGNIAKAAGVDGREVMEVVCMDNKLNLSQYYMRPGLAFGGSCLPKDVSALSYRAHLWDIEAPLISSLMRSNAAQVQKAYDMIDKHGSRKVALLGLSFKAGTDDLRESPQLELAEMLIGKGFKLSIFDSNVEYARDHGANGHYIKNEIPHVSALLQSDLDKVVAEADVIVLGNADPRFEKLAKDVPAGKKVIDLVGFMPQRTAGAAEGICW

SEQ ID NO: 72466 - DNA, 1311 bp, Pseudomonas aeruginosa
  CDS (1)..(1311): transl_table=11
atgcgaatcagcatctttggtttgggctatgtcggtgcagtatgtgctggctgcctgtcggcacgcggtcatgaagtcattggtgtggatgtctccagcaccaagatcgacctgatcaaccagggcaagtcgcccatcgtcgaaccgggcctggaagcgttgttgcagcaaggccggcagaccggacggctgtcgggcaccaccgatttcaagaaggccgtgctggactccgacgtatcgttcatctgcgtcggcacgccgagcaagaagaacggcgacctggacctgggctacatcgagaccgtctgccgcgagatcggcttcgccatccgcgagaagtccgaacgccacaccgtggtggtgcgcagcaccgtactgccgggcaccgtcaacaacgtggtgatcccgctgatcgaggactgctcgggcaagaaggccggggtcgacttcggcgtcggcaccaaccccgaattcctccgcgagagcaccgcgatcaaggactacgacttcccgccgatgaccgtgatcggcgaactggacaagcagaccggcgaccttctcgaggaaatctaccgcgagctggacgcgccgatcatccgcaagaccgtcgaggtcgccgagatgatcaagtacacctgcaacgtctggcacgccgccaaggtcaccttcgccaacgagatcggcaacatcgccaaggcggtcggcgtcgacggccgcgaggtgatggacgtgatctgccaggaccacaagctcaacctgtcgcgctactacatgcgtcccggcttcgccttcggcggctcctgcctgcccaaggatgtacgcgccctcacctatcgcgccagccagctggacgtcgagcacccgatgctcggttcgttgatgcgcagcaactccaaccaggtgcagaaggccttcgatctcatcaccagccacgacacccgcaaggtcggcctgctcggcctgtcgttcaaggccggcaccgacgatttgcgcgaaagcccgctggtggagctggccgagatgctcatcggcaagggctacgagttgcgcatcttcgaccgcaacgtcgaatacgcgcgtgtccacggggccaacaaggaatacatcgagtcgaagatcccgcacgtctcctcactgctggtctccgacctcgacgaagtggtggcgagttccgatgtgctggtgctgggcaatggcgacgagctgttcgtcgacctggtgaacaagaccccgagcggcaagaagctggtcgacctggtgggcttcatgccgcacaccaccactgcccaggccgagggcatctgctggtag

SEQ ID NO: 72467 - protein, 436 aa, Pseudomonas aeruginosa
MRISIFGLGYVGAVCAGCLSARGHEVIGVDVSSTKIDLINQGKSPIVEPGLEALLQQGRQTGRLSGTTDFKKAVLDSDVSFICVGTPSKKNGDLDLGYIETVCREIGFAIREKSERHTVVVRSTVLPGTVNNVVIPLIEDCSGKKAGVDFGVGTNPEFLRESTAIKDYDFPPMTVIGELDKQTGDLLEEIYRELDAPIIRKTVEVAEMIKYTCNVWHAAKVTFANEIGNIAKAVGVDGREVMDVICQDHKLNLSRYYMRPGFAFGGSCLPKDVRALTYRASQLDVEHPMLGSLMRSNSNQVQKAFDLITSHDTRKVGLLGLSFKAGTDDLRESPLVELAEMLIGKGYELRIFDRNVEYARVHGANKEYIESKIPHVSSLLVSDLDEVVASSDVLVLGNGDELFVDLVNKTPSGKKLVDLVGFMPHTTTAQAEGICW

SEQ ID NO: 72468 - DNA, 1317 bp, Pseudomonas putida
  CDS (1)..(1317): transl_table=11
atgcgtatcagcatctttggtttgggttatgtgggtgcagtctgtgcaggctgcctgacggcgcgtggccatgaagtgatcggtgtggacgtgtccagcaccaagatcgacctgatcaaccagggcaagtcgcccatcgtcgaacctggcctggaagcactgctgcaacagggcatcgccaatggccgcctgcgcggcactaccgacttcgccgaagccatccgtgccagcgatgtgtcgatgatctgcgtgggcacccccagcaagaaaaacggcgacctgggcctggagtacatcgagtccgtgtgccgcgaaatcggctacgtgctgcgtgacaccacccgccgtcacaccatcgtggtgcgcagcaccgtactgcctggcaccgtcaagaacgtggtcatcccgatcctcgaagactgctcgggcaagaaggccggcgtcgacttcggcgtggcggtcaacccggaattcctgcgtgaaagcaccgcgatcaaggactacgaccagccaccgatgacagtcatcggcgaactggacagcgccagcggtgacatcctccaggccctgtacgaagagctcgacgccccgatcatccgcaagccgatcgaagtggccgaaatgatcaagtacacctgcaacgtttggcacgccaccaaggtcaccttcgccaacgaaatcggcaacatcgccaaggccgtgggcgtcgatggccgcgaagtgatggacgtggtctgccaggacaaggtcctcaacctgtcccagtactacatgcgccctggctttgccttcggcggctcttgcttgcccaaggacgtacgcgccctcacctaccgcgccgccagcctcgatgtccgtgcaccgctgctcgactcgctgatgcgcagcaacgaatcgcaggtgcagaacgccttcgagctgatcgaagcccacgacaagcgcaaggtcgccctgctgggcctgagcttcaaggccggcaccgacgacctgcgcgaaagcccgctggtggaactggccgagcgcctgatcggcaagggctaccagctggacatctacgacgagaacgtccagtacgcccgtgttcacggcgccaacaaggactacatcgagtcgaagatcccgcacgtgtcgtcgctgctcaacgccaacttgcagcaggtgatcgacaacgccgacatcatcgtcctcggcaaccgtgacgagcagttccgtgcgctggccctgcaagcgccagccggcaagcaggtgatcgacctggtcggcttcatgaacaaaccgaccagcaccaccgcccgtaccgaaggcatctgctggtaa

SEQ ID NO: 72469 - protein, 438 aa, Pseudomonas putida
MRISIFGLGYVGAVCAGCLTARGHEVIGVDVSSTKIDLINQGKSPIVEPGLEALLQQGIANGRLRGTTDFAEAIRASDVSMICVGTPSKKNGDLGLEYIESVCREIGYVLRDTTRRHTIVVRSTVLPGTVKNVVIPILEDCSGKKAGVDFGVAVNPEFLRESTAIKDYDQPPMTVIGELDSASGDILQALYEELDAPIIRKPIEVAEMIKYTCNVWHATKVTFANEIGNIAKAVGVDGREVMDVVCQDKVLNLSQYYMRPGFAFGGSCLPKDVRALTYRAASLDVRAPLLDSLMRSNESQVQNAFELIEAHDKRKVALLGLSFKAGTDDLRESPLVELAERLIGKGYQLDIYDENVQYARVHGANKDYIESKIPHVSSLLNANLQQVIDNADIIVLGNRDEQFRALALQAPAGKQVIDLVGFMNKPTSTTARTEGICW

SEQ ID NO: 72470 - DNA, 1317 bp, Pseudomonas syringae pv
  CDS (1)..(1317): transl_table=11
atgcgtatcagcatatttggtttgggttatgtcggtgcagtctgtgccggctgcctgtctgcccgcggtcacgatgtagttggtgtggatatttccagcaccaagatcgatctgatcaacaacggcaaatcacctatcgttgaaccgggtctggaagaactgctgcagaaaggtatcagtaccggaaaactgcgcggcactaccgacttcgccgaagccattcgcgccactgacctgtcgatgatctgtgtcggtacgccgagcaagaagaacggcgatctggaactcgattacatcgagtcggtgtgccgcgaaatcggctatgtcctgcgtgacaaagccacccgccacaccatcgttgttcgcagtactgtgttgccaggcacggttgccaacgtggtcatcccgattctggaagactgctccggcaaaaaagccggtgttgatttcggtgtcgccgtaaaccctgagttcctgcgtgaaagtaccgcaatcaaggactacgatctgccgccaatgaccgtgatcggcgagttcgataaagcctcgggcgacgtactgcaatcgctgtacgaagaactcgacgcaccgatcatccgcaaggacatcgccgttgccgaaatgatcaagtacacctgcaacgtgtggcacgccaccaaggttactttcgccaacgaaatcggcaacattgccaaggccgtcggcgtcgatggtcgtgaagtgatggacgtggtctgccaggacaaggcgctgaacctgtcccagtactacatgcgcccagggttcgcattcggcggctcctgcctgccaaaagacgttcgcgccctgacctaccgcgccagcagcctggatgtcgaagcgccgttgctcaactcgctgatgcgcagcaacacctcgcaagtgcagaacgctttcgacatggttgccagctacgacacccgcaaggttgcactgttgggcctgagcttcaaggcaggtactgacgacctgcgcgaaagcccgctggtagaactggccgaaatgctgatcggtaagggcttcgacctgagcatcttcgacagcaacgtcgaatatgcacgcgttcacggtgccaacaaggactacatcgaatccaagattccgcacgtatcgtcgctgctgaattcggacttcgatcaggtcatcaacgactctgacgtgatcatccttggcaaccgcgatgagcgtttccgcgccctcgccaacaagactcccgaaggcaagcgcgtcatcgatctggtgggtttcatgaccaacgccaccagcgaagacggtcgcgccgaaggtatctgctggtaa

SEQ ID NO: 72471 - protein, 438 aa, Pseudomonas syringae pv
MRISIFGLGYVGAVCAGCLSARGHDVVGVDISSTKIDLINNGKSPIVEPGLEELLQKGISTGKLRGTTDFAEAIRATDLSMICVGTPSKKNGDLELDYIESVCREIGYVLRDKATRHTIVVRSTVLPGTVANVVIPILEDCSGKKAGVDFGVAVNPEFLRESTAIKDYDLPPMTVIGEFDKASGDVLQSLYEELDAPIIRKDIAVAEMIKYTCNVWHATKVTFANEIGNIAKAVGVDGREVMDVVCQDKALNLSQYYMRPGFAFGGSCLPKDVRALTYRASSLDVEAPLLNSLMRSNTSQVQNAFDMVASYDTRKVALLGLSFKAGTDDLRESPLVELAEMLIGKGFDLSIFDSNVEYARVHGANKDYIESKIPHVSSLLNSDFDQVINDSDVIILGNRDERFRALANKTPEGKRVIDLVGFMTNATSEDGRAEGICW

SEQ ID NO: 72472 - DNA, 1317 bp, Pseudomonas syringae pv
  CDS (1)..(1317): transl_table=11
atgcgtatcagcatatttggtttgggttatgtcggtgcagtctgtgccggttgcctctctgcccgcggccacgacgtagtgggtgtggacatctccagcaccaagatcgacctgatcaacaatggcaagtcgcctatcgttgaaccgggcctggaagagctgctgcaaaaaggtctggccaccggcaaactgcgcggcactaccgacttcgccgaagccattcgcgccactgacctgtcgatgatctgcgtgggtacgccaagcaagaagaacggcgacctggaactggactacatcgaatcagtgtgccgtgaaatcggttatgtcctgcgtgacaagaacactcgccacactatcgtggttcgcagcaccgtactgcctggcaccgtcgccaacgtggttatcccgatcctggaagactgctccggcaagaaagccggcgttgacttcggcgttgccgtaaacccagagttcctgcgtgaaagtaccgcaatcaaagactacgacctgccgccaatgaccgtgatcggcgagttcgacaaggcctcgggtgacgttctgcaatcgctgtacgaagaacttgacgcaccgatcatccgcaaggacatcgccgttgccgaaatgatcaagtacacctgcaacgtgtggcacgccaccaaagtgaccttcgccaacgaaatcggcaacattgccaaagcagtcggcgttgatggccgtgaagtgatggacgtggtctgccaggacaaggcattgaacctgtcccagtactacatgcgcccaggcttcgccttcggcggttcgtgcctgcctaaagacgtccgcgccctgacctaccgcgccggtagcctggatgtcgacgcaccgctgctcaactcgctgatgcgcagcaacacctcgcaagtgcagaacgctttcgacatggttgccagctacgacacccgcaaggttgcactgctgggtctgagcttcaaggccggcaccgacgatctgcgtgaaagcccgctggtagagctggctgaaatgctgatcggcaagggcttcgacctgagcattttcgacagcaacgtcgaatacgcccgtgttcacggtgccaacaaggactacatcgaatcgaagattccgcacgtttcctcgctgctcaattccgacttcgatcaggtcatcaacgactccgacgtgatcatccttggcaaccgcgacgagcgtttccgctccctcgccaacaagacgcctgaaggcaagcgcgttatcgacctggtgggcttcatgaccaatgccaccaccgaagacggtcgtgccgaaggtatctgctggtaa

SEQ ID NO: 72473 - protein, 438 aa, Pseudomonas syringae pv
MRISIFGLGYVGAVCAGCLSARGHDVVGVDISSTKIDLINNGKSPIVEPGLEELLQKGLATGKLRGTTDFAEAIRATDLSMICVGTPSKKNGDLELDYIESVCREIGYVLRDKNTRHTIVVRSTVLPGTVANVVIPILEDCSGKKAGVDFGVAVNPEFLRESTAIKDYDLPPMTVIGEFDKASGDVLQSLYEELDAPIIRKDIAVAEMIKYTCNVWHATKVTFANEIGNIAKAVGVDGREVMDVVCQDKALNLSQYYMRPGFAFGGSCLPKDVRALTYRAGSLDVDAPLLNSLMRSNTSQVQNAFDMVASYDTRKVALLGLSFKAGTDDLRESPLVELAEMLIGKGFDLSIFDSNVEYARVHGANKDYIESKIPHVSSLLNSDFDQVINDSDVIILGNRDERFRSLANKTPEGKRVIDLVGFMTNATTEDGRAEGICW

SEQ ID NO: 72474 - DNA, 1317 bp, Pseudomonas syringae pv
  CDS (1)..(1317): transl_table=11
atgcgtatcagcatatttggtttgggttacgtcggtgcagtctgtgccggttgcctgtctgcccgcggtcacgaagtagttggtgtggatatttccagcaccaagatcgacctgatcaacaacggcaaatcacctatcgttgaaccgggtctggaagagctgttgcagaaaggtatcagtaccggaaaactgcgcggcactacagacttcgccgaagccattcgcgccaccgacctgtcgatgatctgcgtcggtacgccgagcaagaagaacggcgatctggaactggattacattgaatcggtgtgccgcgaaatcggttatgtcctgcgtgacaaagccactcgccacactatcgtggttcgcagtaccgtactgccgggcactgttgccaacgttgttatcccgattctggaagactgctccggcaagaaagccggtgttgacttcggcgtcgccgtcaaccctgagttcctgcgcgaaagtactgcgatcaaggactacgacctgccgccaatgaccgtgatcggcgagttcgacaaagcgtcgggcgacgttctgcaatcgctgtacgaagaactcgatgcaccgatcatccgcaaggacatcgctgttgccgagatgatcaagtacacctgcaatgtgtggcacgccaccaaggttactttcgccaacgaaatcggcaacattgccaaggccgtcggcgtcgatggccgtgaagtgatggacgtggtctgccaggacaaggcgctgaacctgtcccagtactacatgcgccctggcttcgcattcggcggctcctgcctgccgaaagacgttcgtgccctgacctaccgcgccggcagcctggacgttgaagctcccctgctcaactcgctgatgcgcagtaacacgtcgcaagtacagaacgctttcgacatggttgccagctacgacgcccgcaaggttgcactgctgggcctgagcttcaaggccggtactgacgatctgcgtgaaagcccgctggtagagctggccgaaatgctgatcggcaagggcttcgacctgagcatcttcgacagcaacgttgaatatgcacgcgttcacggtgccaacaaggactacatcgaatccaagattccgcacgtttcctcgctgctgaactcggacttcgaccaagtcatcaatgactccgacgtcatcatcctcggcaaccgcgatgagcgtttccgcgccctcgccaacaagacccctgaaggcaagcgcgtcatcgatctggtgggcttcatggccaacgccaccagcgaagacggtcgtgccgaaggtatctgctggtaa

SEQ ID NO: 72475 - protein, 438 aa, Pseudomonas syringae pv
MRISIFGLGYVGAVCAGCLSARGHEVVGVDISSTKIDLINNGKSPIVEPGLEELLQKGISTGKLRGTTDFAEAIRATDLSMICVGTPSKKNGDLELDYIESVCREIGYVLRDKATRHTIVVRSTVLPGTVANVVIPILEDCSGKKAGVDFGVAVNPEFLRESTAIKDYDLPPMTVIGEFDKASGDVLQSLYEELDAPIIRKDIAVAEMIKYTCNVWHATKVTFANEIGNIAKAVGVDGREVMDVVCQDKALNLSQYYMRPGFAFGGSCLPKDVRALTYRAGSLDVEAPLLNSLMRSNTSQVQNAFDMVASYDARKVALLGLSFKAGTDDLRESPLVELAEMLIGKGFDLSIFDSNVEYARVHGANKDYIESKIPHVSSLLNSDFDQVINDSDVIILGNRDERFRALANKTPEGKRVIDLVGFMANATSEDGRAEGICW

SEQ ID NO: 72476 - DNA, 1386 bp, Bacillus subtilis
  CDS (1)..(1386): transl_table=11
gtgaaaaaaatagctgtcattggaacaggttatgtaggactcgtatcaggcacttgctttgcggagatcggcaataaagttgtttgctgtgatatcgatgaatcaaaaatcagaagcctgaaaaatggggtaatcccaatctatgaaccagggcttgcagacttagttgaaaaaaatgtgctggatcagcgcctgacctttacgaacgatatcccgtctgccattcgggcctcagatattatttatattgcagtcggaacgcctatgtccaaaacaggtgaagctgatttaacgtacgtcaaagcggcggcgaaaacaatcggtgagcatcttaacggctacaaagtgatcgtaaataaaagcacagtcccggttggaacagggaaactggtgcaatctatcgttcaaaaagcctcaaaggggagatactcatttgatgttgtatctaaccctgaattccttcgggaagggtcagcgattcatgacacgatgaatatggagcgtgccgtgattggttcaacaagtcataaagccgctgccatcattgaggaacttcatcagccattccatgctcctgtcattaaaacaaacctagaaagtgcagaaatgattaaatacgccgcgaatgcatttctggcgacaaagatttcctttatcaacgatatcgcaaacatttgtgagcgagtcggcgcagacgtttcaaaagttgctgatggtgttggtcttgacagccgtatcggcagaaagttccttaaagctggtattggattcggcggttcatgttttccaaaggatacaaccgcgctgcttcaaatcgcaaaatcggcaggctatccattcaagctcatcgaagctgtcattgaaacgaacgaaaagcagcgtgttcatattgtagataaacttttgactgttatgggaagcgtcaaagggagaaccatttcagtcctgggattagccttcaaaccgaatacgaacgatgtgagatccgctccagcgcttgatattatcccaatgctgcagcagctgggcgcccatgtaaaagcatacgatccgattgctattcctgaagcttcagcgatccttggcgaacaggtcgagtattacacagatgtgtatgctgcgatggaagacactgatgcatgcctgattttaacggattggccggaagtgaaagaaatggagcttgtaaaagtgaaaaccctcttaaaacagccagtcatcattgacggcagaaatttattttcacttgaagagatgcaggcagccggatacatttatcactctatcggccgtcccgctgttcggggaacggaaccctctgacaagtattttccgggcttgccgcttgaagaattggctaaagacttgggaagcgtcaatttataa

SEQ ID NO: 72477 - protein, 461 aa, Bacillus subtilis
MKKIAVIGTGYVGLVSGTCFAEIGNKVVCCDIDESKIRSLKNGVIPIYEPGLADLVEKNVLDQRLTFTNDIPSAIRASDIIYIAVGTPMSKTGEADLTYVKAAAKTIGEHLNGYKVIVNKSTVPVGTGKLVQSIVQKASKGRYSFDVVSNPEFLREGSAIHDTMNMERAVIGSTSHKAAAIIEELHQPFHAPVIKTNLESAEMIKYAANAFLATKISFINDIANICERVGADVSKVADGVGLDSRIGRKFLKAGIGFGGSCFPKDTTALLQIAKSAGYPFKLIEAVIETNEKQRVHIVDKLLTVMGSVKGRTISVLGLAFKPNTNDVRSAPALDIIPMLQQLGAHVKAYDPIAIPEASAILGEQVEYYTDVYAAMEDTDACLILTDWPEVKEMELVKVKTLLKQPVIIDGRNLFSLEEMQAAGYIYHSIGRPAVRGTEPSDKYFPGLPLEELAKDLGSVNL

SEQ ID NO: 72478 - DNA, 1314 bp, Rhizobium meliloti
  CDS (1)..(1314): transl_table=11
atgaaaatcacgatgatcggtgccggctatgtcggccttgtttccggtgtttgctttgcggatttcggccatgacgtcgtctgcgtcgacaaggacgaaggcaagatctcggcgctgaagaagggtcagattccgattttcgaacccgggctggaccatctcgtcgccagcaacgtcgcgtccgggcgcctgaacttcaccgacgatctcaagaccgccgtggccgccagcgacgtggttttcattgccgtcggaacgccgtcacggcgcggtgacgggcatgcggatctttcctatgtttacgcagctgcacgcgaaatcgccgccaaccttcagggcttcaccgtcgtggtgaccaagtcgacggttccggtcggtaccggagacgaggtcgagcgcatcatccgcgagaccaatcccgcggctgacgtcaccgtcgtctccaacccggaattcctgcgggaaggtgccgcgatcgaggatttcaaacggcccgaccggatcgtcatcggggtcgacggcagcgacggtcgcgcgcgagaggtgatgacggaagtctataggccgctctatctcaaccagtcgccgctcgtgttcacgacacgccgcacttcggaactgatcaaatatgccggcaacgccttcctggcgatgaagatcaccttcatcaacgagattgccgatctgtgcgagaaagtcggtgccaatgtgcaggacgtcgcccgcggcatcgggctggacggccgcatcgggtcgaagttcctgcatgccgggccgggatatggcggctcctgcttccccaaggacacattggcgctggtcaagaccgcgcaggaccacgacacccccgtgcggctcgtcgaaaccacggtcgccgtcaacgacaaccgcaagcgggcgatgggacgcaaggtgatcgcggcggccggcggcgatatccgcgggtccaagatcgcggtcctcggcctgaccttcaagccgaataccgacgacatgcgcgacagccccgcgatcgcggtcgttcaggcgctgcaggacgcaggcgcccgggtcaccggctacgacccggaaggaatggaaaacgcgcgcaagctgatagaggggctggactgcgcgcgcgatccctatgaagcggcggcagaggcggacgctctggtgatcatcaccgagtggaacgaattccgggcgctggatttcgaccgtttgaagtctaccatgaagacgcccctgctcgtcgatttgcgcaatatctatcgcaaggacgaagtcgcaaagcacggcttccgctatgcaagcatcggcaggccggactga

SEQ ID NO: 72479 - protein, 437 aa, Rhizobium meliloti
MKITMIGAGYVGLVSGVCFADFGHDVVCVDKDEGKISALKKGQIPIFEPGLDHLVASNVASGRLNFTDDLKTAVAASDVVFIAVGTPSRRGDGHADLSYVYAAAREIAANLQGFTVVVTKSTVPVGTGDEVERIIRETNPAADVTVVSNPEFLREGAAIEDFKRPDRIVIGVDGSDGRAREVMTEVYRPLYLNQSPLVFTTRRTSELIKYAGNAFLAMKITFINEIADLCEKVGANVQDVARGIGLDGRIGSKFLHAGPGYGGSCFPKDTLALVKTAQDHDTPVRLVETTVAVNDNRKRAMGRKVIAAAGGDIRGSKIAVLGLTFKPNTDDMRDSPAIAVVQALQDAGARVTGYDPEGMENARKLIEGLDCARDPYEAAAEADALVIITEWNEFRALDFDRLKSTMKTPLLVDLRNIYRKDEVAKHGFRYASIGRPD

SEQ ID NO: 72480 - DNA, 1263 bp, Escherichia coli O157
  CDS (1)..(1263): transl_table=11
atgagttttgcgaccatttctgttatcggactgggttacatcgggctgcctacagcagcagcgtttgcctcacggcaaaaacaggtgattggtgtcgatatcaaccaacacgcggttgataccatcaatcgtggcgaaatccatatcgtcgagcctgatttggcgagcgtagtaaaaactgccgtagaaggcggttttttacgagcgagcacgacgccagttgaagcggatgcctggctgattgctgtacccacgccgtttaaaggcgatcatgagccagatatgacctacgttgaatcggctgctcgctccattgcgccagtgctgaaaaaaggcgcgctggtgatccttgaatccacctcgccggtggggtcaaccgagaagatggcagaatggttagcagagatgcgtccggatctcactttcccacagcaggtgggcgagcaggcggacgtcaacattgcttactgcccggaacgcgtgttaccgggccaggttatggtcgagctgattaaaaacgatcgcgtgattggtggtatgacgccggtttgttcggcccgcgccagcgaactgtacaaaattttcctcgaaggtgagtgtgtcgtcactaactcgcggacggcggaaatgtgtaagctcaccgaaaacagcttccgcgatgtgaatatcgcttttgctaatgaattgtcgctgatttgtgccgatcaggggattaacgtctgggaactgattcgcctggcgaatcgtcaccctcgcgttaatattcttcagcctggccctggcgtgggcggtcactgcattgctgttgatccgtggtttatcgtggcacagaacccccagcaggcgcggcttatccgtaccgcgcgcgaagtgaacgatcacaaaccgttctgggttatcgatcaggtgaaagcggcggtggctgattgcctggcggctaccgataaacgcgccagtgaactgaaaatcgcctgctttggtctggcgtttaaaccgaatattgatgacctgcgcgaaagcccggcgatggaaatcgctgaactgatcgcccagtggcatagcggcgaaactctggttgttgagcctaacatccaccagttgccgaaaaaactgaccgggctttgtactctggcgcagcttgacgaggcgctggcaacggcagacgtgctggtgatgctggtcgatcatagtcagttcaaagttatcaatggcgacaatgtccatcagcagtatgtcgtcgatgctaaaggagtctggcgctga

SEQ ID NO: 72481 - protein, 420 aa, Escherichia coli O157
MSFATISVIGLGYIGLPTAAAFASRQKQVIGVDINQHAVDTINRGEIHIVEPDLASVVKTAVEGGFLRASTTPVEADAWLIAVPTPFKGDHEPDMTYVESAARSIAPVLKKGALVILESTSPVGSTEKMAEWLAEMRPDLTFPQQVGEQADVNIAYCPERVLPGQVMVELIKNDRVIGGMTPVCSARASELYKIFLEGECVVTNSRTAEMCKLTENSFRDVNIAFANELSLICADQGINVWELIRLANRHPRVNILQPGPGVGGHCIAVDPWFIVAQNPQQARLIRTAREVNDHKPFWVIDQVKAAVADCLAATDKRASELKIACFGLAFKPNIDDLRESPAMEIAELIAQWHSGETLVVEPNIHQLPKKLTGLCTLAQLDEALATADVLVMLVDHSQFKVINGDNVHQQYVVDAKGVWR

SEQ ID NO: 72482 - DNA, 1263 bp, Salmonella typhimurium
  CDS (1)..(1263): transl_table=11
atgagttttacgaccatttctgttattgggctggggtatatcggattaccgactgcggccgcttttgcttcccgccagaagcaggttatcggcgtggatatcaaccaacatgcggtagacattataaatcgcggtgaaattcacatcgtggagccggcgttgggcaatgtggtgaagatggcggtggagggcggctttctgcgtgcgacgacgacacctgtcgaggccgatgcgtacctgattgccgtgccgacaccattcaaaggcgatcacgaccctgacatggcctatgtcgaagccgcggcgaaatccattgcgccagtattaaaaaaaggggcactggtgattctggaatcaacatcgccggtcggcgcaacggagcaaatggctggctggctggccgggatgcgcacggatctgacctttccccagcaggcgggcgagcaggccgatgtgaatatcgcctattgtccggagcgtgtgctgccgggtcaggtgatggtggaactcattaaaaatgaccgcgtgattggcggtatgacgccagtatgttcggctcgcgccagcgcgctgtacaaaattttccttgagggcgaatgcgttgtcaccaactcgcgcaccgcggagatgtgcaaactgacggaaaatagcttccgtgatgtgaatatcgcctttgcgaatgaattgtcgctgatttgcgccgaacaggggattaacgtttgggaattgatccgcctggcgaaccgccatccgcgcgtcaatattttgcagccgggcccaggcgttggcgggcactgcattgcggtcgatccgtggtttattgtggcgcaaaatccgcagcaggcgagactgattcgcaccgcgcgtgaagtgaacgacggcaaaccgcactgggtggtcgatcaggtaaaagccgcggtcacagattgcctggcggccaccgataaacgcgccagcgaagtgaaaatcgcctgttttgggctggcctttaagccgaatatcgacgatctgcgcgaaagcccggcgatggggatcgcgcaaagtatcgcccgctggcacagcggcgaaaccctggtcgtcgaaccgaatatccgtcagttgccgaaaaaattggacggactttgtacgctggcgaaactggacgcggcgctggccgccgccgatgtgctggtgatgctggtcgatcacgacgaatttaaagcgattcccggcgatgcggttcatcaacgttatgtggttgataccaaaggagtctggcgctga

SEQ ID NO: 72483 - protein, 420 aa, Salmonella typhimurium
MSFTTISVIGLGYIGLPTAAAFASRQKQVIGVDINQHAVDIINRGEIHIVEPALGNVVKMAVEGGFLRATTTPVEADAYLIAVPTPFKGDHDPDMAYVEAAAKSIAPVLKKGALVILESTSPVGATEQMAGWLAGMRTDLTFPQQAGEQADVNIAYCPERVLPGQVMVELIKNDRVIGGMTPVCSARASALYKIFLEGECVVTNSRTAEMCKLTENSFRDVNIAFANELSLICAEQGINVWELIRLANRHPRVNILQPGPGVGGHCIAVDPWFIVAQNPQQARLIRTAREVNDGKPHWVVDQVKAAVTDCLAATDKRASEVKIACFGLAFKPNIDDLRESPAMGIAQSIARWHSGETLVVEPNIRQLPKKLDGLCTLAKLDAALAAADVLVMLVDHDEFKAIPGDAVHQRYVVDTKGVWR

SEQ ID NO: 72484 - DNA, 1323 bp, Bacillus subtilis
  CDS (1)..(1323): transl_table=11
atgaatataacagtcatcggaacaggctatgtcggtcttgtgacaggtgtttctctttctgagattggacatcatgtaacctgcattgatattgacgctcacaagattgatgaaatgagaaagggcatttcccccatatttgaaccaggtcttgaagagctgatgagaaaaaatacagctgatggacggctgaactttgaaacgagctatgagaaaggcttggcacaggcagacatcatttttatagcggtcggcacaccgcagaaaagcgacgggcacgccaatctggagcaaattacagatgcggccaaacgcatcgcaaagcatgtcaaacgagatacagtcgtggtaacgaaaagcacagtgcccgttgggacaaacgatttgattaatggactgattactgaacatctagcggagcctgtcagtatttcggtcgcatccaatccggaatttttgcgtgaggggtcggcgatctatgatacctttcatggtgacaggatcgtgatcgggacggccgatgagaaaacagcaaatacgctggaggagctcttccgtccgtttcaaatcccgatttaccaaacggatatcagaagcgccgagatgatcaaatatgcctcaaatgcttttctggccactaagatcagttttataaacgaaatttcgaatatatgtgaaaaggtcggcgccgatattgaagcagtcgcatacgggatgggacaggataagcggatcgggagccagtttttaaaagcgggcataggctacggcggctcttgttttccaaaggacacaaacgccctcgtgcaaattgccggcaatgtcgagcatgattttgaactgctgaaatccgttatcaaagtcaacaacaatcagcaggcgatgctggttgataaagcgctgaacaggctcggtggggtgacgggaaaaacgattgcccttttaggcctgtcatttaaaccgaataccgacgatatgagagaagcgccgtcaattgttattgcagaccgtctcgctgcgctcgacgcccgtatcagagcctacgatcccattgcagttagccatgcaaagcatgttctcccgcaagctgttgaatataaagagacgatcgaggaagctgtcaaagggtctgacgccgtcatgattttaaccgactgggctgacattaaacaattcccgttagcggcttatcaggatttgatggaaacgccgctcatatttgacggcagaaactgctacacattggatgaggctttggctgcaggagtggagtattattctgtcggacggaaggcggttgttccgtcaggtgcaattcaatag

SEQ ID NO: 72485 - protein, 440 aa, Bacillus subtilis
MNITVIGTGYVGLVTGVSLSEIGHHVTCIDIDAHKIDEMRKGISPIFEPGLEELMRKNTADGRLNFETSYEKGLAQADIIFIAVGTPQKSDGHANLEQITDAAKRIAKHVKRDTVVVTKSTVPVGTNDLINGLITEHLAEPVSISVASNPEFLREGSAIYDTFHGDRIVIGTADEKTANTLEELFRPFQIPIYQTDIRSAEMIKYASNAFLATKISFINEISNICEKVGADIEAVAYGMGQDKRIGSQFLKAGIGYGGSCFPKDTNALVQIAGNVEHDFELLKSVIKVNNNQQAMLVDKALNRLGGVTGKTIALLGLSFKPNTDDMREAPSIVIADRLAALDARIRAYDPIAVSHAKHVLPQAVEYKETIEEAVKGSDAVMILTDWADIKQFPLAAYQDLMETPLIFDGRNCYTLDEALAAGVEYYSVGRKAVVPSGAIQ

SEQ ID NO: 72486 - DNA, 1473 bp, Oryza sativa
  CDS (1)..(1473)
atggcggtcatcgccctcaagtgccccgacgtcgaggtggtcgtcgtcgacatctccgccgcccgcatcgacgcctggaacagcgacgcgctcccgatctacgagccgggcctcgacgacgtcgtgcgccgctgccgcgggaggaacctcttcttcagcagcgacgtcgagaggcacgtcggcgaggccgacatcgtcttcgtctccgtgaacacccccaccaaggcccgcggcctcggcgccggcaaggccgccgacctcacctactgggagagcgcggcgcggatgatcgccgccgtggcgacgtccgacaaggtcgtcgtcgagaagtccaccgtgccggtcaagaccgcggaggccatcgagaagatcctcgaccacaacggccgcgacggcgtcggcttccagatcctctccaacccggagttcctcgccgagggcaccgccatccgcgacctgctcgcccccgaccgcgtcctcatcggcggccgcgagaccgccgcggggcgcgccgccgtccaggcgctcaaggacgtgtacacccgatgggtccccgaggagaggatcctcaccaccaacctctggtccgccgagctgtccaagctcgccgccaacgcgttcctggcccagaggatctcgtccgtcaacgccatgtccgcgctctgcgaggccaccggcgccgacgtcgccgaggtcgcctacgccgtgggcaaggactccaggatcggcgccaagtttctcaacgccagcgtgggattcggtggctcctgcttccagaaagacatcctcaacctggtgtacatctgcgagtgcaatggcctccccgaggtggccaactactggaagcaggtgatcaaaggttttaaatctccggctatagcaaccactatgtccaaagatatatactcactcactccgtttcaggttatcaagatcaacgactaccagaagagccggttcgtgaaccgcgtggtgtcgtccatgttcaacaccgtggccggcaagaagatcgccgtgctgggcttcgccttcaagaaggacaccggcgacaccagggagacgcccgccatcgacgtctgcaaggggctgatcggcgacaaggccaaggtgagcatctacgacccccaggtgacggaggaccaggtccagcgcgacctcgccatgagcaagttcgattgggatcacccggtccatctccagccgatgagccccacggccatcaagcaggtgtccgtcgcctgggacgcctacgaggcggccagggccgcccacggcgtctgcatcctcactgagtgggacgagttcaggagcctcgactacgcgaggatctacgggggaatgcagaagccggcgttcgtgttcgacgggcgcaacgtggttgacgctgagaagctgagggagattggattcatcgtctactccattggcaagcctctcgatgcctggctcaaggacatgcctgctgttgcctga

SEQ ID NO: 72487 - protein, 490 aa, Oryza sativa
MAVIALKCPDVEVVVVDISAARIDAWNSDALPIYEPGLDDVVRRCRGRNLFFSSDVERHVGEADIVFVSVNTPTKARGLGAGKAADLTYWESAARMIAAVATSDKVVVEKSTVPVKTAEAIEKILDHNGRDGVGFQILSNPEFLAEGTAIRDLLAPDRVLIGGRETAAGRAAVQALKDVYTRWVPEERILTTNLWSAELSKLAANAFLAQRISSVNAMSALCEATGADVAEVAYAVGKDSRIGAKFLNASVGFGGSCFQKDILNLVYICECNGLPEVANYWKQVIKGFKSPAIATTMSKDIYSLTPFQVIKINDYQKSRFVNRVVSSMFNTVAGKKIAVLGFAFKKDTGDTRETPAIDVCKGLIGDKAKVSIYDPQVTEDQVQRDLAMSKFDWDHPVHLQPMSPTAIKQVSVAWDAYEAARAAHGVCILTEWDEFRSLDYARIYGGMQKPAFVFDGRNVVDAEKLREIGFIVYSIGKPLDAWLKDMPAVA

SEQ ID NO: 72488 - DNA, 1443 bp, Oryza sativa
  CDS (1)..(1443)
atggtgaagatctgctgcatcggagctgggtacgtgggcgggccgaccatggcggtgatcgccctcaagtgcccggcgatcgaggtggtggtcgtcgacatctccaagccgcgcatcgacgcctggaacagcgagcagctgccgatctacgagccggggctcgacgaggtggtcaaggagtgcaggggcaggaacctcttcttcagcacggacgtcgagaagcacgtcgcggaggcggacatcatcttcgtgtccgtgaacacgccgaccaagacgcgcggcctcggcgccggcaaggcggccgacctcacctactgggagagcgcggcgaggatgatcgccgacgtgtccaagtccgacaagatcgtcgtcgagaagtccaccgtgccggtcaagacggccgaggcgatcgagaagatcctgacgcacaacagcaagggcatcaactaccagatcctctccaacccggagttcctcgccgagggcaccgctattgacgacctgttcaagcccgaccgcgtcctcatcggcggccgcgagacggcggaggggaggaaggccgtgcaggcgctcaagtcggtgtacgcgcactgggtgcccgaggacaggatcatcaccaccaacctctggtccgccgagctctccaagctcgccgcgaacgcgttcctggcgcagaggatctcgtcggtgaacgccatctcggcgctctgcgaggccaccggcgcgaacgtcaccgaggtggcgtacgccgtcggcaaggactcgaggattggccccaaattcctcaacgccagcgttggattcggcggctcctgcttccagaaggacatcctgaatctggtgtacatctgcgaatgcaatggcctccccgaggttgcgaactactggaagcaggtgatcaagatcaacgactaccagaagagccggttcgtgaaccgggtggtgtcgtccatgttcaacacggtgtcgggcaagaagatcgccgtgctggggttcgcgttcaagaaggacaccggcgacacgagggagacgccggcgatcgacgtgtgccacggcctgctcggcgacaaggcgcagatcagcatctacgacccgcaggtgacggaggaccagatccagcgggacctcgccatgggcaagttcgactgggaccacccgatgcacctgcagccgacgagccccacggcgttcaagcaggtgagcgtggtgtgggacgcgtacgaggccaccaagaacgcccatggcctctgcatcctcaccgagtgggacgagttcaagacgctcgactaccagaagatctacgacaacatgcagaagccggcgttcgtcttcgacggccgcaacgtcgtcgacccggagaagctcagggagatcggcttcatcgtctactccatcggcaagccgctcgacgcctggctcaaggacatgcccgccgtggcatga

SEQ ID NO: 72489 - protein, 480 aa, Oryza sativa
MVKICCIGAGYVGGPTMAVIALKCPAIEVVVVDISKPRIDAWNSEQLPIYEPGLDEVVKECRGRNLFFSTDVEKHVAEADIIFVSVNTPTKTRGLGAGKAADLTYWESAARMIADVSKSDKIVVEKSTVPVKTAEAIEKILTHNSKGINYQILSNPEFLAEGTAIDDLFKPDRVLIGGRETAEGRKAVQALKSVYAHWVPEDRIITTNLWSAELSKLAANAFLAQRISSVNAISALCEATGANVTEVAYAVGKDSRIGPKFLNASVGFGGSCFQKDILNLVYICECNGLPEVANYWKQVIKINDYQKSRFVNRVVSSMFNTVSGKKIAVLGFAFKKDTGDTRETPAIDVCHGLLGDKAQISIYDPQVTEDQIQRDLAMGKFDWDHPMHLQPTSPTAFKQVSVVWDAYEATKNAHGLCILTEWDEFKTLDYQKIYDNMQKPAFVFDGRNVVDPEKLREIGFIVYSIGKPLDAWLKDMPAVA

SEQ ID NO: 72490 - DNA, 1443 bp, Brassica napus
  CDS (1)..(1443)
atggtgaagatctgttgtattggagctggatatgttggtggtccaacgatggctgtgattgcactcaaatgcccacacgttgaagtagcagtcgttgacatctctgttccacgtatcaacgcatggaacagtgaccagcttcccatctacgagcctggccttgaagacatcgtcaagcaatgcagaggcaagaacctcttcttcagcaccgacgttgagaagcacgtcagagaagctgatatcgtcttcgtctctgtcaacacacccacgaaaaccactggtcttggagctggcaaagccgccgatctcacttactgggagagtgctgctcgtatgattgctgacgtgtcggtttccgacaagatcgtggttgagaaatcaactgtgcccgtgaaaacagctgaagccatcgagaagatcttgatgcataacagcaaagggatcaagtttcagatcctttcgaatcctgagtttctcgcggaaggaactgcgatcgctgatcttttcaaccctgaccgtgttctcatcggagggcgagagacacctgaaggtttcaaagctgttcagacgcttaaggaagtgtatgcaaactgggttcctgagggccagatcatcacgaccaatctctggtccgccgagctttcaaagctagctgcaaacgctttcttggctcagaggatttcatcagtcaacgccatgtcggctctgtgtgaatccaccggagctgatgtcactcaagtggcctacgctgtcggtactgattcaagaatcggtcccaagttcttgaacgctagtgtcggattcggaggctcttgtttccagaaggacattctgaacctcgtctacatctgtcagtgcaatggtcttccggaagtggcggagtactggaaacaagtgatcaagatcaacgattaccagaagaaccggtttgtgaacagaatcgtctcctctatgttcaacaccgtctccaacaagaaggttgccatcctcggattcgcgttcaagaaagacaccggcgacacgagggaaacaccagccattgacgtgtgcaaaggtttgttgggagacaaagcgcagatcagcatctatgatcctcaagtcactgaagagcagattcagagagaccttgcgatgaaaaagttcgactgggaccatccgctacacttgcagccgatgagcccgaccacggtgaaacaagtgagtgtgaaatgggacgcgtatgaagctactaaagacgcgcatgcggtttgcgttttgactgagtgggatgagttcaagtctttggactaccagaagatctttgacaacatgcagaaaccagcttttatcttcgatggaagaaacgttctgaatgtggacaagttgagagagattggtttcatcgtttactccattggtaagccacttgatgcatgggttaaggacatgcctgcttttgtctga

SEQ ID NO: 72491 - protein, 480 aa, Brassica napus
MVKICCIGAGYVGGPTMAVIALKCPHVEVAVVDISVPRINAWNSDQLPIYEPGLEDIVKQCRGKNLFFSTDVEKHVREADIVFVSVNTPTKTTGLGAGKAADLTYWESAARMIADVSVSDKIVVEKSTVPVKTAEAIEKILMHNSKGIKFQILSNPEFLAEGTAIADLFNPDRVLIGGRETPEGFKAVQTLKEVYANWVPEGQIITTNLWSAELSKLAANAFLAQRISSVNAMSALCESTGADVTQVAYAVGTDSRIGPKFLNASVGFGGSCFQKDILNLVYICQCNGLPEVAEYWKQVIKINDYQKNRFVNRIVSSMFNTVSNKKVAILGFAFKKDTGDTRETPAIDVCKGLLGDKAQISIYDPQVTEEQIQRDLAMKKFDWDHPLHLQPMSPTTVKQVSVKWDAYEATKDAHAVCVLTEWDEFKSLDYQKIFDNMQKPAFIFDGRNVLNVDKLREIGFIVYSIGKPLDAWVKDMPAFV

SEQ ID NO: 72492 - DNA, 1443 bp, Brassica napus
  CDS (1)..(1443)
atggtgaagatatgctgcattggagctggatacgtcggtggtccaaccatggcagtcatcgctctaaaatgcccatccgttgaagtagccgtcgttgacatctccgtgcccaggatcaccgcctggaacagcgaccagctccccatctacgagcctggtcttgacgacgtcgtcaagcagtgccgtgggaagaaccttttcttcagcaccgacgttgagaagcacgtcagagaggccgacattgtctttgtctctgtcaacacacccaccaagacccgcggtctcggagctggcaaagctgccgacttgacttactgggagagcgctgctcgtatgatcgctgatgtgtccgtttccgacaagatcgttgtcgagaaatcgactgttccggttaaaaccgcagaggccattgagaagattcttacgcataacagcaaagggatcaagtttcagatcctctccaaccctgagtttctcgctgaaggaaccgctattgaggatctcttcaagcctgaccgtgtcctcatcggtggccgcgagacgcctgaagggtttgcagctgttaaagccttgaaagacgtttactcccaatgggtccctgaagagagaatcctcactaccaatctctggtctgcggagctctccaagctcgctgctaacgccttcttagctcagaggatctcgtctgtcaacgcgatgtcagctctctgtgaagcaacgggcgccaatgtcactgaagtctcttacgctgtgggtaaagactctcgtatcggtcctaagttcttgaactcgagtgttggctttggagggtcctgtttccagaaagacatcctcaacttagtctacatctgcgaatgcaacggcttacctgaagtcgctgagtactggaaacaagtcatcaagatcaacgactaccagaaaaccagattcgttaaccgcatcgtctcctcgatgttcaacaccgtctccaacaaaaagatcgctgttctcggtttcgccttcaagaaagacactggagacacgagagagacaccagccatcgatgtctgcaaaggcttgttaggtgacaaagctcgtatcagcatctacgacccgcaggtcacggaagagcagatccagagagacttgaccatgaacaaattcgactgggaccacccgcttcatctccagcccatgagccccactactgtgaagcaagtctcggtcgcttgggacgcgtacgctgcgaccaaagacgctcacggtatctgcattttgaccgagtgggatgagttcaagaagctcgattacgagaagatctttgagaatatgcagaaacctgcgtttgtttttgatgggaggaacgtggtggatgctgagaagctgaggaagattgggtttattgtttactctattggtaagccgttggaccagtggctcaaggacatgcctgctcttgcctaa

SEQ ID NO: 72493 - protein, 480 aa, Brassica napus
MVKICCIGAGYVGGPTMAVIALKCPSVEVAVVDISVPRITAWNSDQLPIYEPGLDDVVKQCRGKNLFFSTDVEKHVREADIVFVSVNTPTKTRGLGAGKAADLTYWESAARMIADVSVSDKIVVEKSTVPVKTAEAIEKILTHNSKGIKFQILSNPEFLAEGTAIEDLFKPDRVLIGGRETPEGFAAVKALKDVYSQWVPEERILTTNLWSAELSKLAANAFLAQRISSVNAMSALCEATGANVTEVSYAVGKDSRIGPKFLNSSVGFGGSCFQKDILNLVYICECNGLPEVAEYWKQVIKINDYQKTRFVNRIVSSMFNTVSNKKIAVLGFAFKKDTGDTRETPAIDVCKGLLGDKARISIYDPQVTEEQIQRDLTMNKFDWDHPLHLQPMSPTTVKQVSVAWDAYAATKDAHGICILTEWDEFKKLDYEKIFENMQKPAFVFDGRNVVDAEKLRKIGFIVYSIGKPLDQWLKDMPALA

SEQ ID NO: 72494 - DNA, 1443 bp, Zea mays
  CDS (1)..(1443)
atggtgaagatctgctgcatcggtgctggctatgtcggtggcccaaccatggccgtcattgccctcaagtgcccagacattgaggtcgtcgtcgttgacatctccaagccccgcattgaggcctggaacagtgacaccctgccaatctacgagcctggtctcgatgatgttgtgaagcagtgcaggggcaggaacctcttcttcagcactgatgttgagaagcacgtcgctgaggctgacattatctttgtctcggtgaacacccccaccaagacccgtgggcttggagctggcaaggctgccgacctcacctactgggagagcgctgcccgcatgattgcggatgtctccaagtctgacaagattgttgttgagaagtccactgtccctgtcaagaccgctgaggctattgagaagatcttgacccacaacagcaagggcatcaactaccagatcctttccaacccagagttccttgcggagggcactgccattgaggacctgttcaagcctgacagagtgcttatcggtggccgggagacccctgagggcaggaaggccgtccaggctctcaaggatgtgtacgctcactgggttcccgaggacaggatcctcaccaccaacctgtggtctgctgagctctccaagctcgctgccaacgcgttcctggcacagaggatctcctctgtgaacgccatctccgccctctgcgaggccaccggcgcgaatgtgactgaggtggcttacgccgtgggcaaggacacgaggattggccccaagttcctgaacgccagtgttgggttcggtgggtcttgcttccagaaggacatcctgaacctggtgtacatctgcgagtgcaatggcctgcccgaggtggccaactactggaagcaggtgatcaagatcaacgactaccagaagagccggttcgtgaaccgcgtcgtgtcgtccatgttcaacaccgttgccggcaagaagatcgccgtcctcggcttcgccttcaagaaggacaccggcgacaccagggagaccccggccatcgatgtctgcaagggcctgctgggtgacaaggcccagatcagcatctacgacccccaggtgacggaggaccagatccagcgggacctagccatgaacaagttcgactgggaccacccgatgcacctgcagccgacgagcccgacggccgtgaagcaggtgagctgcgtgtgggacgcgtacgaggccaccaagggcgcccacgggctgtgcatcctgaccgagtgggacgagttcaagaccctggactaccagaagatcttcgacaacatgcagaagcccgccttcgtcttcgacggccgcaacatcgtcgactccgagaagctgagggagatcggcttcatcgtctactccatcggcaagccgctcgacgcctggctcaaggacatgcccgcggtcgcctaa

SEQ ID NO: 72495 - protein, 480 aa, Zea mays
MVKICCIGAGYVGGPTMAVIALKCPDIEVVVVDISKPRIEAWNSDTLPIYEPGLDDVVKQCRGRNLFFSTDVEKHVAEADIIFVSVNTPTKTRGLGAGKAADLTYWESAARMIADVSKSDKIVVEKSTVPVKTAEAIEKILTHNSKGINYQILSNPEFLAEGTAIEDLFKPDRVLIGGRETPEGRKAVQALKDVYAHWVPEDRILTTNLWSAELSKLAANAFLAQRISSVNAISALCEATGANVTEVAYAVGKDTRIGPKFLNASVGFGGSCFQKDILNLVYICECNGLPEVANYWKQVIKINDYQKSRFVNRVVSSMFNTVAGKKIAVLGFAFKKDTGDTRETPAIDVCKGLLGDKAQISIYDPQVTEDQIQRDLAMNKFDWDHPMHLQPTSPTAVKQVSCVWDAYEATKGAHGLCILTEWDEFKTLDYQKIFDNMQKPAFVFDGRNIVDSEKLREIGFIVYSIGKPLDAWLKDMPAVA

SEQ ID NO: 72496 - DNA, 1443 bp, Glycine max
  CDS (1)..(1443)
atggtgaagatttgctgcattggagctggctatgttggtggcccaaccatggctgtaattgccttgaagtgtcctgagatcgaggtggtcgtggtggacattgctgcaccgcgaatcaacgcgtggaacagcgaccacctcccgatatatgagcctggccttgatgatgtggtgaagcagtgcagggggaagaatctcttcttcagcactgatgtagagaagcatgttgccgaggctgacattgtctttgtctcggtgaacacaccaacgaagactcagggtcttggagccggcaaggcagctgatctcacatattgggagagtgctgccaggatgattgctgatgtatcaaaatcagacaagatcgtggtcgagaaatcgaccgtgcctgtgaaaacagctgaggcaattgagaggattctgactcacaataggaaaggcatcaatttcacaattctgtcaaaccctgagtttcttgctgagggtacagcaattgcagacctgtttaagccggatcgagtcctcatcggaggcagggaaaccccagagggtcaaaaggctattcattctctgaagagtgtttatgcccattgggttcctgaggacagaatcctttgcaccaatttgtggtctgctgaactctcaaagcttgcagccaatgctttcctggcccagaggatctcctcggtgaatgccatgtcggcactttgtgaggcaactggtgctgatgtctcccaggtgtcacattcaatcggcacagactcaagaattggaccaaagttcctgaatgccagtgttggttttggaggatcatgcttccagaaggacatattgaacttggtctatatctgtgagtgcaatggccttcctgaggtggccaattactggaaacaggtcatcaaggtgaatgactaccaaaaaatgcggtttgtgaaccgcgtggtgtcgtcaatgttcaacacagtctcagggaagaagattgctattttgggatttgctttcaagaaggacactggtgacactagggagaccccagccattgatgtgtgcaagggccttttgggagacaaggccaagttgagcatatatgatcctcaggtcaccgaggatcaaatcatgagggatttggcaatgaagaagtttgattgggaccaccctgctcatcttcaaccactgagtccaacttccaacaaacaagtatctgtagtctgggatgcctatgaggcaatcaaggatgcacatggcatctgcattatgactgagtgggatgagtttaagaaccttgattaccaaaaggtttatgacagcatgcagaagcctgcattcattttcgatggccgcaacgtcgtgaatgttaacaagctgagggaaattggtttcattgtttactccattggcaaacctctagattcatggctcaaggacatgcctgcagtggcttaa

SEQ ID NO: 72497 - protein, 480 aa, Glycine max
MVKICCIGAGYVGGPTMAVIALKCPEIEVVVVDIAAPRINAWNSDHLPIYEPGLDDVVKQCRGKNLFFSTDVEKHVAEADIVFVSVNTPTKTQGLGAGKAADLTYWESAARMIADVSKSDKIVVEKSTVPVKTAEAIERILTHNRKGINFTILSNPEFLAEGTAIADLFKPDRVLIGGRETPEGQKAIHSLKSVYAHWVPEDRILCTNLWSAELSKLAANAFLAQRISSVNAMSALCEATGADVSQVSHSIGTDSRIGPKFLNASVGFGGSCFQKDILNLVYICECNGLPEVANYWKQVIKVNDYQKMRFVNRVVSSMFNTVSGKKIAILGFAFKKDTGDTRETPAIDVCKGLLGDKAKLSIYDPQVTEDQIMRDLAMKKFDWDHPAHLQPLSPTSNKQVSVVWDAYEAIKDAHGICIMTEWDEFKNLDYQKVYDSMQKPAFIFDGRNVVNVNKLREIGFIVYSIGKPLDSWLKDMPAVA

SEQ ID NO: 72498 - DNA, 1443 bp, Glycine max
  CDS (1)..(1443)
atggtgaagatttgctgcattggtgctggatatgtggggggtcctactatggcagtcattgcacttaagtgcccatccattgaagtcgctgttgttgatatctctaaatcccgcattgcagcctggaacagcgaccagcttcctatctatgaacctggccttgatggtgttgtgaagcaatgccgtggcaagaacctcttcttcagcactgatgttgaaaagcatgtctttgaggctgacatagtgtttgtctctgtcaacaccccaaccaaaactcagggtcttggagctggcaaagcagcagatttgacatattgggagagtgcagctcgcatgattgctgatgtctcgaagtctgacaagatcgtggtggagaaatccacagtccctgtcaaaactgctgaagccatagagaagattctgacccacaatagcaagggaatcaaattccagattctatcaaaccctgaattccttgcagagggaactgcaatcaaagatctctttaacccagaccgtgttcttattggaggcagggaaaccccagagggccaaaaagctattcaaacattgaaggatgtttatgctcaatgggtccccgaagaaagaatactgaccacaaatctttggtcggcagaactgtctaagcttgctgctaatgccttcttagcacaaaggatttcatctgtcaatgccatgtcagcactttgtgaggctactggggcaaacgttcaacaggtgtcctattctgttggtacagactcaaggattggacccaagtttctcaatgccagtgttggttttggtggatcctgcttccagaaggatatcttgaaccttgtttacatctgtgagtgcaatggccttccagaggtggctgagtattggaaacaagtgatcaagatcaatgattatcagaagagccgatttgtgaaccgtgttgttgcatcaatgttcaacacagtttcaaacaaaaagattgctattctgggatttgccttcaagaaagacactggtgacacaagggagactcctgccattgatgtatgccaggggctactaggtgataaggccaacctgagcatatacgacccgcaagtaaccgaggaccaaatccagagggatctatccatgaacaagtttgattgggatcatcctatccacttgcagcccacaagtcctactactgtgaagaaggtcagtgttgtttgggatgcctatgaagcaacaaaggatgcacatggcctttgcattctaaccgagtgggatgagttcaagactcttgattaccagaagatatttgacaacatgcaaaaaccagcatttgtttttgatggcagaaacattgtggatgctgataagttgcgtgagattggcttcatagtttactcaattggtaagccactggacccatggctcaaagacatgcctgctgtggcataa

SEQ ID NO: 72499 - protein, 480 aa, Glycine max
MVKICCIGAGYVGGPTMAVIALKCPSIEVAVVDISKSRIAAWNSDQLPIYEPGLDGVVKQCRGKNLFFSTDVEKHVFEADIVFVSVNTPTKTQGLGAGKAADLTYWESAARMIADVSKSDKIVVEKSTVPVKTAEAIEKILTHNSKGIKFQILSNPEFLAEGTAIKDLFNPDRVLIGGRETPEGQKAIQTLKDVYAQWVPEERILTTNLWSAELSKLAANAFLAQRISSVNAMSALCEATGANVQQVSYSVGTDSRIGPKFLNASVGFGGSCFQKDILNLVYICECNGLPEVAEYWKQVIKINDYQKSRFVNRVVASMFNTVSNKKIAILGFAFKKDTGDTRETPAIDVCQGLLGDKANLSIYDPQVTEDQIQRDLSMNKFDWDHPIHLQPTSPTTVKKVSVVWDAYEATKDAHGLCILTEWDEFKTLDYQKIFDNMQKPAFVFDGRNIVDADKLREIGFIVYSIGKPLDPWLKDMPAVA

SEQ ID NO: 72500 - DNA, 1428 bp, Glycine max
  CDS (1)..(1428)
atggtgaagatatgtggaattggagcagggtatgtagggggtccaacaatggctgtgattgccctcaaatgcccctcaattgaagtggctgtggttgacatctcacactctcgcatatcagcttggaacagcaacaagctccccatttacgagcccggcctagaacaagtggtgaatcagtgcagaggaaagaacctcctcttcagcaccaatgttgaaaaacacgtgcatgaagcagacataatctttgtctcagtgaacaccccaacaaaaatcagaggacttggagccggcaaggctgcggacttgacctattgggagagtgcagctaggatgatagctgatgtttccaggtgtaacaaagttgttgttgagaaatccactgtcccagttagaacagctgaggcaattgagaaaattctatgccataatactaatagcaagggcatcaagtatcaaattctgtcaaatcctgagtttctctctgagggaacagctattcaagaccttctgaaccctgaccgggttctgattggagggaatcaatgccctgaaggtttacaagcaattcaaaaactgaaggctatatatgcacattgggtgcctgaagacagaatcataacaaccaatttgtggtctgcagaactgtccaagttagctgataatgcctttttggcacaaaggatttcatctattaatgctatgtcagccttatgtgaggccactggggctgaagtttcacaagtttctcatgctctaagcaaaaacaccaaaattggacccaagttcctaaatgctagtgttggttttggtggctcttgctttcaaaaggacatactcaacttggtgtacatatgtgagagcaatggcctcactgaagtggctaattactggaaacaagtgatcaaggtgaatgactaccaaaagagtcggtctgtgaagcgggtcgtgacatcgatgttcaacacggtttcgggtaagaagattgcaattctggggtttgccttcaagaaagacactagtgatactaggaagacacctgcaattgatgtttgcaaaggactattgggggataacgcgtgcttgaccatctacgatccatgcgttactgaggagcagattcaaaaggatttgtcaatggatggtgttgaattggaccagcacccaatgagttctactatggtgaaacaagttagtgttgttggagatgcctatgaggcaactaaagaagctcatgggatatgcattcttacagagtgggatgagttcaagaacattgattatcaaagagtgtatgacaacatgcacaaaccagcatttgtgtttgatggaagaaacatattgaatgctgacaagttgagggagattggattcattgtgtactcaattgggaggccattagagcaatggctaataagcatggcctaa

SEQ ID NO: 72501 - protein, 475 aa, Glycine max
MVKICGIGAGYVGGPTMAVIALKCPSIEVAVVDISHSRISAWNSNKLPIYEPGLEQVVNQCRGKNLLFSTNVEKHVHEADIIFVSVNTPTKIRGLGAGKAADLTYWESAARMIADVSRCNKVVVEKSTVPVRTAEAIEKILCHNTNSKGIKYQILSNPEFLSEGTAIQDLLNPDRVLIGGNQCPEGLQAIQKLKAIYAHWVPEDRIITTNLWSAELSKLADNAFLAQRISSINAMSALCEATGAEVSQVSHALSKNTKIGPKFLNASVGFGGSCFQKDILNLVYICESNGLTEVANYWKQVIKVNDYQKSRSVKRVVTSMFNTVSGKKIAILGFAFKKDTSDTRKTPAIDVCKGLLGDNACLTIYDPCVTEEQIQKDLSMDGVELDQHPMSSTMVKQVSVVGDAYEATKEAHGICILTEWDEFKNIDYQRVYDNMHKPAFVFDGRNILNADKLREIGFIVYSIGRPLEQWLISMA

SEQ ID NO: 72502 - DNA, 1443 bp, Glycine max
  CDS (1)..(1443)
atggtgaagatttgctgcattggtgctggatatgtggggggtcctactatggcagtcattgcacttaagtgcccatccattgaagttgctgttgttgatatctctaaatcccgcattgcagcctggaacagtgaccagcttcctatctatgaacctggccttgatggtgttgtgaagcaatgccgtggcaagaacctcttcttcagcactgatgttgaaaagcatgtctttgaggctgacatagtgtttgtctctgtcaacaccccaaccaaaactcagggtcttggagctggtaaagcagcagatttgacatattgggagagcgcagctcgcatgattgctgatgtttcgaagtctgacaagatcgttgtagagaaatccacagtcccggttaaaacagctgaggcaatagagaagattctgacccacaatagcaagggaatcagattccagattttatcaaaccctgaattccttgctgagggaactgcaatcaaagatctctttaacccagaccgtgttcttattggaggcagggaaaccccagagggccaaaaagctattcaagcattgaaggatgtttatgctcaatgggtccccgaagaaagaatactaaccacaaatctctggtcggcagaactatctaagcttgctgctaatgccttcttggcccaaaggatttcatctgtcaatgccatgtcagcactttgtgaggctaccggggcaaatgttcaacaggtgtcctattctgttggaacagactcaaggattggacccaagttcctcaacgccagtgttggttttggtggatcctgcttccagaaggatatcttgaaccttgtttacatctgcgagtgcaatggccttccagaggtggctgagtactggaaacaagttatcaagatcaatgattatcagaagagccgttttgtgaaccgtgtagttgcatcaatgttcaacacagtctcaaacaaaaagattgctattctgggatttgccttcaagaaagacactggtgacactagggagacccctgccattgatgtatgccaggggctacttggtgataaggccaacctgagcatatacgatccacaagtaactgaggaccaaattcagagggatctatcaatgaacaagtttgattgggatcatcctatccacttgcagcccacaagtcctactactgtgaagaaggtcagtgttgtttgggatgcctatgaagcaacaaaggatgcacatggcctttgcattctaaccgagtgggatgagttcaagactctcgactaccagaggatatttgacaacatgcaaaaaccagcatttgtttttgatggcagaaacattgtggatgctgataagttgcgtgagattggcttcatagtttactcaattggtaagccactggatccatggctcaaagacatgcctgctttggcgtaa

SEQ ID NO: 72503 - protein, 480 aa, Glycine max
MVKICCIGAGYVGGPTMAVIALKCPSIEVAVVDISKSRIAAWNSDQLPIYEPGLDGVVKQCRGKNLFFSTDVEKHVFEADIVFVSVNTPTKTQGLGAGKAADLTYWESAARMIADVSKSDKIVVEKSTVPVKTAEAIEKILTHNSKGIRFQILSNPEFLAEGTAIKDLFNPDRVLIGGRETPEGQKAIQALKDVYAQWVPEERILTTNLWSAELSKLAANAFLAQRISSVNAMSALCEATGANVQQVSYSVGTDSRIGPKFLNASVGFGGSCFQKDILNLVYICECNGLPEVAEYWKQVIKINDYQKSRFVNRVVASMFNTVSNKKIAILGFAFKKDTGDTRETPAIDVCQGLLGDKANLSIYDPQVTEDQIQRDLSMNKFDWDHPIHLQPTSPTTVKKVSVVWDAYEATKDAHGLCILTEWDEFKTLDYQRIFDNMQKPAFVFDGRNIVDADKLREIGFIVYSIGKPLDPWLKDMPALA

SEQ ID NO: 72504 - DNA, 1443 bp, Glycine max
  CDS (1)..(1443)
atggtgaagatttgctgcattggtgctggatatgtggggggtcctactatggcagtcattgcacttaagtgcccatccattgaagtcgctgttgttgatatctctaaatcccgcattgcagcctggaacagcgaccagcttcctatctatgaacctggccttgatggtgttgtgaagcaatgccgtggcaagaacctcttcttcagcactgatgttgaaaagcatgtctttgaggctgacatagtgtttgtctctgtcaacaccccaaccaaaactcagggtcttggagctggcaaagcagcagatttgacatattgggagagcgcagctcgcatgattgctgatgtttcgaagtctgacaagatcgttgtagagaaatccacagtcccggttaaaacagctgaggcaatagagaagattctgacccacaatagcaagggaatcagattccagattttatcaaaccctgaattccttgctgagggaactgcaatcaaagatctctttaacccagaccgtgttcttattggaggcagggaaaccccagagggccaaaaagctattcaagcattgaaggatgtttatgctcaatgggtccccgaagaaagaatactaaccacaaatctctggtcggcagaactatctaagcttgctgctaatgccttcttggcccaaaggatttcatctgtcaatgccatgtcagcactttgtgaggctaccggggcaaatgttcaacaggtgtcctattctgttggaacagactcaaggattggacccaagttcctcaacgccagtgttggttttggtggatcctgcttccagaaggatatcttgaaccttgtttacatctgcgagtgcaatggccttccagaggtggctgagtattggaaacaagtgatcaagatcaatgattatcagaagagccgatttgtgaaccgtgttgttgcatcaatgttcaacacagtctcaaacaaaaagattgctattctgggatttgccttcaagaaagacactggtgacacaagggagacccctgccattgatgtatgccaggggctactaggtgataaggccaacctgagcatatacgacccacaagtaactgaggaccaaatccagagggatctatccatgaacaagtttgattgggatcatcctatccacttgcagcccacaagtcctactactgtgaagaaggtcagtgttgtttgggatgcctatgaagcaacaaaggatgcacatggcctttgcattctaaccgagtgggatgagttcaagactcttgattaccagaagatatttgacaacatgcaaaaaccagcatttgtttttgatggcagaaacattgtggatgctgataagttgcgtgagattggcttcatagtttactcaattggtaagccactggacccatggctcaaagacatgcctgctgtggcataa

SEQ ID NO: 72505 - protein, 480 aa, Glycine max
MVKICCIGAGYVGGPTMAVIALKCPSIEVAVVDISKSRIAAWNSDQLPIYEPGLDGVVKQCRGKNLFFSTDVEKHVFEADIVFVSVNTPTKTQGLGAGKAADLTYWESAARMIADVSKSDKIVVEKSTVPVKTAEAIEKILTHNSKGIRFQILSNPEFLAEGTAIKDLFNPDRVLIGGRETPEGQKAIQALKDVYAQWVPEERILTTNLWSAELSKLAANAFLAQRISSVNAMSALCEATGANVQQVSYSVGTDSRIGPKFLNASVGFGGSCFQKDILNLVYICECNGLPEVAEYWKQVIKINDYQKSRFVNRVVASMFNTVSNKKIAILGFAFKKDTGDTRETPAIDVCQGLLGDKANLSIYDPQVTEDQIQRDLSMNKFDWDHPIHLQPTSPTTVKKVSVVWDAYEATKDAHGLCILTEWDEFKTLDYQKIFDNMQKPAFVFDGRNIVDADKLREIGFIVYSIGKPLDPWLKDMPAVA

SEQ ID NO: 72506 - DNA, 1443 bp, Glycine max
  CDS (1)..(1443)
atgctgaagatttgctgcattggggctggatatgtggggggtccaacaatggcagtcattgcactgaaatgcccctcaattgaagtggctgttgttgacatctctaaatccaggattgcagcatggaacagtgaccagctccctatctatgagccaggccttgatgatgtggtgaagcaatgtcgtggcaagaaccttttcttcagcactgatgttgagaaacatgtctatgaggccgacatagtgttcgtctccgtcaacaccccgacaaaaactcgtggtcttggagccggaaaggctgcagatttgacttactgggagagtgcagcacgcatgattgctgatgtatccaagagtgacaagattgtggtggagaaatccactgtccctgtgaaaactgctgaggccatagagaaaattttgactcacaatggcaagggaatcaagttccaaatcctttcaaaccctgaattccttgctgagggaactgcaatccaagatcttttcaatccggaccgtgtcctcattggaggcagggagaccccagaaggccaaaaagccattcaaacattgaaggatgtatatgctcattgggttcctgagggaagaatcctaaccacaaacctgtggtctgctgaactgtccaagcttgctgctaatgccttcttggcacagagaatttcatctgtgaatgctatgtcagcactttgtgaggccactggggcaaatgtcacacaagtgtcctatgctgttggcactgacacaaggattggaccaaagttcctgaattctagtgttggttttggtggctcctgcttccagaaggacatcttgaaccttgtctacatctgtgagtgtaatggcctgccagaggtggctgagtactggaaacaagtgatcaagatcaatgattatcagaagagccggttcgtgaaccgtgttgtttcgtcgatgttcaacacagttgcaaccaaaaagatagccattctggggtttgcattcaagaaggacactggggacacaagggagacaccagcaattgatgtgtgcaagggactactcggtgacaaggcacgcctaagcatatatgatccacaagtcactgaggaccaaattcagagggatttatggatgaacaagtttgattgggaccaccctattcacttgcagccaactagtcctacaactgagaagaaagttagtgtggtttgggatgcatacgaggcaacaaaggatgcagatggtgtttgcattctcactgagtgggatgagttcaagagtcttgattatcagaaagtgtatgacaacatgagaaaaccagcatttgtttttgatggaaggaacattgtggatgtggagaagctacgtgagattggtttcattgtgtactcaattggcaagccattggatccatggctcaaggacatgccacctgtggcataa

SEQ ID NO: 72507 - protein, 480 aa, Glycine max
MLKICCIGAGYVGGPTMAVIALKCPSIEVAVVDISKSRIAAWNSDQLPIYEPGLDDVVKQCRGKNLFFSTDVEKHVYEADIVFVSVNTPTKTRGLGAGKAADLTYWESAARMIADVSKSDKIVVEKSTVPVKTAEAIEKILTHNGKGIKFQILSNPEFLAEGTAIQDLFNPDRVLIGGRETPEGQKAIQTLKDVYAHWVPEGRILTTNLWSAELSKLAANAFLAQRISSVNAMSALCEATGANVTQVSYAVGTDTRIGPKFLNSSVGFGGSCFQKDILNLVYICECNGLPEVAEYWKQVIKINDYQKSRFVNRVVSSMFNTVATKKIAILGFAFKKDTGDTRETPAIDVCKGLLGDKARLSIYDPQVTEDQIQRDLWMNKFDWDHPIHLQPTSPTTEKKVSVVWDAYEATKDADGVCILTEWDEFKSLDYQKVYDNMRKPAFVFDGRNIVDVEKLREIGFIVYSIGKPLDPWLKDMPPVA

SEQ ID NO: 72508 - DNA, 1443 bp, Glycine max
  CDS (1)..(1443)
atggtgaagatttgctgcattggtgctggatatgtggggggtcctactatggcagtcattgcacttaagtgcccatccattgaagttgctgttgttgatatctctaaatcccgcattgcagcctggaacagtgaccagcttcctatctatgaacctggccttgatggtgttgtgaagcaatgccgtggcaagaacctcttcttcagcactgatgttgaaaagcatgtctttgaggctgacatagtgtttgtctctgtcaacaccccaaccaaaactcagggtcttggagctggtaaagcagcagatttgacatattgggagagcgcagctcgcatgattgctgatgtttcgaagtctgacaagatcgttgtagagaaatccacagtcccggttaaaacagctgaggcaatagagaagattctgacccacaatagcaagggaatcaaattccagattttatcaaaccctgaattccttgctgagggaactgcaatcaaagatctctttaacccagaccgtgttcttattggaggcagggaaaccccagagggccaaaaagctattcaagcattgaaggatgtttatgctcaatgggtccccgaagaaagaatactaaccacaaatctctggtcggcagaactatctaagcttgctgctaatgccttcttggcccaaaggatttcatctgtcaatgccatgtcagcactttgtgaggctaccggggcaaatgttcaacaggtgtcctattctgttggaacagactcaaggattggacccaagttcctcaacgccagtgttggttttggtggatcctgcttccagaaggatatcttgaaccttgtttacatctgcgagtgcaatggccttccagaggtggctgagtactggaaacaagttatcaagatcaatgattatcagaagagccgttttgtgaaccgtgtagttgcatcaatgttcaacacagtctcaaacaaaaagattgctattctgggatttgccttcaagaaagacactggtgacactagggagacccctgccattgatgtatgccaggggctacttggtgataaggccaacctgagcatatacgatccacaagtaactgaggaccaaattcagagggatctatcaatgaacaagtttgattgggatcatcctatccacttgcagcccacaagtcctactactgtgaagaaggtcagtgttgtttgggatgcctatgaagcaacaaaggatgcacatggcctttgcattctaaccgagtgggatgagttcaagactctcgactaccagaggatatttgacaacatgcaaaaaccagcatttgtttttgatggcagaaacattgtggatgctgataagttgcgtgagattggcttcatagtttactcaattggtaagccactggatccatggctcaaagacatgcctgctttggcgtaa

SEQ ID NO: 72509 - protein, 480 aa, Glycine max
MVKICCIGAGYVGGPTMAVIALKCPSIEVAVVDISKSRIAAWNSDQLPIYEPGLDGVVKQCRGKNLFFSTDVEKHVFEADIVFVSVNTPTKTQGLGAGKAADLTYWESAARMIADVSKSDKIVVEKSTVPVKTAEAIEKILTHNSKGIKFQILSNPEFLAEGTAIKDLFNPDRVLIGGRETPEGQKAIQALKDVYAQWVPEERILTTNLWSAELSKLAANAFLAQRISSVNAMSALCEATGANVQQVSYSVGTDSRIGPKFLNASVGFGGSCFQKDILNLVYICECNGLPEVAEYWKQVIKINDYQKSRFVNRVVASMFNTVSNKKIAILGFAFKKDTGDTRETPAIDVCQGLLGDKANLSIYDPQVTEDQIQRDLSMNKFDWDHPIHLQPTSPTTVKKVSVVWDAYEATKDAHGLCILTEWDEFKTLDYQRIFDNMQKPAFVFDGRNIVDADKLREIGFIVYSIGKPLDPWLKDMPALA

SEQ ID NO: 72510 - DNA, 1443 bp, Zea mays
  CDS (1)..(1443)
atggtgaagatctgctgcatcggtgctggctatgtcggtggcccaaccatggctgtcattgccctaaagtgcccagacattgaggttgtcgttgttgacatctccaagccccgcattgaggcatggaacagcgacaccctcccgatctacgagcccggcctcgatgatgttgtgaagcagtgcaggggcaggaacctcttcttcagcactgatgttgagaagcacgtcgctgaggctgacatcatcttcgtctcggtgaacacccccaccaagacccgtgggcttggagctggcaaggctgccgacctcacctactgggagagcgctgctcgtatgatcgccgatgtctccaagtctgacaagatcgttgtcgagaagtccaccgtccctgtcaagaccgctgaggctattgagaagatcttgacccacaacagcaagggcatcaactaccagatcctttccaacccggagttccttgcagagggcactgctattgaggacctgttcaagcctgacagagtgctcatcggtggccgggagacccccgagggcaggaaagccgtccaggctctcaaggatgtgtatgctcactgggttcccgaggacaggatcctcaccaccaacctgtggtccgctgagctctccaagctcgccgccaatgcgttcttggcacagaggatctcctctgtcaatgccatctccgctctctgcgaggcaaccggagccaatgtctctgaggtggcttacgccgtgggcaaggacacgagaattggccccaagttcctgaacgccagtgttgggttcggtggctcatgcttccagaaggacatcctgaacctggtgtacatctgcgagtgcaacggcctgcccgaggtggccaactactggaagcaggtgatcaagatcaacgactaccagaagagccggttcgtgaaccgcgtcgtggcctccatgttcaacaccgtcgccggcaagaagatcgccgtcctcggcttcgccttcaagaaagacaccggtgacaccagggagaccccggccattgacgtctgcaagggcctgctgggcgacaaggcccagatcagcatctacgaccctcaggtgacggaggaccagatccagcgggacctggccatgaacaagttcgactgggaccacccgatgcacctgcagccgacgagccccacggccattaagcaggtgagctgcgtgtgggacgcgtacgaggccaccaagggcgcccacggggtgtgcatcctgaccgagtgggacgagttcaagaccctggactaccagaagatcttcgacaacatgcagaagcccgccttcgtcttcgacggccgcaacatcgtcgaccccgagaagctgagggagatcggcttcatcgtctactccatcggcaagccgctcgacgcctggcttaaggacatgcccgcggtcgcttaa

SEQ ID NO: 72511 - protein, 480 aa, Zea mays
MVKICCIGAGYVGGPTMAVIALKCPDIEVVVVDISKPRIEAWNSDTLPIYEPGLDDVVKQCRGRNLFFSTDVEKHVAEADIIFVSVNTPTKTRGLGAGKAADLTYWESAARMIADVSKSDKIVVEKSTVPVKTAEAIEKILTHNSKGINYQILSNPEFLAEGTAIEDLFKPDRVLIGGRETPEGRKAVQALKDVYAHWVPEDRILTTNLWSAELSKLAANAFLAQRISSVNAISALCEATGANVSEVAYAVGKDTRIGPKFLNASVGFGGSCFQKDILNLVYICECNGLPEVANYWKQVIKINDYQKSRFVNRVVASMFNTVAGKKIAVLGFAFKKDTGDTRETPAIDVCKGLLGDKAQISIYDPQVTEDQIQRDLAMNKFDWDHPMHLQPTSPTAIKQVSCVWDAYEATKGAHGVCILTEWDEFKTLDYQKIFDNMQKPAFVFDGRNIVDPEKLREIGFIVYSIGKPLDAWLKDMPAVA

SEQ ID NO: 72512 - DNA, 1443 bp, Zea mays
  CDS (1)..(1443)
atggtgaagatctgctgcatcggtgctggctatgtcggtggcccaaccatggctgtcattgccctaaagtgcccagacattgaggttgtcgttgttgacatctccaagccccgcattgaggcatggaacagcgacaccctcccgatctacgagcccggcctcgatgatgttgtgaagcagtgcaggggcaggaacctcttcttcagcactgatgttgagaagcacgtcgctgaggctgacatcatcttcgtctcggtgaacacccccaccaagacccgtgggcttggagctggcaaggctgccgacctcacctactgggagagcgctgctcgtatgatcgccgatgtctccaagtctgacaagatcgttgtcgagaagtccaccgtccctgtcaagaccgctgaggctattgagaagatcttgacccacaacagcaagggcatcaactaccagatcctttccaacccggagttccttgcagagggcactgctattgaggacctgttcaagcctgacagagtgctcatcggtggccgggagacccccgagggcaggaaagccgtccaggttctcaaggatgtgtatgctcactgggttcccgaggacaggatcctcaccaccaacctgtggtccgctgagctctccaagctcgccgccaatgcgttcttggcacagaggatctcctctgtcaatgccatctccgctctctgcgaggcaaccggagccaatgtctctgaggtggcttacgccgtgggcaaggacacgagaattggccccaagttcctgaacgccagtgttgggttcggtggctcatgcttccagaaggacatcctgaacctggtgtacatctgcgagtgcaacggcctgcccgaggtggccaactactggaagcaggtgatcaggatcaacgactaccagaagagccggttcgtgaaccgcgtcgtggcctccatgttcaacaccgtcgccggcaagaagatcgccgtcctcggcttcgccttcaagaaagacaccggtgacaccagggagaccccggccattgacgtctgcaagggcctgctgggcgacaaggcccagatcagcatctacgacccccaggtgacggaggaccagatccagcgggacctggccatgaacaagttcgactgggaccacccgatgcacctgcaaccgacgagccccacggccattaagcaggtgagctgcgtgtgggacgcgtacgaggccaccaagggcgcccacggggtgtgcatcctgaccgagtgggacgagttcaagaccctggactaccagaagatcttcgacaacatgcagaagcccgccttcgtcttcgacggccgcaacatcatcgacccggagaagttgagggagatcggcttcatcgtctactccatcggcaagccgctcgacgcctggcttaaggacatgcccgcggtcgcttaa

SEQ ID NO: 72513 - protein, 480 aa, Zea mays
MVKICCIGAGYVGGPTMAVIALKCPDIEVVVVDISKPRIEAWNSDTLPIYEPGLDDVVKQCRGRNLFFSTDVEKHVAEADIIFVSVNTPTKTRGLGAGKAADLTYWESAARMIADVSKSDKIVVEKSTVPVKTAEAIEKILTHNSKGINYQILSNPEFLAEGTAIEDLFKPDRVLIGGRETPEGRKAVQVLKDVYAHWVPEDRILTTNLWSAELSKLAANAFLAQRISSVNAISALCEATGANVSEVAYAVGKDTRIGPKFLNASVGFGGSCFQKDILNLVYICECNGLPEVANYWKQVIRINDYQKSRFVNRVVASMFNTVAGKKIAVLGFAFKKDTGDTRETPAIDVCKGLLGDKAQISIYDPQVTEDQIQRDLAMNKFDWDHPMHLQPTSPTAIKQVSCVWDAYEATKGAHGVCILTEWDEFKTLDYQKIFDNMQKPAFVFDGRNIIDPEKLREIGFIVYSIGKPLDAWLKDMPAVA

SEQ ID NO: 72514 - DNA, 20 bp, Artificial sequence
  primer
atgcgtatcagcattttcgg

SEQ ID NO: 72515 - DNA, 20 bp, Artificial sequence
  primer
ttaccagcagatgccttctg

SEQ ID NO: 72516 - protein, 452 aa, Artificial sequence
  consensus sequence
  Variant (2)..(2): Xaa in position 2 is any amino acid
  Variant (7)..(18): Xaa in position 7 to 18 is any amino acid
  Variant (19)..(21): Xaa in position 19 to 21 is any or no amino acid
  Variant (23)..(25): Xaa in position 23 to 25 is any amino acid
  Variant (27)..(40): Xaa in position 27 to 40 is any amino acid
  Variant (41)..(44): Xaa in position 41 to 44 is any or no amino acid
  Variant (47)..(47): Xaa in position 47 is any amino acid
  Variant (52)..(61): Xaa in position 52 to 61 is any amino acid
  Variant (62)..(68): Xaa in position 62 to 68 is any or no amino acid
  Variant (70)..(86): Xaa in position 70 to 86 is any amino acid
  Variant (87)..(88): Xaa in position 87 to 88 is any or no amino acid
  Variant (90)..(90): Xaa in position 90 is any amino acid
  Variant (93)..(99): Xaa in position 93 to 99 is any amino acid
  Variant (100)..(105): Xaa in position 100 to 105 is any or no amino acid
  Variant (107)..(115): Xaa in position 107 to 115 is any amino acid
  Variant (117)..(126): Xaa in position 117 to 126 is any amino acid
  Variant (127)..(132): Xaa in position 127 to 132 is any or no amino acid
  Variant (134)..(135): Xaa in position 134 to 135 is any amino acid
  Variant (139)..(141): Xaa in position 139 to 141 is any amino acid
  Variant (143)..(159): Xaa in position 143 to 159 is any amino acid
  Variant (160)..(186): Xaa in position 160 to 186 is any or no amino acid
  Variant (192)..(192): Xaa in position 192 is any amino acid
  Variant (195)..(195): Xaa in position 195 is any amino acid
  Variant (197)..(198): Xaa in position 197 to 198 is any amino acid
  Variant (200)..(202): Xaa in position 200 to 202 is any amino acid
  Variant (204)..(208): Xaa in position 204 to 208 is any amino acid
  Variant (210)..(219): Xaa in position 210 to 219 is any amino acid
  Variant (220)..(228): Xaa in position 220 to 228 is any or no amino acid
  Variant (230)..(243): Xaa in position 230 to 243 is any amino acid
  Variant (244)..(258): Xaa in position 244 to 258 is any or no amino acid
  Variant (261)..(262): Xaa in position 261 to 262 is any amino acid
  Variant (264)..(266): Xaa in position 264 to 266 is any amino acid
  Variant (268)..(270): Xaa in position 268 to 270 is any amino acid
  Variant (272)..(277): Xaa in position 272 to 277 is any amino acid
  Variant (279)..(287): Xaa in position 279 to 287 is any amino acid
  Variant (289)..(290): Xaa in position 289 to 290 is any amino acid
  Variant (291)..(294): Xaa in position 291 to 294 is any or no amino acid
  Variant (296)..(301): Xaa in position 296 to 301 is any amino acid
  Variant (303)..(316): Xaa in position 303 to 316 is any amino acid
  Variant (317)..(329): Xaa in position 317 to 329 is any or no amino acid
  Variant (334)..(335): Xaa in position 334 to 335 is any amino acid
  Variant (338)..(340): Xaa in position 338 to 340 is any amino acid
  Variant (342)..(384): Xaa in position 342 to 384 is any amino acid
  Variant (385)..(416): Xaa in position 385 to 416 is any or no amino acid
  Variant (418)..(419): Xaa in position 418 to 419 is any amino acid
  Variant (422)..(423): Xaa in position 422 to 423 is any amino acid
  Variant (425)..(425): Xaa in position 425 is any amino acid
  Variant (427)..(427): Xaa in position 427 is any amino acid
  Variant (430)..(430): Xaa in position 430 is any amino acid
  Variant (432)..(438): Xaa in position 432 to 438 is any amino acid
  Variant (440)..(449): Xaa in position 440 to 449 is any amino acid
  Variant (450)..(450): Xaa in position 450 is any or no amino acid
GXGYVGXXXXXXXXXXXXXXXVXXXDXXXXXXXXXXXXXXXXXXPIXEPGLXXXXXXXXXXXXXXXXXLXXXXXXXXXXXXXXXXXXXVXTPXXXXXXXXXXXXXLXXXXXXXXXIXXXXXXXXXXXXXXXXVXXSTVXXXTXXXXXXXXXXXXXXXXXXXXXXXXXXXXXXXXXXXXXXXXXXXXNPEFLXEGXAXXDXXXPXXXXXGXXXXXXXXXXXXXXXXXXXYXXXXXXXXXXXXXXXXXXXXXXXXXXXXXAEXXKXXXNXXXAXXXXXXNXXXXXXXXXGXXXXXXVXXXXXXDXXXXXXXXXXXXXXXXXXXXXXXXXXXGGSCXXKDXXXLXXXXXXXXXXXXXXXXXXXXXXXXXXXXXXXXXXXXXXXXXXXXXXXXXXXXXXXXXXXXXXXXXXXXXXXXXXXGXXFKXXTXDXREXPXXXXXXXLXXXXXXXXXXXDP

SEQ ID NO: 72517 - protein, 27 aa, Artificial sequence
  protein pattern
  Variant (2)..(4): Xaa in position 2 to 4 is any amino acid
  Variant (5)..(11): Xaa in position 5 to 11 is any or no amino acid
  Variant (16)..(16): Xaa in position 16 is Phe or Leu
  Variant (17)..(17): Xaa in position 17 is Pro or Gln
  Variant (20)..(21): Xaa in position 20 to 21 is any amino acid
  Variant (22)..(22): Xaa in position 22 is Ala or Asn
  Variant (24)..(26): Xaa in position 24 to 26 is any amino acid
  Variant (27)..(27): Xaa in position 27 is Ala, Cys or Ser
GXXXXXXXXXXGGSCXXKDXXXLXXXX

SEQ ID NO: 72518 - protein, 29 aa, Artificial sequence
  protein pattern
  Variant (2)..(7): Xaa in position 2 to 7 is any or no amino acid
  Variant (12)..(12): Xaa in position 12 is any amino acid
  Variant (14)..(14): Xaa in position 14 is Gly or Ser
  Variant (15)..(15): Xaa in position 15 is any amino acid
  Variant (17)..(17): Xaa in position 17 is Ile or Val
  Variant (18)..(18): Xaa in position 18 is any amino acid
  Variant (20)..(22): Xaa in position 20 to 22 is any amino acid
  Variant (23)..(23): Xaa in position 23 is Ala, Gly, Leu or Pro
  Variant (24)..(24): Xaa in position 24 is Asp, Glu, Pro, Gln or Ser
  Variant (25)..(26): Xaa in position 25 to 26 is any amino acid
  Variant (27)..(27): Xaa in position 27 is Ile, Leu or Val
  Variant (28)..(28): Xaa in position 28 is Phe, Ile, Leu or Val
NXXXXXXPEFLXEXXAXXDXXXXXXXXXG

SEQ ID NO: 72519 - protein, 21 aa, Artificial sequence
  protein pattern
  Variant (2)..(2): Xaa in position 2 is Phe or Leu
  Variant (3)..(3): Xaa in position 3 is Ala, Ser or Thr
  Variant (6)..(6): Xaa in position 6 is any amino acid
  Variant (7)..(8): Xaa in position 7 to 8 is any or no amino acid
  Variant (10)..(11): Xaa in position 10 to 11 is any or no amino acid
  Variant (13)..(13): Xaa in position 13 is any amino acid
  Variant (15)..(15): Xaa in position 15 is Asp or Glu
  Variant (16)..(16): Xaa in position 16 is Ala, Ser or Thr
  Variant (17)..(20): Xaa in position 17 to 20 is any amino acid
  Variant (21)..(21): Xaa in position 21 is Phe, Ile, Leu, Met or Val
GXXFKXXXDXXDXRXXXXXXX

SEQ ID NO: 72520 - DNA, 795 bp, AZOTOBACTER VINELANDII
  CDS (1)..(795): transl_table=11
atgctggaagtgcagcgcctgaactgcggctacgcccgccggaccgtcctcgaagacatcaccttcgacctgaacccgggcgaactgctctgcctgctcggccccaacggggtgggcaagaccaccctgttcaagaccctgctcggcctgctgccgccgcgatccggggaaatccgcctcgacggccggccgacccgccactggtcgcgacgcgagttcgcccgctgggtgggctacgtgccgcaggcccatacgccgccctttccctttcaggtcgaggacgtggtcgccatgggccgcacggcccacggcagcctgttttccggccccggccaggagggccggaaagtcgccgccgaagccctggaaaccctcggcataagcgccctggccaaggccagctacacggaaatcagcggcggcgaacggcaactggtgctgatcgcccgcgccctggcccagcagccgcgcatcctggtgatggacgaacccacctcgaacctggactacggcaaccagttgaaagtgatggcgcacatccgccagatcgcccatggccgggacatgggcatcatcctcaccacccaccaccccgatcacgccctgctctacgcttcccgggtgctgaccctggaccgggaaaaacgctaccgggtcggcgacccggccacgctcatcagcgaagactacctgcgccgcacctatggcgtggaaacggaaatccacgagatcgaccgccatgacggccgcaagacccgtatctgcattcccgccggcgacacggggaaaacctga

SEQ ID NO: 72521 - protein, 264 aa, AZOTOBACTER VINELANDII
MLEVQRLNCGYARRTVLEDITFDLNPGELLCLLGPNGVGKTTLFKTLLGLLPPRSGEIRLDGRPTRHWSRREFARWVGYVPQAHTPPFPFQVEDVVAMGRTAHGSLFSGPGQEGRKVAAEALETLGISALAKASYTEISGGERQLVLIARALAQQPRILVMDEPTSNLDYGNQLKVMAHIRQIAHGRDMGIILTTHHPDHALLYASRVLTLDREKRYRVGDPATLISEDYLRRTYGVETEIHEIDRHDGRKTRICIPAGDTGKT

SEQ ID NO: 72522 - DNA, 747 bp, Archaeoglobus fulgidus DSM 4304
  CDS (1)..(747): transl_table=11
atgattgaagtcaggagcttatactactcctacaactccaaacccgttattcaggatttggagtttgaggctgagaggggcgaattcgttttcattctcggccccaatgggagcggaaagacaactctgctgaagtgcatggccggcattctgaaaccaaagggagcggtgctcgttgaaaaggttagcattgataggctttcggggagagatctggccagaaagcttgcttacgtcccccaaagaagcgattcaggatttttaactgtttatgatgtcgttctgcttggcagaaggccctacatgggcttttcaccatccgatgaggattacaggattgtggaggacgtgctttcgctgctcgacctcaagaagttctcctacagaagaatcaacgagctaagcggtggagagcttcagaaagtaatgattgccagagccttagcccagaaaccgaaaatactccttctggacgagcccacgaacaaccttgacgtgaagaaccagattgagataatgaagcttcttcggaaaatagccgacgagaaggagatttcagttatatccaccatgcacgacttgaatcttgctgccatcttcgcagacaaaatagtaatgctgaaaaacggcaggatattcgcttcaggcggtaaggaggttcttacgcaggagaacataaaggaggtttacggcatagaggtggaagttctcaggcacaacgggagggttcttattgtcccgcagtga

SEQ ID NO: 72523 - protein, 248 aa, Archaeoglobus fulgidus DSM 4304
MIEVRSLYYSYNSKPVIQDLEFEAERGEFVFILGPNGSGKTTLLKCMAGILKPKGAVLVEKVSIDRLSGRDLARKLAYVPQRSDSGFLTVYDVVLLGRRPYMGFSPSDEDYRIVEDVLSLLDLKKFSYRRINELSGGELQKVMIARALAQKPKILLLDEPTNNLDVKNQIEIMKLLRKIADEKEISVISTMHDLNLAAIFADKIVMLKNGRIFASGGKEVLTQENIKEVYGIEVEVLRHNGRVLIVPQ

SEQ ID NO: 72524 - DNA, 1218 bp, Archaeoglobus fulgidus DSM 4304
  CDS (1)..(1218): transl_table=11
atgaggctcgtggtgaagggagtcagcgtaaagctggggagcagagaggtgctgaaggacgtaacctttgaggtgggggagggagagcttctcgccctgctcggccccaacgggagcggcaagaccacgatgctgagaacgatattcggaatgctcaagccccttaagggagtggttttgcttgacggcagggaagttggcagtgctgaggaagctgccagaaagctcggctttcttccgcaggacacaccgatgacgaatttaaaggtcattgatgtcgtgatgctcggcagaactccctatctgagcgggttaaagaggcctaaagaggaggattacagagcagcgatggaagctctgaaggaggttgggatggagaaaatggccgacaggcttttctcggagctcagcggtggagagaggcagaaggttatgcttgcgagggtttttgcccagcagcccgaaataatgctgctcgacgagccaacagcccatttagacatagcggcgcagattgagataatggagattgtaaggagcaaggtggagcagggaaaggctgcaatagttgcaatacacgacataaacctcgcatcctcctttgcaaccaaaattctgatggtaaaggacggtgttgttgtctacgcgggaaggccggaggatgtcattacggaggagagcataagggatgtttttggggctgacgttgttgtcagaaaatacggaaggggggtttacatcgccccgaagctgaaggttccgaacggtttgaggagggttcacgtcatatgcggaggggggagtggtggagcaatcatgcacatgctcagggaggtaggatacaaggtttccgcgggggttgtgaacatccttgattccgactgggagaacgcggttgagctgggagaggttgttgacgaagccccattttcaccgataagcgactcttcgcatcagaaaaacatagagatgattgagaagagcgatgcggttgtgctggcgaacctgagcgttggaaaggggaactacaggaatcttcttgcagcattgcatgcagcaaacctcggcaagctcgttgtggttgacagaactccctttaaagaacgaaattttgccggaaaggaggcggaggagctttatattaaaattctggaaaaagcggtggttgtgaaaagggaagaggaggttctggatgccgtacgaaaattactgggttga

SEQ ID NO: 72525 - protein, 405 aa, Archaeoglobus fulgidus DSM 4304
MRLVVKGVSVKLGSREVLKDVTFEVGEGELLALLGPNGSGKTTMLRTIFGMLKPLKGVVLLDGREVGSAEEAARKLGFLPQDTPMTNLKVIDVVMLGRTPYLSGLKRPKEEDYRAAMEALKEVGMEKMADRLFSELSGGERQKVMLARVFAQQPEIMLLDEPTAHLDIAAQIEIMEIVRSKVEQGKAAIVAIHDINLASSFATKILMVKDGVVVYAGRPEDVITEESIRDVFGADVVVRKYGRGVYIAPKLKVPNGLRRVHVICGGGSGGAIMHMLREVGYKVSAGVVNILDSDWENAVELGEVVDEAPFSPISDSSHQKNIEMIEKSDAVVLANLSVGKGNYRNLLAALHAANLGKLVVVDRTPFKERNFAGKEAEELYIKILEKAVVVKREEEVLDAVRKLLG

SEQ ID NO: 72526 - DNA, 783 bp, Pyrococcus abyssi GE5
  CDS (1)..(783): transl_table=11
atggagtatgttatcgaggccgagaacttaacgataatgtacgacagcgttaaggccgttgaggggttaacctttaaactcaagaaaggggagaccctacttctcctaggcccgaacggtgccggtaaaacaacccttctaagggttttagctgggctacacaccaattatcaaggaaaaatcctcgtctttggcaagtcaccttctgaggttagagagaaggttgcctacgttccccaaacgttttctctgaattttagggttcccttaagtgttcttgacgtagtttccatgggtgggctctataagaagggtctaatccacttcaacattccccaggaggtcataaagaggggacttgaaatcctggatttcctggggttaaaggagatagcaaagaaatcttttagggagctcagcggtgggcaaaagcagagggtgataatagctagagccctgatgtcgaaccctgaactattactcttggatgaacccctctcggcccttgaccctaaggctaggattgaggccacatcaacactatcaaagataaaggaggatatgggtataacgatgataataacgactcacgacgttaatccgctaatagaaattggggataaggtaatgctgatagataggaagttagtggcctttggatctccggaggaagtccttagggacgagataataggaaaggtctatggtcccgcatccaaggccgttcgcgttggggagaggctgtactgcataatcggtgatgtgcacttcagggtgaggtga

SEQ ID NO: 72527 - protein, 260 aa, Pyrococcus abyssi GE5
MEYVIEAENLTIMYDSVKAVEGLTFKLKKGETLLLLGPNGAGKTTLLRVLAGLHTNYQGKILVFGKSPSEVREKVAYVPQTFSLNFRVPLSVLDVVSMGGLYKKGLIHFNIPQEVIKRGLEILDFLGLKEIAKKSFRELSGGQKQRVIIARALMSNPELLLLDEPLSALDPKARIEATSTLSKIKEDMGITMIITTHDVNPLIEIGDKVMLIDRKLVAFGSPEEVLRDEIIGKVYGPASKAVRVGERLYCIIGDVHFRVR

SEQ ID NO: 72528 - DNA, 726 bp, Pyrococcus horikoshii OT3
  CDS (1)..(726): transl_table=11
atgagctttatgcctgaacttgaggtggatatatcattttcctacggtaattttgaagccctaagggatgtcaagtttaaggcgaaaaaaggagaactcttagctataataggccctaacggatctggaaaatcaactttgctcaagtgcatagctggtatactaaagcctagaggtaagatagtgtacgatggtataaatctattaaatcttaaacccaaggagagggctaagatagtttcatacgtcccacagtcctcatttccacagttctctttcaccgttgaggaattcgtagagcttggaacttatgcaaggggaggcgacattgaagatgccctaaagagagttgggctcgttgaaaaaaggcatgagctcatcacaagacttagtggtggtgagtatcagctagcccttatagccagggcccttgcccagggaagtgaggtcatgctcctggatgagccaacgagtcacctagacataaatcacacgaagaaggtcattgagatcctccaggagttaaaaaaagaaaagcttataattgccgtttttcatgatctaaatcttgcaattaactattctgatgagttattagttcttaagaatggagaggttgcatggcttggtgatcctaattctcttcccctggaggtaataggaaaggtatatggaatagtgccaaagttcctcgaggttgatggggtgaagacaatactaccttaa

SEQ ID NO: 72529 - protein, 241 aa, Pyrococcus horikoshii OT3
MSFMPELEVDISFSYGNFEALRDVKFKAKKGELLAIIGPNGSGKSTLLKCIAGILKPRGKIVYDGINLLNLKPKERAKIVSYVPQSSFPQFSFTVEEFVELGTYARGGDIEDALKRVGLVEKRHELITRLSGGEYQLALIARALAQGSEVMLLDEPTSHLDINHTKKVIEILQELKKEKLIIAVFHDLNLAINYSDELLVLKNGEVAWLGDPNSLPLEVIGKVYGIVPKFLEVDGVKTILP

SEQ ID NO: 72530 - DNA, 753 bp, Pyrococcus horikoshii OT3
  CDS (1)..(753): transl_table=11
atgaaggggatagaggttgaaaacttgaagttctcacataatgggagggagatactgcacgatataaactttgaaattgacaaggggagctttctaattatcctgggtccaaatggcgctggaaagacaacattactcagatgcatagctgggatactcaaatataaaggaagcattaaagttctgggaaacgacataaaggagttaagtaggatcgagcttgcaaagctattagcctatgttccccaaaggatagagccagggttcctaagggtctttgatttcgttctcctggggaggaaaccatatatgggtttaaacccagggaggaaggatttaaaagctgtggaggatgcacttaggttactcggcattcagaggcttgaagatagaattatgaaaactttaagcggtggggaactacagaaagttgctatagctagagccatagcccaggaaactcctgttatcctccttgacgaaccaactaacaatctcgatcctaagagtcagattgaagttatggagataataaaggatctcgtaaagaggggtaagaccgtggttaccgttatgcatgacttgaccctagccctcaggtttggggaagagtttctcttccttaaagatggtaggagcactggattattaacaagggaagagcttgaggaaaagattttgagcgagacgtatggagtcaagattagggttgcaagggtagagggggaggtaattcctctagtcggattatag

SEQ ID NO: 72531 - protein, 250 aa, Pyrococcus horikoshii OT3
MKGIEVENLKFSHNGREILHDINFEIDKGSFLIILGPNGAGKTTLLRCIAGILKYKGSIKVLGNDIKELSRIELAKLLAYVPQRIEPGFLRVFDFVLLGRKPYMGLNPGRKDLKAVEDALRLLGIQRLEDRIMKTLSGGELQKVAIARAIAQETPVILLDEPTNNLDPKSQIEVMEIIKDLVKRGKTVVTVMHDLTLALRFGEEFLFLKDGRSTGLLTREELEEKILSETYGVKIRVARVEGEVIPLVGL

SEQ ID NO: 72532 - DNA, 777 bp, Thermotoga maritima MSB8
  CDS (1)..(777): transl_table=11
atgcttcgaataagaaatctctcgttcagttacagaaacaaaaagatcctagataatgtcactttcagcgcgcagaagggagaactcatcgctatcctggggccaaacggtgcaggaaagagcacgttgttgaagtgcatagcaggtatcctgaagtgccagggcgtagagatttttagtaaacctctcgaacaatacaccagaagagatctggccaggatagtagggtacgttccacagagaatcgatcccggaatgttgaacgtttacaatctgatccttctcgggaggaaaccatacgtaagcgtaagcccctcaaaagaggatatcgagattgtaaacagggtggtagaacgattgaatctccaacatctggtgtttcagagagcgaagaatttgagcggtggcgaacttcaaaaggtgagtattgccagggcactcgttcaagagccggagatacttttgctggacgagccaacgaacaatctcgacccaaagaatcagatcgagatcatggagatagttcaagattttgtgaaatcaagaaagatggcactagtcgtgatgcatgagataaacctggctctgcgatttgctgataggttcattttcatgaaggatggaaagattgtacgcgacggtgaaagatcgattttgacaccagatctgttctgggaagtgtacggggtgaacggagttgtgaaagagattcttgatacacctgtttttgttttgagaggcaaggaatctccgggatcccgtgaaaatgctggctag

SEQ ID NO: 72533 - protein, 258 aa, Thermotoga maritima MSB8
MLRIRNLSFSYRNKKILDNVTFSAQKGELIAILGPNGAGKSTLLKCIAGILKCQGVEIFSKPLEQYTRRDLARIVGYVPQRIDPGMLNVYNLILLGRKPYVSVSPSKEDIEIVNRVVERLNLQHLVFQRAKNLSGGELQKVSIARALVQEPEILLLDEPTNNLDPKNQIEIMEIVQDFVKSRKMALVVMHEINLALRFADRFIFMKDGKIVRDGERSILTPDLFWEVYGVNGVVKEILDTPVFVLRGKESPGSRENAG

SEQ ID NO: 72534 - DNA, 1476 bp, Bacillus halodurans C-125
  CDS (1)..(1476): transl_table=11
atgcttgatgcacaaaatgtaagtgttggctatgatgaaaagacaccgattattcagcaactctcgttccaagttcataaaggtgaaattttcggtattcttggtccgaacgggagtgggaaaacgacattgttgaaggctgtgagcggcctgttgtcaccttcggaagggacgatcaccctacatggaaaagccattgccgattatcattcaaaagagctggcacaaaaaatggccgtgctgccccagacagccgacaccgcctttgcttataaagtaaaagaggtggtcgctctcgggcgttatccccatcaaaagggttggcttgcctccgaatcgcaagaagatgaacgagtcatccgtgaggcgatggagcaaactgatacgtggaagtttcgcaataagccgttacaaacgttgagcggaggtgagcgccagcgagctttgcttgcccgagccctttgccaggagcctgatctccttttgcttgatgagccgaccaatcatctcgatatttcgcaccaaatgcagttactcgatgcgttgaaagactggacacgaacgcgccagttgactgttgtggccattttgcacgatttgaatatggcgagcctctattgtgatcgcgtattgcttcttaatgagggacggatggtcgatcttaatagcccacgccaagtgatgaccgaacaccagctggccaacgtttacgaaacgaaaattcgccgcaacgaacacccgacgattccaaggccactcgtcacatttgagccggcggcaataagaagcaaaccaagctcccctatttctgagcttgaggtttttacctccgagcaactaattaaggtgacaagctccataaggtggaaaacgttatcatctgctgtattaggggcagggttcaaatggcatcaaacgtttgtgaacaggcatgtatcaaaagactattattgtgatgatgtggagcgggagtttcaaacgtttttatcaaatgtaggggtcgatggaaccgatgcgttagggatgatgacggccgctattcttgaagatgttgccataaccgaagcgacttacgaatcgtttaaagtacgagtgtttgtgacggccggaatatcaaatgcagtggatgctgccaaagctcatcttcgcaagcgaaatgaggcaacggtcggaacgatcaatacgtgggtgttcattgaaggaacactgcctgatgccgcctatgtccaagcgctgatgacagctacagaagcaaaagggagagcgcttgcggagaaggagattctcgatcctgtaacagggactcttgcgacgggtacatccactgacagtgtcatgatcgcaagttcacaaaccgggacgtacttcccttatgcgggaacaatcactccgctcggtcaagcgatcggaaagctcgtctacgatgcaaccattcaagcggtgacagacaatgaaaagcggaggcttgaacgatga

SEQ ID NO: 72535 - protein, 491 aa, Bacillus halodurans C-125
MLDAQNVSVGYDEKTPIIQQLSFQVHKGEIFGILGPNGSGKTTLLKAVSGLLSPSEGTITLHGKAIADYHSKELAQKMAVLPQTADTAFAYKVKEVVALGRYPHQKGWLASESQEDERVIREAMEQTDTWKFRNKPLQTLSGGERQRALLARALCQEPDLLLLDEPTNHLDISHQMQLLDALKDWTRTRQLTVVAILHDLNMASLYCDRVLLLNEGRMVDLNSPRQVMTEHQLANVYETKIRRNEHPTIPRPLVTFEPAAIRSKPSSPISELEVFTSEQLIKVTSSIRWKTLSSAVLGAGFKWHQTFVNRHVSKDYYCDDVEREFQTFLSNVGVDGTDALGMMTAAILEDVAITEATYESFKVRVFVTAGISNAVDAAKAHLRKRNEATVGTINTWVFIEGTLPDAAYVQALMTATEAKGRALAEKEILDPVTGTLATGTSTDSVMIASSQTGTYFPYAGTITPLGQAIGKLVYDATIQAVTDNEKRRLER

SEQ ID NO: 72536 - DNA, 741 bp, Pasteurella multocida subsp. multocida str. Pm70
  CDS (1)..(741): transl_table=11
atgaatgaattgagtttagatgtagataagctgttatttggttatgataagccgttgtatttaccacttactttccaatgtaagaaaggagaggttatttcggtacttgggacaaatggaaaaggtaaaaccacattattgcattctcttgctcatgttttacctgttatgtctggacagattaggcaacaaggtcatattggttttgtgccacagtctttttcgtcgccagattattccgtgttagagattgttttaatggggcgagcaagcaaaattggtgcatttaacctaccaagtaaagcggatgaaacagtcgcattacagatgttggcgcgcttagacatcctgcatttagctgagcgcaatatcaatatgctttcgggcggtcaatgccaacttgtgctcatcgctcgtgcacttgcgacagaatgtcaggtcctcattttagatgaacccacagcagcattggatgtttataatcaacagcgtgtcttacaacttatgcgttttcttgcaatggaacaaaaaatgaccattattttttccactcatgatccttatcacagtttatgtgtggcagataatgtgttattgctattgcctaaccaacaatggaaatatggaatagctagtcaaattttaacggaatctcatttgaaacaagcgtataatgtaccgattaaatattctatgattgaagaacagcaggttttagtccccatctttaccatacagtaa

SEQ ID NO: 72537 - protein, 246 aa, Pasteurella multocida subsp. multocida str. Pm70
MNELSLDVDKLLFGYDKPLYLPLTFQCKKGEVISVLGTNGKGKTTLLHSLAHVLPVMSGQIRQQGHIGFVPQSFSSPDYSVLEIVLMGRASKIGAFNLPSKADETVALQMLARLDILHLAERNINMLSGGQCQLVLIARALATECQVLILDEPTAALDVYNQQRVLQLMRFLAMEQKMTIIFSTHDPYHSLCVADNVLLLLPNQQWKYGIASQILTESHLKQAYNVPIKYSMIEEQQVLVPIFTIQ

SEQ ID NO: 72538 - DNA, 756 bp, Pasteurella multocida subsp. multocida str. Pm70
  CDS (1)..(756): transl_table=11
atgagtttggtcactttgaagcatgtgagtataggctataaaaaacaggtgttagcttcggatcttaatttacagcttgagccgaatcaggtggtctgtttactcggcgcgaatggctgtggaaaaaccacgttactcaaaacgttgttaggtctattgcctacgcttgctggagaaatattgttacaaaaccgaccgcactttacctggacacaaaaagaattggcacaatttattggttatgtgccacaagtacatcatttgttccattttactgtacaagaagtggtgctgatgggcaggactgcccaccttgcttggtacagttctcctaaacaaaaggatattgcgattgcagagcagtgtctctcgacgttgggcatcgcccatttgagtcagcgtttttaccatgaaattagtggtggggaacgtcaattagtattgattgctcgtgctttagcacaacagcctgcttttttgattatggatgaaccaacgtctaatctggattttggcaatcaaattcgcgtattagaaaaaattacacagctaaaacaaacaggattgtcaattttaatgactacacatcaacccgagcacagctttcatgtcgctgatcggactatcttgttccatcaaggtcgtattattgcaaacggtacaccaaaacaaaccctgactacacaaaatttagccaagatttatcaattagacgaagacgtattacgcaaaaatttaaggatatcttatgaataa

SEQ ID NO: 72539 - protein, 251 aa, Pasteurella multocida subsp. multocida str. Pm70
MSLVTLKHVSIGYKKQVLASDLNLQLEPNQVVCLLGANGCGKTTLLKTLLGLLPTLAGEILLQNRPHFTWTQKELAQFIGYVPQVHHLFHFTVQEVVLMGRTAHLAWYSSPKQKDIAIAEQCLSTLGIAHLSQRFYHEISGGERQLVLIARALAQQPAFLIMDEPTSNLDFGNQIRVLEKITQLKQTGLSILMTTHQPEHSFHVADRTILFHQGRIIANGTPKQTLTTQNLAKIYQLDEDVLRKNLRISYE

SEQ ID NO: 72540 - DNA, 816 bp, Escherichia coli O157:H7 EDL933
  CDS (1)..(816): transl_table=11
atgaccgaatcagtagcccgtttgcgcggcgaacagttaaccctgggatatggcaaatataccgttgcggaaaatctgactgtagaaatacctgatggtcacttcacggcaattatcgggccaaatggctgcggtaaatccacgttgctgcgtaccttaagccgcctgatgacgcctgctcatgggcatgtctggctggatggcgagcacattcaacattacgccagtaaagaagttgcccggcggattggtctgttggcgcaaaatgccaccacgctgggagatatcaccgtgcaggagctggtggcgcgtgggcgttatccacatcaaccgctgtttacccgttggcgcaaagaagatgaagaggcggtaacgaaagcgatgcaggccacgggaataactcatcttgcagatcaaagcgtggataccctttccggtgggcaacgccagcgagcgtggatcgcgatggtgctggcccaggaaacggcaattatgctgctcgacgaacccacgacctggctggatatcagtcatcagattgatttgctggaactgttaagcgaactgaaccgcgagaaaggctataccctggcggcggtgctgcacgatcttaatcaggcctgtcgttacgccagccatttgattgcattgcgagaagggaaaattgttgctcagggagcgccgaaggagattgtcactgctgaactgattgagcgcatttatggtctccgctgcatgatcattgacgatccggtagccggaacgccgctcgtggtgccgctcggacgaacggcaccttcaaccgcaaatagttaa

SEQ ID NO: 72541 - protein, 271 aa, Escherichia coli O157:H7 EDL933
MTESVARLRGEQLTLGYGKYTVAENLTVEIPDGHFTAIIGPNGCGKSTLLRTLSRLMTPAHGHVWLDGEHIQHYASKEVARRIGLLAQNATTLGDITVQELVARGRYPHQPLFTRWRKEDEEAVTKAMQATGITHLADQSVDTLSGGQRQRAWIAMVLAQETAIMLLDEPTTWLDISHQIDLLELLSELNREKGYTLAAVLHDLNQACRYASHLIALREGKIVAQGAPKEIVTAELIERIYGLRCMIIDDPVAGTPLVVPLGRTAPSTANS

SEQ ID NO: 72542 - DNA, 759 bp, Escherichia coli O157:H7 EDL933
  CDS (1)..(759): transl_table=11
atgactttgcttgccgtccgtcatgcgtctctgggttactcccgccatccggtgctacgcgacgtgtccttcaccctgtcgcaaggaacaatttgttgtctgttaggagccaatggttgcggcaaaaccacactcatgcgctccattcttggcgttataccgttattaaaaggcgaggtcttactggatagcctccctgtgcagacactcagccatcgccagcgcgcgcaggctattgcctgggtgccgcaggcgcacgacggtatttttgcttttagtgtgctggatatggtgttgatgggcctggcccccaccataggcgctttttccgttcccggtaagcaagaacgcctgaaagccacggagcaactggaaaagctgggcattttgcatctggcggcacgacgctggaatacgcttagcggcggtgaacgtcagctggctttaatcgcccgtgcactcgtccagcaaccgcgcttgttgttactggatgagcctgcctccagcctcgatttcggtcatcagatccaactactggacacgctggcacagctcaaaaataacggcatgacaatgttaatgtcgactcatcatccgctccatgccaacgccattgccgacagcattatccaggtagagccagatggacgagtaacacaaggcttaccgaccgaacagttaacaacaaacaaactggctgccctgtatcgggtttctgccgaccagattcatcatcacctctctgcaattagccactaa

SEQ ID NO: 72543 - protein, 252 aa, Escherichia coli O157:H7 EDL933
MTLLAVRHASLGYSRHPVLRDVSFTLSQGTICCLLGANGCGKTTLMRSILGVIPLLKGEVLLDSLPVQTLSHRQRAQAIAWVPQAHDGIFAFSVLDMVLMGLAPTIGAFSVPGKQERLKATEQLEKLGILHLAARRWNTLSGGERQLALIARALVQQPRLLLLDEPASSLDFGHQIQLLDTLAQLKNNGMTMLMSTHHPLHANAIADSIIQVEPDGRVTQGLPTEQLTTNKLAALYRVSADQIHHHLSAISH

SEQ ID NO: 72544 - DNA, 825 bp, Deinococcus radiodurans R1
  CDS (1)..(825): transl_table=11
atggttgagggcggggagcagggcagggagcagagcgcagagggcgccgggctgctggaggcgcgcggcgttcacgtccgcgccgggcagacgctggcggtgcggggcgtggacgccacgttccggaccggagaattcgccgccatcatcgggccgaacggggcggggaaaagcacgctgctgcgcgccctgctcggcctgagcgggctggaagcgggcgaggtgcggctgaacggacggcccctgcggacctggaaccgcgccgagcgctcgcggcggctggcctacctcgcgcagtcggagccgctgccgcccgaaacgcgggtgcgcgacgtggtgacgctggggcgcggcgcgggcgagtggcgctggggcctgcttcccacgcggccctggtcggaggccgacgaggaggcggtgaaccgggcgctcgaccgcaccgacacccggcgcttcgaggaccggcgcgtgtccgaactctcgggcggcgaggggcagcgggtggccctggcgcgcgcgctcgccgccgggccggagctgctgctgctcgacgaaccgacgaatcacctcgatctcgcctacaccctcgacctgatgcgctcgctgcgccgcgaagtggaggcgggactgggcgtcatcgccgtgctgcacgatctcaacctcgccgcccgcgccgaccggctgctgctgctctcacggggcgaagtgctcgccaccggaacccccgccgaggtgctgacgccggagcacatcgcggcggcctacggcgtgcgggtggacgtcaccgaacaggcggggcggccgctggtgattccggccgactaa

SEQ ID NO: 72545 - protein, 274 aa, Deinococcus radiodurans R1
MVEGGEQGREQSAEGAGLLEARGVHVRAGQTLAVRGVDATFRTGEFAAIIGPNGAGKSTLLRALLGLSGLEAGEVRLNGRPLRTWNRAERSRRLAYLAQSEPLPPETRVRDVVTLGRGAGEWRWGLLPTRPWSEADEEAVNRALDRTDTRRFEDRRVSELSGGEGQRVALARALAAGPELLLLDEPTNHLDLAYTLDLMRSLRREVEAGLGVIAVLHDLNLAARADRLLLLSRGEVLATGTPAEVLTPEHIAAAYGVRVDVTEQAGRPLVIPAD

SEQ ID NO: 72546 - DNA, 801 bp, Clostridium acetobutylicum ATCC 824
  CDS (1)..(801): transl_table=11
atgaatttgaaattgaaaaatttagcatgtggctataataataaaatcataatagacaatataacaatgcatgtaagatcaggagaaatattatgtattcttggacctaacggagtgggaaaaaccactttgtttaaaactatactcggttttttaaaaatacaggacggagagatattactagatggacaagatttaaaaaaactatcacaaaagcaattatctaaagctataagttatgttccccaagcacatactctaccatttccatatacagtttatgatgtagtattaatgggtagaacagttcatatgggtgcttttttaacaccatctcaaaaggataggcaaattgctagtgaatcaattgatgtattaggtatagggtatctaaaagaaaaaacttatacagaaattagtggtggagaaagacaaatggtgttaatagctagagcattggcacaacaatcacagataatgatattagatgagcctacatctaatcttgattttggaaatcaggtaaaggtgctagagcaaattaataaactagctgctagaggaattgggataataatgacttcgcattttcctgatcatgcttttttgtgttcagccaaagtagcattaattgaaagagggagaatatttaaaataggctcaatggatgaagttataacagaagaaaatcttaaatctatgtacggcatagatgtaaaaattataagtgtaaaagatcaatatggtaatgtaattaaatcatgtataccattattaagtaatataagggagggtgattaa

SEQ ID NO: 72547 - protein, 266 aa, Clostridium acetobutylicum ATCC 824
MNLKLKNLACGYNNKIIIDNITMHVRSGEILCILGPNGVGKTTLFKTILGFLKIQDGEILLDGQDLKKLSQKQLSKAISYVPQAHTLPFPYTVYDVVLMGRTVHMGAFLTPSQKDRQIASESIDVLGIGYLKEKTYTEISGGERQMVLIARALAQQSQIMILDEPTSNLDFGNQVKVLEQINKLAARGIGIIMTSHFPDHAFLCSAKVALIERGRIFKIGSMDEVITEENLKSMYGIDVKIISVKDQYGNVIKSCIPLLSNIREGD

SEQ ID NO: 72548 - DNA, 804 bp, Agrobacterium tumefaciens str. C58
  CDS (1)..(804): transl_table=11
atgcatgaagcttatcgcctcgcgacacgcaatctgtcccttggatataacggcgccgtcattgtcgaagacctgaacctgaaaattccatccgggcatttcacggttctcgtcggaaaaaacggatgcggcaaatccacgatattgcgtgcactcgccggacttctcagccccatgaaaggcgagatatttctggacggcgcatcgacgcggaaaattccatcgcgggaacgagcaaaacacatcggcgtcctcacgcaggggccgcaggctccagagggattgtcggtcaccgaactggtccggcaagggcgttatccccatcgcagactgttcgagcgctggtccagccgtgacgaagatgcgtgcacctatgctctcgacctgaccgatatgacatcgctttcggaccgtccggtagaggctctctccggcggccagcggcagcgcgcctggatcgcgatgacgctggcccaggaaacggacatccttcttctggatgaaccgacgactttcctcgatctcgcccaccagattgaaatactcgatctcatcaggcagcttgtgcatgatcagggccgcaccatcgtcgcggtcctccacgatctcaaccaggcggcccgttacgccgacgaaatcgttcttgtcagggacggcaggatattcgacgctggcgccccaggtgccgtcatcacggcgaaaaatgtccttgatgtctttggcgtcaacgccgtcatcatgccggatccgatttcgggaacaccgatgtgcgtgcccattccatcacagacccaaggcaagtga

SEQ ID NO: 72549 - protein, 267 aa, Agrobacterium tumefaciens str. C58
MHEAYRLATRNLSLGYNGAVIVEDLNLKIPSGHFTVLVGKNGCGKSTILRALAGLLSPMKGEIFLDGASTRKIPSRERAKHIGVLTQGPQAPEGLSVTELVRQGRYPHRRLFERWSSRDEDACTYALDLTDMTSLSDRPVEALSGGQRQRAWIAMTLAQETDILLLDEPTTFLDLAHQIEILDLIRQLVHDQGRTIVAVLHDLNQAARYADEIVLVRDGRIFDAGAPGAVITAKNVLDVFGVNAVIMPDPISGTPMCVPIPSQTQGK

SEQ ID NO: 72550 - DNA, 768 bp, Staphylococcus aureus subsp. aureus Mu50
  CDS (1)..(768): transl_table=11
atgacaccagtctttgaattgaaaaatgtcaattactactatgatcataaaaaagtgttagaaaatataaacattaaaataaataaaggtgaatttttagcgattgttggaccaaatggtgctggtaaatcaacattattgaagttgattctagggttattacctttacaaagtggtgagatttttgttgaaggtattgattttaaaaataagaaaacatcaattaaattaagctatgtatcacaaaaagcaaatgcctttaattcaggtttcccagcaagtgttaaagaagttgttttaagcggattaacaaagacaaaacgtcttttccaaacatttaatagcaaagataatgaaaaagtgattaaagtactagaaagactgaatataagtgatttaattcataaaaatatagcagaattatcaggtggtcaacaacaacgtgtaatgattgcccgagcattgatttcagaacctgcagtattagtacttgatgaaccaacgaatggtattgatgcaaaacatgtaagtgaattttataatactttagatcaattaaaacaagaaggtatcaccattatcttagttactcatgatatcggtgttgtagcagatactgctactgaagtagcatgtttaaataagcatttgcatttccatggtacaactgatgagtttaaatcacttgatgaagttgaaatttcaaaaatttatggacatcctgtacgttttgtcgatcatcagcataatcgagaatgttgtaattaa

SEQ ID NO: 72551 - protein, 255 aa, Staphylococcus aureus subsp. aureus Mu50
MTPVFELKNVNYYYDHKKVLENINIKINKGEFLAIVGPNGAGKSTLLKLILGLLPLQSGEIFVEGIDFKNKKTSIKLSYVSQKANAFNSGFPASVKEVVLSGLTKTKRLFQTFNSKDNEKVIKVLERLNISDLIHKNIAELSGGQQQRVMIARALISEPAVLVLDEPTNGIDAKHVSEFYNTLDQLKQEGITIILVTHDIGVVADTATEVACLNKHLHFHGTTDEFKSLDEVEISKIYGHPVRFVDHQHNRECCN

SEQ ID NO: 72552 - DNA, 777 bp, Halobacterium sp. NRC-1
  CDS (1)..(777): transl_table=11
atggaggaacttcgaatgacaccacaccacgacaacactgccgacacgcccgccatcgagctcgccgatgtcgcgttcgggtacacagccaccccggtcgtcgaagacatctcccttgcggtctcacccggtgagtacatcggcgtcgtcgggcccaacggctccgggaagtccacgctcatgaagctcatgctcgggctgttgcggcccgaccgtggtcgtgcccgcctgttcggggttccagcacaccagttcgacaccggttcgcgcatcggctacgtcgcccaacacgcgagcgcttccaaggagatgccgatcaccgtccgggaggtggtcaagatggggcggttcccacacgtcggcttcggccagctgtcggccgacgactgggccgtcgtcgacgaggcgctggacacggtcggcatgtcggcgttcgccgaccgccgcgtcaccgagttatccggcggacagcgacagcgcgcgttcatcgctcgcgcgctcgccggtgaggccgaactgctcgtgttcgacgaacccacggtcggcgtcgacatcgagtccgtggctgcgttctacgacctgttggacgtgctgcacgacgacggtatcacggtcgtgctcatcgaacacgacctgggtgcggtcaccgagcacgccgagcgcgtcatctgtctcaaccgagaactacatttcgacggccccacggcggagttcgtcgacagcgacgcgctcgcacgcgcgttcggcaccacgaccgccgtgctcggtgacgactga

SEQ ID NO: 72553 - protein, 258 aa, Halobacterium sp. NRC-1
MEELRMTPHHDNTADTPAIELADVAFGYTATPVVEDISLAVSPGEYIGVVGPNGSGKSTLMKLMLGLLRPDRGRARLFGVPAHQFDTGSRIGYVAQHASASKEMPITVREVVKMGRFPHVGFGQLSADDWAVVDEALDTVGMSAFADRRVTELSGGQRQRAFIARALAGEAELLVFDEPTVGVDIESVAAFYDLLDVLHDDGITVVLIEHDLGAVTEHAERVICLNRELHFDGPTAEFVDSDALARAFGTTTAVLGDD

SEQ ID NO: 72554 - DNA, 843 bp, Sinorhizobium meliloti 1021
  CDS (1)..(843): transl_table=11
atgaccgaccatctgctcgtcgccagcggattgacggccggttatgacaaaaccgaaatcctgcatgcgctcgacctcaccattcccccgcgcaaaatcacggtgatcgtcggcgccaatgcctgtggcaagtccacgtttctccgcacgctctcgcggttaatcgcgcccagcaaggggcaagttctcctcgacggcaaatccatccaccggacaccctcgcgagatctcgcccggacgctgggtctgttgccgcaatcgccgatcgcgccggaaggcatcacagtggtcgacctcgtcagcaggggacggcatccgcatcaaagcctgttttccggctggacgcgacgggacgacgaggcggtcgacagtgcgcttagggcgacaaagacattcgaccttgccgatcggccgatcgacgagctctccggcggccagcggcagcgggtctggatcgccatggcactcgcccagcaaaccgacatcctgctgctcgacgagccgacgacctttctcgacatcaaccatcagatcgaggtgctcgatctcctgaccgatctcaacagcgcgcgtcgaactacggtcgtcatggtgctgcacgatctcaaccttgctgcccgctacgccgaccatctcgtggcgattgccggtgggcgcgtgcacatttcgggcactccggaagaggtgctcaccgaagagaccgtgcggcatgttttcggccttgatagtcgcgtcatcagcgatcccacgtcgggtcggccaatcatgctaccgatcgggcgacaccggacggccgtcatcgacgacatgggcgatgcaccacaaaaggagaggagcgcatga

SEQ ID NO: 72555 - protein, 280 aa, Sinorhizobium meliloti 1021
MTDHLLVASGLTAGYDKTEILHALDLTIPPRKITVIVGANACGKSTFLRTLSRLIAPSKGQVLLDGKSIHRTPSRDLARTLGLLPQSPIAPEGITVVDLVSRGRHPHQSLFSGWTRRDDEAVDSALRATKTFDLADRPIDELSGGQRQRVWIAMALAQQTDILLLDEPTTFLDINHQIEVLDLLTDLNSARRTTVVMVLHDLNLAARYADHLVAIAGGRVHISGTPEEVLTEETVRHVFGLDSRVISDPTSGRPIMLPIGRHRTAVIDDMGDAPQKERSA

SEQ ID NO: 72556 - DNA, 870 bp, Synechocystis sp. PCC 6803
  CDS (1)..(870): transl_table=11
atgctaacagtgcccagccctaatgccaacgtccccatggttgattccctactctcccaaccagtaattgccgttgaaaatttattcgctggttatggcgcgacgccagtgctagaaaatattaatctgcgggtggaggaaagggattttctgggcttaattggccctaacggcgggggaaaaaccactctgctcaaagtactgttgggattaattcaaccccagcaaggtacggtacaaattctcgggcggtcagtggaacaggggcggcgttacgtgggctatgtaccccaatggttagagtttgaccgggcgtttccagtgcgggtgttggacgtggtcaggatgggccgtttggggcggggtaaattatttcgccgttatcaccagcaggatgaagccattgtacgccgttgtttagagcaggtgggcatgggagatttaggcgatcgccccttggggaccctgtctggaggacaacggcaacgggtttacattgccagggccctagcttcccaaccgcagattttattgctggacgaacccaccgccaatgtagacagcaaagtgcaaagaagtatttacgagttattgggggaactgaatcaaaccatgaccattgtgatgatttcccacgacctgggggccatttcccgctatgtcaaaaccgttggttgcctcaaccgtagtttgcactatcaccaggagaaatttattacgccccagatgattgaagccacctatcaatgtccggtggatttaattgcccatggtgtgccccatcgggttttccctagccatgatccggctttacccgggttagatgcaaccaatggccaggggcatacagcggagtgtcaccatgattga

SEQ ID NO: 72557 - protein, 289 aa, Synechocystis sp. PCC 6803
MLTVPSPNANVPMVDSLLSQPVIAVENLFAGYGATPVLENINLRVEERDFLGLIGPNGGGKTTLLKVLLGLIQPQQGTVQILGRSVEQGRRYVGYVPQWLEFDRAFPVRVLDVVRMGRLGRGKLFRRYHQQDEAIVRRCLEQVGMGDLGDRPLGTLSGGQRQRVYIARALASQPQILLLDEPTANVDSKVQRSIYELLGELNQTMTIVMISHDLGAISRYVKTVGCLNRSLHYHQEKFITPQMIEATYQCPVDLIAHGVPHRVFPSHDPALPGLDATNGQGHTAECHHD

SEQ ID NO: 72558 - DNA, 1041 bp, Brucella melitensis 16M
  CDS (1)..(1041): transl_table=11
ttgtgtcggggcgtcaacggcggttgcaggctccatcggtttcgtggggcttgtggtgccgcacctcctgcgtccgctggttggtgcgcgcccctcgcgcctgctcgtcgcgagcggccttggcggggccgccctgctgcttgcagcggatattctggtgcgtgtcgtcatgccggggcgcgaactgaaacttggcgttctgacagccattatcggcgcgccattcttcctctggctggtgttcaaatatcggaggcagctcgtatgaccttgctttcggtgaaaaacctcgacgtgatccttggcggcaagcgtgccctggccgatgccagcttcgagacaaagggcggcgaattcatcggccttgtggggccaaacggggccggtaaaacgacattgttgcgcgccattgccgggctggtggcttccagcggtcaggtttctctggccgggcgcgacttgcgccatatgggggctgccgaaaaggcgcgcagccttgcctatctgccgcaggagcgcgatgttgcctggcctgttagcgttcatatgctggtttcactggggcggtctgcgctgaaaccggtctttgccgggctggacaggcaggacgaggccatcattgaagcggtcatggaccgcatggatgtgtcgcgctttggcgagcgctccgtcatggagctttcgggtggcgaaagggcgcgcgtgctgatcgcgcgtgtgctggcgcaggacacacctgtcattctggcagatgagccggtggcggggcttgatcccgcccatcagctaaccttgatggaaacttttgccgaactggcgcgcgaagggcggacggtgattgcatcgctgcatgagcttagccttgccgcccagcattgcagccgcctcatcctgctggatcatggctgcatggctgccgatggcacgcctgccgaggtcttcaccccgcaacgcctgcgcgatgtctatgggatccgtgcgcggatcatgatggtggatggcgaattcatcgtccatccgaccgcactacaacctcgctag

SEQ ID NO: 72559 - protein, 346 aa, Brucella melitensis 16M
MCRGVNGGCRLHRFRGACGAAPPASAGWCAPLAPARRERPWRGRPAACSGYSGACRHAGARTETWRSDSHYRRAILPLAGVQISEAARMTLLSVKNLDVILGGKRALADASFETKGGEFIGLVGPNGAGKTTLLRAIAGLVASSGQVSLAGRDLRHMGAAEKARSLAYLPQERDVAWPVSVHMLVSLGRSALKPVFAGLDRQDEAIIEAVMDRMDVSRFGERSVMELSGGERARVLIARVLAQDTPVILADEPVAGLDPAHQLTLMETFAELAREGRTVIASLHELSLAAQHCSRLILLDHGCMAADGTPAEVFTPQRLRDVYGIRARIMMVDGEFIVHPTALQPR

SEQ ID NO: 72560 - DNA, 747 bp, Pyrococcus furiosus DSM 3638
  CDS (1)..(747): transl_table=11
atgataagggtgagaaacctgtcattttcctacaatgggagggcgatattaagagacatagcatttgaggttaaagaaggagagtttctcgcaatacttggcccaaacggagccggaaaatcgactttgctaaggtgcttggcaaagatactaaagtgtgagggtgagatagaaatatgtggaagaaaccttcacgaatactcaaggagagagttgtcaaagacaatagcttatgtccctcaaagggttgagcccaactttctgagagtatttgatatggttctcctgggtagaaagccttacatgggaattataccaagtgaagaagacataaaagctgttgaaagggctctcaaaactcttaaaattgaacacttagcgggaaggttaacaaaaacattgagtgggggagagctccaaaaggttgccatagctagagctctagcccaagaatcgtcaataatattgctagatgagccaacaaacaatctagatccaaggagtcaagttgacctaatgaacttgctgaggaagttgtcccaggcggggaaaacaatagtgacagttatgcatgacattaatctagccttgagatttgcagaaaagcttatgtttatgaaaaatggggaagttgttggaatagttgaaactaaaaagataagtccagaaataattgaggaaacgttcaacgtaaaggctgagatctttgaaaccccttcaggtgtcaagttctgccaattttactaa

SEQ ID NO: 72561 - protein, 248 aa, Pyrococcus furiosus DSM 3638
MIRVRNLSFSYNGRAILRDIAFEVKEGEFLAILGPNGAGKSTLLRCLAKILKCEGEIEICGRNLHEYSRRELSKTIAYVPQRVEPNFLRVFDMVLLGRKPYMGIIPSEEDIKAVERALKTLKIEHLAGRLTKTLSGGELQKVAIARALAQESSIILLDEPTNNLDPRSQVDLMNLLRKLSQAGKTIVTVMHDINLALRFAEKLMFMKNGEVVGIVETKKISPEIIEETFNVKAEIFETPSGVKFCQFY

SEQ ID NO: 72562 - DNA, 795 bp, Fusobacterium nucleatum subsp. nucleatum ATCC 25586
  CDS (1)..(795): transl_table=11
ttggtaaaaatgaatttagaaataaaaaatggaaatttttcatatactgatggaaatcctattttaaaagatataaatttaaaaattgatagtggagagatatttacaatattggggcaaaatggaattggtaaaacgacattgctaaaatgtattaatggagttttaaaatggaattctggtgaagtatttattgataataaaaaagttgattctataaaggatttaaaagatatagcttatgttccccaagcacattcattctctttctcatatactgtaagagagctttctattatgggaagagctaaatatttaaatattttctctactccttcaaaatcagattatgatatagtagaaaaagttttagatgagatgggaatattgtatttaaaagatagaaaatgttcagagttaagtggtggacaacttcagctggttttcttagctcgagctctagtaggagaacctaaaattttaattcttgatgaacctgaatcacatttagattttaaaaatcaaacaaaaattttaaggacaattgttcaattagcaaaaaagaaaaatattacttgtatttttaatacccactatcctgaatatgctttaagaatttcagataaatctatgttaataggaaaagatgactatattattggtaaaactagtgaagttattaatgaggaaaacttaaaaaaatattttgggataaatacaaaaattgttgaaataaaagatgaaaaacaaaaaataaaatctgtggtgataacagataatttagaaaaagagtaa

SEQ ID NO: 72563 - protein, 264 aa, Fusobacterium nucleatum subsp. nucleatum ATCC 25586
MVKMNLEIKNGNFSYTDGNPILKDINLKIDSGEIFTILGQNGIGKTTLLKCINGVLKWNSGEVFIDNKKVDSIKDLKDIAYVPQAHSFSFSYTVRELSIMGRAKYLNIFSTPSKSDYDIVEKVLDEMGILYLKDRKCSELSGGQLQLVFLARALVGEPKILILDEPESHLDFKNQTKILRTIVQLAKKKNITCIFNTHYPEYALRISDKSMLIGKDDYIIGKTSEVINEENLKKYFGINTKIVEIKDEKQKIKSVVITDNLEKE

SEQ ID NO: 72564 - DNA, 765 bp, Methanosarcina acetivorans C2A
  CDS (1)..(765): transl_table=11
atggagaaggttatagagttaaaggatgtctgggtacgatacggaaaccagacaatcctcgaagccgtaaatttcgaattaacagagccttatgggcttctcgggattataggacccaatggtggtggaaagaccacatttctcaaagtgcttctcggactcttgaagccctataaaggcagtgtgaaactctttgggaagcctccggaaaaaagcagagatcttgtagggtatgtcccccagtacaaaggttttgacttcgattttcctatcagtgtctgggaagtggtcctgacaggcaggatgagccatacgggttttctgaaaaagtacagtggagaagacaaaaaggctgctgaagaggctctgaaaacagtggagatgttcgaccttaaggatcggcagataggccagctctcgggcgggcagcggcagagggtttttatcgccagggctcttgcaactaatcccaaactcctgcttctggacgaacccaactccgggcttgaccctcacatgcaggacgaactctacaggctcctgaacaggctcaaacatgaaatggcaatcattatggttacacatgacctcagcgcagtctctgtctatgtggacaggatagcctgcctgaaccgcacgttccactaccataactctaaggaaatcccggttgaggacctggaagccacttaccagtgccctgtcgaactgatcgctcacggagtaccccatagagtgctggagcagcacaaagggaattcttga

SEQ ID NO: 72565 - protein, 254 aa, Methanosarcina acetivorans C2A
MEKVIELKDVWVRYGNQTILEAVNFELTEPYGLLGIIGPNGGGKTTFLKVLLGLLKPYKGSVKLFGKPPEKSRDLVGYVPQYKGFDFDFPISVWEVVLTGRMSHTGFLKKYSGEDKKAAEEALKTVEMFDLKDRQIGQLSGGQRQRVFIARALATNPKLLLLDEPNSGLDPHMQDELYRLLNRLKHEMAIIMVTHDLSAVSVYVDRIACLNRTFHYHNSKEIPVEDLEATYQCPVELIAHGVPHRVLEQHKGNS

SEQ ID NO: 72566 - DNA, 807 bp, Methanosarcina acetivorans C2A
  CDS (1)..(807): transl_table=11
atgttaaaagtagataatctgggctttgggtatagtggcatacccatattcgaaggcgtttcattcagggtaaaaaaaggttctttatgcgggcttttcgggccaaatgggtccgggaagacaaccctgtttaagtgctgcatgagctttcttaagtacgataacggcagcatatgcattgacggatgcgatgttaagaggaagaagataggggagttggcaaaacttgttgcctacgtgccccaggaacataagccgccttttccgtacctcgtcaaggaagtcgtgctgatgggcaggactcctcacatgggtggtatattcggcgtctctgaggatgacaagagtaaggtcatggaggctctggaaatgcttgagatctcccatatcgccgataagccatacaaccagcttagtggtggccaacgccagctcgtactcatcgcgagggctatggcacaggaaacgccgttaatgctgctggacgagcccacttccgctctggacttctgcaatcagatacggatttggaacattctgaagaaaatctccgcaaaagggacgaccatactggcctgcagccatgaccctaaccatatctcatggttctgtgatgacgtcatagtcatgtacgggggaggcctggtcgcaaagggtaatccaaaaagtgtagtatccgaagaattactaagcactatatttagtgatatctgcagtgtaggctacatggatcgtctgatgatggtatacccgaaaaacattcaggccgaatgtccaataactactataaacaatgatttgttataa

SEQ ID NO: 72567 - protein, 268 aa, Methanosarcina acetivorans C2A
MLKVDNLGFGYSGIPIFEGVSFRVKKGSLCGLFGPNGSGKTTLFKCCMSFLKYDNGSICIDGCDVKRKKIGELAKLVAYVPQEHKPPFPYLVKEVVLMGRTPHMGGIFGVSEDDKSKVMEALEMLEISHIADKPYNQLSGGQRQLVLIARAMAQETPLMLLDEPTSALDFCNQIRIWNILKKISAKGTTILACSHDPNHISWFCDDVIVMYGGGLVAKGNPKSVVSEELLSTIFSDICSVGYMDRLMMVYPKNIQAECPITTINNDLL

SEQ ID NO: 72568 - DNA, 783 bp, Methanosarcina acetivorans C2A
  CDS (1)..(783): transl_table=11
atggaactgaaagttgtcaatgccaattgcggttatgggaaaaaaacaattgtcagcaatatttcgatgaaaatcaaatccggggaaattatgtgccttttgggtccaaacggtgtggggaaaacaaccctgttcaaaactattttaggccttctggcactgcaaagtggagaaattctcctggacggggagaacgtgaagaaatggtcaaaaaaagactttgcaaaggtaatagggtatgtcccgcaggcccatacccctccatttccgtttaccgttttagaggttgtgcttatgggacgaaccccatacttaggggcctgtgcctctccgacaaaaaaagataccgtaattgcggaagagaacctggatttgctcggaattacatacctgaaggataaagtgtatacggatatcagcgggggggaaaggcagatggtccttattgcaagagcccttgcccaacagccaaaaattttatttatggatgagcccacttcaaacctcgattacggcaatcaggtaagggttctggaaagaatagttactctggcaaagacgggcctgggtgtgataatgacatcacattcaccggatcacgcttttctctgctcgacgaaagtagcacttttacaaagaaacgggatctttgaaattggggctgcccacgaaatagtaaccgaaaacaacctgcgctccgcatatggagttgacataatggttgcaagtgttactggcaaaaatggcgattcaattaaaacctgtattccgatgctgagctga

SEQ ID NO: 72569 - protein, 260 aa, Methanosarcina acetivorans C2A
MELKVVNANCGYGKKTIVSNISMKIKSGEIMCLLGPNGVGKTTLFKTILGLLALQSGEILLDGENVKKWSKKDFAKVIGYVPQAHTPPFPFTVLEVVLMGRTPYLGACASPTKKDTVIAEENLDLLGITYLKDKVYTDISGGERQMVLIARALAQQPKILFMDEPTSNLDYGNQVRVLERIVTLAKTGLGVIMTSHSPDHAFLCSTKVALLQRNGIFEIGAAHEIVTENNLRSAYGVDIMVASVTGKNGDSIKTCIPMLS

SEQ ID NO: 72570 - DNA, 768 bp, Methanosarcina acetivorans C2A
  CDS (1)..(768): transl_table=11
atgaagctctcgctcgacggggtcacgctctcatacgcttcggtgacggtgttgcacggaatttcaatggaattttgtgaaccgggcgttgtcggtataatagggccaaacggcgccggaaagagtacgctactccgctgtatcaataatgtccttacacctaagagcggtaggatctgtctagatgagcagaaaacctatgacatggacgcggctgaaatcgctcgaaatttcggatatgttccccaggagttcccgataacctttcaagcaactgtttttgacacggtacttatgggcaggcgtccgttctcgtcctggagggttagcaggaatgatgttgaaatcgctgctggagccgtcaaaatgttgaacctcgagcaggtcgcactcaggtaccactcggaactctctggtggtcagcaacagcgagtaatgatagcccgagcactcgcccagaatagccgggtgctcctccttgacgagccgacttccaaactcgacatcaggcaccagcttgaagtgatggatatcatccgtgcccttgtagacaaacgaggtctgctttctattcttgtaatccatgatctcaaccttgcttccagatacgctgacaaacttatcatgctcaaagatgggaagatatacgcagctggagatcctgtctctgtcctgacacagaagaatattagggcagtctatggagtcgaagctgcggtggtgctcgaggacaatctgccgcatattatcccaaaaagaccggtatga

SEQ ID NO: 72571 - protein, 255 aa, Methanosarcina acetivorans C2A
MKLSLDGVTLSYASVTVLHGISMEFCEPGVVGIIGPNGAGKSTLLRCINNVLTPKSGRICLDEQKTYDMDAAEIARNFGYVPQEFPITFQATVFDTVLMGRRPFSSWRVSRNDVEIAAGAVKMLNLEQVALRYHSELSGGQQQRVMIARALAQNSRVLLLDEPTSKLDIRHQLEVMDIIRALVDKRGLLSILVIHDLNLASRYADKLIMLKDGKIYAAGDPVSVLTQKNIRAVYGVEAAVVLEDNLPHIIPKRPV

SEQ ID NO: 72572 - DNA, 879 bp, Methanosarcina acetivorans C2A
  CDS (1)..(879): transl_table=11
atggaaagaaggagtggaaagaaggagtggaaagaaggagtggaaagaaggagtggaaagaaggaatggaaagaaggaatggaaagaggagatgctaagatggtaaagttgcaggtaaaagacgtagtcttcgggtatacgggcactaatattctgaaggatatctgccttgagatccgggcttcgagcctggtcagcattgtaggtcccaacggggccgggaagtctacacttttaaaatgtatcgacaggatcctgaatgtaaaaaccgggaaaatcactgttgacggcaaggacattaagcagatgggtcggctggaagttgcaaaaaacgtggcttatgtccctcagagttcgaaccgggtatttccgactaccgtttttgagaccgtgatgatgggaaggcgccctcacctcagctggttcgacagcaaaaaagatgaagaaaaggtctgggaagttctggaaatgctggggatagaagacctgtctctctctattttcaatgaactgtcggggggacagcagcagaaagtgttgattgcaagggctcttgtccaggagacaggagtaattctcctggatgagccgaccagcaaccttgatatctggcaccagctggacgtcatggaaacggtaaagaaacttgtacgggaaaagcaggtaacagcaatcatggcagtccatgacctgaaccttgcttccaggtattcggagagtataatcatgatgcagcagggaaaaatcattgctgcgggctcccctggctcggttcttacctcagagaacatagcagaggtttacggggtcgaggcccgtataagcacacacgccgaagttccgtatgtcgtgcctctgaggcagcttgaaattgcctga

SEQ ID NO: 72573 - protein, 292 aa, Methanosarcina acetivorans C2A
MERRSGKKEWKEGVERRSGKKEWKEGMERGDAKMVKLQVKDVVFGYTGTNILKDICLEIRASSLVSIVGPNGAGKSTLLKCIDRILNVKTGKITVDGKDIKQMGRLEVAKNVAYVPQSSNRVFPTTVFETVMMGRRPHLSWFDSKKDEEKVWEVLEMLGIEDLSLSIFNELSGGQQQKVLIARALVQETGVILLDEPTSNLDIWHQLDVMETVKKLVREKQVTAIMAVHDLNLASRYSESIIMMQQGKIIAAGSPGSVLTSENIAEVYGVEARISTHAEVPYVVPLRQLEIA

SEQ ID NO: 72574 - DNA, 756 bp, Methanosarcina acetivorans C2A
  CDS (1)..(756): transl_table=11
atgatcctggaagtagatggagtggaatttcagtaccggagtaaagaagtactcagagacataaaatttcacctgaataagaatgaaatactggccatactgggcccgaacggggtaggaaaaaccaccctgctaaaatgcatgaatgccatcttaaaaccaaagagcggcacaatactgatagaaaatgaagatgtgcttaaacttgagcagatagaaattgcccgtcgcctgggatatgttccgcagcactgtgaatgctcaaggctgacatcttttgatgctattttgcttggcagaattccacacataaagtgggaaatcaccactgaagatctgttactggtagaagccaccatcaagagactgcatcttgaggaacttgcactgaggtacattgacgaacttagcggaggggaattgcaaaaaataggaatagcaagggccattgcacagaacccgaaactgctattgctggacgaacctacaagcagtcttgaccttaagaaccagctggaaatactggatactataagggaagtggtcaggaaggacaatatgtctgccattatgaccatgcatgaccttaatcttgcattcaggtatgccgataagtttctcttcctcaagaacggcacaatctttgcagcgggaggcataggggatatcactccggaaatcataagggaagtatacggagtgccggtggcgattcagaactacatggacatagctgtggtgattcctaccccgtga

SEQ ID NO: 72575 - protein, 251 aa, Methanosarcina acetivorans C2A
MILEVDGVEFQYRSKEVLRDIKFHLNKNEILAILGPNGVGKTTLLKCMNAILKPKSGTILIENEDVLKLEQIEIARRLGYVPQHCECSRLTSFDAILLGRIPHIKWEITTEDLLLVEATIKRLHLEELALRYIDELSGGELQKIGIARAIAQNPKLLLLDEPTSSLDLKNQLEILDTIREVVRKDNMSAIMTMHDLNLAFRYADKFLFLKNGTIFAAGGIGDITPEIIREVYGVPVAIQNYMDIAVVIPTP

SEQ ID NO: 72576 - DNA, 765 bp, Methanosarcina acetivorans C2A
  CDS (1)..(765): transl_table=11
atgctggagctgaaaaatctttcttttgggtataaggagaaaaaaaccctgaagaacatcaatatgcatgttaactcaggagaagttgttggcatcataggacctaacggaagcgggaaaagtacgcttctcaaatgcatgaaccttattctgaagcccaaaggacatatccttctggaaggggcagaacttcaaactcttaacctcaaagaaattagtaagataataggttatgtgccccagagcattcaggtttcctcctttccgataaaagtttttgatgtcgttttgcttggaagaagaccgtatattagatggaacgttagggacagagatctcgattttgtttcagagatcttttctttattaaacctggacgatctgagcatgagaaatttcaatgaattgagtggtggagaaaagcaaaaaatccttctggcaagggctctggctcaggaacctaaaatccttctacttgatgagcctacaagtaatctggatgtgaaacatcaacttgaaataatggatgtcattcgaaatctatcccgagagaaatcccttgcagttgtgattgttttgcatgatctgaatcttgcaagcagatactgcgacagactcgttctgctcaattcgggacaggttttcgcaacgggaacacctgaagagattcttattaactccaatataaaaacggtttataatgtagatgccgagattagttatagcaaaaaaacagggtcaattacagtccttccgatttcatga

SEQ ID NO: 72577 - protein, 254 aa, Methanosarcina acetivorans C2A
MLELKNLSFGYKEKKTLKNINMHVNSGEVVGIIGPNGSGKSTLLKCMNLILKPKGHILLEGAELQTLNLKEISKIIGYVPQSIQVSSFPIKVFDVVLLGRRPYIRWNVRDRDLDFVSEIFSLLNLDDLSMRNFNELSGGEKQKILLARALAQEPKILLLDEPTSNLDVKHQLEIMDVIRNLSREKSLAVVIVLHDLNLASRYCDRLVLLNSGQVFATGTPEEILINSNIKTVYNVDAEISYSKKTGSITVLPIS

SEQ ID NO: 72578 - DNA, 777 bp, Methanosarcina acetivorans C2A
  CDS (1)..(777): transl_table=11
ctgatgctggaagttaactctcttgccttttcctatggaaacgggctggtctttgaaaacgtttctttctctttaaagaaaggtgaggttatgtgcatcctgggtcccaacggggcgggaaaatccacactgatcaaatgcattgcagggattctcaaaccttctaccgggtctgttcgcattctgggagaggatacgacttctctcggggcaaagggaattgcccggcatataggttatgtgccccagcagaacgaggtggtttttccttttaccgtgctggattttgtggtgatgggccgggctcctcatctttccatgtttgcatctccccgtgctgaagatatggagcttgcaagggaatcgcttgcagtggtggggctttccgacctcgcggaaaggccggttgccagtctcagcggcggacagagccagatggtcctgattgcccgggcccttgtccagcagccttctcttcttttgctggacgagccgacttctcacctcgatttcggcaaccaggtccttgtactggaaacagtgcagaggcttgcctccctcgggatgtccattgtgatgaatacccacatgcctgaccatgctttcctggtgggcagcagagccgcagctctggaagggggcaggctggttgcactgggagaggttgaaacggttgtaaccggcaagatgatgtcctcggtctatggggtaaaggtagctgtccgggaaatcgaagatatgaagagaaaagtgtgtctgcccttacgggggaaataa

SEQ ID NO: 72579 - protein, 258 aa, Methanosarcina acetivorans C2A
MMLEVNSLAFSYGNGLVFENVSFSLKKGEVMCILGPNGAGKSTLIKCIAGILKPSTGSVRILGEDTTSLGAKGIARHIGYVPQQNEVVFPFTVLDFVVMGRAPHLSMFASPRAEDMELARESLAVVGLSDLAERPVASLSGGQSQMVLIARALVQQPSLLLLDEPTSHLDFGNQVLVLETVQRLASLGMSIVMNTHMPDHAFLVGSRAAALEGGRLVALGEVETVVTGKMMSSVYGVKVAVREIEDMKRKVCLPLRGK

SEQ ID NO: 72580 - DNA, 885 bp, Methanosarcina acetivorans C2A
  CDS (1)..(885): transl_table=11
atgggaatgaacgaaaaccaaaacaaaggcatatccgtagagaacctgacactgagctacgaaaaaaacctggttttaaacaatatcaacttttcaattaaaaaagggtcggtagtaacccttgtaggccctaacggctgcgggaaaacgacccttctgaaaatcataaacgggtttctcagacagaatgaaggaaccgtgtatatcgacagcaggaatatagagggaattgcaaacagagagctttcaaggattctgggacacgtatcccagatgcacaaatcctcctttcctttttccgtgctggacgtcgtacttacaggccgcatgccctatatctccatgttttcaaccccaggaaaagaagatattgaaaaagcctatcaggtcctggaatttatggggatagcgcattttgccaggagacaatacacccggatcagcggaggagagcggcaaatggttatgattgcaaaagctcttgcccaggagcctgattttctcctgcttgacgaaccgacgtcctttcttgacctgaaaaaccagattcatgtcctgaaaaccataatcaacctggcaaaaacccggaatatcaccgtgctgatgaccctgcacgaaccaaaccatgccctgctgttttctgacgagatcattctcctgagaaaactgcatggcccggaaaacgaaaatatttccagccggcatgatcccaacacgggagcttctcctgaaaaagagaacattctaacttaccctgtggaaaatatagtcagttcgggagctccggaaaaggtgatgacccccgaaaaaataaaggaagcgtacggcatagacgtcgagatcctggaacataaaggaaaaaggatgattatccctgaaatttaa

SEQ ID NO: 72581 - protein, 294 aa, Methanosarcina acetivorans C2A
MGMNENQNKGISVENLTLSYEKNLVLNNINFSIKKGSVVTLVGPNGCGKTTLLKIINGFLRQNEGTVYIDSRNIEGIANRELSRILGHVSQMHKSSFPFSVLDVVLTGRMPYISMFSTPGKEDIEKAYQVLEFMGIAHFARRQYTRISGGERQMVMIAKALAQEPDFLLLDEPTSFLDLKNQIHVLKTIINLAKTRNITVLMTLHEPNHALLFSDEIILLRKLHGPENENISSRHDPNTGASPEKENILTYPVENIVSSGAPEKVMTPEKIKEAYGIDVEILEHKGKRMIIPEI

SEQ ID NO: 72582 - DNA, 819 bp, Streptomyces coelicolor A3(2)
  CDS (1)..(819): transl_table=11
atgactgccaccgaactcgtcatcgacggcgtcaccctcaccgccggcgcgcaccgccttgtcgaggacgtctccctgaccgcacgccccggcgaggtcatcggcctggtcggaccgaacggcagcggcaagtccagcctgctgcgcgccgtctaccgcatcctgcgccccacgaccggccaagtcagcgtcgacggcaccgacgcctggtcgctacccgtacggcaactcgcccggacggtggcagcggtggtacaggagtcgggcgcggagttcgaactcacggtgcgtgaggtcgtcgcgatgggccgcaccccgcataagcggctgctggacggggacaccgccgaagacgccggcctcatacggtcggcgctcaccgcggtggacgccaccgacctggcccaccgtcccttcgatcagctctccggcggcgaacgccagcgcgtgctcatcgcccgtgccctggcccagcagccgtccctgctggtcctggacgaaccgaccaaccacctcgacatccggcaccagttggacgtcctcggtgccttgcgacgactgcccgcgacggtcctggtggccctgcacgacctcaacctggccgcgtactactgcgaccgtctctacgtactgtgcgacggcaaggtcaccgccgcgggcccgcccgccgacatcctcacgtcccagctcctttccgaggtctacggcgtgacgagcgaagtcaccatccatccacgcacgggcgcgccgcaggtgacgttcctccccggagcatcgcgcctcgacgccccagtcgaggcgaatccgtccgtctcctga

SEQ ID NO: 72583 - protein, 272 aa, Streptomyces coelicolor A3(2)
MTATELVIDGVTLTAGAHRLVEDVSLTARPGEVIGLVGPNGSGKSSLLRAVYRILRPTTGQVSVDGTDAWSLPVRQLARTVAAVVQESGAEFELTVREVVAMGRTPHKRLLDGDTAEDAGLIRSALTAVDATDLAHRPFDQLSGGERQRVLIARALAQQPSLLVLDEPTNHLDIRHQLDVLGALRRLPATVLVALHDLNLAAYYCDRLYVLCDGKVTAAGPPADILTSQLLSEVYGVTSEVTIHPRTGAPQVTFLPGASRLDAPVEANPSVS

SEQ ID NO: 72584 - DNA, 810 bp, Methanosarcina mazei Go1
  CDS (1)..(810): transl_table=11
atgattctatctgtagaagaacttcagtttttgtatcgtaaccgtaagatcctgcatgagattgcctttacaatcgatgaaggagaagttgtagcaattctgggccccaacggggttggcaagactaccctgttgaaatgccttaacaggattctgcacccgaaaggaggagcagtccatatagatggagaaaacctgttcaacctcgggactatggagatcgcacgcctgataggttatgtcccccagcgtgtggaaacgggaagactgacagcttttgatgcggtccttctgggacgccgaccccacatcagatgggacgtgacagaaaaagacctgaagattgttgactcggtcttcaagcttctctcaatggaaaacctgcgcctttcatatatcgatgagatgagtggaggagaactccagaaggtggcaatagcgcgttcccttgttcaggagccgaaagtccttctccttgacgagccgacaagcagtctcgatttgaagaaccaggtagaaatccttgctactatcaggcagatagttcttgaccataagattgcagctgtaatgaccatgcacgacctcaaccaggctctaaggtatgcagaccgttttatcctccttaaaggagggaaggtccacgcactgggaggggtggaagtaatcactccccaggtaatcgaagaagtatacggcctgcccgttatcataggggaaatctcaggcatgagatgcgtggttccgggaagtccggcgtgggactgcagcacagactgcagcacggactgcgttgcaggtaaattataa

SEQ ID NO: 72585 - protein, 269 aa, Methanosarcina mazei Go1
MILSVEELQFLYRNRKILHEIAFTIDEGEVVAILGPNGVGKTTLLKCLNRILHPKGGAVHIDGENLFNLGTMEIARLIGYVPQRVETGRLTAFDAVLLGRRPHIRWDVTEKDLKIVDSVFKLLSMENLRLSYIDEMSGGELQKVAIARSLVQEPKVLLLDEPTSSLDLKNQVEILATIRQIVLDHKIAAVMTMHDLNQALRYADRFILLKGGKVHALGGVEVITPQVIEEVYGLPVIIGEISGMRCVVPGSPAWDCSTDCSTDCVAGKL

SEQ ID NO: 72586 - DNA, 3963 bp, Drosophila melanogaster
  CDS (1)..(3963)
atgacaatgacggagacccgcgaagatgttcctgctgcggatgcggatgaggccacgccggcggcccagaagaagaagaagaccaaggagaaggcccagcccatggttagctacacagagctctttcgttatatcgctggatgggattatcttgtgctcctgtcgggtttcgtagctgcattcctccaatccctcgtctttcccattgccattgtggtgtacagcgaactggtggccatgttcatcgaaagaactctgggtcagggaaccagttcggtcaccatcggattgtccctcttcggtggcggaaagatactcacaaatgcctcttacgaggagaatatgcaggagctgcgaaaggacagcgtatccttcggaatactcatgaccctgaatactctactaatgctcttctccggagtctactacgtggatgccttcaatcgattggctctgaaactcacagtccgtatgcgaagggaattcttcaaggccactttgagacaggagatcggatggcatgacatggccaaggatcaaaactttgccgttcgcataactgacaacatggagaaaatacgcagtggcatagctgaaaacttaggtcactatgtggagatcatgtgtgatgtcataatcagtgtagttctctcctttatctacggatggaaattagctctggcaatagtcttttatatacccctaacattggtagtcaactcagcagtggcccattaccaaggtaaactgacgggccaggagcaaagttcctatgtgcgagccagttctgtagttgaagaagtaattggagccattaggactgtggttgcatttggaggagaacgaagcgagtccttgcgctatgatagtctactaaaacccgctctcaaggcgggaaaatggaaaggagccttctccggactgagtgacacggtgatgaaagccatgttgtttatcacaggagcgggatctttctggtatggagctaacttgattctctactaccgcgatcctagcatacccattgacgagagggaatacacaccggcggttgtgatgattgtgatatcgggtataatcgtgagtgccaatcaaatatcccgaacctctccgtttttggagacattcgccatggcacgaggatcggcttcggccatattggatgtgatagatcgcacctccttgattgatccactctccaaggctgggaaaatcctgaactatggcctaaaaggcgccgtcgagtttcgagatgtattcttccgctatcctgccagagaagatgtcattgttctgcgaggtctgaatgtagtcgtcgaggaaggacaaaccgtggccctggtgggtccttcaggatgtggcaagtccacgtgcatacagctgttgcaacgattctatgatcctgtttttgggcaagttctattggatggcgaggatgtgcggaagtacaacatcaagtggctgcgttcaaacattgccgtggtgggtcaggaaccagtgctatttcaaggatcaattggagaaaatatccggcatggaaaaccagaagccacacaaaaggaagtcgaagacgcagctaaagccgccaatgctcacgattttattatagctttacataagggttatgataccgacatcagcgagaagggcgttcagctttctggaggccagcgtcagcgtattgccatcgccagagctctgattcagcagcccaaaatcctgcttttggatgaggccacctccgcattggattaccattccgagaagttggtacaggcggcgctggacaaggcctgcaagggtagaacaaccttggtggtgtcccatcgactttcggccatcagacacgctcatcgaattgtttatattgaaaatggcaaagccgtagaacaaggcacccatgaggagttgatgaaactggagggattctatcacaaaatggtcaccgtgcattcgtatgacgattccgccgaggagctactaaatgaactggaagaagtggccgagattaaggagagaaaaatgtcttatgaagttgaaccttatcaactgggcacacgaaactctattgtgtcactggagaagaatgcagagtttcagatgaagaacctaaatggtctggccaacataactatgaatcaggaaatagatgatccgagagttccatccgcaaattttatcagcaccttctttcgcattttgggttgggctcgacccgagtggagttttctcatcattggcgccatatgtgctggactttatggagtcaccatgccggtgttttccgtagttctagcggagctgtatggatcattggccaaaccaacggacgaggaagtactcgagcaaagtgcgtccatggccataatctccctagtgattggaatcgcagctggcgtggtctgctacatccagacatttttctttaatctggctggtgtctggcttactacgcgaatgcgctccaagacctttagatgcatcatgaaccaggagatgggatggttcgatcgcaaagagaacagcattggagccctttctgcccgactatccggcgatgcggccagtgttcaaggagccattggttttccgctgagcaacatcatccaggcgttcaccaactttatctgcagtattgcgattgcctttccctactcctgggaattggcattaatatgcctgagcacctcgcccttcatggttgcatccattgtgttcgaggcgcgatttggggagaagtcggcgttgaaggagaaggaggtactggaggaaaccagtcgcattgccaccgaaactattacccaaattcggacagtagctggacttcgtcgagaggaggagctgataaagatatatgacaaggaggtggagcgatatcggcatcagatcctcagtcgactgaaatggcgaggactggtcaattccctaggcaaatcccttatgttcttcggctacgcagtgaccttgacatatggtggacacatgtgtgctgatggcaaaatcaaatttgagacgattatgaaaatatccaacacgatgctgtatggtctatttattctggcccaatctctggccttcactcccgccttcaatgctgctcttctttccgcaaatcggatgtatgagattattgaccgcaagccacagatccaatcacccgaatcctttgagatccaacagaatggcaatggaacggcttacaaaaccaatgtcgtacagcaaggagtcagctatcgtggtctcaacttttcctatccctcaagaccccatattaaagttctgcagaactttaatttggatattaatcagggtcagacggttgcactggtgggtgcgtcgggatcgggaaaatccacatgcgttcagctattgatgcggtactatgatcccgatgagggcaagattctcatagatcaagagagcattcaccacgacatggacctaaaaactctgcgtcgtcgcctgggcattgtgtcccaggaaccttcacttttcgagaagtctatcgccgataatattggctatggagatacctcgcgacaggtgcccatgcagcaaataattgaggcggccaaaatggccaatgctcatgagttcattatgtctctgcctgctcagtatgatacggttttgggttccaagggcacccaattatccggtgggcaaaagcaaagaattgcaattgctcgagcgatggtaaggaatcccaagatccttctgctggatgaagccacctctgcgctggacttccaaagtgaaagggtggttcaacaagctttggactcggcatgttcaggacgaacatgtattgtaatcgcccatcgcctgtccaccatccaaaatgccaatgtgatttgtgtaattcaagccggaaagatagtggagcagggatctcactcccaacttctggccaagaatggcatttattccaagctctatcgctgtcagacgaaagcctcttga

SEQ ID NO: 72587 - protein, 1320 aa, Drosophila melanogaster
MTMTETREDVPAADADEATPAAQKKKKTKEKAQPMVSYTELFRYIAGWDYLVLLSGFVAAFLQSLVFPIAIVVYSELVAMFIERTLGQGTSSVTIGLSLFGGGKILTNASYEENMQELRKDSVSFGILMTLNTLLMLFSGVYYVDAFNRLALKLTVRMRREFFKATLRQEIGWHDMAKDQNFAVRITDNMEKIRSGIAENLGHYVEIMCDVIISVVLSFIYGWKLALAIVFYIPLTLVVNSAVAHYQGKLTGQEQSSYVRASSVVEEVIGAIRTVVAFGGERSESLRYDSLLKPALKAGKWKGAFSGLSDTVMKAMLFITGAGSFWYGANLILYYRDPSIPIDEREYTPAVVMIVISGIIVSANQISRTSPFLETFAMARGSASAILDVIDRTSLIDPLSKAGKILNYGLKGAVEFRDVFFRYPAREDVIVLRGLNVVVEEGQTVALVGPSGCGKSTCIQLLQRFYDPVFGQVLLDGEDVRKYNIKWLRSNIAVVGQEPVLFQGSIGENIRHGKPEATQKEVEDAAKAANAHDFIIALHKGYDTDISEKGVQLSGGQRQRIAIARALIQQPKILLLDEATSALDYHSEKLVQAALDKACKGRTTLVVSHRLSAIRHAHRIVYIENGKAVEQGTHEELMKLEGFYHKMVTVHSYDDSAEELLNELEEVAEIKERKMSYEVEPYQLGTRNSIVSLEKNAEFQMKNLNGLANITMNQEIDDPRVPSANFISTFFRILGWARPEWSFLIIGAICAGLYGVTMPVFSVVLAELYGSLAKPTDEEVLEQSASMAIISLVIGIAAGVVCYIQTFFFNLAGVWLTTRMRSKTFRCIMNQEMGWFDRKENSIGALSARLSGDAASVQGAIGFPLSNIIQAFTNFICSIAIAFPYSWELALICLSTSPFMVASIVFEARFGEKSALKEKEVLEETSRIATETITQIRTVAGLRREEELIKIYDKEVERYRHQILSRLKWRGLVNSLGKSLMFFGYAVTLTYGGHMCADGKIKFETIMKISNTMLYGLFILAQSLAFTPAFNAALLSANRMYEIIDRKPQIQSPESFEIQQNGNGTAYKTNVVQQGVSYRGLNFSYPSRPHIKVLQNFNLDINQGQTVALVGASGSGKSTCVQLLMRYYDPDEGKILIDQESIHHDMDLKTLRRRLGIVSQEPSLFEKSIADNIGYGDTSRQVPMQQIIEAAKMANAHEFIMSLPAQYDTVLGSKGTQLSGGQKQRIAIARAMVRNPKILLLDEATSALDFQSERVVQQALDSACSGRTCIVIAHRLSTIQNANVICVIQAGKIVEQGSHSQLLAKNGIYSKLYRCQTKAS

SEQ ID NO: 72588 - DNA, 801 bp, Chlorobium tepidum TLS
  CDS (1)..(801): transl_table=11
atggtgaagctcaaggaacagtcgattgccctgcggaacgccggacttggctacaacggcagggcgattctgaacaatgtcgatctggagattgagccgggcgaaatcatctgcctgctcggccagaacggcgcgggcaaaaccacgctgttcaggacgatgctcggcttcatcgctccggttaatggctcggtgacgcttgcgggtcgcgaagtctctcgcctttcgccgacggagattgcgcgtatcgtctcctacgtgccgcaatcctacgccatgccgttcgcctatccggtaagtgatgtggtgcttttcggccggagcgcgcatctcggcctcttcgcctcgccgggagcgcgtgatcgccggattgcggcggagtgcctcgaactgctcgaaatcggtcatctcgccagtcgcccgttcaacgagttgagcggcggcgagcggcagatggtcgtcattgcgcgggcgctggcgcaggaggcgcggttcatgattctcgacgaaccggcctcgaacctcgactacggcaaccaggtgcggctgctccgcaaagtcagggcgcttgccgggcgcggcatcggcattctgatggcgacgcaccaccccgaccacgccttcatggcggcctcgcgcgtggcggtgctttccggcggcaagctgagccacgacggcccgcccgaagcgacgctcaccccggatacgctgcggagcatctacggcgtcgaggtgcaggtgttcgacaccccgcaaaacggccacgccagccgaagggtctgcgctccggtggtggagtag

SEQ ID NO: 72589 - protein, 266 aa, Chlorobium tepidum TLS
MVKLKEQSIALRNAGLGYNGRAILNNVDLEIEPGEIICLLGQNGAGKTTLFRTMLGFIAPVNGSVTLAGREVSRLSPTEIARIVSYVPQSYAMPFAYPVSDVVLFGRSAHLGLFASPGARDRRIAAECLELLEIGHLASRPFNELSGGERQMVVIARALAQEARFMILDEPASNLDYGNQVRLLRKVRALAGRGIGILMATHHPDHAFMAASRVAVLSGGKLSHDGPPEATLTPDTLRSIYGVEVQVFDTPQNGHASRRVCAPVVE

SEQ ID NO: 72590 - DNA, 771 bp, Chlorobium tepidum TLS
  CDS (1)..(771): transl_table=11
atgagcgaaccgttaatcgtttgcgagcagctctgcgtcaatctcggcggcgcaaaaatcttgcagggtctttctctttcggtatacgagggggactttcttgccgtgctcgggccgaacggcggcggcaaaaccacgctgctcaaggtaatacttggtctggtcaaacccacgactggcaccgtcagggtattcggcaaggagccggggtacgcttccaggcgcatcggctatgtgccgcagcgcctcgatttcgaccgcaccttcccgatcagcgcgatggaggtggtactgatgggccgcctttcacgcaagcggttgttgcagcgctacgggcacgaagatcgccggaaggcgctcgaagcgcttgaaaccaccggtctcgccgagcttgcccagcggcggatcggcgcgctttcgggcggcgaactccagcgcgtcctgatcgcccgcgcgctcgccggagagccggaactgctgctgctcgacgaaccgacggccagcgtcgatcccgacatgaaaaccaccatctacgacctcctcgatcagctcaaaaagagccacaccatcgtgctggtcacacacgacaccggcaccatcgggcggcacgtctcgcgcatcgcctgcctgaactgcacgcttgacatgcacgaacccggctcgacgctgggccgttcggccctcgacaagctttacggctatccggtcgatgtggtcgagcatcgcgcgcctcaaggacacgcaacccaccagaatcaccgccatgcctga

SEQ ID NO: 72591 - protein, 256 aa, Chlorobium tepidum TLS
MSEPLIVCEQLCVNLGGAKILQGLSLSVYEGDFLAVLGPNGGGKTTLLKVILGLVKPTTGTVRVFGKEPGYASRRIGYVPQRLDFDRTFPISAMEVVLMGRLSRKRLLQRYGHEDRRKALEALETTGLAELAQRRIGALSGGELQRVLIARALAGEPELLLLDEPTASVDPDMKTTIYDLLDQLKKSHTIVLVTHDTGTIGRHVSRIACLNCTLDMHEPGSTLGRSALDKLYGYPVDVVEHRAPQGHATHQNHRHA

SEQ ID NO: 72592 - DNA, 777 bp, Brucella suis 1330
  CDS (1)..(777): transl_table=11
atgaccttgctttcggtgaaaaacctcgacgtgatccttggcggcaagcgtgccctggccgatgccagcttcgagacaaagggcggcgaattcatcggccttgtggggccaaacggggccggtaaaacgacattgttgcgcgccattgccgggctggtggcttccagcggtcaggtttctctggccgggcgcgacttgcgccatatgggggctgccgaaaaggcgcgcagccttgcctatctgccgcaggagcgcgatgttgcctggcctgttagcgttcatatgctggtttcactggggcggtctgcgctgaaaccggtctttgccgggctggacaggcaggacgaggccatcattgaagcggtcatggaccacatggatgtgtcgcgctttggcgagcgctccgtcatggagctttcgggtggcgaaagggcgcgcgtgctgatcgcgcatgtgctggcgcaggacacacctgtcattctggcagatgagccggtggcggggcttgatcccgcccatcagctaaccttgatggaaacttttgccgaactggcgcgcgaagggcggacggtgattgcatcgctgcatgagcttagccttgccgcccagcattgcagccgcctcatcctgctggatcatggctgcatggctgccgatggcacgcctgccgaggtcttcaccccgcaacgcctgcgcgatgtctatgggatccgtgcgcggatcatgatggtggatggcgaattcatcgtccatccgaccgcactacaacctcgctag

SEQ ID NO: 72593 - protein, 258 aa, Brucella suis 1330
MTLLSVKNLDVILGGKRALADASFETKGGEFIGLVGPNGAGKTTLLRAIAGLVASSGQVSLAGRDLRHMGAAEKARSLAYLPQERDVAWPVSVHMLVSLGRSALKPVFAGLDRQDEAIIEAVMDHMDVSRFGERSVMELSGGERARVLIAHVLAQDTPVILADEPVAGLDPAHQLTLMETFAELAREGRTVIASLHELSLAAQHCSRLILLDHGCMAADGTPAEVFTPQRLRDVYGIRARIMMVDGEFIVHPTALQPR

SEQ ID NO: 72594 - DNA, 759 bp, Shigella flexneri 2a str. 301
  CDS (1)..(759): transl_table=11
atgactttgcttgccgttcgtcatgcgtctctgggttactcccgccatccagtgctacgcgacgtgtccttcaccctgtcgcaaggaacaatttgttgtctgcttggcgcgaatggttgcggcaaaaccacactcatgcgctccattcttggcgttataccgttattaaaaggcgagatcctactggatagcctctctgtgcagacactcagccatcgccagcgcgcacaggctattgcctgggtgccgcaggcgcacgacggtatttttgctttcagtgtgctggatatggtgttgatgggcctggcccccaccataggcgctttttccgttcccggtaagcaagaacgcctgaaagccacggagcaactggaaaagctgggcattttgcatctggcgacacgacgctggaatacgcttagcggcggtgaacgtcagctggctttaatcgcccgtgcactcgtccaacaaccgcgcttgttgttactggatgagcccgcctccagcctcgatttcggtcatcagatccaacttctggacacgctggcgcagctcaaaaataacggcatgacaatgttaatgtcgactcaccatacgctccatgccaacgccattgccgacagcattatccaagtagagccagatggacgagtaacacaaggcttaccgaccgaacagttaacaacgaacaaactggcggccctgtatcgggtttctgccgaccaaattcatcatcacctctctgcaattagccgctaa

SEQ ID NO: 72595 - protein, 252 aa, Shigella flexneri 2a str. 301
MTLLAVRHASLGYSRHPVLRDVSFTLSQGTICCLLGANGCGKTTLMRSILGVIPLLKGEILLDSLSVQTLSHRQRAQAIAWVPQAHDGIFAFSVLDMVLMGLAPTIGAFSVPGKQERLKATEQLEKLGILHLATRRWNTLSGGERQLALIARALVQQPRLLLLDEPASSLDFGHQIQLLDTLAQLKNNGMTMLMSTHHTLHANAIADSIIQVEPDGRVTQGLPTEQLTTNKLAALYRVSADQIHHHLSAISR

SEQ ID NO: 72596 - DNA, 777 bp, Corynebacterium efficiens YS-314
  CDS (1)..(777): transl_table=11
atgatccacggtgacagggtcagcttctcctacggccgcaccgtggtggtggatggggtgagcatctcgatccccgaccagggcacggtgggactggtcggccccaacggcagtggcaaaaccaccctgttgcgcaccctctatggttccctgcaaccgggcgggggagcagtcacggtgaacaacactccccttcacaaggtgccccgcaagaagctggcacgcaccctggccgtggtggcccaggagcatgtctcggacctgccgatggtggtggctgacctggtcatgctcggccggatgccacaccagggcctggcctcacgggcttctctgcaggatgaatgcctggttgccgacgccctggcgcaggtgggcgtggcgcacctggcggggcggaacttcacggacctgtccggcggtgaacggcaacgcgtcctcatcgcccgcgcactggtgcaggacgccacccatatcctgctggatgaacccaccaaccacctggacatccgttaccaacatgaggtgctcggtttcctggcggaactgcccaccagctgtgtcgtggtcctccatgatctcaacctggccgcccactactgcgaccacgtcctcatcctgcaggacgggaaggtggttgcccagggccctcccgccgaggtgttcaccccggagatcctcgaacccgtctatcggattccggtgcgacgcatcgacctcgacgggcagatgcatctgatcttccggcccgcctcccggatggccccgaccccctga

SEQ ID NO: 72597 - protein, 258 aa, Corynebacterium efficiens YS-314
MIHGDRVSFSYGRTVVVDGVSISIPDQGTVGLVGPNGSGKTTLLRTLYGSLQPGGGAVTVNNTPLHKVPRKKLARTLAVVAQEHVSDLPMVVADLVMLGRMPHQGLASRASLQDECLVADALAQVGVAHLAGRNFTDLSGGERQRVLIARALVQDATHILLDEPTNHLDIRYQHEVLGFLAELPTSCVVVLHDLNLAAHYCDHVLILQDGKVVAQGPPAEVFTPEILEPVYRIPVRRIDLDGQMHLIFRPASRMAPTP

SEQ ID NO: 72598 - DNA, 759 bp, Escherichia coli CFT073
  CDS (1)..(759): transl_table=11
atgactttgcttgccgtccgtcatgcgtctctgggttactcccgccatccggtgctacgcgacgtgtccttcaccctgtcgcaaggaacaatttgttgtctgttaggagccaatggttgcggcaaaaccacactcatgcgctccattcttggcgttataccgttattaaaaggcgagatcttactggatagcctccctgtgcagacactcagccatcgccagcgcgcgcaggctattgcctgggtgccgcaggcgcacgacggcatttttgcttttagtgtgctggatatggtgttgatgggcctggcccccaccataggcgctttttccgttcccggtaagcaagaacgcctgaaagcaacggagcaactggaaaagctgggcattttgcatctggcgacacgacgctggaatacgcttagcggcggtgaacgtcagctggctttaatcgcccgtgcactcgtccagcaaccgcgcttgttattactggatgagcctgcctccagcctcgatttcggtcatcagatccaacttctggacacgctggcgcagctcaaaaataacggcatgacaatgttaatgtcgactcatcatccgctccatgcaaacgccattgccgacagcattatccaggtagagccagatggacgagtaacacaaggcttaccgaccgaacagttaacaacgaaaaaactggctgccctgtaccgggtttctgccgaccagattcaccatcacctctctgcaattaagcactaa

SEQ ID NO: 72599 - protein, 252 aa, Escherichia coli CFT073
MTLLAVRHASLGYSRHPVLRDVSFTLSQGTICCLLGANGCGKTTLMRSILGVIPLLKGEILLDSLPVQTLSHRQRAQAIAWVPQAHDGIFAFSVLDMVLMGLAPTIGAFSVPGKQERLKATEQLEKLGILHLATRRWNTLSGGERQLALIARALVQQPRLLLLDEPASSLDFGHQIQLLDTLAQLKNNGMTMLMSTHHPLHANAIADSIIQVEPDGRVTQGLPTEQLTTKKLAALYRVSADQIHHHLSAIKH

SEQ ID NO: 72600 - DNA, 792 bp, Staphylococcus epidermidis ATCC 12228
  CDS (1)..(792): transl_table=11
atgaaaaccatgacaacaccagtttttgaattacgaaatttagattattatttcgataataagcatgtattagagaacataaatatcaaaattaatcagggagaatttttagcaattgttggtccgaacggggcaggcaaatctactttactaaaagttatactagggctattgcctatacaaaagggcgagataattgttgatggaaaaccatttaaaggtaataaatcttcattgaaaattagctatgtttctcaaaaagcttctgccttcaatgcaggtttcccagctagtgtaaaggaagttgttttaagtggtctgactaaaacaaaaaaattatttcaaagatttaataaaaatgactatcaaaaagtcacaaaggtattagagagattaaatatatctcatttaataaataaaaatatagctgaactatctggtggtcaacaacaacgtgtacttattgctagagcacttatttcagacccaagtgtgctagtgttagatgaacctacaaacggaattgatgcaaaacatgtaagcaaattttacgatacacttgataaattaaaaaaacaggggattacaataattttagtcactcacgatattggcgttgtagcagataccgctactgaagtagcatgtttaaataaacatcttcatttccacggttccacagaagcatttaagtctttagatgaagttgaaatttcaaaaatttatggtcatcctattcaatttgttgatcatcaacacaaccgaacatgttgtaatgagggaaatgaataa

SEQ ID NO: 72601 - protein, 263 aa, Staphylococcus epidermidis ATCC 12228
MKTMTTPVFELRNLDYYFDNKHVLENINIKINQGEFLAIVGPNGAGKSTLLKVILGLLPIQKGEIIVDGKPFKGNKSSLKISYVSQKASAFNAGFPASVKEVVLSGLTKTKKLFQRFNKNDYQKVTKVLERLNISHLINKNIAELSGGQQQRVLIARALISDPSVLVLDEPTNGIDAKHVSKFYDTLDKLKKQGITIILVTHDIGVVADTATEVACLNKHLHFHGSTEAFKSLDEVEISKIYGHPIQFVDHQHNRTCCNEGNE

SEQ ID NO: 72602 - DNA, 858 bp, Clostridium tetani E88
  CDS (1)..(858): transl_table=11
atgccttataaaaatcatgatcctattattttaaataatgtaagttttagatataatgaaaaacatatactagacgatataaatatatcttttgaaagaaataaatttcatagtattttaggaccaaatggttctggaaaaacaacacttttaaaaaatatattaaagacattgcctgcaaaggataaaactatttatatagataattttgatataaatacctataaaaataaagacttagctaaaaaaatgtcctctgttcctcaaaacactaatttagaatttgattttacttcattcgatgtggttttaatgggccgttcacctcatttgaaaagatttgaaagggaaagtaaaaaagattatgaaatagtgaaagaggctatgaatattacaaatacgtggtatctaaaggataaatacataaatcagttaagtggtggagagcgtcaaaaggtaattgtagctagagcattagctcaaaaaagtgcaattatattattggatgaaccaatttcaaatttagatatacaaaatcagatagatataatggatactttaaaatttctaaatagagaagtaactataatttctgtattacatgatttaaatttagcttctcaatatagcgattctatacttttattaaaaaatgggaaaatttattctaaaggaagtccagaaaatgttttaacaaaagataatttaaaatatgtatacgatattaatacttatataataaaaaatcctattacaggaaaacctcatataattcctataagtaaaagttttcttgataataatggtttgaatactgacaattttaatgatgataattttttttataaaaaaccttaa

SEQ ID NO: 72603 - protein, 285 aa, Clostridium tetani E88
MPYKNHDPIILNNVSFRYNEKHILDDINISFERNKFHSILGPNGSGKTTLLKNILKTLPAKDKTIYIDNFDINTYKNKDLAKKMSSVPQNTNLEFDFTSFDVVLMGRSPHLKRFERESKKDYEIVKEAMNITNTWYLKDKYINQLSGGERQKVIVARALAQKSAIILLDEPISNLDIQNQIDIMDTLKFLNREVTIISVLHDLNLASQYSDSILLLKNGKIYSKGSPENVLTKDNLKYVYDINTYIIKNPITGKPHIIPISKSFLDNNGLNTDNFNDDNFFYKKP

SEQ ID NO: 72604 - DNA, 771 bp, Lactobacillus plantarum WCFS1
  CDS (1)..(771): transl_table=11
atgaccgcacttttatcagctgaacatttggcttttcactatccaaaacagaccgacctctttaccgatttacagttacagttgcaccacggcgaaatattgactttgcttggccccaacggtatcggcaaatcgacactgttaaagtgtctgttaggattactcacaccgacagccgggacactcactttgaacggccaaccattagctacactaacgcccaaacaacgggcgcggatcatcgcttacgtgccccagacgattccaacaacgactagtttgagcgtccgtgactacttattgaccggacgcaccccctacttaaactttgctcagtccccgggtgcgaccgatgttgccctggcagaccgcatcctgaaaacgttgcagctcagtgaattaacggcgcgcaccatcaacacgttaagtggcggccaagcccaactggtcacaattgcgcgtgccttgatgcaagaacccgaattgattattttagatgagccaactgcggcccttgattttggccgtcaacagcaacttttaagcctcgtccaacaactcgcaggccagaatattgcggtcattttaaccacgcataacccaaaccacgcactaattttaaaacagcgagtcgggttattcggtgccagcggacacttcgattacggtggcatcgagctgctgaccgaaccacgcttacgagccacttaccaaacaaaactccgactactatacgtcccagaactgggccgcacgatttgcgagttttag

SEQ ID NO: 72605 - protein, 256 aa, Lactobacillus plantarum WCFS1
MTALLSAEHLAFHYPKQTDLFTDLQLQLHHGEILTLLGPNGIGKSTLLKCLLGLLTPTAGTLTLNGQPLATLTPKQRARIIAYVPQTIPTTTSLSVRDYLLTGRTPYLNFAQSPGATDVALADRILKTLQLSELTARTINTLSGGQAQLVTIARALMQEPELIILDEPTAALDFGRQQQLLSLVQQLAGQNIAVILTTHNPNHALILKQRVGLFGASGHFDYGGIELLTEPRLRATYQTKLRLLYVPELGRTICEF

SEQ ID NO: 72606 - DNA, 864 bp, Ruegeria sp. PR1b
  CDS (1)..(864): transl_table=11
atgacgttgaaggccgaaaacgtgaagctttgctatgggtccaggacggttatcgaagacctgaacctgaccctgaacgaaggtgaaatcaccgctctcattggcccgaacggatgcggcaaaagcacactcctgcatgcgctggccgggataaacgccgttgatgggggccgtgtgctgctggatgacgccccaatttcaaggatccctcgtcgccagattgcgcagcgcctgtccttcctgccccagaacccggacacgccaagcgatatcaccgtccggcaattgatacgtcagggccggtttgttcatcacgggttatggaagggttttaatcaatccgattatgacgccgttgatgccgcgattgaggccaccaacctgggccggaaggctgaagaagagctaacgaccgtctccgggggggaaaagcaacgcgcgtggattgccacggcattggcgcaacaatccgacatcttgatcctcgatgaacccaccagctttctcgacattggacaccaagtcgaagtgttggaattgctcttcgagctggtaaaaaaacgcggcaagacagcggtcctcgccattcatgacatcggccaagccctcgcattggcggaccgtatcatcgtcatgcaacgaggtgaggtaaagtttgatgggaacccatcgaccttggcgcagcgagatatcatcaacaaagtatttgagattaaagggacattcctcaatgacaacgcatcacaattaccgctgttctttgcacagatgaacttgcagcagcgcgaaaaacttaaggtagccaacgcagaaggacgtatagggccccggcgcagcgaaagctatgccgcaactgcaaattga

SEQ ID NO: 72607 - protein, 287 aa, Ruegeria sp. PR1b
MTLKAENVKLCYGSRTVIEDLNLTLNEGEITALIGPNGCGKSTLLHALAGINAVDGGRVLLDDAPISRIPRRQIAQRLSFLPQNPDTPSDITVRQLIRQGRFVHHGLWKGFNQSDYDAVDAAIEATNLGRKAEEELTTVSGGEKQRAWIATALAQQSDILILDEPTSFLDIGHQVEVLELLFELVKKRGKTAVLAIHDIGQALALADRIIVMQRGEVKFDGNPSTLAQRDIINKVFEIKGTFLNDNASQLPLFFAQMNLQQREKLKVANAEGRIGPRRSESYAATAN

SEQ ID NO: 72608 - DNA, 747 bp, Vibrio parahaemolyticus RIMD 2210633
  CDS (1)..(747): transl_table=11
atgaaatacggccatcgactagtactagatgacatcagcatcgatattcgtgccggcgaagtgacggcgttattggggccaaacggcgcggggaaaagtacactacttaaacttctgtgtggtgaggttccatcacacaacgagattgactattttggcgagcctaaagaagcctggaaacctgaagagatagcaaagcacctcgccatgctgccacagcacagcacgctcacttttccatttttggcacgagaggtggtcgaactcggagcgatccctttgtcactttcaaacaaagaaacgactgagcttgccctacactacatgcaaaaaaccgatgttctgcacttagcggaaagcttgtaccctgccctctcaggcggagagaaacaacgtttgcacttggctcgagtgctaacgcaactgcatcaatctggtgacaaaaagattctgatgttggacgagcctacgtcggcactggatctcgcccaccagcacaacacgcttaaaattgctcgtgaggcggcaaaagcgcagaacgctgcggtggtggtcgtattgcatgacttgaacttagcctcacaatacgcagaccggctggtgttgctccataacggcaaactcgtatgcgatgacaatccttggcaggccctaacgcccgaacgtattgaacaagtttatgggtatcgctctatcgtgacaaaacaccctactctggactttcctcaagtccacgctgcggcatag

SEQ ID NO: 72609 - protein, 248 aa, Vibrio parahaemolyticus RIMD 2210633
MKYGHRLVLDDISIDIRAGEVTALLGPNGAGKSTLLKLLCGEVPSHNEIDYFGEPKEAWKPEEIAKHLAMLPQHSTLTFPFLAREVVELGAIPLSLSNKETTELALHYMQKTDVLHLAESLYPALSGGEKQRLHLARVLTQLHQSGDKKILMLDEPTSALDLAHQHNTLKIAREAAKAQNAAVVVVLHDLNLASQYADRLVLLHNGKLVCDDNPWQALTPERIEQVYGYRSIVTKHPTLDFPQVHAAA

SEQ ID NO: 72610 - DNA, 822 bp, Bacillus cereus ATCC 14579
  CDS (1)..(822): transl_table=11
atgcaaaaagcattggagacgaaacgcttgacgttgtcttatggtgaaacaattattattgatgagttgaatttagaaattccaaaaggtgaaattacaatctttatcggttccaacggttgcgggaaatcaactttattacgttcactagctagattattaaagccaacaactggtgacattttgttagataatcaagctattcaaagtatgcaaacgaagcaaattgctcgtcaaatggcaattttaccgcaaggaccgcaagcaccagaagggcttacagtattgcaacttgtaaaacaaggacgctatccatatcaaacatggctgaaacagtggtcagaaaaagatgaggaaatggtacagaaggcacttgcagcaacaggtatgacagaatttgctgagcgtgatgtgcatgctctttcaggtgggcagcgtcaacgtgcttggatcgcaatgacacttgcacaagatacagatatcattttactggatgagccaactacatacttagatatgactcaccaaattgaagtgctagatttattattcgaattaaatgaaacagaacaaagaacaattgttatggtattacatgatctgaatttagcatgccgctatgcagataacattgtagcaattcaagataaacaaatatatgcacaaggtaaacctgaagaagtggtagatgagaaactagtacgtgatgtattccgaatggagtgtcaaattagtacggatccgttgtttggaacaccgctttgtatccctcacggaagaggaagacgtgtagttaaagaagttgctcaggcaatgagataa

SEQ ID NO: 72611 - protein, 273 aa, Bacillus cereus ATCC 14579
MQKALETKRLTLSYGETIIIDELNLEIPKGEITIFIGSNGCGKSTLLRSLARLLKPTTGDILLDNQAIQSMQTKQIARQMAILPQGPQAPEGLTVLQLVKQGRYPYQTWLKQWSEKDEEMVQKALAATGMTEFAERDVHALSGGQRQRAWIAMTLAQDTDIILLDEPTTYLDMTHQIEVLDLLFELNETEQRTIVMVLHDLNLACRYADNIVAIQDKQIYAQGKPEEVVDEKLVRDVFRMECQISTDPLFGTPLCIPHGRGRRVVKEVAQAMR

SEQ ID NO: 72612 - DNA, 795 bp, Bordetella parapertussis 12822
  CDS (1)..(795): transl_table=11
atgaacgcgccaggactggccatcgaaggcctgggcgtggcctatggcgcgcgcacggtcatcgccgggctgagcctggggcccttgccgcatggcacgctcaccgcgctgctgggccccaacggcagcggcaaatccaccctgctcaaggcggtggcgggactgctgcccgcgcgcggcggcgcgatcgccctggacgggcagaggctggaccaggccgacctggcgcagcgggcgcagcaggtcgcctatctgccgcaaggcctgccggccgatgtccacttgcgcgtgttcgaatcggtgctggtcgcggcgcgcgcgcatggtggcgaggcggccggacaaatcgggccgccggccatcgccgccctgctcgaacggctgggcatcggccatctggcgctgcaattcctcgacgaactgtccggcggacagaagcagctggtgggcctggcgcaggcgctgatccggcgcccgcgcgtgctgctgctcgacgagccgctatcggcgctggacccgaactaccagttccatgtgatggacctgctgtgccaggaaacccgcgaccatggcttgatcaccatcgcggcgctgcacgatatcaatatcgccctgcgccatgccgaccaggcgctgctgatccgcgccggagagctggcggcggccggcgagccggccgccgtgatcgacgcgccgatgctggcgcgtgtctacggcatccaggcgcgcgtggaacgctgctcgcgcggccacccccatgtgctggtggacggcgtggccggccccgtcaggtag

SEQ ID NO: 72613 - protein, 264 aa, Bordetella parapertussis 12822
MNAPGLAIEGLGVAYGARTVIAGLSLGPLPHGTLTALLGPNGSGKSTLLKAVAGLLPARGGAIALDGQRLDQADLAQRAQQVAYLPQGLPADVHLRVFESVLVAARAHGGEAAGQIGPPAIAALLERLGIGHLALQFLDELSGGQKQLVGLAQALIRRPRVLLLDEPLSALDPNYQFHVMDLLCQETRDHGLITIAALHDINIALRHADQALLIRAGELAAAGEPAAVIDAPMLARVYGIQARVERCSRGHPHVLVDGVAGPVR

SEQ ID NO: 72614 - DNA, 795 bp, Bordetella bronchiseptica RB50
  CDS (1)..(795): transl_table=11
atgaacgcgccaggactggccatcgaaggcctgggcgtggcctatggcgcgcgcacggtcatcgccgggctgagcctggggcccttgccgcatggcacgctcaccgcgctgctgggccccaacggcagcggcaaatccaccctgctcaaggcggtggcgggactgctgcccgcgcgcggcggcgcgatcgccctggacgggcagaggctggaccaggccgacctggcgcagcgggcgcagcaggtcgcctatctgccgcaaggcctgccggccgatgtccacttgcgcgtgttcgagtcggtgctggtcgcggcgcgcgcgcatggtggcgaggcggccggacaaatcgggccgccggccatcgccgccctgctcgaacggctgggcatcggccatctggcgctgcaattcctcgacgaactgtccggcggacagaagcagctggtgggcctggcgcaggcgctgatccggcgcccgcgcgtgctgctgctcgacgagccgctatcggcgctggacccgaactaccagttccatgtgatggacctgctgcgccaggaaacccgcgaccatggcttgatcaccatcgcggcgctgcacgatatcaatatcgccctgcgccatgccgaccaggcgctgctgatccgcgccggagagctggcggcggccggcgagccggccgccgtgatcgacgcgccgatgctggcgcgtgtctacggcatccaggcgcgcgtggaacgctgctcgcgcggccacccccatgtgctggtggacggcgtggccggccccgtcaggtag

SEQ ID NO: 72615 - protein, 264 aa, Bordetella bronchiseptica RB50
MNAPGLAIEGLGVAYGARTVIAGLSLGPLPHGTLTALLGPNGSGKSTLLKAVAGLLPARGGAIALDGQRLDQADLAQRAQQVAYLPQGLPADVHLRVFESVLVAARAHGGEAAGQIGPPAIAALLERLGIGHLALQFLDELSGGQKQLVGLAQALIRRPRVLLLDEPLSALDPNYQFHVMDLLRQETRDHGLITIAALHDINIALRHADQALLIRAGELAAAGEPAAVIDAPMLARVYGIQARVERCSRGHPHVLVDGVAGPVR

SEQ ID NO: 72616 - DNA, 801 bp, Chromobacterium violaceum ATCC 12472
  CDS (1)..(801): transl_table=11
atgcttgaagcccgcggcctgtcgctgcgcaaaggcggccgagccctgctgaccgatgccggcctgtccctgaagcccggcgaattgctgaccgtgctggggccgaacggcgcggggaaaagcaccctgctcaagctattgtcggggctgtggaagccggatgccggcgaaatcctgatcgccggcagccctacggcgcggatgcgcagcgccgaactcgccggctggcgggccgtggttgaacagcatccggtgacgccgtcgggctggcgcggcgcggaactggtcgccgcaggcagttacctgtatccatccgcagacaggccgcgcgtctgcgcggccgtgaacgaagccttgcgcctatgcgatgcggccggactcgccgaccggcacctggccgacctgtccggcggcgagcggcagcgcctgcaactggcgcgcgcgctgtgccagctgctgctgtcgccgcgccccgaacgttatctgctgctggacgagcccaccgcggcgcaggacttcgcgatggccgacgcgctgatgacccgggtccggacactggcccatgagttgggcatcggcgcgctggccgtggtgcacgacctcaacctggccctgcgccacgccgaccgggtgctgctgctgaacgacggccgcgtcgccggctgcggcgacaatgccgcgatgatggagcgcgagcggctggaggccatttacggcgtgcggctggcggagctgacgcaccccgaacaaccatggcgcgccttcattcccatgccaggccaagcgaccggcaagccctga

SEQ ID NO: 72617 - protein, 266 aa, Chromobacterium violaceum ATCC 12472
MLEARGLSLRKGGRALLTDAGLSLKPGELLTVLGPNGAGKSTLLKLLSGLWKPDAGEILIAGSPTARMRSAELAGWRAVVEQHPVTPSGWRGAELVAAGSYLYPSADRPRVCAAVNEALRLCDAAGLADRHLADLSGGERQRLQLARALCQLLLSPRPERYLLLDEPTAAQDFAMADALMTRVRTLAHELGIGALAVVHDLNLALRHADRVLLLNDGRVAGCGDNAAMMERERLEAIYGVRLAELTHPEQPWRAFIPMPGQATGKP

SEQ ID NO: 72618 - DNA, 768 bp, Chromobacterium violaceum ATCC 12472
  CDS (1)..(768): transl_table=11
atgcctgacacccatactctgaaagcgcgcgaactcggttacagcgtgaacggccgcgcgctgctgcgcgacatccgcctggacctgcctgccggccaggtcagcgcgctgctcggccccaacggcgccggcaagaccacgttgctgcggctgctggccggcctggccgttcccagccaaggcgcggtgcgcctggacggccagtgcgtctgccggatggacgcgctgcagcgcgcccggcgcatcgcctgggtgccgcaacacttgcccgccgacattccgctgacggtggcggagtttgtcgccctgggccgcatgccctatctgggcgccttcacccgcccgtcgccgtccgaccggaccgcggtggccgaagcgctggccaccgtggaaatggacggccacgcggccaagcggctggacgcgctgtcgggcggcgaacgccagcgggtcgccatcgcccgcgcgctggcgcagcaagcgccggtcatcctgctggacgagccgaccaaccacctggacctgcgccaccagcacaagctgcagctgctgctgcgcgaactcgccgcccagggcaagaccgtcgcccaggtgctgcatgatctgcagctggcggccgagtacgcggatcgggtggcgctgctgagcgacgggcggctgctggccgagggccagccgcgcgcggtgctgacgccggaacggctgctggcggtataccgctggccggtgcggctggaacaccgcgccacgcaccggcgggccgcctga

SEQ ID NO: 72619 - protein, 255 aa, Chromobacterium violaceum ATCC 12472
MPDTHTLKARELGYSVNGRALLRDIRLDLPAGQVSALLGPNGAGKTTLLRLLAGLAVPSQGAVRLDGQCVCRMDALQRARRIAWVPQHLPADIPLTVAEFVALGRMPYLGAFTRPSPSDRTAVAEALATVEMDGHAAKRLDALSGGERQRVAIARALAQQAPVILLDEPTNHLDLRHQHKLQLLLRELAAQGKTVAQVLHDLQLAAEYADRVALLSDGRLLAEGQPRAVLTPERLLAVYRWPVRLEHRATHRRAA

SEQ ID NO: 72620 - DNA, 759 bp, Porphyromonas gingivalis W83
  CDS (1)..(759): transl_table=11
atggagaagtcaatagagctgagccggcttgctatcggatatcgaaccaaatccggagaccgcatcgtggcctccggtctggaagctcatctccatgccggacaattaacggctctgctcggtgtgaatggtgccggcaagagtacgctcatgcgtacgatggcaggattcatgaagcccttatcgggacaaatacatctactggggcggtcattggacagctataaagagatagaaatagccaaacgtataggcgtagtgctgaccgataattgccggattgccgggatgacggcaggcgaactcgtcgcattgggacgtagcccttataccggattctggggcagattgcagaaaggagacagaaagctcgtggcagaagccgtagaacgtgtgggaatcgctccgctgatcaatcgcgaactaactacgctcagcgatggagagagacaaaaagtagtcatcgcaaaagccctggcacagcagacaccgatcatcttcctcgacgaaccgacggctttcctcgattatcccagcaagatggaactgttgcacctcttgcacagcctggcccatgataccggcaggactatcttcctctccactcatgatctggatgccattttacccatggccgatcgcgtttggctgctggacaaggagcgttctttccgtgagggctcgccggcatctttggcctctgcgcttgaagattatttcggctatatccatccttctcccacattagagccggtgtag

SEQ ID NO: 72621 - protein, 252 aa, Porphyromonas gingivalis W83
MEKSIELSRLAIGYRTKSGDRIVASGLEAHLHAGQLTALLGVNGAGKSTLMRTMAGFMKPLSGQIHLLGRSLDSYKEIEIAKRIGVVLTDNCRIAGMTAGELVALGRSPYTGFWGRLQKGDRKLVAEAVERVGIAPLINRELTTLSDGERQKVVIAKALAQQTPIIFLDEPTAFLDYPSKMELLHLLHSLAHDTGRTIFLSTHDLDAILPMADRVWLLDKERSFREGSPASLASALEDYFGYIHPSPTLEPV

SEQ ID NO: 72622 - DNA, 789 bp, Wolinella succinogenes DSM 1740
  CDS (1)..(789): transl_table=11
atgttgtgtgtcaaagaggtcgcggggggttatggggcgagagatatcctctctggcttgagttttacacttgaagcggggagggtcgtctctattttgggggctaatggcagcggaaagagcactcttttgaagatgatcattggagcgttgccctatcgcggagagatttttttagggggtagagaggccaagactctgagagcctctaaacgagcagaattagtcgcttacgtacctcaaagttacctgattccttttgagtttagcgttttggaagtggttctcatgggaagatttagagaatcgccctttggatttggctactccaaagaggataggcgaatcgccttggaggcgctagagagaattggtgcgcaaaccttaatccctcgcgtatatagagagttgagcggcggagagagacaattggtgcttttagcacaggccttggctcaaaatagctccatgatattgatggatgaacccgtcacaggtttagattttggaaatcagaggcggttgctttcgctcatgggggagctggctggagagggaaagagcatcattcagaccacgcactatcccgatcatgcgctcgaagtttcccatcaagtgatctggatagagaagggagaaattttggcacaaggatcccctagggagacgatcacgccccagcgaatttatcaagtttatggcgtggagacggagcttgtgaatcatcccaggggaggagatagattggtaaccccttcgattcgttttgagcgagagggtatagcatga

SEQ ID NO: 72623 - protein, 262 aa, Wolinella succinogenes DSM 1740
MLCVKEVAGGYGARDILSGLSFTLEAGRVVSILGANGSGKSTLLKMIIGALPYRGEIFLGGREAKTLRASKRAELVAYVPQSYLIPFEFSVLEVVLMGRFRESPFGFGYSKEDRRIALEALERIGAQTLIPRVYRELSGGERQLVLLAQALAQNSSMILMDEPVTGLDFGNQRRLLSLMGELAGEGKSIIQTTHYPDHALEVSHQVIWIEKGEILAQGSPRETITPQRIYQVYGVETELVNHPRGGDRLVTPSIRFEREGIA

SEQ ID NO: 72624 - DNA, 732 bp, Gloeobacter violaceus PCC 7421
  CDS (1)..(732): transl_table=11
atgctcaccatcgccaatctatccgtccgctaccgccgcaaccttgctctaagcgaggtgaaccttgccgtcgagccgcggcggatcgtggggatcatcgggccgaacggcgccggcaaatcgacgctcatcaaggccgtactggatctgatccccgccgggggtaaagtcaccctggacggccggccgctcaggcagcagctgcaccgcgtcgcctacgtgccccagcgcacggcggtcgattgggactacccggcgacggtcgcggacgtggtgatgatgggccgctgccgccacatcggctggctgcgccggcccggccggcccgaccgtgaagcggtgaaatcggccctcgaacgggtgggcatgaccgagtacgccaaccgccagataggcgaactctccggcggccagcagcagcgggtgtttctggcccgcgccctggctcaacaggcggactggttgtttctcgatgaaccgtttgtgggggtggatcagaccaccgaggcggtgctgtttgcgatttttaggcagctgcgcgacgagggtaagacgctgctagtggtcaaccacgacctgggcgaggcggtggatcactacgacgacattttgctgctacgcaaccgggtgatagccttcggtccccgcgaagacgtcttcaccgaggcgaacctggcggcagcctacggcggtctgccgggccgcttcgtctattcggggggcgggcgctag

SEQ ID NO: 72625 - protein, 243 aa, Gloeobacter violaceus PCC 7421
MLTIANLSVRYRRNLALSEVNLAVEPRRIVGIIGPNGAGKSTLIKAVLDLIPAGGKVTLDGRPLRQQLHRVAYVPQRTAVDWDYPATVADVVMMGRCRHIGWLRRPGRPDREAVKSALERVGMTEYANRQIGELSGGQQQRVFLARALAQQADWLFLDEPFVGVDQTTEAVLFAIFRQLRDEGKTLLVVNHDLGEAVDHYDDILLLRNRVIAFGPREDVFTEANLAAAYGGLPGRFVYSGGGR

SEQ ID NO: 72626 - DNA, 798 bp, Corynebacterium diphtheriae NCTC 13129
  CDS (1)..(798): transl_table=11
atgcattgccaagcacagggtattgcttgtggttttgataccaagacaacgattttgaaagacatttccttttctgttgatcagggcacgatgactgcgattgtgggggttaatggtgtcggaaaatctacgctgttgcgtgccctagccggtatcacgcaacctcatgctggcgttgtaacggtcaatggccatgatattcacaaaatccgtgccaaaaaacgtgccatgatgttgaccttcgtgggccaagaggaacaaccacctgcggatttatctgtggaagaagtagtggccctgggcagattgccgtatatcaagtcatggcagttgggttctaagaatgaacgcgacatcgtggaacattctctcgacttggtcggtttggcagggcgtcgtaaagcgttgtgttctgagctttctggcggacagcggcgtcgagtgctgttggcgcgtggttttgcacagcaaacggatctcgtttttctcgacgaaccgaccaaccatctcgacgttcagcaccaattgcacttgctccatgtgcttcgtgattccggacgcaccatcgttgccaccatccatgaccttgatctggcggtgtcgcattttgatcaggtcgtggtggtgggcaacggtggcgtcgtcgctgctggatctccgcaggaagttctcacccctgagattgtgtctcaagtatttggtgtggaatcactgcttgtccaactcgaacaagcccgtcgtgtgcatttgcttatcgacgccctgtctcatcaacctcatctatccccgaaggagtag

SEQ ID NO: 72627 - protein, 265 aa, Corynebacterium diphtheriae NCTC 13129
MHCQAQGIACGFDTKTTILKDISFSVDQGTMTAIVGVNGVGKSTLLRALAGITQPHAGVVTVNGHDIHKIRAKKRAMMLTFVGQEEQPPADLSVEEVVALGRLPYIKSWQLGSKNERDIVEHSLDLVGLAGRRKALCSELSGGQRRRVLLARGFAQQTDLVFLDEPTNHLDVQHQLHLLHVLRDSGRTIVATIHDLDLAVSHFDQVVVVGNGGVVAAGSPQEVLTPEIVSQVFGVESLLVQLEQARRVHLLIDALSHQPHLSPKE

SEQ ID NO: 72628 - DNA, 795 bp, Rhodopseudomonas palustris CGA009
  CDS (1)..(795): transl_table=11
atgaccgggcgcctcgtccttgacgacgttgcgatcggctatgacgggcagccgctcgccgaaggaatcgaccttgttctgtcgggcagcagcacgacttgcctgatggggccgaacggcgtcggcaagacgacgctattcaagacggtgctagggattgtcccacccctgcgcggccggatcatgatcggcggagacgatatcgcgacgctgcgcccggagcagatcgcacgccggatcgctcacgttccgcaagcctaccagggtgatccaagtcatagcgtgatcgatatcgtggtgatgggccgaaccgcgcggctcggcatattcgccgcgccaggccgcgacgactatgcggcggcctggcgcgcgctggagtcgctcggcattgccgatatcgccgaccgatccgccgaccgcatctcgggggggcagcgccaattgatgctgatcgcgcgcgccctgacgcaggacaccgagctgatcatcatggacgagccgaccgccagtctggacctaggcaaccgcttcggcctgctggatcagattcgggcgctgtcggcgcgcgggctgtcactgctggtgtcgacccacgaacccgagcatgcgtttgcgatcgccgatcacgtcgtgatcctgggccgcggccagccggtcgcggtcgggccggtcgacgggatcctcaccgccgaacggttgcgcgagctttacggcctcgacctcgcgatcgagaccaccccgatgggacggcgtgtcgtcacacgcagcgacctgtcggcgacgccggcccgctaa

SEQ ID NO: 72629 - protein, 264 aa, Rhodopseudomonas palustris CGA009
MTGRLVLDDVAIGYDGQPLAEGIDLVLSGSSTTCLMGPNGVGKTTLFKTVLGIVPPLRGRIMIGGDDIATLRPEQIARRIAHVPQAYQGDPSHSVIDIVVMGRTARLGIFAAPGRDDYAAAWRALESLGIADIADRSADRISGGQRQLMLIARALTQDTELIIMDEPTASLDLGNRFGLLDQIRALSARGLSLLVSTHEPEHAFAIADHVVILGRGQPVAVGPVDGILTAERLRELYGLDLAIETTPMGRRVVTRSDLSATPAR

SEQ ID NO: 72630 - DNA, 771 bp, Rhodopseudomonas palustris CGA009
  CDS (1)..(771): transl_table=11
atgatcagagtggagcaggcggggcattggtttcgcccggagcaatggctgtttcgtgatctgtcgttcgcggtcgccgaaggtgaagctaccgcgatcctcgggccgaacggctgcggcaagaccacgttgctgcgcgcgctcgcggatacgctggcgttgaagcagggacgtatcaacgtcgacggcatcgtcggcgtggtgccgcaggcgctgcgcggtgatgtcggctaccgggtgatcgacatggtgctgctcgggcgcagccgctatctcggccgcttcggcgcgcccggccggcgcgatctgtctcgcgccgaggcctgtctcgatgccgtgggcatcgccgatctcgccgaacgccgctacgaccgcctcagcggcggccagcgccagctcgtgctgttcgcccgcgcgctcgccggcgattgccgggtgctgctgctcgacgagccggcatcggcgctcgatctcgccaatcagggcgtggtgctgcggctgatccgccgcctcgtgcgcgacgacggcatgaccgtggtgttcaccacgcatcatcctgatcatgcgctcgcggttgccgacaaggtgctgatgatggcgggcgagccggtgttcggccccgccgaccgtgtgctcgacgaggccaatctggcgcggctttatggcgtgccggtgcggcgtgtcaccatcgaggcggatggcgaacgcatcgaagcgaccgtgccggtgcaccggctgacgggcttcgatgcgccgccaccccgcttatga

SEQ ID NO: 72631 - protein, 256 aa, Rhodopseudomonas palustris CGA009
MIRVEQAGHWFRPEQWLFRDLSFAVAEGEATAILGPNGCGKTTLLRALADTLALKQGRINVDGIVGVVPQALRGDVGYRVIDMVLLGRSRYLGRFGAPGRRDLSRAEACLDAVGIADLAERRYDRLSGGQRQLVLFARALAGDCRVLLLDEPASALDLANQGVVLRLIRRLVRDDGMTVVFTTHHPDHALAVADKVLMMAGEPVFGPADRVLDEANLARLYGVPVRRVTIEADGERIEATVPVHRLTGFDAPPPRL

SEQ ID NO: 72632 - DNA, 753 bp, Geobacter sulfurreducens PCA
  CDS (1)..(753): transl_table=11
atgccggtagatgcggtagcggtcacgggggtgacgctgggataccaggggaccgaggcgttgaccgacgtctcctttgccgtggcggcgggggactacgtcggcatcgtggggcccaacgggtcggggaaaagcactctcatccgctgcatcctggggctcgcccgccccgaccggggtgaaattcgtctcttcggcacccctctggccggtttcgaccagtggcagcgggtcggctatcttccccagggcctccagtatttcaatccccacttcccggccaccgtggccgaggtggtggggctcggcctgctggcgggacgccgctttccccgccgtccccgttccggtgacggtgctgcggtgacccatgccctggaactcatggggattgaatccataagggaccggctggtgggagaactgtccggcgggctgcggcagcgggcgctcctggcccgggcgctggtcagcggacccgagctgctggtgctggacgagccgaccacggccctggacccggagacgcgggagagcttctaccagaccatccgcgacctgaaccgttcccggggtaccaccgtcatcctggtaacccacgacagcggcaccatcggcagtcatgcctcccgtttcctctacctggacaagcgggtggttttctacggcgggttcgacgaattctgcggctcccaggccatgtccgactttttcggcattcattcccagcacctcatctgccaccggcactga

SEQ ID NO: 72633 - protein, 250 aa, Geobacter sulfurreducens PCA
MPVDAVAVTGVTLGYQGTEALTDVSFAVAAGDYVGIVGPNGSGKSTLIRCILGLARPDRGEIRLFGTPLAGFDQWQRVGYLPQGLQYFNPHFPATVAEVVGLGLLAGRRFPRRPRSGDGAAVTHALELMGIESIRDRLVGELSGGLRQRALLARALVSGPELLVLDEPTTALDPETRESFYQTIRDLNRSRGTTVILVTHDSGTIGSHASRFLYLDKRVVFYGGFDEFCGSQAMSDFFGIHSQHLICHRH

SEQ ID NO: 72634 - DNA, 816 bp, Mycobacterium avium subsp. paratuberculosis K-10
  CDS (1)..(816): transl_table=11
atggacgtgagcagcgcggcgatcgccgccgaacagctgtcattcggctaccccggcgacggacagcggctgatcgcggtgtcgctggcggtgcagccgggccaggtgtgctgtctactcgggcccaacggtgcgggcaaaaccacactgctgcgctgcctgctggggctgctgacgccgcagtccggcacggtccgggtggccggcgacccgatcgaccgtctgtcacggcggcagctggcccggcgggtcgcctacgtcccgcaacgcagcaacaccccgttcccgttttccaccctggacatcgcggtcaccggccgcaccccgtatctgcgcgcgatgacgtccccgtcggcgacggaccgccgggcggccgccgcggtgctcgaccggctggggatcggcgcgctggccgatcgaccgtatgcggtgctttccggcggggaacggcggctggcgttgctctcgcgcgcgatggtgcaggacgcgccggtgctgatcctcgacgaacccatggcagcactggatttcggcaacgagagccgcatcctgcaggtggtggccgagctggccgccgccggccgcgccgtgctgatgaccactcatcagccctggcatgcgctacacagcggcgatcaggcagtgctgatcgccgacggccgcctcatcgccgacggccccgtcgagcaagtcgtcaccgcggccgccctcagcgagctgtatggggtgccggtgcgggtgctgaccgctaccgacgacgccaccgggcgcccggtctacgcctgcgcgccggtggccgcgggggatgaccgatga

SEQ ID NO: 72635 - protein, 271 aa, Mycobacterium avium subsp. paratuberculosis K-10
MDVSSAAIAAEQLSFGYPGDGQRLIAVSLAVQPGQVCCLLGPNGAGKTTLLRCLLGLLTPQSGTVRVAGDPIDRLSRRQLARRVAYVPQRSNTPFPFSTLDIAVTGRTPYLRAMTSPSATDRRAAAAVLDRLGIGALADRPYAVLSGGERRLALLSRAMVQDAPVLILDEPMAALDFGNESRILQVVAELAAAGRAVLMTTHQPWHALHSGDQAVLIADGRLIADGPVEQVVTAAALSELYGVPVRVLTATDDATGRPVYACAPVAAGDDR

SEQ ID NO: 72636 - DNA, 780 bp, Treponema denticola ATCC 35405
  CDS (1)..(780): transl_table=11
atggactatcctttaataaatgtaaaatcggtttacgcgggatattcaaagactcccgttttaaaagatatttccttttcggttttaaaaggagacagcctttgtgttttgggtcctaacggctgcggaaaaacgaccctcttaaaaactcttgccggtcttatcggctattcgggtgaaattcttttaaacggtcaaaacttaaaaaatatcaaacgcaaggatatagcaaaaaaaatcgccgttttaagtcaagtttcttccatatatttttcatattccgtctatgataccgttatgatgggaagatatgcacacagagagggcagctcttttctttccgtctcaaaaaaagacagggcctatgtagaaaaatgtttaagggcggtagacatttggaatttgcgtgaaaagaaaatagatgaactttcaggcggtcagcttcagcgtgtttatctggcccgcactcttgcccaagaacccgaacttatcttactggatgaacccacaaatcatctggacttaaaggctcaaaccgagcttattctttttttaaaagagatttgcaaaaaagaagctaaagccgtcatcggtgtcttccacgatataaacctggccctgcaatttgcagataaacttatttttttaaaagacgggataatacaagcctcaggaaaaaaagatgaggttttaaatagagaaattttacaatccgtttacgggatggatgtagccgaatggatgaaagattcttttaatttatggcttagagctttttag

SEQ ID NO: 72637 - protein, 259 aa, Treponema denticola ATCC 35405
MDYPLINVKSVYAGYSKTPVLKDISFSVLKGDSLCVLGPNGCGKTTLLKTLAGLIGYSGEILLNGQNLKNIKRKDIAKKIAVLSQVSSIYFSYSVYDTVMMGRYAHREGSSFLSVSKKDRAYVEKCLRAVDIWNLREKKIDELSGGQLQRVYLARTLAQEPELILLDEPTNHLDLKAQTELILFLKEICKKEAKAVIGVFHDINLALQFADKLIFLKDGIIQASGKKDEVLNREILQSVYGMDVAEWMKDSFNLWLRAF

SEQ ID NO: 72638 - DNA, 822 bp, Bacillus cereus ATCC 10987
  CDS (1)..(822): transl_table=11
atgcaaaaagcattggagacgaaacgtttgacgttgtcttatggtgaaacaattattattgatgagttgaatttagaaattccaaaaggcgaaattacaatcttcattggttctaacggttgcgggaaatcaactttattacgttcactagctagattgttaaaaccaacaactggtgacattttgttagataatcaagcgattcaaagtatgcaaacgaagcaaattgcccgtcaaatggcaattttaccgcaaggaccgcaagcgccagaaggtcttacagtattgcaacttgtaaaacaagggcgttatccatatcaaacatggctgaaacagtggtcagaaaaagacgaagaaatggtacagaaggcacttgcagcaacagggatgacagaatttgctgagcgtgatgtgcatgctctttcaggtggacaacgacaacgcgcttggattgcaatgacgcttgcacaagatacagatattattttattggatgagcctactacctatttagatatgactcaccaaattgaagtgctagatttattattcgaattaaatgaaaaagaacaaagaacaattgttatggtactacacgatttaaatttagcctgccgttatgcagacaatattgtagccattcaagataaacaaatatatgcacaaggtaagccagaagaagtagtagatgagaagctagtacgtgatgtattccgaatggaatgtcaaatcagtacagatccattatttgggacgccactttgtatcccacatggaaaaggaagacgtgtacgtaaagaggttgctcaggcaatgagataa

SEQ ID NO: 72639 - protein, 273 aa, Bacillus cereus ATCC 10987
MQKALETKRLTLSYGETIIIDELNLEIPKGEITIFIGSNGCGKSTLLRSLARLLKPTTGDILLDNQAIQSMQTKQIARQMAILPQGPQAPEGLTVLQLVKQGRYPYQTWLKQWSEKDEEMVQKALAATGMTEFAERDVHALSGGQRQRAWIAMTLAQDTDIILLDEPTTYLDMTHQIEVLDLLFELNEKEQRTIVMVLHDLNLACRYADNIVAIQDKQIYAQGKPEEVVDEKLVRDVFRMECQISTDPLFGTPLCIPHGKGRRVRKEVAQAMR

SEQ ID NO: 72640 - DNA, 1815 bp, Nasonia vitripennis
  CDS (1)..(1815)
atgcagcatcgcgcggtgctggtgaacctgcccaagtccgagtcgctggacatcgagttcagcaacatcggctactcggtctccacgggcttccgcaagccccgcaagcagatcctgcgcggcgtcgacggctgcttcaagagcggcgagctgacggccatcatgggcccctccggggcgggcaagtcctcgctgctgaacatcctgacgggcttccagaagagcggcgtcagcggcagcatgaacttccgctcgaagcagggctgccgcggctggagcgagtacaagaaggagtcctgctacatcctgcaggacgacgtgctgcacccgctgttcagcgtgcaggaggtcatggcgatggcggccgacctgaagctcggcaacaacctgagccgcaaggccaagcagatggtgatcgacgacgtgctcgagatcctcgacctgggcaaggccaaggagacgcgctgcgaccggctgagcggcgggcagcgcaagcggctctcgatcgcactcgagctggtggacaacccgccggtgatgttcctcgacgagccgacgaccggcctcgactactcggcctcgctccagtgcatggccatgctgcagggcctggcgcgcggcgggcgcaccatcatctgcacgatccaccagccgagcgccacgatctacgagatgttcgaccacgtctacatgctggccgagggccgctgcgtctaccagggcgacgcgaagaacacggtcgagtacctgcgccggctcgggctgagctgccccaaataccacaacccggcggactacgcgatcgaggtggcctccaaggagtacggggactttggcgagcggctggccgcggcggcgcgcgaccgctcctggcgggccgccgcgcccctcaagagcatcctctaccactcggacagcgtgctcaagtacagcgaggagggcaagacgaccgtgctgatccggccgccctcggagctctccaagttcttcgtgctcgtgcaccgcagcggcatccagctcttccgcgactggacggtcacgcacctcaagctcgcgctgcacatcctcgtgggcgtgctgctgggcctgctctacgtcgacgccggggccaacggccacaagaccatcagcaacgtctgcttcatgctcgtcaactcggtctacatctgctacacgagcctcatgccggccgtgctcaagttcccctccgagctgcccgtcatccgcaaggagtccttcaacaactggtacaagctacgcacctactacgcggccttcctcttcaccaacgtgcccgtccagctcttcttcacggccgtctactcggccacggcctacttcatgagcagccagccgagcgagctcgaccgcttcctcatgttcctcgtcgtcgccatgctcgtcggcctcatcgccgagagcttcggcctgaccctcggcacgctctgcaacccggtgaacggcaccttcttcggcgccatcaccacctgcgccttcctcgtcttcgccggcttcctcgtcctcttcaaccacatgccgcgctacatgtactacatcacctacacgagctacctgcgctacgccttcgaggccatggtgcactcggtctacggcttcggccgggccaacctgccctgccccaccgagggcgacgagatctcctactgcccgtaccgcatccccggggtcgtgctccaggagctcgccatggccgacaccaactactggctcaacgtcggcctgctcttcggccagctggtgctactccggttcctcgcctacgccacgctcaagcgcaaggtctcgcgcatctga

SEQ ID NO: 72641 - protein, 604 aa, Nasonia vitripennis
MQHRAVLVNLPKSESLDIEFSNIGYSVSTGFRKPRKQILRGVDGCFKSGELTAIMGPSGAGKSSLLNILTGFQKSGVSGSMNFRSKQGCRGWSEYKKESCYILQDDVLHPLFSVQEVMAMAADLKLGNNLSRKAKQMVIDDVLEILDLGKAKETRCDRLSGGQRKRLSIALELVDNPPVMFLDEPTTGLDYSASLQCMAMLQGLARGGRTIICTIHQPSATIYEMFDHVYMLAEGRCVYQGDAKNTVEYLRRLGLSCPKYHNPADYAIEVASKEYGDFGERLAAAARDRSWRAAAPLKSILYHSDSVLKYSEEGKTTVLIRPPSELSKFFVLVHRSGIQLFRDWTVTHLKLALHILVGVLLGLLYVDAGANGHKTISNVCFMLVNSVYICYTSLMPAVLKFPSELPVIRKESFNNWYKLRTYYAAFLFTNVPVQLFFTAVYSATAYFMSSQPSELDRFLMFLVVAMLVGLIAESFGLTLGTLCNPVNGTFFGAITTCAFLVFAGFLVLFNHMPRYMYYITYTSYLRYAFEAMVHSVYGFGRANLPCPTEGDEISYCPYRIPGVVLQELAMADTNYWLNVGLLFGQLVLLRFLAYATLKRKVSRI

SEQ ID NO: 72642 - DNA, 4056 bp, Aedes aegypti
  CDS (1)..(4056)
atgcatcgagacaaggacttcagcaaatacaaaaccgaaaacccgctccgaagcgcgtccttcatctcgcagcgaaccttttggtggctgaaggacatctttcgggccggtcatcgcaaggagatcaccgagaatagcctttatgcggcgcttcccgagcatcgcagtcaacggttggccgatcagttcgatcagttatgggccgaagaactgcaaaggccacagcccaagttgctacgtgcattatggcgaggctatggcaaagccacactgctctgggcaattctgtactcattgctggaaacggcgaatcttgtttcgcgtccgctctttctcggcggactgatttcgtacttctcgccgaaccagactgatacgagtgaacgggaagcgtacggttatgcggccggcgttatcatctgtgcgctgataccggttatcaccttccatccatacatcttattcatcttccaaattggtttgaaactacgcgtcgggtgctcttgccttatctacgacaagagtctaaagctcaccaggtcgacaaccgccggcgaggggttgaacggcatgatcttgaacttgctcaccaatgacgtcagcaagttcgaacccgccctcgccttcatctataacctgtggaagggtcccatggagtctctgctgatcgggtacctcatctacacggaacttggctttgcggggttattgggaatggccttcctgctcagtttccttccattgcaggcctggatcgggaaaatggctgcaaccttccgaatgcgggccgctaagcggacggatgttcgagttcgcttcatgaacgaaatcattcgggggattcagatcatcaagatgtacacctgggaggactccttcgccaaaatggttggacaagttcgccggaaagaagtcaatgcgctacgtggaagtgccttcgtgagagctacgcttatttcattctttgtagtgtcacgaatctccgtgttccttagcttgctttcgttcatccacacgggaaacgtgatcacggctcgtaaagtgtttcttgtgtccagttattacagcatgctgcacgattcgatggttcattactattcgctggccataacgttctgctcggaggcgttgatttccgtgaagcgtattcaggagttcctgttgacgccagaggagaaggccaagactgcgcatggagcagatgaggagaaacatcaggaaggtaaaggaagtgtgctgatcgaagatgaagagaagaaggcaaagaacaatggattggtgccgaatggagtgatgagcgaggaagaagtggagaagctgttaccgacaaagcgagtagtgagtttgaacagtgataagaagggtatagtgatggtagatgtgaaggcacgatgggttgtcagtgagaacgaatcaaacgtgggagtgacgtcaattagcacaacagtagaaagtgggcgattatgtgtggtgatagggtcggtaggtgcgggaaagacctcgctattgcaagtgatcttaggggagcttgaggaggatcaagggatgctgcagatcaatgggacgattagttatgcagcgcaagaaccgtggctgttcgagagtagtgttcgaaacaatattctattcgtcgaggagtacgacgagcagcgatacttagaagtagttcgcatatgtgccttggagcgagacttacagtcgttcccgcacggtgatcagacaatagtcggcgagcgaggcatcagcctgagtggaggacagaaagccagagtgaatctggctcgagcgatctacaagaagagtgatatttaccttctagacgatccgctatcagcggttgacactcacgtagggaaacacatctatgaaatgtgcataaggaagttcctggcggataaggtgtgcgtcttggtgacgcaccagttgcagtatctgaatgacgttcagcacataatattgatgagtggaggtcaaattgacgctcaaggtccatatagggaaataaagagaacgatgatggattcgattctggcactgactccagaggaaccgccagaaaaagagaaattcgactttcaagagttcactggtcatattgagccgactaacctggatcaggagaagcagattgaagagaaagaatctcaaggcgagggttccgttgatttctcggtgtacaaaacttacgtcagcgcgatcaacagctacggttggatattcttcatctccgctctaatagtactggcacaagtgtccgtcagcagcgtggactacttcctagctaagtgggttaactgggaagaatcgctgggcaacattaccccgcaagagggatcctctttcaaagagaatcaaaccacctacgatctcgctgtggaacccactcagatcaacaacactcaccaacacgaacgacaggaatacatcctaacctacacgatcctgatttcgatcttcatctacctagtcttacagcgaacgttttcgttcttctacgcggctttgaggatctcgaggaaccttcatgatcgcatgttccgtcggctgacgcgcgccacaatgcgcttcttcaacaacaactcttccggccggatcctgaaccgattctccaaagacattggtgcgatcgacacatcgctgccaatgtcattacacgaatgtctggtgatcttcctggagataacctccgtcgtcgtgttggttacgatcgtcaactactggttcctgctcccgaccgtggtggtcgcaacgatcatgtaccttcttcgctgcgtctacctggatacatcgcgagctgtcaaacggattgagtcggtcaatcgatcaccgatctacgcgcacctcaatgctacccttcaggggctgtccacgatcagagccttcggtgcgcaaaccgcgttgcggcgtgaattcaaccaccatctggacgtgaacacttcggcgtggttcatctttgcaacgaccacaagggctttcgccctgtggttggacttcgtctgcgtgatctacattgcgatggtgacgctgagctttctggtggccgaacagaacttcctgggtggcagcgttggtctggcgatcacgcaggctctcagcctgatcggtatgtgccagtggggtatgcgacagtcggccgaactcgagaatgaaatggtttccgtggagagggttagtgagtacatgagtttgcctgtggagtcgtcccaggaaacggctcccgattgtcgtccaaagggtaactggccgaatcaagggatgatagaattcatcaatgtgaatcttaggtactcggaagaagaggagactgtgctaaaggatttgaatttttcgattctggcaaaagagaagatcggaattgtgggtcggacgggtgcgggaaagtcctcattgatccaggcactgtttagattagctccgtacgaaggtgtgatcagaattgacggcgttgatatccagacgctgggattgcgtgacttgcgaagtaagatatcgatcataccgcaggatccggtactgttctccggcacattgaggagtaacttggatccgtttgagaagagtgacgatgtggatttatggagtgcgctggatcaagtacagctgaagcaggtcgtcgattctttggccggaggactcaattgtaagatttcggatggcggcaacaacttaagtatgggtcaaaggcagttggtttgtctggctcgagcgattctccgaaataaccggattttggtgctggatgaagccaccgccaacgtggattcagaaaccgacgatctcatccaggcgacgatccgcgaaaagttcgccgactgcacggtgttgacgattgctcatcgactgcacacgatcatggatagcgatcgggtaatggtgatggatgctgggcgtgtggtggaattcggccatccgtatgatctattgcggggtcttggcgacggatatctccgtcggttggtggatcaaatgggagcggagaatgcggctatgctaggtcgcctagccgaggaaacagaacacgaatgcaatgatcatctatcagagataaatggttga

SEQ ID NO: 72643 - protein, 1351 aa, Aedes aegypti
MHRDKDFSKYKTENPLRSASFISQRTFWWLKDIFRAGHRKEITENSLYAALPEHRSQRLADQFDQLWAEELQRPQPKLLRALWRGYGKATLLWAILYSLLETANLVSRPLFLGGLISYFSPNQTDTSEREAYGYAAGVIICALIPVITFHPYILFIFQIGLKLRVGCSCLIYDKSLKLTRSTTAGEGLNGMILNLLTNDVSKFEPALAFIYNLWKGPMESLLIGYLIYTELGFAGLLGMAFLLSFLPLQAWIGKMAATFRMRAAKRTDVRVRFMNEIIRGIQIIKMYTWEDSFAKMVGQVRRKEVNALRGSAFVRATLISFFVVSRISVFLSLLSFIHTGNVITARKVFLVSSYYSMLHDSMVHYYSLAITFCSEALISVKRIQEFLLTPEEKAKTAHGADEEKHQEGKGSVLIEDEEKKAKNNGLVPNGVMSEEEVEKLLPTKRVVSLNSDKKGIVMVDVKARWVVSENESNVGVTSISTTVESGRLCVVIGSVGAGKTSLLQVILGELEEDQGMLQINGTISYAAQEPWLFESSVRNNILFVEEYDEQRYLEVVRICALERDLQSFPHGDQTIVGERGISLSGGQKARVNLARAIYKKSDIYLLDDPLSAVDTHVGKHIYEMCIRKFLADKVCVLVTHQLQYLNDVQHIILMSGGQIDAQGPYREIKRTMMDSILALTPEEPPEKEKFDFQEFTGHIEPTNLDQEKQIEEKESQGEGSVDFSVYKTYVSAINSYGWIFFISALIVLAQVSVSSVDYFLAKWVNWEESLGNITPQEGSSFKENQTTYDLAVEPTQINNTHQHERQEYILTYTILISIFIYLVLQRTFSFFYAALRISRNLHDRMFRRLTRATMRFFNNNSSGRILNRFSKDIGAIDTSLPMSLHECLVIFLEITSVVVLVTIVNYWFLLPTVVVATIMYLLRCVYLDTSRAVKRIESVNRSPIYAHLNATLQGLSTIRAFGAQTALRREFNHHLDVNTSAWFIFATTTRAFALWLDFVCVIYIAMVTLSFLVAEQNFLGGSVGLAITQALSLIGMCQWGMRQSAELENEMVSVERVSEYMSLPVESSQETAPDCRPKGNWPNQGMIEFINVNLRYSEEEETVLKDLNFSILAKEKIGIVGRTGAGKSSLIQALFRLAPYEGVIRIDGVDIQTLGLRDLRSKISIIPQDPVLFSGTLRSNLDPFEKSDDVDLWSALDQVQLKQVVDSLAGGLNCKISDGGNNLSMGQRQLVCLARAILRNNRILVLDEATANVDSETDDLIQATIREKFADCTVLTIAHRLHTIMDSDRVMVMDAGRVVEFGHPYDLLRGLGDGYLRRLVDQMGAENAAMLGRLAEETEHECNDHLSEING

SEQ ID NO: 72644 - DNA, 4050 bp, Anopheles gambiae str. PEST
  CDS (1)..(4050)
atggaagcgatcacaagaaagctgcccccgaacccgcgacaaaatgctagcatcctgtccgcgctgaccttctggtggacgatcgatctgttccggaaagggtacagcaaggtgctggagctgcaggatctgtttcgcccgctagatgtcgatcggtccgacgtgctcggcgatcggttggaaaaaaaatggttcgaacagcaggctggccctggccgaccgtcgctggtgaaagcgatcttcaagacgttctggcgcgagtacggtgtgctcgggttcatcaccatcatcaacgatatcgtgatccggctggcacagcccatctttctcggctggctgctgatgtacttccggaaggacacggaggtaacgcgcgaaagtgccttcctgtacgccggtgcgatcgtgctgctgaacgcgctgagcgtaatcacgatcaatcagtacgtgctgggcagcttccagaacggtatgaaggtgcggattgcggtgtgcagcgtgatctaccgcaaagcgcttcggctgtcccgcacggccctgggcgatacggcgccggggaaggtggtgaacctgctgtcgaacgacgtgaaccggttcgacatcgtgtccgtctttctgcactcgatgtggtcggcaccgctgctcgccatcatcatcggggtgctgctgtacctcgagatcggcgtcgccgggctgatcggcatgatcgtgatcttcatcgtgacgccgatccagtcgtacacgggcaagctgacgagccggttccggctgcagacggcgctccggacggacgagcgcatccggctgatggacgaaatcatctccggcatccaggtgatcaagatgtacgcctgggagcggccgttcgcgaagctgatccggcacgcgcgccagatggagctgaagatcgtgcgcaaaagtgcgtacgtgcgcggcctgtacatgacgtttctgctgttcaccacccggaccgcgctgttctgcacgatgatggcgatggcgctgctcggggacgagctgacggcggcccgcgtcttcgtggtcgcgacgtacttccacatcctggcgaacacgatgtcggcgatgttcgtgcgcggcattgcggagattgcggaggcgatggtggcgatgcgccggctggagcgcttcctcgagtttgaggagcgcgagacggaggcgctgccggacggcaagtcccgcctgctggccgagttcgggctgaatggggacgcgaccgagaagcagcggctgatcgaatcggaaacgcagctcccgcccacgattgccgcgggtgccaagcaagcgaacggcaagctgcagcaggacgggcagggagcgccggacgaactgccaccggtaacgctgtccaacctgaacattgacttccgcaagggactgctgataggtgtgatcgggccggtcggttcgggcaaatcgtccctgctacaggcgatcctgcgcgagctgccgctggaatcgggcagcgtggtagcgcagggccggttcgcgtacgtcagccaggagccgtgggtgttttccggcacggtgcggcagaacattctgttcgggcagccgatggagaaggagcgctacgaggcggtcgtgcgggcctgtgcgctggtgacggactttgagcagctgcccgacggcgaccggacgatgattggcgagcggggggcggccctgtccggcgggcagaaggcgcgtatcagcctggcgcgggcggtgtaccggcgggcggacgtgtacctgctggacgatccgctcagcgcggtggacgcgcacgtcgggcgccatctgttcgatctgtgtctggggccgcagggacggctcgggacgctgcgggcgacgcgcatcctcgtcacgcaccaggtgcacttcctcaaggaggcggactgggtggtggtgctgaacgagggccgggtgcaggcgcagggcacgccgcacgatctggtgcagagtgggatcgactttgtggagctggtcgaacggaaggaggttgagggcagcgagctggagggtggtggtggtggtgatggggatggttcggttggagggggcgatcgacgaagccggcgggattcgcgtgcttccgcccgttcgggtggttcgtccgtgcatgccgatgtaagcgatgaggaggagcgtgacctggcggccgacgcaccggtccagagcaacatggagggtacgtcccgggggaaggtgcagggttcgctgctgctgagctatctgggcagcggggcaaacgggctgataatgtgcggactgttggcactgtttctagcgacgcagctcgcggcgagtggggccgactattgggttgccttctggacttcacaggaagagcagcgactgttccgagcggcacacaacttgtccgccggcccagaagcggccaccgacgagctgccgccactgctcagcacggaaacctgcatggccatccatggtgcgctggtgggcagcatctttctcatcgccatcaccagatcgatcagcttctatcagacctccgtgcgggcgtcgcaaaacctgcacgatgccatgtttgccggctgcgtgtccaccacgatgcgcttctacgacacgaacccgtccggtcgcatcctgaaccgcttctccaaggacatgggctcggtggacgagctgctgccgaaagcgatgctcgacgcgtcgcaaatcattctcagcctgtgcggtacgctggtcgtgacggtgctcgtcaacccactgtttctcgtaccgctagccctgctcggcgtcgtgttctggttcgtgcgccggatctatctgaaaacgtcgaaaaacatcaagcggctggagggcattacgcgctcgcccgtcttctcgcacctgtcggcgtcgctggccgggctgccgacgatacgggcgttcggtgcgcagggcgagctgatccgcgagttcgacgcccatcaggacatacacacggcctcgttctacatgttcatcaccgccagcacggcgttcggctttgcgctcgatctgctctgtctgatctttgtgtttatcgtggtgtttagcttcctgctggtcgagcaggacacgttcggcgatcgggtggggctggcgatcacgcaagcgatggccctgaccggcatgatgcagtggggcatccggcagagtgccgaggtcgctaactttatgatgtcggtcgagcggctgctggagtaccgggatctagcgcccgagcggcagccggagcgaccgcgcgcactgaacgcgggctggcccgcggagggtcggatcgagttccgcagcgtcacgtaccggtacttcgagggagcgcaggccgtactgcgcgatctgtcgtttgagatacggccgcgcgaaaaggtcggcatcgtggggcgcaccggggcgggtaaatcgtccctgattggggcgctgttccggctggcacaggtcgagggcgagatacggctggacgggatcgatacggcggacatcacgctcgagcagctccgctcgaaggtgtcgatcataccgcaggatccggtcctgttttcgggcacgctgcgccgcaatctcgacccgttcgaggactacccggacgcggagctgtggggtgcgctggagcaggtggagctgaaggagctggccaacacgccggccgggctgcagatggcggtggcggccggtggttccaactttagcgtcggccagcggcagctgatctgtctcgcgcgtgccatcctgcgcaacaaccgcatcctggtgctggacgaagcgaccgccaatgttgacccaaacacggatcggttaatacaggaaacgatacggcacaagtttgccgactgtaccgtgctgacgatcgcccaccggctcaacacgatcatggactcggaccgggtgctagtgatggatgcgggccaggccgtcgagctcggtacgccgcacgagctgctgcagctgccgatcagcatcttccgcgacatggtgctcgcgaccgggccggccgaatcggaacggctgcagcagatcgcactgcacaagcacgaacagcaacagctggctgcgtctgactaa

SEQ ID NO: 72645 - protein, 1349 aa, Anopheles gambiae str. PEST
MEAITRKLPPNPRQNASILSALTFWWTIDLFRKGYSKVLELQDLFRPLDVDRSDVLGDRLEKKWFEQQAGPGRPSLVKAIFKTFWREYGVLGFITIINDIVIRLAQPIFLGWLLMYFRKDTEVTRESAFLYAGAIVLLNALSVITINQYVLGSFQNGMKVRIAVCSVIYRKALRLSRTALGDTAPGKVVNLLSNDVNRFDIVSVFLHSMWSAPLLAIIIGVLLYLEIGVAGLIGMIVIFIVTPIQSYTGKLTSRFRLQTALRTDERIRLMDEIISGIQVIKMYAWERPFAKLIRHARQMELKIVRKSAYVRGLYMTFLLFTTRTALFCTMMAMALLGDELTAARVFVVATYFHILANTMSAMFVRGIAEIAEAMVAMRRLERFLEFEERETEALPDGKSRLLAEFGLNGDATEKQRLIESETQLPPTIAAGAKQANGKLQQDGQGAPDELPPVTLSNLNIDFRKGLLIGVIGPVGSGKSSLLQAILRELPLESGSVVAQGRFAYVSQEPWVFSGTVRQNILFGQPMEKERYEAVVRACALVTDFEQLPDGDRTMIGERGAALSGGQKARISLARAVYRRADVYLLDDPLSAVDAHVGRHLFDLCLGPQGRLGTLRATRILVTHQVHFLKEADWVVVLNEGRVQAQGTPHDLVQSGIDFVELVERKEVEGSELEGGGGGDGDGSVGGGDRRSRRDSRASARSGGSSVHADVSDEEERDLAADAPVQSNMEGTSRGKVQGSLLLSYLGSGANGLIMCGLLALFLATQLAASGADYWVAFWTSQEEQRLFRAAHNLSAGPEAATDELPPLLSTETCMAIHGALVGSIFLIAITRSISFYQTSVRASQNLHDAMFAGCVSTTMRFYDTNPSGRILNRFSKDMGSVDELLPKAMLDASQIILSLCGTLVVTVLVNPLFLVPLALLGVVFWFVRRIYLKTSKNIKRLEGITRSPVFSHLSASLAGLPTIRAFGAQGELIREFDAHQDIHTASFYMFITASTAFGFALDLLCLIFVFIVVFSFLLVEQDTFGDRVGLAITQAMALTGMMQWGIRQSAEVANFMMSVERLLEYRDLAPERQPERPRALNAGWPAEGRIEFRSVTYRYFEGAQAVLRDLSFEIRPREKVGIVGRTGAGKSSLIGALFRLAQVEGEIRLDGIDTADITLEQLRSKVSIIPQDPVLFSGTLRRNLDPFEDYPDAELWGALEQVELKELANTPAGLQMAVAAGGSNFSVGQRQLICLARAILRNNRILVLDEATANVDPNTDRLIQETIRHKFADCTVLTIAHRLNTIMDSDRVLVMDAGQAVELGTPHELLQLPISIFRDMVLATGPAESERLQQIALHKHEQQQLAASD

SEQ ID NO: 72646 - DNA, 4170 bp, Ustilago maydis 521
  CDS (1)..(4170)
atggttctcctctttgcctcgacttgtaccaagccttttgacccgcggcagacagccgaggagcgcgcaagcttcatatcaaagatcttcttcctatacctcctggtcccgctatggaaaggtacgagaaagccaattgagctcgatgatatcgaaccgcttgctgcaacatatacttcacatactctagaagctgttctgtttcagcattggcacgcaagcgccgcccatcttagcacgtcagatgagcaagtctcgtacggtgccgatctcaagtcttgtgatttggagcaagtctccatgtctggtcttaacaccgtatcgccatcatcggcgaggccaatatcatttcttccaagggatcccacaagattcccgaagctttacaaagccgccgcgcgggcatttggcactgtccttatatctcctttgccttccaaagctgtatacacggtcttgattctcctccaacctctgctagttcaagagactatcgactttattgcctcttactcgggcgatgccaaagaacccgagccagccgcctatggctacggtatcgcaggcgctttctttctcgtctatctcctctttgcactttcttcgggtcactttaccttttccatcaacaagtcagcttgcaagctgcggggcgcgctcgtatacacggtgtatcgaaaaacgctgctactttctgtagattcgctccaagatccagacactccctcacccacggtcatgcagtcggtcgacattgagcgcatcgttggtggcctcgatccatttcatgaactctggagtggggttgtcgtcatcgttgtcgccctgtatcttttgtggcagcaaatcggcctcgcttttgtctccacgatcgtgacattggcctgcctcttcggctccatacctctcgtgacaaaagatacctctgctcgtcaaaagatttggagtcggctaaccgacgagcgtacaagtctcacctcagccgcgatcaactcgatcaaggcggtcaaacaatccgcattggaaggctttctgatcagcaagatcacctcgattcgtcagcgtgagatcaaagcgatgatccgctatgtgcacgatgtcttatatatgagcctccttgggaacgctgctggagacattctgctgctcgctaccattacgacctttgcacttgtctctgctcttcaccatcaccacaccggtacttttcctttcacgacatcaactgttttcacgagtatcaccatcatccgcatcatcgagcggcctctcttcatcatcggccgtcggtacacgagcgtcatatcggctgtaactgcgcttaatcgactcgagactttcctgctgctccccgaagtcacgcgtgaaaatgactcaactcagcgtcagccgatggaaaaggagcatcttactgcttcagcagctgcgatctttgccggcgcgtccttcacctggaagcaggactctggactgcggggatccagcgtcgatgccacgagcacgatacaaaagagcccacttagaaaggcatgcgcaccggtgctacgggaattgaatcttgtcatccctcgtggccaggtgacaacggtggtaggcgaaattgccacctctaaaacgtcgctgctatgctcattactcggagagttgtccttactgaaaggcgaggcagttctgccgcttcgtgcagctcccatcgcatacgtcggacagaatccatggacacaaggcgaaagaacgatcaaagagaacattgtctttcacagatactttgacaaagaacgctacgagcgtgcagtggaggcttgtggactgtccctcgatatacagcagctgcctaagggcgatggaaccctcgtcaaacacctcagtggtggtcagaagcagagggtcgctctgtgccgtgcggtgtacgtagaagctccgacatatatcctcgacgatgtcttgagtgcagtcgacgcctcgacagctgcgggaatcaaccaggcactcttctcacgtcaatctggtctgctgcggggaagaactgtaattatggctaccaactcggtgcagcaaatgcagcttgccgaccacattgtgcagatgagtgctggcggcaaagccgaaatggtccaaggcggagcgggcgccatctcaaggctagccgacagcattgatacgatccgacgccgttcggccgaggagcgagagagcaacggtgcggacggcgagtcgtctacagccgccaagatacgtgctgcagccgccaaggagcgcaagcttctggaagttgaggaagagcaagaagatgtcatgaagggtggcatcaacctttccgtgttcaaccgttacttcaaagcggctggactgtggacgtcgctcgcatatccggtcgctctcatcgttcagaccggattgtccaacggacaacttctgtggctgcagaactgggccaagcatgtctctgaagacactttacatgcatcgttgggtcttcacattggtgtgatggtcctctttgttgtgacaagggtggtcacatatggtggttcacttttgtgttacctgtacatattgtgtcccaggatttcgctcaagttgcaccacgacgaagtgacgggcttgttgcgctctggagccgacttcttcctcaacctcaacccaggccgaatgatcaaccggttcacaggcgacatctattcgcttgacttccagatcagcgcgtttgtcgtcaacgtcgtttactttgttatcgagctcggcttctctttggtgttgatggcgttaccggctccgtttttgctcggcgtgatcgtcgccatggctgtcctgtactttggcatctataagctgtacagcccttcctcgcggatgctgcgaagacaagagatggccactaagtcgccgcttcatgcccagttcagggacacggcggatcttgagggactgctcacgattcgtgcattgcacatggaagacaccttttcgaaggctaccgcttcgttgctggacacttcgcagagaccgtactactggctctgggcggtccgagtttggctgcagacgtggctcaacctgttgggcatgatgttgaacacggctctcgtgctgattgcggtgggtctgaggtataagtcgaatgccggattagttgctgttgccttgattcaggccatctcactaacctcggatctaaacggactcatgtctgcgtggacggagctggagatcggcattgtctctctcgagaggatcgagcaagtgatcatggctactccggatatcaaggacgatcgaacaaatctcaaagagatgtcgagcactgtcgtggccagtggtgtctctcggccggccgccagtgtccgctttgaggatgtgactgttggataccatggtaatgaaggacccatgtcattgcatagcgtcagcttctcacttcgaccaggcgagcgtctgggagtgtgtggtcgctcaggatcgggtaagtctacgttgctgttatcactgcttcgtatcctggaaccggcttctggtcgcgtcatgatcgacggggtggacacggcgacgctgactggggactcggtccgacgaaacatctcgtatataccacaggagccaatggtgcttccctcgctgtcggtacgcgaaaatctggacccagaatgcgagcactcggacgatggggcttattggaaggtactttggcagacttcgatgttcgacactgtctcgcagcttagcgaagggcttgaccacatccttgacttgcagagtctaagcatgggccagaagcagctattgaacgtcgctcgtgcgctccttaagcgacggggagtgcttgtcatggatgaggctacatcgaaccttgattcggagaccgatgccaaggttcaagcagctcttggctctgcctcgaacgaatctgacgcatcggaacagctttcacgcgctcagtcaaagaagcgcatcgagacaacgaatggcgacgacgatgccttggtctcggcacctaacaggccaacgatgatcacaatcgctcacaggctctcaaccatcatagactatgacaagatccttgtactttccgagggaaaggtgcttgagttcggaagcccatcggagctgctggcactggagaatggagagttcagattgatggtcgaggagcaaacccgagaggtagactag

SEQ ID NO: 72647 - protein, 1389 aa, Ustilago maydis 521
MVLLFASTCTKPFDPRQTAEERASFISKIFFLYLLVPLWKGTRKPIELDDIEPLAATYTSHTLEAVLFQHWHASAAHLSTSDEQVSYGADLKSCDLEQVSMSGLNTVSPSSARPISFLPRDPTRFPKLYKAAARAFGTVLISPLPSKAVYTVLILLQPLLVQETIDFIASYSGDAKEPEPAAYGYGIAGAFFLVYLLFALSSGHFTFSINKSACKLRGALVYTVYRKTLLLSVDSLQDPDTPSPTVMQSVDIERIVGGLDPFHELWSGVVVIVVALYLLWQQIGLAFVSTIVTLACLFGSIPLVTKDTSARQKIWSRLTDERTSLTSAAINSIKAVKQSALEGFLISKITSIRQREIKAMIRYVHDVLYMSLLGNAAGDILLLATITTFALVSALHHHHTGTFPFTTSTVFTSITIIRIIERPLFIIGRRYTSVISAVTALNRLETFLLLPEVTRENDSTQRQPMEKEHLTASAAAIFAGASFTWKQDSGLRGSSVDATSTIQKSPLRKACAPVLRELNLVIPRGQVTTVVGEIATSKTSLLCSLLGELSLLKGEAVLPLRAAPIAYVGQNPWTQGERTIKENIVFHRYFDKERYERAVEACGLSLDIQQLPKGDGTLVKHLSGGQKQRVALCRAVYVEAPTYILDDVLSAVDASTAAGINQALFSRQSGLLRGRTVIMATNSVQQMQLADHIVQMSAGGKAEMVQGGAGAISRLADSIDTIRRRSAEERESNGADGESSTAAKIRAAAAKERKLLEVEEEQEDVMKGGINLSVFNRYFKAAGLWTSLAYPVALIVQTGLSNGQLLWLQNWAKHVSEDTLHASLGLHIGVMVLFVVTRVVTYGGSLLCYLYILCPRISLKLHHDEVTGLLRSGADFFLNLNPGRMINRFTGDIYSLDFQISAFVVNVVYFVIELGFSLVLMALPAPFLLGVIVAMAVLYFGIYKLYSPSSRMLRRQEMATKSPLHAQFRDTADLEGLLTIRALHMEDTFSKATASLLDTSQRPYYWLWAVRVWLQTWLNLLGMMLNTALVLIAVGLRYKSNAGLVAVALIQAISLTSDLNGLMSAWTELEIGIVSLERIEQVIMATPDIKDDRTNLKEMSSTVVASGVSRPAASVRFEDVTVGYHGNEGPMSLHSVSFSLRPGERLGVCGRSGSGKSTLLLSLLRILEPASGRVMIDGVDTATLTGDSVRRNISYIPQEPMVLPSLSVRENLDPECEHSDDGAYWKVLWQTSMFDTVSQLSEGLDHILDLQSLSMGQKQLLNVARALLKRRGVLVMDEATSNLDSETDAKVQAALGSASNESDASEQLSRAQSKKRIETTNGDDDALVSAPNRPTMITIAHRLSTIIDYDKILVLSEGKVLEFGSPSELLALENGEFRLMVEEQTREVD

SEQ ID NO: 72648 - DNA, 801 bp, Clostridium thermocellum ATCC 27405
  CDS (1)..(801): transl_table=11
ttgaggcagggcaaggcatattcaattgaggtaagggatatagaagtatcctttggagatttaaatgtgctaaagggcatatccttgcagatggagaaaggcaggttttacgggattcttggcccaaacgggtcagggaaaaccacgcttttaaagagcatggcaagagctcttcgaccgcaaaaaggcgcaatatatgttaacggtgaagatatcagcagaatgaaggcgagggagctttcgaaaaaaattgcatgcctctatcaaagcaccggtattgcctgtgattatccggttatggatgttgtgcttatgggaagatacccttatataaagaggtttcagactgaaagcgccaaagattgggagattgccaaaaaggccatgattgcttcaaatgtgtggcaccttaaagacaggcggattaatgagataagcggaggagagaggcagagagttttcattgcccgggccttggtgcaggagaccgatatagtgcttctggatgagccgatttcccaccttgacattcagcaccagatagagattttggaacttgtgggaaaaatggcccgggagggaaaaacaattattgcggtcctgcatgatttgaattttgcctctatgtactgcgaccatttgataatgctcaaggatggaaaggttattgcgcagggagagccgcaaaaggttcttacggaagagaccgtaaacaaggtatatggtgtaaagcctttcataattgaagggatggacggcagcaggccttatatcttgcctttgaaaaggcagggagcatga

SEQ ID NO: 72649 - protein, 266 aa, Clostridium thermocellum ATCC 27405
MRQGKAYSIEVRDIEVSFGDLNVLKGISLQMEKGRFYGILGPNGSGKTTLLKSMARALRPQKGAIYVNGEDISRMKARELSKKIACLYQSTGIACDYPVMDVVLMGRYPYIKRFQTESAKDWEIAKKAMIASNVWHLKDRRINEISGGERQRVFIARALVQETDIVLLDEPISHLDIQHQIEILELVGKMAREGKTIIAVLHDLNFASMYCDHLIMLKDGKVIAQGEPQKVLTEETVNKVYGVKPFIIEGMDGSRPYILPLKRQGA

SEQ ID NO: 72650 - DNA, 828 bp, Dehalococcoides sp. BAV1
  CDS (1)..(828): transl_table=11
atgtttgagcttgaagtacgagacgtaaccctagcctatggtccggttgatgttctgaaaaatgtcagctttaaaaccatgcccggtgagatgattgggttggtaggaccgaatggttcaggtaaatctaccctgataaagtctttggccagagtaatagacccgcgtctgggcagtatttatatcaatgggcgtaattcacgctctataccccgtttggaactggcaaaaatggtaggggttgtgccccagataccggtactccccagtgcttttaccgcttttgagattgtcctgatggggcgaaacccccatatgggtactttccagtatgaaagccacaaggatatcgccatagcctgggaggctctggcaagggcaggggtactgcatctggctgaccgccaaatcggcgaactttccggcggggagatacaaagtgtggttattgcccgctctctgtgccagaaaactgaagcaattttgctggatgagcctacttccaatctggatataggccgccagatagagatactggaccttatcaaatctgagtgccgcgaacggaatattaccgttattgccgctttgcatgacctgaatctggctgcccattattgcgaaaggcttatactcattgacaacaatggcattcatgcagatggcagtccggttgaggtaataactaccaataatataagccgtgtttacggccccggcagttatgtccatacccacccactcagcgggcttccggcagtactgccgcgtctgggtaatatccggtgcaatgcaaacggtgaaaagggaggcacggatgctcactga

SEQ ID NO: 72651 - protein, 275 aa, Dehalococcoides sp. BAV1
MFELEVRDVTLAYGPVDVLKNVSFKTMPGEMIGLVGPNGSGKSTLIKSLARVIDPRLGSIYINGRNSRSIPRLELAKMVGVVPQIPVLPSAFTAFEIVLMGRNPHMGTFQYESHKDIAIAWEALARAGVLHLADRQIGELSGGEIQSVVIARSLCQKTEAILLDEPTSNLDIGRQIEILDLIKSECRERNITVIAALHDLNLAAHYCERLILIDNNGIHADGSPVEVITTNNISRVYGPGSYVHTHPLSGLPAVLPRLGNIRCNANGEKGGTDAH

SEQ ID NO: 72652 - DNA, 798 bp, Klebsiella pneumoniae subsp. pneumoniae MGH 78578
  CDS (1)..(798): transl_table=11
atgagcgaccagacattatccgggctgtcgctgtctcacttcagcgccggctaccccagacgcaaggtgatcgagaacctgacggttccccatctgccgcgagggaaaatcaccgcgctgctggggccaaacggcagcggtaaatcaacgttaatgcgggcgatggcgggtctgggcccctgcggcggcgagctgctgctggagggggaaaatctgctgacgcagccgttctcacgtcgcgcagagcaggtggtctatcttccgcagacgctgcccgccggcgtgcatctgcatgtgctggagtcgattatcgttgcccagcgcgccgccggaggacgccacagtccgcagcgccaggaggaagtgatggcgctgctgcgacagctggggattgcccatctggcgatgagctacctcgatcagctctccggcgggcaaaagcagctggtgggtctcgcccagtcgctgatccgccagccgcgcctgctgctgctcgacgaaccgctcagcgcccttgacctcaactaccagtttcacgtgatggatctggtgcgccgggagacccggcggcgcaacatcgtgaccctggtggtggtgcacgacatcaatattgccctgcgtcacgccgaccacgtgctgatgctcaaggcgggccagctgctcggcgacggcaccccggccgcggtcatcacccccgagactctggcggccgtctatggggtgcgcgggcgtattgaaccctgttcgcagggggtgcggcaggtgattattgacggcctggtggacagcgaggcctga

SEQ ID NO: 72653 - protein, 265 aa, Klebsiella pneumoniae subsp. pneumoniae MGH 78578
MSDQTLSGLSLSHFSAGYPRRKVIENLTVPHLPRGKITALLGPNGSGKSTLMRAMAGLGPCGGELLLEGENLLTQPFSRRAEQVVYLPQTLPAGVHLHVLESIIVAQRAAGGRHSPQRQEEVMALLRQLGIAHLAMSYLDQLSGGQKQLVGLAQSLIRQPRLLLLDEPLSALDLNYQFHVMDLVRRETRRRNIVTLVVVHDINIALRHADHVLMLKAGQLLGDGTPAAVITPETLAAVYGVRGRIEPCSQGVRQVIIDGLVDSEA

SEQ ID NO: 72654 - DNA, 750 bp, Klebsiella pneumoniae subsp. pneumoniae MGH 78578
  CDS (1)..(750): transl_table=11
atgaacagctcattatcgctgcaagcgctacgctatggccaccgtcagccgctcttcgccccgctcacgctggcctgccggcccggtgagatctgggcggtgctgggcgccaatggccggggaaaaagcaccctgctggataccctgaccggcgtgttgccgccgctgggcggcgagatgcagtgcgagggcggcgtggccctggttccgcagtcgtttcgtcccgcttttcgctggcgcgtgagcgatgtggtgctgatgggccgggcccgtcacgtggatctctttgcccagccggacgaggaggatgcccggcgggttgagcaggcgctggcgcagctggggattgccgccctggccgaagatgacttcggcgccctctccggcggccagcagcagctggtgttgattgcccgcgcgctggtcagcgccagccagaatatcctgctggatgagccctgctcggcgctggacctcggtaaccagcaggtggtgctgcagctgatcggcgacctcgcccaccgccaggcgcgcaccgtcctgttcaccacccatgatcccaaccacgccctacaggtggccagccatacgctgcttctgctgccggagggccggtggctggcgggcgagaccgccgacgtgctgagcgaaacgcatctccggcaagcgtacggcctgccggtacgcctgatccgccatgccgcctccgccttccctctgctggcgccggggtttacgctgcgtcgctga

SEQ ID NO: 72655 - protein, 249 aa, Klebsiella pneumoniae subsp. pneumoniae MGH 78578
MNSSLSLQALRYGHRQPLFAPLTLACRPGEIWAVLGANGRGKSTLLDTLTGVLPPLGGEMQCEGGVALVPQSFRPAFRWRVSDVVLMGRARHVDLFAQPDEEDARRVEQALAQLGIAALAEDDFGALSGGQQQLVLIARALVSASQNILLDEPCSALDLGNQQVVLQLIGDLAHRQARTVLFTTHDPNHALQVASHTLLLLPEGRWLAGETADVLSETHLRQAYGLPVRLIRHAASAFPLLAPGFTLRR

SEQ ID NO: 72656 - DNA, 774 bp, Kineococcus radiotolerans SRS30216
  CDS (1)..(774): transl_table=11
atgacgctgcgcgccgaggcggtgagctgggaccgcgggggcaacctcgtggtggacggggtgagcctggcccccgcccccgggcagacggtggccctgctggggcccaacgggtccggcaagtcctccctgctgcgcctgctcgacggcgtggtgcgcccgacgtcgggggtcgtcaccctcgacggggaggacctcgcccgcgtcccccgccgggaggccgcgcgcgccgtcgccgtcgtcgggcagcagagcagcaccgaggtcgacctgaccgtccgcgacgtcgtggaactgggccggctgccgcaccgcacgaccttcggcggcgaccgcgccgccgacgcccgggccgtggcggaggcgctgcgctgcaccgggttgaccgacaaggccgaccgcctgtggcggaagctgtccggcggggagcagcagcgcgcccacatcgcgcgggcgctggcccaggaaccccgggaactgctgctggacgaacccaccaaccacctcgacatccgccaccagctcgacgtgctggccctggtgacccggctgccggtgacgacggtcgtcgcgctgcacgacctcaacctcgccgcgatgttctgcgacgcggtcctcgtgctgcgcgagggccgggtggtggccggggggacccccgccgacgtcctcacccccgagctgatcgccgaggtgtacggggtgcgggccgaggtgagcctggacccgcgcgacgggcggcccgcgatccggttcctgcccggcgtcccggtctga

SEQ ID NO: 72657 - protein, 257 aa, Kineococcus radiotolerans SRS30216
MTLRAEAVSWDRGGNLVVDGVSLAPAPGQTVALLGPNGSGKSSLLRLLDGVVRPTSGVVTLDGEDLARVPRREAARAVAVVGQQSSTEVDLTVRDVVELGRLPHRTTFGGDRAADARAVAEALRCTGLTDKADRLWRKLSGGEQQRAHIARALAQEPRELLLDEPTNHLDIRHQLDVLALVTRLPVTTVVALHDLNLAAMFCDAVLVLREGRVVAGGTPADVLTPELIAEVYGVRAEVSLDPRDGRPAIRFLPGVPV

SEQ ID NO: 72658 - DNA, 831 bp, Desulfococcus oleovorans Hxd3
  CDS (1)..(831)
atgatgctctcggtcaaagacatatccatcggctacaacggccgcatggtgctgcacgacctgggatttaccctggagcggggccagaccctggcgattctggggcccaacggcgtgggcaaaaccaccctgctgcgctgcatcaacggcatgctgaagccgaaaaccggcgctgtactggtggaaggggccgacctgtttggcatgcgggccggagaaatcgcccggcgcctgggatacgtggcccagcgcagcgaggccggtcgcatgaccgcctttgacgccgtgctgctgggccgcaagccccacattcactggaacgcatccgttgccgacctgaaaaaggtgagcgcggccttagaccagcttgacctggggcacctggccctgcggtacattgacgaaatgagcggcggcgagctgcagaaggtgtgcattgccagggccatggtgcaggaaccgtccgtgctgctgctggacgagcccaccagcagcctggacctgaaaaaccagctggaaatcctgcgcctgatccgccacgtggtccatgagcacaaactggccgcggtcatgaccatgcacgacctgaacatggccttccggttctccgacgcctttatttttatcaaggacggccgggtgctgcactacggccgaaacgaggacctgaccccggacatgatccatgaagtctatgaggtacccgtggagatcattcagcaccggggccagatggtggtgtttcccaggctggaacgcaaacaggaacaggaggcccttaccgggcgccatgcccatggcggggattttcatacccacaacacggaatag

SEQ ID NO: 72659 - protein, 276 aa, Desulfococcus oleovorans Hxd3
MMLSVKDISIGYNGRMVLHDLGFTLERGQTLAILGPNGVGKTTLLRCINGMLKPKTGAVLVEGADLFGMRAGEIARRLGYVAQRSEAGRMTAFDAVLLGRKPHIHWNASVADLKKVSAALDQLDLGHLALRYIDEMSGGELQKVCIARAMVQEPSVLLLDEPTSSLDLKNQLEILRLIRHVVHEHKLAAVMTMHDLNMAFRFSDAFIFIKDGRVLHYGRNEDLTPDMIHEVYEVPVEIIQHRGQMVVFPRLERKQEQEALTGRHAHGGDFHTHNTE

SEQ ID NO: 72660 - DNA, 753 bp, Thermus thermophilus HB27
  CDS (1)..(753): transl_table=11
atgggcgggcttgaggccagggggatcgtggggcccttcgccctgaagggcgtggacctccttttgcgccccggggagtggctcgccctcctcgggcccaacggctcggggaagaccaccctcctaagggtgatggcgggcctccttaggcccaggcggggggaggtgcttttggggggaaggccccttagggcctacggcagttacgagcggggccgcctcctcgcctacctcccccaaaacggcccctaccccgaggggcttttggtggaggaggtggtgcgcctggggaggcttccccacctcgggctttggcgcagggagggcaaggaggacgaggaggcggtggactgggccctcgaggtcaccggggcctccgcttttcggggaaggctcctcggcaccctctcgggcggggagaggcagcgggtccttctggcccgggccctggccggaaggcctaggtacctcctcctggacgagcccaccaccttcttggacctggcgcaccagggggtggtggtggggcttttgcggcggcttgccgggatgggcctcggggtgctttccgtcctccacgaccccaaccaggcggccctcgcccaccgggtggcggtgctggaagggggaagggtggtggcggaggggaggcctgaagcggtcttgcaggaacccctcctcgcccggctctacggggcgggggtccgggtcgtccgcctgggggggaggccccatgtctacctggacccgtag

SEQ ID NO: 72661 - protein, 250 aa, Thermus thermophilus HB27
MGGLEARGIVGPFALKGVDLLLRPGEWLALLGPNGSGKTTLLRVMAGLLRPRRGEVLLGGRPLRAYGSYERGRLLAYLPQNGPYPEGLLVEEVVRLGRLPHLGLWRREGKEDEEAVDWALEVTGASAFRGRLLGTLSGGERQRVLLARALAGRPRYLLLDEPTTFLDLAHQGVVVGLLRRLAGMGLGVLSVLHDPNQAALAHRVAVLEGGRVVAEGRPEAVLQEPLLARLYGAGVRVVRLGGRPHVYLDP

SEQ ID NO: 72662 - DNA, 816 bp, Desulfovibrio vulgaris subsp. vulgaris str. Hildenborough
  CDS (1)..(816): transl_table=11
atgatggaatgtcgtgctctccatgcggggtatgcgcagacggaggtgctgcacggcatcgaccttcgcatcgcgcaagacgaactcgtcgggcttctcggccccaacggcagcggcaagacgacgctgctgctcgccctttccggtgtcctgcctgcccgtggcggtgacgtgcttctggacggcacgccccttgccgccatggccccgcgcgaacgtgcacggcgtatcgccaccgtaccgcaacgccccgaggtcatcccggatgtggacgccttctctctcgtcctcatgggacgttacccgcacacggggccgcttcgggggtacacggccgtcgaccatgacgcggccgcggccgcccttgccgccaccggcacagcccacctcgcgcgccgcagtgccgccaccctctcggggggggaactgcaacgggtgctcgtggcccgggcgttggcgcaggacaccgacacgctgcttctcgacgaggtgactgccgggcttgacgtcgcccgcatggtggaggtgttcgacctgctggcccaacgccaccggcacgggctgcgcatcgtggcggccatccatgatatcaatctcgccgccctgtactgtacgcggctggtctttctcaaatcgggcagggtcgtcctcgacgggcctgtcgcacaggtcttcgatgaacaagccctatccgccatctatgagacgcgcatcaccgtccacccgcaccccgtcaccggcacaccacaggcgagcatcgttccgggtgtgggtgctgctggtgtgcctcatggtgctgcacaccgcgccatgtga

SEQ ID NO: 72663 - protein, 271 aa, Desulfovibrio vulgaris subsp. vulgaris str. Hildenborough
MMECRALHAGYAQTEVLHGIDLRIAQDELVGLLGPNGSGKTTLLLALSGVLPARGGDVLLDGTPLAAMAPRERARRIATVPQRPEVIPDVDAFSLVLMGRYPHTGPLRGYTAVDHDAAAAALAATGTAHLARRSAATLSGGELQRVLVARALAQDTDTLLLDEVTAGLDVARMVEVFDLLAQRHRHGLRIVAAIHDINLAALYCTRLVFLKSGRVVLDGPVAQVFDEQALSAIYETRITVHPHPVTGTPQASIVPGVGAAGVPHGAAHRAM

SEQ ID NO: 72664 - DNA, 825 bp, Listeria monocytogenes str. 4b F2365
  CDS (1)..(825): transl_table=11
atgaaagaccttcataccgataacttacaaatttcatacgacaaacgaatcattgttgatggtttagatatagccattccagcgaataaaataaccgctttagtaggtgcaaatggctcagggaaatcgactattttaaaaacgatgtcccgcttaatgaaacctagcaaaggcgctgtgtatttagatggcaagacgattcatagtcagccaacgagagacgttgccaaacaactagctattttgccacaaaatccttctgcacctgatggtttaacggtgtttgaattaatttcttatggacgttccccacatcaaagtagctttaaatcgattaccgcaaaagatcgcgaaattattttttggtcattgcgcgtgacgaatttaatggagttagcggatcgaccaattgatagtttatcaggtggacaacgacagcgtgcatggattgccatggcgcttgcccaagaaacagatgtactatttcttgatgaaccgacgacctttttagatatgacgcaccaactagatgtacttaatttattgaaacaattaaatcaatcagagaaccgcacaattgtgatggttgttcatgatttaaatcacgcatctcgttacgctcaccatatgatcactattaaagaagggaaagtcatcgcagaaggaacaccaaccaatgtcatgactgaacaaactttagaggatgtttttaatatcaaagcagatattttaattgatccccgcagcggtgtccctctttgcctcccctacgaaacttgcaacggatgcgaaattgtaaaggagcttgattccagtgccaaataa

SEQ ID NO: 72665 - protein, 274 aa, Listeria monocytogenes str. 4b F2365
MKDLHTDNLQISYDKRIIVDGLDIAIPANKITALVGANGSGKSTILKTMSRLMKPSKGAVYLDGKTIHSQPTRDVAKQLAILPQNPSAPDGLTVFELISYGRSPHQSSFKSITAKDREIIFWSLRVTNLMELADRPIDSLSGGQRQRAWIAMALAQETDVLFLDEPTTFLDMTHQLDVLNLLKQLNQSENRTIVMVVHDLNHASRYAHHMITIKEGKVIAEGTPTNVMTEQTLEDVFNIKADILIDPRSGVPLCLPYETCNGCEIVKELDSSAK

SEQ ID NO: 72666 - DNA, 813 bp, Bacillus anthracis str. Sterne
  CDS (1)..(813): transl_table=11
atggcaactttagcagttgatgcggtatctgttggctataatgaagggttaattattgatggattaacagttgaaattccggaagggaaaattacaacaattattggaccaaatggttgtggaaagtccacattattaaaaacggcttctcgtattttgaaagcaaaaaaaggtactgtttatcttgacggaaaagcaattgagaaacagccaacgaaagaaatcgcaaagaaaatggcgattttaccacagactgcagaagtgccaactggccttactgtgtttgaactcgtttcatatggacgctttcctcatcaaaaaggatttggaacgttgaaggaagaggattatcgctacattcattgggcacttgaagtgacaggaatgacagaattcgcaaatcgtccagcagaggcattatcaggtgggcaacgtcaacgcgtatggattgcgatggctcttgcacaagggacagaattactcgtattagatgaaccgacaacgtacttagatatggctcatcaattagaagtattaaacttattgaaaaagttaaatgaagaagaaggtagaacgattgttatggttatccatgacttaaaccatgcttctcgtttctcagatcatatgattgcattaaaagctggtaagttaatgaaacaaggaacgccagatgaagtgatgacgagtgaaacacttcgtaatgtatttgagattaaggctcaaatcgttccgtgtccagtaaactgtaagccaatttgtttaacatatgatttagcaatgattagtaatcaattgcgtaaaaaagcataa

SEQ ID NO: 72667 - protein, 270 aa, Bacillus anthracis str. Sterne
MATLAVDAVSVGYNEGLIIDGLTVEIPEGKITTIIGPNGCGKSTLLKTASRILKAKKGTVYLDGKAIEKQPTKEIAKKMAILPQTAEVPTGLTVFELVSYGRFPHQKGFGTLKEEDYRYIHWALEVTGMTEFANRPAEALSGGQRQRVWIAMALAQGTELLVLDEPTTYLDMAHQLEVLNLLKKLNEEEGRTIVMVIHDLNHASRFSDHMIALKAGKLMKQGTPDEVMTSETLRNVFEIKAQIVPCPVNCKPICLTYDLAMISNQLRKKA

SEQ ID NO: 72668 - DNA, 813 bp, Bacillus thuringiensis serovar konkukian str. 97-27
  CDS (1)..(813): transl_table=11
atggcaactttagcagttgatgcggtatctgttggctataatgaagggttaattattgatggattaacagttgaaattccggaagggaaaattacaacaattattggaccaaatggttgtggaaagtccacattattaaaaacggcttctcgtattttgaaagcaaaaaaaggtactgtttatcttgacggaaaagcaattgagaaacagccaacgaaagaaatcgcaaagaaaatggcgattttaccacagactgcagaagtgccaactggccttactgtgtttgaactcgtttcatatggacgctttcctcatcaaaaaggatttggaacgttgaaggaagaggattatcgctacattcattgggcacttgaagtgacaggaatgacagaattcgcaaatcgtccagcagaggcattatcaggtgggcaacgtcaacgcgtatggattgcgatggctcttgcacaagggacagaattactcgtattagatgaaccgacaacgtacttagatatggctcatcaattagaagtattaaacttattgaaaaagttaaatgaagaagaaggtagaacgattgttatggttatccatgacttaaaccatgcttctcgtttctcagatcatatgattgcattaaaagctggtaagttaatgaaacaaggaacgccagatgaagtgatgacgagtgaaacacttcgtaatgtatttgagattgaggctcaaatcgttccgtgtccagtaaactgtaagccaatttgtttaacatatgatttagcaatgattagtaatcaattgcgtaaaaaagcataa

SEQ ID NO: 72669 - protein, 270 aa, Bacillus thuringiensis serovar konkukian str. 97-27
MATLAVDAVSVGYNEGLIIDGLTVEIPEGKITTIIGPNGCGKSTLLKTASRILKAKKGTVYLDGKAIEKQPTKEIAKKMAILPQTAEVPTGLTVFELVSYGRFPHQKGFGTLKEEDYRYIHWALEVTGMTEFANRPAEALSGGQRQRVWIAMALAQGTELLVLDEPTTYLDMAHQLEVLNLLKKLNEEEGRTIVMVIHDLNHASRFSDHMIALKAGKLMKQGTPDEVMTSETLRNVFEIEAQIVPCPVNCKPICLTYDLAMISNQLRKKA

SEQ ID NO: 72670 - DNA, 771 bp, Erwinia carotovora subsp. atroseptica SCRI1043
  CDS (1)..(771): transl_table=11
atgccgagaatcaggctatcgacagaagcactggtgtatggctacccgcaggggcagggctttttttcaccgttaaatctgtgctgtcgggaaggcgaaattacggcgattctgggtgcgaacggcagagggaaaaccacactgctgaatacgttattgggaaacttatcgccgctttccgggacgattcagcgcgatgggcacatcggttttgtgccacaaatatttaccccaccgttttcctatagcgtcttggatatggtgctgatggggcgggcggcgcgtgttcggctgtttgctatgccctctgcccatgatatccgcgtggctcagaatgcgctgactctgctgggaatcgcctcgcttgccgagtgtgaatttagcgcgttgtccggcgggcaacggcagctcgtattaatcgcgcgggcattggcatcggagtgtcagacgctgattctggatgagccgatggcggcgcttgatgtgcaaaatcaggcgcaggtgctgcggttattacagcatctggctaaaacgcaacgtctgagtatcctgttgaccacacacgacccagctcacgccgtgatcattgcagagcaggcgctgcttcttatggataatcagcgctatctttatggccgctgtgatgacgtgttgacggaagataacctatctcgtctgtacggcattccggtgcgtcaggtttacgtggaaatggcgccgcagccgtatcgtgcgctgataccgatattaaccatgacggagccacaatga

SEQ ID NO: 72671 - protein, 256 aa, Erwinia carotovora subsp. atroseptica SCRI1043
MPRIRLSTEALVYGYPQGQGFFSPLNLCCREGEITAILGANGRGKTTLLNTLLGNLSPLSGTIQRDGHIGFVPQIFTPPFSYSVLDMVLMGRAARVRLFAMPSAHDIRVAQNALTLLGIASLAECEFSALSGGQRQLVLIARALASECQTLILDEPMAALDVQNQAQVLRLLQHLAKTQRLSILLTTHDPAHAVIIAEQALLLMDNQRYLYGRCDDVLTEDNLSRLYGIPVRQVYVEMAPQPYRALIPILTMTEPQ

SEQ ID NO: 72672 - DNA, 804 bp, Propionibacterium acnes KPA171202
  CDS (1)..(804): transl_table=11
atgaggatcgagcctgccaggctcaccgacgccaaggtcgccttcgggaaccgggtgctgtggtcgggactcaatctcattgtcgaacccggcgaatttatcgccgttctgggccccaacggggtgggtaagaccaccctgttacgagtcctgttagggcagattccgctaacggccgggaccgctatggtcgctggccgtccggtgcgccgcggttcgacccatatcggctacgtccctcagcaacgatccctcgagacgactgctcccatccgtgggcgcgacctcgtcgggatgggaattgacgggcacaagtgggggttcggctggtttagccggtcgcggcggcgccgtattgacgaagccatcgcctcagtcggcgccacagccttcgctaatgcgccgctgacgatgatgtcgggtggtgagcagcagagattgcgtatcgcccaggcgctcgttactaatcctcagttgttgctgtgtgacgaaccgctgtccagcctcgacctgcgccaccagcaagaggtcacccgactcatcgacaatgcgcgccggacccgcaacctcggggtgctcttcgtcacccacgagatcaaccccgtgctgccctacgtcgaccgggtggtctacgtcgcgggcggcaaggttcgcgttggcactcccgacgaggtgctgcgatcggacgttctcagcgaaatgtatgggtcccacgtcgaggtgttccatcgcggtaatcgcatcattgtccttgctgacgaagagcgctcgacccacctgcatgccccgggccgacgaatctga

SEQ ID NO: 72673 - protein, 267 aa, Propionibacterium acnes KPA171202
MRIEPARLTDAKVAFGNRVLWSGLNLIVEPGEFIAVLGPNGVGKTTLLRVLLGQIPLTAGTAMVAGRPVRRGSTHIGYVPQQRSLETTAPIRGRDLVGMGIDGHKWGFGWFSRSRRRRIDEAIASVGATAFANAPLTMMSGGEQQRLRIAQALVTNPQLLLCDEPLSSLDLRHQQEVTRLIDNARRTRNLGVLFVTHEINPVLPYVDRVVYVAGGKVRVGTPDEVLRSDVLSEMYGSHVEVFHRGNRIIVLADEERSTHLHAPGRRI

SEQ ID NO: 72674 - DNA, 1344 bp, Desulfotalea psychrophila LSv54
  CDS (1)..(1344): transl_table=11
atgggtatgagcaggcagaactctttaaaggtggagaggcaggtccttcttgactgtcaaaatctctccttctcctatggcgataaggccattctttccggggtttccctccagtttgagggtgggtgttttgttgcccttttgggaaaaaatggtgcaggcaagagtaccctgctccgctgtctctgtggtcttgatagctctgaatcagatcatcttagcctgaaaggcgttgatctggtgaagatgaaacgcgctgagattgcccggcatattagttttgtcccccaggagcatgatgagatgtttcccttttctgttcttgatgtggtggttatggggcgtacggtttttctgggtgtctttggtcggcctaagcagtttgattatgattatgccagccagacccttgaggagttgggttgtttgtatctcgctgagagggtctataccaccctctcggggggagaaaagcagttggttcttctggcccgggccctggtccagacccgggagataatttttcttgatgaaccgaccaatcatctggattacaagaaccgttatcatatgctcttgaccctgaagaatctctgtcagaaacatgggacctgtgttgttgcctgtctgcatgatccaaatcatgccctgctctttgccgatgaggtgatcatgcttgaggatggcaaggtcatgtgtcaggggaaaacagcagaggtggtgaccggtaaggccatcagtcgcctctacggcattgcctcctcgcactcctcttctcaggggctgtccacggttcaaccctgtttttctcagcctgcctttgccggtagggttcttttgttggtgggaaccagtggtgatggcaaaaccacgattctgcaaagactcgtggcccagaatagatcgcgaaggatggctggtgttctttgtcccggtagctggaaggatggtaagcgttatagcagcgaaatcgttgatattcagagcggtgagtccaccctctttgcccaaagagagaggagcgctggtcctgatttgggctcatttgtcttttatgacgaggggcaggcattggcccgccgggccttggattttagtgaagaagatcaacaggagtgtatcctcatcgatgaggtcggccccttggaattacatggtggcggctatgcacccagtattcctcctctacttgccttgaccggggtaaggcatatttgggcggtgcgaccgaccattgtcgagcaggtaaagagcagatggatgttggttgagccgatcattgttaatgcctccgatgatggggccttggcgcagttgcagaaatttttagaaaccgaggggtag

SEQ ID NO: 72675 - protein, 447 aa, Desulfotalea psychrophila LSv54
MGMSRQNSLKVERQVLLDCQNLSFSYGDKAILSGVSLQFEGGCFVALLGKNGAGKSTLLRCLCGLDSSESDHLSLKGVDLVKMKRAEIARHISFVPQEHDEMFPFSVLDVVVMGRTVFLGVFGRPKQFDYDYASQTLEELGCLYLAERVYTTLSGGEKQLVLLARALVQTREIIFLDEPTNHLDYKNRYHMLLTLKNLCQKHGTCVVACLHDPNHALLFADEVIMLEDGKVMCQGKTAEVVTGKAISRLYGIASSHSSSQGLSTVQPCFSQPAFAGRVLLLVGTSGDGKTTILQRLVAQNRSRRMAGVLCPGSWKDGKRYSSEIVDIQSGESTLFAQRERSAGPDLGSFVFYDEGQALARRALDFSEEDQQECILIDEVGPLELHGGGYAPSIPPLLALTGVRHIWAVRPTIVEQVKSRWMLVEPIIVNASDDGALAQLQKFLETEG

SEQ ID NO: 72676 - DNA, 774 bp, Symbiobacterium thermophilum IAM 14863
  CDS (1)..(774): transl_table=11
atggcgatcacagcagaatcggtccgcttcggctaccgggggggcgaggtcatccgcggcgtcagcttcaccgtgcccgagggggccatcacctgcctgctgggccgcaacgggtccggcaagaccacgctgatccggctggtgaacgggatcctgaggccgcacgacggctccatccggatcgacggcatggacgtactgcgcagcccccgggcggccgtggccaggcgggtcgcgttcgtgccgcaggaacaccaaggggtctttccctacggcgtcgaagagctggtggtgatggggcgcaacccccatctgggcccggtggcccggccgggcaggtccgaccgcgcggcggcccgagccgccatggaggcggtgggcatcgcccacctggcggaccgggactacatgcagatcagcggcggcgagcggcagctggtgctcatcgcccgggccctcacgcaggagaccccgtacctgctgatggacgagcccacgtcccacctggacttcaccaaccagcacgccatcctgtcgatcgtgcggcgcatcgcccgggagcggggcgtgggggtgctggtggccatgcacgacccgaatctggcgctggcgttcgccgaccgggtcatcctgctgcgggaggggcgggtgttccaggcagggcccgcggcggaggtgatgacgcccgagaacctgcagaccctgtaccagatgcccatcgacgtggtgcgcctgcccgacggccggcgcctcatcgtgacggaggcgaggtag

SEQ ID NO: 72677 - protein, 257 aa, Symbiobacterium thermophilum IAM 14863
MAITAESVRFGYRGGEVIRGVSFTVPEGAITCLLGRNGSGKTTLIRLVNGILRPHDGSIRIDGMDVLRSPRAAVARRVAFVPQEHQGVFPYGVEELVVMGRNPHLGPVARPGRSDRAAARAAMEAVGIAHLADRDYMQISGGERQLVLIARALTQETPYLLMDEPTSHLDFTNQHAILSIVRRIARERGVGVLVAMHDPNLALAFADRVILLREGRVFQAGPAAEVMTPENLQTLYQMPIDVVRLPDGRRLIVTEAR

SEQ ID NO: 72678 - DNA, 798 bp, Symbiobacterium thermophilum IAM 14863
  CDS (1)..(798): transl_table=11
atgtgggagcaatgcacggcgcaaggcgaactgccggtggtggtgcgcggcctgacggtggcctaccagcgccgcccggtgctggaggacgtgaacctgtccctgccgcccgggctgctcatcggcgtgatcggacccaacggggccggcaagtcgacgctgctgaaggccatcctggggctggttccccgggtcgccggggaggtgtggatctacggccggcccgtggcggaggcccggcgcgcggtgggctacgtgccgcagcgggcggcggtggactgggactttcccaccgacgtgctggacgtggtgacgatgggccggtatggccacctggggctcttccgccggccgggcgcgcgggagcgcgccgtcgcgatggaggcgctggagaaggtcgggatggccgacctggcccaccggcagatcggacagctctccggtgggcaacagcagcgggtcttcctcgcccgggccctggcgcaggacgcccggatctacttcatggatgagccgttcgccggcgtggacgccgcgaccgagcgggcgatcatcggggtgctccacgagatgaaggcccgcgggcgcacggtggtggtggtccaccatgacctgcagaccgtgcgggagtacttcgactggctcgtgttcctgaacggacacgtgctcgccgccggcccggtggagcgggtcttcacaccggagaacctggcgcgcacctacggcggccggctgggcggcctcgcgcagcttcccgcggcgccgcaggccgcgggccgggggtggggaggggactga

SEQ ID NO: 72679 - protein, 265 aa, Symbiobacterium thermophilum IAM 14863
MWEQCTAQGELPVVVRGLTVAYQRRPVLEDVNLSLPPGLLIGVIGPNGAGKSTLLKAILGLVPRVAGEVWIYGRPVAEARRAVGYVPQRAAVDWDFPTDVLDVVTMGRYGHLGLFRRPGARERAVAMEALEKVGMADLAHRQIGQLSGGQQQRVFLARALAQDARIYFMDEPFAGVDAATERAIIGVLHEMKARGRTVVVVHHDLQTVREYFDWLVFLNGHVLAAGPVERVFTPENLARTYGGRLGGLAQLPAAPQAAGRGWGGD

SEQ ID NO: 72680 - DNA, 753 bp, Symbiobacterium thermophilum IAM 14863
  CDS (1)..(753): transl_table=11
atgcggaacgtcagcttcggttacggtaaggatctggtgctggaccgtgtcagcctgacggtggggcgcggggagtacctggggctgatcggccccaacggttccggcaagaccaccctgctccgcctgatcctcgggctgctgcccctcacgcagggcgaaatccgcctcttcggcacgcccgtacagcagttccgggagcgctggcgggtgggctacgtcgcccagaaggccgcctccttcaactccgcctttcccgccacggtggaggaggtggtcagcacaggcctgacggcccggcgcggcctcttccggcggttcacggcgtcggaccggctggccgtgcgccaagccctggaccgggtcgggctcctcccgtacaaggaccggctggtgggccggctctcgggtgggcagcagcagcgggtgttcatcgcccgggccctggtcagccggccggagcttctgatcctggacgagcccacggtgggtgttgacgcctccgcggaggggcagttctaccggctgatccgccgcctgcgggaggagatggggctgacggtgatcctcgtctcccacgacatcggcgcgatcacccacgaggtctcggccctggcctgcctgaaccgccggctgttctaccacggctcgccggcggacttcggcaccgaggagcagctgtgcgaactctacggtcacgatgtcctgcgcatccaccatcaccaccaccgcggggagggagacggcccgtga

SEQ ID NO: 72681 - protein, 250 aa, Symbiobacterium thermophilum IAM 14863
MRNVSFGYGKDLVLDRVSLTVGRGEYLGLIGPNGSGKTTLLRLILGLLPLTQGEIRLFGTPVQQFRERWRVGYVAQKAASFNSAFPATVEEVVSTGLTARRGLFRRFTASDRLAVRQALDRVGLLPYKDRLVGRLSGGQQQRVFIARALVSRPELLILDEPTVGVDASAEGQFYRLIRRLREEMGLTVILVSHDIGAITHEVSALACLNRRLFYHGSPADFGTEEQLCELYGHDVLRIHHHHHRGEGDGP

SEQ ID NO: 72682 - DNA, 825 bp, Symbiobacterium thermophilum IAM 14863
  CDS (1)..(825): transl_table=11
atgctgcgcatcgaatcgctcgccgtgggctatggcggcgagccggtcctcaacgggctggacctggccgtcgcccggggcgagttcctggtggtggtgggccccaacggcagcggcaagtccaccctggtgcgggccgtgaccggggcgctgcccccgacggaggggcggatcctgctggacggccgggatctgcgcggcctgcggccccgggaggtggcccggacgctggccgtggtggcccaggacacgtccgtggggttccccttcaccgtcgaggagatcgtcgccctggggcgcatcccgcacctgccgccgctgcgcagcgagaccccgcgcgaccgggcggccgtggagcgggccatgcggctgaccggcacccagcccctggccggccggctggtcacggcgctctcgggcggtgagcggcagcgggtgatggtggcccgagccctggcccaggaaccgcgcctgttgatcctggacgagcccactgcccacctggacattgcccatcaggtggggctgctggatctggtccggcgtctgaaccggaccgaggggctgacggttctggcgatcctgcacgacctgaacctggcggcgctgtacgcggaccggctggtgatgctgaggggcgggcgcgtgtgggccgacggcccgcccgcggaggtgctcaccgaggccaacatcctcaccgtctacggcagccgggttcggatcgtccgccatcccagcgctggccagccgcaggtcatgctgctctcgagggaggttgcggcgccggcccagccgctggagccggtcagcgccggcagcgactag

SEQ ID NO: 72683 - protein, 274 aa, Symbiobacterium thermophilum IAM 14863
MLRIESLAVGYGGEPVLNGLDLAVARGEFLVVVGPNGSGKSTLVRAVTGALPPTEGRILLDGRDLRGLRPREVARTLAVVAQDTSVGFPFTVEEIVALGRIPHLPPLRSETPRDRAAVERAMRLTGTQPLAGRLVTALSGGERQRVMVARALAQEPRLLILDEPTAHLDIAHQVGLLDLVRRLNRTEGLTVLAILHDLNLAALYADRLVMLRGGRVWADGPPAEVLTEANILTVYGSRVRIVRHPSAGQPQVMLLSREVAAPAQPLEPVSAGSD

SEQ ID NO: 72684 - DNA, 1284 bp, Bacillus licheniformis ATCC 14580
  CDS (1)..(1284): transl_table=11
atgattgatgtcatccgggtgtccggcggatatggaaaaacggatgtcttacaggatatcagttttgctgtaaagccgggtgaatttttaggaattcttggtccgaacggcagcggaaaaaccactttgctgaaaatgttgtcgggaacaattgccccccgaagcggcgaggtgctgcttgaatgccgttcagtcggggagtacaaaacgaaggagctcgctcgcaaaatggcggtccttcctcaaaaaacggagcaggccttttcctttacggtggaggaaacggtacagtttggccgctacgcgtatcaagcaggcctttttcggcagctgacggcggaagaccatgatatcgtgaagagggtgatgaagcagacagacacgcttcgcttcgcccaaaaatccatccatgagctgagcggcggagagcagcagcgggtgtatttagcgcaggcacttgcccaggaacccgaatatttgctgcttgatgaaccgacgagttttctcgatttgtcatttcaaaagagtctgcttgatttaatgaaacaagaaacggctgcatccaaactcgcagtggtcggggtgtttcatgatgtgaatattgcgagtttatactgtgaccgtctgctcctattaaaagatggaaaagcagaagttcttgaccgcccggaagcagctctttctgctgggcgcatcggacgagtgtatgatacggacatcactggactggaccatcctcagcgttcaaatccgcagtttacaattatggcgaaaaacatcccgcggaaaaccgagcccctctttttaaaagagcgaattgaacaatatttgccgcacggcatcgcatttttggcagaccgcccgctgcggcttctgtcctcagaaaggggctttgcttggagacgaaaacttattttcgacagcggaaataactctggatggccgcatggctcgtcagcttttgaacaggaaacgctgtttatccaacatgatgctgaattggctgactgccatattgtgtcggaaagcggtgatctttgcatcgtcggtatgaaagacacgatggggcgtttgatcatgtgggtgttagttgacggctgtttgcaggatggtcaatttgtgaaggcgataagcgctgcggcatttgccgcagcccagcatcatgttccgtgtagtgatgtccttgtagcggccactcaatccggccggtcagcggatcaaaccgcttttttgacacaaattcaaaataaaacagccgcttgtgtgaaagctttaaaagattaa

SEQ ID NO: 72685 - protein, 427 aa, Bacillus licheniformis ATCC 14580
MIDVIRVSGGYGKTDVLQDISFAVKPGEFLGILGPNGSGKTTLLKMLSGTIAPRSGEVLLECRSVGEYKTKELARKMAVLPQKTEQAFSFTVEETVQFGRYAYQAGLFRQLTAEDHDIVKRVMKQTDTLRFAQKSIHELSGGEQQRVYLAQALAQEPEYLLLDEPTSFLDLSFQKSLLDLMKQETAASKLAVVGVFHDVNIASLYCDRLLLLKDGKAEVLDRPEAALSAGRIGRVYDTDITGLDHPQRSNPQFTIMAKNIPRKTEPLFLKERIEQYLPHGIAFLADRPLRLLSSERGFAWRRKLIFDSGNNSGWPHGSSAFEQETLFIQHDAELADCHIVSESGDLCIVGMKDTMGRLIMWVLVDGCLQDGQFVKAISAAAFAAAQHHVPCSDVLVAATQSGRSADQTAFLTQIQNKTAACVKALKD

SEQ ID NO: 72686 - DNA, 738 bp, Synechococcus elongatus PCC 6301
  CDS (1)..(738): transl_table=11
atgctcgagatccagcacctcagcgtttgctatcgccagcagcgggtcttagaagatatttgtctacaggtgcaggccggtgagcagttagctctgattgggccgaatggtgctgggaaaagtacgttggtgcgcgccattctggggttgctgacaccctatgccggagaagtgcgctggcgcggtcgacccttgcggcggggtcagcgttcgatcgcctacgtgccccagcgatcgcagattgattggcagtatccaatcaccgtggaaacagtggtgcgactgggggctgaggttcgttcttggtgggggcgatcgccccaaacaggatcgcggatcgcggcggctctcgaacaagttcaattgactgagctacgccaccggcccttggcggaactgtctgggggtcagcagcagcgggtatttttggcgcgggcgatcgcccaaggagccgatctgctgctgctaaatgagccctttactggcatcgatcacccgaccgagcggctgatgcagaatctattccagcagtttgcccagcagggaaaaaccctgattgtctgtagccatgaatggggcgacgccctccagcgctacgatcgcctgatcttgctgaaccggcggatcatctgccacgacattcccgatcgagccctgacgccgcagaacttgcagcaaacctttggtgcgcgccagcctgatgctccccctgatcgacaatggggctttgcttgctag

SEQ ID NO: 72687 - protein, 245 aa, Synechococcus elongatus PCC 6301
MLEIQHLSVCYRQQRVLEDICLQVQAGEQLALIGPNGAGKSTLVRAILGLLTPYAGEVRWRGRPLRRGQRSIAYVPQRSQIDWQYPITVETVVRLGAEVRSWWGRSPQTGSRIAAALEQVQLTELRHRPLAELSGGQQQRVFLARAIAQGADLLLLNEPFTGIDHPTERLMQNLFQQFAQQGKTLIVCSHEWGDALQRYDRLILLNRRIICHDIPDRALTPQNLQQTFGARQPDAPPDRQWGFAC

SEQ ID NO: 72688 - DNA, 780 bp, Bacillus clausii KSM-K16
  CDS (1)..(780): transl_table=11
atgattgcggcaaataacctttccgttaaccggggggggcgtctaatcctcgatcaagtaagtttccaagcaaagaaagggcgaatgcttggcatacttggagcaaacggcagtggcaaaacgacgttgttaaaaacggtgacaggtttttatccttatcaggcaggttcaattgaaattgacggaaagccactagctacactaaagccaaaagagcgggcgcagcggatggctgtgctatcccaagatgagcatgtttcctttgacgtgcctgtctatgaagccgtcgcccttggccgctacgcccatcaacaaggcttgtttgctgttaaaggaaaaacagacgacgacatcattcggaaagcgatggaggagacaggtataagcgacatggctgaacggtcgttgttaagtttgagcggcggcgaaaaacaacgtgtctggctcgctcgggcgctagcgcaacagcctgacagcttgctacttgatgaaccgacaaaccatttggacttggctcgccaagttgcgctcatggagcatttaacaaaactgctggcatcacggcaattgacggttgtgtgcattctacacgacattaatctggcaagtttgtattgtgatgatgtgttgttactgaaaaacggaaaagtgatatgccaaggtgaaacgcaatcgatcttgacacggggtgctcttgaaaatatttacggaacagcttttcatgaatggaaagagcctgtaaaaggaaggaaacaattttcggtggtcacacgcgtctaa

SEQ ID NO: 72689 - protein, 259 aa, Bacillus clausii KSM-K16
MIAANNLSVNRGGRLILDQVSFQAKKGRMLGILGANGSGKTTLLKTVTGFYPYQAGSIEIDGKPLATLKPKERAQRMAVLSQDEHVSFDVPVYEAVALGRYAHQQGLFAVKGKTDDDIIRKAMEETGISDMAERSLLSLSGGEKQRVWLARALAQQPDSLLLDEPTNHLDLARQVALMEHLTKLLASRQLTVVCILHDINLASLYCDDVLLLKNGKVICQGETQSILTRGALENIYGTAFHEWKEPVKGRKQFSVVTRV

SEQ ID NO: 72690 - DNA, 777 bp, Campylobacter jejuni RM1221
  CDS (1)..(777): transl_table=11
atgctaaaaatacaagatttaagctttgcttatcaccaaaaagatttactaaaaaacattcatttagaacttaaaaatcgggcttttataggaattttagggccaaatggctcaggcaaaagcactcttttaaaacttatacttaaaaatttaagtccaaataaaggagaaataagtctttttaatacaaatatcaaagatttttctcttaaggaatttgccaaaatttgtggctttgtgcctcaaaaatcagaattaaacacccctttaaaagtcatcgatgtgcttttaatgagtaaatatgcgaatttaaaacacgcttttagttcttattctaaagaagatattttagaaattaaagaatttgctaaggatttaagacttgaaaattttctagaaagaagcatactttctttaagtgggggtgaatttcaaagaatgcttttagcaagagctttgcttaaaaagccaaaaattctttttttagatgaacccacttcagcccttgatttaaactatgctatagagcttttaagcctttgcgaaaaacgagttaaagaaaaaaatatagccgttgttgctatcttgcatgatttaaatttagcttctatgttttgcgataaaatcctttttttaaaagaaggggaaataaagtattttggaacgagtaaagagctttttactcaagaaattttaaaagaaatttatgatttaaactgcgagattatttataaaaattctaaaccttatattttagctttaaaggagaaaaaatga

SEQ ID NO: 72691 - protein, 258 aa, Campylobacter jejuni RM1221
MLKIQDLSFAYHQKDLLKNIHLELKNRAFIGILGPNGSGKSTLLKLILKNLSPNKGEISLFNTNIKDFSLKEFAKICGFVPQKSELNTPLKVIDVLLMSKYANLKHAFSSYSKEDILEIKEFAKDLRLENFLERSILSLSGGEFQRMLLARALLKKPKILFLDEPTSALDLNYAIELLSLCEKRVKEKNIAVVAILHDLNLASMFCDKILFLKEGEIKYFGTSKELFTQEILKEIYDLNCEIIYKNSKPYILALKEKK

SEQ ID NO: 72692 - DNA, 825 bp, Dehalococcoides ethenogenes 195
  CDS (1)..(825): transl_table=11
atgtttgaacttgaagtccgggatataaccctggcctatggtgcggttgatgttttgaggaatgtcagctttaaaaccatgcccggtgaaatgataggcttggtagggctgaatggttcaggcaagtctaccctgataaaatctttggccagagttatagagccgcgtctggggcatatttacataaacgggcgtgattcgcgtactattccccgcctggagctggctaagatggtaggggttgtgcctcagataccggtacttcccagcgcttttaccgcttttgagattgtcctgatgggccgaaaccctcatatgggaacgtttcaatatgaaagccgcaaggatattgccattgcctgggaggcgatggagagggcaggggtactgcatctggctgaaagacaaataggcgaactttcgggtggtgaaatacaaagtgtagtcattgcccgttcgttatgccagaaaaccgaggctattttgctggatgagcctacttccaatctggatataggccgccagatagaggtacttgaccttataaaatcagagtgccgcgaacggaatattaccgtaattgccgccctgcacgaccttaatctggctgcccactattgtgaaaggctgatacttattgatcacaacggcattcatgcagacggcagtccggccgaggtaataaccactgaaaatatcagccgtgtttacggccccggcagttatgtccatactcatcccctaagcggacttccggcggtactgccgcgtttaggtaatacccgctgtgcaaacggcgaaaagggaggcacgggtgcccgctga

SEQ ID NO: 72693 - protein, 274 aa, Dehalococcoides ethenogenes 195
MFELEVRDITLAYGAVDVLRNVSFKTMPGEMIGLVGLNGSGKSTLIKSLARVIEPRLGHIYINGRDSRTIPRLELAKMVGVVPQIPVLPSAFTAFEIVLMGRNPHMGTFQYESRKDIAIAWEAMERAGVLHLAERQIGELSGGEIQSVVIARSLCQKTEAILLDEPTSNLDIGRQIEVLDLIKSECRERNITVIAALHDLNLAAHYCERLILIDHNGIHADGSPAEVITTENISRVYGPGSYVHTHPLSGLPAVLPRLGNTRCANGEKGGTGAR

SEQ ID NO: 72694 - DNA, 762 bp, Thermococcus kodakarensis KOD1
  CDS (1)..(762): transl_table=11
atgctaagggttgaggggctgggcttttcatacggcagtagggaagtcctcaggaacgttacctttgagcttaaaaagggcgttggctgtctccttgggccaaacggcgccggaaaaagcaccctccttaagtgcatagccggaatcctcaatgggaacggtaggataacgctcaacggtactgagctttccaggttgagattgagggagcgtacgaggctcgtaagctactccccccaggaattctcgctgacgtttccgtacacggtctttcaaaccgtgctgatgggcaggaacccccacatcgaccccctgagcgggccgggaaaggtggacgaagagatggcgatgaaggccctccgcaccctcggacttgagaacctcgcggagagacccttcggcgagctcagtggaggccagaaaaggctcgtaatgatagccagaacgctcgcgcagggtggagagcttttcctctttgacgagcccacttcgttcctcgacttcaggaaccagcacctcgttctcagcgttatcaggaagctctcaaaggagagaacagtgctggtctcactccacgatcccaaccaggccctgaccttctgcgatacggttttcctcctgaaagacggggggataatagcgagcggagaaccggctgaagttctcaacgaggagaatctgatggagttatacaggatgaaagtgaagcggtttaaggccgacggcggctttttcatataccccctggaggtggttggatga

SEQ ID NO: 72695 - protein, 253 aa, Thermococcus kodakarensis KOD1
MLRVEGLGFSYGSREVLRNVTFELKKGVGCLLGPNGAGKSTLLKCIAGILNGNGRITLNGTELSRLRLRERTRLVSYSPQEFSLTFPYTVFQTVLMGRNPHIDPLSGPGKVDEEMAMKALRTLGLENLAERPFGELSGGQKRLVMIARTLAQGGELFLFDEPTSFLDFRNQHLVLSVIRKLSKERTVLVSLHDPNQALTFCDTVFLLKDGGIIASGEPAEVLNEENLMELYRMKVKRFKADGGFFIYPLEVVG

SEQ ID NO: 72696 - DNA, 747 bp, Thermococcus kodakarensis KOD1
  CDS (1)..(747): transl_table=11
atgaccgctgttgaggccagaaaccttcactactcctacaacggcactgaagtcctgaagggcatcaacctgaagattgaggatggggagtttgtcgcaatactcggcccgaacggcgccgggaagagcaccctgctgaagtgtctctctggaatcctcaggtgcaatggtgtttatatctcaggacggccaattggggagtactctaggaacgaactagcgaggcttgtggcctatatcccgcagagaacggaaccgggttttatgaccgtgttcgatacagttctgcttggtagaagaccctacatgggattgaggccctcgaagagggatgtagaggtcgttaaaaacgcactgaaaaagctggggatagatcacctcgccttaaggcccaccagggggctgagcggtggcgaacttcaaaaggtcggcatagcgcgcgccctggcacaggagcctgagatttttatgtttgacgagccaacgaacaaccttgacatcaggagccagcttgaggtcatgaagcttgcgcgcgagctctcttctgggggcaaaaccgttatcatggtcatgcacgagatcaacctcgccatccgctttgcggagaggttcgtcttcatttcagagggacgggttgttgcggacggtggccgtgagatcctgaagccttcattgttcagggaggtttacggaacggaggtcgaaatcggggaggtgcacgggattccggttgttgtccccctctaa

SEQ ID NO: 72697 - protein, 248 aa, Thermococcus kodakarensis KOD1
MTAVEARNLHYSYNGTEVLKGINLKIEDGEFVAILGPNGAGKSTLLKCLSGILRCNGVYISGRPIGEYSRNELARLVAYIPQRTEPGFMTVFDTVLLGRRPYMGLRPSKRDVEVVKNALKKLGIDHLALRPTRGLSGGELQKVGIARALAQEPEIFMFDEPTNNLDIRSQLEVMKLARELSSGGKTVIMVMHEINLAIRFAERFVFISEGRVVADGGREILKPSLFREVYGTEVEIGEVHGIPVVVPL

SEQ ID NO: 72698 - DNA, 729 bp, Thermococcus kodakarensis KOD1
  CDS (1)..(729): transl_table=11
atgaggctcttcgcgagggtttcatactcctacgggcagagggaagtcctgaaagatgttgagatagaggccagaaggggcgagctgttggccataataggaccaaacggggccggtaaatcaacccttctcaagtccctcgtgggcattttgaagccgattggaaaggtcgagctggacgggagggacattctcactctcaagccggccgagagggccaagctaataacgtacgtcccccagagctccttcccggagtttgccttcacagttgaggagttcgtggagatggggagctacatgaccggtggaagcgtcgaagacgccctcaggaaagtgggtctctgggagagaaggagggacaggataacggccctcagcggcggggagttccagcttgctctgatagcgagggcactggcacaggggagcagggcggtgctcctcgacgagcccacgagccacctcgatgtcaaccacgcgctaacggttatggagcttctccgcgagttgaagacggaaaggataatcatagctgttctccacgacgtaaacctggccctcgagtatgcagacagactcgtcgtgatgaaagatggagagaagttctgggaggggaagccaggggagataacgcccgatgtccttgaaagggtttacggaattagggcaaaaatagtggaagttgactcccacagggtctttatcccagagctggcaaaggtttaa

SEQ ID NO: 72699 - protein, 242 aa, Thermococcus kodakarensis KOD1
MRLFARVSYSYGQREVLKDVEIEARRGELLAIIGPNGAGKSTLLKSLVGILKPIGKVELDGRDILTLKPAERAKLITYVPQSSFPEFAFTVEEFVEMGSYMTGGSVEDALRKVGLWERRRDRITALSGGEFQLALIARALAQGSRAVLLDEPTSHLDVNHALTVMELLRELKTERIIIAVLHDVNLALEYADRLVVMKDGEKFWEGKPGEITPDVLERVYGIRAKIVEVDSHRVFIPELAKV

SEQ ID NO: 72700 - DNA, 783 bp, Staphylococcus epidermidis RP62A
  CDS (1)..(783): transl_table=11
atgacaacaccagtttttgaattacgaaatttagattattatttcgataataagcatgtattagagaacataaatatcaaaattaatcagggagaatttttagcaattgttggtccgaacggggcaggcaaatctactttactaaaagttatactagggctattgcctatacaaaagggcgagataattgttgatggaaaaccatttaaaggtaataaatcttcattgaaaattagctatgtttctcaaaaagcttctgccttcaatgcaggtttcccagctagtgtaaaggaagttgttttaagtggtctgactaaaacaaaaaaattatttcaaagatttaataaaaatgactatcaaaaagtcacaaaggtattagagagattaaatatatctcatttaataaataaaaatatagctgaactatctggtggtcaacaacaacgtgtacttattgctagagcacttatttcagacccaagtgtgctagtgttagatgaacctacaaacggaattgatgcaaaacatgtaagcaaattttacgatacacttgataaattaaaaaaacaggggattacaataattttagtcactcacgatattggcgttgtagcagataccgctactgaagtagcatgtttaaataaacatcttcatttccacggttccacagaagcatttaagtctttagatgaagttgaaatttcaaaaatttatggtcatcctattcaatttgttgatcatcaacacaaccgaacatgttgtaatgagggaaatgaataa

SEQ ID NO: 72701 - protein, 260 aa, Staphylococcus epidermidis RP62A
MTTPVFELRNLDYYFDNKHVLENINIKINQGEFLAIVGPNGAGKSTLLKVILGLLPIQKGEIIVDGKPFKGNKSSLKISYVSQKASAFNAGFPASVKEVVLSGLTKTKKLFQRFNKNDYQKVTKVLERLNISHLINKNIAELSGGQQQRVLIARALISDPSVLVLDEPTNGIDAKHVSKFYDTLDKLKKQGITIILVTHDIGVVADTATEVACLNKHLHFHGSTEAFKSLDEVEISKIYGHPIQFVDHQHNRTCCNEGNE

SEQ ID NO: 72702 - DNA, 831 bp, Colwellia psychrerythraea 34H
  CDS (1)..(831): transl_table=11
atgtctactctgctaaatatctctgggctcagctggaaagttctaaataaaacgatcttgcaagacattaattttactgtccgcaaaggtgaagtgatcggtattattggccctaatggtgcaggtaaaaccagcttattacgttgtataatcaaccaagccaatattcttgccagtgcaaacgttagcggctgtgtacatcttaaaaatcgtcttataacacaattcagtgctaaagaaattgctcaacacttcgctttagttatgcaaaaaaatgactctatctttgctttatcagtacaagacgtgatgaaaatgggtctattaccgcacaaaagtttgttttcactcgatagtgattatgataagtctcagattgaattagccctaagtaaagtaggattaagtcacgccctagagagtctatttaatcaactctctggcggtgaacagcaacgcgtattaattgctcgagcactggtacaggctagccaaatattaattcttgatgagccgaccaatcaccttgatgtttattaccagcatcaagtattacagttagtaaataagctcaatattaccgtgattatgacagtacatgatctcaatttagccagtttatactgccagcgattgttgctattagataaaggccaattaatttgcgatggttcccctaaagaagttttggctccagagcaactaagcagaatttttggcttaccctgtcagcagaatgttgatgttatcactggtgccactcaagtctctttttatcttgaagaaaacagcatgcaatacagcgccatttcggagcctttaagtgaataa

SEQ ID NO: 72703 - protein, 276 aa, Colwellia psychrerythraea 34H
MSTLLNISGLSWKVLNKTILQDINFTVRKGEVIGIIGPNGAGKTSLLRCIINQANILASANVSGCVHLKNRLITQFSAKEIAQHFALVMQKNDSIFALSVQDVMKMGLLPHKSLFSLDSDYDKSQIELALSKVGLSHALESLFNQLSGGEQQRVLIARALVQASQILILDEPTNHLDVYYQHQVLQLVNKLNITVIMTVHDLNLASLYCQRLLLLDKGQLICDGSPKEVLAPEQLSRIFGLPCQQNVDVITGATQVSFYLEENSMQYSAISEPLSE

SEQ ID NO: 72704 - DNA, 798 bp, Methanosarcina barkeri str. Fusaro
  CDS (1)..(798): transl_table=11
atgaagctggaaatcaaaaacctaacgttcggatataattccaatctggtattaaaaggcttgaatatggtagctgagccaatggtaactgcgatcataggccctaatgcggtaggaaaatccaccttgctaaaatgcatatgcgggatactcaagactgaaggatcgataagattcaatggaaaagacctgaaggcatatcgaaaggacgaggtcataaaagccattagctaccttccccaggaatcctctacaagtacggttatgacggttttagaggcgacaatgctgggaaggataaattcgcttggctggagaatcaaggatgaggacctgtctgcatcgatggatacgcttgaaaaactcgggatcgaagacctggcaatgcgatcaatgaatgagctcagcggcgggcagaagcaaatggtatctatcgcccagtcgatcatccgaaagcccaaagtgctcctcatggacgagcctacgaactcactggacctccagcggcagcttgagctttttgacgtgatccagaacattacggaagagaatggaatgacaacgatagtcgcattacacgacctcaacctggcggctcggtatgcgggcaatgtcgtattaatggatggaggtaaaattgtgtcggcggggagtccggcttccgtgataaccgaagcaatgattcgaaaagtctatggggtcaacgcgagggtaacacttgacggtgagggtataccacaagtcataccaattaattcgacgcgaaaatgcggaataaaaaaggccataatggggtga

SEQ ID NO: 72705 - protein, 265 aa, Methanosarcina barkeri str. Fusaro
MKLEIKNLTFGYNSNLVLKGLNMVAEPMVTAIIGPNAVGKSTLLKCICGILKTEGSIRFNGKDLKAYRKDEVIKAISYLPQESSTSTVMTVLEATMLGRINSLGWRIKDEDLSASMDTLEKLGIEDLAMRSMNELSGGQKQMVSIAQSIIRKPKVLLMDEPTNSLDLQRQLELFDVIQNITEENGMTTIVALHDLNLAARYAGNVVLMDGGKIVSAGSPASVITEAMIRKVYGVNARVTLDGEGIPQVIPINSTRKCGIKKAIMG

SEQ ID NO: 72706 - DNA, 771 bp, Methanosarcina barkeri str. Fusaro
  CDS (1)..(771): transl_table=11
atgctggaagtaaagtcccttgctttttcttatggaaacgggccagtatttgaaaatgtatctttttcgctgaaaaagggcgagatcatgtgcattctgggcccaaacggagcaggaaaatctacacttatcaaatgtattgcaggaattctccaacccgctgctgggtctgtctttattcagggaaaagatacagcttctcttggggtaagaggaattgccaggcatataggttatgtacctcagcagaatgaagtggtttttccatttactgtgctggattttgtagtcatgggccgtgctcctcatctttccatgtttgcatcccctggcgcagaggatattaaacttgcaaaagaatcgctagcaatggtgggaatttctgatcttgcggaaaggccggttgctaacctcagtggaggacagagtcaaatggtgcttattgctagggctcttgtccagaagcctgctctgcttttgctggacgagccaacttctcaccttgattttggcaaccaggtccttgtgctggaaactgtccagaaactggcttcacttggaatgtccattataatgaatacacatatgccagaccatgcttttctgttaggtgacagggctgcagcactgtctgaaggtagactggttgccgtaggaaaagttgaaaccgttgtaaccagtaagatgatgtcttcagtctatggtgtaaatgtagctgtcagggaaattgaggatatgaaaaggaaagtgtgtttacccttaagaaggtga

SEQ ID NO: 72707 - protein, 256 aa, Methanosarcina barkeri str. Fusaro
MLEVKSLAFSYGNGPVFENVSFSLKKGEIMCILGPNGAGKSTLIKCIAGILQPAAGSVFIQGKDTASLGVRGIARHIGYVPQQNEVVFPFTVLDFVVMGRAPHLSMFASPGAEDIKLAKESLAMVGISDLAERPVANLSGGQSQMVLIARALVQKPALLLLDEPTSHLDFGNQVLVLETVQKLASLGMSIIMNTHMPDHAFLLGDRAAALSEGRLVAVGKVETVVTSKMMSSVYGVNVAVREIEDMKRKVCLPLRR

SEQ ID NO: 72708 - DNA, 765 bp, Methanosarcina barkeri str. Fusaro
  CDS (1)..(765): transl_table=11
atggagaaggttatagaactgaaagatgtctgggttcgttatggaacccagacgattcttgaggcaatcaattttgaattaaaagagcccaatggactgcttgggattatcggacctaatgggggaggaaagactacacttctcaaagtgctccttggacttttgaaaccttatagaggtagtgtaaagctctttgggaaacctcccgaaaagagcagagagcttgtaggttatgttcctcaatacaaaggtttcgattttgacttccctataagtgtctgggaagtagtgctcacgggtaggatgagccatacgggttttcggaaaaagtatagagaagaagacaaaaaggctgcagaagaagccctgaatatggtagaaatgttccagtacaaggacaggcagattgggcagctttcgggtgggcagcggcagagggtccttattgcgagagctcttgccacaaaccccaagcttctgcttctggacgaacctaattccgggcttgatccgcatatgcaggatgaactctatcgcctgttgaacaagctaaagcatgaaatggcagtcatcatggttacccacgacctcagtgcggtttctatttatgtcgacaaaatagcctgcttaaaccgcactctccattaccataactccagagaaatcccggttgaagatcttgaagctacttaccagtgtcctgttgaacttattgctcatggaatacctcacagagtgttgagtaatcatgaggagaactcctga

SEQ ID NO: 72709 - protein, 254 aa, Methanosarcina barkeri str. Fusaro
MEKVIELKDVWVRYGTQTILEAINFELKEPNGLLGIIGPNGGGKTTLLKVLLGLLKPYRGSVKLFGKPPEKSRELVGYVPQYKGFDFDFPISVWEVVLTGRMSHTGFRKKYREEDKKAAEEALNMVEMFQYKDRQIGQLSGGQRQRVLIARALATNPKLLLLDEPNSGLDPHMQDELYRLLNKLKHEMAVIMVTHDLSAVSIYVDKIACLNRTLHYHNSREIPVEDLEATYQCPVELIAHGIPHRVLSNHEENS

SEQ ID NO: 72710 - DNA, 780 bp, Methanosarcina barkeri str. Fusaro
  CDS (1)..(780): transl_table=11
atgttaaaagtagataacctgagttttggatacgacagagtgcccgtattcaagggcatttcatttggggtcgagaaaggttctttatgtggactcttcgggccaaatggttccgggaaaacaaccctgttcaagtgttgtatggggttccttaagtacgacagcggtagtgtatccatcgatgggtgtaacgttaagaataaaaagatcgaggagctggcaaaacttgtcgcttacgtaccccaggaacacaagcccccttttccatatctcgtcaaggaagtcgtgctgatgggtcggactcctcatatgggtggtatctttggcatttccgaagatgataagagtaaggtcaaggaagccatggaaatgcttgaaatttcccatctcgccgacaaaccttataatcagctcagcggcggtcaacgccagcttgtgctcatcgcaagggctctggcacaggaaacaccgctgatgctgctggacgagcctacatccgctctggacttctgcaaccagataaggatatggaatattctgaaaaagatttccgcgaaggggacgaccatactggcctgcagccatgacccaaaccacatttcatggttctgtgacgatgtcattgtcatgtatcggggaggtctggttgcaaaggggaatccaaaaagcgtagtatccgagcaattgctcagcactatatttaatggtatttgcagtgtaggttatatggaccacctaatgatggtgtatccgaaaaatatccagtcgggtgtccagtag

SEQ ID NO: 72711 - protein, 259 aa, Methanosarcina barkeri str. Fusaro
MLKVDNLSFGYDRVPVFKGISFGVEKGSLCGLFGPNGSGKTTLFKCCMGFLKYDSGSVSIDGCNVKNKKIEELAKLVAYVPQEHKPPFPYLVKEVVLMGRTPHMGGIFGISEDDKSKVKEAMEMLEISHLADKPYNQLSGGQRQLVLIARALAQETPLMLLDEPTSALDFCNQIRIWNILKKISAKGTTILACSHDPNHISWFCDDVIVMYRGGLVAKGNPKSVVSEQLLSTIFNGICSVGYMDHLMMVYPKNIQSGVQ

SEQ ID NO: 72712 - DNA, 783 bp, Methanosarcina barkeri str. Fusaro
  CDS (1)..(783): transl_table=11
atgatactttcagtagaggaacttgaatttttgtatcgcaaccgtaaaattctccatgaaatagccttttccatcgaggaaggagaaattgtagcaatccttgggcccaatggggttggcaagactacacttttaaaatgtcttaacaaaattctccgccctaaaggaggaacagttcatcttgatggaaataacctttttgacctgggaacaatggagatcgcacgccttgttgggtatgttccccagcgggtggaaaccgggaggttgacagcttttgatgcagtcctgctcggaaggcggccacatatcaaatgggacgtcaccgaaaaagaccttcaaatagtcgattccgtcttcaagttactttccatggaaaaacttcgcctttcatatatcgatgaaatgagcggaggtgaactccagaaggtcgcaattgcacgttcactcgtacaggaaccaaaagtccttcttcttgacgaacctacaagcagccttgatatgaaaaatcaggttgaaattctggctattatcaggcagattgtccttgagcacagaattgcagccataatgacaatgcatgaccttaaccaggccctcaggtacgcagataggtttattttcctgaaagaagggaaagttcatgcgcaagggggcgccgaggtaattacacctcaggttatcgaggaagtgtatggtttgcctgtaattatcggggagattgcaggtatgcgctgtgtggttcccggaaatccagaagttgcacttgtacataacctgtaa

SEQ ID NO: 72713 - protein, 260 aa, Methanosarcina barkeri str. Fusaro
MILSVEELEFLYRNRKILHEIAFSIEEGEIVAILGPNGVGKTTLLKCLNKILRPKGGTVHLDGNNLFDLGTMEIARLVGYVPQRVETGRLTAFDAVLLGRRPHIKWDVTEKDLQIVDSVFKLLSMEKLRLSYIDEMSGGELQKVAIARSLVQEPKVLLLDEPTSSLDMKNQVEILAIIRQIVLEHRIAAIMTMHDLNQALRYADRFIFLKEGKVHAQGGAEVITPQVIEEVYGLPVIIGEIAGMRCVVPGNPEVALVHNL

SEQ ID NO: 72714 - DNA, 810 bp, Methanosarcina barkeri str. Fusaro
  CDS (1)..(810): transl_table=11
atgagcaatattatggatattaggaatgcagagttctcttacaacggaaagaaaaacgtcttcaaaaacgtgaacctctcagttgagaagggggacgtcttatgtatactggggcctaacgggaccggaaaatcgactttaatcaaatgtatgaacagcctgcttaaactgaagggtggcgagatattactgaaaaataagagtatttattcaatgaaagaaaccgaacttgcaaaaatcatcggatatatcccgcaatcaaatagttcaatttttgcgttttcagttctcgatatagttctgatgggcagaactccacatttgagtttaacatctgttcccggaacgaaagattataaaattgctgaagaggctctggaaaggcttggaattttgcatctaaagaataaaacctacactgagatcagtggtggtgaaaggcagcttgttttaatggcaagagcaatagctcaacagcccgagatccttctcctcgacgaaccaacatcccatctggattttggaaaccagatacgaacgctcaaagtcataaaggaattgtctaaaactggactatcggttgtaatgacttcacattttccagaccacgccttcttatcctgtaataaggtagctatcatgaatcagggcacaattatggaaacaggaaaaccggaaattgttgtcactgaacataatatgaaacaggcctatggagttgatgttaaaattatagacgtagatgagcatagaagagcatgtattcctatgcaaatacaagaatcacatatgaatataggctgtttctga

SEQ ID NO: 72715 - protein, 269 aa, Methanosarcina barkeri str. Fusaro
MSNIMDIRNAEFSYNGKKNVFKNVNLSVEKGDVLCILGPNGTGKSTLIKCMNSLLKLKGGEILLKNKSIYSMKETELAKIIGYIPQSNSSIFAFSVLDIVLMGRTPHLSLTSVPGTKDYKIAEEALERLGILHLKNKTYTEISGGERQLVLMARAIAQQPEILLLDEPTSHLDFGNQIRTLKVIKELSKTGLSVVMTSHFPDHAFLSCNKVAIMNQGTIMETGKPEIVVTEHNMKQAYGVDVKIIDVDEHRRACIPMQIQESHMNIGCF

SEQ ID NO: 72716 - DNA, 873 bp, Methanosarcina barkeri str. Fusaro
  CDS (1)..(873): transl_table=11
atgcttcgcgtccatgatctttattttagctatggatcggttcccgtactaaatgggatctctttccatgtcagggaaggagaactttgcgggttattcgggcctaacggatcaggaaagactactctgttcaagtgttgcctcaatttcctcaagaccaaacaaggtaccgttcacatgtgcggcagtgacatatcgaagctttcgataagagaaatggcaaaaatcgtggcatatgtcccgcaggaacacaaacctcccttcccttaccttgtaagcgaagtagtccttatgggaaggaccccgcatctcggaggagtttttggcatcccccgtcgtgataagatgatagcgatagatgcccttgatactcttggcatagctgatcttgcggagcggccttactctcagctctcaggcggccagcgacagatggtactgatggccagagccattgcgcaggacaccccactgatgtttcttgatgaacctacttcagctcttgatttccagaatcagatgcggatatgggaaatcatgcgcacaatcgtagagagcggcaggaccatcattgcatgcagtcacgacccgaatcacgtctcctggttctgcgaccgtgttattgtaattgggaatggtggcataattgctgacggcgatcctgccaagacaatcaacgagcagacccttggccaaatttaccaaaatgcctgcactgtgcagacggtagaaggggtcaggatagtcatgcctgcaggtcttcatacctggaaaaacgaaaaaaaccagtcgcatacctacagtcagcatgtagagcaaaatacgatacggagaatagattatgacatcggacatgataaaattgaacaatga

SEQ ID NO: 72717 - protein, 290 aa, Methanosarcina barkeri str. Fusaro
MLRVHDLYFSYGSVPVLNGISFHVREGELCGLFGPNGSGKTTLFKCCLNFLKTKQGTVHMCGSDISKLSIREMAKIVAYVPQEHKPPFPYLVSEVVLMGRTPHLGGVFGIPRRDKMIAIDALDTLGIADLAERPYSQLSGGQRQMVLMARAIAQDTPLMFLDEPTSALDFQNQMRIWEIMRTIVESGRTIIACSHDPNHVSWFCDRVIVIGNGGIIADGDPAKTINEQTLGQIYQNACTVQTVEGVRIVMPAGLHTWKNEKNQSHTYSQHVEQNTIRRIDYDIGHDKIEQ

SEQ ID NO: 72718 - DNA, 768 bp, Methanosarcina barkeri str. Fusaro
  CDS (1)..(768): transl_table=11
ttgaatctctctatcgacggggttacgctctcatatgcttcggtgcctgtactacatgggatttcaatggagttttgcgaaccgagtgtggttggcataatagggccgaacggggccggaaagagcacactgctccgctgtatcaataacgtccttaaaccaaatagtgggtgggtctgcctggatgggcagaagacccatgacatggacacagtcgaaatcgctcgaaatttcggctatgtgcctcaggagttcccaattacttttcaggcaactgtttttgacacggtgcttatgggcaggcgcccgttctcgtcctggaaggtcagcagggacgatgttgagatcgctgcaggagccatcaagatgctgaatctcgaacaggtagcactcaggtaccactcggaactctcaggtggccaacagcagcgggtaatgattgcaagggcactcgcccagcagagtcgagtgcttcttcttgacgagccgacctccaagcttgacatcaggaaccagctcgaagtaatgaatattatccgcactcttgtagacaaacggggccttctctcaatactcgtgatccatgatcttaaccttgcttcccggtatgtcgaccagctcatcatgctcaaggaaggaaagatatacgcagctgggaaccctgtctcggtcctgacacaggaaaatatcagagtggtctatggtgttgaggctgcggtagtactcgaggataatctgccgcatgtcatcccgaagaggccggtatga

SEQ ID NO: 72719 - protein, 255 aa, Methanosarcina barkeri str. Fusaro
MNLSIDGVTLSYASVPVLHGISMEFCEPSVVGIIGPNGAGKSTLLRCINNVLKPNSGWVCLDGQKTHDMDTVEIARNFGYVPQEFPITFQATVFDTVLMGRRPFSSWKVSRDDVEIAAGAIKMLNLEQVALRYHSELSGGQQQRVMIARALAQQSRVLLLDEPTSKLDIRNQLEVMNIIRTLVDKRGLLSILVIHDLNLASRYVDQLIMLKEGKIYAAGNPVSVLTQENIRVVYGVEAAVVLEDNLPHVIPKRPV

SEQ ID NO: 72720 - DNA, 828 bp, Dehalococcoides sp. CBDB1
  CDS (1)..(828): transl_table=11
atgtttgagcttgaagtacgagacgtaaccctggcctatggtccggttgatgttctgaaaaatgtcagctttaaaaccatgcccggtgagatgattgggttggtaggaccgaatggttcaggtaaatctaccctgataaagtctttggccagagtaatagacccgcgtttgggcagtatttatatcaatgggcgtaattcacgctctataccccgtttggaactggcaaaaatggtaggggttgtgccccagataccggtactccccagtgcttttaccgcttttgagattgttctgatggggcgaaacccccatatgggtactttccagtatgaaagccacaaggatatcgctatagcatgggaggctctggcaagggcaggggtactgcatctggctgaccgccaaatcggcgaactttccggcggggagatacaaagtgtggttattgcccgctctctgtgccagaaaactgaagcaattttgctggatgagcctacttccaatctggatataggccgccagatagagatactggaccttatcaaatctgagtgccgcgaacggaatattaccgttattgccgctttgcatgacctgaatctggctgcccattattgcgaaaggcttatactcattgacaacaatggcattcatgcagatggcagtccggttgaggtaataactaccgataatataagccgtgtttacggccccggcagttatgtccatacccacccactcagcgggcttccggcagtactgccgcgtctgggtaatatccggtgcaatgcaaacggtgaaaagggaggcacggatgctcactga

SEQ ID NO: 72721 - protein, 275 aa, Dehalococcoides sp. CBDB1
MFELEVRDVTLAYGPVDVLKNVSFKTMPGEMIGLVGPNGSGKSTLIKSLARVIDPRLGSIYINGRNSRSIPRLELAKMVGVVPQIPVLPSAFTAFEIVLMGRNPHMGTFQYESHKDIAIAWEALARAGVLHLADRQIGELSGGEIQSVVIARSLCQKTEAILLDEPTSNLDIGRQIEILDLIKSECRERNITVIAALHDLNLAAHYCERLILIDNNGIHADGSPVEVITTDNISRVYGPGSYVHTHPLSGLPAVLPRLGNIRCNANGEKGGTDAH

SEQ ID NO: 72722 - DNA, 1002 bp, Anabaena variabilis ATCC 29413
  CDS (1)..(1002): transl_table=11
atgattttgaggactcaggatttatgtattggttataagtcggggaaggggttgcggtgtgtggcgagggatatttctgtgtgtctggaagctggggaattggtgtgtttacttggccctaatggtgcgggtaagtctaccttactgcgatcgctcgccggaatgcaaccacctctagcgggtcaggtgcggcttttgggtgatgatatctataagttagcaccgcaggatttagccaagcggttgagtttggtgctgacggaaagggtggatgtgggtatgttatcggcttatactctggtgagtttgggacgacatccttatactgactggtggggaaaattaacgcctgaagatgaggctatagtacattgggcaataaaatctgtaggtgcattaaatttagctgcgcgtcaagttagcgaactcagtgatggtgaacgtcaaaaaattatgattgcacgtgctttagcacagtcgccgatggtgatgttgctagatgaaccgacggcatttttagatttaccacggcgggtggaaattatgcaactgttacgccagttagcacgagaaaatcagcaagcgattttactttctacccatgatttagatttagctttgcgtctagctgaccaagtttggttattaacatctgagggaattttacacattggcgcaccagaagatttggtattaagtggtgcttttgctgatactttccgcagtgaaggtgtagagtttaatattttttctggtgagtttcatttacatacacaccaaaaaggcaatattaattttatcggtgagggtatcgctgcggtgtggacgatgcgtgctttgaaacgtgcaggatttcaagtctttcaaagtgaaaataatttaccaatttcaatagaagtaatatcaaattcaagaaaattgatgtggaaaattaccaacagccagaccgtaaatatttataattcactgtacgatgtaattaaatatataaatttattatag

SEQ ID NO: 72723 - protein, 333 aa, Anabaena variabilis ATCC 29413
MILRTQDLCIGYKSGKGLRCVARDISVCLEAGELVCLLGPNGAGKSTLLRSLAGMQPPLAGQVRLLGDDIYKLAPQDLAKRLSLVLTERVDVGMLSAYTLVSLGRHPYTDWWGKLTPEDEAIVHWAIKSVGALNLAARQVSELSDGERQKIMIARALAQSPMVMLLDEPTAFLDLPRRVEIMQLLRQLARENQQAILLSTHDLDLALRLADQVWLLTSEGILHIGAPEDLVLSGAFADTFRSEGVEFNIFSGEFHLHTHQKGNINFIGEGIAAVWTMRALKRAGFQVFQSENNLPISIEVISNSRKLMWKITNSQTVNIYNSLYDVIKYINLL

SEQ ID NO: 72724 - DNA, 801 bp, Rhodobacter sphaeroides 2.4.1
  CDS (1)..(801): transl_table=11
atgaccgacaatgcgctggtggtcagcgagcttgccgctggctacggcgaccggcaagtgctgcgcgggctcgatctcgcggtggcgcccggccggatcaccgccatcgtcggcgcgaatgcctgcggcaagtccacactactgcggacgctgtcgcggctcctttcgcccgccgaggggcaggtgctgctcgacggccgctcggtccatcgcatccccccgcgcgagcttgcccgccggatggggctcctgccgcagtcgccgctggcgcccgacggcatcaccgtgctcgatctggtgagccgcggccgccacccgcatcaggggctcttctcgcgctggagcgccgccgacgatgcggcggtggccgccgcgctcgaggcgacgggcaccatggatctggccgagcgcgcggtggacgagttgtcgggcgggcagcgccagcgggtctggatcgccgtcgcgctggcgcaggagacggggatcctgctcctcgacgagcccaccacctttctcgacatcgcccatcaggtcgaggtgctggacctgctcaccgatctgaaccgcgcgcaggggaccaccatcgtcatggtgctgcacgacctgaacctcgccgcccgctatgccgacgcgctggtggcgatggccgggggccgcatccatgccagcggtccgcccgagacggtcctgaccgaagagatggtgcaggcggtcttcgggctgccctgccggacgctccccgatccggtgagcggccggcccatgatgctgccgatcggccgccaccgcgccggcggctga

SEQ ID NO: 72725 - protein, 266 aa, Rhodobacter sphaeroides 2.4.1
MTDNALVVSELAAGYGDRQVLRGLDLAVAPGRITAIVGANACGKSTLLRTLSRLLSPAEGQVLLDGRSVHRIPPRELARRMGLLPQSPLAPDGITVLDLVSRGRHPHQGLFSRWSAADDAAVAAALEATGTMDLAERAVDELSGGQRQRVWIAVALAQETGILLLDEPTTFLDIAHQVEVLDLLTDLNRAQGTTIVMVLHDLNLAARYADALVAMAGGRIHASGPPETVLTEEMVQAVFGLPCRTLPDPVSGRPMMLPIGRHRAGG

SEQ ID NO: 72726 - DNA, 753 bp, Carboxydothermus hydrogenoformans Z-2901
  CDS (1)..(753): transl_table=11
atgcttttagaggtagtcggtgtgtcctttgattatcccagtaaagctgtgcttaataatgtaagctttaaagttgctgaaggagaaatattagcaatcttgggcaataacggtgcaggtaaatcgactttattaaaatgtttaagccgtaaccttaaaataaaaaaaggggctgtttatttggaaggccaagagatatttcgaaccaatcttcgttggtttgcaggtaaagtgggatatatggcccagcgccaagaggtaagccgcttgaccgtgtttgacacagttttggtggggagaaggcctcatatccggcttgaggcaacgcaaaaagatctggaagtggtggaagaggttttaaagattttggaaatggaagagtttgctttacgttttctcgatgagttaagcggcggtgagttacaaaaagtagcagtggccaggcttttggcccaggaaccgaaacttcttcttttagacgaaccgacaagcaatttggatctaagacaccagtatgaaattctgaaactcttaaaaaagtttgcccgggagcggaaaatgaccataatagccattcttcacgacctcaatcaggcgttacgttttgccgataaatttttactgataaaagatggtgaaattgtggcctttggtgatgaaaaagtattgagtacggaaaacatttatcaagtttatggtattaaagctatagtctacaaaattaataatgttccggtggtaatcccgcagtag

SEQ ID NO: 72727 - protein, 250 aa, Carboxydothermus hydrogenoformans Z-2901
MLLEVVGVSFDYPSKAVLNNVSFKVAEGEILAILGNNGAGKSTLLKCLSRNLKIKKGAVYLEGQEIFRTNLRWFAGKVGYMAQRQEVSRLTVFDTVLVGRRPHIRLEATQKDLEVVEEVLKILEMEEFALRFLDELSGGELQKVAVARLLAQEPKLLLLDEPTSNLDLRHQYEILKLLKKFARERKMTIIAILHDLNQALRFADKFLLIKDGEIVAFGDEKVLSTENIYQVYGIKAIVYKINNVPVVIPQ

SEQ ID NO: 72728 - DNA, 831 bp, Burkholderia sp. 383
  CDS (1)..(831): transl_table=11
atgagcgggctgacgatcgaagggttgaccgtgcgttacgggcggcgcgacgtgctcgcgtcgctgagcgcggggccgttgccgcgcggccggatcaccgcgctgctcggcccgaacggcagcggcaagtcgacgctgctgcgtacgctcgccgggctgacgcgtgctgcgtcgggctcgctcgcgctcgacggcacgccgccgttcgtcccggggctgcgcgatgcgcgttcgcatggcgtcgtgtacctgccgcagacgttgccggccggcgtgcgcctgcaggtgctcgaatcggtcgtcgtcgcgcgccgcgcgacacggcagggcttcatgccggccggtcgcggcgggagcgaagagggggacgacacggtcgcactcgcgttgctcgcccggctcggcatcgatgcactcgcgctacgcaccctcgacgaactctccggcggccagcgccagctcgtcggcctcgcgcaggcgctcgcccgcgatccgcaggttctgctgctcgacgaaccgctgtcggcactcgatctgaatcaccagcaccaggtgatggccgcgctgcgcgacatcacgcgcgaacggcagctcgtgacggtcgtcgtgctgcacgacatcagcgccgcgctgcgaggttgcgaccgcgcgatgctgctgcaccgcggccgcatcgcgcgcttcggtacgccggaagacgtcgtgacgccggccggcctcgccgacgtgttcggcgtcgccgcgcgcatcgagcgctgctcgcacggccagctccaggtgctgatcgacgggctcgccgcccacgacccggttgccgccccatcgcgctag

SEQ ID NO: 72729 - protein, 276 aa, Burkholderia sp. 383
MSGLTIEGLTVRYGRRDVLASLSAGPLPRGRITALLGPNGSGKSTLLRTLAGLTRAASGSLALDGTPPFVPGLRDARSHGVVYLPQTLPAGVRLQVLESVVVARRATRQGFMPAGRGGSEEGDDTVALALLARLGIDALALRTLDELSGGQRQLVGLAQALARDPQVLLLDEPLSALDLNHQHQVMAALRDITRERQLVTVVVLHDISAALRGCDRAMLLHRGRIARFGTPEDVVTPAGLADVFGVAARIERCSHGQLQVLIDGLAAHDPVAAPSR

SEQ ID NO: 72730 - DNA, 816 bp, Desulfovibrio desulfuricans G20
  CDS (1)..(816): transl_table=11
atgacgcaacctgtcatagatgtgaacgctgtcagcttcagctacgacagccgcacagcttacggtgaccgggggctggcactggacaacgtctcgctgcgtgtggacgagggcgagtatcttgcggtgcttggccccaacggcggcggcaagaccacactgttcaagctgttgctggggctgctgaaacccacagcaggaacagtgcgcctgttcggcgaagaaccgcgggaagtactgcacaaggtcggctatgtaccgcaaagtatcacggcgaagccctcttttcctgccagtgcgcttgatgtggtgctgatggggcttgccaaccgtgacggaaaagggctgttcggcaggtggcgacatacccctgccgaacggcagaaagccatgcagtgcatggagaccgtcgggctggagcatcttgcggccagccgcttttcagacctgtcaggcggacagcgccagcgggtgcttgtggcgcgggcgctggtttccgacccgctccttctgctgctggatgagcccacttccaacatcgacccgcaaggcaagttctgtttctacgagtttctggcagagctgcgcggccccatgaccattgttgtggtcagtcacgatctgtccattgccggttccgcgttcagtgccgtggcacttgtcaacaaaacgctgaggtacaatgcggggcccgcattgactgccgagatgctgaccatgctctacggcactcacgataaaacctgccccatgggcacattcatcaactccgtttcgaccatctttcccacgctgccggagaaaaaacatgattga

SEQ ID NO: 72731 - protein, 271 aa, Desulfovibrio desulfuricans G20
MTQPVIDVNAVSFSYDSRTAYGDRGLALDNVSLRVDEGEYLAVLGPNGGGKTTLFKLLLGLLKPTAGTVRLFGEEPREVLHKVGYVPQSITAKPSFPASALDVVLMGLANRDGKGLFGRWRHTPAERQKAMQCMETVGLEHLAASRFSDLSGGQRQRVLVARALVSDPLLLLLDEPTSNIDPQGKFCFYEFLAELRGPMTIVVVSHDLSIAGSAFSAVALVNKTLRYNAGPALTAEMLTMLYGTHDKTCPMGTFINSVSTIFPTLPEKKHD

SEQ ID NO: 72732 - DNA, 738 bp, Synechococcus elongatus PCC 7942
  CDS (1)..(738): transl_table=11
atgctcgagatccagcacctcagcgtttgctatcgccagcagcgggtcttagaagatatttgtctacaggtgcaggccggtgagcagttagctctgattgggccgaatggtgctgggaaaagtacgttggtgcgcgccattctggggttgctgacaccctatgccggagaagtgcgctggcgcggtcgacccttgcggcggggtcagcgttcgatcgcctacgtgccccagcgatcgcagattgattggcagtatccaatcaccgtggaaacagtggtgcgactgggggctgaggttcgttcttggtgggggcgatcgccccaaacaggatcgcggatcgcggcggctctcgaacaagttcaattgactgagctacgccaccggcccttggcggaactgtctgggggtcagcagcagcgggtatttttggcgcgggcgatcgcccaaggagccgatctgctgctgctagatgagccctttactggcatcgatcacccgaccgagcggctgatgcagaatctattccagcagtttgcccagcagggaaaaaccctgattgtctgtagccatgaatggggcgacgccctccagcgctacgatcgcctgatcttgctgaaccggcggatcatctgccacgacattcccgatcgagccctgacgccgcagaacttgcagcaaacctttggtgcgcgccagcctgatgctccccctgatcgacaatggggctttgcttgctag

SEQ ID NO: 72733 - protein, 245 aa, Synechococcus elongatus PCC 7942
MLEIQHLSVCYRQQRVLEDICLQVQAGEQLALIGPNGAGKSTLVRAILGLLTPYAGEVRWRGRPLRRGQRSIAYVPQRSQIDWQYPITVETVVRLGAEVRSWWGRSPQTGSRIAAALEQVQLTELRHRPLAELSGGQQQRVFLARAIAQGADLLLLDEPFTGIDHPTERLMQNLFQQFAQQGKTLIVCSHEWGDALQRYDRLILLNRRIICHDIPDRALTPQNLQQTFGARQPDAPPDRQWGFAC

SEQ ID NO: 72734 - DNA, 825 bp, Rhodospirillum rubrum ATCC 11170
  CDS (1)..(825): transl_table=11
atgagcccaccgcctttgctcgccgttacggatctggcctgcggctatcgcggtcgccgggtgctgggggggatcgggttcaccctggcggcgggggacctgctttgcctgctcggtcccaatggcatcggcaagaccacgctgtttaaaaccctgttgcggctgctgccccgccttggcggcgagatccgcctgaacggccgggatgtggcggggtggacggccaagcgcttcgccgccgtggtcggctatgtgccccaggcccatgtgccgccctttcccttcagcgtgtccgatgtggtggttctgggacgggtcgcccatatgggggccttcgccgccccctcgcgcgccgatcggctgatcgccacccaggccctcgacctgctgggcgcccgtcatctggccgaggagccctataccgaaatcagcggcggcgagcgccagttggtgctgatcgcccgggcgctggcgcaaagcccttccctgctgatcatggacgaaccgaccgccaatctggatttcggcaatcaactgcgcgtgctcggccatatccgtaagctggtcgaagactccgggctggcggtggtgatgaccacccacgatcccaaccacgccctgcaccacgccacccgggtggccgcccttggccgcgatggccggctggccgtcggcgctcccaccgaggtggtgagcgccgccttcttgcgtgagacctatggcgtgtcctgccgccttgcccccacccccctccccggccgccccgaggcccgcacctgcctgcccggcgacgatccggtcgaaagcctcggtccgcgaggataa

SEQ ID NO: 72735 - protein, 274 aa, Rhodospirillum rubrum ATCC 11170
MSPPPLLAVTDLACGYRGRRVLGGIGFTLAAGDLLCLLGPNGIGKTTLFKTLLRLLPRLGGEIRLNGRDVAGWTAKRFAAVVGYVPQAHVPPFPFSVSDVVVLGRVAHMGAFAAPSRADRLIATQALDLLGARHLAEEPYTEISGGERQLVLIARALAQSPSLLIMDEPTANLDFGNQLRVLGHIRKLVEDSGLAVVMTTHDPNHALHHATRVAALGRDGRLAVGAPTEVVSAAFLRETYGVSCRLAPTPLPGRPEARTCLPGDDPVESLGPRG

SEQ ID NO: 72736 - DNA, 783 bp, Moorella thermoacetica ATCC 39073
  CDS (1)..(783): transl_table=11
atgaagctggagcttaaaggcgtgacctgtggctactggggccgggcggtcgtcagcggggtatctatggaggtagagtccggggaaataatgtgcctgctggggcctaacggttcggggaagacgacgcttttcaaaactatactgggcctgataaaaccccaggcgggggatatcctcctcggaggtaaaaatatctgcggctggccgcaggcccggatagccagggtcatgggctacattccccaggcccataacccgccctttcccttcaaagtcctggacgtggtcctcatgggccgcacggcccacctgggcaccatggccgcgccgggccgagaggatgtggccatcgcccgccgggccatcgccaccctcaatatctctcacctggaggaccggatctatacggagatcagcggtggtgaacggcaactggtcctcatcgctcgcgccctggcacaggagccccggctccttattatggacgaacccacctcggctctggacttcggcaaccagctcctggtcttaagccacatcaagcggctggcgcagatggggctggccatcatcatggcttcccactttcccgaccacgccctcctctatgccagtaaagtaatgcttctgaagaagggccaggtctatagcctgggccggccggaggagacggtgaccgaagaaagcctcaaaaacctttacggtgtagacgtgaagataatcagcaccagcttaccgggggagcagaaagcgcaggtctgcattccggtgagcaggtga

SEQ ID NO: 72737 - protein, 260 aa, Moorella thermoacetica ATCC 39073
MKLELKGVTCGYWGRAVVSGVSMEVESGEIMCLLGPNGSGKTTLFKTILGLIKPQAGDILLGGKNICGWPQARIARVMGYIPQAHNPPFPFKVLDVVLMGRTAHLGTMAAPGREDVAIARRAIATLNISHLEDRIYTEISGGERQLVLIARALAQEPRLLIMDEPTSALDFGNQLLVLSHIKRLAQMGLAIIMASHFPDHALLYASKVMLLKKGQVYSLGRPEETVTEESLKNLYGVDVKIISTSLPGEQKAQVCIPVSR

SEQ ID NO: 72738 - DNA, 768 bp, Moorella thermoacetica ATCC 39073
  CDS (1)..(768): transl_table=11
atgatcctggcggtagacggggtggaattcagctataacagccacgccgtgttgcgcgatataaagtttgcagtcgcacggggcgagtttctggctatcctgggcaacaacggcgcggggaaatccaccctgttgaagtgcctgaataaaatattaaaaccccggcgcgggacgattatgattgaaaaagataatatctttaacctcagccggctggaagtggcccgcaaaatggggtacgtggcccagaggtacgaaagcggccgggttaccgtctttgacgccgtgcttctgggccggaaaccccatatcaaatgggatgtttccccccgagatctggaggttgtgcaaagggttttacgcgtcctggacctggaagggtttgctttacgctatctcgacgaactgagtggcggcgagctgcagaaggtaatcattgcccgggccctggcccaggaacccggcgtcctgctattggatgaacccaccagcaatctggatttaaaaaatcagctggaggttttaaagactatcaaaggcgccgtaaaggagcaaaagctggcggctgtggtggtcatgcacgaccttaacctggccttgcgttttgccgataaatttttgctcctgaaaaatagcaccgtctttgcctgcgggggaatggaaatcatgacgccggaaaacctgaccagcgtttatggcgtgccggtcaccctggcgaggatggggcctatcccggtaattgttccgcttattcctgggggcccatga

SEQ ID NO: 72739 - protein, 255 aa, Moorella thermoacetica ATCC 39073
MILAVDGVEFSYNSHAVLRDIKFAVARGEFLAILGNNGAGKSTLLKCLNKILKPRRGTIMIEKDNIFNLSRLEVARKMGYVAQRYESGRVTVFDAVLLGRKPHIKWDVSPRDLEVVQRVLRVLDLEGFALRYLDELSGGELQKVIIARALAQEPGVLLLDEPTSNLDLKNQLEVLKTIKGAVKEQKLAAVVVMHDLNLALRFADKFLLLKNSTVFACGGMEIMTPENLTSVYGVPVTLARMGPIPVIVPLIPGGP

SEQ ID NO: 72740 - DNA, 909 bp, Burkholderia thailandensis E264
  CDS (1)..(909): transl_table=11
atgcatgcgctcgaactcgatcacgtgacgctcgcgctcggcggccgcacgatcctgcgcgacgtgagcttcgccgtcgaatcgggcgaattcgtcggcgtgctcgggccgaacggcgcgggcaagacgacgctgatgcgcgccgtgctcggcctcgtgccggcgcagtccggcgtgattcgcgtcgcgggcgagcccgtggcgcgcggcaatgcggcgatcggttacatgccgcagatccgcagcgcgctcgccgggcggcgcgtgcgcggccgcgatttcgtcgcgatggcggcggacggccaccgctgggggctgccgcgcgcgagcgccgcggtcgcggccgacgtcgatcgcgtgctcgatctcgtcggcgcgagcgcgctcgcgacgcgcccgctgtccgagctctccggcggcgagcgccagcgcctgctgctcgcgcaatgcctgctcggcgcgccgaagctgctgctgctcgacgagccgctcatcagcctcgatccgaaccatcagcgcggcgtcgtcgagctcgttcggcgcgtgcagcgcgagctcggcatcaccgtgctgttttccgcgcacgagctcaatccgctcctgaacgcgctcgaccgcgtgctgtatctcggcaacggcgtcgcggcgctcggcaccgtcgacgaagtgatcacgaagcccgtgctgtcgcgcctgtacggctcgccgatcgacgtgatgcgcgtgaacgggcgcatcttcgtgatgtccggcgacgtcgaagtcgagaagcacgatcacggacacgaggacgagcacgaccacgatcatggtcacgggcatggccacgcgcacggccacgcgcacggccacgcgcacggccacgggcatgcgcactcacacggcggcgggcactcacacgatgtttga

SEQ ID NO: 72741 - protein, 302 aa, Burkholderia thailandensis E264
MHALELDHVTLALGGRTILRDVSFAVESGEFVGVLGPNGAGKTTLMRAVLGLVPAQSGVIRVAGEPVARGNAAIGYMPQIRSALAGRRVRGRDFVAMAADGHRWGLPRASAAVAADVDRVLDLVGASALATRPLSELSGGERQRLLLAQCLLGAPKLLLLDEPLISLDPNHQRGVVELVRRVQRELGITVLFSAHELNPLLNALDRVLYLGNGVAALGTVDEVITKPVLSRLYGSPIDVMRVNGRIFVMSGDVEVEKHDHGHEDEHDHDHGHGHGHAHGHAHGHAHGHGHAHSHGGGHSHDV

SEQ ID NO: 72742 - DNA, 837 bp, Syntrophus aciditrophicus SB
  CDS (1)..(837)
atggtcgttctgaatcttgaaaacgtcagtttccgttatggccaggaagccgagtgcgtgcttcggaacatctcctgcactgtgccgcggggagaatttctgggggtgataggacccaacggatcggggaaaacgacacttctgcggatctgcaacgggattctttctcctcaacagggaacggttgccgtcaagggaacggatatccggcagatccggcgaaacgtcctggcccggaccattgcctttgtgccccaggattcgcccgacctgttccctttcactgtagaggaaaccgtcctcatgggcagggcgcctcacctgggaaaactgcaattcgaaggggaaaaagattttgccattgcccggcaggccatggaggcaacaggcacgcttcctctggccggccggcacatgaccgacctgagcggcggggaaaaaaaacgggtggtgatcgccagggcgctggctcaggaacctcagatcctttttcttgacgaatccacagcttatctggatatgaaacactcgaaggcgattttcgatctgctgaaaatcatgaacaaaaccaatcatttgaccgttgtcgtcgtgacccacgacatcaatacggcttccctctactgcgaccggctcctgcttttaagccggggcaacattttcgcggcggggcgtccggaagacgtagtcactgaatccaacatccgggaggtttatgaaacccgggtaacaatcgagcgcaatccgatcagcggattgccgagaatctctttgctgcctgaaagtctgtcagattcaaggaagccggtaaaagccggcgctgccccgcaactgtaa

SEQ ID NO: 72743 - protein, 278 aa, Syntrophus aciditrophicus SB
MVVLNLENVSFRYGQEAECVLRNISCTVPRGEFLGVIGPNGSGKTTLLRICNGILSPQQGTVAVKGTDIRQIRRNVLARTIAFVPQDSPDLFPFTVEETVLMGRAPHLGKLQFEGEKDFAIARQAMEATGTLPLAGRHMTDLSGGEKKRVVIARALAQEPQILFLDESTAYLDMKHSKAIFDLLKIMNKTNHLTVVVVTHDINTASLYCDRLLLLSRGNIFAAGRPEDVVTESNIREVYETRVTIERNPISGLPRISLLPESLSDSRKPVKAGAAPQL

SEQ ID NO: 72744 - DNA, 777 bp, Syntrophus aciditrophicus SB
  CDS (1)..(777)
atgcccatagatgtgctttctgttgaacgcctgaatttttattataattcgacagaagtcctgagcggcatctcactggttattcatcagggagattacatcggtctggtaggccccaacggttcgggaaaaacgaccctgatcaaagtgcttctgggacttctgcctttcaatcacggccggataagtctcttcggtcaggacatcgtctctttcaaggaatggaacaggatcggatatttaccgcagaaggctgcttccattaatccgcggtttccggccactgtgatggaaatcgcagccatgggattgctggccagcaagaccttcccccggtacattcgacacagggatcgggaaatcatcgaagatactttgaaatcactggggattttagatctcaggaaccggctgatcggggaactttctggcggccagcagcaacgggtattgctggcaaaggccattgttggcaatcctgattttctgattctcgatgaaccgaccagcgccctggatccccatacgagagagcgcttctttgacctgctccgggaaatgaacgaacagagacgaatcacgattatcctcgttacccatgatattgccaacatcggtcgatattcctcgaagctcctgtacctggacaaaactattattttttacggaagttttttagatttctgtgagtcttcggatgtcacccgcctgtttggaagttttgcccagcacatcatctgccatcgtcacgatcacaacaaccggaaaacaggctga

SEQ ID NO: 72745 - protein, 258 aa, Syntrophus aciditrophicus SB
MPIDVLSVERLNFYYNSTEVLSGISLVIHQGDYIGLVGPNGSGKTTLIKVLLGLLPFNHGRISLFGQDIVSFKEWNRIGYLPQKAASINPRFPATVMEIAAMGLLASKTFPRYIRHRDREIIEDTLKSLGILDLRNRLIGELSGGQQQRVLLAKAIVGNPDFLILDEPTSALDPHTRERFFDLLREMNEQRRITIILVTHDIANIGRYSSKLLYLDKTIIFYGSFLDFCESSDVTRLFGSFAQHIICHRHDHNNRKTG

SEQ ID NO: 72746 - DNA, 867 bp, Syntrophus aciditrophicus SB
  CDS (1)..(867)
atggaactgaaaccgttgattcaagtggaagagatatcgttcggctatacggaggagaacgtgctgagcgatatcagttttaccataaagaaaggtgagatcgttaccctgctcggacccaacggctgcgggaaaagcaccctcatcaagatcatgcttggcctcctccgtccggcagggggcgatattttcttcaacgggaaaaatattcagcagatgagctccaaatcccttgccagggaagtcgcctatgtcccgcagctccacaaaagttcctttccgtatacagtaagggatgtcgtgctgatgggacgaattccgcacaaggccttctttttccaatactcgaaggccgacatggagattgccgccgatgcgctcgggagactctccatttcccaccttgcggacagggcctacacggaaatcagcggcggcgagcggcagctcaccctcattgcccgggcgcttgcccagggggcgaagaccttcatcatggacgaaccggcaagcggcctcgattacgggaaccagatgagactcctcgatcagattatcaagctttcccgggaaggatacaccttcatcaaatcgacccattcccccgagcacgccctctggatcgcggaccgtgccatcatgataaaaaacggcgctctcatggcggacggaaaatgtgatgaggtcatcagcagcaaaaatctcttccacctctataacgccagggtcaatgtgctgaagctcaacaggtccctgcgggtgtgcgtcccccagacgatctgcggctgtacggagttcgctcattcaccgctgccgccgtgtgaactgggggagcccatttcatgttcagcggttcggggtggataa

SEQ ID NO: 72747 - protein, 288 aa, Syntrophus aciditrophicus SB
MELKPLIQVEEISFGYTEENVLSDISFTIKKGEIVTLLGPNGCGKSTLIKIMLGLLRPAGGDIFFNGKNIQQMSSKSLAREVAYVPQLHKSSFPYTVRDVVLMGRIPHKAFFFQYSKADMEIAADALGRLSISHLADRAYTEISGGERQLTLIARALAQGAKTFIMDEPASGLDYGNQMRLLDQIIKLSREGYTFIKSTHSPEHALWIADRAIMIKNGALMADGKCDEVISSKNLFHLYNARVNVLKLNRSLRVCVPQTICGCTEFAHSPLPPCELGEPISCSAVRGG

SEQ ID NO: 72748 - DNA, 801 bp, Syntrophus aciditrophicus SB
  CDS (1)..(801)
atgattctctccgtttccggcatcgagttcgcctacaacagtcgtcctgttctcgacggtgtgaccttcgagctccacaagggacaaatcctgggcatccttggaaagaacggcgcaggcaaatctacgctcctgaagtgcctcaacggaatccttcaggcccatagggggacggtgtttctcaacaatcaggatatccgccgcctgcggggagacgaaatcgcccgaatggtcggctacgtcccgcagcgctatggaaacgaacctttgactgtctatgacgcggtccttctgggacggaggcctcacatccggtggacggcaacccgtcgggatcttgaggtggtggaggcggtcctgagtctgatgcgcttaaaggctttcgccctgcgcccggtaaacgagctcagcgggggcgaggcccagaaggtgatcatcgcccgcgcccttgctcaggagccggaattgcttctactcgatgaacccctgagcaaccttgatctgggaaaccaggttgaagtaatgcagcttatgaagagggccgtccgggagcgtgacctgacggcaatcctgtcgctccacgacgtcaacaccgccctgcgttttgctgaccgttttttgcttctcaaagaagggcgagtccacgccttcgcgacccgtgaaaccctttcggcggccatcatcgaagaggtctacggcgtccgggtcctcctgcaggagattcagggttaccccgtcatggtgccctggcctcgcccttttgaatcacaacccttgaaggagcacatcgatgcgatttaa

SEQ ID NO: 72749 - protein, 266 aa, Syntrophus aciditrophicus SB
MILSVSGIEFAYNSRPVLDGVTFELHKGQILGILGKNGAGKSTLLKCLNGILQAHRGTVFLNNQDIRRLRGDEIARMVGYVPQRYGNEPLTVYDAVLLGRRPHIRWTATRRDLEVVEAVLSLMRLKAFALRPVNELSGGEAQKVIIARALAQEPELLLLDEPLSNLDLGNQVEVMQLMKRAVRERDLTAILSLHDVNTALRFADRFLLLKEGRVHAFATRETLSAAIIEEVYGVRVLLQEIQGYPVMVPWPRPFESQPLKEHIDAI

SEQ ID NO: 72750 - DNA, 858 bp, Frankia sp. CcI3
  CDS (1)..(858): transl_table=11
atgacgggccttcgcctggaaggtctgggtgtcgtcgccgacggggtacagatcgtgcgcgacctgacggtcggctgtccccccggcgccttcgtcggcctggtcggtccgaacggcagcgggaagtcgaccgtgctgaagacggtctaccgggtggtgcggccgacgtccggtgcggtgctgctcgacggaactgacctggtcagggacctcaccccgcgccagtcggcgcggcgggtcgcggccctggcgcaggaaagccccgatggctttgacttcaccgtccttgaggtggtcgcgaccgggcggaccccccaccagagcgcgtggagcccgacctcgaccggggatcatgagatcatctcggccgcgctcgacaccgtgggcatggccgcgcacgccgggcgggcgttcgcgtcgctgtccggcggcgagaagcagcgggtcctgctggcgcgcgccctcgtgcaggcaccgtcggtgctgatcctggacgagccgaccaaccatctggatatcagcacccagctgagcctgctggagttggtgcgctcactcgggatcaccgtgctcgccgcgttacatgacctcaacctcgcgacggccttctgtgaccggctctatgtcctgcacgacggcgcggtgatctgttcgggcaaaccggaggacgtcctgaccgccgacctcatcggccgcgtgttcggggtgcgcgccgaccggagcgtccacccggtgaccggccgcctccagctcgctttctccagtcttcccttccccagcctgccttcttccagcctgcccggaacagacgagccggccccggtggtagctggcgcggaaatcccgataaagcaatga

SEQ ID NO: 72751 - protein, 285 aa, Frankia sp. CcI3
MTGLRLEGLGVVADGVQIVRDLTVGCPPGAFVGLVGPNGSGKSTVLKTVYRVVRPTSGAVLLDGTDLVRDLTPRQSARRVAALAQESPDGFDFTVLEVVATGRTPHQSAWSPTSTGDHEIISAALDTVGMAAHAGRAFASLSGGEKQRVLLARALVQAPSVLILDEPTNHLDISTQLSLLELVRSLGITVLAALHDLNLATAFCDRLYVLHDGAVICSGKPEDVLTADLIGRVFGVRADRSVHPVTGRLQLAFSSLPFPSLPSSSLPGTDEPAPVVAGAEIPIKQ

SEQ ID NO: 72752 - DNA, 774 bp, Desulfitobacterium hafniense Y51
  CDS (1)..(774)
atgattttagaagtgcgggacctttgttttgcctacggcaagggcagcaggctgctgaagaatgtttgcttcaccttaaaaaaaggcgagatcttttccatactcggccccaacggagcaggaaagtctacgctgcttaactgcatgatgaatttgctgactcctgaaagcggttcgattcaggtacacggccaacctctggcagcaatggatgtacgtgagattgccaaaaccatcggctatgtgcctcagacccattccctggtctatgattattccgtgcgggactttgtcgtcatggggcgcacgccgtatttggctgcttttcagcagcccggtgctcaggactacgccatggtggacgctgccttggcgcaattgggtatagccagattaagtgagcggccctacacagcactcagcggcggggagcgccaacaggttaccattgcccgcacccttgtccagcgtccccagatcatcattctcgatgaacccacatcttacctggactacggaaatcaaatccgggtgctgcagctgattaagagtttagcggctgatggctattccattatcatgaccactcatatgcccgaccatgccctgcgcttagggggaaaagtcggcattcttgatcgcggcgggcagttcagcgtgggcaaaacggaagagatgctgaccacggagcggttaagcgacctctatgccagcgatatccgtatcgtctatgtagaagaactgggacgctccatatgtgcggcggcccaatag

SEQ ID NO: 72753 - protein, 257 aa, Desulfitobacterium hafniense Y51
MILEVRDLCFAYGKGSRLLKNVCFTLKKGEIFSILGPNGAGKSTLLNCMMNLLTPESGSIQVHGQPLAAMDVREIAKTIGYVPQTHSLVYDYSVRDFVVMGRTPYLAAFQQPGAQDYAMVDAALAQLGIARLSERPYTALSGGERQQVTIARTLVQRPQIIILDEPTSYLDYGNQIRVLQLIKSLAADGYSIIMTTHMPDHALRLGGKVGILDRGGQFSVGKTEEMLTTERLSDLYASDIRIVYVEELGRSICAAAQ

SEQ ID NO: 72754 - DNA, 780 bp, Desulfitobacterium hafniense Y51
  CDS (1)..(780)
atgctgaaagttcaagagctaagctttcaatatggttcccaccctgtactggaggatgtgcatttcgaggctccctacggacagtgcgtggccattctgggcaataacggcgcagggaaaagcaccttgatcaaatgcctcaatagaatactgccccctcgttccggtcaggttctcctggatgaacaggatctgtgcagcatgtcccggaccaatgtggcgaaagagatggcttatgtagcccagcatagtgaaaccgcacggtttacggtttatgatgcggtgatgctgggacgcaaaccctatatcaggttcagtcctacggaagcagattatgagatcgttcatggcatgatcgaaaagttggaattaagccagatgtcgttggcttatatcgatgagctttccggcggggaactgcaaaaagtcatgctggcccgggctttgacccaacagcctaaagtgctgttgctggatgaaccgacgagcaatctggatttgaaaaatcagcatgatatgcttggcttggtagggaaaattgccaaggaggaaaacatctgtgtcctcatggtcattcatgatctgaatcttgccctgcgctattgcgaccggtttctctttattaaagacggaggaatttatgcctatggcgacgaagaaattatgaatgccaaggttatcggcgaagtgtacggcataccggtggctatagaatatgcccatggggccaaaatagtcgtgcccttccctgaacaaggtgttaaagcgaataaagcataa

SEQ ID NO: 72755 - protein, 259 aa, Desulfitobacterium hafniense Y51
MLKVQELSFQYGSHPVLEDVHFEAPYGQCVAILGNNGAGKSTLIKCLNRILPPRSGQVLLDEQDLCSMSRTNVAKEMAYVAQHSETARFTVYDAVMLGRKPYIRFSPTEADYEIVHGMIEKLELSQMSLAYIDELSGGELQKVMLARALTQQPKVLLLDEPTSNLDLKNQHDMLGLVGKIAKEENICVLMVIHDLNLALRYCDRFLFIKDGGIYAYGDEEIMNAKVIGEVYGIPVAIEYAHGAKIVVPFPEQGVKANKA

SEQ ID NO: 72756 - DNA, 780 bp, Desulfitobacterium hafniense Y51
  CDS (1)..(780)
atgaacagcttattggaagtcaatcaggcagccttcgcttaccccagcggcaagactgtgttcaaagatgttaactttacgatctccccggggcagatactgtccattatcgggcctaacggtgccggcaaatcgacgctactgaactgtatcgccgggtttaatactttggatcggggcaatatccgcatcgaagggatacctttgccgaaaatgaaccgcaaagccatagcccgctatatcggttatgttccccagatccataacccggcctatggttattccatacgggattttgtggtgatgggccgtgctccttatatcagcaccttccgcatgccgggccgggaagacttcgccaaagcggatgcggccattgcggcaatggggatttctcatctggctcagcggccttacaccgatgtgagcggaggggagcggcagcaggccaccattgcccgggtgattgtgcaggagccgcaaatcattatgctggacgaacccacttcagccctggattttggcaaccaattaaggactgtccggatgattaaggaattggcgggacggggttatgccatcatcatgaccacccataatcccgatcaggccatgatgctggaagggcaggtaggaatcctggagaaaaacgggcgtttttcagtaggcaaagcccaggaaattatcaatgaagagaccttgaccgaactgtatcaaaccgaggtcaagattccctatgttgaacagatttcccgcaatgcttgtctggcccgcttatag

SEQ ID NO: 72757 - protein, 259 aa, Desulfitobacterium hafniense Y51
MNSLLEVNQAAFAYPSGKTVFKDVNFTISPGQILSIIGPNGAGKSTLLNCIAGFNTLDRGNIRIEGIPLPKMNRKAIARYIGYVPQIHNPAYGYSIRDFVVMGRAPYISTFRMPGREDFAKADAAIAAMGISHLAQRPYTDVSGGERQQATIARVIVQEPQIIMLDEPTSALDFGNQLRTVRMIKELAGRGYAIIMTTHNPDQAMMLEGQVGILEKNGRFSVGKAQEIINEETLTELYQTEVKIPYVEQISRNACLARL

SEQ ID NO: 72758 - DNA, 780 bp, Desulfitobacterium hafniense Y51
  CDS (1)..(780)
atgaacctgttcgagattcagaaccttaatcaacattatggctcctttgctgtgttgcggaacctctcctttgccatcagccagggagatatgtttggcattatcggccccaatggcagcggcaaatcgactcttatccgtaccatcagcggccttcagcctcctacttccggcaaggtcctgttgatggacagacccctttcctcccatacctcaaaagagctggcccgccagattgccgttctggagcaggagggtacccctgccctgccctttaccatagagcagatcgtatccatgggacgctatccctggttaaaaccttttgccgacctgggctcccatgataaggctgtggtggagaacatactcgttaaactcaatcttgggcctaaacgctcccaaaaagtcagcaccctgagcggcggtcagcgccaactggtctctctggcccgggccatggctcaggagccccggatacttatcctggatgaacccaccacctatttggatatcggccatcaatccttagtcatggatcatgtccgtcaatggcatgacgagttaggcatcactgtgattatggtcttgcacgatttaaatatagcggctcagtattgcaaccggattctccttctcgatcaaggggaaatcgttacctggggtaaaaaggaagacgtgctccgggaagaaacgttaacccaggtctataaaacggatttagttcaagttcatcatcccaaattaggcgtacctcaatttctcttaagcggaaagtag

SEQ ID NO: 72759 - protein, 259 aa, Desulfitobacterium hafniense Y51
MNLFEIQNLNQHYGSFAVLRNLSFAISQGDMFGIIGPNGSGKSTLIRTISGLQPPTSGKVLLMDRPLSSHTSKELARQIAVLEQEGTPALPFTIEQIVSMGRYPWLKPFADLGSHDKAVVENILVKLNLGPKRSQKVSTLSGGQRQLVSLARAMAQEPRILILDEPTTYLDIGHQSLVMDHVRQWHDELGITVIMVLHDLNIAAQYCNRILLLDQGEIVTWGKKEDVLREETLTQVYKTDLVQVHHPKLGVPQFLLSGK

SEQ ID NO: 72760 - DNA, 807 bp, Desulfitobacterium hafniense Y51
  CDS (1)..(807)
ttgagtatcgaagtatccaacctcagctttggctatgatcaacggcttattctcaaggatattagtttctcagcagaggattatgagctgttatcgattttaggccccaacggagtagggaaaagcactttatttcgttgtatactcggtttgcttcatgggtacaagggacgaatctctctgaataacctggatgtaaaacatatggggatcaaggacatggccagttgtgtcgcttatatcccccagtcccattatccctcatttaattacagcgtatttgacatggtgctgatggggaccgccatacaggtatccactctctccaaaccgggccataagcagcttcgccttgctgaagcagctatggaaaggctgggaatcacccatcttaaaaacagaggctatactcagatcagcggcggagagaggcagctcgtactcatcgcccgggccttggttcaggaagctaaaatacttattcttgacgaacctaccgccaacttggattttggcaatcagatccgggttcaaaaccagatcaaagctctggccaaggacggatacacggttgttcaatccactcacaaccccgatcagacctttctcttttccgataaagtcttggcgatgaaggatggcaaagttctcgcttatggacagcctcatcagatctattcggaaaacctgattaaaaccctttacggagtggatgttgagattcaaagtctctataaggatcaggtaagagtctgcgttcccaagagcattcttaaagcggattctctccgtgaaagctgctcttaa

SEQ ID NO: 72761 - protein, 268 aa, Desulfitobacterium hafniense Y51
MSIEVSNLSFGYDQRLILKDISFSAEDYELLSILGPNGVGKSTLFRCILGLLHGYKGRISLNNLDVKHMGIKDMASCVAYIPQSHYPSFNYSVFDMVLMGTAIQVSTLSKPGHKQLRLAEAAMERLGITHLKNRGYTQISGGERQLVLIARALVQEAKILILDEPTANLDFGNQIRVQNQIKALAKDGYTVVQSTHNPDQTFLFSDKVLAMKDGKVLAYGQPHQIYSENLIKTLYGVDVEIQSLYKDQVRVCVPKSILKADSLRESCS

SEQ ID NO: 72762 - DNA, 798 bp, Desulfitobacterium hafniense Y51
  CDS (1)..(798)
atggtcctgatgctgagtgttaaaagcttgagttttcactaccaaccggaacgaatcatcctcaaagatatttcctttgatctggacagccatgagattctttgcctgctggggcccaacgggaccggtaaaaccactctgctcagatgcatcctttccctcaataaaatgaaaagcggccggattaccctgaatggtttggagttaagcaaaatttcccccaaaaggcgggcggagatgatggcttatgtccctcaggctaccacggtggctttcccttacgaagccgcggagatcgtacagatggggcgggtcgtcaatctgtccctgggagcccggccctcggcacgggatcggaagctggctgaagaagccatggagaagatggggattctgcacatgagcagctatccctttaatgagatgagcggcggagaaaagcagatggtgttgatcgccagagccattgcccaacaggccaaaattctggtcatggatgagcctaccgccaatctggattattataaccaggtaaaaatgctcaaggtgatcaaagccttggctgagcaggggtacgccatcttaatgacatcccattttccggaccatgcctttctggcctgcagcaaagcggtgctcatgcgggacggcgtgatcatggcccaaggacaccctgatgaggtcgtaaccaccgagaatctgaccaggctttattctacccctgtctgtgtagctgaagccaggttggatgctatggataccgccatgaaagtgtgtatcccggttatgaataattaa

SEQ ID NO: 72763 - protein, 265 aa, Desulfitobacterium hafniense Y51
MVLMLSVKSLSFHYQPERIILKDISFDLDSHEILCLLGPNGTGKTTLLRCILSLNKMKSGRITLNGLELSKISPKRRAEMMAYVPQATTVAFPYEAAEIVQMGRVVNLSLGARPSARDRKLAEEAMEKMGILHMSSYPFNEMSGGEKQMVLIARAIAQQAKILVMDEPTANLDYYNQVKMLKVIKALAEQGYAILMTSHFPDHAFLACSKAVLMRDGVIMAQGHPDEVVTTENLTRLYSTPVCVAEARLDAMDTAMKVCIPVMNN

SEQ ID NO: 72764 - DNA, 867 bp, Burkholderia xenovorans LB400
  CDS (1)..(867): transl_table=11
atgacgaaatcgcagggcgcggcgctcgcggcgcattcgctgacggtcggctatcgcgatcacgtcgtgctccacggtctgaacctgaacatcgcggccggccgcgtcacggccttgtgcggaccgaacggctgcggcaaaagcacgctgttgcgcacgctcgccggtttgcagccggcgctgtccggcaccgtcgaggtcaacggcgtgccgctcgcttcgctccggcggcgcgtgttggcgcgcacgctgaccatgctggcgcagttcaaccagattccttcgggactcagcgtgcgcgaactggtcgcgtacggtcgttacgcgcatggcggctggcttcgcggattgtcgcgcgccgaccatgcggcaatcgacgaagcgctcgccaccagcggccttgccgccgacgccgcgcgcgacgtggccgcgctttcgggcggcgaacggcaacgcgcgtggatcgcaatggcgctcgcgcagcaggcgccgatcgtgctgctcgacgagccgactacctacctcgacatccatcatcaactggacatactgcgcgagttgcggcgcctgaatcgtgagcgcggcctcacgatcgtgtgggtgctgcacgacctgaaccaggcagcggcctacagcgacgacattgtgctcatgcgcgccggccgcatcgtcgcgcaaggctcgcccgatgcgatgctcgacccgcgtcacctgaacgagaccttcggcgtgccgatgctcaagatcgcgcacccgcaaacaggcgcgccgatgtgcgtgccggcctatgaaggcggcgcggtggatctcgacactgccgccgcctcgcttcacgaggaagccacgagcaaggacctcgccgcatga

SEQ ID NO: 72765 - protein, 288 aa, Burkholderia xenovorans LB400
MTKSQGAALAAHSLTVGYRDHVVLHGLNLNIAAGRVTALCGPNGCGKSTLLRTLAGLQPALSGTVEVNGVPLASLRRRVLARTLTMLAQFNQIPSGLSVRELVAYGRYAHGGWLRGLSRADHAAIDEALATSGLAADAARDVAALSGGERQRAWIAMALAQQAPIVLLDEPTTYLDIHHQLDILRELRRLNRERGLTIVWVLHDLNQAAAYSDDIVLMRAGRIVAQGSPDAMLDPRHLNETFGVPMLKIAHPQTGAPMCVPAYEGGAVDLDTAAASLHEEATSKDLAA

SEQ ID NO: 72766 - DNA, 771 bp, Methanococcoides burtonii DSM 6242
  CDS (1)..(771): transl_table=11
atgatatttagcttaaataatgcttcatattcgtatgatggaaaaaagaatgtatttgagaacatttccttttctttaaaaaaaggtgaaactttatgcatacttggtccgaatgggattgggaaatcaactttgataaaatgtattgctaatgtgtttaaattgaaaaatggaaccattttgatcggaaataaaaatatctcgtcaatgagcagaacagaagttgctcaaaggatcggttatgttccacaggcagacatgtcagttttctctttttcaattctggattttgttttgttgggtagggctccacacctccctttcttttcttcgccaagtgagaaagatataataatagctgaaaatgctattattaatgtaggtatttctcatctaatggatagacctgtcactgaaataagtggtggagaaaaacaattggctttgatagcacgggctcttgcccaggaaccagatatattattattagatgaaccgacatctcatttagattttgggaatcaggtacgcattttgaaccttattgataagctctctaggcagggcacatctgttatcatgagcacacattaccctgaccatgcttttatgagccaaaaaaacgttgctattatgcttgaaaatgatttcatagcccaagggactgctgaggaagttataacaaaagaaaatatgtctcttgcatatggtattgaggttgctatcgatcatgtaagttctgtaaagcgaaaggtttgccttccactttga

SEQ ID NO: 72767 - protein, 256 aa, Methanococcoides burtonii DSM 6242
MIFSLNNASYSYDGKKNVFENISFSLKKGETLCILGPNGIGKSTLIKCIANVFKLKNGTILIGNKNISSMSRTEVAQRIGYVPQADMSVFSFSILDFVLLGRAPHLPFFSSPSEKDIIIAENAIINVGISHLMDRPVTEISGGEKQLALIARALAQEPDILLLDEPTSHLDFGNQVRILNLIDKLSRQGTSVIMSTHYPDHAFMSQKNVAIMLENDFIAQGTAEEVITKENMSLAYGIEVAIDHVSSVKRKVCLPL

SEQ ID NO: 72768 - DNA, 753 bp, Methanococcoides burtonii DSM 6242
  CDS (1)..(753): transl_table=11
atgttaagcgttacagaacttgattttagctataataacagagaaattctgaaccagatacatttcgaacttaagccaggaaagatattagccattcttggtcctaacggagttggaaaatcgactcttctcagatgtatcaatgcaattcatccacctaaaacaggtacaattatagttgacggagaagaagtattagcccttgaaaaacatgagatcgcaaagagagtgggatatgtaccacagcgctcagaagcaggacaacttacagcttatgatgcaatattattaggccgaaagccacatattggctggaatgttggagaaaaagatagacgtgttgtagaatcagttatcaaaaaacttggactggaagaattggcccttaggcacatcaatgagatgagtggaggagaacttcagagagtagctattgcaagagctctggtacaggaaccaaaactgttgttacttgatgaaccgaccagcagccttgatcttaaaaagcaattggaaatattacgcacggtcagacaagtggtagaaaataataaggtctcggcagtgataaccatgcatgatctaaacctcgcactacggtttgctgacaattatatattcttaaaggacggaaaggtctttgcacatggaggtaacgagatcgttgtgcctgaaaccatcaagcaggtctatggtgttgccacaagtgttgaaaaatttaatggttttcatgtggttatcccacatgagtaa

SEQ ID NO: 72769 - protein, 250 aa, Methanococcoides burtonii DSM 6242
MLSVTELDFSYNNREILNQIHFELKPGKILAILGPNGVGKSTLLRCINAIHPPKTGTIIVDGEEVLALEKHEIAKRVGYVPQRSEAGQLTAYDAILLGRKPHIGWNVGEKDRRVVESVIKKLGLEELALRHINEMSGGELQRVAIARALVQEPKLLLLDEPTSSLDLKKQLEILRTVRQVVENNKVSAVITMHDLNLALRFADNYIFLKDGKVFAHGGNEIVVPETIKQVYGVATSVEKFNGFHVVIPHE

SEQ ID NO: 72770 - DNA, 789 bp, Methanococcoides burtonii DSM 6242
  CDS (1)..(789): transl_table=11
atggtgaagataaagatcaaggatatgtgttttggctatgccagtacaccaatattggaaaatgtatcggttgatatctatgggtcaagttttgtgagcattgtgggtcctaatggggctggtaaatcaaccatgctcaaatgtatcaacaaaatattagtgccggattccggcgatatccacattgatggatataatttaaagaacatgaaacggatagaagttgccaagaatattgcttacgtacctcagagttcgaacagggtttttcccacgacggtcttcgaaacggttctaatgggaagaaggccacatattggctggttcagtaatgaaaaagatatcgaaaaagtctggcaggtccttgaggagatgggaattgaggatcttgcattgtgtagtttcgatgaattgagcgggggacagcaacaaaagatcctcattgcaagggcactggcacaagatacaggtgctattcttcttgatgaacccactagtaatctggatatatggcatcaattggacgttatggagaatgtgcaaagacttgtaaaagaaaaaaaggttgcagctataatggctgtacatgacctaaatctggcttccagatattcagatcagatcttgatgatgaaggatggtaaagtagtttctgcaggaacacctgctcaggtacttactactgagaacatagcaaaggtctacgaagttgaagcacatgtacacaactatggagaaacgccttatgttatgcctcttaagcaacttggtatgagggaaattacataa

SEQ ID NO: 72771 - protein, 262 aa, Methanococcoides burtonii DSM 6242
MVKIKIKDMCFGYASTPILENVSVDIYGSSFVSIVGPNGAGKSTMLKCINKILVPDSGDIHIDGYNLKNMKRIEVAKNIAYVPQSSNRVFPTTVFETVLMGRRPHIGWFSNEKDIEKVWQVLEEMGIEDLALCSFDELSGGQQQKILIARALAQDTGAILLDEPTSNLDIWHQLDVMENVQRLVKEKKVAAIMAVHDLNLASRYSDQILMMKDGKVVSAGTPAQVLTTENIAKVYEVEAHVHNYGETPYVMPLKQLGMREIT

SEQ ID NO: 72772 - DNA, 783 bp, Myxococcus xanthus DK 1622
  CDS (1)..(783): transl_table=11
atggagcccctgcttgtcacccgggcgctggtcgcgggctacggtcctcgtcccatcttgcatggtgtggcgtgcgaggtccggcccggtgagctgtgggcggtgctcggccccaacggcacgggcaagagcacgctgctgcgcgcggtgctgggcctggggccctggacgcgcggagaagtccgcctgctgggccgcgagcgcgccgcctgggagccccgagcgctcgcccgcaaggtggcttgggtgccgcagaccatcgaatccacggagggcttcagcggcctggaactggtgttgatgggccgcagtccgcacctgggcctctggggtctgccgtccgcggccgacgtggcgctcgcgcgggaggtgatgacggagctcggcattgcgcacctgtccgagcggcccgcggaggccctctctggaggcgagcgccggatgttgatgctggcgcgaggactggtgcagcagcccgagttgttgctgctggatgagcccaccgccttcctggacgtggcccaccaggtgggctcgctcgaccgcgtgcgcgcgcgcgtggacgcggggctgggcgcggtggcggtgctgcatgacgtgaacctcgccgccgccttcgccacccacgtgctgctcctccgggatggccaggtgctcgcgcaggggccggcgaacgaggtgctggagcgtggctccctggaaacgctctacgggctgcccatggaaaccgcgctggctccgtccggcgcccggctcttcgcgccccgagcaccctcgcgctga

SEQ ID NO: 72773 - protein, 260 aa, Myxococcus xanthus DK 1622
MEPLLVTRALVAGYGPRPILHGVACEVRPGELWAVLGPNGTGKSTLLRAVLGLGPWTRGEVRLLGRERAAWEPRALARKVAWVPQTIESTEGFSGLELVLMGRSPHLGLWGLPSAADVALAREVMTELGIAHLSERPAEALSGGERRMLMLARGLVQQPELLLLDEPTAFLDVAHQVGSLDRVRARVDAGLGAVAVLHDVNLAAAFATHVLLLRDGQVLAQGPANEVLERGSLETLYGLPMETALAPSGARLFAPRAPSR

SEQ ID NO: 72774 - DNA, 783 bp, Rubrobacter xylanophilus DSM 9941
  CDS (1)..(783): transl_table=11
atgcagaaggcgatcgaggtccgggatctcaccgtcgtctacggcggccggcccgccctggagggggcggagctggagctcccgcggggggcgatgctcggggtcgtgggccccaacgggggcgggaagagcaccctgctcaaggccgtgctcgggatagcgccggtggcgcggggggaggtgcgggtgctcggccgcaggctcgaccggcgctcgcggcggctcgtcggctacgtcccgcagcgggaggacgtggactgggactttcccgtcagcgccttcgacgtggtcatgatggggcgggtgccctccatgggcctgctccgccgcccctccgcgcgggacagggagctggtgtggggggcgctcgaggccgtcggcatggcccctctcgcgcacaagaggatcggggagttctccggggggcagcagcagaggatcttcctcgcccgggcgctagcgcaggaggccgaggtgctgctgctcgacgagcccgtctccggggtggacgcgccgtcgcagcacgagatcttcgacctgctccacggcctgcaggggcggggcaagaccatcgtggtcaccacccacgacctctcctgcgtggccgagcgcttcgatttggcgctgctgctcaaccggcgggtggtggcctgcggcccgccctcggaggtcttcgtccccgagctgctcaacgagacctaccagagccacctcatgatcctgcgggtcggggaccggaccgtcgccgtggagaccgagcggccgggaggcggcggtgggtga

SEQ ID NO: 72775 - protein, 260 aa, Rubrobacter xylanophilus DSM 9941
MQKAIEVRDLTVVYGGRPALEGAELELPRGAMLGVVGPNGGGKSTLLKAVLGIAPVARGEVRVLGRRLDRRSRRLVGYVPQREDVDWDFPVSAFDVVMMGRVPSMGLLRRPSARDRELVWGALEAVGMAPLAHKRIGEFSGGQQQRIFLARALAQEAEVLLLDEPVSGVDAPSQHEIFDLLHGLQGRGKTIVVTTHDLSCVAERFDLALLLNRRVVACGPPSEVFVPELLNETYQSHLMILRVGDRTVAVETERPGGGGG

SEQ ID NO: 72776 - DNA, 777 bp, Mesorhizobium sp. BNC1
  CDS (1)..(777): transl_table=11
atgcggcttgaggtcgagaatctcgatgtggctctttccggccgccaagtgcttcgaggcatagcgatggcccttgccgccggcgaggtggtgggtcttctcggccccaatggagccggtaaatccaccctcatgcgcgcgctggcgggccttgtcgcggcctcgggcaggatgcggctcgacggcgaggatcttccgtcgctgtcccccgcagcccgcgccaggctgcttgcctatctgccgcaggcacgcatcgtcggctggcggctctcggtgcgcgatctcgtaaggctcgggcgccttccctggcgccgcttcggcgtgagcccgacagaagcggacgaaaagattgttgaggacgccctggcgctcatggacatcgcagggctggcgggccggcccgcgaccgagctttccggcggcgaacaggcccgcgtgctcatcgcgcgcgcggttgctcaggccacgcccgctctcattgccgacgagccggcttcaggtctcgacccggcgcatcagatcatgatgatgctggctttgcgccgtctcgccagcgaggggcgtaccattctggtctctctccatgatctcacattggccgcgcgctggtgcgaccgcgtggtgatgctgaaggaaggacaggttgccgcggagggctctcccggcgaggtcatgacccccgaacgcctcgccgatatttacggcgtcacggcccatttcgcgcgcgacaaagaggggcttatccttgccccgacggggctaacgattgcacgatga

SEQ ID NO: 72777 - protein, 258 aa, Mesorhizobium sp. BNC1
MRLEVENLDVALSGRQVLRGIAMALAAGEVVGLLGPNGAGKSTLMRALAGLVAASGRMRLDGEDLPSLSPAARARLLAYLPQARIVGWRLSVRDLVRLGRLPWRRFGVSPTEADEKIVEDALALMDIAGLAGRPATELSGGEQARVLIARAVAQATPALIADEPASGLDPAHQIMMMLALRRLASEGRTILVSLHDLTLAARWCDRVVMLKEGQVAAEGSPGEVMTPERLADIYGVTAHFARDKEGLILAPTGLTIAR

SEQ ID NO: 72778 - DNA, 777 bp, Rhodococcus sp. RHA1
  CDS (1)..(777): transl_table=11
atgaccgccctgagcctgcaacgtgtccgcgccgaactcgggtcgcgggaagtgctgcacggcatcgacttctccgtgcgtcccggggaggtgctggcgttggtcgggcccaacggttccggcaagaccaccgcgctgcgctgctgctaccgcgcgctcaccccgaccgggggcgccgtcgtcgtcgacggaacggataccgccgatctgggccggcgggaactggcccgcacgatcggggcgagcacccaggagccgcgggtgtccgcgggactgaccgtgcgcgaatccgtttcgctcggacgcatcccgcaccggggctggttcgagcgggcgaccggcgccgacggtgagatcgtcgagacgtgcatacgtcaggtcgggctggccgaactcgcgggtcgcgacgtccaggcactgtcgggtggggagcgtcaacgggtgtcgatcgcccgggcgctcgcgcagcagccgagggtcctgctgctcgacgaacccaccaaccacctcgacctgcggcatcagctgacggtgatgaacctgctgcgtgacctcgcgtgcgacggtctggcgatcgtcgtgaccatgcacgacctccggctggccgtcgagttctgcgacacgctggccgtgatgcacgatggacgggtgatcagcaccggtccgcccgccgacgtgctggacgacaccgtgctgggcggggtgttcggcatccgcgccgtggtgcggtcggcgccgcggctgtcgatggagatcctggggttggccgatggatga

SEQ ID NO: 72779 - protein, 258 aa, Rhodococcus sp. RHA1
MTALSLQRVRAELGSREVLHGIDFSVRPGEVLALVGPNGSGKTTALRCCYRALTPTGGAVVVDGTDTADLGRRELARTIGASTQEPRVSAGLTVRESVSLGRIPHRGWFERATGADGEIVETCIRQVGLAELAGRDVQALSGGERQRVSIARALAQQPRVLLLDEPTNHLDLRHQLTVMNLLRDLACDGLAIVVTMHDLRLAVEFCDTLAVMHDGRVISTGPPADVLDDTVLGGVFGIRAVVRSAPRLSMEILGLADG

SEQ ID NO: 72780 - DNA, 750 bp, Hyphomonas neptunium ATCC 15444
  CDS (1)..(750)
atgatttcggctgaacatctgaccgtggccctgaatggccgggatgtggcgcgggatgtctccttctggctgcgtgatggcgagttggcagcgctggttggccccaacggggcgggcaagagttcggtgctgaaggcgctggcgggggtgacgccttctgcaggagaggttcgcatatgcgatgccccggcggataagctgaccgttcgggagcgggcaagacgccttgcctggctgccccagacacggccggttgcgtggaacctgttggccgaggatgtggtggcgctggggcgttttgccggcgcgccggcccctttcgaccggatgggggaggctgaccgggccgctgtcgttgcggcgttggagaaggcggacgctacccacctcatcgggcggtcctttcaggcactttccgggggcgagcaggcgcgcgtgcatctggcgcggctgctggcgtctccggcgccggtgctgctgctggacgagccctgcgcggcactcgacattgcccatcagctctcgctgatggcggcgctggcggccgaagcggcggcggggcggacggtgattgtggtgctgcatgatctggaactggcggcgcggttttgcccccgcgttctggtgatgcaggcgggtgaactggtggccgatggggcacctgacgcggcattgtcggcagaggtgctggggcaggtgtttggggtacgcaaaagcgctgaggggcggttggagcgcgccaatccctga

SEQ ID NO: 72781 - protein, 249 aa, Hyphomonas neptunium ATCC 15444
MISAEHLTVALNGRDVARDVSFWLRDGELAALVGPNGAGKSSVLKALAGVTPSAGEVRICDAPADKLTVRERARRLAWLPQTRPVAWNLLAEDVVALGRFAGAPAPFDRMGEADRAAVVAALEKADATHLIGRSFQALSGGEQARVHLARLLASPAPVLLLDEPCAALDIAHQLSLMAALAAEAAAGRTVIVVLHDLELAARFCPRVLVMQAGELVADGAPDAALSAEVLGQVFGVRKSAEGRLERANP

SEQ ID NO: 72782 - DNA, 762 bp, Hyphomonas neptunium ATCC 15444
  CDS (1)..(762)
atggctgaccttgtgatccgcaacctttctgtgagcgctggcaaggtcaaacttgtttgcgaggcgaatttcagtctggcgcagggcgaactggtggcactgctgggccctaacggagccgggaaaaccagcctacttcgctcagcactcgggcttgtaaagcgggccactggcgatgcgttgctggatggtactgacagcgaaaagctctcgtccatgcagcgcgctcgccgggtcgcctatctgccgcaacagcgcccgctcgcctggccgaacacagtccgcgacgttgtcgcccttggccgctttgcctacggcgctgctccggggcgcctgagccaggctgattctgttgccgttgagcgcgccatcaggctctgcgaccttaccgctctcgtcgaccgtcataccgacacgctatcgggcggtgaacttgcgcgagttcattgtgcccgggccttcgcggcagacgccccgcttctggtcgcggatgagcctgtggccgcgctggatccgcgccatcaataccgcgtcatggatatcatccgccactacgtcgacgggggaggtggcgcgctcgtcgtccttcacgacatcgcccttgctgcacgatatgcaacacggatggtctggatgaagcacgggcacatcatagccgatggcacacccgatgagacgcttacggaggatcgtctggctgaagtctacggggtccgcgcgcgtgtgagtggccgctccgtagagatagaagggacaatatga

SEQ ID NO: 72783 - protein, 253 aa, Hyphomonas neptunium ATCC 15444
MADLVIRNLSVSAGKVKLVCEANFSLAQGELVALLGPNGAGKTSLLRSALGLVKRATGDALLDGTDSEKLSSMQRARRVAYLPQQRPLAWPNTVRDVVALGRFAYGAAPGRLSQADSVAVERAIRLCDLTALVDRHTDTLSGGELARVHCARAFAADAPLLVADEPVAALDPRHQYRVMDIIRHYVDGGGGALVVLHDIALAARYATRMVWMKHGHIIADGTPDETLTEDRLAEVYGVRARVSGRSVEIEGTI

SEQ ID NO: 72784 - DNA, 762 bp, Rhizobium leguminosarum bv. viciae 3841
  CDS (1)..(762): transl_table=11
atgagcatcaaggccgacaacctcatctggaaaattggcaggaagaccattctcgatggcgtttccatggaggcgcagcctggccggatgctcggcctgctcgggccgaacggctcgggcaaaacctcgttgctgcggattctcgccggcctgaagcggccgcattccggccgcgtcacgctcgaccgcagcgatatcggcacgatcagccgtcgctcgattgcccggcggatcgccttcgtcgagcagcatgcgacgaccaatgccaacctgaaggtggtcgacgtcgtcaagctcggaaggtttccgcaccgatcgatgttctcgggctggacgagggccgacgaagaggcggtcgaagaggcgctggcgcgcgccggcatggcggagaaacgcgacgatcgctggcagagcctgtcgggcggcgaaaagcagcgcacccatatcgcaagggcgctcgcccagtcgccccaggagctgatcctcgacgagccgacaaaccatctcgatatccagcaccagatcggcctgatgcggctcgtctccggcctgccgattaccagcatcgtcgccctgcacgatctcaaccatgccgccatgttctgcgaccagctgatcatcatgcagcatggcaggatcgtcgcctccggcgcgccgcaggacgtgttgagcgaggatcttttaaggaatgtcttctccgtcgaggcccgtatcgaaacctctccctatcattcgcgcccgcatatccattatctcaggtga

SEQ ID NO: 72785 - protein, 253 aa, Rhizobium leguminosarum bv. viciae 3841
MSIKADNLIWKIGRKTILDGVSMEAQPGRMLGLLGPNGSGKTSLLRILAGLKRPHSGRVTLDRSDIGTISRRSIARRIAFVEQHATTNANLKVVDVVKLGRFPHRSMFSGWTRADEEAVEEALARAGMAEKRDDRWQSLSGGEKQRTHIARALAQSPQELILDEPTNHLDIQHQIGLMRLVSGLPITSIVALHDLNHAAMFCDQLIIMQHGRIVASGAPQDVLSEDLLRNVFSVEARIETSPYHSRPHIHYLR

SEQ ID NO: 72786 - DNA, 759 bp, Rhizobium leguminosarum bv. viciae 3841
  CDS (1)..(759): transl_table=11
atgatcggattgacggatgcggtcgtcaggttcggggcgcgcaccatcctcgatcgcctgagtttctcggttcccgtcgggcggtcgctcgccattctcggccccaacggacgtggtaagacgaccacactgaaagccatgctgggctttcagcggctggacgaaggcagccgggtggcgcccgccattgtcggctacgtcccgcagaccggaagcagcaaccagcgctaccgcgccatcgacgtcgccgtcatggggcgggcagcgcatctcggcctgttcgggcaaccgggaccttccgatttcgagattgcccatgccgcgctcgagcgggcgggagcggcccgctttgccgatcatttcttcgaccggctttccggcggcgaacggcaactcgtgcttctggcgcgggcgctcgccaccgggtcgaagtcgatcgtcctcgacgagccggctgccgccctcgaccttcgcaaccaggagcggttgctgaacctgctcaaaagcctgcgcgaaccgcgcgacaaggcaatcgccttcacgacgcatgatccgaaccatgcgcttgccgccgccgacgatgcgctgctgatgatgccggatagtcaatcgctgttcggtccggtcgcggagacgatcacgccggaacacctcgaacggctttacggtgtcccgatgcgggtggtcgagcttatcggcccgacaggcgacaggcatcaggcggttctgccagcctttgcaggaatttgcgccgcatga

SEQ ID NO: 72787 - protein, 252 aa, Rhizobium leguminosarum bv. viciae 3841
MIGLTDAVVRFGARTILDRLSFSVPVGRSLAILGPNGRGKTTTLKAMLGFQRLDEGSRVAPAIVGYVPQTGSSNQRYRAIDVAVMGRAAHLGLFGQPGPSDFEIAHAALERAGAARFADHFFDRLSGGERQLVLLARALATGSKSIVLDEPAAALDLRNQERLLNLLKSLREPRDKAIAFTTHDPNHALAAADDALLMMPDSQSLFGPVAETITPEHLERLYGVPMRVVELIGPTGDRHQAVLPAFAGICAA

SEQ ID NO: 72788 - DNA, 858 bp, Pseudomonas aeruginosa UCBPP-PA14
  CDS (1)..(858): transl_table=11
atgacgttggcggtaaatcagttgaggctgagctacggctcgcgcgaagtgctccgggtggcggagcttcaattcgagcccaccagtatggtgtgcctgatcgggcccaacggctgcggtaagtcaacgttgctcagggctctcgcaggattgaacaggtccacggcgggtgctgtttccctagacggaaagccgttggcttcctggagtccgaaagcactcgcccggcggctggccttccttccccaatcgccggccgtaccgcagggcgtcaccatacgccaattggtcgcctatggccgctacccgcaccagggcctgctcgcgcggcaatccaaccacgaccgcgaaattgtcgggtgggccatggagtctaccggcatctcgcacttgcaaggccgtgacatcggcacgctctccggaggcgaacggcaacgggcatggatcgcgatgatcctggcccaggagtcgagcatcgtcttgctggacgaacccaccacctacctggacatgggacaccaggcggaattgatggaactgctcgcgcacctgcagaggacgcgccagttgaccgtcgtgatggttctgcacgacctcaaccaggctagccaatacgccgaccggctgctggctctgcgagacggccggatcgtcgccgacggggcaccactcgacatcgtcgactcccggctgagtgagcgactgttcggcctcgtcacccagcggatcgaccgcacgagtgccggaaggctcgtgccgtactgcctgcccgttggtcccgcaaccgcggggcgccccactcacgaagaaatggctgcaacccctacggctgagcagcccgaggttttgtcgtactaa

SEQ ID NO: 72789 - protein, 285 aa, Pseudomonas aeruginosa UCBPP-PA14
MTLAVNQLRLSYGSREVLRVAELQFEPTSMVCLIGPNGCGKSTLLRALAGLNRSTAGAVSLDGKPLASWSPKALARRLAFLPQSPAVPQGVTIRQLVAYGRYPHQGLLARQSNHDREIVGWAMESTGISHLQGRDIGTLSGGERQRAWIAMILAQESSIVLLDEPTTYLDMGHQAELMELLAHLQRTRQLTVVMVLHDLNQASQYADRLLALRDGRIVADGAPLDIVDSRLSERLFGLVTQRIDRTSAGRLVPYCLPVGPATAGRPTHEEMAATPTAEQPEVLSY

SEQ ID NO: 72790 - DNA, 819 bp, Shewanella sp. ANA-3
  CDS (1)..(819): transl_table=11
atggctatgagcttatcggctgcgcccgtcgctaaacaacattttgaacgtgctcaactaagcgtggatagactcagctacgctatcggcgataaggcggtgttaaaggacattagtgtgcaatttcaaccgggcagtttcaccgcactgttaggaccgaatggcgcgggtaagtccacactgttaaaggcgctgtgccaagagatccccgccgcgcgcgacagcattcggcttgggcactgcccgcttgtcgattggccaagggctgaactggcaaaatcgctagcggtgctaccacagcacgcgagtttaacctttccctttaaggtgcatgaagtggtcgccatggggctttatcccttaaccttgagtcaaaaagagggacagcagttagtcacaaaatggctcaccgaggtggagatagtgcacttggcgcagcgtagctaccccaccctttctggcggcgaaaaacaaagggtacaactggcgcgggtattaactcagttgagccaatcccccttcccgccgattttactgctcgacgaacccacctcggcgctggatctggcacagcaacataaggtattagcgctggcaaaaaatctcgcccataaacacgcctacactgtgattgtggtactacacgatctcaatcaggccgcccgttatagcgatagagttatcgtcctcaagcatggcgaaattgtcagtgaaggctcggcaagcaaggctttatcggccgagattattcggcaggtatgggattatgaacctgagtttattcctgcaccacagggcggttacccattgattttttaa

SEQ ID NO: 72791 - protein, 272 aa, Shewanella sp. ANA-3
MAMSLSAAPVAKQHFERAQLSVDRLSYAIGDKAVLKDISVQFQPGSFTALLGPNGAGKSTLLKALCQEIPAARDSIRLGHCPLVDWPRAELAKSLAVLPQHASLTFPFKVHEVVAMGLYPLTLSQKEGQQLVTKWLTEVEIVHLAQRSYPTLSGGEKQRVQLARVLTQLSQSPFPPILLLDEPTSALDLAQQHKVLALAKNLAHKHAYTVIVVLHDLNQAARYSDRVIVLKHGEIVSEGSASKALSAEIIRQVWDYEPEFIPAPQGGYPLIF

SEQ ID NO: 72792 - DNA, 981 bp, Shewanella sp. ANA-3
  CDS (1)..(981): transl_table=11
atgcattccacatcgagccttgcgcccttagcgcccgctgcgacctccgccaatatggcacttaaggtcagccaattgagctgggcgattgagggaaaaaccatcctctcggagataagctttgccttgccgcagggggaaatgctcgggctgataggccccaacggcgcgggtaaatccagtttgctgcgctgtttataccgctttattcgccctgctaaaggtcatatcagtttgttttcgcaggatattagcgagctgtcgcccaaggcgtttgcctgtaaagtggctgtggtgcagcaggatacaccgcaatatttcgatatgaccacagagcaattggttgccatgggactcacgccgcacaaggggatgtttgataccaactccagcggcgacggtgaaaaaattgctaaggcgctggaaaaggtaggcctcagtcataaagtgcatcaacaatacgatcgtttatccggcggtgagaagcaacgcgccctgatcgcccgtgccatagtgcagcagccgcaattgttgattttagatgagccgacaaaccacctcgatatccgctatcaaattcaaatcctagagctagtgcgaagccttgggatcagcgtaatcgcctcgattcacgacttgaatttagcctgcgccctgtgcgaccacttattgctgctggacaaggggcaggtgagtgccatgggcacgccagctcaggttctgaccgaggaacgtatcgccgaagtctttggggtatgcgcccaagttacgccccatccccagcatggtaaccccttgattaattacttttatggttatcaaaagcctaagagcgatgctgtggacgcggcgagtgactcccattcagtttcggctcaagctagaccgtcagaggcctgcgcctgccataactctggcgcgccaaacgaggtcttacaaagagctgcattgcaaaatgagagcgtcgagaacacgccatga

SEQ ID NO: 72793 - protein, 326 aa, Shewanella sp. ANA-3
MHSTSSLAPLAPAATSANMALKVSQLSWAIEGKTILSEISFALPQGEMLGLIGPNGAGKSSLLRCLYRFIRPAKGHISLFSQDISELSPKAFACKVAVVQQDTPQYFDMTTEQLVAMGLTPHKGMFDTNSSGDGEKIAKALEKVGLSHKVHQQYDRLSGGEKQRALIARAIVQQPQLLILDEPTNHLDIRYQIQILELVRSLGISVIASIHDLNLACALCDHLLLLDKGQVSAMGTPAQVLTEERIAEVFGVCAQVTPHPQHGNPLINYFYGYQKPKSDAVDAASDSHSVSAQARPSEACACHNSGAPNEVLQRAALQNESVENTP

SEQ ID NO: 72794 - DNA, 774 bp, Mycobacterium smegmatis str. MC2 155
  CDS (1)..(774): transl_table=11
atgagcttgcgcgccgacgacgtgcggtggttgcgctcgggccggctcgtgctcgcggatgtcaccgtggctttccagccgggcagcaccgtgggcgttctcggcccaaacgggtcaggaaagtcgtcgctgctgcgtctgctggccgggctcgaccgacccgacgccgggcgcgtcgaactcgacgggcgaccggtgaccgcgatgccgcgccgtgcactcgcgcgacgcgtcgcgctcgtgggccagcacgccgagacggatctgaacatcacggtcggggacgtggtgcgactcggtcgcatcccgtacacgacgatgttcggcggcgacggggacggggcatcggccgtgcgggacgcgctcgcggtcacgggcctgctcggtatgcagaaccggctgtggcacaccctttccggaggcgagcgtcagcgggtgcagatcgcccgcgcgctcgcgcagcaacccacggaactgctgctcgacgagccgacgaaccatctcgacatcgcccaccagctggagatcctggcgctgatccgcgagctcgacatcaccgtcgtcgtcgcgctccacgacctgaacctcgccgcgatgttctgcgaccacgtcgtggtgctgtcggcgggcggggtcgtggcgtcaggacccccggcggatgtgctcaccgagcaactcgtcgccgacgtctacggcgtgcggtgtgagatcacccgcgactccgccgggccctacgtgcggttccgtccaggcggcagaaccggcgggcgctag

SEQ ID NO: 72795 - protein, 257 aa, Mycobacterium smegmatis str. MC2 155
MSLRADDVRWLRSGRLVLADVTVAFQPGSTVGVLGPNGSGKSSLLRLLAGLDRPDAGRVELDGRPVTAMPRRALARRVALVGQHAETDLNITVGDVVRLGRIPYTTMFGGDGDGASAVRDALAVTGLLGMQNRLWHTLSGGERQRVQIARALAQQPTELLLDEPTNHLDIAHQLEILALIRELDITVVVALHDLNLAAMFCDHVVVLSAGGVVASGPPADVLTEQLVADVYGVRCEITRDSAGPYVRFRPGGRTGGR

SEQ ID NO: 72796 - DNA, 777 bp, Fusobacterium nucleatum subsp. vincentii ATCC 49256
  CDS (1)..(777): transl_table=11
atgaaaaatattttagaagtaaaaaatgtatcttattctgttggagaaaataagatattaaaagatataagttttaaatgtcaatcaggagaaattatagggataataggacctaatggttctggtaaaactactcttttaaagactataaatggaataaattctataagtagtggagatatcttattgaatggtaaaagtataaaagaatacgatgaaaaagaattagcaagagatatttcttttatgaaccaaaatacaaatattgaatttgactttccttgtatagatatagtggtcttaggaagatatccatatttagaaagatttcaagaatattctaaaaaagatatagaacttgcagaaaaatatatggagcttacagatactttaaaatttaaagataaatccatattgcagctgtcaggaggagaaagacagagagtgttatttgcaaaaattttaacacaagaaagtcaagttatacttttagatgaacctactgctagccttgatatgagatatgaagaagatttgctaaaagaaatttcaaaagaaaaagataaggataaaattgtaatattagtaattcataatttaagaacagctattaaatattgttcaaggttgatacttctatctaatggaaatatcataaaagatggaactgttgaggaagttatcacagagaaaaacttaaataatgtctttggggtaaaaactaaagtttattataataaaatttctaaatccttagatttttgtataatagactaa

SEQ ID NO: 72797 - protein, 258 aa, Fusobacterium nucleatum subsp. vincentii ATCC 49256
MKNILEVKNVSYSVGENKILKDISFKCQSGEIIGIIGPNGSGKTTLLKTINGINSISSGDILLNGKSIKEYDEKELARDISFMNQNTNIEFDFPCIDIVVLGRYPYLERFQEYSKKDIELAEKYMELTDTLKFKDKSILQLSGGERQRVLFAKILTQESQVILLDEPTASLDMRYEEDLLKEISKEKDKDKIVILVIHNLRTAIKYCSRLILLSNGNIIKDGTVEEVITEKNLNNVFGVKTKVYYNKISKSLDFCIID

SEQ ID NO: 72798 - DNA, 741 bp, Haemophilus influenzae R2866
  CDS (1)..(741): transl_table=11
atgaatgaattgagtttagatgtagataagctgttatttggttatgataagccgttgtatttaccacttactttccaatgtaagaaaggagaggttatttcggtacttgggacaaatggaaaaggtaaaaccacattattgcatcctcttgctcatgttttacctgttatgtctggacagattaggcaacaaggtcatattggttttgtgccacagtctttttcgtcgccagattattccgtgttagagattgttttaatggggcgagcaagcaaaattggagcatttaacctaccaagtaaaacggatgaaacagtcgcattacagatgttggcgcgcttagacatcctgcatttagctgagcgcaatatcaatatgctttcgggcggtcaacgccaacttgtgctcatcgctcgtgcacttgcgacagaatgtcaggtcctcattttagatgaacctacagcagcattggatgtttataatcaacagcgtgtcttacaacttatacgttttcttgcaacggaacaaaaaatgaccattattttttccactcatgatccttatcacagtttatgtgtggcagataatgtgttattgctattgcctaaccaacaatggaaatatggaatagccagtcaaattttaacggaatttcatttgaaacaagcgtataatgtaccgattaaatattctatgattgaagaacagcaggttttagtccccatctttaccatacagtaa

SEQ ID NO: 72799 - protein, 246 aa, Haemophilus influenzae R2866
MNELSLDVDKLLFGYDKPLYLPLTFQCKKGEVISVLGTNGKGKTTLLHPLAHVLPVMSGQIRQQGHIGFVPQSFSSPDYSVLEIVLMGRASKIGAFNLPSKTDETVALQMLARLDILHLAERNINMLSGGQRQLVLIARALATECQVLILDEPTAALDVYNQQRVLQLIRFLATEQKMTIIFSTHDPYHSLCVADNVLLLLPNQQWKYGIASQILTEFHLKQAYNVPIKYSMIEEQQVLVPIFTIQ

SEQ ID NO: 72800 - DNA, 765 bp, Haemophilus influenzae R2846
  CDS (1)..(765): transl_table=11
atgttactcgaaacacaaaatcttgccattggctatgaaggaaaaacgcttgttcaacatatccaatttaccctagaggaaaatcaaatttgttgtttgcttggtgcaaatggtgcaggcaaaagtacctttttgaaaactttacttggtttacaaccgcctattggtggtgatattgtttggcaaggaaaatcgctttctgattattcaccaacagaattggctcggcatattgcttatgtgccacaagcgcattcccatttatttccttttttagtacaggatatggtgatgatgggaagaagtgcttttttgaagtggtatcaaactccgaaaaaatctgatttggatttagcattaatggcattgcaagagttagaaattgctcatcttgcgcaacgttattatcatcaattaagtggcggcgaaaaacagcttgtgttgattgcccgtgcgattgctcaacaagccaaacttttaattatggacgaaccgacatctagccttgattttggtaatcaaattcgagtattagaaaaaataaaacaactgcaaaagcaaaatattgcgcttattattagcacgcataatccacaacaagcggcatttttaggggataatattgttttgcttgatcaacaatttggctttcaacaaggcgataaaaaacatttattaaccttagaaaacttggcgaaaatttaccgcacttcgtccgaacttttacatcaacatttgaataattacattgaaaaatcactatga

SEQ ID NO: 72801 - protein, 254 aa, Haemophilus influenzae R2846
MLLETQNLAIGYEGKTLVQHIQFTLEENQICCLLGANGAGKSTFLKTLLGLQPPIGGDIVWQGKSLSDYSPTELARHIAYVPQAHSHLFPFLVQDMVMMGRSAFLKWYQTPKKSDLDLALMALQELEIAHLAQRYYHQLSGGEKQLVLIARAIAQQAKLLIMDEPTSSLDFGNQIRVLEKIKQLQKQNIALIISTHNPQQAAFLGDNIVLLDQQFGFQQGDKKHLLTLENLAKIYRTSSELLHQHLNNYIEKSL

SEQ ID NO: 72802 - DNA, 762 bp, Haemophilus influenzae R2846
  CDS (1)..(762): transl_table=11
atgaataaagcgctctccgtggaaaatctaggtttttattaccaagcggaaaacttcctgtttcagcaactgaattttgatttgaataaaggagatattctggcgattttagggcaaaacggttgcggaaaaagcaccttgttggatttgttgcttggcattcatcgcccgattcagggcaagattgaggtgtatcaatctatcagttttgtgccgcaattcttttcttcgccttttgcttattccgtattggatattgtgctgatggggcgctcaacccatattaatacttttgccaaaccgaaaccgcatgattatcaagtcgccatgcgggcactggattatttgaacttgacccatttggcaaagcgcgaatttacttcgctttcgggcgggcagcgacaactaattttaattgcgagagccattgcttcagaatgcaaattgatactgttggatgagccaacttcagcattagatcttgcaaatcaagatatcgtattgtctttacttatcgatttggcacaatcacagaacatgactgtcgtattcacaacacatcaacctaatcaagctgtagcgatagccaataaaactttattgttaaataaacaaaattttaaatttggcgaaacaaggaatattttaacctcagaaaatttgaccgcactttttcatttaccgatgtttgaacaacaagctcaatataaagaatctttttttacgcattttgttcccttgtataaaacgttattaaagtaa

SEQ ID NO: 72803 - protein, 253 aa, Haemophilus influenzae R2846
MNKALSVENLGFYYQAENFLFQQLNFDLNKGDILAILGQNGCGKSTLLDLLLGIHRPIQGKIEVYQSISFVPQFFSSPFAYSVLDIVLMGRSTHINTFAKPKPHDYQVAMRALDYLNLTHLAKREFTSLSGGQRQLILIARAIASECKLILLDEPTSALDLANQDIVLSLLIDLAQSQNMTVVFTTHQPNQAVAIANKTLLLNKQNFKFGETRNILTSENLTALFHLPMFEQQAQYKESFFTHFVPLYKTLLK

SEQ ID NO: 72804 - DNA, 828 bp, Bacillus anthracis str. A2012
  CDS (1)..(828): transl_table=11
atgaatatgcaaaaagcattggagacgaaacgtttgacgttgtcttatggtgaaacaattattattgatgagttgaatttagaaattccaaaaggtgaaattacaatcttcattggttctaacggttgtgggaaatcaactttattgcgttcattagctagattattaaagccaacaactggtgacattttgttagataatcaagccattcaaagtatgcaaacgaagcaaattgctcgtcaaatggcaattttaccgcaaggaccgcaagcgccagaagggcttacagtattacaacttgtaaagcaaggacgttatccgtatcaaacatggctgaagcaatggtcagaaaaagatgaggaaatggtacagaatgcacttgcagcaacaggtatgacagaatttgctgagcgtgatgtgcatgctctttcaggtggacaacgccaacgggcttggattgcaatgacgcttgcacaagatacagatattattttattggatgagcctactacctatttagatatgactcaccaaattgaagtgctagatttattattcgaattaaatgaaacagaacaaagaacaattgttatggtactacacgatttaaatttagcatgccgttatgcagataatattgtagccattcaagataaacaaatatatgcacaaggtaagccagaagaagtagtagatgagaaactagtacgtgatgtattccgaatggaatgtcaaattagtacggatccgttatttgggacaccactttgtatcccacatggaaaaggaagacgtgtacgtaaagaagttgctcatgcaatgagataa

SEQ ID NO: 72805 - protein, 275 aa, Bacillus anthracis str. A2012
MNMQKALETKRLTLSYGETIIIDELNLEIPKGEITIFIGSNGCGKSTLLRSLARLLKPTTGDILLDNQAIQSMQTKQIARQMAILPQGPQAPEGLTVLQLVKQGRYPYQTWLKQWSEKDEEMVQNALAATGMTEFAERDVHALSGGQRQRAWIAMTLAQDTDIILLDEPTTYLDMTHQIEVLDLLFELNETEQRTIVMVLHDLNLACRYADNIVAIQDKQIYAQGKPEEVVDEKLVRDVFRMECQISTDPLFGTPLCIPHGKGRRVRKEVAHAMR

SEQ ID NO: 72806 - DNA, 744 bp, Exiguobacterium sibiricum 255-15
  CDS (1)..(744)
atgctacatgcagtagaagtcgaccaattatccgtctcctatttcgagacgactgcacttgaacgtctgtccgtccgcttgacatccggtcaactcattggaatcattggtccgaatggtgccggcaaatcgactttcatcaaagccatcatgggattgattccggcagaagcgacttcaatccgtctgcttggtcaatccgcgaaacaggcgcggacacaggttgcttacgttccccaacgcagtgcgattgactgggattttccgattcgggtcatcgatgctgtcctgatcggctgttatccgcagctcggtttgttcaagcggccgacgaaacagcaccggatgcgggcgcgcgcctgtctcgaccgggtcggaatgctcgattacgccgaccgtcaaatcggtgaactgtccggcggtcaacaacaacgtgtctttttggcccgcgccttagcgcaggaagccgacctgttattactcgacgaaccgttcgtcggggtcgatgccggcagtgaaggagtcatcatcgatttattgcgagtgttgcgcgatgaaggcaagacgatcctcgtcgtccaccacgatttaagtaaagcagccgactatttcgacacgttgctgcttctcaatcgacggatcatttcggtcggtccgccacaagacgtcctgcatgctgatctcatcgaagcagcttacggcaatccgcttgccttcctgcagaaagtggaggtttcgtcatga

SEQ ID NO: 72807 - protein, 247 aa, Exiguobacterium sibiricum 255-15
MLHAVEVDQLSVSYFETTALERLSVRLTSGQLIGIIGPNGAGKSTFIKAIMGLIPAEATSIRLLGQSAKQARTQVAYVPQRSAIDWDFPIRVIDAVLIGCYPQLGLFKRPTKQHRMRARACLDRVGMLDYADRQIGELSGGQQQRVFLARALAQEADLLLLDEPFVGVDAGSEGVIIDLLRVLRDEGKTILVVHHDLSKAADYFDTLLLLNRRIISVGPPQDVLHADLIEAAYGNPLAFLQKVEVSS

SEQ ID NO: 72808 - DNA, 837 bp, Prosthecochloris aestuarii DSM 271
  CDS (1)..(837): transl_table=11
atggtaatgcctccacagctgaagatcgaactgcgcaacgcggatctcgggtaccggaaagaatcccccctgctgcagggcattgacctcacactcacatcggatgatacggtgtgtgtgctcggccagaacggcacaggaaaaaccaccctgttcaaaacccttcttggctttcttcctccgctgtcaggcggcctgacactgaacggcaaaccccttgaagagtaccagcccagagaacttgcacggcatatcgcatatgtaccccaggctcatcatactccgttcccctacacggtgagccaggtggtactgttcggcaggacggcacacatgggttttttcggcaccccgcagaaaaaggaccgcactgcggtggaacgcattctcgacatgctcgacatcaggcaccttgccagaaggtcctacaccgagctcagcggaggggaacggcaaatggtgatcattgcgcgggcacttgcacaggaggctcggctccttattctcgacgaacctgcctcgagcctcgactatggcaaccaggttcggctgctcgacaagatcaggctgctcaaagaacagcacaccgggattctcatggcgacccaccagcccgaccaggcatttctgctcgatgcccaggtcctgatgctcacggaaaaacacctccttcgctatgatgacccgtcgcatgccctgcagccccggctcctgaaaaaaatttacggggtggatatccaggttattgataccgcccttgccggcaacggcccgtcgaaagtctgcaggccggtcatcacctcttggcaacaaacctcaaacgaccagacaccatga

SEQ ID NO: 72809 - protein, 278 aa, Prosthecochloris aestuarii DSM 271
MVMPPQLKIELRNADLGYRKESPLLQGIDLTLTSDDTVCVLGQNGTGKTTLFKTLLGFLPPLSGGLTLNGKPLEEYQPRELARHIAYVPQAHHTPFPYTVSQVVLFGRTAHMGFFGTPQKKDRTAVERILDMLDIRHLARRSYTELSGGERQMVIIARALAQEARLLILDEPASSLDYGNQVRLLDKIRLLKEQHTGILMATHQPDQAFLLDAQVLMLTEKHLLRYDDPSHALQPRLLKKIYGVDIQVIDTALAGNGPSKVCRPVITSWQQTSNDQTP

SEQ ID NO: 72810 - DNA, 1074 bp, Prosthecochloris aestuarii DSM 271
  CDS (1)..(1074): transl_table=11
atgaacagtgttctattgcagacccgggatcttgaaatcggctacaagattcgccggcccgcttcggctgcagccacgcatggccacaggtacatggccagggtcgttgccgggcatctttccctcagtctcaggcagggggaactggtatgcctgctcgggccgaacggttccggtaaatcgacactcatgcgcacgcttgccggagtgcagaaagcgcttggcgggcaggtgaggctggagggcagggagatcagccgcatgtctcccagggaggtggcaagaaaactgagcctggtgctgaccgacagggtggcgaccggaaacctgaacgtctatgcactggttgctctggggcgttatccctataccgggtggatgggacgattgtccgagaaggatgaagctgttgttcgccacgcgatagagagcaccgggattcgccgttttgctttacgtcacatcagcgatctcagcgacggagaacggcagaaggtgatgatcgcccgggctctcgctcaggatacgccggtcatcatgcttgacgagccgacagctcaccttgacctcccgaaccggatcgaggtcatgagcctgttgaaagagcttgccagaaagcagggaaaagctgttgtcatgtcgacgcacgaacttgacctggctctccaggcagcagacaggatctggctcatgggggcgcccggcagcgatggcactccggctgaaatggtctccggaatgcccgaagaacttgtgcttgacggtcgtctcgagggggctttcaaacgtaacggtttcgagttcgaccggcattcggggtcattcaggattcatcacgagcctgaagagaccatcgggcttgtaggggacggagccgaagcctactggacacgacgggctctcgagaggaaagggttccgggttgtcagtgggccggacatgcctttccgggtcgagatccgcggccgggaggacgaacgtgcatggacatatgtggacggcaagggaggggtacaggactgctgtgatatctgttcattgatcgacgctctcgaacagaggaggggagcctga

SEQ ID NO: 72811 - protein, 357 aa, Prosthecochloris aestuarii DSM 271
MNSVLLQTRDLEIGYKIRRPASAAATHGHRYMARVVAGHLSLSLRQGELVCLLGPNGSGKSTLMRTLAGVQKALGGQVRLEGREISRMSPREVARKLSLVLTDRVATGNLNVYALVALGRYPYTGWMGRLSEKDEAVVRHAIESTGIRRFALRHISDLSDGERQKVMIARALAQDTPVIMLDEPTAHLDLPNRIEVMSLLKELARKQGKAVVMSTHELDLALQAADRIWLMGAPGSDGTPAEMVSGMPEELVLDGRLEGAFKRNGFEFDRHSGSFRIHHEPEETIGLVGDGAEAYWTRRALERKGFRVVSGPDMPFRVEIRGREDERAWTYVDGKGGVQDCCDICSLIDALEQRRGA

SEQ ID NO: 72812 - DNA, 822 bp, Oceanicola batsensis HTCC2597
  CDS (1)..(822): transl_table=11
atgaccctattgaccgccaaagcgctccgggccggctatggcccgcgcgagatcctgaccgatctggacctcacggtgccgcccggcgccatcaccgcgatcgtgggggccaatgcctgcggcaagtccaccctgctgcgctgcctcgcgcggctgctgcgccccagttcggggcaggtggtgctggacggacgcgtgatccgcaagatcccgacgcgcgagctggcccgcagcctcggcctgctgccgcagtcgccgatcgcgccggacggcatcacggtggcggatctggtcagccacggacgccatccgcatcagggggtgctgtcgcgctggacccgcgccgacgacatggccgtcgccacggcgctcgaggcgacgcgcaccgccgatctggccgaccgcgatgtcgacgcgctgtccggcggacagcgccagcgggtctggatcgcgatggcgctggcgcaggagacggatatcctgctgctggacgagccgacgacctttctggacatcgcccatcaggtcgaggtgctggacctgctgatcgatctcaatcgcaggcgtggcacgaccatcgcgatggtgctgcacgatctgaacctggccgcgcgctatgccgaccatctggtcgcgatccgcgcggggagggtatacgccgccggaacgccgcaggacgtgctgaccgaggatatggtcgcggcagtattcggtgtgccgtgccgcgtgatgaccgacccgacctcgggccagccgatgatgctgccgcttggccgacatcgatcgtctgcacggaccacgcccggggaggccttgccatga

SEQ ID NO: 72813 - protein, 273 aa, Oceanicola batsensis HTCC2597
MTLLTAKALRAGYGPREILTDLDLTVPPGAITAIVGANACGKSTLLRCLARLLRPSSGQVVLDGRVIRKIPTRELARSLGLLPQSPIAPDGITVADLVSHGRHPHQGVLSRWTRADDMAVATALEATRTADLADRDVDALSGGQRQRVWIAMALAQETDILLLDEPTTFLDIAHQVEVLDLLIDLNRRRGTTIAMVLHDLNLAARYADHLVAIRAGRVYAAGTPQDVLTEDMVAAVFGVPCRVMTDPTSGQPMMLPLGRHRSSARTTPGEALP

SEQ ID NO: 72814 - DNA, 744 bp, Erythrobacter sp. NAP1
  CDS (1)..(744): transl_table=11
atgctggaggcaaacaacctttccattgagcgcggcggtcgccgggttttgagcgatgtcagcgctgcgtttgcagccggtgagatcaccgcgattgtcgggccgaacggagctggcaagtcgagcctcgtcctcgcgctcgcagggctgctcgatccggtgggtggcgctgtgacgcttgatggacgctcgatccatgcactgccgccgcgagagcgggcacgcatgctcggctatcttccgcaggacactgacatcgcctgggacgtcgcggtcgaacagctggtggcgcttggccgcctcccccatggcgaccgcggacgcgatgaagtcgaagccgccatttcgatgctcgcgcttgaggatttgcgccatcgcccggcgagccgtctgtcaggcggggagaaggcgcgcgttctgctggcgcgagtgctggctggaacgcctgagtgggtgctcgccgatgaaccgctcgccgcgcttgaccttgcgcatgcaaaggcgctgaccgagcactttcgcgagatcgccgatagcggttctggcgtcgtgctcgtggtccacgatcttgccgtggcaatgaactgtgccgaccgcgtcatcgttctgagtgatggcaaatgcgtggccaccggcacaccagccgatgcccttacgcaagagataatcaaacgcgtgtggggagtggatgctgactggttgggtaagccgggccagcatgcgctggtcattcgccgtccttag

SEQ ID NO: 72815 - protein, 247 aa, Erythrobacter sp. NAP1
MLEANNLSIERGGRRVLSDVSAAFAAGEITAIVGPNGAGKSSLVLALAGLLDPVGGAVTLDGRSIHALPPRERARMLGYLPQDTDIAWDVAVEQLVALGRLPHGDRGRDEVEAAISMLALEDLRHRPASRLSGGEKARVLLARVLAGTPEWVLADEPLAALDLAHAKALTEHFREIADSGSGVVLVVHDLAVAMNCADRVIVLSDGKCVATGTPADALTQEIIKRVWGVDADWLGKPGQHALVIRRP

SEQ ID NO: 72816 - DNA, 759 bp, Photobacterium sp. SKA34
  CDS (1)..(759): transl_table=11
atgaaaaagattgtggatgtacagaatgtcagttttgcttataagaaccatcaagcattaattgatataaacttcgagctttacgaaggtcaacgttgtgcattacttggacccaatggcggtggtaaaacgacattagtcaaactactactgggtatattatcgggttatcagggcaatctagcactgtttggcgaccatcccggtcgccatccagcgcttattgggtatgttcctcaacaatataaattgaatccaatattacctgtcacagtaaaagatgttgtattaatgggggcaaatgctgagcagctaaaagataagagattgctatcagccttattaacccaagcattacaacaaatgcatatcgagcatatagagaatacgctgtttaaagatctttcaggcggacagcgtcaacgtgtgttagtagctagagcgttaattgctcaacctaagctattaatacttgatgagccaaccagtaatgttgatccaagcatgacggcacaattttttgccttgctatcagcgctgcccaaagatgttgcggtattggtggtgagtcatgacatgagtattttagagtatcagattgatgtgattttagggctaaaccaaaccatgaaagtgcagcagagtaaggcattaacgtctgatatgttgcaacacttatacggcgtgaacagccattttattaaagatcttgttcagtcaaccacatccaataacgaaccaagtcctgctttagtatga

SEQ ID NO: 72817 - protein, 252 aa, Photobacterium sp. SKA34
MKKIVDVQNVSFAYKNHQALIDINFELYEGQRCALLGPNGGGKTTLVKLLLGILSGYQGNLALFGDHPGRHPALIGYVPQQYKLNPILPVTVKDVVLMGANAEQLKDKRLLSALLTQALQQMHIEHIENTLFKDLSGGQRQRVLVARALIAQPKLLILDEPTSNVDPSMTAQFFALLSALPKDVAVLVVSHDMSILEYQIDVILGLNQTMKVQQSKALTSDMLQHLYGVNSHFIKDLVQSTTSNNEPSPALV

SEQ ID NO: 72818 - DNA, 873 bp, delta proteobacterium MLMS-1
  CDS (1)..(873): transl_table=11
atgacggaccaacggcaaacaccatccgcttctgtaccgaatgccgccggccaacccggcccggccgccgggaagacggccattaccgcccacaacgtcagcctctcctaccaggacacgaccatcctgcaccggctttacttcaccgtcgaagaaggagagtttttcctgatcatcggccccaacggcagcggcaagacctcgctgctcaagctgctggccggcttgctgccccccagcagcggcaccatcgaggtgctggggcaaaaacccaccggccggcggcggcggcaatttgcgcaacaggtggcggtgctgccccagcagatcccggccgaattccccttcccggtggcaaccacggtcctgatgggccgcgccccccacctgcgcccctgggaactggaaggccgggacgaccgccgactggcccgccaggccatggccttcaccgatatcgaacacctggcctcccgccgcctggatcagctcagcggcggcgagcggcaacgggtcttcatcgcccaggcactctgccgccagccccgcctgctgctgctggacgaacccaccgccgccctggacccggcccaccagcttcggattctcgacttgctcacccggatgcgccacgaacagggggtaacggtggtcatggtctcccacgatctcaacctggccgccatgtacggcgaccgcctgctgttgctggatcagggccggattgccggcctgggcgagccggccacggtgctccagagggaaagactggaaaagacctaccaatgcccgctgctggtcgaccacaacccgctgggcgaagtgccccgggtcatgccaatccccaagcagtacctatccaccggcaattaa

SEQ ID NO: 72819 - protein, 290 aa, delta proteobacterium MLMS-1
MTDQRQTPSASVPNAAGQPGPAAGKTAITAHNVSLSYQDTTILHRLYFTVEEGEFFLIIGPNGSGKTSLLKLLAGLLPPSSGTIEVLGQKPTGRRRRQFAQQVAVLPQQIPAEFPFPVATTVLMGRAPHLRPWELEGRDDRRLARQAMAFTDIEHLASRRLDQLSGGERQRVFIAQALCRQPRLLLLDEPTAALDPAHQLRILDLLTRMRHEQGVTVVMVSHDLNLAAMYGDRLLLLDQGRIAGLGEPATVLQRERLEKTYQCPLLVDHNPLGEVPRVMPIPKQYLSTGN

SEQ ID NO: 72820 - DNA, 774 bp, delta proteobacterium MLMS-1
  CDS (1)..(774): transl_table=11
atgcccagcggcggtgaaccagtcattaccatccgtgatcttaatttcgcgtacaaccgcctgccgatcctggaagaggtcaatcttgaagtcgccgcccgggacgccctttgtatcgtcggccccaacggcggcggcaagaccaccctgctcaagctgatcctgggtttactggaacccagcagcggcagcattcgggtacttggcaaaaaacccgccgaggtgcgactgcggctgggctatgtcccccaatacgcccattacgaccccctttttccggtgaccgtccttgatgtggtgctgatgggccgcctgggccggcgccactcggggctctacaaccaggacgaccgccaggccgccgcccgggccctggctaccatgggcctggaagagctggccccacggctctttgccgaaatctccggcggtcagcggcagcgcaccctgctcgcccgggccctggcctgcgatgccgagatcctgctgctggacgagcccaccgccaatatcgatatggaggcggaaaatcatcttttcagtctattgcgccagctcaaccggaagctgacggtgctggtggtgacccacgacgtgggttttgcctccagcttttttgagcgtatcgcctgtgtcaaccgccgggtgcactcgcatccggtggcggaactggacggccacctgatccgggagatgtacggcaccgacgtgaccatgatccgccacgaccatcaatgcgccgagggtgcgggcgggaggtgtggtggtgtttga

SEQ ID NO: 72821 - protein, 257 aa, delta proteobacterium MLMS-1
MPSGGEPVITIRDLNFAYNRLPILEEVNLEVAARDALCIVGPNGGGKTTLLKLILGLLEPSSGSIRVLGKKPAEVRLRLGYVPQYAHYDPLFPVTVLDVVLMGRLGRRHSGLYNQDDRQAAARALATMGLEELAPRLFAEISGGQRQRTLLARALACDAEILLLDEPTANIDMEAENHLFSLLRQLNRKLTVLVVTHDVGFASSFFERIACVNRRVHSHPVAELDGHLIREMYGTDVTMIRHDHQCAEGAGGRCGGV

SEQ ID NO: 72822 - DNA, 774 bp, delta proteobacterium MLMS-1
  CDS (1)..(774): transl_table=11
atgcccagcggcggtgaaccagtcattaccatccgtgatcttaatttcgcgtacaaccgcctgccgatcctggaagaggtcaatcttgaagtcgccgcccgggacgccctttgtatcgtcggccccaacggcggcggcaagaccaccctgctcaagctgatcctgggtttactggaacccggcagcggcagcattcgggtacttggcaaaaaacccgccgaggtgcgactgcggctgggctatgtcccccaatacgcccattacgaccccctttttccggtgaccgtccttgatgtggtgctgatgggccgcctgggccgccgccactcggggctctacaaccaggacgaccgccaggccgccgcccgggccctggctaccatgggcctggaagagctggccccacggctctttgccgaaatctccggcggtcagcggcagcgcaccctgctcgcccgggccctggcctgcgatgccgagatcctgctgctggacgagcccaccgccaatatcgatatggaggcggaaaatcatcttttcagtctattgcgccagctcaaccggaagctgacggtgctggtggtgacccacgacgtgggttttgcctccagcttttttgagcgtatcgcctgtgtcaaccgccgggtgcactcgcatccggtggcggaactggacggccacctgatccgggagatgtacggcaccgacgtgaccatgatccgccacgaccatcaatgcgccgagggtgcgggcgggaggtgtggtggtgtttga

SEQ ID NO: 72823 - protein, 257 aa, delta proteobacterium MLMS-1
MPSGGEPVITIRDLNFAYNRLPILEEVNLEVAARDALCIVGPNGGGKTTLLKLILGLLEPGSGSIRVLGKKPAEVRLRLGYVPQYAHYDPLFPVTVLDVVLMGRLGRRHSGLYNQDDRQAAARALATMGLEELAPRLFAEISGGQRQRTLLARALACDAEILLLDEPTANIDMEAENHLFSLLRQLNRKLTVLVVTHDVGFASSFFERIACVNRRVHSHPVAELDGHLIREMYGTDVTMIRHDHQCAEGAGGRCGGV

SEQ ID NO: 72824 - DNA, 780 bp, Desulfitobacterium hafniense DCB-2
  CDS (1)..(780): transl_table=11
atgaacagcttattggaagtcaatcaggcagccttcgcttaccctggcggcaagactgtgttcaaagatgttaactttacgatctccccggggcagatactgtccattatcgggcctaacggtgccggcaaatcgacgctgctgaactgtatcgccgggtttaataccttgaatcggggcagtatccgcatcgaagggatacctttgccgaaaatgaaccgcaaagccatagcccgctatattggctatgttccccagatccataacccggcctatggttattccatacgggattttgtggtgatgggccgtgctccttatatcagcaccttccgcatgccgggccgggaagacttcgccaaagcggatgcggccattgcggccatggggatttcccatctggctcagcggccatacaccgatgtgagcggaggggagcggcagcaggccaccattgcccgggtgattgtgcaggagccccaaatcattatgctggacgaacccacttcagccctggactttggcaaccaattaagaactgtccggatgattaaggaattggcggaacggggctatgccatcatcatgaccacccataaccccgaccaggccatgatgctggaagggctggtgggaatcttggagaaaaacgggcgtttttcagtgggcaaagcccaggaaataatcaatgaagagaccttgaccgaattgtatcaaaccgaggtcaagattccctatgttgaacagatttcccgcaatgcttgtctggcccgcttataa

SEQ ID NO: 72825 - protein, 259 aa, Desulfitobacterium hafniense DCB-2
MNSLLEVNQAAFAYPGGKTVFKDVNFTISPGQILSIIGPNGAGKSTLLNCIAGFNTLNRGSIRIEGIPLPKMNRKAIARYIGYVPQIHNPAYGYSIRDFVVMGRAPYISTFRMPGREDFAKADAAIAAMGISHLAQRPYTDVSGGERQQATIARVIVQEPQIIMLDEPTSALDFGNQLRTVRMIKELAERGYAIIMTTHNPDQAMMLEGLVGILEKNGRFSVGKAQEIINEETLTELYQTEVKIPYVEQISRNACLARL

SEQ ID NO: 72826 - DNA, 789 bp, Desulfitobacterium hafniense DCB-2
  CDS (1)..(789): transl_table=11
atgctgagtgttaaaagcttaagtttccactaccaaccggaacgaatcatcctcaaagatatttcctttgatctggacagccatgagattctttgcctgctggggcccaacgggaccggtaaaaccactctgctcagatgcatcctttccctcaataaaatgaaaagcggccggattaccctgaatggtttggagttaagcaaaatttcccccaaaaggcgggcggagatgatggcttatgtccctcaggctaccacggtggctttcccttacgaagccgcggagatcgtacagatggggcgggtcgtcaatctgtccctgggagcccggccctcggcacgggatcggaagctggctgaagaagccatggagaagatgggaattctgcacatgagcagctatccctttaatgagatgagcggcggagaaaagcagatggtgctgatcgccagagccattgcccaacaggccaaaattctggtcatggatgagcctaccgccaatctggattattataaccaagtaaaaatgctcaaggtgatcaaagccttggctgagcaggggtacgccatcttaatgacgtcccattttccggatcacgcctttctggcctgcagcaaagcggtgctcatgcgggacggcgtgatcatggcccaaggacaccctgatgaggtcgtaaccaccgagaatctgaccaggctttattctacccctgtctgtgtagctgaagccagattggatgctatggataccgctatgaaagtgtgtatcccggttatgaataattaa

SEQ ID NO: 72827 - protein, 262 aa, Desulfitobacterium hafniense DCB-2
MLSVKSLSFHYQPERIILKDISFDLDSHEILCLLGPNGTGKTTLLRCILSLNKMKSGRITLNGLELSKISPKRRAEMMAYVPQATTVAFPYEAAEIVQMGRVVNLSLGARPSARDRKLAEEAMEKMGILHMSSYPFNEMSGGEKQMVLIARAIAQQAKILVMDEPTANLDYYNQVKMLKVIKALAEQGYAILMTSHFPDHAFLACSKAVLMRDGVIMAQGHPDEVVTTENLTRLYSTPVCVAEARLDAMDTAMKVCIPVMNN

SEQ ID NO: 72828 - DNA, 780 bp, Desulfitobacterium hafniense DCB-2
  CDS (1)..(780): transl_table=11
atgctgaaagttcaggagctaagctttcaatatggctcccgccttgtcctggaggatatgcatttcgaggctccctacggacattgtgtggccattctgggcaataacggcgcaggaaaaagcaccttgatcaaatgcctcaatagaatactgtccccacgctctggccaggttcttctggatgaacgggatttgtgcagcatgtcccgcaccaatgtggcgaaagagatggcttatgtagcccagcatagtgaaaccgcacggtttacggtttatgatgcggtgatgctgggacgcaaaccctatatcaggttcagtcctacggaagcagattatgagatcgttcatggcatgatcgaaaagttggaattaagccagatgtcgttggcttatatcgatgagctttccggcggggaactgcaaaaagtcatgctggcccgggctttgacccaacagcctaaagtgctgttgctggatgaaccgacgagcaatctggatttgaaaaatcagcatgatatgcttggcttggtagggaaaattgccaaggaggaaaacatctgtgtcctcatggtcattcatgatctgaatcttgccctgcgctattgcgaccggtttctctttattaaagacggaggaatttatgcctatggcgacgaagaaattatgaatgccaaggttatcggcgaagtgtacggcataccggtggctatagaatatgcccatggggccaaaatagtcgtgcccttccctgaacaaggtgttaaagcgaataaagcataa

SEQ ID NO: 72829 - protein, 259 aa, Desulfitobacterium hafniense DCB-2
MLKVQELSFQYGSRLVLEDMHFEAPYGHCVAILGNNGAGKSTLIKCLNRILSPRSGQVLLDERDLCSMSRTNVAKEMAYVAQHSETARFTVYDAVMLGRKPYIRFSPTEADYEIVHGMIEKLELSQMSLAYIDELSGGELQKVMLARALTQQPKVLLLDEPTSNLDLKNQHDMLGLVGKIAKEENICVLMVIHDLNLALRYCDRFLFIKDGGIYAYGDEEIMNAKVIGEVYGIPVAIEYAHGAKIVVPFPEQGVKANKA

SEQ ID NO: 72830 - DNA, 789 bp, Pseudomonas putida GB-1
  CDS (1)..(789): transl_table=11
atgaccctcctggctgctgtacaagtgcacccactgagttgccaggggctggggctgcaactggccggcaatgccgtactcagcggtatcgaccttggcgttgtcgctggtgaaaccctgggtatcgtcggccccaacggctcgggcaaatcctcgctactgaagttgctggcagggctgcgcaaacccacctgcggcaacgtacagctgatgggcgaaccgctggcgcagatgcctcgccgccatgtagcccaggccttggcactggtcgaacaacaggccgacaccctcgatgcgatcagcgtgttcgacgcggttgccttgggccgcacgccctggctctcggccctggcgccgttctcccggcaggaccgcgacatcgtcgagcaagcgttggccgaccttgatgccttgcacctgcgtacgcgcctgtggggctcgctgtccggtggcgagcgccagcgtgtgcacatcgcccgcgccttggcccaacgcccgcaggtactgctgctggacgaaccgaccaaccacctggacatccagcatcagctaagcctgctgcagcaagtgcaggccctgccggtaaccaccctggtggctttgcacgacctcaaccaggcgctcacctgtgaccgtgtggcggtactcgacaagggccgcctggtcgcccttggcaaaccactcgacgtactcacccccgagcgcctgctgagtaccttcggcgtccacgcccactaccttaccgacccttacgacggcgcgcgcattctgcgctttcgcgccccctga

SEQ ID NO: 72831 - protein, 262 aa, Pseudomonas putida GB-1
MTLLAAVQVHPLSCQGLGLQLAGNAVLSGIDLGVVAGETLGIVGPNGSGKSSLLKLLAGLRKPTCGNVQLMGEPLAQMPRRHVAQALALVEQQADTLDAISVFDAVALGRTPWLSALAPFSRQDRDIVEQALADLDALHLRTRLWGSLSGGERQRVHIARALAQRPQVLLLDEPTNHLDIQHQLSLLQQVQALPVTTLVALHDLNQALTCDRVAVLDKGRLVALGKPLDVLTPERLLSTFGVHAHYLTDPYDGARILRFRAP

SEQ ID NO: 72832 - DNA, 768 bp, Pseudomonas putida GB-1
  CDS (1)..(768): transl_table=11
atgttgcaagtagagggcctgtatctgcgcaggggcagcaatgaggtactgcacgacattcacctgcaactgcagccagggcaagtagtgggcgtgcttggccccaacggtgccggcaagagcagcctgctgggtgtgctgtgcggtgagctggcgcccgaccatgggcgggtgacgctgcaagggcgacctttggccgattgggctgggcaggaacgagccaggcgcctggcggtattgccgcaagtgtccagcttgggtttctcgttccgggtcgaggaagtggtggccatggggcgtatgccccatggcaccgggcagcggcgtgatgcagaaattgtccaggcagccttgcaggcggcagatgcctggcacctggtggcgcgcagttacctggcgttgtctggcggcgagcggcagcgggtgcacctggcccgcgtactggcgcagctgtggccaggggaagagggcagcatattgctgctcgacgagccgacctcgatgctcgacccgctgcatcagcacacaaccctggaagccgtgcgccgcttcgccgacagtggtgctgctgtgctggtgatcctgcatgacctgaacctggcggcgcgttactgtgaccgtatcctgttgctggagcaggggcgctgccatgcgtttgcctcccctgaagaagtgctgacgccaacggcgttgagagcagtctacggtctcgatgtgctggtgcaggcgcacccggagcgtgggcatccgctgatcattgcccgctag

SEQ ID NO: 72833 - protein, 255 aa, Pseudomonas putida GB-1
MLQVEGLYLRRGSNEVLHDIHLQLQPGQVVGVLGPNGAGKSSLLGVLCGELAPDHGRVTLQGRPLADWAGQERARRLAVLPQVSSLGFSFRVEEVVAMGRMPHGTGQRRDAEIVQAALQAADAWHLVARSYLALSGGERQRVHLARVLAQLWPGEEGSILLLDEPTSMLDPLHQHTTLEAVRRFADSGAAVLVILHDLNLAARYCDRILLLEQGRCHAFASPEEVLTPTALRAVYGLDVLVQAHPERGHPLIIAR

SEQ ID NO: 72834 - DNA, 792 bp, Marinobacter sp. ELB17
  CDS (1)..(792): transl_table=11
atgttgcgtacggatcgactcacccttgcttacggcaataccaacgtcgtgcatgaattatcattggcgattccaacaggcagaatcagctgcctggtcggccctaacgggtcgggcaaaagtacgctgctgaaagggcttgcaggattaatagccccacgccaaggcgaggtattacttgaggaacagcctttgtctttgtggagtcgcaacgaactggcgcttcgtcttgctatgttgccgcagaaacccatcgtgcctgaaggcattcttgtgaaggacctggtcgcgttggggcgttttcctcaccgcaaatggtggcaacgtgacgggcgagaagaccgcgaggcatcccagcaagccatgcacatgaccggtgttgagtcgcttggcggacgtcctgtggcatcgttgtccggcgggcagcagcagcgtgcatggatcgccatggccctggctcagcagaccgacattctgttgctggatgagcctacgacctatctggattgggggtatcagttagaagtgctggaacttctggttgatctcaatcaaacccgagggcttacagtgatcatgtctttacatgacctgaatcaggccgctcaatttgccgaccacgtgctggtgttggaggatggacaggtaaaagcggctggggtgccggggcaggtgattacagaaacccttctggctcaggttttcagggtaaggggcgctgttacgctgaacgatgaaggccggccctattgcatcggacgcggcactgcaaaaggtttgcacagtacctga

SEQ ID NO: 72835 - protein, 263 aa, Marinobacter sp. ELB17
MLRTDRLTLAYGNTNVVHELSLAIPTGRISCLVGPNGSGKSTLLKGLAGLIAPRQGEVLLEEQPLSLWSRNELALRLAMLPQKPIVPEGILVKDLVALGRFPHRKWWQRDGREDREASQQAMHMTGVESLGGRPVASLSGGQQQRAWIAMALAQQTDILLLDEPTTYLDWGYQLEVLELLVDLNQTRGLTVIMSLHDLNQAAQFADHVLVLEDGQVKAAGVPGQVITETLLAQVFRVRGAVTLNDEGRPYCIGRGTAKGLHST

SEQ ID NO: 72836 - DNA, 1470 bp, Bacillus sp. SG-1
  CDS (1)..(1470): transl_table=11
atgataagaacagaaaatctctcaggcggctacggtgataaaaaaattttgcacgatgtcaatgtggaagtcaaaggcggggagttctttggaattcttggaccgaatggaagcggcaaaacaacgctgttgaaaatgatcagtggacttcttaaagctgaaaccggggacgttttcattaatggtaagaatcttactgaatatacaatgaaagaactggccaggctcatggctgttcttcctcagctgaattctcaggctttcaattataaagtaaaagatacagtgtctcttggaaggtatgctcatcaaaccggattttttaagaatttaacagagaaagatgaagcaattatcgtttctgttatggagcagacaggaatccaccactatgcagacaattttttgaatgagttatcaggtggagagaggcaaagagtgtttctggcacaggcacttgcacaagaaccgaaagtcctcttgttggatgagccgacaaaccatctggacctttcccatcaaaaggatttgctggactatttgaagaaaaccacgaaagaaactggactgacggttatctcgatatttcatgatctgaatctcgcaggactttattgtgatcggcttttattaatggaagaaggaagcgtttccattataaaccatccagaggaagttctacgagaagaccgtatttcttcggtatacaacaccaagattgaaaagaactcccatccgaaggtcgcaaagccccaaatgtatctgataccagcccgggtccaggaagaaaccgaatggtgggaaatggacgaaaggtatttaaccttgagggatgatatgatcacccttaacttgccaaaacctgttaaaacgatgtcttcgggtgtttgcggggcgggcttgagatggtcatccaccatcgtgaatcgccatgttcctgacacttatgactgtgacgattacatcgaggatatggagaacttcttattaaaaaagggatttgaccctttcaaaacagtcggaatgatgacggcagtgaagttggaggatgtttcttatagaaaggctgctgaaggtaatgtatctgtttttgtggtggtcacagctggggtcgggaatgcggttgacatttctcgaaacagtatacaagctccactaaagcccggcacgatcaatacctgggtattagtaaatggagagctgtctgatgaggcgttcatccaggcaatcgtgacggcaacagaggcgaaagtcaaggcattgcaggatgaaaaggtgaaagatgaaagtaccaataccctggctactgggacatcgacagacagcatcctgattggagcgacccaacgcggggagttcctgccattttcaggaccgattacgaaggtggggaagatgatcggaactgctgtgtatgaaacgacgagagaagcaatcggtcagtataaaagaagaaagggactcttgtga

SEQ ID NO: 72837 - protein, 489 aa, Bacillus sp. SG-1
MIRTENLSGGYGDKKILHDVNVEVKGGEFFGILGPNGSGKTTLLKMISGLLKAETGDVFINGKNLTEYTMKELARLMAVLPQLNSQAFNYKVKDTVSLGRYAHQTGFFKNLTEKDEAIIVSVMEQTGIHHYADNFLNELSGGERQRVFLAQALAQEPKVLLLDEPTNHLDLSHQKDLLDYLKKTTKETGLTVISIFHDLNLAGLYCDRLLLMEEGSVSIINHPEEVLREDRISSVYNTKIEKNSHPKVAKPQMYLIPARVQEETEWWEMDERYLTLRDDMITLNLPKPVKTMSSGVCGAGLRWSSTIVNRHVPDTYDCDDYIEDMENFLLKKGFDPFKTVGMMTAVKLEDVSYRKAAEGNVSVFVVVTAGVGNAVDISRNSIQAPLKPGTINTWVLVNGELSDEAFIQAIVTATEAKVKALQDEKVKDESTNTLATGTSTDSILIGATQRGEFLPFSGPITKVGKMIGTAVYETTREAIGQYKRRKGLL

SEQ ID NO: 72838 - DNA, 789 bp, Moritella sp. PE36
  CDS (1)..(789): transl_table=11
atgttaaacatgacaacaccggttctgcattgccagcagttgaattatagcatcgcaggtaaatgtatttttaatgatctcaatttgacgttagatgaaggagagtttttggctgtgcttggccctaatggtgcgggtaaaagttcgttgttcaaagccatcaccggtgagttgcaaccctcctctgggaaaattttcttaaacggtgaaatgcggagcaatattaatcggagtgagatagccaggacgctggcagtattgccacaaagcgccagcttaagtttctcatttcaagtgattgacgtggtgctgatgggcggcttacaggccgattgtggtcaagctaaagtacaagcactcgctgatacgatcttagctgaacaagagatcgaccatttaagagcacgtgcttacccgacattatcgggtggtgagaaacagcgtgtgcatttttcccgggtattattacagttagctgtgggtaataagaacaaaccacagatactattattggatgagcccacggcggctttggatataaattatcaacatcaattattaaagagtgccaagcatttagcacagacaggggtggcggttattacagtattacatgatcttaatttggcggctaagtatgctgaccggatcattttattgaaggacggtaatatctgcgctaatggctgtgccaagcaagtggtgaccactgataatattcgtcacgtttatggttatgaaagcacggtgattaatcatgccgagttttcacatccgattatcatgtag

SEQ ID NO: 72839 - protein, 262 aa, Moritella sp. PE36
MLNMTTPVLHCQQLNYSIAGKCIFNDLNLTLDEGEFLAVLGPNGAGKSSLFKAITGELQPSSGKIFLNGEMRSNINRSEIARTLAVLPQSASLSFSFQVIDVVLMGGLQADCGQAKVQALADTILAEQEIDHLRARAYPTLSGGEKQRVHFSRVLLQLAVGNKNKPQILLLDEPTAALDINYQHQLLKSAKHLAQTGVAVITVLHDLNLAAKYADRIILLKDGNICANGCAKQVVTTDNIRHVYGYESTVINHAEFSHPIIM

SEQ ID NO: 72840 - DNA, 786 bp, Cenarchaeum symbiosum
  CDS (1)..(786): transl_table=11
atgcttgcagccgagcacctgaccgtcgattacggcggcagggccgccgtagatgacatcagctttgatgtgctccagggcgacctgctgggcatagtgggccccaacggggcgggcaagaccaccatgttccgggctatactaggcctgcagccgcaccgcggggcagtccggctgttcgggcacgggccccgcagcctcaggcaccttgttcccctggttgggtatgtgccgcaaaagatctcgtttgatcacgggtttccggccaccgtctctgacgtggtctcgctgggcgtctccacccggaggaccgccaagggggcccgcctggtaagggaggcggggctcgagtggggccgcacatacggggggctcggcggggcccgggagaggacggccgcggcactatcgaccgtggggcttggcgcccttgcggggcgccgcataggggagctctccggcggggagctgcagcgcgtgataatagcaaagtcgcttgtcaacgatccccttctgctcatactggatgagccggtcaccggggtggatgcagaatcgcaggccgcattctacgatgtaatgaacaggataaacgagagtgggacgaccataatctggtcgtcgcacgacctgaccgcgatagagcggcacgcggagaaggtggcgtgcatggacgggagtctgttctttcacgggggcaaggagcagttctttaaagacgaagaggcgctcggcaagtacagggaatcggccatgcagatgcacatgcacggccacgacgggtag

SEQ ID NO: 72841 - protein, 261 aa, Cenarchaeum symbiosum
MLAAEHLTVDYGGRAAVDDISFDVLQGDLLGIVGPNGAGKTTMFRAILGLQPHRGAVRLFGHGPRSLRHLVPLVGYVPQKISFDHGFPATVSDVVSLGVSTRRTAKGARLVREAGLEWGRTYGGLGGARERTAAALSTVGLGALAGRRIGELSGGELQRVIIAKSLVNDPLLLILDEPVTGVDAESQAAFYDVMNRINESGTTIIWSSHDLTAIERHAEKVACMDGSLFFHGGKEQFFKDEEALGKYRESAMQMHMHGHDG

SEQ ID NO: 72842 - DNA, 816 bp, Vitis vinifera
  CDS (1)..(816)
atgaactactctgctctcagccgctcctctgcgcttcatcttcctaatcttcactccaccaaccccaccaggtctgtttctctctctattaggagctgcattgtcactcagaatgatgccattgaagggcagagcctcaactactcggtcaccacccgcctgggccaactcactcccattcttaaggactgttcaattcggattccttccggacagttgtggatgcttcttggccccaatggttgtggtaaatctacgcttttgaagattttggctgggcttctgaatccgaccagtggaactttgtatgtgaagaagcccaagagtttcgtttttcaaaatcccgaccatcaggtagtgatgcctacagtagaagcagatgttgcatttggccttggtaagttcaacctgacaattgaagaagtcaggtcaagagtgtcgaaagctctggatgctgtgggcatttctgactacatgcaacgacctgttcagacactaagtggtggtcagaaacaaagggttgccattgctggtgctttggcagaagcgtgtaaagtactattgctagatgagctcacaacattcttggatgaaaatgatcaggtcggggtgataaaagcagtgaagaactctgtggatagttcaggagaagtgacagcattatgggtgacgcatcgtatggaagaacttgagtacgcagatggtgctgtgtacatggaagacgggagagttgtaatgcatggtaatgctgcaagcataatggattttgttaaagccaggcaatcctcctacctcaaccaattgaaacttaaatga

SEQ ID NO: 72843 - protein, 271 aa, Vitis vinifera
MNYSALSRSSALHLPNLHSTNPTRSVSLSIRSCIVTQNDAIEGQSLNYSVTTRLGQLTPILKDCSIRIPSGQLWMLLGPNGCGKSTLLKILAGLLNPTSGTLYVKKPKSFVFQNPDHQVVMPTVEADVAFGLGKFNLTIEEVRSRVSKALDAVGISDYMQRPVQTLSGGQKQRVAIAGALAEACKVLLLDELTTFLDENDQVGVIKAVKNSVDSSGEVTALWVTHRMEELEYADGAVYMEDGRVVMHGNAASIMDFVKARQSSYLNQLKLK

SEQ ID NO: 72844 - DNA, 768 bp, Rhodobacter capsulatus
  CDS (1)..(768): transl_table=11
atggtcgatctctccggggtgttctgggggccaaaggggcagccggaccttctgtcggatatttcctttgccgtgcccgaggggcagagtctcgcgatctgcggcgcgaagggggcggggaaaaccgcgctgttgcggctgatctgccgccagatcgcgcccaatcgcggcacggtgcggctgctggggcgcgatctgtggctgatgagcgcgcccgaggccgcccgcgtgctggccgcggtgctgcaggaacagccgggcgaattcggcctgacggtccggcagatcgtcgcgctggggcggttgccgcatcggcgcggctggggcgcggggctggccacgcccgacggcgccgatgcgacgcttgttcaggcggcgctcgaccggcttgagctgacggcgctggcgagccgcccctttgccacgctgtcggggggcgaacggcagcgcgtgatgatcgcgcgcgcgctggcgcaggaaccccgggtgatcgtgcttgacgagccgacgccccctctcgacatccgttcccggctggacctgctggccctgctcaaggggctcgggctgacggtgatcacggcgctgcacgacctgacgcttgccgccgattttgccgaccgggtgctggtgctgcacgaggggcggcttctggccgatggcccgcccgacaccgccctgaccgagacggttctggcccgcgccttccgggtgcaggcccggatcgaccgcagcggcgcccgcccctgctttgcctgccatctgtga

SEQ ID NO: 72845 - protein, 255 aa, Rhodobacter capsulatus
MVDLSGVFWGPKGQPDLLSDISFAVPEGQSLAICGAKGAGKTALLRLICRQIAPNRGTVRLLGRDLWLMSAPEAARVLAAVLQEQPGEFGLTVRQIVALGRLPHRRGWGAGLATPDGADATLVQAALDRLELTALASRPFATLSGGERQRVMIARALAQEPRVIVLDEPTPPLDIRSRLDLLALLKGLGLTVITALHDLTLAADFADRVLVLHEGRLLADGPPDTALTETVLARAFRVQARIDRSGARPCFACHL

SEQ ID NO: 72846 - DNA, 3912 bp, Aspergillus oryzae; identical to SEQ ID NO: 7583
  CDS (1)..(3912)

SEQ ID NO: 72847 - protein, 1303 aa, Aspergillus oryzae; identical to SEQ ID NO: 7584

SEQ ID NO: 72848 - DNA, 771 bp, Streptomyces hygroscopicus
  CDS (1)..(771): transl_table=11
ttgaggatcgatatcgaggacctgcgggtcgcgtacgccggacgtacggtcgtggccgatgcccacctcatcgcggccgaaggcgagatcaccggtctggtggggcccaacggcagtggcaagtccactcttctgcggaccgtgtaccggcatctgaagcccgccgccggacgtgtgctgctcgacggctccgacatccgcgagctgagccccgcgcggtcggcccggcacatcgccgcgctcccacaggagcggggcggggacttcgagctgaccgtacgtgaggtggtcgccatgggccgcaccccctacaagcgggcgttcgccggggaggacgccgccgaccgggacatcgtcgcgggtgctctcgcggacgtcggcatgggggaccacaccgaccgccacttcagcgagctgtccggcggcgagcggcaacgtgtgttgctggcccgtgcgttcgcccagcagacggacgtcctggtcctggacgagccgacgaaccacctcgacgtacgccaccaggtcgaactcctcgccctgctgcgcggccgacgccgtacgaccctggtgtcgctgcatgacctcaacgccgccgcctccgtgtgcgaccggctgcatgtcctgcacgagggtcgcgtggtcgcctccggtacaccccgcgaggtgctgcgaccgcccctgctggccgaggtgttcggcgtacgtgcggccgtggtcgagcatccgctgaccggggacccgctgatcgccttcgaccaccgggaactatga

SEQ ID NO: 72849 - protein, 256 aa, Streptomyces hygroscopicus
MRIDIEDLRVAYAGRTVVADAHLIAAEGEITGLVGPNGSGKSTLLRTVYRHLKPAAGRVLLDGSDIRELSPARSARHIAALPQERGGDFELTVREVVAMGRTPYKRAFAGEDAADRDIVAGALADVGMGDHTDRHFSELSGGERQRVLLARAFAQQTDVLVLDEPTNHLDVRHQVELLALLRGRRRTTLVSLHDLNAAASVCDRLHVLHEGRVVASGTPREVLRPPLLAEVFGVRAAVVEHPLTGDPLIAFDHREL

SEQ ID NO: 72850 - DNA, 840 bp, Streptomyces griseus
  CDS (1)..(840): transl_table=11
atgaccacgcaccaccgactgaccgccgaaggactcaccctcggctacggcgaccgcaccgtcgtcgactccctcgacctcgccgtaccgcccggccggatcaccgtcatcgtcggcgccaacgcctgcggcaagtcgacgctcctgcgctccatgtcccggctgctcgccccccgggcgggccgcgtcgtcctggacggcaaggaggtccaccggctgcccgccaaggaactggcccgcaccctcggcctgctgccccagtcgcccgtcgcccccgagggcatcaccgtctttgacctcgtcggccgcggccgccacccgcaccaggggatcttctcccgctggaacgagaaggacgacgccgccgtggccgccgccctggaagccacgcacaccgaaccgctcgccgaccgagcggtggacgaactatccggcggccagcgccagcgcgtctggatcgcgatggccctcgcccagcagaccgacctgctgctgctcgacgagccgaccaccttcctcgacgccagtcaccagatcgaggtcctggacctcctgaccgacctgaaccgctcgcgcggcaccaccatcgtgatggtcctgcacgacctcaacctcgccgcccggtacgcggaccacctgatcgcgctggccagcggcgggctccacgcctccggcaccccggccgaggtgctgacggaggagaccgtccgggccgtgttcgacctcgacagccgcatcatcgaggaccccgtgtcgggtcggcccctgatgctcccgatcggccgccaccacgtcctggaccgggccgacccgctgaccgtcggggagccgaccgcgtga

SEQ ID NO: 72851 - protein, 279 aa, Streptomyces griseus
MTTHHRLTAEGLTLGYGDRTVVDSLDLAVPPGRITVIVGANACGKSTLLRSMSRLLAPRAGRVVLDGKEVHRLPAKELARTLGLLPQSPVAPEGITVFDLVGRGRHPHQGIFSRWNEKDDAAVAAALEATHTEPLADRAVDELSGGQRQRVWIAMALAQQTDLLLLDEPTTFLDASHQIEVLDLLTDLNRSRGTTIVMVLHDLNLAARYADHLIALASGGLHASGTPAEVLTEETVRAVFDLDSRIIEDPVSGRPLMLPIGRHHVLDRADPLTVGEPTA

SEQ ID NO: 72852 - DNA, 810 bp, Streptomyces chartreusis
  CDS (1)..(810): transl_table=11
atggccgacgcgctgatcagtctgcggcgagcggccctgtcgtacggcgagcgcgtggtgtggcgggacctcgatctcgacgtgcggccgggcgagttcctggccgtgctcgggcccaacggggccgggaagaccagcttcgtgcgcgcgctgctcgggcagcgccggctgtccgccggcacgctcacggtgctgggccgtccgcccggccgcggcagccggcacatcggctacgtcccccagcaggcggccctgtccgcacaggccatgctgcgtgcccgggacctcgtccgtctcggcgtcgacgggcaccgcttcgggcctcggccgcgcacgggcgccgtacgccgccgcgcggacgagatcctcgcctcggtcggggccacggcgtacgccgacgtccccgtcgccctgctctccggcggcgaacggcaacgcgtgcgcatcgggcaggccctcgcgaccgacccccgcatcctgctctgcgacgaacccctgctctccctcgacctgcaccaccagcgggccgtcacggaactggtcgacgcacggcgccgctcccacggcaccgcggtggtcttcgtcacccacgagatcaaccccgtgctgggcctcgtggaccgcgtgctgtacctcgcccgcggcggccaccgcgtcggcacgcccgacgaggtcctcacctccgaggcgctgtcgcggctgtacggcacacaggtcgacgtcgtccgtgtccgcgaccgcgtggtggtcgtcggcgcacccgaagaggcggcccaccatccccaactgcccggcggagcaaggccatga

SEQ ID NO: 72853 - protein, 269 aa, Streptomyces chartreusis
MADALISLRRAALSYGERVVWRDLDLDVRPGEFLAVLGPNGAGKTSFVRALLGQRRLSAGTLTVLGRPPGRGSRHIGYVPQQAALSAQAMLRARDLVRLGVDGHRFGPRPRTGAVRRRADEILASVGATAYADVPVALLSGGERQRVRIGQALATDPRILLCDEPLLSLDLHHQRAVTELVDARRRSHGTAVVFVTHEINPVLGLVDRVLYLARGGHRVGTPDEVLTSEALSRLYGTQVDVVRVRDRVVVVGAPEEAAHHPQLPGGARP

SEQ ID NO: 72854 - DNA, 759 bp, Thermotoga sp
  CDS (1)..(759): transl_table=11
atgagtgttctgagggtgaggaacctttctttcggttacagacgaaaagaggttctgagggaaatttcgttcgaagtgaagaggaaggaattggttgctattctggggccaaacggtgctggaaaaagtacacttctgaagtgcatagcaggtattctgaaatgtgaaggtgtggagattttaggaaaacccatcagtgcttacaccagagaagagttagcaagagtcattggatacgttccgcagaagttttatccgggtatgatgggagttttcgatgtggtccttcttggaaggcgaccttatatgaaacttggaccttcgagagaagatatagaagtggttgaatccttgcttgaaaggctaggattatctcatctggctctggaaaatgatagtaatttgagtggcggcgaacttcaaagggtgaacatcgccagggctctcgctcagaatcctgaaatactccttctcgatgaaccaaccagcaacctcgatccgaaaaaccaactggaggttatgcaaatcgtagaggacttcgtgagaatgggaaaaacggccatcatggtggttcatgatataaacctggcactcagattcgctacaaggttcattttcatgaaaaatggaaagatcgtgaagaatggtggaaaagaaacgctgaaaccggaaacgttcggtgtggtttatcacgtggacggctctgtcgagaatgtttctggtttccccgtttttgttttgaaaagaagcaggtcttga

SEQ ID NO: 72855 - protein, 252 aa, Thermotoga sp
MSVLRVRNLSFGYRRKEVLREISFEVKRKELVAILGPNGAGKSTLLKCIAGILKCEGVEILGKPISAYTREELARVIGYVPQKFYPGMMGVFDVVLLGRRPYMKLGPSREDIEVVESLLERLGLSHLALENDSNLSGGELQRVNIARALAQNPEILLLDEPTSNLDPKNQLEVMQIVEDFVRMGKTAIMVVHDINLALRFATRFIFMKNGKIVKNGGKETLKPETFGVVYHVDGSVENVSGFPVFVLKRSRS

SEQ ID NO: 72856 - DNA, 759 bp, Thermotoga sp
  CDS (1)..(759): transl_table=11
atgaacgttctgagggtgaagaacctttctttcggttacagacgaaaagaggttctgagggaaatttcgttcgaagtgaagaggaaggaattggttgctattctggggccaaacggtgctgggaaaagcacgcttctgaagtgcctggccggtattctgaagtgtgaaggtgtggagattttaggaaaacccatcagtgtttacaccagagaagagctagcaagagtcattggatacgttccgcagaagttttatccgggtatgatgagagttttcgatgtggcccttcttggaaggcgaccttatatgaagtttggaccttcgagagaagacataaaaatggttgaatccttgcttgaaaggcttgggttatctcatctggctctggagaatgccagtaatttgagtggcggcgaactgcaaagggtgaacatcgccagggccctcgctcagaatcctgaaatactccttctcgatgaaccaaccagcaacctcgatccgaaaaaccaactggaggtcatgcaaatcgtagaggacttcgtgaaaatgggaaaaacagccatcatggtggttcacgatataaacctggcactcagattcgctacaaggttcattttcatgaaagacggaaagatcgtgaaagatggcgggaaagaaaccctgaaaccggagacgttcggtgtggtttatcacgtggatggctctgtcgagaatgtttctggttttcccgttttcgttttgaaaagaagcaggtcttga

SEQ ID NO: 72857 - protein, 252 aa, Thermotoga sp
MNVLRVKNLSFGYRRKEVLREISFEVKRKELVAILGPNGAGKSTLLKCLAGILKCEGVEILGKPISVYTREELARVIGYVPQKFYPGMMRVFDVALLGRRPYMKFGPSREDIKMVESLLERLGLSHLALENASNLSGGELQRVNIARALAQNPEILLLDEPTSNLDPKNQLEVMQIVEDFVKMGKTAIMVVHDINLALRFATRFIFMKDGKIVKDGGKETLKPETFGVVYHVDGSVENVSGFPVFVLKRSRS

SEQ ID NO: 72858 - DNA, 765 bp, Actinobacillus pleuropneumoniae
  CDS (1)..(765): transl_table=11
gtgtttttaattgaaaatgcgacttttactattcctagccgaactttactccattcgatttctttgcaattcgagcagggtaaggtgtacggtttaatcggacacaatggctcgggtaaatctacattcattaaattattggcaaaacaagaacaagtatcggcaggtaaaattctatttaatcagaaagaacttaaccaatggtcatcacgagaatttgccaaacaagtcgcttatcttccgcaacatcttccgcaagctaccaatctgaccgccagagagcttatcgccatggggcgttatgcgtggaacggtttattcggttccaataaacaaaaagatcatgaagctatcgaacgagccttagccttaacccataccgaacggtttgccgatcagttggtggatacgctttccggcggtgagcgttctcgcatttggctggcaatgttattggcgcaacaaagcaaatttttgctgttggacgaaccgcttgccgccttggatatcgctcatcaagtagaagtgatggaattggtcaaaaaattggcgcacgagctgaatttaggtgtgattattgtgattcacgatattaatttggcggcacgttattgtgatcagctggtggcattgcatagcggcaaattattagcgcagggtgatgcgtttgagattgtaaacagcccgaaattaaaacaaatttacggtattgatctgaatgtgatcgaacatcctgaaaccaaacgaccggtgagtttttattga

SEQ ID NO: 72859 - protein, 254 aa, Actinobacillus pleuropneumoniae
MFLIENATFTIPSRTLLHSISLQFEQGKVYGLIGHNGSGKSTFIKLLAKQEQVSAGKILFNQKELNQWSSREFAKQVAYLPQHLPQATNLTARELIAMGRYAWNGLFGSNKQKDHEAIERALALTHTERFADQLVDTLSGGERSRIWLAMLLAQQSKFLLLDEPLAALDIAHQVEVMELVKKLAHELNLGVIIVIHDINLAARYCDQLVALHSGKLLAQGDAFEIVNSPKLKQIYGIDLNVIEHPETKRPVSFY

SEQ ID NO: 72860 - DNA, 786 bp, Staphylococcus aureus
  CDS (1)..(786): transl_table=11
atgcgaggtgagaatacgatgacaccagtctttgaattgaaaaatgtcaattactactatgatcataaaaaagtgttagaaaatataaacattaaaataaataaaggtgaatttttagcaattgttggaccaaatggtgctggtaaatcaacattattgaagttgattctagggttattacctttacaaagtggtgagatttttgttggaggtattgattttaaaaataagaaaacatccattaaattaagctatgtatcacaaaaagcaaatgcctttaattcaggtttcccagcaagtgttaaagaagttgttttaagcggattaacaaagacaaaacgtcttttccaaacatttaatagcaaagataatgaaaaagtgattaaagtactagaaagactgaatataagtgatttaattcataaaaatatagcagaattatcaggtggtcaacaacaacgtgtaatgattgctcgagcattgatttcagaacctgcagtattagtacttgatgaaccaacgaatggtattgatgcaaaacatgtaagtgaattttataatactttagatcaattaaaacaagaaggtatcaccattatcttagttactcatgatatcggtgttgtagcagatactgctactgaagtagcatgtttaaataagcatttgcatttccatggtacaactgatgagtttaaatcacttgatgaagttgaaatttcaaaaatttatggacatcctgtacgttttgtcgatcatcagcataatcgagaatgttgtaattaa

SEQ ID NO: 72861 - protein, 261 aa, Staphylococcus aureus
MRGENTMTPVFELKNVNYYYDHKKVLENINIKINKGEFLAIVGPNGAGKSTLLKLILGLLPLQSGEIFVGGIDFKNKKTSIKLSYVSQKANAFNSGFPASVKEVVLSGLTKTKRLFQTFNSKDNEKVIKVLERLNISDLIHKNIAELSGGQQQRVMIARALISEPAVLVLDEPTNGIDAKHVSEFYNTLDQLKQEGITIILVTHDIGVVADTATEVACLNKHLHFHGTTDEFKSLDEVEISKIYGHPVRFVDHQHNRECCN

SEQ ID NO: 72862 - DNA, 816 bp, Escherichia coli
  CDS (1)..(816): transl_table=11
atgaccgaatcagtagcccgtttgcgcggcgaacagttaaccctgggatatggcaaatataccgttgcggaaaatctgactgtagaaatacctgatggtcacttcacggcaattatcgggccaaatggctgcggtaaatccacgttactgcgtaccttaagccgcctgatgacgcctgctcatgggcatgtctggctggatggcgagcacattcaacattacgccagtaaagaggttgcacgccggattggtctgttggcgcaaaatgctaccacgccgggcgatatcaccgtgcaggagctggtggcgcgtggacgttatccgcatcaaccgctgtttacccgctggcgcaaagaggatgaagaagcggtaacgaaagcaatgcaggccacgggaataactcatctggcagatcaaagcgtggataccctttctggcggacaacgccagcgagcgtggatcgcgatggtgctggcccaggaaacggcaattatgctgctcgacgaacccacgacctggctggatatcagtcatcagattgatttgctggagttgttaagcgaactgaaccgcgaaaaaggctataccctggcggcggtgctgcacgatcttaatcaggcctgtcgttacgccagccatttgattgcattgcgggaagggaaaattgttgctcagggagcgccgaaggagattgtcactgctgaactgattgagcgcatttatggtctgcgctgcatgatcattgacgatccagttgccggaacgccgcttgtggtgccgctcggacgaacggcaccttcaaccgcaaatagttaa

SEQ ID NO: 72863 - protein, 271 aa, Escherichia coli
MTESVARLRGEQLTLGYGKYTVAENLTVEIPDGHFTAIIGPNGCGKSTLLRTLSRLMTPAHGHVWLDGEHIQHYASKEVARRIGLLAQNATTPGDITVQELVARGRYPHQPLFTRWRKEDEEAVTKAMQATGITHLADQSVDTLSGGQRQRAWIAMVLAQETAIMLLDEPTTWLDISHQIDLLELLSELNREKGYTLAAVLHDLNQACRYASHLIALREGKIVAQGAPKEIVTAELIERIYGLRCMIIDDPVAGTPLVVPLGRTAPSTANS

SEQ ID NO: 72864 - DNA, 810 bp, Bacillus subtilis
  CDS (1)..(810): transl_table=11
atgaattcattatcaacggaacagcttggaatcggttatggcgacagggtgattgtagaggatttaaatatatcgattcctaaagggaaaattaccaccttaattggcccgaacggctgcgggaaatcaacgattttaaaaacaatgtccagaattatgcgttcacatgcaggtgccgtctatttaaacggcaaagcgattcataaaatgtctacaaaggacattgcaaaagatatggcgattcttccacagacacctgaagcgccgagcggcctaacagtgcacgaattggtgtcgtacggcaggtttccgcatcaatcaggattcggcagattaaatgacgaagaccgccggattatcaaatgggcgcttgaagaaacaggcatggctgaatatgctgaacggccgattgaggcattgtcaggcggacagcgtcaacgtgtgtggattgccatggcgcttgcgcaagggacggaactgcttctgctggatgaacctacaacgtatcttgatcttgcacatcagcttgaaattctgcagctgcttgacagactcaacaaagagcaagggcggacgattttaatggtcattcatgatcttaaccatgcagctcgtttttctcattatatgatcgcgctcaaaaaaggcacggtcatcaaggaaggaactgctctggaggtcatgacaccagacattttgaagcaggtatttcagattgatgccgaaatcgtgactgatccccgtacaaataaacctgtatgcttgacatatgacttgattaaaaatgaaaaagagctagttactgtatga

SEQ ID NO: 72865 - protein, 269 aa, Bacillus subtilis
MNSLSTEQLGIGYGDRVIVEDLNISIPKGKITTLIGPNGCGKSTILKTMSRIMRSHAGAVYLNGKAIHKMSTKDIAKDMAILPQTPEAPSGLTVHELVSYGRFPHQSGFGRLNDEDRRIIKWALEETGMAEYAERPIEALSGGQRQRVWIAMALAQGTELLLLDEPTTYLDLAHQLEILQLLDRLNKEQGRTILMVIHDLNHAARFSHYMIALKKGTVIKEGTALEVMTPDILKQVFQIDAEIVTDPRTNKPVCLTYDLIKNEKELVTV

SEQ ID NO: 72866 - DNA, 789 bp, Bordetella bronchiseptica
  CDS (1)..(789): transl_table=11
atgaccctgcaagcccgcaatctgaccttggcgcgcggcggcgcgcccatcctcaccgacgtgtcgctgacgctggcgcccggcacgctggtggggctgctgggcgccaatggcgccggcaagtccaccctgctggcggcgctggccggcgaactggcgccgcgctcgggccaggtcttcctgggcgatgcggacctggcgacgttgaacgcgcggcagctggcgcgccgccgcgccgtgctgccgcaaaaaccctcgctgtcgttcgacctgggtgtcagcgacgtggtcggcatgggcgcctatccgtttccggaactggatccggccgccgtgcgccagctggtgcgcgacgcgctggagcaggcgggcgtgacccacctggcgcagcggcgctatccgcagctgtccggcggcgagcagcagcgcgtgcagttcgcgcgcgtgctggcgcagtgccatgccatgcacgcgcccggccagacccgctacctgatgctggacgaacccatttccaacctggaccccaggcaccagatggaattgctggccacggcgcgggcgctggcccacgaggccggcatgggcgtgctggtgatcgtgcatgacatcaatcaggcggcgcgctggtgcgacacgctggcgctgctggccgatggccggctggccgcgctggggccgcccgccgacgtgctgacgccggaccacatgcggcgcgtctatggcatcgaggccgatgtgctggcgcatcccaccctgcccggccgcctgctggtgctggcgcgctga

SEQ ID NO: 72867 - protein, 262 aa, Bordetella bronchiseptica
MTLQARNLTLARGGAPILTDVSLTLAPGTLVGLLGANGAGKSTLLAALAGELAPRSGQVFLGDADLATLNARQLARRRAVLPQKPSLSFDLGVSDVVGMGAYPFPELDPAAVRQLVRDALEQAGVTHLAQRRYPQLSGGEQQRVQFARVLAQCHAMHAPGQTRYLMLDEPISNLDPRHQMELLATARALAHEAGMGVLVIVHDINQAARWCDTLALLADGRLAALGPPADVLTPDHMRRVYGIEADVLAHPTLPGRLLVLAR

SEQ ID NO: 72868 - DNA, 789 bp, Bordetella parapertussis
  CDS (1)..(789): transl_table=11
atgaccctgcaagcccgcaatctgaccttggcgcgcggcggcgcgcccatcctcaccgacgtgtcgctgacgctggcgcccggcacgctggtggggctgctgggcgccaatggcgccggcaagtccaccctgctggcggcgctggccggcgaactggcgccgcgctcgggccaggtctacctgggcgatgcggacctggcgacgttgaacgcgcggcagctggcgcgccgccgcgccgtgctgccgcaaaaaccctcgctgtcgttcgacctgggtgtcagcgacgtggtcggcatgggcgcctatccgtttccggaactggatccggccgccgtgcgccagctggtgcgcgacgcgctggagcaggcgagcgtgacccacctggcgcagcggcgctatccgcagctgtccggcggcgagcagcagcgcgtgcagttcgcgcgcgtgctggcgcagtgccatgccatgcacgcgcccggccagacccgctacctgatgctggacgaacccatttccaatctggaccccaggcaccagatggaattgctggccacggcgcgggcgctggcccacgaggccggcatgggcgtgctggtgatcgtgcatgacatcaatcaggcggcgcgctggtgcgacacgctggcgctgctggccgatggccggctggccgcgctggggccgcccgccgacgtgctgacgccggaccacatgcggcgcgtctatggcatcgaggccgatgtgctggcgcatcccaccctgcccggccgcctgctggtgctggcgcgctga

SEQ ID NO: 72869 - protein, 262 aa, Bordetella parapertussis
MTLQARNLTLARGGAPILTDVSLTLAPGTLVGLLGANGAGKSTLLAALAGELAPRSGQVYLGDADLATLNARQLARRRAVLPQKPSLSFDLGVSDVVGMGAYPFPELDPAAVRQLVRDALEQASVTHLAQRRYPQLSGGEQQRVQFARVLAQCHAMHAPGQTRYLMLDEPISNLDPRHQMELLATARALAHEAGMGVLVIVHDINQAARWCDTLALLADGRLAALGPPADVLTPDHMRRVYGIEADVLAHPTLPGRLLVLAR

SEQ ID NO: 72870 - DNA, 789 bp, Bordetella pertussis
  CDS (1)..(789): transl_table=11
atgaccctgcaagcccgcaatctgaccttggcgcgcggcggcgcgcccatcctcaccgacgtgtcgctgacgctggcgcccggcgcgctggtgggcctgctgggcgccaatggcgccggcaagtccaccctgctggcggcgctggccggcgaactggcgccgcgctcgggccaggtcttcctgggcgatgcagacctggcgacgttgagcgcgcggcagctggcgcgccgccgcgccgtgctgccgcaaaaaccctcgctgtcgttcgacctgggcgtcagcgacgtggtcggcatgggcgcctatccgtttccggaactggatccggccgccgtgcgccagctggtgcgcgacgcgctggagcaggcgggcgtgacccacctggcgcagcggcgctatccgcagctgtccggcggcgagcagcagcgcgtgcagttcgcgcgcgtgctggcgcagtgccatgccatgcacgcgcccggccagacccgctacctgatgctggacgaacccatttccaacctggaccccaggcaccagatggaattgctggccacggcgcgggcgctggcccacgaggccggcatgggggtgctggtgatcgtgcatgacatcaatcaggcggcgcgctggtgcgacacgctggcactgctggccgatggccggctggccgcgctggggccgcccgccgacgtgctgacgccggaccacatgcggcgcgtctatggcatcgaggccgatgtgctggcgcatcccaccctgcccggccgcctgctggtgctggcgcgctga

SEQ ID NO: 72871 - protein, 262 aa, Bordetella pertussis
MTLQARNLTLARGGAPILTDVSLTLAPGALVGLLGANGAGKSTLLAALAGELAPRSGQVFLGDADLATLSARQLARRRAVLPQKPSLSFDLGVSDVVGMGAYPFPELDPAAVRQLVRDALEQAGVTHLAQRRYPQLSGGEQQRVQFARVLAQCHAMHAPGQTRYLMLDEPISNLDPRHQMELLATARALAHEAGMGVLVIVHDINQAARWCDTLALLADGRLAALGPPADVLTPDHMRRVYGIEADVLAHPTLPGRLLVLAR

SEQ ID NO: 72872 - DNA, 828 bp, Gloeobacter violaceus
  CDS (1)..(828): transl_table=11
atgctcaaggccgcgggaatcggtgtgcgcctcgcggggcggtggcttcttgagcaggtgaacctggaagctctccccggcgaggtgctcgccgtcgtcggtcccaacggcgccggcaaatcgacgttgctcaagaccctcgcgggcgaaatccggcccacccggggcagcgtctccatggcgggcaaagctctcgcggattggcccgcccgcgagcgggcctgcgtgcgcgccgttttgccccagaattccacattggcttttgcctttcgggtgttcgaggtggtgctgatgggccgcacaccccacagccgcggcctcgaaggggagcgcgaccgtcaaatcgcccgcgaggcgatggcggcggccggggtggctcacctggccgaacggctttacccgacgctctcgggcggcgaaaagcaacgggtgcaactggcccgcgtcctggcccagatctgggaagcgccccccgattcgccccgctacctgctgctcgacgaaccgaccgcgagcctcgatctcactcaccaacacagcactctggccgtggcgcgcaactttgcccaccggggagcggccgtcgtgaccgtcctccacgatctcaacctggcggcccaatacgcggatcgccttgcgcttctaaaagacggaaaattgctcgtagtcggcgtgcccgacatcgtcctcaccccagaatggatcgagacgggtttcggcttgcagacgctggtcatgcgccacccccggttgggttgcccactggtgataccgcttggaagcgcttcagtcttgcagccaggcgaacagctcgcccacggtaagtga

SEQ ID NO: 72873 - protein, 275 aa, Gloeobacter violaceus
MLKAAGIGVRLAGRWLLEQVNLEALPGEVLAVVGPNGAGKSTLLKTLAGEIRPTRGSVSMAGKALADWPARERACVRAVLPQNSTLAFAFRVFEVVLMGRTPHSRGLEGERDRQIAREAMAAAGVAHLAERLYPTLSGGEKQRVQLARVLAQIWEAPPDSPRYLLLDEPTASLDLTHQHSTLAVARNFAHRGAAVVTVLHDLNLAAQYADRLALLKDGKLLVVGVPDIVLTPEWIETGFGLQTLVMRHPRLGCPLVIPLGSASVLQPGEQLAHGK

SEQ ID NO: 72874 - DNA, 798 bp, Listonella damsela
  CDS (1)..(798): transl_table=11
atgagcagcacactatcctctcatcacgcaatagcactaaaagcatctaaccttcacttgcagctgggcggaaaaaccttactggataatgttgatttagaaataatgtctgggcaaataacggcgctgttagggccaaatggtgccggtaaaagtagtctactgaaggtattaaacggtgaaataaagccaaattcaggatcaattgagatcttttcaagacctaaagatcattggccatctgaattattagccaaacacatgggtatattgccgcagcatagtaccctatcgttctcatttcttgctcatgaagttgcagagctcggtgcgatgcctttagcgatatcaaatcatcaagcacaacaactcgcggctaagaatatggttaaagttggtgttgatcatctcgcaaacaggctatatccaactttatctggtggagaaaaacagcgcgttcattttgccagagtattaactcagttatcgcactctggcaaacaatgtattttaatgcttgatgaacccacatccgcccttgatcttgctcatcaacatcatactttagagattgcacaagcgctttcgcaacagggtgctgccgttatcattgttattcatgatctgaacttagctgctcaatatgcggatcgtttaatcattttgaaccaaggcaaaattcaagctgatggtacgccatggcaagtgctaaccccaaccgcagtcgaaaatgtttacggctggccagttcaagttatcgctcatccagaacataactacccggttattttggcttaa

SEQ ID NO: 72875 - protein, 265 aa, Listonella damsela
MSSTLSSHHAIALKASNLHLQLGGKTLLDNVDLEIMSGQITALLGPNGAGKSSLLKVLNGEIKPNSGSIEIFSRPKDHWPSELLAKHMGILPQHSTLSFSFLAHEVAELGAMPLAISNHQAQQLAAKNMVKVGVDHLANRLYPTLSGGEKQRVHFARVLTQLSHSGKQCILMLDEPTSALDLAHQHHTLEIAQALSQQGAAVIIVIHDLNLAAQYADRLIILNQGKIQADGTPWQVLTPTAVENVYGWPVQVIAHPEHNYPVILA

SEQ ID NO: 72876 - DNA, 804 bp, Myxococcus xanthus
  CDS (1)..(804): transl_table=11
atgagcctggaggttcgtggcatcgaggtgtggcgtggccgtgggcggacgctgggacccatggatttgacgctggagcccggtgaggtgctggccgtcgtggggcccaacggcgcgggcaagtccacgctgctgtccgccatgtcgggcgagctgcggtgctcgacgggcgaggtgcttctggacggcactcccttgttgcagtggaagccgcgggagcgggccatgcggctgggcgtgcttccccaggagtcgtcgctgggcttcggcttcacggcgctggaggtggcgctgctgggacggagtccccattcgagccgcgctgagggcagcgcggacctggcggcggcggtggcggcgctcgatgccaccgacacgcggcacctggcttcacgttcgtatctcacgctgtcggggggcgagcggcagcgtgtgcagctgtcgcgggtgctggctcagctctccgaaccgttggcatccggacaccgttacctgctgctggacgagccgacggcgagtctggacctggcccaccagcacctcgtgctggaggcggcggcgcgcttcgcccaggcgggtggcgcggtgctggcggtgctgcatgacctcaatctggccgcgcgttacgcgcaccggatggccgtgctcgccgagggccgggtggttgaactgggcgcaccggcgcaggtgctttcccaggagttggtggcccgcgtcttcggtctgcgcgtgcaggtcgtcgaatggccgggctcgcccggtcccctggtcatcccggagggccgcgcgccgctgactccctga

SEQ ID NO: 72877 - protein, 267 aa, Myxococcus xanthus
MSLEVRGIEVWRGRGRTLGPMDLTLEPGEVLAVVGPNGAGKSTLLSAMSGELRCSTGEVLLDGTPLLQWKPRERAMRLGVLPQESSLGFGFTALEVALLGRSPHSSRAEGSADLAAAVAALDATDTRHLASRSYLTLSGGERQRVQLSRVLAQLSEPLASGHRYLLLDEPTASLDLAHQHLVLEAAARFAQAGGAVLAVLHDLNLAARYAHRMAVLAEGRVVELGAPAQVLSQELVARVFGLRVQVVEWPGSPGPLVIPEGRAPLTP

SEQ ID NO: 72878 - DNA, 867 bp, Nocardia farcinica
  CDS (1)..(867): transl_table=11
gtgagcaccgacctcgaccgtccccgcctcggctcgctgttcacccgcggccacgagctgcccaccgcgcccgcgcgcggggagatcaccctgcgtgcgcgcgggctggtggtggagcgccgcggtgggtccgggcccgcgcgccgggtgctcgaccaggtcgatttcgccgtcgccgccggggagatcgtcgccctcgtcggccccaacggcgcgggcaaatccaccctgctggcggccctggccggggaactgacaccggccgcgggcggtgtcgaactcgacgggcatccgctgacccactggtctccgctggacatggcgcgccggcgcgcggtgctgccccagacccacaccgtcgggttcccgttcaccgcccgcgaagtcgtcgcgatgggacgcgcgccgtgggtgcgcacgccgcgcgccgaccacgacgacgacctcatcgccgccgccatggccgccgccgacgtcacgcacctggccgggcgcgcgttccccaccctctccgggggtgaatgcgcccgcgtcgcgctggcccgcgtactggcccaggacacgccgacgctgctgttggacgaacccaccgccgccctcgacctcggccatcaggaggccgtgctgcgcctggccgccgaccgcgcccgcgacggcgccgccgtggtcgtggtcctgcacgacctcggtatcgccgccgcctacgccgaccgcgtcgcggtcctggactccggccgcgtcgccgccgacggcccaccccgagccgttctcaccaccgacctgctcacccgcgtctaccagcacccggtcgaagtcctcgaccaccccgtcaccggtgcccaactcgtcctccccgtccggaactaa

SEQ ID NO: 72879 - protein, 288 aa, Nocardia farcinica
MSTDLDRPRLGSLFTRGHELPTAPARGEITLRARGLVVERRGGSGPARRVLDQVDFAVAAGEIVALVGPNGAGKSTLLAALAGELTPAAGGVELDGHPLTHWSPLDMARRRAVLPQTHTVGFPFTAREVVAMGRAPWVRTPRADHDDDLIAAAMAAADVTHLAGRAFPTLSGGECARVALARVLAQDTPTLLLDEPTAALDLGHQEAVLRLAADRARDGAAVVVVLHDLGIAAAYADRVAVLDSGRVAADGPPRAVLTTDLLTRVYQHPVEVLDHPVTGAQLVLPVRN

SEQ ID NO: 72880 - DNA, 768 bp, Pseudomonas aeruginosa
  CDS (1)..(768): transl_table=11
atgctgcgcgtggagaacctgtccatccgccgtggcggaaagactgtactggaaggcctcgagctggagctgcggcctggcgagatgctcggcgtactcggccccaacggcgctggcaagagcaccttgcttggcgctctctgtggcgaactggagccggccgaagggctggtgctgctcgacgagcgcggcctcgacgactggccgggcgtcgctcgcgcgcagcgcctggcggtgctgccgcagagttcgtcgctgggcttcgcctttccggtggaggcggtggtcggcttcggtcggctgccccattccagcggccgcgagcgcgatgtgcagatcgtcgccgaggccttggcggcggccgacgccagccatctggccgggcgcagctacctggcgctgtccggcggcgaacgccagcgcgtgcacctggcgcgggtgctggcgcagctgtggccgggcgagccggggcaggtgctgctgctcgacgaaccgacctcggcgctcgacccgctgcaccagcacactaccctgcaggcggtgcatgatttcgcccgccgcggtgcctcggtgctggtgatcctccacgatctcaacctggccgcgcgctattgcgaccgcctgctgctgttgcagaatggtcgcccgcacctgctcggtacgcccgaggaagtcctgcgccccgagccgttgcgcgcggtgttcggcctcgaggtcctggtccagcgtcatcccgagcgaggtcatccgctgatcgtcgcccgttga

SEQ ID NO: 72881 - protein, 255 aa, Pseudomonas aeruginosa
MLRVENLSIRRGGKTVLEGLELELRPGEMLGVLGPNGAGKSTLLGALCGELEPAEGLVLLDERGLDDWPGVARAQRLAVLPQSSSLGFAFPVEAVVGFGRLPHSSGRERDVQIVAEALAAADASHLAGRSYLALSGGERQRVHLARVLAQLWPGEPGQVLLLDEPTSALDPLHQHTTLQAVHDFARRGASVLVILHDLNLAARYCDRLLLLQNGRPHLLGTPEEVLRPEPLRAVFGLEVLVQRHPERGHPLIVAR

SEQ ID NO: 72882 - DNA, 768 bp, Pseudomonas fluorescens
  CDS (1)..(768): transl_table=11
atgctgcgagtcgagaacctgcatgtgcggcgcggcggcaaagacgtcctggctggcatcgacctgcagttgctgccgggtgaagtgctgggagtcctcggccctaatggtgcaggtaaaagcagcctcttggggggcttgagtggtgaactggcggctcatcaggggcaggtgctgctggatgatcaggaactggctcattggtcgggcgccgagcgtgcgcagcgcctggcagtgctgccccaggcttcgagcctggatttcgcctttcgtgtggaggaggtggtggcgctggggcgtttgccccatcagaccgggcgcgtgcgtgacgaggaaatcgtcaacgctgctttgaatgctgccgatgtggcgcacctgtcggggcgcagctatctcgcgctgtccggcggcgagcgccagcgggtgcatctggcgcgggtcctggcgcaactgtggccgggccagccagggcacaacctgctgctggatgagccgacttctgcactcgaccccttgcaccagcacgtcaccttgcaggccattcgagcctttgccgaccgcggcgcggcggtgctggtcatcctgcatgacctgaatctggctgcgcgttattgtgaccgggtcttgttgctcgaaggcggccgcccgcattcattgggaacaccgaccgcggtactgcggcccgagcccctgaaggcggtgttcggcctggaagttctggtgcaggagcatcccgaacgcgggcacccgttgatcatcgcccgctga

SEQ ID NO: 72883 - protein, 255 aa, Pseudomonas fluorescens
MLRVENLHVRRGGKDVLAGIDLQLLPGEVLGVLGPNGAGKSSLLGGLSGELAAHQGQVLLDDQELAHWSGAERAQRLAVLPQASSLDFAFRVEEVVALGRLPHQTGRVRDEEIVNAALNAADVAHLSGRSYLALSGGERQRVHLARVLAQLWPGQPGHNLLLDEPTSALDPLHQHVTLQAIRAFADRGAAVLVILHDLNLAARYCDRVLLLEGGRPHSLGTPTAVLRPEPLKAVFGLEVLVQEHPERGHPLIIAR

SEQ ID NO: 72884 - DNA, 768 bp, Pseudomonas fluorescens
  CDS (1)..(768): transl_table=11
atgctgcgtgcgcacaacctgcacatccgtcgtggccgcaagaccgttctggccgatgtcagcctgcagctcgaaccgggcgaagtgcttggcgtgctgggccccaatggcgccggcaaaagcactttgctcggtgcgttgtgcggtgagctgagcgcacacgaaggggacgtgctgctggatggtgaggcattgagccgctggagtggcactcagcgcgcccagcggctggcggtgctgccgcaggtgtcgaccctggatttcgcctttcgtgtcgaggaagtggtcggcatggggcgtctgccttatcagagcgggcgggtgcgcgatgacgagatcgtcgctgccgcattacgggccgccgatgccggacacctgagtggccgcagttatctggccttgtccggcggcgagcgtcagcgggtgcatctggcgcgggtgctggcgcaactttggccggggcaggcggggcagactctgctgcttgatgagccgacctcgatgctcgatccgttgcatcaacacacgacgctgcaagcggtgcgcgaatttgccgatcgcggcgcggcggtgctggtgatcctgcatgatctgaatctggcggcgcgttattgtgatcgcatcctgctgctggagggcggccggccggtcgcactggatacaccgcagcaggtcttgcgcccggaatcgctgaaggcggttttcggtctggaagtgctggtgcaaacgcacccggagcgcgggcatccgctgatcatcgcccgctga

SEQ ID NO: 72885 - protein, 255 aa, Pseudomonas fluorescens
MLRAHNLHIRRGRKTVLADVSLQLEPGEVLGVLGPNGAGKSTLLGALCGELSAHEGDVLLDGEALSRWSGTQRAQRLAVLPQVSTLDFAFRVEEVVGMGRLPYQSGRVRDDEIVAAALRAADAGHLSGRSYLALSGGERQRVHLARVLAQLWPGQAGQTLLLDEPTSMLDPLHQHTTLQAVREFADRGAAVLVILHDLNLAARYCDRILLLEGGRPVALDTPQQVLRPESLKAVFGLEVLVQTHPERGHPLIIAR

SEQ ID NO: 72886 - DNA, 768 bp, Pseudomonas putida
  CDS (1)..(768): transl_table=11
atgttgcaagttgagggcctgtatctgtgcaggggcagcaatgaggtgctgcacgacattcacctgcagttgcctccggggcaggtcgtgggtgtgcttggcccaaacggtgccggcaagagcagcctgctgagtgtgctgtgcggtgaactggcgcccgaccgcgggcgggtaacgctgcagggccgccccctggccgattgggccgggcaggaacgggcaaggcgcctggcagtgttgccacaggtgtccagtttgggtttctcgtttcgggtggaggaagtggtgggcatggggcgcatgcctcatggcaccggtcagcggcgcgatgcggaaattgtcgaagcagcgttgcgggcggcagatgcctggcacctggtggcgcgcagttacctggcgctttccggtggcgagcggcaacgggtgcacctggcccgcgtgctggcgcagctatggccgggcgaggagggcagcacgttgctgctcgacgaaccgacttcgatgctcgacccgctgcatcagcacaccaccctggaagccgtacgccgtttcgccgactgcggtgctgcagtgttggtgatcctgcatgacctgaacctggcggcgcgttactgtgaccgtatcctgttgctggagcaggggcgctgccatgcgtttgccacgcccgaagcggcactgaccccagcggccctgaaggcggtgtacggtatcgacgtactggtgcaggcgcaccccgagcgcgggcatccgctgatcatcacccgttga

SEQ ID NO: 72887 - protein, 255 aa, Pseudomonas putida
MLQVEGLYLCRGSNEVLHDIHLQLPPGQVVGVLGPNGAGKSSLLSVLCGELAPDRGRVTLQGRPLADWAGQERARRLAVLPQVSSLGFSFRVEEVVGMGRMPHGTGQRRDAEIVEAALRAADAWHLVARSYLALSGGERQRVHLARVLAQLWPGEEGSTLLLDEPTSMLDPLHQHTTLEAVRRFADCGAAVLVILHDLNLAARYCDRILLLEQGRCHAFATPEAALTPAALKAVYGIDVLVQAHPERGHPLIITR

SEQ ID NO: 72888 - DNA, 786 bp, Ralstonia metallidurans
  CDS (1)..(786): transl_table=11
atgctgattgcccgcaatctttcatgcagccgcggtcggcggcagatcctgtccggtatcgacctgaccctgccggccggcgagatggtcggcgtgctcggtgccaacggcgccggcaagagcacgctgctcggcacgctggcaggtgaactgcccggcgacgacgcggcggtgtcgctctgcaaccggccattgacggactggcccgtggacgagctcgcccgtagccgtgcggtgctgccgcaatcgcccggtctgggcttcgacctgggtgtgaccgaggtggtggcgatgggcggctatccatttccagagatgggcaagcacacgctcgataccctgctggaccgcgccctggcgctggccgacgtcgcgcatctggccacgcgttcgtaccagagcctatccggcggcgaacagcagcgcgtgcagttcgctcgcgcgctggtgcaggtgctggcctgccgcacggccgacagctaccgcgcgctactgctcgatgaaccgatttcgagcctcgacccccggcatcagttgcaactgctcggcacggcgcgcaacctgtgccataccgacgccctggcggtgctggtcgtgctccacgacgtcaatctcgccgcccgctggtgcgacaggctcgtgctgctggccgatggccgtaccgtggccagcggcacccccgccgacgtgctgaccccgccgaacctcgccacggtgtacggcattccagccaccgtcatggaatcgccagttcaccggggcgtgccgatggtggtgtttggctga

SEQ ID NO: 72889 - protein, 261 aa, Ralstonia metallidurans
MLIARNLSCSRGRRQILSGIDLTLPAGEMVGVLGANGAGKSTLLGTLAGELPGDDAAVSLCNRPLTDWPVDELARSRAVLPQSPGLGFDLGVTEVVAMGGYPFPEMGKHTLDTLLDRALALADVAHLATRSYQSLSGGEQQRVQFARALVQVLACRTADSYRALLLDEPISSLDPRHQLQLLGTARNLCHTDALAVLVVLHDVNLAARWCDRLVLLADGRTVASGTPADVLTPPNLATVYGIPATVMESPVHRGVPMVVFG

SEQ ID NO: 72890 - DNA, 879 bp, Rhodococcus sp
  CDS (1)..(879): transl_table=11
atgagtccggcattccacccgctccgcacccgggtcggcgaggccatcgagcagagcctgttccgacggaccgacccggtgcccccgccgcgcccgtcgggggcggtgacgctgcgggcggacggcatcgcggtcacccgcgggggcaggcccgtgctcgacgacgtgtccgtggacgtgcggatcggcgaggtcctcgttctcgtcggccccaacggggcgggcaagtcgacgctcctcgcggcgctgtcgggcgatcaggacgtgcacacgggaaccgtgcacctcgacgaccgggacctcggcgagtggacggcactcgagatggcccagcgccgggcggtccttccccagcagaacacggtcggattctcgttcaccgcacgtcaggtgatcacgatgggccgctcaccgtgggcacgcaccccccgctccgacgacgacgccgtcgcgatcgccgaggccatgcggatctgcgacgtcgtggcgttcgccgaccggccgttcaccgcgctgtcgggtggcgaacgtgcccgggtagctctggcgcgggtgctggcgcagcgcaccgagacgatcctgctcgacgagcccaccgccgccctcgacctcgggcaccaggagaccgtgatgcgtctcgcccgctcccgcgcggagcagggcaccgcggtggtggtcgtcctccacgacctcgcgctcgccgccgcgtacgcggaccggatcgtggtcctcgagcagggacgtgtcgccgcgaacggccctcccgccgacgtcttgtccgaggaattgctgacccgggtgtacgggcaccccgtcgaggtcatcgagcacccggtgaccggtgcgaccctcgtcctcccccgccgcgatcagcgctag

SEQ ID NO: 72891 - protein, 292 aa, Rhodococcus sp
MSPAFHPLRTRVGEAIEQSLFRRTDPVPPPRPSGAVTLRADGIAVTRGGRPVLDDVSVDVRIGEVLVLVGPNGAGKSTLLAALSGDQDVHTGTVHLDDRDLGEWTALEMAQRRAVLPQQNTVGFSFTARQVITMGRSPWARTPRSDDDAVAIAEAMRICDVVAFADRPFTALSGGERARVALARVLAQRTETILLDEPTAALDLGHQETVMRLARSRAEQGTAVVVVLHDLALAAAYADRIVVLEQGRVAANGPPADVLSEELLTRVYGHPVEVIEHPVTGATLVLPRRDQR

SEQ ID NO: 72892 - DNA, 756 bp, Shewanella oneidensis
  CDS (1)..(756): transl_table=11
gtggatagactcagctacgctatcggcgataaggcggtgttgaacaacattcgcgtgcaatttcaaccgggcagtgtcaccgcacttttagggcctaatggggcaggcaaatccacactgttaaaggctctgtgccaagagatcccctccgcgcaaggcagcatcaagcttggccactgccaactggtggattggccaagggctgaactggcaaaatccctcgctgttctgcctcaacatgccagcttaaccttcccctttaccgttgatgaagtggtggcaatggggctttatcccttaaccttgagtcaaaaagaagggcagcagttagtcacaaaatggcttgccgaagtgggtgtattgcatttagctcggcgcagttaccccacgctttcagggggagaaaaacaaagggtgcaactggcgagggtgttaacgcagttaagccaatcccccttcccgcctattttactgctcgacgaacctacctcagcactggatctggcgcagcaacacaaagtattagcgctagcaaaaaatctcgcccacaagcacgcctacactgtgattgtggtattgcacgacctcaatcaagctgcccgttacagcgacagagttatcgtcctcaaacagggtgaaatcgtcagtgaaggtacacctaacgatgcattatcgattgatataattcgccaagtatgggattacgaacctgagtttattcctgcaccacagggtgattacccactgattttttaa

SEQ ID NO: 72893 - protein, 251 aa, Shewanella oneidensis
MDRLSYAIGDKAVLNNIRVQFQPGSVTALLGPNGAGKSTLLKALCQEIPSAQGSIKLGHCQLVDWPRAELAKSLAVLPQHASLTFPFTVDEVVAMGLYPLTLSQKEGQQLVTKWLAEVGVLHLARRSYPTLSGGEKQRVQLARVLTQLSQSPFPPILLLDEPTSALDLAQQHKVLALAKNLAHKHAYTVIVVLHDLNQAARYSDRVIVLKQGEIVSEGTPNDALSIDIIRQVWDYEPEFIPAPQGDYPLIF

SEQ ID NO: 72894 - DNA, 783 bp, Silicibacter sp
  CDS (1)..(783): transl_table=11
atgaccttgcatgcacagcagatttccctctcgatcggcaaaaagcagatcctgaaggatgtgacgttcgcggcacgcgctggggcgctctccgcgatcgtgggaccaaatggctccggcaagtccaccttgctcaaggccttggttgcagagctgccgtcagagggacagatctccctcaacgggcggctgttgcaggactacgccgcctgggagctggcaagcctgcgcggggtgttgccacaggccgcccatctcgcctttccgttcacggtgctggaggtagtgcgactggggctgatggccgggcctgaggcacagaacacgcggcttccctttgaggcactggcccgcgtggaccttgagggctatgccgggcgctcctatcaggaactctccggaggcgaacaacagcgggtccagctggcgcgggttctggcgcaggtcggcgctccgatgcgggaggggcaaccttgctggttgtttctggacgagcctgtctccagtctcgacatcgcccatcagctgacggtgatggatatcgcgcgccagtttgcggatggcggtggcggggtggttgcggtgatgcacgacctgaacctcaccgcgatgtatgccgatcacgtgcatgtcatgaccggcggagagaccgcaggtgccggaacagtggcggacgttctgaccgatcaacgcctgtcagaggtctacggatgcgacctgcgcatcggaaaagtgcccgcagatgccgccgtctttgttctgccgcaaacggcgcgggcatga

SEQ ID NO: 72895 - protein, 260 aa, Silicibacter sp
MTLHAQQISLSIGKKQILKDVTFAARAGALSAIVGPNGSGKSTLLKALVAELPSEGQISLNGRLLQDYAAWELASLRGVLPQAAHLAFPFTVLEVVRLGLMAGPEAQNTRLPFEALARVDLEGYAGRSYQELSGGEQQRVQLARVLAQVGAPMREGQPCWLFLDEPVSSLDIAHQLTVMDIARQFADGGGGVVAVMHDLNLTAMYADHVHVMTGGETAGAGTVADVLTDQRLSEVYGCDLRIGKVPADAAVFVLPQTARA

SEQ ID NO: 72896 - DNA, 843 bp, Streptomyces coelicolor
  CDS (1)..(843): transl_table=11
atgagaggtgtgaagctgccgcggctggtgccgtcccgtccggtgcccccgcccccggccgcccccggtgaggtcctcgccgccgccgggggactgcgcgtgcacctcggcggccggccggtcctcgacggggtggacgtggaggtccgcgcgggcgaggtgctcgccctggtcggccccaacggggcgggcaagtccaccctgctgggcgcgctggccgccgacgtcccggccgccgagggggtcgtacgcgtccacgggcgcccggtgtcggactggtcggcgcccgaactcgcgctgcgccgggcggtgctgccccagtcggcgtcgctgtccttcccgttcgcggtggaggaggtcgtccggatgggccgggcgccctgggcgggcggcgaccgggcggacgaggacgaagcggccgtggccgaggcgatggcgcgcacggaggtggccggattcgccgggcgcccgttctccgcgctcagcggcggcgaacgggcccgcgtggccctcgcccgcgtcctcgcccagcgcgctcccctcctgctgctcgacgagccgaccgcggccctggacctgaggcaccaggaactcgtgctgcggctgtgccgggagcgggcgcgggccggggacgcggtggtcgtcgtcctgcacgacctcgcgctggcggcggcgtacgcggaccgggtggcgctcctgcgctcgggccggatcgcggccgggggcccgccctcggaggtgttcgcccaggggctgctgtccgaggtctacgaccagccggtggaggtgttcccgcacccgcgcacgggcgcgctcctcgtcgtcccgcaccgctcgccgtga

SEQ ID NO: 72897 - protein, 280 aa, Streptomyces coelicolor
MRGVKLPRLVPSRPVPPPPAAPGEVLAAAGGLRVHLGGRPVLDGVDVEVRAGEVLALVGPNGAGKSTLLGALAADVPAAEGVVRVHGRPVSDWSAPELALRRAVLPQSASLSFPFAVEEVVRMGRAPWAGGDRADEDEAAVAEAMARTEVAGFAGRPFSALSGGERARVALARVLAQRAPLLLLDEPTAALDLRHQELVLRLCRERARAGDAVVVVLHDLALAAAYADRVALLRSGRIAAGGPPSEVFAQGLLSEVYDQPVEVFPHPRTGALLVVPHRSP

SEQ ID NO: 72898 - DNA, 855 bp, Thermobifida fusca
  CDS (1)..(855): transl_table=11
atgaaacgcatccggcagacgatgcgcgcggtcgtgcacggctcgggcctgcggcgcctcaccccgccgcagcgggtgacgagcggcaccgtggtgctgggtgcccggcacctcagcaagtcctatggcgcgcggaccgtgctggacgacgtgagcctcgacgtgcgcaccggggaagtgctggccctggtcggtccgaacggggcaggcaagagcaccctgctgtccatcctcaccggggatactccccctgacagaggcgaagtcactgtcctggaccgccccctggccgcgtggagtccggccgaactcgcgctgcgccgcgcagtcctgccgcagagcttcacggtcagcttcccgttcgacgtggtcgacgtcgtgcacatggggcgggccccgtgggccgcggtcgacgtcgacgtcgacgacgaccgcgtcgtcgcggacgcgatggcggccaccgaggtcaccgcgctcgccgcccgcaagttcccgtccctgtccggcggggagaaggcccgggtgatgctcgctcgggtcctggcccagcagacccagatcatgctgtgggacgagcccacggccgcgctcgacatccgccaccaggagtcggtgctgcgcatcgcccgccaacgggccgcgcagggtgatgcgatcgtggttgttctccacgatttagcgttggcagccgcctacgcggaccaagtcgcgatactctcccaaggacagatcgcggcatacgggcctcctgctgaggtcttcaccgcgaagcttctcagcgacgtctactcatacgaagtcgagatcgtgtcgcatccgcgcaccggggttccgctggtcctgccggtccgatga

SEQ ID NO: 72899 - protein, 284 aa, Thermobifida fusca
MKRIRQTMRAVVHGSGLRRLTPPQRVTSGTVVLGARHLSKSYGARTVLDDVSLDVRTGEVLALVGPNGAGKSTLLSILTGDTPPDRGEVTVLDRPLAAWSPAELALRRAVLPQSFTVSFPFDVVDVVHMGRAPWAAVDVDVDDDRVVADAMAATEVTALAARKFPSLSGGEKARVMLARVLAQQTQIMLWDEPTAALDIRHQESVLRIARQRAAQGDAIVVVLHDLALAAAYADQVAILSQGQIAAYGPPAEVFTAKLLSDVYSYEVEIVSHPRTGVPLVLPVR

SEQ ID NO: 72900 - DNA, 723 bp, Listeria innocua
  CDS (1)..(723): transl_table=11
atgaacattcaaggtttaacgatagcatataaacaaaaagtggcgattgatgatgtcactcttcaaatagcaacaggaaaattaactgggattgtcggtcccaatggtgctggtaaatctacattattaaaaggaatgatgggattagttccacgcgaaaaaggccaagtaacattagataataagcctctcacttattggagaaagaaaatcgcttatgtcccgcagcgtagtgaagtagatttaacttttccaatcactgtttttgatatggtacttcttggtacttatccggccctgggattaataaaacgccctggtaaaaaagaaaaacagctggcatttgatgctttagaacaagtggagatgacggcatttagtaaaagacaaatcggcgaactgtcaggtggtcaattgcagcgtgtgtttattgctcgtgccttagcgcaacatgcggaaatcttctttttagatgaaccatttgctggcattgatatggctagcgaagcgcttattatgaaattgttaaaaaagctaagagataacggaaaaactatcgtagtcgtccaccatgattttcataaagtagctgcttactttgatgacattattttactcaataaaaaattagtggcacacggtccggtagaacaaacatttacagaagaaaaaattcaatttgcttatggtgacgcaccggtagcatttgcggcgggggtgtag

SEQ ID NO: 72901 - protein, 240 aa, Listeria innocua
MNIQGLTIAYKQKVAIDDVTLQIATGKLTGIVGPNGAGKSTLLKGMMGLVPREKGQVTLDNKPLTYWRKKIAYVPQRSEVDLTFPITVFDMVLLGTYPALGLIKRPGKKEKQLAFDALEQVEMTAFSKRQIGELSGGQLQRVFIARALAQHAEIFFLDEPFAGIDMASEALIMKLLKKLRDNGKTIVVVHHDFHKVAAYFDDIILLNKKLVAHGPVEQTFTEEKIQFAYGDAPVAFAAGV

SEQ ID NO: 72902 - DNA, 840 bp, Rhizobium meliloti
  CDS (1)..(840): transl_table=11
atgtttcagttgaagaacgtaacccgccagttcggcaagaagacagccgtcagcacggttaccttcgacataccgcagggtcagatggttggcattatcggtcgctccggcgccggcaagtcgacactcctgcgcatgataaaccgtctcgtggacccctcctccggctcgatcgaattcgccggcctacaggtctcctcgctcaagggggcggctctgcgcaattggcagcgcgactgcgcgatgattttccagcagttcaatctggtgcctcgactcgacgtgctgaccaatgttctcctcgggcgactgaaccatcgatccaccgtactgagcgtcctcaacatgttcagccgcgaagagcgcatcatggcgatcggtgcactggagcgtctggggatcgaacagaccgcccttcagccggccggcacgctctcgggtgggcagcagcagcgcgtcgcaatcgcccgcgcgctgatgcagcagccgaaggtgctgctcgccgatgagccgatcgcgtcgctcgacccgctcaacgccaagatcgtgatggacgcgctgcgcgacatcaacgagcgcgacggcatcaccgtgattaccaatctgcatacgctcgataccgcgcggaactattgcgagcgggtcatcggcatggcgcatggccgtgtcgtcttcgacgggcagccgaaggatcttaccgccgccgcggtcgcggcgatctatggcgcggaaacggcgatcgaggagtcgatgacctcgaccagcatcaacatccccgcggaagccccgcgggaaacagcatcggccggcttgaagccgctggcactggccggcccttaa

SEQ ID NO: 72903 - protein, 279 aa, Rhizobium meliloti
MFQLKNVTRQFGKKTAVSTVTFDIPQGQMVGIIGRSGAGKSTLLRMINRLVDPSSGSIEFAGLQVSSLKGAALRNWQRDCAMIFQQFNLVPRLDVLTNVLLGRLNHRSTVLSVLNMFSREERIMAIGALERLGIEQTALQPAGTLSGGQQQRVAIARALMQQPKVLLADEPIASLDPLNAKIVMDALRDINERDGITVITNLHTLDTARNYCERVIGMAHGRVVFDGQPKDLTAAAVAAIYGAETAIEESMTSTSINIPAEAPRETASAGLKPLALAGP

SEQ ID NO: 72904 - DNA, 801 bp, Treponema pallidum
  CDS (1)..(801): transl_table=11
atggcagagatatcagcaacagcttatgctgtccaggttgacgacctgacgcttgcgtatcggcagaagccggtgctttgggacgtggatgtgcgtattccagagggggttatcgaggccattatcggtcctaatggggcgggcaagtcgaccctattgaaggcgatcatgggtcttctgcctctcgcttccggagaggtgcgtgtctttgggcgtcctttttcaaaagagcggcgacgtgttgcgtatgtcccgcagcgcagtgcagtggattgggatttccctactaccgtttttgatgtggtgctcatgggttcgtacggttcgctcggttggattcttcgtccgggaaaaagagaaaaggcgcgtgcccgggaagcgatcgaggaagtaggaatgggcgcctttttagaccgacaaatcagtgagctttcaggcggtcagcagcagcgcgtgtttctcgcgcgggccttggtgcaggacgcggatctttacttcatggatgagccatttcaaggtgtggatgcagctactgaacaagcaatcgttactcttttaaaaacgctgaaagggcgtgggaaaacgttgcttgttgtgcatcatgatttgcagacggtggcagagtattttgaccgcgtgctgcttttaaatgttcgcgtcatcgctgaaggggccgtcgtgtctgccttcaccgaagaatacgttcaaagagcctatggcggacggattagttccaccctttttccgagaggaaataaggaggatgtgcacgatgcacgcgctcatgcgtctgttctctga

SEQ ID NO: 72905 - protein, 266 aa, Treponema pallidum
MAEISATAYAVQVDDLTLAYRQKPVLWDVDVRIPEGVIEAIIGPNGAGKSTLLKAIMGLLPLASGEVRVFGRPFSKERRRVAYVPQRSAVDWDFPTTVFDVVLMGSYGSLGWILRPGKREKARAREAIEEVGMGAFLDRQISELSGGQQQRVFLARALVQDADLYFMDEPFQGVDAATEQAIVTLLKTLKGRGKTLLVVHHDLQTVAEYFDRVLLLNVRVIAEGAVVSAFTEEYVQRAYGGRISSTLFPRGNKEDVHDARAHASVL

SEQ ID NO: 72906 - DNA, 765 bp, Methanococcus jannaschii
  CDS (1)..(765): transl_table=11
gtgagtttaatgattctctctgttgatggagttgaatttgcatataaaagtaggcaaatactaaacaacataaaatttgaggttaaaagaggagaggttgtttctattttaggagttaatggagctgggaaatctaccttattaaaatgtataaataaaatcttaaagccaaagagagggacaatattgattgataattttgatataaagaatttagataatcttgaattagctaagaaagttggttatgttccacagagagctgaaggaaattacatgactgtatttgatgctgttttgttgggaaggaagccacatataaaatgggaagtctctgatagagatatagagataactcacaaggttttaaagcttttaaacttagaggattatgctctaagatatacgaatgagttgagtggtggagaactgcaaaaggtaataatagcaagggctttagtgcaagagcctcaaatattacttttagatgagccaacaaacaacttagatttaaagaatcagttggaggttatgaaaatcattatggatatatcaaaatctcaaaacatagcctcaattgtagttatgcatgatttaaatttggctttaagatactccgataaatttataatgctaaaggatggagttatatatgctgaaggagggagagaagttataaatccagagaatattaaagcagtttatggagtcgatgcttatattgaaaatgttagagggattcctgtagttgttccaataggataa

SEQ ID NO: 72907 - protein, 254 aa, Methanococcus jannaschii
MSLMILSVDGVEFAYKSRQILNNIKFEVKRGEVVSILGVNGAGKSTLLKCINKILKPKRGTILIDNFDIKNLDNLELAKKVGYVPQRAEGNYMTVFDAVLLGRKPHIKWEVSDRDIEITHKVLKLLNLEDYALRYTNELSGGELQKVIIARALVQEPQILLLDEPTNNLDLKNQLEVMKIIMDISKSQNIASIVVMHDLNLALRYSDKFIMLKDGVIYAEGGREVINPENIKAVYGVDAYIENVRGIPVVVPIG

SEQ ID NO: 72908 - DNA, 792 bp, Haemophilus influenzae
  CDS (1)..(792): transl_table=11
gtggttattagtgcgagggcaaaaataatgttactcgaaacccaaaatcttgccattggctatgaaggaaaaacactggttcaacatatccaatttaccctagaggaaaatcaaatttgttgtttgcttggtgcaaatggtgcaggcaaaagtacgtttttgaaaactttacttggtttacaaccgcctattggtggtgatattgtttggcaaggaaagtcgctttctgattattcaccaacagaattggctcggcatattgcttatgtgccacaagcgcattctcatttatttccttttttagtgcaggatatggtgatgatggggcgatctgcttttttgaagtggtatcaaactccgaaaaaatctgatttggatttagcattaatggcattgcaagagttagaaattgctcatcttgcgcaacgttattatcatcaattaagtggcggcgaaaaacagcttgtgttgattgcccgtgcgattgctcaacaagccaaacttttaattatggacgaaccgacttctagccttgattttggtaatcaaattcgagtgttagaaaaaataaaacaactgcaaaagcaaaatattgcgcttattattagtacgcataatccacaacaagcggcatttttaggggataatattgttttgcttgatcaacaatttggctttcaacaaggcgataaaaaacatttattaaccttagaaaacttggcgaaaatttaccgcacttcgcccgaacttttacatcaacatttgaataaccacattgaaaaatcactatga

SEQ ID NO: 72909 - protein, 263 aa, Haemophilus influenzae
MVISARAKIMLLETQNLAIGYEGKTLVQHIQFTLEENQICCLLGANGAGKSTFLKTLLGLQPPIGGDIVWQGKSLSDYSPTELARHIAYVPQAHSHLFPFLVQDMVMMGRSAFLKWYQTPKKSDLDLALMALQELEIAHLAQRYYHQLSGGEKQLVLIARAIAQQAKLLIMDEPTSSLDFGNQIRVLEKIKQLQKQNIALIISTHNPQQAAFLGDNIVLLDQQFGFQQGDKKHLLTLENLAKIYRTSPELLHQHLNNHIEKSL

SEQ ID NO: 72910 - DNA, 1842 bp, Oryza sativa
  CDS (1)..(1842)
atgtcgtccgcggccgtggcgtctccgagggagacggtgtcgccgcccatgtcgctggggaaggttggtgtcgccgtcgtcggcggcgggaggaggaggtcgaggtaccgcctcgagacgagggggttgtcgtacgtgctcccggcgaggggggcggcggcgaggttgtttcttggaggcggtggggaggagaggttgctcctgaggggcgtgacgtgcgaggcgccgcccggggaggtggtggcgatcgtcgggccgagcggggccgggaagacgacgctgctgtccgtgctggccgggtcggccgacccggcgagggtggtcgccggcgaggtgctggtgaacgggcgcgccatggacgctgcgaggttccggcgggtgtccgggcacgtcccgcaggacgacgcgctgttcccgatgctcaccgtggaggagtcgctggtgtacagcgcgcggctgaggctgcgcggggcgggcggcgggaatggcggggcggcggtggcgagggcgagggagctgatggcggagctcgggctgcggcacgtggccgggtcgagggtggggagggtgtccggcggcgagcggcggcgggtgtcgatcggcgtcgacctcgtgcacgacccggccgtgctgctgctcgacgagcccacctcgggcctcgactccggctccgcgctccacattgtcaagatgctcagggacatggccgccgcgcacggcaagaccgtcgtgctcaccatccaccagcccgggttccgcatcctcgagctgctcgaccgcgtcgtcctcctcgccgacggcgccgtccgccaccacggctccctcggcttcctcgaggctcgcctcgccgcctccggccacggcatccctccccacgtcaacgtcctcgagtacgccatggagtgcatcgactccctcaagcccgaggtcaccacggcggacgcgagccacgcggacgccgcgtcggggtcgtcacggcggcgcgcgagctccgcgccgtacgcgaactcggcggcggcggaggtgtgcatcctgtcggcgcggttcgcgaagacggtgctgcggacgccgcagctgttcgcggcgcggatggcgcagtcgctcctcgccggcgcgttcctcggcaccgtcttcctgggcgccggcgacctccagtcgaggctgggcttcttcgccttcaccctcacctacgtcctctcctccaccaccgagggcctcccggtgttcctccaggagcggcgcatcctggagcgcgagacgtcccgcggcgcgcaccgcgtcgcctcctacgtcgcctccaacgccgccgtgttcctcccgctcctcctcgcgtcggcgctgctgtacgccgcgccggtgtactggctcgccggcctcgccagggagcccggccggttcgcctacttctccctcgtcgtctggctcgtcatgctcaccgccaactcgttcgtcgcgtgcttcagcgcgctggcgcccagctacatcgtcgccaactccctcatcgcgggcctcatcggctgcttcttcctcttctccggctacttcgtggcgagcaagaacatccccaggtactgggtgttcatgcactacgccagcctgttcaagtacccgttcgaggcgttcctcgtcaacgagtacggcggcgcgcgcggcggcgccgagtgcctcgccgaggtcggcggggggctctgcgtgctcgacggcgccacgctgctgcggcagcaggggatgcgggcgagcatgcggtggagcaacgtcgccgtcatgctcggcttcgtcgtcggctacaggctgctctgcttcgtcttcctctggttcagatgccaccgcatgaggaggtga

SEQ ID NO: 72911 - protein, 613 aa, Oryza sativa
MSSAAVASPRETVSPPMSLGKVGVAVVGGGRRRSRYRLETRGLSYVLPARGAAARLFLGGGGEERLLLRGVTCEAPPGEVVAIVGPSGAGKTTLLSVLAGSADPARVVAGEVLVNGRAMDAARFRRVSGHVPQDDALFPMLTVEESLVYSARLRLRGAGGGNGGAAVARARELMAELGLRHVAGSRVGRVSGGERRRVSIGVDLVHDPAVLLLDEPTSGLDSGSALHIVKMLRDMAAAHGKTVVLTIHQPGFRILELLDRVVLLADGAVRHHGSLGFLEARLAASGHGIPPHVNVLEYAMECIDSLKPEVTTADASHADAASGSSRRRASSAPYANSAAAEVCILSARFAKTVLRTPQLFAARMAQSLLAGAFLGTVFLGAGDLQSRLGFFAFTLTYVLSSTTEGLPVFLQERRILERETSRGAHRVASYVASNAAVFLPLLLASALLYAAPVYWLAGLAREPGRFAYFSLVVWLVMLTANSFVACFSALAPSYIVANSLIAGLIGCFFLFSGYFVASKNIPRYWVFMHYASLFKYPFEAFLVNEYGGARGGAECLAEVGGGLCVLDGATLLRQQGMRASMRWSNVAVMLGFVVGYRLLCFVFLWFRCHRMRR

SEQ ID NO: 72912 - DNA, 4449 bp, Oryza sativa; identical to SEQ ID NO: 60277
  CDS (1)..(4449)

SEQ ID NO: 72913 - protein, 1482 aa, Oryza sativa; identical to SEQ ID NO: 60278

SEQ ID NO: 72914 - DNA, 1875 bp, Oryza sativa
  CDS (1)..(1875)
atgtccaccaccaccaccaccaccgtcacagaacccgacaatgccgaagcctcgccatcgccgtcgccgtcgccgtcgacgccgcccaagaaggtgatcatgtacgagctcgccgcgcggaacatctactacgccaagccggccgccgccgcggtggccacgacgacggtggcgtcgctggcgcggctcctgaggccctgcggcgcggcgcagccgccgtcgccggagtacatcctccgggacgtgtcgctgacggcgcggcccggggagatcctcgccgtcgtcggccccagcggcgccggcaagtccaccctgctcgacatcctcgccgcgcggacggcgccgacgcacgggaggctgctcctcaacgcggcgccgctccgaccgtcctcgttccggcggctgtccgcccacgtgccgcagatggacgtcgcgctgccgttgctcaccgtcgcagagacgttcgccttcgcggcgtcgctgctgtacccggcggcggcggaggcgtcggccgcggtcgccgccctcctcgcggacctccggctgggccacgcggcgcacacccgcgtctccgccacgcggctgtccggcggcgagcggcgtcgcgtgtccatcgggctcgccctcctccgggaccccggggtcctcctcctcgacgagcccacctccggcctcgactcctcctccgcgcacgtcgtcgtcggctgcctgcgcgccgtcgcggccgcgcgcggcacgacggtggtgctctccatccaccagcccagctcgcgcctcctctccgccgtggactccctcctcctcctctcccgtggcgccgtcgtgcaccacggctccgtcgactccctcgacgccgcgctcctctcccacggcctcgccgtgccggcgcagctcaacccgctggagtttgccctcgaggtactcgaccagatgccccacccgtccgcctcctcccctgagcccaagacgacggaggagctcgccgccgtgacgtcctccaagtcgtcgtcgtcgtcaacctcgccgtgctcgaggatacacgaggtggtggtcctgtacaagcgggcatggaaggtggtgtaccgaagcaagcaactgctgctgaccaacttcctggagtcggtggtggtggggacgctgctggggagcatctacatcaacgccggcgacggcgagggcggcgcgcacaagcggctggggctgttcgccttcacgctgacgttcctcctgacgtccacgacggagacgctgccgacgttcgtgtcggagcggccgatcgtgctggcggagacggcgtcggggctgtacaggctgtcgtcgcacgcggcggcggcgacgctggtgttcctcccgtacctcctggcggtggcgctcctctactccgcctgcgtctacttcctcgtcggcctctgcgcgtcggcggcggcgttcgcggcgttcgtgatggtggtgtgggcggtggtgctgacggcgaactccttcgtgctgttcgtgagctcgttcgcgccggactacatcgccgggatgtcgctggtgtcggtgtccctcgccggcttcttcctcttctccggctacttcctgtccagggggagcatgccgccgtactgggtgttcatgcactacgtctccccgtacaagtacgccctcgacgccctcctcgccaacgagtacacctgcgccgccacccgctgcttcggcgtcgccggccccgccgccggcgactgctccgagaccggcgccgacgtgctggcggagaaggggctcacggccaaggagcggtggaccggggtgcaggtgctcttcggcttcttcctcctctacagagttctctactgggtggtgctcagccgccgagccgccagggccaagaggtga

SEQ ID NO: 72915 - protein, 624 aa, Oryza sativa
MSTTTTTTVTEPDNAEASPSPSPSPSTPPKKVIMYELAARNIYYAKPAAAAVATTTVASLARLLRPCGAAQPPSPEYILRDVSLTARPGEILAVVGPSGAGKSTLLDILAARTAPTHGRLLLNAAPLRPSSFRRLSAHVPQMDVALPLLTVAETFAFAASLLYPAAAEASAAVAALLADLRLGHAAHTRVSATRLSGGERRRVSIGLALLRDPGVLLLDEPTSGLDSSSAHVVVGCLRAVAAARGTTVVLSIHQPSSRLLSAVDSLLLLSRGAVVHHGSVDSLDAALLSHGLAVPAQLNPLEFALEVLDQMPHPSASSPEPKTTEELAAVTSSKSSSSSTSPCSRIHEVVVLYKRAWKVVYRSKQLLLTNFLESVVVGTLLGSIYINAGDGEGGAHKRLGLFAFTLTFLLTSTTETLPTFVSERPIVLAETASGLYRLSSHAAAATLVFLPYLLAVALLYSACVYFLVGLCASAAAFAAFVMVVWAVVLTANSFVLFVSSFAPDYIAGMSLVSVSLAGFFLFSGYFLSRGSMPPYWVFMHYVSPYKYALDALLANEYTCAATRCFGVAGPAAGDCSETGADVLAEKGLTAKERWTGVQVLFGFFLLYRVLYWVVLSRRAARAKR

SEQ ID NO: 72916 - DNA, 1839 bp, Oryza sativa
  CDS (1)..(1839)
atggactgcttcttgtcctccgtctgcacgccgctcaatctccagttcatcgacgtggcgtaccgggtcaaggtgtcgaccacggcggcggcggcgaagggggcgccgccggggaggatatcgcacgccgggggaacaggtggtggcggtggcgcgcaggaggagaggacgatactgaaggggatcaccggcgaggcgaggccgggggaggtgctggcggtgctgggcccatcggggagcggcaagtcgacgctgctctccatcctcggcggccgcctcgccggccgccacgccgggacggtgctggcgggcgggcgcgcgccgtgccgcgccgtgcagcggcgcacggggttcgtggcgcaggacgacgtgctccacccccacctcaccgtccgcgagacgctcctcttctgcgccatgctccgcctcccggcctcctcccccgcagccgccaaggccgccgccgccgaggccgtgatcgccgagctggggctcgcgccgtgcgccgacaccatcgtcggcaacgcgttcgtccgcggcgtgtcggggggcgagcggaagcgcgtcagcatcgggcacgagctgcttgtgaacccgagcctcctcgtcctcgacgagcccacctccggcctcgactccaccgccgccgcgcgcctcgtcgccacgctctcgtcgctggcgcgcaggggccgcaccgtcgtcatgtccgtccaccagccgtccacccgcgtctaccgcatgttcgactccgtcctcctcctcgccgaggggacctgcctctacttcggcgccggccgcgacgccatggactacttcgccgccgtcggcttctcgccggccttccacgtcaaccccgccgacttcatgctcgaccttgccaacggattcgctcaaacagagtatgataattgcaacgcagccgatggcggcaacgtgaagcagtcgctgatctcgtcgtacaaccgagtgctcgcgccgcgggtgaaggcgtccatcaacgccggcgacgtccacggcggcgagcagcagccaccgccgccggcggcggagagctgcagcgggtgcacgagctggtcgaaccagttcgcgatcctgctgcggcggagcctcaaggagcggcggcacgaggcgttcacgtcgctgcggctgttccagatcatcgcgccggcgctggtggcgggggccatgtggtggcggtcgtcgccggcggcggtgggcgaccggatggggctcctcttcttcgtctccatcttctggggtgtgttcgcctccttcaacgccgtgttcgcgttcccgcaggagcggcccgtgctggcgcgggagcgcgcgtcggggatgtacgcgctctcgtcctacttcatgtcgcgcatggcgggcgacctccccatggagctcgcgctccccgccgcgttcaccgtcatcgtctacctcatggccgggctcaacccgtcgccggccgcgttcgcgctcacgctcgccgtgatcctctcctacgtgctcgtcgccgaggggctcggcctcgccgtcggcgccgtcatgatggacgccaagcgcgcctccacgctcgtcaccgtcgtcatgctcgcctacctcctcaccggcggcttctacgtccacaacgtgccggggttcatggcgtgggccaagtacacctccttcacctactactgctaccggctgctcatcgccgtgcagtacagcggccgcctcgcccgcctcctcccgccggaggaggcccgcggcgaggccagcccggccgcctgcgtcgccgcgctcgtcgccatgttcttcgcctaccggctgctcgcctacctcgcgctccgccgggtcaggaagtga

SEQ ID NO: 72917 - protein, 612 aa, Oryza sativa
MDCFLSSVCTPLNLQFIDVAYRVKVSTTAAAAKGAPPGRISHAGGTGGGGGAQEERTILKGITGEARPGEVLAVLGPSGSGKSTLLSILGGRLAGRHAGTVLAGGRAPCRAVQRRTGFVAQDDVLHPHLTVRETLLFCAMLRLPASSPAAAKAAAAEAVIAELGLAPCADTIVGNAFVRGVSGGERKRVSIGHELLVNPSLLVLDEPTSGLDSTAAARLVATLSSLARRGRTVVMSVHQPSTRVYRMFDSVLLLAEGTCLYFGAGRDAMDYFAAVGFSPAFHVNPADFMLDLANGFAQTEYDNCNAADGGNVKQSLISSYNRVLAPRVKASINAGDVHGGEQQPPPPAAESCSGCTSWSNQFAILLRRSLKERRHEAFTSLRLFQIIAPALVAGAMWWRSSPAAVGDRMGLLFFVSIFWGVFASFNAVFAFPQERPVLARERASGMYALSSYFMSRMAGDLPMELALPAAFTVIVYLMAGLNPSPAAFALTLAVILSYVLVAEGLGLAVGAVMMDAKRASTLVTVVMLAYLLTGGFYVHNVPGFMAWAKYTSFTYYCYRLLIAVQYSGRLARLLPPEEARGEASPAACVAALVAMFFAYRLLAYLALRRVRK

SEQ ID NO: 72918 - DNA, 3675 bp, Oryza sativa
  CDS (1)..(3675)
atgtcggagtcgagcagggcgttcggagtgaatgcgtcgtcgtcgtcgtccggcggcggcggcggcggcgaggcggtggctggaacgacggggaagaatggtggcggggggagcgtggcgttccaccggctgttcgcgttcgcggacggcacggacgcggcgctgatgctgctcgggacgctgggcgcggtggcgaacggcgccgcgctgccgttcatgaccgtgctgttcggcggcctcatcgacgccttcggcggcgccgcgggcggcgacgtcgtggcgcgcgtctccgaggtgtcgctccagttcatctacctcgccgtcgcctcggccgccgcgtcgttcatccaggtggcgtgctggatgatcaccggcgagcggcaggcggcgcggatacggagtctgtacctgaggacgatactccggcaggaggtcgccttcttcgacaagcacaccaacaccggcgaggtggtgggcaggatgtccggcgacacggtgctgatccaggacgccatgggggagaaggtgggcaagttcgtccagctcctcgtcacgttcctgggcggcttcggcgtggcgttcgcgcaggggtggctcctcaccctcgtcatgctcgccaccatcccgccgctcgtcctctccggcgccgtcatgtccaatgtcgtcgccaggatggcgtcgctcggccaggccgcctacgccgacgcctccgtcgtcgtcgagcagaccatcggctccatcagaacagttgcgtcgttcaccggcgagaagcaggcggtggcgaagtacagtaggtcactgaagagagcgtacagctccggcgtcagggaggggctcgccgccggcgtgggcatgggcacggtgatggtgctcctcttctgtggctactcattggggatttggtacggtgccaagctgattctggagaagggatacaccggagctcaggtcatgaatgtcatcttcgccgtgctcaccggctcgctagctctaggtcaggcatcaccaagcatgaaagcattcgcgggagggcaggctgcggcatacaagatgtttgagacaatcaacagggagccagagatcgatgcgtacagcgccacaggtaggaagctagatgacattcagggggatatcgagttcagaaacgtttacttttcgtacccgacaaggcccgatgagcaaatattcagagggttctcgcttgccatacagagtggaacaactgttgcattggttggacagagtgggagtggaaaatcaacagtcatcagcttaatcgagcggttttacgaccctcagctcggtgaagttctaattgatggagtgaatctcaaggagttgcagctaaggtggatcagaagtaaaattggccttgtgagccaggagccaatcttgtttgctgctagcattatagataacatagcttatggcagggataatgctacaaatcaggaaattagagctgcagctgagcttgctaatgcctccaaattcattgataaaatgccccaggaggctcttgacagggtcatgtcaaaccggaccaccgtcatagtcgctcaccgtttgaccactgtcaggaatgctgatactattgctgtcatccatcaaggatcaatagttgaaaaaggttcacaccatgagctcataagtgatccagatggagcgtatagccaattgatacgcttacaggaaaacagtcatgattctgaggatgcaaattaccagaacaagtcaggcaagaagagtgattctgggattcgctcgggcaaacaatcgttttcgtaccagtcgactcctcagagatcatctagggacaacagtaacaatcactcattctcagtatctgctactcctctagaaattgatgtccagggtggttcaccaaagaagatagctgaagaaacaccacaggaagtgcctctcagtcgcctcgcagcgcttaacaaaccagagatcccagtgcttctgcttggttctgttgcttctgctgtcagtggagttatcttcccaatctttgcgatacttttatccaatgtgatcaaagcattttatgagcccccacaagtgctaaagaaggatgctgagttttggtcatcgatgttcttagtgtttggggcagtgtacttcttgtcacttcctattggctcataccttttttcagtggctgggtgtaggttgatcagaaggatcagactgatgacttttgagaaggttgtaaatatggagattgaatggtttgatcatccagaaaactcaagtggatcaatcggagcaaggctatcggccgatgcagcaaaaattagggggcttgtgggtgatgcacttcaactggttgtgcagaatttagcaacattagttgctggtttgttgattgcttttatatcaaactgggagctatctctgatcatcttggcgttgataccactcatcggcgtcaacggatggatccagatgaagtttattcagggattcagtgcagatgcaaagatgatgtatgaagaggcaagccaagtggcaaatgatgcagtgagcagcataaggacagtagcctcattttcagctgaagagaaggtaatggatttgtacaagatgaaatgtgaaggaccactaagaacaggaatcaggacggcgataataagtggtatcggtttcggtgtttctatcttcctgctgtttggagtctatgcagccagcttctatgccggtgctcggcttgtcgaggacaggaaaacaacatttcctaacgttttcagggtgtttcttgctctcacaatggcagcaattggggtgtcacacactagcaacctcacatcagattcttccaaggcaaaatcagctgtatcttctatattcgccatcgtagaccgtaaatctaggattgatccaagtgatgatgctggagtgagcttagaaccactaagaggcgatatcgagttccagcatgtgagcttcagatatcctacacgaccagatgttcagatctttgaagacctgtgcttaacaattcaatctggaaagactgttgctcttgtcggagagagcggtagcgggaaatcgacagcgatatcattgcttcagaggttctatgatccggatgcaggccatatacttctagatggagtggacattcaaaagtttcagctaaggtggctaaggcaacagatgggtctagtgagtcaagaaccagctctgttcaatgacacgattcgcgcaaacatcgcgtatgggaaggaaggggatgcgacagaatcagacatcgtatcctccgcgcaattggcgaatgcgcacaagttcatcagctcattgcatcagggatatgaaaccatggtcggggagcgtggagctcagctatccggagggcagaagcaacgcatcgcgatcgcccgcgccattgtcaaggatcccaagatcctccttctcgatgaagccacgagtgcgctcgacgcagaatcggagcgcgtcgtccaagatgcgctggaccgggtgatgatgaacaggaccacggtgatcgtggcacaccggctgtccacaattcagggcgcagacatgatcgcggtggtgaagaacgggatgatcatcgagaaggggaagcatgatgcattgatcggcatcaaggatggagcttacgcctccctcgtcgccctccatgtttttgctgctgccatttcgtag

SEQ ID NO: 72919 - protein, 1224 aa, Oryza sativa
MSESSRAFGVNASSSSSGGGGGGEAVAGTTGKNGGGGSVAFHRLFAFADGTDAALMLLGTLGAVANGAALPFMTVLFGGLIDAFGGAAGGDVVARVSEVSLQFIYLAVASAAASFIQVACWMITGERQAARIRSLYLRTILRQEVAFFDKHTNTGEVVGRMSGDTVLIQDAMGEKVGKFVQLLVTFLGGFGVAFAQGWLLTLVMLATIPPLVLSGAVMSNVVARMASLGQAAYADASVVVEQTIGSIRTVASFTGEKQAVAKYSRSLKRAYSSGVREGLAAGVGMGTVMVLLFCGYSLGIWYGAKLILEKGYTGAQVMNVIFAVLTGSLALGQASPSMKAFAGGQAAAYKMFETINREPEIDAYSATGRKLDDIQGDIEFRNVYFSYPTRPDEQIFRGFSLAIQSGTTVALVGQSGSGKSTVISLIERFYDPQLGEVLIDGVNLKELQLRWIRSKIGLVSQEPILFAASIIDNIAYGRDNATNQEIRAAAELANASKFIDKMPQEALDRVMSNRTTVIVAHRLTTVRNADTIAVIHQGSIVEKGSHHELISDPDGAYSQLIRLQENSHDSEDANYQNKSGKKSDSGIRSGKQSFSYQSTPQRSSRDNSNNHSFSVSATPLEIDVQGGSPKKIAEETPQEVPLSRLAALNKPEIPVLLLGSVASAVSGVIFPIFAILLSNVIKAFYEPPQVLKKDAEFWSSMFLVFGAVYFLSLPIGSYLFSVAGCRLIRRIRLMTFEKVVNMEIEWFDHPENSSGSIGARLSADAAKIRGLVGDALQLVVQNLATLVAGLLIAFISNWELSLIILALIPLIGVNGWIQMKFIQGFSADAKMMYEEASQVANDAVSSIRTVASFSAEEKVMDLYKMKCEGPLRTGIRTAIISGIGFGVSIFLLFGVYAASFYAGARLVEDRKTTFPNVFRVFLALTMAAIGVSHTSNLTSDSSKAKSAVSSIFAIVDRKSRIDPSDDAGVSLEPLRGDIEFQHVSFRYPTRPDVQIFEDLCLTIQSGKTVALVGESGSGKSTAISLLQRFYDPDAGHILLDGVDIQKFQLRWLRQQMGLVSQEPALFNDTIRANIAYGKEGDATESDIVSSAQLANAHKFISSLHQGYETMVGERGAQLSGGQKQRIAIARAIVKDPKILLLDEATSALDAESERVVQDALDRVMMNRTTVIVAHRLSTIQGADMIAVVKNGMIIEKGKHDALIGIKDGAYASLVALHVFAAAIS

SEQ ID NO: 72920 - DNA, 3612 bp, Oryza sativa
  CDS (1)..(3612)
atgagtgccgcggcgaccaccggcggcggcggcgagcggcggagcctccgtggcatgttcaagttcgcggaccgggtggacgtgctgctcatggcgctgggcacgctgggtgccatcggcgacgggtgctcgaccaacctgctcctcatcttcgccagcgacgtgatgaactcgctcgggtacgcgcgcgccggcgcccacggcggcgccgccgccgccaccggcgtggacttcatgcgcgaggtcgagaagtcttgcctgaatttcgtgtacctggcgttcgcggtgctggcagtggcgtttatggaggggtattgctggagcaggacgagcgagaggcaggtgctgaggatcaggtacctgtacctgcaggccatactgcggcaggaggtgggcttcttcgactcgcaggaggccaccacctcggagatcatcaacagcatctccaaggacgcctcgctcattcaggaagttctcagtgagaaggttccactctttctgatgcactctacagttttcatctctgggctggcattctccacatatttctcctggaggctggctctggtttcttttcctctggtcctgctcctgataattccagggctcatctacggcaagtatctcctgtacctctcccgacaatcgcgccacgagtacacaaacgcaaactcgttggttgagcaagctcttggctctatcaagactgtctactctttcactgctgagaaaaggataatccagagatacacagcagttcttgacaagacgatcaagctggggattagacaaggtattgcgaaaggtttggctgtcggattcacgggcctttccttcgccatctgggctttcctcgcttggtacggcagtagactggtgatgtaccatcatgaaagcggaggaaggatatatgctgcagggatttccttcgttttaggcggcctatcccttggaatggcactccctgaactgaagcatttcacagaagcgtcggttgctgccacaagaattctcgatcggataaaccgtgtgccagagataaatgctgatgaccccaagggacttattttggatcaagtccggggagagcttcagtttgagtctgtccgctttgtttacccatcgaggcctaacatgacggtcctcaaagacttcaacctccagattcctgctgggcaaactgttgccttggttggatccagtggcagcggcaagtcaaccgcaatagcattggttcaacggttctatgatgccactgaaggaactgtcaaggttgacggtgtcaacattaaagaactccagctcaagtggatcaggagcaagatggggcttgtcagccaagatcatgcactcttcggtacatccataaaagagaacatcttgtttggcaaaccagatgcaacaatggatgaactgtatgcagcagccatgacagcaaatgctcacaacttcataagggggcttcctgaggaatatgagactaagattggcgagcgtggagcactgctatctggtggccagaagcaacgtattgccattgcacgggcagtcatcaagaacccggctatacttttgctcgatgaagccacaagtgcacttgattcagaatcagaaaagctggtgcagcatgcacttgaccaagcatctatgggaagaacaacactggtagtagctcataagctttccacagtgaagaatgccgatcagattgcagtggttgatgggggcactatagctgaaattggcacacacgatgaactgattaataagggtggcccatattcacgacttgtgaaactgcagaagatgggcctcttcagtggcaaggaccagtaccagccgtctcagtatgtccagagcaagtccaatgccacttacaccaggcttcttgcgatgaatgcaccagagtggagacaagcagtcataggaagtctctctgctttggtatatggttccttgcagcccatctatgctataaccatcggaggaatgattgctgcattttttgttcaagatctcaatgagatgaatgcaattatcagccgctatgccttgattttctgctcattgtcggtgatatccattgttgttaatctacttcaacattacaattttgcttacatgggagagcatctagtaaggcgtatcagagtccaagtacttgaaaagatcttaacctttgaggcagcatggtttgatgaagaaactaattcaagtggttcactgtgctctcggcttagcaatgaggcttctcttgtcaaaacccttgttgcagatagaatttccctactgcttcagacagcttctggaattataattgcagtgacaatgggccttatagtagcttggaaacttgctcttgtcatgatcgctgtacagccaactacgatgatatgctactatgccaaaaagatagttctctcaaatgtgtcaagggacttagcaaaggctcagcaccaaagtactcagattgctatagaagctgtttacaaccacaggatggtgacctcttttggatgctcatcaaaggttcttcagctctttgagcatacacaagaggaaccactgaagagagcaaggaagaaatcatgggtggccgggatcaccactggactgtcaccttgcctttcattcttgtcatgggctcttgacttctggtatggtgggaaattggcacaatctggggagatctccgcaggtgatgtcttcaaaacattttttgtcttggtgagtacaggaaagttgattgctgatgctggcagcatgacatccgacctggctaagggagcaaatgcagttgcttcagtgtttgaggtgctagacaggaaatctatctctccacaaaattcacaggtggaaaaggacaatcagaagaacaaaatacaaggaaggatagagttcaaaagggtagattttgcatatccgacaagaccacaatgccttatcctgcaggattttagcttggatgtgaaagcaggaacaagtattggtcttgttgggagaagcggctgtggaaaatctaccatcattggtttgatccagaggttctatgatgttgacagaggggctgtaaaggttgatggtatggatgtgagggagatggatatcctttggtatcgaggatttacagcccttgttagccaggagcctgcaatattttctggtagtgtcagggacaacattgcttttggtaaaccagaagctgatgaagacgagatcgtggaagctgctaaagctgcaaatgcacatgaattcatatcatctctaaaggacggatatcatactgactgtggtgagcatggattacaactatcaggagggcaaaagcaacgaattgcaattgcgagggcaataatccggaatccagcaatacttctacttgacgaagcaacaagtgctctcgatgcacagtcagagcaagttgtgcaggaagcccttgatagaatcatgtcaggaaggactacaattgtggtggcacatcgactgaacacaatcaagaatgtagattcgattgccttcttaggagagggtaaggtagtggaacgtggtacttatccacacctcatgagtaagaaaggagcattctacaacctagcggctcttcagaaataa

SEQ ID NO: 72921 - protein, 1203 aa, Oryza sativa
MSAAATTGGGGERRSLRGMFKFADRVDVLLMALGTLGAIGDGCSTNLLLIFASDVMNSLGYARAGAHGGAAAATGVDFMREVEKSCLNFVYLAFAVLAVAFMEGYCWSRTSERQVLRIRYLYLQAILRQEVGFFDSQEATTSEIINSISKDASLIQEVLSEKVPLFLMHSTVFISGLAFSTYFSWRLALVSFPLVLLLIIPGLIYGKYLLYLSRQSRHEYTNANSLVEQALGSIKTVYSFTAEKRIIQRYTAVLDKTIKLGIRQGIAKGLAVGFTGLSFAIWAFLAWYGSRLVMYHHESGGRIYAAGISFVLGGLSLGMALPELKHFTEASVAATRILDRINRVPEINADDPKGLILDQVRGELQFESVRFVYPSRPNMTVLKDFNLQIPAGQTVALVGSSGSGKSTAIALVQRFYDATEGTVKVDGVNIKELQLKWIRSKMGLVSQDHALFGTSIKENILFGKPDATMDELYAAAMTANAHNFIRGLPEEYETKIGERGALLSGGQKQRIAIARAVIKNPAILLLDEATSALDSESEKLVQHALDQASMGRTTLVVAHKLSTVKNADQIAVVDGGTIAEIGTHDELINKGGPYSRLVKLQKMGLFSGKDQYQPSQYVQSKSNATYTRLLAMNAPEWRQAVIGSLSALVYGSLQPIYAITIGGMIAAFFVQDLNEMNAIISRYALIFCSLSVISIVVNLLQHYNFAYMGEHLVRRIRVQVLEKILTFEAAWFDEETNSSGSLCSRLSNEASLVKTLVADRISLLLQTASGIIIAVTMGLIVAWKLALVMIAVQPTTMICYYAKKIVLSNVSRDLAKAQHQSTQIAIEAVYNHRMVTSFGCSSKVLQLFEHTQEEPLKRARKKSWVAGITTGLSPCLSFLSWALDFWYGGKLAQSGEISAGDVFKTFFVLVSTGKLIADAGSMTSDLAKGANAVASVFEVLDRKSISPQNSQVEKDNQKNKIQGRIEFKRVDFAYPTRPQCLILQDFSLDVKAGTSIGLVGRSGCGKSTIIGLIQRFYDVDRGAVKVDGMDVREMDILWYRGFTALVSQEPAIFSGSVRDNIAFGKPEADEDEIVEAAKAANAHEFISSLKDGYHTDCGEHGLQLSGGQKQRIAIARAIIRNPAILLLDEATSALDAQSEQVVQEALDRIMSGRTTIVVAHRLNTIKNVDSIAFLGEGKVVERGTYPHLMSKKGAFYNLAALQK

SEQ ID NO: 72922 - DNA, 4140 bp, Zea mays; identical to SEQ ID NO: 7669
  CDS (1)..(4140)

SEQ ID NO: 72923 - protein, 1379 aa, Zea mays; identical to SEQ ID NO: 7670

SEQ ID NO: 72924 - DNA, 846 bp, Zea mays
  CDS (1)..(846)
atgacgcacggcctcgccgtcggcttcggctacctacgctgcggtccctccgtgtcgtcgtcctctgccaccattcatcgcaccctggtcgctccccctcgtcgaagcttacggatatgctcctcgaccttccctcctccacccgcgcccgccatcgagggtcgtgacgtcagcctctcggtgaccacgcggcggggcagggtgttgccggtgcttaagggatgctccctccttgtcccgcccgggcagctctggatgctcctcggccccaacggctgcggcaagtccacgctgctcaaggttttagcaggttttcagaatccaacggccggtacagtgtatataaacagaccatgcagctatgtcttccaaaatcctgatcaccaggttgtgatgcctacagtgggatctgatgtagcatttggtctcggtaagctcaaacttccgttagatgaggtcaggttaagggtatcaaaatctttggatgccgttgggatgttgagctactctcagaggccaatccaaactctgagtggtgggcagaaacagagagttgcaattgctggtgcgttagctgaagcatccaaagtattactgctggacgaactgaccacattcttagatgaacatgaccagataggcgtgataaatgcagtgagggactctgtggctgccgatggggaggtcgccgcattatgggtgactcatcggttggaagagctgaaatatgcagatggtgccatctatatggaagatggccagataatcattcaaggcgacgtctctaccatatcaaaatttataaagaaaaaacaggcacgctactttggtcattttgaactctaa

SEQ ID NO: 72925 - protein, 281 aa, Zea mays
MTHGLAVGFGYLRCGPSVSSSSATIHRTLVAPPRRSLRICSSTFPPPPAPAIEGRDVSLSVTTRRGRVLPVLKGCSLLVPPGQLWMLLGPNGCGKSTLLKVLAGFQNPTAGTVYINRPCSYVFQNPDHQVVMPTVGSDVAFGLGKLKLPLDEVRLRVSKSLDAVGMLSYSQRPIQTLSGGQKQRVAIAGALAEASKVLLLDELTTFLDEHDQIGVINAVRDSVAADGEVAALWVTHRLEELKYADGAIYMEDGQIIIQGDVSTISKFIKKKQARYFGHFEL

SEQ ID NO: 72926 - DNA, 2214 bp, Zea mays; identical to SEQ ID NO: 7675
  CDS (1)..(2214)

SEQ ID NO: 72927 - protein, 737 aa, Zea mays; identical to SEQ ID NO: 7676

SEQ ID NO: 72928 - DNA, 846 bp, Zea mays
  CDS (1)..(846)
atgacgcacggcctcgccgtcggcttcggctccctccgctgcggtccctccgtgtcgtcgtcctctgccaccattcatcgcaccctggtcgctccccctcgtcgaagcttacggatatgctcctcgaccttccctcctccacccgcgcccgccatcgagggtcgtgacgtcagcctctcggtgaccacgcggcggggcagggtgttgccggtgcttaagggatgctccctccttgtcccgcccgggcagctctggatgctcctcggccccaacggctgcggcaagtccacgctgctcaaggttttagcaggttttcagaatccaacggccggtacagtgtatataaacagaccatgcagctatgtcttccaaaatcctgatcaccaggttgtgatgcctacagtgggatctgatgtagcatttggtctcggtaagctcaaacttccgttagatgaggtcaggttaagggtatcaaaatctttggatgccgttgggatgttgagctactctcagaggccaatccaaactctgagtggtgggcagaaacagagagttgcaattgctggtgcgttagctgaagcatccaaagtattactgctggacgaactgaccacattcttagatgaacatgaccagataggcgtgataaatgcagtgagggactctgtggctgccgatggggaggtcgccgcattatgggtgactcatcggttggaagagctgaaatatgcagatggtgccatctatatggaagatggccagataatcattcaaggcgacgtctctaccatatcaaaatttataaagaaaaaacaggcacgctactttggtcattttgaactctaa

SEQ ID NO: 72929 - protein, 281 aa, Zea mays
MTHGLAVGFGSLRCGPSVSSSSATIHRTLVAPPRRSLRICSSTFPPPPAPAIEGRDVSLSVTTRRGRVLPVLKGCSLLVPPGQLWMLLGPNGCGKSTLLKVLAGFQNPTAGTVYINRPCSYVFQNPDHQVVMPTVGSDVAFGLGKLKLPLDEVRLRVSKSLDAVGMLSYSQRPIQTLSGGQKQRVAIAGALAEASKVLLLDELTTFLDEHDQIGVINAVRDSVAADGEVAALWVTHRLEELKYADGAIYMEDGQIIIQGDVSTISKFIKKKQARYFGHFEL

SEQ ID NO: 72930 - DNA, 21 bp, Artificial sequence
  primer
atgctggaagtgcagcgcctg

SEQ ID NO: 72931 - DNA, 20 bp, Artificial sequence
  primer
tcaggttttccccgtgtcgc

SEQ ID NO: 72932 - protein, 232 aa, Artificial sequence
  consensus sequence
  Variant (2)..(6): Xaa in position 2 to 6 is any amino acid
  Variant (7)..(7): Xaa in position 7 is any or no amino acid
  Variant (9)..(9): Xaa in position 9 is any amino acid
  Variant (12)..(12): Xaa in position 12 is any amino acid
  Variant (15)..(15): Xaa in position 15 is any amino acid
  Variant (18)..(28): Xaa in position 18 to 28 is any amino acid
  Variant (29)..(34): Xaa in position 29 to 34 is any or no amino acid
  Variant (36)..(47): Xaa in position 36 to 47 is any amino acid
  Variant (48)..(63): Xaa in position 48 to 63 is any or no amino acid
  Variant (65)..(76): Xaa in position 65 to 76 is any amino acid
  Variant (77)..(78): Xaa in position 77 to 78 is any or no amino acid
  Variant (80)..(81): Xaa in position 80 to 81 is any amino acid
  Variant (83)..(109): Xaa in position 83 to 109 is any amino acid
  Variant (110)..(135): Xaa in position 110 to 135 is any or no amino acid
  Variant (140)..(141): Xaa in position 140 to 141 is any amino acid
  Variant (143)..(146): Xaa in position 143 to 146 is any amino acid
  Variant (148)..(149): Xaa in position 148 to 149 is any amino acid
  Variant (151)..(158): Xaa in position 151 to 158 is any amino acid
  Variant (159)..(166): Xaa in position 159 to 166 is any or no amino acid
  Variant (171)..(173): Xaa in position 171 to 173 is any amino acid
  Variant (176)..(197): Xaa in position 176 to 197 is any amino acid
  Variant (198)..(201): Xaa in position 198 to 201 is any or no amino acid
  Variant (203)..(223): Xaa in position 203 to 223 is any amino acid
  Variant (224)..(231): Xaa in position 224 to 231 is any or no amino acid
GXXXXXXGXNGXGKXTLXXXXXXXXXXXXXXXXXGXXXXXXXXXXXXXXXXXXXXXXXXXXXXQXXXXXXXXXXXXXXVXXGXXXXXXXXXXXXXXXXXXXXXXXXXXXXXXXXXXXXXXXXXXXXXXXXXXXXXLSGGXXQXXXXAXXLXXXXXXXXXXXXXXXXLDEPXXXLDXXXXXXXXXXXXXXXXXXXXXXXXXXHXXXXXXXXXXXXXXXXXXXXXXXXXXXXXG

SEQ ID NO: 72933 - protein, 11 aa, Artificial sequence
  protein pattern
  Variant (2)..(2): Xaa in position 2 is any amino acid
  Variant (5)..(5): Xaa in position 5 is any amino acid
  Variant (8)..(8): Xaa in position 8 is Ser or Thr
  Variant (10)..(10): Xaa in position 10 is any or no amino acid
GXNGXGKXTXL

SEQ ID NO: 72934 - protein, 14 aa, Artificial sequence
  protein pattern
  Variant (4)..(4): Xaa in position 4 is Glu or Gln
  Variant (5)..(5): Xaa in position 5 is any amino acid
  Variant (7)..(7): Xaa in position 7 is any amino acid
  Variant (8)..(8): Xaa in position 8 is Ala, Ile or Val
  Variant (9)..(9): Xaa in position 9 is any amino acid
  Variant (10)..(10): Xaa in position 10 is Phe, Ile, Leu, Met or Val
  Variant (12)..(13): Xaa in position 12 to 13 is any amino acid
  Variant (14)..(14): Xaa in position 14 is Phe, Ile, Leu or Met
SGGXXQXXXXAXXX

SEQ ID NO: 72935 - DNA, 1086 bp, Azotobacter vinelandii
  CDS (1)..(1086): transl_table=11
atggaaacaatggtgacatccgtgcgccatgccgccagtgtcaacttttggcaagggaagcgggttctgctgaccggccacaccggctttaagggcggttggctggcattgtggctgcagaggctgggagcggtggtaacgggaatcgctttgcccccccagactaggccaaacctgttcgagttggcccgagttgccgatggtatgcacagtcatttcgccgatattcgcgatgcagcaaaacttatggaaatagtgcaagccgcgcagccagaagtggtgttccatctagcggcccaaccgctggtacgtgcaagctaccgcgagccggtagccacctttgcctctaatgtgatgggcacggtacatgtgctggattccatgcgtggcttggatagcgtgcgtgtggcggtgatggtgaccaccgacaaggtgtaccgcaatctggaacatccctatccctatcgtgaagacgatgtcttgggtggccacgatccctacagtgccagcaaggcggcgagtgaaatcgtcattgccagttaccgcgatgcctttttggcgcagcagggggtggcgattgcctctgcccgggcgggaaatgtaattggtggcggcgactggtcggaagaccgcttgattcccgatgcgctgcgagcctggcagtccggtcagttgctggaggtccgccggcccgaggccatccgtccctggcagcatgtgctggagccgctcagtggttatctagtactggcagaaatgctctggcatgaacctgcgcgggctggcgcttacaatttcggcccgttcacccatgaggcggccaccgtgcggaaggtcattgagatggcccgcgaggcttacggccagggtgatgtgcgttacggctatggagccggatgtccgcatgaagcgggttggctggcgctggagaccagtaagacgcgagtggcattaggcgtggtgccatgctggtcactggccgaaagtgtgagtcgcaccattgcttggcatcgagcacagcacggaggggccgatgcgcggggcttgtgcgaagccgaaataaaggcacatgagacgcgagtatga

SEQ ID NO: 72936 - protein, 361 aa, Azotobacter vinelandii
METMVTSVRHAASVNFWQGKRVLLTGHTGFKGGWLALWLQRLGAVVTGIALPPQTRPNLFELARVADGMHSHFADIRDAAKLMEIVQAAQPEVVFHLAAQPLVRASYREPVATFASNVMGTVHVLDSMRGLDSVRVAVMVTTDKVYRNLEHPYPYREDDVLGGHDPYSASKAASEIVIASYRDAFLAQQGVAIASARAGNVIGGGDWSEDRLIPDALRAWQSGQLLEVRRPEAIRPWQHVLEPLSGYLVLAEMLWHEPARAGAYNFGPFTHEAATVRKVIEMAREAYGQGDVRYGYGAGCPHEAGWLALETSKTRVALGVVPCWSLAESVSRTIAWHRAQHGGADARGLCEAEIKAHETRV

SEQ ID NO: 72937 - DNA, 1071 bp, Sinorhizobium meliloti 1021
  CDS (1)..(1071): transl_table=11
atgagccgtctccctgatccggaattctgggcgggaaagcgcgtcctgctgaccggccatacgggcttcaagggaagctgggcgggtgtatggctcaaagagatgggcgcgcatgtgaccggctatgccctaccgcccgcctcccggccgtcgctccatgacttgctgcatccgaacgaagccccgggcgggcaattcggcgatatacgcgacggtgaagcgctggcgacgattgcacggaagagcgagccggagattgtcctgcatatggcggcgcagccgctggtccgcgaaagctatgcggagcctgccgaaactttcgacgtcaatgtcatgggcacggtccggctgctcgaagcggcccgtgcgacgccttccgtgaaagccgttctcgttgtgacgaccgacaaggtctatcgcaacgacgagagcggacggcatttccgggagagcgacacgctcggcgggcacgacccctattcgggctccaaggcagcctgcgagcttgccgtcgcaacctggcgcagcgcctatcttaaggagcgcggcattcgtgtcgccacggcgcgcggcggcaatgtgatcggtggcggcgacttttccgacgaccggctggtgcccgacgtcgtgcgcgccgccctttccggcacccggctcaacatccgaagcccgctcgcgacgcgcccctggcagcacgtgctcgattgtctcaacggctattttctcttcgccgaggcgctcttcaagggcgaaagcgatgtcgacgcgctgaatttcggcccctcgccctccgagcaggcgatccccgtgcgcgacgtggcgaacgcggtgcaggccgcgatggggctcgaccccgaatgggacgacgtctcggcgctcgagcaaccgcgcgagatgcgaacgctcggccttgatccggctctcgccggcgagaccctcgcctggcgcccccgcctcgcccagagccaggcgatcgagtggaccgcgcgctggtacgacggctggcgtcgcggcgaagctgcgcgtcagctcacgctcgatcagatagaagcattcacgaaaggcctttaa

SEQ ID NO: 72938 - protein, 356 aa, Sinorhizobium meliloti 1021
MSRLPDPEFWAGKRVLLTGHTGFKGSWAGVWLKEMGAHVTGYALPPASRPSLHDLLHPNEAPGGQFGDIRDGEALATIARKSEPEIVLHMAAQPLVRESYAEPAETFDVNVMGTVRLLEAARATPSVKAVLVVTTDKVYRNDESGRHFRESDTLGGHDPYSGSKAACELAVATWRSAYLKERGIRVATARGGNVIGGGDFSDDRLVPDVVRAALSGTRLNIRSPLATRPWQHVLDCLNGYFLFAEALFKGESDVDALNFGPSPSEQAIPVRDVANAVQAAMGLDPEWDDVSALEQPREMRTLGLDPALAGETLAWRPRLAQSQAIEWTARWYDGWRRGEAARQLTLDQIEAFTKGL

SEQ ID NO: 72939 - DNA, 1083 bp, Synechocystis sp. PCC 6803
  CDS (1)..(1083): transl_table=11
atgctagataagtcgttttggcaaggtaaatccgtttttttaacgggccatacgggttttaaaggcagttggttaactctctggctcagtcagttgggagcaaaggtgtcgggctattcattagatcctctgacaaaccctaacttatgtgaactggctgaaattgctaaatgtttgcgctctgatactcgggctgatgtcaatgatttagcgaatcttcaaaaggcgatcgccgaagccaggccggagattgtctttcaccttgcagcccagcctctagtgcgccgtagctatcgtgatccagtcggcacttttgccactaacgtgatgggaactgcccaccttcttgaggcgttgcgggcctctgactcagtgcgagtggtggtgattgtgactaccgataaggtttatcgcaatgttgaatggtgttggccataccgagaagatgatcaactgggaggtcatgatccctatagtgcgagcaaggccgcctgcgaaatcgtagtagccagttatcgtgatgcctttcttcgagaacaaggagtggccgtggccagcgcccgggccggcaatgtcatcggagggggagattggtcagaggatcgtctcattcctgatgttgtccgcgccctagatgcaaaaacgatggtcataatccgtcgtccccaagctattcgtccctggcaacatgtgttagagcctctagctggctatttattgttagctcaaaaactttggcattcaccagaattggcaggggcctataacctaggcccggaaacaaaagacgcagccactgtgcgtcaaatattagaatttgcttcgcgaatagaacccggcttgcaagtggaatatggcgatggcaatgaagggccccatgaggcgggttggttatccctcgagattgcaaaagcgcgaactttactgggatatcgtcctagttggggggtcgaggaggcagtacgacgcacaatgatctggtatcgttctcaacgacagggagaaagcccattaactctttgtcagacagaaattgaagaatatgaaaaggagctaatggctctgtcagaccttgctatctga

SEQ ID NO: 72940 - protein, 360 aa, Synechocystis sp. PCC 6803
MLDKSFWQGKSVFLTGHTGFKGSWLTLWLSQLGAKVSGYSLDPLTNPNLCELAEIAKCLRSDTRADVNDLANLQKAIAEARPEIVFHLAAQPLVRRSYRDPVGTFATNVMGTAHLLEALRASDSVRVVVIVTTDKVYRNVEWCWPYREDDQLGGHDPYSASKAACEIVVASYRDAFLREQGVAVASARAGNVIGGGDWSEDRLIPDVVRALDAKTMVIIRRPQAIRPWQHVLEPLAGYLLLAQKLWHSPELAGAYNLGPETKDAATVRQILEFASRIEPGLQVEYGDGNEGPHEAGWLSLEIAKARTLLGYRPSWGVEEAVRRTMIWYRSQRQGESPLTLCQTEIEEYEKELMALSDLAI

SEQ ID NO: 72941 - DNA, 1080 bp, Salmonella enterica subsp. enterica serovar Typhi str. CT18
  CDS (1)..(1080): transl_table=11
atgattgataaaaatttttggcaaggtaaacgtgtattcgttaccggccatactggctttaaaggaagctggctttcgctatggctgactgaaatgggtgcaattgtaaaaggctatgcacttgatgcgccaactgttccaagtttatttgagatagtgcgtcttaatgatcttatggaatctcatattggcgacattcgtgattttgaaaagctgcgcagttctattgcagaatttaagccagaaattgttttccatatggcagcccagcctttagtgcgcctatcttatgaacagccaatcgaaacatactcaacaaatgttatgggtactgtccatctgcttgaagcagttaagcaagtaggtaacataaaggcagtcgtaaatatcaccagtgataagtgctacgacaatcgtgagtgggtgtggggctatcgtgagaacgaacccatgggagggtacgatccatactctaatagtaaaggttgtgcagaattagtcgcgtctgcattccggaactcattcttcaatcctgcaaattatgagcaacatggcgttggtttggcgtctgtgagggctggtaatgtcataggtggaggcgattgggctaaagaccgtttaattcccgatattctgcgctcatttgaaaataaccagcaggttattattcgaaacccatattctatccgtccctggcagcatgtactggagcctctttctggttacattgtggtggcgcaacgcttgtatacagaaggtgctaagttttctgaaggatggaatttcggcccgcgtgatgaagatgcgaagacggtcgaatttattgttgacaagatggttacgctttggggtgatgatgcaagctggttactggatggtgagaatcatcctcatgaggcacattacctgaaactggattgctctaaagcaaatatgcaattaggatggcatccgcgttggggattgactgaaacacttagtcgcatcgtaaaatggcataaagcatggattcgcggcgaagatatgttgatttgttcaaagcgtgaaatcagcgactatatgtctgcaactactcgttaa

SEQ ID NO: 72942 - protein, 359 aa, Salmonella enterica subsp. enterica serovar Typhi str. CT18
MIDKNFWQGKRVFVTGHTGFKGSWLSLWLTEMGAIVKGYALDAPTVPSLFEIVRLNDLMESHIGDIRDFEKLRSSIAEFKPEIVFHMAAQPLVRLSYEQPIETYSTNVMGTVHLLEAVKQVGNIKAVVNITSDKCYDNREWVWGYRENEPMGGYDPYSNSKGCAELVASAFRNSFFNPANYEQHGVGLASVRAGNVIGGGDWAKDRLIPDILRSFENNQQVIIRNPYSIRPWQHVLEPLSGYIVVAQRLYTEGAKFSEGWNFGPRDEDAKTVEFIVDKMVTLWGDDASWLLDGENHPHEAHYLKLDCSKANMQLGWHPRWGLTETLSRIVKWHKAWIRGEDMLICSKREISDYMSATTR

SEQ ID NO: 72943 - DNA, 1077 bp, Bradyrhizobium japonicum USDA 110
  CDS (1)..(1077): transl_table=11
gtggaagcactggccatgaacgccactttctggacggggaagcgcgttctcgtcaccgggcacaccggcttcaaaggcggctggatggtggcgtggctacgccatctcggcgccgaggtcgcgggtctcgcgctgccgccgtcgacgacccccaacctgttcgacctggcgcagactgcacgggacaccgtatcggtcttcgctgatatccgcgatccactcgcggtcaaggcggtgttcgaccgattccagcccgagatcgtgtttcatatggcggcgcaggcgatcgtgcgggcgtcctatgacgatccggtcggcacctatgcgaccaacgtcatgggcaccgtgcacgtcttcgaggcggtgcggacctccggcgtgcgcgtggtggtcaacgtcaccagcgacaaatgctacgataacaaggaatgggtgtggggctaccgcgagaccgatccgctcggcggcaaggatccctattccagcagcaaggcctgcgcggaactggtcacggcggcgtatcggtcctcgttcttcagcggaactcaccggatcggcttcgccagcgcccgcgccggcaatgtgatcggtggcggcgactgggcgcaggatcgtctcgtccccgatgtgatcgccgcgatccgcaacgggcagccggtgccggtccgcaatcccgatgcggtgcggccctggcagcacgtgctcgagccgctgtcgggctacattctgctcgccgagcatctgtggcgcgatccggctgcattctccagcgaatggaattttggccccgacgccgatagcgtgcgcacggtgcgctggctggtcgatcgcctcgcgctgttgtggggcgttccgtcgcagcagatgccgcagccgggacagcatccgcacgaggcgcggctgctgtcgctggacagctccaaggcgcgggctcatctcggctgggcgccgcgttggggcctcgatcgtgccgcgtccgccgtggtggagtggtacaaggcgttcgagcagggcgccgcggtcaggccagtgatggttgaccagatcgacgcattcatgaacaccaggctgaactag

SEQ ID NO: 72944 - protein, 358 aa, Bradyrhizobium japonicum USDA 110
MEALAMNATFWTGKRVLVTGHTGFKGGWMVAWLRHLGAEVAGLALPPSTTPNLFDLAQTARDTVSVFADIRDPLAVKAVFDRFQPEIVFHMAAQAIVRASYDDPVGTYATNVMGTVHVFEAVRTSGVRVVVNVTSDKCYDNKEWVWGYRETDPLGGKDPYSSSKACAELVTAAYRSSFFSGTHRIGFASARAGNVIGGGDWAQDRLVPDVIAAIRNGQPVPVRNPDAVRPWQHVLEPLSGYILLAEHLWRDPAAFSSEWNFGPDADSVRTVRWLVDRLALLWGVPSQQMPQPGQHPHEARLLSLDSSKARAHLGWAPRWGLDRAASAVVEWYKAFEQGAAVRPVMVDQIDAFMNTRLN

SEQ ID NO: 72945 - DNA, 1089 bp, Bacillus cereus ATCC 14579
  CDS (1)..(1089): transl_table=11
ttgttaaaccaaaactttaataatgctttttacggaaaaacaattttaattactggacatactggttttaaaggttcttggttatccctatggttgaatgaattaggtgctactgtaatcggatattcattagatcctaaaaataagaatgataactttaacattactaaccttcaaaataatataattgatattcgtggagacattagagattttaataaattaaataaggtttttacagattataaacctgaaattgtattccatttagctgcccaacctctagttaagtattcatatgaatatcctagagaaacatacgaggtaaacgttgtaggaactatgaatgtactagaggcaattcgattacatgaatcagctaaaataggaattatggtgacaagtgacaagtgctatgaaaataaagaatggccttggggttatcgtgaaattgaccctatgggcggccatgacatatatagctcaagcaaaggatgctgcgaacttttaatttcttcctatcgaaattcttacttttcagtagaaaacttttctcaacacaagaaaataattgcaagcgttcgagctggtaatgtaattggtggtggtgattggtcaatagatagaattattcctgattgtatacgagcattagaatcaaacaaaaacattattattagaaaccctactgctattagaccctggcaacatgtactagaacccttaagcgggtatttactccttacagaaaaaattataaataatggtatcctttattcaggagcatggaacttcgggccatccctaagcaatattgtttcagtagaaaaattagtgaccagtttactagatatttggggctgcggggattggacagcagaaaatatagatccaataaattttcatgaagcaaatttactaaaccttgacattagcaaagcaaaattcaatcttaattggcagccaaaatggtccctacaacagactttagaaaatacaatagaatggtataaacattataattcttacaccagttctgagatgagaaatctatgtattagccaaatcaaacaatattgcatgctttga

SEQ ID NO: 72946 - protein, 362 aa, Bacillus cereus ATCC 14579
MLNQNFNNAFYGKTILITGHTGFKGSWLSLWLNELGATVIGYSLDPKNKNDNFNITNLQNNIIDIRGDIRDFNKLNKVFTDYKPEIVFHLAAQPLVKYSYEYPRETYEVNVVGTMNVLEAIRLHESAKIGIMVTSDKCYENKEWPWGYREIDPMGGHDIYSSSKGCCELLISSYRNSYFSVENFSQHKKIIASVRAGNVIGGGDWSIDRIIPDCIRALESNKNIIIRNPTAIRPWQHVLEPLSGYLLLTEKIINNGILYSGAWNFGPSLSNIVSVEKLVTSLLDIWGCGDWTAENIDPINFHEANLLNLDISKAKFNLNWQPKWSLQQTLENTIEWYKHYNSYTSSEMRNLCISQIKQYCML

SEQ ID NO: 72947 - DNA, 1047 bp, Chromobacterium violaceum ATCC 12472
  CDS (1)..(1047): transl_table=11
gtgaatccggccttctggcgcgggcgcaaggtattcctgaccggccacactggcttcaagggcggctggctcagcctgtggctggccgacatgggggccgaggtgcacggctactcgctgccgccggagcagtcgccggcgctattcgaggccgccggcgtcggcggccgcaccatgggtatgctggccgatatccgcgacgcggcggctctggccgacgcgatgcgctcctgtcgcccctccatcgttttccatctggcggcgcagcctctggtccggcacagctacgccgatccgctgggcactttcacgaccaatgtgatgggcaccgccaacctgctggacgcggcgcgccattgtccgggcgtggaggccgtagtggccgtcaccaccgacaagtgctacgaaaaccatgaatggccgtgggcctaccgcgagagcgacgcgctgggcggccacgatccctacagcagcagcaaggcctgcgccgagctggtgtgcgccgcttaccggcgctcctatcccggcatggcccccatcgccaccgcccgcgccggcaatgtgataggcggcggcgactggtcggccaaccggctggtgcccgacttgctgcaagccttctccgagaaccgctcgctggcgatacgcagcccggacgccgtccgtccctggcagcacgtgctggagtcgctggctggttacctgcggctggccgagcgcctggcgcaggggcaggatgatgccgcgtcggcctggaatttcggccccgccgacgacagcaatcgtccggtgtcctggatcgccgacacgctggcccggcaatggggcggcgacgcccgctggcaccgcgacggcggcgaccatccgcacgaggcgcagaccctgcggctggacagcgccaagtcccgccagcggctgggctggtcgccgcgctggagcctggagcaggccttgtcggccacgctggactggcatcgcgcctggctgcgcggcgaggacatgcaggccttcaccttaaagcagatctcagcctatacgcgcggctga

SEQ ID NO: 72948 - protein, 348 aa, Chromobacterium violaceum ATCC 12472
MNPAFWRGRKVFLTGHTGFKGGWLSLWLADMGAEVHGYSLPPEQSPALFEAAGVGGRTMGMLADIRDAAALADAMRSCRPSIVFHLAAQPLVRHSYADPLGTFTTNVMGTANLLDAARHCPGVEAVVAVTTDKCYENHEWPWAYRESDALGGHDPYSSSKACAELVCAAYRRSYPGMAPIATARAGNVIGGGDWSANRLVPDLLQAFSENRSLAIRSPDAVRPWQHVLESLAGYLRLAERLAQGQDDAASAWNFGPADDSNRPVSWIADTLARQWGGDARWHRDGGDHPHEAQTLRLDSAKSRQRLGWSPRWSLEQALSATLDWHRAWLRGEDMQAFTLKQISAYTRG

SEQ ID NO: 72949 - DNA, 1095 bp, Rhodopseudomonas palustris CGA009
  CDS (1)..(1095): transl_table=11
atgatccagccggcgttctggcgcggaaagcgagtattcctgacgggtcacaccggcttcaagggaagctggctgtctatatggttcgccgaactcggcgcggatgtggtcggttttgcactcccgccaccaacggagccgagcttattcgaagttgccggcctcgctagacgcatgaattcgatcatcggcgacgtccgcaatgctgatgccctgtgctcagccatgcaagaagcgcgacctgagatcgtcattcatatggcagctcagccgctcgtccgactctcttaccatcagcccgtcgagacatacgcaaccaatgtcatgggccttgtccatgtcttcgaggcggtacgcaaatgtcaaagcgtgcgtgcggtcgtaaatgtgacgagcgacaagtgctacgagaataaggagtgggtatggggttatcgcgaatctgagccgatgggaggctacgacccctatagcagcagcaagggctgcgccgaattggtaactacagcttatcgcaattcgttcttcaatcctgagaattatcagacgcacggcgtcgccatcgcgagcgcccgcgctggcaacgtgatcggtggtggggactgggcgccggatcgtcttattccaaacatcatgcgtgcgatcgaaaccggcatcccggttcaaattcgcaatcccgccgctatccggccatggcagcatgttctcgaaccgctgggcggatacctgtgccttgcgaaaaagctgtatgaagccggcccggctttcgtgggcggctggaatttcgggcccgcagattccgacgccaagcccgtgcaatggatcgttgatcgcatgacccggatgtggggtaaaggcgcgagttggcaggaagtcacggatcgcactgcgccgcacgaagctcactatctcaagttggactgttcgaaagcgcagtcgttgctcggctggaaaccagcctggaacttggaacgtgcgttagagaagatcatcgattggcaccactcttctttacaaggcgcggaccttcatgcaaaaactctcggtcaaatccgtgattatcaggccgacttcttcaaaaccgttgccccgtag

SEQ ID NO: 72950 - protein, 364 aa, Rhodopseudomonas palustris CGA009
MIQPAFWRGKRVFLTGHTGFKGSWLSIWFAELGADVVGFALPPPTEPSLFEVAGLARRMNSIIGDVRNADALCSAMQEARPEIVIHMAAQPLVRLSYHQPVETYATNVMGLVHVFEAVRKCQSVRAVVNVTSDKCYENKEWVWGYRESEPMGGYDPYSSSKGCAELVTTAYRNSFFNPENYQTHGVAIASARAGNVIGGGDWAPDRLIPNIMRAIETGIPVQIRNPAAIRPWQHVLEPLGGYLCLAKKLYEAGPAFVGGWNFGPADSDAKPVQWIVDRMTRMWGKGASWQEVTDRTAPHEAHYLKLDCSKAQSLLGWKPAWNLERALEKIIDWHHSSLQGADLHAKTLGQIRDYQADFFKTVAP

SEQ ID NO: 72951 - DNA, 1026 bp, Bdellovibrio bacteriovorus HD100
  CDS (1)..(1026): transl_table=11
gtgactaatttctggaacggcaaaagagttttcgtcacctgccccacgggttttctgggggcgtgggtggtgcagactttgcttgattcccaagctcaggtgtttggttttggtgaaacagccaccacatctccgaatctttttgatctgaaaaacctgggccagaaaatctcgatgacctacggggacctgcgggatgagtccgcattgcgcgaggctttgcaatttaccgaagctgatgtggttctgcatctgggcgaaagtggcctgatttcagatcttggcaaaagacctctggaaacctttgccaaagcggcgttgggaacggcgactttgatggagctgatgcgggaaacggcctcggttcgttcgttggtggttgttagttctgacaaggtctatgcacgaaaaacatccggcgaagagctggttgaaacagatgcggtggcgccatcagcgattttgcccacggccaagctgtgtgccgagatgatcgcactatcttatcgtcagagcttctttgctcctgaaaaatacaacaagcataaaattgccattgccacggcccggatgggttctgccatcggaggcggggacttcaccgaacacgcattgattccgcaggctgtgcaggcctttgttgcggggaatagttttgaattgaagaaccctcagtccgtgcgcccgtggattcacgtgctggatcaggtggcgggtcttttgagtcttgccgaagctttgtttgagcgcgggccgaagctggcgccgacctataattttgcggcgaaagagactaacacagtcggcgaagttgcgcaagctttggctcgttattggggagaaaatgcccgggtgaatttgggcgaggggtcgaagtcctctttgtctgttcatgcgaatttggattcaaagctcgctcagagcgatctgaactggaaagttcaaagaaacctcacagatgctctgaaagaaacacttcagtggtataaagaattttattcttcaaggacttctgctaccttgtag

SEQ ID NO: 72952 - protein, 341 aa, Bdellovibrio bacteriovorus HD100
MTNFWNGKRVFVTCPTGFLGAWVVQTLLDSQAQVFGFGETATTSPNLFDLKNLGQKISMTYGDLRDESALREALQFTEADVVLHLGESGLISDLGKRPLETFAKAALGTATLMELMRETASVRSLVVVSSDKVYARKTSGEELVETDAVAPSAILPTAKLCAEMIALSYRQSFFAPEKYNKHKIAIATARMGSAIGGGDFTEHALIPQAVQAFVAGNSFELKNPQSVRPWIHVLDQVAGLLSLAEALFERGPKLAPTYNFAAKETNTVGEVAQALARYWGENARVNLGEGSKSSLSVHANLDSKLAQSDLNWKVQRNLTDALKETLQWYKEFYSSRTSATL

SEQ ID NO: 72953 - DNA, 1143 bp, Yersinia pestis biovar Microtus str. 91001
  CDS (1)..(1143): transl_table=11
gtgacaagatctatctgcatgaactatgggaagaaggcagggcaccttggaaggtatgggaataacaaaatgattaataatagtttctggcaaggtaaacgggtttttgtaacaggccatactgggtttaaaggtggctggttgagtttatggttgcaaaccatgggggcaacggtaaaaggttactctttgcccccccccacggtgcctagcctatttgagaccgcacgagttgccgacgggatgcaatcggaaatcggtgatattcgtgatcaaaacaaattattagaatcaatccgcgaattccaaccagagattgttttccacatggctgctcagccactggtccgtctatcctattccgagcctgttgaaacctactcgacgaatgttatgggtaccgtttatttactggaagctattcgccatgttggtggcgtcaaagcggtggtcaatatcaccagtgataaatgctacgataataaagagtggatctggggctatcgcgaaaatgaagcgatgggggggtatgatccttactccaacagtaaaggttgtgcggaattagtgacgtcatcctaccgtaattcgttcttcaatccagcgaactatggccagcatggcactgccgtagcgacagtgcgtgcgggtaatgttatcggtggtggcgattgggcattggatcgcatcgttccagatattcttcgggcgtttgaacagtcccaaccagtgattattcgcaacccacatgccattcgcccatggcagcatgtgttggagcctttgtcgggttatttgctgttggcacagaagttatatactgacggtgctgaatatgccgaaggttggaactttggtcctaacgatgctgatgctactccagtaaaaaacattgttgaacaaatggtgaaatattggggagagggtgcaagctggcaattagatggcaatgctcaccctcatgaagctcattatctgaaactggattgttcaaaagctaaaatgcaacttggctggcatcctcgctggaacttgaatactacgctcgaatatattgtgggctggcacaagaactggttatcaggcacagatatgcatgaatacagtattactgaaattaataattacatgaacactaaatga

SEQ ID NO: 72954 - protein, 380 aa, Yersinia pestis biovar Microtus str. 91001
MTRSICMNYGKKAGHLGRYGNNKMINNSFWQGKRVFVTGHTGFKGGWLSLWLQTMGATVKGYSLPPPTVPSLFETARVADGMQSEIGDIRDQNKLLESIREFQPEIVFHMAAQPLVRLSYSEPVETYSTNVMGTVYLLEAIRHVGGVKAVVNITSDKCYDNKEWIWGYRENEAMGGYDPYSNSKGCAELVTSSYRNSFFNPANYGQHGTAVATVRAGNVIGGGDWALDRIVPDILRAFEQSQPVIIRNPHAIRPWQHVLEPLSGYLLLAQKLYTDGAEYAEGWNFGPNDADATPVKNIVEQMVKYWGEGASWQLDGNAHPHEAHYLKLDCSKAKMQLGWHPRWNLNTTLEYIVGWHKNWLSGTDMHEYSITEINNYMNTK

SEQ ID NO: 72955 - DNA, 1083 bp, Prochlorococcus marinus str. MIT 9515
  CDS (1)..(1083): transl_table=11
atggtaaatataaacttagatttttggaaggacaagaaagtaatcattactggacatactggtttcaaaggaagttggctgcttatttggcttattacacttggtgctgaagtttatggaatatctatttcagaaggagaagaaagtaacttatttaattctataaaaagaaatatatctaataaatttgatcataaattaatagacattagagatttaggaaaagtctctaacgctatctctcaaatcaagccagatataatagttcatatggctgctcaagcattagtacaagaaagttataaagatccgataacaacttggtctacaaatcttatgggtaccatcaatttattagaaagcgttagcaaaattaagaatcattgcgctttagtttgcgtcacaacagacaaagtttacgaaaacaaaaattggtgttatggatatagagagaatgataacttaggtggtgcagatccttatagtgcaagcaaagcggctgcagaaatagctattaaaagttggagaaaaagttattgtggagaaaataatttcgaaatatctaaccttggaattgcgacagcaagagcaggaaatgttattgggggtggagactatgctgaaaatagattaattcctgattgttatagagcatatgtcaaagaaaatataattaaagtgagaaatcctaattcaattagaccatggcaatttgtacttgaaccattgtacggttaccttttattagctgaaagactgtatctagatcctaaaaactattcatcagaatataattttggtccgaataatgacagtaacaagactgtcttagaagttgttaagcacatatcttcttgttggaaagttagttatgctgttcaacaggaaaatgatttttttcaagaagcaaatatattaaatttagatgtatctaaatcaaaacaagttctgcaatgggaacctatatgggactttgaacagtccttaaataagacagtaaattggtataaaaatataaagttaggaggagatccatataaagaatgcttgaataatataaattcttttcaaactgaaaattaa

SEQ ID NO: 72956 - protein, 360 aa, Prochlorococcus marinus str. MIT 9515
MVNINLDFWKDKKVIITGHTGFKGSWLLIWLITLGAEVYGISISEGEESNLFNSIKRNISNKFDHKLIDIRDLGKVSNAISQIKPDIIVHMAAQALVQESYKDPITTWSTNLMGTINLLESVSKIKNHCALVCVTTDKVYENKNWCYGYRENDNLGGADPYSASKAAAEIAIKSWRKSYCGENNFEISNLGIATARAGNVIGGGDYAENRLIPDCYRAYVKENIIKVRNPNSIRPWQFVLEPLYGYLLLAERLYLDPKNYSSEYNFGPNNDSNKTVLEVVKHISSCWKVSYAVQQENDFFQEANILNLDVSKSKQVLQWEPIWDFEQSLNKTVNWYKNIKLGGDPYKECLNNINSFQTEN

SEQ ID NO: 72957 - DNA, 1098 bp, Prochlorococcus marinus str. MIT 9303
  CDS (1)..(1098): transl_table=11
atggaaaacatggtgatggctgagagctggaatccagatttttggtgtggcaggcgcgtctggctcagtggccacacaggctttaaaggcagctggttggctctttggttgctgcattggggagcagttgtggaaggctatgcccttgatccagaccaggctggtggaccctccttattcgacagccttgagatcgcggccgatctgtcacgtgatgagcgcgctgatttggcgcaggctgatcatctagtcacgcggctgcgcgcctttcagcccgaggtggtgtttcatcttgctgcccagccgcttgtgaccagaagttaccgagaacctttgcagacgtggaataccaacgtgattggtacctgccatgtgctcgaggctttgcgacaattggatcatccctgtgtgtcggtgatgatcaccaccgacaaggtctacgacaatcaagagtgggagtatggctatcgggagaatgatcccctcggaggtcatgatccttacagcagtagtaaggcagcagcagaacttgcgattgcgagttggcgagcaagtttttgtggtctcttgccccatcaagtgccaaatttgaagctggtttcagcgcgtgcaggcaatgtgattggcggtggcgattgggctgaaaatcgcattgttcctgatgccatacgtgctctgatcaaggcagagccaattgtcgtgcgtgcgcctgaatcgacaaggccgtggcagcatgtgcttgagcctctgggtggctatctcgccttggctgagcagctgcacgagaatcccaatcttgcgaccgccttcaattttggtccacaacgaagcgccaaccggccagtggcagcccttgtcgaagaaatcctcagccattggcctggatcatggcttgatcaatccgatcccaaggccaaacatgaagctggtcgcctagatctaaccaccgatcgagcattccatcagcttggttggagccctcgttggagttttgaggtcacgattgcggaaacggtgaattggtatcgccgctttcatgctggagaagatgcgcgccaattgtgccttgaacagatcgatcgctacgtgaagggctga

SEQ ID NO: 72958 - protein, 365 aa, Prochlorococcus marinus str. MIT 9303
MENMVMAESWNPDFWCGRRVWLSGHTGFKGSWLALWLLHWGAVVEGYALDPDQAGGPSLFDSLEIAADLSRDERADLAQADHLVTRLRAFQPEVVFHLAAQPLVTRSYREPLQTWNTNVIGTCHVLEALRQLDHPCVSVMITTDKVYDNQEWEYGYRENDPLGGHDPYSSSKAAAELAIASWRASFCGLLPHQVPNLKLVSARAGNVIGGGDWAENRIVPDAIRALIKAEPIVVRAPESTRPWQHVLEPLGGYLALAEQLHENPNLATAFNFGPQRSANRPVAALVEEILSHWPGSWLDQSDPKAKHEAGRLDLTTDRAFHQLGWSPRWSFEVTIAETVNWYRRFHAGEDARQLCLEQIDRYVKG

SEQ ID NO: 72959 - DNA, 1140 bp, Clostridium thermocellum ATCC 27405
  CDS (1)..(1140): transl_table=11
atgaaaaatttttataaaaacaaaagagtgcttataacaggtcataccggttttaaaggttcatggttatccgagatattgctgcaatttggtgccgaggtttgcggatatgcactggaatcaaaagaaagctcggatttatatttaaatctgaagctgcacaaaaacatgaactcatatattggcgacattagaaactatgacaaattaaaaaaagtattcgatacattcaaacctgagattgtttttcatttggctgcgcagcctattgtgagggaatcgtataaaaatcctttatatacctatgaaaccaatgtcatgggaacagtcaatctgctcgaagcagtaagacactgcagttcagtcaggtccgtggttaatgtaacaaccgataaagtatataaaaatataaatgttaacaaaggatacactgaaacagactatttgtgtggacaagaaccctattcaaattccaagtcatgttcggaattggtaacctacagctataaaaaatctttctttgatactgatgattctccggctgtttccactgccagagcaggaaatgtcattggcgcgggagatttttcaaaaaacagaattattccggattgtgtaagagcagcattcagcaggaacaaaatagagatcagaaatccctattcaataaggccgtatcagtatgtaatggattgcttgtacgggtatctgcttattggaatgaagcaatactgcgacagaagtctggcgggagcatacaatttcggacctaaagaagatgattgcaaaaccacaatagaaatcgtggataaattctgtcatgtctggggtgacgggttggactattatacaaaaccggatgattcagtatatgaaagtcagatattgatgctggacagtagtaagtccaacaagttattaaattggaatcctcaatatgatatagatcatgccatgcataagaccgtagaattgtataaactgatttatgaaaagaattttgacaaatatgcttgttcacatatagaggattttttcagcggagtatcagcttttaaaaacaacagcccattatccatctctgcaaaaaaatccgcaaaaaacaattctctccatgaaaatcaaatttgtgcaatgtaa

SEQ ID NO: 72960 - protein, 379 aa, Clostridium thermocellum ATCC 27405
MKNFYKNKRVLITGHTGFKGSWLSEILLQFGAEVCGYALESKESSDLYLNLKLHKNMNSYIGDIRNYDKLKKVFDTFKPEIVFHLAAQPIVRESYKNPLYTYETNVMGTVNLLEAVRHCSSVRSVVNVTTDKVYKNINVNKGYTETDYLCGQEPYSNSKSCSELVTYSYKKSFFDTDDSPAVSTARAGNVIGAGDFSKNRIIPDCVRAAFSRNKIEIRNPYSIRPYQYVMDCLYGYLLIGMKQYCDRSLAGAYNFGPKEDDCKTTIEIVDKFCHVWGDGLDYYTKPDDSVYESQILMLDSSKSNKLLNWNPQYDIDHAMHKTVELYKLIYEKNFDKYACSHIEDFFSGVSAFKNNSPLSISAKKSAKNNSLHENQICAM

SEQ ID NO: 72961 - DNA, 1092 bp, Leptospira interrogans serovar Copenhageni str. Fiocruz L1-130
  CDS (1)..(1092): transl_table=11
atgtttcaaaatatctataaaaataaaaaggttctggtcactggacataccggtttcaaagggtcttggttagttatttggttacagtctttaggtgcggaagtagcaggattttcacttggacttccaacgtcgccgaaccattttgaattgctcaatttagataagaagattaaagattatcgaggagacattcgggatcgagcttcgctttctcaagcaatagatgaatttaaacctcaagttatttttcatatggctgcacaagcattagtaagaaaatcttaccaagatccggttgctacttttgaaatcaacattatggggatgatcaatttactggatgttatccgtactaaatcgtttgtagaagccacgattttgattactagtgataaagcatacagaaatgacgagtggtgttggggttatcgtgagacagatgttttaggtggtcacgatccttacagcagttctaaaagttgtgcggatttaattgcacaatcctattattattcttttctaaaagatacaaaaacaaaaattgcaattacaagagctggtaacgtgatcggtggcggagattgggctgcagatagaattgttccggattgtattcgggcttggggtggtaacgaatctgttacgattcgcagtcctttagcgactcgtccttggcagcatgtattagaacctttgagcggctatttattattaggtgaaaaattatacattggtcaagaaggattggtcggagaggcatttaacttcggtccagatgcaagtgttaatcaaactgttttggaattattaaatgcaatagctgaaagatggcctggggttcaatgggaaattccaaaaggatatgaaggtggaggtagggaagccaatcttctcaaactttcttgtgacaaagctttatatcatttaaaatggaagcccgttttaggtttttccgagacggttgactttacggttaattggtatagaaattggattgaaaaaaaagaaaacgtttatgatttcactctttctcaaattcgtatttattgtgaactagcttcaaaaaagaattacatttggactcaataa

SEQ ID NO: 72962 - protein, 363 aa, Leptospira interrogans serovar Copenhageni str. Fiocruz L1-130
MFQNIYKNKKVLVTGHTGFKGSWLVIWLQSLGAEVAGFSLGLPTSPNHFELLNLDKKIKDYRGDIRDRASLSQAIDEFKPQVIFHMAAQALVRKSYQDPVATFEINIMGMINLLDVIRTKSFVEATILITSDKAYRNDEWCWGYRETDVLGGHDPYSSSKSCADLIAQSYYYSFLKDTKTKIAITRAGNVIGGGDWAADRIVPDCIRAWGGNESVTIRSPLATRPWQHVLEPLSGYLLLGEKLYIGQEGLVGEAFNFGPDASVNQTVLELLNAIAERWPGVQWEIPKGYEGGGREANLLKLSCDKALYHLKWKPVLGFSETVDFTVNWYRNWIEKKENVYDFTLSQIRIYCELASKKNYIWTQ

SEQ ID NO: 72963 - DNA, 1107 bp, Desulfovibrio vulgaris subsp. vulgaris str. Hildenborough
  CDS (1)..(1107): transl_table=11
atgttcggtgacatctatcgcggccgtcgcgtcctcgtgaccgggcacaccggtttcaaggggtcgtggctcacggcatggctgctgcacctcggggccgaggtggcgggcttctcgctggacgtgcccacctcgcccgccaacttcgaggtactcgacctctctggtcgcatctccgacctgcgtggcgacatccgcgaccgcaaggccatgtgcgaggccatcgagggcttcaagcccgacgtggtgttccaccttgcggcgcaggcgctggtacgcaagtcgtacgacgacccggcgggcaccatcgaggccaacgccatgggtacgctcaacgtgctcgaggccgtgcgctgcacgccgtccgttcaggcggtggtgtgcatcacctccgacaagtgctaccgcaacgacgagtgggtgtggggctaccgcgagaccgaccatctgggtggcgaagacccgtactccgcctccaagggctgcgcggaaatcatcgcccagtcgtacttcaagtcgttcttcaagaatggcccccgctgcgccaccacgcgcgcgggcaacgtcatcggcggcggcgactgggctgccgaccgcatcgtgcccgactgcgcccgcgcatggtcgcaggggcgccccgtgcccatccgcagcccgtgggccacgcgcccgtggcagcatgtgctcgaaccgctttccggctacctgtggctgggggcgaagctgctggtcgacgccaaggggcccttccccctttcgggcgaggcctacaacttcggcccggctgcggacgtgaacaacaccgtggccgaggtggtggacgccctcgccccctactggcagggcttctccagcgagatggacagggccgggcaggcgggcatgaaggaatgcacgctgctcaagctgtgctgtgacaagtcgctggcctacctgcgctggcaggccacgctcacctttgccgagaccatacgcttcacggccgaatggtaccgcgccttctacgcacccacaggcggtgcgcaggacatgtacgccttcaccatgggccagatactcgagtacgcggacaaggcccgcgccaagggactggaatggacggcatag

SEQ ID NO: 72964 - protein, 368 aa, Desulfovibrio vulgaris subsp. vulgaris str. Hildenborough
MFGDIYRGRRVLVTGHTGFKGSWLTAWLLHLGAEVAGFSLDVPTSPANFEVLDLSGRISDLRGDIRDRKAMCEAIEGFKPDVVFHLAAQALVRKSYDDPAGTIEANAMGTLNVLEAVRCTPSVQAVVCITSDKCYRNDEWVWGYRETDHLGGEDPYSASKGCAEIIAQSYFKSFFKNGPRCATTRAGNVIGGGDWAADRIVPDCARAWSQGRPVPIRSPWATRPWQHVLEPLSGYLWLGAKLLVDAKGPFPLSGEAYNFGPAADVNNTVAEVVDALAPYWQGFSSEMDRAGQAGMKECTLLKLCCDKSLAYLRWQATLTFAETIRFTAEWYRAFYAPTGGAQDMYAFTMGQILEYADKARAKGLEWTA

SEQ ID NO: 72965 - DNA, 1107 bp, Erwinia carotovora subsp. atroseptica SCRI1043
  CDS (1)..(1107): transl_table=11
atgggagtaagcagcgtggtaaattcagcattttggcaaggaaaaaaagtcttcgtaacagggcatactggcttcaaaggtagttggttatgcctgtggctacagagcatgggggcagaagtaaaagggtatgcgttgcaaccgcctaccgagtcgtctatctaccaagccgcatgtgttgaagaagggatgtccagtgaaattggggatatccgtgattaccagaaaatggaagaaagtatcagagcatttggccctgaaattgttttccatatggcggctcagccgcttgtcaggctttcatacgatattcctgtcgatacttacgctacgaatgtcatgggtacggtacatttgctggaagcggtgcgtaaaatcggtggcgttaaagcggtagtcaatattaccagtgataaatgctacgaaaataaagagtgggtctggggatatcgtgagaacgagcccatgggcggttatgacccttacagtaacagcaaaggctgtgctgagttagttgccgctgcgtatcgacagtcatactttaatgctgataaatatcacgaacatggttgtgcgctggcttctgtcagagcaggtaatgtgatcggcggtggtgactgggccctcgatcgtcttattcccgatatccttaaggcgtttgaagagcaacgtcctgtcttgattcgcaatccgcacgcgatccgcccttggcagcatgtacttgagcccctgtctggatatctctgtgccgcgcaggcgctttatctaaacggtacagagtatgctgaggcttggaactttgggccgctagatgaagatgctcaaccggttcaatggattgttgagaagatggttggtgcgtggggcgacgatgcatcatggattctggatgatggtgaacacccccacgaggcacactatctgaagctagattgttccaaggctaaaatgcgtttgaattgggcaccagtatggcggcttggcgagacgctgaaccgcattgtcacgtggcacaaagcctggttagctggtgcggatatgcatcagattacgctaaatgaaatacatgattatatgaaaactcaaaacgataaaggtcactattga

SEQ ID NO: 72966 - protein, 368 aa, Erwinia carotovora subsp. atroseptica SCRI1043
MGVSSVVNSAFWQGKKVFVTGHTGFKGSWLCLWLQSMGAEVKGYALQPPTESSIYQAACVEEGMSSEIGDIRDYQKMEESIRAFGPEIVFHMAAQPLVRLSYDIPVDTYATNVMGTVHLLEAVRKIGGVKAVVNITSDKCYENKEWVWGYRENEPMGGYDPYSNSKGCAELVAAAYRQSYFNADKYHEHGCALASVRAGNVIGGGDWALDRLIPDILKAFEEQRPVLIRNPHAIRPWQHVLEPLSGYLCAAQALYLNGTEYAEAWNFGPLDEDAQPVQWIVEKMVGAWGDDASWILDDGEHPHEAHYLKLDCSKAKMRLNWAPVWRLGETLNRIVTWHKAWLAGADMHQITLNEIHDYMKTQNDKGHY

SEQ ID NO: 72967 - DNA, 1074 bp, Yersinia pseudotuberculosis IP 32953
  CDS (1)..(1074): transl_table=11
atgattaataatagtttctggcaaggtaaacgggtttttgtaacaggccatactgggtttaaaggtggctggttgagtttatggttgcaaaccatgggggcaaaggtaaaaggttactctctgaccccccccacggtgcctagcctatttgagaccgcacgagttgccgacgggatgcaatcggaaatcggtgatattcgtgatcaaaacaaattattagaatcaatccgcgaattccaaccagagattgttttccacatggctgctcagccactggtccgtctatcctattccgagcctgttgaaacctactcgacgaatgttatgggtaccgtttatttactggaagctattcgccatgttggtggcgtcaaagcggtggtcaatatcaccagtgataaatgctacgataataaagagtggatctggggctatcgcgaaaatgaagcgatgggggggtatgatccttactccaacagtaaaggttgtgcggaattagtgacgtcatcctaccgtaattcgttcttcaatccagcgaactatggccagcatggcactgccgtagcgacagtgcgtgcgggtaatgtcatcggtggtggcgattgggcattggatcgcatcgttccagatattcttcgggcgtttgaacagtcccaaccagtgattattcgcaacccacatgccattcgcccatggcagcatgtgttggagcctttgtcgggttatttgctgttggcacagaagttatatactgacggtgctgaatatgccgaaggttggaactttggtcctaacgatgctgatgctactccagtaaaaaacattgttgaacaaatggtgaaatattggggagagggtgcaagctggcaattagatggcaatgctcaccctcatgaagctcattatctgaaactggattgttcaaaagctaaaatgcaacttggctggcatcctcgctggaacttgaatactacgctcgaatatattgtgggctggcacaagaactggttatcaggcacagatatgcatgaatacagtattactgaaattaataattacatgaacactaaatga

SEQ ID NO: 72968 - protein, 357 aa, Yersinia pseudotuberculosis IP 32953
MINNSFWQGKRVFVTGHTGFKGGWLSLWLQTMGAKVKGYSLTPPTVPSLFETARVADGMQSEIGDIRDQNKLLESIREFQPEIVFHMAAQPLVRLSYSEPVETYSTNVMGTVYLLEAIRHVGGVKAVVNITSDKCYDNKEWIWGYRENEAMGGYDPYSNSKGCAELVTSSYRNSFFNPANYGQHGTAVATVRAGNVIGGGDWALDRIVPDILRAFEQSQPVIIRNPHAIRPWQHVLEPLSGYLLLAQKLYTDGAEYAEGWNFGPNDADATPVKNIVEQMVKYWGEGASWQLDGNAHPHEAHYLKLDCSKAKMQLGWHPRWNLNTTLEYIVGWHKNWLSGTDMHEYSITEINNYMNTK

SEQ ID NO: 72969 - DNA, 1056 bp, Bacillus cereus E33L
  CDS (1)..(1056): transl_table=11
atggcttcatcatctttttggaataaaaaaaaagtatttattacgggacatactggatttaaaggttcctggctcacccttttcttaacttctttaggtgcagaagtagttggcttttcttctcatcccccatctattcctaacctttttgaacaaggtaacgtagcaaaagaatgcataacaattcatggcaacattacagattacgattctttattccacaccctaaaacaacataatcctgacatactatttcatttagcagcccagccaatcgtcaccacttcatataaaaatcctatcgaaacatttaaaacgaatgttttaggaactgtccacgtgttagaggcggcaaaacatatagaaagtatacgtggcatcattaatgttacaagtgataaatgttatgaaaatgacgggagcggtaaccaggcattcgtggaaagtgaccgactaggcggttttgacccttatagtgctagtaaagcttgcgctgaaatagtggcaacatcctatcataaatcattcttccgcacgaatactcagaaactcgcttcggttagagcaggtaacgtcatcggcggtggtgattgggcagaggaccgattattcccagatatcattcgtgcatatttacaagatgatacgttaactattagaaacaaaaatgctattcgcccgtggcaacacgtattagatcctttacacggctatatccttttagctgaaaaactttggacagacgctgaatatgcagaagcatggaatttcggcccgttgaacgaacctaacagaaccgttcatgatgtcattcaatctgtaataaaattatggaataaacaactaacaatcacttccccctctacaaacgctccttatgaatcgcctgttttaacactcgatagtacaaaagcagtaaataaactcaactggactcctaagttatcaacagataacgctatcgcttggactgttgattggtacaaacaatatgcatccggtgaaaatatagaatctttcacgaggcaacaaatcgatgcattcaaaaatttataa

SEQ ID NO: 72970 - protein, 351 aa, Bacillus cereus E33L
MASSSFWNKKKVFITGHTGFKGSWLTLFLTSLGAEVVGFSSHPPSIPNLFEQGNVAKECITIHGNITDYDSLFHTLKQHNPDILFHLAAQPIVTTSYKNPIETFKTNVLGTVHVLEAAKHIESIRGIINVTSDKCYENDGSGNQAFVESDRLGGFDPYSASKACAEIVATSYHKSFFRTNTQKLASVRAGNVIGGGDWAEDRLFPDIIRAYLQDDTLTIRNKNAIRPWQHVLDPLHGYILLAEKLWTDAEYAEAWNFGPLNEPNRTVHDVIQSVIKLWNKQLTITSPSTNAPYESPVLTLDSTKAVNKLNWTPKLSTDNAIAWTVDWYKQYASGENIESFTRQQIDAFKNL

SEQ ID NO: 72971 - DNA, 1074 bp, Burkholderia pseudomallei K96243
  CDS (1)..(1074): transl_table=11
atgcatgcgcccgacgctcgattctggcaggcgagacgcgtgctcgtgacgggccacacgggcttcaagggaagctggctgagcctgtggttgcagtcgctcggcgcgcaggttcacgggctcgcgctcgagccgccgtcgcgcccgtcgctgttcgaaacggcgcgcgtcgcccagcgcatgtccagcacgatcggcgacatacgcgactacgacgtcgttcggcgaacgatcgccgattgcaggccggaggtggtgatccatctggccgcccagccgctcgtgcgcgcgtcctatgcggatccgctgtcgacctacggcaccaacgtgatgggcacggccaatctgctggaggcgctgcgccgcgccggctgcgcgcgggcggtcgtcaacgtcaccaccgacaagtgctacgagaaccgggattggctctggggctatcgcgagaacgacgtgctcggcggccacgatccgtacagcagcagcaaggcgtgctcggagctcgtgagcagtgcgtaccggcgctcgtttttcgcgcagggcgcgacggcgctcgccagcgcgcgggccggcaacgtcatcggcggcggcgactgggccgcggagcggctcgtgcccgacgtgctggccgctttcgcgagcggccggccggcggtcattcgccatccgcatgcggtccggccgtggcagcacgtgctggattcgctgtcgggctacctgcgcctcgccgagcgtctgcatgccgatgggcaggcatgggccgaagcatggaatttcggccccgacgatgcgcaggcccgtacggtcgaatgggtggtgtcgcgaatggcccgcatctggggcggcgatgcgcgatggcatcccgattcggccgatcatcctcacgaggccgcgcaattgaagctcgacagctcgaaagcgaaggcgaggctcggctggcggccgcgctggagcctcgcgcgcgcgctcgaatgcacgatcgcgtggcaccgcgcatggctcgcccgcgaggacatgcgcgccgtatgcatcgaacagatcgcggaattcgacacttcgcccgacccgacctag

SEQ ID NO: 72972 - protein, 357 aa, Burkholderia pseudomallei K96243
MHAPDARFWQARRVLVTGHTGFKGSWLSLWLQSLGAQVHGLALEPPSRPSLFETARVAQRMSSTIGDIRDYDVVRRTIADCRPEVVIHLAAQPLVRASYADPLSTYGTNVMGTANLLEALRRAGCARAVVNVTTDKCYENRDWLWGYRENDVLGGHDPYSSSKACSELVSSAYRRSFFAQGATALASARAGNVIGGGDWAAERLVPDVLAAFASGRPAVIRHPHAVRPWQHVLDSLSGYLRLAERLHADGQAWAEAWNFGPDDAQARTVEWVVSRMARIWGGDARWHPDSADHPHEAAQLKLDSSKAKARLGWRPRWSLARALECTIAWHRAWLAREDMRAVCIEQIAEFDTSPDPT

SEQ ID NO: 72973 - DNA, 1059 bp, Azoarcus sp. EbN1
  CDS (1)..(1059): transl_table=11
atgatcctggtaaccggcggcgccggcttcatcggtgccaacttcgtgctcgactggctgggccagaccgacgaaccggtcgtcaatctcgatgcgctgacctacgccggcaaccgcgagaacctcgcttcgctggcgggcgacgcgcgccacgtgttcgtccacggcgacatctgcgaccgcgcgctgctcgaccgcctgctggccgaacatcacccgcgcgcgatcgtgcatttcgctgccgagagccacgtcgaccgctcgatccacgggccggcggcattcgtccgcaccaatgtcgaaggcacgttcaccctgctcgaggcggcgcgcgcgtactggtccgggctcgacggcgacgcgaaagcgatgttccgcttcctgcatgtgtcgaccgacgaagtgtacggctcgctcggccccgccgacccggccttcaccgagacgaaaggcttcgagccgaacagcccgtattccgcgagcaaggcggcttccgaccacctcgtgcgcgcctggcatcacacctacggcctgccggtcgtgacgacgaactgctcgaacaactacggtccataccagttccccgagaagctgatcccgctgatgatcgccaatgcgctcgccggcaagccgttgcccgtctatggcgacgggcagaacgtgcgcgactggctgtacgtcggcgaccattgcgcggcgatccgcgaagtgctcgcgcgcgggcgcgcaggcgagacttacaacgtcggcggctggaacgaaaaaccgaacctcgacatcgtgcatacggtgtgcacgctgctcgacgagctgcgccccgacgccgccggcccgcatgcgcgtctgatcacctatgtcgcggatcggcccggacacgaccggcgctacgcgatcgacgcgcgcaagatcgagcacgaactcggctggcggcccgtcgagacgttcgaatcgggcatccgcaagacgatcgcgtggtacctcgaacaccaggactgggtcgcgcacgtgcagagcggcgcgtaccgcgagtgggtcgaccgcaactatggccaacgatag

SEQ ID NO: 72974 - protein, 352 aa, Azoarcus sp. EbN1
MILVTGGAGFIGANFVLDWLGQTDEPVVNLDALTYAGNRENLASLAGDARHVFVHGDICDRALLDRLLAEHHPRAIVHFAAESHVDRSIHGPAAFVRTNVEGTFTLLEAARAYWSGLDGDAKAMFRFLHVSTDEVYGSLGPADPAFTETKGFEPNSPYSASKAASDHLVRAWHHTYGLPVVTTNCSNNYGPYQFPEKLIPLMIANALAGKPLPVYGDGQNVRDWLYVGDHCAAIREVLARGRAGETYNVGGWNEKPNLDIVHTVCTLLDELRPDAAGPHARLITYVADRPGHDRRYAIDARKIEHELGWRPVETFESGIRKTIAWYLEHQDWVAHVQSGAYREWVDRNYGQR

SEQ ID NO: 72975 - DNA, 1107 bp, Synechococcus elongatus PCC 6301
  CDS (1)..(1107): transl_table=11
atgaactctagcttttggcgcgatcgccaagtgctgatcacagggcatacgggctttaagggaagctggctaacgctttggttattgatgcaaggggctgatgtttgggggtatgccctacctccagaatccgagcgatcgctgtttacagccttggacttggcgaaccagcggcaagcgggttggggttactttcagtatcggctcggagagatgaatgatgctgaagctctgaggcagtgggtagaacaagcacaacctgaggtggtgtttcacctagcggctcaacctttagtccgtcgaagctatgccgatcccttgggaacttggcaaacgaatgttctcggtagcctgcaactgctcgaagccctaaaaagtttgcagcacccttgcgccatggtgatggtgacaacagataaggtttacgaaaatcgtgagtgggtctacggctatcgggagactgattgcttaggagggcatgatccctacagtgccagcaaagcagcgatggagttagccgtggctagttggcgatcgagcttttgtggggatgcggctcatcaaacgccgtatttagcgatcgcgacggcgcgggcaggcaatgtgattggcgggggagactgggcagtcgatcgcatcgtgccagatgcggttcggtctctatcagccggtgctgctattgctgttcgtaattcccactcaactcgaccttggcagcatgttttggaaccgctaggaggatatctactgttggcgcagcgactgcttggacatcagcagtctgcggagaaaacggtgaatccgtttgcgcgagcttttaactttggcccagcaatagagtccaatcgttctgtgaaagagctgattacgacagtgcttcagcattggccgggacagtggttcgaccaatccgatccaacagctccgcacgaggctgggctattgcatctcgtcagtgaccaagcacgtcagctcctgggctggcagcctcgctgggattttgaaacaaccgtcagcagaacgatccattggtatcgaccggtcatgatgacaggaggctcagcattggaggcttgtcttgaggaccttgctacttacgggcagtga

SEQ ID NO: 72976 - protein, 368 aa, Synechococcus elongatus PCC 6301
MNSSFWRDRQVLITGHTGFKGSWLTLWLLMQGADVWGYALPPESERSLFTALDLANQRQAGWGYFQYRLGEMNDAEALRQWVEQAQPEVVFHLAAQPLVRRSYADPLGTWQTNVLGSLQLLEALKSLQHPCAMVMVTTDKVYENREWVYGYRETDCLGGHDPYSASKAAMELAVASWRSSFCGDAAHQTPYLAIATARAGNVIGGGDWAVDRIVPDAVRSLSAGAAIAVRNSHSTRPWQHVLEPLGGYLLLAQRLLGHQQSAEKTVNPFARAFNFGPAIESNRSVKELITTVLQHWPGQWFDQSDPTAPHEAGLLHLVSDQARQLLGWQPRWDFETTVSRTIHWYRPVMMTGGSALEACLEDLATYGQ

SEQ ID NO: 72977 - DNA, 1080 bp, Bacteroides fragilis NCTC 9343
  CDS (1)..(1080): transl_table=11
atgagtatagatatatttaataacttttataaaggtaaacgagtacttgttactggtcataccggtttcaaaggttcatggctttcgatttggctgcacgaattgggtgctgaggtgataggtgtgggcttagaaccattcacagagcgagataattatgttctttccgacataggaaagaacataaaagctgatatccgtgctgatattcgtgatgggggacgtatgaaagccatttttaaagaatacgagcctgaacttgttttccatttagcagcccaaccactagtacggcttagttatgatattccggttgagacgtacgaaaccaatgttatgggaacaattaatgtccttgaagctatccgtgtaaccgatagtgtaaaagtgggggtgatgattaccactgataaatgttatgagaataaagagcaaatttggggatatcgggaaaatgaaccgatgggaggttatgatccttattcaagtagtaaaggggcagctgaaatagcgatagcctcttggcgtcgctcttttttccatcccgagcaatatgagaagcatggtaaaagcatcgccagtgtacgtgcaggtaatgtgattggtggtggtgattgggcattagatcgtattattccagactgtattaaggctttagaagccggcaaagaaatagagattaggagtcctaaagcgattcgtccatggcagcatgtacttgaacctttaagcggttatatgcttcttgccctaaggatgtggaaagagcctataaaatattgtgaaggttggaattttggcccgagagcagaatctatttccacagtatgggatgtggctactaaagtggtggaaaactatgggagtggtcaattgcgagatttatccgatcccaatactttgcatgaagctaaactactaatgttggatatttctaaagcaaaatttatgttggggtgggaatccagaatggatataaatcagacagtagcattgactgtagactggtacaaacgttaccaagaagaaagtgtctacagtatttgtgtaaatcaaatagcggattttgtttgtaaatga

SEQ ID NO: 72978 - protein, 359 aa, Bacteroides fragilis NCTC 9343
MSIDIFNNFYKGKRVLVTGHTGFKGSWLSIWLHELGAEVIGVGLEPFTERDNYVLSDIGKNIKADIRADIRDGGRMKAIFKEYEPELVFHLAAQPLVRLSYDIPVETYETNVMGTINVLEAIRVTDSVKVGVMITTDKCYENKEQIWGYRENEPMGGYDPYSSSKGAAEIAIASWRRSFFHPEQYEKHGKSIASVRAGNVIGGGDWALDRIIPDCIKALEAGKEIEIRSPKAIRPWQHVLEPLSGYMLLALRMWKEPIKYCEGWNFGPRAESISTVWDVATKVVENYGSGQLRDLSDPNTLHEAKLLMLDISKAKFMLGWESRMDINQTVALTVDWYKRYQEESVYSICVNQIADFVCK

SEQ ID NO: 72979 - DNA, 1086 bp, Pseudomonas fluorescens Pf-5
  CDS (1)..(1086): transl_table=11
atgaaggcgacagttactccggccttttggcaaggcaagaaagttttcctgaccggtcatacaggcttcaaaggcagctggctggcgctttggctacaaagcatgggagcacaagtacaaggctttgcattgatgccaccaacgacacctgcactgttcgatgtggctaatgttgttaaaggtatgcaatcttgcattggtgacattcgtgacttgcaggctatcacccacagcatggtgggcttcaatccagacgtgctgattcacatggcagcccaaccactggtgcgcttgtcttatcgtgaacccttagagacttacgccaccaatgtgatgggcaccttgcatgttcttgaagccgcccgcctttgcccaaacctgcgtgcgatagtcaacgtcaccaccgacaagtgctatgagaaccgggagtgggaatggggataccgcgaagatgagcccatgggaggacatgacccgtatagcaacagcaaaggctgcgtggaactgataaccgcctcttaccgtaattcattcttcaacaccccacaggcagcagcgctggcaagtgcccgagcgggaaacgttataggcggcggcgattgggcagaggatcgtctgatccccgacatcctgcgagcattcgagaaaggtcagcctgtaacagtacgcaatccccaggcaactcgtccctggcagcacgtacttgagcccttgagtgggtatctggtcctcgctgagcatctatggaagaacgggcaccagtttgctcagggctggaacttcggccccaaggatgaggatgctcggccagttgagtggatactcaactacatggtcgattcttggggagatggcgcccactggcaactggatcgcgactctcacccccatgaagcaaactacctaaagctggatatctccaaggcgcgtgctcggctgaattgggctccaacttggaacctggaaaaaacactttcacgtatcgtccaatggcaccgagccttcttaagtggcgcagacatacaagctcaatgcctcgacgaaattcacgcatacatgtcagccatgcatgccaccggcaactaa

SEQ ID NO: 72980 - protein, 361 aa, Pseudomonas fluorescens Pf-5
MKATVTPAFWQGKKVFLTGHTGFKGSWLALWLQSMGAQVQGFALMPPTTPALFDVANVVKGMQSCIGDIRDLQAITHSMVGFNPDVLIHMAAQPLVRLSYREPLETYATNVMGTLHVLEAARLCPNLRAIVNVTTDKCYENREWEWGYREDEPMGGHDPYSNSKGCVELITASYRNSFFNTPQAAALASARAGNVIGGGDWAEDRLIPDILRAFEKGQPVTVRNPQATRPWQHVLEPLSGYLVLAEHLWKNGHQFAQGWNFGPKDEDARPVEWILNYMVDSWGDGAHWQLDRDSHPHEANYLKLDISKARARLNWAPTWNLEKTLSRIVQWHRAFLSGADIQAQCLDEIHAYMSAMHATGN

SEQ ID NO: 72981 - DNA, 1083 bp, Pseudomonas syringae pv. phaseolicola 1448A
  CDS (1)..(1083): transl_table=11
atgacatccagactgaagttcgaagacagccttgctggaaaaaaggttttggtcaccggtcataccgggtttaccggagggtgggcatgtctttggctgaattctatcggtgctcaagttgcagggtattcgctcgctcctgagaccaaaccttctctttttgaagagataggtcttgaagacgatgtcaccagcgtgttgggtgatatttgtgattttgacaagctgctgcaggctgtcgaagccttccagccggatttgatcttgcatctcgccgctcaacccctcgttcgcaggtcttaccgcgagcccgtgcagacgttcatggtcaacgctcaagggactgcgcacgttcttgaagcggctcggctggtaaaaagtgttcgcggcgtgctctgtgtcacaacagacaaagtctataaaaacaacgaatgggcatggccgtaccgcgaaaacgacccactgggcggcaaagatccttacagtgcatccaaagccgctgcggaaatgattatccagagctatggcgcttcctaccccttctctcaagggctcggtcctgccatcgctaccgcacggggcggcaatataatcggcggcggggattggtctgaagaccgtcttattcctgacttcgttcgtgctgtgaacgaagggcaggtcatgacccttcgttaccctgatgccacacggccctggcagcatgttctggcactcgtgcacggttatctcgtcattcttgcagggctgctatctgaaaacccgggccgtgttgctaaagcctggaacctcgggcctcaggagctcaagcagtattcggtcagagatgtgctcgaactgatgagtgctgactggcagcgtccgaatctcgagttcatggacaacccattgcctgaggcaggcgcattggcgctggacagttcaatcgcgagaaatcaactgaactggattccggtgtggaacacggaagaagttgtggagaaaaccgcctcctggtaccgggatttctacgcccttccaggtagtgcccgggcaatcacactcgctcaaatcgatgggtggcgagcgggcattcaggaatga

SEQ ID NO: 72982 - protein, 360 aa, Pseudomonas syringae pv. phaseolicola 1448A
MTSRLKFEDSLAGKKVLVTGHTGFTGGWACLWLNSIGAQVAGYSLAPETKPSLFEEIGLEDDVTSVLGDICDFDKLLQAVEAFQPDLILHLAAQPLVRRSYREPVQTFMVNAQGTAHVLEAARLVKSVRGVLCVTTDKVYKNNEWAWPYRENDPLGGKDPYSASKAAAEMIIQSYGASYPFSQGLGPAIATARGGNIIGGGDWSEDRLIPDFVRAVNEGQVMTLRYPDATRPWQHVLALVHGYLVILAGLLSENPGRVAKAWNLGPQELKQYSVRDVLELMSADWQRPNLEFMDNPLPEAGALALDSSIARNQLNWIPVWNTEEVVEKTASWYRDFYALPGSARAITLAQIDGWRAGIQE

SEQ ID NO: 72983 - DNA, 1098 bp, Dechloromonas aromatica RCB
  CDS (1)..(1098): transl_table=11
atgaagcagttcggtgacttctaccgcgggcgccgggtcctgatcacgggacataccggcttcaagggatcctggctcgcactatggctgctgcaactgggcgccgaggtggcaggcttttcgattgacgtgccttccaatccttccaattttgaactgctgggcttgaaggagcgcttgcgccactacagcggcgacgtctgccagcttggccagctcgagcaggcgatcgatgaattccagccggagatcatttttcacctagctgcccaggccttggtgcggcgctcttaccaggatccgcgcggcactatcgagaccaacgtgatgggcatggtcaacgtcctggaactggtccgtagccgacctttcatcaggacagccgtcctgatcacgagcgacaaggcctatcgaaacgacgaatggtgctggggctatcgcgaaacggacgccctcggcggacatgatccctacagcggctccaagagctgcgccgacctagtggcgcaaacttacatccactcctatctgcgcagttccggcaagcgggtggcaattactcgcgccggcaacgtgatcggcggcggcgactgggccagcgatcgcatcgtgcccgactgcatccgcgcctggaccgagggcggttcagtagaagtgcgcagtccatccgccacccgcccctggcaacatgtgctcgagcctctgggagcctacctctggctcggagcctcgctgcagcgtgacgagcgcatcaatggcgaggccttcaatttcggtccggcggctcacgtcaaccagagcgtaggggagttgcttgacgccatggcccagcgctggccaggcgcccaatggaactcgcctgccaatgcgggccggcccgctcaaaccgaagccacgctgctgaagctctcctgcgacaaggcgcaggcctacctggactggcgcgcggtactcgatttcagcgacacggtggagctcaccgtcgactggtatcgaaactggtacgaagggaagcaggacattttcgcctatgcgctgcgccaggttgaggcctactgcgacctggccaaagtcaggggagcgaaatggctgacgtga

SEQ ID NO: 72984 - protein, 365 aa, Dechloromonas aromatica RCB
MKQFGDFYRGRRVLITGHTGFKGSWLALWLLQLGAEVAGFSIDVPSNPSNFELLGLKERLRHYSGDVCQLGQLEQAIDEFQPEIIFHLAAQALVRRSYQDPRGTIETNVMGMVNVLELVRSRPFIRTAVLITSDKAYRNDEWCWGYRETDALGGHDPYSGSKSCADLVAQTYIHSYLRSSGKRVAITRAGNVIGGGDWASDRIVPDCIRAWTEGGSVEVRSPSATRPWQHVLEPLGAYLWLGASLQRDERINGEAFNFGPAAHVNQSVGELLDAMAQRWPGAQWNSPANAGRPAQTEATLLKLSCDKAQAYLDWRAVLDFSDTVELTVDWYRNWYEGKQDIFAYALRQVEAYCDLAKVRGAKWLT

SEQ ID NO: 72985 - DNA, 1077 bp, Thiobacillus denitrificans ATCC 25259
  CDS (1)..(1077): transl_table=11
gtggaagatatggtgacgagcccggacttctggcagggcaagcgggtttttgtaacgggtcacacgggcttcaaggggagctggctctgtctttggctgcaaagcatgggggcggaggtcttgggatttgcgcttcccccccccaccgatcccaacctgtatgaggccgccggggtgacccgcggcatgcattcgcatctgggcgacatccggcagggcgaggagctggcacgcgtattggcggcatcgcggcccgatgtcgtattccatttagcggcccagccactggtccgtcacagctatacccatcccgttgaaacgtactccacgaatgtgatgggaacggtcaatctgctcgaggccgtgaggcgagccccgtcagtgcgttccgtggtcatcgtcacgagcgacaagagttacgaaaatcgcgaatggccctgggggtatcgcgagatagatccgatggggggatacgatccgtacagcaacagcaagggctgcgcggagcttgtggtttcagcttaccgcagctcctatttcaatccggcaaactaccaggagcatcgtgtcgccctggcatcggcgcgggcgggtaatgtgatcggtggcggcgactgggctgccgatcggctggtgcccgacattgttcgtgcggttagcgtggggcgtccggtgtggatacggaatcctcatgccattcgtccgtggcagcacgttctggagccgctctccggatacctgctactcgcgcagcgcttatacgagcaggggcccgcgtttgcacagggctggaattttggtcctgccgatgacgatgcgcagccggtctcctggatcgtcgaccgagtaaccgctctctggggggagggggcccgctgggagttggaaggcggagagcatgcgcatgaggcgaattatcttcgcctcgactgctcgaaggcgcgagccgagttgcagtggcacccgaaatggacgctcggccaagccctggacaagacagtcgagtggtaccgggcagccggatcgggcgctgacatgcgcccgttcacgcttggccaaatcgaagcctacctctga

SEQ ID NO: 72986 - protein, 358 aa, Thiobacillus denitrificans ATCC 25259
MEDMVTSPDFWQGKRVFVTGHTGFKGSWLCLWLQSMGAEVLGFALPPPTDPNLYEAAGVTRGMHSHLGDIRQGEELARVLAASRPDVVFHLAAQPLVRHSYTHPVETYSTNVMGTVNLLEAVRRAPSVRSVVIVTSDKSYENREWPWGYREIDPMGGYDPYSNSKGCAELVVSAYRSSYFNPANYQEHRVALASARAGNVIGGGDWAADRLVPDIVRAVSVGRPVWIRNPHAIRPWQHVLEPLSGYLLLAQRLYEQGPAFAQGWNFGPADDDAQPVSWIVDRVTALWGEGARWELEGGEHAHEANYLRLDCSKARAELQWHPKWTLGQALDKTVEWYRAAGSGADMRPFTLGQIEAYL

SEQ ID NO: 72987 - DNA, 1083 bp, Pseudomonas fluorescens PfO-1
  CDS (1)..(1083): transl_table=11
atggaagcaatgggactgagtccggaattctggcgcggcaagcgggttctggtcaccggccacaccggtttcaagggcagctggctgaccctgtggctgcaaagcctcggcgcgcaagtcagcggtttttccctcgatccgtcgaccgagccgagcctgttcgaactggcgcgcgtgagcgaaggcatcaacgaccagcgcggcgacctgcgtgacctcggcgccttgctcgagatcatcgctgacaccgagcctgagatcgtcctgcacctggcggcccagccgctggtgcgtgaaggttatcgcgatccgctggggacttattccagcaacgtcatgggcaccctcaatctgctcgaagcgattcgtcaggtcggttgcgtgcgggcctgcgtgctggtgaccaccgacaaggtctacgccaacaaggaatggctgtggccgtaccgcgaggacgaagccctcggtggtcacgatccttacagcagcagcaaggcctgctgcgagttgctggcgcagtcttacgcggcatcgttcttcccggccgacaagtacgccgagcatggtctggccctggccaccgcgcgcgccggcaacgtgttgggtggtggcgacttcgccccagaacggctgattcccgatgtactgaaagcctggtcggccgacgagccggtgaccttgcgttacccgcaagccgtgcgcccgtggcagcacgcgctggagccgctggccggctatctgcaactggccgccgggctctacgaacaaggcccggagtacgccggcgcgtggaacttcggtccgggcgaggcggacatgtgcagcgtcggtgaagtggtcgaactgctctccaaccgctggcctcaggcccgtgggctgcgcctcgaaaagagcgacctgcacgaagccggtctgctgcgcctggacagcagccgcgcccgtcaggtgctcggctggcaaccgcgctggacgttgcagcaatgcctgacccagaccctcgactggcacctggcgtggcagaacggcgacgacatgcgcaccgtgaccctcggccaactgaacctgtaccggggcgcgctgtga

SEQ ID NO: 72988 - protein, 360 aa, Pseudomonas fluorescens PfO-1
MEAMGLSPEFWRGKRVLVTGHTGFKGSWLTLWLQSLGAQVSGFSLDPSTEPSLFELARVSEGINDQRGDLRDLGALLEIIADTEPEIVLHLAAQPLVREGYRDPLGTYSSNVMGTLNLLEAIRQVGCVRACVLVTTDKVYANKEWLWPYREDEALGGHDPYSSSKACCELLAQSYAASFFPADKYAEHGLALATARAGNVLGGGDFAPERLIPDVLKAWSADEPVTLRYPQAVRPWQHALEPLAGYLQLAAGLYEQGPEYAGAWNFGPGEADMCSVGEVVELLSNRWPQARGLRLEKSDLHEAGLLRLDSSRARQVLGWQPRWTLQQCLTQTLDWHLAWQNGDDMRTVTLGQLNLYRGAL

SEQ ID NO: 72989 - DNA, 996 bp, Syntrophus aciditrophicus SB
  CDS (1)..(996): transl_table=11
atgggaagtttctgggcggataagaaagtgctggtaaccggcgccggtggatttatcggcagtcacctggtggagcggcttgccggggaaggggcttcagtgcgggccttcgtccgctacaactcccgtgccgacgcggggctgctcaagctggcgcctccggagattctttcccgcatcgagctgatcggcggagatctgcgggattccgatgccgtgcgcaaggccgtggaaggctgccggattgtgttccacctgggtgcgctcatttccattccctattcctattatcatcccgtggaagtggccgagacgaatctcatggggacgttgaacgtgcttctcgcctgccgcgacctcggcgtggagcgcctgatccacacgtccaccagcgaagtctatggcaccgcccagcgcgtccccatcgacgaggcgcatcccctccaggggcagtccccctattccgccagcaagatcggggcggacaaactggcggagagcttcttctgcgccttcagcgtgccggtggtgaccgtccgtcccttcaacacattcggcccgcgccagtccgcccgcgcagtcatccccacgatcatcacccaggtgcttgcccggcagagcatccgtctgggaaatctcgaaaccacccgtgatttcacctacgtagacgacaccgtcagcggttttctctgtgccgcgcagaaggagggcatcgaaggcatgaccttcaacctggggacggggtcggagattgcgatcggcgttcttgcccggacaatcatcgaaaaaatcggagtccccgtttcagtcgaactggatccggagcggctccgtccggaaggctccgaggtgatgcggcttctgtccgacaattcgcgggcccgttcccaactcgggtgggggcccgaagtgggcctggatgaaggactcaacaggaccatcgcctggattcgggagaatctggggaattaccgcatcggcgtttatgaattatag

SEQ ID NO: 72990 - protein, 331 aa, Syntrophus aciditrophicus SB
MGSFWADKKVLVTGAGGFIGSHLVERLAGEGASVRAFVRYNSRADAGLLKLAPPEILSRIELIGGDLRDSDAVRKAVEGCRIVFHLGALISIPYSYYHPVEVAETNLMGTLNVLLACRDLGVERLIHTSTSEVYGTAQRVPIDEAHPLQGQSPYSASKIGADKLAESFFCAFSVPVVTVRPFNTFGPRQSARAVIPTIITQVLARQSIRLGNLETTRDFTYVDDTVSGFLCAAQKEGIEGMTFNLGTGSEIAIGVLARTIIEKIGVPVSVELDPERLRPEGSEVMRLLSDNSRARSQLGWGPEVGLDEGLNRTIAWIRENLGNYRIGVYEL

SEQ ID NO: 72991 - DNA, 1125 bp, Syntrophus aciditrophicus SB
  CDS (1)..(1125): transl_table=11
gtgagttttttaaagagggatgaggagttgacattgttgaagactatataccaggctaaaagggttttcatctccggccataccggattcaaaggttcgtggttagccctctggcttgcggaatcaggggcggacgtcattggctattctcttgatcctcccactgatcccaacaactttcaggcaacggaacttcaggataagatcacccacatccgtggagatgtttgcgaccttaattgcctcctcgaagctttcagaagataccagcctgaatttgtcttccacttggctgcccagcccatcgttcgcctttcctacaatgaaccaaaaatgaccttcgacacgaatgtcggtggcacagtcaatatatttgaggccgtcaggctgaatccctccgtcaaggtcctggtcaacatcacaagcgataaatgttacgaaaacaaagaatgggtctggggctaccgggagaacgaccccatgggtggccatgatccctatagcgcctccaaggggtgtgcggagctcgttttcaacgcttatctgaactcttttttttcttccagtgccacgaagaaaaggtcggtcggcaccgcctccgctcgtgcgggcaacgtcattggtgggggtgactggggtgtggaccgccttgtgcccgattgcatccgagctctccaccgcgggcagacaatcggtatccgtaacccccatgcgatccgtccctggcaacacgttctggagcccctctatggctatcttcagcttggtgcggccctgcgtcatgatccacaaagatactcaggcgcatggaattttggttccagtaacagcagtcatctgacggttggtgaaatggccgaccgactcatacaatattggggtaatggctcctggaaagacctgtcagatccgcaggctcctcacgaggcaacgctgctcaaactgaattgcgacaaggctcatgcggagcttaactggcgcggtgttttaacgatcgatgaatgtctgctgatgacagcggattggtataaggaattttattcaggatcaaggatgaaaaacatgtaccagttctgtgtgtctcaaatccgtaaatatgaagaaacattagcatccaggagataa

SEQ ID NO: 72992 - protein, 374 aa, Syntrophus aciditrophicus SB
MSFLKRDEELTLLKTIYQAKRVFISGHTGFKGSWLALWLAESGADVIGYSLDPPTDPNNFQATELQDKITHIRGDVCDLNCLLEAFRRYQPEFVFHLAAQPIVRLSYNEPKMTFDTNVGGTVNIFEAVRLNPSVKVLVNITSDKCYENKEWVWGYRENDPMGGHDPYSASKGCAELVFNAYLNSFFSSSATKKRSVGTASARAGNVIGGGDWGVDRLVPDCIRALHRGQTIGIRNPHAIRPWQHVLEPLYGYLQLGAALRHDPQRYSGAWNFGSSNSSHLTVGEMADRLIQYWGNGSWKDLSDPQAPHEATLLKLNCDKAHAELNWRGVLTIDECLLMTADWYKEFYSGSRMKNMYQFCVSQIRKYEETLASRR

SEQ ID NO: 72993 - DNA, 1116 bp, Methanococcoides burtonii DSM 6242
  CDS (1)..(1116): transl_table=11
atgcaaaatgttctttttaaaaatgcctataacggaaaaaaagttattgtaaccggcaacacgggttttaaaggctcatggcttagcatttggctttccctccttggtgcaaaagtgtatggattatcaaatgatatcccaagcaagccatcccactttgaaactgcatccttggatgaacatataatccataatgaaatcgacatacgttgcctatatgatgtgagagaacttatcaacgagatcgaaccggatttcgtattccaccttgctgcccagccaatagttcgtgcttcatataatgatccggttgaaacaattgaaactaatgtcattgggacaatgaatatcctggaagcattgcgactttcgaatcatccatgcattgctataatgataaccagcgataaatgttatgataatgttgaatgggtgtggggatatcgggaaactgacccattgggtggagaagacccatatagtgcttcaaaaggtgctgcagaactaatcataaaaacatatgcaagatcttttttcgacaaacctaatagtaacgtaaagatagcatccgttagagcaggcaatgtaattggaggcggagattgggcaaaggatcgtattgttccagattgtatcagagcatggggtgtaaaagaaaaagtacagattcgaagcccaaatgcaacgcgcccatggcaacatgtattagaaccacttagcggatacctttatttgggtcagaaactgaatgaagataaatcattgaatggagaaccatttaattttggaccagccactaaccaaaattataccgttgctgaattgataagtaaaatgcaagaatactgggaagatgcagagatacagatagatactggtaatgcatctaaacaaaaggaagctaaccttctgaaattatgttgcgataaagcactccatgttttgggatggcaggcaactctcgactttgaaaaaacagtcaagtttactgttgattggtatcgctcatactatacaacagacacagatatattcgaattaagttgtcaacagatatcagattatgttaatttcgctatggaacaaggacagagttgggtgaaacacaatgattga

SEQ ID NO: 72994 - protein, 371 aa, Methanococcoides burtonii DSM 6242
MQNVLFKNAYNGKKVIVTGNTGFKGSWLSIWLSLLGAKVYGLSNDIPSKPSHFETASLDEHIIHNEIDIRCLYDVRELINEIEPDFVFHLAAQPIVRASYNDPVETIETNVIGTMNILEALRLSNHPCIAIMITSDKCYDNVEWVWGYRETDPLGGEDPYSASKGAAELIIKTYARSFFDKPNSNVKIASVRAGNVIGGGDWAKDRIVPDCIRAWGVKEKVQIRSPNATRPWQHVLEPLSGYLYLGQKLNEDKSLNGEPFNFGPATNQNYTVAELISKMQEYWEDAEIQIDTGNASKQKEANLLKLCCDKALHVLGWQATLDFEKTVKFTVDWYRSYYTTDTDIFELSCQQISDYVNFAMEQGQSWVKHND

SEQ ID NO: 72995 - DNA, 975 bp, Acidobacteria bacterium Ellin345
  CDS (1)..(975): transl_table=11
atgacaaacactttctggcgcgatcgctcggtcttggttacgggcgccaccggccttctcggcggatggctcacgcgacacctgctcgagcaaggtgcttcagtcacggcgctggtgcgcgattccgtgccgcagtcggagtttgaacgctgcctgatgcgccagcgcgtgaacgtggtgcagggagatttgagcaagccacagttgctggagcgggtgcttggcgaatacgaggtcgagaccgttttccatctcgcggcacagacgattgttgggatcgcgaaccgcaatccggtctcgacgtttgagagcaatattcgcgggacgtggaatttgctggaagcgtgtcgtcgttcgccgaacgtcagcgcgattgtgctggcgtcgtccgacaaagcctatggcgatcagacggtacttccgtacaccgaagatatgccactgcaaggccgccatccctacgacgtaagcaagtcgtgcgccgaccttattgcgcagtcgtacgcgcatacgtttcgtgtgccggtggcgataacgcgttgcgggaatttttatggtggtggggacctcaactggaaccgcgtggtcccgggcacgattcgttccgtatttcgtggagagcgtccgattattcgcagcgatggaaagtttgtgcgcgactacttctatatagaggatggcgcggcggcttacatgctgcttgccgagcgactcacggtcgataaaaagttgattggctcggcgtttaatttttcgaacgaagcgcaaatcaacgtactcgacctggtgaacacgatccttcagaagatgaactcgaacctgaaaccggagatccagaaccaggcgaataacgagatccggcaccaattcctgagcgccgaacgcgcgcgcaagcagctcaactggcgggcgcagtacacgcttgacgaaggcctggagcgcacgatcgcctggtacaaagaggtattgcagtag

SEQ ID NO: 72996 - protein, 324 aa, Acidobacteria bacterium Ellin345
MTNTFWRDRSVLVTGATGLLGGWLTRHLLEQGASVTALVRDSVPQSEFERCLMRQRVNVVQGDLSKPQLLERVLGEYEVETVFHLAAQTIVGIANRNPVSTFESNIRGTWNLLEACRRSPNVSAIVLASSDKAYGDQTVLPYTEDMPLQGRHPYDVSKSCADLIAQSYAHTFRVPVAITRCGNFYGGGDLNWNRVVPGTIRSVFRGERPIIRSDGKFVRDYFYIEDGAAAYMLLAERLTVDKKLIGSAFNFSNEAQINVLDLVNTILQKMNSNLKPEIQNQANNEIRHQFLSAERARKQLNWRAQYTLDEGLERTIAWYKEVLQ

SEQ ID NO: 72997 - DNA, 1074 bp, Rhizobium leguminosarum bv. viciae 3841
  CDS (1)..(1074): transl_table=11
gtggaagctatgggcctgacggacttctggaatggcaggcgcgtgttcctgacgggacacactgggttcaagggatcctggctgtcgttgtggctggaaaagctcggtgcggaagtgacggcggtctcgctcgaacccgagaccaatccctcgctctatgggcggcttgcgccctggaacggacagggccatcacattgccgacatccgcgaagcggcgacgttcaaacagcatttcatcgatttcgagcctgaaatcgtcatccacatggcagcgcaggcgctggtgcggcgctcctacgaaaatccgaccgaaaccttcgcgaccaatgtgatgggaacggcaaacgtgcttgacgcggtgcgagaaacgccctcggtcaagacggctctcgtcgtcacctccgacaaggtctatgccaacaacggcagcggcgttcccttcgtcgagacggatatgctgggcggcaaggacccctactccaactccaaggcctgcaccgaactcgtcgtccgaagctaccgcgacagcttcttcaaggggcgcgacatcaagcttgcgacggtacgtgccggcaatgtcattggtggcggcgactggtcgaaagaccggttgatcccggacttcatccgcgccttcgaaagcagccagccgatcctgctgcgctatcccgaagcgatccgcccctggcagcatgtgctggagccgctcggcggctatctcgccttcgccgaggccttgacacttgccggcgaacaggaactgcccgaagcgctcaatttcggcccagacccgcagagcttcgcgacggtctccgaacttgcggaagcgctcggcctcgctcatggcgtgaacgacgtctggaagcccgcgctgggaaaacatcttccggaagcgcctgcccttaccttgagttcggcactggcgctctccgccatcggctggcgtccgcgcctcggcctgaagcagacaatcgactggacagccgcctggtacaaggccaaccgcgagggcgccgacatgcgcgccttctcgctcgggcagatcgcggcctatgaggaaacaatatcatga

SEQ ID NO: 72998 - protein, 357 aa, Rhizobium leguminosarum bv. viciae 3841
MEAMGLTDFWNGRRVFLTGHTGFKGSWLSLWLEKLGAEVTAVSLEPETNPSLYGRLAPWNGQGHHIADIREAATFKQHFIDFEPEIVIHMAAQALVRRSYENPTETFATNVMGTANVLDAVRETPSVKTALVVTSDKVYANNGSGVPFVETDMLGGKDPYSNSKACTELVVRSYRDSFFKGRDIKLATVRAGNVIGGGDWSKDRLIPDFIRAFESSQPILLRYPEAIRPWQHVLEPLGGYLAFAEALTLAGEQELPEALNFGPDPQSFATVSELAEALGLAHGVNDVWKPALGKHLPEAPALTLSSALALSAIGWRPRLGLKQTIDWTAAWYKANREGADMRAFSLGQIAAYEETIS

SEQ ID NO: 72999 - DNA, 1056 bp, Fusobacterium nucleatum subsp. vincentii ATCC 49256
  CDS (1)..(1056): transl_table=11
atggaaataatgaaattttataaggggaaaaaagtactagtaacaggacatactggttttaagggagcatggttatctaaaattttattggaggcaggagcagaggttacaggatattctttagaaccaaatacagaaccttcattatttaaaatattagatttagaaaaaaaattaaattcaattattggagatatagcaaatttagaaaaattaaaaaaagtttttgaagaatacaagccagaaatagtttttcatttagctgctcaacctattgttttagattcatataaggaaccagtttatacttatatgacaaatgtgatgggaacagttaacttattggaatgtgtaagagaaactaaaacagtaaagtctgtaataaatgtaacaacagataaagtatatgagaatatggaatgggaatggggctatcgtgaaaatgaaagattaaatggttatgatccttattccaatagtaagtcttgttcagaattagttactcatagttataaggtatctttttttaatgatacaaaggtagcagtttctactgcaagagcaggaaatgttataggaggaggggattttgctaattttagaataattcctgattgtgtaagagcaatgaaaaataatgaaattattgaaattagaaatccaaattctacacgtccttatcaacatgtattagaacctttatttgcttatttattaatagcaaaaatgcaatatgaagatttttattatgcatctagttataatataggaccttcggaagatgattgcgtaacaacagaagaattagtgaatatcttttgtgaaaaatggggtgatggagcaaattggagaattattaattttgatgcacctcatgaagctaattttttaaagttagattgttctaagatgaaaaaggtttttaaatgggaaaataaatggaatatagagaaggcaattgaagaaactgtgaaatggtcaaaagcttattttaataaagaagatatgaataagattgtagaagaacaaataaaagattttgtagaaggagtttaa

SEQ ID NO: 73000 - protein, 351 aa, Fusobacterium nucleatum subsp. vincentii ATCC 49256
MEIMKFYKGKKVLVTGHTGFKGAWLSKILLEAGAEVTGYSLEPNTEPSLFKILDLEKKLNSIIGDIANLEKLKKVFEEYKPEIVFHLAAQPIVLDSYKEPVYTYMTNVMGTVNLLECVRETKTVKSVINVTTDKVYENMEWEWGYRENERLNGYDPYSNSKSCSELVTHSYKVSFFNDTKVAVSTARAGNVIGGGDFANFRIIPDCVRAMKNNEIIEIRNPNSTRPYQHVLEPLFAYLLIAKMQYEDFYYASSYNIGPSEDDCVTTEELVNIFCEKWGDGANWRIINFDAPHEANFLKLDCSKMKKVFKWENKWNIEKAIEETVKWSKAYFNKEDMNKIVEEQIKDFVEGV

SEQ ID NO: 73001 - DNA, 1056 bp, Bacillus cereus G9241
  CDS (1)..(1056): transl_table=11
atggcttcatcatctttttggaataagaaaaaagtatttattacgggacatactggatttaaaggttcctggctcacccttttcttaacttctttaggtgcagaagtagttggcttttcttctcatcccccatctattcctaacctttttgaacaaggtaacgtagcaaaagaatgcataacaattcatggcaacattacagattacgattctttattccacgccctaaagcaacataatcctgacatactatttcatttagcagcccagccaatcgtcaccacttcatataaaaatcctatcgaaacatttaaaacgaatgttttaggcaccgttcacgtattagaggcggcaaaacatatagacagtatacgtggcatcattaatgttacaagtgataaatgttatgaaaatgacgggagcggtaaccaagcatttgtggaaagtgaccggctaggaggtttcgacccttatagtgctagtaaggcttgcgctgaactagtggcaacatcctatcaaaaatcattcttccgcacgaatactcagaaactcgcctcagtaagagcaggtaacgtcatcggcggtggtgattgggcagaagaccgattattcccagatatcattcgtgcatatttacaagatggtacattaactattagaaacaaaaacgctattcgcccgtggcaacacgtattagatcctttacatggctatatccttttagctgaaaaactttggacagacgctgcatatgcagaagcgtggaatttcggtccgctgaacgaacctaaccgaacagttcatgacgtcattcaatctataataaaattatggaataaaccattaacaatcctttcacctcctacaaacactccttatgaatcacctattttaacactcgacagtacaaaggcagtaaataaactcggttggacacctaagttatcaacagatcattctatcacttggactgttgattggtacaaaaaatatgcattcggtgaaaatatagaatctttcacgcggcaacaaatcgatgcattcaaaaatttataa

SEQ ID NO: 73002 - protein, 351 aa, Bacillus cereus G9241
MASSSFWNKKKVFITGHTGFKGSWLTLFLTSLGAEVVGFSSHPPSIPNLFEQGNVAKECITIHGNITDYDSLFHALKQHNPDILFHLAAQPIVTTSYKNPIETFKTNVLGTVHVLEAAKHIDSIRGIINVTSDKCYENDGSGNQAFVESDRLGGFDPYSASKACAELVATSYQKSFFRTNTQKLASVRAGNVIGGGDWAEDRLFPDIIRAYLQDGTLTIRNKNAIRPWQHVLDPLHGYILLAEKLWTDAAYAEAWNFGPLNEPNRTVHDVIQSIIKLWNKPLTILSPPTNTPYESPILTLDSTKAVNKLGWTPKLSTDHSITWTVDWYKKYAFGENIESFTRQQIDAFKNL

SEQ ID NO: 73003 - DNA, 1101 bp, Prochlorococcus marinus str. MIT 9211
  CDS (1)..(1101): transl_table=11
atgaatctgaacacaacattcaaaaataaaagagtagttgtaaccggtcatactggctttaaaggttcatggctctcaatttggctattatcccttggagcaaaagtatatggaatagcactagatcctcctagcttgccttctctttttgatgaagcattaatgagtgagagagtagtggataatagaattaatataaaagatactaataaagttattgaaattatagacgaagttaaacctgactttttatttcatttagctgcacaacctttggtaagagagtcataccttgacccagttgaaacatggcacacaaatgtgttaggtacagttaatgttctaaatgctcttagggtagtaaaccatagatgtacagccataataattacaagtgataagtgctatgacaaccaggaatggttatggggttatagagagtctgataagttaggaggaggagatccttatagtgcctctaaaggatctgcagagttagcatttagttctttttatcgttcttattttcatgacaataatagtaaggtaactatagcttcagcaagagcaggtaacgttataggaggaggagattgggccaacaatagaatagtcccagactgtataagagcttggacacaagagagagaagtttctattagagctccatattcaacaagaccatggcaacatgtgcttgagcccctaagcggatatctttgccttgcacaacaattaacctcagaaagtttgcttaatggggagtcatttaattttggcccaacatcttctctgaactattcagttctagatgttgtgaatgaactagctaaaggatggtcatacaatttattggatatagaagaaaagagtgaatcaaaagctaatgaatcagcacttctaaaattaaattgtgacaaagccttggcccaattaagctggcaatctacacttaacttcgaatcaactctactgtatacaagctcatggtatttagattattattcagaatcaaaatctatagacccttatgagctttgtcttaaacagattaattcttactctgccgaagccaagttaactggtaacaaatggatataa

SEQ ID NO: 73004 - protein, 366 aa, Prochlorococcus marinus str. MIT 9211
MNLNTTFKNKRVVVTGHTGFKGSWLSIWLLSLGAKVYGIALDPPSLPSLFDEALMSERVVDNRINIKDTNKVIEIIDEVKPDFLFHLAAQPLVRESYLDPVETWHTNVLGTVNVLNALRVVNHRCTAIIITSDKCYDNQEWLWGYRESDKLGGGDPYSASKGSAELAFSSFYRSYFHDNNSKVTIASARAGNVIGGGDWANNRIVPDCIRAWTQEREVSIRAPYSTRPWQHVLEPLSGYLCLAQQLTSESLLNGESFNFGPTSSLNYSVLDVVNELAKGWSYNLLDIEEKSESKANESALLKLNCDKALAQLSWQSTLNFESTLLYTSSWYLDYYSESKSIDPYELCLKQINSYSAEAKLTGNKWI

SEQ ID NO: 73005 - DNA, 1101 bp, delta proteobacterium MLMS-1
  CDS (1)..(1101): transl_table=11
atgccgaaagttgcgctgattaccggggttaccggccaggatggtgcctatctggccgagttgttgttggagaaggggtatctggtccacgggatcaagcggcggagcagcctcttcaacaccgctcggatcgaccatctgtatcaggatccccatgagccggagcgccgcttcatccttcatcacggcgacatgactgactccagcagcctgatccgcatcgtccaacaggtgcagcccgacgagatttacaatctggcggcccagagtcatgtggcggtctccttcgaggagccggagtacaccgccaactccgatgccctgggcgccctgcgcctgctggaaaccatccgcattttgggcctggagcgaaaaacccgcttctatcaggcttccacttcggagctgtttggcaaggtgcgggaaaccccgcagaaggaaaccacccccttctacccccgttcaccgtacgcggcggccaagctgtacgcctactggatcacggtcaactaccgtgaggcctatggtctgtatgcctgtaacggaattttatttaaccatgaaagcccggtgcggggggagacctttgtcacccgcaagatcacccgggccctgaccaggatcaagctgggcctgcagcaatgtttgtacctgggcaacctcgaggccaaacgggattggggccatgcccgtgattatgtggagatgcagtggttgatgctccagcaggaacagcccgaggatttcgttattgccaccggccgccagcacagtgtgcgggagtttgtagaagcggcggcggccgagttgggcatggggctgcgctgggaaggagctggggttgatgagcggggctattggcagggcgctgcggcacccgaggaaccgattgtccgggtcgacccccgctattttcgccccaccgaagtcgagaccctgttgggtgatgccaccaaggcccgcgaaaaactgggctggacccccaaaatcagttttgccgaactggtggcggagatgattcgcgaggatctcaaaaccgcggaaatggatgtgctaaccaaaaaacatggttatgccaccatgcggtattatgaggcctag

SEQ ID NO: 73006 - protein, 366 aa, delta proteobacterium MLMS-1
MPKVALITGVTGQDGAYLAELLLEKGYLVHGIKRRSSLFNTARIDHLYQDPHEPERRFILHHGDMTDSSSLIRIVQQVQPDEIYNLAAQSHVAVSFEEPEYTANSDALGALRLLETIRILGLERKTRFYQASTSELFGKVRETPQKETTPFYPRSPYAAAKLYAYWITVNYREAYGLYACNGILFNHESPVRGETFVTRKITRALTRIKLGLQQCLYLGNLEAKRDWGHARDYVEMQWLMLQQEQPEDFVIATGRQHSVREFVEAAAAELGMGLRWEGAGVDERGYWQGAAAPEEPIVRVDPRYFRPTEVETLLGDATKAREKLGWTPKISFAELVAEMIREDLKTAEMDVLTKKHGYATMRYYEA

SEQ ID NO: 73007 - DNA, 1050 bp, Candidatus Desulfococcus oleovorans Hxd3
  CDS (1)..(1050): transl_table=11
atggtaaaaagtgatttgcagaagaaaacgattcttgtcaccggcggcgccggttttatcggtaccaattttatctatcacgccctggatgcaagtttccagtgtcggattgttaacctggatgcgcttttgtgtggcggcaatgcctccaatcttgaccggctgccggaccctgccaggtcgcgataccggtttgtgcgcggtaaggttcaggacggtgccctgctggaccggctttttgccgaagaacagtttgccggtgtgtttcatttcgcggcccagacccacgtggaccgctccatcaccgatcccggggattttgttgaatccaatgtggtggggacttttcgcctgctggatacatgtctcaagtactggcgccggggtgctctggatcctgactttcgcatggttcatgtctccacggacgaggtgtatggcagcctgggcagtgaagggcgcttctccgaaaccagcccttacgatccctccagcccctactctgcgtcaaaggcgggttcggaccatctggtcaaatcctatgtgcggacctatggattgccggccatggtgaccaactgctccaacaattttggcccctaccagtatcctgaaaaactgattcccctgatgattgccagtattctaaacgaagaaccgctcccggtttacggggatggcaaaaatgtccgggactggctctacgtgctggaccactgcgaggccctgatgcgggtgtttgaggccggccggccgggggagagttacaacatcggcggaggacaggagtatgagaacatcgaactggtacacatgctttgcgacctggtggacacccggctgggacgtcccgaggcgcaaagccgtcgtctggtccggtttgtcaccgaccggccgggccatgaccggcggtacgccattgacgcatcaaaaatcaaacacgccctggactggagcccccggcacgattttacccgggccctggaccagaccgtgacatggtacctgagcaaccggcagtggctgacaggcggcaagcaggatcaataa

SEQ ID NO: 73008 - protein, 349 aa, Candidatus Desulfococcus oleovorans Hxd3
MVKSDLQKKTILVTGGAGFIGTNFIYHALDASFQCRIVNLDALLCGGNASNLDRLPDPARSRYRFVRGKVQDGALLDRLFAEEQFAGVFHFAAQTHVDRSITDPGDFVESNVVGTFRLLDTCLKYWRRGALDPDFRMVHVSTDEVYGSLGSEGRFSETSPYDPSSPYSASKAGSDHLVKSYVRTYGLPAMVTNCSNNFGPYQYPEKLIPLMIASILNEEPLPVYGDGKNVRDWLYVLDHCEALMRVFEAGRPGESYNIGGGQEYENIELVHMLCDLVDTRLGRPEAQSRRLVRFVTDRPGHDRRYAIDASKIKHALDWSPRHDFTRALDQTVTWYLSNRQWLTGGKQDQ

SEQ ID NO: 73009 - DNA, 1167 bp, Candidatus Desulfococcus oleovorans Hxd3
  CDS (1)..(1167): transl_table=11
atgcatggatacgcttcgcgacaagatatatctgaaccagttatgggaaaacaatcaggccgaatggaagacctggaaatgaaaaacctttttcagaacgcgtatcaccgccggagagtgctggtcaccgggcataccggctttaaagggtcatggctctccttctggctttcgcaaatgggcgccgatgtgtacggctactccctggcgcccgagacccggcccaatcacttctctctgctcaacccgggtgacgaaacccctgaaaccgacatccgggatatccgacaagtaattgactgctttcagtcctttcagccggaaatcgtttttcacctggccgctcagtccctggtgcgccggtcctaccgtgaacccctcgacacctttgccgccaatgtcatgggcacggccaacatactcgaggcctgccggctgacaaaatccgtgcgggccgtggtgatcgtgaccagtgacaagtgctaccagaacaatgaatgggaatggggataccgggagagcgaccccatgggcggccatgacccttacagcgcctccaaggggtgcgcggaacttgtcaccgccgctttccggaattcttttttttctacaggcaccggccatccggccctgatggccacggcccgggccggtaatgtgatcggcggcggcgactgggccgaagaccgcctgattccggacgtggcccgtgctttcaacaaaaaagaaaccatgaaaatccgtaacccccatggactccgtccctggcagcatgtgctggagccgctttccggatacctgatgctgggacaacgcctgattgaaggagaccggggacttgccgatgcctggaattttgggccgtcggaagaagacacgcttccggtaataacgcttctgaaacggttaaaaactcactggtccgacctggactttgatgtggaccaacagccggaccagccccacgaggccggtctgctccggctggactcttctaaagccaggcggaaacttggctggcaaccggtctggaactgtgaccaggcccttgaaaggaccgcagcctggtaccaggcgttttacaaccaggctacgattctgaccggcgcggatctggcggcctatatcgagtcggcccgttcaaaaggattgccatgggcgcaataa

SEQ ID NO: 73010 - protein, 388 aa, Candidatus Desulfococcus oleovorans Hxd3
MHGYASRQDISEPVMGKQSGRMEDLEMKNLFQNAYHRRRVLVTGHTGFKGSWLSFWLSQMGADVYGYSLAPETRPNHFSLLNPGDETPETDIRDIRQVIDCFQSFQPEIVFHLAAQSLVRRSYREPLDTFAANVMGTANILEACRLTKSVRAVVIVTSDKCYQNNEWEWGYRESDPMGGHDPYSASKGCAELVTAAFRNSFFSTGTGHPALMATARAGNVIGGGDWAEDRLIPDVARAFNKKETMKIRNPHGLRPWQHVLEPLSGYLMLGQRLIEGDRGLADAWNFGPSEEDTLPVITLLKRLKTHWSDLDFDVDQQPDQPHEAGLLRLDSSKARRKLGWQPVWNCDQALERTAAWYQAFYNQATILTGADLAAYIESARSKGLPWAQ

SEQ ID NO: 73011 - DNA, 1083 bp, Vibrio anguillarum
  CDS (1)..(1083): transl_table=11
atgaatccaacattttggcacggtaaaaaagtgtttattactggacatactggctttaaaggtggctggctttcactatggctacaggaaatgggtgctatagtgaaaggatattctcttccggctcctacaactcccagtttatttgagcaagggaaagtatgggctggaatgagaacagaagaaggcgatatccgcgattttactcacatgcgacaaagtatgtatgagtttaaaccagaaatagtttttcatatggcggcccagccattagtacgcctttcataccatgagccaatcgaaacatactcaacgaatgttatgggtacggtctatttgttagaagctgttaagcaagttggtggcgttaaggctgtagttaatattacatccgataaatgttacgaaaaccgagagtgggtttggggataccgagaagacgaaccaatgggtggttatgatccatatagcaacagtaaaggatgtgctgagttggttgcttcatcttatcgccagtccttttttaataaagaaaattaccatcagcatagatgtgctttagcatcagttcgtgcaggtaacgttattggtggtggcgattgggcagaagatcgattgattccagatatgttaaaagcattttcaaataatcaaacagtagaaattcgaagtcctcatgcaattcgtccttggcagcatgttcttgaacctttgtctggttacctaactatagcagaaaagctttatactgtaggtcccggctttgctgaaggatggaattttggtcctcgagatgaagatgcaaagcctgttgattggatagttaatcgattaactgaactttgggggggaggggctcgctggtctttgtgtgatggggaacatccacatgaggctcattatcttaagcttgattgttcgaaagcaaaaatgcgactagattggcagcctgtttgggatgtagatactacactggaaaaaattgtctcttggcataaagcttggcttgcaaaacaagatatgcaccaatatacaattaacgaaattaaacaatatatgaccgcacgagcaggtaaagagtaa

SEQ ID NO: 73012 - protein, 360 aa, Vibrio anguillarum
MNPTFWHGKKVFITGHTGFKGGWLSLWLQEMGAIVKGYSLPAPTTPSLFEQGKVWAGMRTEEGDIRDFTHMRQSMYEFKPEIVFHMAAQPLVRLSYHEPIETYSTNVMGTVYLLEAVKQVGGVKAVVNITSDKCYENREWVWGYREDEPMGGYDPYSNSKGCAELVASSYRQSFFNKENYHQHRCALASVRAGNVIGGGDWAEDRLIPDMLKAFSNNQTVEIRSPHAIRPWQHVLEPLSGYLTIAEKLYTVGPGFAEGWNFGPRDEDAKPVDWIVNRLTELWGGGARWSLCDGEHPHEAHYLKLDCSKAKMRLDWQPVWDVDTTLEKIVSWHKAWLAKQDMHQYTINEIKQYMTARAGKE

SEQ ID NO: 73013 - DNA, 1176 bp, Yersinia pseudotuberculosis
  CDS (1)..(1176): transl_table=11
atgccggtttctggcagccaatggatacgttgcgtgacaagatttatctgcatgaactatgggaagaaggcagggcaccttggaaggtatgggaataacaaaatgattaataatagtttctggcaaggtaaacgggtttttgtaacaggccatactgggtttaaaggtggctggttgagtttatggttgcaaaccatgggggcaacggtaaaaggttactctttggccccccccacggtgcctagcctatttgagaccgcacgagttgccgacgggatgcaatcggaaatcggtgatattcgtgatcaaaacaaattattagaagcaatccgcgaattccaaccagaaattgttttccacatggctgctcagccactggtccgtctatcctattccgaacccgttgaaacctactcgacgaatgttatgggtaccgtttatttactggaagctattcgccatgttggtggcgtcaaagcggtggtcaatatcaccagtgataaatgctacgataataaagagtggatctggggctatcgcgaaaatgaagcgatgggggggtatgatccttactccaacagtaaaggttgtgcggaattagtgacgtcatcctaccgtaattcgttcttcaatccagcgaactatggccagcatggcactgccgtagcgacagtgcgtgcgggtaatgtcatcggtggtggcgattgggcattggatcgcatcgttccagatattcttcgggcgtttgaacagtcccaaccagtgattattcgcaacccacatgccattcgcccatggcagcatgtgttggagcctttgtcgggttatttgctgttggcacagaagttatatactgacggtgctgaatatgccgaaggttggaactttggtcctaacgatgctgatgctactccagtaaaaaacattgttgaacaaatggtgaaatattggggagagggtgcaagctggcaattagatggcaatgctcaccctcatgaagctcattatctgaaactggattgttcaaaagctaaaatgcaacttggctggcatcctcgctggaccttgaatactacgctcgaatatattgtgggctggcacaagaactggttatcaggcacagatatgcatgaatacagtattactgaaattaataattacatgaacactaaatga

SEQ ID NO: 73014 - protein, 391 aa, Yersinia pseudotuberculosis
MPVSGSQWIRCVTRFICMNYGKKAGHLGRYGNNKMINNSFWQGKRVFVTGHTGFKGGWLSLWLQTMGATVKGYSLAPPTVPSLFETARVADGMQSEIGDIRDQNKLLEAIREFQPEIVFHMAAQPLVRLSYSEPVETYSTNVMGTVYLLEAIRHVGGVKAVVNITSDKCYDNKEWIWGYRENEAMGGYDPYSNSKGCAELVTSSYRNSFFNPANYGQHGTAVATVRAGNVIGGGDWALDRIVPDILRAFEQSQPVIIRNPHAIRPWQHVLEPLSGYLLLAQKLYTDGAEYAEGWNFGPNDADATPVKNIVEQMVKYWGEGASWQLDGNAHPHEAHYLKLDCSKAKMQLGWHPRWTLNTTLEYIVGWHKNWLSGTDMHEYSITEINNYMNTK

SEQ ID NO: 73015 - DNA, 1158 bp, Spirochaeta aurantia
  CDS (1)..(1158): transl_table=11
atgggcagctttcggctttcaagcacacggggttctggaagcccatggacactctgcgcgagaagcacgagttcgaagagctctggcgcgacggcaaggcgccctggaggctgtggaatgactgatccgctgttctggcggggaaaacgtgtccttctgaccggaaacacaggcttcaagggttcgtggctttcgatttggcttgagatgctgggtgctgaagtcacggggtttgcacttcccccgccgaccgagcctagcctctttgccctctccgggttggaccaaaagaagaactggatcgaaggagacgttcgcgaccgcgctgccgtactcaaggccgttcagagtaccgaaccagagattgtttttcacttggcggcccagcctttggttcgcgagagctatgtcgatcccgttggaacgtacgccactaacgtgatgggaacggttcatgttctcgatgcggtgcgtcagaccggcggggtccgggccatcgtgaatgtcaccaccgacaagtgctacgagaaccaggagtgggcctggggttatcgagagaacgagcccatgggcggctacgacccctatagcaatagcaagggttgttccgagctcgtcacctccgcctatcggcggtcctatggacttcctctcgcctcggcccgggcgggcaatgtgatcggaggcggagacttcgcaaaagaccggctgattcccgacatcttgagggccgtccaggccggcgagaaggtcaagattcgtagccccttggccatccgcccctggcagcatgtgcttgaacccttgtcgggttatctgacccttgccgagtccctctacagcaatcccgaggggtatgcccaagcctggaattttgggccccatgacgacgatgcccagcccgtcgagtggatcgtgaagaccctgtgtcggctcgtccccgaaagccagggctatgaggtcgatcagagtcctcagccccacgaagcccactacctcaagctcgacatcagtaaggccaagtcccttttgggatggtctccgcggtggtcactgagcaccgcgcttgcgaagattgttgagtggaatggcaccgacgggaacgcttcctgtcgtgcacaaattgccgcctatggggaggttcccgttggcagctaa

SEQ ID NO: 73016 - protein, 385 aa, Spirochaeta aurantia
MGSFRLSSTRGSGSPWTLCARSTSSKSSGATARRPGGCGMTDPLFWRGKRVLLTGNTGFKGSWLSIWLEMLGAEVTGFALPPPTEPSLFALSGLDQKKNWIEGDVRDRAAVLKAVQSTEPEIVFHLAAQPLVRESYVDPVGTYATNVMGTVHVLDAVRQTGGVRAIVNVTTDKCYENQEWAWGYRENEPMGGYDPYSNSKGCSELVTSAYRRSYGLPLASARAGNVIGGGDFAKDRLIPDILRAVQAGEKVKIRSPLAIRPWQHVLEPLSGYLTLAESLYSNPEGYAQAWNFGPHDDDAQPVEWIVKTLCRLVPESQGYEVDQSPQPHEAHYLKLDISKAKSLLGWSPRWSLSTALAKIVEWNGTDGNASCRAQIAAYGEVPVGS

SEQ ID NO: 73017 - DNA, 1065 bp, Rhizobium leguminosarum bv
  CDS (1)..(1065): transl_table=11
atgggcctgacggacttctggaacgggcggcgggttttcctgaccggacataccggcttcaagggatcgtggctttccctgtggctggagcggctcggcgctgaggttaccgctgtgtcgctggcgcccgagaccgaaccatcgctctatcgcaagcttgctccctgggacgatcgcggccatcacatcgtcgatatctgcgatgccgaggcgcttttcgccctctcgagaagtttccaaccggagatcgtcatccatatggcggcgcaggctctggtgcggcgttcttatgagaacccggccgagaccttttcgaccaacgtcatgggaacggcaaatgttctcgacgcggtcaggcagacgccctccgtcaagaccgtgctggtcatcacctccgacaaggtttacgccaataacggcagcggcatccccttcgtcgagaccgatacgctcggcggcaaggatccgtacagcaactccaaggcctgcaccgaactcgtctgccagagctaccgcgacagtttcttcaaagggcgcgatctcaggctcgccacggtccgcgccggcaatgtcatcggcggcggcgactggtcgaaggaccggctgatcccggatttcatccgcgctttcgaaggcggcgaaccgatcatgctgcgctatcccgcggcgatccgcccctggcagcacgtgctggagccgcttggcggttatctgagcttcgctgaggtgctgacgcagcagcgcggcagggatctgccggatgcactgaatttcggtccgcatcccgaaagcttcgccactgtttccgaactcgccgaagcgctcggacgcgcgcactgcgtcgaagacgtttggcggctggcgcccggcgaacatctgccggaagcgccggcgctgacgctgagctcggcgcttgcgctcgacaccatcggctggcgcccgcgcctcagcctgcaacagaccatcgactggactgccgcctggtacaaggccaatcgcgagggcgaagacatgcgcgccttctcgctcggccagatcgcggcatatgaggaagcagtatcatga

SEQ ID NO: 73018 - protein, 354 aa, Rhizobium leguminosarum bv
MGLTDFWNGRRVFLTGHTGFKGSWLSLWLERLGAEVTAVSLAPETEPSLYRKLAPWDDRGHHIVDICDAEALFALSRSFQPEIVIHMAAQALVRRSYENPAETFSTNVMGTANVLDAVRQTPSVKTVLVITSDKVYANNGSGIPFVETDTLGGKDPYSNSKACTELVCQSYRDSFFKGRDLRLATVRAGNVIGGGDWSKDRLIPDFIRAFEGGEPIMLRYPAAIRPWQHVLEPLGGYLSFAEVLTQQRGRDLPDALNFGPHPESFATVSELAEALGRAHCVEDVWRLAPGEHLPEAPALTLSSALALDTIGWRPRLSLQQTIDWTAAWYKANREGEDMRAFSLGQIAAYEEAVS

SEQ ID NO: 73019 - DNA, 990 bp, Streptomyces griseus subsp
  CDS (1)..(990): transl_table=11
ttgaccacccatctgctcgtcaccggcgcggccggtttcatcggttcccagtacgtccgcaccctgctcggccccggcgggccgcccgacgtggtggtgaccgcactggacgccctcacctacgcgggcaacccggacaacctggccgccgtccgcggacatccccggtaccgcttcgagcggggcgacatctgcgacgccgccctggtcgaccgggtgatggcgggacaggaccaggtcgtccacctcgccgccgaatcccatgtggaccgctccctgctcgacgcgtcggtcttcgtgcggaccaatgtgcacggcacccagaccctgttggacgcggcgacccggcacggggtcgcgtccttcgtacaggtgtcgaccgacgaggtctacggctccctggagcacgggtcctggaccgaggacgagcccctgcggcccaacagcccctactccgcgtccaaggcctccggcgacctgctcgccctggcccatcatgtcagccacggtctggacgtacgggtgacccgctgctccaacaactacgggccccgccagttcccggagaagctgatcccccggttcatcaccctgctgatggacgggcaccgggtgccgctgtacggggacgggctgaacgtgcgggaatggctgcacgtcgacgaccacgtgagggggatcgaggcggtccgcacccgcggccgggcgggccgggtgtacaacatcggcggcggcgccacgctgagcaacaaggagttggtggggctgctgctcgaagccgccggcgccgactggggcagcgtggagtacgtcgaggaccgcaagggacacgaccggcgctacgccgtggactccacgcgcatccagcgggagctcggcttcgctccggccgtcgacctggccgacgggctggccgccaccgtcgcctggtaccacaagcaccgttcctggtgggagccgctggtcccggccggctcgctacccgcctga

SEQ ID NO: 73020 - protein, 329 aa, Streptomyces griseus subsp
MTTHLLVTGAAGFIGSQYVRTLLGPGGPPDVVVTALDALTYAGNPDNLAAVRGHPRYRFERGDICDAALVDRVMAGQDQVVHLAAESHVDRSLLDASVFVRTNVHGTQTLLDAATRHGVASFVQVSTDEVYGSLEHGSWTEDEPLRPNSPYSASKASGDLLALAHHVSHGLDVRVTRCSNNYGPRQFPEKLIPRFITLLMDGHRVPLYGDGLNVREWLHVDDHVRGIEAVRTRGRAGRVYNIGGGATLSNKELVGLLLEAAGADWGSVEYVEDRKGHDRRYAVDSTRIQRELGFAPAVDLADGLAATVAWYHKHRSWWEPLVPAGSLPA

SEQ ID NO: 73021 - DNA, 1077 bp, Yersinia enterocolitica
  CDS (1)..(1077): transl_table=11
atgattaatgaaaaattttggcaagacaaacgtgtttttatcaccggccatactggctttaaaggtagttggctgagcttatggctgcaaaatatgggagccaaagtgaaaggttatgctttggacgcaccaacaaagccaagtttatttgaagcagccaacgttgcggatggtatgatttcggaagtaggtgatattcgtaattatgctcagctactcaagtcaatcaacgattttaaacctgaaatcgtttttcatatggctgcacagtctttagtccggttgtcatacttagaaccggttgaaacttattcgacaaatgttatgggtactgtctatttgttggaagctcttcgacatgtaggaggagctaaggctattgttaatgtaactagtgataaatgttacgaaaataaagagtgggtctggggatatcgtgaagacgaatcaatggggggatatgatccttattcaaatagtaaaggttgtgccgagttagttacttcatcatatcgaaattcattttttaatccggttaaatatgaacaacatggtacagcattagcgacacagcgtgcaggtaatgttattggcggtggtgattgggctttagaccgtgtggttccagatatgctacgcgcatttgagaactctgagcctgttattatacggaataatccatatgctatacgtccttggcagcatgttttagaacccttgtcaggttatttattgttagctcaacgattatatattgatggaattaaatatgctgaaggctggaattttggccctgatgacacagattctagccaagtacaaagtattgttgataaaatggtaaaatactggggaggagatgcttgttggcagttagacgatcatgaacatccacatgaggcaaattatctaaaactggattgttctaaagcaaaggttttattgggctggcagtctcgatggaatctagattgcactttagaatatattgttgcatggcataaagcgtggttacgcggtgttaatatgcatgaatatagtattgttgaaattaataaatatatggctagtaaatga

SEQ ID NO: 73022 - protein, 358 aa, Yersinia enterocolitica
MINEKFWQDKRVFITGHTGFKGSWLSLWLQNMGAKVKGYALDAPTKPSLFEAANVADGMISEVGDIRNYAQLLKSINDFKPEIVFHMAAQSLVRLSYLEPVETYSTNVMGTVYLLEALRHVGGAKAIVNVTSDKCYENKEWVWGYREDESMGGYDPYSNSKGCAELVTSSYRNSFFNPVKYEQHGTALATQRAGNVIGGGDWALDRVVPDMLRAFENSEPVIIRNNPYAIRPWQHVLEPLSGYLLLAQRLYIDGIKYAEGWNFGPDDTDSSQVQSIVDKMVKYWGGDACWQLDDHEHPHEANYLKLDCSKAKVLLGWQSRWNLDCTLEYIVAWHKAWLRGVNMHEYSIVEINKYMASK

SEQ ID NO: 73023 - DNA, 1113 bp, Hordeum vulgare
  CDS (1)..(1113)
atggcgatcggcggcgttggcgctgggggcggggccgggggcgtggaggggcagcagggcaggagcgtgctggtgacgggcggcgcgggcttcatcggcacgcacacggtgctgcggctgctggagaagggctacgccgtcaccgccgtcgacaacttccacaactccgtccccgaggcgctcgaccgcgtccgccacatcgtcggccccgccctctccgcccgcctccaattcatcttcggcgatctgaccatcaaggatgacctggagaaggtgttcgccgccaagaggtacgacgccgtgatacacttcgccgggctgaaggcggtggcggagagcgtggcgcacccggagatgtacaaccgcaacaacatcgtcggcaccgtcaacctctacgacgtcatgaagaagcacgggtgcaacaagttggtgttctcgtcgtcggcgaccgtgtacggccagccggagaaggtgccctgcgtcgaggactccccgctcaaggccctcaacccctacggcaggaccaagctgtacctggaggagatgctgcgcgactaccagcacgcgaacccggagtggaggacgatcctgctgcgctacttcaaccccatcggcgcccaccagagcggtgacatcggggaggaccccaagggcgtgcccaacaacctgctcccctacatccagcaggtggccgtcggccgccgccccgagctcaacgtctacggccacgactaccgcacccgcgacggcaccgccgtcagggactacatccacgtcgtcgacctcgccgacggccacatcgccgcgctcgagaagctcttcgccacccctgacatcggctgcgtggcgtacaacctggggacgggccgcgggacgacggtgctggagatggtgagcgcgttcgagaaggcatacggcaagaaaatcccggtgaagatgtgccccaggaggccgggcgattcggagcaggtgtacgcgtccaccgccaaggccgagcaggagctcggctggagggccaagtacgggatcgaggagatgtgcagggaccagtggaactgggccaggaagaacccgtatggctactgtggcgacgccgctgaaaacaaagactga

SEQ ID NO: 73024 - protein, 370 aa, Hordeum vulgare
MAIGGVGAGGGAGGVEGQQGRSVLVTGGAGFIGTHTVLRLLEKGYAVTAVDNFHNSVPEALDRVRHIVGPALSARLQFIFGDLTIKDDLEKVFAAKRYDAVIHFAGLKAVAESVAHPEMYNRNNIVGTVNLYDVMKKHGCNKLVFSSSATVYGQPEKVPCVEDSPLKALNPYGRTKLYLEEMLRDYQHANPEWRTILLRYFNPIGAHQSGDIGEDPKGVPNNLLPYIQQVAVGRRPELNVYGHDYRTRDGTAVRDYIHVVDLADGHIAALEKLFATPDIGCVAYNLGTGRGTTVLEMVSAFEKAYGKKIPVKMCPRRPGDSEQVYASTAKAEQELGWRAKYGIEEMCRDQWNWARKNPYGYCGDAAENKD

SEQ ID NO: 73025 - DNA, 1032 bp, Micromonospora echinospora
  CDS (1)..(1032): transl_table=11
atgaacacgacgcggatcctcgtcaccggcggcgccggcttcatcgggtcgcactacgtccgcaccctgctgcggccggcgggaccgggcggcgtccggatcaccgtgctggacaagctgacgtacgcgggcaacctcgccaacctgcgtcccgtcgccggccaccccgcctaccgtttcgtccgcggcgacatctgcgacagcctcctggtggaccggctggtggcggagcacgaccaggtcgtgcacttcgccgccgagtcccacgtggaccggtccatcgccgacggcggcgacttcgtccgcaccaacacgctcggcacctacaccctgctggaggcggtccggcggcggcacggcgaccgcgcggtcttcgtgcacgtctccaccgacgaggtgtacgggtcgatcgagcacggcacctggccggagacggacccggtcctgcccagttcgccgtacgccgccgcgaaggccgccagcgacctgctcgccctggccttcgtccggacgcacgggctcgacgtgcgggtgacgcggtgcgccaacaactacggcccgcaccagcacccggagaagctggtgccgctggcgatcacgaacctgctcgacggcggggacgtcccgctctacggcgacgggctgcacgtgcgcgactggctgcacgtcgacgaccacgtccgggcgctggagctggtgcggacgcggggccgggccgggcaggtctacaacgtcggcgggggcacccagttgaccaaccgggagatggccgatcgcctgcttgcggcctgcggcgccgggcccgaacggatccgctacgtcgaggaccgcaaggggcacgaccggcgctacgcggtcgactggagcaagatcagatgcgagctcgggtacgcgccgcgcaaggacctcgaccgcgggctcgccgacacggtcgcctggtatcgcgcgaaccgctcctggtgggagccgcttcggcgacgccctgttgcgcaagctgggagaccgaccgggacggaccacgggttagcctga

SEQ ID NO: 73026 - protein, 343 aa, Micromonospora echinospora
MNTTRILVTGGAGFIGSHYVRTLLRPAGPGGVRITVLDKLTYAGNLANLRPVAGHPAYRFVRGDICDSLLVDRLVAEHDQVVHFAAESHVDRSIADGGDFVRTNTLGTYTLLEAVRRRHGDRAVFVHVSTDEVYGSIEHGTWPETDPVLPSSPYAAAKAASDLLALAFVRTHGLDVRVTRCANNYGPHQHPEKLVPLAITNLLDGGDVPLYGDGLHVRDWLHVDDHVRALELVRTRGRAGQVYNVGGGTQLTNREMADRLLAACGAGPERIRYVEDRKGHDRRYAVDWSKIRCELGYAPRKDLDRGLADTVAWYRANRSWWEPLRRRPVAQAGRPTGTDHGLA

SEQ ID NO: 73027 - DNA, 1134 bp, Aeromonas hydrophila
  CDS (1)..(1134): transl_table=11
atgaaatctatgaataagaaagtcgcacttatcactggtgtaaccgggcaggatggctcctatttggccgagtttctgttagaaaaagggtatcaggtgcatgggatcaagcgtcgagcgtcatcgttcaatactcaacgtatagaccatatctaccaagaccctcatattgaacatcaaaattttgtactgcattatggtgatctgacggactcctctaacttgacccgtattattcaagaggttcaaccagatgaggtatataatttgggggctcaatctcacgtagccgtcagctttgagtctcctgaatatacggccgatgtggatgctatgggcacactgcgcctgctagaggctatccggttgttgggattggagaaaaaaacccggttttatcaagcttcgacgtcagagttgtttggcctggtccaagagataccgcaaagagaaaccacccccttctatccacgctctccttatgccgttgccaaactttatgcatactggatcacggtgaactattgtgaggcttatggtttatatgcatgcaacggtattcttttcaatcatgaatctccccgtaggggagaaacttttgttactcgaaagattaccagaggtttggccaatattgcccaaggtttggatagttgtctctacatggggaatattgattctctacgggattggggtcatgcaaaggattatgtacaactacaatggctcatgttacagcaagaagaacctgaagactttgtgatagcgactggcgagcagtattctgtgcgtcagttcattctttgggcagcagaagatgtaggtatgcaattacgtttcgaaggcaagggtgttgaagaagttgcagtggtggtatcaaccaagggagagctggctccggcagttcgtcctggtgatgtggtccttcgtattgatccccggtatttccgtcctgcagaagttgattctttgttaggtgatgcgagtaaagcacgagaaaaactgggttggaaacccagtattacagtcagagaaatgtgtgccgaaatggttgctgctgatgtgaaagtagcgcagtgccatgccttgttgaaaaaacacggatttgagattggtgagtccatgggggactga

SEQ ID NO: 73028 - protein, 377 aa, Aeromonas hydrophila
MKSMNKKVALITGVTGQDGSYLAEFLLEKGYQVHGIKRRASSFNTQRIDHIYQDPHIEHQNFVLHYGDLTDSSNLTRIIQEVQPDEVYNLGAQSHVAVSFESPEYTADVDAMGTLRLLEAIRLLGLEKKTRFYQASTSELFGLVQEIPQRETTPFYPRSPYAVAKLYAYWITVNYCEAYGLYACNGILFNHESPRRGETFVTRKITRGLANIAQGLDSCLYMGNIDSLRDWGHAKDYVQLQWLMLQQEEPEDFVIATGEQYSVRQFILWAAEDVGMQLRFEGKGVEEVAVVVSTKGELAPAVRPGDVVLRIDPRYFRPAEVDSLLGDASKAREKLGWKPSITVREMCAEMVAADVKVAQCHALLKKHGFEIGESMGD

SEQ ID NO: 73029 - DNA, 1080 bp, Salmonella typhimurium
  CDS (1)..(1080): transl_table=11
atgattgataaaaatttttggcaaggtaaacgtgtattcgttaccggccatactggctttaaaggaagctggctttcgctatggctgactgaaatgggtgcaattgtaaaaggctatgcacttgatgcgccaactgttccaagtttatttgagatagtgcgtcttaatgatcttatggaatctcatattggcgacattcgtgattttgaaaagctgcgcaattctattgcagaatttaagccagaaattgttttccatatggcagcccagcctttagtgcgcctatcttatgaacagccaatcgaaacatactcaacaaatgttatgggtactgtccatttgcttgaaacagttaagcaagtaggtaacataaaggcagtcgtaaatatcaccagtgataagtgctacgacaatcgtgagtgggtgtggggctatcgtgagaacgaacccatgggagggtacgatccatactctaatagtaaaggttgtgcagaattagtcgcgtctgcattccggaactcattcttcaatcctgcaaattatgagcaacatggcgttggtttggcgtctgtgagggctggtaatgtcataggcggaggcgattgggctaaagaccgtttaattcccgatattctgcgctcatttgaaaataaccagcaggttattattcgaaacccatattctatccgtccctggcagcatgtactggagcctctttctggttacattgtggtggcgcaacgcttatatacagaaggtgctaagttttctgaaggatggaatttcggcccgcgtgatgaagatgcgaagacggtcgaatttattgttgacaagatggtcacgctttggggtgatgatgcaagctggttactggatggtgagaatcatcctcatgaggcacattacctgaaactggattgctctaaagcaaatatgcaattaggatggcatccgcgttggggattgactgaaacacttggtcgcatcgtaaaatggcataaagcatggattcgcggcgaagatatgttgatttgttcaaagcgtgaaatcagcgactatatgtctgcaactactcgttaa

SEQ ID NO: 73030 - protein, 359 aa, Salmonella typhimurium
MIDKNFWQGKRVFVTGHTGFKGSWLSLWLTEMGAIVKGYALDAPTVPSLFEIVRLNDLMESHIGDIRDFEKLRNSIAEFKPEIVFHMAAQPLVRLSYEQPIETYSTNVMGTVHLLETVKQVGNIKAVVNITSDKCYDNREWVWGYRENEPMGGYDPYSNSKGCAELVASAFRNSFFNPANYEQHGVGLASVRAGNVIGGGDWAKDRLIPDILRSFENNQQVIIRNPYSIRPWQHVLEPLSGYIVVAQRLYTEGAKFSEGWNFGPRDEDAKTVEFIVDKMVTLWGDDASWLLDGENHPHEAHYLKLDCSKANMQLGWHPRWGLTETLGRIVKWHKAWIRGEDMLICSKREISDYMSATTR

SEQ ID NO: 73031 - DNA, 20 bp, Artificial sequence
  primer
atggaaacaatggtgacatc

SEQ ID NO: 73032 - DNA, 20 bp, Artificial sequence
  primer
tcatactcgcgtctcatgtg

SEQ ID NO: 73033 - protein, 368 aa, Artificial sequence
  consensus sequence
  Variant (2)..(3): Xaa in position 2 to 3 is any amino acid
  Variant (6)..(6): Xaa in position 6 is any amino acid
  Variant (10)..(10): Xaa in position 10 is any amino acid
  Variant (12)..(12): Xaa in position 12 is any amino acid
  Variant (15)..(17): Xaa in position 15 to 17 is any amino acid
  Variant (19)..(20): Xaa in position 19 to 20 is any amino acid
  Variant (21)..(21): Xaa in position 21 is any or no amino acid
  Variant (24)..(24): Xaa in position 24 is any amino acid
  Variant (26)..(26): Xaa in position 26 is any amino acid
  Variant (28)..(51): Xaa in position 28 to 51 is any amino acid
  Variant (52)..(60): Xaa in position 52 to 60 is any or no amino acid
  Variant (62)..(76): Xaa in position 62 to 76 is any amino acid
  Variant (78)..(80): Xaa in position 78 to 80 is any amino acid
  Variant (81)..(81): Xaa in position 81 is any or no amino acid
  Variant (83)..(83): Xaa in position 83 is any amino acid
  Variant (87)..(88): Xaa in position 87 to 88 is any amino acid
  Variant (90)..(91): Xaa in position 90 to 91 is any amino acid
  Variant (94)..(95): Xaa in position 94 to 95 is any amino acid
  Variant (97)..(98): Xaa in position 97 to 98 is any amino acid
  Variant (100)..(102): Xaa in position 100 to 102 is any amino acid
  Variant (104)..(105): Xaa in position 104 to 105 is any amino acid
  Variant (108)..(110): Xaa in position 108 to 110 is any amino acid
  Variant (112)..(127): Xaa in position 112 to 127 is any amino acid
  Variant (128)..(136): Xaa in position 128 to 136 is any or no amino acid
  Variant (139)..(139): Xaa in position 139 is any amino acid
  Variant (141)..(149): Xaa in position 141 to 149 is any amino acid
  Variant (150)..(151): Xaa in position 150 to 151 is any or no amino acid
  Variant (153)..(157): Xaa in position 153 to 157 is any amino acid
  Variant (159)..(160): Xaa in position 159 to 160 is any amino acid
  Variant (164)..(164): Xaa in position 164 is any amino acid
  Variant (167)..(187): Xaa in position 167 to 187 is any amino acid
  Variant (188)..(196): Xaa in position 188 to 196 is any or no amino acid
  Variant (198)..(198): Xaa in position 198 is any amino acid
  Variant (201)..(201): Xaa in position 201 is any amino acid
  Variant (207)..(209): Xaa in position 207 to 209 is any amino acid
  Variant (210)..(210): Xaa in position 210 is any or no amino acid
  Variant (212)..(213): Xaa in position 212 to 213 is any amino acid
  Variant (215)..(228): Xaa in position 215 to 228 is any amino acid
  Variant (230)..(234): Xaa in position 230 to 234 is any amino acid
  Variant (235)..(243): Xaa in position 235 to 243 is any or no amino acid
  Variant (247)..(247): Xaa in position 247 is any amino acid
  Variant (251)..(254): Xaa in position 251 to 254 is any amino acid
  Variant (257)..(269): Xaa in position 257 to 269 is any amino acid
  Variant (270)..(287): Xaa in position 270 to 287 is any or no amino acid
  Variant (289)..(289): Xaa in position 289 is any amino acid
  Variant (291)..(296): Xaa in position 291 to 296 is any amino acid
  Variant (297)..(299): Xaa in position 297 to 299 is any or no amino acid
  Variant (301)..(323): Xaa in position 301 to 323 is any amino acid
  Variant (324)..(334): Xaa in position 324 to 334 is any or no amino acid
  Variant (336)..(338): Xaa in position 336 to 338 is any amino acid
  Variant (340)..(340): Xaa in position 340 is any amino acid
  Variant (342)..(349): Xaa in position 342 to 349 is any amino acid
  Variant (351)..(351): Xaa in position 351 is any amino acid
  Variant (353)..(367): Xaa in position 353 to 367 is any amino acid
VXXTGXTGFXGXWLXXXLXXXGAXVXGXXXXXXXXXXXXXXXXXXXXXXXXXXXXXXXXXDXXXXXXXXXXXXXXXPXXXXHXAAQXXVXXSYXXPXXTXXXNXXGTXXXLXXXXXXXXXXXXXXXXXXXXXXXXXDKXYXXXXXXXXXXXEXXXXXGXXPYSXSKXXXXXXXXXXXXXXXXXXXXXXXXXXXXXXRXGNXIGGGDXXXXRXXPXXXXXXXXXXXXXXRXXXXXXXXXXXXXXRPWXHVLXXXXGYXXXXXXXXXXXXXXXXXXXXXXXXXXXXXXXNXGXXXXXXXXXVXXXXXXXXXXXXXXXXXXXXXXXXXXXXXXXXXXEXXXLXLXXXXXXXXLXWXXXXXXXXXXXXXXXW

SEQ ID NO: 73034 - protein, 20 aa, Artificial sequence
  protein pattern
  Variant (2)..(2): Xaa in position 2 is Asp, Glu, Gln, Arg or Ser
  Variant (3)..(3): Xaa in position 3 is any amino acid
  Variant (4)..(4): Xaa in position 4 is Ile, Leu or Val
  Variant (5)..(5): Xaa in position 5 is Phe, Ile, Leu or Val
  Variant (7)..(7): Xaa in position 7 is Phe, Leu or Met
  Variant (10)..(10): Xaa in position 10 is Glu or Gln
  Variant (11)..(11): Xaa in position 11 is Ala, Pro or Ser
  Variant (12)..(12): Xaa in position 12 is any amino acid
  Variant (14)..(15): Xaa in position 14 to 15 is any amino acid
  Variant (16)..(16): Xaa in position 16 is Gly or Ser
  Variant (17)..(19): Xaa in position 17 to 19 is any amino acid
PXXXXHXAAXXXVXXXXXXP

SEQ ID NO: 73035 - protein, 13 aa, Artificial sequence
  protein pattern
  Variant (2)..(2): Xaa in position 2 is any amino acid
  Variant (3)..(3): Xaa in position 3 is Ile, Leu or Val
  Variant (4)..(4): Xaa in position 4 is Ser or Thr
  Variant (5)..(5): Xaa in position 5 is Cys or Gly
  Variant (6)..(6): Xaa in position 6 is any amino acid
  Variant (9)..(9): Xaa in position 9 is Phe or Leu
  Variant (10)..(10): Xaa in position 10 is any amino acid
  Variant (12)..(12): Xaa in position 12 is Ala, Gly or Ser
VXXXXXTGXXGXW

SEQ ID NO: 73036 - protein, 26 aa, Artificial sequence
  protein pattern
  Variant (2)..(5): Xaa in position 2 to 5 is any amino acid
  Variant (6)..(6): Xaa in position 6 is any or no amino acid
  Variant (8)..(9): Xaa in position 8 to 9 is any amino acid
  Variant (10)..(10): Xaa in position 10 is any or no amino acid
  Variant (13)..(13): Xaa in position 13 is Asp or Ser
  Variant (14)..(14): Xaa in position 14 is Ala, Gly, Asn, Ser or Val
  Variant (17)..(17): Xaa in position 17 is any amino acid
  Variant (18)..(18): Xaa in position 18 is Ala, Cys, Gly or Ser
  Variant (19)..(19): Xaa in position 19 is any amino acid
  Variant (20)..(20): Xaa in position 20 is Asp or Glu
  Variant (21)..(21): Xaa in position 21 is any amino acid
  Variant (22)..(22): Xaa in position 22 is Ala, Ile, Leu or Val
  Variant (23)..(24): Xaa in position 23 to 24 is any amino acid
  Variant (25)..(25): Xaa in position 25 is Ala, Ser or Thr
  Variant (26)..(26): Xaa in position 26 is Phe, Trp or Tyr
EXXXXXGXXXPYXXSKXXXXXXXXXX

SEQ ID NO: 73037 - protein, 20 aa, Artificial sequence
  protein pattern
  Variant (2)..(2): Xaa in position 2 is Ala, Cys or Gly
  Variant (5)..(5): Xaa in position 5 is Phe, Ile or Val
  Variant (6)..(6): Xaa in position 6 is any amino acid
  Variant (8)..(8): Xaa in position 8 is any or no amino acid
  Variant (10)..(10): Xaa in position 10 is any or no amino acid
  Variant (12)..(12): Xaa in position 12 is any amino acid
  Variant (13)..(13): Xaa in position 13 is Ala, Gly, Asn or Ser
  Variant (14)..(15): Xaa in position 14 to 15 is any amino acid
  Variant (17)..(17): Xaa in position 17 is Ile, Leu or Val
  Variant (18)..(18): Xaa in position 18 is Phe, Ile or Val
  Variant (20)..(20): Xaa in position 20 is Asp, Gly or Asn
RXGNXXGXGXDXXXXRXXPX

SEQ ID NO: 73038 - DNA, 831 bp, Azotobacter vinelandii
  CDS (1)..(831): transl_table=11
atgaacaagtacgaaggccgctggaagaccgtgattgtggagatcgagggtggtatcgcctgggtcaccctgaaccgcccggacaagcgcaatgccatgagcccgacgctcaaccgcgagatgcgcgatgtgctggaaaccctggagcaggaccccgcggccagggtgctggtgctgaccggcgccggcagcgcctggaccgccggcatggacctcaaggaatacttccgcgaggtcgacgccggtcccgagatcctccaggagaagatccgccgcgaagcctgcgaatggcagtggaaacttctgcgcatgtacgccaagccgaccgtcgccatggtcaacggctggtgcttcggcggcggcttcagcccgctggtggcctgcgacctggcgatctgcgccgacgaggcgaccttcggcctgtcggaaatcaactggggcatcccgcccggcaacctggtcagcaaggccatggccgacaccgtcggccaccgccaggcgctctactacatcatgaccggcaagaccttcgacggccgccaggcggcagagatgggcctggtcaaccagagcgtgccgctggcgcagctgcgcgagacggtagcgaccctctgccaggacctgctggacaagaacccggtggtgctgcgcgcggcgaagaacggcttcaagcgctgccgcgaactgacctgggaacagaacgaggactacctgtacgccaagctcgaccagtcgcgcctgctcgacgaagagggcgggcgcgaggagggcatgcgccagttcctcgacgagaagagcatcaagccgggcctgcaagcctacaagcgctga

SEQ ID NO: 73039 - protein, 276 aa, Azotobacter vinelandii
MNKYEGRWKTVIVEIEGGIAWVTLNRPDKRNAMSPTLNREMRDVLETLEQDPAARVLVLTGAGSAWTAGMDLKEYFREVDAGPEILQEKIRREACEWQWKLLRMYAKPTVAMVNGWCFGGGFSPLVACDLAICADEATFGLSEINWGIPPGNLVSKAMADTVGHRQALYYIMTGKTFDGRQAAEMGLVNQSVPLAQLRETVATLCQDLLDKNPVVLRAAKNGFKRCRELTWEQNEDYLYAKLDQSRLLDEEGGREEGMRQFLDEKSIKPGLQAYKR

SEQ ID NO: 73040 - DNA, 831 bp, Pseudomonas putida
  CDS (1)..(831): transl_table=11
atgagcacatacgaaggtcgctgggctaccgtgaaggtcgaactggagtcgggcattgcctgggtcaccctcaaccggccggaaaagcgcaatgcaatgagccccacgctgaaccgggaaatggtcgacgtgctggaaaccctggaacaggacggcgaagccggggtgctcgtgctgaccggcgcgggtgaatcgtggacggcaggcatggacctgaaggaatacttccgtgaggtggacgccggcccggaaatcctccaggaaaaaatccgccgcgatgcctcgcaatggcaatggaggctgctgcgcatgtacgccaagccgactatcgccatggtcaacggctggtgctttggcggcggcttcagcccgctggtggcctgcgacctggccatctgtgccgacgaggccacctttggcctgtcggaaatcaactggggcatcccaccgggcaacctggtcagcaaagccatggccgataccgttggccaccgccagtcgctgtactacatcatgaccggcaagactttcggcgggcctaaagctgccgagatggggctggttaacgagagcgtgccgctggcgcaattgcgcgacgtcacccgcgaactggcgctcaacctgctggaaaagaacccggtggtgctgcgtgcggccaagaacggtttcaagcgctgccgcgaactgacctgggagcagaacgaagactacctgtacgccaagctcgaccagtcccgtctgctggacaccgaaggtgggcgcgagcagggcatgaagcagttcctcgacgacaagagcatcaagccaggcctgcaagccatcaagcgctga

SEQ ID NO: 73041 - protein, 276 aa, Pseudomonas putida
MSTYEGRWATVKVELESGIAWVTLNRPEKRNAMSPTLNREMVDVLETLEQDGEAGVLVLTGAGESWTAGMDLKEYFREVDAGPEILQEKIRRDASQWQWRLLRMYAKPTIAMVNGWCFGGGFSPLVACDLAICADEATFGLSEINWGIPPGNLVSKAMADTVGHRQSLYYIMTGKTFGGPKAAEMGLVNESVPLAQLRDVTRELALNLLEKNPVVLRAAKNGFKRCRELTWEQNEDYLYAKLDQSRLLDTEGGREQGMKQFLDDKSIKPGLQAIKR

SEQ ID NO: 73042 - DNA, 816 bp, Mesorhizobium loti MAFF303099
  CDS (1)..(816): transl_table=11
atgaccgatgagaccgttgccttcgatgtcgatgacggcatcgcctgggtgcgcttcaaccgcccggacaagcgcaattgcatgaacccggcgctcaaccggcgcatgatggaggtcctcgatgaactcgagtatcgcgccgatgtcggcgttctggtgctgtcgggcgaaggcagcgcctggtcggcgggcatggacctcaaggagtatttccgcgagaccgaagccaaggggctcggcgccgtccgcaaggcgcaagcggaagcctatggctggtggcggcgcctgcgctggtacggcaagccgaccatcgccatggtcaatggctggtgtttcggcggcggctatggcccgctcttcgcctgcgacctcgccttcgccgccgacgaggcgcagttcgctctgtccgagatcaactggggcatcctgcccggcggcggcgccaccaaggtggtggtcgacctcctgtcgatgcgtgacgccatgtaccacgccctgaccggcgaactcatcgacggcaggaaagccgccgcttggaaattggtcaatgaaagcctgccgctggcggagctgaaggcgcgggtcaccgaggtagccaacatcctcttgaagaagaacccgatcgcactgaaggcgaccaaggacgccatccgccgcgtcggcgaaatgacctatgacaatgccgaggactatctggtgcgggcgcaggaggcggccaactcgcacgacaatgagggccgcaaggaaggcattcgccagttcatcgacgaaaagagctacaagccaggtctcggcgcttacgacaaggccagatga

SEQ ID NO: 73043 - protein, 271 aa, Mesorhizobium loti MAFF303099
MTDETVAFDVDDGIAWVRFNRPDKRNCMNPALNRRMMEVLDELEYRADVGVLVLSGEGSAWSAGMDLKEYFRETEAKGLGAVRKAQAEAYGWWRRLRWYGKPTIAMVNGWCFGGGYGPLFACDLAFAADEAQFALSEINWGILPGGGATKVVVDLLSMRDAMYHALTGELIDGRKAAAWKLVNESLPLAELKARVTEVANILLKKNPIALKATKDAIRRVGEMTYDNAEDYLVRAQEAANSHDNEGRKEGIRQFIDEKSYKPGLGAYDKAR

SEQ ID NO: 73044 - DNA, 894 bp, Escherichia coli O157:H7 EDL933; identical to SEQ ID NO: 28768
  CDS (1)..(894): transl_table=11

SEQ ID NO: 73045 - protein, 297 aa, Escherichia coli O157:H7 EDL933; identical to SEQ ID NO: 28769

SEQ ID NO: 73046 - DNA, 858 bp, Escherichia coli O157:H7 EDL933; identical to SEQ ID NO: 28770
  CDS (1)..(858): transl_table=11
  misc_feature (49)..(49): n is a, g, c or t
  misc_feature (184)..(184): r is g or a

SEQ ID NO: 73047 - protein, 285 aa, Escherichia coli O157:H7 EDL933; identical to SEQ ID NO: 28771
  misc_feature (17)..(17): The Xaa at location 17 stands for Asn, Asp, His, or Tyr.

SEQ ID NO: 73048 - DNA, 867 bp, Agrobacterium tumefaciens str. C58; identical to SEQ ID NO: 28776
  CDS (1)..(867): transl_table=11

SEQ ID NO: 73049 - protein, 288 aa, Agrobacterium tumefaciens str. C58; identical to SEQ ID NO: 28777

SEQ ID NO: 73050 - DNA, 843 bp, Agrobacterium tumefaciens str. C58; identical to SEQ ID NO: 28778
  CDS (1)..(843): transl_table=11

SEQ ID NO: 73051 - protein, 280 aa, Agrobacterium tumefaciens str. C58; identical to SEQ ID NO: 28779

SEQ ID NO: 73052 - DNA, 894 bp, Escherichia coli K12; identical to SEQ ID NO: 28784
  CDS (1)..(894): transl_table=11

SEQ ID NO: 73053 - protein, 297 aa, Escherichia coli K12; identical to SEQ ID NO: 28785

SEQ ID NO: 73054 - DNA, 828 bp, Caulobacter crescentus CB15
  CDS (1)..(828): transl_table=11
atgacagacgccaacgacaccgcgacctatcgggtcgagaaccgcatcgcctgggtgaagttcaatcgccccgataagcgcaactgcatgagccccaccctgaaccgtcgcatgatggaggtgctggatgagctggagttccgtgacgacgtcggcgtcctggtcctgaccggcgaaggctcggcctggtcggcgggcatggacctgaaggagtacttccgcgaaaccgaggccaagggtctgggcgctacgcgtcaggctcagcgcgagtcctacggctggtggcgtcgcctgcgctggtaccagaagccgacgatcgccatggtcaacggctggtgctttggcggcggctatggcccgctgtactcgtgcgacctggcgatcgccgccgacgaggctcagttcgccctgtcggagatcaactggggcatcctgccgggcggcggcgcaaccaaggtcgtggtcgaccttatgccgctgcgcgacgccatgtaccacgccatgaccggcgagctgatcgatggccggaaggccgccgcctggcgcctggtcaacgagagcgtgccgctggagcgcctggaggcgcgcgtgcgcgagctggccgaggtgctgttgaaaaagaacccggtggccctgaaggccaccaaggacgccgtccgacgtgttaaggaaatgaactacgacaacgccgaggactacctggtccgggcccaggaggcggccaactccttcgacaacgacggtcgcaaggagggcatcaagcagttcatcgacgacaagacctacaagcccggcctgggcgcctacgatctggccaagcagagctga

SEQ ID NO: 73055 - protein, 275 aa, Caulobacter crescentus CB15
MTDANDTATYRVENRIAWVKFNRPDKRNCMSPTLNRRMMEVLDELEFRDDVGVLVLTGEGSAWSAGMDLKEYFRETEAKGLGATRQAQRESYGWWRRLRWYQKPTIAMVNGWCFGGGYGPLYSCDLAIAADEAQFALSEINWGILPGGGATKVVVDLMPLRDAMYHAMTGELIDGRKAAAWRLVNESVPLERLEARVRELAEVLLKKNPVALKATKDAVRRVKEMNYDNAEDYLVRAQEAANSFDNDGRKEGIKQFIDDKTYKPGLGAYDLAKQS

SEQ ID NO: 73056 - DNA, 858 bp, Salmonella typhimurium LT2; identical to SEQ ID NO: 28790
  CDS (1)..(858): transl_table=11

SEQ ID NO: 73057 - protein, 285 aa, Salmonella typhimurium LT2; identical to SEQ ID NO: 28791

SEQ ID NO: 73058 - DNA, 795 bp, Ralstonia solanacearum GMI1000
  CDS (1)..(795): transl_table=11
atgaacgccttcgagaccctcgccttcgcacagcacggcgccgtggctacggtcacgctcaaccggccggacgtgcgcaacgccttcaacgagaccgtcatcgccgagctgaccggggcgttccacgccctggccacggaagacagcgtgcgcgccatcgtgctggccggccacggcccggccttctgcgcgggcgcggacctgaactggatgcggaagatggccggctactccgacgacgaaaaccgcgccgatgccctgcgcctggccgagatgctgcgcgccatccacgcctgcccgaagcccgtggtcgcccgcgtgcacggcgacacctacgcgggcggcgttggcctggtgtcggcctgcgacatcgtcgtagcggcggataccgcacacttctgcctgtcggaggccaggctcggcctgattccggctactatcagcccctacgtgatccgcgcgctgggcgaacaggcctcgcgccgctacttcatcaccgccgagcgcttcaccgcggccgaggcgcaccgcctgggcctcgtccatgaactggcgggcgccgaggcgctggacgccacggtggacgcgctcaccgccgcgctggtggccaacagccccaacgcggtgcgggaaagcaagcggctggtgcgcgagatcgccagcgcgccgatcgacgacgcgctgctggccgacaccgccaaccgcatcgccgccatccgcgcctccaccgaaggccgcgaaggcgtgcagagtttcctgggcaagcgcaaaccgaactggctgctgccggcctga

SEQ ID NO: 73059 - protein, 264 aa, Ralstonia solanacearum GMI1000
MNAFETLAFAQHGAVATVTLNRPDVRNAFNETVIAELTGAFHALATEDSVRAIVLAGHGPAFCAGADLNWMRKMAGYSDDENRADALRLAEMLRAIHACPKPVVARVHGDTYAGGVGLVSACDIVVAADTAHFCLSEARLGLIPATISPYVIRALGEQASRRYFITAERFTAAEAHRLGLVHELAGAEALDATVDALTAALVANSPNAVRESKRLVREIASAPIDDALLADTANRIAAIRASTEGREGVQSFLGKRKPNWLLPA

SEQ ID NO: 73060 - DNA, 834 bp, Ralstonia solanacearum GMI1000
  CDS (1)..(834): transl_table=11
atggccacatacgaaggtcgctggaacaccgtcaaggtggatgtcgaagacgggattgcctgggtgaccctcaaccgcccggacaagcgcaacgcgatgagtccgacgctcaaccgcgagatgatcgacgtgctggagacgctcgagctcgacggcgacgcgcaggtgctggtgctgaccggcgcgggcgaatcctggtcggccggcatggacctgaaggagtacttccgcgagaccgacggccagcccgagatcatgcaggagcgcatccgccgcgattgctcgcagtggcagtggaagctgctgcgcttctactccaagccgaccatcgccatggtcaacggctggtgcttcggcggcgcattctcgccgctggtggcctgcgatctggcgatcgcggcggacgacgccgtgttcggcctgtccgagatcaactggggcattccgccgggcaacctggtgagcaaggccgtggccgacaccatgggccatcgcgccgcgctgcactacatcatgacgggcgagaccttcaccggccgcgaagccgccgagatggggctcgtcaaccggagcgtgccgcgcgagcgcctgcgcgaggccgtgaccgaactggccggcaagctgctcgccaagaacccggtggtgctgcgctatgccaagcacggcttcaagcgctgccgcgagctgtcgtgggagcagaacgaggactacctgtacgccaaggtggaccagtccaaccatcgcgatccggagaaggggcgccagcacggcctgaagcagttcctcgacgacaagaccatcaagccgggcctgcagacctacaagcgcgcctga

SEQ ID NO: 73061 - protein, 277 aa, Ralstonia solanacearum GMI1000
MATYEGRWNTVKVDVEDGIAWVTLNRPDKRNAMSPTLNREMIDVLETLELDGDAQVLVLTGAGESWSAGMDLKEYFRETDGQPEIMQERIRRDCSQWQWKLLRFYSKPTIAMVNGWCFGGAFSPLVACDLAIAADDAVFGLSEINWGIPPGNLVSKAVADTMGHRAALHYIMTGETFTGREAAEMGLVNRSVPRERLREAVTELAGKLLAKNPVVLRYAKHGFKRCRELSWEQNEDYLYAKVDQSNHRDPEKGRQHGLKQFLDDKTIKPGLQTYKRA

SEQ ID NO: 73062 - DNA, 762 bp, Agrobacterium tumefaciens str. C58; identical to SEQ ID NO: 28794
  CDS (1)..(762): transl_table=11

SEQ ID NO: 73063 - protein, 253 aa, Agrobacterium tumefaciens str. C58; identical to SEQ ID NO: 28795

SEQ ID NO: 73064 - DNA, 777 bp, Agrobacterium tumefaciens str. C58; identical to SEQ ID NO: 28798
  CDS (1)..(777): transl_table=11

SEQ ID NO: 73065 - protein, 258 aa, Agrobacterium tumefaciens str. C58; identical to SEQ ID NO: 28799

SEQ ID NO: 73066 - DNA, 807 bp, Streptomyces coelicolor A3(2); identical to SEQ ID NO: 28812
  CDS (1)..(807): transl_table=11

SEQ ID NO: 73067 - protein, 268 aa, Streptomyces coelicolor A3(2); identical to SEQ ID NO: 28813

SEQ ID NO: 73068 - DNA, 744 bp, Streptomyces coelicolor A3(2); identical to SEQ ID NO: 28814
  CDS (1)..(744): transl_table=11

SEQ ID NO: 73069 - protein, 247 aa, Streptomyces coelicolor A3(2); identical to SEQ ID NO: 28815

SEQ ID NO: 73070 - DNA, 768 bp, Streptomyces coelicolor A3(2); identical to SEQ ID NO: 28820
  CDS (1)..(768): transl_table=11

SEQ ID NO: 73071 - protein, 255 aa, Streptomyces coelicolor A3(2); identical to SEQ ID NO: 28821

SEQ ID NO: 73072 - DNA, 828 bp, Xanthomonas campestris pv. campestris str. ATCC 33913
  CDS (1)..(828): transl_table=11
ttgaacgagcatgacgtggtatcggtgcatgtggaaaaccgcattgcgtgggtaaagtttgcgcggccggacaagcgcaacgcgatgagcccggcgctcaatcgccgcatgctggacgtgctggacgagctggaattcgacgacaacgtcggcgtgctggtgcttggtggcgaaggtaccgcgtggtcggccggcatggacctgaaggaatactttcgcgagaccgaagcacaaggcctgcgcggcgtgcgccgatcgcaacgcgaatcctatggctggttccgccggctgcgctggtaccaaaaacccaccatcgccatggtcaacgggtggtgtttcggcggcggcttcggcccgttgttcgcctgcgacctggccatcgccgccgacgaggcgcaattcggcctgtcggaaatcaactggggcatcctgcccggtggcggcgtcaccaaggtggcggtggaattgctctccatgcgcgatgcgatgtggatgacgctcaccggcgaactggtcgacggcaggaaggccgccgaatggcgcctggtcaacgaaagcgtgccgttggaacggttggaaacacgtacgcgcgaagtggccgagttgctgctcaagaaaaatccggtagcgctgaaatatgccaaggatgcggtgcgtcgcgtcggcaccatgacctacgacgaagccgaagactatctggtacgcatgcaggaagcggccaactcgttcgacaacaacgcgcgcaaggaaggcatccgtcagttcatcgatgaaaagcgttacaagcccggtctgggtgcgtacgagccggacgccggcaccaactga

SEQ ID NO: 73073 - protein, 275 aa, Xanthomonas campestris pv. campestris str. ATCC 33913
MNEHDVVSVHVENRIAWVKFARPDKRNAMSPALNRRMLDVLDELEFDDNVGVLVLGGEGTAWSAGMDLKEYFRETEAQGLRGVRRSQRESYGWFRRLRWYQKPTIAMVNGWCFGGGFGPLFACDLAIAADEAQFGLSEINWGILPGGGVTKVAVELLSMRDAMWMTLTGELVDGRKAAEWRLVNESVPLERLETRTREVAELLLKKNPVALKYAKDAVRRVGTMTYDEAEDYLVRMQEAANSFDNNARKEGIRQFIDEKRYKPGLGAYEPDAGTN

SEQ ID NO: 73074 - DNA, 828 bp, Xanthomonas axonopodis pv. citri str. 306
  CDS (1)..(828): transl_table=11
ttgaacgagcatgacgtggtatcggttcgcatcgaaaaccgcatcgcctgggtgaagttcgctcgcccagacaagcgcaatgcgatgagcccggcgctcaaccgccgcatgatggacgtgctggacgagctggaattcgacgacaacgtcggcgtgctggtgctcggcggcgaaggcaccgcctggtcggcgggcatggacctgaaggaatatttccgcgaaaccgaagcgcagggcctgcgcggcgtgcggcgctcgcagcgtgaatcgtatggctggttccgtcgcctgcgctggtatcagaagccgaccatcgccatggtcaacgggtggtgcttcggtggcggcttcggcccgctgttcgcctgcgacctggcgattgccgccgatgaggcgcagttcggcctgtcggaaatcaactggggcatcctgcccggtggtggcgtcaccaaggtcgcggtggaactgctgtcgatgcgcgatgcgatgtggatgacgctgaccggcgaaatggtggatggcaagaaggcggccgagtggcgcctggtcaacgaaagcgtgcccctggaacgcctggaagcccgcacccgcgaggtggccgaactgctgctgcgcaagaacccggtcgcgctcaagtacgccaaggatgcggtgcgccgcgtcggcaccatgacttacgacgaagccgaagattacctggtacgcatgcaggaagcggccaactcgttcgacaacaacgcccgcaaggaaggcattcgtcagttcatcgacgagaagagctacaagcccggcctgggcgagtacgacctcagcaaacacagcgcgtaa

SEQ ID NO: 73075 - protein, 275 aa, Xanthomonas axonopodis pv. citri str. 306
MNEHDVVSVRIENRIAWVKFARPDKRNAMSPALNRRMMDVLDELEFDDNVGVLVLGGEGTAWSAGMDLKEYFRETEAQGLRGVRRSQRESYGWFRRLRWYQKPTIAMVNGWCFGGGFGPLFACDLAIAADEAQFGLSEINWGILPGGGVTKVAVELLSMRDAMWMTLTGEMVDGKKAAEWRLVNESVPLERLEARTREVAELLLRKNPVALKYAKDAVRRVGTMTYDEAEDYLVRMQEAANSFDNNARKEGIRQFIDEKSYKPGLGEYDLSKHSA

SEQ ID NO: 73076 - DNA, 774 bp, Pseudomonas putida KT2440; identical to SEQ ID NO: 28830
  CDS (1)..(774): transl_table=11

SEQ ID NO: 73077 - protein, 257 aa, Pseudomonas putida KT2440; identical to SEQ ID NO: 28831

SEQ ID NO: 73078 - DNA, 792 bp, Pseudomonas putida KT2440; identical to SEQ ID NO: 28832
  CDS (1)..(792): transl_table=11

SEQ ID NO: 73079 - protein, 263 aa, Pseudomonas putida KT2440; identical to SEQ ID NO: 28833

SEQ ID NO: 73080 - DNA, 774 bp, Pseudomonas putida KT2440; identical to SEQ ID NO: 28834
  CDS (1)..(774): transl_table=11

SEQ ID NO: 73081 - protein, 257 aa, Pseudomonas putida KT2440; identical to SEQ ID NO: 28835

SEQ ID NO: 73082 - DNA, 831 bp, Pseudomonas putida KT2440; identical to SEQ ID NO: 28836
  CDS (1)..(831): transl_table=11

SEQ ID NO: 73083 - protein, 276 aa, Pseudomonas putida KT2440; identical to SEQ ID NO: 28837

SEQ ID NO: 73084 - DNA, 816 bp, Pseudomonas putida KT2440
  CDS (1)..(816): transl_table=11
atgagcgatttcagcaccctcgaagtgatccgcgacccgcgcggcttcgccaccctgtggttaagccgtgaggacaagaacaacgccttcaatgcgcagatgatccgcgagctgatcgtggccatcgaccagttggccgaagacgccagcctgcgctttgtgctgctgcgcggccgtggccggcacttcagcgccggtgccgacctggcctggatgcagcagtcggcgcaactggacttcaacaccaacctggatgatgcccacgaactgggcgagctgatgtacgccctgcatcgcctcaaggccccgaccctggccgtggtgcaaggtgcagcctttggcggcgcgctgggcctgatcagctgctgcgacatggccatcggcgccgaagacgcccaactgtgcctgtcggaagtacgcatcggcctggccccggcggtcatcagcccgttcgtggtcaaggccattggcgaacgcgccgcgcgccgctacgccctcaccgccgagcgtttcactggcgtgcgcgcacgcgagctgggcctgctggccgaggtgtacccggccagcgaactggacgaccacgtcgaagcctgggtaagcaacctgctgcagaacagcccgcaagcattgcgcgccaccaaggacttgctgcgcgaagtggacgacggcgaactcagcccggccctgcgccgttactgcgaaaacaccatcgcccgtatccgcgtcagcgccgaaggccaggagggcctgcgcgctttcctggaaaaacgccgccctgcctggcaaaccgttgacaagaaggagccgcgcccatga

SEQ ID NO: 73085 - protein, 271 aa, Pseudomonas putida KT2440
MSDFSTLEVIRDPRGFATLWLSREDKNNAFNAQMIRELIVAIDQLAEDASLRFVLLRGRGRHFSAGADLAWMQQSAQLDFNTNLDDAHELGELMYALHRLKAPTLAVVQGAAFGGALGLISCCDMAIGAEDAQLCLSEVRIGLAPAVISPFVVKAIGERAARRYALTAERFTGVRARELGLLAEVYPASELDDHVEAWVSNLLQNSPQALRATKDLLREVDDGELSPALRRYCENTIARIRVSAEGQEGLRAFLEKRRPAWQTVDKKEPRP

SEQ ID NO: 73086 - DNA, 831 bp, Pseudomonas syringae pv. tomato str. DC3000
  CDS (1)..(831): transl_table=11
atgagcaagtacgaaggtcgctggacaaccgtcaaggtcgagatcgagcaaggcatcgcgtgggtcatcctcaaccgaccggaaaaacgcaacgcaatgagccccacgctcaatcgcgaaatgatcgatgtgctggaaacactggaacaggaccccgaggccggtgtgctggtgctgaccggtgccggtgaagcctggaccgctggcatggaccttaaggaatactttcgcgaagtggacgccggcccggaaattcttcaggagaagattcgtcgcgaagcatcccaatggcaatggaagctgctgcgcatgtacgccaaacccaccatcgccatggtcaatggctggtgtttcggcggtggcttcagcccgctggtggcgtgcgatctggcgatctgtgccgacgaggcgacgttcgggctgtcggaaatcaactggggcattccgcctggcaacctggtgagcaaggcgatggccgacaccgtgggccatcgccagtcgttgtactacatcatgaccggcaagaccttcgacggtaaaaaagccgccgaaatggggctggtcaatgaaagtgtgccgctggcacaactgcgccaggtgaccatcgacctggccctcaatctgctggaaaagaacccggttgtcctgcgtgccgccaagcatggcttcaagcgttgccgcgaactgacctgggaacagaacgaagattacctgtacgccaaactcgaccagtcgcgcctgctggacaaggaaggcggccgcgagcagggcatgaagcagttcctcgacgacaagagcatcaagccagggctggaagcgtataagcggtag

SEQ ID NO: 73087 - protein, 276 aa, Pseudomonas syringae pv. tomato str. DC3000
MSKYEGRWTTVKVEIEQGIAWVILNRPEKRNAMSPTLNREMIDVLETLEQDPEAGVLVLTGAGEAWTAGMDLKEYFREVDAGPEILQEKIRREASQWQWKLLRMYAKPTIAMVNGWCFGGGFSPLVACDLAICADEATFGLSEINWGIPPGNLVSKAMADTVGHRQSLYYIMTGKTFDGKKAAEMGLVNESVPLAQLRQVTIDLALNLLEKNPVVLRAAKHGFKRCRELTWEQNEDYLYAKLDQSRLLDKEGGREQGMKQFLDDKSIKPGLEAYKR

SEQ ID NO: 73088 - DNA, 789 bp, Chromobacterium violaceum ATCC 12472
  CDS (1)..(789): transl_table=11
atgagcaccgacgccgtaacgctgagcgtggacaaccgtggcatcgccaccgtcgcgctgaaccgcccgggcctgcacaatgcgctggacgacgaaaccatcagcctcttggccgccacgctggaaacgctggcggaagacgccacggtgcgcatggtggtattgaccggcagcggcatcagcttctccgccggccatgatccggagtggctgcgccggctggcggaattctccgccaacgagctgaaccgctacgcgcaacagatcgcgcggctgctgcatacgctggacacgctgcccaagccgacgctggccaaggtccagggctcggccttcggcctgggcgtggccatggtcgcctgttgcgacatcaccatcagcgcgtccgaagcgctgtacagcctcgccgacgtcaggttcggccagattcccgcgctcaccgccccctacctgatccgcgcgataggcgaacgcgccacccggcgctacagcatcaccgccgagcgcttcaacgccggcaaggccaagcggctgggcctgatccatcaggtggtggaaaacgacgagctgaacgccgcggtggagcatatggtgggccaactgctgctgaacagcccggcggcgatgcgcgccaccaagcatctgataggcgagatcggcaagcaggagatcacgccccaggtgatgcagcgctgcatcgaacacagcctgacggtgcgaatgagcgacgaagggcgcgaaggcatgcgcgcgctgatcgagatgcgcaagccgggctggatggaataa

SEQ ID NO: 73089 - protein, 262 aa, Chromobacterium violaceum ATCC 12472
MSTDAVTLSVDNRGIATVALNRPGLHNALDDETISLLAATLETLAEDATVRMVVLTGSGISFSAGHDPEWLRRLAEFSANELNRYAQQIARLLHTLDTLPKPTLAKVQGSAFGLGVAMVACCDITISASEALYSLADVRFGQIPALTAPYLIRAIGERATRRYSITAERFNAGKAKRLGLIHQVVENDELNAAVEHMVGQLLLNSPAAMRATKHLIGEIGKQEITPQVMQRCIEHSLTVRMSDEGREGMRALIEMRKPGWME

SEQ ID NO: 73090 - DNA, 858 bp, Photorhabdus luminescens subsp. laumondii TTO1
  CDS (1)..(858): transl_table=11
atgatttacccgagcgaagaagaactttattccccaattgtatggcaggactgctctgaagggtttgaagatattttttatcacaaatccaccgatggtatggctaaaatcaccatcaatcgcccgcaagtacgtaacgcattccgtccattgacggttaaagagatgatgcaggcgttggataatgcccgttatgatgacaatatcggtgtgattatcctgacgggtatgggtgaaaaagctttttgtgctggtggtgatcaaaaagtccgtggtgatcatggtggttataaggatgacaacggcatgcatcatctgaatgtcttggatttccagcgccaaattcgcacttgtccaaaacccgttgttgctatggttgctggatatgcgattggtggtggtcatgtactgcatttggtatgtgatctgaccattgcggctgataatgctattttcggtcagactgggcctaaagtgggctcttttgacggtggttggggggcatcttacatggcgcggattgttggtcagaaaaaggcccgtgaaatctggtttttgtgtcgtcaatatgatgctaaacaagcgttggaaatggggctggttaatacagttgtgccatatgtggatctggaaaaagagaccgttcgctggtgtcgtgagatgctgaaaaatagcccaatggccttgcgttgcttaaaagccgctctaaatgcggattgtgatggtcaatctggcttgcaagagctggcaggtaacgccaccatgcttttctatatgacagaagaaggtcaggagggacgtaatgcatttgttgagaaacgccatcctgatttcagtaaatttaaacgtaacccataa

SEQ ID NO: 73091 - protein, 285 aa, Photorhabdus luminescens subsp. laumondii TTO1
MIYPSEEELYSPIVWQDCSEGFEDIFYHKSTDGMAKITINRPQVRNAFRPLTVKEMMQALDNARYDDNIGVIILTGMGEKAFCAGGDQKVRGDHGGYKDDNGMHHLNVLDFQRQIRTCPKPVVAMVAGYAIGGGHVLHLVCDLTIAADNAIFGQTGPKVGSFDGGWGASYMARIVGQKKAREIWFLCRQYDAKQALEMGLVNTVVPYVDLEKETVRWCREMLKNSPMALRCLKAALNADCDGQSGLQELAGNATMLFYMTEEGQEGRNAFVEKRHPDFSKFKRNP

SEQ ID NO: 73092 - DNA, 780 bp, Rhodopseudomonas palustris CGA009
  CDS (1)..(780): transl_table=11
atgagcaatgacgccgtgatcatcgagaagcgcgatcaggcgctttggatcaccatcaatcgtcccgacaagcgcaacgccatcaatgccggtgtggtcgaggggattacaagcggctggaagcaggcgcatgacgacgccgaggtgcgggtgatcgtactcaccggcgccggagacaaggcgttctgcgccggcgccgacctgcaatccaccggggcggcgttctcgttcgatttctccaagccgaatgtcgactacgccgatctgttgcgattggcgcagaacgcgaccaagccctcgatcgcccgcgtcaacggcacctgcatggccggcggcatgggcctgctgtgcatgaccgacatggcggtcgcggctgacaatgtcgtgttcggcctgcccgaggtgaaggtcggggtgtttccgatgcaggtgatgagcctgttgcagaacatcgcgccgcgccggctgatcgccgaatgggcgctgaccggcgagccgttcgatgcggcgacggcgcgagaggccggattgctcaactacgtggtgccggcggctgagctcgacgccaaggtcgactggctggcgaagcggctcatcgacaaatcgccgaccgcgatccgccgcggcaaatacgcgatgcgcgcgatcgccgcgatgtcgttcgacgagagcatcgcctacaccgaaagccagatcgcgcttttggcaatgaccgaggatgccaaggaaggcctgaaggcattcgtcgagaagcgcaaaccggtgtggccggggaagtga

SEQ ID NO: 73093 - protein, 259 aa, Rhodopseudomonas palustris CGA009
MSNDAVIIEKRDQALWITINRPDKRNAINAGVVEGITSGWKQAHDDAEVRVIVLTGAGDKAFCAGADLQSTGAAFSFDFSKPNVDYADLLRLAQNATKPSIARVNGTCMAGGMGLLCMTDMAVAADNVVFGLPEVKVGVFPMQVMSLLQNIAPRRLIAEWALTGEPFDAATAREAGLLNYVVPAAELDAKVDWLAKRLIDKSPTAIRRGKYAMRAIAAMSFDESIAYTESQIALLAMTEDAKEGLKAFVEKRKPVWPGK

SEQ ID NO: 73094 - DNA, 798 bp, Bdellovibrio bacteriovorus HD100; identical to SEQ ID NO: 28870
  CDS (1)..(798): transl_table=11

SEQ ID NO: 73095 - protein, 265 aa, Bdellovibrio bacteriovorus HD100; identical to SEQ ID NO: 28871

SEQ ID NO: 73096 - DNA, 888 bp, Strongylocentrotus purpuratus
  CDS (1)..(888)
atgtctgctcttcgtcaagttttcacctctgcaagccgggctttcctggtatccagcgccagaaactctccagtagctccttctgttacaagatgtcttgcaacaggagcctatgagaacatcatcgtcgaccatgttggtgaaaagaagaatgttggtttgatcaagttaaaccgacccaaggcactgaacgctcttaaagatgatctgatgaatgaattggcactggctttagatgtttttgaggctgataaaaatgtaggtgccattgtggtgacggggagtgagaaagcatttgcagctggagctgatatcaaggagatgtcaggcttgacgtttcaggagacgctgggcgcaaacttcttagaatcttggagcagactctcaaaatccaagaaacccaccattgcagctgtcaatggctttgctcttggaggaggatgtgaggttgccatgatgtgtgacatcatctatgcaggagagaaggcatcgtttggtcagccggaaattctccttggtctcatcccaggtgctggtggaacccagaggttacccagggctgtagggaagtctctggctatggagatggttctttctggtgataggatcacagctcagcaagctctacaagcaggacttgtcagcaagatctaccctgtcgaggagctactggagaaggccatcgcgctgggtgagaagatcagtaagaactctaagctcatcaactctctttgcaaggaggccgtcaacacgagctacgaactcacactcaatgaaggcatgcactttgagaagaggctcttccacgcttgctttggaacggaggatgcaagggaaggaatgggggcatttgtaggaaagagagccgctgacttcaaggacaactga

SEQ ID NO: 73097 - protein, 295 aa, Strongylocentrotus purpuratus; identical to SEQ ID NO: 28875

SEQ ID NO: 73098 - DNA, 906 bp, Nasonia vitripennis; identical to SEQ ID NO: 28880
  CDS (1)..(906)

SEQ ID NO: 73099 - protein, 301 aa, Nasonia vitripennis; identical to SEQ ID NO: 28881

SEQ ID NO: 73100 - DNA, 900 bp, Anopheles gambiae str. PEST; identical to SEQ ID NO: 28884
  CDS (1)..(900)

SEQ ID NO: 73101 - protein, 299 aa, Anopheles gambiae str. PEST; identical to SEQ ID NO: 28885

SEQ ID NO: 73102 - DNA, 777 bp, Gibberella zeae PH-1; identical to SEQ ID NO: 28888
  CDS (1)..(777)

SEQ ID NO: 73103 - protein, 258 aa, Gibberella zeae PH-1; identical to SEQ ID NO: 28889

SEQ ID NO: 73104 - DNA, 825 bp, Ustilago maydis 521; identical to SEQ ID NO: 28916
  CDS (1)..(825)

SEQ ID NO: 73105 - protein, 274 aa, Ustilago maydis 521; identical to SEQ ID NO: 28917

SEQ ID NO: 73106 - DNA, 975 bp, Ustilago maydis 521; identical to SEQ ID NO: 28922
  CDS (1)..(975)

SEQ ID NO: 73107 - protein, 324 aa, Ustilago maydis 521; identical to SEQ ID NO: 28923

SEQ ID NO: 73108 - DNA, 852 bp, Cryptococcus neoformans var. neoformans B-3501A; identical to SEQ ID NO: 28924
  CDS (1)..(852)

SEQ ID NO: 73109 - protein, 283 aa, Cryptococcus neoformans var. neoformans B-3501A; identical to SEQ ID NO: 28925

SEQ ID NO: 73110 - DNA, 903 bp, Cryptococcus neoformans var. neoformans B-3501A; identical to SEQ ID NO: 28926
  CDS (1)..(903)

SEQ ID NO: 73111 - protein, 300 aa, Cryptococcus neoformans var. neoformans B-3501A; identical to SEQ ID NO: 28927

SEQ ID NO: 73112 - DNA, 780 bp, Bradyrhizobium sp. ORS278
  CDS (1)..(780): transl_table=11
atgaccaacgacagcgtgattctcgacaggcgcgggcaggccctctggatcaccatcaaccggcccgagaagcgcaacgcgctcaatggcgacgtcatcgccgggatctcgcgcggctatcgtcaggcgcatgacgatcccgaggtgcgcgtcatcgtgctgaccggagcgggtgacaaggcgttctgcgccggcgccgacctgcagaactcgggggccgccttcgcgatggatttctcgcggcccaatgtcgactatgccgatctgctcaggctgtcgcagaacgccaccaagccggcgatcgcccgcgtgggcggcgtctgcatggcgggcggcatgggcctgttgtgcatgaccgatatggcggtcgcggccgaccacgtcgtcttcggcctgccggaggtgaaggtcggcgtgttcccgatgcaggtgctgagcctgctgcagagcatcgcgccgccacgcctcgtcaacgaatgggctttgacgggggagccgtttgatgccaaggcggcgcaggccgccggcctgctgaaccacgtcgttcccgccgccgagctcgatgccaagatcgactggctgatcggccgtttggttgacaaatcgccgacagcgatccgccgcggcaaatacgcgatgcgcgcgatcgcctcgatgtcgttcgacgagtccattgcctatctcgaaagccagatcgcattgctggcgatgaccgaggatgccaaggaagggctgaaggctttcgcagaaaagcgtaagccggtctggccggggaagtag

SEQ ID NO: 73113 - protein, 259 aa, Bradyrhizobium sp. ORS278
MTNDSVILDRRGQALWITINRPEKRNALNGDVIAGISRGYRQAHDDPEVRVIVLTGAGDKAFCAGADLQNSGAAFAMDFSRPNVDYADLLRLSQNATKPAIARVGGVCMAGGMGLLCMTDMAVAADHVVFGLPEVKVGVFPMQVLSLLQSIAPPRLVNEWALTGEPFDAKAAQAAGLLNHVVPAAELDAKIDWLIGRLVDKSPTAIRRGKYAMRAIASMSFDESIAYLESQIALLAMTEDAKEGLKAFAEKRKPVWPGK

SEQ ID NO: 73114 - DNA, 828 bp, Candidatus Protochlamydia amoebophila UWE25
  CDS (1)..(828): transl_table=11
atgttagcgacagtaaattgggaaaaagttaaaacttatcaggatattaggttagaaaaaacagaagatggaatagcaaaaattactattaatagacctgaggtgcgaaatgcttttcgtcctgaaacggttcaagaaatgcaagaagcttttgatatctgtcgtaatgactcaacgattggcgtgattatattgacgggagaagggcctcacgcattttgttcaggaggtgatcaaagagttcgtgcagaagaaggctacattggacaagacggtgttccacgtttaaatgtcttagacttgcaaaaacaaattcgctctttgccaaaacctatcattgccatggtggctggttatgcaattggaggtgggcatgtcttacacatcgtttgtgatttaacaattgcagcaaataatgcacgttttgggcaagttgggccaaaagttggatcatttgacggtggattgggaagcagttatttagctcgtattgtagggcaaaaaaaagcgcgagaaatttggtatttatgccgtcaatatgatgctaaagaagctttagaaatgggacttgtcaactgtgttgtccctttagagcagcttgaaaaagagactttaaaatggtgtcgtgaaattttacagcattctcccttagctcttcgttgtttaaaagcttgtttgaatgctgattgtgatggacaagtaggtcttcttgacttagcaggtaatgcgaccatgctttattacatgactgaagaagctcaagaaggaaaacaagcatttttagaaaaacggaagcctaattttaatcaatttcctcggttaccttaa

SEQ ID NO: 73115 - protein, 275 aa, Candidatus Protochlamydia amoebophila UWE25
MLATVNWEKVKTYQDIRLEKTEDGIAKITINRPEVRNAFRPETVQEMQEAFDICRNDSTIGVIILTGEGPHAFCSGGDQRVRAEEGYIGQDGVPRLNVLDLQKQIRSLPKPIIAMVAGYAIGGGHVLHIVCDLTIAANNARFGQVGPKVGSFDGGLGSSYLARIVGQKKAREIWYLCRQYDAKEALEMGLVNCVVPLEQLEKETLKWCREILQHSPLALRCLKACLNADCDGQVGLLDLAGNATMLYYMTEEAQEGKQAFLEKRKPNFNQFPRLP

SEQ ID NO: 73116 - DNA, 834 bp, Acinetobacter sp. ADP1
  CDS (1)..(834): transl_table=11
atgacatacgataaacgttgggaaaccgttgatgtacaagtagaacatggaattgcatgggtcacacttaatcgtcctcacaaaaaaaatgcaatgagcccaacactcaaccgtgaaatgatcgatgtgcttgaaacactcgagctagattcagaggcaaaagtgctggtgttaactggtgccggtgattcttggactgctggcatggatttaaaagaatatttccgtgaagtagatgctcaacctgaaattttccaagaacgtattcgacgtgattcgtgtcgctggcagtggcaattacttcgtatgtactctaaaccaacaattgccatggttaacggctggtgttttggtggtggtttctcgccactggtggcctgtgatttagccattgcagccgatgaagccactttcggactgtcagaaattaactggggcattccaccgggcaacctcgtcagcaaagcgatggcagatacggttgggcatcgtgcatcactgtattacattatgaccggtaaaacttttaccggtaaagaagctgaagcaatgggtctgattaataaaagcgttccgcttgcacagctaaaggcagaagtgacagaactggcacagtgtctggtcgagaaaaaccctgtcgttttacgtacagctaaaaatggctttaagcgctgtcgtgagctgacatgggatcagaatgaagattatttatatgccaaactggatcaatgtaatcatcgagatactgagggcggccgccaagagggtttaaaacagttcttagatgaaaaatcgattaaaccaggtttgcaaagctataagcgtacaggttaa

SEQ ID NO: 73117 - protein, 277 aa, Acinetobacter sp. ADP1
MTYDKRWETVDVQVEHGIAWVTLNRPHKKNAMSPTLNREMIDVLETLELDSEAKVLVLTGAGDSWTAGMDLKEYFREVDAQPEIFQERIRRDSCRWQWQLLRMYSKPTIAMVNGWCFGGGFSPLVACDLAIAADEATFGLSEINWGIPPGNLVSKAMADTVGHRASLYYIMTGKTFTGKEAEAMGLINKSVPLAQLKAEVTELAQCLVEKNPVVLRTAKNGFKRCRELTWDQNEDYLYAKLDQCNHRDTEGGRQEGLKQFLDEKSIKPGLQSYKRTG

SEQ ID NO: 73118 - DNA, 828 bp, Burkholderia mallei ATCC 23344
  CDS (1)..(828): transl_table=11
atgagttatgaaggtcgctggaaaaccgtcgaggtgatcgtcgacggcgcaatcgcatgggtgacgctgaatcgtcccgacaagcgcaacgcgatgagcccgacgctgaacgcggagatgatcgacgtgctggaggcgatcgagctcgatcccgaagcgcgggtgctcgtgctgacgggcgagggcgaggcgtggacggccggcatggacctgaaggagtactttcgcgaaatcgacgccggccccgagatcctgcaggagaagatccgccgcgacgcgagccgctggcagtggcagttgctgcgcatgtatgcgaagccgacgatcgcgatggtcaacggctggtgcttcggcggcgggttctcgccgctcgtcgcgtgcgatctcgcgatcgcggccgacgaggccgtgttcggcctgtcggagatcaactggggcattccgcccggcaatctcgtcagcaaggcgatggccgatacggtcggccatcgtcaggcgctgtactacatcatgacgggcgagaccttcacgggcgcgcaggccgcgcagatggggctcgtcaaccggagcgtgccgcgcgcgcaactgcgcgacgcggtgcgcgcgctcgccgcgaagctgctcgacaagaatccggtcgtgctgcgcaacgcgaagcacggcttcaagcgctgccgcgagctcacgtgggagcagaacgaggactacctgtacgcgaagctcgatcaggcgcagttgcgcgatcccgagcacgggcgcgagcagggcctcaagcaattcctcgacgacaagacgatcaagccgggcttgcaggcgtacaggcgttga

SEQ ID NO: 73119 - protein, 275 aa, Burkholderia mallei ATCC 23344
MSYEGRWKTVEVIVDGAIAWVTLNRPDKRNAMSPTLNAEMIDVLEAIELDPEARVLVLTGEGEAWTAGMDLKEYFREIDAGPEILQEKIRRDASRWQWQLLRMYAKPTIAMVNGWCFGGGFSPLVACDLAIAADEAVFGLSEINWGIPPGNLVSKAMADTVGHRQALYYIMTGETFTGAQAAQMGLVNRSVPRAQLRDAVRALAAKLLDKNPVVLRNAKHGFKRCRELTWEQNEDYLYAKLDQAQLRDPEHGREQGLKQFLDDKTIKPGLQAYRR

SEQ ID NO: 73120 - DNA, 858 bp, Synechococcus elongatus PCC 6301
  CDS (1)..(858): transl_table=11
gtgttcagaggaaatggcgtggcgcaggttcaatggcagtcggtgcgggagtacgaggatattcgctacgagaaatgtgccgaaggtatcgccaagatcaccatcaaccgccctcacaagcgcaatgccttccgccccaaaacggtggttgagctgtacgacgccttttgcgatgcccgcgaggacattgcgatcggtgtgattttgctgacaggcgcagggccgcacacggatggtcgctatgccttttgtgccgggggtgatcagtcggtgcggggcgccggcggctacatcgatgaagaaggcttgccgcgtctgaatgtgctcgacctccagcggttgattcgcaccattcccaaggtagtgatcgcgctagtagccggctacgcgatcggcggtggccatgttctccacatcctctgcgacctgacgattgcagccgacaacgctgtcttcggccaaacggggcccaaggtcggtagttttgatggtggctttggggcgagttacctagcgcggctagtcggtcagaagaaagcgcgggaaatttggttcctctgtcgccagtacggtgccaaagaggcgctgcagatgggtttggttaatactgtggtgcctgttgaggaactagaagcggaagggattcgttgggcgttagagattctagagaaaagcccgatcgcgattcgctgtcttaaggccgccttcaatgccgagttggacggtatggcaggcattcaagaactggccggccacgccacacatctttattacctgacggaagaagggagcgaaggcaagcaggcctttcacgaaaagcgatcgcccgactttcggcaatatccttggttgccctag

SEQ ID NO: 73121 - protein, 285 aa, Synechococcus elongatus PCC 6301
MFRGNGVAQVQWQSVREYEDIRYEKCAEGIAKITINRPHKRNAFRPKTVVELYDAFCDAREDIAIGVILLTGAGPHTDGRYAFCAGGDQSVRGAGGYIDEEGLPRLNVLDLQRLIRTIPKVVIALVAGYAIGGGHVLHILCDLTIAADNAVFGQTGPKVGSFDGGFGASYLARLVGQKKAREIWFLCRQYGAKEALQMGLVNTVVPVEELEAEGIRWALEILEKSPIAIRCLKAAFNAELDGMAGIQELAGHATHLYYLTEEGSEGKQAFHEKRSPDFRQYPWLP

SEQ ID NO: 73122 - DNA, 831 bp, Pseudomonas syringae pv. syringae B728a
  CDS (1)..(831): transl_table=11
atgagcaaatatgaaggtcgctggtcaaccatcaaggtcgagatcgagcaaggtattgcgtgggtcatcctcaatcggccggaaaagcgcaacgccatgagcccgaccctgaaccgcgaaatgatcgatgtgctggaaaccctcgagcaggatcccgatgcgggggttctggtgctgaccggtgcgggtgaggcgtggaccgctggcatggacctcaaggagtacttccgcgaggtggatgccggaccggaaattcttcaggaaaaaatccggcgcgaagcctcccagtggcagtggaagatgttacgcatgtacgccaagccaaccatcgcaatggtcaacggctggtgctttggtggtggtttcagcccgctggtggcctgtgatctggcgatctgcgccgatgaagcgaccttcggcctgtcggaaatcaactggggcattccgcccggcaacctggtgagcaaggccatggccgacaccgtgggccaccgccagtcgctgtactacatcatgaccggcaaaaccttcaatggtcagaaggccgctgaaatgggcctcgtcaatgaaagcgtaccgctggcgcaactgcgtcaggtggccatcgatctggccaataatctgctggaaaaaaatccggtggtgctgcgcgccgccaagcacggcttcaaacgctgccgcgaactgacctgggagcagaacgaagactacctgtacgccaagctcgaccagtcacgtctgctggacaaggaaggcgggcgcgagcagggcatgaagcagttcctcgatgacaagagcatcaagcccggcctggaagcttataaacgctag

SEQ ID NO: 73123 - protein, 276 aa, Pseudomonas syringae pv. syringae B728a
MSKYEGRWSTIKVEIEQGIAWVILNRPEKRNAMSPTLNREMIDVLETLEQDPDAGVLVLTGAGEAWTAGMDLKEYFREVDAGPEILQEKIRREASQWQWKMLRMYAKPTIAMVNGWCFGGGFSPLVACDLAICADEATFGLSEINWGIPPGNLVSKAMADTVGHRQSLYYIMTGKTFNGQKAAEMGLVNESVPLAQLRQVAIDLANNLLEKNPVVLRAAKHGFKRCRELTWEQNEDYLYAKLDQSRLLDKEGGREQGMKQFLDDKSIKPGLEAYKR

SEQ ID NO: 73124 - DNA, 831 bp, Pseudomonas syringae pv. phaseolicola 1448A
  CDS (1)..(831): transl_table=11
atgagcaagtacgaaggtcgctgggcaaccgtcaaggtcgaaattgagcaaggcatcgcgtgggtcatactcaatcggcctgaaaagcgcaatgccatgagcccgaccctgaaccgtgaaatgatcgatgtgctggaaacactcgagcaggatcccgacgcaggtgttctggtgttgaccggtgcgggcgaggcctggactgccggcatggacctcaaggagtactttcgtgaggtggacgccggaccggagattcttcaggaaaaaatccgtcgcgaggcctcccagtggcaatggaagatgttgcgcatgtacgccaaaccgaccattgcaatggtcaacggctggtgtttcggcggggggttcagcccgctggtggcatgtgacctggcgatctgcgccgatgaagcgaccttcgggctgtcggaaatcaactggggcattccgcctggcaacctggtgagcaaggctatggccgataccgtgggtcatcgccagtcgctttactacatcatgaccggcaagaccttcgatggtaagaaagccgctgaaatggggctcgtcaatgaaagcgtgccgctggcacaactgcgtcaggtgaccatcgacctggccctcaacctgctggaaaagaacccggtggtactgcgcgccgccaagcacggcttcaagcgctgccgcgaattgacctgggagcagagcgaagactacctgtatgccaaactcgatcagtcacgactgctggacaaggaaggcgggcgcgagcaaggcatgaagcaattcctcgacgacaagagcatcaaaccagggttggaagcttataagcggtag

SEQ ID NO: 73125 - protein, 276 aa, Pseudomonas syringae pv. phaseolicola 1448A
MSKYEGRWATVKVEIEQGIAWVILNRPEKRNAMSPTLNREMIDVLETLEQDPDAGVLVLTGAGEAWTAGMDLKEYFREVDAGPEILQEKIRREASQWQWKMLRMYAKPTIAMVNGWCFGGGFSPLVACDLAICADEATFGLSEINWGIPPGNLVSKAMADTVGHRQSLYYIMTGKTFDGKKAAEMGLVNESVPLAQLRQVTIDLALNLLEKNPVVLRAAKHGFKRCRELTWEQSEDYLYAKLDQSRLLDKEGGREQGMKQFLDDKSIKPGLEAYKR

SEQ ID NO: 73126 - DNA, 834 bp, Ralstonia eutropha JMP134
  CDS (1)..(834): transl_table=11
atggccaattacgaaggacgctggaagaccgtaaaggtcagcgtggaagagggcattgcatgggtaatgtttaaccgccccgaaaagcgcaacgcgatgagcccgaccctgaacagcgagatgatccaggtactcgaagcgctcgaactcgacgccgatgccagggtggtggtgctgacgggcgccggcgacgcatggaccgccggcatggatctcaaggagtatttccgcgaagtcgacgccggccccgagatcctgcaggagaagatccgccgcgacgcctgccagtggcaatggaagctgttgcgcatgtatgcgaagccgaccatcgcgatggtcaacggttggtgcttcggcggcggcttttcgcctctggtcgcatgcgacctcgcgattgccgccgatgaggccgtgttcggcctgtcggaaatcaactggggcatcccgccgggcaacctggtcagcaaggcgatggccgatacggtcggacatcgccaggcgctgcactacatcatgaccggcgacaccttcacgggccagcaggcggccgcgatgggcctggtcaacaagagcgtgccgcgctcgcaattgcgtgagcacgtgctggaactggccggcaagctgctggagaagaaccccgtcgtgctgcgcgccgccaagcacggcttcaagcgcagccgcgaactgacctgggagcagaacgaggactacctgtacgccaagctcgaccaggcgcaactgcgcgaccccgagcacggacgcgaacagggcctcaagcagttcctcgacgacaagtcgatcaagccgggcctgcaagcctacaagcgcgcctga

SEQ ID NO: 73127 - protein, 277 aa, Ralstonia eutropha JMP134
MANYEGRWKTVKVSVEEGIAWVMFNRPEKRNAMSPTLNSEMIQVLEALELDADARVVVLTGAGDAWTAGMDLKEYFREVDAGPEILQEKIRRDACQWQWKLLRMYAKPTIAMVNGWCFGGGFSPLVACDLAIAADEAVFGLSEINWGIPPGNLVSKAMADTVGHRQALHYIMTGDTFTGQQAAAMGLVNKSVPRSQLREHVLELAGKLLEKNPVVLRAAKHGFKRSRELTWEQNEDYLYAKLDQAQLRDPEHGREQGLKQFLDDKSIKPGLQAYKRA

SEQ ID NO: 73128 - DNA, 774 bp, Carboxydothermus hydrogenoformans Z-2901; identical to SEQ ID NO: 28990
  CDS (1)..(774): transl_table=11

SEQ ID NO: 73129 - protein, 257 aa, Carboxydothermus hydrogenoformans Z-2901; identical to SEQ ID NO: 28991

SEQ ID NO: 73130 - DNA, 831 bp, Burkholderia sp. 383
  CDS (1)..(831): transl_table=11
atgagcaagtacgacaaccgctggcagaccgttgaagtgaaggtggaggccggcatcgcgtgggtcacgctgaaccgcccggacaagcgcaatgcgatgagcccgacgctcaaccgggagatgctgcaggtactcgacgcggtcgagttcgacgatgaagcgaaggtgctcgtcctcaccggcgcgggcgccgcgtggacggccggcatggacctgaaggaatacttccgcgagatcgatggcggctccgacgcaatgcaggaaaaggtgcgccgcgacgcatcggaatggcagtggcgccgcctgcggatgtacaacaagccgacgatcgcgatggtgaacggctggtgcttcggcggcggcttctcgccgctcgtcgcgtgcgacctcgcgatcgcggccgacgaagccgtgttcgggctgtcggaaatcaactggggcatcccgcccggcaacctcgtcagcaaggcgatggccgacacggtcgggcaccgccgcgcgctgcactacatcatgaccggcgacacgttcaccggcaccgaagcggcggacatgggcctcgtgaacagcagcgtgccgctggccgaactgcgtgaagcgacgatcgcgctcgcggcccgcctgatggacaagaacccggtcgtgttgcgcgcggcaaagcacggcttcaagcgctcgcgcgaactgacgtgggagcagtgcgaggattacctgtacgcgaagctcgaccaggcgcaactgcgcgatccggagcacggccgcgaacaggggctcaagcagttcctcgacgacaagacgatcaagccgggcctgcaggcctacaagcgctga

SEQ ID NO: 73131 - protein, 276 aa, Burkholderia sp. 383
MSKYDNRWQTVEVKVEAGIAWVTLNRPDKRNAMSPTLNREMLQVLDAVEFDDEAKVLVLTGAGAAWTAGMDLKEYFREIDGGSDAMQEKVRRDASEWQWRRLRMYNKPTIAMVNGWCFGGGFSPLVACDLAIAADEAVFGLSEINWGIPPGNLVSKAMADTVGHRRALHYIMTGDTFTGTEAADMGLVNSSVPLAELREATIALAARLMDKNPVVLRAAKHGFKRSRELTWEQCEDYLYAKLDQAQLRDPEHGREQGLKQFLDDKTIKPGLQAYKR

SEQ ID NO: 73132 - DNA, 801 bp, Burkholderia sp. 383
  CDS (1)..(801): transl_table=11
atgacctcgtccggctcgttctcttcgctgacgggcgacgacgccccgtcgatcctgcgcaacgacgacaacggcatcgcgtggctgacgatccatcgtccgcacgtcgccaatgcgctgtccgcggaagcgatccggcggctgtgcgacgaactcgtcacgctcgacgacaacccgtcgattcgcgtgatcgtgatccgcggcgcgggcgaccgtgccttcagcgcgggcgtcgatctcggcgaccccgagatgcgcgggatgcagccgatgcgcgggctcgcacgcaacgtgcacgagctgatcctcgaactgcgcaagccgaccatcgcggcgatcaacggctacgcgatcggcggcggcttcgagatcgcgctcgcgtgcgacctgcggatcgccgccgatcacgcgaccttcgcgctgcccgaagcacgcgtcggcatgggcgcgaacttcgcgagcgtgctgctgccgcgcatgctgccgcgtgcgatcgcgatggagctgctgttcacgggccgccgcttcgacgcggacgaggcgcagcgcgccgggttgctgaaccgcgtcgtccccggcgccgcactcgacgacaccgtgcgcgacctggcgcagacgatcgccgggaacgcgccgctcacgatccgccgcatcaaggaaaccgcggcacgcagccaggggttgccggtggccgccgcgctgcggctggacgtcggccccgacgtctatgcgagcgaggaccggatcgagggcgcccgcgcgttcctcgagaagcgcaaaccggtattcaagggacgctga

SEQ ID NO: 73133 - protein, 266 aa, Burkholderia sp. 383
MTSSGSFSSLTGDDAPSILRNDDNGIAWLTIHRPHVANALSAEAIRRLCDELVTLDDNPSIRVIVIRGAGDRAFSAGVDLGDPEMRGMQPMRGLARNVHELILELRKPTIAAINGYAIGGGFEIALACDLRIAADHATFALPEARVGMGANFASVLLPRMLPRAIAMELLFTGRRFDADEAQRAGLLNRVVPGAALDDTVRDLAQTIAGNAPLTIRRIKETAARSQGLPVAAALRLDVGPDVYASEDRIEGARAFLEKRKPVFKGR

SEQ ID NO: 73134 - DNA, 789 bp, Geobacter metallireducens GS-15; identical to SEQ ID NO: 28994
  CDS (1)..(789): transl_table=11

SEQ ID NO: 73135 - protein, 262 aa, Geobacter metallireducens GS-15; identical to SEQ ID NO: 28995

SEQ ID NO: 73136 - DNA, 801 bp, Syntrophus aciditrophicus SB; identical to SEQ ID NO: 29000
  CDS (1)..(801): transl_table=11

SEQ ID NO: 73137 - protein, 266 aa, Syntrophus aciditrophicus SB; identical to SEQ ID NO: 29001

SEQ ID NO: 73138 - DNA, 855 bp, Novosphingobium aromaticivorans DSM 12444
  CDS (1)..(855): transl_table=11
atgaccgaacagcagaagatcgagcgcgcggaagaagataccgtcgctttcaccgtcgaggacggcatcgcttgggtgaagttcaaccgccccgagaagcgcaactgcatgagccccaagctcaaccgccgcatgaaggcggtgcttgaggaactggaattccgcgacgacgtgaaggtcctcgtgctgaccggtgagggcgatgcctggaccgccggcatggacctcaaggaatacttccgggagaccgaggcccagggccttggcgccgtgcgcaagtcgcagcgcgaaagctatggctggttcgaacgcctgcgctggtacgagaagccgaccgttgcgatgatcaacggctggtgcttcggcggcggctatggcccgctgttcggctgcgacatcgcgatcgcttcggaagacgcgcagttcggcctgtcggaaatcaattggggaatcctgcccggcggcggcgcgtcgaaggtcgcgcaggaacttatgccgttccgcaaggccatgtaccatgcgatgatgggcgagaacctgacaggcaagcaggccgaagagcagggcctcgtcaccgaagccgtgcccgccgacaagctcaaggcgcgtgtgctggaaatctgcgaagcgctgaagaagaaggatagccacgcgcttcgcgccaccaagtggacgatgcgtcgcatggtcgacatgacctacgacaacggccttgaataccagattcgcgcgcaggaagcgctgcacagcttcggcggtgcggcagcccgcaaggaagcgacgcgccagttccttgacgagaagagcttcaagcccggtctcggcacgttcgacacgtcgaaggtcaagggctga

SEQ ID NO: 73139 - protein, 284 aa, Novosphingobium aromaticivorans DSM 12444
MTEQQKIERAEEDTVAFTVEDGIAWVKFNRPEKRNCMSPKLNRRMKAVLEELEFRDDVKVLVLTGEGDAWTAGMDLKEYFRETEAQGLGAVRKSQRESYGWFERLRWYEKPTVAMINGWCFGGGYGPLFGCDIAIASEDAQFGLSEINWGILPGGGASKVAQELMPFRKAMYHAMMGENLTGKQAEEQGLVTEAVPADKLKARVLEICEALKKKDSHALRATKWTMRRMVDMTYDNGLEYQIRAQEALHSFGGAAARKEATRQFLDEKSFKPGLGTFDTSKVKG

SEQ ID NO: 73140 - DNA, 798 bp, Burkholderia xenovorans LB400
  CDS (1)..(798): transl_table=11
atggacgcaaagacaaacaatgcagccgtgcgggtcgaacgaaacggcaggaccgcctggatcgtcctgaaccggccggagcagatcaacgcgatcaacgacgaaatccgcgaggccgtgccgcgcgcgctgctggagctggacgcggacccggcggtcagcgtgatcgtgatccgcggcgaagggccgcgcggcttttgcgccggcgcagacatcaaggaaaagcgcggtccggaatcgtcgctgcaggtgcggcggcggatggagcactcgcgctggatcgagacgctcgaccgggtcgcgaagcccgtgattgccgcgctgcacggattttgcatgggcggcgggatggagctcgcgctcgcctgcgacattcgctacgccgcacccgatacagtgatggcgctgccggaaacgggcctcggcctgattcctggcggcggcggcacgcagcggctttcgcgtcttgtcggtcacggcatggcgatggacatgctcctgaccggcgagcggctcgactcacggcgggcgcaggaaatcggactcgtctcgcgcattgcggccgcgcccgccagcctcttcgaggaagtgcaggcactggccgaccgtatcgccgtgcgctcgccgatggcgacggcctatgccaagcaggccgcgcgcacggcgctcgaactcgatctgcggcgcgggctggatcgcgaactggatctcttcgcgctgctcgcgccgagccaggacgtcaaggaagcggcgctggccttcaaggaaaagcgcgtacctgtcttcaccggagaatga

SEQ ID NO: 73141 - protein, 265 aa, Burkholderia xenovorans LB400
MDAKTNNAAVRVERNGRTAWIVLNRPEQINAINDEIREAVPRALLELDADPAVSVIVIRGEGPRGFCAGADIKEKRGPESSLQVRRRMEHSRWIETLDRVAKPVIAALHGFCMGGGMELALACDIRYAAPDTVMALPETGLGLIPGGGGTQRLSRLVGHGMAMDMLLTGERLDSRRAQEIGLVSRIAAAPASLFEEVQALADRIAVRSPMATAYAKQAARTALELDLRRGLDRELDLFALLAPSQDVKEAALAFKEKRVPVFTGE

SEQ ID NO: 73142 - DNA, 783 bp, Myxococcus xanthus DK 1622
  CDS (1)..(783): transl_table=11
atggaagccggagaagtccgctacgaagtccaaggcacccaagcgctcctgaccattgaccggcccaaggcccgcaacgccttgtccccggcggtggtgcgcgagctgatggccgcgctggagcgggccgaatccgacacctcggtgcgcgtggtggtgctgacgggcgccggtgagaaggtcttctgcgcgggcggggacctgggaaccctggccggtgacgagggcttcctgtccacgcacgagggccgccgttcctatgggcggctgctggcgcgcttccaggagctgcgcaagcccaccgtggcgcgcgtcaacgggcacgcgctggcgggtggcctggggctggtgctcgcgtgtgacctggccgtcgccgtggagggcgcggacctgggcacgcccgaaatcgacgtgggcctcttcccgatgatgatgatggcgctgctccagcgtcacctgggccgcaagcgtgcgctggagctggtgctcaccggagaccggctgcccgcgcgcgaggcgctgacgttggggctgctcaaccgcgtggtgccggccgcggagctggacgccgcggtgggcacgctcgcgggaaagctggcgggaaagagccaggcggtgctggcgttggggcgccgtgccttcttcaccgccgaggacctgccgctgcccgccgcgctggagtacctggcctcgcagctgtctctgaacgtgctggcggacgacgcgggggagggcatctccgcgttcctggagaagcgtcccccgaagtggaacgaccgctga

SEQ ID NO: 73143 - protein, 260 aa, Myxococcus xanthus DK 1622
MEAGEVRYEVQGTQALLTIDRPKARNALSPAVVRELMAALERAESDTSVRVVVLTGAGEKVFCAGGDLGTLAGDEGFLSTHEGRRSYGRLLARFQELRKPTVARVNGHALAGGLGLVLACDLAVAVEGADLGTPEIDVGLFPMMMMALLQRHLGRKRALELVLTGDRLPAREALTLGLLNRVVPAAELDAAVGTLAGKLAGKSQAVLALGRRAFFTAEDLPLPAALEYLASQLSLNVLADDAGEGISAFLEKRPPKWNDR

SEQ ID NO: 73144 - DNA, 804 bp, Rubrobacter xylanophilus DSM 9941
  CDS (1)..(804): transl_table=11
gtggaacgggacttcgggcatctggaggtatccgtcgagggccgggtggcggtggcccggctgaaccggccggagcggtacaacgccatcggggttcggctggcggaggagctcaaccggttcgtggagggcgtggagggggctgacgtgcgggcggtgatcctgacgggcgccggggagcgggccttctgctcgggggtggacctcaaggagcgccgcgagatgagcctggaggagcgctgggagcacaaccgggcggtcaacgggttcgtctcccggctggcgcggctgcaggtgcccaccatagcggccataaacggtctcgcgctgggcgggggcttcgagatgacgctcgggtgcgacttcaggatcgccgccgagcacgccgagttcgcgctgccggaggtggggctcgggatcataccgggcgcgggggggacccagcgcctcccgcggctggtgggcccctcgcgggcgaaggagctcatcctcaccgcccgccgcatagacgcccggcgggcgctggagatgggcatcctcaacgcggtcgtccccgccgggaggctcatggaggaggcgcggtcgctggccgaggaggcggcggccaacagccccctcgcggtggcctacgccaaggccgccgtggacgtggccatggagacccccctcgagcagggcctgcgcttcgagacggccgccatccgcaccacgctggactccgaggactacagggaggggctcgccgccttcgccgagcgccggaggccggagttcccgccgctcaaagcaaggaggatcacctga

SEQ ID NO: 73145 - protein, 267 aa, Rubrobacter xylanophilus DSM 9941
MERDFGHLEVSVEGRVAVARLNRPERYNAIGVRLAEELNRFVEGVEGADVRAVILTGAGERAFCSGVDLKERREMSLEERWEHNRAVNGFVSRLARLQVPTIAAINGLALGGGFEMTLGCDFRIAAEHAEFALPEVGLGIIPGAGGTQRLPRLVGPSRAKELILTARRIDARRALEMGILNAVVPAGRLMEEARSLAEEAAANSPLAVAYAKAAVDVAMETPLEQGLRFETAAIRTTLDSEDYREGLAAFAERRRPEFPPLKARRIT

SEQ ID NO: 73146 - DNA, 777 bp, Hyphomonas neptunium ATCC 15444; identical to SEQ ID NO: 29036
  CDS (1)..(777): transl_table=11

SEQ ID NO: 73147 - protein, 258 aa, Hyphomonas neptunium ATCC 15444; identical to SEQ ID NO: 29037

SEQ ID NO: 73148 - DNA, 825 bp, Rhizobium leguminosarum bv. viciae 3841
  CDS (1)..(825): transl_table=11
atgactgaagacaaatcgccggttctggtcgaattcgacagcggcatcgccttcgtgaccctcaaccgtccggaaaagcgcaatgcgatgaatccggcgctgaatgcccgaatgctcgaagtgcttgacgagctcgagggcgacgagcgttgcggcgtcctcgtcctgcgcggcgccggcgaatcctggtcggccggcatggatctgaaggaatatttccgcgacaatgacgacaagccgcgtgacgtcacgctgaaggcgcggcgccagtccggcaactggtggggccggctgatgtatttcgaaaagccgacgatcgccatggtcaacggctggtgcttcggcggcgcattcacaccgctggtttcctgcgatctcgccatcgccgccgaggaggcaaatttcggcctctccgagatcaactggggcattctgccgggcggcaatgtcacccgcgcggtcgccgaagtgatgcgccatcgcgacgccctctattacatcatgaccggcgaactgttcggcggacgcaaggccgccgaaatgggtctcgtcaacgaggcggtgccgctggcggagctggaaatccgggtccgcaagatctgcgccagccttctcgaaaagaacccggtgacgctgaaggccgccaaggacacctacaagcgggtgcgcaacctgccatgggatctcgccgacgattacatctacgccaagctggagcagatgctgtttctcgacaagaccaaggggcgcgacgaggggctgaaacagttcctcgacgacaaaacctatcagccggggctcggcgcctaccagcgcgaccgctga

SEQ ID NO: 73149 - protein, 274 aa, Rhizobium leguminosarum bv. viciae 3841
MTEDKSPVLVEFDSGIAFVTLNRPEKRNAMNPALNARMLEVLDELEGDERCGVLVLRGAGESWSAGMDLKEYFRDNDDKPRDVTLKARRQSGNWWGRLMYFEKPTIAMVNGWCFGGAFTPLVSCDLAIAAEEANFGLSEINWGILPGGNVTRAVAEVMRHRDALYYIMTGELFGGRKAAEMGLVNEAVPLAELEIRVRKICASLLEKNPVTLKAAKDTYKRVRNLPWDLADDYIYAKLEQMLFLDKTKGRDEGLKQFLDDKTYQPGLGAYQRDR

SEQ ID NO: 73150 - DNA, 837 bp, Solibacter usitatus Ellin6076
  CDS (1)..(837): transl_table=11
atggaccaatacgaagagaaatggcaaacggtgaaggtggaagtggacgcggaagggatcgcgtgggtgatcttcaaccggccggcgaaacggaatgcgatgagtccgacgctcaatcgcgaaatggcccaggtgttggagaccctggaactggatgccgcggccaaagtgctggtgctcactggcgcaggggaatcgtggtcggccggcatggacctgaaggagtactttcgagaagtcgatggccaacccgaaagtcatcaggagaagattcggcgcgaagcttctctctggcaatggaagctgctgcggatgtacgccaagccaaccatcgccatggtgaatggatggtgtttcggcggcgccttctccccgctggtggcgtgcgacctggccatcgcggacgaaaaagcggtcttcggcctgtcggaaatcaactggggtattccgcccggtaaccttgtgagcaaggcggtggcggataccatgggacatcgcaaggcgctgcattacatcatgaccggcgagacattcacaggtgcgcaggcggccgagatggggctggtgaatgccgcggttcccacgagtgaattgcgcgaggctacccggactttggccctgaagctggcgagcaagaatcccgtgatcctgcgggcagccaagcacgggttcaagcgctgccgcgaactgacctgggaacagaacgaagactacctatatgcgaagctcgatcaggctttgcatcgcgatcccgaagatgcgcgcgcggaggggatgaagcagttccttgacgagaagagcatcaagccgggcctgcagtcttataaacgctcttga

SEQ ID NO: 73151 - protein, 278 aa, Solibacter usitatus Ellin6076
MDQYEEKWQTVKVEVDAEGIAWVIFNRPAKRNAMSPTLNREMAQVLETLELDAAAKVLVLTGAGESWSAGMDLKEYFREVDGQPESHQEKIRREASLWQWKLLRMYAKPTIAMVNGWCFGGAFSPLVACDLAIADEKAVFGLSEINWGIPPGNLVSKAVADTMGHRKALHYIMTGETFTGAQAAEMGLVNAAVPTSELREATRTLALKLASKNPVILRAAKHGFKRCRELTWEQNEDYLYAKLDQALHRDPEDARAEGMKQFLDEKSIKPGLQSYKRS

SEQ ID NO: 73152 - DNA, 783 bp, Nocardioides sp. JS614
  CDS (1)..(783): transl_table=11
atgagcgccgggttcgagacgctgctggtcgaggtcgccgacgggatcgcagtggtgaccgtcaaccgcccggaggtccgcaatgcggtgagccggcaggtccaggccgacctccgcgccgtcctcgacacgttccgtcacgacgacgcggtggaggtggtggtgttcaccggcgcgggcgaccgcgccttcgtcgccggcgccgacatcgcccagctgcgcgactacacgctgcacaccggactcgcctcggagatgcaggcgctctacgacgaggtcgaggcctatgagaagccgaccatcgccgcggtcaacggctacgccctgggcggtggctgcgagctcgcgatggcgtgcgacctgcgggtggcgtccacgagcgcccggttcgggctgccggagaccaacctcgccgtactgcccggcgcgggcggcacccagcggctcgccaggctggtcggcgtggggcgtgccctcgagctgatcctcaccggacggctcgtcgacgccgaggaggcccgcacgatcgggctggtcacctcggtggtcgcaccggaggagctcctcccccacgcccgcgaggtggccgggcagatccgggccaagggtccgctcgcggtccggctcgccaagctggtggtgcgctccggcatggacaccgaccggcggaccggcctggtcatcgagcagctggcccagtcgctgctctacaccaccggggacaagcgggagggcgccgaggcgttcctggccaagcgcacccctgcgttccggggggcctga

SEQ ID NO: 73153 - protein, 260 aa, Nocardioides sp. JS614
MSAGFETLLVEVADGIAVVTVNRPEVRNAVSRQVQADLRAVLDTFRHDDAVEVVVFTGAGDRAFVAGADIAQLRDYTLHTGLASEMQALYDEVEAYEKPTIAAVNGYALGGGCELAMACDLRVASTSARFGLPETNLAVLPGAGGTQRLARLVGVGRALELILTGRLVDAEEARTIGLVTSVVAPEELLPHAREVAGQIRAKGPLAVRLAKLVVRSGMDTDRRTGLVIEQLAQSLLYTTGDKREGAEAFLAKRTPAFRGA

SEQ ID NO: 73154 - DNA, 834 bp, Nostoc punctiforme PCC 73102
  CDS (1)..(834): transl_table=11
atgcaaattaactggcaaactgccaaaacctacgaagatattctgtatcaaaaaactgatggcattgcaaaaatcaccatcaaccgtccccataaacgcaatgctttccgtcctgaaacagtctttgaactgtatgacgctttctgtaatgctcgtgaagatactactattggtgtcgtcctatttactggctatggcccacatactgatggcaaatatgccttctgttccggtggcgatcaaagcgtgcgcggacatgcgggttatgtggatgatactggtatccctcgcttgaatgtgctggacttacaacgcctgattcgttctatgccgaaagtggtgattgctttagtcgctggatatgcgatcggtggtggacacgtcttacacttaatttgcgacctgaccatcgctgccgataacgccattttcggacagactggccccaaagtcggcagttttgacggtggttttggagccagctatctcgcccgcattgtgggacaaaaaaaagcacgagaaatttggtttctctgccgccaatatgatgcacaacaagcgctagaaatgggcttaattaatttcgtcgtcccagtcgaacaactagaagcggaaggtattcaatgggcgcaggagattttagaaaaaagcccgatcgcaattcgatgtctcaaatccgccttcaatgctgattgtgacggacaggctggtttacaagaactcgcgggcaatgccaccttactctattacatgacagaagaagggtctgaaggcaaacaagcttttctcgaaaagcgtccaccagattttcgctcttttccttggctaccttaa

SEQ ID NO: 73155 - protein, 277 aa, Nostoc punctiforme PCC 73102
MQINWQTAKTYEDILYQKTDGIAKITINRPHKRNAFRPETVFELYDAFCNAREDTTIGVVLFTGYGPHTDGKYAFCSGGDQSVRGHAGYVDDTGIPRLNVLDLQRLIRSMPKVVIALVAGYAIGGGHVLHLICDLTIAADNAIFGQTGPKVGSFDGGFGASYLARIVGQKKAREIWFLCRQYDAQQALEMGLINFVVPVEQLEAEGIQWAQEILEKSPIAIRCLKSAFNADCDGQAGLQELAGNATLLYYMTEEGSEGKQAFLEKRPPDFRSFPWLP

SEQ ID NO: 73156 - DNA, 843 bp, Oceanobacter sp. RED65
  CDS (1)..(843): transl_table=11
atgacggctactaccctgataaaacaagaacaaagcgcaaagcgagtcgtgcttgaagtcaaagacgcgattgcttatgtcaccctaaaccgcccagagaagcacaatggcttagataagcagatgtttattgagatggtggccacggcaaaacaaattcgtaaagatcgtcgtattcgcgctgtggtgatgaaaggagaaggcccatcgttttgtgccggcttagatttcgctgcggtcagcaagaaccctagcatgattcctaagttcttcgccaagctgccatggagcaaggacaacatgttccaacgggttgctcacatatggcgcgacctacccgttcccgtcattgcagcgatacatggcaattgctttggcggtggcatgcagattgtcctagcgtgcgattatcgcatttcaacgccggatgccaatttatctatcttggagatgaaatgggggcttattccagatatgagtggcatggtcacgctttcccgtttaacgcgtatcgatattgcccaagaactcaccatgacagggcgcttctttagcggtgaagagggtgcagagtacggtattattagccgagtgagccaagatccggtggcagaagccactgaactagcgcaaaccattgcgacaaagagcccagatgcagtcgcggcaaccaaatacttgttcaagaaaacgtggaaaaaagatacgcgcggtgcgcttttatgggagcgactcacccaattacgtttattggggcgcaaaaatcaacgcattgctatggccaatggcttggcgaaagacaaagaacctaagcctttcttggatcgaacgtcctttaaataa

SEQ ID NO: 73157 - protein, 280 aa, Oceanobacter sp. RED65
MTATTLIKQEQSAKRVVLEVKDAIAYVTLNRPEKHNGLDKQMFIEMVATAKQIRKDRRIRAVVMKGEGPSFCAGLDFAAVSKNPSMIPKFFAKLPWSKDNMFQRVAHIWRDLPVPVIAAIHGNCFGGGMQIVLACDYRISTPDANLSILEMKWGLIPDMSGMVTLSRLTRIDIAQELTMTGRFFSGEEGAEYGIISRVSQDPVAEATELAQTIATKSPDAVAATKYLFKKTWKKDTRGALLWERLTQLRLLGRKNQRIAMANGLAKDKEPKPFLDRTSFK

SEQ ID NO: 73158 - DNA, 792 bp, Pseudomonas putida GB-1; identical to SEQ ID NO: 29084
  CDS (1)..(792): transl_table=11

SEQ ID NO: 73159 - protein, 263 aa, Pseudomonas putida GB-1; identical to SEQ ID NO: 29085

SEQ ID NO: 73160 - DNA, 774 bp, Pseudomonas putida GB-1; identical to SEQ ID NO: 29088
  CDS (1)..(774): transl_table=11

SEQ ID NO: 73161 - protein, 257 aa, Pseudomonas putida GB-1; identical to SEQ ID NO: 29089

SEQ ID NO: 73162 - DNA, 816 bp, Pseudomonas putida GB-1
  CDS (1)..(816): transl_table=11
atgagcgacttcagcaccctcgaagtgacccgcgacccgcgcggtttcgccaccctgtggctgagccgcgaggacaagaacaacgccttcaacgcgcagatgatccgcgagctgatcgtggccatcgaccagttggccgaagacgccagcctgcgcttcgtgctgctgcgcggccgcggccggcacttcagcgccggcgccgacctggcctggatgcagcaatcggcgcagctggacttcaataccaacctggatgatgcccacgaactgggcgagctgatgtacgccctgcaccgcctcaaggcccctaccctggcggtggtgcaaggtgcagcctttggcggcgcgctgggtttgatcagttgctgtgacatggccatcggcgccgaagacgcccagctgtgcctgtcggaagtacgcatcggcctggccccggcagtgatcagcccgttcgtggtcaaggccattggcgagcgtgccgcgcgccgctatgcgctcaccgcagagcgcttcagcggcgtgcgcgcccgcgagctgggcctgctggccgaggtgtatccagccagcgagctggacgcccacgtcgaagcctgggtgaacaacctgctgcagaacagcccacaagcgttgcgcgccaccaaggacctgctgcgcgaagtggacgatggcgaactcagcccggccctgcgccgttactgcgaaaacaccatcgcccgtatccgcgtcagcgccgaaggccaggagggcctgcgcgccttcctggaaaaacgccgccccgcctggcaaaccgatgacaagaaggagccgcgcccatga

SEQ ID NO: 73163 - protein, 271 aa, Pseudomonas putida GB-1
MSDFSTLEVTRDPRGFATLWLSREDKNNAFNAQMIRELIVAIDQLAEDASLRFVLLRGRGRHFSAGADLAWMQQSAQLDFNTNLDDAHELGELMYALHRLKAPTLAVVQGAAFGGALGLISCCDMAIGAEDAQLCLSEVRIGLAPAVISPFVVKAIGERAARRYALTAERFSGVRARELGLLAEVYPASELDAHVEAWVNNLLQNSPQALRATKDLLREVDDGELSPALRRYCENTIARIRVSAEGQEGLRAFLEKRRPAWQTDDKKEPRP

SEQ ID NO: 73164 - DNA, 915 bp, Vitis vinifera; identical to SEQ ID NO: 29108
  CDS (1)..(915)
  misc_feature (804)..(804): r is g or a

SEQ ID NO: 73165 - protein, 304 aa, Vitis vinifera; identical to SEQ ID NO: 29109

SEQ ID NO: 73166 - DNA, 735 bp, Pseudomonas sp
  CDS (1)..(735): transl_table=11
atgagcccaactctcaatcgagagatggtcgaggttctggaggtgctggagcaggacgcagatgctcgcgtgcttgttctgactggtgcaggcgaatcctggaccgcgggcatggacctgaaggagtatttccgcgagaccgatgctggccccgaaattctgcaagagaagattcgtcgcgaagcgtcgacctggcagtggaagctcctgcggatgtacaccaagccgaccatcgcgatggtcaatggctggtgcttcggcggcggcttcagcccgctggtggcctgtgatctggccatctgtgccgacgaggccacctttggcctgtccgagatcaactggggcatcccgccgggcaacctggtgagtaaggctatggccgacaccgtgggtcaccgcgagtccctttactacatcatgactggcaagacatttggcggtcagcaggccgccaagatggggcttgtgaaccagagtgttccgctggccgagctgcgcagtgtcactgtagagctggctcagaacctgctggacaagaaccccgtagtgctgcgtgccgccaaaataggcttcaagcgttgccgcgagctgacttgggagcagaacgaggactacctgtacgccaagctcgaccaatcccgtttgctcgatccggaaggcggtcgcgagcagggcatgaagcagttccttgacgagaaaagcatcaagccgggcttgcagacctacaagcgctga

SEQ ID NO: 73167 - protein, 244 aa, Pseudomonas sp
MSPTLNREMVEVLEVLEQDADARVLVLTGAGESWTAGMDLKEYFRETDAGPEILQEKIRREASTWQWKLLRMYTKPTIAMVNGWCFGGGFSPLVACDLAICADEATFGLSEINWGIPPGNLVSKAMADTVGHRESLYYIMTGKTFGGQQAAKMGLVNQSVPLAELRSVTVELAQNLLDKNPVVLRAAKIGFKRCRELTWEQNEDYLYAKLDQSRLLDPEGGREQGMKQFLDEKSIKPGLQTYKR

SEQ ID NO: 73168 - DNA, 804 bp, Amycolatopsis orientalis; identical to SEQ ID NO: 29112
  CDS (1)..(804): transl_table=11

SEQ ID NO: 73169 - protein, 267 aa, Amycolatopsis orientalis; identical to SEQ ID NO: 29113

SEQ ID NO: 73170 - DNA, 714 bp, Pseudomonas putida
  CDS (1)..(714): transl_table=11
atgagcccaacgctcaaccgtgaaatgcgcgatgtactggaaaccgtcgagcaggatgccgacgcacgcgtgctggtgttgaccggtgagggcagcgcctggaccgccggcatggacctcaaggagtacttccgcgaggtggacgcaggccccgagatccttcaggagcgattccgtcgcgatgcctcggaatggcagtggaagctgctgcgcttcatcagcaaacccaccatcgccatggtcaacggctggtgcttcggcggtggtttcagcccgctggtcgcttgcgacctggctatctgcgccgacgaggccaccttcggcctgtctgaaatcaactggggtattccaccgggcaacctggtcagcaaggccatggccgacaccgtgggccaccgtgaatcgcgtatcatcatgaccggcaagaccttcgacgggcagaaagccgcgcagatggggctggtcaacaagagcgtgccggttgcgcagttgcgcgatgaagtggtgctgctcgcccaggaccttctcgacaagaacccggttgtgctgcgcgccgccaaaaacggcttcaagcgctgccgcgagttgacctgggagcagaacgaggactacctgtacgccaagctgcgtgacccggagccccgcgcgcaaggcctgaagcagttcctcgacgacaaaagcataaagccaggcctgcaagccatcaagcgctga

SEQ ID NO: 73171 - protein, 237 aa, Pseudomonas putida
MSPTLNREMRDVLETVEQDADARVLVLTGEGSAWTAGMDLKEYFREVDAGPEILQERFRRDASEWQWKLLRFISKPTIAMVNGWCFGGGFSPLVACDLAICADEATFGLSEINWGIPPGNLVSKAMADTVGHRESRIIMTGKTFDGQKAAQMGLVNKSVPVAQLRDEVVLLAQDLLDKNPVVLRAAKNGFKRCRELTWEQNEDYLYAKLRDPEPRAQGLKQFLDDKSIKPGLQAIKR

SEQ ID NO: 73172 - DNA, 831 bp, Pseudomonas fluorescens
  CDS (1)..(831): transl_table=11
atgagcacatacgaaggtcgctggaaaacggtcaaggtcgaaatcgaagacggcatcgcgtttgtcatcctcaatcgcccggaaaaacgcaacgcgatgagcccgaccctgaaccgcgagatgatcgatgttctggaaaccctcgagcaggaccctgccgccggtgtgctggtgctgaccggtgcgggcgaagcctggaccgcaggcatggacctcaaggaatacttccgcgaagtggacgccggcccggaaatcctccaggaaaaaatccgccgcgaagcctcgcaatggcaatggaaactgctgcgcatgtacgccaagccgaccatcgccatggtcaatggctggtgcttcggcggcggtttcagcccgctggtggcctgcgacctggcgatctgcgccgacgaagcaaccttcggtctctcggaaatcaactggggtatcccgccgggcaacctggtgagcaaggccatggccgacaccgtgggccaccgccagtcgctctactacatcatgaccggcaagaccttcggtgggcagaaagccgccgagatgggcctggtcaacgaaagcgtgcccctggcgcaactgcgcgaagtcaccatcgagctggcgcgtaacctgctcgaaaaaaacccggtggtgctgcgtgccgccaaacacggtttcaaacgctgccgcgaactgacctgggagcagaacgaggattacctgtacgccaagctcgatcagtcgcgtttgctggacaccgaaggcggtcgcgagcagggcatgaagcaattcctcgacgacaagagcatcaagcctggcctgcaagcgtataaacgctga

SEQ ID NO: 73173 - protein, 276 aa, Pseudomonas fluorescens
MSTYEGRWKTVKVEIEDGIAFVILNRPEKRNAMSPTLNREMIDVLETLEQDPAAGVLVLTGAGEAWTAGMDLKEYFREVDAGPEILQEKIRREASQWQWKLLRMYAKPTIAMVNGWCFGGGFSPLVACDLAICADEATFGLSEINWGIPPGNLVSKAMADTVGHRQSLYYIMTGKTFGGQKAAEMGLVNESVPLAQLREVTIELARNLLEKNPVVLRAAKHGFKRCRELTWEQNEDYLYAKLDQSRLLDTEGGREQGMKQFLDDKSIKPGLQAYKR

SEQ ID NO: 73174 - DNA, 774 bp, Pseudomonas putida; identical to SEQ ID NO: 29114
  CDS (1)..(774): transl_table=11

SEQ ID NO: 73175 - protein, 257 aa, Pseudomonas putida; identical to SEQ ID NO: 29115

SEQ ID NO: 73176 - DNA, 792 bp, Pseudomonas putida; identical to SEQ ID NO: 29116
  CDS (1)..(792): transl_table=11

SEQ ID NO: 73177 - protein, 263 aa, Pseudomonas putida; identical to SEQ ID NO: 29117

SEQ ID NO: 73178 - DNA, 894 bp, Streptomyces griseus subsp; identical to SEQ ID NO: 29118
  CDS (1)..(894): transl_table=11

SEQ ID NO: 73179 - protein, 297 aa, Streptomyces griseus subsp; identical to SEQ ID NO: 29119

SEQ ID NO: 73180 - DNA, 750 bp, Rhizobium meliloti; identical to SEQ ID NO: 29122
  CDS (1)..(750): transl_table=11

SEQ ID NO: 73181 - protein, 249 aa, Rhizobium meliloti; identical to SEQ ID NO: 29123

SEQ ID NO: 73182 - DNA, 816 bp, Aspergillus oryzae; identical to SEQ ID NO: 29128
  CDS (1)..(816)

SEQ ID NO: 73183 - protein, 271 aa, Aspergillus oryzae; identical to SEQ ID NO: 29129

SEQ ID NO: 73184 - DNA, 831 bp, Pseudomonas fluorescens
  CDS (1)..(831): transl_table=11
atgagcaaatacgaaggtcgctggaccacagtcaaggttgagatcgaagaaggcatcgcctgggtcattctcaatcgtccggaaaaacgcaacgccatgagcccgaccctgaaccgggaaatgatcgacgtcctggaaaccctcgagcaggatcctgccgccggcgtgctggtcctcaccggtgcgggcgaagcctggacggcgggcatggacctcaaggaatactttcgcgaagtggatgccggcccggaaatcctccaggagaaaatccgccgcgaagcctcgcaatggcaatggaaactgctgcgcatgtacgccaagccgaccatcgccatggtcaatggctggtgcttcggcggtggcttcagcccgctggtggcgtgcgacctggcgatctgcgccgacgaagcgaccttcggcctttcggaaatcaactggggcatcccgccgggtaacctggtgagcaaggccatggccgacaccgtgggccatcgtcaatcgctgtactacatcatgaccggcaagacctttggcgggcagaaagccgccgaaatgggccttgtcaacgaaagcgtgccgctggcgcaactgcgcgaagtgaccatcgaactggcgcgtaacctgctcgagaaaaacccggtggtgctgcgtgccgccaagcatggcttcaagcgctgccgcgaactgacctgggagcagaacgaggattacctctacgccaagctcgatcagtcgcgtctgctcgacaccgaaggcggtcgcgagcagggcatgaaacagttcctcgacgacaagagcatcaagcctggcctgcaggcctataaacgctga

SEQ ID NO: 73185 - protein, 276 aa, Pseudomonas fluorescens
MSKYEGRWTTVKVEIEEGIAWVILNRPEKRNAMSPTLNREMIDVLETLEQDPAAGVLVLTGAGEAWTAGMDLKEYFREVDAGPEILQEKIRREASQWQWKLLRMYAKPTIAMVNGWCFGGGFSPLVACDLAICADEATFGLSEINWGIPPGNLVSKAMADTVGHRQSLYYIMTGKTFGGQKAAEMGLVNESVPLAQLREVTIELARNLLEKNPVVLRAAKHGFKRCRELTWEQNEDYLYAKLDQSRLLDTEGGREQGMKQFLDDKSIKPGLQAYKR

SEQ ID NO: 73186 - DNA, 768 bp, Klebsiella sp; identical to SEQ ID NO: 29138
  CDS (1)..(768): transl_table=11

SEQ ID NO: 73187 - protein, 255 aa, Klebsiella sp; identical to SEQ ID NO: 29139

SEQ ID NO: 73188 - DNA, 795 bp, uncultured archaeon GZfos27B6; identical to SEQ ID NO: 29144
  CDS (1)..(795): transl_table=11

SEQ ID NO: 73189 - protein, 264 aa, uncultured archaeon GZfos27B6; identical to SEQ ID NO: 29145

SEQ ID NO: 73190 - DNA, 732 bp, Pseudomonas putida
  CDS (1)..(732): transl_table=11
atgagcccaacgctcaaccgtgaaatgcgcgatgtactggaaaccgtcgagcaggatgccgacgcacgcgtgctggtgttgaccggtgagggcagcgcctggaccgccggcatggacctcaaggagtacttccgcgaggtggacgcaggccccgagatccttcaggagcgtatccgtcgcgatgcctcggaatggcagtggaagctgctgcgcttctacagcaaacccaccatcgccatggtcaacggctggtgcttcggcggtggtttcagcccgctggtcgcttgcgacctggccatctgcgccgacgaggccaccttcggcctgtctgaaatcaactggggtattccaccgggcaacctggtcagcaaggccatggccgacaccgtgggccaccgtgaatcgctgtactacatcatgaccggcaagaccttcgacgggcagaaagccgcgcagatggggctggtcaacaagagcgtgccgttggcgcagttgcgcgatgaagtggtgctgctcgcccaggaccttctcgacaagaacccggttgtgctgcgcgccgccaaaaacggcttcaagcgctgccgcgagttgacctgggagcagaacgaggactacctgtacgccaagctggaccaggccgagcttgacccggagcacggccgcgcgcaaggcctgaagcagttcctcgacgacaaaagcatcaagccaggcctgcaagcctacaagcgctga

SEQ ID NO: 73191 - protein, 243 aa, Pseudomonas putida
MSPTLNREMRDVLETVEQDADARVLVLTGEGSAWTAGMDLKEYFREVDAGPEILQERIRRDASEWQWKLLRFYSKPTIAMVNGWCFGGGFSPLVACDLAICADEATFGLSEINWGIPPGNLVSKAMADTVGHRESLYYIMTGKTFDGQKAAQMGLVNKSVPLAQLRDEVVLLAQDLLDKNPVVLRAAKNGFKRCRELTWEQNEDYLYAKLDQAELDPEHGRAQGLKQFLDDKSIKPGLQAYKR

SEQ ID NO: 73192 - DNA, 804 bp, Streptomyces toyocaensis; identical to SEQ ID NO: 29152
  CDS (1)..(804): transl_table=11

SEQ ID NO: 73193 - protein, 267 aa, Streptomyces toyocaensis; identical to SEQ ID NO: 29153

SEQ ID NO: 73194 - DNA, 834 bp, Pseudomonas paucimobilis
  CDS (1)..(834): transl_table=11
atgtcggatgaactgacattcgagaccgtgaaggtcacgcttgatgacggaattgcctgggtggcgctcaaccggcccgagaagcgcaatgcgatgagccccaccgtcaatcgcgagatgtgggtcgcgctcgacgagctcgaaatccgcgacgacgtgggcgtcgtcgtgctgacgggcgagggcgaagccttttccgccggcatggatctcaaggaatatttccgggaaaccgagggcgagtcggcgatcgtgcaggcgcggtatcgccgcgcggcgacggactggatgtggcggcgcctgatgcactatcccaagccgaccatcgccatggtcaatggctggtgcttcggcggtgccttcacgccgctcgttgcctgcgatcttgccattgccgccgacgaggcgacgttcgggctttccgagatcaactggggcatcatcccggccggtaatgtcactcgcgccgtcgcgcaggtcatgaaccaccgcgatgcgcttcattatatcatgaccggcgatcccttcgacgggaaggaagcagcgaagatggggctggtcaatcgctccgtcccgctggcggagctgcgcggcgaggtcgaggtgcttgcccgcaagctgctttccaagaacccgacgatcctgcgccatgccaagtcggcgttcaaatatgtcgagcggctggactgggacacgtccgaggccatgctgggtgcgctggccgcaacggccgcctcgcaggataccgagcgcggccggcgcaagggcatgacgcagttcctcgacgagaaatccttcaagcccgggctgggtggctatcgccgcgaggactga

SEQ ID NO: 73195 - protein, 277 aa, Pseudomonas paucimobilis
MSDELTFETVKVTLDDGIAWVALNRPEKRNAMSPTVNREMWVALDELEIRDDVGVVVLTGEGEAFSAGMDLKEYFRETEGESAIVQARYRRAATDWMWRRLMHYPKPTIAMVNGWCFGGAFTPLVACDLAIAADEATFGLSEINWGIIPAGNVTRAVAQVMNHRDALHYIMTGDPFDGKEAAKMGLVNRSVPLAELRGEVEVLARKLLSKNPTILRHAKSAFKYVERLDWDTSEAMLGALAATAASQDTERGRRKGMTQFLDEKSFKPGLGGYRRED

SEQ ID NO: 73196 - DNA, 855 bp, Pseudomonas paucimobilis
  CDS (1)..(855): transl_table=11
atgtccgaggagaataagccggtggaacgggaagaggataccgtccgctacgagatcgtgaacaacgtggcgtgggtctattataaccgccccaccaagcggaatgcgcagagccccaagctcaaccgccagatgctgaaggtgctcaccgagctcgagttccgcgacgatgtcggcgtgctggtgctcggcggcgaaggtccggcctggtgcgcgggcatggacctcaaggaatattttcgcgagacggaggccgagggtctggccggcacgcgcaaggcacagcgcgaggcctatacctggtgggagcgtctgcgctggtatcagaagccgaccatcgccatggtccatggctggtgcttcggcggcgcttatggcccgctcttcgcttgcgatctcgccttcgcggcggacgaggcgcagttcggtctttccgaagtgaactggggtatcctgcccggcggcggcgcgacgaaagtcgcggtcgacctcatgccgatgcgggtcgccatgtaccacgccatgatgggcgagaatctctcgggccaggacgcggcgcgctacaatctcgtcaatgagtcgatgcccgccgatcagctcaaggcccgtgtgaagcaggtcgccgagacgctcatccagaagaactgggcgacggtgaagtacacgaaggatgccgtgcgtcgggtcaaggaaatgacgtacgacaatgcggaagactatctgatccgcctgcaggaaggcctcaactggttcgacaagtcggacggccggcatgtcgcgatgaagcagttcctcgacgacaagacgttcaagcccggtctcgggcactatgacaagaccaagaccgaggtctga

SEQ ID NO: 73197 - protein, 284 aa, Pseudomonas paucimobilis
MSEENKPVEREEDTVRYEIVNNVAWVYYNRPTKRNAQSPKLNRQMLKVLTELEFRDDVGVLVLGGEGPAWCAGMDLKEYFRETEAEGLAGTRKAQREAYTWWERLRWYQKPTIAMVHGWCFGGAYGPLFACDLAFAADEAQFGLSEVNWGILPGGGATKVAVDLMPMRVAMYHAMMGENLSGQDAARYNLVNESMPADQLKARVKQVAETLIQKNWATVKYTKDAVRRVKEMTYDNAEDYLIRLQEGLNWFDKSDGRHVAMKQFLDDKTFKPGLGHYDKTKTEV

SEQ ID NO: 73198 - DNA, 840 bp, Comamonas acidovorans; identical to SEQ ID NO: 29156
  CDS (1)..(840): transl_table=11

SEQ ID NO: 73199 - protein, 279 aa, Comamonas acidovorans; identical to SEQ ID NO: 29157

SEQ ID NO: 73200 - DNA, 774 bp, Pseudomonas putida; identical to SEQ ID NO: 29162
  CDS (1)..(774): transl_table=11

SEQ ID NO: 73201 - protein, 257 aa, Pseudomonas putida; identical to SEQ ID NO: 29163

SEQ ID NO: 73202 - DNA, 864 bp, Amycolatopsis sp
  CDS (1)..(864): transl_table=11
atgagcacagcggtcggcaacgggcgggtccggacggagccgtggggcgagacggttctggtggagttcgacgaaggcatcgcctgggtcatgctcaaccggccggacaagcgcaacgccatgaaccccaccctgaacgacgagatggtgcgggtgctggaccacctggagggcgacgaccgctgccgagtgctggtgctgaccggcgcgggcgagtcgttctccgcgggcatggacctcaaggagtacttccgcgaggtcgacgccaccggcagcaccgccgtgcagatcaaggtgcggcgggccagcgcggagtggcagtggaagcggctggcgaactggagcaagccgacgatcgcgatggtcaacggctggtgcttcggcggcgcgttcaccccgctggtggcctgcgacctggccttcgccgacgaggacgcgcggttcgggctgtccgaggtcaactggggcatcccgccgggcggcgtggtcagccgggcgctggcggcgaccgtgccgcagcgcgacgcgctgtactacatcatgaccggtgagcccttcgacggcccgccgcgcgcggagatgcgcctggtcaacgaggcgctgcccgccgaccggctgcgggagcgcacccgcgaggtggcgctgaagctcgcgtcgatgaaccaggtggtcctgcacgcggccaagaccgggtacaagatcgcccaggagatgccctgggagcaggccgaggactacctctacgccaagctcgaccagtcccagttcgccgacaaggcgggcgcccgcgccaaggggctgacccagttcctcgaccagaagtcctaccggcccggcctgagcgccttcgacccggagaagtag

SEQ ID NO: 73203 - protein, 287 aa, Amycolatopsis sp
MSTAVGNGRVRTEPWGETVLVEFDEGIAWVMLNRPDKRNAMNPTLNDEMVRVLDHLEGDDRCRVLVLTGAGESFSAGMDLKEYFREVDATGSTAVQIKVRRASAEWQWKRLANWSKPTIAMVNGWCFGGAFTPLVACDLAFADEDARFGLSEVNWGIPPGGVVSRALAATVPQRDALYYIMTGEPFDGPPRAEMRLVNEALPADRLRERTREVALKLASMNQVVLHAAKTGYKIAQEMPWEQAEDYLYAKLDQSQFADKAGARAKGLTQFLDQKSYRPGLSAFDPEK

SEQ ID NO: 73204 - DNA, 810 bp, Streptomyces collinus
  CDS (1)..(810): transl_table=11
  misc_feature (760)..(760): n is a, g, c or t
atgcgccatgccgacaccgtgctctacgaggtgagcgacgggctcgcgacgatcacgctgaaccgccccgaggcgatgaacgcgctgaacatcgcgaccaaggtcgccctccgcgaggcggcggaatcggcggccgccgacacggccgtacgggcgattctgctgaccgcggccggggagcgggcgttctgcgtgggccaggacctcaaggagcacatcgggctgctcgcccaggaccgggagaccgggtcggggcagacgatgagcacggtcaaggagcactacaacccgatcgtgcgggccctcgccggggcggcgaagccggtggtcgccgcggtgaacggcgtcgcggccggggccggcttcggcttcgcgctcaccgcggactaccgcgtcgtcgccgacaccgcctccttcaacacgtccttcgccggcgtggccctcaccgccgactccggcatctcctggacgctgccccgtgtgatcggcccgagccgcgccgccgacctgctgctcttcccgcgcagcatcagcgcccaggacgcgctggagctgggcatcgccaaccgggtcgtccccgccgcggagctgcgcgccgaggccgagaaggtggcgcgggcgctggccgaggggccgacggtggcgtacgcggcgatcaaggaggcggtggcctacgggctgacgcactcgctcgcggagacgctggagaaggaggacgagctgcagacccgggccgggcagtccgaggaccacgccatcntcgtccaggcgttcgtgaacaaggagcggcccaagtacctggggcggtag

SEQ ID NO: 73205 - protein, 269 aa, Streptomyces collinus
  misc_feature (254)..(254): The Xaa at location 254 stands for Ile, Leu, Phe, or Val.
MRHADTVLYEVSDGLATITLNRPEAMNALNIATKVALREAAESAAADTAVRAILLTAAGERAFCVGQDLKEHIGLLAQDRETGSGQTMSTVKEHYNPIVRALAGAAKPVVAAVNGVAAGAGFGFALTADYRVVADTASFNTSFAGVALTADSGISWTLPRVIGPSRAADLLLFPRSISAQDALELGIANRVVPAAELRAEAEKVARALAEGPTVAYAAIKEAVAYGLTHSLAETLEKEDELQTRAGQSEDHAIXVQAFVNKERPKYLGR

SEQ ID NO: 73206 - DNA, 894 bp, Escherichia coli; identical to SEQ ID NO: 28784
  CDS (109)..(894): transl_table=11

SEQ ID NO: 73207 - protein, 261 aa, Escherichia coli; identical to SEQ ID NO: 29173

SEQ ID NO: 73208 - DNA, 774 bp, Rhizobium meliloti; identical to SEQ ID NO: 29186
  CDS (1)..(774): transl_table=11

SEQ ID NO: 73209 - protein, 257 aa, Rhizobium meliloti; identical to SEQ ID NO: 29187

SEQ ID NO: 73210 - DNA, 816 bp, Bacillus subtilis; identical to SEQ ID NO: 29188
  CDS (1)..(816): transl_table=11

SEQ ID NO: 73211 - protein, 271 aa, Bacillus subtilis; identical to SEQ ID NO: 29189

SEQ ID NO: 73212 - DNA, 768 bp, Escherichia coli; identical to SEQ ID NO: 29192
  CDS (1)..(768): transl_table=11

SEQ ID NO: 73213 - protein, 255 aa, Escherichia coli; identical to SEQ ID NO: 29193

SEQ ID NO: 73214 - DNA, 789 bp, Escherichia coli; identical to SEQ ID NO: 29194
  CDS (1)..(789): transl_table=11

SEQ ID NO: 73215 - protein, 262 aa, Escherichia coli; identical to SEQ ID NO: 29195

SEQ ID NO: 73216 - DNA, 876 bp, Oryza sativa; identical to SEQ ID NO: 29196
  CDS (1)..(876)

SEQ ID NO: 73217 - protein, 291 aa, Oryza sativa; identical to SEQ ID NO: 29197

SEQ ID NO: 73218 - DNA, 903 bp, Oryza sativa; identical to SEQ ID NO: 29198
  CDS (1)..(903)

SEQ ID NO: 73219 - protein, 300 aa, Oryza sativa; identical to SEQ ID NO: 29199

SEQ ID NO: 73220 - DNA, 1101 bp, Brassica napus; identical to SEQ ID NO: 29202
  CDS (1)..(1101)

SEQ ID NO: 73221 - protein, 366 aa, Brassica napus; identical to SEQ ID NO: 29203

SEQ ID NO: 73222 - DNA, 1116 bp, Brassica napus
  CDS (1)..(1116)
atggcctctcactctcaggttttggaggaagagaaatcgagtgttagaatattgacactgaacagaccaaagcagctgaatgctctgtccttccaaatgatatctcggttgctgcaactgttccttgcatatgaggaggaccctagtgtgaaacttgttatccttaagggccagggaagagccttttgtgctggtggtgatgtttcagctgttgttcgtgacatcggacaaggcaattggagactcggtgccaagttcttcgcagatgaatacatgctcaactatgttatggccacctataccaaacctcaggtttcaattttgaatggtattgtcatgggaggcggagctggtgtctccgtccatggtccatttcgtattgctactgagaacacggtttttgccatgcccgagacagttctggggctctttcccgatgtaggcgcctcctacttcttgtctaggctccctggattttttggagagtatgttggcctcacaggagctaggttagatggcgctgacatgcttgcttgtggtcttgctactcattatcttccttcaacgagattgactgcattggaagcagaactttgcagagttgattcaagtgatccaaccttggtctcagcaattctcgatgcatgcacacagaatccgcaccttaaacagcagagtgcttaccacaggttggatgttattgataggtgcttctcggggagaacagtggaagaaattatagctgcacttgagagagaggccagtgatgattggatctcaaccactattagagcattgaaaaaggcttcaccagcaagccttaaaatctctcttagatcgataagagaaggaagattgcagggggtggggcaatgccttagccgtgagtatagaatggtgtgtcatgtgctaaagggagatataagcaaagattttgtggaggggtgcagagccatattgattgacaaagataagaatccaaagtgggagccatggcggctggaggagatgaaggataggatggtagagcagtacttcaagagagtggaggaagaagaggatctaaagcttccagcaaggaaaaatttgccagccttagcaatggcaaagctgtga

SEQ ID NO: 73223 - protein, 371 aa, Brassica napus
MASHSQVLEEEKSSVRILTLNRPKQLNALSFQMISRLLQLFLAYEEDPSVKLVILKGQGRAFCAGGDVSAVVRDIGQGNWRLGAKFFADEYMLNYVMATYTKPQVSILNGIVMGGGAGVSVHGPFRIATENTVFAMPETVLGLFPDVGASYFLSRLPGFFGEYVGLTGARLDGADMLACGLATHYLPSTRLTALEAELCRVDSSDPTLVSAILDACTQNPHLKQQSAYHRLDVIDRCFSGRTVEEIIAALEREASDDWISTTIRALKKASPASLKISLRSIREGRLQGVGQCLSREYRMVCHVLKGDISKDFVEGCRAILIDKDKNPKWEPWRLEEMKDRMVEQYFKRVEEEEDLKLPARKNLPALAMAKL

SEQ ID NO: 73224 - DNA, 831 bp, Brassica napus; identical to SEQ ID NO: 29204
  CDS (1)..(831)

SEQ ID NO: 73225 - protein, 276 aa, Brassica napus; identical to SEQ ID NO: 29205

SEQ ID NO: 73226 - DNA, 1020 bp, Glycine max; identical to SEQ ID NO: 29206
  CDS (1)..(1020)

SEQ ID NO: 73227 - protein, 339 aa, Glycine max; identical to SEQ ID NO: 29207

SEQ ID NO: 73228 - DNA, 915 bp, Triticum aestivum
  CDS (1)..(915)
atgcgcagcctacggggcctcctcgccgtctccggccacctcgccgcccgccacgcgccgccgagcggcgcctcctcgtctccccacagcgtcctcttcgcccgtgccctccagatcctctcccagccggagcccgtccgcctccacaagctctcggcgcccgactccgggatcgtggagctgaggctggagcggccggaggccaggaacgccatcgggaaggagatgctcaaggggctgcggagcgccatggacaaggtgaaggccgactcgacggccaacgttgtactggtagcgagctccgtgcccaaggtcttctgcgcgggcgctgacctcaaggaaaggaggttaatgggcccttctgaagtccgggaatttgttaataccttgagagctacattctcatcctttgaggcactccctattcctacaatagctgttgttgaaggagctgcctttggcggtgggctagagttggctctttcatgtgatcttcgtatatgtggggagagtgcaacattcagcttgccagaaaccggccttgctattattcctggagctggagggacacagcgtcttccaaggattgttggaagggccagagcaaaggaattgatattcactggccgtagatttgatgcgacagaagctgtaaatatgggggtagtgaactactgcgttcctggtggcgaggcttatcaaaaggctcttgaacttgcccgggagataaatcagaaaggtccgttagcgataaggatggccaagaaggccatcaacgaaggggtggaggtagacctgtcctctgcgttggctgtcgaagaagagtgctacgagcaagttctgcacactcaggatcgccttgaaggtctagctgcatttgcagagaaaagaagacctttgtacacaggaaagtga

SEQ ID NO: 73229 - protein, 304 aa, Triticum aestivum; identical to SEQ ID NO: 28743

SEQ ID NO: 73230 - DNA, 2160 bp, Triticum aestivum
  CDS (1)..(2160)
atggcgaggggcgcaaccaccatggaggtccgcgacgacggcgtcgccgtcatcaccatctccaacccgcccgtcaacgccctctcctttgacgtcatagctagcttgcagagaaactatgaagaagctctaagaaggaatgatgtcaaggccatcgttctcactggggccaaagggaggttttcaggtggatttgatataaatggattcggaaataaaccaaaaaacgagaagcccgggtccttttctattgattttctgactggcgtagtggaagatgctcagaagccgtcagtggctgctatagatggtgttgctctaggtggtggcttagagcttgcaatggtttgccatgctcgcgtttctacaccgtcagctcaattaggactacctgaacttcagcttggtatcattcctggaatgggaggaacacaacgattgccccgccttgttggcctgaaaaaagctcttgagatgatgttgatgtcaaagtctataaaaggagtagaggctcacaaattcggtttggttgatgccatagtttcagctgataagctgatcagcactgcctgttcttgtgctctggaaatccacgaacacaaaaggccatggttaaagagtctcctgagaacggatagacttacagatattgtggaagcaaagaaaattctcaaatttgcgagagttcaagccctaaaacaggctgctaatcttcaacatccattagtttgcattgatgttattgaagaaggaattctttttggccctcgtgccgccctcatgaaggaagtgctttctggaaaaatgcttgagcagtctcaaacaagcaaaagcttaaggcatttttttttcgcccaacgtgcgacttcaaagataccaaatattaccaacttgggtttgacaccacggagaatactaaaggcagctattgttggtggaggtctaatgggatccggaattgcaactgcgttcatactgagtgacattgtggtagtcttgaaagaagtaaatgagaagttcttgaatactggcattaacagaattaaagccaatttgcagagttttgtcaaaaagggacgaatgacccaagaagattatgaaaagaaactttctctgctgtccggtgttcttgactacgagcaatttagagatgcagatgtggtcattgaggccgttattgaggatctattgctgaagcagaaaatattctctgatcttgaaaggagctgtcactctaattgtatatttgccacaaatacttcaaccatagacttgcggttaattggccaacaaacagcttgtcaagatcgaattgttggtgcccacttcttcagtccagctcatgtcatgccactgttggaaatagttcgtactcagcagacttcctcacaagttattgtggacttgctagatgtggcaaagaagatacggaaaacaccaattgttgttgggagctgcactgggtttgctgtcaataggatgttttttccttacggccaggcggctggtttgctcgttgattatggtttggatatatatcacatagatcacgtgatagcaaattttggaatgccgacgggaccttttcgattagctgatcttgtaggttttggcgttgccgttgccactggaaagcaatattataagagttatccagagcgatgttataaatcacgtcttactgaaattatgctcgaggagaacaggacaggtgaatcttctcataggggattttatctttataatgataagcgacaagcttctccagatcctgatatcaaaaagtatgttgagaaatcaagaaacatggcaggtgttgcacaagatcctaagctgatgaaattaacagacaaggacattgtagagatggtcttctttcccgtggtgaatgaggcctgccgagtgctggatgagggaattgcactgaaagcatctgaccttgatgtagcatccattatgggaatgggcttcccttcttttaggggtggagtgatgttttgggccgactctctcggtgcggaatacgtgtaccgcagactggatgcgtggtccaaggattacggagagttcttcagaccctgtgaatatctagctgccagagctagtcgcggcacatccttggctgccaccacagctgatggcaccaaatcgcgactctag

SEQ ID NO: 73231 - protein, 719 aa, Triticum aestivum
MARGATTMEVRDDGVAVITISNPPVNALSFDVIASLQRNYEEALRRNDVKAIVLTGAKGRFSGGFDINGFGNKPKNEKPGSFSIDFLTGVVEDAQKPSVAAIDGVALGGGLELAMVCHARVSTPSAQLGLPELQLGIIPGMGGTQRLPRLVGLKKALEMMLMSKSIKGVEAHKFGLVDAIVSADKLISTACSCALEIHEHKRPWLKSLLRTDRLTDIVEAKKILKFARVQALKQAANLQHPLVCIDVIEEGILFGPRAALMKEVLSGKMLEQSQTSKSLRHFFFAQRATSKIPNITNLGLTPRRILKAAIVGGGLMGSGIATAFILSDIVVVLKEVNEKFLNTGINRIKANLQSFVKKGRMTQEDYEKKLSLLSGVLDYEQFRDADVVIEAVIEDLLLKQKIFSDLERSCHSNCIFATNTSTIDLRLIGQQTACQDRIVGAHFFSPAHVMPLLEIVRTQQTSSQVIVDLLDVAKKIRKTPIVVGSCTGFAVNRMFFPYGQAAGLLVDYGLDIYHIDHVIANFGMPTGPFRLADLVGFGVAVATGKQYYKSYPERCYKSRLTEIMLEENRTGESSHRGFYLYNDKRQASPDPDIKKYVEKSRNMAGVAQDPKLMKLTDKDIVEMVFFPVVNEACRVLDEGIALKASDLDVASIMGMGFPSFRGGVMFWADSLGAEYVYRRLDAWSKDYGEFFRPCEYLAARASRGTSLAATTADGTKSRL

SEQ ID NO: 73232 - DNA, 810 bp, Zea mays; identical to SEQ ID NO: 29212
  CDS (1)..(810)

SEQ ID NO: 73233 - protein, 269 aa, Zea mays; identical to SEQ ID NO: 29213

SEQ ID NO: 73234 - DNA, 801 bp, Helianthus annuus; identical to SEQ ID NO: 29214
  CDS (1)..(801)

SEQ ID NO: 73235 - protein, 266 aa, Helianthus annuus; identical to SEQ ID NO: 29215

SEQ ID NO: 73236 - DNA, 2178 bp, Brassica napus
  CDS (1)..(2178)
atggcgtcacgaacgaaagggaagacgacgattgaagttggcgccgatggcgtcgccgtcataactctcatcaatcctcccgtcaattcgctatcattcgacgtgctatacagtctcaagagtaattacgaggaggccttgagcaggaacgatgttaaagctattgttattacaggtgctaaggggaagttctctggtggatttgatatatctggatttggtgaaattcagaaagggacgatgaaagagccaaaggttggatacatatcgattgatatcctcaccgatttgcttgaagctgcaaagaaaccgtctgtagctgctattgatgggcttgccttaggaggagggttagagctttccatggcttgccatgctaggatatcagctcctggtgcacagttaggtctgcccgagcttcaactcggtgttattcctgggtttggaggaacacagcgtcttccacgtcttgtaggtctcacaaaagcccttgagatgattttgacatctaagccgggtaaagcagaggaaggtcatacattgggtcttattgatgctgtcgtgccacctgcggagttactaaacgctgctcgtcgctgggcccttgacattgccgagaggagaaaaccatggggttctagtgttttaaagactgataagttacctcctcttggagaggcaagggagatactgaaatttgccaaggatcagacgcgcaggcaagcccccaacatgaaacaccccttgatgtgccttgaggctgttgaagttggtattgtttctggttcaagagctggtttagaaaaggaggctcaagtcggctcagaagtgataaacctggataccaccaaaggactgatccatgtcttcttttctcagcgaggaactacaaaggttcctggagttactgatcgtgggttggtgccaaggaagattaataaggtagccataattggaggcgggttaatgggatctggaatagccactgcattgatcctcagtaactattcagtgattctcaaggaggtaaatgagaagttcttggaggctggaattggcagggtcaaagctaatcttcagagtcgtgtaaagaaaggaaagatgtcgaaggaaaagtttgagaaaaccatgtctctcctcaagggttctcttgactatgaaagctttagggatgtggacatggtcatcgaggctgtcattgagaatatatctctgaagcagcaaatttttgctgatctcgagaagtactgtcctcaacattgtatccttgctagcaacacatctaccattgatttgaacaaaattggggagcggaccaagtcccaggatcggattatcggagcacatttcttcagtccagcgcatgtcatgccactacttgaaatagttcggaccaatcatacctctgcccaagtaattgttgacctgttagatgttgggaagaagattaggaaaacaccagtcgtggttggaaactgcacggggttcgcagttaataggatgttcttcccatacacacaggcagctatgttccttgttgagcatggaacagatccatatctcatcgacaaagcagtcagcaagtttggaatgccaatgggtcccttcagattgtgcgacctggttggattcggtgtggcgattgcaaccgcaacacaattcattgagaacttccctgaacggacatacaaatcaatgattatcccactcatgcaagaggacaagagagctggtgaagccactcgtaaaggtttctatctttatgatgataggcgcaaggctaaacctgaccctgaaataaagaaatatatagacaaggcaaggagcgtatcaggagcaaagcctgacccgaagctggagaaactgtcggagaaggaaattattgaaatgacgttcttcccagtagtgaacgaggcgtgtagagtctttgcggaaggaattgctgtcaaagcagcagaccttgacattgctggcatatttggaatgggttttccaccttacagaggaggaatcatgttctgggctgattccattggatcgaaatacatttactcaaagctagaggagtggtcgaaggcttatggtgaattcttcaagccttgtgctttcttggctgaaaggggatccaaaggagctcctctgagcgctcccttggaacaagccagatcgcggttgtaa

SEQ ID NO: 73237 - protein, 725 aa, Brassica napus
MASRTKGKTTIEVGADGVAVITLINPPVNSLSFDVLYSLKSNYEEALSRNDVKAIVITGAKGKFSGGFDISGFGEIQKGTMKEPKVGYISIDILTDLLEAAKKPSVAAIDGLALGGGLELSMACHARISAPGAQLGLPELQLGVIPGFGGTQRLPRLVGLTKALEMILTSKPGKAEEGHTLGLIDAVVPPAELLNAARRWALDIAERRKPWGSSVLKTDKLPPLGEAREILKFAKDQTRRQAPNMKHPLMCLEAVEVGIVSGSRAGLEKEAQVGSEVINLDTTKGLIHVFFSQRGTTKVPGVTDRGLVPRKINKVAIIGGGLMGSGIATALILSNYSVILKEVNEKFLEAGIGRVKANLQSRVKKGKMSKEKFEKTMSLLKGSLDYESFRDVDMVIEAVIENISLKQQIFADLEKYCPQHCILASNTSTIDLNKIGERTKSQDRIIGAHFFSPAHVMPLLEIVRTNHTSAQVIVDLLDVGKKIRKTPVVVGNCTGFAVNRMFFPYTQAAMFLVEHGTDPYLIDKAVSKFGMPMGPFRLCDLVGFGVAIATATQFIENFPERTYKSMIIPLMQEDKRAGEATRKGFYLYDDRRKAKPDPEIKKYIDKARSVSGAKPDPKLEKLSEKEIIEMTFFPVVNEACRVFAEGIAVKAADLDIAGIFGMGFPPYRGGIMFWADSIGSKYIYSKLEEWSKAYGEFFKPCAFLAERGSKGAPLSAPLEQARSRL

SEQ ID NO: 73238 - DNA, 1017 bp, Brassica napus; identical to SEQ ID NO: 29216
  CDS (1)..(1017)

SEQ ID NO: 73239 - protein, 338 aa, Brassica napus; identical to SEQ ID NO: 29217

SEQ ID NO: 73240 - DNA, 906 bp, Brassica napus
  CDS (1)..(906)
atgagctttgtcaagtatctccgccgtgatagtttgctccagttagccggaaaacgatcccttagccgaagttgcatgcttcagacctgccggactctcatcattgaaaccgccccgcctgaatctgtcaagcttaaccgtctctctggttccgattctgggattgtcgaggtcaatctagacaggtctgtggccaaaaattccattaataaagagatgctgaaaggtctccagaccacatttgagaccatacatcatgatagttccgctagagttgtgatgatcacaagtctggttccaggagttttctgtgcaggtgcagatctcaaggaacgtagaactatgagtccatctgaggttcacacatatgtcaactccttgcgctacatgttctccttcatagaggcattgagtatcccaactattgctgcaatagaaggtgtggcactaggaggtggactcgaaatggctttatcctgtgatcttcgaatctgtggcgaaaatgcagtatttggtttgcctgaaacaggactcgctgtaatccctggtgctggtgggacacagagactctcaaggctggttggaagatcagtttcaaaggaacttatattcacaggtcgaaagattgatgcaagagaagctgcaaagaaagggctagttaacttctgtgttgcggcgggtgaggctcataagaaagcaatggaagtggctcagcagataaataataaaggtccaatggcgataaagatggcgaagaaagcgattgatgaaggaatagagacgaatatggcttcaggattagagctagaggagatgtgttatcagaagcttctaaacactgaagatcgtctggaaggattagctgcgtttgctgagaaacgtaagcctcgttacactggcaagtga

SEQ ID NO: 73241 - protein, 301 aa, Brassica napus; identical to SEQ ID NO: 28741

SEQ ID NO: 73242 - DNA, 1140 bp, Brassica napus
  CDS (1)..(1140)
atggctcaagaaggtcgaaacatcatcgatgagcaggttgttgttggagaggagaaaggttcggtgagattggccacgctaaaccgccctcgtcagctaaatgtcatctcttctgaagtggtcctcaagcttgcagaatatcttgaaacctgggagaaggacgacaaaacaaagcttatactgatcaagggtgctgggagagctttctcagccggtggtgatctaaagatgttttatgacggccgtgaatcaaaggattcttgccttgaggttgtttaccggatgtactggctttgctatcacatccacacatacaagaaaactcaggtttctctagttaatggaatatcaatgggtggaggtgcatcattgatggtcccaatgaagttctctgttgtgacagagaaaactgtatttgcaactccagaagcaagtattgggtttcatactgattgtggcttctcttacatccattcacgtcttcctggtcatttaggagaattcttggctttaactggggcgagattgaatggcaaagaacttgtagcaattggcatggcaacacattttgttccttctgctaaactggctgatctggaggcacggcttgtgagtttagactctggagacatggatgtagtccgatccacaattgaagagttctccgagaaagtagacctcgacaaagacagcatccttaacaagcagacaataattgatgagtgtttctcaaaagaaagtgtgaagcagatcatacaagcatttgaagctgaagggagcaaagagggaaatgagtggataacaccagtcatcaaaggtctaaaacgatcatctcccacagggttgaaaataaccctacgatcgattcgtgaaggtaggaaacaaacactaagtgaatgcctcaagaaggagtttaggatcactgtgaatatcttgaggagcaccatatcccctgacgtgtatgagggtataagagctctgaccatagacaaagacaattctcccaagtggagtccagcgacgttggatgaggtggctgaggagaagatcaacttggtgtttgagcccttggaggatgatattgagcttcatatccctgaaaccgaagaaaacaggtggggaggcaaatacgagacttga

SEQ ID NO: 73243 - protein, 379 aa, Brassica napus
MAQEGRNIIDEQVVVGEEKGSVRLATLNRPRQLNVISSEVVLKLAEYLETWEKDDKTKLILIKGAGRAFSAGGDLKMFYDGRESKDSCLEVVYRMYWLCYHIHTYKKTQVSLVNGISMGGGASLMVPMKFSVVTEKTVFATPEASIGFHTDCGFSYIHSRLPGHLGEFLALTGARLNGKELVAIGMATHFVPSAKLADLEARLVSLDSGDMDVVRSTIEEFSEKVDLDKDSILNKQTIIDECFSKESVKQIIQAFEAEGSKEGNEWITPVIKGLKRSSPTGLKITLRSIREGRKQTLSECLKKEFRITVNILRSTISPDVYEGIRALTIDKDNSPKWSPATLDEVAEEKINLVFEPLEDDIELHIPETEENRWGGKYET

SEQ ID NO: 73244 - DNA, 831 bp, Brassica napus; identical to SEQ ID NO: 29220
  CDS (1)..(831)

SEQ ID NO: 73245 - protein, 276 aa, Brassica napus; identical to SEQ ID NO: 29221

SEQ ID NO: 73246 - DNA, 1128 bp, Brassica napus; identical to SEQ ID NO: 29222
  CDS (1)..(1128)

SEQ ID NO: 73247 - protein, 375 aa, Brassica napus; identical to SEQ ID NO: 29223

SEQ ID NO: 73248 - DNA, 1140 bp, Brassica napus
  CDS (1)..(1140)
atggctcaagaaggtcgaaacatcatcgatgagcaggttgttgttggagaggagaaaggttcggtgagattggccacgctaaaccgccctcgtcagctaaatgtcatctcttctgaagtggtcctcaagcttgcagaatatcttgaaacctgggagaaggacgacaaaacaaagcttatactgatcaagggtgctgggagagctttctcagccggtggtgatctaaagatgttttatgacggccgtgaatcaaaggattcttgccttgaggttgtttaccggatgtactggctttgctatcacatccactcatacaagaaaactcaggtttctctagttaatggaatatcaatgggtggaggtgcatcattgatggtcccaatgaagttctctgttgtgacagagaaaactgtatttgcaactccagaagcaagtattgggtttcatactgattgtggtttctcttacatccattcacgtcttcctggtcatctaggagaattcttggctctaactgggacaagattgaatggcaaagaacttgtagcagttggcatggcaacacatttcgtaccttctgctaaattggttgatcttgaggcacggctttggagtttggactctggagacatggatgtagtccgatccacaattgaagagttctccgagaaagttgacctcgacaaagacagcatccttaacaagcagacaataattgatgagtgtttctcaaaagaaagtgtgaagcagatcatacaagcatttgaagctgaagggagcaaagagggaaatgagtggataacaccagtcatcaaaggtctaaaacgatcatctcccacagggttgaaaataaccctacgatcgattcgtgaaggtaggaaacaaacactaagtgaatgcctcaagaaggagtttaggatcactgtgaatatcttgaggagcaccatatcccctgacgtgtatgagggtataagagctctgaccatagacaaagacaattctcccaagtggagtccagcgacgttggatgaggtggctgaggagaagatcaacttggtgtttgagcccttggaggatgatattgagcttcatatccctgaaaccgaagagaacaggtggggaggcaaatacgagacttga

SEQ ID NO: 73249 - protein, 379 aa, Brassica napus
MAQEGRNIIDEQVVVGEEKGSVRLATLNRPRQLNVISSEVVLKLAEYLETWEKDDKTKLILIKGAGRAFSAGGDLKMFYDGRESKDSCLEVVYRMYWLCYHIHSYKKTQVSLVNGISMGGGASLMVPMKFSVVTEKTVFATPEASIGFHTDCGFSYIHSRLPGHLGEFLALTGTRLNGKELVAVGMATHFVPSAKLVDLEARLWSLDSGDMDVVRSTIEEFSEKVDLDKDSILNKQTIIDECFSKESVKQIIQAFEAEGSKEGNEWITPVIKGLKRSSPTGLKITLRSIREGRKQTLSECLKKEFRITVNILRSTISPDVYEGIRALTIDKDNSPKWSPATLDEVAEEKINLVFEPLEDDIELHIPETEENRWGGKYET

SEQ ID NO: 73250 - DNA, 831 bp, Brassica napus; identical to SEQ ID NO: 29224
  CDS (1)..(831)

SEQ ID NO: 73251 - protein, 276 aa, Brassica napus; identical to SEQ ID NO: 29225

SEQ ID NO: 73252 - DNA, 1017 bp, Brassica napus; identical to SEQ ID NO: 29226
  CDS (1)..(1017)

SEQ ID NO: 73253 - protein, 338 aa, Brassica napus; identical to SEQ ID NO: 29227

SEQ ID NO: 73254 - DNA, 2178 bp, Brassica napus
  CDS (1)..(2178)
atggcttcacgaacgaaagggaagacgacgattgaagttggcgccgatggcgtcgccgtcataactctcgtcaatcctcccgtcaattcgctatcattcgacgtgctatacagtctcaagagtaattacgaggaggccttgagcaggaacgatgttaaagctattgttgttacaggtgctaaggggaagttctctggtggatttgatatatctggatttggtgaaattcagaaagggacgatgaaagagccaaaggttggatacatatcgattgatatcctcacagatttgcttgaagctgcaaagaaaccgtctgtagctgctattgatgggcttgccttaggaggagggttagagctttccatggcttgccatgctaggatatcagctcctggtgcacagttaggtctgcccgagcttcaactcggtgttattcctgggtttggaggaacacagcgtcttccacgtcttgttggtctcacaaaagcccttgagatgattttgacatctaagccgggtaaagcagaggagggtcattcattgggtcttattgatgctgtcgtgccacctgcggagttactgaacgctgctcgtcgctgggcccttgacattgccgagaggagaaaaccatggggttctagtgttttaaagactgataagttacctcctcttggagaggcaagggagatactgaaatttgccaaggatcagacgcgcaggcaagcccccaacatgaaacaccccttgatgtgccttgaggctgttgaagtgggtattgtttctggttcaagggctggtttagaaaaggaggctcaagttggctcgcaagtggtaaacctggataccaccaaaagcttgatccatgtcttcttttctcagcgaggaactacaaaggttcctggagttactgatcgtgggttagtgccaaggaagattaataaggtagccataattggaggcgggttgatgggatctggaatagccactgcattgatcctcagtaactattcagtgattctcaaggaggtaaatgagaagttcttggaggctggaattggcagggtcaaagctaatcttcagagtcgtgtaaagaaaggaaagatgtctcaggaaaagtttgagaaaaccatgtcactccttaagggttctcttgactacgaaagctttagggatgtggatatggtcatcgaggctgtcattgagaatatatctttgaagcagcaaatttttgctgatctcgagaagtactgtcctcaacattgtatccttgctagcaacacatctaccattgatttgaacaaaattggggagcggaccaagtcccaagatcggattatcggagcacatttcttcagtccagcgcatgtcatgccactacttgaaatagttcggaccaatcatacctctgcccaagtaattgttgacctgttagatgttgggaagaagattaggaaaacaccagtcgtggttggaaactgcacggggttcgcagttaataggatgttcttcccatacacacaggcagctatgttccttgttgagcatggaacagatccatatctcatcgacaaagcagtcagcaagtttggaatgccaatgggtcccttcagattgtgcgacctggttggattcggtgtggcgattgcaaccgcaacacaattcattgagaacttccctgaacggacatacaaatcaatgattatcccactcatgcaagaggacaagagagctggtgaagccactcgtaaaggtttctatctttatgatgataggcgcaaggctaaacctgaccctgaaataaagaactatatagacaaggcaaggagcgtatcaggagcaaagcctgacccgaagctggagaaactgtcggagaaggaaattattgaaatgacgttcttcccagtagtgaacgaggcgtgtagagtctttgcggaaggaattgctgtcaaagcagcagaccttgacattgctggcatatttggaatgggttttccaccttacagaggaggaatcatgttctgggctgattccattggatcgaaatacatttactcaaagctagaggagtggtcgaaggcttatggtgaattcttcaagccttgtgctttcttggctgaaaggggatccaaaggagctcctctgagcgctcctttggaacaatccagatcgcggttgtaa

SEQ ID NO: 73255 - protein, 725 aa, Brassica napus
MASRTKGKTTIEVGADGVAVITLVNPPVNSLSFDVLYSLKSNYEEALSRNDVKAIVVTGAKGKFSGGFDISGFGEIQKGTMKEPKVGYISIDILTDLLEAAKKPSVAAIDGLALGGGLELSMACHARISAPGAQLGLPELQLGVIPGFGGTQRLPRLVGLTKALEMILTSKPGKAEEGHSLGLIDAVVPPAELLNAARRWALDIAERRKPWGSSVLKTDKLPPLGEAREILKFAKDQTRRQAPNMKHPLMCLEAVEVGIVSGSRAGLEKEAQVGSQVVNLDTTKSLIHVFFSQRGTTKVPGVTDRGLVPRKINKVAIIGGGLMGSGIATALILSNYSVILKEVNEKFLEAGIGRVKANLQSRVKKGKMSQEKFEKTMSLLKGSLDYESFRDVDMVIEAVIENISLKQQIFADLEKYCPQHCILASNTSTIDLNKIGERTKSQDRIIGAHFFSPAHVMPLLEIVRTNHTSAQVIVDLLDVGKKIRKTPVVVGNCTGFAVNRMFFPYTQAAMFLVEHGTDPYLIDKAVSKFGMPMGPFRLCDLVGFGVAIATATQFIENFPERTYKSMIIPLMQEDKRAGEATRKGFYLYDDRRKAKPDPEIKNYIDKARSVSGAKPDPKLEKLSEKEIIEMTFFPVVNEACRVFAEGIAVKAADLDIAGIFGMGFPPYRGGIMFWADSIGSKYIYSKLEEWSKAYGEFFKPCAFLAERGSKGAPLSAPLEQSRSRL

SEQ ID NO: 73256 - DNA, 1149 bp, Glycine max
  CDS (1)..(1149)
atggctttcccctccaaaggcgatgacgagcaggttctggtgcagcgtaaatcgaatgcgagagttttgacactaaacaggactaaacagctgaatgccctatcgtttgatatggtaactcggctacttgaaattttttctgaagatgagaaagattctgatattaaattggttgtcgtgaagggaaatggaagggctttttgtgctggtggtgatgttgcagctgttgctcgtgatggaagtaaaggtgactggaggtttggtgcaaatttttttcaaagtgaatttaaattgaattacttgatggcaacatatagtaagccccaggtttcaattcttaatggaattgtcatgggaggtggtgctggtgtttctgtacatggaagatttcgtgttgttactgagaatacggtctttgcaatgccagaaacagctttgggtttatttcctgatataggttcctcatacttcttgtctagactgcccggatttcttggagaatatgctggtcttacaggtgctaggttggatggtgcagaaatgcttgcttgtggtcttgcaacacattttgttccttcatcaaaattgtctttattggaagaagcattatgcaaggtggaaactagtgatccaaatgcggtgtctgcaatcatcaataagtattcagagcaacctttcctaaaagaggatagtgtttatcacaggatggatgtgatcaataagtgcttctctaaaaaggctgttgaggaaatattatcttctctcgaggtggaagctacgagaaaggctgatccttggatttctgcaactattcaatccttaaagaaagcatctccaacaagccttaaaatctttcttagatcgattagacaaggaaggctccaaggtgttggacaatgccttgtttctgattatagagttgtttgtcatattctaaaaggacactacagcaaggatttcttcgagggttgtagggctatactgatagataaagacagaaacccaaagtgggaaccttccaaattggagcttcttagtgatagcgatgttaatcgttacttctctaaacttgatgataaaggatggaaagatttggagcttcctaaaaggtttaataatctgcctacatatgctatttcaaagctgtaa

SEQ ID NO: 73257 - protein, 382 aa, Glycine max
MAFPSKGDDEQVLVQRKSNARVLTLNRTKQLNALSFDMVTRLLEIFSEDEKDSDIKLVVVKGNGRAFCAGGDVAAVARDGSKGDWRFGANFFQSEFKLNYLMATYSKPQVSILNGIVMGGGAGVSVHGRFRVVTENTVFAMPETALGLFPDIGSSYFLSRLPGFLGEYAGLTGARLDGAEMLACGLATHFVPSSKLSLLEEALCKVETSDPNAVSAIINKYSEQPFLKEDSVYHRMDVINKCFSKKAVEEILSSLEVEATRKADPWISATIQSLKKASPTSLKIFLRSIRQGRLQGVGQCLVSDYRVVCHILKGHYSKDFFEGCRAILIDKDRNPKWEPSKLELLSDSDVNRYFSKLDDKGWKDLELPKRFNNLPTYAISKL

SEQ ID NO: 73258 - DNA, 795 bp, Glycine max; identical to SEQ ID NO: 29228
  CDS (1)..(795)

SEQ ID NO: 73259 - protein, 264 aa, Glycine max; identical to SEQ ID NO: 29229

SEQ ID NO: 73260 - DNA, 795 bp, Glycine max; identical to SEQ ID NO: 29230
  CDS (1)..(795)

SEQ ID NO: 73261 - protein, 264 aa, Glycine max; identical to SEQ ID NO: 29231

SEQ ID NO: 73262 - DNA, 1158 bp, Hordeum vulgare
  CDS (1)..(1158)
atggctcaacaacaacccaatcccgacgaggtcgtgctcggtcaggagatcaacggcgcgagggtggtcaccctcaaccgcccgcgccagctcaacggcatcaacgacagagtggtatatctcctagcgcagctcttggagaaatgggagaaagatgacgatgccaagctggtcatcttcaagggagcaggacgagcattttctgctggcggggacctaaagatgttctacgaagggagatcatcagatgattcctgcctcgaggtcgtgtataggatgtactggctctgctatcacatccatacatacaagaaaaccacggtggctcttgttaatggacttgtcatgggtggaggtgcggccatggttgctccgctgaaatttgcagttgtcacagagaaaacggtttttgccactcccgaggcaagcgttggactacacacagattgtagcttttcttatatccattctcggctccctggatatttaggggagtacctggctttgactggtgctagactgaatgcaaaagaaatgatcgctgccggtcttgctactcattttgtcctttctgaaaaattggaagagctcgaaaaacaattactgaatttaaacgcaggcgacgagtctgcagtccgagctgtcattgaggaattctcaacggatgttcagcttgatcaagagagtattttaaacaagcttccaactatcgacaaatgtttctcagccgagactgttgaggagatcttgaaagcacttgattcagaagtgagcattgatggaaaccaatggatagctccagtcctgaagagtatgagaagatcatctcctactggattgaagatcacactgcgatcggttagagaaggtcggaagcagagtctgcaggaatgtttaaagaaggaatttggactaacaatgaacatcctccgatccgtcgttactggcgatgtctatgagggtattagagctctgagtatcgacaaagacaatgcacctaagtggagtcccgcaaccattgaagaggtgaagaatgaagacattgaccgtgttttcgaaccattcagctcagaacatgagctccaggtcccatctgatgattccaacaggtggagcggcaaatacgagcacacggtctatgcgaaatcttcgcagtga

SEQ ID NO: 73263 - protein, 385 aa, Hordeum vulgare
MAQQQPNPDEVVLGQEINGARVVTLNRPRQLNGINDRVVYLLAQLLEKWEKDDDAKLVIFKGAGRAFSAGGDLKMFYEGRSSDDSCLEVVYRMYWLCYHIHTYKKTTVALVNGLVMGGGAAMVAPLKFAVVTEKTVFATPEASVGLHTDCSFSYIHSRLPGYLGEYLALTGARLNAKEMIAAGLATHFVLSEKLEELEKQLLNLNAGDESAVRAVIEEFSTDVQLDQESILNKLPTIDKCFSAETVEEILKALDSEVSIDGNQWIAPVLKSMRRSSPTGLKITLRSVREGRKQSLQECLKKEFGLTMNILRSVVTGDVYEGIRALSIDKDNAPKWSPATIEEVKNEDIDRVFEPFSSEHELQVPSDDSNRWSGKYEHTVYAKSSQ

SEQ ID NO: 73264 - DNA, 1224 bp, Zea mays
  CDS (1)..(1224)
atgccgcgcctcgccgccgccgccgccgccgtctcacgccgcgccggcgaggccctgcgccgcggcgcgtttgggggactgcggcctctctcctccctgcaaccgttaaacgccgcctccagcgacgaggtgctcgttgaaggaaagacaagtgcgcgcgctgccgtgctcaaccgccctggctacctcaacgccctcaccaccaccatgggagctaggctcaataaattttatcaatcatgggaggacaacccagacattggctttgtcatgatgaagggcagcggccgagcattctgtgctggtggggatgttgttagattacatgaacttatcactgaaggcaagctggaggaatgtaaggattttttcaagactttgtacatgttcatttattttctgggcacgtacttgaaaccacatgttgccattcttgatggcattactatgggtggtggtggaggtgtttccatccctggaacattccgtgttgcaactgataggacagtctttgcaactccagaagttcatattggattccatcctgatgctgcagcctccttttatttgtcgcatctaactggccatgttggggaatatgtggccttgactggtgaaaagcttaatggaacagatatgattgctcttggcctcgctacacactatttcatgagtggccatctggatctgatcgatgaacgacttgcaaagttagtaactgatgatccatcagttattgattcgtcccttgcacaatatggagacatggtttatccggacaaaaatagcattgttcataggctggaggtgattgataaatgcttcagccatgacacagttgaagagattgttgatgccttggaaagtgaagcagccagctcaaatgaagaatggtgtatcttggcgctgaaacgattgaaagaggcctctccgttagctttgaaggtctcactgcgatcgatacgcgagggtagatatcagacacttgatgagtgccttgtccgtgagtaccgcatgtccatgaatggaatctcaaagcaattttctcatgaattctgcgagggagtcagagcacgactagtcgacaaggacttcactcctaagtgggatcctcctgcccttgagtatgttacgaatgacatggttgacgcatacttcgcacctcttggcgattcggagcctgagttgaagctgcctatagaatcgcgagaggcatttgtatga

SEQ ID NO: 73265 - protein, 407 aa, Zea mays
MPRLAAAAAAVSRRAGEALRRGAFGGLRPLSSLQPLNAASSDEVLVEGKTSARAAVLNRPGYLNALTTTMGARLNKFYQSWEDNPDIGFVMMKGSGRAFCAGGDVVRLHELITEGKLEECKDFFKTLYMFIYFLGTYLKPHVAILDGITMGGGGGVSIPGTFRVATDRTVFATPEVHIGFHPDAAASFYLSHLTGHVGEYVALTGEKLNGTDMIALGLATHYFMSGHLDLIDERLAKLVTDDPSVIDSSLAQYGDMVYPDKNSIVHRLEVIDKCFSHDTVEEIVDALESEAASSNEEWCILALKRLKEASPLALKVSLRSIREGRYQTLDECLVREYRMSMNGISKQFSHEFCEGVRARLVDKDFTPKWDPPALEYVTNDMVDAYFAPLGDSEPELKLPIESREAFV

SEQ ID NO: 73266 - DNA, 1224 bp, Zea mays
  CDS (1)..(1224)
atgccgcgcctcgccgccgccgccgccgccgtctcacgccgcgccggcgaggccctgcgccgcggcgcgtttgggggactgcggcctctctcctccctgcaaccgttaaacgccgcctccagcgacgaggtgctcgttgaaggaaagacaagtgcgcgcgctgccgtgctcaaccgccctggctacctcaacgccctcaccaccaccatgggagctaggctcaataaattttatcaatcatgggaggacaacccagacattggctttgtcatgatgaagggcagcggccgagcattctgtgctggtggggatgttgttagattacatgaacttatcactgaaggcaagctggaggaatgtaaggattttttcaagactttgtacatgttcatttattttctgggcacatacttgaaaccacatgttgccattcttgatggcattactatgggtggtggtggaggtgtttccatccctggaacattccgtgttgcaactgataggacagtctttgcaactccagaagttcatattggattccatcctgatgctgcagcctccttttatttgtcgcatctaactggccatgttggggaatatgtggccttgactggtgaaaagcttaatggaacagatatgattgctcttggcctcgctacacactatttcatgagtggccatctggatctgatcgatgaacgacttgcaaagttagtaactgatgatccatcagttattgattcgtcccttgcacaatatggagacatggtttatccggacaaaaaaagcattgttcataggctggaggtgattgataaatgcttcagccatgacacagttgaagagattgttgatgccttggaaagtgaagcagccagctcaaatgaagaatggtgtatcttggcgctgaaacgattgaaagaggcctctccgttagctttgaaggtctcactgcgatcgatacgcgagggtagatatcagacacttgatgagtgccttgtccgtgagtaccgcatgtccatgaatggaatctcaaagcaattttctcatgaattctgcgagggagtcagagcacgactagtcgacaaggacttcactcctaagtgggatcctcctgcccttgagtatgttacgaatgacatggttgacgcatacttcgcacctcttggcgattcggagcctgagttgaagctgcctatagaatcgcgagaggcatttgtatga

SEQ ID NO: 73267 - protein, 407 aa, Zea mays
MPRLAAAAAAVSRRAGEALRRGAFGGLRPLSSLQPLNAASSDEVLVEGKTSARAAVLNRPGYLNALTTTMGARLNKFYQSWEDNPDIGFVMMKGSGRAFCAGGDVVRLHELITEGKLEECKDFFKTLYMFIYFLGTYLKPHVAILDGITMGGGGGVSIPGTFRVATDRTVFATPEVHIGFHPDAAASFYLSHLTGHVGEYVALTGEKLNGTDMIALGLATHYFMSGHLDLIDERLAKLVTDDPSVIDSSLAQYGDMVYPDKKSIVHRLEVIDKCFSHDTVEEIVDALESEAASSNEEWCILALKRLKEASPLALKVSLRSIREGRYQTLDECLVREYRMSMNGISKQFSHEFCEGVRARLVDKDFTPKWDPPALEYVTNDMVDAYFAPLGDSEPELKLPIESREAFV

SEQ ID NO: 73268 - DNA, 909 bp, Zea mays; identical to SEQ ID NO: 29232
  CDS (1)..(909)

SEQ ID NO: 73269 - protein, 302 aa, Zea mays; identical to SEQ ID NO: 29233

SEQ ID NO: 73270 - DNA, 918 bp, Zea mays; identical to SEQ ID NO: 29234
  CDS (1)..(918)

SEQ ID NO: 73271 - protein, 305 aa, Zea mays; identical to SEQ ID NO: 29235

SEQ ID NO: 73272 - DNA, 1221 bp, Zea mays
  CDS (1)..(1221)
atgccgcgcctcgccgccgccgccgccgtctcacgccgcgccggcgaggccctgcgccgcggcgcgtttgggggactgcggcctctctcctccctgcaaccgttaaacgccgcctccagcgacgaggtgctcgttgaaggaaagacaagtgcgcgcgctgccgtgctcaaccgccctggctacctcaacgccctcaccaccaccatgggagctaggctcaataaattttatcaatcatgggaggacaacccagacattggctttgtcatgatgaagggcagcggccgagcattctgtgctggtggggatgttgttagattacatgaacttatcagtgaaggcaagctggaggaatgtaaggattttttcaagactttgtacatgttcatttattttctgggcacgtacttgaaaccacatgttgccattcttgatggcattactatgggtggtggtggaggtgtttccatccctggaacattccgtgttgcaactgataggacagtctttgcaactccagaagttcatattggattccatcctgatgctgcagcctccttttatttgtcgcatctaactggccatgttggggaatatgtggccttgaccggtgaaaagcttaatggaacagatatgattgctcttggccttgctacacactatttcatgagtggccatctggatctgatcgatgaacgacttgcaaagttagtaactgatgatccatcagttattgattcgtcccttgcacaatatggagacatggtttatccggacaaaaaaagcattgttcataggctggaggtgattgataaatgcttcagccatgacacagttgaagagattgttgatgccttggaaagtgaagcagccagctcaaatgaagaatggtgtatcttggcgctgaaacgattgaaagaggcctctccgttagctttgaaggtttcactgcgatcgatacgcgagggtagatatcagacacttgatgagtgccttgtccgtgagtaccgcatgtccatgaatggaatctcaaagcaattttctcatgaattctgcgagggagtcagagcacgactagtcgacaaggacttcactcctaagtgggatcctcctgcccttgagtatgttacgaatgacatggttgacgcatacttcgcacctcttggcgattcggagcctgagttgaagctgcctatagaatcgcgagaggcatttgtatga

SEQ ID NO: 73273 - protein, 406 aa, Zea mays
MPRLAAAAAVSRRAGEALRRGAFGGLRPLSSLQPLNAASSDEVLVEGKTSARAAVLNRPGYLNALTTTMGARLNKFYQSWEDNPDIGFVMMKGSGRAFCAGGDVVRLHELISEGKLEECKDFFKTLYMFIYFLGTYLKPHVAILDGITMGGGGGVSIPGTFRVATDRTVFATPEVHIGFHPDAAASFYLSHLTGHVGEYVALTGEKLNGTDMIALGLATHYFMSGHLDLIDERLAKLVTDDPSVIDSSLAQYGDMVYPDKKSIVHRLEVIDKCFSHDTVEEIVDALESEAASSNEEWCILALKRLKEASPLALKVSLRSIREGRYQTLDECLVREYRMSMNGISKQFSHEFCEGVRARLVDKDFTPKWDPPALEYVTNDMVDAYFAPLGDSEPELKLPIESREAFV

SEQ ID NO: 73274 - DNA, 918 bp, Zea mays; identical to SEQ ID NO: 29236
  CDS (1)..(918)

SEQ ID NO: 73275 - protein, 305 aa, Zea mays; identical to SEQ ID NO: 29237

SEQ ID NO: 73276 - DNA, 1011 bp, Zea mays; identical to SEQ ID NO: 29238
  CDS (1)..(1011)

SEQ ID NO: 73277 - protein, 336 aa, Zea mays; identical to SEQ ID NO: 29239

SEQ ID NO: 73278 - DNA, 867 bp, Zea mays; identical to SEQ ID NO: 29240
  CDS (1)..(867)

SEQ ID NO: 73279 - protein, 288 aa, Zea mays; identical to SEQ ID NO: 29241

SEQ ID NO: 73280 - DNA, 20 bp, Artificial sequence
  primer
atgaacaagtacgaaggccg

SEQ ID NO: 73281 - DNA, 21 bp, Artificial sequence
  primer
tcagcgcttgtaggcttgcag

SEQ ID NO: 73282 - protein, 330 aa, Artificial sequence
  consensus sequence
  Variant (3)..(4): Xaa in position 3 to 4 is any amino acid
  Variant (5)..(5): Xaa in position 5 is any or no amino acid
  Variant (8)..(34): Xaa in position 8 to 34 is any amino acid
  Variant (35)..(42): Xaa in position 35 to 42 is any or no amino acid
  Variant (44)..(50): Xaa in position 44 to 50 is any amino acid
  Variant (51)..(56): Xaa in position 51 to 56 is any or no amino acid
  Variant (58)..(58): Xaa in position 58 is any amino acid
  Variant (60)..(80): Xaa in position 60 to 80 is any amino acid
  Variant (81)..(101): Xaa in position 81 to 101 is any or no amino acid
  Variant (104)..(105): Xaa in position 104 to 105 is any amino acid
  Variant (107)..(109): Xaa in position 107 to 109 is any amino acid
  Variant (111)..(113): Xaa in position 111 to 113 is any amino acid
  Variant (117)..(122): Xaa in position 117 to 122 is any amino acid
  Variant (125)..(131): Xaa in position 125 to 131 is any amino acid
  Variant (133)..(133): Xaa in position 133 is any amino acid
  Variant (134)..(134): Xaa in position 134 is any or no amino acid
  Variant (136)..(138): Xaa in position 136 to 138 is any amino acid
  Variant (140)..(142): Xaa in position 140 to 142 is any amino acid
  Variant (144)..(145): Xaa in position 144 to 145 is any amino acid
  Variant (147)..(155): Xaa in position 147 to 155 is any amino acid
  Variant (156)..(158): Xaa in position 156 to 158 is any or no amino acid
  Variant (160)..(176): Xaa in position 160 to 176 is any amino acid
  Variant (177)..(177): Xaa in position 177 is any or no amino acid
  Variant (179)..(181): Xaa in position 179 to 181 is any amino acid
  Variant (184)..(213): Xaa in position 184 to 213 is any amino acid
  Variant (214)..(283): Xaa in position 214 to 283 is any or no amino acid
  Variant (285)..(314): Xaa in position 285 to 314 is any amino acid
  Variant (315)..(325): Xaa in position 315 to 325 is any or no amino acid
  Variant (327)..(329): Xaa in position 327 to 329 is any amino acid
RPXXXNAXXXXXXXXXXXXXXXXXXXXXXXXXXXXXXXXXXXGXXXXXXXXXXXXXGXDXXXXXXXXXXXXXXXXXXXXXXXXXXXXXXXXXXXXXXXXXXKPXXAXXXGXXXGGGXXXXXXCDXXXXXXXAXXFXXXEXXXGXXPXXXXXXXXXXXXGXXXXXXXXXXXXXXXXXXAXXXGLXXXXXXXXXXXXXXXXXXXXXXXXXXXXXXXXXXXXXXXXXXXXXXXXXXXXXXXXXXXXXXXXXXXXXXXXXXXXXXXXXXXXXXXXXXXXXXXXXXXXKXXXXXXXXXXXXXXXXXXXXXXXXXXXXXXXXXXXXXXXXXGXXXF

SEQ ID NO: 73283 - protein, 28 aa, Artificial sequence
  protein pattern
  Variant (2)..(2): Xaa in position 2 is any amino acid
  Variant (3)..(3): Xaa in position 3 is Ile, Leu or Val
  Variant (5)..(5): Xaa in position 5 is any amino acid
  Variant (6)..(6): Xaa in position 6 is Ile, Leu or Val
  Variant (7)..(7): Xaa in position 7 is any amino acid
  Variant (9)..(11): Xaa in position 9 to 11 is any amino acid
  Variant (12)..(12): Xaa in position 12 is any or no amino acid
  Variant (14)..(14): Xaa in position 14 is any or no amino acid
  Variant (16)..(18): Xaa in position 16 to 18 is any amino acid
  Variant (19)..(19): Xaa in position 19 is Ala, Leu, Pro or Val
  Variant (20)..(22): Xaa in position 20 to 22 is any amino acid
  Variant (23)..(23): Xaa in position 23 is Ala, Cys, Asp or Gly
  Variant (24)..(27): Xaa in position 24 to 27 is any amino acid
  Variant (28)..(28): Xaa in position 28 is Ala, Cys, Gly, Ser or Thr
PXXAXXXGXXXXGXGXXXXXXXXXXXXX

SEQ ID NO: 73284 - DNA, 477 bp, Azotobacter vinelandii
  CDS (1)..(477): transl_table=11
atgcgcgacccgttgttcggcattcccctcgatgaccagccgcggacgctggccgattttcccgggcgcgcctggctggtcgtgaacacggccagccgttgcggtttcacgccccagtacgaaggcctgcagatgctctggcagcgttatcgggaaaggggattggtggtgctcggcttcccctgcgatcagttcggtcatcaggagccaggcaatgaactcgaaatcgccgagttctgccagcttcgctatggcgtcgattttccgctgtttcagaaggtcgaggtcaatgggccccgggcacaccccctgttcgtggaattgaagaagcgcgcgccaggcctgctgggtagccagagggtgaagtggaacttcaccaagttcctgatcggccgggagggccgggtggtcaggcgtttcgctcccgcgaccggcccacgcgagctgtgcggcgaaatcgaagccctgcttgaatag

SEQ ID NO: 73285 - protein, 158 aa, Azotobacter vinelandii
MRDPLFGIPLDDQPRTLADFPGRAWLVVNTASRCGFTPQYEGLQMLWQRYRERGLVVLGFPCDQFGHQEPGNELEIAEFCQLRYGVDFPLFQKVEVNGPRAHPLFVELKKRAPGLLGSQRVKWNFTKFLIGREGRVVRRFAPATGPRELCGEIEALLE

SEQ ID NO: 73286 - DNA, 911 bp, Oryza sativa
  CDS (201)..(710)
ctcgcaccgccccgttcatctctcgcctccggctcctccgaaccgccgccgccctctccccgttctcgtcctccgcgccgccgcggcacagcccccgcatcctccgcgctatccctgtcggtgcgcctcacccgccgcgcgtctccgcagccgtctcgccgctggtccgtccggtcgccgccgggttcgcgctgttcagcatggccaccgccgcctcctccgccgcatccgtccacgacttcaccgtcaaggatgcaagtggcaaagatgtggacctgagcaccttcaaggggaaagtcctccttatcgtcaatgttgcatctcagtgtggcttgaccaattccaactacacggagctgagccagttgtatgagaagtacaaggaccagggttttgagatccttgctttcccatgcaaccagtttggtggacaggaacctggcactaatgaggagattgtccaatttgcttgcacccgcttcaaggccgagtatccaatttttgataaggttgatgttaatggtgacaacactgcacccatctacaagtttctgaagtccagcaaaggtggtcttttcggtgacaatatcaaatggaacttctccaagttcttggtcgacaaagaggggcgtgttgtggagcgctatgcgccaactacttctccactcagcatggagaaggacatcaagaagctgcttggaagttcttaaaaccttaccgccggcgccaccagatgcactgctgcgttgcattgagcacttggaacttccaataatgttgtaataaaactgtgcttggaattgctgtattttcatttgcgtagccctgctgtgtaatgtataaagtattaacgtgtaatgaaattggcttactgcatcactttgcccctttattgaaatattatctcctgt

SEQ ID NO: 73287 - protein, 169 aa, Oryza sativa
MATAASSAASVHDFTVKDASGKDVDLSTFKGKVLLIVNVASQCGLTNSNYTELSQLYEKYKDQGFEILAFPCNQFGGQEPGTNEEIVQFACTRFKAEYPIFDKVDVNGDNTAPIYKFLKSSKGGLFGDNIKWNFSKFLVDKEGRVVERYAPTTSPLSMEKDIKKLLGSS

SEQ ID NO: 73288 - DNA, 513 bp, Glycine max
  CDS (1)..(513)
atgggtgcttcggcatcggtcacagaaaaatccatccatgaattcatggtcaaggatgctaagggcagagacgtgaacctcagcacctacaaagggaaggttcttcttgtagttaacgtcgcttcaaaatgtggatttacaaattccaattacacccagttaactgagctttacagcaaatataaagacagaggtcttgagatactggcatttccatgcaaccagtttctgaaacaagagcccgggagtagccaggaggcagaggaatttgcctgtacaaggtacaaggctgagtatcccatttttggaaaggtacgtgtcaatggacctgatacagcacctgtctacaaattccttaaagcaaataaaacaggatttctgggtagtaggataaagtggaatttcactaagtttttggttgacaaggaagggcatgtcctcgctcgttatggtccaaccacctcaccgttgtccattgaaaatgacatcaagacagcattgggggaggcttga

SEQ ID NO: 73289 - protein, 170 aa, Glycine max
MGASASVTEKSIHEFMVKDAKGRDVNLSTYKGKVLLVVNVASKCGFTNSNYTQLTELYSKYKDRGLEILAFPCNQFLKQEPGSSQEAEEFACTRYKAEYPIFGKVRVNGPDTAPVYKFLKANKTGFLGSRIKWNFTKFLVDKEGHVLARYGPTTSPLSIENDIKTALGEA

SEQ ID NO: 73290 - DNA, 900 bp, Sorghum bicolor
  CDS (208)..(714)
  misc_feature (800)..(800): n is a, g, c or t
gcggcgctcgaggcggccgggatcaaaattggtgccggctggtgtcccatttcctactgcacgcctcggccgaccgccggtctgccgctctgcctcgatgattgaggctacaagagggctcaggggcccccgactcctcctgtccgtcgccgtcctcgtcctcgccattgctctcgtcttccgctccctcaccccccagtcccgcaaatggccgacgacctgcccacctccatctacgacatcaccgtcaaggatattagaggtgatgacatagatctaagcgagtatgctggaaaggttcttcttatcgtcaatgttgcttcaaaatgtggactaacaagttccaattacaaagagctaaatgtcttgtatgagaagtacagagagaaaggccttgagatacttgcattcccatgtaatcaatttgctggtcaagagcctggcaccaatgaagatatccaggagacagtttgtagcaggttcaaagcagagtttcctatttttgacaagattgatgtgaatggtaaggacgctgcaccattgtacaagtacttgaaatcacagaaaggtggcttccttggcgatggtattaaatggaacttcaccaagtttcttgttgacaaagatggcaaggttgttgagcgatatgctccgacgacttctcctttgaagattgagaatgacatccagaagcttctgggcacagcatcatgatttggttacatgaattatgttccctgaactctcttgccactgttgtaatttcattgaaaatatggagcttggacatctgtgccagntttccgttctcagttgaaaatacgatggtctagtgtaaagaaacattatcatgtatagatgctgtgtattttacttgcaaaaaaaaaaaaaaaggcccta

SEQ ID NO: 73291 - protein, 168 aa, Sorghum bicolor
MADDLPTSIYDITVKDIRGDDIDLSEYAGKVLLIVNVASKCGLTSSNYKELNVLYEKYREKGLEILAFPCNQFAGQEPGTNEDIQETVCSRFKAEFPIFDKIDVNGKDAAPLYKYLKSQKGGFLGDGIKWNFTKFLVDKDGKVVERYAPTTSPLKIENDIQKLLGTAS

SEQ ID NO: 73292 - DNA, 992 bp, Sorghum bicolor
  CDS (134)..(649)
gcacgaggtccccattattgctggaaaaaaaagaacacgatgaaaaatctaatccaagagacggggattccagagcgcccccgctcggctagggaagggaagggaaggagaggcgaagcggagcggaggcgagatgggggcggccgagtccgtgccggagacctccatacacgaattcaccgtcaaggattgcaacggcaaggaagtgagcctggagacctacaaggggaaggtcctccttgttgttaacgtcgcctccaaatgtgggttcaccgaggttaattacacgcagctgacggagctttatcggaagtacagggacaaagactttgagatattggcattcccctgcaatcagttcttgcgacaagagccaggttctaatcagcagataaaagactttgcttgcaccagatttaaagctgaatacccagtttttcagaaggtgcgtgtaaatggcccggacgccgcgccggtttacaagtttctgaaagctagcaagcctggtttgtttggatcagcaagagtcaaatggaattttaccaagtttctcgtggataaaaatgggaaggtcgttgagagatacggaacatcgacggctccaatgtcaattgagaaggacatccagaaggcccttgatgaggaataaagatcccatgtcctcttgtctcgtctcatccatcacccacactggcagaaataggcactcgcagaagtattccgtcgtagcaacatttgcttgtttgtagtaaatctgtataatgccctccttttcgccttcatgctcattgcgctcgtgtaagtattggttgtattaactagccattaatcttctccgtcttttttttttctttttgccctttttggactgaagagttaagtcatgctatatcgatgcaaaactatgtaacattggtgaagtattatactcctactagtttataaggtttgtgtttacgctcattccattcctaattatgcttgatagcctg

SEQ ID NO: 73293 - protein, 171 aa, Sorghum bicolor
MGAAESVPETSIHEFTVKDCNGKEVSLETYKGKVLLVVNVASKCGFTEVNYTQLTELYRKYRDKDFEILAFPCNQFLRQEPGSNQQIKDFACTRFKAEYPVFQKVRVNGPDAAPVYKFLKASKPGLFGSARVKWNFTKFLVDKNGKVVERYGTSTAPMSIEKDIQKALDEE

SEQ ID NO: 73294 - DNA, 495 bp, Glycine max
  CDS (1)..(495)
atggccgactggaagagcgcttcgtctgtgtacgacttcagcgtcaaggacatcactggcgccgacgtcagcctagacaagtacaagggccacgttctgctgatcgtcaacatcgcctcgctgtgcgggctgacggccaccaactacaaggagctcgtcgagctggacgagaagtaccgcgagcgcgggctgcgcatcctcgccttcccctgcaaccagttcaacggccaggagcccggcacggccgacgacatcgtgtgcttcgccaagaagcagaacgccaactttgacctgttcgagaaggtgaacgtcaacggcgacgacgccagccccctctggaagtacctgaagaacaagcagggcggcaccttcggagacttcatcaagtggaacttcaccaagttcatcgtcgacaaggagggccagcccgtggagcgacacagccccactacggagccacacaaactgatctctcacattgagaagtacctgtaa

SEQ ID NO: 73295 - protein, 164 aa, Glycine max
MADWKSASSVYDFSVKDITGADVSLDKYKGHVLLIVNIASLCGLTATNYKELVELDEKYRERGLRILAFPCNQFNGQEPGTADDIVCFAKKQNANFDLFEKVNVNGDDASPLWKYLKNKQGGTFGDFIKWNFTKFIVDKEGQPVERHSPTTEPHKLISHIEKYL

SEQ ID NO: 73296 - DNA, 832 bp, Zea mays subsp. mays
  CDS (195)..(701)
ataaatcaaccgccggtgaagtctagtcgtctcgtcgctcggtccaccacctcagctccgccgcttgcccgcttttgctctctccctcccggctctcggcttcttctacacgctaccgtctcacagccgtaaacgcccctcccggatcccgctagttcgccaccgccgcccgcccgcccgcctttcgcctcatcatggccgcctcgtcgaccgccacctccgtccacgacttcatcgtcaaggatgcgagcggcaaagacgttgacctcagcacctacaaggggaaggttcttctcattgttaacgtcgcatcccagtgtggcttaaccaactccaactacactgagctggcccagctctatgagaagtacaaggaccaaggctttgaaatcctggctttcccatgcaaccagtttggtgggcaggagcctggtaccaataaggagattgtccagtttgcctgcacacgcttcaaggctgagtaccccatcttcgacaaggttgatgtcaacggtagcaatgctgcgcccatctacaagttcttgaaatctagcaaaggtggccttttcggcgacagcatcaagtggaacttttccaagttcttggttgacaaggagggacgtgttgtggatcgctatgctccaaccacttcacccctgagcattgagaaggatatcaagaagctgcttgggagctcttaatcagtatctgggtgcaaagctgtagaaaaacatgtatcaacaatgccctgagcgataaaatatatgataagttgtattaataaagtattgtcgtacttgagaggttgcagtatctgctctatttcccttgc

SEQ ID NO: 73297 - protein, 168 aa, Zea mays subsp. mays
MAASSTATSVHDFIVKDASGKDVDLSTYKGKVLLIVNVASQCGLTNSNYTELAQLYEKYKDQGFEILAFPCNQFGGQEPGTNKEIVQFACTRFKAEYPIFDKVDVNGSNAAPIYKFLKSSKGGLFGDSIKWNFSKFLVDKEGRVVDRYAPTTSPLSIEKDIKKLLGSS

SEQ ID NO: 73298 - DNA, 728 bp, Aloe arborescens
  CDS (46)..(549)
ccagtttcagaaacccttctctctcctcctcgatcagtttcggtaatggcatctcaatcagcaacctcagtccacgatttcaccgtcaaggatgctaaggggaatgatgtggatctcagtgtttacaaagggaaggttctgctgattgtaaatgttgcttctaagtgtggactgactaactcgaactatacggagctgactcaattgtacgagaaatacaaggatcaaggttttgagattctggctttcccatgcaaccagtttggagcagaagaaccagggagcaatgaggagattgtagaatttgcttgtacacgctttaaagctgagttccccatattcgacaaggttgatgttaatggggacaaagctgcacccatctacaagttcttaaagtccagcaaaggtggtctgtttggggatagcattaagtggaacttctctaagttcttggtcgacaaggatgggcatgtcgttgaccgttatgcaccaaccacatctcctctgagcattgagaaggacatcaagaagctattgggagtctcctaaacttggcgatgcttggacacctaaagttgaataataaatagatcactgggatcaataggtgcccatctatcttactgtatggattcgctatctatgaggaatgtcaaagctagtatgagctagaaataaacttccagttgtgtaataattagtctctggatgaggttctagtgcttcgt

SEQ ID NO: 73299 - protein, 167 aa, Aloe arborescens
MASQSATSVHDFTVKDAKGNDVDLSVYKGKVLLIVNVASKCGLTNSNYTELTQLYEKYKDQGFEILAFPCNQFGAEEPGSNEEIVEFACTRFKAEFPIFDKVDVNGDKAAPIYKFLKSSKGGLFGDSIKWNFSKFLVDKDGHVVDRYAPTTSPLSIEKDIKKLLGVS

SEQ ID NO: 73300 - DNA, 505 bp, Aloe vera
  CDS (1)..(504)
atggcatctcaatcagcaacctcagtccacgatttcaccgtcaaggatgctaaggggaatgatgtggatctcagtgtttacaaagggaaggttctgctgattgtaaatgttgcttctaagtgtggactgactaactcgaactatacggagctgactcaattgtacgagaaatacaaggatcaaggttttgagattctggctttcccatgcaaccagtttggagcagaagaaccagggagcaatgaggagattgtagaatttgcttgtacacgctttaaagctgagtttcccatattcgacaaggttgatgttaatggggaccaagctgcacccatctacaagttcttaaagtccagcaaaggtggtctgtttggggatagcattaagtggaacttctctaagttcttggtcgacaaggatgggcatgtcgttgaccgttatgcaccaaccacacctcctctgagcattgagaaggacatcaagaagctattgggagtctcctaag

SEQ ID NO: 73301 - protein, 167 aa, Aloe vera
MASQSATSVHDFTVKDAKGNDVDLSVYKGKVLLIVNVASKCGLTNSNYTELTQLYEKYKDQGFEILAFPCNQFGAEEPGSNEEIVEFACTRFKAEFPIFDKVDVNGDQAAPIYKFLKSSKGGLFGDSIKWNFSKFLVDKDGHVVDRYAPTTPPLSIEKDIKKLLGVS

SEQ ID NO: 73302 - DNA, 801 bp, Lolium perenne
  CDS (151)..(666)
  misc_feature (75)..(75): n is a, g, c or t
  misc_feature (705)..(705): n is a, g, c or t
  misc_feature (714)..(714): n is a, g, c or t
  misc_feature (733)..(733): n is a, g, c or t
  misc_feature (772)..(772): n is a, g, c or t
  misc_feature (776)..(776): n is a, g, c or t
  misc_feature (779)..(779): n is a, g, c or t
  misc_feature (791)..(791): n is a, g, c or t
gaagaattctagaacttcctgagatgcagaaataaatttgaggacaggtgcttgccacttgtcaccattcttatngttcttcagacttcagagtattgccgcataacttttcttctcaaatcctttctcaagtgcctactgaaagcaaagatgggagcagcagagtcgtcttccaagcccggtggttctatccatgacttcgtcgttaaggatacaagaggaaatgatgtggagctcagcagatacaaagggaaagttttgctgattgtgaatgttgcatctcgatgtggtctgacaaattccaactacactgaactgggtcagctctacgagaaatacagggagaaaggattggagatattggcgttcccctgcaatcaatttgccggacaggaaccagatagcgatgagcagattgtggagtttgcctgcaatcgtttcaatgcagagtatccaatttttcgcaaggttgatgttaatggcaacaatgccgctccactgtacaagttcctgaagtcagagagaggcggtctatttggagaacgtatcaaatggaacttcaccaagtttctagttgacaaagaggggcacgttgtgactcgctatgcgccaacctgttccccgtccaacattgagaatgacatcaagaagctgttggaggtttgaggtgtctccagggaagatcatgcatcatgggtgtgtcgngtgtatggngtcttctgttattttaagnactgtatgtactctttactctattaagagaagatccggnctgnggntaaaaaaaaaantctacacgga

SEQ ID NO: 73303 - protein, 171 aa, Lolium perenne
MGAAESSSKPGGSIHDFVVKDTRGNDVELSRYKGKVLLIVNVASRCGLTNSNYTELGQLYEKYREKGLEILAFPCNQFAGQEPDSDEQIVEFACNRFNAEYPIFRKVDVNGNNAAPLYKFLKSERGGLFGERIKWNFTKFLVDKEGHVVTRYAPTCSPSNIENDIKKLLEV

SEQ ID NO: 73304 - DNA, 800 bp, Lolium perenne
  CDS (150)..(665)
  misc_feature (75)..(75): n is a, g, c or t
  misc_feature (673)..(673): n is a, g, c or t
  misc_feature (691)..(691): n is a, g, c or t
  misc_feature (701)..(701): n is a, g, c or t
  misc_feature (704)..(704): n is a, g, c or t
  misc_feature (715)..(715): n is a, g, c or t
  misc_feature (759)..(759): n is a, g, c or t
  misc_feature (771)..(771): n is a, g, c or t
  misc_feature (775)..(775): n is a, g, c or t
  misc_feature (778)..(778): n is a, g, c or t
  misc_feature (785)..(785): n is a, g, c or t
  misc_feature (787)..(787): n is a, g, c or t
  misc_feature (790)..(790): n is a, g, c or t
gaagaattctagaacttcctgagatgcagaaataaatttgaggacaggtgcttgccacttgtcaccattcttatngttcttcagacttcagagtattgccgcataacttttcttctcaaatcctttctcaagtgctactgaaagcaaagatgggagcagcagagtcgtcttccaagcccggtggttctgtccatgacttcgtcgttaaggatacaagaggaaatgatgtggagctcagcagatacaaagggaaagttttgctgattgtgaatgttgcatctcgatgtggtctgacaaattccaactacactgaactgggtcagctctacgagaaatacagggagaaaggattggagatattggcgttcccctgcaatcaatttgccggacaggaaccagatagcgatgagcagattgtggagtttgcctgcaatcgtttcaatgcagagtatccaatttttcgcaaggttgatgttaatggcaacaatgccgctccactgtacaagttcctgaagtcagagagaggcggtctatttggagaacgtatcaaatggaacttcaccaagtttctagttgacaaagaggggcacgttgtgactcgctatgcgccaacctgttccccgtccaacattgagaatgacatcaagaagctgttggaggtttgaggtgtctncagggaagatcatgcatnatgggtgtgncgngtgtatggggncatctggtattttaaggactggatggactctttactctattaanaaaaaatccggnctgnggnaccttgngncgntctacacgga

SEQ ID NO: 73305 - protein, 171 aa, Lolium perenne
MGAAESSSKPGGSVHDFVVKDTRGNDVELSRYKGKVLLIVNVASRCGLTNSNYTELGQLYEKYREKGLEILAFPCNQFAGQEPDSDEQIVEFACNRFNAEYPIFRKVDVNGNNAAPLYKFLKSERGGLFGERIKWNFTKFLVDKEGHVVTRYAPTCSPSNIENDIKKLLEV

SEQ ID NO: 73306 - DNA, 513 bp, Zea mays
  CDS (1)..(513)
atgggggcggccgaatccgtgccggagacctccatacacgaattcaccgtcaaggattgcaacggcaaggaagtgagcctggaaacctacaaggggaaggtcctccttgttgttaacgtcgcctccaaatgtgggttcacggagaccaattacacgcagctgacggagctttatcagaagtacagggacaaagacttcgagatattggcattcccttgcaatcagttcttgcgacaggagccaggtactgatcagcagatacaagactttgcttgcaccagatttaaagctgaatacccagtttttcagaaggtgcgcgtaaacggaccagatgcggcgccggtttacaagtttctgaaagctagcaagcctggtttgtttgggtcatcaaggatcaaatggaactttaccaagtttctggtggacaaagatgggaaggtcatcgagagatacggaacctcgacagctccaatggcaattgagaaggacatccagaaggcccttgaggaataa

SEQ ID NO: 73307 - protein, 170 aa, Zea mays
MGAAESVPETSIHEFTVKDCNGKEVSLETYKGKVLLVVNVASKCGFTETNYTQLTELYQKYRDKDFEILAFPCNQFLRQEPGTDQQIQDFACTRFKAEYPVFQKVRVNGPDAAPVYKFLKASKPGLFGSSRIKWNFTKFLVDKDGKVIERYGTSTAPMAIEKDIQKALEE

SEQ ID NO: 73308 - DNA, 483 bp, Klebsiella pneumoniae subsp. pneumoniae MGH 78578
  CDS (1)..(483): transl_table=11
atgacccctttttatcaattgacggctacccgcctgcgcggccagcccctctccatggctgactatgctggcaaggtggttctggtggtgaatacggccagccattgtggcttcacaccgcaatacgctggcctggaagcgctctacaaaaagtacgcggctcaagggctggtagtgcttggtttcccgtgcaaccagtttggtaagcaggaacccggcggtgcggatgaaatcgagcagacttgtcacgttaactacggcgtgagcttcccgatgtttgagaaagtggacgtcaacggccccgccgcacacccgctgtttcgttatctgaaacaagcgttgcccggcgtgctcggcggacggatcaagtggaatttcaccaagttcctcatcggtcgcgacggcacacccctcacgcgttttgcgccgttcacgacgccggagaaaatggaagcctccattgtcgcggccctcacgcgctga

SEQ ID NO: 73309 - protein, 160 aa, Klebsiella pneumoniae subsp. pneumoniae MGH 78578
MTPFYQLTATRLRGQPLSMADYAGKVVLVVNTASHCGFTPQYAGLEALYKKYAAQGLVVLGFPCNQFGKQEPGGADEIEQTCHVNYGVSFPMFEKVDVNGPAAHPLFRYLKQALPGVLGGRIKWNFTKFLIGRDGTPLTRFAPFTTPEKMEASIVAALTR

SEQ ID NO: 73310 - DNA, 600 bp, Bombyx mori
  CDS (1)..(600)
atgacaatcagttttagagtgatagccaagcttgctacgcctatcatcggcaacgtaatttgtttatcgcgagcgcaattaagtacagtaagaatgacatcgaatccggattataaagctgcgacatccattcacgaatttacagtcaaaaacattaaaggtgaagacgtgaagctggatgtctacaaaggccatgtttgtatcattgtgaatgttgcttctcagtgcggccttactgcgaacaattacaaacaattgaatgagctctatgaacaatacggagagagcaaaggtctccgcattctggctttcccttgtaatcagtttgctggtcaagagcctggcaatccagaagagatagtttgctttgcctctgagcgtaaagtcaaattcgatttgtttgagaaagttgatgtcaatggagacaatgccagtccactgtggaagtatttgaagcataagcaaggaggcacccttggtagcttcatcaagtggaactttaccaagttcatcataaacaaggatggagttccagttgaacgccacggccccaatactgacccgttggatttggtcaaatcacttgaaaaatattggtga

SEQ ID NO: 73311 - protein, 199 aa, Bombyx mori
MTISFRVIAKLATPIIGNVICLSRAQLSTVRMTSNPDYKAATSIHEFTVKNIKGEDVKLDVYKGHVCIIVNVASQCGLTANNYKQLNELYEQYGESKGLRILAFPCNQFAGQEPGNPEEIVCFASERKVKFDLFEKVDVNGDNASPLWKYLKHKQGGTLGSFIKWNFTKFIINKDGVPVERHGPNTDPLDLVKSLEKYW

SEQ ID NO: 73312 - DNA, 699 bp, Oryza sativa (japonica cultivar-group)
  CDS (1)..(699)
atggcgtccaccaccaccaccacggcggcggccgcggcccgcttcacctgcctcgcgccggccacgcgccccgcctccgcctccgcctccgcgggccgcttcctcctcccggcgcggcagtggggggcggcgacgacgcacgggagcgcggcggtgcccgtcgtcgcggcgccgtcgcggaggtgggcgccaggggtcgcctacgccaccgccgccaccgggaagagcgtccacgacttcaccgtcaaggacattgatggaaaagatgttgcgcttagcaagttcaagggaagggcgctgctaattgttaatgttgcatctcagtgtgggctgacaacagcaaattacacggaactatctcatctttatgagaagtacaagactcaaggatttgagattcttgcatttccttgcaatcagtttggtgcacaagaacctgggtcaaacccgcagattaagcagtttgcttgtacaaggtttaaagctgaatttcctatttttgacaaggttgatgtcaacgggcctaacacagcccctatttataagtttcttaagtcgagtgctggaggatttttgggtgatcttgtgaaatggaattttgagaagttcttggtggacaaaactggaaaagttgttgagagatacccacctacaacttcaccattccagattgaggtactgatggtgaggcagccctaa

SEQ ID NO: 73313 - protein, 232 aa, Oryza sativa (japonica cultivar-group)
MASTTTTTAAAAARFTCLAPATRPASASASAGRFLLPARQWGAATTHGSAAVPVVAAPSRRWAPGVAYATAATGKSVHDFTVKDIDGKDVALSKFKGRALLIVNVASQCGLTTANYTELSHLYEKYKTQGFEILAFPCNQFGAQEPGSNPQIKQFACTRFKAEFPIFDKVDVNGPNTAPIYKFLKSSAGGFLGDLVKWNFEKFLVDKTGKVVERYPPTTSPFQIEVLMVRQP

SEQ ID NO: 73314 - DNA, 489 bp, Ureaplasma parvum serovar 3 str. ATCC 700970
  CDS (1)..(489): transl_table=4
atggaaaggctaaatatgaaattaagtgattatccggtcttagatatcgataaaaaattgtttaattgatcaaaagttaagaataaactagtcttaattgttaatgtagcaagtaaatgtggatacgctaaacaatatgaacaattagaatatttatacaaaaaatataagaataaaggattcatcattgtcgcttttccttgccgtcaatttatgtttcaagaatttgatgacaataataaaataaaggaattttgttcaacaaaatacaatgttacttttccaataatggatctaactaatgttgtaggttctaatatttctccattatacaaacaattaattactgagtatccatgaagtccaaaagcaaaagcagtaaaatgaaattttgagaaattttttgttaaaaatgatgaaattattggacgttttgaatcaaaatgtgaaccaaatgatttagaagaatttattaaaaataatttataa

SEQ ID NO: 73315 - protein, 162 aa, Ureaplasma parvum serovar 3 str. ATCC 700970
MERLNMKLSDYPVLDIDKKLFNWSKVKNKLVLIVNVASKCGYAKQYEQLEYLYKKYKNKGFIIVAFPCRQFMFQEFDDNNKIKEFCSTKYNVTFPIMDLTNVVGSNISPLYKQLITEYPWSPKAKAVKWNFEKFFVKNDEIIGRFESKCEPNDLEEFIKNNL

SEQ ID NO: 73316 - DNA, 702 bp, Arabidopsis thaliana
  CDS (1)..(702)
atggctttctcttacgcatcattctctacacccttcaatggtttcgctgcaaatccgtctccgattacttccgcttttctcggcccatcattgagattctccaccagaacatcaaaaactcggaatccgagtaatggggtttcagtgaaatcgtcaaatagtcataggtttctagtcaaatctaaaaatttcagtgtctatgcaagggctgcagcagagaagtctgttcacgatttcactgtaaaggacatcgatggtaatgatgtttctctggacaaattcaaaggaaaacctttgttgatcgttaacgttgcgtcaagatgtggtttgacatcatcaaattactcagagctttctcaactgtacgaaaaatacaagaaccaaggatttgagattcttgctttcccttgcaatcaatttggaggtcaagaacccggttcaaaccctgagatcaagcaatttgcttgcacccggttcaaagcagagttccctatattcgacaaggttgatgtgaatggaccaagcacagctccaatctacaagttcttgaaatccaatgctggtggtttccttggtgatatcatcaaatggaactttgagaaattcttggttgataaaaagggcaaagttgtcgagagataccctcccacaacttctcctttccaaatcgagaaggacatccagaagttgcttgcggcttaa

SEQ ID NO: 73317 - protein, 233 aa, Arabidopsis thaliana
MAFSYASFSTPFNGFAANPSPITSAFLGPSLRFSTRTSKTRNPSNGVSVKSSNSHRFLVKSKNFSVYARAAAEKSVHDFTVKDIDGNDVSLDKFKGKPLLIVNVASRCGLTSSNYSELSQLYEKYKNQGFEILAFPCNQFGGQEPGSNPEIKQFACTRFKAEFPIFDKVDVNGPSTAPIYKFLKSNAGGFLGDIIKWNFEKFLVDKKGKVVERYPPTTSPFQIEKDIQKLLAA

SEQ ID NO: 73318 - DNA, 486 bp, Pseudomonas aeruginosa PAO1
  CDS (1)..(486): transl_table=11
atgagcgattcgctgctgagcattccctgcaccaccatcaagggcgaacagaagaccctggccgacttcggcggcaaggcgctgctggtggtgaacaccgccagcaagtgcggcttcaccccgcagtaccaggggctggaggccttgtgggaaaaataccgtgagcgcggactggtggtgctcgggttcccctgcaaccagttcggcaagcaggaaccgggcgacgagggcgagatttcgcagttctgcgaactgaactacggggtgagcttcccgctgttcaggaagatcgaggtcaacggcgccggcgcccacccgttgttcgtcagcctgaagaagcgcgcgccgggcctgctcggcagccagggcatcaagtggaacttcaccaagttcctgatcggccgcgatggccaggtggtgaagcgctatgcgccgaccaccaagccggaggagctgagctcggcgatcgaggcgctgcttgaatga

SEQ ID NO: 73319 - protein, 161 aa, Pseudomonas aeruginosa PAO1
MSDSLLSIPCTTIKGEQKTLADFGGKALLVVNTASKCGFTPQYQGLEALWEKYRERGLVVLGFPCNQFGKQEPGDEGEISQFCELNYGVSFPLFRKIEVNGAGAHPLFVSLKKRAPGLLGSQGIKWNFTKFLIGRDGQVVKRYAPTTKPEELSSAIEALLE

SEQ ID NO: 73320 - DNA, 480 bp, Streptococcus pyogenes M1 GAS
  CDS (1)..(480): transl_table=11
atgcctaatctctatgattttacggttaaggctcaggacggcagtgacatctcactagttgactacaaagaaaaagtggttttggtcgtgaatacagctaccaaatgtgggctaaccccacaataccaggccttgcaagcactatatgacacataccatgacaagggatttgaggtcttagattttccttgcaaccaatttttaaatcaagctccaggagatgctgaggagattaatcacttttgcagtctgacctatcacactactttccctcgctttgcaaaaatcaaagtgaatggtaaagacgctgatcctttgttcacctggttaaaagaagaaaaaagtggtccccttgggaaacgcatcgaatggaatttcactaaatttctcattgaccaaaatggtcaagtcattaaacgctattcctcaaagacagatcctaaactaattgaagaagaccttaaagcacttcttggttaa

SEQ ID NO: 73321 - protein, 159 aa, Streptococcus pyogenes M1 GAS
MPNLYDFTVKAQDGSDISLVDYKEKVVLVVNTATKCGLTPQYQALQALYDTYHDKGFEVLDFPCNQFLNQAPGDAEEINHFCSLTYHTTFPRFAKIKVNGKDADPLFTWLKEEKSGPLGKRIEWNFTKFLIDQNGQVIKRYSSKTDPKLIEEDLKALLG

SEQ ID NO: 73322 - DNA, 552 bp, Escherichia coli O157:H7 EDL933
  CDS (1)..(552): transl_table=11
atgcaagattccattctgacgaccgtagtgaaagatatcgacggtgaagtgaccacgctggagaagtacgccggtaatgtgctgttgattgtcaatgtcgcctcaaagtgtggcttaacgccgcaatatgagcagttggagaatattcagaaagcctgggccgatcgaggttttgtggtgctgggattcccgtgcaaccagtttctggaacaagaaccgggcagcgatgaagagattaaaacttactgtaccaccacatggggggtgacgttcccgatgttcagtaagattgaagttaatggcgaaggacgccatccgctgtatcaaaaattgatttccgcagcgccgaccgcagtcgcgccggaagagagcggattctatgcccgtatggtcagcaaaggtcgtgcaccgctgtaccctgatgatattttatggaattttgagaaatttttagttggcagggacggattggtcatccagcgtttttccccggatatgacgccggaagatcccattgtgatggaaagcattaaactggcgttggcaaaataa

SEQ ID NO: 73323 - protein, 183 aa, Escherichia coli O157:H7 EDL933
MQDSILTTVVKDIDGEVTTLEKYAGNVLLIVNVASKCGLTPQYEQLENIQKAWADRGFVVLGFPCNQFLEQEPGSDEEIKTYCTTTWGVTFPMFSKIEVNGEGRHPLYQKLISAAPTAVAPEESGFYARMVSKGRAPLYPDDILWNFEKFLVGRDGLVIQRFSPDMTPEDPIVMESIKLALAK

SEQ ID NO: 73324 - DNA, 546 bp, Clostridium acetobutylicum ATCC 824
  CDS (1)..(546): transl_table=11
atgtcagtatatgattttaaagcaaaaacaatagaaggaaaagaggtatctttagatacttataagggaaaggttttaataatagcaaatactgcaagtaaatgcggatttacaccacaatatgagggacttgaaaagctgtataaagaatacaaagataaggggctcgaaatattaggcttcccaagtaatcaatttgcagaacaggaaccaggagataataatgaagtaaagaatttttgcaaacttaattatggagtaacctttcaactatttgaaaaaacagatgtaagagatgaaaatgcacatcctttatttaactacttaactgagaatgctccatttaagggatttgatttaaatcatccaacaggaaaaatgctttcagaggttttagagaagaattttccaaagttcttagaaggaaattcagtaaaatggaactttacaaagtttttaatagatagagatggaaatgttgtaaaaagatttgaaccaacttctgaaccaagtgatatggttaaagatatagaaaagttattataa

SEQ ID NO: 73325 - protein, 181 aa, Clostridium acetobutylicum ATCC 824
MSVYDFKAKTIEGKEVSLDTYKGKVLIIANTASKCGFTPQYEGLEKLYKEYKDKGLEILGFPSNQFAEQEPGDNNEVKNFCKLNYGVTFQLFEKTDVRDENAHPLFNYLTENAPFKGFDLNHPTGKMLSEVLEKNFPKFLEGNSVKWNFTKFLIDRDGNVVKRFEPTSEPSDMVKDIEKLL

SEQ ID NO: 73326 - DNA, 483 bp, Caulobacter crescentus CB15
  CDS (1)..(483): transl_table=11
atggccatgtcgatctacgactattccgccaagacgctggacggccaggacgtgagcctggccgactatcgcggccaagtgctgctgatcgtgaacaccgccagcaagtgcgggttcacgccgcagtacgagggcctggaagcgctctacaaggcgcacaaggaccgtggcttcacggtcctggccttcccctgcaatcagttcggcgctcaggagccgggtaacgccgaggaaatcgcgaacttctgctcgctgacctacgacgtgagcttcccggtcatgagcaagatcgacgtcaacggcgccgacgcccacccgctctacaagttcctcaagaaggaacagaagggcgtcttgggcaccgaggcgatcaagtggaacttcaccaagttcctgatcggcaaggacggccaggtcgtcgatcggttcgcgccgaccgtgaagcccgaagacctgaaggtcgcggtcgaggcgctgctctag

SEQ ID NO: 73327 - protein, 160 aa, Caulobacter crescentus CB15
MAMSIYDYSAKTLDGQDVSLADYRGQVLLIVNTASKCGFTPQYEGLEALYKAHKDRGFTVLAFPCNQFGAQEPGNAEEIANFCSLTYDVSFPVMSKIDVNGADAHPLYKFLKKEQKGVLGTEAIKWNFTKFLIGKDGQVVDRFAPTVKPEDLKVAVEALL

SEQ ID NO: 73328 - DNA, 552 bp, Salmonella typhimurium LT2
  CDS (1)..(552): transl_table=11
atgcaaaactcgcttcttaatactcacgttacgacgattgatggagaggtcactacacttgaaaaatacgccggaaaagtgctgctcattgtaaacgtcgcctccagatgtggcctgacgccgcaatatgaacagttggaaaatatccaaaaggcgtgggcagatcaggggtttgtcgtgttgggttttccctgcaaccagtttatggggcaggagccaggcagcgaagaggagattaaaacctattgtgccagcacctggggcgtcacgttcccgatgttcagtaaaattgatgtgaatggcgacgcgcgccatccgctgtatcaaaaactgatagccgctgcgccaacggcagtcgcgccggagaagagcggcttttacgaacggatggtaagcaaagggcgtacgccactctatccggatgatattctgtggaattttgaaaaatttttggtaggccgggatggtcaggtggtacagcgtttttcgccggatatgacgcctgaagatcctattgtgatggaaagcataaaaatcgcgttggcaaaataa

SEQ ID NO: 73329 - protein, 183 aa, Salmonella typhimurium LT2
MQNSLLNTHVTTIDGEVTTLEKYAGKVLLIVNVASRCGLTPQYEQLENIQKAWADQGFVVLGFPCNQFMGQEPGSEEEIKTYCASTWGVTFPMFSKIDVNGDARHPLYQKLIAAAPTAVAPEKSGFYERMVSKGRTPLYPDDILWNFEKFLVGRDGQVVQRFSPDMTPEDPIVMESIKIALAK

SEQ ID NO: 73330 - DNA, 480 bp, Listeria monocytogenes EGD-e
  CDS (1)..(480): transl_table=11
atgaatgtccatgatttttctgaaaaagcaatgaacggcaaagaaatagctttaagtgattataaaggtaaagttttactcatagtgaataccgcgagtaaatgtggcttaacacctcaattagaaggtcttgaagcaatgtataaaaaattgggtggagataattttgaaattctcggtttcccatgtaaccagtttttacgtcaagaccctggtagtgatgaggaaattttagaattttgccaaatgaattatggtgtgactttccaaatgttttccaaaattaaagtaaaaggcaaagatgccagcccactttataaatatttaaccgaacaaactggtggtaaaaaagtagaatggaactttgcgaaatttttaattgatgaaaatggagaagttattgaacgtttcccatctaaaatgaaacctgaagattttgaggataaagtggaagcacttgttgcgaaagtaaataattaa

SEQ ID NO: 73331 - protein, 159 aa, Listeria monocytogenes EGD-e
MNVHDFSEKAMNGKEIALSDYKGKVLLIVNTASKCGLTPQLEGLEAMYKKLGGDNFEILGFPCNQFLRQDPGSDEEILEFCQMNYGVTFQMFSKIKVKGKDASPLYKYLTEQTGGKKVEWNFAKFLIDENGEVIERFPSKMKPEDFEDKVEALVAKVNN

SEQ ID NO: 73332 - DNA, 534 bp, Encephalitozoon cuniculi GB-M1
  CDS (1)..(534)
atggagcgagggatggaatcagaggccttttacggtctgagtgctcgtggatgggacggaagcgaagtcagccttggatcgttcagagggtgcgttattatgattgctaatgttgcgtcgtcatgcaagtttgctgaaagcaactacaagagctttgcgggtcttcttgataagttctacaggaaagggctaaggattcttttgtttccctgcaatcagtatctgggccaggagtcaaggcccattgaggaaatacgcggagaggtgtctaagaagtattcggacaggtttgtggtttttgacaaagtcgatgtttttgggaaaggagctcatcccgtgttcaggcatcttgtcaataccaaaaacggaaaggggaggctcggaaatttcattaagtggaactttacaaaattcctcgttgatcgtaagggatgtgttgttaagaggtttgggccaagcgatattgtcaaggaggatgacgagaatctcttgaggagtattgaggatggggagaatggcatgcagaactcctga

SEQ ID NO: 73333 - protein, 177 aa, Encephalitozoon cuniculi GB-M1
MERGMESEAFYGLSARGWDGSEVSLGSFRGCVIMIANVASSCKFAESNYKSFAGLLDKFYRKGLRILLFPCNQYLGQESRPIEEIRGEVSKKYSDRFVVFDKVDVFGKGAHPVFRHLVNTKNGKGRLGNFIKWNFTKFLVDRKGCVVKRFGPSDIVKEDDENLLRSIEDGENGMQNS

SEQ ID NO: 73334 - DNA, 480 bp, Corynebacterium glutamicum ATCC 13032
  CDS (1)..(480): transl_table=11
atgacttctattcatgacatcagcgtaactctcaacgacggcacagaaaccaccatggcggattgggcgggccaccttttgctcatcgtgaacgtggcatccaagtgcggactcacgccacagtatgaagggcttcaaaaactgtatgaggaataccaagatcgaggcttctttgtcattggcgtgccctgcaatcaattcaacggccaggaacctggaaccgacgctgaggtgtgtgctttcgcgcaaaatcagtacgacgtcaccttcccgctcttgagcaaaaccgaggtgaatggggagggtgcccaccccctgtacaaggtgctcaaagaggcaactgatggtagcgaaatcgagtggaattttgagaaattcctggtagatgcagaaggtaatacgattaagcgctttgctcctcggacggaaccatctgcagctgaggtagtggaagcaatcgaggagaatctccctatctaa

SEQ ID NO: 73335 - protein, 159 aa, Corynebacterium glutamicum ATCC 13032
MTSIHDISVTLNDGTETTMADWAGHLLLIVNVASKCGLTPQYEGLQKLYEEYQDRGFFVIGVPCNQFNGQEPGTDAEVCAFAQNQYDVTFPLLSKTEVNGEGAHPLYKVLKEATDGSEIEWNFEKFLVDAEGNTIKRFAPRTEPSAAEVVEAIEENLPI

SEQ ID NO: 73336 - DNA, 582 bp, Streptomyces coelicolor A3(2)
  CDS (1)..(582): transl_table=11
gtgcgtgccagaccccgcgaccccggcaagatccaaacggcaccccctagcatcctgtgcatgacgagcgcaccgaacacgcggaacgacgacaaccttcccctcgacgtcgagatcggcgccctccagggcggggccgcggacctctcgcagtacgccggccgggtcgtgctggtggtcaacgtggcctccaagtgcgggctcaccccgcagtacgccggcctggagcgactgcacgagcggtacgcggagcaggggttcaccgtgctgggcgtgccctgcaaccagttcatgggccaggagccgggcagcgccgacgagatcgccgagttctgctcggcgacctacggggtcaccttcccgatgaccgggaaggccgaggtcaacggcgagggccggcatccgctgtacgaccggctgaccggcttcgcggacgccgagggccacagcggggacatccgctggaacttcgagaagttcctgatcgggcgggacggcaaggtcgccgcccgcttctcgccgcagaccgagccggaggcggccgaggtcgtggcggccgtcgaggaacgcctcgccggttga

SEQ ID NO: 73337 - protein, 193 aa, Streptomyces coelicolor A3(2)
MRARPRDPGKIQTAPPSILCMTSAPNTRNDDNLPLDVEIGALQGGAADLSQYAGRVVLVVNVASKCGLTPQYAGLERLHERYAEQGFTVLGVPCNQFMGQEPGSADEIAEFCSATYGVTFPMTGKAEVNGEGRHPLYDRLTGFADAEGHSGDIRWNFEKFLIGRDGKVAARFSPQTEPEAAEVVAAVEERLAG

SEQ ID NO: 73338 - DNA, 486 bp, Xanthomonas campestris pv. campestris str. ATCC 33913
  CDS (1)..(486): transl_table=11
atgaccacgctctccacctaccagttcaccgacctggacggtcaaccccagtcgctggccgagtacgccggcaaggtggtgctcgtggtcaacgtggcctccaaatgcggttttacgccgcagtacgccggcctgcaggcgctgtggcagcgctaccgcgatcgcgggctggtggtgatcgggtttccctgcgatcagttcggtcatcaggagcctggagatgcggcggacatccgccagttctgctcgctggactacgcggtggattttccgctcgcggccaaggtcgaggtcaatggcagcggcgcccacccgctatggcaatggctcaagcacgaaaaacgcggcgtgctgggctcggaagcgatcaagtggaatttcaccaaattcctgatcggccgcgatggcagtgtgctggagcgctatgcgccaaccaccaagccggaggcgctggcggcggatatcgagcgcgcgctcggtgcgtga

SEQ ID NO: 73339 - protein, 161 aa, Xanthomonas campestris pv. campestris str. ATCC 33913
MTTLSTYQFTDLDGQPQSLAEYAGKVVLVVNVASKCGFTPQYAGLQALWQRYRDRGLVVIGFPCDQFGHQEPGDAADIRQFCSLDYAVDFPLAAKVEVNGSGAHPLWQWLKHEKRGVLGSEAIKWNFTKFLIGRDGSVLERYAPTTKPEALAADIERALGA

SEQ ID NO: 73340 - DNA, 486 bp, Xanthomonas axonopodis pv. citri str. 306
  CDS (1)..(486): transl_table=11
atgagcgacatctccaccttcgcattcaccgacctggaaggtcgcacccagtcgatgcgcgattatgccggcaacgtactgctggtggtcaatgtcgcctccaagtgcgggtttacgccgcaatacgcggggctgcaggccctgtggcagcgttatcgcgaacgtggactggtagtgatcggttttccatgcgatcagttcgggcaccaggagccgggcgatgcggcgcagatccgccagttctgctcgctcgactatgcggtggattttccgctggccgcgaaaatcgacgtcaacggcaacggcgcgcatccgctgtggcaatggctcaagcacgaacaacgcggcgtgctcgggtccgaggcgatcaagtggaacttcaccaagttcctgatcggccgcgacggccgcgtgctggaacgttatgcgcccaccaccaagccggaggcattggctaccgagatcgagcgcgcgctggacgcatga

SEQ ID NO: 73341 - protein, 161 aa, Xanthomonas axonopodis pv. citri str. 306
MSDISTFAFTDLEGRTQSMRDYAGNVLLVVNVASKCGFTPQYAGLQALWQRYRERGLVVIGFPCDQFGHQEPGDAAQIRQFCSLDYAVDFPLAAKIDVNGNGAHPLWQWLKHEQRGVLGSEAIKWNFTKFLIGRDGRVLERYAPTTKPEALATEIERALDA

SEQ ID NO: 73342 - DNA, 477 bp, Oceanobacillus iheyensis HTE831
  CDS (1)..(477): transl_table=11
atgagtgtacatgattttacagtaactaccattgaaggggaagaaaaaagactttccgattataaaggtaaagtgatattaattgtgaatactgcaagtcaatgtggctttaccccacagttagaagatctccaaaaactatataaacaatatcaagataatgattttgaaatattagggtttccgtgtaaccagtttggtaatcaagatcctggagcatcagaggaaatttcagcattctgtcaaaagaactatggagtaacttttcaaatgtttaaaaaagttgatgtgaaaggtaaagaagcccatccgctctataagcacctaaccgaagagaagaaaggaatactaggtggacaaatcaaatggaatttcacgaagttccttattgatcaaaatggaaatgttatagaacgtttttctccccaaaagaaccccaatacgttaaataaagatattgaagttttgttacgataa

SEQ ID NO: 73343 - protein, 158 aa, Oceanobacillus iheyensis HTE831
MSVHDFTVTTIEGEEKRLSDYKGKVILIVNTASQCGFTPQLEDLQKLYKQYQDNDFEILGFPCNQFGNQDPGASEEISAFCQKNYGVTFQMFKKVDVKGKEAHPLYKHLTEEKKGILGGQIKWNFTKFLIDQNGNVIERFSPQKNPNTLNKDIEVLLR

SEQ ID NO: 73344 - DNA, 552 bp, Shigella flexneri 2a str. 301
  CDS (1)..(552): transl_table=11
atgcaagattccattctgacgaccgtagtgaaagatatcgacggtgaagtgaccacgctggagaagtacgccggtaatgtgctgttaattgtcaatgtcgcctcaaagtgtggcttaacgccgcaatatgagcagttggagaatattcaaaaagcctgggccgatcgaggttttgtggtgctgggattcccgtgcaaccagtttctggaacaagaaccgggcagcgatgaagagattaaaacttactgtaccaccacatggggggtgacgttcccgatgttcagtaagattgaagttaatggcgaaggacgccatccgctgtatcaaaaattgattgccgcagcgccgaccacagtcgcgccggaagagagcggattctatgcccgtatggtcagcaaaggccgtgcaccgctgtacccggatgatattttatggaattttgaaaaattcctggttggcagggacggaaaagtcatccagcgtttttccccggatatgacgccggaagatcccattgtgatggaaagcattaaactggcgttggcaaaataa

SEQ ID NO: 73345 - protein, 183 aa, Shigella flexneri 2a str. 301
MQDSILTTVVKDIDGEVTTLEKYAGNVLLIVNVASKCGLTPQYEQLENIQKAWADRGFVVLGFPCNQFLEQEPGSDEEIKTYCTTTWGVTFPMFSKIEVNGEGRHPLYQKLIAAAPTTVAPEESGFYARMVSKGRAPLYPDDILWNFEKFLVGRDGKVIQRFSPDMTPEDPIVMESIKLALAK

SEQ ID NO: 73346 - DNA, 489 bp, Shewanella oneidensis MR-1
  CDS (1)..(489): transl_table=11
atgacatccactatctatcgccataacgcaattgacattcagggtaatccaaccccattgacacaatatcaaggtaaagtgatattgattgtaaacaccgccagcgagtgcggttttacgccgcagtacaaggggttagaagcactttatcaagaatacaaagcgcgtggatttgtggttttgggctttccctgtaaccagtttggcgcccaagaaaaggctaatgaacaagggatcaaaagcttttgcgaactcaactttggggtaagctttccactgttttcgaaaatcgaggtcaatggtgaacatacccatcctctctaccaatatttaaagaaagccgctcccggcatgttaggcacagaacgcataaaatggaatttcaccaaatttttaattaatcgtcagggggaagccgtcgctcgttttgcgccgacaacgaaaccagaagacattcgcgacaaaatagagtcacttttaaataagtaa

SEQ ID NO: 73347 - protein, 162 aa, Shewanella oneidensis MR-1
MTSTIYRHNAIDIQGNPTPLTQYQGKVILIVNTASECGFTPQYKGLEALYQEYKARGFVVLGFPCNQFGAQEKANEQGIKSFCELNFGVSFPLFSKIEVNGEHTHPLYQYLKKAAPGMLGTERIKWNFTKFLINRQGEAVARFAPTTKPEDIRDKIESLLNK

SEQ ID NO: 73348 - DNA, 597 bp, Drosophila melanogaster
  CDS (1)..(597)
atggctggccgctccatcgtccacttttttctggggtccgtggcaatcgccctgggatcgtacatctacttcaccatgcaaatcgacatgtctgctaacggagattacaagaacgccgcctcgatctacgagttcaccgtgaaggatacccatggcaacgatgtttccctggaaaagtacaagggcaaggtggtcctggtggtgaacatcgcctccaagtgcggcctgaccaagaacaactacgagaagctgacggatctaaaggagaagtacggcgagcgcggcctggtgatcctcaacttcccgtgcaatcagtttgggtcccagatgccggaggccgatggagaggccatggtgtgccacctgcgcgactccaaggctgacatcggcgaggtgttcgccaaggtcgatgtgaatggagacaatgcggcgccgctgtacaaatacctaaaggccaagcagaccggcaccctgggcagcggaatcaagtggaacttcaccaagtttctggtgaacaaggagggcgtgcccatcaaccgatatgccccgaccaccgatcccatggacatcgccaaggacattgaaaagctgctgtag

SEQ ID NO: 73349 - protein, 198 aa, Drosophila melanogaster
MAGRSIVHFFLGSVAIALGSYIYFTMQIDMSANGDYKNAASIYEFTVKDTHGNDVSLEKYKGKVVLVVNIASKCGLTKNNYEKLTDLKEKYGERGLVILNFPCNQFGSQMPEADGEAMVCHLRDSKADIGEVFAKVDVNGDNAAPLYKYLKAKQTGTLGSGIKWNFTKFLVNKEGVPINRYAPTTDPMDIAKDIEKLL

SEQ ID NO: 73350 - DNA, 717 bp, Drosophila melanogaster
  CDS (1)..(717)
atgagtctcaggcagtttcagaacatttcccgccaggccctcaggtgctactcgatgaggcggacccctggccccgtcctcgagctgagtcgcggtcagaggcagtgccttcgcctctgcaccatcatgcttcccgtgagctgtgcggccacgcccatgaacgccatctcctcagccgcccagcactccacagcagctgccatcgacatgtctgctaacggagattacaagaacgccgcctcgatctacgagttcaccgtgaaggatacccatggcaacgatgtttccctggaaaagtacaagggcaaggtggtcctggtggtgaacatcgcctccaagtgcggcctgaccaagaacaactacgagaagctgacggatctaaaggagaagtacggcgagcgcggcctggtgatcctcaacttcccgtgcaatcagtttgggtcccagatgccggaggccgatggagaggccatggtgtgccacctgcgcgactccaaggctgacatcggcgaggtgttcgccaaggtcgatgtgaatggagacaatgcggcgccgctgtacaaatacctaaaggccaagcagaccggcaccctgggcagcggaatcaagtggaacttcaccaagtttctggtgaacaaggagggcgtgcccatcaaccgatatgccccgaccaccgatcccatggacatcgccaaggacattgaaaagctgctgtag

SEQ ID NO: 73351 - protein, 238 aa, Drosophila melanogaster
MSLRQFQNISRQALRCYSMRRTPGPVLELSRGQRQCLRLCTIMLPVSCAATPMNAISSAAQHSTAAAIDMSANGDYKNAASIYEFTVKDTHGNDVSLEKYKGKVVLVVNIASKCGLTKNNYEKLTDLKEKYGERGLVILNFPCNQFGSQMPEADGEAMVCHLRDSKADIGEVFAKVDVNGDNAAPLYKYLKAKQTGTLGSGIKWNFTKFLVNKEGVPINRYAPTTDPMDIAKDIEKLL

SEQ ID NO: 73352 - DNA, 483 bp, Pseudomonas putida KT2440
  CDS (1)..(483): transl_table=11
atgagtgcatttcacgacctgaaactggaagcgctgaacggcggagagctgcccctcgcacccttcaagggccaagtggtgctggtggtcaacgttgcctccaaatgtggcctgacgccgcaatacaaggccctggaaaacctctaccagatctacaaagacaagggcttcaatgtgcttggcctgccgtgcaaccagtttgccgggcaggaaccgggtagcgaaaaggaaatccaggacttctgcagcctcaactacggggtcagtttcccgctggggagcaagctggaggtcaacgggccgcagcgccattcgttgtaccgcctgctggcaggggagggggccgagttccccggtgacattacctggaatttcgagaagtttctggtgggcaaggatggccgggtgctggcgcgtttctcgccgcgcacggcgccggatgacccagcggtggtgcaggccatcgagaaagccctggcctga

SEQ ID NO: 73353 - protein, 160 aa, Pseudomonas putida KT2440
MSAFHDLKLEALNGGELPLAPFKGQVVLVVNVASKCGLTPQYKALENLYQIYKDKGFNVLGLPCNQFAGQEPGSEKEIQDFCSLNYGVSFPLGSKLEVNGPQRHSLYRLLAGEGAEFPGDITWNFEKFLVGKDGRVLARFSPRTAPDDPAVVQAIEKALA

SEQ ID NO: 73354 - DNA, 609 bp, Pseudomonas putida KT2440
  CDS (1)..(609): transl_table=11
gtgtgtgttaggcgctaccctgcaagctcaaggattgtcatgcgggagaaacgagtcatgcgtgcacattggttgacggtgccggtgctggccctgcttgccagtacatcgagctgggctgcagattgccctgcgttgttgcagggcagcctgccggagttgcgcggtaaggggcaggtcgacctctgcgagcgctttgccggcaagccgctcgtggtggtgaacactgccagttattgcggttttgccccgcagttcgaggggcttgaggcgacctacaaggagtatcacgagcaaggcctggaaatgctcggcgtgccgtccaatgacttcaagcaggaagacgccgacagtgagaagactgccaaggtttgctatgccaactacggtgtcaccttcaccatgaccaagacacaggcggtgcggggcaaggatgcgataccgctgtttgcggagctggccagccaaagcagtgcgccgaagtggaatttctacaagtatgttgtcgatcgcaagggcaaggtgatcggtaacttctccagcctgaccaaaccggatgatcccgcgttccgcgctgctatcgaaaaggccattgcctcacagccgtga

SEQ ID NO: 73355 - protein, 202 aa, Pseudomonas putida KT2440
MCVRRYPASSRIVMREKRVMRAHWLTVPVLALLASTSSWAADCPALLQGSLPELRGKGQVDLCERFAGKPLVVVNTASYCGFAPQFEGLEATYKEYHEQGLEMLGVPSNDFKQEDADSEKTAKVCYANYGVTFTMTKTQAVRGKDAIPLFAELASQSSAPKWNFYKYVVDRKGKVIGNFSSLTKPDDPAFRAAIEKAIASQP

SEQ ID NO: 73356 - DNA, 489 bp, Pseudomonas putida KT2440
  CDS (1)..(489): transl_table=11
atggctgcaacgatgctgaacatcccctgcgtgaccctgggcggcgagcacaagacgctcggcgacttcccgggcaaggtgctgttggtggtcaataccgccagccagtgcggttttaccccgcagtacaagggcctggagcaactgtggcaggcctatcgcgaccgtggcctggtggtactgggctttccgtgcaaccagttcggcaagcaggaacctggcgatgcgcgggaaattgcgcagttctgcgagcgtaatttcggcgtgagttttccgctgtttcgcaaggtcgaggtcaacggcccgggcgctcaccctctgttcgtcgaactcaagcaacgcgccccgggtattttgggtagccagaagatcaagtggaacttcaccaagtttctggtcgacccggccagtggccaggtcaagcgctatgcccccaccaccaagccacaggccctggaggcggacatcgagcgtttgctcagccgctga

SEQ ID NO: 73357 - protein, 162 aa, Pseudomonas putida KT2440
MAATMLNIPCVTLGGEHKTLGDFPGKVLLVVNTASQCGFTPQYKGLEQLWQAYRDRGLVVLGFPCNQFGKQEPGDAREIAQFCERNFGVSFPLFRKVEVNGPGAHPLFVELKQRAPGILGSQKIKWNFTKFLVDPASGQVKRYAPTTKPQALEADIERLLSR

SEQ ID NO: 73358 - DNA, 495 bp, Mycoplasma penetrans HF-2
  CDS (1)..(495): transl_table=4
gtgtttaaaatgagtgatttttataaatttaaagttaataaaataaatggtaaagaaattgaattatctgaatacaaaaataaagtagttttagttgttaatgttgctagcaaatgtggatttgttaaacaatatgaaaatttggaaaatatgtaccaaaaatataaggatcaaggattagtaattttaggttttccttgtaatcaattttttttccaagaacctaaaaccaatcaagagatcttatctttttgtacaactaaatataatgttacatttgatatgtttgaaaagattaatgttaatggtaaagaagccaatcctttatatacgtggttaaaagaacaaatgccttgaactgcaagagctaaaaatgttaaatgaaactttgaaaaattcttattagataaaaatggtaatgttaaatacagatttgaatctaagaaaattccagaagaatttgaacaagaagtagtaaatttaattaatgaatag

SEQ ID NO: 73359 - protein, 164 aa, Mycoplasma penetrans HF-2
MFKMSDFYKFKVNKINGKEIELSEYKNKVVLVVNVASKCGFVKQYENLENMYQKYKDQGLVILGFPCNQFFFQEPKTNQEILSFCTTKYNVTFDMFEKINVNGKEANPLYTWLKEQMPWTARAKNVKWNFEKFLLDKNGNVKYRFESKKIPEEFEQEVVNLINE

SEQ ID NO: 73360 - DNA, 477 bp, Bradyrhizobium japonicum USDA 110
  CDS (1)..(477): transl_table=11
atgtcggcgatttacgacttcaaggccaactcgctgctcggcgaggaagtgcccatgcgccggttcgaagggcaggtgctcctgatcgtcaacaccgcgagcaaatgcggcttcacgccgcaatatcgcggccttgaggatctctaccgcgatctctcgccgcgcggcttcgcggtgctcggctttccctgcaaccagttcggcgcgcaggagccggggcaggcgagcgagatccaggaattctgctcgaccaattacgacgtcacctttcccctgttcgagaagatcgacgtcaacggcgccaacgcgcatcccttgtatgagtatctgaaacgccagcaatccgggctcctcggcgcctccatcaaatggaatttcaccaaattcctggtggaccgtgccggccgggtgatcgcgcgctacgcgccgaccgcgcggcccgaaggattgcggcagcaaatcgagaccctgttatga

SEQ ID NO: 73361 - protein, 158 aa, Bradyrhizobium japonicum USDA 110
MSAIYDFKANSLLGEEVPMRRFEGQVLLIVNTASKCGFTPQYRGLEDLYRDLSPRGFAVLGFPCNQFGAQEPGQASEIQEFCSTNYDVTFPLFEKIDVNGANAHPLYEYLKRQQSGLLGASIKWNFTKFLVDRAGRVIARYAPTARPEGLRQQIETLL

SEQ ID NO: 73362 - DNA, 507 bp, Xylella fastidiosa Temecula1
  CDS (1)..(507): transl_table=11
atgagcagtatctacacattcactttcacacgtcttgacggacggcctcaagcattagcagattggcgtggacaagtactgttattggtcaacgtggcatcgcgttgcggctttactccacaatatgctgggttggagatgctatggcaacgttaccgcgatgcaggtttgattgttattggctttccatgcgatcaattcgctgggcaggaacctggggatgaggccaaaatcgctgagttttgcacgctgacctatggggtggatttcccaatggcggcgaagatcaaagtcaatggagcagatgcacatccactttggcaatggttgaagcaccgccgccgtggtttgttcggtgtggccgcgattaagtggaacttcactaaatttctgatcggacgcaacgggcaacccattgcccgttattcgccaatcaagtcaccggagcaattggaggtgcatatcgttcgtgccttaggggaggaagggggagggaatactcattga

SEQ ID NO: 73363 - protein, 168 aa, Xylella fastidiosa Temecula1
MSSIYTFTFTRLDGRPQALADWRGQVLLLVNVASRCGFTPQYAGLEMLWQRYRDAGLIVIGFPCDQFAGQEPGDEAKIAEFCTLTYGVDFPMAAKIKVNGADAHPLWQWLKHRRRGLFGVAAIKWNFTKFLIGRNGQPIARYSPIKSPEQLEVHIVRALGEEGGGNTH

SEQ ID NO: 73364 - DNA, 486 bp, Pseudomonas syringae pv. tomato str. DC3000
  CDS (1)..(486): transl_table=11
atgagcgaaaacctgctgaacatcccggtcacgacgatcaagggagaacagaaaaccctcgccgatttcgctggcaaggcggtcctggtggtcaatacggccagcaaatgcggtttcacgccccaatacaaagggctggaaaaactctggcaggactacaaggatcaggggttggtggtgctcggctttccgtgcaaccagttcggcaagcaggagccgggagacgagggcgctatttccggtttttgcgaactgaactacggcgtcagcttcccgctgttcaagaaagtcgatgtcaacggtgatcaggcccatcccttgttcgttcagctcaaggagcaggcgccggggctgctgggcaccgagcgcatcaagtggaatttcaccaagttcctgattggtcaggacggcaagctggtcaagcgttttgcgccattgaccaagcctgaagaactgacggatgaaattgaagcgctgctgcgttaa

SEQ ID NO: 73365 - protein, 161 aa, Pseudomonas syringae pv. tomato str. DC3000
MSENLLNIPVTTIKGEQKTLADFAGKAVLVVNTASKCGFTPQYKGLEKLWQDYKDQGLVVLGFPCNQFGKQEPGDEGAISGFCELNYGVSFPLFKKVDVNGDQAHPLFVQLKEQAPGLLGTERIKWNFTKFLIGQDGKLVKRFAPLTKPEELTDEIEALLR

SEQ ID NO: 73366 - DNA, 543 bp, Bacteroides thetaiotaomicron VPI-5482
  CDS (1)..(543): transl_table=11
atgaagtcattcatcttaatggttataacaatggtatgtgcaatctctctggaagcgcagaataagtctttctacgacttcaatgtgaccacgattgatggtaaggaatttccgctttcttctttgaaaggaaagaaagtgctggtagtaaatgtagcctccaaatgcggactgacgccacagtatgccaaactgcaagagctatatgataaatataaggataagaattttgtaatcatcggctttcctgccaacaactttatgggacaggaaccgggaagcaatgaagagatcgctcagttctgctccttaaagtatgacgttacttttccgatgatggccaagatttccgtcaagggcaaaaacatgtcgccactttaccaatggctgacggaaaagaaactgaacggcaaagaagatgcgcccgtccagtggaattttcagaagtttatgattgacgagaacggaaactgggtcggctttgtggcccccaaagagagtccgctctcggaaaaaatcgttacttggatagagcaggagtag

SEQ ID NO: 73367 - protein, 180 aa, Bacteroides thetaiotaomicron VPI-5482
MKSFILMVITMVCAISLEAQNKSFYDFNVTTIDGKEFPLSSLKGKKVLVVNVASKCGLTPQYAKLQELYDKYKDKNFVIIGFPANNFMGQEPGSNEEIAQFCSLKYDVTFPMMAKISVKGKNMSPLYQWLTEKKLNGKEDAPVQWNFQKFMIDENGNWVGFVAPKESPLSEKIVTWIEQE

SEQ ID NO: 73368 - DNA, 477 bp, Nitrosomonas europaea ATCC 19718
  CDS (1)..(477): transl_table=11
atgaatatttacgactgcggtatcaaaaccatggatgggcaggacaaattgctcggcgattataagggtaaagttctgctgattgtgaatactgccagcaaatgcgggtttacaccgcagtatcagggcctggaggatctgtaccgtcgctacaaggaccgaggattcgtcgtactcgcttttccctgtaaccagtttggccaccaggaacccggcagtgagtccgagattcagcaattttgtaccacccgctatgacgtcagctttccggtattcgcaaaaatcgaagtgaatggcgccaatacccatccgctctatcgatatctgaagaatgagaaatctggtgtactgggcactaaagcaatcaaatggaatttcaccaaattcctggtagaccgatccggccacgtggtcaggcgttatgcacctgccgataaaccggaatcactgaccggagatatcgaacaactgctttga

SEQ ID NO: 73369 - protein, 158 aa, Nitrosomonas europaea ATCC 19718
MNIYDCGIKTMDGQDKLLGDYKGKVLLIVNTASKCGFTPQYQGLEDLYRRYKDRGFVVLAFPCNQFGHQEPGSESEIQQFCTTRYDVSFPVFAKIEVNGANTHPLYRYLKNEKSGVLGTKAIKWNFTKFLVDRSGHVVRRYAPADKPESLTGDIEQLL

SEQ ID NO: 73370 - DNA, 480 bp, Prochlorococcus marinus subsp. marinus str. CCMP1375
  CDS (1)..(480): transl_table=11
atgttgatcaacgtaaaagaaacagtagtagaaactgcagatggagaaaagaaaaatcttggtgattatttaggcaacgtcttattaatagtaaatgtagcaagcctttgtggaaatactcctcagtacaaaggtttggagaaactttttgaaaagtataagaaaaacggtttttgtgttcttgccttcccttgtaatgattttgctggtcaggagcccgggactatcgaggagatcaaggagttttgctcggtaaaatacggaaccacatttgaaatttttaacaaggttcatgcaaaaggtctaacaactgagccttatacaacactcaataaagttgaacctaaaggagatgtttcttggaactttgaaaaattcttagtcggcaaggatggtaatgttattgcaagattcgaacctagcgttgaaccatcaagtgaggaattgataacagcaattgaagttgcgttgtcttcatag

SEQ ID NO: 73371 - protein, 159 aa, Prochlorococcus marinus subsp. marinus str. CCMP1375
MLINVKETVVETADGEKKNLGDYLGNVLLIVNVASLCGNTPQYKGLEKLFEKYKKNGFCVLAFPCNDFAGQEPGTIEEIKEFCSVKYGTTFEIFNKVHAKGLTTEPYTTLNKVEPKGDVSWNFEKFLVGKDGNVIARFEPSVEPSSEELITAIEVALSS

SEQ ID NO: 73372 - DNA, 501 bp, Bordetella pertussis Tohama I
  CDS (1)..(501): transl_table=11
atgaacaccatgtacgacttcagcgcccccaccataacgggcgcggaacgcgcgctggccgattttcgcggccaggtggcgctggtggtcaatgtcgcctcgcgctgcgggttcacgccccagtactcgggcctggaagaactgtaccgctcgtaccgcaacgaaggctttgtcgtcctgggatttccgtgcaaccagttcgggcgccaggagccgggcgacgaggccgccatcgcgcagttctgcgaaacccagtacgccatcagcttcccgctgttcgccaagatcgacgtcaacggcgcccacgcccacccgctgtaccgctggctgaaggcacgcaagcccggcctgctgggcacccgcgccatcaaatggaatttcaccaaattcctggtcgggcgcgacggcctgccgctgcggcgctacgcgcccgcccacacgcccgaatcgctgcgccacgacatcgcgcgcgcctgcgccgcgcccggcccgacgccctag

SEQ ID NO: 73373 - protein, 166 aa, Bordetella pertussis Tohama I
MNTMYDFSAPTITGAERALADFRGQVALVVNVASRCGFTPQYSGLEELYRSYRNEGFVVLGFPCNQFGRQEPGDEAAIAQFCETQYAISFPLFAKIDVNGAHAHPLYRWLKARKPGLLGTRAIKWNFTKFLVGRDGLPLRRYAPAHTPESLRHDIARACAAPGPTP

SEQ ID NO: 73374 - DNA, 477 bp, Chromobacterium violaceum ATCC 12472
  CDS (1)..(477): transl_table=11
atgagcatctacgacttctccttccgccgcctggacggcagcgaacaggcgatggccgactaccgcggcagcgtgctgctgctggtcaacaccgccagccgctgcggcttcacgtcgcaatacgccggcctggaggcgctgcaccgccgcttcggcccgcaaggcctggcgatcatcggcttcccctgcaaccagttcggcgcccaggagccgggcgacgccggcgaaatcggcgccttctgccagaagaactacggcgtggacttcgccatggccgacaaggtggacgtcaacggcgcgaacgcccacccgctgtggcagtatctgaagcggcagaaacgcggcctgctcgggcaggcgatacgctggaacttcagcaaattcctggtggaccgccagggccgggtggtcgcgcgcttcgccccgttcacccggccggaaaaactggccgccaggatagaagcgctgctcaaatga

SEQ ID NO: 73375 - protein, 158 aa, Chromobacterium violaceum ATCC 12472
MSIYDFSFRRLDGSEQAMADYRGSVLLLVNTASRCGFTSQYAGLEALHRRFGPQGLAIIGFPCNQFGAQEPGDAGEIGAFCQKNYGVDFAMADKVDVNGANAHPLWQYLKRQKRGLLGQAIRWNFSKFLVDRQGRVVARFAPFTRPEKLAARIEALLK

SEQ ID NO: 73376 - DNA, 483 bp, Gloeobacter violaceus PCC 7421
  CDS (1)..(483): transl_table=11
gtggctaccgtcagcgatatcaccgtccagacagtagatgggcaggcccgttcccttggcagatacaaaggtcaggtgctgcttatcgtcaacgtcgcttcctactgtggctacacgccccagtacgcgggcctcgaaaagctctaccgccgctataaagatgccgggttgcgggtactggcctttccctgcaacgactttggagggcaggagccgggttccaacgccgagattgccgagttttgcagccgctacgatgtcagcttcgagctgttcgacaaggtgggtgcgcgcggctactacaagcatcccctttacgtccgcctgagtgaagcggctgagcctgcgggggaagtgtcctggaattttgaaaagtttttaatcgctaaatcgggggagatcgtgggccgctaccgcagcggtatcggcccggaagatccgcaactggtcgccgatatcgaacgcgaactggcgaaaagttag

SEQ ID NO: 73377 - protein, 160 aa, Gloeobacter violaceus PCC 7421
MATVSDITVQTVDGQARSLGRYKGQVLLIVNVASYCGYTPQYAGLEKLYRRYKDAGLRVLAFPCNDFGGQEPGSNAEIAEFCSRYDVSFELFDKVGARGYYKHPLYVRLSEAAEPAGEVSWNFEKFLIAKSGEIVGRYRSGIGPEDPQLVADIERELAKS

SEQ ID NO: 73378 - DNA, 477 bp, Rhodopseudomonas palustris CGA009
  CDS (1)..(477): transl_table=11
atggcgtcgatctatgatttcaccgccaaatcgctggtgggcaaagacgtttcgctgaagcagttcgaaggaaaggtgctgctgatcgtcaacaccgcgagcgcctgcggcttcactccgcaatacaagggcctcgaagcgctgcaggagaaatatggcccgcgcggcttttcggtgctcggctttccgtgcaaccagttcggtgcgcaggagcccggcgacgaagcgcagatcgcccagttctgttcgaccaattacggcgtgaccttcccgatgttcgccaagatcgacgtcaatggcgccggcgcacatccgctgtacaagtttctgaaggatgaaaagggcggcttgctcgggtcggcgatcaaatggaatttcaccaagttcctggtcgatcggtccgggcgcgtggtatcgcggcatgcgccgaccaccacgccggaggcgctttcgaaagagatcgagaccttgctatga

SEQ ID NO: 73379 - protein, 158 aa, Rhodopseudomonas palustris CGA009
MASIYDFTAKSLVGKDVSLKQFEGKVLLIVNTASACGFTPQYKGLEALQEKYGPRGFSVLGFPCNQFGAQEPGDEAQIAQFCSTNYGVTFPMFAKIDVNGAGAHPLYKFLKDEKGGLLGSAIKWNFTKFLVDRSGRVVSRHAPTTTPEALSKEIETLL

SEQ ID NO: 73380 - DNA, 606 bp, Apis mellifera
  CDS (1)..(606)
atgcagaaattgatatttctaacagttctcttcttttgtggagtcataggagaaaattgtgaagataataataaaaaagaagaatgtgctttagcacctttagatcaagacaagaattggaaatcagcttctaccatttatgattttcatgctaaagatatccatggaaatgacgtgtcattgaataaatatcgtggacatgtttgtataattgttaatgttgctagtaattgtggacttacagatacaaattacagagaacttgtacaattatatgaaaaatacaatgaaaaagaaggtttaaggattttagcatttccatcaaatgagtttggcggtcaagaaccaggaacctctgtagaaattttagagtttgtcaaaaaatataatgttacttttgatctatttgaaaaaattaatgttaatggagataatgcacatccattatggaagtggttgaagacacaagcaaatggattcataactgacgatataaaatggaattttagtaaatttattattaacaaagaaggaaaagttgtttctcgatttgcaccaactgttgatcctttgcaaatggaatctgagttgaagaaatatttttaa

SEQ ID NO: 73381 - protein, 201 aa, Apis mellifera
MQKLIFLTVLFFCGVIGENCEDNNKKEECALAPLDQDKNWKSASTIYDFHAKDIHGNDVSLNKYRGHVCIIVNVASNCGLTDTNYRELVQLYEKYNEKEGLRILAFPSNEFGGQEPGTSVEILEFVKKYNVTFDLFEKINVNGDNAHPLWKWLKTQANGFITDDIKWNFSKFIINKEGKVVSRFAPTVDPLQMESELKKYF

SEQ ID NO: 73382 - DNA, 612 bp, Strongylocentrotus purpuratus
  CDS (1)..(612)
atgctcgacgctgtttgctacgatgacgccgaatccctgtccgatgtcgcaatgacaaagagtctatccctggacgactatcgtggcaaagtcgtgttggtcgtcaatacagcttccttctgcacctacacgtaccagtacccgtatttcaatgaacttaagaacgagttcggtgatcagctagcgatcttgggcttcccctgcaaccagttttggctccaggaacctggggtgggccaggagatccctaacaccctccggtacgtgcgaccaggaggtggatacgaacccaacttctatctcaacgaggagaagatcgatgtgaacggacctaaagctcacccgctcttcaaaaaactgaagaactcttgtccaccagtcaaaatggagatcggtgatccttccaatctgtattggtcgcctatgaccatcggtgacgtcacctggaattttaacaagtttctcctcgacaaagagggcgtccctttcaagcgctacgactctgtcgtcgaaccacttcagctggtcagcgacatccagcttgtagtggacggcgactacaaaacggtcaagcgcccctcacgtccaaaatacgccactgaggagttgtaa

SEQ ID NO: 73383 - protein, 203 aa, Strongylocentrotus purpuratus
MLDAVCYDDAESLSDVAMTKSLSLDDYRGKVVLVVNTASFCTYTYQYPYFNELKNEFGDQLAILGFPCNQFWLQEPGVGQEIPNTLRYVRPGGGYEPNFYLNEEKIDVNGPKAHPLFKKLKNSCPPVKMEIGDPSNLYWSPMTIGDVTWNFNKFLLDKEGVPFKRYDSVVEPLQLVSDIQLVVDGDYKTVKRPSRPKYATEEL

SEQ ID NO: 73384 - DNA, 624 bp, Nasonia vitripennis
  CDS (1)..(624)
atgatgcgttttacagtaatactcggcctcgtctgcatcgccggtgttttcggccagagctgtgataagacaaaggaggaatgtcccgaagcaaaggaagccgaagttaagtttaaccaggacacggactggagcaaggctaaatctatttacgaatttcatgccaaagacattcgcggcaatgatgtttcattggataaataccggggccacgttgcaattatcgtcaacgttgcgagccagtgcggcttgactgacacgaattacaaacagctacagagcttgttcgagaagtacggaaaatcaaagggattgagaatcttggccttcccgtcgaacgagttcgccggacaagaaccgggaacttccgaggagattttgaacttcgtcaagaaatacaacgtgtcctttgacatgttcgagaagattcaggtaaatggagatgaggctcatcccctgtacaagtggctcaagtctcaggaagaaggagctggaactatcaccgatggtatcaagtggaacttcaccaaatttttgatcgacaaaaatggaaaggttgtctccagattcgcgcctaccactgagcctttctccatggaagataccatcaccaaatacttgtaa

SEQ ID NO: 73385 - protein, 207 aa, Nasonia vitripennis
MMRFTVILGLVCIAGVFGQSCDKTKEECPEAKEAEVKFNQDTDWSKAKSIYEFHAKDIRGNDVSLDKYRGHVAIIVNVASQCGLTDTNYKQLQSLFEKYGKSKGLRILAFPSNEFAGQEPGTSEEILNFVKKYNVSFDMFEKIQVNGDEAHPLYKWLKSQEEGAGTITDGIKWNFTKFLIDKNGKVVSRFAPTTEPFSMEDTITKYL

SEQ ID NO: 73386 - DNA, 504 bp, Anopheles gambiae str. PEST
  CDS (1)..(504)
atggaagactacaagaatgctaaatcggtgtacgacttcacggtgaaggattcgcaaggggccgacgtcagcctggagaagtaccgtggcaaggtgctgctaatcgtcaacattgcctcccagtgcgggctaaccaagggcaattatgccgagctgaccgagctatcgcagaagtacgcggataaggatttcaaaattttgtccttcccctgcaatcagttcggtggccaaatgccggaaggcgacggagaggaaatggtgtgtcatcttcgctcggccaaagcggaagtaggagacgttttcgctaagatcgatgtaaacggtgacggcgcacatccgctctacaaatatctcaagcacaagcagggtggcactttgggtgattcgatcaagtggaactttgccaagtttttggtaaacaaggacggtcagccggtggatcgctatgcgcctacaacgtcgcccagcagcattgtgaaggacattgataagctgctgggctag

SEQ ID NO: 73387 - protein, 167 aa, Anopheles gambiae str. PEST
MEDYKNAKSVYDFTVKDSQGADVSLEKYRGKVLLIVNIASQCGLTKGNYAELTELSQKYADKDFKILSFPCNQFGGQMPEGDGEEMVCHLRSAKAEVGDVFAKIDVNGDGAHPLYKYLKHKQGGTLGDSIKWNFAKFLVNKDGQPVDRYAPTTSPSSIVKDIDKLLG

SEQ ID NO: 73388 - DNA, 507 bp, Anopheles gambiae str. PEST
  CDS (1)..(507)
atggaagactacaagaatgctaaatcggtgtacgacttcacggtgaaggattcgcaaggggccgacgtcagcctggagaagtaccgtggcaaggtgctgctaatcgtcaacattgcctcccagtgcgggctaaccaagggcaattatgccgagctgaccgagctatcgcagaagtacgcggataaggatttcaaaattttgtccttcccctgcaatcagttcggtggccaaatgccggaaggcgacggagaggaaatggtgtgtcatcttcgctcggccaaagcggaagtaggagacgttttcgctaagattaaggtgaacggagacgatgcggatccgttgtacaaatatttgaagcacaagcagggtggaattctgggtgattcaattaaatggaatttctccaagttcctggtaaacaaggacggacagccggtggaccgctacgcaccgaccacgtcgcctaagagtatcgttaaggatatcgataagctgctggaagcgtag

SEQ ID NO: 73389 - protein, 168 aa, Anopheles gambiae str. PEST
MEDYKNAKSVYDFTVKDSQGADVSLEKYRGKVLLIVNIASQCGLTKGNYAELTELSQKYADKDFKILSFPCNQFGGQMPEGDGEEMVCHLRSAKAEVGDVFAKIKVNGDDADPLYKYLKHKQGGILGDSIKWNFSKFLVNKDGQPVDRYAPTTSPKSIVKDIDKLLEA

SEQ ID NO: 73390 - DNA, 516 bp, Anopheles gambiae str. PEST
  CDS (1)..(516)
atgcagtcaccaccggaaaaagcaaaatcaatttttgaatttaccgtcaccgatctgaacggtaatgaggtttcgctcgaccgctaccagggatcggtgtgcctgatcgtgaacttctctaccaaggatgccaccttcgagaaggtgttgagtcttctcacgcctctgttgcgaaagtatcacaacgacacccgaaaagatttgaacgtcctcttcttcccatgcttccaattcggctccaaagaatcgccggacgaaatcgtacagcgcttcgagagcagcaccgatagcagcggtatgatcggtgagattttcaccgagattgaggtgaacggctcgaaagcccccggactgtacaagtatctgaaggcgaaaaaaccgggcaactgcggaggatttatcaacagcaactttaccatctttcttaccgaccgccaaggcgtaccggtggaaaggttaaatgctggaattcatccttacacgctcgaggacatggtcgagaatttgttacgctaa

SEQ ID NO: 73391 - protein, 171 aa, Anopheles gambiae str. PEST
MQSPPEKAKSIFEFTVTDLNGNEVSLDRYQGSVCLIVNFSTKDATFEKVLSLLTPLLRKYHNDTRKDLNVLFFPCFQFGSKESPDEIVQRFESSTDSSGMIGEIFTEIEVNGSKAPGLYKYLKAKKPGNCGGFINSNFTIFLTDRQGVPVERLNAGIHPYTLEDMVENLLR

SEQ ID NO: 73392 - DNA, 519 bp, Magnaporthe grisea 70-15
  CDS (1)..(519)
atggcttccgctacgacaatctacgacttcaagcccctcaacaagaagggcgaggagacccctctggccgactacaagggcaaggtcgtcctggtagtcaacacggcctccaagtgcggcttcacgccgcagtacgccggcctcgaggccctgtacaagaagatcaccgagaagcaccccgaggactttaccatcctcggcttcccctgcaaccagtttggcggccaggagcccggcaccgacgacgacattcaaaacttttgccaggtcaactacggcgtcaccttccccatcatgaagaaggtcgacgtcaacggcgacaacgccgacccgctcttcaagtggctcaaggaggagatgcccggcatcatgggcctcaagcgcgtcaagtggaactttgaaaagttcctgattggcagggacggcaaggtcaagggccgctgggcgagcacgaccaagcccgagtcgctcgagaaggacattctcaaggagattgaggctcccaagccgtccatctaa

SEQ ID NO: 73393 - protein, 172 aa, Magnaporthe grisea 70-15
MASATTIYDFKPLNKKGEETPLADYKGKVVLVVNTASKCGFTPQYAGLEALYKKITEKHPEDFTILGFPCNQFGGQEPGTDDDIQNFCQVNYGVTFPIMKKVDVNGDNADPLFKWLKEEMPGIMGLKRVKWNFEKFLIGRDGKVKGRWASTTKPESLEKDILKEIEAPKPSI

SEQ ID NO: 73394 - DNA, 516 bp, Gibberella zeae PH-1
  CDS (1)..(516)
atggcctctgctactagcttttacgactttaagccgcttgacaagcgcggccaggaggttcccctcgccgactacaagggcaaggtcgtcctcattgtcaacactgcctccaagtgcggcttcacccctcagtacgccggtcttgagaagctctggaccgacctcaagggcaagtaccccgatgactttgtcatcctcggcttcccctgcaatcagttcggcggccaggagcccggcaccgacgatgacattcaggagttctgccagctcaactacggcgtgaccttccccatcatgcaaaagaccgaggtcaacggtgacggcaccaaccctctctgggtctggctcaaggaccagcagtccggtcttctcggcctcaagcgcatcaagtggaactttgagaagttcctcgtcggccgtgatggaaaggtcaagggtcgatgggccagcaccaccaagcctgagagtcttgagaagcccattctcgaggcccttgctgagaagcctgcggcttaa

SEQ ID NO: 73395 - protein, 171 aa, Gibberella zeae PH-1
MASATSFYDFKPLDKRGQEVPLADYKGKVVLIVNTASKCGFTPQYAGLEKLWTDLKGKYPDDFVILGFPCNQFGGQEPGTDDDIQEFCQLNYGVTFPIMQKTEVNGDGTNPLWVWLKDQQSGLLGLKRIKWNFEKFLVGRDGKVKGRWASTTKPESLEKPILEALAEKPAA

SEQ ID NO: 73396 - DNA, 495 bp, Candida glabrata CBS 138
  CDS (1)..(495)
atggctgctaagagtttttacgagttggaatgcaaggacaagaaaggtgagactttcaagttcgataccttgaagggcaaggttgtcctgattgtcaacgttgcctccaagtgtggtttcaccccacaatacaaggatttggagagcttgtaccagaagcacaaggacgagggcttggtcatccttggtttcccatgcaaccagttcggtggccaagaacctggctctcaagaggagatcggtaacttctgccaattgaactacggtgtcactttcccaattatgcacaagattgaggttaacggtgacaacactgaccctgtatatgacttcttgaagtctcaaaagagtggcctgctgggtctaaatagagtcaagtggaactttgagaaattcttggtcgacaagcacggtaaggttcaccagagatactcttctttgaccaagccaatgtccatcgaagacgacattaagcaattgcttgctcaaaaataa

SEQ ID NO: 73397 - protein, 164 aa, Candida glabrata CBS 138
MAAKSFYELECKDKKGETFKFDTLKGKVVLIVNVASKCGFTPQYKDLESLYQKHKDEGLVILGFPCNQFGGQEPGSQEEIGNFCQLNYGVTFPIMHKIEVNGDNTDPVYDFLKSQKSGLLGLNRVKWNFEKFLVDKHGKVHQRYSSLTKPMSIEDDIKQLLAQK

SEQ ID NO: 73398 - DNA, 498 bp, Candida glabrata CBS 138
  CDS (1)..(498)
atggatagccaaagcagtttttatgatctaagtccacatgataaggataataatgagtttccgttcagtaacctaaaaggccaagttgtactaatagtaaatgttgcttctaagtgtaacttcacaccacagtacaatgatctacagtacctgcatgaaaaatacagttacagaggactgaaaatcataggattcccatgcaatcagtttggccaacaagagcctgaaaacgatgaagtaattcaaaaattttgcttgtccaattatggtgtttcattcaaaatcctaaagaaaatcaaggtgaatggacctaatgctgatcctgtctacacgtatttgaagaatgagatgccatcacaaataggcctgaaggtaataagatggaattttgaaaaatttttggttgataaacatggcagagtacgccatcgatactctagtttaacctcccctaaatctctacaacgcactatagatcaattactcgacgataagtaa

SEQ ID NO: 73399 - protein, 165 aa, Candida glabrata CBS 138
MDSQSSFYDLSPHDKDNNEFPFSNLKGQVVLIVNVASKCNFTPQYNDLQYLHEKYSYRGLKIIGFPCNQFGQQEPENDEVIQKFCLSNYGVSFKILKKIKVNGPNADPVYTYLKNEMPSQIGLKVIRWNFEKFLVDKHGRVRHRYSSLTSPKSLQRTIDQLLDDK

SEQ ID NO: 73400 - DNA, 486 bp, Candida glabrata CBS 138
  CDS (1)..(486)
atgtcaccatttcaccaattgcgcccagttgatggccaagggaatatctatccttttgagatgttaaaaggtaaggttgtcctcattgtaaacacagcctcaaactgtggttttacacctcaatatatcgaattagaaaacatgtatcagaaatataagaacgagggtttcgaaatattaggtttcccctgtaatcaatttggtcatcaagagccgggcagcgatgccgaaattcagaaattttgttcctctaagtacaaggttactttcccaataatgaagaagattgacgtcaatggtccatatgaagaccctgtcttcaagtatatcaaagaacaaaagccaggaatgctaggtctgaagggtataaagtggaattttgagaagtttctaatagatcgacaaggtaatgttgttttaagagcttcatcattaactaagccatcaactttgaatgaaacaatagaaaagcttttaaagaactga

SEQ ID NO: 73401 - protein, 161 aa, Candida glabrata CBS 138
MSPFHQLRPVDGQGNIYPFEMLKGKVVLIVNTASNCGFTPQYIELENMYQKYKNEGFEILGFPCNQFGHQEPGSDAEIQKFCSSKYKVTFPIMKKIDVNGPYEDPVFKYIKEQKPGMLGLKGIKWNFEKFLIDRQGNVVLRASSLTKPSTLNETIEKLLKN

SEQ ID NO: 73402 - DNA, 507 bp, Kluyveromyces lactis NRRL Y-1140
  CDS (1)..(507)
atgagtgacgatttctacagttattcttgtgaaactaaagatgggtctgaatatcatatgagtgaactgcgaggaaaagttgttcttatagttaatgttgcatcgaaatgtggcttccgaggtcaatatggagagctacaagagttgtacaaagaattccatgcaaaagggtttgaaatattagcattcccctgcaatcagttcatgaaccaggaacctggttccgatgaagaaataggaaaattttgccaggagcactacggtgtcagttttaaaataatgaagaagtgtaaagtgaatggtgtcaatgctcttccgctatataagtacttgaaagatcaacaaccgcgaatgtttgggttcacgttcgttagatggaattttgagaagtttttgatcgatcgctcagggagagtccatggacggtattccacgttgacgaaaccgaaaagtatgaaggaagacatcgaacaattactaaaacaaaaaagccaactacaatcatga

SEQ ID NO: 73403 - protein, 168 aa, Kluyveromyces lactis NRRL Y-1140
MSDDFYSYSCETKDGSEYHMSELRGKVVLIVNVASKCGFRGQYGELQELYKEFHAKGFEILAFPCNQFMNQEPGSDEEIGKFCQEHYGVSFKIMKKCKVNGVNALPLYKYLKDQQPRMFGFTFVRWNFEKFLIDRSGRVHGRYSTLTKPKSMKEDIEQLLKQKSQLQS

SEQ ID NO: 73404 - DNA, 486 bp, Kluyveromyces lactis NRRL Y-1140
  CDS (1)..(486)
atgtctaagttttacgaattagcaccaaaggacaaaaagggcgaaccattcccattcactcagctagaaggtaaagttgttttaattgtcaacgttgcttccaagtgcgggttcactcctcaatataaggaactagaagctttgtacaagaagtacgaggataaagggttcattgtgttgggtttcccatgtaaccagtttggacatcaagagccaggtactgatgaagagatttctcagttctgtcaactaaactacggtgtttctttcccaatcttgaagaaggttgatgtgaacggttctgaagctgacccagtctacgacttcttgaagaacgaaaaatccggattgttgggtttcaagggtatcaaatggaactttgaaaaattccttgttgacaagaagggtaccgttgttgaaaggtacagttctttgactaagccatcttcgttagaagaacctattgaaaaattgttgaatgaataa

SEQ ID NO: 73405 - protein, 161 aa, Kluyveromyces lactis NRRL Y-1140
MSKFYELAPKDKKGEPFPFTQLEGKVVLIVNVASKCGFTPQYKELEALYKKYEDKGFIVLGFPCNQFGHQEPGTDEEISQFCQLNYGVSFPILKKVDVNGSEADPVYDFLKNEKSGLLGFKGIKWNFEKFLVDKKGTVVERYSSLTKPSSLEEPIEKLLNE

SEQ ID NO: 73406 - DNA, 489 bp, Debaryomyces hansenii CBS767
  CDS (1)..(489)
atggataaaacgagtttctacgacttcaaaccgttagatgtatacggcgaggtgtatgatttcagtcaattgaaggggaaggtggtggtgattgtaaatgtagcgagtctttgtggatttacactgcagtacaaagatcttgaatatttgtataaaacgtataaggagaggggatttgttgtgcttggattcccatgcaatcaatttgggagtcaagaaccgtataccgaacgagagattttgcagatatgcgaaaagaagtttggagttacgtttcctataatggacaagattgaggttaacggagagtgtgaagatccgctttatggatatttgaagaacgagcaacggacgtctctcgggttcaaagggattaagtggaattttgagaaatttttgattagtagaagtggtagagtagtcaaacgttacgactcgacagtagccccgctaaacttcgagaaagctattgtagagctactagagtaa

SEQ ID NO: 73407 - protein, 162 aa, Debaryomyces hansenii CBS767
MDKTSFYDFKPLDVYGEVYDFSQLKGKVVVIVNVASLCGFTLQYKDLEYLYKTYKERGFVVLGFPCNQFGSQEPYTEREILQICEKKFGVTFPIMDKIEVNGECEDPLYGYLKNEQRTSLGFKGIKWNFEKFLISRSGRVVKRYDSTVAPLNFEKAIVELLE

SEQ ID NO: 73408 - DNA, 483 bp, Debaryomyces hansenii CBS767
  CDS (1)..(483)
atgtctttttacgatttaagtcctcttgatacaaacgacaagccattcccatttgaagaattaaagggtaaagttgtgttggtggtcaatgttgcatctaagtgtggtttcacaccacaatacaaggaattagaagaactcaacaaaaaatatcaggataaaggattacagattattggtttcccatgtaaccaattcggaggacaagaaccgggcagttctgaagaaattgctagcttctgttctctcaactacggagtgtcattcccagtgttgaagaaagtcgatgtcaatggggacaagactgacccagtttacaagtatttgaagggggaaaagctgggattactcgggttgaacagaattaagtggaactttgaaaaattcttgattgacaagaacgggaaggttattgaacgttattcgtcattgaccaagcctgcttctctcctgtctacaatcgaggagttattgaagaaatag

SEQ ID NO: 73409 - protein, 160 aa, Debaryomyces hansenii CBS767
MSFYDLSPLDTNDKPFPFEELKGKVVLVVNVASKCGFTPQYKELEELNKKYQDKGLQIIGFPCNQFGGQEPGSSEEIASFCSLNYGVSFPVLKKVDVNGDKTDPVYKYLKGEKLGLLGLNRIKWNFEKFLIDKNGKVIERYSSLTKPASLLSTIEELLKK

SEQ ID NO: 73410 - DNA, 507 bp, Yarrowia lipolytica CLIB122
  CDS (1)..(507)
atgtccgccgagaaaaccaataccgctttctacaacctcgctccactcgacaagaacggagagcctttccccttcaagcagcttgagggcaaggtcgtgctcatcgtgaacgtcgcctccaagtgtggctttactccccaatacaagggccttgaggaggtctaccagaagtacaaggatcagggattcaccatcatcggcttcccctgcaaccagtttggtggccaagagcctggttccgctgacgagatctcctccttctgtcagctgaactacggcgtcactttccccgttcttcagaagatcaacgtcaacggcaacgacgccgaccccgtctacgtctacctgaaggagcagaaggctggtctgctgggcttccgaggaatcaagtggaactttgagaagttcctggttgataagcacggtaacgtcgtcgaccgatatgcttccctcaagacccccgccggcctcgaatccaccatcgagaccctcctcaaaaagccctaa

SEQ ID NO: 73411 - protein, 168 aa, Yarrowia lipolytica CLIB122
MSAEKTNTAFYNLAPLDKNGEPFPFKQLEGKVVLIVNVASKCGFTPQYKGLEEVYQKYKDQGFTIIGFPCNQFGGQEPGSADEISSFCQLNYGVTFPVLQKINVNGNDADPVYVYLKEQKAGLLGFRGIKWNFEKFLVDKHGNVVDRYASLKTPAGLESTIETLLKKP

SEQ ID NO: 73412 - DNA, 507 bp, Apis mellifera
  CDS (1)..(507)
atgagtggaaacgacaactataaggaagcgaaatcaatttatgatttcactgcgaaatccatcaaaggcgaagacgtttttctatctaaatataaaggacatgtttgtttaatcgtaaatgtagcgtcaaaatgcggccttacagcaacaaattataaagaattgaatgagttatacgatgaatatgctgaatctaaaggtttacgaattttggcttttccttgtaatcaatttaatggtcaagaaccgggaaatagtgaagatatatgtaattttgctgatcgacaaaaagttaaattcgacttgtttgaaaaaattgacgttaatggagattctgcgcatcctttatggaaatatttaaaaaaagaacaaggaggaattttgggtgatttcataaaatggaattttacaaaatttattgtaaataaagaaggcaaagtggtggaacgccatggtccaaatgtggctcccagtaatttgaaaaatcatcttgaaaaatatttttaa

SEQ ID NO: 73413 - protein, 168 aa, Apis mellifera
MSGNDNYKEAKSIYDFTAKSIKGEDVFLSKYKGHVCLIVNVASKCGLTATNYKELNELYDEYAESKGLRILAFPCNQFNGQEPGNSEDICNFADRQKVKFDLFEKIDVNGDSAHPLWKYLKKEQGGILGDFIKWNFTKFIVNKEGKVVERHGPNVAPSNLKNHLEKYF

SEQ ID NO: 73414 - DNA, 585 bp, Aspergillus nidulans FGSC A4
  CDS (1)..(585)
atggcttctgctactacattttatgacttcgagcctgttgacaagaaaggcgaagcttatcccctcaaccagctaaagggcaaagttatccttgtcgtcaacaccgcgtcgaaatgcggtttcacgcctcaattcaaaggcctcgagaccctttaccagtccatcaaagccaagcgccccgatgacttcgttatccttggtttcccctgcaaccagtttggcggtcaggacccgggctccaacgaccagattcaggaattctgtcaattgaactacggcgttaccttccccgttctcggcaagacggaggtcaacggagataatgcgaaccctctttggacttggctgaaagagagccagcctggtctgttggggttgaagaggataaagtggaactttgagaaattcctgatttccgcggatggcaaggttgttgggaggtgggctagtaccaccaagcctgagggattggagagcaggattttagaggagattgagaaggccgagaagcaggggcttctggcttcgaaggctatgcagcccgaagctgcaggtacggacggggagactgccaagctggcgtaa

SEQ ID NO: 73415 - protein, 194 aa, Aspergillus nidulans FGSC A4
MASATTFYDFEPVDKKGEAYPLNQLKGKVILVVNTASKCGFTPQFKGLETLYQSIKAKRPDDFVILGFPCNQFGGQDPGSNDQIQEFCQLNYGVTFPVLGKTEVNGDNANPLWTWLKESQPGLLGLKRIKWNFEKFLISADGKVVGRWASTTKPEGLESRILEEIEKAEKQGLLASKAMQPEAAGTDGETAKLA

SEQ ID NO: 73416 - DNA, 492 bp, Candida albicans SC5314
  CDS (1)..(492): transl_table=12
atgtcggatttttatgaatttgctccaaatgatatcaagggaactccttactcattcaaaaaacttcaaggtaaagttgttcttattgtcaatgttgcttccaaatgtggattcactccacaatacaaaggtttacaagatttgaaacaaaaatttgctgatcaaccagtggaaatattaggatttccttgcaatcaatttggtcatcaagaacctggaactaatgaagaaattgaaaagtattgtcgtgaatactttggtgtgactttccccgtattaagtaaagttgaaactaatggtaaaaatgctgaaccagtttataaatttttgaagtctcaaaagcccggactactaggattacatagaataatgtggaattttgaaaaattcttaattgatcaagatggtaatgttgtggcaagatttagtagttttactaaacctgaaactattggattacgaattgaagaaatgttaaaacatcaggcttag

SEQ ID NO: 73417 - protein, 163 aa, Candida albicans SC5314
MSDFYEFAPNDIKGTPYSFKKLQGKVVLIVNVASKCGFTPQYKGLQDLKQKFADQPVEILGFPCNQFGHQEPGTNEEIEKYCREYFGVTFPVLSKVETNGKNAEPVYKFLKSQKPGLLGLHRIMWNFEKFLIDQDGNVVARFSSFTKPETIGLRIEEMLKHQA

SEQ ID NO: 73418 - DNA, 486 bp, Candida albicans SC5314
  CDS (1)..(486): transl_table=12
atgtctcaattttacgaattagctccaaaagacgccaaaggtgaaccatatccatttgaacaattgaaagggaaagttgtccttatcgtcaatgttgcttccaaatgtggattcactcctcaatacaagggtttagaagaattgaataagaaatttgctgatcaaccagtacaaatcttgggtttcccatgtaatcaatttggccaccaagaaccaggtagtaacgaagaaattggatcattctgttcattgaactacggtgttacattcccagtcttggataaaattgaagtcaatggtgacaataccgatccagtttataaatatttgaaatcacaaaagagtggtgttttgggattgaccagaattaaatggaattttgaaaaattcttgattgaccaaaatggtaaagttattgaaagattcagttcattgactagtccagaaagtatcggtaccaagattgaagaattgttgaagaaataa

SEQ ID NO: 73419 - protein, 161 aa, Candida albicans SC5314
MSQFYELAPKDAKGEPYPFEQLKGKVVLIVNVASKCGFTPQYKGLEELNKKFADQPVQILGFPCNQFGHQEPGSNEEIGSFCSLNYGVTFPVLDKIEVNGDNTDPVYKYLKSQKSGVLGLTRIKWNFEKFLIDQNGKVIERFSSLTSPESIGTKIEELLKK

SEQ ID NO: 73420 - DNA, 690 bp, Candida albicans SC5314
  CDS (1)..(690): transl_table=12
atggtgaaaagcaacgtcgagctggcatgggaaaccatggaagatacatttctggaaatccaaaacaaatttcaccaaatttacaaaccaatagacactggcaaacctgatgaagatgatgaaactactaaaaaagagagtcttgacattactgatgattcgacactctcagtatcaccaataacccaactactttatcttgcacgactgaagttttatgatttaactcccttagataaccagaaatcaccattcccattcaaaaatctacgaggtaaagtggttttaattgttaatgttgcctccagatgtgggttttctttccaatacaatggtctagaacaattgaataaacgatttgctaatgatgactttgtgttattgggtgttccctgtaatcaatttctatggcaagaaccaggcactaatgatcaaatagtaacgaaatgtaaaaagaaatatgatgtatcattccagatactagataaaatcaatgttaatggtgaacaagcagatccagtttataaatttctaaaagcacaaaaagaagggttatggggtactaatagagtgaaatggaattttgaaaagttcttgatagataaaaatggcagagtggtggaaaggtatagtacgtttactagacccgtggcaataataccaaagattgaacagttgctagaaagctag

SEQ ID NO: 73421 - protein, 229 aa, Candida albicans SC5314
MVKSNVESAWETMEDTFSEIQNKFHQIYKPIDTGKPDEDDETTKKESLDITDDSTLSVSPITQLLYLARSKFYDLTPLDNQKSPFPFKNLRGKVVLIVNVASRCGFSFQYNGLEQLNKRFANDDFVLLGVPCNQFLWQEPGTNDQIVTKCKKKYDVSFQILDKINVNGEQADPVYKFLKAQKEGLWGTNRVKWNFEKFLIDKNGRVVERYSTFTRPVAIIPKIEQLLES

SEQ ID NO: 73422 - DNA, 516 bp, Candida albicans SC5314
  CDS (1)..(516): transl_table=12
atgggcaacgagttattatcaaccgcaagaatatacacgttcaaaatacccgatgcatataataatgtgatagatttcgaccaattcaagaataaagtgatactaatagtcaatgtggcaagtttgtgtgggttcacacctcaatataaagaattgcaattgctttacgaaaaatatcatgaacgtggtctagaaatattaggatttccttgtaatcaatttggaaatcaagaaccacttcaggaagaagaaatagtcgaatcttgtagacgcaattttggtgtcagtttccccataatgaagaaaaccaaagttaatatagattgtgatggccatgagtcggaattgtacaagtacttgaaatctgaaaagcctggtgaagtgggttttaaaggtgtccgttggaattttgaaaagtttatagtgaacagaaaaggtgaagttgttgctagatttaactctctaataacaccactacaactcgaagggtttattgaacaacttttatcagaataa

SEQ ID NO: 73423 - protein, 171 aa, Candida albicans SC5314
MGNELLSTARIYTFKIPDAYNNVIDFDQFKNKVILIVNVASLCGFTPQYKELQLLYEKYHERGLEILGFPCNQFGNQEPLQEEEIVESCRRNFGVSFPIMKKTKVNIDCDGHESELYKYLKSEKPGEVGFKGVRWNFEKFIVNRKGEVVARFNSLITPLQLEGFIEQLLSE

SEQ ID NO: 73424 - DNA, 690 bp, Candida albicans SC5314
  CDS (1)..(690): transl_table=12
atggtgaaaagcaacgtcgagctggcatgggaaaccatggaagatacatttctggaaatccaaaacaaatttcaccaaatttacaaaccaatagacactggcaaacctgatgaagatgatgaaactactaaaaaagagagtcttgacattactgatgattcgacactctcagtatcaccaataacccaactactttatcttgcacgactgaagttttatgatttaactcccttagataacctgaaatcaccattcccattcaaaaatctacgaggtaaagtggttttaattgttaatgttgcctccagatgtgggttttctttccaatacaatggtctagaacaattgaataaacgatttgctaatgatgactttgtgttattgggtgtcccctgtaatcaatttctatggcaagaaccaggcactaatgatcaaatagtaacgaaatgtaaaaagaaatatgatgtatcattccagatactagataaaatcaatgttaatggtgaacaagcagatccagtttataaatttctaaaagcacaaaaagaagggttatggggtactaatagagtgaaatggaattttgaaaagttcttgatagataaaaatggcagagtggtggaaaggtatagtacgtttactagacccgtggcaataacaccaaggattgaacagttgctagaaagctag

SEQ ID NO: 73425 - protein, 229 aa, Candida albicans SC5314
MVKSNVESAWETMEDTFSEIQNKFHQIYKPIDTGKPDEDDETTKKESLDITDDSTLSVSPITQLLYLARSKFYDLTPLDNSKSPFPFKNLRGKVVLIVNVASRCGFSFQYNGLEQLNKRFANDDFVLLGVPCNQFLWQEPGTNDQIVTKCKKKYDVSFQILDKINVNGEQADPVYKFLKAQKEGLWGTNRVKWNFEKFLIDKNGRVVERYSTFTRPVAITPRIEQLLES

SEQ ID NO: 73426 - DNA, 486 bp, Ustilago maydis 521
  CDS (1)..(486)
atggtctcattctacgatctcaaggccaaaaagcccagccaggaggactacacctttgatcaactcaaaggcaaagtcgttctagttgtcaacaccgcctccaagtgcggatatactccccagtttgctgagcttgaggagctcaacaaaaagtacgctgaccagggtctgcagatcattgggttcccttgcaaccagtttgctggtcaagatccagggagcgatgaatccatcggcgagttctgccaacgtaactacggtgtaactttcccgatgatggccaaatccgatgtcaacggcagtaacaccaacgaggtcttccagttcctcaagaaggaaaaggctggcattcttggtaccgagatgatcaagtggaacttcaccaaattccttatcgacaaggagggtaacgtcattgagcgatatggatccaacaccaaaccatcggccatcgcacccgccatcgagaagcttctctcccagtga

SEQ ID NO: 73427 - protein, 161 aa, Ustilago maydis 521
MVSFYDLKAKKPSQEDYTFDQLKGKVVLVVNTASKCGYTPQFAELEELNKKYADQGLQIIGFPCNQFAGQDPGSDESIGEFCQRNYGVTFPMMAKSDVNGSNTNEVFQFLKKEKAGILGTEMIKWNFTKFLIDKEGNVIERYGSNTKPSAIAPAIEKLLSQ

SEQ ID NO: 73428 - DNA, 456 bp, Cryptococcus neoformans var. neoformans B-3501A
  CDS (1)..(456)
atgtctgatatctactcttactctgttgagtttcccaagtccactcttccccttagtgacctgaagggcaagactctcttgttcgtcaacgttgcgagcaagtgcggtttgactcctcagtacaaggatcttcaagctttgcacgagaagtacggtgataaggggctggcgatcattggtttcccttgcaaccagtttaaggctcaagagcctgggaccgatgatgaggttcttcagttctgtcaagtcaactatggagtgactttccctattgctaagaagggcgacgttaatggcgaaaacactcagcctatctggaaatacctcaaagagaatgccgagccccctgtctctgacatcgactggaacttttccaagttccttgtcaaggatggaaagatcacttggttccctgcccgaagcaccaaggttagcgatgttgaggctgctctttga

SEQ ID NO: 73429 - protein, 151 aa, Cryptococcus neoformans var. neoformans B-3501A
MSDIYSYSVEFPKSTLPLSDLKGKTLLFVNVASKCGLTPQYKDLQALHEKYGDKGLAIIGFPCNQFKAQEPGTDDEVLQFCQVNYGVTFPIAKKGDVNGENTQPIWKYLKENAEPPVSDIDWNFSKFLVKDGKITWFPARSTKVSDVEAAL

SEQ ID NO: 73430 - DNA, 558 bp, Cryptococcus neoformans var. neoformans B-3501A
  CDS (1)..(558)
atgacgtttttcgacagcatcgcctccaagtttggttacgaatctctcccaggggacgttgccaacaaaagcttctacgatttgaaggccaagctgcctgggagcaagggtgatttggacttttctactttgaaaggcaaggtcgtgttgatcgtcaacactgcttccaaatgtggtttcactccccagtataccggccttgaagagctccacaagacttacggagataagggtctcgtcgttcttggtttcccttccaacgagtttggaggacaagagcctggctctgacgatgatatcgcccagttttgtacccttaaccacggtgtcactttcccgcttatgaagaagtctgaagtgaacggaaagaacatgaatgaggtctttgcgtggttgaagtctcagaagggagagaatgttggtggtcttgccgggaccactgctatcaagtggaactttaccaaattccttatcaacaaggagggcaagtgtgtcggccgatatggctcttccaccaagcccgagaagctcaaggaggaaatcgagaagcttctttaa

SEQ ID NO: 73431 - protein, 185 aa, Cryptococcus neoformans var. neoformans B-3501A
MTFFDSIASKFGYESLPGDVANKSFYDLKAKLPGSKGDLDFSTLKGKVVLIVNTASKCGFTPQYTGLEELHKTYGDKGLVVLGFPSNEFGGQEPGSDDDIAQFCTLNHGVTFPLMKKSEVNGKNMNEVFAWLKSQKGENVGGLAGTTAIKWNFTKFLINKEGKCVGRYGSSTKPEKLKEEIEKLL

SEQ ID NO: 73432 - DNA, 507 bp, Tribolium castaneum
  CDS (1)..(507)
atgtccaaccccgcaaatccgcaagaagccaagtcaatttacgagtttagtgccaaagacctaaagggcgaaactgtgtctttggaaaagtacaaagggcacgtctgcatcgtcgtaaatgtggcctcccagtgcggttacaccaagaacaactacgccgagttggtcgacttgttcaacgaatatggggaatcgaaaggactgaggattctggcctttccctgcaaccagttcgccggggaagaaccggggagcagtgaggagatttgccagtttgtttcgagcaaaaacgtcaagtttgatgtcttcgagaaagtcaatgtgaacggcaaagatgcacaccctttgtgggtctacttgaagcacaagcagggcggaactttggggaatttcatcaagtggaatttcaccaagtttatcgtcgacaaggagggacaacctgtggaaaggcatgggcccagcactaatcccaaagatttggtcaagtcgctggaaaagtattggtga

SEQ ID NO: 73433 - protein, 168 aa, Tribolium castaneum
MSNPANPQEAKSIYEFSAKDLKGETVSLEKYKGHVCIVVNVASQCGYTKNNYAELVDLFNEYGESKGLRILAFPCNQFAGEEPGSSEEICQFVSSKNVKFDVFEKVNVNGKDAHPLWVYLKHKQGGTLGNFIKWNFTKFIVDKEGQPVERHGPSTNPKDLVKSLEKYW

SEQ ID NO: 73434 - DNA, 597 bp, Tribolium castaneum
  CDS (1)..(597)
atgccacgtgtcaaaactaaagccagaaagcgcactcaacccaccggagacgctgcagacacaaaacacaccactgctgaaagttctgaaccagagccctcaagcgaagcctcgtccgcaaccaccatttacgaattcacggccaagacaattgagggcgaagaaatctcgctggagaagtacaaaggacacgtttgcatcatagtaaatgtagcgtcaaaatgtggccacacaaagtcaaattatgaacagtttgttgagctgtacgataagtattcggaggagaaagggctgcgaattttggcgtttccttgcaatcagttcggtggacaggaacctggcgattcggaaaagatctgcgagtttgtcaaagcccgaaatgtcaaatttgacatgtttgagaaaattaaggttaacggcaaggacgctcatcccttgtggaagtttctgaaggagaaacttcccagtcctaaggggaaagacatcaagtggaatttcactaaattcattgttaacgatgaaggcgtccctgtcgagagacatgcctccagtgttaagccactcactcttctggaatctcttcagaaattgtggtag

SEQ ID NO: 73435 - protein, 198 aa, Tribolium castaneum
MPRVKTKARKRTQPTGDAADTKHTTAESSEPEPSSEASSATTIYEFTAKTIEGEEISLEKYKGHVCIIVNVASKCGHTKSNYEQFVELYDKYSEEKGLRILAFPCNQFGGQEPGDSEKICEFVKARNVKFDMFEKIKVNGKDAHPLWKFLKEKLPSPKGKDIKWNFTKFIVNDEGVPVERHASSVKPLTLLESLQKLW

SEQ ID NO: 73436 - DNA, 600 bp, Tribolium castaneum
  CDS (1)..(600)
atgttggttcccggcctccagttgtttagcgttgcgacgacagtgttgcgggtgttttcgaccgtaccccctgtgattacctcgaaagccgcgatgtcgaacccggagaagccccaggaagccgcctccatctacgaattcaccgccaacgatatcaaaggtgaacccgtatcgttggaaaagtacaaagggcatgtgtgcatcatcgtgaacgtcgcctcccagtgcggctacaccaagaacaactacgcggagctggtggacctcttcaacgagtacggcgagtccaagggcttgaggatcttggcgttcccgtgcaatcagttcgccggccaggagccgggcactaacgaggagatttgccagtttgtttcgagcaagaatgtcaagtttgatgttttcgagaaaattaatgtcaatgggaatgacgcgcatccgttgtggaagtacttgaagcacaagcaagggggaacgttgggcgatttcatcaagtggaatttcaccaagtttattattgacaagaatgggcagccggttgagagacatggacccagcactaatcccaaagacttggtcaagtcactagagaagtactggtga

SEQ ID NO: 73437 - protein, 199 aa, Tribolium castaneum
MLVPGLQLFSVATTVLRVFSTVPPVITSKAAMSNPEKPQEAASIYEFTANDIKGEPVSLEKYKGHVCIIVNVASQCGYTKNNYAELVDLFNEYGESKGLRILAFPCNQFAGQEPGTNEEICQFVSSKNVKFDVFEKINVNGNDAHPLWKYLKHKQGGTLGDFIKWNFTKFIIDKNGQPVERHGPSTNPKDLVKSLEKYW

SEQ ID NO: 73438 - DNA, 480 bp, Burkholderia vietnamiensis G4
  CDS (1)..(480): transl_table=11
atgtccaccctgtattcgttcagcgcagagacgctcgccggtgagccggtgtcgctcgacgcgtatcgcggcaaggtcctgctgatcgtcaacaccgcgagcgagtgcggtttcacgccgcagtacgcgggcctgcagaagctgtacgaccggtacgcggcgcgcggcttctccgtgctcggctttccgtgcaaccagttcggcaagcaggagccgggcgatgcgacgcagatcggcgcgttttgcgagcgcaactacggcgtcacgttcccgatgttcgcgaagatcgacgtgaagggcgaccacgcgcatccgctgtaccgctacctgactgacgaggcgcccggcatcctgggcctgaaggcgatcaaatggaacttcacgaagtttctgatcggtcgcgacggacgcatcgtcaagcgctacgcgccgtcgacgaagcccgaggagatcgccgcggatatcgacaagctgctgtga

SEQ ID NO: 73439 - protein, 159 aa, Burkholderia vietnamiensis G4
MSTLYSFSAETLAGEPVSLDAYRGKVLLIVNTASECGFTPQYAGLQKLYDRYAARGFSVLGFPCNQFGKQEPGDATQIGAFCERNYGVTFPMFAKIDVKGDHAHPLYRYLTDEAPGILGLKAIKWNFTKFLIGRDGRIVKRYAPSTKPEEIAADIDKLL

SEQ ID NO: 73440 - DNA, 489 bp, Leifsonia xyli subsp. xyli str. CTCB07
  CDS (1)..(489): transl_table=11
atgagcctgatggatatcccgttccgcaccatcgacggcgaacccacttccctcgcggctttcgcgggcaaggtcatcctcgtcgtcaacgtcgcctcccgctgcgggctcgccccgcagtacgagaagctcgaaggcttgcagaagacctacggcgaccgcggcttcaccgtgatcggattcccgagcaaccagttcctgcaggagctgaacagcacggacgcgatcaaggaatactgctcgaccacctggggcgtcactttcccgatgatggagaaagtgaagctgaacggccgctcggcgcacccgctctacgcagagctgaccacctaccccgacgccgctggcaaggcggggaaggtgaagtggaatttcgagaagttcatgatcacccccggcggcgcggtgcatcggttccgcccgacgaccgagccggacgctcccgagatcatcgggctcatcgagcaggcgctgccgacggcggtgtga

SEQ ID NO: 73441 - protein, 162 aa, Leifsonia xyli subsp. xyli str. CTCB07
MSLMDIPFRTIDGEPTSLAAFAGKVILVVNVASRCGLAPQYEKLEGLQKTYGDRGFTVIGFPSNQFLQELNSTDAIKEYCSTTWGVTFPMMEKVKLNGRSAHPLYAELTTYPDAAGKAGKVKWNFEKFMITPGGAVHRFRPTTEPDAPEIIGLIEQALPTAV

SEQ ID NO: 73442 - DNA, 480 bp, Bacillus licheniformis ATCC 14580
  CDS (1)..(480): transl_table=11
atgtccatttacgatatcagcgtcaagacgattaaaggcgaggacacgacactgcggccgtataaaggcaaagtgctgctcatcgtcaacaccgcctcgaagtgcggatttacacctcaatatcagcagcttcaagacttgtatgaaacatataaagaccgggggcttgagattctcggctttcccagcaaccaattcatgaatcaggagccgggcgatgaaaaaagcattgaagaattttgcagcgtcaattacggtgtcacgtttccgatgttttcgaaggtgaatgtaaaaggggatcaaatccacccgctgttccgccacttgacgaacaaggcgaagggcatgcttggaacaaaagcggtcaaatggaatttcacaaaatttctcgtcgatcaaaccggagaaaacgttgtgcgcttttcaccgcaaaccaatccaaaggagatggaggagaccattcagaaatggctgggctga

SEQ ID NO: 73443 - protein, 159 aa, Bacillus licheniformis ATCC 14580
MSIYDISVKTIKGEDTTLRPYKGKVLLIVNTASKCGFTPQYQQLQDLYETYKDRGLEILGFPSNQFMNQEPGDEKSIEEFCSVNYGVTFPMFSKVNVKGDQIHPLFRHLTNKAKGMLGTKAVKWNFTKFLVDQTGENVVRFSPQTNPKEMEETIQKWLG

SEQ ID NO: 73444 - DNA, 495 bp, Methylococcus capsulatus str. Bath
  CDS (1)..(495): transl_table=11
atgaacatctacgaattcgaagtccgcaccctggagggcgaaaccgttcgcctggacggctaccgcgggaaggtccttctgatcgtcaacgtcgccagccgctgcggcttcactccgcagtacgccggcctggaggcactgtaccggcgccatcgtaacgccggcctggtgatcctcggctttccctgcaaccagttcggcggccaggaacccggcagcgaaacggaaatcaggcggttctgttcgagccggtacgaagtgagcttcccgctgttcgccaagatcgaggtgaacggcgagcatacccaccccctctatgcctatctcaaatccgcgcagccgggactgctcggcagcgaagccatcaagtggaatttcaccaagttcctggtcggccgcaacggcgaagtcgtgaaacgctacgccccgaccgccacgccggaaagcatcgaacccggcctcctgccgctgctcacggttgggagcgggggctag

SEQ ID NO: 73445 - protein, 164 aa, Methylococcus capsulatus str. Bath
MNIYEFEVRTLEGETVRLDGYRGKVLLIVNVASRCGFTPQYAGLEALYRRHRNAGLVILGFPCNQFGGQEPGSETEIRRFCSSRYEVSFPLFAKIEVNGEHTHPLYAYLKSAQPGLLGSEAIKWNFTKFLVGRNGEVVKRYAPTATPESIEPGLLPLLTVGSGG

SEQ ID NO: 73446 - DNA, 489 bp, Azoarcus sp. EbN1
  CDS (1)..(489): transl_table=11
atgagcgtcccggcaaacgtgttcgatttcgaaaccaggcggctcaacggggcgccgatgccgctcgcggaatttcgcggcaaagtgctgctgctcgtcaataccgcgagcgaatgcggcttcacgccgcagtacgaggcactgcaggaactgcacgacaggttcgcaccgcgcggtttttcggtgatcggttttccgtgcaaccagttcggcgggcaggagccgggcggggctgaagaaatcgctgcgttctgcgcgaagaactacggcgtcagcttcccgctcagcgaaaagatcgacgtaaacggcgacaatgcgcatccactgtaccggcatctcacgtcggtcgcgcccggcattctcggcaccgaagcgatcaagtggaacttcaccaagttcctggtcgatcgcgatggtcaggtcgtcgcgcgtttcgccccggcgacgaaaccggaaagcatcgcacgcgatatcgaagcgctgctgtag

SEQ ID NO: 73447 - protein, 162 aa, Azoarcus sp. EbN1
MSVPANVFDFETRRLNGAPMPLAEFRGKVLLLVNTASECGFTPQYEALQELHDRFAPRGFSVIGFPCNQFGGQEPGGAEEIAAFCAKNYGVSFPLSEKIDVNGDNAHPLYRHLTSVAPGILGTEAIKWNFTKFLVDRDGQVVARFAPATKPESIARDIEALL

SEQ ID NO: 73448 - DNA, 486 bp, Pseudomonas syringae pv. syringae B728a
  CDS (1)..(486): transl_table=11
atgagtgaaaacctgctgagcatcccggtcacgacgatcaagggcgaacagaaaaccctcgccgatttctccggcaaggcgctgctggtggttaacaccgccagccagtgtggctttacccctcaatacaagggcctggaaaagctctggcaggactatagggatcagggcttggtggtgctgggtttcccctgtaaccagttcggcaagcaggagccaggcgacgagggggcgatttccggcttttgcgagctgaactacggcgtcagcttcccgttgttcaagaagatcgatgtgaacggcgagcaggcccatccgctgttcgtgcagctcaagcagcaggcgccggggttgttgggcacggagcgcatcaagtggaatttcaccaagttcctgattggccaggacggtcggctggtcaagcgttttgcgccattgaccaagcctgaggaactgacgggcgagatcgaggcgctgctgcgctga

SEQ ID NO: 73449 - protein, 161 aa, Pseudomonas syringae pv. syringae B728a
MSENLLSIPVTTIKGEQKTLADFSGKALLVVNTASQCGFTPQYKGLEKLWQDYRDQGLVVLGFPCNQFGKQEPGDEGAISGFCELNYGVSFPLFKKIDVNGEQAHPLFVQLKQQAPGLLGTERIKWNFTKFLIGQDGRLVKRFAPLTKPEELTGEIEALLR

SEQ ID NO: 73450 - DNA, 570 bp, Pseudomonas syringae pv. phaseolicola 1448A
  CDS (1)..(570): transl_table=11
ttggcgtgcgccgcacgccgttgcaggctaacgtcagtgctcacattccgatccagccaccgcctggtcttgaggcctcttttgatgagcgaaaacctgctgagtatcccggtcactacgatcaagggagaacagaaaaccctcgccgactacgctggcaaggcggtgctggtggtcaatacagccagcaaatgcggctttaccccgcaatataaaggcctggaaaaactctggctggactacaaggataaagggctggtagtgctgggcttcccttgcaatcagttcggcaagcaggagccgggtgacgagggcgcgatttccgggttttgcgaactgaactatggggtcagcttcccgctgttcaagaagatcgacgtgaacggcgctcaggcccatcccttgttcgttcagctcaagcagcaggcaccggggttgctggggaccgagcgaatcaagtggaatttcaccaagttcctgattggcaggaatggcgcgctggtcaagcgtttcgccccgttgaccaagcccgaggaactgaccggggaaatcgaagcgctgctgcgctaa

SEQ ID NO: 73451 - protein, 189 aa, Pseudomonas syringae pv. phaseolicola 1448A
MACAARRCRLTSVLTFRSSHRLVLRPLLMSENLLSIPVTTIKGEQKTLADYAGKAVLVVNTASKCGFTPQYKGLEKLWLDYKDKGLVVLGFPCNQFGKQEPGDEGAISGFCELNYGVSFPLFKKIDVNGAQAHPLFVQLKQQAPGLLGTERIKWNFTKFLIGRNGALVKRFAPLTKPEELTGEIEALLR

SEQ ID NO: 73452 - DNA, 483 bp, Dechloromonas aromatica RCB
  CDS (1)..(483): transl_table=11
atgagccaaactctctacgacttcagcgcccagcgcctgaacggtgaaccgcaggacttcgaagcttaccgcggcaaggtactgctgattgtgaacaccgccagtgaatgcggcttcaccccgcaatataccggccttgaagagctctactggatgttcaaggaccgaggattcgtcgtccttggcttcccctgtaaccagtttggcggacaggaacccggtgacgccgaggccattggccagttctgccagacccgtttcgatgtcacctttccgctcttcgccaaggtcgatgtcaacggcgacagcgcccatccgctctacacttggctcaagcacgaagcagccggcgtccttggcaccgaggccatcaaatggaatttcaccaagttcctgatcgaccgtgagggtaaggtcgtccaccgctacgccccggccacccggccggacgaactggtggaagcggtcgaagcccaactgtaa

SEQ ID NO: 73453 - protein, 160 aa, Dechloromonas aromatica RCB
MSQTLYDFSAQRLNGEPQDFEAYRGKVLLIVNTASECGFTPQYTGLEELYWMFKDRGFVVLGFPCNQFGGQEPGDAEAIGQFCQTRFDVTFPLFAKVDVNGDSAHPLYTWLKHEAAGVLGTEAIKWNFTKFLIDREGKVVHRYAPATRPDELVEAVEAQL

SEQ ID NO: 73454 - DNA, 477 bp, Prochlorococcus marinus str. NATL2A
  CDS (1)..(477): transl_table=11
atgtccgtaaatatcagcaaagtggaggtcttctcttttaaaaatcagaaaataacttttgatcattacaaaggaaatgtcttattaattgtcaatgtcgcaagcaagtgcggatttactaagcaatataaagctcttcagtatcttcaggataaatatgaatccaaaggcttcaaagttttaggctttccttgcaatgactttggaaaccaagagcctgggcaattggaagaaataaaagagttctgttcaacaacttatggagtcaatttccaacttttccaaaaagttcatgccaaaggcaaaacaacagaaccatttactaccttgaatcaagtaagtccatctggagacgttgaatggaactttgagaaatttctcattaatactgagggagatgcggtcgcaagatttaaaagttcaatagaacctgacagtcctgaagtcacacaagcaatagaaaaattactcgattaa

SEQ ID NO: 73455 - protein, 158 aa, Prochlorococcus marinus str. NATL2A
MSVNISKVEVFSFKNQKITFDHYKGNVLLIVNVASKCGFTKQYKALQYLQDKYESKGFKVLGFPCNDFGNQEPGQLEEIKEFCSTTYGVNFQLFQKVHAKGKTTEPFTTLNQVSPSGDVEWNFEKFLINTEGDAVARFKSSIEPDSPEVTQAIEKLLD

SEQ ID NO: 73456 - DNA, 486 bp, Pseudomonas fluorescens PfO-1
  CDS (1)..(486): transl_table=11
atgagcgataacctgctgaatattccgtgcaccaccatcaagggcgagcagaagaccctcgccgatttcgccggcaaggcggtgctggtggttaataccgccagcaaatgcggtttcactccgcagtacaaaggccttgaggaactgtggcagacctacaaggatcagggcctggtggtgctgggttttccgtgcaatcagttcggcaagcaggagccgggcaacgaaggcgccatcagcgagttctgcgagctgaactacggtgtcagcttcccgctgttcaagaagatcgaagtcaacggtaccggcgcgcacccgctgttcgtgcagttgaagaagcgcgcgccgggcgtgctgggctcccagggcatcaagtggaacttcaccaaattcctgatcggcaaggacggccagttggtcaagcgcttcgccccggccaccaagccgcaggatctgagccgtgagatcgaagccctgctcaaatga

SEQ ID NO: 73457 - protein, 161 aa, Pseudomonas fluorescens PfO-1
MSDNLLNIPCTTIKGEQKTLADFAGKAVLVVNTASKCGFTPQYKGLEELWQTYKDQGLVVLGFPCNQFGKQEPGNEGAISEFCELNYGVSFPLFKKIEVNGTGAHPLFVQLKKRAPGVLGSQGIKWNFTKFLIGKDGQLVKRFAPATKPQDLSREIEALLK

SEQ ID NO: 73458 - DNA, 504 bp, Synechococcus elongatus PCC 7942
  CDS (1)..(504): transl_table=11
atgaagattcgtaacgtatccatggctcctcaagtcactgacatcgccgtcacaaccatcgacggtgcagcgaaaagcctcagcgactacgccggtcaggtgttgttgattgtcaacgtggcctcctactgcggttacacctcgcagtacagcggcttggaagccctctatcgccaataccgcgatcgcggtctgcaggtcttggcgttcccctgcaatgactttggggcccaggaaccgggcagcaatgaggagatcaaaaccttctgctccactcgtttcgatgtcagcttcgaactgttcgataaagtccatgccaaaggcgcggatcaacatcctctttacgcagcgctgacgcaaacggaccctgccggtgacgtagcttggaactttgagaaatttttggtcggcaaggatggcactgtcttagcccgcttcaagagtggcgttgcccccaacgatgccagcctgattcaagcgatcgaagcagcactcgctgcctaa

SEQ ID NO: 73459 - protein, 167 aa, Synechococcus elongatus PCC 7942
MKIRNVSMAPQVTDIAVTTIDGAAKSLSDYAGQVLLIVNVASYCGYTSQYSGLEALYRQYRDRGLQVLAFPCNDFGAQEPGSNEEIKTFCSTRFDVSFELFDKVHAKGADQHPLYAALTQTDPAGDVAWNFEKFLVGKDGTVLARFKSGVAPNDASLIQAIEAALAA

SEQ ID NO: 73460 - DNA, 507 bp, Rhodospirillum rubrum ATCC 11170
  CDS (1)..(507): transl_table=11
atgagcccgctttacgacatcgaagtcaccaccctcgacggcgctccccaaaccctggccgactatgccggcaaggttctgctgatcgtcaatgtcgccagcaaatgcggcttcaccccccagtacaagggactggaagccttgcagcggcgctatcgggaccgggggttttgcgtgctcggcttcccctgcaaccagttcggccatcaggaacccggcgacgccggggagatcaaatccttctgcacgctgacctatgacgtcagcttcccgatgttcgccaagatcgacgtcaacggccccgacgcccatccgctctatcgcctgctcaaggcggaggccaaggggctgctgggcagcgaggcgatcaaatggaacttcaccaagttcctggtcagcgccgatggcgagaccatctcgcgcttcgcccccaccgacacccccgaaagcctgcgcgcccgcatcgaagcgctgctgcctgccgctcagggccccctaggagcttaa

SEQ ID NO: 73461 - protein, 168 aa, Rhodospirillum rubrum ATCC 11170
MSPLYDIEVTTLDGAPQTLADYAGKVLLIVNVASKCGFTPQYKGLEALQRRYRDRGFCVLGFPCNQFGHQEPGDAGEIKSFCTLTYDVSFPMFAKIDVNGPDAHPLYRLLKAEAKGLLGSEAIKWNFTKFLVSADGETISRFAPTDTPESLRARIEALLPAAQGPLGA

SEQ ID NO: 73462 - DNA, 537 bp, Frankia sp. CcI3
  CDS (1)..(537): transl_table=11
atgactgtccatgacttcaccgtcgatgccgcggacggaacctcccgctcgctcggcgactacgccggccagacgttgctgattgtcaacgttgccagcaaatgcggtctgacgccgcagtacgaggggctggagtccctgtaccgggatctgcacggccgcggcctggagatcctcggcttcccgtgtaaccagttcggcgggcaggagccgggcaccgatgccgagatccaggagttctgcgccacgaagttcgacgtcaccttcccggtcctggggaagatcgaggtgaacggacccgacgcggccccgctgtacacccacctgcgttccgaggcgcccggtgacttcgggcccgatgccggtttcctctacgagcacatcaagaagacccggccggaagcgatcggcaccgacgagatcaagtggaacttcaccaagttccttgtcgacccggacggaaaagtggtccgccggtacgagccgactgtcacccccgaggagatccgcaaggacctcgaggccaccctggcctga

SEQ ID NO: 73463 - protein, 178 aa, Frankia sp. CcI3
MTVHDFTVDAADGTSRSLGDYAGQTLLIVNVASKCGLTPQYEGLESLYRDLHGRGLEILGFPCNQFGGQEPGTDAEIQEFCATKFDVTFPVLGKIEVNGPDAAPLYTHLRSEAPGDFGPDAGFLYEHIKKTRPEAIGTDEIKWNFTKFLVDPDGKVVRRYEPTVTPEEIRKDLEATLA

SEQ ID NO: 73464 - DNA, 489 bp, Novosphingobium aromaticivorans DSM 12444
  CDS (1)..(489): transl_table=11
atgagcgggcctcgcaccattgccgatttcaaggcgcgcaagcccaacggcgaggaaatcgacctggccgagaagaagggcaaggtcctgctcgtggtgaacaccgcatccaagtgcgggttcaccccgcagtacgatggccttgaggccctttggcgccaatatggcgagcgcggatttgaagttctcgcctttccctgcaaccagttcggcaagcaggaacccggcacggcggatgagatcgaaagcttctgcaaggtcaacttcggcctcagctttccgctcatggccaagatcgaggtcaatggcgacaacgccgatccgctttacgactggctgaagagcgaggctccgggcgtgctcggcaccaagtcgatcaagtggaacttcaccaagttcctgatcgaccgcgaaggccgcgtggtccgccgctatgcccccacggacaagccggaaagcatcgccggggacatcgaaaggctgctctga

SEQ ID NO: 73465 - protein, 162 aa, Novosphingobium aromaticivorans DSM 12444
MSGPRTIADFKARKPNGEEIDLAEKKGKVLLVVNTASKCGFTPQYDGLEALWRQYGERGFEVLAFPCNQFGKQEPGTADEIESFCKVNFGLSFPLMAKIEVNGDNADPLYDWLKSEAPGVLGTKSIKWNFTKFLIDREGRVVRRYAPTDKPESIAGDIERLL

SEQ ID NO: 73466 - DNA, 480 bp, Saccharophagus degradans 2-40
  CDS (1)..(480): transl_table=11
atggcttcaatttacgatataaacatacagagcctacaaggccaattgataggttttagcgactttaagggcaaggccctgttaattgttaatacggcaagcaagtgcggctttacaccgcagtacgaaggtttacagcagcttcaccagcaatacgccagcgaagggctagtgataataggttgcccgtgtaatcagtttggcaagcaagaaccgggggatgccaaggctatttctgaagggtgcttaattaactacggggtggattttctaattaccgaaaaaatacacgtgaacggtgccaatactcacccgttgtataggtatttaaaaaccgcgctaccgggctttatgggcaacaatataaagtggaactttaccaagtttttaattggtaaagacggcacgcccattaaacgcttcgcgccatttactaagcctgcctctatggaaggggcggtaaaaaaagcgttaggttag

SEQ ID NO: 73467 - protein, 159 aa, Saccharophagus degradans 2-40
MASIYDINIQSLQGQLIGFSDFKGKALLIVNTASKCGFTPQYEGLQQLHQQYASEGLVIIGCPCNQFGKQEPGDAKAISEGCLINYGVDFLITEKIHVNGANTHPLYRYLKTALPGFMGNNIKWNFTKFLIGKDGTPIKRFAPFTKPASMEGAVKKALG

SEQ ID NO: 73468 - DNA, 495 bp, Ralstonia metallidurans CH34
  CDS (1)..(495): transl_table=11
atgagcaatgtgtaccagttcgaagccaattcgctgtccggccagcctcagccgctggccgactaccgcggcaaggtgctgctgatcgtcaacaccgcgagcgaatgtggcttcacgccgcaatacgcgggcctgcagacgctgcaggcgtcctatcaggcgcgcggcttcgacgtgcttggctttccctgcaaccagtttggcaagcaggagcctggtgacgccgaacaaattggcgcgttttgcgaatcccgatttcacgtcacgttcccgatgttcgagaaaatcgacgtgaacggcgcggacgcgcatccgctctacaagtggctgacgtcggagaagcgggggttcctcggtacccaggcgatcaagtggaatttcaccaagttcctgctgcgccgcgacggtaccgtcttcaagcgttatgcgtccacaaccaagcccgaggaaatccgcgcagacatcgagtcgctgctcgccgaacaaccggcgtga

SEQ ID NO: 73469 - protein, 164 aa, Ralstonia metallidurans CH34
MSNVYQFEANSLSGQPQPLADYRGKVLLIVNTASECGFTPQYAGLQTLQASYQARGFDVLGFPCNQFGKQEPGDAEQIGAFCESRFHVTFPMFEKIDVNGADAHPLYKWLTSEKRGFLGTQAIKWNFTKFLLRRDGTVFKRYASTTKPEEIRADIESLLAEQPA

SEQ ID NO: 73470 - DNA, 480 bp, Acidobacteria bacterium Ellin345
  CDS (1)..(480): transl_table=11
atgggcctgtacgatttgtctgccacgctgaataacggcaaggaaaagaagctctccgactacaagggcgaagtgttgctcgttgtgaacacggctagcgaatgcggtttcacgccgcaatacaagggtctgcaagaactctacgagaagtataagaaccagggcttcgagatcctcggcttcccctgcgaccagttcggccaccaggagccgggcagcgacaaagagatcgcttctttctgcgaggtcaactacggcgtaacgttcccgatcttctcgaagatcgaagtgaacggggcgaacgagcatcccgtgtacaagttccttaagtccgaaaaaggcggcctgctcaccaacaacatcaagtggaacttcaccaagttcttggtagataagcagggcaacgtggtggaccgctacgctccgcagacgatcccggcgcgcatcgcggcggacgtggagaagctgttaagcacctag

SEQ ID NO: 73471 - protein, 159 aa, Acidobacteria bacterium Ellin345
MGLYDLSATLNNGKEKKLSDYKGEVLLVVNTASECGFTPQYKGLQELYEKYKNQGFEILGFPCDQFGHQEPGSDKEIASFCEVNYGVTFPIFSKIEVNGANEHPVYKFLKSEKGGLLTNNIKWNFTKFLVDKQGNVVDRYAPQTIPARIAADVEKLLST

SEQ ID NO: 73472 - DNA, 477 bp, Clostridium perfringens ATCC 13124
  CDS (1)..(477): transl_table=11
atggaaatttatgatattagcgtaaaagatattaatggagaaaatgtaagtttagaaagatatagaggaaaggttcttttaatagttaatactgctagtaaatgtggttttacaaaacagtttgatggattagaggagttatatgaaaaatataaggatgaaggttttgaggttttaggattcccttgtaatcaatttaaggaacaagatccaggaagtaattcagaaataatgaacttttgtaaattaaattttggtgtaacattccctatgtttgaaaaaattgatgttaatggagaaaatgaatctctattatattcatacttaaaagaacagaaaagtggaatgtttggaagtaaaattaagtggaattttactaagtttttagtggatagagaaggaaatgtaataaagagattttcaccacaaactactccaaaatcaatagaaaaagatattgaggaacttttagattaa

SEQ ID NO: 73473 - protein, 158 aa, Clostridium perfringens ATCC 13124
MEIYDISVKDINGENVSLERYRGKVLLIVNTASKCGFTKQFDGLEELYEKYKDEGFEVLGFPCNQFKEQDPGSNSEIMNFCKLNFGVTFPMFEKIDVNGENESLLYSYLKEQKSGMFGSKIKWNFTKFLVDREGNVIKRFSPQTTPKSIEKDIEELLD

SEQ ID NO: 73474 - DNA, 486 bp, Shewanella sp. MR-4
  CDS (1)..(486): transl_table=11
atgacatcgactatctatagccatagcgcaaacgacattcaaggtaatccaacggcactggcgcaatatcaaggcaaagtgatcttaattgtgaacaccgccagtgagtgcggttttacaccacagtacaagggcttagaagcgctctatcaaaaatataaagcgcagggattggtggttttaggcttcccatgcaatcagtttggcgcccaagaaaaagccgatgagaaaggtattcaaagtttttgtgaactcaactttggcgtgagctttccactgttttcgaaaatcgaggtaaacggtgagcacactcaccctttataccagtacctcaaaaaagcggctccaggcgtattaggcacggaacgcattaagtggaatttcactaaattcttagttaatcgtcagggcgaagtggtcgctcgctttgcgccaaccacaaaaccagaggccattagtgacaagatagaagcgcttttaaaataa

SEQ ID NO: 73475 - protein, 161 aa, Shewanella sp. MR-4
MTSTIYSHSANDIQGNPTALAQYQGKVILIVNTASECGFTPQYKGLEALYQKYKAQGLVVLGFPCNQFGAQEKADEKGIQSFCELNFGVSFPLFSKIEVNGEHTHPLYQYLKKAAPGVLGTERIKWNFTKFLVNRQGEVVARFAPTTKPEAISDKIEALLK

SEQ ID NO: 73476 - DNA, 486 bp, Pseudomonas aeruginosa UCBPP-PA14
  CDS (1)..(486): transl_table=11
atgagcgattctctgctgagcattccctgcaccaccatcaagggcgaacagaagaccctggccgatttcggcggcaaggcgctgctggtggtgaacaccgccagcaagtgcggcttcaccccgcagtaccaggggctggaggccttgtgggaaaaataccgtgagcgcggactggtggtgctcggcttcccctgcaaccagttcggcaagcaggaaccgggcgacgagggcgagatttcgcagttctgcgagctgaactacggggtgagcttcccgctgttcaggaagatcgaggtcaacggcgccggcgcccacccgttgttcgtcagcctgaagaagcgcgcgctgggcctgctcggcagccagggcatcaagtggaacttcaccaagttcctgatcggccgcgatggccaggtggtgaagcgctacgcgccgaccaccaagccggaggagctgagttcggcgatcgaggcgctgcttgaatga

SEQ ID NO: 73477 - protein, 161 aa, Pseudomonas aeruginosa UCBPP-PA14
MSDSLLSIPCTTIKGEQKTLADFGGKALLVVNTASKCGFTPQYQGLEALWEKYRERGLVVLGFPCNQFGKQEPGDEGEISQFCELNYGVSFPLFRKIEVNGAGAHPLFVSLKKRALGLLGSQGIKWNFTKFLIGRDGQVVKRYAPTTKPEELSSAIEALLE

SEQ ID NO: 73478 - DNA, 486 bp, Shewanella sp. ANA-3
  CDS (1)..(486): transl_table=11
atgacatcgactatctatagccatagcgcaaacgacattcaaggcaatccaacggcactggcacaatatcaaggcaaagtgatcttaattgtgaataccgccagtgagtgcggttttacaccacagtacaagggcttagaagcgctctatcaaaaatataaatcacagggattggtggttttaggcttcccatgcaatcagtttggtgcccaagaaaaagctgatgagaaaggcatccaaagtttttgtgaactcaactttggcgtgagttttccgctgttttcgaaaatagaggtaaacggtgagcacactcaccctttatatcagtacctaaaaaaagccgcgccgggcgtattaggcacagaacgcattaagtggaatttcactaaattcttaattaatcgtcagggcgaagtggtcgctcgctttgcgccaaccacaaaaccagaggccattagtgacaagatagaagcgcttttaaaataa

SEQ ID NO: 73479 - protein, 161 aa, Shewanella sp. ANA-3
MTSTIYSHSANDIQGNPTALAQYQGKVILIVNTASECGFTPQYKGLEALYQKYKSQGLVVLGFPCNQFGAQEKADEKGIQSFCELNFGVSFPLFSKIEVNGEHTHPLYQYLKKAAPGVLGTERIKWNFTKFLINRQGEVVARFAPTTKPEAISDKIEALLK

SEQ ID NO: 73480 - DNA, 489 bp, Mycobacterium avium 104
  CDS (1)..(489): transl_table=11
gtgactgtgaaaaacatcccgctgaccacactcgacggccggcccaccacgctggccgaattgtccgatggcgcaacgctggtcgtcaacgtcgcctccaaatgcgggctgactccgcaatacacggccctggagaaactggccgaggactacgccgcgcgcggcctgaccgtcgtgggggtgccgtgcaaccagttcatgggtcaggagcccggcacgcccgaggagatccgggagttctgctcgaccaactacggtgtgacgttcccgctgctggccaagaccgacgtcaacggcgacgaccggcacccgctgtacgccgagctgaccaaggccgccgacgccgacggccacgccggggacatccagtggaacttcgagaagttcctcatctcccccgacggtgaggtggttcgccgcttccggccccgcaccgaacccgacgcgcccgaggtgatcagcgccatcgaggccgtgctgccccgctag

SEQ ID NO: 73481 - protein, 162 aa, Mycobacterium avium 104
MTVKNIPLTTLDGRPTTLAELSDGATLVVNVASKCGLTPQYTALEKLAEDYAARGLTVVGVPCNQFMGQEPGTPEEIREFCSTNYGVTFPLLAKTDVNGDDRHPLYAELTKAADADGHAGDIQWNFEKFLISPDGEVVRRFRPRTEPDAPEVISAIEAVLPR

SEQ ID NO: 73482 - DNA, 489 bp, Nocardioides sp. JS614
  CDS (1)..(489): transl_table=11
atgagcatcctcgacgccaagatcgcccgcctggacgggaccccgagcacgctgggcgagatcaccggcggccggcccgcgctgttggtcaacgtcgccagcaagtgcgggctgaccccgcagtacgccgggctcgaggagctccacgagcggctcgcggaccgcggcttcacggtggtcgggctgccgtgcaaccagttccgcgggcaggagccggggaccgcggacgagatcgccgagttctgctccgcgacgtacggcgtcaccttcccgatgaccgagaagatcgacgtcaacggcccggaccgccacgagatctaccggaccctcgtcgacaccccgaacgagtccggcgagagcggcgacatcacgtggaacttcgagaagttcctcgtcgacgcctccggcgcggtcctcgcccggttcagccccggcgtcgagcccggcgacccccgcctggtcgccgccgtcgagtcccaggtcggctga

SEQ ID NO: 73483 - protein, 162 aa, Nocardioides sp. JS614
MSILDAKIARLDGTPSTLGEITGGRPALLVNVASKCGLTPQYAGLEELHERLADRGFTVVGLPCNQFRGQEPGTADEIAEFCSATYGVTFPMTEKIDVNGPDRHEIYRTLVDTPNESGESGDITWNFEKFLVDASGAVLARFSPGVEPGDPRLVAAVESQVG

SEQ ID NO: 73484 - DNA, 492 bp, Azoarcus sp. BH72
  CDS (1)..(492): transl_table=11
atgacgaccccgctctacgacatccccctgcaacgcttggacggcagcgccgccacgctcgccgactacgccggcaaggtgctgctgatcgtcaataccgccagccagtgcggcttcacgccgcagtacgcggggctggagatgctctaccgcaactacaaggaccgcggcctcgtggtgctcggctttccgtgcaaccagttcggcgcacaggagccgggcgacgccagcgagatcgccgacttctgcgaacgcaactacggcgtcagcttcccgatgttcgccaagctcgacgtcaatggcgacaacgcccatcccctgtacgtggcgctgaagcagcaagcgccgggcgtgctgggcaccgaagcgatcaagtggaacttcaccaagttcctcgtcgaccgccacggcgaggtgatcgaacgctacgcccccaccaccacgccgcaggatctcgcgggcgatatcgaagcccagctcgcgcgggcctga

SEQ ID NO: 73485 - protein, 163 aa, Azoarcus sp. BH72
MTTPLYDIPLQRLDGSAATLADYAGKVLLIVNTASQCGFTPQYAGLEMLYRNYKDRGLVVLGFPCNQFGAQEPGDASEIADFCERNYGVSFPMFAKLDVNGDNAHPLYVALKQQAPGVLGTEAIKWNFTKFLVDRHGEVIERYAPTTTPQDLAGDIEAQLARA

SEQ ID NO: 73486 - DNA, 486 bp, Acidovorax sp. JS42
  CDS (1)..(486): transl_table=11
atgaccactgcgtatgacttcgacgcgacatgcatcgacggcgcaccccagccactgagcgacttccgcggtcaggtgctgctcatcgtcaacaccgccagcgcctgcggcttcacgccgcagttcaccgggctgcaggcgctgcacgaacgctatgggccgcgcgggctggcagtgctcggctttccgtgcaaccagttcggccaccaggacccgggcagcaacgacgccatcgcgggcttttgccagcgcaactatggcgtgcagtttcccatgatgtccaagatcgacgtcaacggcagcgacgcgcacccgctgtaccgctggctcaccggcgaagcgcccggcgtgctgggcaccaaggcgatcaagtggaacttcaccaagttcctggtcggccgggacggccaggtgatccgccgctacgcgccgcaggaggctcccgagaagctcacggtcgacatcgaggcagcgctggcggcctga

SEQ ID NO: 73487 - protein, 161 aa, Acidovorax sp. JS42
MTTAYDFDATCIDGAPQPLSDFRGQVLLIVNTASACGFTPQFTGLQALHERYGPRGLAVLGFPCNQFGHQDPGSNDAIAGFCQRNYGVQFPMMSKIDVNGSDAHPLYRWLTGEAPGVLGTKAIKWNFTKFLVGRDGQVIRRYAPQEAPEKLTVDIEAALAA

SEQ ID NO: 73488 - DNA, 486 bp, Nostoc punctiforme PCC 73102
  CDS (1)..(486): transl_table=11
atgagtaacacaatttcggatatcgcagtcaagaccatcaacggtgaagataagcaattaaaggattacaccggaaaggtacttttaattgtgaatgtagcttcctactgcggttatacttctcaatacgaggggctagaaaagttgaaccagaagtatagggaacaaggattacgtattttggggttcccctgtaacgattttggagcgcaggaaccaggaagtaatgaagaaattgtgcagttctgcacgagtaaatatagtgttacctttgaactatttgataaaatccatgccaaaggtccacagcagcatccactttatgagcgacttaccaaagctgttgagccaacggggactattgcttggaactttgaaaaatttttagttaataaaaaaggtgaagtgacagctagatttaatagtagcgtacagcccaattcaccagagttaattgccataattgagaaagaattagcaaaatag

SEQ ID NO: 73489 - protein, 161 aa, Nostoc punctiforme PCC 73102
MSNTISDIAVKTINGEDKQLKDYTGKVLLIVNVASYCGYTSQYEGLEKLNQKYREQGLRILGFPCNDFGAQEPGSNEEIVQFCTSKYSVTFELFDKIHAKGPQQHPLYERLTKAVEPTGTIAWNFEKFLVNKKGEVTARFNSSVQPNSPELIAIIEKELAK

SEQ ID NO: 73490 - DNA, 552 bp, Fusobacterium nucleatum subsp. vincentii ATCC 49256
  CDS (1)..(552): transl_table=11
atgaaaatttatgattttagtgtaaaaaatagaaaagatgaagacatttctttaaaaagttacaaaggaaaagtcttattgattgtaaatactgcaactagatgtggatttacaccacaatatgatgaattggaaaatttatatgaaaagtataacaaggaaggttttgaagttttagattttccttgtaatcaatttggtaatcaagcaccagaaagtgatgaagaaattcatactttttgccaattaaattacaaagttaaatttgaccaatttgcaaaagttgaagttaatggagaaaatgctttaccacttttccaatacttaaaagaacaaaaaggattttctggatttgaccctaagcataaactaacttctgtattgacagaaatgctttcaaaaaatgatccagattttgctaaaaaatctgatataaaatggaattttactaaatttttagtggataagtctggaaatgttgtagcaagatttgagcctacaacaagtgtaaaagtgatagaacaagagataaaaaaattattagaaaaataa

SEQ ID NO: 73491 - protein, 183 aa, Fusobacterium nucleatum subsp. vincentii ATCC 49256
MKIYDFSVKNRKDEDISLKSYKGKVLLIVNTATRCGFTPQYDELENLYEKYNKEGFEVLDFPCNQFGNQAPESDEEIHTFCQLNYKVKFDQFAKVEVNGENALPLFQYLKEQKGFSGFDPKHKLTSVLTEMLSKNDPDFAKKSDIKWNFTKFLVDKSGNVVARFEPTTSVKVIEQEIKKLLEK

SEQ ID NO: 73492 - DNA, 465 bp, Crocosphaera watsonii WH 8501
  CDS (1)..(465): transl_table=11
atgcccttaccaaccagtctcgttacacttgagggaacagcactccctctcagcgaattagagaataaagtgattctttttgtcaatgttgccagtaaatgcggtttaacccctcaatattccggtttagtccaactggacaaaaaatatggtgaacgtggatttaaggtggttgctgttccttgcaatcagttcggcgaacaagaaccaggaactcctgctgagattaaagagtttaccagtaccaagtatgatgttgaattcaccttactggaaaagcaagatgtaaatgggagtaatcgtagtcccctttatcagtttctagtcaaggatggtgaagatattgcctggaactttggcaagtttttggtaggtcgtgatggtgaagtggtagcacgttttgaaccagctaccgctcctgatgatgctcaacttgaagctgctattgacaaggcattgggttaa

SEQ ID NO: 73493 - protein, 154 aa, Crocosphaera watsonii WH 8501
MPLPTSLVTLEGTALPLSELENKVILFVNVASKCGLTPQYSGLVQLDKKYGERGFKVVAVPCNQFGEQEPGTPAEIKEFTSTKYDVEFTLLEKQDVNGSNRSPLYQFLVKDGEDIAWNFGKFLVGRDGEVVARFEPATAPDDAQLEAAIDKALG

SEQ ID NO: 73494 - DNA, 480 bp, Exiguobacterium sibiricum 255-15
  CDS (1)..(480): transl_table=11
atgttacaggagcagacatttcaacggatcgacggtacggaagcgacgttaaaagattatccgggacaagcttggctgatcgtcaatacagcgagtaaatgcggcttgacaccccagtttgaaggactggaacaacttcatcaggactaccggaaacaaggactcgtcgtcctcggtttcccctgtaaccagttcgccggacaggatccgggaacagacgaagaaatccagagtttttgccaaatgaactacggcgtgacgttccctgtcttctcaaaaatcgaagtcaacgggaaagggacacatccgttgttcgcagaacttaaagcacttgccccgaacacgacgggcgagcaggacgtcgaatggaacttcacgaaatttttagtgacgcgtgacggggaagtcacacgattcgcaccaaaaactaatccgacagatcttgtcgcagctatcgaacggattgtcgttccggtttaa

SEQ ID NO: 73495 - protein, 159 aa, Exiguobacterium sibiricum 255-15
MLQEQTFQRIDGTEATLKDYPGQAWLIVNTASKCGLTPQFEGLEQLHQDYRKQGLVVLGFPCNQFAGQDPGTDEEIQSFCQMNYGVTFPVFSKIEVNGKGTHPLFAELKALAPNTTGEQDVEWNFTKFLVTRDGEVTRFAPKTNPTDLVAAIERIVVPV

SEQ ID NO: 73496 - DNA, 507 bp, Xylella fastidiosa Ann-1
  CDS (1)..(507): transl_table=11
atgaccagcatctacacattcactttcacacgtcttgacggacggcctcaagcattagcagattggcgtggacaagtactgttattggtcaacgttgcgtcgcattgcggctttactccacaatatgctgggttggagatgctatggcaacgttaccgcgatgcaggtttgattgttattggctttccatgcgatcaattcgctgggcaggaacctggggatgaggccaaaattgctgagttttgcacgctgacctatggggtggatttcccaatggcggcgaagatcaaagtcaatggagcagatgcacatccactgtggcaatggctcaagcaccgccgccgtggtttgttcggtgtggccgcgattaagtggaacttcactaaatttctgatcggacgcaacgggcaacccattgcccgttattcgccaatcaagtcaccggagcaattggaggtgcatatcgttcgtgccttaggggaggaagggggagggaatactcattga

SEQ ID NO: 73497 - protein, 168 aa, Xylella fastidiosa Ann-1
MTSIYTFTFTRLDGRPQALADWRGQVLLLVNVASHCGFTPQYAGLEMLWQRYRDAGLIVIGFPCDQFAGQEPGDEAKIAEFCTLTYGVDFPMAAKIKVNGADAHPLWQWLKHRRRGLFGVAAIKWNFTKFLIGRNGQPIARYSPIKSPEQLEVHIVRALGEEGGGNTH

SEQ ID NO: 73498 - DNA, 480 bp, Synechococcus sp. WH 5701
  CDS (1)..(480): transl_table=11
atggctgtgaatgtgtcggatgtggtggttcgcggcgccacgggtggtgaacaacgtctgggcgactttgcgggccaggtgctgttgatcgtgaacgtggccagccgttgcggcttcacccgccagtacgccggactgcagaagctgcaggacagctacggcccccgtggcctgcaggtgctgggcttcccctgcaacgatttcggcgctcaggaaccgggcacgctgcccgagatccagcagttctgcgccaccacctacggcgcctccttcaccctcttcgacaaggtgcacgccaagggcgtcaagaccgctccttacgacctgctcacaaccgtggagccggcaggggatgtggagtggaacttcgagaagttcctggtgggcaaggacggcaccgtgctggcccgctacaagagcgccgtcgaacccgatggcgccgaactgaccgctgcgatcgaagcggccctggctgcctga

SEQ ID NO: 73499 - protein, 159 aa, Synechococcus sp. WH 5701
MAVNVSDVVVRGATGGEQRLGDFAGQVLLIVNVASRCGFTRQYAGLQKLQDSYGPRGLQVLGFPCNDFGAQEPGTLPEIQQFCATTYGASFTLFDKVHAKGVKTAPYDLLTTVEPAGDVEWNFEKFLVGKDGTVLARYKSAVEPDGAELTAAIEAALAA

SEQ ID NO: 73500 - DNA, 480 bp, Pseudoalteromonas tunicata D2
  CDS (1)..(480): transl_table=11
atggcgtcaatttttgactttactgccccattaacaaacggcgaacactgtgatttggctcaatttaagggaaaaccactattaattgttaacacagccagtaaatgtgaattaactcctcaatattttgcattagagcaactttatcaaaaatataaagatcaaggtttcacagtattggcatttccctgtaatcagtttgagaacaaagaacctgccgaaaacgatgagataaaacatttttgtgagctacaatttggtgtcagcttcccaatttttgcgaaagtggctgtaaatggtcccgacgctttgccgctgtttaattttctaaaaaccaattcaagaggattaatgcaagcgcgggcaataaaatggaatttcaccaagtttctgattaaccgcaccggtcaagttgttgcacgttatgcaccacgcactaaacccgatgcgataagctcagtcatagagagtattttataa

SEQ ID NO: 73501 - protein, 159 aa, Pseudoalteromonas tunicata D2
MASIFDFTAPLTNGEHCDLAQFKGKPLLIVNTASKCELTPQYFALEQLYQKYKDQGFTVLAFPCNQFENKEPAENDEIKHFCELQFGVSFPIFAKVAVNGPDALPLFNFLKTNSRGLMQARAIKWNFTKFLINRTGQVVARYAPRTKPDAISSVIESIL

SEQ ID NO: 73502 - DNA, 480 bp, Oceanobacter sp. RED65
  CDS (1)..(480): transl_table=11
atgagcgtatacgatttcaaagcgacggatatcacaggtcaagaacgtgaactgagtgagttcaaggggaaaccgctattgattgtgaatacagcaagcaagtgcggtttaacacctcagtttgacggcctagaagcgctatataagcaatataaggatcaaggctttgcgatcttaggttttccatgcaaccaatttgcagaacaggataagggcagcgacagtgaaatcgctggtttttgtatgaaaaattatggcgttagctttcctatgttcagtaagatcgaggtgaatggcgacaatgctcatcctttataccgttatcttaaggatcaagcgccaggtttcttgggtagtaaaaagatcaaatggaacttcaccaagtttttgattaataaagagggcaaagtggttaagcgttttgcgcctacaacaaaaccagctgctatcgagaagcatgtgaaagcgcttgttgaatag

SEQ ID NO: 73503 - protein, 159 aa, Oceanobacter sp. RED65
MSVYDFKATDITGQERELSEFKGKPLLIVNTASKCGLTPQFDGLEALYKQYKDQGFAILGFPCNQFAEQDKGSDSEIAGFCMKNYGVSFPMFSKIEVNGDNAHPLYRYLKDQAPGFLGSKKIKWNFTKFLINKEGKVVKRFAPTTKPAAIEKHVKALVE

SEQ ID NO: 73504 - DNA, 552 bp, Alteromonadales bacterium TW-7
  CDS (1)..(552): transl_table=11
atggatagtatttatcagtttaatgcaccactttataacagtgagaatttttctttaagcgagttaaaaggcaaaaccgtactcattgtcaatacagccagtaaatgtagtttttcaatgcaattaaatgctctcgaaaagctataccaagagtacaaggatcgtggcttaacggtacttgcattcccatgtaaccagtttgggcaaaacgagccacttgataatttagctatcagagacttttaccaaatgcagtttggtgtttcgtttaaagtatttggtaaagtcatggtaaatggcccagacgctcaccctttatttagctatttaaaatgccatacccgcggtatttcacaaaaccgtgcagtaaaatggaatttcacaaagtttttaattaactcacaggggcaattagtcgcacgctatgcaccgcgtactaaacctgaaacacttaaacaggttatcgaaacacacctacagaaagccgttgaatcaagtgaaataaaagcaacacccattatgtctgctttaaatagacgcacagcgctgtaa

SEQ ID NO: 73505 - protein, 183 aa, Alteromonadales bacterium TW-7
MDSIYQFNAPLYNSENFSLSELKGKTVLIVNTASKCSFSMQLNALEKLYQEYKDRGLTVLAFPCNQFGQNEPLDNLAIRDFYQMQFGVSFKVFGKVMVNGPDAHPLFSYLKCHTRGISQNRAVKWNFTKFLINSQGQLVARYAPRTKPETLKQVIETHLQKAVESSEIKATPIMSALNRRTAL

SEQ ID NO: 73506 - DNA, 486 bp, marine gamma proteobacterium HTCC2143
  CDS (1)..(486): transl_table=11
atgactacaatctacgactttgatgcagaaactattggcggccagcccgcgcctatggaaaactaccaaggtaaagtcctattaattgttaataccgccagcaaatgcggcctcacgcctcaattcaaagggcttgaaaagttgtatgaagatctcaaagatcgcggcttagaaatactcggcttcccctgtaatcagtttgccaaccaagaccctggcagcaatgaaaaaattgaggaattctgccaaatgaactatggcgtcagcttcccaatgcacgccaaaattgacgtcaatggcgcgaagactcatccgctgttcaaacacctgaaagaaaaagcaccggggtttatgggcacacgccaaataaaatggaatttcaccaaatttttagtcaatgacgaaggcgaagtcttaaagcgatttgcgcccactgatacaccggagcaaatccgatcagctattgagcaggtgttacccgagtaa

SEQ ID NO: 73507 - protein, 161 aa, marine gamma proteobacterium HTCC2143
MTTIYDFDAETIGGQPAPMENYQGKVLLIVNTASKCGLTPQFKGLEKLYEDLKDRGLEILGFPCNQFANQDPGSNEKIEEFCQMNYGVSFPMHAKIDVNGAKTHPLFKHLKEKAPGFMGTRQIKWNFTKFLVNDEGEVLKRFAPTDTPEQIRSAIEQVLPE

SEQ ID NO: 73508 - DNA, 552 bp, Escherichia coli B
  CDS (1)..(552): transl_table=11
atgcaagattccattctgacgaccgtagtgaaagatatcgacggtgaagtgaccacgctggagaagtacgccggtaatgtgctgttgattgtcaatgtcgcctcaaagtgtggcttaacgccgcaatatgagcagttggagaatattcagaaagcctgggccgatcgaggttttgtggtgctgggattcccgtgcaaccagtttctggaacaagaaccgggcagcgatgaagagattaaaacttactgtaccaccacatggggggtgacgttcccgatgttcagtaagattgaagttaatggcgaaggacgccatccgctgtatcaaaaattgattgccgcagcgccgaccgcagtcgcgccggaagagagcggattctatgcccttatggtcagcaaaggccgtgcaccgctgtacccggatgatattttatggaattttgaaaaattcctggttggcatggacggaaaagtcatccagcgtttttccccggatatgacgccggaagatcccattgtgatggaaagcattaaactggcgttggcaaaataa

SEQ ID NO: 73509 - protein, 183 aa, Escherichia coli B
MQDSILTTVVKDIDGEVTTLEKYAGNVLLIVNVASKCGLTPQYEQLENIQKAWADRGFVVLGFPCNQFLEQEPGSDEEIKTYCTTTWGVTFPMFSKIEVNGEGRHPLYQKLIAAAPTAVAPEESGFYALMVSKGRAPLYPDDILWNFEKFLVGMDGKVIQRFSPDMTPEDPIVMESIKLALAK

SEQ ID NO: 73510 - DNA, 489 bp, Pseudomonas putida GB-1
  CDS (1)..(489): transl_table=11
atggctgcatcgatgctggacatcccctgcgtgaccctcggcggtgagcacaagacgctcgcagactacccaggcaaggtgctgctggtggtcaataccgccagccagtgcggctttaccccgcagtacaagggcctggagcaactctggcaaacctaccgcgagcgcggcctggtggtgctgggctttccatgcaatcagtttggcaagcaggaaccgggcgatgcgcgtgaaatcgcgcagttttgcgagcgcaatttcggtgtgagctttccgctgtttcgcaagatcgaggtcaacggccccggcacccacccgctgtacgtcgaactcaagcagcgtgcaccgggcttgctcggctcgcagaagatcaagtggaacttcaccaagttcctgatcgaccctgccagcggtcaggtcacgcgctatgcccccaccaccaagccacaggccctggaagcggacatcgagcgcttgctcagccgttga

SEQ ID NO: 73511 - protein, 162 aa, Pseudomonas putida GB-1
MAASMLDIPCVTLGGEHKTLADYPGKVLLVVNTASQCGFTPQYKGLEQLWQTYRERGLVVLGFPCNQFGKQEPGDAREIAQFCERNFGVSFPLFRKIEVNGPGTHPLYVELKQRAPGLLGSQKIKWNFTKFLIDPASGQVTRYAPTTKPQALEADIERLLSR

SEQ ID NO: 73512 - DNA, 483 bp, Pseudomonas putida GB-1
  CDS (1)..(483): transl_table=11
atgagtgcatttcacgacctgaaactggacgcgctgaacggcggagagctgccgctcgcaccgttcaaggggcaagtggtgctggtggtcaacgttgcctccaaatgtggtctcacgccgcaatacaaggccctggaaaacctctaccaggtttacaaggacaagggcttcaacgtgcttggcctgccgtgcaaccagtttgccggccaggagccgggtagcgaaaaggaaatccaggacttctgcagcctcaactatggggtgagcttcccgctggggggcaagttggaggtcaacggcccgcagcgccattcgctgtaccgtctgctggcgggtgagggggccgagttccccggtgacatcacctggaacttcgagaagtttctggtgggcaaggatgggcgagtactggcgcgtttttcaccgcgcacggcgccggatgacccggcggtagtccaggccatagaaaaagcacttgcctga

SEQ ID NO: 73513 - protein, 160 aa, Pseudomonas putida GB-1
MSAFHDLKLDALNGGELPLAPFKGQVVLVVNVASKCGLTPQYKALENLYQVYKDKGFNVLGLPCNQFAGQEPGSEKEIQDFCSLNYGVSFPLGGKLEVNGPQRHSLYRLLAGEGAEFPGDITWNFEKFLVGKDGRVLARFSPRTAPDDPAVVQAIEKALA

SEQ ID NO: 73514 - DNA, 552 bp, Pseudomonas putida GB-1
  CDS (1)..(552): transl_table=11
atgcgtgcacattggttgacggtgccggtgctggccctgcttgccagcacatcaagctgggctgccgattgcccggcattgttgcagggtagcctgccagagttgcgcggcaaggggcaggtcgagctgtgcgagcgctttgccggcaagccgctggtggtggtgaacaccgccagctattgcggttttgccccgcaattcgaggggcttgaggcgacgtacaaggaatatcacgggcagggcctggaaatgctgggcgtgccgtccaatgacttcaagcaggaagacgccgatagcgaaaagaccgccaaggtttgctatgccaactatggcgttaccttcaccatgaccaagacgcaagctgtgcggggcaaggatgcgataccgctgtttgcggagctggccagccagagcagtgcgccgaagtggaatttctacaagtatgttgtcgatcgtaaggggaaggtgattggtaacttctccagcctgaccaaaccggatgatcctgcgttccgtgcagccatcgaaaaggccatcgcttcacagccgtag

SEQ ID NO: 73515 - protein, 183 aa, Pseudomonas putida GB-1
MRAHWLTVPVLALLASTSSWAADCPALLQGSLPELRGKGQVELCERFAGKPLVVVNTASYCGFAPQFEGLEATYKEYHGQGLEMLGVPSNDFKQEDADSEKTAKVCYANYGVTFTMTKTQAVRGKDAIPLFAELASQSSAPKWNFYKYVVDRKGKVIGNFSSLTKPDDPAFRAAIEKAIASQP

SEQ ID NO: 73516 - DNA, 483 bp, Marinobacter sp. ELB17
  CDS (1)..(483): transl_table=11
atggccggcatatacgattttgaggtagcagacattcgcggtaacgcccaaagcatggctgtttaccagggcaaagtcttgctgattgtgaacaccgccagcaaatgcggtttcacgccacagtttgagggtctgcagtcgctttatagcgacctggctgatcggggcctggaagtgctgggttttccctgcaatcagtttatgaatcaggatccaggcagcaacgacagcatcggacagttttgttcgctgaactacggagtcagctttccgatgtttgcgaaagttgaggtaaacggcgataacacacatccgctttaccgctatctaaagcatgaagcctcggggctgctggggtccaagcaagtaaagtggaactttaccaagtttctggtgaatcgcgacggcgaggtgctcaagcgctaccctcccaccaccaagcctgccgagattcgtgccgacatcgaaaaggcgctgggttag

SEQ ID NO: 73517 - protein, 160 aa, Marinobacter sp. ELB17
MAGIYDFEVADIRGNAQSMAVYQGKVLLIVNTASKCGFTPQFEGLQSLYSDLADRGLEVLGFPCNQFMNQDPGSNDSIGQFCSLNYGVSFPMFAKVEVNGDNTHPLYRYLKHEASGLLGSKQVKWNFTKFLVNRDGEVLKRYPPTTKPAEIRADIEKALG

SEQ ID NO: 73518 - DNA, 480 bp, Moritella sp. PE36
  CDS (1)..(480): transl_table=11
atgactaagctttatgatttcgaagtaactacgatcacaggtgaacaaaaaaaactcagtgattataaaggtcaagcagtgttgattgtaaatacagcgagtaaatgtggattcactaatcaatatgccgaattagaagagttacagcaaacctatgcaagtaaaggattagctattctggggttcccttgcaaccagtttaagcaacaagaaaaaggctcagatgctgatatcaacgcgttctgtcagcttaatttcggtgtcacctttgatatgtttagcaagattgatgtgaatggtgataatgcagccccactttataaatggcttaagtcagaagccactgggttgttaggtagtaaaggcattaagtggaacttcactaaatttttggttaaccgtgacggtgatgtagtcgatcgctttgcaccgacactctcgccaaaaggcatggtaaaagatattgagaaactgctgtaa

SEQ ID NO: 73519 - protein, 159 aa, Moritella sp. PE36
MTKLYDFEVTTITGEQKKLSDYKGQAVLIVNTASKCGFTNQYAELEELQQTYASKGLAILGFPCNQFKQQEKGSDADINAFCQLNFGVTFDMFSKIDVNGDNAAPLYKWLKSEATGLLGSKGIKWNFTKFLVNRDGDVVDRFAPTLSPKGMVKDIEKLL

SEQ ID NO: 73520 - DNA, 522 bp, Prunus avium
  CDS (1)..(522)
atggctagccagtctgggtctggaagtaaatctatccatgatttcactgtcaaggatgccaagggtaaagatgttgatcttagcatctacaaagggaaggtcctgttgattgtcaacgttgcatcacaatgtggcttgactaattcaaactacacagagctgagtcagttgtatgagaaatacaaaaatcaaggtttggaaatcttggcattcccatgcaatcagtttggagctcaggagccaggatcaaatgatgagattgtagagtttgcttgcactcgctttaaggctgagtatcccatctttgataaggtggatgtgaatggtgacaatgctgctcccatttacaagttcttgaagtcgagcaagggtgggctctttggtgacagcattaagtggaacttctccaaattccttgttgacaaaaaaggaatgttgttgaccgtatgccctacactactctcttacattagaagagtaagaactgtggggttgcaggcaccatctgtgataagaaactga

SEQ ID NO: 73521 - protein, 173 aa, Prunus avium
MASQSGSGSKSIHDFTVKDAKGKDVDLSIYKGKVLLIVNVASQCGLTNSNYTELSQLYEKYKNQGLEILAFPCNQFGAQEPGSNDEIVEFACTRFKAEYPIFDKVDVNGDNAAPIYKFLKSSKGGLFGDSIKWNFSKFLVDKKGMLLTVCPTLLSYIRRVRTVGLQAPSVIRN

SEQ ID NO: 73522 - DNA, 513 bp, Nelumbo nucifera
  CDS (1)..(513)
atggcaagccaatcgaagaaggagaaaggatctattcacgacttcactgtcaaggatgctaggggaaatgatgtggatcttagcatttacaagggaaaggttctgttggttgtcaatgttgcatcccagtgtggattgaccaattcgaactacacggagctgagtacgctatatgagaagtacaaagatcaaggtctggaaatattggctttcccatgcaatcagtttggtcatcaggagccagggactaatgagcagatactagaattttcctgcactcgattcaaggctgagtttccaatctttgataaggttgatgtgaatggtcaaaatgcagcccccatttacaagttcttaaagtcaagcaaaggtgggatttttggagacagcatcaagtggaacttctcaaagttcctggttgacaaagaggggcatgtgatcgaccgatatgctccagcgacttctcctcttagcatagagaaggatataaagaagctattgggtatctcttga

SEQ ID NO: 73523 - protein, 170 aa, Nelumbo nucifera
MASQSKKEKGSIHDFTVKDARGNDVDLSIYKGKVLLVVNVASQCGLTNSNYTELSTLYEKYKDQGLEILAFPCNQFGHQEPGTNEQILEFSCTRFKAEFPIFDKVDVNGQNAAPIYKFLKSSKGGIFGDSIKWNFSKFLVDKEGHVIDRYAPATSPLSIEKDIKKLLGIS

SEQ ID NO: 73524 - DNA, 504 bp, Vitis vinifera
  CDS (1)..(504)
atggctgaagcagctcccaaatccatttatgatttcactgtcaaggatattcgcgggaacgacgtgagtctgagcgattacaatgggaaggttcttctgatagtgaatgttgcatcaaaatgcggtctaacacattccaactacaaggaattgaatgttttatatgaaaaatacaaaagccaagggtttgagattttggcatttccttgcaaccagtttctaggacaagaaccaggaagtaatgaggaaattctggaagctgcatgcaccatgttcaaagctgagttcccgatctttgataaggttgaggtgaatggcaagaacacggcacccctctacaagttcttaaagttgcagaaaggtgggttatttggtgatggcatcaaatggaatttcacaaagtttctggtggacaaagaagggaaggttgtggacagatatgctcctaccacatcacctcttaaaattgaggaagacatccaaaatctgctgggttcagcctga

SEQ ID NO: 73525 - protein, 167 aa, Vitis vinifera
MAEAAPKSIYDFTVKDIRGNDVSLSDYNGKVLLIVNVASKCGLTHSNYKELNVLYEKYKSQGFEILAFPCNQFLGQEPGSNEEILEAACTMFKAEFPIFDKVEVNGKNTAPLYKFLKLQKGGLFGDGIKWNFTKFLVDKEGKVVDRYAPTTSPLKIEEDIQNLLGSA

SEQ ID NO: 73526 - DNA, 741 bp, Vitis vinifera
  CDS (1)..(741)
  misc_feature (202)..(202): s is g or c
atggcttccatgcctttctctgtctccttcactgctcattcacctggatttgcccaaaccaaagcagcacatcaccattcatggccttcttctccttatccttccatggctttcttgatgccatccaccaaatcctcttttggggcctctaattcagcctttttgcgaactgggttctcgctttgctcttcagaaattcctsgggtctccttgaaatctcgattttcaggcggcgtttatgcgagagcggctacggagaagagcctgtatgattacactgtcaaggatattgagaagaaggatgttcctcttagcaaatttaagggcaaagtcctcttgatagtcaatgtggcttcaaaatgtggtttgacagcatcaaactattcagaactctcgcacatatatgagaagtacaaaactcaaggctttgagattctagctttcccttgcaatcagtttggggggcaagagcctggatcaaatcccgagattaagcagtttgcttgcacaaggttcaaagctgaattcccaatttttgataaggttgatgttaatgggccaaccactgctccagtttaccagtttctgaagtcaaacgctggcggatttttgggtgacctgatcaagtggaactttgagaagtttttggtggacaaaaatggtaaggttgtcgagagatatcagccaacaacatcacctttccagattgagaaggacattcagaggcttcttgcagcatga

SEQ ID NO: 73527 - protein, 246 aa, Vitis vinifera
  misc_feature (68)..(68): The Xaa at location 68 stands for Arg, or Gly.
MASMPFSVSFTAHSPGFAQTKAAHHHSWPSSPYPSMAFLMPSTKSSFGASNSAFLRTGFSLCSSEIPXVSLKSRFSGGVYARAATEKSLYDYTVKDIEKKDVPLSKFKGKVLLIVNVASKCGLTASNYSELSHIYEKYKTQGFEILAFPCNQFGGQEPGSNPEIKQFACTRFKAEFPIFDKVDVNGPTTAPVYQFLKSNAGGFLGDLIKWNFEKFLVDKNGKVVERYQPTTSPFQIEKDIQRLLAA

SEQ ID NO: 73528 - DNA, 489 bp, Chlamydomonas reinhardtii
  CDS (1)..(489)
  misc_feature (444)..(444): y is t or c
atggcgaaccccgagttttacggcctgtcgacgaccacgctttcgggacagccctttcctttcaaggaccttgagggcaaggcagtcctaatcgtgaacgtggctagcaagtgcggctttacgccacaatacaagggtctggaggagctgtaccaacagtacaaggaccgggggctcgtcatccttggcttcccctgcaaccagtttggaggccaggagcctggggacgctagcgccatcggggagttctgccagcgcaatttcggcgttacgttccccattatggagaagtcggacgtgaacggcaacgacgccaaccccgtgttcaagtacctgaagagccaaaagaagcagttcatgatggagatgattaaatggaactttgagaagttcctggtggacaagagcggccaggtggtggcgcgcttcagcagcatggctacycccgccagcctggcgccggagattgagaaggtgctgaacgcgtaa

SEQ ID NO: 73529 - protein, 162 aa, Chlamydomonas reinhardtii
MANPEFYGLSTTTLSGQPFPFKDLEGKAVLIVNVASKCGFTPQYKGLEELYQQYKDRGLVILGFPCNQFGGQEPGDASAIGEFCQRNFGVTFPIMEKSDVNGNDANPVFKYLKSQKKQFMMEMIKWNFEKFLVDKSGQVVARFSSMATPASLAPEIEKVLNA

SEQ ID NO: 73530 - DNA, 735 bp, Zantedeschia aethiopica
  CDS (1)..(735)
atggcctcctccgcggccttcacagccgccccctcccccgttcgaccactccacgggctcgccgacggcggcagaagagcccttcgccctgctctggcctccgccaccttctccatcagagccccatccgggttatctgagttctcgtcgtccctgcgccgtaggttttctctttcgtcctccacaattagggtttcggagtccaaacctcggaggacgtcgggcgtcgtctacgccaccgcggccacggagaagagcatccacgatttcaccgttaaggacattgatgggaaggatgtatctcttagcaaattcaagggaaaagttttattgattgtcaatgttgcttcaagatgtggcttaacaacatccaattacatggaactttctcacatctatgagaaatacaaaactcaaggatttgagatcctggcattcccttgcaaccagtttgggagtcaagagcctggaacaaactcagaaataaaacagtttgcatgcacaaggtttaaagctgaattccctatttttgacaaggttgatgtcaacggaccaaaaacagctccagtatatcaatttcttaagtccagtgctggaggattcctgggtgatctcataaagtggaactttgagaaattcctggttgacaaaaatggcaaagtcgtggagagatatccaccaacaacatcccccttccagattgagaaagacatcaggaaactggtcgctgcatga

SEQ ID NO: 73531 - protein, 244 aa, Zantedeschia aethiopica
MASSAAFTAAPSPVRPLHGLADGGRRALRPALASATFSIRAPSGLSEFSSSLRRRFSLSSSTIRVSESKPRRTSGVVYATAATEKSIHDFTVKDIDGKDVSLSKFKGKVLLIVNVASRCGLTTSNYMELSHIYEKYKTQGFEILAFPCNQFGSQEPGTNSEIKQFACTRFKAEFPIFDKVDVNGPKTAPVYQFLKSSAGGFLGDLIKWNFEKFLVDKNGKVVERYPPTTSPFQIEKDIRKLVAA

SEQ ID NO: 73532 - DNA, 540 bp, Ostreococcus tauri
  CDS (1)..(540)
atgggcgcgtttcagtccaaacgcccctcgagcgtcatcgacgcctgcgacaccttcgaccaactcccgagcgagcccctacacgatggcaccgctttcgacttcgcctccacgcgcggcggcgtcgtgctcgtcgtcaacgtcgcgtcgtactgcggtttgacgacgaaaaactacgaagatttcaagctcttacaggacagattcggtgacgacttgacaatcttggcgttcccgtgtaacgggttcatgtttcaagagcctttcggggcgaaatccgcgtgcgcgttcgcgcggaagcgagggttcaaggggatggtgtttcaaaaggtgaaggtgaacgggagcggcgcgagcgagacgttcaagtggttgaagtcgcgcgcgggggtgagacgaatcgagtggaactttgggaagtttctgatcgatcgtgacgggaaagtacgggggtattacccgccgcagacgcgaccgagagtgttcgagggcgacgtcgaggcactgattggtgaaaaggcgacggaggcgctcgcgtag

SEQ ID NO: 73533 - protein, 179 aa, Ostreococcus tauri
MGAFQSKRPSSVIDACDTFDQLPSEPLHDGTAFDFASTRGGVVLVVNVASYCGLTTKNYEDFKLLQDRFGDDLTILAFPCNGFMFQEPFGAKSACAFARKRGFKGMVFQKVKVNGSGASETFKWLKSRAGVRRIEWNFGKFLIDRDGKVRGYYPPQTRPRVFEGDVEALIGEKATEALA

SEQ ID NO: 73534 - DNA, 513 bp, Mayetiola destructor
  CDS (1)..(513)
atggcccaatcaagtgatatcgatcacaccaaaacaacatcgatctatgactttacagtcaaagatacattcggaaatgatgtttcattggaaaaatatcgtggctatgttgttcttattgttaacattgcctcacaatgtggactcacaaaaaataattacgctaaattgaccgaattgcgaaaacaatattacgacaaaggtcttcgtatccttggttttccatgcaatcaatttaatggccagatgcccgaaggtgatggtgaagaaaccgtttgccatttgcaaaaggaaaaggctgattttggtgatatttttgctaagatcaaagtaaacggtgattcggccagtccattgtacaaatatttgaaagaaaagcaacacggtacattcggtaatgcaatcaagtggaattttaccaaatttttggtcgacaaagatggacaaccagttaatcgttatgcaccaacaaccgatccgatggatcttgttcagatatcgaaactcctttga

SEQ ID NO: 73535 - protein, 170 aa, Mayetiola destructor
MAQSSDIDHTKTTSIYDFTVKDTFGNDVSLEKYRGYVVLIVNIASQCGLTKNNYAKLTELRKQYYDKGLRILGFPCNQFNGQMPEGDGEETVCHLQKEKADFGDIFAKIKVNGDSASPLYKYLKEKQHGTFGNAIKWNFTKFLVDKDGQPVNRYAPTTDPMDLVQISKLL

SEQ ID NO: 73536 - DNA, 810 bp, Medicago truncatula
  CDS (1)..(810)
atggagttactcggtgtgaaatacagacagatcggcacttggacacgagaagaagcatccacgcgtaatcttcgttattctgttcacactcacaattgtcggtggctctcagaacaaagtacttcaacaacaactcgcatccgattcatttcaactacaaaacgtcttttaactgctcctctttcttccttacttcgcttcttctcaatctctactactcttccaaacaaacctataatacataaaccactttttacaactctaaccccttctttgtatttcactttaagaagaacagatcacaccatggcatctgcatcaaaccctcaatcaattcatgatttcactgttaaggatgctaagggtaacgatgttaatctcggtgactacaaaggaaaggtccttatcattgtcaatgttgcctcacaatgtggattgactaactcaaattacacagagctgagtcagttgtatgagaaatacaaatcaaaaggtttggaaattctggcattcccttgtaatcaatttggggcacaagagcctggatctgttgaagagatacaaaactttgtgtgtacacgcttcaaggctgagtttcctgtttttgacaaggttgatgtgaatggtgccactgctgctccaatctacaagtatctgaagtcgagcaaaggtggactctttggggatggtatcaaatggaacttctccaagttccttgttgataaaaatgggaatgttgttgatcgttatgcaccaacgacttctccactgagcattgagaaggacttgctgaagttgcttgatgcataa

SEQ ID NO: 73537 - protein, 269 aa, Medicago truncatula
MELLGVKYRQIGTWTREEASTRNLRYSVHTHNCRWLSEQSTSTTTRIRFISTTKRLLTAPLSSLLRFFSISTTLPNKPIIHKPLFTTLTPSLYFTLRRTDHTMASASNPQSIHDFTVKDAKGNDVNLGDYKGKVLIIVNVASQCGLTNSNYTELSQLYEKYKSKGLEILAFPCNQFGAQEPGSVEEIQNFVCTRFKAEFPVFDKVDVNGATAAPIYKYLKSSKGGLFGDGIKWNFSKFLVDKNGNVVDRYAPTTSPLSIEKDLLKLLDA

SEQ ID NO: 73538 - DNA, 519 bp, Medicago truncatula
  CDS (1)..(519)
atgagcaccgaacccagtaacagtaaggatccaaaatcggtctacgacttcactctcaaggatggtatgggaaatgatgttgatctcgccacttacaagggtaaagtcctcctcattgttaatgttgcttccaaatgtggtatgaccaactcaaattatgtggggttaaatcaactatatgacaagtacaaactcaaaggccttgagattctggcatttccaagtaatcaatttggtgaggaagaacctggaaccaatgatcaaatattggattttgtttgtactcacttcaaatcagaattccccatctttgataagattgaagtgaatggggacaattctgctcccttgtataaattcttaaagtcgggtaaatggggaatttttggggatgatattcagtggaactttgccaagtttctagttgacaaggatggtcaagtggtggatcgatattatcccaccacgtctcctcttagccttgagcgagatatctgtaaactacttggtgttgaatga

SEQ ID NO: 73539 - protein, 172 aa, Medicago truncatula
MSTEPSNSKDPKSVYDFTLKDGMGNDVDLATYKGKVLLIVNVASKCGMTNSNYVGLNQLYDKYKLKGLEILAFPSNQFGEEEPGTNDQILDFVCTHFKSEFPIFDKIEVNGDNSAPLYKFLKSGKWGIFGDDIQWNFAKFLVDKDGQVVDRYYPTTSPLSLERDICKLLGVE

SEQ ID NO: 73540 - DNA, 711 bp, Medicago truncatula
  CDS (1)..(711)
atggtttccatggcttcttccacaacattcttcacacctcttcacaatttcaatcaagctagaacaaattcaataccttcaatttctttgccttttgtaaaatcctcaattccttcttcaaagtcacctttttttcaacatggcttttctcaaccaacttctttcgattttcctaaggctgttttgaagtcaaggtctttctctgtcaacgctagagctgttactgataaatccatttatgattttactgtaaaggatattgataagaaggatgtgcctcttagcaaattcaaggggaaggttcttttgattgttaatgttgcttcaagatgcggtttgacatcatcaaactacacggaactctcacacttatatgaaaattttaaagacaaaggtttggaggttctagctttcccttgcaatcaatttggcatgcaggagcctggatcaaatgaagaaattaagaaattcgcttgcactaggttcaaagcagaatttccaattttcgataaggttgatgtaaatggaccatttactgctccagtataccagtttctgaagtcaagttctggagggttttttggtgatcttgtcaagtggaattttgagaaattcttggttgataaaaatggtaaagttgttgaacgatacccaccaacaacctctccttttcaaattgagaaggatatccagaagttacttgctgcgtga

SEQ ID NO: 73541 - protein, 236 aa, Medicago truncatula
MVSMASSTTFFTPLHNFNQARTNSIPSISLPFVKSSIPSSKSPFFQHGFSQPTSFDFPKAVLKSRSFSVNARAVTDKSIYDFTVKDIDKKDVPLSKFKGKVLLIVNVASRCGLTSSNYTELSHLYENFKDKGLEVLAFPCNQFGMQEPGSNEEIKKFACTRFKAEFPIFDKVDVNGPFTAPVYQFLKSSSGGFFGDLVKWNFEKFLVDKNGKVVERYPPTTSPFQIEKDIQKLLAA

SEQ ID NO: 73542 - DNA, 576 bp, Aspergillus oryzae
  CDS (1)..(576)
atggcttccgcaaccaccttcttcgactttgagccagttgacaagaaaggctctccttttcccctcaccccgctcaagggcaagaccatcctcgtcgtcaacactgcctccaagtgcggctttactccccagttcgaaggtctcgagaaactctaccagaagctgaagtccaagtaccccgaagactttactatcctcggattcccttgcaaccagttcggcggccaggatcccggttccaacgatcagattcaagacttctgccagctgaactacggtgttacattccctgtgttgggcaagctggatgtgaacggaaacgaggcctcacccttgtggacctggatgaaggagcagcaacccggtctgctgggcctgaagcgcgtcaagtggaacttcgaaaagttcctgatctcgcccgatggcaaggtcgtcggtcgctgggccagtaccaccaagcccgagtcactcgaggacaccatcgtcaaggagattgagaaggcacagaaggccggaactgcagcttcggttcaggctaaggagggagagtctgctgagcaggctaagttgtcgtaa

SEQ ID NO: 73543 - protein, 191 aa, Aspergillus oryzae
MASATTFFDFEPVDKKGSPFPLTPLKGKTILVVNTASKCGFTPQFEGLEKLYQKLKSKYPEDFTILGFPCNQFGGQDPGSNDQIQDFCQLNYGVTFPVLGKLDVNGNEASPLWTWMKEQQPGLLGLKRVKWNFEKFLISPDGKVVGRWASTTKPESLEDTIVKEIEKAQKAGTAASVQAKEGESAEQAKLS

SEQ ID NO: 73544 - DNA, 507 bp, Plantago major
  CDS (1)..(507)
atggccacttctactcagcctcagtcgattcatgatttcaccgttaaggatgctaagggtgatgatgttgatctgagcatttacaagggaaaggtcctgttgattgttaatgttgcatcacagtgtggcctgactaattcaaactatactgagttgacaacattgtatcagaagtacaaggatcaaggtcttgagatccttgcattcccgtgcaatcaatttggctcacaagagcctggcagcaatgaagaaattcagaattttgtatgcactcgcttcaaggccgaatatcccatatttgacaaggttgatgtgaatggtgccactgcagctccaatatacaagttcttgaagtcagccaagggtggcttgtttggcgatggcatcaagtggaatttctccaagttcctagttgacaaagagggcaaggttgtagatcgctatgctcccaccacatctcctctaagcattgagaaggatgttaagaagctgctggagaaagcgtaa

SEQ ID NO: 73545 - protein, 168 aa, Plantago major
MATSTQPQSIHDFTVKDAKGDDVDLSIYKGKVLLIVNVASQCGLTNSNYTELTTLYQKYKDQGLEILAFPCNQFGSQEPGSNEEIQNFVCTRFKAEYPIFDKVDVNGATAAPIYKFLKSAKGGLFGDGIKWNFSKFLVDKEGKVVDRYAPTTSPLSIEKDVKKLLEKA

SEQ ID NO: 73546 - DNA, 510 bp, Capsicum chinense
  CDS (1)..(510)
atggctagccaatccaacaggcctcaatctgtttatgacttcactgtcaaggatgctaagggcaaggacgttgatctcagcatttacaagggaaaggttcttatcattgtcaatgttgcatcacagtgtggcctgactaattcaaactacaccgacatgacggagttatacagaaagtacaaggacaaaggtttggagattctcgcattcccttgcaaccagttcggtgggcaggagcctggaagcatcgaagatatccagcagatggtttgcactcgcttcaaggccgagtacccagtatttgataaggtcgatgtgaatggcgataatgctgctccactgtataagtttctgaaatcaagcaaaggtgggttctttggtgatggtatcaagtggaatttctccaaattcctcattgacaaagaaggaaacgtcgttgatcgctactctccaaccacttctccagctagcatggagaaggacatcaagaaactcttgggcgttgcatga

SEQ ID NO: 73547 - protein, 169 aa, Capsicum chinense
MASQSNRPQSVYDFTVKDAKGKDVDLSIYKGKVLIIVNVASQCGLTNSNYTDMTELYRKYKDKGLEILAFPCNQFGGQEPGSIEDIQQMVCTRFKAEYPVFDKVDVNGDNAAPLYKFLKSSKGGFFGDGIKWNFSKFLIDKEGNVVDRYSPTTSPASMEKDIKKLLGVA

SEQ ID NO: 73548 - DNA, 504 bp, Unknown
  Unidentified
  CDS (1)..(504)
atggctgaacaaacctccaaatctctttacgatttcactgtcaaggacatccgtggaaatgatgtgagtttgagtcaatacagtgggaaggttcttataattgtgaatgttgcttcacaatgtggtttgacgcaaacaaattacaaagaattgaatatactgtacgagaagtacaagagtaaagggcttgaaatcttggcatttccatgcaaccagtttgctggacaggagccaggaaccaatgatgaaattcaggatgttgtgtgcacaaggttcaaatctgaatttccagtcttcgataaggttgaagtgaatgggaagaatgcagaaccactcttcaagtttttgaaggatcagaaagggggaatatttggagatggtatcaagtggaacttcacaaagttcttagtgaacaaagaagggaaggttgtggagagatatgctcctaccacctctcctatgaaaattgagaaggacctcgagaagctcttacaatcttcttga

SEQ ID NO: 73549 - protein, 167 aa, Unknown
  Unidentified
MAEQTSKSLYDFTVKDIRGNDVSLSQYSGKVLIIVNVASQCGLTQTNYKELNILYEKYKSKGLEILAFPCNQFAGQEPGTNDEIQDVVCTRFKSEFPVFDKVEVNGKNAEPLFKFLKDQKGGIFGDGIKWNFTKFLVNKEGKVVERYAPTTSPMKIEKDLEKLLQSS

SEQ ID NO: 73550 - DNA, 711 bp, Lotus japonicus
  CDS (1)..(711)
atgctctgtactcgcatcttgttcttctccagaactataagattcgctgctcctctttcttcatcttctcttcattccttcgtcttctcaaattctcccatcaccctctcgcgttcttatcactcttctctgcttactactactagttttccaatcaaatcacttgtttctacttcaacaacccctttctctttcactctcagaccagatcacactatggctgcccccacatccgtttatgatttcaccgtcaaagatgccagaggaaatgatgttaatcttggtgactacaaaggaaaagtcctcttgattgtcaatgttgcctcacaatgtgggttgactaattcaaattacacagagctcagccagttgtatgagaaatacaaatcaaaaggtcttgaaattctgggtttcccatgtaatcagtttggggcacaggagcctggagataatgaacagatacaagagtttgtttgcactcgcttcaaagctgagttccctgtttttgacaaggttgatgtgaacggtgacagtgccgctccactctacaaatatctaaaatcaagcaagggaggactctttggagataaaatcaaatggaacttctccaagttccttgttgacaaagaaggaaatgttgttgaacgttatgcaccaacaacttctcctttgagcattgagaaggacttggtgaaattgttgggtgcatga

SEQ ID NO: 73551 - protein, 236 aa, Lotus japonicus
MLCTRILFFSRTIRFAAPLSSSSLHSFVFSNSPITLSRSYHSSLLTTTSFPIKSLVSTSTTPFSFTLRPDHTMAAPTSVYDFTVKDARGNDVNLGDYKGKVLLIVNVASQCGLTNSNYTELSQLYEKYKSKGLEILGFPCNQFGAQEPGDNEQIQEFVCTRFKAEFPVFDKVDVNGDSAAPLYKYLKSSKGGLFGDKIKWNFSKFLVDKEGNVVERYAPTTSPLSIEKDLVKLLGA

SEQ ID NO: 73552 - DNA, 654 bp, Aedes aegypti
  CDS (1)..(654)
atgttcctgttgcgacttctaacccgtccggcgtcttccgcatcgaaccggacggcagcgtttggccttttcggtacggccatggtggcgataaacctgctttcaacatctagcgttttggcgtgtccctcatcgcagagcaagaagacggcgtctggcaatgaaccttcgtcggtctacgacttcagcgcagtggacatcgatggcaataaggtggatttcgagcgctaccgaggtcacgtgctgatcatcgtcaatgtcgcctccaagtgtggctataccgctggccattacaaggagctgaacgaactgtacgaggaatatggcgaaacggaaggtcttcgaattctagcgttcccctgcaaccagttcggtaaccaggaaccgggaaccaacgaggagatcaaacacttcgcccgcgttgagaagggagccaagttcgacctgttcgccaagatatacgtcaacggggacgaggcgcatccgctgtggcagttcctgaagcaacgtcaaggtggtacgctgttcgatgccatcaagtggaacttcaccaagttcatcgtggacaagaatgggcagccggtggaaagacatggaccccagaccagcccgctgcagttgcgggacaatttgaagaagtactttgctcaatga

SEQ ID NO: 73553 - protein, 217 aa, Aedes aegypti
MFLLRLLTRPASSASNRTAAFGLFGTAMVAINLLSTSSVLACPSSQSKKTASGNEPSSVYDFSAVDIDGNKVDFERYRGHVLIIVNVASKCGYTAGHYKELNELYEEYGETEGLRILAFPCNQFGNQEPGTNEEIKHFARVEKGAKFDLFAKIYVNGDEAHPLWQFLKQRQGGTLFDAIKWNFTKFIVDKNGQPVERHGPQTSPLQLRDNLKKYFAQ

SEQ ID NO: 73554 - DNA, 480 bp, Corynebacterium glutamicum
  CDS (1)..(480): transl_table=11
atgacttctattcatgacatcagcgtaactctcaacgacggcacagaaaccaccatggcggattgggcgggccaccttttgctcatcgtgaacgtggcatccaagtgcggactcacgccacagtatgaagggcttcaaaaactgtatgaggaataccaagatcgaggcttctttgtcattggcgtgccctgcaatcaattcaacggccaggaacctggaaccgacgctgaagtgtgtgctttcgcgcaaaatcagtacgacgtcaccttcccgctcttgagcaaaaccgaggtgaatggggagggtacccaccccctgtacaaggtgctcaaagaggcaactgatggtagcgaaatcgagtggaattttgagaaattcctggtagatgcagaaggtaatacgattaagcgctttgctcctcggacggaaccatctgcagctgaggtagtggaagcaatcgaggagaatctccctatctaa

SEQ ID NO: 73555 - protein, 159 aa, Corynebacterium glutamicum
MTSIHDISVTLNDGTETTMADWAGHLLLIVNVASKCGLTPQYEGLQKLYEEYQDRGFFVIGVPCNQFNGQEPGTDAEVCAFAQNQYDVTFPLLSKTEVNGEGTHPLYKVLKEATDGSEIEWNFEKFLVDAEGNTIKRFAPRTEPSAAEVVEAIEENLPI

SEQ ID NO: 73556 - DNA, 726 bp, Oryza sativa subsp
  CDS (1)..(726)
atggcgtccaccaccaccaccacggcggcggccgcggcccgcttcacctgcctcgcgccggccacgcgccccgcctccgcctccgcctccgcgggccgcttcctcctcccggcgcggcagtggggggcggcgacgacgcacgggagcgcggcggtgcccgtcgtcgcggcgccgtcgcggaggtgggcgccaggggtcgcctacgccaccgccgccaccgggaagagcgtccacgacttcaccgtcaaggttgtggcatttcgagccctcgacattgatggaaaagatgttgcgcttagcaagttcaagggaagggcgctgctaattgttaatgttgcatctcagtgtgggctgacaacagcaaattacacggaactatctcatctttatgagaagtacaagactcaaggatttgagattcttgcatttccttgcaatcagtttggtgcacaagaacctgggtcaaacccgcagattaagcagtttgcttgtacaaggtttaaagctgaatttcctatttttgacaaggttgatgtcaacgggcctaacacagcccctatttataagtttcttaagtcgagtgctggaggatttttgggtgatcttgtgaaatggaattttgagaagttcttggtggacaaaactggaaaagttgttgagagatacccacctacaacttcaccattccagattgagaaggacatccagaaactccttgcggcataa

SEQ ID NO: 73557 - protein, 241 aa, Oryza sativa subsp
MASTTTTTAAAAARFTCLAPATRPASASASAGRFLLPARQWGAATTHGSAAVPVVAAPSRRWAPGVAYATAATGKSVHDFTVKVVAFRALDIDGKDVALSKFKGRALLIVNVASQCGLTTANYTELSHLYEKYKTQGFEILAFPCNQFGAQEPGSNPQIKQFACTRFKAEFPIFDKVDVNGPNTAPIYKFLKSSAGGFLGDLVKWNFEKFLVDKTGKVVERYPPTTSPFQIEKDIQKLLAA

SEQ ID NO: 73558 - DNA, 588 bp, Glossina morsitans morsitans
  CDS (1)..(588)
  misc_feature (94)..(94): w is a or t
atgatgtcctttgtaatcgtgaacattttaattggattgtttttcgctggattgggaacttattacttctatagtaaacaacaatctacaacgwtgtctgaagaggctagcagcatttacgattttaccgtaaaagacacttatgggaatgatgtttctttagagcaatacaggggtcacgtcgtgcttattgtgaacatagcttctcagtgtggtttgactaagaataattacaagaaactaaccgatttgcgcgagaaatatggcgacaagggtttgaaaattttgaattttccatgcaatcaatttggatcgcaaatgcccgaatctgatggcgaacccatggtctgtcacttacgagatgctaaagcggatattggtgatgttttccaaaaggttgatgttaacggggccaatgctgcgccactttatcaatatttgaaggctaagcaaggcggtacactcgttagcgccattaaatggaattttacaaagttcttagtcaacaaagaaggcatacctgtaaaacgatatgcacccacaaccgatcctatggatattgccaaggacattgaaaaacttttgtaa

SEQ ID NO: 73559 - protein, 195 aa, Glossina morsitans morsitans
  misc_feature (32)..(32): The Xaa at location 32 stands for Leu, or Met.
MMSFVIVNILIGLFFAGLGTYYFYSKQQSTTXSEEASSIYDFTVKDTYGNDVSLEQYRGHVVLIVNIASQCGLTKNNYKKLTDLREKYGDKGLKILNFPCNQFGSQMPESDGEPMVCHLRDAKADIGDVFQKVDVNGANAAPLYQYLKAKQGGTLVSAIKWNFTKFLVNKEGIPVKRYAPTTDPMDIAKDIEKLL

SEQ ID NO: 73560 - DNA, 507 bp, Malus domestica
  CDS (1)..(507)
atggctggccattccgagagtaaatcaatccacgatttcactgtcaaggatgccaagggtaatgatgttgatctcagcacctacaaagggaaggtccttctgatcgttaacgttgcgtcgcaatgtggcttgactaattcaaactacacagagttggctcagttgtatgagaaatacaaaactcaaggtttggaaatcttggcattcccatgcaaccagtttggagcccaggagccagggacaaatgacgagattgtagagtttgcctgcactcgcttcaaggctgagtatcccatctttgacaaggtggatgtgaatggcgacaatgctgctccgatttacaaattcttgaagtcgagcaagggtggactgtttggtgacagcatcaagtggaacttctccaagttcctggttgacaaagaagggaaagtcgttgaccgttatgcccctacaacttctcctcttagcattgagaaggatgtgaagaaactgctgggggtcgcatga

SEQ ID NO: 73561 - protein, 168 aa, Malus domestica
MAGHSESKSIHDFTVKDAKGNDVDLSTYKGKVLLIVNVASQCGLTNSNYTELAQLYEKYKTQGLEILAFPCNQFGAQEPGTNDEIVEFACTRFKAEYPIFDKVDVNGDNAAPIYKFLKSSKGGLFGDSIKWNFSKFLVDKEGKVVDRYAPTTSPLSIEKDVKKLLGVA

SEQ ID NO: 73562 - DNA, 507 bp, Sorghum bicolor
  CDS (1)..(507)
atggccgccgcgtcgtccgccacctccgtccacgacttcaccgtcaaggatgccagcggcaaagacgttgacctcagcacctacaaggggaaggttcttctcatcgttaacgtcgcatcccagtgtggcttaaccaactccaactacaccgagctggcccagctctatgagaagtacaaggaccaaggctttgaaattctggctttcccatgcaaccagtttggtgggcaggagcctggtaccaacgaggagattgtgcagtttgcctgcacacgcttcaaggctgagtaccccatcttcgacaaggttgatgtcaatggtaacaatgctgcgcccatctacaagtttctgaaatctagcaagggtggcctttttggcgacagcatcaagtggaacttttccaagttcttggttgacaaggagggacgtgttgtggatcgctatgctccaacaacttcacctctgagcattgagaaggatatcaagaagctgcttgggagctcttaa

SEQ ID NO: 73563 - protein, 168 aa, Sorghum bicolor
MAAASSATSVHDFTVKDASGKDVDLSTYKGKVLLIVNVASQCGLTNSNYTELAQLYEKYKDQGFEILAFPCNQFGGQEPGTNEEIVQFACTRFKAEYPIFDKVDVNGNNAAPIYKFLKSSKGGLFGDSIKWNFSKFLVDKEGRVVDRYAPTTSPLSIEKDIKKLLGSS

SEQ ID NO: 73564 - DNA, 507 bp, Zea mays
  CDS (1)..(507)
atggccgcctcgtcgaccgccacctccgtccacgacttcatcgtcaaggatgcgagcggcaaagacgttgacctcagcacctacaaggggaaggttcttctcattgttaacgtcgcatcccagtgtggcttaaccaactccaactacactgagctggcccagctctatgagaagtacaaggaccaaggctttgaaatcctggctttcccatgcaaccagtttggtgggcaggagcctggtaccaatgaggagattgtccagtttgcctgcacacgcttcaaggctgagtaccccatcttcgacaaggttgatgtcaacggtagcaatgctgcgcccatctacaagttcttgaaatctagcaaaggtggccttttcggcgacagcatcaagtggaacttttccaagttcttggttgacaaggagggacgtgttgtggatcgctatgctccaaccacttcacccctgagcattgagaaggatatcaagaagctgcttgggagctcttaa

SEQ ID NO: 73565 - protein, 168 aa, Zea mays
MAASSTATSVHDFIVKDASGKDVDLSTYKGKVLLIVNVASQCGLTNSNYTELAQLYEKYKDQGFEILAFPCNQFGGQEPGTNEEIVQFACTRFKAEYPIFDKVDVNGSNAAPIYKFLKSSKGGLFGDSIKWNFSKFLVDKEGRVVDRYAPTTSPLSIEKDIKKLLGSS

SEQ ID NO: 73566 - DNA, 507 bp, Setaria italica
  CDS (1)..(507)
  misc_feature (476)..(476): r is g or a
atggccgccgcgtcgtccaccacctccgtccacgacttcaccgtcaaggatgcaagcgggaaggatgttgacctcagcacctacaaggggaaggttctcctcattgtcaacgtcgcatcccagtgtggattaactaactccaactacactgagctggcccagctctatgagaagtacaaggaccaaggctttgagatcctggcttttccatgcaaccagtttggcgggcaggagcctggcaccaatgaggagattgtccagtttgcctgcacacgcttcaaggccgagtaccccatctttgacaaggttgatgtcaacggtaacaatgccgcacccatctacaaattcctgaagtctagcaagggtggcctcttcggtgacagcatcaagtggaacttctccaagttcttggttgacaaggaggggcgtgttgtggatcgctacgccccgaccacttcccctctgagcatcgagarggatatcaagaaactgcttgggagctcttaa

SEQ ID NO: 73567 - protein, 168 aa, Setaria italica
  misc_feature (159)..(159): The Xaa at location 159 stands for Arg, or Lys.
MAAASSTTSVHDFTVKDASGKDVDLSTYKGKVLLIVNVASQCGLTNSNYTELAQLYEKYKDQGFEILAFPCNQFGGQEPGTNEEIVQFACTRFKAEYPIFDKVDVNGNNAAPIYKFLKSSKGGLFGDSIKWNFSKFLVDKEGRVVDRYAPTTSPLSIEXDIKKLLGSS

SEQ ID NO: 73568 - DNA, 699 bp, Brassica oleracea var
  CDS (1)..(699)
atggcttcttcctcttacgcaccattctctgcagtcttcagcggtttcgctgcaaccaaacctaacccacctccgacttgttctgcttttctcgtccctaagcgaagatcaaattctcggaatctgaaaaatggggtttccttgaaatcttggaataagcatgggtttcaattcaaatcaagaaatttgagtgtgtatgcaagagctactgaagagaagactgttcatgatttcactgtaaaggacataagtgggaaggatgtttccctagacaaattcaaaggaaaacctctgttgatcgttaacgttgcttcaaaatgtggtttgacatcatcaaactacacagagctttcacaattgtacgacaaatacaggaaccaaggatttgagattttagctttcccttgcaatcaatttggaggtcaagaacccgaatcaaacccggatatcaagcggttcgtgtgtaccagatttaaagctgagttccctatattcgataaggttgatgtgaatggaccgagcacagctccaatctaccagttcttgaaatcaaagtctggtcggttcttgggtgatctcatcaagtggaactttgagaaattcttggttgacaaaaagggcaacgtcgtccagagataccctcccacgaccccgcctttacaaattgagaaagacatccagaagttgcttgtggcttaa

SEQ ID NO: 73569 - protein, 232 aa, Brassica oleracea var
MASSSYAPFSAVFSGFAATKPNPPPTCSAFLVPKRRSNSRNLKNGVSLKSWNKHGFQFKSRNLSVYARATEEKTVHDFTVKDISGKDVSLDKFKGKPLLIVNVASKCGLTSSNYTELSQLYDKYRNQGFEILAFPCNQFGGQEPESNPDIKRFVCTRFKAEFPIFDKVDVNGPSTAPIYQFLKSKSGRFLGDLIKWNFEKFLVDKKGNVVQRYPPTTPPLQIEKDIQKLLVA

SEQ ID NO: 73570 - DNA, 507 bp, Triticum monococcum
  CDS (1)..(507)
atggccgccgcgtcctccgccacctccgtccacgacttcaccgtcaaggattcaagcggcaaggacgtcgacctcagcgtctacaaggggaaggttcttctcattgttaacgtcgcatcccagtgtggcttaaccaactccaactacaccgagctgagccagctgtaccccaagtacaaggaccaaggctttgagatcttggctttcccatgcaatcagtttggtgggcaggagcctggcaccaatgatgagatagttcagtttgcctgcactcgcttcaaggctgagtaccccatttttgacaaggttgatgtcaacggcaacaatgtttctcccctatacaagttcctgaagtctagcaaaggtggccttttcggcgacagcatcaagtggaacttctccaagttcttggttgacaaggagggtcacgttgtggaccgctatgccccgaccacttcccccctgagcattgagaaggatatcaagaagctgcttgggagctcttag

SEQ ID NO: 73571 - protein, 168 aa, Triticum monococcum
MAAASSATSVHDFTVKDSSGKDVDLSVYKGKVLLIVNVASQCGLTNSNYTELSQLYPKYKDQGFEILAFPCNQFGGQEPGTNDEIVQFACTRFKAEYPIFDKVDVNGNNVSPLYKFLKSSKGGLFGDSIKWNFSKFLVDKEGHVVDRYAPTTSPLSIEKDIKKLLGSS

SEQ ID NO: 73572 - DNA, 504 bp, Citrus sinensis
  CDS (1)..(504)
atggcaagccaatcgaaaacttcagttcacgatttcagtgttaaggacgccaagggacaggatgttgatctgagcatctacaagggaaagcttcttttgattgtcaatgttgcatcacagtgtggcttgaccaattcaaactacactgagctgagtcagttgtacgacaagtacaagaatcaaggcttggagattctggcctttccttgtaatcagtttggagctcaagagccaggagacaatgaacagattcaagaatttgcatgcactcgctttaaggctgagtttcccatatttgataaggttgatgttaatggtgataatgctgctcctttatacaagcatctgaaatccagcaaaggtggactttttggagacagcatcaagtggaacttttccaagttcttggtggataaggaggggaatgttgttgagcgttatgcccccaccactagccctctgagcattgagaaggatataaagaaacttctggagactgcttaa

SEQ ID NO: 73573 - protein, 167 aa, Citrus sinensis
MASQSKTSVHDFSVKDAKGQDVDLSIYKGKLLLIVNVASQCGLTNSNYTELSQLYDKYKNQGLEILAFPCNQFGAQEPGDNEQIQEFACTRFKAEFPIFDKVDVNGDNAAPLYKHLKSSKGGLFGDSIKWNFSKFLVDKEGNVVERYAPTTSPLSIEKDIKKLLETA

SEQ ID NO: 73574 - DNA, 531 bp, Zea mays
  CDS (1)..(531)
atggccgccgcgtcgtccgccacctccgtccacgacttcaccgtcaaggattcgagcggcaaggacgttgacctcagcgtctacagggggaaggttcttctcatcgttaacgtcgcatcccaatgtggcttaaccaactccaactacactcagcaggcccagctctatgagaagtacaagaaccaaggcttgttcttgattcattgctcttgctttgaaatcctcgctttcccgtgcaaccagtttggtgggcaggagcctggtaccaacgaggagattgcccagtttgcctgcacacgcttcaaggctgactaccccatctttgacaaggttgatgtcaatggtaacaatgctgcgcccatctacaagtttctgaaatctagcaagggtggccttttcggcgacagcatcaagtggaacttttccaagttcttggttgacaaggaggggcgtgttgtggatcgctatgctccaaccacttcacctctgagcattgagaaggatatcaagaagctgcttgggagctcttaa

SEQ ID NO: 73575 - protein, 176 aa, Zea mays
MAAASSATSVHDFTVKDSSGKDVDLSVYRGKVLLIVNVASQCGLTNSNYTQQAQLYEKYKNQGLFLIHCSCFEILAFPCNQFGGQEPGTNEEIAQFACTRFKADYPIFDKVDVNGNNAAPIYKFLKSSKGGLFGDSIKWNFSKFLVDKEGRVVDRYAPTTSPLSIEKDIKKLLGSS

SEQ ID NO: 73576 - DNA, 516 bp, Oryza sativa subsp
  CDS (1)..(516)
atggccgccgcgccgtccgccacctccgtccacgacttcaccgtcaagggcgtgcaggatgcaagcggaaaagacgtgaacctgagcacctacaaggggaaggttctcctcatcgttaacgtcgcatcccaatgtggcttaactaactccaactacactgagctgagccagctgtatgagaagtacaaggtccaaggctttgagatattggctttcccgtgcaatcagtttggagggcaggaacccggctccaatgaggagattgtccagtttgcttgcactcgcttcaaggctgagtatcccatttttgacaaggttgatgtcaacggtaacaatgctgcacccctgtacaagtatctgaagtctaacaaaggtgggcttttcggtgatagcatcaagtggaacttctccaaattcttggttgacaaggagggtcgcgtggtggatcgctatgcgcccaccacctcccctcttagtattgagaaggatatcaagaagctgcttgggagctcttaa

SEQ ID NO: 73577 - protein, 171 aa, Oryza sativa subsp
MAAAPSATSVHDFTVKGVQDASGKDVNLSTYKGKVLLIVNVASQCGLTNSNYTELSQLYEKYKVQGFEILAFPCNQFGGQEPGSNEEIVQFACTRFKAEYPIFDKVDVNGNNAAPLYKYLKSNKGGLFGDSIKWNFSKFLVDKEGRVVDRYAPTTSPLSIEKDIKKLLGSS

SEQ ID NO: 73578 - DNA, 504 bp, Solanum lycopersicum
  CDS (1)..(504)
atggctgaaggatcaccaaaatctatttatgatttcactgtgaaggatatacagggaaatgaggtacctttgagcaattataggggaaaggttctccttattgtcaatgttgcatcaaaatgtggtttaacagattcaaactacaaggagctgaatattttgtatgagaagtacaaagatcaaggttttgaaattttagcatttccttgtaaccagttcctgtggcaagaacccggaacaaatgaggagattcagcaaactgtatgcaccaggttcaaagctgaattccctgtatttgaaaagattgatgtgaacggggataatgctgcaccactttacaagttcttgaaatcagaaaaaggcggtttccttggaagtgctgtcaagtggaacttcaccaaattccttgtggacaaagaaggaaaggttgtggaacgatatgcacccaagacaccacctcttcagtttgagaaagacataaaaaatctgttgggtgtggcttga

SEQ ID NO: 73579 - protein, 167 aa, Solanum lycopersicum
MAEGSPKSIYDFTVKDIQGNEVPLSNYRGKVLLIVNVASKCGLTDSNYKELNILYEKYKDQGFEILAFPCNQFLWQEPGTNEEIQQTVCTRFKAEFPVFEKIDVNGDNAAPLYKFLKSEKGGFLGSAVKWNFTKFLVDKEGKVVERYAPKTPPLQFEKDIKNLLGVA

SEQ ID NO: 73580 - DNA, 510 bp, Hordeum vulgare
  CDS (1)..(510)
atggccgccgccgcctcttccgcctcctccgtccacgacttcaccgtcaaggatgcaagtggaaaagatgtcgatctgagcacctacaaggggaaggttctcctcattgtcaatgttgcatcccagtgtggattgaccaattccaactatacggaactcgctcagttgtatgagaagtacaaggaccagggttttgagatccttgctttcccatgcaaccagtttggtgggcaggaacctggcactaatgaggaaattgttcagtttgcttgcactcgcttcaaggccgagtatccaatttttgacaaggttgatgtcaatggtgacaatgttgcacctgtctacaagtttctgaagtcgagcaaaggcagtctcttcggggacaacatcaaatggaacttctccaagttcttggttgacaaggatgggaatgttgtggatcgctacgcgccgaccacctcccccctcagcatcgagaaggacatcaagaagctgctcgcgagttcttaa

SEQ ID NO: 73581 - protein, 169 aa, Hordeum vulgare
MAAAASSASSVHDFTVKDASGKDVDLSTYKGKVLLIVNVASQCGLTNSNYTELAQLYEKYKDQGFEILAFPCNQFGGQEPGTNEEIVQFACTRFKAEYPIFDKVDVNGDNVAPVYKFLKSSKGSLFGDNIKWNFSKFLVDKDGNVVDRYAPTTSPLSIEKDIKKLLASS

SEQ ID NO: 73582 - DNA, 717 bp, Drosophila melanogaster
  CDS (1)..(717)
atgagtctcaggcagtttcagaacatttcccgccaggccctcaggtgctactcgatgaggcggacccctggccccttcctcgagctgagtcgcggtcagaggcagtgccttcgcctctgcaccatcatgcttcccgtgagctgtgcggccacgcccatgaacgccatctcctcagccgcccagcactccacagcagctgccatcgacatgtctgctaacggagattacaagaacgccgcctcgatctacgagttcaccgtgaaggatacccatggcaacgatgtttccctggaaaagtacaagggcaaggtggtcctggtggtgaacatcgcctccaagtgcggcctgaccaagaacaactacgagaagctgacggatctaaaggagaagtacggcgagcgcggcctggtgatcctcaacttcccgtgcaatcagtttgggtcccagatgccggaggccgatggagaggccatggtgtgccacctgcgcgactccaaggctgacatcggcgaggtgttcgccaaggtcgatgtgaatggagacaatgcggcgccgctgtacaaatacctaaaggccaagcagaccggcaccctgggcagcggaatcaagtggaacttcaccaagtttctggtgaacaaggagggcgtgcccatcaaccgatatgccccgaccaccgatcccatggacatcgccaaggacattgaaaagctgctgtag

SEQ ID NO: 73583 - protein, 238 aa, Drosophila melanogaster
MSLRQFQNISRQALRCYSMRRTPGPFLELSRGQRQCLRLCTIMLPVSCAATPMNAISSAAQHSTAAAIDMSANGDYKNAASIYEFTVKDTHGNDVSLEKYKGKVVLVVNIASKCGLTKNNYEKLTDLKEKYGERGLVILNFPCNQFGSQMPEADGEAMVCHLRDSKADIGEVFAKVDVNGDNAAPLYKYLKAKQTGTLGSGIKWNFTKFLVNKEGVPINRYAPTTDPMDIAKDIEKLL

SEQ ID NO: 73584 - DNA, 504 bp, Cicer arietinum
  CDS (1)..(504)
atggccgaacaagcttcaaaatccatttacgatttcactgtcaaggatatccgtggaaatgatgtgagtctgagtgagtacagtgggaaggttctactgattgtcaatgttgcttcacaatgtggtttgactcaaacaaattacaaagagttgaatgtgatatacgataagtacaagaatcaagggtttgaaatcttggcatttccatgcaaccagtttcgtggacaggaacccggatccagtgaagaaattcagaatgttgtttgcacaaggttcaaagctgaatttccaatctttgataaggttgaagtcaatggaaagaatgcggaaccactttacaagtttttgaagggtcagcaaggtggaatatttggagatggtatcaagtggaacttcacaaaattcttagtaaacaaacaagggaaggttgtggacagatatgctcctaccactgctcctctgaaaatcgagaaggacatcgagaagcttataaagtcttcttga

SEQ ID NO: 73585 - protein, 167 aa, Cicer arietinum
MAEQASKSIYDFTVKDIRGNDVSLSEYSGKVLLIVNVASQCGLTQTNYKELNVIYDKYKNQGFEILAFPCNQFRGQEPGSSEEIQNVVCTRFKAEFPIFDKVEVNGKNAEPLYKFLKGQQGGIFGDGIKWNFTKFLVNKQGKVVDRYAPTTAPLKIEKDIEKLIKSS

SEQ ID NO: 73586 - DNA, 507 bp, Zea mays
  CDS (1)..(507)
atggctgctgcctcctccgccacctccgtccacgacttcaccgtcaaggatgctagcgggaaagatgtggaccttagcacctataaggggaaggttctgctcatagtcaatgttgcatctcagtgtggcttaaccaattccaactacacagagctgagccagttgtatgagaagtacaaggaccagggttttgagatccttgcattcccatgcaaccagttcggtgggcaggagcctggcactaatgaggagattgtccagtttgcttgtactcgcttcaaggctgagtatccaattttcgacaaggttgatgtcaatggtgacaatactgcacccatttacaagttcctgaagtccagcaaaggtagtctctttggcgataacataaaatggaacttctccaaattcttggttgacaaagaggggcatgttgtggagcggtatgcaccaacaacttccccactgagcatcgagaaggacatcaagaaactactagggagttattaa

SEQ ID NO: 73587 - protein, 168 aa, Zea mays
MAAASSATSVHDFTVKDASGKDVDLSTYKGKVLLIVNVASQCGLTNSNYTELSQLYEKYKDQGFEILAFPCNQFGGQEPGTNEEIVQFACTRFKAEYPIFDKVDVNGDNTAPIYKFLKSSKGSLFGDNIKWNFSKFLVDKEGHVVERYAPTTSPLSIEKDIKKLLGSY

SEQ ID NO: 73588 - DNA, 699 bp, Brassica napus
  CDS (1)..(699)
atggcttcttcctcttacgcaccattctctgcagtcttcagcggtttcgctgcaacgaaacctaacccacctccaacttgttctgcttttctcgtccctaagcgaagatcaaattctcggaatctgaaaaatggggtttccttgaaatcttggaataagcatggatttcaattcacatcaagaaatttgagtgtgtatgcaagagctactgaagagaagactgttcatgatttcactgtaaaggacataagtgggaaggatgtttccctagacaaattcaaaggaaaacctctgttgatcgttaacgttgcttcaaaatgtggtttaacatcatcaaactacacagagctttcacaattgtacgacaaatacagaaaccaaggatttgagattctagctttcccttgcaatcaatttggaggtcaagaacctgaatcaaacccggatatcaagcggttcgtgtgtaccagatttaaagctgagttccctatattcgataaggttgatgtgaatggaccgagcacagctccaatctaccagttcttgaaatcaaagtcgggtgggttcttgggtgatctcatcaagtggaactttgagaaattcttggttgacaaaaaaggcaacgtcgtccagagataccctcccacgacttctcctttacaaattgagaaagacatccagaagttgcttgtggcttaa

SEQ ID NO: 73589 - protein, 232 aa, Brassica napus
MASSSYAPFSAVFSGFAATKPNPPPTCSAFLVPKRRSNSRNLKNGVSLKSWNKHGFQFTSRNLSVYARATEEKTVHDFTVKDISGKDVSLDKFKGKPLLIVNVASKCGLTSSNYTELSQLYDKYRNQGFEILAFPCNQFGGQEPESNPDIKRFVCTRFKAEFPIFDKVDVNGPSTAPIYQFLKSKSGGFLGDLIKWNFEKFLVDKKGNVVQRYPPTTSPLQIEKDIQKLLVA

SEQ ID NO: 73590 - DNA, 504 bp, Momordica charantia
  CDS (1)..(504)
atggctgaagaatcccccaaatccatatatgatttcactgtcaaggatattcgtgggaatgatgtgtgccttagtcaatacagtgggaaggttcttctgatagtgaatgttgcttctaagtgtggttttacggattcaaactacaaggaattgaatgtattgtatgacaagtacaaaagtcaaggtttcgagatattagcatttccttgcaatcaatttgcacgacaagagccaggaaccaatgaggagatccaggaaactctatgcacaaggttcaaagcagaattccccatctttgataaggtcgaggttaacggtaagaatgcagcacccatttataaattcctgaaattgaaaaagggtggaatatttggcgatggcatcaaatggaacttcacgaagttcttggtgaacagagaaggaaaggtcgttgacagatatgctcctaccacccctcctctcaacattgagaaagatatccagaatctattgggatctgcttga

SEQ ID NO: 73591 - protein, 167 aa, Momordica charantia
MAEESPKSIYDFTVKDIRGNDVCLSQYSGKVLLIVNVASKCGFTDSNYKELNVLYDKYKSQGFEILAFPCNQFARQEPGTNEEIQETLCTRFKAEFPIFDKVEVNGKNAAPIYKFLKLKKGGIFGDGIKWNFTKFLVNREGKVVDRYAPTTPPLNIEKDIQNLLGSA

SEQ ID NO: 73592 - DNA, 594 bp, Raphanus sativus
  CDS (1)..(594)
atgcctagatcaagaagtcgcgtcctgattctcttattgcctctagcctttgtgttctacctgtacaggtacctgccttctccagctattgtcgaccaatcatcatacagctccatctaccacatctccgttaaggacattgatgggaatgatgtgagtttaagcaagttcacaggaaaggtgcttcttattgtcaatgtagcctctaagtgtggtctaacacagggaaactacaaagagttgaacattttgtatgccaagtacaaaactaaggggcttgagatcttagcgtttccctgcaaccaatttggaagtcaagagccaggtagcaacaaggagattaaggataacatttgcacaaccttcaaaggagagtttcccatctttgacaagattgaagtgaatggtgagaatgcttcacctctatacaagttcttgaaagaacagaaaggtggattgtttggggattctatcaagtggaacttcgcaaaatttctggtagacaaacaaggaaatgttgtggatcgatttgctcctacaacatcacctcttgagattgagaaggacatagagaagctattggcatctacgtga

SEQ ID NO: 73593 - protein, 197 aa, Raphanus sativus
MPRSRSRVLILLLPLAFVFYLYRYLPSPAIVDQSSYSSIYHISVKDIDGNDVSLSKFTGKVLLIVNVASKCGLTQGNYKELNILYAKYKTKGLEILAFPCNQFGSQEPGSNKEIKDNICTTFKGEFPIFDKIEVNGENASPLYKFLKEQKGGLFGDSIKWNFAKFLVDKQGNVVDRFAPTTSPLEIEKDIEKLLAST

SEQ ID NO: 73594 - DNA, 531 bp, Hevea brasiliensis
  CDS (1)..(531)
atggctagccaatccgaacctaaatcagtctatgacttcactgttaaggatgctaggggaaacgatgttgatctcagcacttacaaggggaaggttctcttgattgttaatgttgcttcacaatgtggcttgacaaactcgaactacactgagctgactcagttgtaccagaaatataaggaccaaggcttggagattctggctttcccctgtaatcagtttggatctcaggagccaggtaccaatgaacagattgtggagtttgcttgtactcgtttcaaggctgagtatccaatatttgacaaggttgatgtgaatggaaacaatgctgctcctctttacaaattcttgaagtctagcaaaggtggaatttttggggacaacatcaagtggaatttttccaagtttctggttgataaagatggcaatgttgttgaccgttatgcccccactacggtcccctctcagcatcgagaaggatgtgaagaaactgctggggattgcatgagtgcgcaaggcaggcctaattaa

SEQ ID NO: 73595 - protein, 176 aa, Hevea brasiliensis
MASQSEPKSVYDFTVKDARGNDVDLSTYKGKVLLIVNVASQCGLTNSNYTELTQLYQKYKDQGLEILAFPCNQFGSQEPGTNEQIVEFACTRFKAEYPIFDKVDVNGNNAAPLYKFLKSSKGGIFGDNIKWNFSKFLVDKDGNVVDRYAPTTVPSQHREGCEETAGDCMSAQGRPN

SEQ ID NO: 73596 - DNA, 504 bp, Blumeria graminis
  CDS (1)..(504)
atgggaccgacaactactctatacgattttatgccaaaagataagaatggcgaaccagttccacttgaaaagtacaaaggtcaagtagtcttaattgtgaatacggcatcgaaatgtggcttcactcctcagtttgagggcctagaaaagttatacaagtcagtttcgtcaacacacccggggaaattcacgattctgggtttcccttgcaaccaattcggcggacacgatccaggatcaaatgatgagattcagaacttctgtcgcatcaattatggcgtcacctttcccatgctgggcaaagttaacgtgaatggcgatacggcagatccgctctttgagtggctcaaagtggagaaacctggcataatgggaatgaagagggtcaagtggaattttgaaaagtggctcgtgtcaaaagatggtaagcccatcaagagatattcaagtaccgcaggccccgaaggctttcaaagtcttataattgaagagattgagaagtag

SEQ ID NO: 73597 - protein, 167 aa, Blumeria graminis
MGPTTTLYDFMPKDKNGEPVPLEKYKGQVVLIVNTASKCGFTPQFEGLEKLYKSVSSTHPGKFTILGFPCNQFGGHDPGSNDEIQNFCRINYGVTFPMLGKVNVNGDTADPLFEWLKVEKPGIMGMKRVKWNFEKWLVSKDGKPIKRYSSTAGPEGFQSLIIEEIEK

SEQ ID NO: 73598 - DNA, 546 bp, Paenibacillus polymyxa
  CDS (1)..(546): transl_table=11
atgagcatttatgattattcagccattgcgatgaacggtaaggagattgtccttagtgattataaagataaagtagtgttgattgtaaatacggccagccagtgcggatttacatttcaatatcaggatttgcagcgtctatatgatcaatttaaggatagaggcttagtgattctcggttttccatgcaatcaatttgccgatcaagagccagattccaatgaaagtgtgcaaacattttgtactctgaattatggtgtcgcgttccctatgtttcaaaaggtgaatgtacgtgatgagcaggctcacccgttgtttacatatcttgcttcgtcgttgccctttgagggctttgatgaaacgcattcggttgccaaaatacttattcctttaattcatgagcgtcatcctgagtacttaccaggagattcgatcaaatggaatttcacgaaattcctgattgatcggaacgggaaagtgatcaaacgatttgaagcaacgactgaccctctggatatggaagaatatattgaagcattactgtaa

SEQ ID NO: 73599 - protein, 181 aa, Paenibacillus polymyxa
MSIYDYSAIAMNGKEIVLSDYKDKVVLIVNTASQCGFTFQYQDLQRLYDQFKDRGLVILGFPCNQFADQEPDSNESVQTFCTLNYGVAFPMFQKVNVRDEQAHPLFTYLASSLPFEGFDETHSVAKILIPLIHERHPEYLPGDSIKWNFTKFLIDRNGKVIKRFEATTDPLDMEEYIEALL

SEQ ID NO: 73600 - DNA, 498 bp, Hordeum vulgare
  CDS (1)..(498)
atggccgccgcgtcctccgccacctccgtccacgacttcaccgtcaaggatgcaagcggcaaggacgtcgacctgagcgtctacaaggggaaggttcttctcatcgttaacgtcgcatcccagtgtggcttaacgaactccaactacaccgagctgagccagctgtaccccaagtacaaggaccaaggctttgagatcttggctttcccatgcaatcagtttggtgggcaggagcctggcaccaatgatgagatcgttcagtttgcctgcactcgcttcaaggccgagtaccccatttttgacaaggttgatgtcaacggcaacaatgtttctcccctatacaagttcctgaagtctagcaaaggcggctttttcggcgacagcatcaaatggaacttctctaagttcttggttgacaaggagggtcacgttgtggaccgctatgccccgaccacttcccccatgagcattgagaaggatatcaagaagctgctttag

SEQ ID NO: 73601 - protein, 165 aa, Hordeum vulgare
MAAASSATSVHDFTVKDASGKDVDLSVYKGKVLLIVNVASQCGLTNSNYTELSQLYPKYKDQGFEILAFPCNQFGGQEPGTNDEIVQFACTRFKAEYPIFDKVDVNGNNVSPLYKFLKSSKGGFFGDSIKWNFSKFLVDKEGHVVDRYAPTTSPMSIEKDIKKLL

SEQ ID NO: 73602 - DNA, 516 bp, Hordeum vulgare
  CDS (1)..(516)
atgggcgcagcagagtcgtcttccaagcttggtggttccgtccatgacttcgtcgttaaggatgtgagaggaaatgatgtggagctcagcagatacaaggggaaagtcctgcttattgtcaatgtcgcatctcgatgcggtctggccaattccaactacacggaaatgggccagctctatgagaaataccgggagaaaggtttggagatattggcgttcccctgcaatcaatttgccgggcaggaaccagatagcgatgagaagattgtggagtttgcttgcgaccgcttccaagcacagtttcctatttttcgcaaggtggacgtgaatggcaacaatgctgccccgctgtacaagttcttgaagtcagagaggggcggtctattcggagagcgtatcaaatggaacttcaccaagtttctagttgacaaagaggggcatgtcatgaatcgatatgcaccgacctggtccccactcggcattgagaatgatatcaagaagctgttggaggtttga

SEQ ID NO: 73603 - protein, 171 aa, Hordeum vulgare
MGAAESSSKLGGSVHDFVVKDVRGNDVELSRYKGKVLLIVNVASRCGLANSNYTEMGQLYEKYREKGLEILAFPCNQFAGQEPDSDEKIVEFACDRFQAQFPIFRKVDVNGNNAAPLYKFLKSERGGLFGERIKWNFTKFLVDKEGHVMNRYAPTWSPLGIENDIKKLLEV

SEQ ID NO: 73604 - DNA, 714 bp, Hordeum vulgare
  CDS (1)..(714)
atgccttctcgccccgccccgttcatccaccgcctccgcctcctgagaagcgccgtcgtctctccctcctccgcgccgctgccgtgcagccgcccgcgcctcgccgtcccgttcgcgcagccgccgatccgcgcccccgccttcgccgccgccggctcgccgctgctccgcccggtcggcgcccgattctcgctgtccagcaacatggccgccgccgcctcctccgcctcctccgtccacgacttcaccgtcgaggatgcaagtggaaaagatgtcgatctgagcacctacaaggggaaggttctcctcattgtcaatgttgcatcccagtgtggattgaccaattccaactatacggaactcgctcagttgtatgagaagtacaaggaccagggttttgagatccttgctttcccatgcaaccagtttggtgggcaggaacctggcactaatgaggaaattgttcagtttgcttgcactcgcttcaaggccgagtatccaatttttgacaaggttgatgtcaatggtgacaatgttgcacctgtctacaagtttctgaagtcaagcaaaggcagtctcttcggggacaacatcaaatggaacttctccaagttcttggttgacaaggatgggaatgttgtggatcgctacgcgccgaccacctcccccctcagcatcgagaaggacatcaagaagctgctcgcgagttcttaa

SEQ ID NO: 73605 - protein, 237 aa, Hordeum vulgare
MPSRPAPFIHRLRLLRSAVVSPSSAPLPCSRPRLAVPFAQPPIRAPAFAAAGSPLLRPVGARFSLSSNMAAAASSASSVHDFTVEDASGKDVDLSTYKGKVLLIVNVASQCGLTNSNYTELAQLYEKYKDQGFEILAFPCNQFGGQEPGTNEEIVQFACTRFKAEYPIFDKVDVNGDNVAPVYKFLKSSKGSLFGDNIKWNFSKFLVDKDGNVVDRYAPTTSPLSIEKDIKKLLASS

SEQ ID NO: 73606 - DNA, 492 bp, Chlamydomonas sp
  CDS (1)..(492)
atggcgtcgccattctacgcgctcgccgcgaccgacatcgccggcaaggagtttccgttcgcgcagctgcagggaaaagtggtgctcgtcgttaacgtcgcgagccagtgtggcttcacaccccagtacaagggcctccaggagctgtatgacaagtacaaggacgagggcctggtgatcatcggcttcccgtgcgaccagttcggccatcaggagcccggccaggagtctgagatcgccagcttctgccagaagaacttcggcgtgacgttcccgatgatggccaagatcgaggtaaacggcgacaacacgcacccggtctaccagttcctcaagtcggagaagaagcagctgttcatggagcgcatcaagtggaactttgaaaagttcctgatcaacaagcagggcgaggtcgtggagcgcttctcatcggcgggcgacccaatgaggaacatcgccccggcagtcgccaagctcctggccgaggcatga

SEQ ID NO: 73607 - protein, 163 aa, Chlamydomonas sp
MASPFYALAATDIAGKEFPFAQLQGKVVLVVNVASQCGFTPQYKGLQELYDKYKDEGLVIIGFPCDQFGHQEPGQESEIASFCQKNFGVTFPMMAKIEVNGDNTHPVYQFLKSEKKQLFMERIKWNFEKFLINKQGEVVERFSSAGDPMRNIAPAVAKLLAEA

SEQ ID NO: 73608 - DNA, 483 bp, Bacillus subtilis
  CDS (1)..(483): transl_table=11
atgtctatttatcatatgaaggtacgtacaatcacagggaaagacatgacacttcagcctttcgcgggaaaggtactgatgatcgtgaatacagcaagtaagtgcggttttacttcccaattgaagcagctgcaggaattatatgatacatatcagcaggaggggctggagatcttagggttcccctgcaatcaattcatgaaccaagagcctggtgaagaggctgacatacaggaattttgtgaaacaaattacggtgttacatttcctatgttttcaaaagtggatgtaaacgggaaaaacgcccacccgctgtttgtgtatttgacagaacatgcgaaagggatgctgggaactaaggcgatcaagtggaatttcacgaaatttatagtggatagaaatggagaaatcgttggccgttattcaccaaatacaaatccgaaagagttggaagacgatatcgtgaagctattagagcaataa

SEQ ID NO: 73609 - protein, 160 aa, Bacillus subtilis
MSIYHMKVRTITGKDMTLQPFAGKVLMIVNTASKCGFTSQLKQLQELYDTYQQEGLEILGFPCNQFMNQEPGEEADIQEFCETNYGVTFPMFSKVDVNGKNAHPLFVYLTEHAKGMLGTKAIKWNFTKFIVDRNGEIVGRYSPNTNPKELEDDIVKLLEQ

SEQ ID NO: 73610 - DNA, 477 bp, Staphylococcus aureus
  CDS (1)..(477): transl_table=11
atggagacaatttatgattttgtagtagaaacaaataaaggtgttacttacaaattagatgcatataagggtgacgttatgctaattgttaatacagctagcgaatgtggctttacttcacaatttgaaggtttgcaatcattatacgagaaatacaaagatcaagggtttgtaattctaggtttcccttgtaatcaatttggtggccaagaacctggttcaggcgaagaagcagctcaaaactgtaaattaaactatggtgttaccttccctatgcatcaaaaaatagacgtaaaaggggaacatcaattacctttatttagatatttgactgcggcacaacacggattctttaatgagaaaatcaaatggaatttcactaagtttttagtggatcgcgaaggtaacgttgttaaacgatttgcacctcaaaaaaaacctgttcaaatcgaaagagaaatagaaaaattattataa

SEQ ID NO: 73611 - protein, 158 aa, Staphylococcus aureus
METIYDFVVETNKGVTYKLDAYKGDVMLIVNTASECGFTSQFEGLQSLYEKYKDQGFVILGFPCNQFGGQEPGSGEEAAQNCKLNYGVTFPMHQKIDVKGEHQLPLFRYLTAAQHGFFNEKIKWNFTKFLVDREGNVVKRFAPQKKPVQIEREIEKLL

SEQ ID NO: 73612 - DNA, 552 bp, Escherichia coli
  CDS (1)..(552): transl_table=11
atgcaagattccattctgacgaccgtagtgaaagatatcgacggtgaagtgaccacgctggagaagttcgccggtaatgtgctgttgattgtcaatgtcgcctcaaagtgtggcttaacgccgcaatatgagcagttggagaatattcagaaagcctgggtcgatcgaggttttatggtgctgggattcccgtgcaaccagtttctggaacaagaaccgggcagcgatgaagagattaaaacttactgtaccaccacatggggggtgacgttcccgatgttcagtaagattgaagttaatggcgaaggacgccatccgctgtatcaaaaattgattgccgcagcgccgaccgcagtcgcgccggaagagagcggattctatgcccgtatggtcagcaaaggccgtgcaccgctgtacccggatgatattttatggaattttgaaaaattcctggttggcagggacggaaaagtcatccagcgtttttccccggatatgacgccggaagatcccattgtgatggaaagcattaaactggcgttggcaaaataa

SEQ ID NO: 73613 - protein, 183 aa, Escherichia coli
MQDSILTTVVKDIDGEVTTLEKFAGNVLLIVNVASKCGLTPQYEQLENIQKAWVDRGFMVLGFPCNQFLEQEPGSDEEIKTYCTTTWGVTFPMFSKIEVNGEGRHPLYQKLIAAAPTAVAPEESGFYARMVSKGRAPLYPDDILWNFEKFLVGRDGKVIQRFSPDMTPEDPIVMESIKLALAK

SEQ ID NO: 73614 - DNA, 510 bp, Synechocystis sp
  CDS (1)..(510): transl_table=11
atgactgcccaagccaacaacacaatctacggtttttctgccaatgccttggatggttcccccgtagctctgagggactttgaaggtaaagtgctgttaattgtcaacaccgccagtcaatgtggcttcactccccaataccaaggactccaggctctatacaatcgattcggcgatcggggttttacggtgcttggttttccctgtaatcagtttggccagcaggaacccggtggctcaggggaaattaaaaacttttgcgaaacccgttatggagtaacttttcccttatttgaaaaagtggaagtcaatggtcccaacgcccatcccctatttaagtttttaaccgcagctagccctggtatggccattccttttttgggtggtgcggaggacattaaatggaatttcactaagtttttggtcgatcgccaaggtaaagtggtcaaacgctacggttccatcgccaaacccgatgaaattgcggcggacatcgagaaattgttgtaa

SEQ ID NO: 73615 - protein, 169 aa, Synechocystis sp
MTAQANNTIYGFSANALDGSPVALRDFEGKVLLIVNTASQCGFTPQYQGLQALYNRFGDRGFTVLGFPCNQFGQQEPGGSGEIKNFCETRYGVTFPLFEKVEVNGPNAHPLFKFLTAASPGMAIPFLGGAEDIKWNFTKFLVDRQGKVVKRYGSIAKPDEIAADIEKLL

SEQ ID NO: 73616 - DNA, 669 bp, Pseudomonas wisconsinensis
  CDS (1)..(669): transl_table=11
atgtctattcgtcgtcttgcctgttcacttttgctctccagcctggcgttgccggtgcttgccgcagagtgtccggccatgctccagggcgaactgcccaagctgcgcgccaaaggtgaaaacatcgagctctgtcagtacgcgggcaagccgctggtggtggtcaataccgccagcttttgcggcttcaccccgcaattcaaagggcttgaagcgctttaccagcggtacaaggatcaggaactggaggtattgggcgtgccgtccgacgacttccgccaggaatccgccgatagcaaggaaacggccaccgtctgctacgtcaactacggcgtgaccttcgccatgaccgaaccgcagccggtttccggtgccaatgccatcccgttgttcaagggcctggccgagcagagccggcagccgcgctggaacttcttcaagtacgtggtcgaccgtcagggcaaggtggtggcgagtttctccagcctgaccaagcctgacgatcccgagctgattgccgcccgtagagaaggcgatcgcctcgcaaccctgattccgtcccgcttcacggcccttcacccatctgggcgatgggccttgtccgtctgcctgcctagactggccaggcgccggacgcagttcacccggcgtgccctacaagaacaataa

SEQ ID NO: 73617 - protein, 222 aa, Pseudomonas wisconsinensis
MSIRRLACSLLLSSLALPVLAAECPAMLQGELPKLRAKGENIELCQYAGKPLVVVNTASFCGFTPQFKGLEALYQRYKDQELEVLGVPSDDFRQESADSKETATVCYVNYGVTFAMTEPQPVSGANAIPLFKGLAEQSRQPRWNFFKYVVDRQGKVVASFSSLTKPDDPELIAARREGDRLATLIPSRFTALHPSGRWALSVCLPRLARRRTQFTRRALQEQ

SEQ ID NO: 73618 - DNA, 504 bp, Helianthus annuus
  CDS (1)..(504)
atggctacgcaatcgaagaaaaccctctatgatttcacagtcaaggatgctaagggtaacgatgtagaccttagcgtatacaagggaaaagttgtacttattgttaacgttgcgtccaagtgtgggcttacaaacaacagctatgatgaactgaatcagatttatttgaagtacaaggagaaaggttttgagatcttggcatttccatgcaaccaatttggacagcaggaaccaggaaccaacgaagaaattgtcgacttcgtctgcaccaaattcaaatcggaatttcccatctttgacaagattgatgtgaatggcgagaacgctgcacctgtatacgagttcttgaaaacagggttctatggaattcttgggggagacatccaatggaacttttccaagttcttggttgataaaaacggccaacctgtcgactgctactatcccacaacttcccctcttacagtcgagagagacattcagaagctcttgggtctcctctag

SEQ ID NO: 73619 - protein, 167 aa, Helianthus annuus
MATQSKKTLYDFTVKDAKGNDVDLSVYKGKVVLIVNVASKCGLTNNSYDELNQIYLKYKEKGFEILAFPCNQFGQQEPGTNEEIVDFVCTKFKSEFPIFDKIDVNGENAAPVYEFLKTGFYGILGGDIQWNFSKFLVDKNGQPVDCYYPTTSPLTVERDIQKLLGLL

SEQ ID NO: 73620 - DNA, 711 bp, Pisum sativum
  CDS (1)..(711)
atggcttccatggctttctccacaaccttcttcactcctcttcgtgatttcaaccaacctagaaccaattcaaccccttcaacttctttgccttttaccaaatcctcaattgcttcttctaagtccccgttttttcaactagggttttctcaacaagcttcctccaatttcccaattgttccgtcgaagactaggtctttctcagtcaacgctaaggctatcaaagataaaaccatttatgattttactgttaaggatattgataagaaggatgtttctcttagcaaattcaaggggaaggttctcttgattgtcaatgttgcttcacgatgtggcctgacatcatcaaactacacagaactttcgcacttatatgaaaattttaaaaataaaggtttggaggttctagctttcccttgcaatcaatttggcatgcaggagcctggatcaaatgaagaaattaagcaatttgcttgcactaagttcaaagcagaatttccaatttttgataaggttgatgtaaatggaccatttactgctccagtataccagtttctgaaatcaagttctgggggctttttcggtgatattgtcaagtggaatttcgagaaattcttggttgataaaaatggtaaagttgttgaaagatacccaccaacaacctctccttttcaaattgagaaggatatccagaagttacttgctgcataa

SEQ ID NO: 73621 - protein, 236 aa, Pisum sativum
MASMAFSTTFFTPLRDFNQPRTNSTPSTSLPFTKSSIASSKSPFFQLGFSQQASSNFPIVPSKTRSFSVNAKAIKDKTIYDFTVKDIDKKDVSLSKFKGKVLLIVNVASRCGLTSSNYTELSHLYENFKNKGLEVLAFPCNQFGMQEPGSNEEIKQFACTKFKAEFPIFDKVDVNGPFTAPVYQFLKSSSGGFFGDIVKWNFEKFLVDKNGKVVERYPPTTSPFQIEKDIQKLLAA

SEQ ID NO: 73622 - DNA, 477 bp, Schizosaccharomyces pombe
  CDS (1)..(477)
atgtctcatttctacgacttggctcctaaggacaaggatggaaatccttttcctttcagcaacttgaagggtaaagtggtccttgttgtcaatacagcgagcaaatgtggattcactcctcaatacaaaggtcttgaggcgttgtatcagaaatacaaggatagaggatttatcatccttggattcccttgcaatcaatttggaaaccaagaacccggttctgacgaagaaatcgctcaattttgccaaaagaactatggcgtaaccttccctgtactggccaagatcaatgttaatggcgacaacgtcgaccctgtttatcaattcttgaagagccaaaagaagcaacttggccttgagcgtattaagtggaattttgaaaagttcttggtcaatcgtcaaggtcaagtcatcgaacgctattccagtattagcaagcctgaacatctcgaaaacgatatcgagagtgtcctttaa

SEQ ID NO: 73623 - protein, 158 aa, Schizosaccharomyces pombe
MSHFYDLAPKDKDGNPFPFSNLKGKVVLVVNTASKCGFTPQYKGLEALYQKYKDRGFIILGFPCNQFGNQEPGSDEEIAQFCQKNYGVTFPVLAKINVNGDNVDPVYQFLKSQKKQLGLERIKWNFEKFLVNRQGQVIERYSSISKPEHLENDIESVL

SEQ ID NO: 73624 - DNA, 504 bp, Saccharomyces cerevisiae
  CDS (1)..(504)
atgcaagaattttattctttttcaccaatagatgaaaacggaaatccattccccttcaactccctgcgtaacaaagtggttttgatagtcaatgtagcatctcattgtgcgttcacacctcaatacaaggaattagagtacttgtacgaaaaatacaaatcacatggtctagtgattgtggcctttccctgtggtcaattcggaaatcaagagttcgagaaggataaagagattaataagttctgtcaagataaatatggtgtaaccttccctattctacataagatccgttgcaacgggcaaaagcaagatcccgtctacaagttcttaaagaattcagtaagcgggaagtctggaataaaaatgataaaatggaattttgaaaagtttgtggtagaccgaaatgggaaggtggttaaaaggttttcatgcatgactaggccactagagctttgtccaataatcgaagaattactgaatcaaccaccagaagaacagatttaa

SEQ ID NO: 73625 - protein, 167 aa, Saccharomyces cerevisiae
MQEFYSFSPIDENGNPFPFNSLRNKVVLIVNVASHCAFTPQYKELEYLYEKYKSHGLVIVAFPCGQFGNQEFEKDKEINKFCQDKYGVTFPILHKIRCNGQKQDPVYKFLKNSVSGKSGIKMIKWNFEKFVVDRNGKVVKRFSCMTRPLELCPIIEELLNQPPEEQI

SEQ ID NO: 73626 - DNA, 510 bp, Arabidopsis thaliana
  CDS (1)..(510)
atggcggatgaatctccaaagtctatctacgacttcaccgtcaaggatatcggaggtaacgatgtgagtttggaccaatacaaaggcaaaactcttttggttgtaaacgttgcttccaaatgtggtctgacggatgcgaactacaaggaactgaatgttctgtacgagaaatacaaggagcaagggttggagatattagcattcccgtgtaatcagttcttaggacaagaaccaggaaacaatgaagagattcaacaaactgtctgcaccaggttcaaagctgaattccccatctttgacaaggtggatgtgaacggtaagaacacggcaccattatacaagtacttgaaagcagagaaaggaggtttgctcattgatgctatcaaatggaacttcaccaaattcttggtttctcctgatggcaaggtcttacagagatattctcccagaacctctcctcttcaattcgagaaggacattcaaactgcgttgggacaggcctcttcttaa

SEQ ID NO: 73627 - protein, 169 aa, Arabidopsis thaliana
MADESPKSIYDFTVKDIGGNDVSLDQYKGKTLLVVNVASKCGLTDANYKELNVLYEKYKEQGLEILAFPCNQFLGQEPGNNEEIQQTVCTRFKAEFPIFDKVDVNGKNTAPLYKYLKAEKGGLLIDAIKWNFTKFLVSPDGKVLQRYSPRTSPLQFEKDIQTALGQASS

SEQ ID NO: 73628 - DNA, 489 bp, Saccharomyces cerevisiae
  CDS (1)..(489)
atgaccacatctttttatgatttagaatgcaaggacaagaaaggcgaatcttttaagtttgaccaactgaaaggcaaagtagttctcatagttaatgttgcctccaagtgcggcttcacgccgcagtataaagaattggaagaactatacaaaaaatatcaagataaggggtttgttattttggggttcccatgtaatcagttcgggaagcaggaaccgggctctgatgaacaaattacggaattttgccagttgaattatggcgttacattcccaattatgaagaagattgatgttaacggaagtaatgctgactctgtctataattatttgaaaagccaaaaagcaggtttactaggtttcaagggtatcaaatggaattttgaaaagttcttagttgattccaatggtaaggttgtccaaagattttcctccttaacaaaaccatcgtccttggaccaagaaatccaaagcctgttaagtaaatga

SEQ ID NO: 73629 - protein, 162 aa, Saccharomyces cerevisiae
MTTSFYDLECKDKKGESFKFDQLKGKVVLIVNVASKCGFTPQYKELEELYKKYQDKGFVILGFPCNQFGKQEPGSDEQITEFCQLNYGVTFPIMKKIDVNGSNADSVYNYLKSQKAGLLGFKGIKWNFEKFLVDSNGKVVQRFSSLTKPSSLDQEIQSLLSK

SEQ ID NO: 73630 - DNA, 621 bp, Arabidopsis thaliana
  CDS (1)..(621)
atgcctagatcaagcagatgggtcaatcagcgagctacctctaagattaaaaaatttatactctttttgggtgtagcctttgtcttctacctctacagatacccttcttcgccatcgacggtggaacaatcatccacttccatctacaacatttccgttaaggatattgaagggaaagatgtgagtttgagcaagtttaccgggaaagtgcttcttatagtcaatgtagcctctaagtgtggtctaacacatggaaactacaaagaaatgaacattctgtatgccaagtacaaaactcaggggtttgagatcttagcatttccttgcaaccaatttggtagtcaagagccaggcagcaacatggagatcaaggaaaccgtttgcaatatcttcaaagcagaattcccaatctttgacaagattgaagtaaatggaaagaacacttgtcccctttacaatttcttaaaagaacaaaaaggaggattgtttggggatgctattaagtggaatttcgcaaagtttctggtagacagacaaggaaatgtcgttgaccgatatgctccaactacatcacctcttgaaattgagaaggatatcgtcaagctattggcatctgcttga

SEQ ID NO: 73631 - protein, 206 aa, Arabidopsis thaliana
MPRSSRWVNQRATSKIKKFILFLGVAFVFYLYRYPSSPSTVEQSSTSIYNISVKDIEGKDVSLSKFTGKVLLIVNVASKCGLTHGNYKEMNILYAKYKTQGFEILAFPCNQFGSQEPGSNMEIKETVCNIFKAEFPIFDKIEVNGKNTCPLYNFLKEQKGGLFGDAIKWNFAKFLVDRQGNVVDRYAPTTSPLEIEKDIVKLLASA

SEQ ID NO: 73632 - DNA, 492 bp, Saccharomyces cerevisiae
  CDS (1)..(492)
atgtcagaattctataagctagcacctgttgacaagaaaggccaaccattccccttcgaccaattaaagggaaaagtggtgcttatcgttaatgttgcctccaaatgtggattcactcctcaatacaaagaactagaggccttgtacaaacgttataaggacgaaggatttaccatcatcgggttcccatgcaaccagtttggccaccaagaacctggctctgatgaagaaattgcccagttctgccaactgaactatggcgtgactttccccattatgaaaaaaattgacgttaatggtggcaatgaggaccctgtttacaagtttttgaagagccaaaaatccggtatgttgggcttgagaggtatcaaatggaattttgaaaaattcttagtcgataaaaagggtaaagtgtacgaaagatactcttcactaaccaaaccttcttcgttgtccgaaaccatcgaagaacttttgaaagaggtggaatag

SEQ ID NO: 73633 - protein, 163 aa, Saccharomyces cerevisiae
MSEFYKLAPVDKKGQPFPFDQLKGKVVLIVNVASKCGFTPQYKELEALYKRYKDEGFTIIGFPCNQFGHQEPGSDEEIAQFCQLNYGVTFPIMKKIDVNGGNEDPVYKFLKSQKSGMLGLRGIKWNFEKFLVDKKGKVYERYSSLTKPSSLSETIEELLKEVE

SEQ ID NO: 73634 - DNA, 513 bp, Arabidopsis thaliana
  CDS (1)..(513)
atgggtgcttctgcttcggttcccgagagatccgtccatcaattcactgtaaaggatagctccggcaaggacctgaatatgagcatttaccaagggaaagtcctcctcatcgtcaatgttgcttccaaatgcggtttcaccgaaacaaactatacacagctcaccgaactttaccggaaatacaaggaccaagattttgagatcttggcattcccttgcaaccagtttctataccaggagcccggcacaagtcaagaggctcatgaatttgcctgcgaacgctttaaggccgaataccctgttttccaaaaggtacgcgtaaacggtcaaaacgcagcaccaatctataaattccttaaggcaagtaaacccacctttctgggttccagaattaagtggaacttcaccaagttcttggtcggcaaagatggcttagtgattgatcgttatggcacgatggttacaccgctatcaatcgagaaagacatcaagaaagctcttgaagacgcttga

SEQ ID NO: 73635 - protein, 170 aa, Arabidopsis thaliana
MGASASVPERSVHQFTVKDSSGKDLNMSIYQGKVLLIVNVASKCGFTETNYTQLTELYRKYKDQDFEILAFPCNQFLYQEPGTSQEAHEFACERFKAEYPVFQKVRVNGQNAAPIYKFLKASKPTFLGSRIKWNFTKFLVGKDGLVIDRYGTMVTPLSIEKDIKKALEDA

SEQ ID NO: 73636 - DNA, 504 bp, Citrus sinensis
  CDS (1)..(504)
atggcaagccaatcgaaaacttcagttcacgatttcactgttaaggacgccaagggacaggatgttgatcttagcatctacaagggaaagcttcttttgattgtcaatgttgcatcacagtgtggcttgaccaattcaaactacactgagctgagtcagttgtacgacaagtacaagaatcaaggcttggagattctggcctttccttgtaatcagtttggagctcaagagccaggagacaatgaacagattcaagaatttgcatgcactcgctttaaggctgagtttcccatatttgataaggttgatgttaatggtgataatgctgctcctttatacaagcatctgaaatccagcaaaggtggactttttggagacagcatcaagtggaacttttccaagttcttggtggataaggaggggaatgttgttgagcgttatgcccccaccactagccctctgagcattgagaaggatataaagaaacttctggagactgcttaa

SEQ ID NO: 73637 - protein, 167 aa, Citrus sinensis
MASQSKTSVHDFTVKDAKGQDVDLSIYKGKLLLIVNVASQCGLTNSNYTELSQLYDKYKNQGLEILAFPCNQFGAQEPGDNEQIQEFACTRFKAEFPIFDKVDVNGDNAAPLYKHLKSSKGGLFGDSIKWNFSKFLVDKEGNVVERYAPTTSPLSIEKDIKKLLETA

SEQ ID NO: 73638 - DNA, 513 bp, Gossypium hirsutum
  CDS (1)..(513)
  misc_feature (504)..(504): n is a, g, c or t
atggccagtcaatccagcaagcctcaatctatttatgacttcactgtcaaggatgctaagggtaatgatgttgatctcagcatttacaagggaaaggtccttattattgtcaatgttgcatcacagtgtggtctgacaaattcgaactatactgacttgaccgagatatacaagaagtacaaggatcaaggtttggagattcttgcattcccttgcaaccagttcggtgggcaggagcctggaagcattgaagagtcaatccagaacatggtttgcactcgcttcaaggccgagtacccaatattcgataaggttgatgtgaatggtgataatgctgctccactgtataagttcttgaaatcaagcaaaggtgggttctttggagatagtatcaagtggaacttctccaaattccttgttgacaaagaaggaaacgtcgtcgatcgctactctccaaccactactccagctagcatggagaaggatatcaagaaacttttgggngttgcttaa

SEQ ID NO: 73639 - protein, 170 aa, Gossypium hirsutum
MASQSSKPQSIYDFTVKDAKGNDVDLSIYKGKVLIIVNVASQCGLTNSNYTDLTEIYKKYKDQGLEILAFPCNQFGGQEPGSIEESIQNMVCTRFKAEYPIFDKVDVNGDNAAPLYKFLKSSKGGFFGDSIKWNFSKFLVDKEGNVVDRYSPTTTPASMEKDIKKLLGVA

SEQ ID NO: 73640 - DNA, 543 bp, Helianthus annuus
  CDS (1)..(543)
atggctacgcagacagtctttgacttcccggacgatgttctgcaacaaccacccatgccggcggataatgctttttccgacaaggatgtgaaagggcaagatgttgagcttagcaagtacaagggaaaagtcttgctgattgtcaatgttgcttcacaatgtggctttactaattcgaattatcctgagttgacaaccttgtaccagaagtacaaggatcaaggttttgagattcttgcttttccatgcaaccaatttggcgggcaagaacctggatccaatgaagaaatccaggtgtttgcttgcactcgttttaaagccgaataccccgtctttagcaaggtcaatgtgaatgggaaagaagccgatcccttgtacaagttcttgaagtcgagcaaaggcgggtttcttggtgacagtatcaaatggaatttcacaaagttcctagttgaccgtgaggggaaggtcgttgaccgatatgcacccaccaccagccctctgagcatcgagaaggacataaagaagctgcttaacgtcgcttaa

SEQ ID NO: 73641 - protein, 180 aa, Helianthus annuus
MATQTVFDFPDDVLQQPPMPADNAFSDKDVKGQDVELSKYKGKVLLIVNVASQCGFTNSNYPELTTLYQKYKDQGFEILAFPCNQFGGQEPGSNEEIQVFACTRFKAEYPVFSKVNVNGKEADPLYKFLKSSKGGFLGDSIKWNFTKFLVDREGKVVDRYAPTTSPLSIEKDIKKLLNVA

SEQ ID NO: 73642 - DNA, 513 bp, Mesembryanthemum crystallinum
  CDS (1)..(513)
atggctagccagtccaccgatcagcccaaatccatccacgacttcatcgtcaaggatgctcgtggtaatgacgtggatcttagcatctacaaagggaaggtgctgttgattgtcaatgttgcatcacaatgtggtttgacaaattcaaactacccagaattgaccaagttgtatgagcaatacaaggacaagggtctggagatattggcatttccctgcaaccagttcggcaaccaggagcctggggacaatgaacagatcatggagttcgcatgcactcgcttcaaagccgagtttcccatatttgacaaggttgatgtgaatggtagtaatgctgccccagtctacaaatatctgaaatcaagcaaaggcggacttttcggagatgggatcaaatggaacttcacaaagttccttgttgacagagatggaaaggttgttgatcgttatgcaccaacaacttctcccgctagcatcgagaaggacattaagaaactgatcggcacctcatga

SEQ ID NO: 73643 - protein, 170 aa, Mesembryanthemum crystallinum
MASQSTDQPKSIHDFIVKDARGNDVDLSIYKGKVLLIVNVASQCGLTNSNYPELTKLYEQYKDKGLEILAFPCNQFGNQEPGDNEQIMEFACTRFKAEFPIFDKVDVNGSNAAPVYKYLKSSKGGLFGDGIKWNFTKFLVDRDGKVVDRYAPTTSPASIEKDIKKLIGTS

SEQ ID NO: 73644 - DNA, 510 bp, Nicotiana sylvestris
  CDS (1)..(510)
atggccagtcaatccagcaagcctcaatctatttatgacttcactgtcaaggatgctaagggtaatgatgttgatctcagcatttacaagggaaaggtccttattattgtcaatgttgcatcacagtgtggtctgacaaattcgaactatactgacttgaccgagatatacaagaagtacaaggatcaaggtttggagattcttgcattcccttgcaaccagttcggtgggcaggagcctggaagcattgaagagatccagaacatggtttgcactcgcttcaaggccgagtacccaatattcgataaggttgatgtgaatggtgataatgctgctccactgtataagttcttgaaatcaagcaaaggtgggttctttggagatagtatcaagtggaacttctccaaattccttgttgacaaagaaggaaacgtcgtcgatcgctactctccaaccactactccagctagcatggagaaggatatcaagaaacttttgggtgttgcttaa

SEQ ID NO: 73645 - protein, 169 aa, Nicotiana sylvestris
MASQSSKPQSIYDFTVKDAKGNDVDLSIYKGKVLIIVNVASQCGLTNSNYTDLTEIYKKYKDQGLEILAFPCNQFGGQEPGSIEEIQNMVCTRFKAEYPIFDKVDVNGDNAAPLYKFLKSSKGGFFGDSIKWNFSKFLVDKEGNVVDRYSPTTTPASMEKDIKKLLGVA

SEQ ID NO: 73646 - DNA, 510 bp, Solanum lycopersicum
  CDS (1)..(510)
atggctacgcaaacgagcaaccctcaatctgtttatgatttcactgtcaaggatgctaagggcaaggacgttgatctcagtatttacaagggaaaagtccttatcattgtcaatgttgcatcacagtgtggcctgactaattcgaactacactgacatgacggagttatacaagaagtacaaggatcaaggtttggagattctggccttcccttgcaaccagtttggtggacaggagcctggaaacattgaagatatccagcaaatggtctgcactcgcttcaaggctgagtaccccatatttgacaaggttgacgtgaatggtgataatgctgctccattatataggtttctgaaatcaagcaaaggtgggttctttggagatggtatcaagtggaacttctccaaattcctcattgacaaagaaggacatgtcgttgatcgctactctccaaccacttctccagctagcatggagaaggatatcaagaaactcttgggtgttgcttaa

SEQ ID NO: 73647 - protein, 169 aa, Solanum lycopersicum
MATQTSNPQSVYDFTVKDAKGKDVDLSIYKGKVLIIVNVASQCGLTNSNYTDMTELYKKYKDQGLEILAFPCNQFGGQEPGNIEDIQQMVCTRFKAEYPIFDKVDVNGDNAAPLYRFLKSSKGGFFGDGIKWNFSKFLIDKEGHVVDRYSPTTSPASMEKDIKKLLGVA

SEQ ID NO: 73648 - DNA, 516 bp, Spinacia oleracea
  CDS (1)..(516)
atggcaagtgactcttctgctcaacccaaatcagttcacgagtttgttgtcagggacgcccgtggaaatgatgttgatcttagcatttacaaagggaaggtgctgttgattgtcaatgttgcatcacaatgtgggcttaccaactcaaactacacagagatgactgaattgtatgagaagtacagggaactaggtttggaaatcttggcatttccatgtaaccagtttggtaatcaagagccaggaagtaacgaggaggtcttggagtttgcatgcacgcgtttcaaagctgaataccccatttttgacaaggttgatgtgaatggtagtaatgctgccccaatctataagttcttgaagtcaagcaaaggtggactttttggagatggacttaagtggaacttcaccaagtttctcgttgacaaagatggcaacgttgttgatcgttacgcacctactacttcaccaaagagcatcgagaaagatgtgaagaaactgttgggcatccaaaaataa

SEQ ID NO: 73649 - protein, 171 aa, Spinacia oleracea
MASDSSAQPKSVHEFVVRDARGNDVDLSIYKGKVLLIVNVASQCGLTNSNYTEMTELYEKYRELGLEILAFPCNQFGNQEPGSNEEVLEFACTRFKAEYPIFDKVDVNGSNAAPIYKFLKSSKGGLFGDGLKWNFTKFLVDKDGNVVDRYAPTTSPKSIEKDVKKLLGIQK

SEQ ID NO: 73650 - DNA, 510 bp, Nicotiana tabacum
  CDS (1)..(510)
atggccagccaatctagcaagcctcaatctatttatgacttcactgtcaaggatgctaagggtaatgatgttgatctcagcatttacaagggaaaggtccttatcattgtcaatgttgcatcacagtgtggcctgactaattcaaactacactgacatgaccgagatatacaagaagtacaaggatcaaggtctggagattcttgcattcccttgcaaccagttcggtggacaggagcctggaagcattgaagagatccagaacatggtttgcactcgcttcaaggccgagtaccccatatttgataaggttgatgtgaatggtgataatgctgctccactgtataagttcttgaaatcaagcaaaggtgggttctttggggatagtatcaagtggaacttctccaaattccttgttgacaaagaaggaaacgtcgtcgatcgctactctccaaccactactccagctagcatggagaaggatatcaagaaacttttgggggttgcttaa

SEQ ID NO: 73651 - protein, 169 aa, Nicotiana tabacum
MASQSSKPQSIYDFTVKDAKGNDVDLSIYKGKVLIIVNVASQCGLTNSNYTDMTEIYKKYKDQGLEILAFPCNQFGGQEPGSIEEIQNMVCTRFKAEYPIFDKVDVNGDNAAPLYKFLKSSKGGFFGDSIKWNFSKFLVDKEGNVVDRYSPTTTPASMEKDIKKLLGVA

SEQ ID NO: 73652 - DNA, 522 bp, Arabidopsis thaliana
  CDS (1)..(522)
atgggtgcttcatcatcatcatctgtgtcggagaaatcaatccatcaattcaccgtcaaggatagctccggcaaggaggttgacctaagcgtgtatcaagggaaagtgctgctcgtcgtcaacgtcgcttctaaatgcggattcacggagtccaattacacccagctgacggaactttaccggaaatataaagatcaaggttttgtggtattggcgtttccttgcaaccagtttctgtcccaagagcctggcaccagcgaagaggctcatcaatttgcttgtactcgctttaaggctgaataccctgttttccaaaaggtgcgtgtaaatggacaaaacgctgcaccagtctacaaattcctcaaatctaagaaaccctcttttcttggaagtcgtatcaaatggaacttcaccaagttcttggtcggcaaagatggtcaagtcattgatcgttatggcacaactgtttcacctctatccatccagaaagacatcgagaaagcccttgcacaagaattgtga

SEQ ID NO: 73653 - protein, 173 aa, Arabidopsis thaliana
MGASSSSSVSEKSIHQFTVKDSSGKEVDLSVYQGKVLLVVNVASKCGFTESNYTQLTELYRKYKDQGFVVLAFPCNQFLSQEPGTSEEAHQFACTRFKAEYPVFQKVRVNGQNAAPVYKFLKSKKPSFLGSRIKWNFTKFLVGKDGQVIDRYGTTVSPLSIQKDIEKALAQEL

SEQ ID NO: 73654 - DNA, 699 bp, Arabidopsis thaliana
  CDS (1)..(699)
atgcttcgctcctcaattcgacttctctatataagaagaaccagtcctctgcttcgaagtttatcatcatcatcatcatcatcatcatcaaaacgattcgattctgcgaaaccacttttcaattctcatcggattatttctcttccaatttctacaacgggagctaaactatctagatcggagcattcaatggctgcttcttccgaacccaaatctctttacgatttcaccgtcaaggatgctaagggaaacgatgttgatctaagcatctacaaagggaaggttcttttgattgtgaacgttgcttctcaatgtggcttgactaattcgaattatactgagcttgcgcagctgtatgagaagtacaaaggccatggtttcgagattcttgcgtttccgtgtaaccagtttgggaatcaagagcctggtactaatgaagagattgttcagtttgcttgtactcgtttcaaggctgagtacccgattttcgacaaggttgatgttaacggtgacaaagctgccccagtctacaagtttctgaaatcaagcaaaggcgggctctttggagacggcattaagtggaacttcgcaaagttcttggttgacaaagatggaaatgttgtcgatcgtttcgcaccaactacctcacctctcagcattgagaaggatgtgaagaagttgttgggagttactgcttaa

SEQ ID NO: 73655 - protein, 232 aa, Arabidopsis thaliana
MLRSSIRLLYIRRTSPLLRSLSSSSSSSSSKRFDSAKPLFNSHRIISLPISTTGAKLSRSEHSMAASSEPKSLYDFTVKDAKGNDVDLSIYKGKVLLIVNVASQCGLTNSNYTELAQLYEKYKGHGFEILAFPCNQFGNQEPGTNEEIVQFACTRFKAEYPIFDKVDVNGDKAAPVYKFLKSSKGGLFGDGIKWNFAKFLVDKDGNVVDRFAPTTSPLSIEKDVKKLLGVTA

SEQ ID NO: 73656 - DNA, 693 bp, Arabidopsis thaliana
  CDS (1)..(693)
atggctttctcttacgcatcattctctacacccttcaatggtttcgctgcaaatccgtctccgattacttccgcttttctcggcccatcattgagattctccaccagaacatcaaaaactcggaatccgagtaatggggtttcagtgaaatcgtcaaatagtcataggtttctagtcaaatctaaaaatttcagtgtctatgcaagggctgcagcagagaagtctgttcacgatttcactgtaaaggacatcgatggtaatgatgtttctctggacaaattcaaaggaaaacctttgttgatcgttaacgttgcgtcaagatgtggtttgacatcatcaaattactcagagctttctcaactgtacgaaaaatacaagaaccaaggatttgagattcttgctttcccttgcaatcaatttggaggtcaagaacccggttcaaaccctgagatcaagcaatttgcttgcacccggttcaaagcagagttccctatattcgacaaggttgatgtgaatggaccaagcacagctccaatctacaagttcttgaaatccaatgctggtggtttccttggtgatatcatcaaatggaactttgagaaattcttggttgataaaaagggcaaagttgtcgagagataccctcccacaacttctcctttccaaatcgaggtaccaaattcaaaactctaa

SEQ ID NO: 73657 - protein, 230 aa, Arabidopsis thaliana
MAFSYASFSTPFNGFAANPSPITSAFLGPSLRFSTRTSKTRNPSNGVSVKSSNSHRFLVKSKNFSVYARAAAEKSVHDFTVKDIDGNDVSLDKFKGKPLLIVNVASRCGLTSSNYSELSQLYEKYKNQGFEILAFPCNQFGGQEPGSNPEIKQFACTRFKAEFPIFDKVDVNGPSTAPIYKFLKSNAGGFLGDIIKWNFEKFLVDKKGKVVERYPPTTSPFQIEVPNSKL

SEQ ID NO: 73658 - DNA, 504 bp, Arabidopsis thaliana
  CDS (1)..(504)
atggcgacgaaggaaccagaatctgtttacgagttaagcatcgaggatgcaaaagggaacaacttagcactcagtcaatacaaagacaaagttcttttaattgtcaatgttgcttccaaatgtgggatgacaaactcaaactacactgaattgaatgagctttacaacaggtataaagataaaggtctggagattctagcatttccttgtaaccagtttggtgacgaggaaccgggaactaatgaccaaattactgactttgtttgtactcgcttcaaatctgaattccccattttcaacaagattgaagtaaacggagagaatgcttctcctctgtataagttcctgaagaaaggcaaatggggaatcttcggcgatgacattcaatggaactttgctaagtttcttgttgacaaaaacggtcaagctgtacaacgttattatccaactacttcccctcttacacttgagcatgacataaagaatcttctgaatatctcctga

SEQ ID NO: 73659 - protein, 167 aa, Arabidopsis thaliana
MATKEPESVYELSIEDAKGNNLALSQYKDKVLLIVNVASKCGMTNSNYTELNELYNRYKDKGLEILAFPCNQFGDEEPGTNDQITDFVCTRFKSEFPIFNKIEVNGENASPLYKFLKKGKWGIFGDDIQWNFAKFLVDKNGQAVQRYYPTTSPLTLEHDIKNLLNIS

SEQ ID NO: 73660 - DNA, 534 bp, Neisseria meningitidis serogroup A
  CDS (1)..(534): transl_table=11
atgggtatttacgattttcaaatgaaagatgcagaaggcaatgcggttgatttgtcaggctatcgcggcaaggttctgctgattgtcaacacggcaacgcgttgcggtctgaccccgcaatacgaggctttgcagaagctgtatgcacaatataccgcagaaggcttggagattttggattttccgtgcaaccagttccgcgaacaggctcccgaaagcagcggagaaattgcccaagtgtgtatgatgaagtttggcacgaagtttaagattttcgacaaaatcgaagtcaatggagcaaataccgcgcccttgtatgcctacctgaaatccgtcaaaccgcaagataaaggcaatcatctgtttaaagatttcgtgttgaagctcgcagctttgggagagaagcgcgacgaaggcgacatcaaatggaactttaccaaattcctcgtcaaccgcgacggcgaagtggtcgagcgttttgcgcctagtgttacgcccgaagaaatcgaagccgatattcgggcattgctgtaa

SEQ ID NO: 73661 - protein, 177 aa, Neisseria meningitidis serogroup A
MGIYDFQMKDAEGNAVDLSGYRGKVLLIVNTATRCGLTPQYEALQKLYAQYTAEGLEILDFPCNQFREQAPESSGEIAQVCMMKFGTKFKIFDKIEVNGANTAPLYAYLKSVKPQDKGNHLFKDFVLKLAALGEKRDEGDIKWNFTKFLVNRDGEVVERFAPSVTPEEIEADIRALL

SEQ ID NO: 73662 - DNA, 717 bp, Oryza sativa
  CDS (1)..(717)
atgccgtctcgcaccgccccgttcatctctcgcctccggctcctccgaaccgccgccgccctctccccgttctcgtcctccgcgccgccgcggcacagcccccgcatcctccgcgctatccctgtcggtgcgcctcacccgccgcgcgtctccgcagccgtctcgccgctggtccgtccggtcgccgccgggttcgcgctgttcagcatggccaccgccgcctcctccgccgcatccgtccacgacttcaccgtcaaggatgcaagtggcaaagatgtggacctgagcaccttcaaggggaaagtcctccttatcgtcaatgttgcatctcagtgtggcttgaccaattccaactacacggagctgagccagttgtatgagaagtacaaggaccagggttttgagatccttgctttcccatgcaaccagtttggtggacaggaacctggcactaatgaggagattgtccaatttgcttgcacccgcttcaaggccgagtatccaatttttgataaggttgatgttaatggtgacaacactgcacccatctacaagtttctgaagtccagcaaaggtggtcttttcggtgacaatatcaaatggaacttctccaagttcttggtcgacaaagaggggcgtgttgtggagcgctatgcgccaactacttctccactcagcatggagaaggacatcaagaagctgcttggaagttcttaa

SEQ ID NO: 73663 - protein, 238 aa, Oryza sativa
MPSRTAPFISRLRLLRTAAALSPFSSSAPPRHSPRILRAIPVGAPHPPRVSAAVSPLVRPVAAGFALFSMATAASSAASVHDFTVKDASGKDVDLSTFKGKVLLIVNVASQCGLTNSNYTELSQLYEKYKDQGFEILAFPCNQFGGQEPGTNEEIVQFACTRFKAEYPIFDKVDVNGDNTAPIYKFLKSSKGGLFGDNIKWNFSKFLVDKEGRVVERYAPTTSPLSMEKDIKKLLGSS

SEQ ID NO: 73664 - DNA, 510 bp, Oryza sativa
  CDS (1)..(510)
atgggggcggcggaatccgtgccggagacctccatacacgaattcaccgtcaaggattgcaacggcaaggaggtgagcctggagatgtacaaggggaaggtgctaatcgtcgtcaacgtcgcctccaaatgtgggttcacggagaccaactacacgcagctgacggagctctatcagaaacacagggacaaagattttgagattctagcatttccctgcaatcagttcttgcgacaagagccaggatctgaccagcaaataaaggattttgcttgcacaagatttaaagctgaatatcccgtttttcagaaggtgcgtgtaaatggtcctgatgctgcaccactttacaaatttttgaaagctagcaagcctggcttgtttggatctagaatcaagtggaactttaccaaatttcttattgataagaatggcaaagtcattaacagatactcgactgcgaccagtcccttgtcttttgagaaagacatcctgaaggcgctcgaggattag

SEQ ID NO: 73665 - protein, 169 aa, Oryza sativa
MGAAESVPETSIHEFTVKDCNGKEVSLEMYKGKVLIVVNVASKCGFTETNYTQLTELYQKHRDKDFEILAFPCNQFLRQEPGSDQQIKDFACTRFKAEYPVFQKVRVNGPDAAPLYKFLKASKPGLFGSRIKWNFTKFLIDKNGKVINRYSTATSPLSFEKDILKALED

SEQ ID NO: 73666 - DNA, 507 bp, Oryza sativa
  CDS (1)..(507)
atggccgccgcgccgtccgccacctccgtccacgacttcaccgtcaaggatgcaagcggaaaagacgtgaacctgagcacctacaaggggaaggttctcctcatcgttaacgtcgcatcccaatgtggcttaactaactccaactacactgagctgagccagctgtatgagaagtacaaggtccaaggctttgagatattggctttcccgtgcaatcagtttggagggcaggaacccggctccaatgaggagattgtccagtttgcttgcactcgcttcaaggctgagtatcccatttttgacaaggttgatgtcaacggtaacaatgctgcacccctgtacaagtatctgaagtctaacaaaggtgggcttttcggtgatagcatcaagtggaacttctccaaattcttggttgacaaggagggtcgcgtggtggatcgctatgcgcccaccacctcccctcttagtattgagaaggatatcaagaagctgcttgggagctcttaa

SEQ ID NO: 73667 - protein, 168 aa, Oryza sativa
MAAAPSATSVHDFTVKDASGKDVNLSTYKGKVLLIVNVASQCGLTNSNYTELSQLYEKYKVQGFEILAFPCNQFGGQEPGSNEEIVQFACTRFKAEYPIFDKVDVNGNNAAPLYKYLKSNKGGLFGDSIKWNFSKFLVDKEGRVVDRYAPTTSPLSIEKDIKKLLGSS

SEQ ID NO: 73668 - DNA, 705 bp, Oryza sativa
  CDS (1)..(705)
atggcgtccaccaccaccaccacggcggcggccgcggcccgcttcacctgcctcgcgccggccacgcgccccgcctccgcctccgcctccgcgggccgcttcctcctcccggcgcggcagtggggggcggcgacgacgcacgggagcgcggcggtgcccgtcgtcgcggcgccgtcgcggaggtgggcgccaggggtcgcctacgccaccgccgccaccgggaagagcgtccacgacttcaccgtcaaggacattgatggaaaagatgttgcgcttagcaagttcaagggaagggcgctgctaattgttaatgttgcatctcagtgtgggctgacaacagcaaattacacggaactatctcatctttatgagaagtacaagactcaaggatttgagattcttgcatttccttgcaatcagtttggtgcacaagaacctgggtcaaacccgcagattaagcagtttgcttgtacaaggtttaaagctgaatttcctatttttgacaaggttgatgtcaacgggcctaacacagcccctatttataagtttcttaagtcgagtgctggaggatttttgggtgatcttgtgaaatggaattttgagaagttcttggtggacaaaactggaaaagttgttgagagatacccacctacaacttcaccattccagattgagaaggacatccagaaactccttgcggcataa

SEQ ID NO: 73669 - protein, 234 aa, Oryza sativa
MASTTTTTAAAAARFTCLAPATRPASASASAGRFLLPARQWGAATTHGSAAVPVVAAPSRRWAPGVAYATAATGKSVHDFTVKDIDGKDVALSKFKGRALLIVNVASQCGLTTANYTELSHLYEKYKTQGFEILAFPCNQFGAQEPGSNPQIKQFACTRFKAEFPIFDKVDVNGPNTAPIYKFLKSSAGGFLGDLVKWNFEKFLVDKTGKVVERYPPTTSPFQIEKDIQKLLAA

SEQ ID NO: 73670 - DNA, 639 bp, Oryza sativa
  CDS (1)..(639)
atggcggctacaactacaagtagcagcagcggcggcggcaaccggatctggacctcctcactcgccgtcctcgcgctcgccgtcgccctcgtctccctcctctccctccgcgcgccgccacctgctgcgcccagcatggccgacgacctgcccacctccgtccacgacatctccgtcaaggatataaagggaaatgatgtgaagctgagcgagtatgaggggaaggttcttcttattgttaatgtggcctcaaaatgtggcttaacaaattccaattacaaggagttgaatgtcttgtacgagaaatacaaagaaaaaggccttgagatactcgcatttccgtgcaaccaatttgctggtcaagagcctggcagcaatgaagagattgagcaaacagtttgtaccagattcaaagcagaatttcctatttttgacaagattgatgttaacgggaaggaggccgcaccgctatacaagttcttgaaatcacagaaaggtggattccttggtgatggcatcaaatggaacttcacgaagtttctcgttggtaaagatggcaaggttgttgagcgatatgccccgacgacttctccattaaagattgagaatgatatccagaagctacttgggacctcgtaa

SEQ ID NO: 73671 - protein, 212 aa, Oryza sativa
MAATTTSSSSGGGNRIWTSSLAVLALAVALVSLLSLRAPPPAAPSMADDLPTSVHDISVKDIKGNDVKLSEYEGKVLLIVNVASKCGLTNSNYKELNVLYEKYKEKGLEILAFPCNQFAGQEPGSNEEIEQTVCTRFKAEFPIFDKIDVNGKEAAPLYKFLKSQKGGFLGDGIKWNFTKFLVGKDGKVVERYAPTTSPLKIENDIQKLLGTS

SEQ ID NO: 73672 - DNA, 711 bp, Brassica napus
  CDS (1)..(711)
atggctttttcgtcttcttattactcaccattctctgcactcttcgacgtttccaaacccaatccatctctaaaccccgcggcttttctcgtcccttccttgaaattctccaccgccatatcgaatttcgcgaatctgagtaatgggttctctctaaaatctccgattaatcctgggtttctcttcaagtcccgagctttcaatgttcaagctcgagctgctgctgagaagaccgttcacgatttcaccgtaaaggacattgatgggaatgatgtttctttgaacaagtataaggggaaagttatgttgatcgtcaatgtcgcttcaagatgtggtttgacatcatcaaattactcagagctttcacatctgtatgagaaatacaagagccaaggatttgagattctagctttcccttgtaatcagtttggtggccaagagcccggttcaaaccctgagatcaaacagtttgcttgcacccggtttaaagcagagttccctatatttgataaggtcgatgtgaatggaccgagcacagcaccaatctatcagttcttgaaatcaaacgcaggaggattcttgggtgatctcattaaatggaactttgagaagttcttgattgataaaaagggaaaggtcgttgagaggtaccctcccaccacatcccctttccaaatcgagaaggacatcaagaagttgcttgctgcttaa

SEQ ID NO: 73673 - protein, 236 aa, Brassica napus
MAFSSSYYSPFSALFDVSKPNPSLNPAAFLVPSLKFSTAISNFANLSNGFSLKSPINPGFLFKSRAFNVQARAAAEKTVHDFTVKDIDGNDVSLNKYKGKVMLIVNVASRCGLTSSNYSELSHLYEKYKSQGFEILAFPCNQFGGQEPGSNPEIKQFACTRFKAEFPIFDKVDVNGPSTAPIYQFLKSNAGGFLGDLIKWNFEKFLIDKKGKVVERYPPTTSPFQIEKDIKKLLAA

SEQ ID NO: 73674 - DNA, 531 bp, Brassica napus
  CDS (1)..(531)
atgggtggttcaatatcagtgcctgaaaaatctatccatgaattcactgtcaaggatagctccggcaaggaggttgaccttagcgtttaccaagggaaggttcttctcatcgtcaacgtcgcttctaaatgcggtttcactcaaaccaattacacccagcttactgaactttaccggaaatacaaagatcaagggttggtgatattggcgtttccttgcaaccagtttttgaaccaagagcctggcactagccaagatgctcacgaatttgcttgtactaggttcaaggccgagtaccccgtcttccaaaaggtgcgtgtgaatggtcaaaacgcagcaccagtctacaaattcctcaagtcaaagaagccatctttccttggaagcaggatcaaatggaacttcaccaagttcttggtcggcaaagatggtcaagtcattgatcgttatggccccactgttccacctctttccatcgagaaagacatcaagaaagccctcggagatgaaggagcgtttccaagtacttag

SEQ ID NO: 73675 - protein, 176 aa, Brassica napus
MGGSISVPEKSIHEFTVKDSSGKEVDLSVYQGKVLLIVNVASKCGFTQTNYTQLTELYRKYKDQGLVILAFPCNQFLNQEPGTSQDAHEFACTRFKAEYPVFQKVRVNGQNAAPVYKFLKSKKPSFLGSRIKWNFTKFLVGKDGQVIDRYGPTVPPLSIEKDIKKALGDEGAFPST

SEQ ID NO: 73676 - DNA, 504 bp, Glycine max
  CDS (1)..(504)
atgaccaccaaggatccaaaatccgtgtacgactttgttgtcaaggatgctaagggagatgatgtagatctctccttttacaagggaaaagtccttctgattgtcaatgttgcttctcaatgcggcttgaccaactccaattatacggagctgaatcaattgtatgacaagtataaagaccaaggcctggagattctggcatttccatgtaatcaatttggtaagcaagaaccagaaagcaatgataaaattgtggattttgtctgcagtcgcttcaaatctgaattccccatctttgataagattgaagtgaatggggacaattctgctcctttgtacaaattcttgaagttggggaaatggggaatttttggtgatgatattcagtggaacttttccaagtttgtggttgataagaatggacaagtagtgggtcgctattatcccaccacttctcctctcagccttgagcgagacattcaccagcttctgggtatttcttga

SEQ ID NO: 73677 - protein, 167 aa, Glycine max
MTTKDPKSVYDFVVKDAKGDDVDLSFYKGKVLLIVNVASQCGLTNSNYTELNQLYDKYKDQGLEILAFPCNQFGKQEPESNDKIVDFVCSRFKSEFPIFDKIEVNGDNSAPLYKFLKLGKWGIFGDDIQWNFSKFVVDKNGQVVGRYYPTTSPLSLERDIHQLLGIS

SEQ ID NO: 73678 - DNA, 510 bp, Brassica napus
  CDS (1)..(510)
atggcggaggaatctccagagtctatctacgacttcgccgttaaggatattgaaggtaaagatgtgagtttgagccaattcaaaggcaaaactcttttgattgtaaacgttgcctccaaatgtggtctgacggatgcaaactacaaggaactgaatgttctatacgataaatacaaggaccaagggttggagattttagcgtttccgtgcaatcagttcttgggacaagaaccaggaaacaatgaagagatccaacaaactgtctgcacaaggttcaaagctgagttccccatctttgacaaggtggatgtgaacgggaagaacacggcgccattatacaaatacttgaaagcagagaaaggaggtttgcttattgacgcaatcaaatggaacttcacaaagttcttggtttcacctgacggcaaagtctcccagagatattctcctagaacctctcctccccaattcgagaaagacattcaatctctgttgggacaggcttcatcttga

SEQ ID NO: 73679 - protein, 169 aa, Brassica napus
MAEESPESIYDFAVKDIEGKDVSLSQFKGKTLLIVNVASKCGLTDANYKELNVLYDKYKDQGLEILAFPCNQFLGQEPGNNEEIQQTVCTRFKAEFPIFDKVDVNGKNTAPLYKYLKAEKGGLLIDAIKWNFTKFLVSPDGKVSQRYSPRTSPPQFEKDIQSLLGQASS

SEQ ID NO: 73680 - DNA, 516 bp, Brassica napus
  CDS (1)..(516)
atggctgctgctacttcctcctccccaaaatccgtccatgatttcacagtcaaggacgcgaagggaaacgaagtggatctaagcatctacaaggggaaggttctgttgattgtcaacgttgcttctcagtgtggcttgaccaattcgaactatactgagcttgcgcagctctatcaaaagtacaaagatcatgggtttgagatccttgcgttcccttgtaaccagtttgggaatcaagaacctggttctaacgaagagattgttcagtttgcttgtacccgtttcaaggctgagtaccccattttcgacaaggttgatgtgaacggtgacaaggctgctccaatctacaagtttctgaaatcaagcaaaggcgggctttttgggagcggcatcaagtggaacttctccaagttcttggttgacaaagatggaaatgtcgtggaccggtacgctccaaccacttctcctctcagcatcgagaaggacctgaagaaactgttgggagttactgcttag

SEQ ID NO: 73681 - protein, 171 aa, Brassica napus
MAAATSSSPKSVHDFTVKDAKGNEVDLSIYKGKVLLIVNVASQCGLTNSNYTELAQLYQKYKDHGFEILAFPCNQFGNQEPGSNEEIVQFACTRFKAEYPIFDKVDVNGDKAAPIYKFLKSSKGGLFGSGIKWNFSKFLVDKDGNVVDRYAPTTSPLSIEKDLKKLLGVTA

SEQ ID NO: 73682 - DNA, 648 bp, Linum usitatissimum
  CDS (1)..(648)
atgatgcaatgggtatcatattcatctctgggttttcttggtattggagtcttcctctactactacacctaccaatttgattcctttccttccttcctcaacatggcagattcttcttcttcttcttcatctccaaactccatctatgacttcactgttaaggatataaaggggagtggtgtgagtctgagtgaatacaaggggaaggttcttctcattgtcaatgttgcttccaaatgtgggttgacacacgcaaactacaaggaattgaacatgctgtaccagaaatacaaagaccaagggctagagatcctagcattcccttgcaaccagtttggtggacaagaaccaggaaccattgaccaaattcaggacactgtatgcaccatcttcaaagctgaattcccaatctttgataaggtcgatgtgaacgggaagaacactgcagaggtgtacaggtacttgaagtcggagaaaggagggtttctgggagatgcaatcaaatggaacttcacaaagttcctggtgaacaaacaaggcaaagtcatggagcgttacgctcccactacttcgcctcttaagatcgagaaggatatccagaacctgttggaaattgcttctgcttcagattccatttccagcctctaa

SEQ ID NO: 73683 - protein, 215 aa, Linum usitatissimum
MMQWVSYSSLGFLGIGVFLYYYTYQFDSFPSFLNMADSSSSSSSPNSIYDFTVKDIKGSGVSLSEYKGKVLLIVNVASKCGLTHANYKELNMLYQKYKDQGLEILAFPCNQFGGQEPGTIDQIQDTVCTIFKAEFPIFDKVDVNGKNTAEVYRYLKSEKGGFLGDAIKWNFTKFLVNKQGKVMERYAPTTSPLKIEKDIQNLLEIASASDSISSL

SEQ ID NO: 73684 - DNA, 513 bp, Zea mays
  CDS (1)..(513)
atgggggcggccgaatccgtgccggagacctccatacacgaactcaccgtcaaggattgcaacggcaaggaagtgagcctggaaacctacaaggggaaggtcctccttgttgttaacgtcgcctccaaatgtgggttcacggagaccaattacacgcagctgacggagctttatcagaagtacagggacaaagacttcgagatattggcattcccttgcaatcagttcttgcgacaggagccaggtactgatcagcagatacaagactttgcttgcaccagatttaaagctgaatacccagtttttcagaaggtgcgcgtaaacggaccagatgcggcgccggtttacaagtttctgaaagctagcaagcctggtttgtttgggtcatcaaggatcaaatggaactttaccaagtttctggtggacaaagatgggaaggtcatcgagagatacggaacctcgacagctccaatggcaattgagaaggacatccagaaggcccttgaggaataa

SEQ ID NO: 73685 - protein, 170 aa, Zea mays
MGAAESVPETSIHELTVKDCNGKEVSLETYKGKVLLVVNVASKCGFTETNYTQLTELYQKYRDKDFEILAFPCNQFLRQEPGTDQQIQDFACTRFKAEYPVFQKVRVNGPDAAPVYKFLKASKPGLFGSSRIKWNFTKFLVDKDGKVIERYGTSTAPMAIEKDIQKALEE

SEQ ID NO: 73686 - DNA, 531 bp, Hordeum vulgare
  CDS (1)..(531)
atgggggcggccgaatctgtgccggagacctccgtacacgaattcaccgttaaggattgcaacggcaaggaggtgtgcctggacacgtacaaggggaaggtcctcctcatcgtcaacgtcgcctccaaatgcgggttcacggagactaattacacgcagctgacggagctttatcagaagtacagggagaaagactttgagatattagcattcccctgcaaccagtttttgcgacaagagccaggcagtgaccagcagatccaagactttgcatgcacaagattcaaagctgaatatccagtttttcagaaggtgcgtgtaaatggcccagatgctgcgccgctttacaagtttctaaaagctagcaaacctggtttgtttggttcaagaatcaagtggaactttaccaagtttcttgttgacaagaatggaaaagtaatcaacagatacgcaactgctaccactccattttcattcgagaaagatatccagaaggcacttgaggaggaacctgccgactcgcagaagtag

SEQ ID NO: 73687 - protein, 176 aa, Hordeum vulgare
MGAAESVPETSVHEFTVKDCNGKEVCLDTYKGKVLLIVNVASKCGFTETNYTQLTELYQKYREKDFEILAFPCNQFLRQEPGSDQQIQDFACTRFKAEYPVFQKVRVNGPDAAPLYKFLKASKPGLFGSRIKWNFTKFLVDKNGKVINRYATATTPFSFEKDIQKALEEEPADSQK

SEQ ID NO: 73688 - DNA, 690 bp, Brassica napus
  CDS (1)..(690)
atgttgagatcctcgtttcggcttctctatataacaagaaccaatcttctggttcgagcttcaccatcatcgctctctcgactcccatctaagttcacttctgcgaaaccacttgtcagttctcatcatcagattccgttatcaacaacgggagctaaactttctaggtcggaacattccatggctgcttcctccgaacccaaatccatctatgatttcaccgtcaaggatgcgaagggaaacgatgttgatctaagcacttacaaggggaaggttctgttgattgtcaacgttgcttctcagtgtggcttgaccaattcgaactatactgagcttgcacagctgtaccagaagtacaaagaccatgggtttgagatccttgcattcccctgtaaccagtttggtaatcaagaacctggttctaatgaagagattgttcagtttgcttgtacccgtttcaaggccgagtaccccatcttcgacaaggttgatgtgaacggtgactcggctgctccaatctataagttcctgaaatcaagcaaaggagggctttttggagacggaatcaagtggaacttcgccaagttcttggttgacaaagatgggaatgttgtggaccgttacgctccaactacttcccctctcagcattgagaaggacctgaagaaactgttgggagttactgcttaa

SEQ ID NO: 73689 - protein, 229 aa, Brassica napus
MLRSSFRLLYITRTNLLVRASPSSLSRLPSKFTSAKPLVSSHHQIPLSTTGAKLSRSEHSMAASSEPKSIYDFTVKDAKGNDVDLSTYKGKVLLIVNVASQCGLTNSNYTELAQLYQKYKDHGFEILAFPCNQFGNQEPGSNEEIVQFACTRFKAEYPIFDKVDVNGDSAAPIYKFLKSSKGGLFGDGIKWNFAKFLVDKDGNVVDRYAPTTSPLSIEKDLKKLLGVTA

SEQ ID NO: 73690 - DNA, 510 bp, Brassica napus
  CDS (1)..(510)
atggcggatgaatctccaaagtctatctacgacttcaccgtcaaggatatctcaggtaacgatgtgagtttgagccaattcaaaggcaaaactcttctgattgtaaacgttgcctccaaatgtggactaacggatgcgaactacaaggaactcaatgttctgtacgaaaaatacaaggaacaagggttggagatattagcgttcccatgcaatcagtttttgggacaagaaccaggaaacaatgaagagattcagcaaactgtctgcacaaggttcaaagctgagttccccatctttgacaaggtagatgtgaacgggaagaacacggccccgttatacaaatacttgaaagcagagaaaggaggattgctaattgacgcaatcaaatggaacttcacaaagttcttggtttctcctgacggcaaagtctcccagagatattctcccagaacgtctcctcttcagttcgagaaagacattcaagctctgctgggacaggcttcttcttga

SEQ ID NO: 73691 - protein, 169 aa, Brassica napus
MADESPKSIYDFTVKDISGNDVSLSQFKGKTLLIVNVASKCGLTDANYKELNVLYEKYKEQGLEILAFPCNQFLGQEPGNNEEIQQTVCTRFKAEFPIFDKVDVNGKNTAPLYKYLKAEKGGLLIDAIKWNFTKFLVSPDGKVSQRYSPRTSPLQFEKDIQALLGQASS

SEQ ID NO: 73692 - DNA, 510 bp, Brassica napus
  CDS (1)..(510)
atggcggaggaatctccacagtctatctacgacttcaccgttaaggatattgaaggtaaagatgtgagtttgagccaattcaaaggcaaaactcttttgattgtaaacgttgcctccaaatgtggtctgacggatgcaaactacaaggaactgaatgttctatacgataaatacaaggaccaagggttggagattttagcgtttccgtgcaatcagttcttgggacaagaaccaggaaacaatgaagagatccaacaaactgtctgcacaaagttcaaagctgagttccccatctttgacaaggtggatgtgaacgggaagaacacggcgccattatacaaatacttgaaagcagagaaaggaggtttgcttattgacgcaatcaaatggaacttcacaaagttcttggtttcacctgacggcaaagtctcccagagatattctcctagaacctctcctcttcaattcgagaaagacattcaatctctgttgggacaggcttcatcttga

SEQ ID NO: 73693 - protein, 169 aa, Brassica napus
MAEESPQSIYDFTVKDIEGKDVSLSQFKGKTLLIVNVASKCGLTDANYKELNVLYDKYKDQGLEILAFPCNQFLGQEPGNNEEIQQTVCTKFKAEFPIFDKVDVNGKNTAPLYKYLKAEKGGLLIDAIKWNFTKFLVSPDGKVSQRYSPRTSPLQFEKDIQSLLGQASS

SEQ ID NO: 73694 - DNA, 711 bp, Brassica napus
  CDS (1)..(711)
atggctttttcgtcttcttattactcaccattctctgcactcttcgacgtttccaaacccaatccatctctaaaccccgcggcttttctcgtcccttccttgaaattctccaccgccatatcgaatttcgcgaatctgagtaatgggttctctctaaaatctccgattaatcctgggtttctcttcaagtcccgagctttcaatgttcaagctcgagctgctgctgagaagaccgttcacgatttcaccgtaaaggacattgatgggaatgatgtttctttgaacaagtataaggggaaagttatgttgatcgtcaatgtcgcttcaagatgtggtttgacatcatcaaattactcagagctttcacatctgtatgagaaatacaagagccaaggatttgagattctagctttcccctggcatcagttcggtggccaagagcccggttcacaccctgagatcaaacagtttgcttgcacccggtttaaagcagagttccctatatttgataaggtcgatgtgaatggaccgagcacagcaccaatctaccagttcttgaaatcaaacgcaggaggattcttgggtgatctcattaaatggaactttgagaagttcttgattgataaaaagggaaaggtcgttgaaaggtaccctcccaccacatcccctttccaaatcgagaaggacatcaagaagatgcttgctgcttaa

SEQ ID NO: 73695 - protein, 236 aa, Brassica napus
MAFSSSYYSPFSALFDVSKPNPSLNPAAFLVPSLKFSTAISNFANLSNGFSLKSPINPGFLFKSRAFNVQARAAAEKTVHDFTVKDIDGNDVSLNKYKGKVMLIVNVASRCGLTSSNYSELSHLYEKYKSQGFEILAFPWHQFGGQEPGSHPEIKQFACTRFKAEFPIFDKVDVNGPSTAPIYQFLKSNAGGFLGDLIKWNFEKFLIDKKGKVVERYPPTTSPFQIEKDIKKMLAA

SEQ ID NO: 73696 - DNA, 510 bp, Brassica napus
  CDS (1)..(510)
atggcggaggaatctccacagtctatctacgacttcaccgttaaggatattgaaggtaaagatgtgagtttgagccaattcaaaggcaaaactcttttgattgtaaacgttgcctccaaatgtggtctgacggatgcaaactacaaggaactgaatgttctatacgataaatacaaggaccaagggttggagattttagcgtttccgtgcaatcagttcttgggacaagaaccaggaaacaatgaagagatccaacaaactgtctgcacaaagttcaaagctgagttccccatctttgacaaggtggatgtgaacgggaagaacacggcgccattatacaaatacttgaaagcagagaaaggaggtttgcttattgacgcaatcaaatggaacttcacaaagttcttggtttctcctgacggcaaagtctcccagagatattctcctagaacgtctcctcttcaattcgagaaagacattcaagctctgttgggacaggcttcatcttga

SEQ ID NO: 73697 - protein, 169 aa, Brassica napus
MAEESPQSIYDFTVKDIEGKDVSLSQFKGKTLLIVNVASKCGLTDANYKELNVLYDKYKDQGLEILAFPCNQFLGQEPGNNEEIQQTVCTKFKAEFPIFDKVDVNGKNTAPLYKYLKAEKGGLLIDAIKWNFTKFLVSPDGKVSQRYSPRTSPLQFEKDIQALLGQASS

SEQ ID NO: 73698 - DNA, 501 bp, Glycine max
  CDS (1)..(501)
atggctgaacaatcttccaactccatttacgatttcactgtcaaggacatcagtggaaatgatgtgagtctgaatgattacagcgggaaggttctactgattgtgaatgtcgcctctcaatgtggtttgacacagacaaattacaaagaattgaatgtattgtacgagaagtacaagaatcaaggatttgaaatcttggcatttccgtgcaaccagtttgctggacaggaaccaggaaacaatgaagaaattcaggaagtagtttgcacaaggttcaaggctgaatttcctatctttgataaggttgaagtcaatgggaagaatgcagtgccactttacaagtttttaaaggagaagaaagggggaatatttggcgatggtatcaagtggaacttcacaaagttcttagtaaacaaagaagggaaggttgtggacagatatgcacctaccacctcacctctgaaaatcgagaaagacatcgagaagctcttgcaatcttga

SEQ ID NO: 73699 - protein, 166 aa, Glycine max
MAEQSSNSIYDFTVKDISGNDVSLNDYSGKVLLIVNVASQCGLTQTNYKELNVLYEKYKNQGFEILAFPCNQFAGQEPGNNEEIQEVVCTRFKAEFPIFDKVEVNGKNAVPLYKFLKEKKGGIFGDGIKWNFTKFLVNKEGKVVDRYAPTTSPLKIEKDIEKLLQS

SEQ ID NO: 73700 - DNA, 678 bp, Glycine max
  CDS (1)..(678)
atgctctctatttcagccactcgtatattcttcctccgctcaacaactataagattatcttcttcttcttcttctcttcaattcttctccaatcccaaccgcaccctcttccgtccctttcttcacacttccttcaaaccacttccttcgtctttctctttccgaacagatcacactatggccacctcaaacgccaaatcagtccatgatttcaccgttaaagatgccaagggaaatgatattaaccttggtgactacaaaggaaaggtccttatcattgtcaatgttgcctcacaatgtggcttgactaattcaaattacactgagctcagtcagttgtatgagaaatacaaacagaaaggtctggaaattctggcgttcccatgcaatcagtttggggcacaggagcctggatctaatgaacagatacaagagtttgtttgtactcgcttcaaggctgagtttcccgtttttgacaaggttgatgtgaatggtgacaaggctgctccactgtacaaatatctaaaatcaagcaaaggtggactccttggggatggcatcaaatggaacttcgccaagttccttgttgataaagaggggaatgttgttgatcgctatgcacccacaacttctcctctgagcattgagaaggacttgctgaagttgttggatgcatga

SEQ ID NO: 73701 - protein, 225 aa, Glycine max
MLSISATRIFFLRSTTIRLSSSSSSLQFFSNPNRTLFRPFLHTSFKPLPSSFSFRTDHTMATSNAKSVHDFTVKDAKGNDINLGDYKGKVLIIVNVASQCGLTNSNYTELSQLYEKYKQKGLEILAFPCNQFGAQEPGSNEQIQEFVCTRFKAEFPVFDKVDVNGDKAAPLYKYLKSSKGGLLGDGIKWNFAKFLVDKEGNVVDRYAPTTSPLSIEKDLLKLLDA

SEQ ID NO: 73702 - DNA, 600 bp, Glycine max
  CDS (1)..(600)
atgaagtggttgactttctggaactgcatatctatcctcgtgttgtcttttgctttcttcttcttctattgtcacacatacacatctactccttccctcatggctgagcaatcttccaagtccatttacgatttcacagtcaaggacatcagtggaaatgatgtgagtctgaataattacagcgggaaggttctactgattgtgaatgtcgcctcacaatgtggtttgacacagacaaattacaaagaattgaatgtattgtacgagaagtacaagaatcaaggatttgaaatcttggcatttccatgcaaccagtttgctggacaggaaccaggaaacaatgaagaaattcaggaagttgtttgcacaaggttcaaggctgaatttcctatctttgataaggttgaagtcaatgggaagaatgcagcgccactttataagtttttaaaggagcagaaagggggaatatttggtgatggtatcaagtggaacttcacaaagttcttagtaaacaaagaagggaaggttgtggacagatatgcacctaccacctcacctctgaaaatcgagaaagacatagagaagcttttgcaatcttga

SEQ ID NO: 73703 - protein, 199 aa, Glycine max
MKWLTFWNCISILVLSFAFFFFYCHTYTSTPSLMAEQSSKSIYDFTVKDISGNDVSLNNYSGKVLLIVNVASQCGLTQTNYKELNVLYEKYKNQGFEILAFPCNQFAGQEPGNNEEIQEVVCTRFKAEFPIFDKVEVNGKNAAPLYKFLKEQKGGIFGDGIKWNFTKFLVNKEGKVVDRYAPTTSPLKIEKDIEKLLQS

SEQ ID NO: 73704 - DNA, 513 bp, Glycine max
  CDS (1)..(513)
atgggtgcttcgctatcggtctcggaaaaatccatccatgaattcatggtcaaggatgctaagggcagagacgtgaacctcagcatctacaaagggaaggttcttcttgtagtaaatgtcgcttcaaaatgtggatttacgaataccaattacacccagttaactgagctttacagcaaatacaaagacagaggccttgagatactggcatttccatgcaaccagtttctgaagcaggagcctgggagtagccaggacgtagaggaatttgcctgcacaagatacaaggccgcgtatcccatttttggaaaggtacgtgtcaatggacctgatacagcacctgtctacaaattccttaaagcaaataaatcaggatttctgggttctaggataaagtggaatttcaccaagtttttggttgacaaggaagggaatgtcctccggcgttatggttcaaccacctcaccgttttccattgaaaatgacatcaagagagcattgggggaggcttga

SEQ ID NO: 73705 - protein, 170 aa, Glycine max
MGASLSVSEKSIHEFMVKDAKGRDVNLSIYKGKVLLVVNVASKCGFTNTNYTQLTELYSKYKDRGLEILAFPCNQFLKQEPGSSQDVEEFACTRYKAAYPIFGKVRVNGPDTAPVYKFLKANKSGFLGSRIKWNFTKFLVDKEGNVLRRYGSTTSPFSIENDIKRALGEA

SEQ ID NO: 73706 - DNA, 705 bp, Glycine max
  CDS (1)..(705)
atgtcctccatggcttcctccaccgctttcttcacacccctccatgatttcactcaagccagaacaaccccatcaccccctttgcctttcatcaaatcctcctttgcttcctccaagtcaaccttttttcaccctgccctttccctacaaacctcttccaactttcccaggctttttggaaagcctaagtttttctctgttcatgcaagggctgccacagaaaaaaccatttatgattttactgtcaaggatattgacagaaaggatgtttctcttagcaagtttaaggggaaggttctattgattgtcaatgttgcttcacgatgtggtttgacatcatcaaattactcggagctgtcacgcttgtatgaaaaatataagaatcaaggtttggagattttagctttcccctgcaatcaatttggtatgcaggaacctggatcaaatgaagatattaagcaatttgcttgcactcgatataaagcagaatttccaatttttgataaggttgatgtcaatggaccatttacaactccagtgtaccagtttctgaaatcgagtgctggaggctttttgggtgatcttataaagtggaattttgagaaattcttggttgacaaaaatggtaaagttattgaaagatacccaccaacaacgtctccttttcaaattgagaaggatatccagaagttacttgctgcctga

SEQ ID NO: 73707 - protein, 234 aa, Glycine max
MSSMASSTAFFTPLHDFTQARTTPSPPLPFIKSSFASSKSTFFHPALSLQTSSNFPRLFGKPKFFSVHARAATEKTIYDFTVKDIDRKDVSLSKFKGKVLLIVNVASRCGLTSSNYSELSRLYEKYKNQGLEILAFPCNQFGMQEPGSNEDIKQFACTRYKAEFPIFDKVDVNGPFTTPVYQFLKSSAGGFLGDLIKWNFEKFLVDKNGKVIERYPPTTSPFQIEKDIQKLLAA

SEQ ID NO: 73708 - DNA, 513 bp, Glycine max
  CDS (1)..(513)
atgggtgcttcgctatcggtctcggaaaaatccatccatgaattcatggtcaaggatgctaagggcagagacgtgaacctcagcatctacaaagggaaggttcttcttgtagtaaatgtcgcttcaaaatgtggatttacgaataccaattacacccagttaactgagctttacagcaaatacaaagacagaggccttgagatactggcatttccatgcaaccagtttctgaagcaggagcctgggagtagccaggacgtagaggaatttgcctgcacaagatacaaggccgcgtatcccatttttggaaaggtacgtgtcaatggacctgatacagcacctgtctacaaattccttaaagcaaataaatcaggatttctgggttctaggataaagtggaatttcaccaagtttttggttgacaaggaagggaatgtcctccggcgttatggttcaaccacctcaccgttttccattgaaaatgacatcaagagagcattgtgggaggcttga

SEQ ID NO: 73709 - protein, 170 aa, Glycine max
MGASLSVSEKSIHEFMVKDAKGRDVNLSIYKGKVLLVVNVASKCGFTNTNYTQLTELYSKYKDRGLEILAFPCNQFLKQEPGSSQDVEEFACTRYKAAYPIFGKVRVNGPDTAPVYKFLKANKSGFLGSRIKWNFTKFLVDKEGNVLRRYGSTTSPFSIENDIKRALWEA

SEQ ID NO: 73710 - DNA, 684 bp, Zea mays
  CDS (1)..(684)
atggctccctcgttcactagcctcctctcggccgcgaactccgccgccgcctcgcggctcccctcggccgccgccggacgggcatccactttcgtgcgcttcccgcatcacccgacgggctgggctggggcctccgtcgcggcgccgcgtacggcgcgcaagcgggcacccggcgtcgcctacgccaccgcagctaccgagaagagcatctacgactacaccgttaaggacattgatggaaaagatgttcctcttaaaaagttcaagaataaggtgttgctgattgttaacgttgcttctcaatgtgggttgacaacagcaaattacactgaactatctcatatctatgagaagtacaagactcaagggtttgagatccttgcatttccttgcaatcaatttggtgcacaagaacctggatcaaatactcagattaagcagtttgcatgtacaagattcaaagctgaatttccgatttttgacaaggttgatgtcaatggacctaatacagctcccatctataaatttctgaagtccagtgctggaggatttttgggtgatctcgtgaaatggaattttgagaagttcttagtggataagaatggcaaagtcattgagagatatccaccaacaacttcacctttccagattgagaaggacatccagaaactgctcgcggcataa

SEQ ID NO: 73711 - protein, 227 aa, Zea mays
MAPSFTSLLSAANSAAASRLPSAAAGRASTFVRFPHHPTGWAGASVAAPRTARKRAPGVAYATAATEKSIYDYTVKDIDGKDVPLKKFKNKVLLIVNVASQCGLTTANYTELSHIYEKYKTQGFEILAFPCNQFGAQEPGSNTQIKQFACTRFKAEFPIFDKVDVNGPNTAPIYKFLKSSAGGFLGDLVKWNFEKFLVDKNGKVIERYPPTTSPFQIEKDIQKLLAA

SEQ ID NO: 73712 - DNA, 741 bp, Zea mays
  CDS (1)..(741)
atgcctccccgccccgtcccactattctctcgcctgcgcttccgcctcccgagttgcgccgccgtctccatctccacccctccatcctccgcggcgcccctgcactacggccatcgcactcccctcgctagcccttttcctctgtccccaccttgcccgcgcatcctccgtgcggccgtcgcggtttcttcgctggatctgcgcccgatcaccggcgggttcgcgctattcagcatggctgctgcctcctccgccacctccgtccacgacttcaccgtcaaggatgctagcgggaaagatgtggaccttagcacctataaggggaaggttctgctcatagtcaatgttgcatctcagtgtggcttaaccaattccaactacacagagctgagccagttgtatgagaagtacaaggaccagggttttgagatccttgcattcccatgcaaccagttcggtgggcaggagcctggcactaatgaggagattgtccagtttgcttgtactcgcttcaaggctgagtatccaattttcgacaaggttgatgtcaatggtgacaatactgcacccatttacaagttcctgaagtccagcaaaggtagtctctttggcgataacataaaatggaacttctccaaattcttggttgacaaagaggggcatgttgtggagcggtatgcaccaacaacttccccactgagcatcgagaaggacatcaagaaactactagggagttcttaa

SEQ ID NO: 73713 - protein, 246 aa, Zea mays
MPPRPVPLFSRLRFRLPSCAAVSISTPPSSAAPLHYGHRTPLASPFPLSPPCPRILRAAVAVSSLDLRPITGGFALFSMAAASSATSVHDFTVKDASGKDVDLSTYKGKVLLIVNVASQCGLTNSNYTELSQLYEKYKDQGFEILAFPCNQFGGQEPGTNEEIVQFACTRFKAEYPIFDKVDVNGDNTAPIYKFLKSSKGSLFGDNIKWNFSKFLVDKEGHVVERYAPTTSPLSIEKDIKKLLGSS

SEQ ID NO: 73714 - DNA, 20 bp, Artificial sequence
  primer
atgcgcgacccgttgttcgg

SEQ ID NO: 73715 - DNA, 24 bp, Artificial sequence
  primer
ctattcaagcagggcttcgatttc

SEQ ID NO: 73716 - protein, 186 aa, Artificial sequence
  consensus sequence
  Variant (2)..(4): Xaa in position 2 to 4 is any amino acid
  Variant (5)..(5): Xaa in position 5 is any or no amino acid
  Variant (7)..(9): Xaa in position 7 to 9 is any amino acid
  Variant (10)..(10): Xaa in position 10 is any or no amino acid
  Variant (12)..(12): Xaa in position 12 is any amino acid
  Variant (13)..(13): Xaa in position 13 is any or no amino acid
  Variant (15)..(15): Xaa in position 15 is any amino acid
  Variant (17)..(17): Xaa in position 17 is any amino acid
  Variant (20)..(20): Xaa in position 20 is any amino acid
  Variant (23)..(23): Xaa in position 23 is any amino acid
  Variant (26)..(26): Xaa in position 26 is any amino acid
  Variant (28)..(29): Xaa in position 28 to 29 is any amino acid
  Variant (30)..(30): Xaa in position 30 is any or no amino acid
  Variant (32)..(33): Xaa in position 32 to 33 is any amino acid
  Variant (35)..(36): Xaa in position 35 to 36 is any amino acid
  Variant (38)..(40): Xaa in position 38 to 40 is any amino acid
  Variant (42)..(47): Xaa in position 42 to 47 is any amino acid
  Variant (48)..(56): Xaa in position 48 to 56 is any or no amino acid
  Variant (58)..(58): Xaa in position 58 is any amino acid
  Variant (65)..(65): Xaa in position 65 is any amino acid
  Variant (66)..(66): Xaa in position 66 is any or no amino acid
  Variant (70)..(73): Xaa in position 70 to 73 is any amino acid
  Variant (74)..(80): Xaa in position 74 to 80 is any or no amino acid
  Variant (82)..(95): Xaa in position 82 to 95 is any amino acid
  Variant (96)..(97): Xaa in position 96 to 97 is any or no amino acid
  Variant (99)..(100): Xaa in position 99 to 100 is any amino acid
  Variant (104)..(107): Xaa in position 104 to 107 is any amino acid
  Variant (108)..(110): Xaa in position 108 to 110 is any or no amino acid
  Variant (112)..(114): Xaa in position 112 to 114 is any amino acid
  Variant (115)..(115): Xaa in position 115 is any or no amino acid
  Variant (118)..(122): Xaa in position 118 to 122 is any amino acid
  Variant (123)..(151): Xaa in position 123 to 151 is any or no amino acid
  Variant (157)..(157): Xaa in position 157 is any amino acid
  Variant (161)..(163): Xaa in position 161 to 163 is any amino acid
  Variant (164)..(164): Xaa in position 164 is any or no amino acid
  Variant (166)..(168): Xaa in position 166 to 168 is any amino acid
  Variant (169)..(169): Xaa in position 169 is any or no amino acid
  Variant (171)..(175): Xaa in position 171 to 175 is any amino acid
  Variant (176)..(176): Xaa in position 176 is any or no amino acid
  Variant (178)..(181): Xaa in position 178 to 181 is any amino acid
  Variant (182)..(185): Xaa in position 182 to 185 is any or no amino acid
GXXXXLXXXXGXXVXLXVNXASXCGXTXXXYXXLXXLXXXYXXXXXXXXXXXXXXXLXFPCNQFXXQEPXXXXXXXXXXXIXXXXXXXXXXXXXXXXKXXVNGXXXXXXXPXXXXLKXXXXXXXXXXXXXXXXXXXXXXXXXXXXXXXXXXIKWNFXKFLXXXXGXXXXRXXXXXXPXXXXXXXXI

SEQ ID NO: 73717 - protein, 18 aa, Artificial sequence
  protein pattern
  Variant (2)..(2): Xaa in position 2 is any amino acid
  Variant (3)..(3): Xaa in position 3 is Ala, Thr or Val
  Variant (4)..(4): Xaa in position 4 is any amino acid
  Variant (5)..(5): Xaa in position 5 is Ile or Leu
  Variant (6)..(6): Xaa in position 6 is Ile, Leu or Val
  Variant (9)..(9): Xaa in position 9 is any amino acid
  Variant (12)..(12): Xaa in position 12 is any amino acid
  Variant (15)..(15): Xaa in position 15 is any amino acid
  Variant (17)..(17): Xaa in position 17 is any amino acid
  Variant (18)..(18): Xaa in position 18 is Ala, Gly, Asn, Gln, Ser or Thr
GXXXXXVNXASXCGXTXX

SEQ ID NO: 73718 - protein, 12 aa, Artificial sequence
  protein pattern
  Variant (4)..(4): Xaa in position 4 is Glu, Ser or Thr
  Variant (8)..(8): Xaa in position 8 is Ile or Val
  Variant (9)..(9): Xaa in position 9 is Asp, Gly, Asn or Ser
  Variant (10)..(11): Xaa in position 10 to 11 is any amino acid
WNFXKFLXXXXG

SEQ ID NO: 73719 - DNA, 309 bp, Azotobacter vinelandii
  CDS (1)..(309): transl_table=11
atgaatgcaattcccatggagcacggcctggcgctgtccggcgtgctgttcagcctcggcctgatcggcctgatggtacggcgcaacatcctgttcgtactgatgagtctggaagtcatgatgaacgcggccgccctggccttcgtggtcgccggcagccgctgggcgcaggccgacgggcagatcatgttcattctggtgatcaccctggcagccgccgaggccagcatcggcctggcgatcctgctgcagttgcatcgccgcttccataccctcgatatcgacgctgccagcgagatgcgcggatga

SEQ ID NO: 73720 - protein, 102 aa, Azotobacter vinelandii
MNAIPMEHGLALSGVLFSLGLIGLMVRRNILFVLMSLEVMMNAAALAFVVAGSRWAQADGQIMFILVITLAAAEASIGLAILLQLHRRFHTLDIDAASEMRG

SEQ ID NO: 73721 - DNA, 303 bp, Klebsiella pneumoniae subsp. pneumoniae MGH 78578
  CDS (1)..(303): transl_table=11
atgatccccttaacacatggactgatcctcgcggccatcctgtttgtgcttggtctgacggggctggtgatccgccgcaatctgctgtttatgttgattagcctggaaatcatgattaacgccgccgcgctggcctttgtggtggcgggtagctactggggtcaggcagatggtcagataatgtatatcctcgccatcagcctcgcggctgcggaagcgagtatcggcctggcgctgctgctgcagctccatcgtcgccgccagaacctgaacatcgattcagtaagtgagttgcgtggatga

SEQ ID NO: 73722 - protein, 100 aa, Klebsiella pneumoniae subsp. pneumoniae MGH 78578
MIPLTHGLILAAILFVLGLTGLVIRRNLLFMLISLEIMINAAALAFVVAGSYWGQADGQIMYILAISLAAAEASIGLALLLQLHRRRQNLNIDSVSELRG

SEQ ID NO: 73723 - DNA, 306 bp, Medicago truncatula
  CDS (1)..(306)
atgatgctcgaacatgtacttgttttgagtgcctatttattttctattggtatctatggattgatcacgagccgaaatatggttagagcccttatgtgtcttgaacttatactgaatgcagttaatataaatctcgtaactttttctgatttttttgataatcgccaattaaaaggaaatattttttcaatttttgttatagctattgcagccgctgaagcagctatcggactggctattgtttccgcaattgctcgtaacagaaaatcaacccgtatcaatcaatcgaatttgttgaataaatag

SEQ ID NO: 73724 - protein, 101 aa, Medicago truncatula
MMLEHVLVLSAYLFSIGIYGLITSRNMVRALMCLELILNAVNINLVTFSDFFDNRQLKGNIFSIFVIAIAAAEAAIGLAIVSAIARNRKSTRINQSNLLNK

SEQ ID NO: 73725 - DNA, 315 bp, Xanthobacter autotrophicus Py2
  CDS (1)..(315): transl_table=11
atgggcatggacatcggtctctcccactatctgaccgtcgcggcgatcctgttcacgctgggaacgctcggcatcttcctcaaccggaagaatgtgatcgtcatcctcatgtcggtggagctgatcctgctcgccgtgaacatcaacctggtgtcgttctcggccttcctcgggaacctgaccggccaggtgttcgcgctgcttgtcctcaccgtcgcggcggccgaggcggccatcggcctcgccatcctcgtggtgttctaccgcaaccgcggttcgatcgccgtcgaggacatcaacgccatgaagggctga

SEQ ID NO: 73726 - protein, 104 aa, Xanthobacter autotrophicus Py2
MGMDIGLSHYLTVAAILFTLGTLGIFLNRKNVIVILMSVELILLAVNINLVSFSAFLGNLTGQVFALLVLTVAAAEAAIGLAILVVFYRNRGSIAVEDINAMKG

SEQ ID NO: 73727 - DNA, 303 bp, Katharina tunicata
  CDS (1)..(303): transl_table=5
atgataaatttttttaacccattattcacgcttggagctttaagtaggattagagcactaataacaatttgcctacaacgaaaacatcttcttaacaccttattagccttagaaatcttaatagtaagaatttttttattattagtatccctatcaaaccttataagaaatgaagggttaataattttcgtcttacttactctagcagcttcagaagctagcatcgggctcgcaatattagtaattttaattcgtgcacacggaaatgattacgtatcatcaatctccattcataagtgctag

SEQ ID NO: 73728 - protein, 100 aa, Katharina tunicata
MMNFFNPLFTLGALSSISALMTICLQRKHLLNTLLALEILMVSIFLLLVSLSNLMSNEGLMIFVLLTLAASEASIGLAMLVILIRAHGNDYVSSISIHKC

SEQ ID NO: 73729 - DNA, 303 bp, Arabidopsis thaliana
  CDS (1)..(303)
atggatcttatcaaatatttcacattttctatgattatttctattttaggtattcggggaatcctccttaatagacgaaatattcctattatgtcaatgccaattgaatcaatgttattagctgtgaattcgaactttttggtattttccgtttcttcggatgatatgatgggtcaagtatttgcttcattggttccaacggtggcagctgcggaatccgctattgggttagccattttcgttataactttccgagtccgaggtactattgctgtagaatttattaatagcattcaaggttaa

SEQ ID NO: 73730 - protein, 100 aa, Arabidopsis thaliana
MDLIKYFTFSMIISILGIRGILLNRRNIPIMSMPIESMLLAVNSNFLVFSVSSDDMMGQVFASLVPTVAAAESAIGLAIFVITFRVRGTIAVEFINSIQG

SEQ ID NO: 73731 - DNA, 309 bp, Mesorhizobium loti MAFF303099
  CDS (1)..(309): transl_table=11
atggtcgtgggcatcgcacattatctgaccgtatcggctgttctgttcacgctcggcgtgttcggcattttcctgaaccgcaagaacgtcatcgtcatcctgatgtcggtcgagttgatcctgcttgcggtcaacatcaacttcgtcgccttttcggcggcgctcggcgatctggtcggccaggtgttcgcgctgttcgtgctgacggtcgcggcggctgaagccgcaatcggacttgccattctcgtcgtcttcttccgcaaccgcggctcgatcgcggtcgaagacgtgaacatgatgaagggttga

SEQ ID NO: 73732 - protein, 102 aa, Mesorhizobium loti MAFF303099
MVVGIAHYLTVSAVLFTLGVFGIFLNRKNVIVILMSVELILLAVNINFVAFSAALGDLVGQVFALFVLTVAAAEAAIGLAILVVFFRNRGSIAVEDVNMMKG

SEQ ID NO: 73733 - DNA, 306 bp, Aeropyrum pernix K1
  CDS (1)..(306): transl_table=11
gtggatgcagctttatcgcaggtagtggtgttgctggccgctgttttagcggccatagggtcctacggcctagccggttctaggaatcttgttaggcagctgatatccgccgaggttcttttcaacgccttcctcctcatcgttatactagtcctgagtaagagcagcctcgcggccaatgtccttggtataatgctagtcatagtcgtctcgggcgagattatagttgtagtagcactggtggctgccctctacagaaggcttggcacgctggagacggagcctttggaggaggagggggtgtag

SEQ ID NO: 73734 - protein, 101 aa, Aeropyrum pernix K1
MDAALSQVVVLLAAVLAAIGSYGLAGSRNLVRQLISAEVLFNAFLLIVILVLSKSSLAANVLGIMLVIVVSGEIIVVVALVAALYRRLGTLETEPLEEEGV

SEQ ID NO: 73735 - DNA, 303 bp, Helicobacter pylori 26695
  CDS (1)..(303): transl_table=11
atgatagggttaaaccactatttgattgtttcagggttgctcttttgcattggtttagcgggcatgctgaaacgcaaaaacattctgttactctttttttctacagaaatcatgctcaatgcgatcaatatcggttttgtagcgatctctaaatacacgcataatttagacgggcagatgtttgcgctctttattatctctattgccgctagtgaggtggctattggtttgggcttggtgattttgtggtttaagaaattcaaaagcttagatattgattctttaaacgctatgaaaggttga

SEQ ID NO: 73736 - protein, 100 aa, Helicobacter pylori 26695
MIGLNHYLIVSGLLFCIGLAGMLKRKNILLLFFSTEIMLNAINIGFVAISKYTHNLDGQMFALFIISIAASEVAIGLGLVILWFKKFKSLDIDSLNAMKG

SEQ ID NO: 73737 - DNA, 309 bp, Aquifex aeolicus VF5
  CDS (1)..(309): transl_table=11
atgaagacgataccgcttgaggctttcttaacggtaagcatgatactttttgggctggggctaataggtataatcgccagaaggaatttggttaccgttttgatgagtttagagcttgcccttaacgctgtaaacatagccttggtgggtgctgaccattacttaggtcttgcggaggggcagatatttgccctctttataatagcccttgccgctactgaagccgctgtgggtctcgggattataatcgccatattcaggttgaagaaggtagaaagtacggacgaaataagagagctgaggggctga

SEQ ID NO: 73738 - protein, 102 aa, Aquifex aeolicus VF5
MKTIPLEAFLTVSMILFGLGLIGIIARRNLVTVLMSLELALNAVNIALVGADHYLGLAEGQIFALFIIALAATEAAVGLGIIIAIFRLKKVESTDEIRELRG

SEQ ID NO: 73739 - DNA, 306 bp, Neisseria meningitidis MC58
  CDS (1)..(306): transl_table=11
atgattaccttgacgcattatttggtattgggtgcgctcctgttcggtatcagcgcaatgggtatctttatgaaccgcaaaaacgtgctggtattgctgatgtcgatcgagctgatgcttttggcggtgaacttcaactttatcgccttctcgcaacatttgggcgatactgccggacaaattttcgtattcttcgtattgaccgttgccgctgccgaatctgccatcggtttggcgattatggtgctggtgtaccgcaaccgacaaacaatcaacgttgccgatttggacgagttgaaagggtaa

SEQ ID NO: 73740 - protein, 101 aa, Neisseria meningitidis MC58
MITLTHYLVLGALLFGISAMGIFMNRKNVLVLLMSIELMLLAVNFNFIAFSQHLGDTAGQIFVFFVLTVAAAESAIGLAIMVLVYRNRQTINVADLDELKG

SEQ ID NO: 73741 - DNA, 303 bp, Halobacterium sp. NRC-1
  CDS (1)..(303): transl_table=11
atggtgcccatggagtactacctcctgttgtccgctgccgtcttctgtatcggcgtcttcggcgtgctgacgcgccgcagtgcgttgctgttcctgatgtccgtcgagttgatgctgaacgcggcgggcatcaacctcgtggcgttctcgtggttccacgggaacctctcggggcaggcgttcacgctgttcgtgatggcgcttgccgccgccgaggtcgcggtcggtctcggcatcatcctgacgctgtatcgtaacttcgatgacatcgatgtgacaaacgcgacgacgatgaggtggtaa

SEQ ID NO: 73742 - protein, 100 aa, Halobacterium sp. NRC-1
MVPMEYYLLLSAAVFCIGVFGVLTRRSALLFLMSVELMLNAAGINLVAFSWFHGNLSGQAFTLFVMALAAAEVAVGLGIILTLYRNFDDIDVTNATTMRW

SEQ ID NO: 73743 - DNA, 312 bp, Deinococcus radiodurans R1
  CDS (1)..(312): transl_table=11
gtgcctgagatggtgccgacctcgtattacctcgcgctgtcgggcgtcctgttcgcgctcggcctcatcggtgtgatgacccgccgcacggcgattctcattttcctgagtgtggagctgatgctcaacgccgccaacatcgcgctggtggccttcgcccgctcatggggcgacctgatggggcagaccgccgtgtttatcgtgatgacgctggccgccgccgaggtggcgattgggctggcgatcatcgtcgccattttccggggacgtgagaccaccaacgtggacgacctcgcgcagttgaggggctga

SEQ ID NO: 73744 - protein, 103 aa, Deinococcus radiodurans R1
MPEMVPTSYYLALSGVLFALGLIGVMTRRTAILIFLSVELMLNAANIALVAFARSWGDLMGQTAVFIVMTLAAAEVAIGLAIIVAIFRGRETTNVDDLAQLRG

SEQ ID NO: 73745 - DNA, 306 bp, Xylella fastidiosa 9a5c
  CDS (1)..(306): transl_table=11
gtgattagtctgggtcatcttctcgtgttgggagcggccctattttgtatcagtctcgcgggtatctttctgaatcgtaagaatgtcatcgtattgttgatgtctatcgagctgatgttgttggccgtcaatgtcaacttcattgccttctctcgtcagcttggggacactgcgggccaattgttcgtgtttttcattttgaccgttgctgctgcagaggctgccattggcctcgcgatcctggtcactttgttccgtacccgccacacgatcaatgtggccgaagtcgatgctctgaagggctga

SEQ ID NO: 73746 - protein, 101 aa, Xylella fastidiosa 9a5c
MISLGHLLVLGAALFCISLAGIFLNRKNVIVLLMSIELMLLAVNVNFIAFSRQLGDTAGQLFVFFILTVAAAEAAIGLAILVTLFRTRHTINVAEVDALKG

SEQ ID NO: 73747 - DNA, 315 bp, Thermoplasma acidophilum DSM 1728
  CDS (1)..(315): transl_table=11
gtgatgtttatatcagcaatcagcttcgttgccatactgctttttgtaatagggctgtatggcgtaatgacttccagggtcggaataaagatgctgatctcgatcgaaatcatgataaattccgcaatactgaatgttatagggataggatcatactactatgcccattccgggactatatctccctatgtctttgcgctgtttgcgatagcgataggagttgttgaatctgcagttggcctggggctgctcatagcggtttatcacaggttcggaaagattgatatctccctgctcaaggagataaggtggtga

SEQ ID NO: 73748 - protein, 104 aa, Thermoplasma acidophilum DSM 1728
MMFISAISFVAILLFVIGLYGVMTSRVGIKMLISIEIMINSAILNVIGIGSYYYAHSGTISPYVFALFAIAIGVVESAVGLGLLIAVYHRFGKIDISLLKEIRW

SEQ ID NO: 73749 - DNA, 306 bp, Caulobacter crescentus CB15
  CDS (1)..(306): transl_table=11
atgatcggcctgccgcattatctcgtcgtcgccgcgatcctgttcacgatcggcgtcttcggcattttcgtgaaccgcaagaacgtcatcgtcatcctgatgtcgatcgagctgatccttctggcggtgaacatcaacctcgtggcgttctcggcctatctgcacgacgtggcgggccagatcttcgcgatgttcgttctgaccgtcgccgccgccgaggcggccgtgggtctggcgatcctcgtcaccttcttccgcaaccgcggcgacatcgcggttgacgacgccagcatgatgaagggctaa

SEQ ID NO: 73750 - protein, 101 aa, Caulobacter crescentus CB15
MIGLPHYLVVAAILFTIGVFGIFVNRKNVIVILMSIELILLAVNINLVAFSAYLHDVAGQIFAMFVLTVAAAEAAVGLAILVTFFRNRGDIAVDDASMMKG

SEQ ID NO: 73751 - DNA, 303 bp, Sinorhizobium meliloti 1021
  CDS (1)..(303): transl_table=11
atggtcccgctctggtggtcgatcctgctcggagtggccctgtttgtgataggagcggggggcgtccttctgaggcgcaatatcctgatcgtgctgatgtcgctggagcttctgctcaattcggtcaacatcaatttcatcgccttcgggcagtactacgacgacttccgcggacagatctttgcgatcttcgtcatcgcgatcaccgcggcggaggttgccgtagccctcggcatattggtcgcgctggtgaggaacaagtccaccctcaaggtagacgacgtcaccatcatgaaaggatag

SEQ ID NO: 73752 - protein, 100 aa, Sinorhizobium meliloti 1021
MVPLWWSILLGVALFVIGAGGVLLRRNILIVLMSLELLLNSVNINFIAFGQYYDDFRGQIFAIFVIAITAAEVAVALGILVALVRNKSTLKVDDVTIMKG

SEQ ID NO: 73753 - DNA, 303 bp, Salmonella typhimurium LT2
  CDS (1)..(303): transl_table=11
atgatccccttaacacacggactgatcctcgctgcgattttattcgtcctgggtttaaccggtctggttatccgccgcaatctgctgtttatgctgattgggctggaaatcatgattaacgcctccgcgctggcctttgtggtcgccgggagctactggggccagaccgatggtcaggtgatgtacattctcgccatcagccttgcggctgcggaagcgagtattggacttgcgctgttgctgcaactccatcgccgtcgccagaacctgaacatcgattcagtaagtgagatgcgtggatga

SEQ ID NO: 73754 - protein, 100 aa, Salmonella typhimurium LT2
MIPLTHGLILAAILFVLGLTGLVIRRNLLFMLIGLEIMINASALAFVVAGSYWGQTDGQVMYILAISLAAAEASIGLALLLQLHRRRQNLNIDSVSEMRG

SEQ ID NO: 73755 - DNA, 306 bp, Ralstonia solanacearum GMI1000
  CDS (1)..(306): transl_table=11
atgctatcgctcgcccattacctcgtgctcggcgccgtcctgttcgccatcagcatcgtcggcatcttcctgaaccgcaagaacgtcatcgtgctgctgatggcgatcgaactgatgctgctcgcggtcaacatgaacttcgtcgcgttctcccattacctgggtgacctggcggggcaggtgttcgtgtttttcatcctgacggtggccgcggcggaatccgcgatcggtctcgccatcctggtggtgctgttccgtaacctggacaccatcaacgttgacgatctggacagcctcaagggctga

SEQ ID NO: 73756 - protein, 101 aa, Ralstonia solanacearum GMI1000
MLSLAHYLVLGAVLFAISIVGIFLNRKNVIVLLMAIELMLLAVNMNFVAFSHYLGDLAGQVFVFFILTVAAAESAIGLAILVVLFRNLDTINVDDLDSLKG

SEQ ID NO: 73757 - DNA, 309 bp, Agrobacterium tumefaciens str. C58
  CDS (1)..(309): transl_table=11
atggtaatcggtctttcccactacctgacggtcagcgccatcctctttacgatcggcgtcttcggcatcttcctcaaccggaagaacgtcatcgtcatcctgatgtcgatcgagcttatcctgctggcggtcaacatcaacatggtggcgttctcggccttcctgaacgatatcgtcggccaggtcttcgctttgttcattctgaccgttgcagccgccgaagcggccatcggtcttgcaatactcgttgtcttctaccgcaaccgcggatcgatcgccgtcgaagacgtcaatatgatgaagggctga

SEQ ID NO: 73758 - protein, 102 aa, Agrobacterium tumefaciens str. C58
MVIGLSHYLTVSAILFTIGVFGIFLNRKNVIVILMSIELILLAVNINMVAFSAFLNDIVGQVFALFILTVAAAEAAIGLAILVVFYRNRGSIAVEDVNMMKG

SEQ ID NO: 73759 - DNA, 306 bp, Psilotum nudum
  CDS (1)..(306): transl_table=11
atttttgcacttgaacacctacttactttaggtgcttatcttttttgcattggattctatggattaataacaagtcaaaatatgataaaagcacttatgtgccttgaattggtccttaacgcagttaatatcaattttgtcacattttctaattacttcgatactcagcatataaaaggagagatcttcgttctttttattatggctattgcagctgcagaagcagctatcggattagccattgttttgacaatatatcgcgatcgaaaatcaattcgtattgatcaatttaatttgttaaaatga

SEQ ID NO: 73760 - protein, 101 aa, Psilotum nudum
MFALEHLLTLGAYLFCIGFYGLITSQNMIKALMCLELVLNAVNINFVTFSNYFDTQHIKGEIFVLFIMAIAAAEAAIGLAIVLTIYRDRKSIRIDQFNLLK

SEQ ID NO: 73761 - DNA, 300 bp, Hypocrea jecorina
  CDS (1)..(300): transl_table=4
ataatttgatcgataataaaaacaataaatatgagtttaactttagtactttttttaataggaattttaggattcgtatttaacagaaaaaatataatattaatgcttatttctatagaaataatgctattatctataacattcttaatattggttagttctattaatttagacgatataataggacaaacatatgctatatacatcatagtagttgctggtgcagaatctgccattggtttagctattttagtagctttttatagacttagaggaagtattgcaatagaatataaataa

SEQ ID NO: 73762 - protein, 99 aa, Hypocrea jecorina
MIWSIIKTINMSLTLVLFLIGILGFVFNRKNIILMLISIEIMLLSITFLILVSSINLDDIIGQTYAIYIIVVAGAESAIGLAILVAFYRLRGSIAIEYK

SEQ ID NO: 73763 - DNA, 300 bp, Streptomyces coelicolor A3(2)
  CDS (1)..(300): transl_table=11
gtgaaccccgtcaactacctgtacctcgcggccctgctgttcacgatcggtgccaccggcgtgctgatccggcgcaacgcgatcgtggtcttcatgtgcatcgagctgatgctcaacgcctgcaacctcgcgttcgtcgccttctcccgcatgcacggcaacctcgacggccagatcatcgccttcttcacgatggtcgtcgccgccgcggaggtcgtggtcgggctcgcgatcatcgtgtccctgttccgttcccgccactcggcctcggtcgacgacgccagcctgatgaagctgtga

SEQ ID NO: 73764 - protein, 99 aa, Streptomyces coelicolor A3(2)
MNPVNYLYLAALLFTIGATGVLIRRNAIVVFMCIELMLNACNLAFVAFSRMHGNLDGQIIAFFTMVVAAAEVVVGLAIIVSLFRSRHSASVDDASLMKL

SEQ ID NO: 73765 - DNA, 393 bp, Streptomyces coelicolor A3(2)
  CDS (1)..(393): transl_table=11
atgcacctcgcctatcccgccgtcctctccgccctcctcttctgcacgggtctctacggcgtcctcgcccgccgtaacgcgatcctggtcctgatgtcggtcgagctgatgctcaacgccgtcaacctcaaccttgtcgccttcgacgtctggctcagcagggccgcggaggagaccctgcattccggccaggccctgaccctgttcacgatcgccatcgcggcagccgagatcggcataggcctggcgatcgtcctcgccgtccaccgcaaccgcggcacctcggacatcgacaagctccgcgacaccgccgagggccacgagccggacggccccgacaccgacacgcccgcgaccgggacggccgccgagaaggctgaggccaccgcgtga

SEQ ID NO: 73766 - protein, 130 aa, Streptomyces coelicolor A3(2)
MHLAYPAVLSALLFCTGLYGVLARRNAILVLMSVELMLNAVNLNLVAFDVWLSRAAEETLHSGQALTLFTIAIAAAEIGIGLAIVLAVHRNRGTSDIDKLRDTAEGHEPDGPDTDTPATGTAAEKAEATA

SEQ ID NO: 73767 - DNA, 309 bp, Methanosarcina mazei Go1
  CDS (1)..(309): transl_table=11
atgactgccattccattaacattttacctgggacttgcagccctgctcttttcaatagggctctacggtgtcatgacgcataaaagcggtatcaggctgatcatgtgcatagagctcatgctgaactccgcaaacctgaaccttgtagcgttttcaagctatacggacactttgcacggccaggtctttgccatgttctcgatcgcccttgcagccgctgaagctgcagtagggtttgcgatattcatggcgatctacagaatgcacgataaaatcaaccttgatgaacttaatattctgaggtggtaa

SEQ ID NO: 73768 - protein, 102 aa, Methanosarcina mazei Go1
MTAIPLTFYLGLAALLFSIGLYGVMTHKSGIRLIMCIELMLNSANLNLVAFSSYTDTLHGQVFAMFSIALAAAEAAVGFAIFMAIYRMHDKINLDELNILRW

SEQ ID NO: 73769 - DNA, 306 bp, Xanthomonas campestris pv. campestris str. ATCC 33913
  CDS (1)..(306): transl_table=11
ttgattaccttgggccacctgctgggcttgggcgcggtgctgttctgcatctcgctggccggcatcttcctcaatcgcaagaacgtcatcgtgctgttgatgtcgatcgagctgatgctgttgtcggtcaacgtcaacttcatcgctttctcgcgcgagctcggcgataccgcaggtcagttgttcgtgttcttcatcctgaccgttgccgccgcggaggccgccatcggccttgcgatcctggtgacactgttccgtacgcgccgcacgatcaatgtggccgaagtcgatacgttgaagggctga

SEQ ID NO: 73770 - protein, 101 aa, Xanthomonas campestris pv. campestris str. ATCC 33913
MITLGHLLGLGAVLFCISLAGIFLNRKNVIVLLMSIELMLLSVNVNFIAFSRELGDTAGQLFVFFILTVAAAEAAIGLAILVTLFRTRRTINVAEVDTLKG

SEQ ID NO: 73771 - DNA, 324 bp, Chlorobium tepidum TLS
  CDS (1)..(324): transl_table=11
atgctaacgcaacagttactgtcgatcggcgtcaaccattttctgaccatttcagtcattcttttcggtctgggcatgtttgccgtcatgacccgcaaaaacgccatcgttatcctgatgggcgtcgagctgatcttgaacgcggctaacatcaactttctgaccttttcgaaatacaatggcggcatggaaggggtgatgttcagccttttcgtcattgtgctggctgccgccgaagccgctatcgcacttgcgatcgtgatcaatattttcaagaccttcaagacggtcgatgtatccagcgtggacaccatgaaggagtga

SEQ ID NO: 73772 - protein, 107 aa, Chlorobium tepidum TLS
MLTQQLLSIGVNHFLTISVILFGLGMFAVMTRKNAIVILMGVELILNAANINFLTFSKYNGGMEGVMFSLFVIVLAAAEAAIALAIVINIFKTFKTVDVSSVDTMKE

SEQ ID NO: 73773 - DNA, 306 bp, Thermosynechococcus elongatus BP-1
  CDS (1)..(306): transl_table=11
atgcagttaacctatgttttgatcttggcagcactgctgttttgtattggcatctatggtttggttaccagtcgcaatgccgtgcgtgtcctcatgtccattgagttgcttctgaatgcggttaacctcaacctgattggttttgccaactatctggatggccagcaaatcaaggggcaagtctttgcagtatttgtgattactgtggcagccgctgaagccgccgtgggtttagcgattattttggccatctatcgcaaccgcgacactgttgatatggagaaatttaacctcctgaagtggtag

SEQ ID NO: 73774 - protein, 101 aa, Thermosynechococcus elongatus BP-1
MQLTYVLILAALLFCIGIYGLVTSRNAVRVLMSIELLLNAVNLNLIGFANYLDGQQIKGQVFAVFVITVAAAEAAVGLAIILAIYRNRDTVDMEKFNLLKW

SEQ ID NO: 73775 - DNA, 303 bp, Chaetosphaeridium globosum
  CDS (1)..(303)
atggagttagtcaattttttaactgtatctatgattctgtttttattaggcatttggggaatttttttaaatcgaaaaaatatccttattatgttaatgtcaattgaactgatgttgctagcggttaatttaaattttttagttttttcagtttatttagatgatatgatgggtcaattatttgctttgtttgtacttactgtagccgctgcggaatcggcaataggtttggctattttagtaattacttttcgcattcgtggcactattgcgatagaatttattaattcaatgaaagggtaa

SEQ ID NO: 73776 - protein, 100 aa, Chaetosphaeridium globosum
MELVNFLTVSMILFLLGIWGIFLNRKNILIMLMSIELMLLAVNLNFLVFSVYLDDMMGQLFALFVLTVAAAESAIGLAILVITFRIRGTIAIEFINSMKG

SEQ ID NO: 73777 - DNA, 309 bp, Shewanella oneidensis MR-1
  CDS (1)..(309): transl_table=11
atgacagggatcccaatggagcacggcctactgctggccgcggcgctcttttgtatcgggttgtgcggtctactgatccgccgcaacctgctctacatcctgatgagtatcgagatcatgatgaatgcctcggcactggcgtttgtagtggcgggtagccgctgggcccaggccgatggccagatcatgtacatcttggtgatttctctggcggcagcagaggccagtatcggcctcgccctgttactgctgctctatcgtcgttaccacaccctgaacgtggacactgtgagcgagatgcgcggatga

SEQ ID NO: 73778 - protein, 102 aa, Shewanella oneidensis MR-1
MTGIPMEHGLLLAAALFCIGLCGLLIRRNLLYILMSIEIMMNASALAFVVAGSRWAQADGQIMYILVISLAAAEASIGLALLLLLYRRYHTLNVDTVSEMRG

SEQ ID NO: 73779 - DNA, 309 bp, Pseudomonas putida KT2440
  CDS (1)..(309): transl_table=11
atgggtgctatccctctcgagcatgggctggcggtcgccggcatcctgttctgcttaggtctggttggcctgatggtccgccgcaacatcctcttcgtgctcatgagcctggaagtcatgatgaacgcctctgccctggcgttcgtcgtcgccggtgcccgttgggtccagcccgacggtcaggtgatgttcattctggtgatcagcctggcagccgccgaggccagcattggcctggccatcctgctgcagctgtatcgccgcttccacactctcgacatcgatgctgccagtgagatgcgcggatga

SEQ ID NO: 73780 - protein, 102 aa, Pseudomonas putida KT2440
MGAIPLEHGLAVAGILFCLGLVGLMVRRNILFVLMSLEVMMNASALAFVVAGARWVQPDGQVMFILVISLAAAEASIGLAILLQLYRRFHTLDIDAASEMRG

SEQ ID NO: 73781 - DNA, 309 bp, Bradyrhizobium japonicum USDA 110
  CDS (1)..(309): transl_table=11
atgacgatcgggctcggacactatctggcggtcggcgcgatcctgttcacactcgggatcctcggcatcttcctgaaccgcaagaacatcatcgtcatcctgatgtcgatcgagctgatcctgctctcggtcaacatcaacctcgtcgcgttctcgaccttcctcggcgatatcgtcggccaggtcttcgcgcttctggtgctgacggttgctgctgctgaggctgcgatcggtctcgccatcctggtggtctatttccgcaaccgcggctcgatcgcggttgaggacgtcaatctgatgaagggctga

SEQ ID NO: 73782 - protein, 102 aa, Bradyrhizobium japonicum USDA 110
MTIGLGHYLAVGAILFTLGILGIFLNRKNIIVILMSIELILLSVNINLVAFSTFLGDIVGQVFALLVLTVAAAEAAIGLAILVVYFRNRGSIAVEDVNLMKG

SEQ ID NO: 73783 - DNA, 270 bp, Lecanicillium muscarium
  CDS (1)..(270): transl_table=4
atgagtttaactttagtactttttttaataggaatcttagggttcgtatttaatagaaaaaatataatattaatgttaatctcaatcgagataatgttagtatctattacattcttaattttgataagttctataaatcttgacgatattataggacaaacatatgctaaaaaaataattgttattgctggagcagaatctgctataggtttggctatcttagtagccttttatagacttagaggaagtatagcaatagaatataaataa

SEQ ID NO: 73784 - protein, 89 aa, Lecanicillium muscarium
MSLTLVLFLIGILGFVFNRKNIILMLISIEIMLVSITFLILISSINLDDIIGQTYAKKIIVIAGAESAIGLAILVAFYRLRGSIAIEYK

SEQ ID NO: 73785 - DNA, 309 bp, Pseudomonas syringae pv. tomato str. DC3000
  CDS (1)..(309): transl_table=11
atgaatgctatccctcttgaacacggtctggcggttgccggggtcctgttctgcctgggtctggtcggcctgatggtgcgccgcaacattctctttgtgttgatgagcctggaaatcatgatgaacgccgctgctctggcgtttgtagttgccggcagtcgctgggcgcaaccggatggacaggtcatgttcatcctggtgatcagccttgcggcagccgaggccagtatcggcctggcgatcctgatgcaactgtatcgccgcttccacactctcgatatcgatgctgccagcgagatgcgcggatga

SEQ ID NO: 73786 - protein, 102 aa, Pseudomonas syringae pv. tomato str. DC3000
MNAIPLEHGLAVAGVLFCLGLVGLMVRRNILFVLMSLEIMMNAAALAFVVAGSRWAQPDGQVMFILVISLAAAEASIGLAILMQLYRRFHTLDIDAASEMRG

SEQ ID NO: 73787 - DNA, 390 bp, Streptomyces avermitilis MA-4680
  CDS (1)..(390): transl_table=11
atgcacctcgcctatcccgccgtgctctccgccctcctcttctccacgggcctgtacggcgtcctcgcccgccgtaacgcgatcctggtcctgatgtccgtcgagctgatgctcaacgccgtcaacctcaacctcgtcgccttcgacgtctggctgtccaagaccgcccgggacacccttcactccggccaggccctcaccctgttcaccatcgccatcgccgccgccgagatcggcatcggcctggcgatcgtcctcgccgtctaccgaaaccgcggcacctcggacatcgacaagctccgcgacaccgccgagggccccgagcccgacggccccggaaccgacggctccgcacccaccgcggccgagaaggctgaggccaccgcgtga

SEQ ID NO: 73788 - protein, 129 aa, Streptomyces avermitilis MA-4680
MHLAYPAVLSALLFSTGLYGVLARRNAILVLMSVELMLNAVNLNLVAFDVWLSKTARDTLHSGQALTLFTIAIAAAEIGIGLAIVLAVYRNRGTSDIDKLRDTAEGPEPDGPGTDGSAPTAAEKAEATA

SEQ ID NO: 73789 - DNA, 306 bp, Nitrosomonas europaea ATCC 19718
  CDS (1)..(306): transl_table=11
ttggtctcactatcacattatcttgtgctgggtgctctcctgtttgccattggggtcgtcggtatttttctcaaccggaaaaatgtcattatcctgctgatgtcgattgaattgatgctattggccgtcaatatgaatttcgtcgctttttcacattttctacaggatacggcggggcagatcttcgtgttttttattctgactgtcgctgcagctgaagcagccatcggactggcaattttagttgcactattcagaaatctgcgcaccattaacgtggatgatctggatgaattgaaaggctga

SEQ ID NO: 73790 - protein, 101 aa, Nitrosomonas europaea ATCC 19718
MVSLSHYLVLGALLFAIGVVGIFLNRKNVIILLMSIELMLLAVNMNFVAFSHFLQDTAGQIFVFFILTVAAAEAAIGLAILVALFRNLRTINVDDLDELKG

SEQ ID NO: 73791 - DNA, 303 bp, Adiantum capillus-veneris
  CDS (1)..(303): transl_table=11
atcacgtttgaacaaggactaattctgagtgcttatcttttatgtgtaggttttttcggtctaattacgagtagaaatatggttagggcactgatgagtctagagctaatctttaacgcgattactttaaatttcattacactttcaaatctttttgacaaccgagagactggggaaatatttacattatttgtaatagccgttgcagctgctgaagctgctaccgggttagctattgccctttctatacatcgaaacaggagatctactcgtatcgatcaatcgaatttgttaaaatggtga

SEQ ID NO: 73792 - protein, 100 aa, Adiantum capillus-veneris
MTFEQGLILSAYLLCVGFFGLITSRNMVRALMSLELIFNAITLNFITLSNLFDNRETGEIFTLFVIAVAAAEAATGLAIALSIHRNRRSTRIDQSNLLKW

SEQ ID NO: 73793 - DNA, 306 bp, Calycanthus floridus var. glaucus
  CDS (1)..(306): transl_table=11
atgatgaccgagtatgtacttattttgagtgcctatttattttcgatcggtatttatggactgatcacaagccgaaacatggttagagcacttatgtgtcttgagcttatactgaatgcggttaatatgaatctcgtaacgttttctgatttatttgatagtcgccaattaaaaggagatattttctcgatttttgttatagctattgcagccgctgaagcagctattgggccggctattgtttcatcgatccatcgtaaccgaaaatcaactcgtatcaatcaatcaaatttgttgaataaatag

SEQ ID NO: 73794 - protein, 101 aa, Calycanthus floridus var. glaucus
MMTEYVLILSAYLFSIGIYGLITSRNMVRALMCLELILNAVNMNLVTFSDLFDSRQLKGDIFSIFVIAIAAAEAAIGPAIVSSIHRNRKSTRINQSNLLNK

SEQ ID NO: 73795 - DNA, 303 bp, Candidatus Blochmannia floridanus
  CDS (1)..(303): transl_table=11
atgattcctttatctcatggattaggtattacaataattttatttgcattaggattgctaggaatgatagtgaggcgtaattttctttttatattgttgggattagaaattatgattcattctgctgctttagcttttgtggtagttggtgcttatttaggtcaagaggatggtcaaattatgtatatgttggttgtgactttggcggcttctgaatctgcaattgccttagcgctgttattaagattgcatcgttattgtcatacattaaacgttgattctattaatgagatagttgaatga

SEQ ID NO: 73796 - protein, 100 aa, Candidatus Blochmannia floridanus
MIPLSHGLGITIILFALGLLGMIVRRNFLFILLGLEIMIHSAALAFVVVGAYLGQEDGQIMYMLVVTLAASESAIALALLLRLHRYCHTLNVDSINEIVE

SEQ ID NO: 73797 - DNA, 309 bp, Bordetella pertussis Tohama I
  CDS (1)..(309): transl_table=11
atgacgctgacgctggcccactacctgatcctgggggcgattctcttcgccatcggcatcttcggcatcttcctcaaccgccgtaacctgatcattctgctgatgtccatcgagctggtgctcctggccgtcaacatgaacttcgtggcgttctcgagctggttcggcgacatcgccggccaggtgttcgtgttcttcatcctgaccgtcgcggccgccgaggccgccatcggcctggcgatcctggtactgctgttccgcaacctgaacacgatcaacgttgacgaactcgatcgcctcaagggctga

SEQ ID NO: 73798 - protein, 102 aa, Bordetella pertussis Tohama I
MTLTLAHYLILGAILFAIGIFGIFLNRRNLIILLMSIELVLLAVNMNFVAFSSWFGDIAGQVFVFFILTVAAAEAAIGLAILVLLFRNLNTINVDELDRLKG

SEQ ID NO: 73799 - DNA, 321 bp, Prochlorococcus marinus subsp. pastoris str. CCMP1986
  CDS (1)..(321): transl_table=11
atgaatttagaatccatcccacttcaagcttttttaatagtttcctcagttttattttgtattggcatttggggattattaaatagtagaaatgcagtaagagtactgatgagtatagagttaatgttgaatgcagtgaacataaatttgatggccttctcctcttatgtggacaataacctaattcaaggacaagtttttacaatttttgttattacagttgcagcagcagaagctgctgtaggtttagctatattgttatctctttatagaaatagggtgactgttgatatggaaagttttaatttattaaagtggtaa

SEQ ID NO: 73800 - protein, 106 aa, Prochlorococcus marinus subsp. pastoris str. CCMP1986
MNLESIPLQAFLIVSSVLFCIGIWGLLNSRNAVRVLMSIELMLNAVNINLMAFSSYVDNNLIQGQVFTIFVITVAAAEAAVGLAILLSLYRNRVTVDMESFNLLKW

SEQ ID NO: 73801 - DNA, 306 bp, Chromobacterium violaceum ATCC 12472
  CDS (1)..(306): transl_table=11
gtgctgacactgactcactttctggtgctggccgccatcctgttcgccatcagcgtgctcggtattttcctgaaccggaaaaacctgatcattctgctgatggccatcgagctgatgctgctggcggtgaatttcaacttcatcgcgttttcgcactacctgtcggattcggcaggccagatcttcgtgttcttcatcctgacggttgccgccgccgagtccgccattggtctggcgatcctggtggtgctgttccgcaacctgcagagcatcaacgttgaagacttgggcagcctcaagggctaa

SEQ ID NO: 73802 - protein, 101 aa, Chromobacterium violaceum ATCC 12472
MLTLTHFLVLAAILFAISVLGIFLNRKNLIILLMAIELMLLAVNFNFIAFSHYLSDSAGQIFVFFILTVAAAESAIGLAILVVLFRNLQSINVEDLGSLKG

SEQ ID NO: 73803 - DNA, 306 bp, Amborella trichopoda
  CDS (1)..(306): transl_table=11
atgatgttcgagtatgcacttgttttaagtagttatttattttctatgggtatctatggattaatcacaagtcgaaacatggttagagcacttatgtgtcttgagcttatactgaatgctgttaatatgaatctcgtaacattttctgatttatttgatagtcgacaattaaagggagacattttctcgatcttcgttatagctattgcagccgctgaagcagctattggcccagctattgtttcatcaatccatcgtaacagaaaatccactcgtatcaatcaatcaaatttgttgaagaaatag

SEQ ID NO: 73804 - protein, 101 aa, Amborella trichopoda
MMFEYALVLSSYLFSMGIYGLITSRNMVRALMCLELILNAVNMNLVTFSDLFDSRQLKGDIFSIFVIAIAAAEAAIGPAIVSSIHRNRKSTRINQSNLLKK

SEQ ID NO: 73805 - DNA, 303 bp, Physcomitrella patens subsp. patens
  CDS (1)..(303): transl_table=11
atgcttgaacatatacttagtttaggtgcttatttattttgcattggtatttttggattaattacaagtcgaaacatggtccgagcacttatgtgtttagagttaatttttaatgctgttaatattaatcttataactttttctaattcttttgatactcaacaagcaaaaggtgaaatttttgctatttttattatagcgattgcggctgctgaagcagctattggactagctattgttttagcgatttatcgtaataaaaattcaactcgtattgatcaatttaatttgttaaaatggtaa

SEQ ID NO: 73806 - protein, 100 aa, Physcomitrella patens subsp. patens
MLEHILSLGAYLFCIGIFGLITSRNMVRALMCLELIFNAVNINLITFSNSFDTQQAKGEIFAIFIIAIAAAEAAIGLAIVLAIYRNKNSTRIDQFNLLKW

SEQ ID NO: 73807 - DNA, 303 bp, Wolinella succinogenes DSM 1740
  CDS (1)..(303): transl_table=11
atggtcaccctcaaccactaccttattctctcgtcactcctttttatgattgggcttgttggggtgatgcggcgcaagaatctcctcatgctctttttctccacagagatcatgctcaatgccgtcaatgttggtttggtcgcagcgggcaaatacatgaatgatatggcggggcagatgttctcgttttttatcattgcggtggcagcgagcgaggtggccgtggggcttggactgcttatcctttggtataagaaaaatggcagtctggatttggataatctccagctgatgaaaggataa

SEQ ID NO: 73808 - protein, 100 aa, Wolinella succinogenes DSM 1740
MVTLNHYLILSSLLFMIGLVGVMRRKNLLMLFFSTEIMLNAVNVGLVAAGKYMNDMAGQMFSFFIIAVAASEVAVGLGLLILWYKKNGSLDLDNLQLMKG

SEQ ID NO: 73809 - DNA, 309 bp, Gloeobacter violaceus PCC 7421
  CDS (1)..(309): transl_table=11
atgcccagtctcaacgcctttttgctcgtcggcgccgccctgttctgcatcggcttctacggcctggtcacctcccgcaacgccgtgcgggtgctgatgtccatcgagctgttgctcaacgccgtcaacatcaacctcatcgccttttcgaactttctcgatcccaacaacatccgcggccaactgttcgccatcttcgtgatcaccgtggcggcggcggaggcggcggtgggactggccatcgtgctcgctatctaccgcaaccgcgacactatcgatatggaaaacttcaatttgctcaagtggtga

SEQ ID NO: 73810 - protein, 102 aa, Gloeobacter violaceus PCC 7421
MPSLNAFLLVGAALFCIGFYGLVTSRNAVRVLMSIELLLNAVNINLIAFSNFLDPNNIRGQLFAIFVITVAAAEAAVGLAIVLAIYRNRDTIDMENFNLLKW

SEQ ID NO: 73811 - DNA, 303 bp, Photorhabdus luminescens subsp. laumondii TTO1
  CDS (1)..(303): transl_table=11
atgatacctcttcaacatggactgattttggcggcaattctatttgtgttgggcctgaccgggctcatcatccgccgtaatctgttgtttatgttaattgggctcgaagtgatgattaatgctgcggctctggcttttgttgtggtaggcagctattggggccagccagatggtcaagtgatgtttattttggctatcagcttggcggcggcagaggcgagtattggcttggcgctgttattgcagctctatcgtcgtcgccagaatctgaatattgatacagtcagtgagatgcgcggatga

SEQ ID NO: 73812 - protein, 100 aa, Photorhabdus luminescens subsp. laumondii TTO1
MIPLQHGLILAAILFVLGLTGLIIRRNLLFMLIGLEVMINAAALAFVVVGSYWGQPDGQVMFILAISLAAAEASIGLALLLQLYRRRQNLNIDTVSEMRG

SEQ ID NO: 73813 - DNA, 312 bp, Chara vulgaris
  CDS (1)..(312)
atggatttagtgaaatatttaacattttcaatgattctttttcttttaggtatttggggaatctttttaaatagaaagaatatccttattatgttaatgtcaattgagttaatgttacttgctgtcaatttgaactttttagtattttctgtttatctagatgacatgatgggtcaattatttgctttattcgtattaactgtagctgctgcagaatctgctattgggctcgctattcttgttattacttttcgaattcgtggcactattgaaatctacccaaaccaaaacaagtggcccatttccgcttaa

SEQ ID NO: 73814 - protein, 103 aa, Chara vulgaris
MDLVKYLTFSMILFLLGIWGIFLNRKNILIMLMSIELMLLAVNLNFLVFSVYLDDMMGQLFALFVLTVAAAESAIGLAILVITFRIRGTIEIYPNQNKWPISA

SEQ ID NO: 73815 - DNA, 309 bp, Rhodopseudomonas palustris CGA009
  CDS (1)..(309): transl_table=11
atgaccggctccgacctgatcggcatcatgatcctcgccgcgggcctgttcgcggtcggcgtgttcggtgtgctggcgcgccgcggcatgctgttccagcttgtcgcgctggaggtcgcgctcagcggcccggcgcttggcttcatcgccgccggcgcctatcacgccgatcccgaagggcaggggatgttcatcctggtgctgacgctcgctgccgccgaggtcgcggtcgggctggcgctgttcctgcgcttgcgccgcctcaccggcaccgatgacagcgatgccatcagcgggctgaaggggtga

SEQ ID NO: 73816 - protein, 102 aa, Rhodopseudomonas palustris CGA009
MTGSDLIGIMILAAGLFAVGVFGVLARRGMLFQLVALEVALSGPALGFIAAGAYHADPEGQGMFILVLTLAAAEVAVGLALFLRLRRLTGTDDSDAISGLKG

SEQ ID NO: 73817 - DNA, 309 bp, Geobacter sulfurreducens PCA
  CDS (1)..(309): transl_table=11
gtgatcgtccccttcgagcacgttctgatccttgccggccttctcttcgccctggggcttgtttgcgtcctggtctggcggatgaacctgatcatgctcctcatcggtatcgaagtgatgctcaacgccgccatgctcgccttcgtggggggcgcggcccgctggggaatggcggacggacaggtcttctccctcatcatcatggccctcacctcggccgaggtgtccctggccctggccatggtggtctacctccaccggcggaagaagacggttgatgcggatgagttcagggagctgcagggatga

SEQ ID NO: 73818 - protein, 102 aa, Geobacter sulfurreducens PCA
MIVPFEHVLILAGLLFALGLVCVLVWRMNLIMLLIGIEVMLNAAMLAFVGGAARWGMADGQVFSLIIMALTSAEVSLALAMVVYLHRRKKTVDADEFRELQG

SEQ ID NO: 73819 - DNA, 309 bp, Wolbachia endosymbiont of Drosophila melanogaster
  CDS (1)..(309): transl_table=11
atggaaataggattaaatcattttttgatagttgctgctattttgttcactgttggggtgtgcggtattttcatcaaccgtaagagcataatcaatatattgttatcaatagaaatattattgttggcgattaacatcaatctagttgctttttctgcctttatgaatgatatagttgggcaaatttttgtgatgtttgtgttgactgttgcggcagcagagtcaggagttgggcttgcaatattggttgtatattatagaagccgtggcaatatagatgttgaacaagcaaatttaatgaaagaatga

SEQ ID NO: 73820 - protein, 102 aa, Wolbachia endosymbiont of Drosophila melanogaster
MEIGLNHFLIVAAILFTVGVCGIFINRKSIINILLSIEILLLAININLVAFSAFMNDIVGQIFVMFVLTVAAAESGVGLAILVVYYRSRGNIDVEQANLMKE

SEQ ID NO: 73821 - DNA, 324 bp, Bdellovibrio bacteriovorus HD100
  CDS (1)..(324): transl_table=11
atgaacactgagttcatcaataatatcggcctgactcattacttggttctggctgcacttttgtttgttatgggtatggcgggcgttcttcttcgccgtaacgtgatcgttcttttgatgtccatcgagttgatgctgaactctgtgaatctgactttcgtggctttcagtaaatacctgggcctgttggatggtcacatcatggtgttcttcgttatgactatcgcggctgcggaagcggcagtgggtctggcgctggcagtatccatctttaaacgattcaacgaagtgaatattcgcttctttgagcacttgaaaggatag

SEQ ID NO: 73822 - protein, 107 aa, Bdellovibrio bacteriovorus HD100
MNTEFINNIGLTHYLVLAALLFVMGMAGVLLRRNVIVLLMSIELMLNSVNLTFVAFSKYLGLLDGHIMVFFVMTIAAAEAAVGLALAVSIFKRFNEVNIRFFEHLKG

SEQ ID NO: 73823 - DNA, 306 bp, Nuphar advena
  CDS (1)..(306): transl_table=11
atgatgctcgagcatgtacttgttttgagtgcctatttattttctattggtatctatggattgatcacaagtcgaaacatggttagagcacttatgtgtcttgaacttatactgaatgctgttaatatgaatctcgtaacattttctgatttatttgatagtcgccaattaaagggagacgttttctcgatcttcgttatcgctattgcagccgccgaagcagctattggaccagctattgtttcttcgatctatcgtaacagaaaatcaactcgtataaatcaatcaaatttattgaataaatag

SEQ ID NO: 73824 - protein, 101 aa, Nuphar advena
MMLEHVLVLSAYLFSIGIYGLITSRNMVRALMCLELILNAVNMNLVTFSDLFDSRQLKGDVFSIFVIAIAAAEAAIGPAIVSSIYRNRKSTRINQSNLLNK

SEQ ID NO: 73825 - DNA, 330 bp, Prochlorococcus marinus str. MIT 9303
  CDS (1)..(330): transl_table=11
atgctcgagtcctcctccggtcttgttcctcttcaggcctatctcttgcttgctgcgatgcttttctgtatcggcgtgtgggggctgatcaatagccgtaatgctgttcgggttttgatgagcattgagctgatgctcaatgcggtgaatatcaatctgatggcattctcttcatatattgatggtgatctgatccgcggtcaggtctttgctgtgtttgtgattactgttgctgctgcagaggcagctgtgggtcttgcgatcctcctttccttgtatcgcaatcgcgtcactgtggatatggagcgcttcaatctgctgcgctggtaa

SEQ ID NO: 73826 - protein, 109 aa, Prochlorococcus marinus str. MIT 9303
MLESSSGLVPLQAYLLLAAMLFCIGVWGLINSRNAVRVLMSIELMLNAVNINLMAFSSYIDGDLIRGQVFAVFVITVAAAEAAVGLAILLSLYRNRVTVDMERFNLLRW

SEQ ID NO: 73827 - DNA, 306 bp, Chlorokybus atmophyticus
  CDS (1)..(306): transl_table=11
atgattcttgattcacttctaatattagctgcatctgtgttttgtatagggatttacgggttaattacaagccgtaacgtagtccgaatcttaatgtctctcgagttattactaaatgcagtcaatataaatttcgttgctttttctaattttattgattcaatagagataaaaggacaggtcatctcaatctttattatgactatagcagcagctgaggctgcggttgggttggctttaattttagcaatctatcgtaacagagatactgttgatattgagagttttaatcttttaaaaagatga

SEQ ID NO: 73828 - protein, 101 aa, Chlorokybus atmophyticus
MILDSLLILAASVFCIGIYGLITSRNVVRILMSLELLLNAVNINFVAFSNFIDSIEIKGQVISIFIMTIAAAEAAVGLALILAIYRNRDTVDIESFNLLKR

SEQ ID NO: 73829 - DNA, 303 bp, Angiopteris evecta
  CDS (1)..(303): transl_table=11
atgattgaaaacgcacttattttaggtgcttatcttttctgtatcggtttctatggattaatcacaagtcgaaacatgattcgagcacttatgtgtctagagctaatttttaatgcagttaatataaactttgtaacgttttctaattatttcgatacccaagaacgaaaaggagaaatattttctatctctgtgatagctattgcagctgctgaagctgctatcggattatctatcattttaatcatctatcgcaatagaaaatcaactcgtattgatcaatttaatttgttaaaatggtaa

SEQ ID NO: 73830 - protein, 100 aa, Angiopteris evecta
MIENALILGAYLFCIGFYGLITSRNMIRALMCLELIFNAVNINFVTFSNYFDTQERKGEIFSISVIAIAAAEAAIGLSIILIIYRNRKSTRIDQFNLLKW

SEQ ID NO: 73831 - DNA, 309 bp, Herminiimonas arsenicoxydans
  CDS (1)..(309): transl_table=11
gtggagttatcgctcgtacattacctgattctcggcgcgatcctgttcgcgatctcgatagtcggtatttttctgaatcgtaaaaacatcatcattctgctgatggcaatcgaattgatgctgctggctgtgaatatgaatttcgtcgcgttttcctattttctgggtgacgccgccggccaggtttttgttttcttcattttgacggtagccgccgctgaagctgcaatcggtcttgccattctggtttccatgttccgtacactggataccatcaatgtcgaagatcttgacagcctcaaaggctaa

SEQ ID NO: 73832 - protein, 102 aa, Herminiimonas arsenicoxydans
MELSLVHYLILGAILFAISIVGIFLNRKNIIILLMAIELMLLAVNMNFVAFSYFLGDAAGQVFVFFILTVAAAEAAIGLAILVSMFRTLDTINVEDLDSLKG

SEQ ID NO: 73833 - DNA, 306 bp, Populus trichocarpa
  CDS (1)..(306): transl_table=11
atgatgctcgaatatgtgcttggtttgagtgcttatttattttctatcggtatctatggattgatcacgagtcgaaatatggttagagcccttatgtgtcttgaacttatattgaatgccgtcaatataaatttcgtaacattttctgatttttttgatagtcgacaattaaaaggaaatattttttcaatttttgttatatctatcgcagccgctgaagcagctatcgggccggctatagtttcgtcaatttatcgtaacagaaaatcaatccgtattaatcaattgaatttgttgaataagtag

SEQ ID NO: 73834 - protein, 101 aa, Populus trichocarpa
MMLEYVLGLSAYLFSIGIYGLITSRNMVRALMCLELILNAVNINFVTFSDFFDSRQLKGNIFSIFVISIAAAEAAIGPAIVSSIYRNRKSIRINQLNLLNK

SEQ ID NO: 73835 - DNA, 306 bp, Burkholderia vietnamiensis G4
  CDS (1)..(306): transl_table=11
atgctgactcttgcccattacctcgtgctcggcgcgatcctgtttgcgatgtcgatcgtcgggattttcctgaaccgccgcaacatcatcatcatcctgatggcgatcgaactgatgctgctggccgtcaacaccaacttcgtcgcgttctcgcactatctcggcgacgtacacggccagatcttcgtgttcttcgtgctgacggtcgccgcagcggaagccgcgatcggcctcgcgattctggtgaccctgttccgtaagctcgacacgatcaatgtcgaggatctcgatcagctcaaaggttaa

SEQ ID NO: 73836 - protein, 101 aa, Burkholderia vietnamiensis G4
MLTLAHYLVLGAILFAMSIVGIFLNRRNIIIILMAIELMLLAVNTNFVAFSHYLGDVHGQIFVFFVLTVAAAEAAIGLAILVTLFRKLDTINVEDLDQLKG

SEQ ID NO: 73837 - DNA, 306 bp, Phaseolus vulgaris
  CDS (1)..(306): transl_table=11
atgatattcgagcatgcacttgttttgagtgcttttttattttctataggtatctatggattgatcacgagccgaaatatggttagagcccttatgtgtcttgaacttatactgaatgcagtaaatataaatctcgtaaccttttctgatttttttgataggcggcaattaaaaggaaatattttttcaatttttgttatagctgttgcagccgctgaagcagctatcggaccggctattgtttcctcaatatatcgtaatagaaaatcaacccgtatcaatcaatcaaatttgttgaataaatag

SEQ ID NO: 73838 - protein, 101 aa, Phaseolus vulgaris
MIFEHALVLSAFLFSIGIYGLITSRNMVRALMCLELILNAVNINLVTFSDFFDRRQLKGNIFSIFVIAVAAAEAAIGPAIVSSIYRNRKSTRINQSNLLNK

SEQ ID NO: 73839 - DNA, 306 bp, Aethionema grandiflorum
  CDS (1)..(306): transl_table=11
atgatactcgaacatgtacttgttttgagtgcctatttattttttattggtctttatggattgattacgagtcgaaatatggttagggctcttatgtgtcttgaacttatactcaatgcagttaatatgaatttcgtaacattttctgatttttttgataattcccaattaaaaggggatattttctgcatttttgttatagcaattgcagccgctgaagcagctattggattagctatagtctcgtcaatttatcgtaacagaaaatcaactcgcatcaaccaatcaaccttattaaataagtag

SEQ ID NO: 73840 - protein, 101 aa, Aethionema grandiflorum
MILEHVLVLSAYLFFIGLYGLITSRNMVRALMCLELILNAVNMNFVTFSDFFDNSQLKGDIFCIFVIAIAAAEAAIGLAIVSSIYRNRKSTRINQSTLLNK

SEQ ID NO: 73841 - DNA, 306 bp, Olimarabidopsis pumila
  CDS (1)..(306): transl_table=11
atgatactcgaacatgtacttgttttgagtgcctatttatttttgattggtctttatggattgatcatgagtcgaaatatggttagggctcttatgtgtcttgaacttatactcaatgcagttaatatgaatttcgtaacattttctgatttttttgataattcccaactaaaaggggatattttttgcatttttgttatagcaattgcagccgctgaagcagctattggattagctatagtctcgtcaatttatcgtaacagaaaatcaactcgcataaaccaatcgaccttattaaataagtag

SEQ ID NO: 73842 - protein, 101 aa, Olimarabidopsis pumila
MILEHVLVLSAYLFLIGLYGLIMSRNMVRALMCLELILNAVNMNFVTFSDFFDNSQLKGDIFCIFVIAIAAAEAAIGLAIVSSIYRNRKSTRINQSTLLNK

SEQ ID NO: 73843 - DNA, 306 bp, Arabis hirsuta
  CDS (1)..(306): transl_table=11
atgatactcgagcatgtacttgttttgagtgcctatttatttttgattggtctttatggattgatcacgagtcgaaatatggttagggctcttatgtgtcttgaacttatacttaatgcagttaatatgaatttcgtaacattttctgatttttttgataattcccaactaaaaggggatattttctgcatttttgttatagcaattgcagccgctgaagcagctattggattagctatagtctcgtcaatttatcgtaacagaaaatcaactcgcatcaaccaatcgatcttattaaataagtag

SEQ ID NO: 73844 - protein, 101 aa, Arabis hirsuta
MILEHVLVLSAYLFLIGLYGLITSRNMVRALMCLELILNAVNMNFVTFSDFFDNSQLKGDIFCIFVIAIAAAEAAIGLAIVSSIYRNRKSTRINQSILLNK

SEQ ID NO: 73845 - DNA, 306 bp, Barbarea verna
  CDS (1)..(306): transl_table=11
atgatactcgaacatgtacttgttttgagtgcctatttatttttgattggtctttatggattgatcacgagtcgaaatatggttagggctcttatgtgtcttgaacttatactcaatgcagttaatatgaatttcgtaacattttctgatttttttgataattcccaactaaaagggaatattttctgcatttttgttatagcaattgcagccgctgaagcagctattggattagctatagtctcgtcaatttatcgtaacagaaaatcaacgcgcatcaaccaatcgaccttattaaataagtag

SEQ ID NO: 73846 - protein, 101 aa, Barbarea verna
MILEHVLVLSAYLFLIGLYGLITSRNMVRALMCLELILNAVNMNFVTFSDFFDNSQLKGNIFCIFVIAIAAAEAAIGLAIVSSIYRNRKSTRINQSTLLNK

SEQ ID NO: 73847 - DNA, 306 bp, Crucihimalaya wallichii
  CDS (1)..(306): transl_table=11
atgatactcgaacatgtacttgttttgagtgcctatttatttttgattggtctttatggattgatcacgagtcgaaatatggttagggctcttatgtgtcttgaacttatactcaatgcagttaatatgaatttcgtaacattttctgatttttttgataattccgaactaaaaggggatattttctgcatttttgttatagcaattgcagccgcggaagcagctattggattagctatagtctcgtcaatttatcgtaacagaaaatcaactcgcataaaccaatcgaccttattaaataagtag

SEQ ID NO: 73848 - protein, 101 aa, Crucihimalaya wallichii
MILEHVLVLSAYLFLIGLYGLITSRNMVRALMCLELILNAVNMNFVTFSDFFDNSELKGDIFCIFVIAIAAAEAAIGLAIVSSIYRNRKSTRINQSTLLNK

SEQ ID NO: 73849 - DNA, 306 bp, Draba nemorosa
  CDS (1)..(306): transl_table=11
atgatactcgagcatgtacttgttttgagtgcttatttatttttgattggtctttatggattgatcacgagtcgaaatatggttagggctcttatgtgtcttgaacttatactcaatgcagttaatatgaatttggtaacattttctgatttttttgataattcccaactaaaaggggatattttctgcatttttgttatagcaattgcagccgctgaagcagctattggattagctatagtttcgtcaatttatcgtaacagaaaatcaactcggatcaaccaatcgaccttattaaataagtag

SEQ ID NO: 73850 - protein, 101 aa, Draba nemorosa
MILEHVLVLSAYLFLIGLYGLITSRNMVRALMCLELILNAVNMNLVTFSDFFDNSQLKGDIFCIFVIAIAAAEAAIGLAIVSSIYRNRKSTRINQSTLLNK

SEQ ID NO: 73851 - DNA, 306 bp, Lepidium virginicum
  CDS (1)..(306): transl_table=11
atgatactcgaacatgtacttgttttgagtgcctatttatttttgattggtctttatggattgatcactagtcgaaatatggttagggctcttatgtgtcttgaacttatactcaatgcagttaatatgaatttcgtaacattttctgatttttttgataattcccaactaaaaggggatattttctgcatttttgttatagcaattgcagctgctgaagcagctattggattagctatagtctcatcaatttatcgtaacagaaaatcgactcgcatcaaccaatcgaccttattaaataagtag

SEQ ID NO: 73852 - protein, 101 aa, Lepidium virginicum
MILEHVLVLSAYLFLIGLYGLITSRNMVRALMCLELILNAVNMNFVTFSDFFDNSQLKGDIFCIFVIAIAAAEAAIGLAIVSSIYRNRKSTRINQSTLLNK

SEQ ID NO: 73853 - DNA, 306 bp, Lobularia maritima
  CDS (1)..(306): transl_table=11
atgatactcgaacatgtacttgttttgagtgcctatttatttttgcttggtctttatggattgatcatgagtcgaaatatggttagggctcttatgtgtcttgagcttatactcaatgcagttaatatgaatttggtaacattttctgatttttttgataattcccaactaaaagggaatattttctgcatttttgttatagcaattgcagctgctgaagcagctattgggttggctatagtctcgtcaatttatcgtaacagaaaatcaactcgtatcaaccaatcgaccttattaaataagtag

SEQ ID NO: 73854 - protein, 101 aa, Lobularia maritima
MILEHVLVLSAYLFLLGLYGLIMSRNMVRALMCLELILNAVNMNLVTFSDFFDNSQLKGNIFCIFVIAIAAAEAAIGLAIVSSIYRNRKSTRINQSTLLNK

SEQ ID NO: 73855 - DNA, 270 bp, Gibberella zeae
  CDS (1)..(270): transl_table=4
atgagtttaaccttattactttttttaataggaatcttaggattcgtatttaatagaaaaaatttgatacttatgcttatttctatagaaataatgctattatctataacattcctaatattggtaagttctgttaatatcgatgatataataggacaaacgtatgccatttacattattgtcgttgccggtgcagaatctgcgatcggtttagctattctagtagctttttatagattaagaggaagtattagaatagaatataaataa

SEQ ID NO: 73856 - protein, 89 aa, Gibberella zeae
MSLTLLLFLIGILGFVFNRKNLILMLISIEIMLLSITFLILVSSVNIDDIIGQTYAIYIIVVAGAESAIGLAILVAFYRLRGSIRIEYK

SEQ ID NO: 73857 - DNA, 306 bp, Chloranthus spicatus
  CDS (1)..(306): transl_table=11
atgatgctcgagcatgtacttgttttgagtgcctatttattttctattggtatctatggattgatcacaagccgaaacatggttagagcacttatgtgtcttgagcttatattgaatgcggtaaatatgaatctcgtaacattttctgatttatttgatagtcgtcaattaaaaggagacattttttcgatctttgttatagctattgcagccgctgaagcagctattgggccagctattgtttcgtcgatccatcgtaacagaaaatcaactcgtatcaatcaatcgaatttgttgaataaatag

SEQ ID NO: 73858 - protein, 101 aa, Chloranthus spicatus
MMLEHVLVLSAYLFSIGIYGLITSRNMVRALMCLELILNAVNMNLVTFSDLFDSRQLKGDIFSIFVIAIAAAEAAIGPAIVSSIHRNRKSTRINQSNLLNK

SEQ ID NO: 73859 - DNA, 306 bp, Buxus microphylla
  CDS (1)..(306): transl_table=11
atgatgctcgaacatgtacttgttttgggtgcctatttattttctattggtatctatggattgatcacgagccgaaatatggttagagcgcttatgtgtcttgagcttatacttaatgcagttaatataaatttagtaacattttctgatttttttgatagtcgacaattaaaaggagacattttatccatttttgttatagctattgcagccgctgaagcagctattggtcttgctattgtttcgtcaatttatcgtaacagaaaatcaactcgtatcaatcaatcgaatttgttgaataaatag

SEQ ID NO: 73860 - protein, 101 aa, Buxus microphylla
MMLEHVLVLGAYLFSIGIYGLITSRNMVRALMCLELILNAVNINLVTFSDFFDSRQLKGDILSIFVIAIAAAEAAIGLAIVSSIYRNRKSTRINQSNLLNK

SEQ ID NO: 73861 - DNA, 306 bp, Illicium oligandrum
  CDS (1)..(306): transl_table=11
atgatgctggagcatgtacttgttttgagtgcctatttattttctatcggtatctatggcttgatcacaagccgaaacatggttagagcacttatgtgtcttgagcttatactgaatgctgttaatataaatctcgtaacattttctgatttatttgatagtcgccaattaaaaggagacattttctcaatcttcgttatagcgattgcagccgctgaagcagctattgggccagctattgtttcgtccatctatcgtaacagaaaatcaactcgtatcaatcaatctaatttgttgaataaatag

SEQ ID NO: 73862 - protein, 101 aa, Illicium oligandrum
MMLEHVLVLSAYLFSIGIYGLITSRNMVRALMCLELILNAVNINLVTFSDLFDSRQLKGDIFSIFVIAIAAAEAAIGPAIVSSIYRNRKSTRINQSNLLNK

SEQ ID NO: 73863 - DNA, 306 bp, Dioscorea elephantipes
  CDS (1)..(306): transl_table=11
atgatgttcgaacatgtactagttttgagtgtatatttattttctatcggtatctatggattgatcacaagtcgaaacatggttagagcacttatgtgtcttgatcttatactaaattcggttaatatgaatctcgtaacattttctgatttatttgatagtcgacaattaaaaggagacattttctcaatctttgttatagctgttgcagctgctgaagcagctattggtctagctattgtttcgtcgatctaccgtaacagaaaatcaactcgtatcaatcaatccaacttgttgaataattag

SEQ ID NO: 73864 - protein, 101 aa, Dioscorea elephantipes
MMFEHVLVLSVYLFSIGIYGLITSRNMVRALMCLDLILNSVNMNLVTFSDLFDSRQLKGDIFSIFVIAVAAAEAAIGLAIVSSIYRNRKSTRINQSNLLNN

SEQ ID NO: 73865 - DNA, 303 bp, Cycas taitungensis
  CDS (1)..(303): transl_table=11
atgctcgagcatgcgcttatttcaggtgcttatttgttctctatcggtatttatggactgatcacaagtcggaacatggttagagcacttatgtgtcttgagctaatactgaatgcggttaatgtcaatctcgtaacattctccaattattttgatagtcgacaagtaaagggagacatcttctcgatctttgttaccgctattgcagccgctgaagcagccattggattagctattgctttagcaatatatcgtaacagaaaatcgactcgtatcgatcaatttaatttgtcaaaatggtaa

SEQ ID NO: 73866 - protein, 100 aa, Cycas taitungensis
MLEHALISGAYLFSIGIYGLITSRNMVRALMCLELILNAVNVNLVTFSNYFDSRQVKGDIFSIFVTAIAAAEAAIGLAIALAIYRNRKSTRIDQFNLSKW

SEQ ID NO: 73867 - DNA, 303 bp, Chlorokybus atmophyticus
  CDS (1)..(303)
atggatcaaacacaatatttaacggtatcaatgattctttttttacttggcatttggggaatctttcttaacagaaagaatattattataatgttaatgtcaattgaattaatgcttttggcggttaatctcaactttgctttcttttcagtatatttagatgatatgatgggacaattatttgtattacttatactaacggtcgccgcagcagaatctgcgattggtttagccatcttagtagcctactatagaattcgtgggacaattgcggtagaattaatacatttaatgaaaggttaa

SEQ ID NO: 73868 - protein, 100 aa, Chlorokybus atmophyticus
MDQTQYLTVSMILFLLGIWGIFLNRKNIIIMLMSIELMLLAVNLNFAFFSVYLDDMMGQLFVLLILTVAAAESAIGLAILVAYYRIRGTIAVELIHLMKG

SEQ ID NO: 73869 - DNA, 297 bp, Vampyroteuthis infernalis
  CDS (1)..(297): transl_table=5
atgacaataattaatggtttattattaggaggttttatattttttagaggtttaatagttcttatttttcagtgaaaacatattttaaatattttacttagatttgaaattttaatgttaagtattattattagatttttatttacttgaggtttgtatagtagggattatatattatctataattattattgtttttagagtaagagaggcaagtttgggattatctttattagtaagattaattcgttgttatggtaatgattacgttaaaagtttaagaatatataaattataa

SEQ ID NO: 73870 - protein, 98 aa, Vampyroteuthis infernalis
MTMINGLLLGGFMFFSGLMVLIFQWKHILNILLSFEILMLSIIISFLFTWGLYSSDYMLSMIIIVFSVSEASLGLSLLVSLIRCYGNDYVKSLSMYKL

SEQ ID NO: 73871 - DNA, 321 bp, Leptospira interrogans serovar Copenhageni str. Fiocruz L1-130
  CDS (1)..(321): transl_table=11
atgaaccactttatatccggaattccgatccactactacctcatacttgcgatgatcattttcacaatcggagtcgcgggagtgatggtaagaagaagcgcggttctgatttttatgtcggtagaattgatcttaaactcggtaaatctagtattcgtaacattttcaaaagctctgcatcaaatagacggagaagtggtggtgttttttgtgatggcgattgcggcggcagaggcggcgatcggactggccattgtcatcgcaatccataggatcaaaaagactagttatgtagacgaaatgaatctgatgaaatggtag

SEQ ID NO: 73872 - protein, 106 aa, Leptospira interrogans serovar Copenhageni str. Fiocruz L1-130
MNHFISGIPIHYYLILAMIIFTIGVAGVMVRRSAVLIFMSVELILNSVNLVFVTFSKALHQIDGEVVVFFVMAIAAAEAAIGLAIVIAIHRIKKTSYVDEMNLMKW

SEQ ID NO: 73873 - DNA, 288 bp, Thermus thermophilus HB27
  CDS (1)..(288): transl_table=11
gtgagctacctcctggcctctgccctcctcttcgccctgggggtctacggggtcctgacccgcaggaccgccattctggtcttcctctccatagagctcatgctgaacgccgccaacctctccctggtgggcttcgcccgggcctacgggcttgacggccaggtggccgccctcatggtcatcgccgtggccgccgccgaggtggccgtgggcctcggcctcatcgtggccatcttccgccaccgggagagcaccgcggtggacgacctctcggagcttcgggggtaa

SEQ ID NO: 73874 - protein, 95 aa, Thermus thermophilus HB27
MSYLLASALLFALGVYGVLTRRTAILVFLSIELMLNAANLSLVGFARAYGLDGQVAALMVIAVAAAEVAVGLGLIVAIFRHRESTAVDDLSELRG

SEQ ID NO: 73875 - DNA, 300 bp, Candidatus Protochlamydia amoebophila UWE25
  CDS (1)..(300): transl_table=11
atggatattctttttagcctttttattagtatggccatgtttacctttggcatcattggcattttaattaagcgaaatgccctaattgtttttatgtgtgtggaattaatgttgaatgcggctaatttgctttttgttgcttttgctgcgcattggggaaatgagacaggccttatttgggtgttttttgtattagtggttgctgcagctgaagctgctgtcggccttgctattatcattaatatgtttagatcaaagcaagttgttgacgttgatcaatataatttgctgaggggttga

SEQ ID NO: 73876 - protein, 99 aa, Candidatus Protochlamydia amoebophila UWE25
MDILFSLFISMAMFTFGIIGILIKRNALIVFMCVELMLNAANLLFVAFAAHWGNETGLIWVFFVLVVAAAEAAVGLAIIINMFRSKQVVDVDQYNLLRG

SEQ ID NO: 73877 - DNA, 300 bp, Haliotis rubra
  CDS (1)..(300): transl_table=5
atgaggagtgtttcttatttgtttgttattgctgttttcggggtcgggttttcggttgttgttttgagtttgcagtataagcatcttttaggggttttgctttctctggagttgatgatgttgaggttgtttttgatgattgttagagtgggtagaggttttaattttgaggggcaattgtgtttaattttaattactttgagggcctgtgaggctagtttggggttggccgttctcgtttctttaattcggacgcatggtaatgattacgtgcataggtttaatgggtataagtgttag

SEQ ID NO: 73878 - protein, 99 aa, Haliotis rubra
MSSVSYLFVIAVFGVGFSVVVLSLQYKHLLGVLLSLELMMLSLFLMIVSVGSGFNFEGQLCLILITLSACEASLGLAVLVSLIRTHGNDYVHSFNGYKC

SEQ ID NO: 73879 - DNA, 315 bp, Bacillus anthracis str. Sterne
  CDS (1)..(315): transl_table=11
atgagtagcgtacctgcttctgcatatttaacgcttgcgattattttgttttgcatcggtttgtttggagctttaacgaagcgaaatacagtgattgtattagtttgtattgaattaatgcttaacgcagccaatttaaactttgtagcgtttagtaaattaggtttgtttccaaatttaacagggcaaattttctctctgtttacgatggctgtagcagcagcggaagccgcggtaggactcgccattttaattgctttatatcgtaaccgtacgacagttcatgtagatgaaatggatacgctcaaaggatag

SEQ ID NO: 73880 - protein, 104 aa, Bacillus anthracis str. Sterne
MSSVPASAYLTLAIILFCIGLFGALTKRNTVIVLVCIELMLNAANLNFVAFSKLGLFPNLTGQIFSLFTMAVAAAEAAVGLAILIALYRNRTTVHVDEMDTLKG

SEQ ID NO: 73881 - DNA, 309 bp, Bartonella quintana str. Toulouse
  CDS (1)..(309): transl_table=11
atgcacattgatattactcattatctgattgtttctgctctcatttttacaattggtattgctggaatttttctcaacagaaagaatgtaattattattcttatgtccattgagcttatattgctttcggttaatctcaattttgttgcgttttcagcgttttttcaggatctcgttggtcagatattcgctttatttatcttaacagtagcggctgctgaagctgcaattggtttagcaattcttgtggtttttttccgtaattgtggttctattgcggttgaagatgttaatgtaatgaaaggctga

SEQ ID NO: 73882 - protein, 102 aa, Bartonella quintana str. Toulouse
MHIDITHYLIVSALIFTIGIAGIFLNRKNVIIILMSIELILLSVNLNFVAFSAFFQDLVGQIFALFILTVAAAEAAIGLAILVVFFRNCGSIAVEDVNVMKG

SEQ ID NO: 73883 - DNA, 309 bp, Acinetobacter sp. ADP1
  CDS (1)..(309): transl_table=11
atgggtaatattcctttagagcatggtttgattgttgctaccattctttttgcactgggattttacggtgtaatggtgcgacgcaacttattgtttatgttgatgagccttgagatcatgatgaatgctgctgcactggcattcgttttggcggggagtgtctgggcacaacctgatggtcagatcatgtttattctgattttgacccttgctgcggcagaggcatgtatcggtcttgcgatcgtccttcagttttaccatcgcttccaccatctggatgtggatgctgcgagtgagatgcgtggatga

SEQ ID NO: 73884 - protein, 102 aa, Acinetobacter sp. ADP1
MGNIPLEHGLIVATILFALGFYGVMVRRNLLFMLMSLEIMMNAAALAFVLAGSVWAQPDGQIMFILILTLAAAEACIGLAIVLQFYHRFHHLDVDAASEMRG

SEQ ID NO: 73885 - DNA, 303 bp, Erwinia carotovora subsp. atroseptica SCRI1043
  CDS (1)..(303): transl_table=11
atgattccgttacaacatgggttgattttagccgctattctgtttgttctggggctgacgggtctgttgattcgtcgtaacctgctgtttatgttgatcagtctggaaatcatgatcaacgctgccgcactggcttttgtcgtcgcgggtagctattggcagcagccagatggtcaggtgatgtacattctggcgattacgctggcagcagccgaggccagtattggtctggccttgttgttacagatgtatcgccgtcgtcaaaccctgaatattgatacagtcagtgagatgcgcggatga

SEQ ID NO: 73886 - protein, 100 aa, Erwinia carotovora subsp. atroseptica SCRI1043
MIPLQHGLILAAILFVLGLTGLLIRRNLLFMLISLEIMINAAALAFVVAGSYWQQPDGQVMYILAITLAAAEASIGLALLLQMYRRRQTLNIDTVSEMRG

SEQ ID NO: 73887 - DNA, 306 bp, Nymphaea alba
  CDS (1)..(306): transl_table=11
atgatgctcgagcatgtacttgttttaagtgcctatttattttctattggtatctatggattgatcacaagtcgaaacatggttagagcacttatgtgtcttgaacttatactgaatgctgttaatatgaatctcgtaacattttctgatttatttgatagtcgccaattaaagggagacattttctcgatctttgttatcgctattgcagccgccgaagcagctattggaccagctattgtttcttcaatctatcgtaacagaaaatcaactcgtatcaatcaatcaaatttattgaataaataa

SEQ ID NO: 73888 - protein, 101 aa, Nymphaea alba
MMLEHVLVLSAYLFSIGIYGLITSRNMVRALMCLELILNAVNMNLVTFSDLFDSRQLKGDIFSIFVIAIAAAEAAIGPAIVSSIYRNRKSTRINQSNLLNK

SEQ ID NO: 73889 - DNA, 300 bp, Propionibacterium acnes KPA171202
  CDS (1)..(300): transl_table=11
atgaatccgaatgactacctggtgctctcggcgatcttgttcgctatcggcatcgtgggcttcctgacgaggcgtaatgccttggtggcttttatgtcggtggagttgatgctcaacgccgcgaacctggcgctggtgactttcgctcacgtacacggctctctcgacggacaggtcggagctttcttcgtgatgattgtggcagctgctgaggtggtcgtcggtttggcgatcatcgtcaccattttccgttcccgtcgcaccacttcggtggacgacaccaacctgctgaagttctga

SEQ ID NO: 73890 - protein, 99 aa, Propionibacterium acnes KPA171202
MNPNDYLVLSAILFAIGIVGFLTRRNALVAFMSVELMLNAANLALVTFAHVHGSLDGQVGAFFVMIVAAAEVVVGLAIIVTIFRSRRTTSVDDTNLLKF

SEQ ID NO: 73891 - DNA, 327 bp, Desulfotalea psychrophila LSv54
  CDS (1)..(327): transl_table=11
atggaaatcttaaatctctataacagcctcaacacatttcttatcctggcagcggcactctttggcatgggcatctatggcatactgacccgtcgcacccttatcggtatgctcttctgcgccgaacttgtgctggcctccgtgtccataaactttatggcctttaatcgtttcaccgccccggaccccgcaacagggcagatcataaccctgtttattatggccatcgcagcggctgaaactgccattgccctgagtatcattattgcagtttaccgtcagaacaaatccattgacgcagacgatactgcacaacttaaaggatag

SEQ ID NO: 73892 - protein, 108 aa, Desulfotalea psychrophila LSv54
MEILNLYNSLNTFLILAAALFGMGIYGILTRRTLIGMLFCAELVLASVSINFMAFNRFTAPDPATGQIITLFIMAIAAAETAIALSIIIAVYRQNKSIDADDTAQLKG

SEQ ID NO: 73893 - DNA, 309 bp, Symbiobacterium thermophilum IAM 14863
  CDS (1)..(309): transl_table=11
atgcccgcattctcgctgaatgcctacgtcgccctctccgccgtcctgttcgccctcggcggcatcggcgtgctggtgcggcgcagcccgctggccatcctgatgtgcatcgaactgatgctcaacgccgccaacctgctgttcgtcgccttcggacgggcgcacggcggctacgagggacagatcatggccttcctcgtgatcaccgtggcggcggcggaggtggccatcggcctggcgctgacggtgctgctgtttcggcgccgcgcagaggtggacgtggaccgcgtgaacgagctcaaactctag

SEQ ID NO: 73894 - protein, 102 aa, Symbiobacterium thermophilum IAM 14863
MPAFSLNAYVALSAVLFALGGIGVLVRRSPLAILMCIELMLNAANLLFVAFGRAHGGYEGQIMAFLVITVAAAEVAIGLALTVLLFRRRAEVDVDRVNELKL

SEQ ID NO: 73895 - DNA, 306 bp, Panax ginseng
  CDS (1)..(306): transl_table=11
atgatgctcgaacatgtacttgttttgagtgcctatttattttctgttggtctttatggattgatcacgagtcgaaatatggttagggcccttatgtgtcttgaacttattttgaatgcagttaatatcaattttgtaacattttctgatttttttgatagtcgtcaattaaaaggagccattttctccatttttgttatagctattgcagccgctgaagcagctattggactggctattgtttcatcaatttatcgtaacagaaaatcaattcgtatcaatcaatcgaatttgttgaataagtag

SEQ ID NO: 73896 - protein, 101 aa, Panax ginseng
MMLEHVLVLSAYLFSVGLYGLITSRNMVRALMCLELILNAVNINFVTFSDFFDSRQLKGAIFSIFVIAIAAAEAAIGLAIVSSIYRNRKSIRINQSNLLNK

SEQ ID NO: 73897 - DNA, 306 bp, Legionella pneumophila subsp. pneumophila str. Philadelphia 1
  CDS (1)..(306): transl_table=11
atgatacctgtttatgattatttagtattaggagtgattttgttcggcttgagtctcgttggtattatgctcaatcgtaaaaatatcatcttattacttgtttgtgttgagttgatgctcttggccgtgaataccaattttattgcattttctcattactacaatgaagtaggtggacaggtatttgtctttttcattttaactgtagctgcagcggaagcagcaataggtttggccatagtcatgttgctctatagaaatagaggcaatattgacgttgataaaatgaatcatttaaaaggttaa

SEQ ID NO: 73898 - protein, 101 aa, Legionella pneumophila subsp. pneumophila str. Philadelphia 1
MIPVYDYLVLGVILFGLSLVGIMLNRKNIILLLVCVELMLLAVNTNFIAFSHYYNEVGGQVFVFFILTVAAAEAAIGLAIVMLLYRNRGNIDVDKMNHLKG

SEQ ID NO: 73899 - DNA, 309 bp, Methylococcus capsulatus str. Bath
  CDS (1)..(309): transl_table=11
atggcgccgattcctttcgaacatgcgctggtgctggcctcggtcctgttcgtgctgggcctggtcgccctgctgatccggcgcaacctgatcgtgatgctgatgtcggtggagatcatgctgaacgccgcgggcttggccttcatcgcggcagggtcacgctggggccagcccgatggccaggtcatgttcctgttgatattgaccctggccgccgcagaggtcggcgtagggctggggctggggctgcaggtctatcggcgccacaagacgctggacgtggatcgcctgagcgaaatgcaaggctag

SEQ ID NO: 73900 - protein, 102 aa, Methylococcus capsulatus str. Bath
MAPIPFEHALVLASVLFVLGLVALLIRRNLIVMLMSVEIMLNAAGLAFIAAGSRWGQPDGQVMFLLILTLAAAEVGVGLGLGLQVYRRHKTLDVDRLSEMQG

SEQ ID NO: 73901 - DNA, 327 bp, Anaplasma marginale str. St. Maries
  CDS (1)..(327): transl_table=11
atggagtttttagtcaatgccggcttgtccctggatcactttttggtgcttgcggctgctttgtttgtcattggtgcttgtggcatagtgataggacgaaagagtgcgatcaacgttttgctttccctagagctcatgttgctggctgtgaatgtgaattttgtggccttttccgcctataagggggacattcaggggcagacttttgcggtgttcatactcgctgttgcggctgcggaatctgctgtgggcctggcggtgatgttggcgcatttcagaaatgttggggatattgacctcagtgaggcgagttcgttaaagatgtag

SEQ ID NO: 73902 - protein, 108 aa, Anaplasma marginale str. St. Maries
MEFLVNAGLSLDHFLVLAAALFVIGACGIVIGRKSAINVLLSLELMLLAVNVNFVAFSAYKGDIQGQTFAVFILAVAAAESAVGLAVMLAHFRNVGDIDLSEASSLKM

SEQ ID NO: 73903 - DNA, 306 bp, Azoarcus sp. EbN1
  CDS (1)..(306): transl_table=11
atgctttcgctttcccactatctcgttctgggcgcgatcctgttcgcgatcagcgtggtcgggattttcctcaaccggaagaacctgatcgtcctgctgatggctatcgagttgatgttgctcgcggtcaatctgaacttcattgccttttcgcattatctcggcgatctggcagggcagatctttgttttcttcattctcaccgtggcagcagcggaatcggcaatcggtcttgcgattctggtggtgttgttccgcaatctgcggacgatccatgtggatgatctcgacagcctcaagggttaa

SEQ ID NO: 73904 - protein, 101 aa, Azoarcus sp. EbN1
MLSLSHYLVLGAILFAISVVGIFLNRKNLIVLLMAIELMLLAVNLNFIAFSHYLGDLAGQIFVFFILTVAAAESAIGLAILVVLFRNLRTIHVDDLDSLKG

SEQ ID NO: 73905 - DNA, 303 bp, Nicotiana tabacum
  CDS (1)..(303)
atggatcctatcaaatatttcacattttctatgattatctctatttcaggtattcggggaatcctccttaatagacgaaatattcctattatgtcaatgccaattgaatcaatgttattagctgtgaattcgaactttttggtattttctgtttcttcggatgatatgatgggtcaatcatttgcttcattggttccaacggtggcagctgcggaatctgctattgggttagctattttcgttattactttccgagtccgagggactattgctgtagaatctattaatagcattcaaggttaa

SEQ ID NO: 73906 - protein, 100 aa, Nicotiana tabacum
MDPIKYFTFSMIISISGIRGILLNRRNIPIMSMPIESMLLAVNSNFLVFSVSSDDMMGQSFASLVPTVAAAESAIGLAIFVITFRVRGTIAVESINSIQG

SEQ ID NO: 73907 - DNA, 306 bp, Dehalococcoides ethenogenes 195
  CDS (1)..(306): transl_table=11
atgggactgactcactttttggtactggcggtaatactgttctgtatcggtctttacggggcactggttaaaaagagcgccgtagtgatactgatgtgcatagaaataatgctgaacgcagttaccattgcggcggtggcctttaaccgtttttctgccgccgaattttttaccgggcagatatttactctgtttattatcgcggtggcggccgccgaggcaactattggtctggccataataatatccatttacaaaaaccgggatactattgatgccaccaagatagatttgatgaagtggtaa

SEQ ID NO: 73908 - protein, 101 aa, Dehalococcoides ethenogenes 195
MGLTHFLVLAVILFCIGLYGALVKKSAVVILMCIEIMLNAVTIAAVAFNRFSAAEFFTGQIFTLFIIAVAAAEATIGLAIIISIYKNRDTIDATKIDLMKW

SEQ ID NO: 73909 - DNA, 327 bp, Ehrlichia ruminantium str. Welgevonden
  CDS (1)..(327): transl_table=11
atgaagactctgattgatgctggaattactctaaaccattttctaattttagctgcagtactgtttactactggaatttgtggtatttttataaatcgcaaaaatattataacaatcttgttatcaatagaactaatgttattagcagttaatatcaattttgctgctttttcagtatatcttgacaatatcttagggcaagtatttgtcatgtttatcttgacagttgcagctgcagagtctgcagtgggattagcaattattgttgtatattttaggagttgtggaaatattgatattgaaacagcaaataagatgaaagaataa

SEQ ID NO: 73910 - protein, 108 aa, Ehrlichia ruminantium str. Welgevonden
MKTLIDAGITLNHFLILAAVLFTTGICGIFINRKNIITILLSIELMLLAVNINFAAFSVYLDNILGQVFVMFILTVAAAESAVGLAIIVVYFRSCGNIDIETANKMKE

SEQ ID NO: 73911 - DNA, 267 bp, Rhizopus oryzae
  CDS (1)..(267)
atgaatttatcgatggtattatttcttatcggtattttaggatttattcttaaccgaaaaaatattattctaatgttgatttccatcgaaattatgttattagctgtaacattattaattatcttaagttcatttagctttgatgatatcttaggtcaaacttatggtatttatattattgctattgcaggagcagaatcagctattggattaggaattttagttgcatattatagattaagaggtagtattgcaattaaagcataa

SEQ ID NO: 73912 - protein, 88 aa, Rhizopus oryzae
MNLSMVLFLIGILGFILNRKNIILMLISIEIMLLAVTLLIILSSFSFDDILGQTYGIYIIAIAGAESAIGLGILVAYYRLRGSIAIKA

SEQ ID NO: 73913 - DNA, 303 bp, Huperzia lucidula
  CDS (1)..(303): transl_table=11
atgtttggacatgcacttcttttaggtgcttttccgttctgcatcggtatctacggattgatcacgagtcgaaacacggttagagcacttatgtgtcttgagttaattttcaatgcagttaatgttaattttgtaacatttcctaattatttggacattcaacaaataaagggggaaattctttccgtttttgttatagctgttgcagccgctgaagcagcaataggatcagccattgttttagccatctaccgtaatagagaatcaattcgtatcgatcaatttaatttgttgaaatggtaa

SEQ ID NO: 73914 - protein, 100 aa, Huperzia lucidula
MFGHALLLGAFPFCIGIYGLITSRNTVRALMCLELIFNAVNVNFVTFPNYLDIQQIKGEILSVFVIAVAAAEAAIGSAIVLAIYRNRESIRIDQFNLLKW

SEQ ID NO: 73915 - DNA, 312 bp, Bacteroides fragilis NCTC 9343
  CDS (1)..(312): transl_table=11
atgatgatacacatggaatattacctggtggtttctaccatcatgatgtttgcgggaatatacgggttcttcacccgccgcaacacacttgctatcctcatctctgtagaactgatgctgaatgctacagatatcaactttgccgtatttaaccgtttcctttttcccggagagctcgaagggtatttctttgccctgttctccattgccatctcggcagcggaaacggctatcgctatcgccatcatgattaatatttaccggaatatacgtagtattcaagtaaagaatctggatgaattaaagtggtaa

SEQ ID NO: 73916 - protein, 103 aa, Bacteroides fragilis NCTC 9343
MMIHMEYYLVVSTIMMFAGIYGFFTRRNTLAILISVELMLNATDINFAVFNRFLFPGELEGYFFALFSIAISAAETAIAIAIMINIYRNIRSIQVKNLDELKW

SEQ ID NO: 73917 - DNA, 288 bp, Centruroides limpidus
  CDS (1)..(288): transl_table=5
atgataaactactccctgtctacaggcatggttctctttctaataagtcttataagcctctcctctcgatttaaacacctcctatcaatactactaagcctagaaatagctatactaagagtattagtactcttagtgagaacaactaccccaaaaacagcagacaattcccttttaataatttttattaccctcgcagtttgtgaggggagactaggcctttctatccttgtggccatatcccgactcagagggaacacactaatcaactcaacaactattctataa

SEQ ID NO: 73918 - protein, 95 aa, Centruroides limpidus
MMNYSLSTGMVLFLMSLMSLSSRFKHLLSMLLSLEMAMLSVLVLLVSTTTPKTADNSLLMIFITLAVCEGSLGLSILVAMSRLSGNTLINSTTIL

SEQ ID NO: 73919 - DNA, 306 bp, Cucumis sativus
  CDS (1)..(306): transl_table=11
atcatgctcgaacatgtacttattataagtgcctatttattttctatcggtatctatggattgatcacgagccgaaatatggttagggcccttatgtgtcttgagcttatactgaatgcagttaatatgaatttcgtaacattttctgatttttttgatagtcgccaattaaaagggaatattttctcaatttttgttatagctattgcagccgctgaagcagctattggcccagctattctttcgtcaacttatcgtaacagaaaatcaactcgtatcaatcaatcgaatttgttgaataagtag

SEQ ID NO: 73920 - protein, 101 aa, Cucumis sativus
MMLEHVLIISAYLFSIGIYGLITSRNMVRALMCLELILNAVNMNFVTFSDFFDSRQLKGNIFSIFVIAIAAAEAAIGPAILSSTYRNRKSTRINQSNLLNK

SEQ ID NO: 73921 - DNA, 324 bp, Pseudomonas fluorescens Pf-5
  CDS (1)..(324): transl_table=11
atgcctactatctctctcggtactatcccgatggaacatggcctggcggttgccggcatcctgttctgcctcggtctggtcggcctgatggtccgccgtaacatcctcttcgtgttgatgagcctggaagtgatgatgaacgcctctgcactggccttcatcgttgctggcgcccgctgggcgcagccggatggacaagtgatgttcatcctggtgatcagcctggcagccgccgaggccagtatcggcctggcgatcctgctgcagctgtaccgccgcttccacactctcgatatcgatgcagccagcgagatgcgcggatga

SEQ ID NO: 73922 - protein, 107 aa, Pseudomonas fluorescens Pf-5
MPTISLGTIPMEHGLAVAGILFCLGLVGLMVRRNILFVLMSLEVMMNASALAFIVAGARWAQPDGQVMFILVISLAAAEASIGLAILLQLYRRFHTLDIDAASEMRG

SEQ ID NO: 73923 - DNA, 408 bp, Psychrobacter arcticus 273-4
  CDS (1)..(408): transl_table=11
atggtactagcagcaagcgtggcacaagaggttgccaatgtgccgtttgcccatgaagtagcaggcttagtgcagccggttgctgaggcgcaaaatgtactgggtctgatacccatgagtcatggattgatcttggcaggtatcttatttgccattggtctgtgcggtgtcatggtacggcgtaatttcttgtttatgctgatgagccttgagatcatgatgaatgcggcggcactagcatttgtggtagcaggtagccgctgggtcgatccagatggacagattatgtttatctttattttgaccttagcagcagcagaggcagccattggtttagcaatattattgcgtttttatcatcagcgtgggcatctcgatgtcgacagcgccaatgagatgaaaggatga

SEQ ID NO: 73924 - protein, 135 aa, Psychrobacter arcticus 273-4
MVLAASVAQEVANVPFAHEVAGLVQPVAEAQNVLGLIPMSHGLILAGILFAIGLCGVMVRRNFLFMLMSLEIMMNAAALAFVVAGSRWVDPDGQIMFIFILTLAAAEAAIGLAILLRFYHQRGHLDVDSANEMKG

SEQ ID NO: 73925 - DNA, 309 bp, Pseudomonas syringae pv. phaseolicola 1448A
  CDS (1)..(309): transl_table=11
atgaatgctatccctcttgagcacggtctggcggtcgccggggtcctgttctgcctgggtctggtcggcctgatggtacgccgtaacattctcttcgttttgatgagtctggaaatcatgatgaacgcctctgcactggcgttcgtagttgccggcagtcgttgggcgcaaccggatgggcaggtcatgttcatcctggtgatcagccttgcggcagccgaggccagtatcggcctggcgatccttatgcaactgtatcgccgcttccacactctcgatatcgatgctgccagcgagatgcgcggatga

SEQ ID NO: 73926 - protein, 102 aa, Pseudomonas syringae pv. phaseolicola 1448A
MNAIPLEHGLAVAGVLFCLGLVGLMVRRNILFVLMSLEIMMNASALAFVVAGSRWAQPDGQVMFILVISLAAAEASIGLAILMQLYRRFHTLDIDAASEMRG

SEQ ID NO: 73927 - DNA, 312 bp, Dechloromonas aromatica RCB
  CDS (1)..(312): transl_table=11
atgcttactttgtcactctctcatttcctgattctgggcgcgattctgttcgcgatcagtgtcgtcggcatcttcctgaatcggaagaacctgctggtgctgctgatggccatcgaattgatgctgcttgcggtcaacatgaatttcgtggcgttttcccactatcttcaggatctctcgggccagattttcgtcttcttcatcctgaccgttgccgctgctgaatcggcgattggtctggccatcctgatcgtgctgttccgcaacctcaagagcatccatgtggatgacctgggcagcctgaagggttaa

SEQ ID NO: 73928 - protein, 103 aa, Dechloromonas aromatica RCB
MLTLSLSHFLILGAILFAISVVGIFLNRKNLLVLLMAIELMLLAVNMNFVAFSHYLQDLSGQIFVFFILTVAAAESAIGLAILIVLFRNLKSIHVDDLGSLKG

SEQ ID NO: 73929 - DNA, 291 bp, Thermobifida fusca YX
  CDS (1)..(291): transl_table=11
atgaactacatcgtgctcgcggcgatcgtgttcaccatcggcgccgtgggcgtcctggtgcggcgcaacgcgatcatcgtgttcatgtgcgtggagctgatgctcaacgcctgcaacctcgcttttgtcgccttcgcgcggatgcacggaggcatcgaaggccaagtgatcgcgttcttcgtgatggtggtcgctgcggccgaggtcgtggtgggactggccatcatcatgcagatcttccgaacccgcaggtccgcgtcgatcgacgacgccaacctgctcaagaactag

SEQ ID NO: 73930 - protein, 96 aa, Thermobifida fusca YX
MNYIVLAAIVFTIGAVGVLVRRNAIIVFMCVELMLNACNLAFVAFARMHGGIEGQVIAFFVMVVAAAEVVVGLAIIMQIFRTRRSASIDDANLLKN

SEQ ID NO: 73931 - DNA, 303 bp, Methanosarcina barkeri str. Fusaro
  CDS (1)..(303): transl_table=11
atgattcctttaatcttttacctggggcttgcagccctgctgttttcaataggactctatggtgtaatgacacataaaaacggcatcagaatgattatgtgcattgagctcatgctcaactccgcaaacctgaacctggtagctttctccagctacacggataccctaaacgggcaggtttttgccgtattctcaattgcccttgcagctgccgaagcagcagtcggttttgcaatcctcatggcaatctacagaatgcacgataagatcaaccttaatgagctcaagagcctgaggtggtaa

SEQ ID NO: 73932 - protein, 100 aa, Methanosarcina barkeri str. Fusaro
MIPLIFYLGLAALLFSIGLYGVMTHKNGIRMIMCIELMLNSANLNLVAFSSYTDTLNGQVFAVFSIALAAAEAAVGFAILMAIYRMHDKINLNELKSLRW

SEQ ID NO: 73933 - DNA, 270 bp, Epidermophyton floccosum
  CDS (1)..(270): transl_table=4
atgaatttatcattaatattatttttaatagggattttaggttttgttttaaatagaaaaaatataattctaatgcttatttcaatagaaataatgttattgtctgttacttttttaatattaataagttcacttaattttgacgatatattaggtcaaacttttgctatatatataataacaatagcaggagctgaatctgctataggtttaggtatattagtagctttttatagattaagaggaagtatagcaatagaatataaataa

SEQ ID NO: 73934 - protein, 89 aa, Epidermophyton floccosum
MNLSLILFLIGILGFVLNRKNIILMLISIEIMLLSVTFLILISSLNFDDILGQTFAIYIITIAGAESAIGLGILVAFYRLRGSIAIEYK

SEQ ID NO: 73935 - DNA, 306 bp, Thiobacillus denitrificans ATCC 25259
  CDS (1)..(306): transl_table=11
gtgatttccttatcgcattttctggtgctcggaggcgtcctgttcgccatcgccgtgctgggtatttttctcaaccgcaagaacgtcatcgttctcctgatggcgatcgaactcatgctgcttgcggtgaacatgaatttcatcgcgttttcgcactacctcggtgacgtccacggccaggtattcgtctttttcatcctgaccgtggcggcggccgaatccgcgatcggtctagcgatcctggtgctgttgttccgcaacctgcgcacgatcaacgtcgacgacctcgaccaattgaaaggctga

SEQ ID NO: 73936 - protein, 101 aa, Thiobacillus denitrificans ATCC 25259
MISLSHFLVLGGVLFAIAVLGIFLNRKNVIVLLMAIELMLLAVNMNFIAFSHYLGDVHGQVFVFFILTVAAAESAIGLAILVLLFRNLRTINVDDLDQLKG

SEQ ID NO: 73937 - DNA, 306 bp, Acorus calamus
  CDS (1)..(306): transl_table=11
atgatgctggagtatgtactttttttgagtgcttatttattttccatcggtatctatggattgattacaagtcgaaacatggttagagcacttatgtgtcttgaacttatactgaatgcggttaatatcaatctcgtaacattttctgatttatttgatagtcgccaattaaaaggagacattttttcgatctttgttatagctattgcagccgctgaagcagctattggaccagctattgtttcatcgatctatcgtaacagaaaatccattcgtattaatcaatcaaatttgttgaataaatag

SEQ ID NO: 73938 - protein, 101 aa, Acorus calamus
MMLEYVLFLSAYLFSIGIYGLITSRNMVRALMCLELILNAVNINLVTFSDLFDSRQLKGDIFSIFVIAIAAAEAAIGPAIVSSIYRNRKSIRINQSNLLNK

SEQ ID NO: 73939 - DNA, 306 bp, Anabaena variabilis ATCC 29413
  CDS (1)..(306): transl_table=11
atgcaacttcagtactttttattactcgcagcagctttattttgtattggcatctacggtttgattaccagccgtaacgctgtacgcgtgttgatgtcaattgaattactgctgaatgctgttaatctgaatttaatggcattttccaactatcttgactcaacattaattaaaggtcaggttttcacagtgtttgtgattaccgtggcagctgctgaagcggcggttggtttagcgatcgtgctggccatttatcgcaaccgcgataccgtcgatatggagcagtttaatctcctgaaatggtaa

SEQ ID NO: 73940 - protein, 101 aa, Anabaena variabilis ATCC 29413
MQLQYFLLLAAALFCIGIYGLITSRNAVRVLMSIELLLNAVNLNLMAFSNYLDSTLIKGQVFTVFVITVAAAEAAVGLAIVLAIYRNRDTVDMEQFNLLKW

SEQ ID NO: 73941 - DNA, 309 bp, Pseudomonas fluorescens PfO-1
  CDS (1)..(309): transl_table=11
atgcctgctatccctctcgagcatggattggccgttgccggcatcctgttctgccttggtctggtcggcctgatggtccgccgcaacattttgttcgtgttgatgagtctggaagtgatgatgaacgcctctgcactggccttcatcgttgcgggcgcccgctgggcgcaaccggatggacagatcatgttcatcctggtgatcagccttgcagccgccgaagccagtattggcctggcgatcctgctgcaactgtatcgccgcttccacacgctcgatatcgacgctgccagtgagatgcgcggatga

SEQ ID NO: 73942 - protein, 102 aa, Pseudomonas fluorescens PfO-1
MPAIPLEHGLAVAGILFCLGLVGLMVRRNILFVLMSLEVMMNASALAFIVAGARWAQPDGQIMFILVISLAAAEASIGLAILLQLYRRFHTLDIDAASEMRG

SEQ ID NO: 73943 - DNA, 309 bp, Rhodobacter sphaeroides 2.4.1
  CDS (1)..(309): transl_table=11
atgagcgtcacgaccctcatcctcctcctcgcgcttgcgggcgggatcttcgccaccggcttcttcggcctgctggcccggcgcgcgatcctgttccagctcatctcgctcgagatgatgctggcgggccctgccctcgccttcctcgccggcggcgccttccatggcagccagcagggacaggcgatgttcatcctcatcatcatcctcgccgccgccgaggtggcgctggggcttgcgctctatctcgcgctgcgccggggcgcggatgtcgaggacagcgacacgatcgcggggctgaagcactga

SEQ ID NO: 73944 - protein, 102 aa, Rhodobacter sphaeroides 2.4.1
MSVTTLILLLALAGGIFATGFFGLLARRAILFQLISLEMMLAGPALAFLAGGAFHGSQQGQAMFILIIILAAAEVALGLALYLALRRGADVEDSDTIAGLKH

SEQ ID NO: 73945 - DNA, 309 bp, Carboxydothermus hydrogenoformans Z-2901
  CDS (1)..(309): transl_table=11
atgattaccttagcccattacatgcttttaagtgcggtgttgtttgcaattggcctatttggcgttctttccaagaaaaatgctattacagtactggtatcaacggagataatgttaaatgccgtaaatttaaatttaattgccataaacaaatatataggtgttgatggtttttacggacagttaatggccctttttgtaattgcggttgctgctgcagaagttggggtaggtcttggtatagtaatatctatgtacagaaataaagaaactatttccctggatgaatttaatttcttaaaatggtag

SEQ ID NO: 73946 - protein, 102 aa, Carboxydothermus hydrogenoformans Z-2901
MITLAHYMLLSAVLFAIGLFGVLSKKNAITVLVSTEIMLNAVNLNLIAINKYIGVDGFYGQLMALFVIAVAAAEVGVGLGIVISMYRNKETISLDEFNFLKW

SEQ ID NO: 73947 - DNA, 309 bp, Geobacter metallireducens GS-15
  CDS (1)..(309): transl_table=11
atgatcgtcccctttgagcacgtcctgatcctggccggcatcctctttgccctggggctcgtctgcgtcctggtctggcggatgaacctgatcatgctcctcatcggcatcgaggtgatgctcaacgccgccatgctcgcctttgtgggaggggcggcccgatggggaatggccgacggccaggtcttctccctcgtcatcatggccctcacctcagccgaggtctccctggccctggccatggtggtctacctccaccggcgcaagaggacggtggatgcggatgagttcagcgagctgaagggatga

SEQ ID NO: 73948 - protein, 102 aa, Geobacter metallireducens GS-15
MIVPFEHVLILAGILFALGLVCVLVWRMNLIMLLIGIEVMLNAAMLAFVGGAARWGMADGQVFSLVIMALTSAEVSLALAMVVYLHRRKRTVDADEFSELKG

SEQ ID NO: 73949 - DNA, 312 bp, Synechococcus elongatus PCC 7942
  CDS (1)..(312): transl_table=11
atgactgtacctctcgagtactttttggtcttggctgccgccctgttctgtattggtgtctatgggttggtgaccagccgcaacgccgttcgcgtcttgatgtcgatcgaattgatgctgaatgccgtcaacctcaacctgatggccttctccaactatctggatggcacattgattcgcggccaagtctttacggtttttgtgattacggtagcagcggcagaagcggcggttggtctcgcgatcttgctagcgatttaccgcaaccgcaacacggtggatatggaacagttcaatcttttgaaatggtag

SEQ ID NO: 73950 - protein, 103 aa, Synechococcus elongatus PCC 7942
MTVPLEYFLVLAAALFCIGVYGLVTSRNAVRVLMSIELMLNAVNLNLMAFSNYLDGTLIRGQVFTVFVITVAAAEAAVGLAILLAIYRNRNTVDMEQFNLLKW

SEQ ID NO: 73951 - DNA, 309 bp, Rhodospirillum rubrum ATCC 11170
  CDS (1)..(309): transl_table=11
atggaaatcacgctcgcccactatcttaccgtcgcggcgatcctgttcacgctgggcgtgttcgggatcttcgccaaccgcaagaacgtggtgacgattctgatgtccgtcgagctgatgctgctcgccgtcaacatcaacatggtggccttctcgacctatttgcaggacatggtggggcagatcttctccatgttcatcctgaccgtcgccgccgccgaggcgggcatcggtttggcgatcgtcgtggtcttcttccggaaccgcggctcgatcgaggtcgaagacatcaatcagatgaaggggtga

SEQ ID NO: 73952 - protein, 102 aa, Rhodospirillum rubrum ATCC 11170
MEITLAHYLTVAAILFTLGVFGIFANRKNVVTILMSVELMLLAVNINMVAFSTYLQDMVGQIFSMFILTVAAAEAGIGLAIVVVFFRNRGSIEVEDINQMKG

SEQ ID NO: 73953 - DNA, 309 bp, Moorella thermoacetica ATCC 39073
  CDS (1)..(309): transl_table=11
gtgatcaccctcaaccactatctggccgtgggcggtctcctcttttgcatcggccttttcggagccctggccaagagaaatgccatcgccgttttaatgggaatcgaacttatgctcaatgctgtcaacattaacctggtggccttcaaccatttcctggcgccggatcaggtgacgggccagatcttcgcaatctttgttatcgtcgtcgctgctgcggaagtagccgtcggcctggccctggtcctgaatatctatcgccggcgcctggacagcaatgttgatgatctggactggctcaagtggtaa

SEQ ID NO: 73954 - protein, 102 aa, Moorella thermoacetica ATCC 39073
MITLNHYLAVGGLLFCIGLFGALAKRNAIAVLMGIELMLNAVNINLVAFNHFLAPDQVTGQIFAIFVIVVAAAEVAVGLALVLNIYRRRLDSNVDDLDWLKW

SEQ ID NO: 73955 - DNA, 297 bp, Gymnocrinus richeri
  CDS (1)..(297): transl_table=9
atgtggtttttgtttgtttttctttgttctgtgttttttttgggtgttttaggtgttttgttgaatcgtatgcatttgttgactgttatgctttgtttggagcttcttttggtttctctttttttgaaattttctttgttaatgtctgtttatagtaaattttctttttctggttttagtcttgttttgttaactttgtctgcttgcgaggctagaataggtctttctttgttagttgtagtttctcgaaggtttggtactgatagagttttttctttgaaattattgcgagtttag

SEQ ID NO: 73956 - protein, 98 aa, Gymnocrinus richeri
MWFLFVFLCSVFFLGVLGVLLNRMHLLTVMLCLELLLVSLFLNFSLLMSVYSNFSFSGFSLVLLTLSACEASIGLSLLVVVSRSFGTDSVFSLNLLRV

SEQ ID NO: 73957 - DNA, 306 bp, Novosphingobium aromaticivorans DSM 12444
  CDS (1)..(306): transl_table=11
atgatcggcatcgaacactatctcgtcgtcagctcgatcctgttcgtgctcggcgtcctgggcatcttcctcaaccggaagaacgtgatcatcatcctgatggcgatcgaattgatcctgctctcggtcaacctcaacctcgtcgcgttcagcgcgttcctgcacgaccttgtcggacaggtcttcgcgatgttcgtgctgacggtggcggctggcgaagcagcgatcgggcttgccattctggtcatctatttccgtggccgcggcacgattgccgtcgacgacgtcaaccggatgaaaggctga

SEQ ID NO: 73958 - protein, 101 aa, Novosphingobium aromaticivorans DSM 12444
MIGIEHYLVVSSILFVLGVLGIFLNRKNVIIILMAIELILLSVNLNLVAFSAFLHDLVGQVFAMFVLTVAAGEAAIGLAILVIYFRGRGTIAVDDVNRMKG

SEQ ID NO: 73959 - DNA, 300 bp, Neorickettsia sennetsu str. Miyayama
  CDS (1)..(300): transl_table=11
gtgagtcctagttttgcgctcttttttgtttctacctgtttcttttctattggactttttggtgtgctgacatcgaccaggaatgtagtaacaatgcttttggcggtagaaattatgttgcttggtgcaatacttagcttctgtagtacttctttcaatgctataggaggacaagttttttccatcctagtgattacagtcgctgcagctgaagctgcggtagcacttgcagtggttgtttcgtattttaggaaagccggaaatgtggatgtaaaaaaacttaataaattgggacattga

SEQ ID NO: 73960 - protein, 99 aa, Neorickettsia sennetsu str. Miyayama
MSPSFALFFVSTCFFSIGLFGVLTSTRNVVTMLLAVEIMLLGAILSFCSTSFNAIGGQVFSILVITVAAAEAAVALAVVVSYFRKAGNVDVKKLNKLGH

SEQ ID NO: 73961 - DNA, 318 bp, Francisella tularensis subsp. holarctica
  CDS (1)..(318): transl_table=11
atgaatagtatttcagtctcagtcacacacgggctgatttttagtatacttctgtttgtgataagtgttgctggtataattataaatagaagaaatattcttatattattgatgtcgatagagttaatgcttctagcagtcaatactaattttttgatatttgctaatatgcatcagcaggcaatgggtggagtttttgtattctttataatggcagtagctgctgctgagacagcaattggtttagcaattgttgtggcaatatttagaaaacgcaaaactattgatttaagtaaacttaatacactaagaggttaa

SEQ ID NO: 73962 - protein, 105 aa, Francisella tularensis subsp. holarctica
MNSISVSVTHGLIFSILLFVISVAGIIINRRNILILLMSIELMLLAVNTNFLIFANMHQQAMGGVFVFFIMAVAAAETAIGLAIVVAIFRKRKTIDLSKLNTLRG

SEQ ID NO: 73963 - DNA, 333 bp, Desulfitobacterium hafniense Y51
  CDS (1)..(333): transl_table=11
atgagtataagcgttgggcttggatcctatcttttggttggagcgatgcttttttgcctggggctctacggagttttcgtgaagcgaaatatcattgccattctcatgtccattgaattgatgcttaacgcagtgaatattaacttcattgcttttagccgctttgccccctgggctaatcccgggacaaatcccctcattggacaggtagcggccatcttcgtgatcgtagttgccgcagcggaaattgccgtgggattggccttggttatcgccatctatcgcaatcgccgtaccacgaatgtggatgaattcaactggttgaaatggtag

SEQ ID NO: 73964 - protein, 110 aa, Desulfitobacterium hafniense Y51
MSISVGLGSYLLVGAMLFCLGLYGVFVKRNIIAILMSIELMLNAVNINFIAFSRFAPWANPGTNPLIGQVAAIFVIVVAAAEIAVGLALVIAIYRNRRTTNVDEFNWLKW

SEQ ID NO: 73965 - DNA, 306 bp, Gossypium hirsutum
  CDS (1)..(306): transl_table=11
atgatgctcgaacatatacttgttttgagtgcctatttattttctatcggtatttatggattgatcacgagtcgaaatatggttagggcccttatgtgtcttgaacttatactgaatgcggttaatataaattttgtaacattttctgatttttttgatagtcggcaattaaagggaaatattttctcaatttttgttatagctattgcagccgctgaagcagctattggatcagctattgtgtcctcgatttatcgtaacagaaaatcaacgcgtatcaatcaatcaactttgttgaataagtaa

SEQ ID NO: 73966 - protein, 101 aa, Gossypium hirsutum
MMLEHILVLSAYLFSIGIYGLITSRNMVRALMCLELILNAVNINFVTFSDFFDSRQLKGNIFSIFVIAIAAAEAAIGSAIVSSIYRNRKSTRINQSTLLNK

SEQ ID NO: 73967 - DNA, 303 bp, Physcomitrella patens
  CDS (1)..(303)
atggatctagtaaaatatttaacattttctatgattctttttcttttaggtatttgggggattttcttgaatagaaaaaacatccttattatgttaatgtcaattgagttaatgttacttgcagtcgatttaaactttttggtattttcggtttatttggatgatatgatgggtcaattatttgctttatttgttttaacggtggcagcagcggaatccgctattgggctggccattctggttataacttttcgaattcgtgggactattgcagtggaattttttaattgcatgaagggataa

SEQ ID NO: 73968 - protein, 100 aa, Physcomitrella patens
MDLVKYLTFSMILFLLGIWGIFLNRKNILIMLMSIELMLLAVDLNFLVFSVYLDDMMGQLFALFVLTVAAAESAIGLAILVITFRIRGTIAVEFFNCMKG

SEQ ID NO: 73969 - DNA, 309 bp, Methylobacillus flagellatus KT
  CDS (1)..(309): transl_table=11
atgagcgtaggactctctcactacctgattttgggctcgatattgttcgccatcagcgtgatcggcattttcctcaatcgcaagaatgtgatcgtgctgctgatggccatcgagctgatgttgctggcggtgaacatgaatttcatcgcattctcgcactatctcaatgacattgccgggcagatattcgtattcttcattctcaccgtggcggcggccgaatctgcaatcggactggcgattctcgtcctgctgttccgcaatttgagaaccatcaatgtcgatgatattggcagcttgaaaggataa

SEQ ID NO: 73970 - protein, 102 aa, Methylobacillus flagellatus KT
MSVGLSHYLILGSILFAISVIGIFLNRKNVIVLLMAIELMLLAVNMNFIAFSHYLNDIAGQIFVFFILTVAAAESAIGLAILVLLFRNLRTINVDDIGSLKG

SEQ ID NO: 73971 - DNA, 303 bp, Methanococcoides burtonii DSM 6242
  CDS (1)..(303): transl_table=11
atgatcccattgaattggtatctggctctttcagctatcgtgttctccataggactctatggcttgatgacccataagaacggtatcaggatgctgatgtgcgtggaacttatgttaaactccgcaaacattaatcttgttgccttctcaagttataataatgatatgacaggacaggtatttgctctgttctccattgcactcgcagcagcagaagcagctattggatttgcaatactcatgtcaatttacaggatgcgagatatgatagatgttgataaacttaacatattgaggtggtaa

SEQ ID NO: 73972 - protein, 100 aa, Methanococcoides burtonii DSM 6242
MIPLNWYLALSAIVFSIGLYGLMTHKNGIRMLMCVELMLNSANINLVAFSSYNNDMTGQVFALFSIALAAAEAAIGFAILMSIYRMRDMIDVDKLNILRW

SEQ ID NO: 73973 - DNA, 306 bp, Vitis vinifera
  CDS (1)..(306): transl_table=11
atgatgctcgaacatgtacttgttttgagtgcctatttattttctatcggtatctatggattgatcacgagtcgaaatatggttagagctcttatgtgtcttgaacttatactgaatgcagttaatataaatttcgtaacattttctgatttttttgataatcgacaattaaaaggagacattttctcaatttttgttatagctattgcagccgctgaagctgctattggaccagctattgtttcgtcaatttatcgtaatagaaaatcaactcgtattaatcaatcgaatttgttgaataagtag

SEQ ID NO: 73974 - protein, 101 aa, Vitis vinifera
MMLEHVLVLSAYLFSIGIYGLITSRNMVRALMCLELILNAVNINFVTFSDFFDNRQLKGDIFSIFVIAIAAAEAAIGPAIVSSIYRNRKSTRINQSNLLNK

SEQ ID NO: 73975 - DNA, 306 bp, Helianthus annuus
  CDS (1)..(306): transl_table=11
atgatgctcgagcatgtacttgttttgagtgcctatttattttctgtcggtctatatggattgattacaagtcgaaatatggttagggctcttatgtgtcttgaacttatattaaatgcagttaatctcaattttgtaacattttctgatttttttgatagtcgtcaattaaaaggagccattttttctatttttgttatagctattgcagctgctgaagccgctattggactcgctattgtttcatcaatttatcgtaacagaaaatcaactcgtataaatcaatcgaatttattgaataagtaa

SEQ ID NO: 73976 - protein, 101 aa, Helianthus annuus
MMLEHVLVLSAYLFSVGLYGLITSRNMVRALMCLELILNAVNLNFVTFSDFFDSRQLKGAIFSIFVIAIAAAEAAIGLAIVSSIYRNRKSTRINQSNLLNK

SEQ ID NO: 73977 - DNA, 306 bp, Acidobacteria bacterium Ellin345
  CDS (1)..(306): transl_table=11
atggctgaaatcggaaccatgcattacctggttgtggccgcgatgctcttcatcatcggcaccgtgggagtggtgacgcgccgcaacgtggtggttattttgatgtcgatcgaactgatcctgaacgccgtgaacctgaatctggtagcgttttcgcggctctacgggctccacgggcaggtgttttcgatcttcgtaatggtggatgccgcggcggaagccgcagtgggacttggcattgtgatcgcgttcttccggaacaaagagacggtgaacgtggatgaagtggatctcttgaagtggtga

SEQ ID NO: 73978 - protein, 101 aa, Acidobacteria bacterium Ellin345
MAEIGTMHYLVVAAMLFIIGTVGVVTRRNVVVILMSIELILNAVNLNLVAFSRLYGLHGQVFSIFVMVDAAAEAAVGLGIVIAFFRNKETVNVDEVDLLKW

SEQ ID NO: 73979 - DNA, 303 bp, Chara vulgaris
  CDS (1)..(303): transl_table=11
atgatattacaacatatattaattttaagttcctttttattttgtcttggaatttttggattgattacaagccaaaatatggttaaaattctaatctgtctggaattaatatttaatgcagttaatttaaacttagtaattttttgcaaattttttgattcttctgcaattataggtaatttatttggactatttattattgcaattgctgcagcagaagcagcaattgcattagctattttattagctatgtatcgaaatagaagatctatacgtatagatagatttaatatacttaaataa

SEQ ID NO: 73980 - protein, 100 aa, Chara vulgaris
MILQHILILSSFLFCLGIFGLITSQNMVKILICLELIFNAVNLNLVIFCKFFDSSAIIGNLFGLFIIAIAAAEAAIALAILLAMYRNRRSIRIDRFNILK

SEQ ID NO: 73981 - DNA, 306 bp, Eucalyptus globulus subsp. globulus
  CDS (1)..(306): transl_table=11
atgatactcgaacatgtacttgttttgagtgcctatttattttctattggtatctatggattgatcacgagtcgaaatatggttagggcccttatgtgtcttgaacttatcctcaatgcggttaatataaattttgtaacattttcagatttttttgatagtcgacaattaaaaggagatattttctccatttttgttatagctattgcagccgctgaagcagctattgggttagctattgtttcgtcaatttatcgtaacagaaaatcaactcgtatcaatcaatcgaatttgttgaataaatga

SEQ ID NO: 73982 - protein, 101 aa, Eucalyptus globulus subsp. globulus
MILEHVLVLSAYLFSIGIYGLITSRNMVRALMCLELILNAVNINFVTFSDFFDSRQLKGDIFSIFVIAIAAAEAAIGLAIVSSIYRNRKSTRINQSNLLNK

SEQ ID NO: 73983 - DNA, 303 bp, Staurastrum punctulatum
  CDS (1)..(303): transl_table=11
atgttagaaaattcacttattttaggtgcttatcttttttgtttaggaatttatggattaacaactagcagaaatatgattagagcattaatgtgtttagaattaatgcttaatggagttaatataaatttagtagccttttcttcttttttagacccggataaaattagaggacaagtttttgctatttttattattgctatcgcagcagctgaagctgctattggtttagctattattttaaatatttttcgtaatcgaaattctattcgaatagatcaatttaatttattaaagtggtag

SEQ ID NO: 73984 - protein, 100 aa, Staurastrum punctulatum
MLENSLILGAYLFCLGIYGLTTSRNMIRALMCLELMLNGVNINLVAFSSFLDPDKIRGQVFAIFIIAIAAAEAAIGLAIILNIFRNRNSIRIDQFNLLKW

SEQ ID NO: 73985 - DNA, 303 bp, Zygnema circumcarinatum
  CDS (1)..(303): transl_table=11
atgttacagaattatctctgtgtagccgcttatctattttgcattggaatttatggtttaataattagtcgtagcatggttagagctcttatgtgtcttgaattaatgctaaatggcgtaaatttgaatcttgtagcatttgctacttatttagataatcaagaaattaaaggacaagtatttgctgtatttattatcgctatagccgctgctgaagcggctatagggctggctattgtattaaatatttatcgaaatcgcaattctgtacgtgttgatcagtttgatatactgaaatggtaa

SEQ ID NO: 73986 - protein, 100 aa, Zygnema circumcarinatum
MLQNYLCVAAYLFCIGIYGLIISRSMVRALMCLELMLNGVNLNLVAFATYLDNQEIKGQVFAVFIIAIAAAEAAIGLAIVLNIYRNRNSVRVDQFDILKW

SEQ ID NO: 73987 - DNA, 300 bp, Mycobacterium sp. MCS
  CDS (1)..(300): transl_table=11
gtgaaccccgacaactacctgcacctgtcggcgctgctgttcaccatcggcgccgccggggtgttgttgcggcgcaacgtgatcgtggtcttcatgtgcgtggagttgatgctcaacgcggcgaacctcgcgttcgtcgcgttctcgcgcatgcacggccaactcgacggtcaggtggtggcgttcttcacgatggtggtcgcggcctgcgaggtggtcatcgggctggccatcatcatgaccatctaccgggcccgccggtcggcctcggtcgacgacgccaacctactcaaacactga

SEQ ID NO: 73988 - protein, 99 aa, Mycobacterium sp. MCS
MNPDNYLHLSALLFTIGAAGVLLRRNVIVVFMCVELMLNAANLAFVAFSRMHGQLDGQVVAFFTMVVAACEVVIGLAIIMTIYRARRSASVDDANLLKH

SEQ ID NO: 73989 - DNA, 339 bp, Rubrobacter xylanophilus DSM 9941
  CDS (1)..(339): transl_table=11
atgcagcagctcgtcgagcagctcaacgcccagataccgctggagggctacctgacggtcgcggcgatcatgttcgccatcggggcgtggggcgcgctcataaggcgcaacgcggtggtcgtcttcatgtgcgtggagctgatgatcaacgcggtgaacctcacgctggtggccttcgcggacttcctccccggggcggggggagcgggggccgggtacacggtgctcatcatcgccatcgccgccgcggaggtcgcggtggggctggcgatagtgctggcgatcttccggacccgccggacggtaaacatagacgaggtcgactccctgcggggctag

SEQ ID NO: 73990 - protein, 112 aa, Rubrobacter xylanophilus DSM 9941
MQQLVEQLNAQIPLEGYLTVAAIMFAIGAWGALIRRNAVVVFMCVELMINAVNLTLVAFADFLPGAGGAGAGYTVLIIAIAAAEVAVGLAIVLAIFRTRRTVNIDEVDSLRG

SEQ ID NO: 73991 - DNA, 306 bp, Populus alba
  CDS (1)..(306): transl_table=11
atgatgctcgaatatgtgcttggtttgagtgcttatttattttctatcggtatctatggattgatcacgagtcgaaatatggttagagcccttatgtgtcttgaacttatattgaatgccgtcaatctaaatttcgtaacattttctgatttttttgatagtcgacaattaaaaggaaatattttatcaatttttgttatatctatcgcagccgctgaagcagctatcgggccggctatagtttcgtcaatttatcgtaacagaaaatcaatccgtatcaatcaattgaatttgttgaataagtag

SEQ ID NO: 73992 - protein, 101 aa, Populus alba
MMLEYVLGLSAYLFSIGIYGLITSRNMVRALMCLELILNAVNLNFVTFSDFFDSRQLKGNILSIFVISIAAAEAAIGPAIVSSIYRNRKSIRINQLNLLNK

SEQ ID NO: 73993 - DNA, 303 bp, Nephroselmis olivacea
  CDS (1)..(303)
atgaatcaaattaacttcttagcagtatcaatgattcttttccttttaggaatttggggaatatttttgaatcgtaaaaacattattattatgttaatgtctattgagcttatgttactcgctgttaacttaaatttcctatttttttctgtttatctagatgatatgataggtcagatttttgcactttttattctaacagtagctgctgccgaatctgctattggattagctttacttgttagttattaccgtgtgcgaggaagtattgccgtagaattaatccatttaatgaaaggataa

SEQ ID NO: 73994 - protein, 100 aa, Nephroselmis olivacea
MNQINFLAVSMILFLLGIWGIFLNRKNIIIMLMSIELMLLAVNLNFLFFSVYLDDMIGQIFALFILTVAAAESAIGLALLVSYYRVRGSIAVELIHLMKG

SEQ ID NO: 73995 - DNA, 303 bp, Mesostigma viride
  CDS (1)..(303)
atgaatttagctctctctttaactttctctatgactctttttcttataggtgtttggggtatgtttttaaatagaaagaatttgttaattatgctaatgtgcattgaacttatgttattaggagttaatttaaatcttttatttttttctcttgctttagatgatttaatgggacaaatatttgcgttgttggtacttacagtggctgctgcagaatctgctataggccttgccattttagtagtatattatcgtgttcgtggaactattgcagtagaatttattaaccttatgaaaggttaa

SEQ ID NO: 73996 - protein, 100 aa, Mesostigma viride
MNLALSLTFSMTLFLIGVWGMFLNRKNLLIMLMCIELMLLGVNLNLLFFSLALDDLMGQIFALLVLTVAAAESAIGLAILVVYYRVRGTIAVEFINLMKG

SEQ ID NO: 73997 - DNA, 270 bp, Verticillium dahliae
  CDS (1)..(270): transl_table=4
atgagtctaacattagtactttttttaataggagttttagggtttgtatttaatagaaaaaatattatattaatgcttatttctatagaaataatgttagtatcaataacattttttatattaataagttctataaatatagatgatataataggacaaacttatgctatatatattataataatagctggagcagagtctgcaataggtttaggtattttagtagctttttatagattaagaggaagtatagcaatagaatataaataa

SEQ ID NO: 73998 - protein, 89 aa, Verticillium dahliae
MSLTLVLFLIGVLGFVFNRKNIILMLISIEIMLVSITFFILISSINIDDIIGQTYAIYIIIIAGAESAIGLGILVAFYRLRGSIAIEYK

SEQ ID NO: 73999 - DNA, 306 bp, Cytophaga hutchinsonii ATCC 33406
  CDS (1)..(306): transl_table=11
atgataccgattgattattatatcgctgtttccattttattgttcagcatcggctcggctatcgtattcacacgccgcaatattttatatgtgctgatgggtattgagttaatctttaatgcagcaaacataaatctggttgcctttggacaacttgatccgaatctgaacggacaattgttcagtatgctgattataacggtagcagcagcagagtctgtcgtagcactggctattattatcgtactgtttaagaaattaaatacagtcgatttatcagaaattaaaaatcttaaagaaaaatag

SEQ ID NO: 74000 - protein, 101 aa, Cytophaga hutchinsonii ATCC 33406
MIPIDYYIAVSILLFSIGSAIVFTRRNILYVLMGIELIFNAANINLVAFGQLDPNLNGQLFSMLIITVAAAESVVALAIIIVLFKKLNTVDLSEIKNLKEK

SEQ ID NO: 74001 - DNA, 300 bp, Oltmannsiellopsis viridis
  CDS (1)..(300)
atgcaaattcaaagtttaactttttcatcaattctttttctaattggtttaaccggtatttatttaaatagaaaaagtgttattttattattaatgtctattgagcttctattacttgcagttaatttaaattttttaatgttttctgcaacttcagaagatattgttggagaagtatttgctttatttgtactaacggttgcagcagcagaagctgctattggtcttgctttacttgtaatttactatagagtacgtggatcaatttctattgaatttgtaagtttacttaaatcataa

SEQ ID NO: 74002 - protein, 99 aa, Oltmannsiellopsis viridis
MQIQSLTFSSILFLIGLTGIYLNRKSVILLLMSIELLLLAVNLNFLMFSATSEDIVGEVFALFVLTVAAAEAAIGLALLVIYYRVRGSISIEFVSLLKS

SEQ ID NO: 74003 - DNA, 300 bp, Rhodococcus sp. RHA1
  CDS (1)..(300): transl_table=11
atgaaccccgagaactacctctacctgtcggcgctgctgttcacgatcggcgcggccggggtgctgatccggcgcaacgcgatcatcgtgttcatgtgcatcgaactgatgctcaacgcctcgaacctggcgttcgtgacgttcgcccggatgcacggcaacctcgacggccaggtcttcgcgttcttcacgatggtcgtcgcggccgccgaggtcgtcgtcggtctggcgatcatcatgaccatattccgttcccgccgttcggcttccgtcgacgacgccaacctcctcaagaactga

SEQ ID NO: 74004 - protein, 99 aa, Rhodococcus sp. RHA1
MNPENYLYLSALLFTIGAAGVLIRRNAIIVFMCIELMLNASNLAFVTFARMHGNLDGQVFAFFTMVVAAAEVVVGLAIIMTIFRSRRSASVDDANLLKN

SEQ ID NO: 74005 - DNA, 303 bp, Ostreococcus tauri
  CDS (1)..(303)
atgcattgtatttcttttttacattgttctctattgctttttttactgggtgtttggggtatctttttcaatcgtaaaaatattgtggttatgctaatgtgtattgaattaatgctccttgctgtcaacctgaactttcttattttctccacatacttagatgacctgagtggacaaatcttttccctcctcatcttaaccgtcgccgcagcagaatcttccattggactcgctttacttgtaatgtattacagaactcgtggaaccatctccattgaatatatgaaccttttaaaaggataa

SEQ ID NO: 74006 - protein, 100 aa, Ostreococcus tauri
MHCISFLHCSLLLFLLGVWGIFFNRKNIVVMLMCIELMLLAVNLNFLIFSTYLDDLSGQIFSLLILTVAAAESSIGLALLVMYYRTRGTISIEYMNLLKG

SEQ ID NO: 74007 - DNA, 327 bp, Trichodesmium erythraeum IMS101
  CDS (1)..(327): transl_table=11
atggttgataagtttatgcaattacaactggaatattttttgttgttggcagcagcacttttttgtataggaatttatggcttagttaccagtcgtaatgcagttagggtgctaatgtctattgagttacttctcaatgctgttaatttgaatttgatgggtttttctaattttctagattctcaaaatattaaaggtcaggtttttactgtctttgtcatgacggttgctgctgctgaagctgctgtgggtttggctatagttttagcaatttatcgtaaccgtgatacggtggatatggaagaatttaacttattaaagtggtaa

SEQ ID NO: 74008 - protein, 108 aa, Trichodesmium erythraeum IMS101
MVDKFMQLQLEYFLLLAAALFCIGIYGLVTSRNAVRVLMSIELLLNAVNLNLMGFSNFLDSQNIKGQVFTVFVMTVAAAEAAVGLAIVLAIYRNRDTVDMEEFNLLKW

SEQ ID NO: 74009 - DNA, 306 bp, Daucus carota
  CDS (1)..(306): transl_table=11
atgatgctcgaacatgtacttgttttgagtgcctatttattttctgttggtctttatggattgattacgagtcgaaatatggttagggcccttatgtgtcttgaacttattttgaatgcagttaatatcaattttgtaacattttctgatttttttgatagtcgtcaattaaaaggatcaattttctctatttttgttatagctattgcagccgctgaagcagctattggactagctattgtttcatcaatttatcgtaacagaaaatcaactcgtatcaatcaatcaaacttgttgaataagtag

SEQ ID NO: 74010 - protein, 101 aa, Daucus carota
MMLEHVLVLSAYLFSVGLYGLITSRNMVRALMCLELILNAVNINFVTFSDFFDSRQLKGSIFSIFVIAIAAAEAAIGLAIVSSIYRNRKSTRINQSNLLNK

SEQ ID NO: 74011 - DNA, 306 bp, Liriodendron tulipifera
  CDS (1)..(306): transl_table=11
atgatgaccgagcatgtacttattttgagtgcctatttattttctatcggtatttatggattgatcacaagccgaaacatggttagagcacttatgtgtcttgagcttatactgaatgcggttaatctaaatctcgtaacattttctgatttatttgatagtcgccaattaaaaggagacattttctcgatctttgttatagctattgcagccgctgaagcagctattgggccagctattgtttcgtcgatctatcgtaacagaaaatcaactcgtatcaatcaatcgaatttgttgaataaatag

SEQ ID NO: 74012 - protein, 101 aa, Liriodendron tulipifera
MMTEHVLILSAYLFSIGIYGLITSRNMVRALMCLELILNAVNLNLVTFSDLFDSRQLKGDIFSIFVIAIAAAEAAIGPAIVSSIYRNRKSTRINQSNLLNK

SEQ ID NO: 74013 - DNA, 306 bp, Citrus sinensis
  CDS (1)..(306): transl_table=11
atgatgctcgagcatgtacttgttttgagtgcctatttattttcgattggcatctatggcttgattacgagccgaaatatggttcgggccttgatgtgccttgaacttatactaaatgcagttaatatcaattttgtaacattctctgatttttttgatagtcgacaattaaaaggagatattttttcaatttttgttatagctattgcagccgctgaagcagctatcggatcagctattgtttcgtcaatttatcgtaacagaaaatcgacgcgtatcaatcaatcgactttgttgaataagtag

SEQ ID NO: 74014 - protein, 101 aa, Citrus sinensis
MMLEHVLVLSAYLFSIGIYGLITSRNMVRALMCLELILNAVNINFVTFSDFFDSRQLKGDIFSIFVIAIAAAEAAIGSAIVSSIYRNRKSTRINQSTLLNK

SEQ ID NO: 74015 - DNA, 306 bp, Platanus occidentalis
  CDS (1)..(306): transl_table=11
atgatactcgaacatgtacttgttttgagtgcttatttattttctatcggtatctatggattgatcacgagccgaaatatggttagagcgcttatgtgtcttgaacttatactgaatgcggttaatataaatttcgtaacattctctgatttttttgatagtcgccaattaagaggagacattttctcgatttttgttatagctattgcagcagctgaagcagctattggaccagctattctttcgtcaatttttcgtaacagaaagtcaactcgtatcaatcaatcgaatttgttgaataaatag

SEQ ID NO: 74016 - protein, 101 aa, Platanus occidentalis
MILEHVLVLSAYLFSIGIYGLITSRNMVRALMCLELILNAVNINFVTFSDFFDSRQLRGDIFSIFVIAIAAAEAAIGPAILSSIFRNRKSTRINQSNLLNK

SEQ ID NO: 74017 - DNA, 306 bp, Nandina domestica
  CDS (1)..(306): transl_table=11
atgatgctcgagcatgtacttgttttgagtgcctatttattatctatcggtatttatggattgattacaagccgaaatatggttagagcgcttatgtgtcttgagcttatactgaatgcggttaatatgaatttcgtaacattttctgatttatttgatagtcgccaaataaaaggagacattttctcgatttttgttatagctattgcagccgctgaagccgctattggattagctattgtttcatcaatttatcgtaacagaaaatcaactcgtataaaccaatcgaatttgttgaataaatag

SEQ ID NO: 74018 - protein, 101 aa, Nandina domestica
MMLEHVLVLSAYLLSIGIYGLITSRNMVRALMCLELILNAVNMNFVTFSDLFDSRQIKGDIFSIFVIAIAAAEAAIGLAIVSSIYRNRKSTRINQSNLLNK

SEQ ID NO: 74019 - DNA, 306 bp, Alkalilimnicola ehrlichei MLHE-1
  CDS (1)..(306): transl_table=11
atgattggacttgccgactatctgatattgggggcactgctgttctccctgggcgtggccgggatcttcatcaaccggaagaacctgctcgtgctgctgatgtgcattgagctgatcctgcttgcggtgaacatgaacttcatcgccttctcggcctatctgcaggatctggccgggcaggtctttgtgttcttcatcctcaccgtcgcggcggcagaggccgccattggcctggccattgtggtggcgctgttccgtaaccggggctccatcaatgtgggcgatctggacagcatgaagggctga

SEQ ID NO: 74020 - protein, 101 aa, Alkalilimnicola ehrlichei MLHE-1
MIGLADYLILGALLFSLGVAGIFINRKNLLVLLMCIELILLAVNMNFIAFSAYLQDLAGQVFVFFILTVAAAEAAIGLAIVVALFRNRGSINVGDLDSMKG

SEQ ID NO: 74021 - DNA, 306 bp, Morus indica
  CDS (1)..(306): transl_table=11
atgatgctcgaacatgtacttgttttgagtgcctacttattttctatcggtatctatggattgatcaccagccgaaatatggttagagctcttatgtgtcttgaacttatactaaatgcggttaatataaattttgtaacattttctgatttttttgatagtcgccaattaaaaggaaatattttttccatttttgttatagccattgcagccgctgaagccgccattggaccagctattgtttcgtcaatttatcgtaatagaaaatcaactcgtatcaatcaatcgaatttgttgaataagtag

SEQ ID NO: 74022 - protein, 101 aa, Morus indica
MMLEHVLVLSAYLFSIGIYGLITSRNMVRALMCLELILNAVNINFVTFSDFFDSRQLKGNIFSIFVIAIAAAEAAIGPAIVSSIYRNRKSTRINQSNLLNK

SEQ ID NO: 74023 - DNA, 306 bp, Jasminum nudiflorum
  CDS (1)..(306): transl_table=11
atgatgctcgaacatatacttgttttgagtgcctatttattttccatcggtatctatggattgatcacaagtcgaaatatggttagagcccttatgtgtcttgaacttatattcaattcagttaatatcaattttgtaacattttctggtttttttgataatcgtcaattaagaggagatattttctccgtttttgttttcgctattgcagccgctgaagcagctattggactagctattgtttcatcaatttatcgtaacagaaaatccactcgtattaaccaatcgaatttgttgaataaatag

SEQ ID NO: 74024 - protein, 101 aa, Jasminum nudiflorum
MMLEHILVLSAYLFSIGIYGLITSRNMVRALMCLELIFNSVNINFVTFSGFFDNRQLRGDIFSVFVFAIAAAEAAIGLAIVSSIYRNRKSTRINQSNLLNK

SEQ ID NO: 74025 - DNA, 306 bp, Pelargonium x hortorum
  CDS (1)..(306): transl_table=11
atgatactggaacatgtccttgttttgagttcttttttattttctattggtatctatggattgatcacgagtcggaatatgattagggctcttatgtctcttgaacttatgctgaatggggttaatctcaatttcgtaacattttctgatttttttgatagtcgccaactaaaaggtgacattttctccatttttgttatagccattgcagccgctgaagccgctattggaccggctattctgtcgtcaatttatcgtaacaaaaaatcaattcgtattaatcaatcaaatttattgaataagtag

SEQ ID NO: 74026 - protein, 101 aa, Pelargonium x hortorum
MILEHVLVLSSFLFSIGIYGLITSRNMIRALMSLELMLNGVNLNFVTFSDFFDSRQLKGDIFSIFVIAIAAAEAAIGPAILSSIYRNKKSIRINQSNLLNK

SEQ ID NO: 74027 - DNA, 306 bp, Drimys granadensis
  CDS (1)..(306)
atgatgctcgagcatgtacttattttgagtgcctatttattttctattggtatttatggattgatcacaagtcgaaatatggttagagcacttatgtgtcttgagcttatactgaatgcggttaatatgaatctcataaaattttctgatttatttgatagtcgacaattaaaaggagacattttctcgatctttgttatagctattgcagccgctgaagcagctattgggccagctattgtttcgtcgatccatcgtaacagaaaatcaactcgtatcaatcaatcgaacttgttgaataaatag

SEQ ID NO: 74028 - protein, 101 aa, Drimys granadensis
MMLEHVLILSAYLFSIGIYGLITSRNMVRALMCLELILNAVNMNLIKFSDLFDSRQLKGDIFSIFVIAIAAAEAAIGPAIVSSIHRNRKSTRINQSNLLNK

SEQ ID NO: 74029 - DNA, 306 bp, Coffea arabica
  CDS (1)..(306): transl_table=11
atgatgctcgaacatgtacttgttttgagtgcctatttattttctatcggtatctatggattgatcacaagtcgaaatatggttagagctcttatgtgtcttgaacttatattgaatgcagttaatatcaattttgtaacattttctgatttttttgataatcgtcaattaaaaggagacattttttcaatttttgttatagctattgcagccgctgaagcggctattggactggctattgtttcatcaatttatcgtaaccgaaaatcaactcgtattaaccaatcgaatttgttgaataactag

SEQ ID NO: 74030 - protein, 101 aa, Coffea arabica
MMLEHVLVLSAYLFSIGIYGLITSRNMVRALMCLELILNAVNINFVTFSDFFDNRQLKGDIFSIFVIAIAAAEAAIGLAIVSSIYRNRKSTRINQSNLLNN

SEQ ID NO: 74031 - DNA, 312 bp, Solibacter usitatus Ellin6076
  CDS (1)..(312): transl_table=11
atgatgaacgcggtccccatttcctggttcctcaccctgagcgcaatcctgtttgcgctgggcgtcgccggtttcctgttccggcgcaatatcatcacggtgttcatgtccatcgaactgatgctgaacgccgtcaacctgagttttgtgactttctcctaccagcacaaggaagtcgccggccacctgttcacgttcttcgtgatggtggtagcggcggccgaagcggcggtgggactggccatcatcctgacagtgttcaagaaccgctcgacactcaatatcgatgatgtcaattcgatgaagaactaa

SEQ ID NO: 74032 - protein, 103 aa, Solibacter usitatus Ellin6076
MMNAVPISWFLTLSAILFALGVAGFLFRRNIITVFMSIELMLNAVNLSFVTFSYQHKEVAGHLFTFFVMVVAAAEAAVGLAIILTVFKNRSTLNIDDVNSMKN

SEQ ID NO: 74033 - DNA, 303 bp, Magnetococcus sp. MC-1
  CDS (1)..(303): transl_table=11
atgagtctcaatgcctatctggttttggcggcgatgctgttcaccataggggtgtttggtatcttccttaaccgtaaaaacgtgatcagcatcatgatgagtatcgagttgatgctgctggcggtgaacatcaactttgtggcgttttcccactatctgcatgatttgaccggtcagatcttcacctttttcgttgtcacggtggcagcggcagaggcggcgattggtctggccatattggtgaccttcttccgtaatcggaccaccattaacgtggaggagatcgacaccctcaagggttaa

SEQ ID NO: 74034 - protein, 100 aa, Magnetococcus sp. MC-1
MSLNAYLVLAAMLFTIGVFGIFLNRKNVISIMMSIELMLLAVNINFVAFSHYLHDLTGQIFTFFVVTVAAAEAAIGLAILVTFFRNRTTINVEEIDTLKG

SEQ ID NO: 74035 - DNA, 306 bp, Gossypium barbadense
  CDS (1)..(306): transl_table=11
atgatgcttgaacatatacccgttttgagtgcctatttattttctatcgatatttatggattgatcacaagtcgaaatatggttagggcccttatgtgtcttgaacttatactgaatgcggttaatataaattttgtaacattttctgatttttttgatagtcggcaattaaagggaaatattttctcaatttttgttatagctattgcagccgctgaagcagctattggatcagctattgtgtcctcgatttatcgtaacagaaaatcaacgcgtatcaatcaatcaactttgttgaataagtaa

SEQ ID NO: 74036 - protein, 101 aa, Gossypium barbadense
MMLEHIPVLSAYLFSIDIYGLITSRNMVRALMCLELILNAVNINFVTFSDFFDSRQLKGNIFSIFVIAIAAAEAAIGSAIVSSIYRNRKSTRINQSTLLNK

SEQ ID NO: 74037 - DNA, 300 bp, Nocardioides sp. JS614
  CDS (1)..(300): transl_table=11
atgaacgtgacggcctacgtggtcctctcggggatcctgttcaccatcggctgcgtcggcgtgctgatccggcgcaacgcgatcgtggtcttcatgtgcgtcgagctgatgctcaacgcctcgaacctcgcactggtcgccttcgcccgccagcacggcaacctcgacgggcagatcgccgcgttcttcgtgatggtcgtcgccgccgccgaggtggtcgtggggctcgcgatcatcatgaccatcttccggacccgccgctcggcctcggtcgacgacgccagcctgctgaagtactag

SEQ ID NO: 74038 - protein, 99 aa, Nocardioides sp. JS614
MNVTAYVVLSGILFTIGCVGVLIRRNAIVVFMCVELMLNASNLALVAFARQHGNLDGQIAAFFVMVVAAAEVVVGLAIIMTIFRTRRSASVDDASLLKY

SEQ ID NO: 74039 - DNA, 309 bp, Acidovorax sp. JS42
  CDS (1)..(309): transl_table=11
atgacattgactctgggtcactttctctcgctgggcgccatgctgttcgccatggcggtgatcggcatcttcctgaatcgcaagaatctcatcgtcttgctgatggcgatcgaattgatgctgctcgcggtgaatttcaacttcgtcgcgttctcgcactacctcggggacatgcacggtcaggtcttcgtgttcttcattctcaccgtggcggctgctgaatccgccatcggcctggccatcctggtgctgctgttccgtaacaagtccagcattgacgcggaagacctcaacaccctcaagggttga

SEQ ID NO: 74040 - protein, 102 aa, Acidovorax sp. JS42
MTLTLGHFLSLGAMLFAMAVIGIFLNRKNLIVLLMAIELMLLAVNFNFVAFSHYLGDMHGQVFVFFILTVAAAESAIGLAILVLLFRNKSSIDAEDLNTLKG

SEQ ID NO: 74041 - DNA, 306 bp, Nostoc punctiforme PCC 73102
  CDS (1)..(306): transl_table=11
atgcaactccagtactttttattactagcagcagctttattctgcatcggcatctacggtttaattaccagccgcaacgctgtgcgggtgctgatgtcaattgaattactgctcaatgctgttaatctgaatttaatggcattttccaacttcctcgactcaacattaattaagggtcaggttttcacagtatttgtgattaccgtggccgcggccgaggcggcggtgggtttagcgatcgtgcttacaaaaaatcgcaaccgcgataccgtcgatatggagcagtttaatctcctgaagtggtaa

SEQ ID NO: 74042 - protein, 101 aa, Nostoc punctiforme PCC 73102
MQLQYFLLLAAALFCIGIYGLITSRNAVRVLMSIELLLNAVNLNLMAFSNFLDSTLIKGQVFTVFVITVAAAEAAVGLAIVLTKNRNRDTVDMEQFNLLKW

SEQ ID NO: 74043 - DNA, 315 bp, Rickettsia akari str. Hartford
  CDS (1)..(315): transl_table=11
atgaatgaatatatttcgcttaatcattatttaatcttaagcagcttagtttttactattgggatgtttggattatttatgcatcgcaaaaatattatcaatatattaatgtccattgagttaatgctgctcgcagttaacataaattttgttacattttccgtatatatgcaagaattatcgggacaaatttttagtattataatcttaactgtagcagctgccgaaacctcaatagggcttgcaatattactaatatatttccgtaataaaggctcaattgaaatcactgacattaatcagatgagggggtga

SEQ ID NO: 74044 - protein, 104 aa, Rickettsia akari str. Hartford
MNEYISLNHYLILSSLVFTIGMFGLFMHRKNIINILMSIELMLLAVNINFVTFSVYMQELSGQIFSIIILTVAAAETSIGLAILLIYFRNKGSIEITDINQMRG

SEQ ID NO: 74045 - DNA, 312 bp, Crocosphaera watsonii WH 8501
  CDS (1)..(312): transl_table=11
atggaaataagtttagagttttgtttactgttagccgctgcacttttctgtattgggatttatggattagtgaccagtcgcaatgcagtgagagttttaatgtctattgaattactgttaaatgcagttaatttgaacttaatgggattttctaattttcttgatcctgttggtattaaaggtcaaatttttaccatatttgtgattactgtagcagcagcagaggcagccgttgggttagctattgtcttaacaatttatcgtaaccgcgaaacaacagacatggaacaatttaatctcttgaaatggtaa

SEQ ID NO: 74046 - protein, 103 aa, Crocosphaera watsonii WH 8501
MEISLEFCLLLAAALFCIGIYGLVTSRNAVRVLMSIELLLNAVNLNLMGFSNFLDPVGIKGQIFTIFVITVAAAEAAVGLAIVLTIYRNRETTDMEQFNLLKW

SEQ ID NO: 74047 - DNA, 318 bp, Prosthecochloris aestuarii DSM 271
  CDS (1)..(318): transl_table=11
atggatgtactcactactatcggtctcaaccattacctgaccatctccgtgctgctgtttggattcggtctgtttgccatcctcacacgcaagaatgccattgtggtgcttatgggggttgagctgatcctcaatgcagcaaatatcaatctgcttgcattctccaaatacaacggcgggatgcaaggcgtcatgttcagtctgtttgtcattgtgcttgctgcagcagaagctgcgatcgctcttgctattattatcaatatctacaagacctttaataccgttgacgtttctcgtatcgactccatgaaggagtga

SEQ ID NO: 74048 - protein, 105 aa, Prosthecochloris aestuarii DSM 271
MDVLTTIGLNHYLTISVLLFGFGLFAILTRKNAIVVLMGVELILNAANINLLAFSKYNGGMQGVMFSLFVIVLAAAEAAIALAIIINIYKTFNTVDVSRIDSMKE

SEQ ID NO: 74049 - DNA, 330 bp, Synechococcus sp. RS9917
  CDS (1)..(330): transl_table=11
atgtccgacctgctgagcggttccgtacctcttgaggcctacctgctcctggcggcggtgctgttctgcacgggggtttggggcctgatcaacagccgcaacgcggtgcgcgtgctgatgagcattgagctgatgctgaacgccgtcaacatcaacctgatggcgttctcctcgtatgtggatggcgatctgatccgcggtcaggtgtttgccgtgttcgtgatcaccgtggcggcggcggaggcggcggtgggtctggcgattctgctgtcgctgtatcggaatcgggtcacagtggatatggaacgcttcaatctgctgcgctggtga

SEQ ID NO: 74050 - protein, 109 aa, Synechococcus sp. RS9917
MSDLLSGSVPLEAYLLLAAVLFCTGVWGLINSRNAVRVLMSIELMLNAVNINLMAFSSYVDGDLIRGQVFAVFVITVAAAEAAVGLAILLSLYRNRVTVDMERFNLLRW

SEQ ID NO: 74051 - DNA, 327 bp, Synechococcus sp. WH 5701
  CDS (1)..(327): transl_table=11
atgtccgccacctccattgatattccgctccaggcctacctggtgcttgctgccatcctcttttgcaccggggtctggggcctgatcaacagccgcaacgccgtgcgtgttctgatgagcatcgagttgatgctcaatgccgtcaacatcaacctgatggccttctccagttacatcgatggccagcagatccgtggccaggtctttgccattttcgtgatcaccgtggccgccgccgaagcggccgtgggcctggcgatcctgctgtccctctaccgcaaccgcgaaaccgtcgacatggagcgcttcaacctgttgcgctggtga

SEQ ID NO: 74052 - protein, 108 aa, Synechococcus sp. WH 5701
MSATSIDIPLQAYLVLAAILFCTGVWGLINSRNAVRVLMSIELMLNAVNINLMAFSSYIDGQQIRGQVFAIFVITVAAAEAAVGLAILLSLYRNRETVDMERFNLLRW

SEQ ID NO: 74053 - DNA, 324 bp, Photobacterium sp. SKA34
  CDS (1)..(324): transl_table=11
atgagtccactgactattttaattttatcctttgccatgttcattattggcctactcattgttgttgttcgccgacagctgttgttcgttcttatgggtatcgaagtcatgcttaatggcgttgcgttagccgcggttgaagccggtcaacattggggaaatccaacaggacaaatcattactatttttttaatgattgcggcaggctgtgagctttctgttgtcttgatgctcgctatgttgtcgtacaagcacctaaaaacaacccgtatcgaccaacttaaccagcttagcaatacattaattagtaagggagaactgtaa

SEQ ID NO: 74054 - protein, 107 aa, Photobacterium sp. SKA34
MSPLTILILSFAMFIIGLLIVVVRRQLLFVLMGIEVMLNGVALAAVEAGQHWGNPTGQIITIFLMIAAGCELSVVLMLAMLSYKHLKTTRIDQLNQLSNTLISKGEL

SEQ ID NO: 74055 - DNA, 327 bp, delta proteobacterium MLMS-1
  CDS (1)..(327): transl_table=11
atgccaatgcccattatctacaacagcctggagacctacctgctgatcgccgccctgcttttcgggctggggatttacgggatcatgcgccaccgcagcctgatcggcatcctgatttccgccgagctggtgctctgcgcggcgtcgatcaacttcatggcctttaatcgttttctggccccggacccggtggtgggacagattttcgccctttttatcatgggtctggccgcggccgaggcggcgatcattctcagtatcatcgtcgcggtttaccgcaattacaaatccatcgacccggaagagtcgacggagttggctgggtga

SEQ ID NO: 74056 - protein, 108 aa, delta proteobacterium MLMS-1
MPMPIIYNSLETYLLIAALLFGLGIYGIMRHRSLIGILISAELVLCAASINFMAFNRFLAPDPVVGQIFALFIMGLAAAEAAIILSIIVAVYRNYKSIDPEESTELAG

SEQ ID NO: 74057 - DNA, 306 bp, Rickettsiella grylli
  CDS (1)..(306): transl_table=11
atgattccgttaaattattatctaatacttgcggcgaccttattcagtataggtttactcggattgatcattaatcggaagaatataattattttgctgatgtgtgtcgaattattattactggctgtgaatatcaattttattgcattttcgcatttttttgcggatttagcaggacaaatatttgttttttttatacttgccgtagcggctgtcgaagcggctatcggtttagcgatagtgatcgttttatttcgtacacgacagagtattcaagtcgatgacttaaaccggttaaaggggtag

SEQ ID NO: 74058 - protein, 101 aa, Rickettsiella grylli
MIPLNYYLILAATLFSIGLLGLIINRKNIIILLMCVELLLLAVNINFIAFSHFFADLAGQIFVFFILAVAAVEAAIGLAIVIVLFRTRQSIQVDDLNRLKG

SEQ ID NO: 74059 - DNA, 309 bp, Marinobacter sp. ELB17
  CDS (1)..(309): transl_table=11
atgaacggtgtgcccatggaacatggtctggtgttggcagccattctgttcgcgctggggctggctggcctgatgttcaggcgcaatatgatctttatactgatgagccttgagatcatgctcaacgctgcggggcttgcctttatcgtcgccggcgcggcctggcagcagccggaaggccaggtcatgtttctgctggtgatcacactcgcggctgcagaggccagcgtcggtctggcgctgctgattcagctgcaccagcgctttaagtccctggatatcgatgcggttagcaggatgcgcggataa

SEQ ID NO: 74060 - protein, 102 aa, Marinobacter sp. ELB17
MNGVPMEHGLVLAAILFALGLAGLMFRRNMIFILMSLEIMLNAAGLAFIVAGAAWQQPEGQVMFLLVITLAAAEASVGLALLIQLHQRFKSLDIDAVSRMRG

SEQ ID NO: 74061 - DNA, 306 bp, Erythrobacter sp. SD-21
  CDS (1)..(306): transl_table=11
gtgatcggcatcgaacactatgtcatcgtcagcgcgatcctgttcgtgctgggcgtgctcggcatcttcctcaaccggaagaacatcatcgtcatcctgatggcgatcgaactcattctgctcagcgtgaacatcaacctcgtagccttcagcgcctttctcggtgatctcgtcgggcaggtctttgccatgttcgtgctgaccgtcgccgcgggcgaggcggctatcgggctcgccattctcgtcatctatttccgtggtcgcggcaccatcgcggtcgacgatgccaaccggatgaagggataa

SEQ ID NO: 74062 - protein, 101 aa, Erythrobacter sp. SD-21
MIGIEHYVIVSAILFVLGVLGIFLNRKNIIVILMAIELILLSVNINLVAFSAFLGDLVGQVFAMFVLTVAAGEAAIGLAILVIYFRGRGTIAVDDANRMKG

SEQ ID NO: 74063 - DNA, 303 bp, Moritella sp. PE36
  CDS (1)..(303): transl_table=11
atgatccccatctcttggtatttgatattagccgccattttatttgtcattggcgcggcaggcgtattgctccggcgtaatgttttgattgtactgatgtctctcgaactaatgctcaacagcgtcaatatcaatctgcttgccttcgggtatgaaatgaacgatccccgcggccagatcatggctatttttattattgcgatcaccgcagccgaagtcgctattgcactcggcatactggtggctttattgcgcaacaaacgcacgttggaagtagatgacctaacaataatgaagggctga

SEQ ID NO: 74064 - protein, 100 aa, Moritella sp. PE36
MIPISWYLILAAILFVIGAAGVLLRRNVLIVLMSLELMLNSVNINLLAFGYEMNDPRGQIMAIFIIAITAAEVAIALGILVALLRNKRTLEVDDLTIMKG

SEQ ID NO: 74065 - DNA, 333 bp, Rhodotorula glutinis
  CDS (1)..(333): transl_table=4
atgactgtaaggggcgaaacccacaaacttataatacaaaggaaaccaataggaactattacaagatgcatgacattatcattagtgttattccttgtaggtattttaggattcgttctaaaccgtaaaaacattattctaatgctaattagtattgagatgatgttactagcggtgactttactagttattgttagctcattcagcttcgatgacattgtaggtcaaacttacagcatctacatcattgccattgctggagcagaatctgcaattggtcttggtatcttagttgcattctatcgattacgaggatcaattactctacgttag

SEQ ID NO: 74066 - protein, 110 aa, Rhodotorula glutinis
MTVRGETHKLIIQRKPIGTITRCMTLSLVLFLVGILGFVLNRKNIILMLISIEMMLLAVTLLVIVSSFSFDDIVGQTYSIYIIAIAGAESAIGLGILVAFYRLRGSITLR

SEQ ID NO: 74067 - DNA, 312 bp, Magnetospirillum gryphiswaldense
  CDS (1)..(312): transl_table=11
atgttcgagatcggtctttcccactacctgacggtggcggccattttgttcacgctgggcgtcttcggcatcttcctgaaccgtaagaacgtcatcatcatcatgatgagcatcgaactgatgctgctggcggtgaatttgaacttcgtcgccttctcgtcctatctgaacgatctggtcggccaagtgttcaccatgttcatcctgaccgtcgccgccgccgaggcggccatcggtctggccattctcgtcgtcttcttccgcaaccgcggcacgatcgcggtcgaggaaatcagccagctgaaggggtaa

SEQ ID NO: 74068 - protein, 103 aa, Magnetospirillum gryphiswaldense
MFEIGLSHYLTVAAILFTLGVFGIFLNRKNVIIIMMSIELMLLAVNLNFVAFSSYLNDLVGQVFTMFILTVAAAEAAIGLAILVVFFRNRGTIAVEEISQLKG

SEQ ID NO: 74069 - DNA, 306 bp, Cucumis sativus
  CDS (1)..(306): transl_table=11
atcatgctcgaacatgtacttattataagtgcctatttattttctatcggtatctatggattgatcacgagccgaaatatggttagggcccttatgtgtcttgagcttatactgaatgcagttaatatgaatttcgtaacattttctgatttttttgatagtcgccaattaaaagggaatattttctcaatttttgttatagctattgcagccgctgaagcagctattggcccagctattctttcgtcaatttatcgtaacagaaaatcaactcgtatcaatcaatcgaatttgttgaataagtag

SEQ ID NO: 74070 - protein, 101 aa, Cucumis sativus
MMLEHVLIISAYLFSIGIYGLITSRNMVRALMCLELILNAVNMNFVTFSDFFDSRQLKGNIFSIFVIAIAAAEAAIGPAILSSIYRNRKSTRINQSNLLNK

SEQ ID NO: 74071 - DNA, 297 bp, Cucumaria pseudocurata
  CDS (1)..(297): transl_table=9
atgaacatattaacaagaatattattctcccttttctttctcggcgttttaggggtgattataaaacggttacatcttctctcccttttactttgcttagaactccttttaatctccctttttttaaaaataacaatctgagctagtactttcagcagccttttaacccttaaatactcgatactcttagtaactttttctgcatgtgaagcaagagcaggattagcattaatggtgtctctatcccgaagacacaacaccgaccttttagcccaaattaaactcttacaatcataa

SEQ ID NO: 74072 - protein, 98 aa, Cucumaria pseudocurata
MNILTSILFSLFFLGVLGVIINRLHLLSLLLCLELLLISLFLNITIWASTFSSLLTLNYSILLVTFSACEASAGLALMVSLSRSHNTDLLAQINLLQS

SEQ ID NO: 74073 - DNA, 312 bp, Heliobacillus mobilis
  CDS (1)..(312): transl_table=11
gtgaccataggattaacgcattttctgctcctcggaacggctctgttctgcctcggtttgtatggccttctgtcgaaacgcaatgccatcgcgattctgatgggaatcgaattgatgctgaacgcagtcaacatcaacctgatcgccttcaataaatatgtggcggccgggagttataccggtcaagtattttctgtgtttgtcatcgtggtagccgcagctgaagtggccgtaggtctggctcttgtccttgccatttacaaggatcgtctcagcacaaatgtggatgacctcgattggctcaaatggtaa

SEQ ID NO: 74074 - protein, 103 aa, Heliobacillus mobilis
MTIGLTHFLLLGTALFCLGLYGLLSKRNAIAILMGIELMLNAVNINLIAFNKYVAAGSYTGQVFSVFVIVVAAAEVAVGLALVLAIYKDRLSTNVDDLDWLKW

SEQ ID NO: 74075 - DNA, 306 bp, Rhodothermus marinus
  CDS (1)..(306): transl_table=11
atggaaattacgctgaactggtacctggccctgggggtggtgctcttcacgctgggcgtgctgggcgtgctcttccggcgcaacgccatcgtgattctgatgtcggtggagctgatgctcaacgccgtgaacctgacgctggtggcactcagtcaggcgatgggggatgtgtcgggtcaggtgctggtgttcttcgtgatttcggtggccgccgccgaggcggccgtcggactggcgatcgtgatcgccctgttccgcaagaaggtgacggtggacgtgggggaattcaacctgttcaagtactga

SEQ ID NO: 74076 - protein, 101 aa, Rhodothermus marinus
MEITLNWYLALGVVLFTLGVLGVLFRRNAIVILMSVELMLNAVNLTLVALSQAMGDVSGQVLVFFVISVAAAEAAVGLAIVIALFRKKVTVDVGEFNLFKY

SEQ ID NO: 74077 - DNA, 270 bp, Fusarium oxysporum
  CDS (1)..(270): transl_table=4
atgaatttaactttagtactttttttaataggaatcttagggtttgtatttaatagaaaaaatataatattaatgcttatttctatagaaataatgctattatctataacattcttaatattggtaagttctgttaatattgatgatataataggacaaacatatgctatatacattatagtagttgctggtgcagaatctgctatcggtttagctattttagtagctttttatagactaagaggaagtatcgcaatagaatataaataa

SEQ ID NO: 74078 - protein, 89 aa, Fusarium oxysporum
MNLTLVLFLIGILGFVFNRKNIILMLISIEIMLLSITFLILVSSVNIDDIIGQTYAIYIIVVAGAESAIGLAILVAFYRLRGSIAIEYK

SEQ ID NO: 74079 - DNA, 267 bp, Cryptococcus neoformans var
  CDS (1)..(267): transl_table=4
atgacactatcactggtactatttctaattggaattctaggatttattatgaatctaaagaatattattcttatgattatttctattgaaattatgcttctagcggtgacactactagtactagtaagttcatataatttcgatgatattatgggacaaacatattctatttatattattactattgctggtgctgaatctgctattggtcttggtattctagtagcttattatcgactacaaggtaatatttctcttccaacataa

SEQ ID NO: 74080 - protein, 88 aa, Cryptococcus neoformans var
MTLSLVLFLIGILGFIMNLKNIILMIISIEIMLLAVTLLVLVSSYNFDDIMGQTYSIYIITIAGAESAIGLGILVAYYRLQGNISLPT

SEQ ID NO: 74081 - DNA, 267 bp, Cryptococcus neoformans var
  CDS (1)..(267): transl_table=4
atgacactatcactggtactatttctaattggaattctaggatttattatgaatcgaaagaatattattcttatgattatttctattgaaattatgcttctagcggtgacactactagtactagtaagttcatataatttcgatgatattatgggacaaacatattctatttatattattactattgctggtgctgaatctgctattggtcttggtattctagtagcttattatcgactacgaggtaatatttcacttcgaacataa

SEQ ID NO: 74082 - protein, 88 aa, Cryptococcus neoformans var
MTLSLVLFLIGILGFIMNRKNIILMIISIEIMLLAVTLLVLVSSYNFDDIMGQTYSIYIITIAGAESAIGLGILVAYYRLRGNISLRT

SEQ ID NO: 74083 - DNA, 267 bp, Cryptococcus neoformans var
  CDS (1)..(267): transl_table=4
atgacactatcactggtactatttctaattggaattctaggatttattatgaatcgaaagaatattattcttatgattatttctattgaaattatgcttctagcggtgacactactagtactagtaagttcatataatttcgatgatattatgggacaaacatattctatttatattattactattgctggtgctgaatctgctattggtcttggtattctagtagcttattatcgactacgaggtaatatgtcacttcgaacataa

SEQ ID NO: 74084 - protein, 88 aa, Cryptococcus neoformans var
MTLSLVLFLIGILGFIMNRKNIILMIISIEIMLLAVTLLVLVSSYNFDDIMGQTYSIYIITIAGAESAIGLGILVAYYRLRGNMSLRT

SEQ ID NO: 74085 - DNA, 306 bp, Pseudanabaena sp
  CDS (1)..(306): transl_table=11
atgtctttagaaccttttttgattattgccgccgcattgttttgtattggcatctatggattaatcactagccgtaatgcggtgcgggtattaatgtccgtggagttaatgctcaatgctgttaatttaaatttgatggcattctctaacttcttagattctgctagtattcgcggacaggtatttacaatttttgtaatttcgatcgcagccgcggaagcggctgtgggtctcgcgattgtcttatcgatctatcgcagtcgcgatactgccgatatggagcagttcaacttactacgttggtaa

SEQ ID NO: 74086 - protein, 101 aa, Pseudanabaena sp
MSLEPFLIIAAALFCIGIYGLITSRNAVRVLMSVELMLNAVNLNLMAFSNFLDSASIRGQVFTIFVISIAAAEAAVGLAIVLSIYRSRDTADMEQFNLLRW

SEQ ID NO: 74087 - DNA, 312 bp, Thraustochytrium aureum
  CDS (1)..(309): transl_table=23
atgattaaagtaaattttttgttttttatttttttgtctagttttatttttattattggtcttactggtattattctgaataagcgtaatattcttcttacactactttctattgagttgatactattggccatcaatataaattttattttttattcgatatatatcgatgatttttttgggcagttgtttgcgttgtatattcttacagtagctgcagcagaatctgctatcggccttacaattcttgttatttattatcgagttcaaaacactttggatataagggttattaacctactacaggcctta

SEQ ID NO: 74088 - protein, 103 aa, Thraustochytrium aureum
MIKVNFLFFIFLSSFIFIIGLTGIILNKRNILLTLLSIELILLAININFIFYSIYIDDFFGQLFALYILTVAAAESAIGLTILVIYYRVQNTLDIRVINLLQA

SEQ ID NO: 74089 - DNA, 306 bp, Paracoccus denitrificans
  CDS (1)..(306): transl_table=11
atgatcggattgactcattatcttgttgtgggggcgatattgttcgtcaccggcattttcgggatcttcgtgaaccgaaagaacgtcatcgtcatcctgatgtcgatcgaactgatgctgctggcggtgaacatcaacttcgtcgccttctcgacccatctgggcgatctggccgggcaggtcttcaccatgttcgtgctgaccgtcgccgccgccgaggccgccatcggcctggcgatcctggtggtcttcttccgcaaccgcggcaccatcgcggtggaagacgtcaacgtgatgaagggataa

SEQ ID NO: 74090 - protein, 101 aa, Paracoccus denitrificans
MIGLTHYLVVGAILFVTGIFGIFVNRKNVIVILMSIELMLLAVNINFVAFSTHLGDLAGQVFTMFVLTVAAAEAAIGLAILVVFFRNRGTIAVEDVNVMKG

SEQ ID NO: 74091 - DNA, 282 bp, Anthoceros formosae
  CDS (1)..(282): transl_table=11
atgcttgaacatgcacttattgcaggtgctttctcattctgtattggaatttccggattaattacgagtcgaaatatggttagagcacctatgtgtcttgaatcaatttttaatgcagttaatgtaaattctgtagtatcttctaatactttagacgccgaagaaataaaaggcgaaatttttgcgatttttgttatagctattgcagctgctgaagcagctattggattatccatagctttagcaatctatcgtaatagaaaatccactcgtgttgattaa

SEQ ID NO: 74092 - protein, 93 aa, Anthoceros formosae
MLEHALIAGAFSFCIGISGLITSRNMVRAPMCLESIFNAVNVNSVVSSNTLDAEEIKGEIFAIFVIAIAAAEAAIGLSIALAIYRNRKSTRVD

SEQ ID NO: 74093 - DNA, 306 bp, Arabidopsis thaliana
  CDS (1)..(306): transl_table=11
atgatactcgaacatgtacttgttttgagtgcctatttatttttgattggtctttatggattgatcacaagtcgaaatatggttagggctcttatgtgtcttgaacttatactcaatgcagttaatatgaatttcgtaacattttctgatttttttgataattcccaactaaaaggggaaattttctgcatttttgttatagcaattgcagccgctgaagcagctattggattagctatagtctcgtcaatttatcgtaacagaaaatcaattcgcataaaccaatcgaccttattaaataagtaa

SEQ ID NO: 74094 - protein, 101 aa, Arabidopsis thaliana
MILEHVLVLSAYLFLIGLYGLITSRNMVRALMCLELILNAVNMNFVTFSDFFDNSQLKGEIFCIFVIAIAAAEAAIGLAIVSSIYRNRKSIRINQSTLLNK

SEQ ID NO: 74095 - DNA, 303 bp, Chaetosphaeridium globosum
  CDS (1)..(303): transl_table=11
atgattgaaaatatccttatcataggtgcgtttttattttgtattggtacatatggactaattactagtaaaaatatgatcaaagttttaatgtgtttagaattaatgtttaattcggttaatataaatttagtagctttttcaaatttttttgattctgaatctataaaaggacaagtttttgctgtttttattatagcaatcgcagcagcagaagctgcaattggtttagcaattgtttttgctttatatcgtaatcgacgttctacaaaagttaatcaatttaatttattaaaatggtag

SEQ ID NO: 74096 - protein, 100 aa, Chaetosphaeridium globosum
MIENILIIGAFLFCIGTYGLITSKNMIKVLMCLELMFNSVNINLVAFSNFFDSESIKGQVFAVFIIAIAAAEAAIGLAIVFALYRNRRSTKVNQFNLLKW

SEQ ID NO: 74097 - DNA, 306 bp, Hordeum vulgare
  CDS (1)..(306): transl_table=11
atgatgtttgagcatgtactttttttgagtgtctatttattttcgattggtatctatggattgatcacaagccgaaacatggttagagctctaatatgtcttgaacttatactgaattcaattaatctaaatctcgtaacattttctgatctatttgatagtcgccaattaaaaggagatattttcgccatttttgttatagcccttgccgctgctgaagccgctattggactatccattctttcttccatccatcgtaataggaaatccactcgtatcaatcaatctaatttattgaataattag

SEQ ID NO: 74098 - protein, 101 aa, Hordeum vulgare
MMFEHVLFLSVYLFSIGIYGLITSRNMVRALICLELILNSINLNLVTFSDLFDSRQLKGDIFAIFVIALAAAEAAIGLSILSSIHRNRKSTRINQSNLLNN

SEQ ID NO: 74099 - DNA, 306 bp, Lotus japonicus
  CDS (1)..(306): transl_table=11
atgatgctcgaacatgtacttgttttgagtgcttatctattttctatcggtatctatggattaatcacgagtcgaaatatggttcgagcccttatgtgtcttgaacttatattgaatgcagtaaatatgaatctcgtaaccttttctgatttttttgataatcgccaattaaagggaaatattttttcaatttttgttatagctattgcagccgctgaagcagctatcggaccggcgattgtttcctcaatttcgcgtaacagaaaatcaattcgtatcaatcaatcgaatttgttgaataaatag

SEQ ID NO: 74100 - protein, 101 aa, Lotus japonicus
MMLEHVLVLSAYLFSIGIYGLITSRNMVRALMCLELILNAVNMNLVTFSDFFDNRQLKGNIFSIFVIAIAAAEAAIGPAIVSSISRNRKSIRINQSNLLNK

SEQ ID NO: 74101 - DNA, 306 bp, Zea mays
  CDS (1)..(306): transl_table=11
atgatgtttgagcgagtactttttttgagtgtctatttattttcgattggtatctatggattgatcacaagccgaaacatggttagagctctaatatgtcttgaacttatactgaattcaattaatctaaatctcgtaacattttctgatctatttgatagtcgccaattaaaaggagacattttcgcaatttttgttatagcccttgcggctgctgaagcagctattggactatccattctttcttccatccatcgtaacaggaaatcaactcgtatcaatcaatccaattttttgaataattag

SEQ ID NO: 74102 - protein, 101 aa, Zea mays
MMFERVLFLSVYLFSIGIYGLITSRNMVRALICLELILNSINLNLVTFSDLFDSRQLKGDIFAIFVIALAAAEAAIGLSILSSIHRNRKSTRINQSNFLNN

SEQ ID NO: 74103 - DNA, 303 bp, Marchantia polymorpha
  CDS (1)..(303): transl_table=11
atgcttgaacatatacttactttaagtgcttttttattttgtattggggtttttggattaattacaagtcgaaatatggtaagagcattgatgtgtcttgaattaatttttaatgctgttaatattaatttagtagctttttcaaattttttagatagctcacaaattaaaggagaaattttttctatttttattatagccatcgctgctgctgaagccactataggattagctattgttttagctatttatcgaaatagaaaatcaactcgtattgatcaatttaatttgctaaaatggtaa

SEQ ID NO: 74104 - protein, 100 aa, Marchantia polymorpha
MLEHILTLSAFLFCIGVFGLITSRNMVRALMCLELIFNAVNINLVAFSNFLDSSQIKGEIFSIFIIAIAAAEATIGLAIVLAIYRNRKSTRIDQFNLLKW

SEQ ID NO: 74105 - DNA, 306 bp, Mesostigma viride
  CDS (1)..(306): transl_table=11
atgtatattgaaaattttttattattagcaagtgctttattttgtataggtatttatggcttactaactagtcgtaatatagtaagagtgttaatgtgtttagaattatgtctaaatgcaatcaatataaatttcattgctttttcaaattttattgattatgaaaaaattaatggtcaagtgattgctatatttattatgacaatagcagctgcagaagcagctattggtttagcattagtattaactatttatcgtaatagagaaacagttgatatagaaaattttgatttattaaaaggttaa

SEQ ID NO: 74106 - protein, 101 aa, Mesostigma viride
MYIENFLLLASALFCIGIYGLLTSRNIVRVLMCLELCLNAININFIAFSNFIDYEKINGQVIAIFIMTIAAAEAAIGLALVLTIYRNRETVDIENFDLLKG

SEQ ID NO: 74107 - DNA, 306 bp, Nephroselmis olivacea
  CDS (1)..(306): transl_table=11
atgatttttcaatcttaccttctcatagcagcatctatgttttgcattggactttatggtcttctaacaagtcgtaatgtggtacgtgtattaatgtctcttgagttgttattaaatgctgtgaatctgaacttattaaccttttcaaatttcgttgattctcatgagatgaaggggcaagtacttgccttatttgtgattgccttagctgctgctgaagctgcaattggtttagctattattttatcaatctatcgaaatcagcgaactgtggatccagagcaatttaacttgttgaaatggtaa

SEQ ID NO: 74108 - protein, 101 aa, Nephroselmis olivacea
MIFQSYLLIAASMFCIGLYGLLTSRNVVRVLMSLELLLNAVNLNLLTFSNFVDSHEMKGQVLALFVIALAAAEAAIGLAIILSIYRNQRTVDPEQFNLLKW

SEQ ID NO: 74109 - DNA, 306 bp, Oenothera hookeri
  CDS (1)..(306): transl_table=11
atgatactcgaacatgtacttgttttgagtgcctatttattttctataggtatttatggattgatcacgagtcgaaatatggttcgggctcttatgtgccttgaacttatactgaattcggttaatcttaatttcgtaacattttcggatttttttgatagtcgccaattaaaaggagatattttttccatttttattatagctattgcagccgccgaagccgctattgggttggctattgtttcgtcaatttatcgtaacagaaaatcaattcgtatcaatcaatccaatttattgaataagtag

SEQ ID NO: 74110 - protein, 101 aa, Oenothera hookeri
MILEHVLVLSAYLFSIGIYGLITSRNMVRALMCLELILNSVNLNFVTFSDFFDSRQLKGDIFSIFIIAIAAAEAAIGLAIVSSIYRNRKSIRINQSNLLNK

SEQ ID NO: 74111 - DNA, 306 bp, Oryza nivara
  CDS (1)..(306): transl_table=11
atgatgtttgagcatgtactttttttgagtgtctatttattttcgattggtatctatggattgatcacaagccgaaacatggttagagctctaatatgccttgaacttatactgaattcaattaatctaaatctcgtaacattttctgatctatttgatagccgccaattaaaaggagacattttcgcaatttttgttatagcccttgcggctgctgaagcagctattggattatccattctttcttccatccatcgtaataggaaatcaactcgtatcaatcaatctaattttttgaataattag

SEQ ID NO: 74112 - protein, 101 aa, Oryza nivara
MMFEHVLFLSVYLFSIGIYGLITSRNMVRALICLELILNSINLNLVTFSDLFDSRQLKGDIFAIFVIALAAAEAAIGLSILSSIHRNRKSTRINQSNFLNN

SEQ ID NO: 74113 - DNA, 306 bp, Plectonema boryanum
  CDS (1)..(306): transl_table=11
atgcaacttcaatatttcttactcattgcagccgcgttgttctgcattggcgtatatggtctggtgacgagccgaaatgcggttcgagtcctgatgtcgatcgagttgatgctgaacgctgtgaatttgaatttgatggcgttttctaactatcttgatccgcaagagatcaaaggtcagatgtttacgattttcgtgattacgatcgcggctgcagaagcggcagttggtttagcgatcgtgctagcgatctatcggaaccgcgatacggtcgatatggaacaattcaatttactcaagtggtaa

SEQ ID NO: 74114 - protein, 101 aa, Plectonema boryanum
MQLQYFLLIAAALFCIGVYGLVTSRNAVRVLMSIELMLNAVNLNLMAFSNYLDPQEIKGQMFTIFVITIAAAEAAVGLAIVLAIYRNRDTVDMEQFNLLKW

SEQ ID NO: 74115 - DNA, 321 bp, Psilotum nudum
  CDS (1)..(321): transl_table=11
atgaaatttgcaaatatttttgcacttgaacacctacttactttaggtgcttatcttttttgcattggattctatggattaataacaagtcaaaatatgataaaagcacttatgtgccttgaattggtccttaacgcagttaatatcaattttgtcacattttctaattacttcgatactcagcatataaaaggagagatcttcgttctttttattatggctattgcagctgcagaagcagctatcggattagccattgttttgacaatatatcgcgatcgaaaatcaattcgtattgatcaatttaatttgttaaaatga

SEQ ID NO: 74116 - protein, 106 aa, Psilotum nudum
MKFANIFALEHLLTLGAYLFCIGFYGLITSQNMIKALMCLELVLNAVNINFVTFSNYFDTQHIKGEIFVLFIMAIAAAEAAIGLAIVLTIYRDRKSIRIDQFNLLK

SEQ ID NO: 74117 - DNA, 306 bp, Solanum lycopersicum
  CDS (1)..(306): transl_table=11
atgattctcgaacatgtacttgttttgagtgcctatttattttcgatcggtatctatggattgatcacaagtcgaaatatggttagagcccttatgtgtcttgaacttatattgaatgcagttaatatcaattttgtaacattttctgatttttttgataatcgtcaattaaagggagacattttctcaatttttgttatagctattgcagccgctgaagcagccattggcctggctattgtttcatcaatttaccgtaacagaaaatcaactcgtatcaaccaatcaaatttgttgaataattaa

SEQ ID NO: 74118 - protein, 101 aa, Solanum lycopersicum
MILEHVLVLSAYLFSIGIYGLITSRNMVRALMCLELILNAVNINFVTFSDFFDNRQLKGDIFSIFVIAIAAAEAAIGLAIVSSIYRNRKSTRINQSNLLNN

SEQ ID NO: 74119 - DNA, 306 bp, Glycine max
  CDS (1)..(306): transl_table=11
atgatattcgagcatgcacttgttttgagtgcctatttattttctataggtatatatgggttgatcacgagccggaatatggttagagcccttatgtgtcttgaacttatactgaatgcagttaatataaatctcgtaaccttttctgatttttttgatagtcgacaattaaaaggaaatattttttcaatttttgttatagctattgcagctgctgaagcagctatcggaccggctattgtttcctcaatttatcgtaatagaaaatcaacccgtatcaatcaatcaaatttattgaataaataa

SEQ ID NO: 74120 - protein, 101 aa, Glycine max
MIFEHALVLSAYLFSIGIYGLITSRNMVRALMCLELILNAVNINLVTFSDFFDSRQLKGNIFSIFVIAIAAAEAAIGPAIVSSIYRNRKSTRINQSNLLNK

SEQ ID NO: 74121 - DNA, 306 bp, Spinacia oleracea
  CDS (1)..(306)
atgatactcgagcatgtacttgttttgagtgcttttttattttctatcgggatttatggattagtcacgagtcgaaatttagttcgcgctcttatgtgccttgaacttatattgaatgcagttaatctaaactttgtaacattttctgatttttttgatagtcgccaattaaagggaaacattttctccatttttgttatagccattgcagccgctgaagcagctattggaccggctattgtttcttcaatttatcgtaacagaaaatccattcgtatcaatcaatcgaatttattgaataaatag

SEQ ID NO: 74122 - protein, 101 aa, Spinacia oleracea
MILEHVLVLSAFLFSIGIYGLVTSRNLVRALMCLELILNAVNLNFVTFSDFFDSRQLKGNIFSIFVIAIAAAEAAIGPAIVSSIYRNRKSIRINQSNLLNK

SEQ ID NO: 74123 - DNA, 264 bp, Crinipellis perniciosa
  CDS (1)..(264): transl_table=4
atgaatttatcaatatttttatttttaataggtattttaggttttatattaaatagaaaaaatattatacttatgattattgctattgaaataatgttattagctgttactctgttagtattaatcagttcctttggatttgatgataatgtaggacagaccttcagtttatatataatatctattgctggagcagaatcagttattggtttaagtattcttgttgcattctatagattattcttagtccttaattatttataa

SEQ ID NO: 74124 - protein, 87 aa, Crinipellis perniciosa
MNLSIFLFLIGILGFILNRKNIILMIIAIEIMLLAVTLLVLISSFGFDDNVGQTFSLYIISIAGAESVIGLSILVAFYRLFLVLNYL

SEQ ID NO: 74125 - DNA, 270 bp, Cryphonectria parasitica
  CDS (1)..(270): transl_table=4
atgaatttaactttaatactttttttgattggaatcttaggattcgtcttaaatagaaaaaatattatcttaatgcttatttctatagaaataatgcttttagctataactttccttatattggtaagttcactaaatattgatgacatcttaggtcaaacttacgctatctatattatagtagtggcgggtgcagagtcagcaattggtttaggtattctagtcgccttctatagattaagaggaagtgtcgcaatagaatataaataa

SEQ ID NO: 74126 - protein, 89 aa, Cryphonectria parasitica
MNLTLILFLIGILGFVLNRKNIILMLISIEIMLLAITFLILVSSLNIDDILGQTYAIYIIVVAGAESAIGLGILVAFYRLRGSVAIEYK

SEQ ID NO: 74127 - DNA, 303 bp, Marchantia polymorpha
  CDS (1)..(303)
atggatctagtaaaatatttaacattttctatgattctttttcttttaggtatttggggaattttcttaaatagaaaaaatattcttattatgttaatgtcaattgagttaatgttacttgctgtcaatttgaactttttggtattttctgtttatttggatgatatgatgggtcaattatttgctttatttgttttaacggtggctgctgcggaatccgctattgggttggccattctggttattacttttcgaattcgcggtactattgcagtggaatttattaattgcatgaagggttaa

SEQ ID NO: 74128 - protein, 100 aa, Marchantia polymorpha
MDLVKYLTFSMILFLLGIWGIFLNRKNILIMLMSIELMLLAVNLNFLVFSVYLDDMMGQLFALFVLTVAAAESAIGLAILVITFRIRGTIAVEFINCMKG

SEQ ID NO: 74129 - DNA, 270 bp, Neurospora crassa
  CDS (1)..(270): transl_table=4
atgaatattaccttaatactttttttaataggaattttaggtttcgtattaaatagaaaaaatattatattaatgcttatttcaattgaaataatgctattagctataacattcctaatattggtaagttcacttaatatggatgatataatcggccaaacttatgctatttatataatagttgtagcaggtgcagaatctgctataggtttagctattctagttgctttctatagattaagaggaagtatcacaatagaatataaataa

SEQ ID NO: 74130 - protein, 89 aa, Neurospora crassa
MNITLILFLIGILGFVLNRKNIILMLISIEIMLLAITFLILVSSLNMDDIIGQTYAIYIIVVAGAESAIGLAILVAFYRLRGSITIEYK

SEQ ID NO: 74131 - DNA, 270 bp, Penicillium marneffei
  CDS (1)..(270): transl_table=4
atgaatttttcaatatttttattccttataggaattttaggttttgttttaaatagaaaaaatataatacttatgttaatttctattgaaataatgctattagcaattacatttttaatattaataagttcatttaattttgacgatattttaggtcaaacctttgctatatacataataactatagctggtgcagaatctgcaataggtttaggtatattagtagcatactatagattaagaggaagtatatctatacaatataaataa

SEQ ID NO: 74132 - protein, 89 aa, Penicillium marneffei
MNFSIFLFLIGILGFVLNRKNIILMLISIEIMLLAITFLILISSFNFDDILGQTFAIYIITIAGAESAIGLGILVAYYRLRGSISIQYK

SEQ ID NO: 74133 - DNA, 270 bp, Podospora anserina
  CDS (1)..(270): transl_table=4
atgaatattaccttaatactttttttaataggaatcttaggattcgtattgaacagaaaaaatattatattaatgcttatttcaatcgaaataatgctattagctataacattcctaatattggtaagttcacttaatatggatgatataatcggtcaaacttatgctatttatataatagttgttgcaggtgcagaatctgccataggtttgggtattttagttgctttctatagattaagaggaagtatagcaatagaatataaataa

SEQ ID NO: 74134 - protein, 89 aa, Podospora anserina
MNITLILFLIGILGFVLNRKNIILMLISIEIMLLAITFLILVSSLNMDDIIGQTYAIYIIVVAGAESAIGLGILVAFYRLRGSIAIEYK

SEQ ID NO: 74135 - DNA, 303 bp, Prototheca wickerhamii
  CDS (1)..(303)
atggacttatcaaaatatcttactgtttccatgatattatttttactaggtatttggggtatttttttaaatagaaaaaatattattgtaatgttaatgtcaatcgaattaatgttattagcagttaatttaaattttttattattttctgtatacattgatgattgtataggacaattgttcgctttattaatattaacagtagcagccgcagaatctgcaataggattagcattacttgtagtgtattatcgtattcgtggaactatcgcagtagaatttatcaatttaatgaaaggttaa

SEQ ID NO: 74136 - protein, 100 aa, Prototheca wickerhamii
MDLSKYLTVSMILFLLGIWGIFLNRKNIIVMLMSIELMLLAVNLNFLLFSVYIDDCIGQLFALLILTVAAAESAIGLALLVVYYRIRGTIAVEFINLMKG

SEQ ID NO: 74137 - DNA, 267 bp, Schizophyllum commune
  CDS (1)..(267): transl_table=4
atgaatttgtctttattattatttttaattggaattttaggatttattttaaatagaaaaaatattatcctaatgatcattgctatagaaataatgttattagctataacactattagtattaatgagttctgtaagttttgatgatatagctggacaaacttttagtatttatatcatttctatagccggggctgagtcagttataggtttaagtattcttgtagcttattatagattaagaggtacaatatcacttagaacttaa

SEQ ID NO: 74138 - protein, 88 aa, Schizophyllum commune
MNLSLLLFLIGILGFILNRKNIILMIIAIEIMLLAITLLVLMSSVSFDDIAGQTFSIYIISIAGAESVIGLSILVAYYRLRGTISLRT

SEQ ID NO: 74139 - DNA, 267 bp, Trimorphomyces papilionaceus
  CDS (1)..(267): transl_table=4
atgactttatctctagtattattcttaattggaattcttggttttattcttaaccgaaaaaacattattctaatgatcatttctattgaaattatgttacttgctgtaacattattagtgttagttagttcataccaatttgatgatatcatgggacaaacttattctatttatatcattgccattgcaggagctgaatcagctattggtttaggtattctggtagcatactaccgattacgaggtaacatttctctacgtacataa

SEQ ID NO: 74140 - protein, 88 aa, Trimorphomyces papilionaceus
MTLSLVLFLIGILGFILNRKNIILMIISIEIMLLAVTLLVLVSSYQFDDIMGQTYSIYIIAIAGAESAIGLGILVAYYRLRGNISLRT

SEQ ID NO: 74141 - DNA, 300 bp, Trichoderma reesei; identical to SEQ ID NO: 73761
  CDS (31)..(300)

SEQ ID NO: 74142 - protein, 89 aa, Trichoderma reesei
MSLTLVLFLIGILGFVFNRKNIILMLISIEIMLLSITFLILVSSINLDDIIGQTYAIYIIVVAGAESAIGLAILVAFYRLRGSIAIEYK

SEQ ID NO: 74143 - DNA, 270 bp, Trichophyton rubrum
  CDS (1)..(270): transl_table=4
atgaatttatcattaatattatttttaatagggattttaggttttgttttaaatagaaaaaatataattctaatgcttatttcaatagaaataatattattgtctgttacttttttaatattaataagttcacttaattttgacgatatattaggtcaaacttttgctatatatataataacaatagcaggtgctgaatctgctataggattaggtatattagtagctttttatagattaagaggaagtatagcaatagaatataaataa

SEQ ID NO: 74144 - protein, 89 aa, Trichophyton rubrum
MNLSLILFLIGILGFVLNRKNIILMLISIEIILLSVTFLILISSLNFDDILGQTFAIYIITIAGAESAIGLGILVAFYRLRGSIAIEYK

SEQ ID NO: 74145 - DNA, 282 bp, Ustilago maydis
  CDS (1)..(282): transl_table=4
atggcactatatgaaatgaatctttcagtaattctatttctaattggtattctaggatttgttcttaaccgaaagaatattattcttatgctaatttcaattgaagtaatgctactagctgtaacacttctagtgctagtaagttcttacagttttgatgacattcttggtcaaacatatagtatttatattattgcaattgctggtgctgaatcagcaattggtctaggtattctagttgcttactaccgactacgaggaaatattagtctacgacaataa

SEQ ID NO: 74146 - protein, 93 aa, Ustilago maydis
MALYEMNLSVILFLIGILGFVLNRKNIILMLISIEVMLLAVTLLVLVSSYSFDDILGQTYSIYIIAIAGAESAIGLGILVAYYRLRGNISLRQ

SEQ ID NO: 74147 - DNA, 303 bp, Buchnera aphidicola subsp
  CDS (1)..(303): transl_table=11
atgatttctttatttcacgggttatttttatcattaatattatttattttaggtttaacatctttaattgtcagacgtaatatattatttatattaattagtttagaaataatgatgaatgctgttggattagcgttaatagtagttggtagttactggcatcaagcagatggtcaaataatgtatatattcgtcataactttagccgcatcagaagccagtatagctttagcattattattacaactttataggcgaaagaaaacattaaatattgatattttaagtgagatgaatggatga

SEQ ID NO: 74148 - protein, 100 aa, Buchnera aphidicola subsp
MISLFHGLFLSLILFILGLTSLIVRRNILFILISLEIMMNAVGLALIVVGSYWHQADGQIMYIFVITLAASEASIALALLLQLYRRKKTLNIDILSEMNG

SEQ ID NO: 74149 - DNA, 303 bp, Buchnera aphidicola subsp
  CDS (1)..(303): transl_table=11
atgatttctttgtttcatggtttatttttatcattaatattatttattttaggtttgacatctcttatagttcgtcgcaacatactatttatgttaattagtttagaaataatgatgaatgctgctgcattagcattagtagtatcaggaagttattggaaacagtccgatggtcaaataatgtatatacttgctattacattagctgcgtctgaagctagtatagcattagctttattactacaactttatagacgtcaaagaacgttaaacattaatgctttaagtgagatgagtggatga

SEQ ID NO: 74150 - protein, 100 aa, Buchnera aphidicola subsp
MISLFHGLFLSLILFILGLTSLIVRRNILFMLISLEIMMNAAALALVVSGSYWKQSDGQIMYILAITLAASEASIALALLLQLYRRQRTLNINALSEMSG

SEQ ID NO: 74151 - DNA, 303 bp, Buchnera aphidicola subsp
  CDS (1)..(303): transl_table=11
atgatacctttgtctcatggattaattttagctttttttttattttcattaggttttgtgtctttagtgatgcataagaatatactgtttatgttgattagtttagaaattatgattaattcagctgcgttagcattggtagtagttgggaattattggaatcaagtagatggtcaaattatgtatattttaattttgactttgggggcatctgaatcgtcgataggattagcgctactaattcagtgttataggcattttaaaacattaaatattgataaattaagtgagatgaatggatga

SEQ ID NO: 74152 - protein, 100 aa, Buchnera aphidicola subsp
MIPLSHGLILAFFLFSLGFVSLVMHKNILFMLISLEIMINSAALALVVVGNYWNQVDGQIMYILILTLGASESSIGLALLIQCYRHFKTLNIDKLSEMNG

SEQ ID NO: 74153 - DNA, 303 bp, Escherichia coli O157
  CDS (1)..(303): transl_table=11
atgatccccttacaacatggactgatcctcgcggcaatcttattcgttcttggcttaaccggtctggttatccgtcgcaatctgctgtttatgctgattggtctggaaatcatgattaacgcttccgcgctggcctttgtggtcgccggaagttactggggccagaccgacggtcaggtgatgtacattctcgccatcagcctcgcggcggcagaagcgagtatcggccttgcgctgctgctgcaacttcaccgtcgtcgccagaacctgaacatcgattcagtaagtgagatgcgcggatga

SEQ ID NO: 74154 - protein, 100 aa, Escherichia coli O157
MIPLQHGLILAAILFVLGLTGLVIRRNLLFMLIGLEIMINASALAFVVAGSYWGQTDGQVMYILAISLAAAEASIGLALLLQLHRRRQNLNIDSVSEMRG

SEQ ID NO: 74155 - DNA, 333 bp, Rickettsia conorii
  CDS (1)..(333): transl_table=11
gtgttgagaatattaaatatgaatgaatatatttcgcttaatcattatttaatcttaagcagcttagtttttactatcggaatgtttggattatttatgcatcgcaaaaatattatcaatatattaatgtctattgagttaatgctgcttgcagttaacataaattttgttgcattttccatatatatgcaagaattatcgggacaaatttttagtattataatcttaaccgtagcagctgccgaaacctcaatcgggcttgcaatattactaatatatttccgtaataaaggctccattgaaattactgacattaatcagatgtggggataa

SEQ ID NO: 74156 - protein, 110 aa, Rickettsia conorii
MLRILNMNEYISLNHYLILSSLVFTIGMFGLFMHRKNIINILMSIELMLLAVNINFVAFSIYMQELSGQIFSIIILTVAAAETSIGLAILLIYFRNKGSIEITDINQMWG

SEQ ID NO: 74157 - DNA, 333 bp, Rickettsia typhi
  CDS (1)..(333): transl_table=11
gtgttgaaaatattaaatatgaatgaatatatttcgcttaatcattatttaattttaagcagcttagtttttactattgggatgtttggattatttatgcatcgcaaaaatattatcaatatactaatgtctattgagttaatgttacttgctgttaacataaattttgttgcgttttctgtatatatgcaagaattatcgggacaaatttttagtattataatcttaaccgtcgcagctgcagaaaccgcaataggacttgcaatattactaatatattttcgcaataaaggctcaattaaaattaccgacattaataagatgaggggataa

SEQ ID NO: 74158 - protein, 110 aa, Rickettsia typhi
MLKILNMNEYISLNHYLILSSLVFTIGMFGLFMHRKNIINILMSIELMLLAVNINFVAFSVYMQELSGQIFSIIILTVAAAETAIGLAILLIYFRNKGSIKITDINKMRG

SEQ ID NO: 74159 - DNA, 21 bp, Artificial sequence
  primer
atgaatgcaattcccatggag

SEQ ID NO: 74160 - DNA, 20 bp, Artificial sequence
  primer
tcatccgcgcatctcgctgg

SEQ ID NO: 74161 - protein, 88 aa, Artificial sequence
  consensus sequence
  Variant (2)..(5): Xaa in position 2 to 5 is any amino acid
  Variant (6)..(6): Xaa in position 6 is any or no amino acid
  Variant (9)..(10): Xaa in position 9 to 10 is any amino acid
  Variant (12)..(13): Xaa in position 12 to 13 is any amino acid
  Variant (15)..(18): Xaa in position 15 to 18 is any amino acid
  Variant (20)..(20): Xaa in position 20 is any amino acid
  Variant (22)..(25): Xaa in position 22 to 25 is any amino acid
  Variant (27)..(29): Xaa in position 27 to 29 is any amino acid
  Variant (31)..(32): Xaa in position 31 to 32 is any amino acid
  Variant (34)..(49): Xaa in position 34 to 49 is any amino acid
  Variant (50)..(58): Xaa in position 50 to 58 is any or no amino acid
  Variant (60)..(68): Xaa in position 60 to 68 is any amino acid
  Variant (69)..(71): Xaa in position 69 to 71 is any or no amino acid
  Variant (76)..(78): Xaa in position 76 to 78 is any amino acid
  Variant (83)..(87): Xaa in position 83 to 87 is any amino acid
LXXXXXLFXXGXXGXXXXRXNXXXXLXXXEXXLXXXXXXXXXXXXXXXXXXXXXXXXXGXXXXXXXXXXXXAAAEXXXGLAIXXXXXR

SEQ ID NO: 74162 - protein, 22 aa, Artificial sequence
  protein pattern
  Variant (2)..(10): Xaa in position 2 to 10 is any amino acid
  Variant (11)..(11): Xaa in position 11 is Ile, Leu or Val
  Variant (12)..(12): Xaa in position 12 is Ala, Ser or Thr
  Variant (16)..(16): Xaa in position 16 is any amino acid
  Variant (17)..(17): Xaa in position 17 is Ala, Cys, Gly, Ser, Thr or Val
  Variant (18)..(18): Xaa in position 18 is any amino acid
  Variant (19)..(19): Xaa in position 19 is Ala, Gly or Ile
  Variant (20)..(20): Xaa in position 20 is any amino acid
  Variant (21)..(21): Xaa in position 21 is Ala, Gly, Ser or Thr
  Variant (22)..(22): Xaa in position 22 is Ile, Leu or Val
GXXXXXXXXXXXAAEXXXXXXX

SEQ ID NO: 74163 - DNA, 1341 bp, Azotobacter vinelandii
  CDS (1)..(1341): transl_table=11
atgctcaagcctcagcaactgcttgccgaccgtctggccggcgtcgaggaggtcgaatgcatcactcccgacctcaatggggtgcctcgtggcaaggtaatgactctcaggggctttctagaggggcagcgcctgcaactggcgcgcggggttctgcttcagtgcatcatgggcggctatccgccaacccgtttttatggcggtgacgatggcgatctgctcctcgttcccgacctgcggcagctccatcttattccctggtgcgaacggccccgggctctggcggtctgcgatgccgaagagttgaagggtgaaggctcgccattgtcgacccgcgcgctgctcaagcgcatagtggccgcttatgcccgccaaggctggcagccggtggtggccaccgagctggagttcttcgtcttcgccccgcatggtgatccacagatgccgtttcagccgccgattgggctcgatggtaggcgcgaagcgggtttttcggccttcagcatgtcttccagcaacggcttgcggcccttcttcgacgatgtctatcgctgcatggcggcgctcgggctgccgcgtgacacattcatgcacgaaatggggatcagccagttcgagatcaatctgctgcatggcgaccccctgcaactggccgaccagacttttctgttcaagcatctgctcagagaggtggcgctccggcacgggctgacggtggtctgcatggccaagccactggccggggttcccggtagttccatgcatgtccatcagagcgtggtggagcaggaaagcggcaggaacctgttcagcgatggggacggcgaaccgactccggccttccgtcatttcatcggcggtcagcaacgggcgctggccgatctcaccctgttgttcgctccgcatgtcaactctttccagcggctgtaccacccctatgcttcgccgaacaacgcctgctggtcttacgacaatcgggcggcggggctgcgcattccggccagcccggcggtcgcgcggcgggtcgagaaccggctgccgggcgcggatgccaatccttatctggccattgccgccagtctggccgccggtctgttcggaatgctgcagcaggtggagccgagcgcgccgctgcagggcgaattccaggtaccggaaagcctgatcctgccgagcagcatgccggtcgcgctggctcggctcgagcatagccggctggcgcgggagttgttcggcgaggaattcatcgagggctatatcgccagcaagcgactggagctgatggattttctcgacgagatcagcccttgggagcggcgcattctggcaggccaggtctga

SEQ ID NO: 74164 - protein, 446 aa, Azotobacter vinelandii
MLKPQQLLADRLAGVEEVECITPDLNGVPRGKVMTLRGFLEGQRLQLARGVLLQCIMGGYPPTRFYGGDDGDLLLVPDLRQLHLIPWCERPRALAVCDAEELKGEGSPLSTRALLKRIVAAYARQGWQPVVATELEFFVFAPHGDPQMPFQPPIGLDGRREAGFSAFSMSSSNGLRPFFDDVYRCMAALGLPRDTFMHEMGISQFEINLLHGDPLQLADQTFLFKHLLREVALRHGLTVVCMAKPLAGVPGSSMHVHQSVVEQESGRNLFSDGDGEPTPAFRHFIGGQQRALADLTLLFAPHVNSFQRLYHPYASPNNACWSYDNRAAGLRIPASPAVARRVENRLPGADANPYLAIAASLAAGLFGMLQQVEPSAPLQGEFQVPESLILPSSMPVALARLEHSRLARELFGEEFIEGYIASKRLELMDFLDEISPWERRILAGQV

SEQ ID NO: 74165 - DNA, 1422 bp, Klebsiella pneumoniae subsp. pneumoniae MGH 78578; identical to SEQ ID NO: 32039
  CDS (1)..(1422): transl_table=11

SEQ ID NO: 74166 - protein, 473 aa, Klebsiella pneumoniae subsp. pneumoniae MGH 78578; identical to SEQ ID NO: 32040

SEQ ID NO: 74167 - DNA, 1404 bp, Xanthobacter autotrophicus Py2; identical to SEQ ID NO: 32041
  CDS (1)..(1404): transl_table=11

SEQ ID NO: 74168 - protein, 467 aa, Xanthobacter autotrophicus Py2; identical to SEQ ID NO: 32042

SEQ ID NO: 74169 - DNA, 1437 bp, Mesorhizobium loti MAFF303099
  CDS (1)..(1437): transl_table=11
atgatgccgcctgcaaaaaaggaagtccgtccgtcgagccgcggaggacgggcgcgtacgcctgccttcgtgaagaacctgcgtggtgtgaagaactggaaggaagtcagcgagtggctggaatggcgcggcatcgaggacatcgaatgcatcacgcctgatcaggcgggcgtggcccgcggcaagatgatgccgtcgaaaaaattcacctccaacacctcgctggcgctgccttcggccgttttcatgacgacgatttccggcggctatcccgaagacggcaacggcttccactatcccgaggacgacggcgacctcaagctgatgccggacctgtcgacgctgacagtggtgccctgggaagaagacccgacggccgccgtcatctgcgacctcgtccaccaggacggccgctcggtagaattcacgccgcgcaatgtgttgaagcgcgtgcttgccgcctatgacaagctcgggctgaggccggtggtggcgcccgagatcgagttctacctggtgcgcaagaatccggacccggactatccgctcaccccgcccgtcggtcgctcgggccgtgcgatcggcggcggcgccggctattcgatcgccggcgtcaacgagttcgacgaactgatcgacgacatctaccacttctccgaaagccagggcctggaaatcgacacgctcatccatgaagagggcgccggccagctcgagatcaatctgcgccacggcgacccgatcgagctcgccgaccaggtgttcatgttcaagcgcaccatccgtgaagccgcgctcaagcacgaaatctacgccaccttcatggccaagccgatccagggccagccgggttcggccatgcatatccaccagtcgatcatcgacaagaagaccggcaagaatatcttctcggccgaggacggctcggagaccgaggcgttcttccatttcatcggcggcatgcagaaacacgtgcctaacgcgctggtgatgttcgcgccctatgtcaattcctaccggcggctgacgcaggcggcctcggctccggtcaacaacaaatggggctatgacaaccgcaccacggcgttccgtgtgccgcgttcggatccggcggcgcggcgtgtcgaaaaccgcatcccgtcctccgatgccaatccctacctggcgctggcggcttcgcttgcctgcgggctgatcggcatcaccaggaagatcaaggccgaaccgccggtcctgacgaccgccaatgcggacgagatcgacctgccgcgcagcctgctcgaagccgtcgacctgttcgaaggcgacgaggaactctgcgcgctgctgggcaaatccttcgccgccacctatgcggcgatcaagcgggcggaattcgagaccttcatggaagtgatcagcccgtgggagcgggagtaccttctgctcaacgtgtga

SEQ ID NO: 74170 - protein, 478 aa, Mesorhizobium loti MAFF303099
MMPPAKKEVRPSSRGGRARTPAFVKNLRGVKNWKEVSEWLEWRGIEDIECITPDQAGVARGKMMPSKKFTSNTSLALPSAVFMTTISGGYPEDGNGFHYPEDDGDLKLMPDLSTLTVVPWEEDPTAAVICDLVHQDGRSVEFTPRNVLKRVLAAYDKLGLRPVVAPEIEFYLVRKNPDPDYPLTPPVGRSGRAIGGGAGYSIAGVNEFDELIDDIYHFSESQGLEIDTLIHEEGAGQLEINLRHGDPIELADQVFMFKRTIREAALKHEIYATFMAKPIQGQPGSAMHIHQSIIDKKTGKNIFSAEDGSETEAFFHFIGGMQKHVPNALVMFAPYVNSYRRLTQAASAPVNNKWGYDNRTTAFRVPRSDPAARRVENRIPSSDANPYLALAASLACGLIGITRKIKAEPPVLTTANADEIDLPRSLLEAVDLFEGDEELCALLGKSFAATYAAIKRAEFETFMEVISPWEREYLLLNV

SEQ ID NO: 74171 - DNA, 1242 bp, Pseudomonas aeruginosa PAO1
  CDS (1)..(1242): transl_table=11
atgaccggcgagggcttcctcagcggccggcgcctgcagctcgcccgtggcgtgctgctgcaatgcatcatgggcggctacccgccggcgcgtttctatggcagcgacgatggcgacctggcgctggtcgccgagccgacccaggtccatcgcctgccctggagcaacactccgcgcgccttcgccatctgcgatgcgcaggaactggatggcacgccgtccgggctgtccacccgcggcctgctcaagcaggtggtggcgcgctacgccgcccacggcttgcaaccggtggtggccaccgaactggagttcttcgtcttcgccccgaacaccgatcccaacgagccgttccaggccccgctggggccggatggccggcgcgagctgggctattcggccttcagcgtgtcttccaacaacggcctgcggccgttcttcgaggacgtctaccgctgcatggatgcgctgggcctggtgcgcgacaccttcatgcacgagatgggcaccagccagttcgagatcaacttcctgcatggcgacccggtcctgctggccgaccagaccttcctgttcaagcacctgctcaaggaggtcgcgctcaagcacggcctgatcgtggtgtgcatggccaagccgctggcgaagacgccgggcagctcgatgcacatccaccagagcatcgtcgaactggacggcgggcgaaacatcttcagcgaagccgatggcgagccttccgccgcgttccgccacttcatcggcggccagcaggcctgcctggcggacttcacgcccttcttcgcgccgcatgtgaactccttccagcgcctctgccatccctacgcttcgccgaacaacgcctgctggtcccacgacaaccgcgccgccggcctacgcatcccggccagcggagcctccgcgcggcgcgtcgagaatcgcctgccgggcgccgacgccaacccttacctggccatcaccgccagcctggccgccggtctctacggcctggagcacgaactggagccgagcccggcgatccagggtgagttcgaggtaccggaggagttgaccctgccttgcaccatgtacgacgccctgcggcgcctgaaaggcagcgcgctggcgcgcgaactgttcggcagcgagttcgtcgaaggctacgtggcgaccaagagcatggagctgaccagcttcttcgacgagatcagcccctgggaacgtcgcgtcctggcagcccaggcctga

SEQ ID NO: 74172 - protein, 413 aa, Pseudomonas aeruginosa PAO1
MTGEGFLSGRRLQLARGVLLQCIMGGYPPARFYGSDDGDLALVAEPTQVHRLPWSNTPRAFAICDAQELDGTPSGLSTRGLLKQVVARYAAHGLQPVVATELEFFVFAPNTDPNEPFQAPLGPDGRRELGYSAFSVSSNNGLRPFFEDVYRCMDALGLVRDTFMHEMGTSQFEINFLHGDPVLLADQTFLFKHLLKEVALKHGLIVVCMAKPLAKTPGSSMHIHQSIVELDGGRNIFSEADGEPSAAFRHFIGGQQACLADFTPFFAPHVNSFQRLCHPYASPNNACWSHDNRAAGLRIPASGASARRVENRLPGADANPYLAITASLAAGLYGLEHELEPSPAIQGEFEVPEELTLPCTMYDALRRLKGSALARELFGSEFVEGYVATKSMELTSFFDEISPWERRVLAAQA

SEQ ID NO: 74173 - DNA, 1497 bp, Escherichia coli O157:H7 EDL933; identical to SEQ ID NO: 32045
  CDS (1)..(1497): transl_table=11

SEQ ID NO: 74174 - protein, 498 aa, Escherichia coli O157:H7 EDL933; identical to SEQ ID NO: 32046

SEQ ID NO: 74175 - DNA, 1410 bp, Escherichia coli O157:H7 EDL933; identical to SEQ ID NO: 32047
  CDS (1)..(1410): transl_table=11
  misc_feature (664)..(664): r is g or a

SEQ ID NO: 74176 - protein, 469 aa, Escherichia coli O157:H7 EDL933; identical to SEQ ID NO: 32048
  misc_feature (222)..(222): The Xaa at location 222 stands for Met, or Val.

SEQ ID NO: 74177 - DNA, 1350 bp, Deinococcus radiodurans R1
  CDS (1)..(1350): transl_table=11
atgacgtccgtctcgcctacccccgacggcatcctgcggcagttgcaggacgccgaggtcagctttttgcgcctgcaattcaccgacatcctggggcacaccaaaaacgtggaggtgccgcgcacgcagtttgccaaggcgctgagcggcgacgtgaccttcgacggcagcgcggtgcagggctttacgcgggtggaggagtcggacatgctgctctcgcccgacctgtccacctttctggtctacccgcagtttgcccgcgacgaccgcgagcggggccgcgtcgcccggctgatctgcgacgtgacgctgcccgacggcaccccctttgaaggcgacccccgccgggtgctgcgagcgcaggtggaacgggcgcaggcgctcgggctggagatgtacgtgggcaccgaacccgagtttttcctgtttgaacgtggccccaacggcgcggcgaccaccgtgacccatgaccgcgccggatacttcgacctcgcgccgattgaccggggcgagcgcattcgccgcgagattgccagccgcctggtggaaatgggctttgaaatcgaagcctcgcaccacgaagtcgcgccggggcagcacgagattgatttccgctacgcccccgcgctcgaaaccgccgaccgtatcgccactttcaagttcgtggtcaagcgaattgcgctcgaacacggcctgctcgccagctttctgcccaagccgattgccggggtcagcggcagtgggatgcactgtcacctcagcctcttcaaggacgggcaaaacgtctttgatgacccgggcggcgaacatggcctctcggacaccgcgcaccagttcgtcgccgggctgctcgaccacgccgagggcatgacggccatcaccaacccgctcgtcaacagctacaagcggctggtgccgggcttcgaggcccccgtcaacatcgcctggagcacgtccaaccgctcagcgctggtccgcattcccgccaagcgcggcccgtccacccgcgccgaactgcggatgcccgacccgagttgcaacccgtacctcgcgctcgccgccatgctcgccgctgggctcgacggcattgagcggcagttggagccgccgcccgccattcagcgcaacattttccgcatgacggtgcgtgaaaagcgccaccaccgcgtcaaagagctgcccggcgacctgcgcgaggcggtggacgagctggcgaaggacgaagtgattgccgccgcgctgggggaacacgtgatggagcattacgtaacggcgaagcgggcggagtggcgggagtacagttcggcggtgcacgcctgggagctggagcggtatttggatttggtgtag

SEQ ID NO: 74178 - protein, 449 aa, Deinococcus radiodurans R1
MTSVSPTPDGILRQLQDAEVSFLRLQFTDILGHTKNVEVPRTQFAKALSGDVTFDGSAVQGFTRVEESDMLLSPDLSTFLVYPQFARDDRERGRVARLICDVTLPDGTPFEGDPRRVLRAQVERAQALGLEMYVGTEPEFFLFERGPNGAATTVTHDRAGYFDLAPIDRGERIRREIASRLVEMGFEIEASHHEVAPGQHEIDFRYAPALETADRIATFKFVVKRIALEHGLLASFLPKPIAGVSGSGMHCHLSLFKDGQNVFDDPGGEHGLSDTAHQFVAGLLDHAEGMTAITNPLVNSYKRLVPGFEAPVNIAWSTSNRSALVRIPAKRGPSTRAELRMPDPSCNPYLALAAMLAAGLDGIERQLEPPPAIQRNIFRMTVREKRHHRVKELPGDLREAVDELAKDEVIAAALGEHVMEHYVTAKRAEWREYSSAVHAWELERYLDLV

SEQ ID NO: 74179 - DNA, 1359 bp, Agrobacterium tumefaciens str. C58; identical to SEQ ID NO: 32051
  CDS (1)..(1359): transl_table=11

SEQ ID NO: 74180 - protein, 452 aa, Agrobacterium tumefaciens str. C58; identical to SEQ ID NO: 32052

SEQ ID NO: 74181 - DNA, 1440 bp, Agrobacterium tumefaciens str. C58; identical to SEQ ID NO: 32053
  CDS (1)..(1440): transl_table=11

SEQ ID NO: 74182 - protein, 479 aa, Agrobacterium tumefaciens str. C58; identical to SEQ ID NO: 32054

SEQ ID NO: 74183 - DNA, 1437 bp, Sinorhizobium meliloti 1021; identical to SEQ ID NO: 32059
  CDS (1)..(1437): transl_table=11

SEQ ID NO: 74184 - protein, 478 aa, Sinorhizobium meliloti 1021; identical to SEQ ID NO: 32060

SEQ ID NO: 74185 - DNA, 1398 bp, Caulobacter crescentus CB15; identical to SEQ ID NO: 32061
  CDS (1)..(1398): transl_table=11

SEQ ID NO: 74186 - protein, 465 aa, Caulobacter crescentus CB15; identical to SEQ ID NO: 32062

SEQ ID NO: 74187 - DNA, 1383 bp, Caulobacter crescentus CB15; identical to SEQ ID NO: 37672
  CDS (1)..(1383): transl_table=11

SEQ ID NO: 74188 - protein, 460 aa, Caulobacter crescentus CB15; identical to SEQ ID NO: 37673

SEQ ID NO: 74189 - DNA, 1383 bp, Agrobacterium tumefaciens str. C58; identical to SEQ ID NO: 32063
  CDS (1)..(1383): transl_table=11

SEQ ID NO: 74190 - protein, 460 aa, Agrobacterium tumefaciens str. C58; identical to SEQ ID NO: 32064

SEQ ID NO: 74191 - DNA, 1395 bp, Agrobacterium tumefaciens str. C58; identical to SEQ ID NO: 32065
  CDS (1)..(1395): transl_table=11

SEQ ID NO: 74192 - protein, 464 aa, Agrobacterium tumefaciens str. C58; identical to SEQ ID NO: 32066

SEQ ID NO: 74193 - DNA, 1410 bp, Agrobacterium tumefaciens str. C58
  CDS (1)..(1410): transl_table=11
atgacgaccgcaaacgatatcttgaagcagatcaaggataacgacatcaagttcgtggacctgcgctttaccgatcccaagggtaagctgcagcacgtcaccatggatgttgtctgtgtggacgaagacatgttcgccgatggcgtcatgttcgacggctcctcgatcgccggctggaaggccatcaacgagtccgacatggtgctgatgcccgatccggccaccgcccacatcgacccgttctttgcccagtctaccctggtcgtcctttgcgacattctcgacccggtttcgggcgaagcctataaccgcgacccgcgcggcaccgcgaagaaagccgaagcctacctcaaggcctctggtatcggcgacaccgttttcgtcggccccgagccggaattcttcgtcttcgacgacgtgaagtacaaggcagacccctacaacaccggcttcaagcttgattcgtccgaactgccgtccaacgacgacacggattacgaaaccggcaacctcggccaccgtccgcgcgtcaagggcggctacttcccggttccgccgatcgacagcctgcaggacatgcgttctgaaatgctgacggttctggccgaaatgggcgtcgtcgttgaaaagcaccaccacgaagtggctgccgcacagcacgagctgggcgtgaagttcgacacgctggtttccagcgccgacaagatgcagatctacaagtacgtcgtgcaccaggtcgccaatgcctatggcaagacggcaaccttcatgccgaagccgatcttcggcgataatggctcgggcatgcacgttcaccagtcgatctggaagggcggcaagccgaccttcgctggcgacgaatatgctggcctgtccgaaaattgcctctactacatcggcggcatcatcaagcatgccaaggcaatcaacgccttcaccaaccctaccaccaactcctacaagcgtctggtgccgggttacgaagcgccggttctgctcgcctactccgcgcgcaaccgctccgcatcgtgccgtattcccttcggctccaacccgaaggcaaagcgcgtcgaagtccgcttcccggacccgacccagaacccctatctcggttttgcggccatgctgatggccggcctcgacggcatcaagaacaagatccaccccggcaagccgatggacaaggacctttacgatcttcctgccaaggaactgaagaagatcccgaccgtctgcggctcgctgcgtgaagcgctggaaagcctcgacaaggatcgcaagttcctgaccgccggcggcgtgttcgacgacgaccagatcgactccttcatcgaactgaagatgcaggaagtcatgcgtttcgaaatgaccccgcatccggtcgaattcgacatgtactactcggcctga

SEQ ID NO: 74194 - protein, 469 aa, Agrobacterium tumefaciens str. C58
MTTANDILKQIKDNDIKFVDLRFTDPKGKLQHVTMDVVCVDEDMFADGVMFDGSSIAGWKAINESDMVLMPDPATAHIDPFFAQSTLVVLCDILDPVSGEAYNRDPRGTAKKAEAYLKASGIGDTVFVGPEPEFFVFDDVKYKADPYNTGFKLDSSELPSNDDTDYETGNLGHRPRVKGGYFPVPPIDSLQDMRSEMLTVLAEMGVVVEKHHHEVAAAQHELGVKFDTLVSSADKMQIYKYVVHQVANAYGKTATFMPKPIFGDNGSGMHVHQSIWKGGKPTFAGDEYAGLSENCLYYIGGIIKHAKAINAFTNPTTNSYKRLVPGYEAPVLLAYSARNRSASCRIPFGSNPKAKRVEVRFPDPTQNPYLGFAAMLMAGLDGIKNKIHPGKPMDKDLYDLPAKELKKIPTVCGSLREALESLDKDRKFLTAGGVFDDDQIDSFIELKMQEVMRFEMTPHPVEFDMYYSA

SEQ ID NO: 74195 - DNA, 1365 bp, Agrobacterium tumefaciens str. C58; identical to SEQ ID NO: 32067
  CDS (1)..(1365): transl_table=11

SEQ ID NO: 74196 - protein, 454 aa, Agrobacterium tumefaciens str. C58; identical to SEQ ID NO: 32068

SEQ ID NO: 74197 - DNA, 1431 bp, Brucella melitensis 16M; identical to SEQ ID NO: 32069
  CDS (1)..(1431): transl_table=11

SEQ ID NO: 74198 - protein, 476 aa, Brucella melitensis 16M; identical to SEQ ID NO: 32070

SEQ ID NO: 74199 - DNA, 1290 bp, Pyrobaculum aerophilum str. IM2
  CDS (1)..(1290): transl_table=11
atgccagatggtttggctgtttggagggtgttgagaggggctggggttaagttagtgaagtttatcgttgtggatatattcggcaggcctagggctgaggtcttgccaatagaggcggctagagaggcctttttagacggcgttgcttacgacggctcttctataccggcttataccactgtgaataaaagcgatttagtggccgtccccgatttaaacgcagtatacgtggagagctggaacggggggaagactgccatagtctttacaaacactgtggacggcggcaagccccacccaatggacccgagaaacgtgttaagacaggcggcggactacgccaagtctagagggtatgcgccagtggtgggggctgaggtggagttctttctagtgagaggcgttccgccagcccctgcggacagcggcgtttatttcgacggctatctccacggggattcctacgcggcggttgaggaaatcctaggccatttagaggcctctggcattggcctatctaagacgcatcacgaagtcgccccgggccagtacgaggtgaacatcccggcgggagacccagtgcaagtggccgaccagatcctagtctttaaaataatggcaaaggccgtggccaagaggaggggcctcaccgccactttcatgccgaagcccttctggggagttaacggctctggcatgcacgtacacgtcagtttttggaaagacggcgttaatctcttcgcctctagaggcgagccgacgcaagagctcaagtgggcagtggcgggggttttagaaaacgccttgcgcaacagcgccttcgtcgcgcccactgtgaacagctacaaaaggctcgtcccacaccacgaggcccccacgagagttgtgtggggacttggaaaccgctctgtcatggtcagaattccctactacggcgggaggataaataggcttgagtacagacacccagacccctctgcaaatccctacttggcctttgcagtaattatcctctcagccctagcgggaattgaaaaaaagagagagcccccgcccccagtggccgaagtggcgtatgagctggaagaggccagggagactccccccaatttaggcgaggcccttaaaatggccagagacggcacgccgctacccgggcaattcctagaggcctacttaaggctaaaagagagggagtgggaagagtacataacggccgagggaagctgggaaaccacatggaataaaataactaaatgggaatacgaaaaatacttagaagaagcctaa

SEQ ID NO: 74200 - protein, 429 aa, Pyrobaculum aerophilum str. IM2
MPDGLAVWRVLRGAGVKLVKFIVVDIFGRPRAEVLPIEAAREAFLDGVAYDGSSIPAYTTVNKSDLVAVPDLNAVYVESWNGGKTAIVFTNTVDGGKPHPMDPRNVLRQAADYAKSRGYAPVVGAEVEFFLVRGVPPAPADSGVYFDGYLHGDSYAAVEEILGHLEASGIGLSKTHHEVAPGQYEVNIPAGDPVQVADQILVFKIMAKAVAKRRGLTATFMPKPFWGVNGSGMHVHVSFWKDGVNLFASRGEPTQELKWAVAGVLENALRNSAFVAPTVNSYKRLVPHHEAPTRVVWGLGNRSVMVRIPYYGGRINRLEYRHPDPSANPYLAFAVIILSALAGIEKKREPPPPVAEVAYELEEARETPPNLGEALKMARDGTPLPGQFLEAYLRLKEREWEEYITAEGSWETTWNKITKWEYEKYLEEA

SEQ ID NO: 74201 - DNA, 1341 bp, Corynebacterium glutamicum ATCC 13032; identical to SEQ ID NO: 32073
  CDS (1)..(1341): transl_table=11

SEQ ID NO: 74202 - protein, 446 aa, Corynebacterium glutamicum ATCC 13032; identical to SEQ ID NO: 32074

SEQ ID NO: 74203 - DNA, 1389 bp, Streptomyces coelicolor A3(2); identical to SEQ ID NO: 32075
  CDS (1)..(1389): transl_table=11

SEQ ID NO: 74204 - protein, 462 aa, Streptomyces coelicolor A3(2); identical to SEQ ID NO: 32076

SEQ ID NO: 74205 - DNA, 1386 bp, Xanthomonas campestris pv. campestris str. ATCC 33913; identical to SEQ ID NO: 32081
  CDS (1)..(1386): transl_table=11

SEQ ID NO: 74206 - protein, 461 aa, Xanthomonas campestris pv. campestris str. ATCC 33913; identical to SEQ ID NO: 32082

SEQ ID NO: 74207 - DNA, 1380 bp, Xanthomonas campestris pv. campestris str. ATCC 33913; identical to SEQ ID NO: 37678
  CDS (1)..(1380): transl_table=11

SEQ ID NO: 74208 - protein, 459 aa, Xanthomonas campestris pv. campestris str. ATCC 33913; identical to SEQ ID NO: 37679

SEQ ID NO: 74209 - DNA, 1386 bp, Xanthomonas axonopodis pv. citri str. 306; identical to SEQ ID NO: 32083
  CDS (1)..(1386): transl_table=11

SEQ ID NO: 74210 - protein, 461 aa, Xanthomonas axonopodis pv. citri str. 306; identical to SEQ ID NO: 32084

SEQ ID NO: 74211 - DNA, 1380 bp, Xanthomonas axonopodis pv. citri str. 306; identical to SEQ ID NO: 37680
  CDS (1)..(1380): transl_table=11

SEQ ID NO: 74212 - protein, 459 aa, Xanthomonas axonopodis pv. citri str. 306; identical to SEQ ID NO: 37681

SEQ ID NO: 74213 - DNA, 1368 bp, Brucella suis 1330
  CDS (1)..(1368): transl_table=11
atggccggacagttgacttttgacgaattgaagaaggcagtcgcggaaggcaggatcgacacggtgctggcctgcatcgtggacatgcagggccgcctgattggaaagcgcttctacggacagtttttcgtggaatccggttatgacgaaacccacggctgcaattatcttctggccgacgatatcgatatggaacccgtaccgggctatgaggcggcgggttgggacaaaggctatggcgatttcgtcatgaagccggatctctccacgctgcgccttgcgccgtggctggaaaagacggccattgtgctgtgcgatgtactggaccaccatcatgacgatctttcccattcgccgcgcgccgtcctgaaaaaacaggtgcagcgcctgcacgagcgcggttatcgcgcttatttcgcatccgagcttgaattctacattttcgatgaaacctataaatcggcgcgggcaaaacgctggcatgagatggaaaccgcctcgccttacgtgcaggattatgtgatccacctcaccaccagggaggagccggtcctgcgcgccatgcgcaaccatctggccgatgcgggcattccggtggaaaattcaaaaggcgaatgggggccgggccagcaggagctgaacgtgcgctattgcaaggcgcttgaaatggccgatcgccacgtcatcatgaaaaacgcgatgaaggagattgccgaggcgcatggcaagtgcatcaccttcatggcgaagtatgattatgcaagggctggcagttcgagccatgtgcacaattccatctggagtgcagatggcaaggaacctctgttcttcgatcccaaagccccctacaccatgacaccgctgatgcgctcatgggtggccggccagatcaaatatgcgaccgattacacctattttctggcgccttacatcaattcctacaagcggtttcaggcgggcaccttcgcccccaccaagatcatgtggagccaggacaaccgcacagccggttttcgcctttgcggcgaaggtaccaagggcattcgcatcgaatgccgcatcggcggcgcggatatcaatccctatctggcctttgcagcgctcatcgccgccggcctgaaaggcgtggatgaaaagctggaactggacgaaccttttgtgggcgatgcctatagcgcggtgaggctgaaggaaattccttacacgctgcgcgaggcggctgcggcgctcaaaggttccgctttcctgaaagaagccttcggcgaggatgtcgtgaaccattacacccataccgcccattgggagcagatcgaatatgaccgccgcgtgaccgactgggagctctaccgcggatttgaacgctactga

SEQ ID NO: 74214 - protein, 455 aa, Brucella suis 1330
MAGQLTFDELKKAVAEGRIDTVLACIVDMQGRLIGKRFYGQFFVESGYDETHGCNYLLADDIDMEPVPGYEAAGWDKGYGDFVMKPDLSTLRLAPWLEKTAIVLCDVLDHHHDDLSHSPRAVLKKQVQRLHERGYRAYFASELEFYIFDETYKSARAKRWHEMETASPYVQDYVIHLTTREEPVLRAMRNHLADAGIPVENSKGEWGPGQQELNVRYCKALEMADRHVIMKNAMKEIAEAHGKCITFMAKYDYARAGSSSHVHNSIWSADGKEPLFFDPKAPYTMTPLMRSWVAGQIKYATDYTYFLAPYINSYKRFQAGTFAPTKIMWSQDNRTAGFRLCGEGTKGIRIECRIGGADINPYLAFAALIAAGLKGVDEKLELDEPFVGDAYSAVRLKEIPYTLREAAAALKGSAFLKEAFGEDVVNHYTHTAHWEQIEYDRRVTDWELYRGFERY

SEQ ID NO: 74215 - DNA, 1347 bp, Pseudomonas putida KT2440; identical to SEQ ID NO: 32091
  CDS (1)..(1347): transl_table=11

SEQ ID NO: 74216 - protein, 448 aa, Pseudomonas putida KT2440; identical to SEQ ID NO: 32092

SEQ ID NO: 74217 - DNA, 1359 bp, Pseudomonas putida KT2440; identical to SEQ ID NO: 32093
  CDS (1)..(1359): transl_table=11

SEQ ID NO: 74218 - protein, 452 aa, Pseudomonas putida KT2440; identical to SEQ ID NO: 32094

SEQ ID NO: 74219 - DNA, 1242 bp, Pseudomonas putida KT2440
  CDS (1)..(1242): transl_table=11
atgaccgccgaaggcttcctcgaaggccgtcgtctgcagatggcccggggcgtgctgctgcaatgcatcatgggcggttatccaccagcgaaattctacggcagtgacgacggcgacctggcactggtggccgaacccagtcaggtccaccgcctgccctggagcgatgacggccgcgccttggccatctgtgatgccaacgagctggatggccggccctcggcactgtccacacggggccagctgaaggccgtgatagcccgctatgcggcactgggcctggcgccggtagtggcaaccgagctggagttcttcgtctttgcccccaacaccgacccgcagcaaccgttcctgccgcctgtaggcagcgatggccgccgcgagctgggccattcggcgttcagtgtcagttccaacaacggcctgcgcccgttcttcaaggaggtgtaccactgcatggccgcgctcggcctgccacgtgacaccttcatgcacgaaatgggtgtcagccagttcgagatcaacctgctgcacggcgacccgctgctgttggccgaccagaccttcctgttcaagcacctgctcaaggaagtggcgctcaagcacgggctgaccgtggtctgcatggccaagccgctggcgcgtacgcccggcagttccatgcacattcaccagagcctggtcgaggccggcagcggccgtaacgtattcagtgacgagcaaggcctgccgacagaaaccttccaccatttcatcggcgggttgcaggcgtgcatggccgacttcaccgccctgtttgcacccaacgtcaactcctaccagcgcctgtgccacccctatgcctcgccgaacaatgcgtgctggtccgaggacaatcgcgccgctggcttgcgcattccggccagtgcgccggtcgcgcgacgggtggaaaaccgcctgcctggcgccgatgccaacccctacctggccattgcagccagcctggccgccgggctgcatggcatcgagcagcgcttgcagccatcgccggccatccagggcgaattcgaagtgcccgagcacctgagcctgccgtgcacgctgcacgcggcccttgaaaggctcaagcgcagcacgctggcgcgggaactgttcggcagcgagttcatcgaaggctacattgccagcaagacccttgagctgagcgatttcttcgacgagatcacaccgtgggagcgtcgggtcctggcggcacaggcctga

SEQ ID NO: 74220 - protein, 413 aa, Pseudomonas putida KT2440
MTAEGFLEGRRLQMARGVLLQCIMGGYPPAKFYGSDDGDLALVAEPSQVHRLPWSDDGRALAICDANELDGRPSALSTRGQLKAVIARYAALGLAPVVATELEFFVFAPNTDPQQPFLPPVGSDGRRELGHSAFSVSSNNGLRPFFKEVYHCMAALGLPRDTFMHEMGVSQFEINLLHGDPLLLADQTFLFKHLLKEVALKHGLTVVCMAKPLARTPGSSMHIHQSLVEAGSGRNVFSDEQGLPTETFHHFIGGLQACMADFTALFAPNVNSYQRLCHPYASPNNACWSEDNRAAGLRIPASAPVARRVENRLPGADANPYLAIAASLAAGLHGIEQRLQPSPAIQGEFEVPEHLSLPCTLHAALERLKRSTLARELFGSEFIEGYIASKTLELSDFFDEITPWERRVLAAQA

SEQ ID NO: 74221 - DNA, 1365 bp, Pseudomonas putida KT2440; identical to SEQ ID NO: 32095
  CDS (1)..(1365): transl_table=11

SEQ ID NO: 74222 - protein, 454 aa, Pseudomonas putida KT2440; identical to SEQ ID NO: 32096

SEQ ID NO: 74223 - DNA, 1407 bp, Pseudomonas putida KT2440
  CDS (1)..(1407): transl_table=11
atgtcgaagtcggttcaactcatcaaagatcatgacgtcaagtggattgatctgcgtttcacggacaccaaaggcattcagcaccacgtgaccatgccgtcgcgtgatgcgctggacgaagacttcttcgaagtcggcaagatgttcgacggttcctccatcgctggctggaaaggcatcgaagcttccgacatgatcctgatgccggtcgacgaaaccgccgttctggacccgttcaccgaagaaccaaccctgatcatcacctgcgacatcgtcgacccgtcgagcatgcagggctacgaccgcgacccacgcgccatcgccaagcgtgctgaagagtacctgaagagcaccggcatcggtgacaccgtattcgccggtccagagcctgagttcttcatcttcgacgaagtgaagttccactcggacatctccggttcgatgttcaagatcttctccgagcagggctcgtggatgaccggcgctgacgtggaaggcggcaacaaaggccaccgtccaggcgtgaaaggcggctacttcccggttccgccgttcgaccatgaccacgaaatccgtactgccatgtgcaacgccctggaagaaatgggccagaccgttgaagttcaccaccacgaagtggcgactgccggccagaacgaaatcggcgtcaagttcaacaccctggtgaagaaggctgacgaagtacaggcgctgaaatacgtcgtgcacaacgttgccgacgcttacggccgtaccgccaccttcatgccgaagccactgtacggcgacaacggctcgggcatgcacgtgcacatgtcgatctggaaagacggcaagaacaccttctcgggtgaaggctatgccggcctgtccgacaccgccctgtacttcatcggcggtatcatcaagcacggtaaggccctgaacggcttcaccaacccgtcgaccaactcgtacaagcgtctggtcccaggcttcgaagccccggtaatgctggcctactcggctcgcaaccgttccgcctcgatccgtattccttacgttggcagcccgaaagcccgacgtatcgaagcacgcttcccggacccatcggccaacccgtacctggcgttcgcggccctgctgatggctggcctggacggcatccagaacaagatccacccaggcgacgcggccgacaagaacctgtacgacctgccgccagaagaagccaagaacatcccgcaagtgtgcggcagcctgaaagaagctctggaagagctggataaaggccgtgcgttcctgaccaagggcggcgtgttctccgacgacttcatcgatgccttcatcgagctgaagagcgaagaagaaatcaaggtccgtaccttcgtacacccgctggaatacgagctgtactacagctgctga

SEQ ID NO: 74224 - protein, 468 aa, Pseudomonas putida KT2440
MSKSVQLIKDHDVKWIDLRFTDTKGIQHHVTMPSRDALDEDFFEVGKMFDGSSIAGWKGIEASDMILMPVDETAVLDPFTEEPTLIITCDIVDPSSMQGYDRDPRAIAKRAEEYLKSTGIGDTVFAGPEPEFFIFDEVKFHSDISGSMFKIFSEQGSWMTGADVEGGNKGHRPGVKGGYFPVPPFDHDHEIRTAMCNALEEMGQTVEVHHHEVATAGQNEIGVKFNTLVKKADEVQALKYVVHNVADAYGRTATFMPKPLYGDNGSGMHVHMSIWKDGKNTFSGEGYAGLSDTALYFIGGIIKHGKALNGFTNPSTNSYKRLVPGFEAPVMLAYSARNRSASIRIPYVGSPKARRIEARFPDPSANPYLAFAALLMAGLDGIQNKIHPGDAADKNLYDLPPEEAKNIPQVCGSLKEALEELDKGRAFLTKGGVFSDDFIDAFIELKSEEEIKVRTFVHPLEYELYYSC

SEQ ID NO: 74225 - DNA, 1359 bp, Pseudomonas putida KT2440; identical to SEQ ID NO: 32097
  CDS (1)..(1359): transl_table=11

SEQ ID NO: 74226 - protein, 452 aa, Pseudomonas putida KT2440; identical to SEQ ID NO: 32098

SEQ ID NO: 74227 - DNA, 1377 bp, Pseudomonas putida KT2440; identical to SEQ ID NO: 32099
  CDS (1)..(1377): transl_table=11

SEQ ID NO: 74228 - protein, 458 aa, Pseudomonas putida KT2440; identical to SEQ ID NO: 32100

SEQ ID NO: 74229 - DNA, 1383 bp, Pseudomonas putida KT2440; identical to SEQ ID NO: 32101
  CDS (1)..(1383): transl_table=11

SEQ ID NO: 74230 - protein, 460 aa, Pseudomonas putida KT2440; identical to SEQ ID NO: 32102

SEQ ID NO: 74231 - DNA, 1344 bp, Pseudomonas syringae pv. tomato str. DC3000
  CDS (1)..(1344): transl_table=11
atgacacgcaatgacccccattcgctggcgcaactgctgatgggcattgatgaagtggagtgcgtgactccggacttgaacggcgtgccgcgtggcaaggtgatgaccgctgccggctttctggagggcaggcgattgcagcttgcgcggggcgtgttgttgcaatgcatcatgggcggctatccacctgcgcgattttacggcagcgatgacggcgaccttgcgctggtcagcgacccgcagcaggtccaccgcctgccctggagcgagcagcctcgcgccctggccatctgcgatgccgagcaattgaatggtgaacgctgcctgttatcgacacgcggccagctcaagtcggtgatcgcccgctacgccgcgcaggggctggccccggtggttgccaccgaactcgaattttttgtcttcgcggccaaccccgagccgctccagccgtttgtgccgcctctcgggctggacgggcgacgtgagctggggcattcggcgttcagtatcagttccaacaacggtctgcggccgtttttcgccgaggtctatgcctgcatggcggcgctcgggttgccgcgtgacacggtgatgcatgaaatgggtgtcagtcagttcgagatcaatctgttgcatggcgatccgttgctgctggccgaccagacctttctgttcaagcacctgctcaaggaggtcgcgctcaagcacggcctgattgtggtctgcatggccaagccgctcgcgcacaccgcgggcagctcgatgcatattcatcaaagcgtggtggcagccgagtccggacaaaacgtgttcagcgatgcgaacggcgaggccacagacaccttccgccacttcattggcggccagcaggcgtgcatggctgactttaccgcgctgtttgcccctaacgtgaattcctaccagcgcctctaccatccttatgcgtcgcccaataatgcttgctggtcccacgacaatcgcgctgccgggctacgtattccggcaagtgcggcggcggcccgacgggtggaaaatcgtctgccgggcgccgacgcgaacccttatctggccattgccgcaagcctggcggccggtctgcacggcatcgaacagcgcctggagccgacggcgccgatgcagggcgagatccaggtgccgaaagaattatcgctgccttgtaccttgcatgcggctgttgagcgtctgaaaagcagtcagttggccaaggaactgtttggtcatgagttcatcgaaggctacgtcgcatcgaagaccctggaactgaccagttttttcgacgaaataactccctgggaacggcgcgttctggctgcccaggtttaa

SEQ ID NO: 74232 - protein, 447 aa, Pseudomonas syringae pv. tomato str. DC3000
MTRNDPHSLAQLLMGIDEVECVTPDLNGVPRGKVMTAAGFLEGRRLQLARGVLLQCIMGGYPPARFYGSDDGDLALVSDPQQVHRLPWSEQPRALAICDAEQLNGERCLLSTRGQLKSVIARYAAQGLAPVVATELEFFVFAANPEPLQPFVPPLGLDGRRELGHSAFSISSNNGLRPFFAEVYACMAALGLPRDTVMHEMGVSQFEINLLHGDPLLLADQTFLFKHLLKEVALKHGLIVVCMAKPLAHTAGSSMHIHQSVVAAESGQNVFSDANGEATDTFRHFIGGQQACMADFTALFAPNVNSYQRLYHPYASPNNACWSHDNRAAGLRIPASAAAARRVENRLPGADANPYLAIAASLAAGLHGIEQRLEPTAPMQGEIQVPKELSLPCTLHAAVERLKSSQLAKELFGHEFIEGYVASKTLELTSFFDEITPWERRVLAAQV

SEQ ID NO: 74233 - DNA, 1389 bp, Vibrio parahaemolyticus RIMD 2210633; identical to SEQ ID NO: 32109
  CDS (1)..(1389): transl_table=11

SEQ ID NO: 74234 - protein, 462 aa, Vibrio parahaemolyticus RIMD 2210633; identical to SEQ ID NO: 32110

SEQ ID NO: 74235 - DNA, 1365 bp, Streptomyces avermitilis MA-4680
  CDS (1)..(1365): transl_table=11
gtggcagaccgcacaccaccgctcggtgtcgaggagctgcacgccctcgtcgcgggcggcgagatcgacactgtcgtcctcgcgttccccgatatgcaagggcgcctccagggcaagcggttcgccgcgcgcttcttcctcgacgaggtgctggagcacggcacggagggatgcaactacctgctcgccgtcgacaccgacatgaacaccgtcgacggctatgacatgtcctcctgggaccgcgggtacggcgacttcgccatgcatcccgacctgagcacgctgcgccaggtgccgtggaacgcgggcacggcgctgctgatcgccgacctcgcctggaacgacggatcgccggtggtcgccgccccccgccagatcctgcgtcgccagctcgaccggctcgccgccctcggctacaccgcccaggtcggcaccgagctggagttcatcgtcttcaaggacacctacgagcaggcctgggacgccggatacaaggggctcacaccggccaaccagtacaacatcgactactcggtgctcgggacgggacggatcgaacccctgctgcgccgcatccgcaacgagatgcaggccgcgggcctcaccgtcgagtcggccaagggcgagtgcaaccccggccagcacgagatcgtgttccggtacgacgaggccctggtcacctgcgaccagcacgccgtctacaagaccggcgccaaggagatcgccgcccaggagggcgtgtcgatcaccttcatggccaagtacaacgagcgcgagggcaactcctgccacatccacctgtcgctggcggacgcggacggcaccaacgccatggccggcgacggacccggcggcatgtcggacgtcatgcgccacttcctcgccgggcagctcgccgcgctgcgcgacttctcacttctgtacgcgcccaacatcaactcgtacaagcggttccagccgggctccttcgcgccgaccgccgtggcctggggctacgacaaccgcacctgcgcgctgcgggtggtcggccacggccgctcgatgcgcttcgagaaccggctccccggcggtgacgtcaacccgcacctcgccgtcgccggactcgtcgcggccggcctgtacggcatcgagcacaagctggagctgcccgaggcctgcgcgggcaacgcctacgccgccgagtacgagcacgtccccaccaccctgcgcgaggcggccgaactctgggagaacagccccatcgccaaggccgccttcggcgacgacgtggtcgcccactaccgcaacatggcgcgcgtcgaactgaaggccttcgacgccgcggtgaccgactgggagctgcgccgctccttcgaacgcctgtga

SEQ ID NO: 74236 - protein, 454 aa, Streptomyces avermitilis MA-4680
MADRTPPLGVEELHALVAGGEIDTVVLAFPDMQGRLQGKRFAARFFLDEVLEHGTEGCNYLLAVDTDMNTVDGYDMSSWDRGYGDFAMHPDLSTLRQVPWNAGTALLIADLAWNDGSPVVAAPRQILRRQLDRLAALGYTAQVGTELEFIVFKDTYEQAWDAGYKGLTPANQYNIDYSVLGTGRIEPLLRRIRNEMQAAGLTVESAKGECNPGQHEIVFRYDEALVTCDQHAVYKTGAKEIAAQEGVSITFMAKYNEREGNSCHIHLSLADADGTNAMAGDGPGGMSDVMRHFLAGQLAALRDFSLLYAPNINSYKRFQPGSFAPTAVAWGYDNRTCALRVVGHGRSMRFENRLPGGDVNPHLAVAGLVAAGLYGIEHKLELPEACAGNAYAAEYEHVPTTLREAAELWENSPIAKAAFGDDVVAHYRNMARVELKAFDAAVTDWELRRSFERL

SEQ ID NO: 74237 - DNA, 1419 bp, Shigella flexneri 2a str. 2457T; identical to SEQ ID NO: 37700
  CDS (1)..(1419): transl_table=11

SEQ ID NO: 74238 - protein, 472 aa, Shigella flexneri 2a str. 2457T; identical to SEQ ID NO: 37701

SEQ ID NO: 74239 - DNA, 1389 bp, Chromobacterium violaceum ATCC 12472; identical to SEQ ID NO: 32111
  CDS (1)..(1389): transl_table=11

SEQ ID NO: 74240 - protein, 462 aa, Chromobacterium violaceum ATCC 12472; identical to SEQ ID NO: 32112

SEQ ID NO: 74241 - DNA, 1347 bp, Chromobacterium violaceum ATCC 12472
  CDS (1)..(1347): transl_table=11
atgtccgaagcccgcatgcccgcaggccgagccgaatggctgcaacacagcaaggtgcgagacgtcgagctcgcctttgccgatgtccatggttttccccgcggcaagaccctgcccgccgccgccttcatccaagggcagccgctgcgcatcgcgcgcgcggtgccgctgcaaagctgcgtcggcgaattccccgactacagcttttacggcgagcacgatccggacgtcacgctggcgccggactacgacacgctgcggccgatgccctgggccaagactccgcgcgcgatggtgatctgcgactgcgtcgaccacgacggcggcctgtcgccgctagcgccgcgctcggtgctgaagcaagtgctggcgcgctaccgcgcccacggctgggcgccggtggtggcgccggagctcgagttctacctgttcgccgcccacggcgacccggcgcagccattccagccgccccagcttgccagcggccgccgcgaggccggcttcgacgccttcggcttctccgcgctgggcgaactggaggcgttcttcgacgagctgtaccaggcctgcgaaacgctggagatcgccaccgacacctgcgtgcacgagatgggccccagccagttcgagatcaacctcaagcacggcgacgcgctgaagctggccgacgataccttcctgttcaagaccgcgctgaaggaaatcgcccaccgccacggcctcagcgccgtgtgcatggccaagccgctgcccggccagcccggcagctcgatgcacatccaccagagcgtggtggaccgccagggccgcaacgccttcagccgcgccgacggctcggaaagcccggaattcttcggcttcatcgccggcctgcagcgcttcctgcccgaactgatgccgatgttctgtcccaatcccaactcctaccgccgcttcgtcaagggcatggcggcgccggtcaacctcagttgggggctggacaaccgctcggtcggcctcagggtgccggtatccggccccgaggcgcggcgggtggaaaaccgcctgcccggctgcgacgccaatccctatctggcgctggccgccagcctgggcgccggcctcgccggcatagagggtaagctggtgccggacgaggcggtgcacggcaatgtgttcaagcagcaggccgccagcctgccgaccacgctggacgccgcctgcgcggcgatggccgccggctgcgccgaggagctgttcggcgccgacttcagccgcgcctacctggcggtgaaggaggtggagctgaacgactaccatcgccaggtcaccgcctgggaacggcaatatctggggtttctggtctaa

SEQ ID NO: 74242 - protein, 448 aa, Chromobacterium violaceum ATCC 12472
MSEARMPAGRAEWLQHSKVRDVELAFADVHGFPRGKTLPAAAFIQGQPLRIARAVPLQSCVGEFPDYSFYGEHDPDVTLAPDYDTLRPMPWAKTPRAMVICDCVDHDGGLSPLAPRSVLKQVLARYRAHGWAPVVAPELEFYLFAAHGDPAQPFQPPQLASGRREAGFDAFGFSALGELEAFFDELYQACETLEIATDTCVHEMGPSQFEINLKHGDALKLADDTFLFKTALKEIAHRHGLSAVCMAKPLPGQPGSSMHIHQSVVDRQGRNAFSRADGSESPEFFGFIAGLQRFLPELMPMFCPNPNSYRRFVKGMAAPVNLSWGLDNRSVGLRVPVSGPEARRVENRLPGCDANPYLALAASLGAGLAGIEGKLVPDEAVHGNVFKQQAASLPTTLDAACAAMAAGCAEELFGADFSRAYLAVKEVELNDYHRQVTAWERQYLGFLV

SEQ ID NO: 74243 - DNA, 1311 bp, Gloeobacter violaceus PCC 7421; identical to SEQ ID NO: 37704
  CDS (1)..(1311): transl_table=11

SEQ ID NO: 74244 - protein, 436 aa, Gloeobacter violaceus PCC 7421; identical to SEQ ID NO: 37705

SEQ ID NO: 74245 - DNA, 1386 bp, Rhodopseudomonas palustris CGA009; identical to SEQ ID NO: 32117
  CDS (1)..(1386): transl_table=11

SEQ ID NO: 74246 - protein, 461 aa, Rhodopseudomonas palustris CGA009; identical to SEQ ID NO: 32118

SEQ ID NO: 74247 - DNA, 1386 bp, Mycobacterium avium subsp. paratuberculosis K-10
  CDS (1)..(1386): transl_table=11
ctgaccggttccgataccgcgatgctctcgctcgccgcgctggaccgactggtggccgccggcgcgccggaaacgcgggtggacaccgtcatcgtggccttccccgacatgcagggccggctggtcggcaagcggatggacgcgcggctgttcgtcgacgaggcggccgccaccggggtcgagtgttgcggctacctgctggccgtcgacgtcgacatgaacaccgtgggcggctatgcgatctcgggctgggacaccgggtacggcgacctggtgatgcgcccggacctgtccaccctgcgccgcattccctggctgcccgggacggcgctggtgatcgccgacgtggtgggggccgacggcagcccggtcgcggtgtcgccgcgggccgtgctgcgccgccagctcgaccggctggccgggcgggggctgttcgccgacgccgcgacggagctggaattcatggtgttcgacgagccgtaccgccaggcgtgggccagcggctaccgcgggctgaccccggccagtgactacaacatcgactacgcgatctcggcgtcgtcgcgcatggagccgctgctgcgcgacatccggcgcggaatggccggtgcgggactgcgattcgagtccgtgaagggtgaatgcaaccgcggccagcaggagatcggcttccgctacgacgaggcgctgcggacctgcgacaaccacgtcatctacaagaacggggccaaggagatcgccgatcagcacggcaagagcctgacattcatggcgaaatacgatgagcgcgaaggcaacagctgccgcgttcacctttcgctgcgcgacgcccagggcggggcggcgttcgccgaccccagccgcccgcacggcatgtcgacgatgttctgcagcttcctggccggcctgctggccaccatggcagacttcacgctgttctacgcgccgaacatcaactcctacaagcgattcgccgatgagagtttcgcgcccaccgcgctggcctggggattggacaaccgcacctgcgcgctgcgggtggtcggccacggcgcgcacacccgcgtcgagtgccgggttcccggcggcgatgtcaacccgtatctggcggtggcggcgatcgtcgccggcgggctgtacggtatcgagcagggcctggcgctgccggaaccctgcgcgggcaacgcctaccgcgcccgcggcgtcggccggctgccgggcaccctggccgaggcggcggcgctgttcgagcactcggcgctggcgcggcaggtgttcggcgacgacgtcgtcgcgcactacctgaacaacgcccgggtcgagctggcggcgtttcacgccgcggccaccgattgggagaggatgcgtggttttgaacggctctga

SEQ ID NO: 74248 - protein, 461 aa, Mycobacterium avium subsp. paratuberculosis K-10
MTGSDTAMLSLAALDRLVAAGAPETRVDTVIVAFPDMQGRLVGKRMDARLFVDEAAATGVECCGYLLAVDVDMNTVGGYAISGWDTGYGDLVMRPDLSTLRRIPWLPGTALVIADVVGADGSPVAVSPRAVLRRQLDRLAGRGLFADAATELEFMVFDEPYRQAWASGYRGLTPASDYNIDYAISASSRMEPLLRDIRRGMAGAGLRFESVKGECNRGQQEIGFRYDEALRTCDNHVIYKNGAKEIADQHGKSLTFMAKYDEREGNSCRVHLSLRDAQGGAAFADPSRPHGMSTMFCSFLAGLLATMADFTLFYAPNINSYKRFADESFAPTALAWGLDNRTCALRVVGHGAHTRVECRVPGGDVNPYLAVAAIVAGGLYGIEQGLALPEPCAGNAYRARGVGRLPGTLAEAAALFEHSALARQVFGDDVVAHYLNNARVELAAFHAAATDWERMRGFERL

SEQ ID NO: 74249 - DNA, 1347 bp, Strongylocentrotus purpuratus; identical to SEQ ID NO: 32121
  CDS (1)..(1347)

SEQ ID NO: 74250 - protein, 448 aa, Strongylocentrotus purpuratus; identical to SEQ ID NO: 32122

SEQ ID NO: 74251 - DNA, 1548 bp, Strongylocentrotus purpuratus; identical to SEQ ID NO: 32127
  CDS (1)..(1548)

SEQ ID NO: 74252 - protein, 515 aa, Strongylocentrotus purpuratus; identical to SEQ ID NO: 32128

SEQ ID NO: 74253 - DNA, 1341 bp, Strongylocentrotus purpuratus; identical to SEQ ID NO: 32129
  CDS (1)..(1341)

SEQ ID NO: 74254 - protein, 446 aa, Strongylocentrotus purpuratus; identical to SEQ ID NO: 32130

SEQ ID NO: 74255 - DNA, 1446 bp, Magnaporthe grisea 70-15; identical to SEQ ID NO: 32131
  CDS (1)..(1446)

SEQ ID NO: 74256 - protein, 481 aa, Magnaporthe grisea 70-15; identical to SEQ ID NO: 32132

SEQ ID NO: 74257 - DNA, 2073 bp, Gibberella zeae PH-1
  CDS (1)..(2073)
atggcttcctcacaaaccgtcaccgtcgacaatctcgcccaagtcctcgagaatgacaacatggtcaaactcgcaggcgtcgacgtcgacggcatccttcgcggaaagctcgtctccaagaaaaagttcctgtccatcgcagaagccggcttcggtttctgctccgtcatctttggctgggacatgcacgaccgcacatatgtccgcgagctcaagatctcaaatgccgagaacggttaccatgatcttctagcgataccagacctttctacctttaggcgcattccctgggaggacaatgtgccgctgtttttggtcgactttcttgatcctgattcgcaaaagcccatttgcgcttgtccccgtggattggtcaagacacaacttgccaaactcaaggagcacggctacggtgctatggctggtgccgaatatgaattctaccaattcaagtcccccgacccttcatcatcctctcccgccgcctacctccaagacaaccctcctcaccagctccccgctctaacagagggcatgtttggctactctctcacccggccggtgcacaaccaagattactactacgacgtcttcaacacatgcgccaagttttcttgtaatattgagggctggcacaccgagtccggaccaggcgtcttcgaagccgctctcgagtttggcgagattgctcaaatggccgaccgcgctgcgctgttcaagtacgtcgtcaagagcgtcagcacaaagtacggcatcacaccttgcttcatggccaagcccaagcagggtcttcctggaaacagtggacacatgcatgtttccatcgtggacaaggagggcaagaacctctttgcgcgcgagacaaaggatgagaaccccaagtggagagacattgccaatctttccgacatgggccggcacttcctcgctggtattctggtcggtctgccagacatcatgcccattctcgcgcccacaatcaactcctacaagcgtctggtagagaacttctgggcccccgtaactgtctcatggggtctcgagcaccgcgccgcctccatccgtctcatctgtcccaagccctcagcgacacgcttcgaagtccgcgttcccggcgcagacacaaacccgcatctcgtcctctccgcgatcctaggctgcggctggcgcggcgtagagaagaagctcgagattcctactcccccgctcgccatgggccaggacgtcggtggtgacgctgaccagggtgagagattggccaagagtctgaaggaggctacagcgcgattcatggcaaaggacagtatcgcgcgtgaggtgtttggggatgatttcgtggagcactttggtggaacaagagaacatgaagtccgtctgtttgacgaggcagttactgattgtaatgagactagacaaacagagcatgataccaaatatccgccgccattattgcacgattcggaatcttttgtaacacttgttcattccatgattgaggcgatgaaaagctaccaaaatgtctgtctacattgccgaaaatactgcaagcgagcctctagcgtccaacgaacatgggaatccgccgagcgtctcacccgtcccaaagacgccctcatagacggcgtcggcatcgtcgccattctcgcccactcccacagccctaaaatcgtcctccagaaacaattccgcccccccgtaaacaaagtcgtcatcgaagtccccgccggactaatcgatgaaggcgaaacagctgaagagtgcgccgtgcgcgagctccgcgaagaaacaggctacgtcggggttgttactgagacgtcacccatcatgttcaacgatcctggcttctgtaacactaatttaaaaatggtgcatgtcagtattgatatgactctcgaggaaaacaagaatccgaagccgaatttggagccgggggagtttattgagacgtttacggttgagttgaaggatttgtggaaggagtgtgagaggttggaggcgcaggggcatgttattgatgcgagggttgcgacgattgcggaggggattcttcttgctcagaggttcaagctttag

SEQ ID NO: 74258 - protein, 690 aa, Gibberella zeae PH-1
MASSQTVTVDNLAQVLENDNMVKLAGVDVDGILRGKLVSKKKFLSIAEAGFGFCSVIFGWDMHDRTYVRELKISNAENGYHDLLAIPDLSTFRRIPWEDNVPLFLVDFLDPDSQKPICACPRGLVKTQLAKLKEHGYGAMAGAEYEFYQFKSPDPSSSSPAAYLQDNPPHQLPALTEGMFGYSLTRPVHNQDYYYDVFNTCAKFSCNIEGWHTESGPGVFEAALEFGEIAQMADRAALFKYVVKSVSTKYGITPCFMAKPKQGLPGNSGHMHVSIVDKEGKNLFARETKDENPKWRDIANLSDMGRHFLAGILVGLPDIMPILAPTINSYKRLVENFWAPVTVSWGLEHRAASIRLICPKPSATRFEVRVPGADTNPHLVLSAILGCGWRGVEKKLEIPTPPLAMGQDVGGDADQGERLAKSLKEATARFMAKDSIAREVFGDDFVEHFGGTREHEVRLFDEAVTDCNETRQTEHDTKYPPPLLHDSESFVTLVHSMIEAMKSYQNVCLHCRKYCKRASSVQRTWESAERLTRPKDALIDGVGIVAILAHSHSPKIVLQKQFRPPVNKVVIEVPAGLIDEGETAEECAVRELREETGYVGVVTETSPIMFNDPGFCNTNLKMVHVSIDMTLEENKNPKPNLEPGEFIETFTVELKDLWKECERLEAQGHVIDARVATIAEGILLAQRFKL

SEQ ID NO: 74259 - DNA, 1377 bp, Yarrowia lipolytica CLIB122; identical to SEQ ID NO: 32133
  CDS (1)..(1377)

SEQ ID NO: 74260 - protein, 458 aa, Yarrowia lipolytica CLIB122; identical to SEQ ID NO: 32134

SEQ ID NO: 74261 - DNA, 1443 bp, Ustilago maydis 521; identical to SEQ ID NO: 32137
  CDS (1)..(1443)

SEQ ID NO: 74262 - protein, 480 aa, Ustilago maydis 521; identical to SEQ ID NO: 32138

SEQ ID NO: 74263 - DNA, 1449 bp, Cryptococcus neoformans var. neoformans B-3501A; identical to SEQ ID NO: 32139
  CDS (1)..(1449)

SEQ ID NO: 74264 - protein, 482 aa, Cryptococcus neoformans var. neoformans B-3501A; identical to SEQ ID NO: 32140

SEQ ID NO: 74265 - DNA, 1374 bp, Strongylocentrotus purpuratus; identical to SEQ ID NO: 32141
  CDS (1)..(1374)

SEQ ID NO: 74266 - protein, 457 aa, Strongylocentrotus purpuratus; identical to SEQ ID NO: 32142

SEQ ID NO: 74267 - DNA, 1338 bp, Burkholderia vietnamiensis G4; identical to SEQ ID NO: 32149
  CDS (1)..(1338): transl_table=11

SEQ ID NO: 74268 - protein, 445 aa, Burkholderia vietnamiensis G4; identical to SEQ ID NO: 32150

SEQ ID NO: 74269 - DNA, 1440 bp, Bradyrhizobium sp. ORS278
  CDS (1)..(1440): transl_table=11
ttgagtttcgtcgccaagcatcggctgtggaccgctgagcagactgaagccgcggcgcgcatgcgccgtctcgccgaggagcacggcctcaacaccatccgcttctcattccccgaccagcacggcatcctgcgcggcaaggcgctgagcgtcgacgccgcgctgtcctcgctggaagacggttgctcgatcacgacgacgctgctcgccaaggacacctcgcaccggactgtgtttccggtgttcaccgccggcggcggcttcggcatgagcgaaatgcaaggtggcagcgatgcgttgatggtcgccgatcccaccacgttccgcgtgctgccctgggcgcccggcaccggatgggtgctgtgcgatctctatttcgccaatggcgcgcccgtgccgttcgccacccgcaatctgctgcgctccgcgctgtcgacgctcgaccagcgtggttatcagttcaaggcgggcctggaggttgagtgtcacatcttcaaggtcgaagacccgcgcctcgcacccgccgacgccggctctcccggccagcccggcgcgccgccggcggtcagtctgctgacccagggctatcagtatctgaccgagcagcgcttcgatcagatggagccggcgctcgagatcatcaggacccatctcgccgccctcggcctgcctctacgctcgatcgagctggagtacggcccgagccagtgcgagttcgtgctgcagcccggcatcgggatggagccagccgacaccatggtgctgttccgtagcgccgtgaagcagatcgcgcaacgccacggctatcatgctaccttcatgtgccggccgcgcattcccaacgtgatgtcgtcgggctggcatctgcaccagtcgctggtggcgcgtgatggcgggaacgccttcatgagcaatgagcccgaggagctctccgcgctcggccgtcactacatggccggcctgctcgcgcatgcgcgcgcggccgcagtgttctcgacgccgacgatcaacggctaccggcgctaccgctcatattcgctggcgccggaccgcgccatctggggccgcgacaaccgcggcgtcatgatccgcgtgctcggcggtccgggcgacagcgcgacccggctggagaaccggatcggcgagcccgccgccaatccctatctctacatagcctcgcagatcgcagccggcctcgacggcatcgaccgcgcgctcgatcccggcccgtcggccgacgtgccctacgagaccaaggcgagcccgctgccgaaatcgctgcgcgaggccgtcgatgcgctcaagggcgatgccttcttccgccaggcgttcggcgccaccttcatcgattactacaccttcatcaagaacgccgagatcgaacgcttccagcaggaggtgtcggactgggagcagcgcgaatatttcgagatgttttga

SEQ ID NO: 74270 - protein, 479 aa, Bradyrhizobium sp. ORS278
MSFVAKHRLWTAEQTEAAARMRRLAEEHGLNTIRFSFPDQHGILRGKALSVDAALSSLEDGCSITTTLLAKDTSHRTVFPVFTAGGGFGMSEMQGGSDALMVADPTTFRVLPWAPGTGWVLCDLYFANGAPVPFATRNLLRSALSTLDQRGYQFKAGLEVECHIFKVEDPRLAPADAGSPGQPGAPPAVSLLTQGYQYLTEQRFDQMEPALEIIRTHLAALGLPLRSIELEYGPSQCEFVLQPGIGMEPADTMVLFRSAVKQIAQRHGYHATFMCRPRIPNVMSSGWHLHQSLVARDGGNAFMSNEPEELSALGRHYMAGLLAHARAAAVFSTPTINGYRRYRSYSLAPDRAIWGRDNRGVMIRVLGGPGDSATRLENRIGEPAANPYLYIASQIAAGLDGIDRALDPGPSADVPYETKASPLPKSLREAVDALKGDAFFRQAFGATFIDYYTFIKNAEIERFQQEVSDWEQREYFEMF

SEQ ID NO: 74271 - DNA, 1341 bp, Thermus thermophilus HB27
  CDS (1)..(1341): transl_table=11
atgggttacacgaaggccgagattttaaaagcgcttaagggggaaaacgtcaagttcttgcgcctgcagatcacggacatcctgggcgtggtcaagaacgtggaggtgcccgagtcccagtttgagaaggccctggacggggagatcatgtttgacggctcctccattgagggcttcacccggattgaggagtcggacatgctcctaaggcccgactacaacaccttcgtcatcctccccgacctggtggaagacccaaagcggggccgggtggcgcggctcatctgcgacgtctactaccccgacggccgcccctttgaaggggacccccgctacgtcctcaagcggcagattgaaaggctcaagaagctcgggtttgacaacctgtacgccggccccgagcccgagttcttcctcttcctcaggaccccggagggcctgcccaccaccgagacccacgaccgggcgggctactttgacctggcccccatagacaagggggaggaggcgcgccgcgacatggtgaacgccctggtggccatgggctttgagattgaggcggcccaccacgaggtggccccggggcagcacgagattgacttcaagtacgccgacgccctcaccaccgccgacaacatcgccaccttcaagtgggtggtgaagcggatcgccctgaaccacggcctccacgccaccttcctgcccaagcccatccggggcatcaacggcagcggcatgcacacccacctctccctcttcaaggacggggagaacgccttctatgaccccaacgccgagtaccagctctcccagaccgccctccacttcatcgctgggctcctggagcacgccgccgggatggtggccgtcaccaaccccttggtgaactcctacaagcgcctcacccccgggtacgaggcccccaccaacatcgcctggtccgcctccaaccgctccgccatgatccggatcccggcgcgccggggcgtgggcacccgggcggagctcaggatgcccgacccctcctgcaacccctacctggccctggcggtgatggcggccgcgggcgcggacgggattgagcggaagctcctcccgcccccgcccatccagcggaacatctaccagatgaccgtgcgggagcggcgcaagcacaagatccgggagctccccgggaccctccgggaggccctcgaggccctgaggaaggaccccgtgatccgggaggccctgggcgagcacgtctacacccacttcctccaggccaagcagatggagtgggacgactaccgggtcacggtccaccagtgggagctggaccggtacctggccacctactag

SEQ ID NO: 74272 - protein, 446 aa, Thermus thermophilus HB27
MGYTKAEILKALKGENVKFLRLQITDILGVVKNVEVPESQFEKALDGEIMFDGSSIEGFTRIEESDMLLRPDYNTFVILPDLVEDPKRGRVARLICDVYYPDGRPFEGDPRYVLKRQIERLKKLGFDNLYAGPEPEFFLFLRTPEGLPTTETHDRAGYFDLAPIDKGEEARRDMVNALVAMGFEIEAAHHEVAPGQHEIDFKYADALTTADNIATFKWVVKRIALNHGLHATFLPKPIRGINGSGMHTHLSLFKDGENAFYDPNAEYQLSQTALHFIAGLLEHAAGMVAVTNPLVNSYKRLTPGYEAPTNIAWSASNRSAMIRIPARRGVGTRAELRMPDPSCNPYLALAVMAAAGADGIERKLLPPPPIQRNIYQMTVRERRKHKIRELPGTLREALEALRKDPVIREALGEHVYTHFLQAKQMEWDDYRVTVHQWELDRYLATY

SEQ ID NO: 74273 - DNA, 1428 bp, Bartonella henselae str. Houston-1
  CDS (1)..(1428): transl_table=11
atggtggtgaaaaatggtaaacaaataaaaagcaaaggttctaagcttgtttctgattttctcaagaatttacgtggtgtagataattgggagcaagtttcgcagtggcttgcattccgtaatgtagaagatattgaatgtattacgcctgatcaagcgggtgtaccccgtggtaagatgatgctttctaaaaaatttacatcgaaaacatcgttggcattgccttcagccgtttttatggccacaatttcaggagattatcctgaagatggtcatggttttgagtatcctaaaacagatggcgatttacgccttgaacctgacctttctacattaagcattgtgccctgggaagaagcccctactgcacaagtaatttgtgatcttgtctatcaaaatggcgaagttgttgattacacaccacgaaatgttttgcgaacagtgatcgatttttacacacaaatgggtttaaaaccagttgtgtcaccagaaattgaattttatttggtgcagaaaaatccagatcctgattatcctttagttcctccggttggtcgttctggacgttcaattggtggggggcagggctattcgattgctggtgtgaatgaatttgatgatttaattgatgatatttatcatttttcggaagcgcaagggctagaaattgacacgcttattcatgaggaaggagcaggtcagtttgaaattaatttacgtcatggcgatccaattgaattagctgatcaagtttttatgtttaaacgaacgattcgtgaagcggcattgaagcataatatgtatgcaacttttatggctaagcctattcaagggcaaccgggttctgctatgcatattcaccagtcggttgttgataagaaaacgggtatgaatatttttacacagaaagatgggaaggaaagtgtttgttttcgccattttattggtggattacaaaagcatatggctggtgtttttgtgatgcttgctccttatgtgaattcttatagacgtcttgtacctgatctttcggcgcctgttaatttgcgatggggatatgataatcgtactacagcttttcgtgtgcctcgttctgctccaaagggacgccgtgttgagaataggcttccttcttcagatgctaacccttatttagcgcttgcggcttctttagtttgtggtcttatcggattgcagcaaaagcttgaaccagatgagccgacaacaaagaatgtgaatgctgataatattgaattaccgcgtggacttattgaggctgtcaacttatttgaacaagatacagcagtgcgtgctattctaggagaggtatttgtaagtacttatgctgctatcaaacgacaagagtttgaaacttttatggaagtgattagcccgtgggaacgtgaatatcttttgctgaatgtttaa

SEQ ID NO: 74274 - protein, 475 aa, Bartonella henselae str. Houston-1
MVVKNGKQIKSKGSKLVSDFLKNLRGVDNWEQVSQWLAFRNVEDIECITPDQAGVPRGKMMLSKKFTSKTSLALPSAVFMATISGDYPEDGHGFEYPKTDGDLRLEPDLSTLSIVPWEEAPTAQVICDLVYQNGEVVDYTPRNVLRTVIDFYTQMGLKPVVSPEIEFYLVQKNPDPDYPLVPPVGRSGRSIGGGQGYSIAGVNEFDDLIDDIYHFSEAQGLEIDTLIHEEGAGQFEINLRHGDPIELADQVFMFKRTIREAALKHNMYATFMAKPIQGQPGSAMHIHQSVVDKKTGMNIFTQKDGKESVCFRHFIGGLQKHMAGVFVMLAPYVNSYRRLVPDLSAPVNLRWGYDNRTTAFRVPRSAPKGRRVENRLPSSDANPYLALAASLVCGLIGLQQKLEPDEPTTKNVNADNIELPRGLIEAVNLFEQDTAVRAILGEVFVSTYAAIKRQEFETFMEVISPWEREYLLLNV

SEQ ID NO: 74275 - DNA, 1335 bp, Bacillus thuringiensis serovar konkukian str. 97-27
  CDS (1)..(1335): transl_table=11
atggctaggtacacaaaagaagatattttccgtttggcgaaagaagagaatgtaaagtatatccgattacaatttacggaccttttaggagtaattaaaaacgtagaaattccagtgagccaattaacaaaagctcttgataacaaaatgatgtttgatggatcttctattgaaggtttcgtacgtattgaagaatctgatatgtacttatatccagatttagatacttgggtaattttcccttggacagctgaaaaaggtaaagtagctcgattaatctgtgatatttacaatgcagatggcactccatttgaaggagatccacgtaacaatttaaaacgtgtattaaaagaaatggaagctttaggattctcagatttcaatcttggaccagagccagaattcttcctattcaaagtagatgaaaaaggaaatccgacattagaattaaacgataacggtggatacttcgaccttgcgccgatggatctaggggaaaactgtcgtcgtgatatcgttcttgaacttgaagaaatgggctttgaaattgaagcgtctcaccatgaggttgctccagggcaacacgaaattgacttcaaatatgcaaacgcaattcgctcatgtgatgacattcaaacattcaaacttgttgtaaaaacaattgctcgtaaacacggtttacacgcaacatttatgccaaaaccattatacggtgtgaacggttcaggtatgcactgtaacttatcactattcaaaaatggtgagaacgtattcttcgatcaaaacggtgacttacaattaagtgatgatgctcgtcacttcatcgcaggtattttaaaacacgcaccagcatttacagcggtagcaaacccaactgtaaactcttacaagcgtttagtacctggatacgaagctccttgttacgtagcatggtctgcacaaaaccgtagcccattagtacgtatccctgcatctcgtggtattagtacacgcgtagaagtacgtagtgttgacccagctgcaaacccatatttagtaatggctacattattagctgcaggtcttgatggaattaaaaacaaattaactccaccagctgcagtagaccgtaacatctacgtaatgacaaaagaagagcgcgaagaagcaggtatcgttgacttaccagcaacattagcgcaagctttagttacattacaatctaacgaagtaattagtaacgcattaggagatcacttacttgagcacttcattgaagcgaaggaaattgagtgggatatcttccgtacgcaagttcaccaatgggaacgcgatcaatatatgtctctgtactaa

SEQ ID NO: 74276 - protein, 444 aa, Bacillus thuringiensis serovar konkukian str. 97-27
MARYTKEDIFRLAKEENVKYIRLQFTDLLGVIKNVEIPVSQLTKALDNKMMFDGSSIEGFVRIEESDMYLYPDLDTWVIFPWTAEKGKVARLICDIYNADGTPFEGDPRNNLKRVLKEMEALGFSDFNLGPEPEFFLFKVDEKGNPTLELNDNGGYFDLAPMDLGENCRRDIVLELEEMGFEIEASHHEVAPGQHEIDFKYANAIRSCDDIQTFKLVVKTIARKHGLHATFMPKPLYGVNGSGMHCNLSLFKNGENVFFDQNGDLQLSDDARHFIAGILKHAPAFTAVANPTVNSYKRLVPGYEAPCYVAWSAQNRSPLVRIPASRGISTRVEVRSVDPAANPYLVMATLLAAGLDGIKNKLTPPAAVDRNIYVMTKEEREEAGIVDLPATLAQALVTLQSNEVISNALGDHLLEHFIEAKEIEWDIFRTQVHQWERDQYMSLY

SEQ ID NO: 74277 - DNA, 1422 bp, Propionibacterium acnes KPA171202
  CDS (1)..(1422): transl_table=11
atgttcgaaggtcccgacgacctgcttgcctatgtcaagaaggagggcatcgagatgatcgatgtccgcttctgtgaccttatcggtatcatgcagcacttcaccgttcccgcccgagagttcgacaaggaccagtacgagaacggtctggccttcgacggatcctctattcggggtttccagaagattaacgagtcggacatggccctactacccgatccgacgaccgcctggatcgaccccttccgcgagcgcaaaacccttatcgtgaatttcaacgtccatgaccccattacgaaggaggcctacagccgcgatccgcgcaacatcgcgcgtaaggccgaggcttacctcgcatctactgggatcggcgatactgccttcttcgctcctgaagctgagttttacgtcttcgacgacattcgcttcgacacccgtcagaacacctcgtactactccatcgactccgaggctggagcgtggaacactggacgtaccgaggatggcggcaaccgcggatacaaggtgaaatacaagggcggatattttccggtcgccccgaccgaccattttggtgatctgcgtgacgaaatcgtcaccatcatggagcgccttggcatgaaggtcgagcgcgcccaccatgaggtgggcacagcaggtcaagccgagatcaattggcgtttcgacaccctgtcgcgcagcgctgacgatgtcatgaagtttaagtacatcgtcaagaacgtcgcctggcagcacggcaagacggccactttcatgccgaagccgatcttcggagacaacggctcgggcatgcatgttcactcttcgatctggaagggcggcgaacctctgttctttgacgagtccggatacgcccaactctctgacatggcccgctactacatcggcggcatcctcaagcacgcaccgtcgctgctggccttcactaacccctcggccaactcgtaccaccgtctggtgccgggcttcgaggccccagtcaatctggtgtattcacagcgcaaccgctccgcctgcatgcgtatcccgatcaccggcccaaatccgaaggccaagcgcgtcgaattccgttgcccagatccgtctgccaacccttacatggcctttgccgccctgctactggccggcctggacggcatccagaacaagatcgagccgcccgcgccggtcgacaaggacatctacgagctccctcctgaggagcatgccgccatggatcacgtgccgggcaacctgggtgcggtcctcgacaatctcgaggccgaccacgagtttctccttgccggtgacgtgttcaccccggatctcatcgagacctgggtcgaactcaagcgtggcgacctggctgccctgcagcaacgtccgcacccctacgagttcgacctgtactacgacatctga

SEQ ID NO: 74278 - protein, 473 aa, Propionibacterium acnes KPA171202
MFEGPDDLLAYVKKEGIEMIDVRFCDLIGIMQHFTVPAREFDKDQYENGLAFDGSSIRGFQKINESDMALLPDPTTAWIDPFRERKTLIVNFNVHDPITKEAYSRDPRNIARKAEAYLASTGIGDTAFFAPEAEFYVFDDIRFDTRQNTSYYSIDSEAGAWNTGRTEDGGNRGYKVKYKGGYFPVAPTDHFGDLRDEIVTIMERLGMKVERAHHEVGTAGQAEINWRFDTLSRSADDVMKFKYIVKNVAWQHGKTATFMPKPIFGDNGSGMHVHSSIWKGGEPLFFDESGYAQLSDMARYYIGGILKHAPSLLAFTNPSANSYHRLVPGFEAPVNLVYSQRNRSACMRIPITGPNPKAKRVEFRCPDPSANPYMAFAALLLAGLDGIQNKIEPPAPVDKDIYELPPEEHAAMDHVPGNLGAVLDNLEADHEFLLAGDVFTPDLIETWVELKRGDLAALQQRPHPYEFDLYYDI

SEQ ID NO: 74279 - DNA, 1371 bp, Burkholderia mallei ATCC 23344; identical to SEQ ID NO: 32161
  CDS (1)..(1371): transl_table=11

SEQ ID NO: 74280 - protein, 456 aa, Burkholderia mallei ATCC 23344; identical to SEQ ID NO: 32162

SEQ ID NO: 74281 - DNA, 1407 bp, Anaplasma marginale str. St. Maries
  CDS (1)..(1407): transl_table=11
atgttcctacgcgcagaggacttgctggactacattgcaaaaaattcggtcaaattcatagactggcggtttaccgaccttcttggaaggtggcatcatacaacatatagcgtttcctccttgagtgctgaggttttttcttctggcattgcatttgacagttcttcggtacccgggtggcaacctatagaaaagtctgacatgttgctagtaccagacgtaagcaccgcatttgtagacccgttttcgccccagccgtccttagctgtaatttgcaacgtcgtaaacccacatgggcataacgattatcagcgtgacccgcgctatacagcacgcaaggcgtacgagtatatgctgtcatccgagattgcagataagtgctttttcggcaccgaactggagttttttgtgttcgaccacgtgcgttttggcacggacccttataacacatattttaagttagccagccaggaagatggggggcttggttcccgagggtgcttttcaaaccatgggtaccgcatgaaggcaaaagacggatacatgcggctcgcaccggtagattctctgcacgatgtacggtcggaaatgcttgccatgttgtctgaagttggggtcacaccgttgctccatcaccatgaagttgcagcatcgcagtgtgaaattgggttccggtacgcagagctcgtcacgagcgcagacaatgtacagaagtgtaagtatgtgctccgaaacgtggcaagttcttacggcaaaagcgtaactttcatgccgaaacccgtgcgcggagataatggcagcggtatgcactgccatcaatctctgtggaaggacgggaataacatattttccggtagcaatagggggctgtctgagctgtgtttgcattacataggtggtgtaataaagcatggtagggctttgagtgcatttgcgaatccatctactaacagctacaaacggcttctaccgaattttgaagcccctacgtggttggtgtattcgcacgagaacaggtctgcagcaattcgcataccgtgtataccagacggaggctccacgaggatagaggtcaggtttccggacccgctcgcgaacccgtacttgtgttttgccgcgcagctaatggcggggttagacggcattaagcacaaggtgcatcctcatgaagtaagtggcaaatgtttgtacagcatggaagagtcagaaacgcgtgacttgctgtctgttcccacctctttggaagaggcgctaacatctctggataaagaccgggactttctcctacagggcgaagttttcactaacgagcagatagaatcctacatccagctcaagagatcagaggttgacaacctgcggtcatatccacacccggtagagtttagcaactactacgctctttga

SEQ ID NO: 74282 - protein, 468 aa, Anaplasma marginale str. St. Maries
MFLRAEDLLDYIAKNSVKFIDWRFTDLLGRWHHTTYSVSSLSAEVFSSGIAFDSSSVPGWQPIEKSDMLLVPDVSTAFVDPFSPQPSLAVICNVVNPHGHNDYQRDPRYTARKAYEYMLSSEIADKCFFGTELEFFVFDHVRFGTDPYNTYFKLASQEDGGLGSRGCFSNHGYRMKAKDGYMRLAPVDSLHDVRSEMLAMLSEVGVTPLLHHHEVAASQCEIGFRYAELVTSADNVQKCKYVLRNVASSYGKSVTFMPKPVRGDNGSGMHCHQSLWKDGNNIFSGSNRGLSELCLHYIGGVIKHGRALSAFANPSTNSYKRLLPNFEAPTWLVYSHENRSAAIRIPCIPDGGSTRIEVRFPDPLANPYLCFAAQLMAGLDGIKHKVHPHEVSGKCLYSMEESETRDLLSVPTSLEEALTSLDKDRDFLLQGEVFTNEQIESYIQLKRSEVDNLRSYPHPVEFSNYYAL

SEQ ID NO: 74283 - DNA, 1359 bp, Silicibacter pomeroyi DSS-3; identical to SEQ ID NO: 32163
  CDS (1)..(1359): transl_table=11

SEQ ID NO: 74284 - protein, 452 aa, Silicibacter pomeroyi DSS-3; identical to SEQ ID NO: 32164

SEQ ID NO: 74285 - DNA, 1359 bp, Bacillus clausii KSM-K16
  CDS (1)..(1359): transl_table=11
atgacgacacaagcgccaactcgtgaaagcttaattgagacgatccgggaaacgattgaaaagaaaaatgtcgagctgcttcatatgcagtttgttgatcttgaaggcatgctcaaacatgtgacgattacggcagagcaattggatcaagctgtgaacggcaaaaccatgtttgacggttcttcgattacaggttttacaccaattaaccaatcagacttgtacttgtcccccgacttgacgacgtttgccgttcttccttggacggaagaagaaggctactcagaagcacgttttttatgcagcgtgaaaaatcctgatggctctgattttgagggcgatccacggaacattttaaaaaaaacggttaagcgtgcagccgacaaaggctactcgattagcgtaggcccagagcttgagtttttccttttcgacacggatgaacatggcgaaccgacgatgcgtacgcaagacgctggtggctattttgaaccttctccaaaagacgacggtgaaaaagtgcgcctcgcgatttacaaagcactgcggatgatgggcttcacgattgaagcttctcaccatgaagtggcagtcggccagcatgaaattaattttaaatattcggatgcgttagggtctgccgatgcagcaacaacgtataaatgggttgtaaaaacagttgcgaaacaatttggcctccacgctacgttcatgccaaaaccacttggtggagcaaacggaaacggcatgcacgtcaatatgtcgttgttcgatatcgaaaagcaagaaaacagtttctacaatgaagacgataaaaatgcgctttccaagacggcctatcactttatcgcgggcttgcttgacaacgtcaaagactttgtggcaataacgaatccacttgttaactcatacaaacgcctcgttccaggctacgaagcaccttgttacatcgcttggtctgcttccaaccgttcggcgcttgtccgcatcccggctacgcggggccctggcactcgtgtggaaatccgttgtccagacccgtccgccaacccttatcttgcttttgcggttatcgcctctgctggattggacggcgttgagaacgaaatcgaatgccctgcgtctgtagatgctgatattttcagcatgtcttccgcagaaattaaggagcgggcgattgagaacttgccaacaagccttgaagatgcgattaatcgttttgaaacaggtgctattggccgcaaaactcttggcgatcacgcgtttgaagaatacattgaattaaaacgcagcgaatgggatgacttccgtacgagtgtgcatccttgggaagttgcctcttaccaaagcaagttttaa

SEQ ID NO: 74286 - protein, 452 aa, Bacillus clausii KSM-K16
MTTQAPTRESLIETIRETIEKKNVELLHMQFVDLEGMLKHVTITAEQLDQAVNGKTMFDGSSITGFTPINQSDLYLSPDLTTFAVLPWTEEEGYSEARFLCSVKNPDGSDFEGDPRNILKKTVKRAADKGYSISVGPELEFFLFDTDEHGEPTMRTQDAGGYFEPSPKDDGEKVRLAIYKALRMMGFTIEASHHEVAVGQHEINFKYSDALGSADAATTYKWVVKTVAKQFGLHATFMPKPLGGANGNGMHVNMSLFDIEKQENSFYNEDDKNALSKTAYHFIAGLLDNVKDFVAITNPLVNSYKRLVPGYEAPCYIAWSASNRSALVRIPATRGPGTRVEIRCPDPSANPYLAFAVIASAGLDGVENEIECPASVDADIFSMSSAEIKERAIENLPTSLEDAINRFETGAIGRKTLGDHAFEEYIELKRSEWDDFRTSVHPWEVASYQSKF

SEQ ID NO: 74287 - DNA, 1419 bp, Neisseria gonorrhoeae FA 1090
  CDS (1)..(1419): transl_table=11
atgtccattaaaaacgccgtaaaattgattgaagaaagcgaagcccgctttgtcgatttgcgcttcaccgataccaaaggcaagcagcaccactttaccgtgcctgcgcgcatcgtgttggaagaccccgaagagtggtttgaaaacggaccggcgtttgacggctcgtccatcggcggctggaaaggcattgaggcttccgatatgcagttgcgccccgatgcgtccacagccttcgtcgatcctttttatgatgatgttaccgtcgtcattacctgcgacgtcatcgaccctgccgacggtcagggttacgaccgcgacccgcgctccatcgcacgtcgcgccgaagcctatttgaaatcttccggtatcggcgacaccgcctatttcggccccgaacccgaattcttcgtcttcgacggcgtagaatttgaaaccgacatgcacaaaacccgttacgaaatcacgtccgaaagcggcgcgtgggcaagcggcctgcatatggacggtcaaaacaccggccaccgccccgccgtcaaaggcggctacgcgcccgtcgcgccgattgactgcggtcaagatttgcgctccgccatggtgaacattttggaaggactcggcatcgaagtcgaagtccaccacagcgaagtcggtaccggcagccaaatggaaatcggcacccgtttcgccactttggtcaaacgcgccgaccaaacccaagatatgaaatacgtcatccaaaacgttgcccacaatttcggcaaaaccgccacctttatgcccaaaccgattatgggcgacaacggcagcggtatgcacgtccaccaatccatttggaaagacggtcaaaacctgttcgcaggcgacggctatgccggtttgtccgataccgcgctctactacatcggcggcatcatcaaacacgccaaagccctgaacgcgattaccaatccgtccaccaactcctacaaacgcctcgtgccgcactttgaagcaccgaccaaattggcctattccgccaaaaaccgttccgcttccatccgtatcccgtctgtgaacagcagcaaggcgcgccgcatcgaagcgcgtttccccgacccgaccgccaacccgtatttggcatttgccgccctgctgatggccggtttggacggcattcaaaacaaaatccatccgggcgaccctgccgataaaaacctgtacgacctgccgccggaagaagacgcgctcgtcccgaccgtctgcgcttctttggaagaagcacttgccgccctcaaggccgaccacgaattcctgctgcgcggcggcgtgttcagcaaagactggatcgacagctacatcgcctttaaagaggaagatgtccgccgcatccgtatggcgccgcacccgctggaatttgaaatgtattacagcctgtaa

SEQ ID NO: 74288 - protein, 472 aa, Neisseria gonorrhoeae FA 1090
MSIKNAVKLIEESEARFVDLRFTDTKGKQHHFTVPARIVLEDPEEWFENGPAFDGSSIGGWKGIEASDMQLRPDASTAFVDPFYDDVTVVITCDVIDPADGQGYDRDPRSIARRAEAYLKSSGIGDTAYFGPEPEFFVFDGVEFETDMHKTRYEITSESGAWASGLHMDGQNTGHRPAVKGGYAPVAPIDCGQDLRSAMVNILEGLGIEVEVHHSEVGTGSQMEIGTRFATLVKRADQTQDMKYVIQNVAHNFGKTATFMPKPIMGDNGSGMHVHQSIWKDGQNLFAGDGYAGLSDTALYYIGGIIKHAKALNAITNPSTNSYKRLVPHFEAPTKLAYSAKNRSASIRIPSVNSSKARRIEARFPDPTANPYLAFAALLMAGLDGIQNKIHPGDPADKNLYDLPPEEDALVPTVCASLEEALAALKADHEFLLRGGVFSKDWIDSYIAFKEEDVRRIRMAPHPLEFEMYYSL

SEQ ID NO: 74289 - DNA, 1344 bp, Pseudomonas syringae pv. syringae B728a; identical to SEQ ID NO: 32165
  CDS (1)..(1344): transl_table=11

SEQ ID NO: 74290 - protein, 447 aa, Pseudomonas syringae pv. syringae B728a; identical to SEQ ID NO: 32166

SEQ ID NO: 74291 - DNA, 1308 bp, Pseudomonas fluorescens Pf-5
  CDS (1)..(1308): transl_table=11
ttgacgggcattgatgagatcgaatgtgtcaccgcggatttgaatggcgtgccgcggggcaaggtaatgaccgccgaggggttcctcgaagggcggcgcttgcagatggcgcggggggtgctgctgcaatgcatcatgggcggttatccgccagcacgtttctacggcagcgacgacggcgacctggcgctcaatgccgacccccggcagatccaccgcctgccctggagcgaaacgcccagagcgctggccatctgtgacgccgatgagctcagcggcgagagttcgcggctctccactcgtgggcagctcaagcaggtaatcgcccgttatgccgccctgggcctggcgccggtggtggccaccgagctcgagttcttcgtgttcgcggccaatgacgatccagcgcagcccttccggccgccggtcggcctggatgggcgccgggaggaaggctattcggcgttcagcgtgagttccaacaatggtctgcggccattcttcaaggaggtctacgaaggcatggccgccctgggcctgccccgcgataccttcatgcacgagatgggcgtcagccagttcgaaatcaacctgttgcacggtgacccgctgctgttggcggaccagaccttcctgttcaagcacctgctcaaggaggtggcgctcaagcacggcctgatcgtggtctgcatggccaagcccttggctcacacgccgggcagctcgatgcatatacaccagagcctggtggagatgggtaacggccgtaacgttttcagtgacgacgccgggcaacctacggcgatgttccggcatttcattggcggcctgcaggccggcctcgccgacttcactgccttgttcgcccccaatgtgaactcctatcagcgcttgtgtcatccttacgcttcgccgaacaatgcgtgctggtcccacgacaatcgggccgctggcctgcggattccggccagttcaccggtggcgcgacgggtggaaaatcgtctgccgggggcggacgccaatccttatctggcgatcgccgcgagcctggcagcaggtttgcatggcatcgagaacgagttggagccaaccgctgccatccagggtgagttcgaagtgccggacaatctttcgttgccctgtaccttgcatgcggccctggagcgtctgaaacgtagccagttggccagggaactgttcggcaacgagttcatcgaaggctacatcgcttcgaagaccatggagttgaccagtttctttgatgaaattactccctgggagcggcgtgtgttagcggcccaggcataa

SEQ ID NO: 74292 - protein, 435 aa, Pseudomonas fluorescens Pf-5
MTGIDEIECVTADLNGVPRGKVMTAEGFLEGRRLQMARGVLLQCIMGGYPPARFYGSDDGDLALNADPRQIHRLPWSETPRALAICDADELSGESSRLSTRGQLKQVIARYAALGLAPVVATELEFFVFAANDDPAQPFRPPVGLDGRREEGYSAFSVSSNNGLRPFFKEVYEGMAALGLPRDTFMHEMGVSQFEINLLHGDPLLLADQTFLFKHLLKEVALKHGLIVVCMAKPLAHTPGSSMHIHQSLVEMGNGRNVFSDDAGQPTAMFRHFIGGLQAGLADFTALFAPNVNSYQRLCHPYASPNNACWSHDNRAAGLRIPASSPVARRVENRLPGADANPYLAIAASLAAGLHGIENELEPTAAIQGEFEVPDNLSLPCTLHAALERLKRSQLARELFGNEFIEGYIASKTMELTSFFDEITPWERRVLAAQA

SEQ ID NO: 74293 - DNA, 1371 bp, Colwellia psychrerythraea 34H; identical to SEQ ID NO: 32169
  CDS (1)..(1371): transl_table=11

SEQ ID NO: 74294 - protein, 456 aa, Colwellia psychrerythraea 34H; identical to SEQ ID NO: 32170

SEQ ID NO: 74295 - DNA, 1344 bp, Pseudomonas syringae pv. phaseolicola 1448A
  CDS (1)..(1344): transl_table=11
atgacacgcaatgacccccatccgctggcacagctgctgatgggcattgatgaagtggagtgtgtgaccccggacctgaacggcgtgcctcgcggcaaggtgatgaccgctgccggttttctggagggcaggcgattgcagcttgcgcggggtgtgttgctgcaatgcatcatgggcgggtacccgccgtcacggttttacggtagcgatgatggcgacctcgcgctgctcagcgatccgcagcaggtccatcgtctgccctggagcgagcaaccgcgcgccctggccgtctgcgatgccgaagagttgagcggcgagcgttgcatgctctcgacgcgcagccagctaaaggccgtcatcgcccgctacgccgcacgggggttggcaccggttgtggccaccgaactggagttctttgtctttgcgcctaaccccgagccgctgtatccgttcgtgccgccgacagggctggacggacgacgcgagcaggggcattcagcgttcagtgtcagctcgaacaatggcttgcggccttttttcgccgaggtatacgcctgcatggcggcgttgggtctgccgcgtgacacggtgatgcacgagatgggcgtcagccagttcgagatcaacctgctgcatggcgacccgctgctgctcgccgaccagacctttctgttcaagcacctgctcaaggaggtcgcgctcaagcacgggcttattgtggtctgcatggccaagccgctcgctcacacggcgggcagttcgatgcatcttcatcagagcgttgtagcaacagactccagggtaaacgtcttcagtggtgcagatggccaaccgactgacacgtttcgtcactttatcgcgggtcagcaggcctgcatggctgatttcacagcgctgttcgcgcccaacgtgaattcctatcagcgcctgtgccaaccctatgcttcgcccaataacgcctgctggtcctacgacaatcgcgcagccggcctgcgcatcccgtcgagtgcagcggcggctcgaagggtggagaaccgtttgccaggcgccgacgccaatccttatctggccatcgccgcaagcctggcggccgggctgcatggcatcgagcaaaagctggaacccaccccgcccatgcaaggcgcgattgaggtgccggaagaattgtcattgccgtgtaccctgcacgccgctctggagcgtctgaaaagcagtcagttggccaaggaactgtttggtcatgaattcatcgaaggctacatcgcgtcgaagaccctagaactgaccagtttttttgacgagataaccccctgggaacggcgcgttctggctgctcaggtttaa

SEQ ID NO: 74296 - protein, 447 aa, Pseudomonas syringae pv. phaseolicola 1448A
MTRNDPHPLAQLLMGIDEVECVTPDLNGVPRGKVMTAAGFLEGRRLQLARGVLLQCIMGGYPPSRFYGSDDGDLALLSDPQQVHRLPWSEQPRALAVCDAEELSGERCMLSTRSQLKAVIARYAARGLAPVVATELEFFVFAPNPEPLYPFVPPTGLDGRREQGHSAFSVSSNNGLRPFFAEVYACMAALGLPRDTVMHEMGVSQFEINLLHGDPLLLADQTFLFKHLLKEVALKHGLIVVCMAKPLAHTAGSSMHLHQSVVATDSRVNVFSGADGQPTDTFRHFIAGQQACMADFTALFAPNVNSYQRLCQPYASPNNACWSYDNRAAGLRIPSSAAAARRVENRLPGADANPYLAIAASLAAGLHGIEQKLEPTPPMQGAIEVPEELSLPCTLHAALERLKSSQLAKELFGHEFIEGYIASKTLELTSFFDEITPWERRVLAAQV

SEQ ID NO: 74297 - DNA, 1416 bp, Ralstonia eutropha JMP134
  CDS (1)..(1416): transl_table=11
atggcccaaagcgttgcagatgtgatgaagcttgtgaaggaaaacgacgtcaagttcgtcgatttccgtttcaccgataccaaaggcaaggagcaacacgtttcggtgccgacctcgcatttcgacgacgacaagttcgaaagcggccatgccttcgacggttcgtccatcgctggctggaagggtatcgaggcttcggacatgctgctgatgccggattcgaacaccgccttcatcgacccgttctacgaagagccgacgctggtgctgacctgcgacgtggtcgagccgtcggatggcaagggctatgaccgcgacccgcgttcgatcgccaagcgcgcagaagcctacctgaagagcaccggcctgggcgacaccgccttcttcggtccggaacccgaattcttcatcttcgacggcgtgacctggaacgtcgacatgcaaggctgcttcgtgaaggtgcattccgaagaagccccgtggtcgtcgggcaaggaattcgaacacggcaactcgggccaccgtccgggcaagaagggcggctacttcccggttgccccgatcgacacgttccaggacatgcgttcggaaatgtgcctgatcctcgaatcgctgggcattcccgttgaagtccaccaccacgaagtggctggccagggccagaacgaaatcggcacgcgcttcagcacgctggtgcaacgcgccgactggacccagctgcagaagtacgtgatccagaacgtcgcccacacctacggcaagaccgccacgttcatgccgaagcccatcgtcggcgacaacggctcgggcatgcacgtgcaccagtccgtgtggaaggacggccagaacctgttcgcgggcaacggctacgccggcctgtcggaattcgcgctgtactacatcggcggcatcatcaagcacgctcgcgcgctgaacgccatcaccaacccgggtacgaactcgtacaagcgtctggtgccgggcttcgaagcgccggtgaagctggcctactcggcccgcaaccgttcggcctcgatccgtattccgtacgttgccaacccgaagggccgccgtatcgagacccgcttcccggatccgctgatgaacccgtacctgggcttctcggcactgctgatggccggtctggatggcgtgatgaacaagatccacccgggcgaagctgccgacaagaacctgtacgacctgccgccggaagaggatgcaaagatcccgaccgtctgcaacagcctcgaccagtcgctggaatacctcgacaacgaccgtgagttcctgacccgcggcggcgtgttctccaactccatgctcgacgcctacatcgagctgaagatggaagaagtcacccgcttccgcatgaccactcacccggtcgaattcgaaatgtattactcgctgtaa

SEQ ID NO: 74298 - protein, 471 aa, Ralstonia eutropha JMP134
MAQSVADVMKLVKENDVKFVDFRFTDTKGKEQHVSVPTSHFDDDKFESGHAFDGSSIAGWKGIEASDMLLMPDSNTAFIDPFYEEPTLVLTCDVVEPSDGKGYDRDPRSIAKRAEAYLKSTGLGDTAFFGPEPEFFIFDGVTWNVDMQGCFVKVHSEEAPWSSGKEFEHGNSGHRPGKKGGYFPVAPIDTFQDMRSEMCLILESLGIPVEVHHHEVAGQGQNEIGTRFSTLVQRADWTQLQKYVIQNVAHTYGKTATFMPKPIVGDNGSGMHVHQSVWKDGQNLFAGNGYAGLSEFALYYIGGIIKHARALNAITNPGTNSYKRLVPGFEAPVKLAYSARNRSASIRIPYVANPKGRRIETRFPDPLMNPYLGFSALLMAGLDGVMNKIHPGEAADKNLYDLPPEEDAKIPTVCNSLDQSLEYLDNDREFLTRGGVFSNSMLDAYIELKMEEVTRFRMTTHPVEFEMYYSL

SEQ ID NO: 74299 - DNA, 1377 bp, Pseudomonas fluorescens PfO-1; identical to SEQ ID NO: 37728
  CDS (1)..(1377): transl_table=11

SEQ ID NO: 74300 - protein, 458 aa, Pseudomonas fluorescens PfO-1; identical to SEQ ID NO: 37729

SEQ ID NO: 74301 - DNA, 1365 bp, Pseudomonas fluorescens PfO-1
  CDS (1)..(1365): transl_table=11
atgaaattcgcagccattgaagacgcccgcagctttctcgagcacaaccccgacatcgacatgatcgagctgttcatcctcgacgccaacggcgtgccccgcggcaagctgttgcaccgcgaagaactgctcgccgtatacgaaagtggccgcccgctgccaagcaccatcctcggcctgacggtgcacggcgaagacgtggagaactccggtctggtgtgggacgtcggcgacatcgactgccgcgcctacccgctggaaggcagtctggtacgcctgccgtggcggcagattccgactgctgcggtgcaggtcagcatgcatccggaacaaggcatgccggcgagcattgccgacccgcgtcacctgttgatcaagatcatcgaccgcttgaaagccgagggttaccacccggtaatggcctgcgagctggagttctatctgctcgacgccaaacgcgatcacaacggtcgcccgcaaccggcgctggatgccgacggtggtcgaccgagacacacgcaggtctacggtttgcgtgagctggaacagatcgaaccgttcctcgccgatctctacagcgcctgcaaactgcacggcattccggcgcgcacggcgatctcggaatacgcgccgggccaggtggaaattaccctcgaacacggcgatgcactggaggcgatggaccaggccgtgcgctacaaacgactggtcaaagccgtggcgcacaagcacgggatgcaggcgacgttcatggccaagccgttcgatcacctggctggcaccggcatgcacatgcacgtcagcctcgccgatgccgagggacgcaatctgtttgcctccgaggacccggccggcaccccgctgttgcgcacggcgattggcgggatgctcgcttccctgctcgattcgctgctgctgttctgcccgaacgccaactcctaccgtcgcttccaggccaacagttacgcgccactggcgccgacctggggcgtcgacaaccgtaccgtcagcctgcgcgtgcccggcggcccggccaacacccggcacatcgaacaccgcatctgcggcgccgatgccaacccgtatctggcagcggcggcgatcctggcgggcattcatcgcgggataaaagaagacatcgatccgggtgaaccggtggaaggcaacggttacgcgcaggcgaaagaattgctgccgaccgactggctgacctcgcttacggcgctggagaattcggtgtgggcgcgggatgcgctggggcaggagtttctcggggtgtatctggcggtgaaacgcgcggaataccggcagttcatggctgaagtgggtgagcaggactggcgctggtatctgaccgaagcctga

SEQ ID NO: 74302 - protein, 454 aa, Pseudomonas fluorescens PfO-1
MKFAAIEDARSFLEHNPDIDMIELFILDANGVPRGKLLHREELLAVYESGRPLPSTILGLTVHGEDVENSGLVWDVGDIDCRAYPLEGSLVRLPWRQIPTAAVQVSMHPEQGMPASIADPRHLLIKIIDRLKAEGYHPVMACELEFYLLDAKRDHNGRPQPALDADGGRPRHTQVYGLRELEQIEPFLADLYSACKLHGIPARTAISEYAPGQVEITLEHGDALEAMDQAVRYKRLVKAVAHKHGMQATFMAKPFDHLAGTGMHMHVSLADAEGRNLFASEDPAGTPLLRTAIGGMLASLLDSLLLFCPNANSYRRFQANSYAPLAPTWGVDNRTVSLRVPGGPANTRHIEHRICGADANPYLAAAAILAGIHRGIKEDIDPGEPVEGNGYAQAKELLPTDWLTSLTALENSVWARDALGQEFLGVYLAVKRAEYRQFMAEVGEQDWRWYLTEA

SEQ ID NO: 74303 - DNA, 1407 bp, Pseudomonas fluorescens PfO-1; identical to SEQ ID NO: 32171
  CDS (1)..(1407): transl_table=11

SEQ ID NO: 74304 - protein, 468 aa, Pseudomonas fluorescens PfO-1; identical to SEQ ID NO: 32172

SEQ ID NO: 74305 - DNA, 1344 bp, Pseudomonas fluorescens PfO-1
  CDS (1)..(1344): transl_table=11
atgacaaccgatggccagcgttcactcgcgcagcgattgacgggcattgatgagattgaatgtgtcacgccggatttgaacggtgtgccacggggcaaggtaatgaccgccgagggcttcctcgaagggcggcgtttgcagttggcccgaggggtgctgctgcaatgcatcatgggcggctatcccgccgccaaattctatggcagcgatgacggcgatctggcgctggtggccgatcctgcgcagattcacccattgccatggagtgaagagccacgggccttggcaatctgtgatgccgacgagctgaccggcgagagctccaacctgtcgacccgtggtcagctcaagaaggtcattgcccgctacgcagccctcggtctggcgccggtggtggcgaccgaacttgaattctttgtattcgccccgaacaccgacccgacccaaccgttccagccgccagtcggtctcgacggtcgtcgcgaggacggtcattcggcgttcagcgtcagttccaacaacggtctgcgaccgttcttcagtgaagtctataaatgcatggccgccctcggtctgccgcgcgatactttcatgcacgaaatgggcgtcagccagttcgagatcaacttgctgcacggtgatccgctgttgctggccgaccagaccttcctgttcaagcacctgctcaaggaagtcgcgctcaagcacggcctgaccgtggtgtgcatggccaagccgctggcgcacacaccgggcagttcgatgcacattcaccagagcatcgtcgaaatcggcagcggcaaaaatgtgttcagcgacgcggatggccagccgaccgcgatgttccgccacttcatcggcgggcagcaggcaggcatggctgatttcaccgcgctgtttgcaccaaacgtcaattcgtaccagcgcctgtgccatccgttcgcgtcaccgaacaatgcctgctggtcccacgacaaccgcgccgccggcctgcgcattccggccagttcgccggtcgcacgccgtgtcgagaaccgtttgccgggcgccgatgccaacccgtatctggccatcgctgcgagcctggctgccggcttgtacggcatcgagcatgagctggaaccaagcgaagcgattcagggcgagttcgacgtgccggaccatctttcgctgccgtgtaccttgcacgcggcgctcgaacgtctgaagcgcagccagcttgcaaaggaactgttcggcacggagttcatcgaaggctacatcgcttcgaagaccatggagttgaccagcttctttgatgaaatcactccctgggaacgccgtgttctagcagcccaggcctga

SEQ ID NO: 74306 - protein, 447 aa, Pseudomonas fluorescens PfO-1
MTTDGQRSLAQRLTGIDEIECVTPDLNGVPRGKVMTAEGFLEGRRLQLARGVLLQCIMGGYPAAKFYGSDDGDLALVADPAQIHPLPWSEEPRALAICDADELTGESSNLSTRGQLKKVIARYAALGLAPVVATELEFFVFAPNTDPTQPFQPPVGLDGRREDGHSAFSVSSNNGLRPFFSEVYKCMAALGLPRDTFMHEMGVSQFEINLLHGDPLLLADQTFLFKHLLKEVALKHGLTVVCMAKPLAHTPGSSMHIHQSIVEIGSGKNVFSDADGQPTAMFRHFIGGQQAGMADFTALFAPNVNSYQRLCHPFASPNNACWSHDNRAAGLRIPASSPVARRVENRLPGADANPYLAIAASLAAGLYGIEHELEPSEAIQGEFDVPDHLSLPCTLHAALERLKRSQLAKELFGTEFIEGYIASKTMELTSFFDEITPWERRVLAAQA

SEQ ID NO: 74307 - DNA, 1359 bp, Pseudomonas fluorescens PfO-1; identical to SEQ ID NO: 32173
  CDS (1)..(1359): transl_table=11

SEQ ID NO: 74308 - protein, 452 aa, Pseudomonas fluorescens PfO-1; identical to SEQ ID NO: 32174

SEQ ID NO: 74309 - DNA, 1377 bp, Pseudomonas fluorescens PfO-1
  CDS (1)..(1377): transl_table=11
atgtcggtacccccgcgtgccgttcagcttaacgaagcgaacgcgttccttaaggaacatcctgaggttctgtacgttgaccttctgattgcggatatgaatggtgtggtgcgcggcaagcgcatcgaacgcaccagcctccacaaggtttacgagaaaggcatcaacctgccggcctctctatttgctctggatatcaatggttcgacggtggaaagcaccggcctgggcctggacatcggcgacgccgaccgtatctgctatccaatccccgataccctgtgcaacgagccatggcagaagcgcccgaccgcgcaactgttgatgaccatgcacgaactcgaaggtgaccctttcttcgccgacccgcgcgaagtgctccgtcaagttgttgcaaagtttgacgagcttggcttgaccatctgcgccgcgttcgaactcgagttttacctgatcgaccaggaaaacgtgaacggccgccctcagccgccacgctcgccgatctccggcaaacgcccgcattcgactcaggtttacctgatcgacgacctcgacgaatacgtcgactgcctccaggacattctggaaggcgccaaagagcaaggtattccggccgacgccatcgtcaaggaaagtgccccggcgcagttcgaagtgaacctgcaccacgtcgccgacccgatcaaggcatgcgactacgcggtcctgctcaagcgtctgatcaagaacatcgcctacgaccatgaaatggacaccactttcatggccaagccgtacccgggccaggcaggcaacggtctgcacgtccacatttcggttctcgacaaagaaggcaaaaacatttttgccagcgaggatcccgagcagaacgccgcgctgcgtcacgcgatcggcggtgtgctcgagaccctgcccgcgcagatggctttcctctgcccgaacgtcaactcctaccgtcgtttcggcgcacagttctacgtgccgaactcgccgagctggggcctggacaaccgcaccgtggccctgcgcgtaccgaccggctccgccgacgcggtccgtctggaacaccgcgttgccggcgccgacgccaacccgtacctgctgatggcttcggtgctggcgggcgtgcaccacggtctgaccaacaagatcgagccaccggctccgaccgaaggcaacagctacgagcagaacgagcagagcctgccgaacaacttgcgcgatgccctgcgcgagctggacgacagcgaggtgatggccaagtacatcgatccgaaatacatcgatatcttcgtcgcctgcaaagagagcgaactggaggagttcgaacactccatctccgacctcgagtacaactggtacctgcacaccgtttaa

SEQ ID NO: 74310 - protein, 458 aa, Pseudomonas fluorescens PfO-1
MSVPPRAVQLNEANAFLKEHPEVLYVDLLIADMNGVVRGKRIERTSLHKVYEKGINLPASLFALDINGSTVESTGLGLDIGDADRICYPIPDTLCNEPWQKRPTAQLLMTMHELEGDPFFADPREVLRQVVAKFDELGLTICAAFELEFYLIDQENVNGRPQPPRSPISGKRPHSTQVYLIDDLDEYVDCLQDILEGAKEQGIPADAIVKESAPAQFEVNLHHVADPIKACDYAVLLKRLIKNIAYDHEMDTTFMAKPYPGQAGNGLHVHISVLDKEGKNIFASEDPEQNAALRHAIGGVLETLPAQMAFLCPNVNSYRRFGAQFYVPNSPSWGLDNRTVALRVPTGSADAVRLEHRVAGADANPYLLMASVLAGVHHGLTNKIEPPAPTEGNSYEQNEQSLPNNLRDALRELDDSEVMAKYIDPKYIDIFVACKESELEEFEHSISDLEYNWYLHTV

SEQ ID NO: 74311 - DNA, 1356 bp, Rhodobacter sphaeroides 2.4.1; identical to SEQ ID NO: 32175
  CDS (1)..(1356): transl_table=11

SEQ ID NO: 74312 - protein, 451 aa, Rhodobacter sphaeroides 2.4.1; identical to SEQ ID NO: 32176

SEQ ID NO: 74313 - DNA, 1329 bp, Carboxydothermus hydrogenoformans Z-2901
  CDS (1)..(1329): transl_table=11
atgagttacaccaaaaacgatattatggatatggtgcgggagcaaaatgttaagtttatccggctccagtttaccgacatttttggggttctaaaaaatgtggccattccggtagaacagttagaaaaggccttaaacaacgagctaatgtttgacggctccagtattgaaggttttgtccgtattgaagagtcggatatgtatttgcgtccggaccccaatacttttgccgtatttccctggcggcccagaaacggtgcggtagcccggctgatttgcgatgtgtacaatcccgatggtactccctttgagggcgacccccgctatgttttgaaaagagctttggcggaagccaaagagctgggttacaccatgtacgttggtccggaattagagtttttccttttccaggtagatgcagaaggaaaacccaccctggtgacccatgacaatgccggctattttgatttaagcccggtagatttgggcgaaaacgcccggcgggatatggtgttggctttggaacaaatggggtatgaagtcgaagcatcccaccacgaagttgctccgggacagcacgaaattgactttaagtattccgatgctttagatgtagccgataaaattgttacctttaaagtagttgttcgttccattgcccaaaggcacggacttcatgcaaccttcatgcccaaaccgctttttggggtaaatggttcgggaatgcacaccaaccagtcgctgtttaaagacggtcaaaacgctttttatgatcccaatggggagttgcaattatccgaaaccgcttactactatattggcggtattatgaagcatattaaagctatcactgccattgccaatccggtggtaaactcctacaagcgtttggttccgggctatgaagcaccggtttacattgcctggtcggcaagaaaccgtagccccttaatccggattccggccaaaagaggctcctctacccggattgaattaagaagcccggacccgtcggcaaatccgtatcttgccttagcggttatgcttaaagcgggcttggatggaattaaaaataaaattaagccaccggcgccggttaaccaaaacctttatgaaatgactgctgaagagcgaaaggctctgggagttgataccttacccggtagcttaaaagaagccattgattgtcttttagaagataaggtaatccaggaagctttaggtaaacacgtatttgagcggtttgtggaagctaagttaaaagagtgggatgagtaccgggttcaggttcacgagtgggaagtgaaaaaatatctcaccatgtattaa

SEQ ID NO: 74314 - protein, 442 aa, Carboxydothermus hydrogenoformans Z-2901
MSYTKNDIMDMVREQNVKFIRLQFTDIFGVLKNVAIPVEQLEKALNNELMFDGSSIEGFVRIEESDMYLRPDPNTFAVFPWRPRNGAVARLICDVYNPDGTPFEGDPRYVLKRALAEAKELGYTMYVGPELEFFLFQVDAEGKPTLVTHDNAGYFDLSPVDLGENARRDMVLALEQMGYEVEASHHEVAPGQHEIDFKYSDALDVADKIVTFKVVVRSIAQRHGLHATFMPKPLFGVNGSGMHTNQSLFKDGQNAFYDPNGELQLSETAYYYIGGIMKHIKAITAIANPVVNSYKRLVPGYEAPVYIAWSARNRSPLIRIPAKRGSSTRIELRSPDPSANPYLALAVMLKAGLDGIKNKIKPPAPVNQNLYEMTAEERKALGVDTLPGSLKEAIDCLLEDKVIQEALGKHVFERFVEAKLKEWDEYRVQVHEWEVKKYLTMY

SEQ ID NO: 74315 - DNA, 1332 bp, Carboxydothermus hydrogenoformans Z-2901
  CDS (1)..(1332): transl_table=11
atgagtcctaccaaagaagatattttaaaaatagttgaggaaaaaggaatacgctttataaggttgcaatttaccgatatttacgggattcccaaaaatgtggccataactgcggagcagttagagaaagctttggatggggagttaatgtttgatggctcctcgattgatggttttgttcgcattgaagagtcggatatgtacttaaagcccgacccttccacttttatgattttgccctgggcggaccagcggtatgcggaagcgagattaatttgcgatatttatacctatgatggaaagcctttttccggctgtccccggggaaatttaaaaagaatcctccaggaagcaaaacaaatggggattgatgaaatgtacgtggggccggaagcggaatttttcctctttcaaaccaaagaagacggtacgcttactactgttacccatgatgaagccggttattttgacctggctccggtagaccggggagaaaatgcccggcgggatatggtactggctttggaacaaatgggctttgaagtggaagcttcccaccatgaagtggctcccggtcagcacgagatcgactttaaatacgactcggcggtgcgaactgccgataaagttattaccttcaagacggtggtacggaagattgccaaaaaacacgggttacatgctacttttatgccaaagcccgtttacggcattgccggttcgggaatgcatttaaatatttccctggcggctaaaggacaaaatatcttttacgatcccagtaccccccatcagttaagcgatatagcattgtattttatcggtggcttattaaagcatgcccgggcaatttcggccataaccaatcctctggtaaattcatataaacgactggtttccggatttgaagcaccggtctatattgcctggtcgtttagaaacagaagtcctttaatacggattccggctaaaagaggaccctctacccggattgagttgagaagtcctgatccctcggccaatccttacctggcatttgcggtttgcttaaaagcaggtttggacggcattaaaaataaaattatgccacctcctccttgcgaccggaatatttatcatatggatgaagaagaaagaaaagcttggggcattggtaatctacccgccagtttgggcgaagccttaaaggagttggagcaggatgaagtaatccgcgaagctttgggggaacatatttttgagcggtatatggaaggtaagcgcctggaatgggatacttaccgcatgcaggttcatgaatgggaattaaaggaatatttagtgaagtattaa

SEQ ID NO: 74316 - protein, 443 aa, Carboxydothermus hydrogenoformans Z-2901
MSPTKEDILKIVEEKGIRFIRLQFTDIYGIPKNVAITAEQLEKALDGELMFDGSSIDGFVRIEESDMYLKPDPSTFMILPWADQRYAEARLICDIYTYDGKPFSGCPRGNLKRILQEAKQMGIDEMYVGPEAEFFLFQTKEDGTLTTVTHDEAGYFDLAPVDRGENARRDMVLALEQMGFEVEASHHEVAPGQHEIDFKYDSAVRTADKVITFKTVVRKIAKKHGLHATFMPKPVYGIAGSGMHLNISLAAKGQNIFYDPSTPHQLSDIALYFIGGLLKHARAISAITNPLVNSYKRLVSGFEAPVYIAWSFRNRSPLIRIPAKRGPSTRIELRSPDPSANPYLAFAVCLKAGLDGIKNKIMPPPPCDRNIYHMDEEERKAWGIGNLPASLGEALKELEQDEVIREALGEHIFERYMEGKRLEWDTYRMQVHEWELKEYLVKY

SEQ ID NO: 74317 - DNA, 1338 bp, Burkholderia sp. 383; identical to SEQ ID NO: 32179
  CDS (1)..(1338): transl_table=11

SEQ ID NO: 74318 - protein, 445 aa, Burkholderia sp. 383; identical to SEQ ID NO: 32180

SEQ ID NO: 74319 - DNA, 1353 bp, Rhodospirillum rubrum ATCC 11170
  CDS (1)..(1353): transl_table=11
ttgatcaacgagttcgaagcctggatcaacgagcatggcatcgcggaagtcgaatgcctgctctcggacatgaatggcatcgtccgcggaaaggtgctgcccgcccgaaaattcctgcgctcgctggaagacaactcgctgcgcattccaagcagcgtgtttctggtgacagtgacgggcgaataccccttcgccgatgacaacaacaccgtcgtcatcgaccccgacgccgacctcaggcccgatttccgcacgttatgcgtcgcgccgggctaccgcacgcccaccgccttcgtcgttgtcgacgcctataaaagcaacggcatcccgcttgatctctcgcccagacaggtgctgaagcgggttttggcgctctattctgaacagggctggaagccggtcgtcgcccccgagatcgagttttatctgacccaggtcaacgccgatcccgatctgccgctatcgccgcccgccggccgttcgggacggcccgaaacctcgccccagccctatggtctggaagcgattaccgaattcgaagacctgatcgagaatatctacgaacacgccgaaatcgccggcctgcagatcgataccctgatccatgaggccggcgccgcccagttggagatcaatttccttcacggcgacccgatcacgctctcggatcaggtggtggtgttcaagcgtctggtgcgtcaggtggcgctcaagcacggggtctatgccaccttcatggccaagccgatggccgatcagccgggcagcgccatgcatattcaccagtccctggtggaaatcggcaccggcaagaacctgttcgtgcgcgacgatggcagcgacagcccgatgtttcgccattatatcggcggcctgcaggccctgctcgcccaggtgacgccgctgttcgcccccaacatcaattccttccgccgcatgcgcccccatcacagcgcgccgatcaatctggaatgcggctatgacaaccgctcttgcgggctgcgggtgcccttgtccgatccggccaaccgccgcctggaaaaccgcctgcccggcgccgacgccaatccctatctggcgatggccgcctcgctggcctgcggctatatcggcatcatggagcggatcgagccctcgatcatggtcgaaggcggcaatgcctatcgccgctcgcgcaccctgccgcgcacccttgatgaagcccttgaccgcttggagaaatgcacggtcatcaagaacgtgctgggcgagcacttcttcgaagccttcaccatgatcaagcgcgtcgaactcgacgccttccaagacgtcatcagttcgtgggagcgcaatcacctgctgctcaaggtgtaa

SEQ ID NO: 74320 - protein, 450 aa, Rhodospirillum rubrum ATCC 11170
MINEFEAWINEHGIAEVECLLSDMNGIVRGKVLPARKFLRSLEDNSLRIPSSVFLVTVTGEYPFADDNNTVVIDPDADLRPDFRTLCVAPGYRTPTAFVVVDAYKSNGIPLDLSPRQVLKRVLALYSEQGWKPVVAPEIEFYLTQVNADPDLPLSPPAGRSGRPETSPQPYGLEAITEFEDLIENIYEHAEIAGLQIDTLIHEAGAAQLEINFLHGDPITLSDQVVVFKRLVRQVALKHGVYATFMAKPMADQPGSAMHIHQSLVEIGTGKNLFVRDDGSDSPMFRHYIGGLQALLAQVTPLFAPNINSFRRMRPHHSAPINLECGYDNRSCGLRVPLSDPANRRLENRLPGADANPYLAMAASLACGYIGIMERIEPSIMVEGGNAYRRSRTLPRTLDEALDRLEKCTVIKNVLGEHFFEAFTMIKRVELDAFQDVISSWERNHLLLKV

SEQ ID NO: 74321 - DNA, 1365 bp, Rhodospirillum rubrum ATCC 11170; identical to SEQ ID NO: 32183
  CDS (1)..(1365): transl_table=11

SEQ ID NO: 74322 - protein, 454 aa, Rhodospirillum rubrum ATCC 11170; identical to SEQ ID NO: 32184

SEQ ID NO: 74323 - DNA, 1329 bp, Moorella thermoacetica ATCC 39073
  CDS (1)..(1329): transl_table=11
atggtggatagccgggaagcgattttacagaaagctaccgacctgggagtcaagtttattcgcctccagtttaccgatatctttggggtgctgaaaaatgtcgccatcaccctggaccagcttcccaaagccctcaataacgagttgatgttcgacgggtcctctattgagggtttcgtccggattgaagaatctgatatgtacctgcgcccggacccatccacctttaccatctttccctggaagcccaatggcgacgccgtggcgcggttgatctgcgacgtttataatgccgacggcacgccttttatcgggtgcccacgcgggaccttaaagcgggttatcgctgaagccgaggccctgggttataccatgaatgtcggcccggaggcggagtttttcctcttccataccgacgccaccggccggccgaccctggaaacccacgatcgggccggttattttgacctgaccccggtagacctgggggaagacgcccggagggatatggtcctgaccctgcagcagatggggtttgaaatcgaggcctcccaccatgaggtggctcccggccagcatgagatagattttaaatacgccgacgccttaaggacggccgacaatatcgctactttcaagtttgtggtgcggaccatcgcccagcgccacggcctccatgccacctttatgcccaagcccatttacggcattgccggttcgggcatgcactgcaatatctctcttttccgcgccggccaaaatgccttttacgaccctgacgacgatctccagctgagccaggttgcctactactttatcggcggcctgatagcccacgcccggggcatgacggcaattaccaatcccactgttaactcatacaagcgtctggtacctggttacgaagccccggtgtatatagcctggtcacctcaaaaccgtagccccctgatccgtatccccgccaagcggggcctgtcaacgcggctggaggtacgccatcccgacccctcgaccaacccctacctggccattgccgtcatgttgaaggccggcctggacggcattaagaaccgtatccaaccgccggcgcccatcaatgccaatatttttgacatggaagcgactagactacgggccgaaggtatcgacctcctgccgggcaccctggatgaagccctggatgcattagaaaaagaccccgttatccgcgaggccctggggccccatatctaccagcggttcatggaggcgaaacgcatcgaatgcgaggagtaccgcacccgggtgcaccagtgggaaatcgaacattacctgactaagttctaa

SEQ ID NO: 74324 - protein, 442 aa, Moorella thermoacetica ATCC 39073
MVDSREAILQKATDLGVKFIRLQFTDIFGVLKNVAITLDQLPKALNNELMFDGSSIEGFVRIEESDMYLRPDPSTFTIFPWKPNGDAVARLICDVYNADGTPFIGCPRGTLKRVIAEAEALGYTMNVGPEAEFFLFHTDATGRPTLETHDRAGYFDLTPVDLGEDARRDMVLTLQQMGFEIEASHHEVAPGQHEIDFKYADALRTADNIATFKFVVRTIAQRHGLHATFMPKPIYGIAGSGMHCNISLFRAGQNAFYDPDDDLQLSQVAYYFIGGLIAHARGMTAITNPTVNSYKRLVPGYEAPVYIAWSPQNRSPLIRIPAKRGLSTRLEVRHPDPSTNPYLAIAVMLKAGLDGIKNRIQPPAPINANIFDMEATRLRAEGIDLLPGTLDEALDALEKDPVIREALGPHIYQRFMEAKRIECEEYRTRVHQWEIEHYLTKF

SEQ ID NO: 74325 - DNA, 1608 bp, Frankia sp. CcI3
  CDS (1)..(1608): transl_table=11
atgacatcgtcgccggttccgaccccgccatcggcccaggttccggcccgtcccgaccccccggacccgcttgagccacctgagccgatcgggcggcccgcaccgcgggtccagccccgcccgatcggccccgggtcatcgtccgatcaggcgctcggggagaacgcggccggccggggagtgctgcgtgacctgctggccggagccgaaccggtcgaggagatcatcgtcgccaccgtcgacctgcagggccggctcgtcggcagcgccgtgtccccggagcacttcaccggaccggtgctcgccgatggcctcggcgcctgcacctacctgcacgccgtcgacgtcgacatgaagaccgacggaggctacccccactcgccctggtacgacggcttcggtgatctacggctccagcccgacctcaccacgttgcgccgcgcaccctggcatccgtccgacgcggtggtgttcgcggacgcgttctggccggacgggtccccggtgggcgtcgctccccgtgccgtgctgcgtcgacagctcgacgcgctcgcagcctccggtctgaccgccttcgccgggacggagctggagttcctggtcttccgcgagtcctaccgtcgagctgcgcggcgctcctataccgatctcaccccggccagccgttacaacatcgactacgcgctttccggcacggaaggcctggacgatctggtccgacgcctccggcgggcgatggccggcatcggggtggcggtcgagtccgcgcgcggggaggtccatccgggacagttcgagatcgtgttccggtatgccgatgcgatgcaggcctgcgacaaccacaccctctacaagaccgccgccaagaaaatcgccgcggcgggcgggcaggccctgaccttcatggcgaagtacgacgagggcgaggggaactcctgccatgttcatctgtccctgcgcgggacggacggggcgtgtgtgttcgcgccgtcccccgaaggtgagggggcgctcgtccggcaccccggcttggccccaccgggcatcgcaccccccggtttcccaccccccggctctcgcgacgacatcgccgggatgtccgcgctgatgtgctcgttcgtggccgggcagctcgcctgcatggccgatttcgcgttgctgtacgcgcccaacgtgaactcgtacaagcgcctggcaccgggctcattcgctccgaccggagtcagctggggacgggacaaccggacctgcgccatacgggtggtcggcgacgggccgggcctgcgcgtcgaacatcgggtgccgggcggtgacgcgaatccctacctcgccgtcgccgggatgatcgcggccggccgttacggcatcgagcaccgtctcccgctcgaacccggacgggtgggcaacgccttcaccatgccggacgtgccacggctgcccgcgacgttgcgggaggcggtggaccgatggcgcgccagtgcggtggcccgggccgccttcggtgatcgggtcgtcgcccatctggcccatgcggccgaagtcgagctcgccggctacgagcggaccgtcaccgactgggagcgccggcgcggctttgaacggttctga

SEQ ID NO: 74326 - protein, 535 aa, Frankia sp. CcI3
MTSSPVPTPPSAQVPARPDPPDPLEPPEPIGRPAPRVQPRPIGPGSSSDQALGENAAGRGVLRDLLAGAEPVEEIIVATVDLQGRLVGSAVSPEHFTGPVLADGLGACTYLHAVDVDMKTDGGYPHSPWYDGFGDLRLQPDLTTLRRAPWHPSDAVVFADAFWPDGSPVGVAPRAVLRRQLDALAASGLTAFAGTELEFLVFRESYRRAARRSYTDLTPASRYNIDYALSGTEGLDDLVRRLRRAMAGIGVAVESARGEVHPGQFEIVFRYADAMQACDNHTLYKTAAKKIAAAGGQALTFMAKYDEGEGNSCHVHLSLRGTDGACVFAPSPEGEGALVRHPGLAPPGIAPPGFPPPGSRDDIAGMSALMCSFVAGQLACMADFALLYAPNVNSYKRLAPGSFAPTGVSWGRDNRTCAIRVVGDGPGLRVEHRVPGGDANPYLAVAGMIAAGRYGIEHRLPLEPGRVGNAFTMPDVPRLPATLREAVDRWRASAVARAAFGDRVVAHLAHAAEVELAGYERTVTDWERRRGFERF

SEQ ID NO: 74327 - DNA, 1362 bp, Methylobacillus flagellatus KT
  CDS (1)..(1362): transl_table=11
atgaaatcccccgcagaagtaaccagcatccagaatgcaatgaaggataaaggcatcaagtattgcatcggtgcttatgtcgatatccacggcgtgcccaaggccaaggtggtgccgatcgaccatttgccgcagatggcagccggctccgagcgctataccggttatgcactggatggcttgggccaggcacccagcgacgatgagctgacctccattcccgatctcgaccacatcatccaattgccatgggagcctaaagtggcctggatgcctgcagacaacggctttcagggccagccttatgctctgaacacgcgcgtggctttgaagaacgtgctggcacaggctgcggccatgggcttcggcatgaatttggggattgaatgcgagatctacctgttgaagcaggaagccgacggcaagctcgccattcccaaccccgacgataaattggtcaagccttgctatgacgtgcgcggcttcatggacaatttcggctggctggacaagatggcaaccgcgatcaacagcctgggctgggatctgtactcctttgaccatgaagacggcaacagccagttcgagttcgacttcaactacagtgatgtgctcaccatgtgcgatcgctttaccttcttccgctacatggccaagcattacgccaaggaagaaggcctgttggcgaccatgatgcccaagccgtttgcggacaagaccggaaccggcgcgcatttcaacatgtccttgtacgatctggacactggcaagaacctgttcgcctgcgatcccaaggatgatccacgcggcctgggcttgaccccgctcggttatcacttcattgcaggcatcctcaagcatggagcagcgctatgcgctgtattcgcgcctacggtcaacagctataagcgcttggtgcgtcgtggggcaatgagctatttcagctgggcaccggtattcaattcgtatggttccaataaccggaccaattccgtgcgggtgccgcagggtgggggacgttgtgaatcacgcaatgccgatggcgcggtcaatccttacctggctgctgcgctggtgctggctgcaggcctggagggcattcgcgagaagctcgacccaggggcgcccaatgaggacaatctctacgccatcaacgatgaagagcgggagaagcgtggtatccactttctgccgcaaaccttgcaggaggccgttgcctgctttgctgccgatgggttgatggaaaaaaccctcggcaaggagctgcgggatgagttcattacttacaagagccaggagtgggatgcctaccacctgagcatcagtcagtgggaagtagagcgctacagctatatgttctaa

SEQ ID NO: 74328 - protein, 453 aa, Methylobacillus flagellatus KT
MKSPAEVTSIQNAMKDKGIKYCIGAYVDIHGVPKAKVVPIDHLPQMAAGSERYTGYALDGLGQAPSDDELTSIPDLDHIIQLPWEPKVAWMPADNGFQGQPYALNTRVALKNVLAQAAAMGFGMNLGIECEIYLLKQEADGKLAIPNPDDKLVKPCYDVRGFMDNFGWLDKMATAINSLGWDLYSFDHEDGNSQFEFDFNYSDVLTMCDRFTFFRYMAKHYAKEEGLLATMMPKPFADKTGTGAHFNMSLYDLDTGKNLFACDPKDDPRGLGLTPLGYHFIAGILKHGAALCAVFAPTVNSYKRLVRRGAMSYFSWAPVFNSYGSNNRTNSVRVPQGGGRCESRNADGAVNPYLAAALVLAAGLEGIREKLDPGAPNEDNLYAINDEEREKRGIHFLPQTLQEAVACFAADGLMEKTLGKELRDEFITYKSQEWDAYHLSISQWEVERYSYMF

SEQ ID NO: 74329 - DNA, 1335 bp, Burkholderia xenovorans LB400
  CDS (1)..(1335): transl_table=11
atgcatgacatcgacgattttctgaagaagaaccgtgtcaccgaaatcgaagcgatcattccggatatggccggaatcgcgcgcggcaagatcattccgcgcagcaaattcgaatccggcgagtccatgcgcttgccgcaggcggtgatgatccagaccgtcacaggggactatccggaagacggcacgctcaccggcgtcaccgatccggacatggtctgcgtgcccgaccccagcacgatccgcatgattccgtgggccgtcgatccgaccgcccaggtgatccacgattgcgttcacttcgacggcacgccggtcgcgatctcgccgcgccgcgtcctgcgccgcgtgctcgaactctataaggccaagggctggaagccggtcatcgcgcccgaactcgagttctatctggtggacatgaacaaggacccggacctgccgctgcaaccgcctatcggccgtaccgggcgtccggaaaccggccgtcaggcgtattcgatcgaagcggtcaacgaattcgatccgctcttcgaagacatctacgagtactgcgaggtgcaggaactggaagtcgacacgctgattcacgaagtcggcgccgcgcagatggaaatcaacttcatgcacggcgatccgctcaagctcgccgacagcgtgttcctgttcaagcgcacggtgcgtgaagccgcgttgcgccacaagatgtacgccactttcatggccaagccgatggaaggcgaaccgggctcggcgatgcacatgcatcaaagtctggtcgacgaagaaaccggccacaacctcttcaccggcgcggacggcaagccgaccacgttgttcacgagctatatcgccggtttgcagaagtacacgcccgcgctgatgccgattttcgcgccgtatatcaactcgtatcgccgcctgtcgcgcttcatggccgcgccgatcaacgtggcctggggttacgacaaccgcacagtgggtttccggattccgcattcgggcccggccgcgcgccgcatcgaaaaccgcattccgggcgtggactgcaacccgtacctcgccattgcagcgacgctcgccgccggctatctcggcatgacgcagaacctcgaagccaccgagccgctgctcagcgacggttacgaattgccgtaccagttgccgcgcaatctcgaagagggcctgacgttgatgggcgcctgtgaacctatcgccgaagtactcggcgaaaaattcgtcaaggcgtacctcgccctgaaggaaaccgaatacgaagcgttcttccgcgtgatcagttcgtgggaacgcaggcatttgctgctgcacgtgtaa

SEQ ID NO: 74330 - protein, 444 aa, Burkholderia xenovorans LB400
MHDIDDFLKKNRVTEIEAIIPDMAGIARGKIIPRSKFESGESMRLPQAVMIQTVTGDYPEDGTLTGVTDPDMVCVPDPSTIRMIPWAVDPTAQVIHDCVHFDGTPVAISPRRVLRRVLELYKAKGWKPVIAPELEFYLVDMNKDPDLPLQPPIGRTGRPETGRQAYSIEAVNEFDPLFEDIYEYCEVQELEVDTLIHEVGAAQMEINFMHGDPLKLADSVFLFKRTVREAALRHKMYATFMAKPMEGEPGSAMHMHQSLVDEETGHNLFTGADGKPTTLFTSYIAGLQKYTPALMPIFAPYINSYRRLSRFMAAPINVAWGYDNRTVGFRIPHSGPAARRIENRIPGVDCNPYLAIAATLAAGYLGMTQNLEATEPLLSDGYELPYQLPRNLEEGLTLMGACEPIAEVLGEKFVKAYLALKETEYEAFFRVISSWERRHLLLHV

SEQ ID NO: 74331 - DNA, 1350 bp, Myxococcus xanthus DK 1622; identical to SEQ ID NO: 32193
  CDS (1)..(1350): transl_table=11

SEQ ID NO: 74332 - protein, 449 aa, Myxococcus xanthus DK 1622; identical to SEQ ID NO: 32194

SEQ ID NO: 74333 - DNA, 1314 bp, Mycobacterium sp. MCS
  CDS (1)..(1314): transl_table=11
atgccgcagcaggacgaggagctacgggcgcagggcgtggcgctgatcgccgggtcggtgaccgatctggccggcgtcacgcgcgcgaagtacgtccccgtccggcggctccgcgccttcgaacagtcggggatgggcgtatccccctcgtggagcgtgttctgcgtggacagcggcatcgcgttcacccccgacatcggggtcgccggagacctgcggatccgtatcgacggcgagcacctgcgcatcatcgaggacggaattgcctgggccccgggcgatctgcacgaccagtacggccgtcccgccccgctgtgcccgcgctcgctgctggcccgcgtcgagcagcgggccgccgaacgcggtctggaggtccgcgtcggcggtgagctcgagtgcacgatgctggccgccgacagtgggcctgcgtcggccgagccgtggtcgccgtacggaatccgcacctcgctcgaccgttcggcgttcctcgtcgacctcatcggcgcggccgaacgcgccggtctcgccgtcgaacagctgcacaccgaatacgggcacgaccagctcgagatgtccctggcacccgccggccccgtcgagaccgccgatgcgatcatcctggcgcgcatcgtgatcggccgcgccgccgcccgccacgggatgaagatctcgttctcgccggtgcccttcgccgacgccgcaggcaacggcgcccacctccacctctcgctcaccgacagcgccggtccgctgctgtccggcggcgacggcccctacgggatccggcccgaaggcagtgcggccatcgccggtgtcctcgacaccctgccggacctcctcggcgtctacgccggttccgcactgtcggccctgcggctcaaaccgggaaactgggcgggcgcatcggcgtgctggggcctggagaaccgggaggccgcggtccgtttcatcgccgccacgcccggaaacccgcacggcgccaacgccgaactgaaactcgtcgacccgagcgccaacccgtacctggccgccgccgcgttcctcggcagcgcgctgcacggaatcgaccgccggctcccgctgccaccggaggtgcccgaggatccgcgacggtcgggcgccaccccgcccgcgctgccgaccggacagcaggcggcgctcgaggcgctcgagaactccgccaccgccgccgaactgctcaccaccccgatcatcgaggcgctgatcgccgtccggcgccacgagctgaccacctacggcgaccgtccgcccgccgagaccacccaggcgctgcgcctcgcctggagctgttga

SEQ ID NO: 74334 - protein, 437 aa, Mycobacterium sp. MCS
MPQQDEELRAQGVALIAGSVTDLAGVTRAKYVPVRRLRAFEQSGMGVSPSWSVFCVDSGIAFTPDIGVAGDLRIRIDGEHLRIIEDGIAWAPGDLHDQYGRPAPLCPRSLLARVEQRAAERGLEVRVGGELECTMLAADSGPASAEPWSPYGIRTSLDRSAFLVDLIGAAERAGLAVEQLHTEYGHDQLEMSLAPAGPVETADAIILARIVIGRAAARHGMKISFSPVPFADAAGNGAHLHLSLTDSAGPLLSGGDGPYGIRPEGSAAIAGVLDTLPDLLGVYAGSALSALRLKPGNWAGASACWGLENREAAVRFIAATPGNPHGANAELKLVDPSANPYLAAAAFLGSALHGIDRRLPLPPEVPEDPRRSGATPPALPTGQQAALEALENSATAAELLTTPIIEALIAVRRHELTTYGDRPPAETTQALRLAWSC

SEQ ID NO: 74335 - DNA, 1401 bp, Mycobacterium sp. MCS; identical to SEQ ID NO: 37756
  CDS (1)..(1401): transl_table=11

SEQ ID NO: 74336 - protein, 466 aa, Mycobacterium sp. MCS; identical to SEQ ID NO: 37757

SEQ ID NO: 74337 - DNA, 1335 bp, Rubrobacter xylanophilus DSM 9941; identical to SEQ ID NO: 37742
  CDS (1)..(1335): transl_table=11

SEQ ID NO: 74338 - protein, 444 aa, Rubrobacter xylanophilus DSM 9941; identical to SEQ ID NO: 37743

SEQ ID NO: 74339 - DNA, 1368 bp, Rubrobacter xylanophilus DSM 9941
  CDS (1)..(1368): transl_table=11
atgaagactagacacgggcagggaatactggagcttgaggccctacgcagcgcggtccaagaggggagcatagacaccgttctggtggccatgacagacatgcaggggcgcctgcagggcaagcggctcaccgccgagcactttctggaggaggtggtcgagcacggcgccgagggctgcaactacctgctggcggtggacgtggacatgaacaccgtcggcggctacgcgatgagctcctgggagcgcggttacggggactttgtcttcaagcccgacctctccacgttgagggtcgtaccctggctggagggcaccgcgctcgtcgtctgcgacctcgcatgggaggacggttctccggtggccgcctccccgcggcagattctgcgccgccagctcgagcggctcgctggtttggggctcagggcgttcgtgggtacggagctggagttcatcgtcttccgcgacgcctacgaggacgcctggcgcaaggggtacagagacctcgagcctgccaacctgtacaacgtcgactactcgttgctcgggaccacgagggtggagcctttactgcggcgcatccgcaactccatggctggagccggtctgcaagtggagaacgccaagggcgagtgcaacctgggccagcacgagatcaacttcaggtacgacgaggcgctcgtcaccgccgacgggcactccatctacaagaacggtgcgaaggagatcgcctcccaggagggctgctcgatcacctttatgcccaagttcaacgagcgggagggaaactcctgccacatacaccttagcctccgcacggacgacggcgagccggtgttctctgggggacacggtttctccaagaccttcgagcacttcctggccgggcagctcgcctgcatccgggagctcatgctctttctggcgcccaacatcaactcctacaagcgctacgcgccaggctccttcgccccgaccgccatcgcctggggcaaggacaacaggacctgcgctttccgcgtcgtggggcacggcccctctctcagggtggagtgcaggatccccgggggggacgtcaacccgtacctggggataagcgcgatgatcgccgccgggctctacggcctcgagaacgagctgccgctggaggaggagttcgtcggcaacgcctacggcgcgcaggacaaaccgcacgtgccgcgcaacctctacgaggcgcgcgagcttttcgcgaacagcgaggtggcccgcagggccttcggcgaagaggtcgtcgagcactacctcaacatggccagggtagagatagaggcgttcgagtccgccgtcaccgactgggaacgctaccgaaacttcgagaggctatga

SEQ ID NO: 74340 - protein, 455 aa, Rubrobacter xylanophilus DSM 9941
MKTRHGQGILELEALRSAVQEGSIDTVLVAMTDMQGRLQGKRLTAEHFLEEVVEHGAEGCNYLLAVDVDMNTVGGYAMSSWERGYGDFVFKPDLSTLRVVPWLEGTALVVCDLAWEDGSPVAASPRQILRRQLERLAGLGLRAFVGTELEFIVFRDAYEDAWRKGYRDLEPANLYNVDYSLLGTTRVEPLLRRIRNSMAGAGLQVENAKGECNLGQHEINFRYDEALVTADGHSIYKNGAKEIASQEGCSITFMPKFNEREGNSCHIHLSLRTDDGEPVFSGGHGFSKTFEHFLAGQLACIRELMLFLAPNINSYKRYAPGSFAPTAIAWGKDNRTCAFRVVGHGPSLRVECRIPGGDVNPYLGISAMIAAGLYGLENELPLEEEFVGNAYGAQDKPHVPRNLYEARELFANSEVARRAFGEEVVEHYLNMARVEIEAFESAVTDWERYRNFERL

SEQ ID NO: 74341 - DNA, 1428 bp, Mesorhizobium sp. BNC1; identical to SEQ ID NO: 32195
  CDS (1)..(1428): transl_table=11

SEQ ID NO: 74342 - protein, 475 aa, Mesorhizobium sp. BNC1; identical to SEQ ID NO: 32196

SEQ ID NO: 74343 - DNA, 1359 bp, Cytophaga hutchinsonii ATCC 33406; identical to SEQ ID NO: 37746
  CDS (1)..(1359): transl_table=11

SEQ ID NO: 74344 - protein, 452 aa, Cytophaga hutchinsonii ATCC 33406; identical to SEQ ID NO: 37747

SEQ ID NO: 74345 - DNA, 1356 bp, Rhodococcus sp. RHA1
  CDS (1)..(1356): transl_table=11
atgtctgaaatcaccaccaccgcaacggatcgcaccgccgccgtccacacggtccgactcgaggccaccaatcacgatggctcgttcctcggcaagaacgtggcgcccaagaagttcgccgcgagcgcgggctcgggtttcgcgttcgccgatcttctgttcggcctcgacctgggcaacgatccgaccttcggattcgcctaccccgagtggcgtgggcacctcgccgacctgcagttccggcccgacatgtcaacgctggtgcagtgggagcccggcctgcagtccgtgatcggtgactactggcaggcggacggcaccccggtcgggacctgtccgcggaacctggcccgaaagctggtcgaccgactcgcaacgcacggcttcacggccaccgtggcggtcgagatcgaggcgaccctgttccaggagtccatccacgaggccagggccaaggggtatcgcgacctgaccccgctcggcggttccgccggaaccgcgtaccacctcgcgaagtcgaaggactggatcgactacatgtcggcggtcgcccgccgcctcgacgagatcggcatcgaatgggaggcctggagcgacgaggacgcggccggccaggtcgaactcaatctggttcccggcgatccgatctcggtgtgcgacaactgggctcggacccgccaggtgatgcgcgaggtcgctttcgaactcggccacaccgtcaccttcatggccaagccgaccgccgggtacggccaggcctcacacgtcaacctgtctctgcagcgcgacggggtcaacagtttctacgccgccgacggcccgtcgccgacgatgctgcatgcggtcggcggactcctcgcgacgatgcggggcgcgacgtcgatcgtgttgccgcagatcacctcgtaccgccgcctgatcgacctgagcggccctccgacgacggtcacgtggggcatcagcaacaagaccgccgcggtgcgtgcggtgtgcgggcacccggcctactcgcgcctcgagtaccgggttcccggtgccgacgcgaacctgtatctcgcggtggcgaccatcctcgccggggtgatcgccggtctcgacggcgcgatcgagccacccgagccggtcaccgacatggcgtggtgtgtgcccgacctcgagcggttgccggacaccatcaccaaggcggccgatgcactcgagacggacctgatcctgcgcgaacaactcggggacgagttcgtcgactactgggtcggtacgcggcggtgggagtggatgcaattccacaccacgggcggtgatccgttcgccgagctctccgaatgggagtcggcgcggtacttcgagttcccgtga

SEQ ID NO: 74346 - protein, 451 aa, Rhodococcus sp. RHA1
MSEITTTATDRTAAVHTVRLEATNHDGSFLGKNVAPKKFAASAGSGFAFADLLFGLDLGNDPTFGFAYPEWRGHLADLQFRPDMSTLVQWEPGLQSVIGDYWQADGTPVGTCPRNLARKLVDRLATHGFTATVAVEIEATLFQESIHEARAKGYRDLTPLGGSAGTAYHLAKSKDWIDYMSAVARRLDEIGIEWEAWSDEDAAGQVELNLVPGDPISVCDNWARTRQVMREVAFELGHTVTFMAKPTAGYGQASHVNLSLQRDGVNSFYAADGPSPTMLHAVGGLLATMRGATSIVLPQITSYRRLIDLSGPPTTVTWGISNKTAAVRAVCGHPAYSRLEYRVPGADANLYLAVATILAGVIAGLDGAIEPPEPVTDMAWCVPDLERLPDTITKAADALETDLILREQLGDEFVDYWVGTRRWEWMQFHTTGGDPFAELSEWESARYFEFP

SEQ ID NO: 74347 - DNA, 1356 bp, Shewanella sp. MR-4; identical to SEQ ID NO: 32199
  CDS (1)..(1356): transl_table=11

SEQ ID NO: 74348 - protein, 451 aa, Shewanella sp. MR-4; identical to SEQ ID NO: 32200

SEQ ID NO: 74349 - DNA, 1437 bp, Rhizobium leguminosarum bv. viciae 3841; identical to SEQ ID NO: 32203
  CDS (1)..(1437): transl_table=11

SEQ ID NO: 74350 - protein, 478 aa, Rhizobium leguminosarum bv. viciae 3841; identical to SEQ ID NO: 32204

SEQ ID NO: 74351 - DNA, 1242 bp, Pseudomonas aeruginosa UCBPP-PA14
  CDS (1)..(1242): transl_table=11
atgaccggcgagggcttcctcagcggccggcgcctgcagctcgcccgtggcgtgctgctgcaatgcatcatgggcggctacccgccggcgcgcttctatggcagcgacgatggcgacctggcgctggtcgccgagccgacccaggtccatcgcctgccctggagcaacactccgcgcgccttcgccatctgcgatgcgcaggaactggatggctcgccgtccgggctgtccacccgcggcctgctcaagcaggtggtggcgcgctacgccgcccacggctggcaaccggtggtggccaccgaactggaattcttcgtcttcgccccgaacaccgatcccaacgagccgttccaggccccgctggggccggatggccggcgcgagctgggctattcggccttcagcgtgtcttccaacaacggcctgcggccgttcttcgaggacgtctaccgctgcatggatgcgctgggcctggtgcgcgacaccttcatgcacgagatgggcaccagccagttcgagatcaacttcctgcatggcgacccggtcctgctggccgaccagaccttcctgttcaagcacctgctcaaggaggtcgcgctcaagcacggcctgatcgtggtgtgcatggccaagccgctggcgaagacgccgggcagctcgatgcacatccaccagagcatcgtcgaactggacggcgggcgaaacatcttcagcgaagccgatggcgagccttccgccgcgttccgccacttcatcggcggccagcaggcctgcctggcggacttcacgcccttcttcgcgccgcacgtgaactccttccagcgcctctgccatccctacgcatcgccgaacaacgcctgctggtcccacgacaaccgcgccgccggcctgcgcatcccggccagcggagcctccgcgcggcgcgtcgagaatcgcctgccaggcgccgacgccaacccttacctggccatcgccgccagcctggccgccggtctctacggcctggagcacgaactggagccgagcccggcgatccagggcgagttcgaggtaccggaggaactgaccctgccctgcaccatgtacgatgccctgcggcgtctgaaaggcagcgcgctggcgcgcgaactgttcggcagcgagttcgtcgaaggctacgtggcgaccaagagcatggaactgaccagcttcttcgacgagatcagcccctgggagcgtcgtgtcctggcagcccaggcctga

SEQ ID NO: 74352 - protein, 413 aa, Pseudomonas aeruginosa UCBPP-PA14
MTGEGFLSGRRLQLARGVLLQCIMGGYPPARFYGSDDGDLALVAEPTQVHRLPWSNTPRAFAICDAQELDGSPSGLSTRGLLKQVVARYAAHGWQPVVATELEFFVFAPNTDPNEPFQAPLGPDGRRELGYSAFSVSSNNGLRPFFEDVYRCMDALGLVRDTFMHEMGTSQFEINFLHGDPVLLADQTFLFKHLLKEVALKHGLIVVCMAKPLAKTPGSSMHIHQSIVELDGGRNIFSEADGEPSAAFRHFIGGQQACLADFTPFFAPHVNSFQRLCHPYASPNNACWSHDNRAAGLRIPASGASARRVENRLPGADANPYLAIAASLAAGLYGLEHELEPSPAIQGEFEVPEELTLPCTMYDALRRLKGSALARELFGSEFVEGYVATKSMELTSFFDEISPWERRVLAAQA

SEQ ID NO: 74353 - DNA, 1407 bp, Mycobacterium avium 104
  CDS (1)..(1407): transl_table=11
atggccagtgaagacagcgcgctgaccggttccgataccgcgatgctctcgctcgccgcgctggaccgactggtggccgccggcgcgccggaaacgcgggtggacaccgtcatcgtggccttccccgacatgcagggccggctggtcggcaagcggatggacgcgcggctgttcgtcgacgaggcggccgccaccggggtcgagtgttgcggctacctgctggccgtcgacgtcgacatgaacaccgtgggcggctatgcgatctcgggctgggacaccgggttcggcgacctggtgatgcgcccggacctgtccaccctgcgccgcattccctggctgcccgggacggcgctggtgatcgccgacgtggtgggggccgacggcagcccggtcgcggtgtcgccgcgggccgtgctgcgccgccagctcgaccggctggccgggcgggggctgttcgccgacgccgcgacggagctggaattcatggtgttcgacgagccgtaccgccaggcgtgggccagcggctaccgcgggctgaccccggccagtgactacaacatcgactacgcgatctcggcgtcgtcgcgcatggagccgctgctgcgcgacatccggcgcggaatggccggtgcgggactgcgattcgagtccgtgaagggcgaatgcaaccgcggccagcaggagatcggcttccgctacgacgaggcgctgcggacctgcgacaaccacgtcatctacaagaacggggccaaggagatcgccgatcagcacggcaagagcctgacattcatggcgaaatacgatgagcgcgaaggcaacagctgccacgttcacctttcgctgcgcgacgcccagggcggggcggcgttcgccgaccccagccgcccgcacggcatgtcgacgatgttctgcagcttcctggccggcctgctggccaccatggcagacttcacgctgttctacgcgccgaacatcaactcctacaagcgattcgccgatgagagtttcgcgcccaccgcgctggcctggggattggacaaccgcacctgcgcgctgcgggtggtcggccacggcgcgcacacccgcgtcgagtgccgggttcccggcggcgacgtcaacccgtatctggcggtggcggcgatcgtcgccggcgggctgtacggtatcgagcagggcctggcgctgccggaaccctgcgcgggcaacgcctaccgcgcccgcggcgtcggccggctgccggccaccctggccgaggcggcggcgctgttcgagcactcggcgctggcgcggcaggtgttcggcgacgacgtcgtcgcgcactacctgaacaacgcccgggtcgagctggcggcgtttcacgccgcggtcaccgattgggagaggatgcgtggttttgaacggctctga

SEQ ID NO: 74354 - protein, 468 aa, Mycobacterium avium 104
MASEDSALTGSDTAMLSLAALDRLVAAGAPETRVDTVIVAFPDMQGRLVGKRMDARLFVDEAAATGVECCGYLLAVDVDMNTVGGYAISGWDTGFGDLVMRPDLSTLRRIPWLPGTALVIADVVGADGSPVAVSPRAVLRRQLDRLAGRGLFADAATELEFMVFDEPYRQAWASGYRGLTPASDYNIDYAISASSRMEPLLRDIRRGMAGAGLRFESVKGECNRGQQEIGFRYDEALRTCDNHVIYKNGAKEIADQHGKSLTFMAKYDEREGNSCHVHLSLRDAQGGAAFADPSRPHGMSTMFCSFLAGLLATMADFTLFYAPNINSYKRFADESFAPTALAWGLDNRTCALRVVGHGAHTRVECRVPGGDVNPYLAVAAIVAGGLYGIEQGLALPEPCAGNAYRARGVGRLPATLAEAAALFEHSALARQVFGDDVVAHYLNNARVELAAFHAAVTDWERMRGFERL

SEQ ID NO: 74355 - DNA, 1380 bp, Mycobacterium smegmatis str. MC2 155
  CDS (1)..(1380): transl_table=11
atgagcagcacatctgcacttctcgacctcgaccagttcgaaaagctcgccgcggcaggcgagatcaccacggtgatctgcgcggcgcccgatccgtacggccgcctggtgggcaagcgcctgaccatatcggccttccggacgctgggcctcgacggcggcggcgtgaacgccagcagcttcatcttcgcggtcgacctcgagatgaacccactcgacctcccggtgtccaacgccgccaacggctgggtggacatccgtctggtcccggatctctcgacgctgcggcgcgtgccgtgggaacccacggcggcactggtgatctgcgacgcctaccacatggattccgacgagccgctggccgtcgctccgagaaccattctgcgccaacagatcgaccgggccgcgcagcagggtctgcggttcaagttcgcatccgaactcgagttctacctgtcgtgcaccccgccgcgtcaggcgtgggacctgggctatcagaacctcaagatgatgtcggactaccggtcggactaccagatgatccaggccgcgcgcgacgactggttcatcgagcggatccgcaaccagatgcccgagttcggcgtacccatcgaatcgtcgaaacccgaatggggactgggccagcaggaggtcacactcgactactgcgacaccttggagatggccgaccgccacgtactgttcaagtacggcgtcaagcagttggcccacagcgccgatctgaccgtgacgttcatggcgaaacccaagatcgacgaggtcggctcgtcgtgccacctgcacgtcagcatgtggtcgaccgacgacgaccaaccgctgtgctggtgtcccgagcgccgcggcatgtcggaccgcttcggcgcgttcgtggccgggcagttgcgtcacgccatcgacatgagcctgatgtacgccccgacggtcaactcctacaagcgcttcaagcccgatcagttcgccgggaccgcgatcgcgctggggatggacaaccggtcgtgcgcgttccggctcgtgggcaacggaccgtcgttccgggtggagaaccgcatccccggtgcggacgtgaatccttactacgcgtacgcggcgaccattgcggccggcctcgacggcgtcgaggcgaacctgcccgcacccgacatcttcgacggcaacgcctggacccgcgaaggtgtggcgaccgtgccgacatcgttgcaccgctcgctggacctgttcgccgagagcaagatggcccgaaccgcgttcggcgacgaggtgttcgaccatctgctgtcctcggcgcagggcgagttggaggcgttcgactcgcacaccgtgaccgactgggagtcgcgccgctactacgaacgcgtctga

SEQ ID NO: 74356 - protein, 459 aa, Mycobacterium smegmatis str. MC2 155
MSSTSALLDLDQFEKLAAAGEITTVICAAPDPYGRLVGKRLTISAFRTLGLDGGGVNASSFIFAVDLEMNPLDLPVSNAANGWVDIRLVPDLSTLRRVPWEPTAALVICDAYHMDSDEPLAVAPRTILRQQIDRAAQQGLRFKFASELEFYLSCTPPRQAWDLGYQNLKMMSDYRSDYQMIQAARDDWFIERIRNQMPEFGVPIESSKPEWGLGQQEVTLDYCDTLEMADRHVLFKYGVKQLAHSADLTVTFMAKPKIDEVGSSCHLHVSMWSTDDDQPLCWCPERRGMSDRFGAFVAGQLRHAIDMSLMYAPTVNSYKRFKPDQFAGTAIALGMDNRSCAFRLVGNGPSFRVENRIPGADVNPYYAYAATIAAGLDGVEANLPAPDIFDGNAWTREGVATVPTSLHRSLDLFAESKMARTAFGDEVFDHLLSSAQGELEAFDSHTVTDWESRRYYERV

SEQ ID NO: 74357 - DNA, 1395 bp, Nocardioides sp. JS614
  CDS (1)..(1395): transl_table=11
ttggcccagaacgagacccaggacgagtccgggctccgcaacagccggcacctgacgatgcaccagctcgtcgaccgcatcgagagcggcgtgatcgacaccgtggtcgtcgcgatgaccgacatgcaggggcggctccagggcaagcggctgcacgggaagtacttcgtcgagcacgtggcccgccatggcaccgagggctgcaactacctgctcgcggtggacgtggacatgaacaccgtcgacggctacgccaactcctcgtgggagaagggctacggcgacatggagttccggctcgacgagcgcaccatccgcgtcctcacgcacctccccgcgacggcgatgatccagtgcgacctggtctggcccgacgactcgccggtcacccagtccccgcggggcatcctgcgccgccagctcgaccggtgcgcggagcacggctggacggccctggccggcaccgagctcgagttcatcgcgttcgacacgacctacgagcaggcgcacgcggacggctaccgggacctggtcccgtcgaaccagtacaacgtcgactactcgatcctcgggaccagccgggtcgaacccctgctcagggccttgcgcaaccacatgtacgcggcgggcctggacgtcgagggcgccaagggcgagtgcaacttgggccagcacgaggtcggtttcctgtacgccgacgcgctcaccaccgcggacaaccacgcggtctacaagactgccgcgaaggagatcgccgcccagcaggggaaggcgatcaccttcatggcgaagtacaaccagcgcgagggcagctcctgccacatccacctgtccctgcgcggtcgggacggctccctggtcttctgggaccgcgagaccggcaccaggacgccgttgtacgacaggttcgtcgccggcgtgctggccacgatcccggacttcacgctgctgtacgcgccgaacatcaactcctacaagcggttcgccgacggctcgttcgctccgaccacgatcgcctgggggctggacaaccgcacctgtgcggtccggctcgtcggccacggcgcgtccgcgcggatggagaaccggatccccggcgccgacgtgaacccctacctcgccctggccgcgatggtggccggcgggctgcacggcatcgagaacgagctcccgctcgaggacgagctcgtcggcaacgcctacacgtcgggccggccgcaggtgccgcgcacgatgacggaggcgcgggaccggttcgcggggtcggccgtggcacgcgccgccctgggtgacgacgtcgtggaccactacgtcaacatggcggaggtggagctcgcggcgtacaacgccgccgtcaccgactgggagctccgccgtggattcgagaggctgtaa

SEQ ID NO: 74358 - protein, 464 aa, Nocardioides sp. JS614
MAQNETQDESGLRNSRHLTMHQLVDRIESGVIDTVVVAMTDMQGRLQGKRLHGKYFVEHVARHGTEGCNYLLAVDVDMNTVDGYANSSWEKGYGDMEFRLDERTIRVLTHLPATAMIQCDLVWPDDSPVTQSPRGILRRQLDRCAEHGWTALAGTELEFIAFDTTYEQAHADGYRDLVPSNQYNVDYSILGTSRVEPLLRALRNHMYAAGLDVEGAKGECNLGQHEVGFLYADALTTADNHAVYKTAAKEIAAQQGKAITFMAKYNQREGSSCHIHLSLRGRDGSLVFWDRETGTRTPLYDRFVAGVLATIPDFTLLYAPNINSYKRFADGSFAPTTIAWGLDNRTCAVRLVGHGASARMENRIPGADVNPYLALAAMVAGGLHGIENELPLEDELVGNAYTSGRPQVPRTMTEARDRFAGSAVARAALGDDVVDHYVNMAEVELAAYNAAVTDWELRRGFERL

SEQ ID NO: 74359 - DNA, 1299 bp, Magnetospirillum magnetotacticum MS-1
  CDS (1)..(1299): transl_table=11
atgacgcacgaacttgaaattgccgcccgcgagcgcggcatcaaatacttcctcgtttcctacaccgacctgttcggcacccagcgcgccaagctcgtgccggccgccgccatcggcagcacatgccgcaacggcgcgggattcgccggctttgcgacctggctcgacatgagccccgccgatgccgatctgctcgccgtgcccgatccctccggcctgatccagctgccctggaaacccgaggtgggctggctgcccgccgacctcgtgatgggcggcaaggcggtcgagcagggcccgcgcaacatcctcaagcgcctcatcaaggaagccgcccgcgaggggctgcagatgaagagcggcgtcgagtgtgagttcttcctgatcacgccctgcggctcggaacccgccgacaccgccgacaagcagaccaagccctgctacgaccaatccgccctgatgcgccgctacgacgtcatcagcgagatctgcgacgcgatgctgagcctgggctggaagccctaccagaacgaccacgaggacgcgaacggccagttcgagatgaactgggactacgacgacgccctcatcaccgcggaccggcacgccttcttcaagtacatggcccgctcgatcgccgagaagcacggcttccgcgcgaccttcatgcccaagcccttcatggacctgaccggctccggctgccacgctcacgtctcgctctggagcggcgggcagaacgtgttcgccgacgagtcggacgagatcggcatgtcgcgcaagggctaccacttcatcggcggcctgatccactcggccgacgcgctggccgccctgaccaatccttgcgtgaattcctacaagcgcatcaacgccccgcgcacgacctccggcgcgacctgggcccccaacaccgtgacctatacgggcaacaaccgcacccacatgatccgcatccccgatggcgggcgcttcgagttccgcctcgccgacggcgcggccaatccctacctgctccaggcgggcattctggcggccggcctcgacggcatccgccagcagcgcgatccgggccagcgcctcgacatcaacatgtacaccgacgggcacaaggtcgagggcgtcaagcaattgccgctcaacctgctcgatgccctgcgcgccctggaggccagcagcgtcctcaacgaggcgctgggctccttcgtgccgagctacctcaagctcaagcggcaggaatgggacgattactgccgtcacctgacccagtgggagcgcgacacgaccctcgactgttga

SEQ ID NO: 74360 - protein, 432 aa, Magnetospirillum magnetotacticum MS-1
MTHELEIAARERGIKYFLVSYTDLFGTQRAKLVPAAAIGSTCRNGAGFAGFATWLDMSPADADLLAVPDPSGLIQLPWKPEVGWLPADLVMGGKAVEQGPRNILKRLIKEAAREGLQMKSGVECEFFLITPCGSEPADTADKQTKPCYDQSALMRRYDVISEICDAMLSLGWKPYQNDHEDANGQFEMNWDYDDALITADRHAFFKYMARSIAEKHGFRATFMPKPFMDLTGSGCHAHVSLWSGGQNVFADESDEIGMSRKGYHFIGGLIHSADALAALTNPCVNSYKRINAPRTTSGATWAPNTVTYTGNNRTHMIRIPDGGRFEFRLADGAANPYLLQAGILAAGLDGIRQQRDPGQRLDINMYTDGHKVEGVKQLPLNLLDALRALEASSVLNEALGSFVPSYLKLKRQEWDDYCRHLTQWERDTTLDC

SEQ ID NO: 74361 - DNA, 1491 bp, Nostoc punctiforme PCC 73102; identical to SEQ ID NO: 32213
  CDS (1)..(1491): transl_table=11

SEQ ID NO: 74362 - protein, 496 aa, Nostoc punctiforme PCC 73102; identical to SEQ ID NO: 32214

SEQ ID NO: 74363 - DNA, 1383 bp, Kineococcus radiotolerans SRS30216
  CDS (1)..(1383): transl_table=11
gtggggcgcaccagtaccgacgcgagcaccggcgcacccctgtcgctgcaggacctgcgccacgacatcacctccggccggatcgacaccgtcctcgtcgccatgaccgacatgcagggtcgcctgcagggcaagcgcctcaccgggcggttcttcctcgacgaggtcctcgagcacggcaccgaggggtgcaactacctgctcggcgtcgacgtcgagatgaacaccgtcgacggctacgagatcacctcctggtcgcgcggctacggcgacctcctgctgcgcccggacctctccaccctgcgccgcatcccgtggcacccggccacggcgatggtgctgtgcgacgtgctgcagctggacgacgagccggtgcgcccctccccccgccaggtcctgcgcgcccagctccagcggctggaggggcacggcctgcgccccctggtcgccaccgagctggagttcaacctgctgcgcgtcacctacgaggaggcgcacgccaacggctaccgcgacctgcggcccgccagcacccacaacatcgactactccctcctcggcaccggccgggtggagccggtgctgcgccggatccgcaacgagatggacggcgcgggcctctacaccgagtccgccaagggcgagtgcaacctcggccagcaggagatcgggttccgctacgccgacgccctcaccacctgcgaccagcactccgtcttcaagctcggcgccaaggagatcgccgcccaggagggcatgtcggtgacgttcatggcgaagctggaccagcgggaggggaactcctgccacatccacctcagcctcaccgacctcgacggttccccggtcttcgccgccggcgcgggttcggagatggcgccggtcatgcgctccttcctcgccggccagctcgcggcgctgcgcgagctgacgctgctgctggccccgaacgtcaacagctacaagcgcttcgccgacgggtccttcgcccccaccgccgtggcgtggggctacgacaaccggacctgcgcgctgcgggtggtcggccgcgggccctcgctgcgcatggagaaccgcgtccccggcggggacgcgaacccctacctggccgtctccgcgctcatcgcggccggcctgcacggcatcgaggagggcctggagctggaggaggtgaccaccgggaacgcctacaccggcggcgccccccgggtgccgaccaccctgctcgccgcggcggagctcttcgccggctccgcgctggcccggcgcgccttcggcgacgacgtcgtggaccactacgcgcgcgccgcgcacgtggagctggaggccttccagaccgccgtcaccgactgggagcgcgcccgtggcttcgaacgcctctga

SEQ ID NO: 74364 - protein, 460 aa, Kineococcus radiotolerans SRS30216
MGRTSTDASTGAPLSLQDLRHDITSGRIDTVLVAMTDMQGRLQGKRLTGRFFLDEVLEHGTEGCNYLLGVDVEMNTVDGYEITSWSRGYGDLLLRPDLSTLRRIPWHPATAMVLCDVLQLDDEPVRPSPRQVLRAQLQRLEGHGLRPLVATELEFNLLRVTYEEAHANGYRDLRPASTHNIDYSLLGTGRVEPVLRRIRNEMDGAGLYTESAKGECNLGQQEIGFRYADALTTCDQHSVFKLGAKEIAAQEGMSVTFMAKLDQREGNSCHIHLSLTDLDGSPVFAAGAGSEMAPVMRSFLAGQLAALRELTLLLAPNVNSYKRFADGSFAPTAVAWGYDNRTCALRVVGRGPSLRMENRVPGGDANPYLAVSALIAAGLHGIEEGLELEEVTTGNAYTGGAPRVPTTLLAAAELFAGSALARRAFGDDVVDHYARAAHVELEAFQTAVTDWERARGFERL

SEQ ID NO: 74365 - DNA, 1359 bp, Sulfitobacter sp. EE-36; identical to SEQ ID NO: 32217
  CDS (1)..(1359): transl_table=11

SEQ ID NO: 74366 - protein, 452 aa, Sulfitobacter sp. EE-36; identical to SEQ ID NO: 32218

SEQ ID NO: 74367 - DNA, 1359 bp, Roseovarius nubinhibens ISM; identical to SEQ ID NO: 32219
  CDS (1)..(1359): transl_table=11

SEQ ID NO: 74368 - protein, 452 aa, Roseovarius nubinhibens ISM; identical to SEQ ID NO: 32220

SEQ ID NO: 74369 - DNA, 1362 bp, Oceanicola batsensis HTCC2597; identical to SEQ ID NO: 32221
  CDS (1)..(1362): transl_table=11
